United States Patent Application Publication US 2011/0014706 A2 - sequence listing, part 40

SEQ ID NO: 114098 - DNA, 257 bp, Arabidopsis thaliana columbia
aggacaccatgacaccctctattcctaaaaattactcaatcaccagtggggccctaatacagtttttgagaaggttaaacaaaccctatgactccaatgcaatagacaacctctaatcctataccaaccattcatgctaaggaatactcaaatcccacccacttttacccccgtacctcttacattatgcgtcacccaaggaaatcccaaaaacccgcttaaaccattcggtgtgggcactctccaaaagtggaacc

SEQ ID NO: 114099 - DNA, 360 bp, Arabidopsis thaliana columbia
cggacgcgtgggtttggatcttatatactagctgctatggatcgagctatacttgatggtgttgatgtgctttcgatatctcttggtggtggttctgctccgtattatcgcgatacgattgcgattggagcgttttcggctatggagagaggtgtttttgtgtcttgttctgctggtaatagtggtcctactagagcttctgttgctaatgttgctccttgggttatgactgttggtgctggtactttagatagagattttccggcttttgcgaatctcggtaaccggaaacgacttaccggtgttttgctgcatatcggtgtgggaatggggaccatatcccttgaattggtttataat

SEQ ID NO: 114100 - DNA, 362 bp, Arabidopsis thaliana columbia
ttctgaggtatattaagattcagtctccaattaatatttcggcgaccaatcggtcctaattcacacttgtggggaaagaattttttttgtaattccttacataaggattcagaaaatataggatccccacctacacaagaaaattgttgataaaactccaaaatagcattttcttttgatcctattttttttttctccttatcggtcaagaaagataagaaaatttcagggtagcaaacattctctagaatttctcgtagattcaaacccatagctgatgatagaactagaatagatattttttgtttcctactcacccgagcccatattcttgcttttttatcaatctctaattctaacct

SEQ ID NO: 114101 - DNA, 274 bp, Arabidopsis thaliana columbia
ttttccaaaaaaaataaataccacccggcggccccataaaaatttttcgggtttccaaaaccttattctgataataaaaattacccttccactttatctgctagtaagcatccttctactcaccatctaaatgaaattctgtatagaattgactccctataattcagcatcacaaagaggaaagcgaagctagtcaaacacatagatcccctcttttacctaacattaacccataatcatcaacaatattccaatactacaaattccatgcaac

SEQ ID NO: 114102 - DNA, 361 bp, Arabidopsis thaliana columbia
aggaaatcatgatgacctctagtcgattaaaatacaataacgctaggggggccataattcaatttgttggaaaagtaacaggtgaaaggattccaaagggagagcctagtgctacaagtgtatcacccttgctacttgatgaagcaaaattcatgcttggttgaccctgatttacaaaatatttgcgtcacaaagatgaaccataaatcagaaagaaggaaacggggaggaaaatcagggaaatatttaccagtaaacttaaggggactcctagaatagccattcgagtggcagacttggccatgaagttagcgttgtgtggctcatcaagttgcatcaagggcttgctgtaatgttcaat

SEQ ID NO: 114103 - DNA, 360 bp, Arabidopsis thaliana columbia
accaggggttttcacttctgtttgttacttgtttgagaagtacaacatggaggttttgtttgctaatgtctcctctaatgttttctggagcacctacgtgatccaagcacaggtatcttatacatataaccatttttatcatatgatatgtggtgacatctattatttaccatggttctttttttttatgtgatgaaacaggtaaatccgagttgtgagaatcagttactgggaaatggtcttggagttgtagacgttttcaagcaagtttctcaagaactggtgttatatttttcatctctataaatcataactggctgcttcggtttgagttttaagtattttcagggtttgttttct

SEQ ID NO: 114104 - DNA, 363 bp, Arabidopsis thaliana columbia
cgataatgggttcaagagttttggcttccttctttgctttcttaatctggacggtcatcacattgtttgccactatccaagcttgcactccttgtactcgtcctcatcctccggttccgaaacctccacaacacggcggtggtggaggtggtggtacctatcctgctacacatcccagtttaaattgtggctgcataagcagattaatgtcacgggttctacataaatatatgctagaacggttcaataaaaaaacacctatttaaacttcatatttctgaccttcaaatgtttccgaggtgggcctattgaacttctctcatagtcatactcatatgcattaaataccaattatttttcctt

SEQ ID NO: 114105 - DNA, 267 bp, Arabidopsis thaliana columbia
  unsure (1)..(267): unsure at all n locations
gccatatgtggcccacatgagacccagccgaacgatgaagtttatnatagcaccgtactctgccattataggaccaaccgtgactcgaccagtanntgcttggaactgaaaaatatcgttcatgcgttctcttcgctcctatctcgttgtgtggattgttcaaacagatgtatatnccagtgtccgtaacaatgaaataagtgtcacttgtctttgaactagattcgagacttgtgaaaagtcatactcatttgcgtcaaatacgaa

SEQ ID NO: 114106 - DNA, 358 bp, Arabidopsis thaliana columbia
gttcctcacatctctaattagtaaagtatgcttaattattggagtaaatggcctaaaaaagacttttcgttttcctttttgcctttataatcatgcacaatttacatgagagtatatataaagattagttaaataaaaaataaaaaagagggaaagagattgattattcaatggccgagaaagaagagggtgtgaagcttatagggtcttgggcaagcccattcagtcgtagagtcgagatggctctcaagcttaaaggcgtgccgtacgattacttggacgaagattatttggttgtcaagagcccgttgctactttaactcaacccgttttacaaataagttcctgttttgtttca

SEQ ID NO: 114107 - DNA, 359 bp, Arabidopsis thaliana columbia
acgcttgtctagctacttgtgcttacaccttgtaccatcgaaagcatagtgtgcagagaaacactcaaggaagaatctgtgatcgaacaaatcatacatgatgcagaagccatagtgcccacagagacagccgaagatgagtttataagcaccgtctctgccattatggacaaccggctcgaccagtatgcttggaactgaaaaatatcttcatcgttctttcgctcctatctgtttgtggattgttcaacagatgtatatccagtgtccgtaacaataaataagtgtcactgtctttgaactaatccttggcttttgaaaacaatggtttgctaatgaatatgatgattggattataa

SEQ ID NO: 114108 - DNA, 374 bp, Arabidopsis thaliana columbia
aggacagtggtttgttgctctcgaccaaccgacagaagtcaacttcttacacaaagacagtcctaattgatcctcaacagtgccagacctgagctatggaacagataaatgggtcggaagaacttcatcacacttagtatataagtaaccaagcagggcccttttcaacatgtggttggcctaagtctactgtcattgcttgatatatatctagcatgccataatgttctttcaacataaatactttcaagtacagagcctgatagtaagaattaatgacttacagaatctcatcgccgacagcaattactgaggccaaaagcacctcgtgtttctgtgattcggtatctacgtcttttttcagtgaagcaatt

SEQ ID NO: 114109 - DNA, 370 bp, Arabidopsis thaliana columbia
agccttccgtggaaggtccattgtttcaacttggagttagtgcatatgtcgattggatgcaggatttgatccttgaaatgaaagatgggactatacgcacagctattgacactggttgtggggtaagtttatatttttgtggaatttaacttggcaaatatcggattagatgctctcttcttcaactccattgatcttgttctgttttcaaggttgcgagctggggaggtgatttgttggaccgtggtatccttacagactcacttgggatatgaaactttgagtatgctcaagtccagtttgctctagaacgtggaattcttgctatcataggcatcatttccactcaacgtctccctttcccttcaaa

SEQ ID NO: 114110 - DNA, 362 bp, Arabidopsis thaliana columbia
caccagcctgctcctcatctacactcttcccaacagcttgctcctgggcaatactcttcctaacaggcggctcctcatcaagactcttctctccaccagcctgctcctcatcaacactcttcccaacagcttgctcctcatcaatactcttcccaacagccggctccttatcaatactcttcccaacagccggctcctcatcaaccctattcccaaaacctgactcagtctcaccaacaacatctccaacattctcacaaccatctatcgtctctacagccgctgctagcttcatcatcccatcaccagtccttaactcctcaccaccactctcaccaacagctttctcaccaccaccaata

SEQ ID NO: 114111 - DNA, 373 bp, Arabidopsis thaliana columbia
agccttccgtttttatatatttctgaatttcatattaatcttgctccatactttattggttggatttaaaaattgttgtgtcttccttcgatggaaacccattttccgggaaaagggcttattgcaagggttacctaatttccttattttttaatctaacccttggacatttctcttaaaaaagactcaccagggctatggtcagacctcatttatgtatgtcttgagtccttactaataatttaagcttcggatataatatgttgatggttcagaaccttcatgtcaaggaatattggtgtgtctggagggtttttataaggtcttaggaacctaagacatctttgtatttggacgaacgttgatgaaaaca

SEQ ID NO: 114112 - DNA, 362 bp, Arabidopsis thaliana columbia
atttgttgaagtcatgtataggtgtcaatggtacataaattagataacgagaagaaacaatcttacatggacaatagaacgcttcagtatatgatccaatactacataacttgcatcgctagaaacaataacaatgcgtaagtaaagaccaaaactttgagaagtataaaacagttaaaacaatagttggacacagaacatctcgtatataggtcaaaagaaacaattgagaggagacagagctgaaactaaagctgaattcatttgtttatttaccaaaaccaacaaaagcaaaacactcttacgtcatcctaaggctgtgaattgaatcatcaaactcaagaactgaaattttggcgtcg

SEQ ID NO: 114113 - DNA, 365 bp, Arabidopsis thaliana columbia
gttttataactccagttttgtttttgtcaatttctcaattaagtttcatagttgtaacgtcgcgttgaactctaatttttgtgtttttctccgatccagtcaaatgtctgatgacccacacccaccaagacaccgacccatattactcctcattgaatacatcttataattaagtagttaatattgtttctttgtcgagaattataattagagtgtatgttgttaataaaccataatttccacccgctcatttatcattattgttatgaaaaataaatttatgttgtcaaatattaagatataggcttatagtttcggttaattggataaaaagagtttgcattaattacagtaagaaaaagtaa

SEQ ID NO: 114114 - DNA, 303 bp, Arabidopsis thaliana columbia
aataaattttataacggcctaggtcaaaattatcaagacactgtataaacattgaaattcttgccaaatccctataaactatgacgacgtaatacccaattagagatagccacgtggatgtatgaccaatttaggagcattcagttttcgtgttttgcagtgataaatatctctgagagctaaccccggagagcttacagaattcaagctaaacattgttagagagaaagagagagcgataatggcgatgaggggcttcacgttgttttcgatccttgtgttgtcttttgtgcgctccgtcta

SEQ ID NO: 114115 - DNA, 365 bp, Arabidopsis thaliana columbia
aattaacaatttttaaaaaatctagaaattcacactagttaaattaaatatcgtcgatgagaattaatcagtcaacaaaaaactaatcattttatttggataactaaatcgtatcaaatgggaacatatgtttacaaccttttagaaagaaaaatgaagatatgttgatacaaaagatgtttctcttttccaaataatctaacaaacgaatcagaagaaaaaaaaacaatattgtgacaacaatcatcaaacctctgcaactgcattcttcacacaatcaacattacacaaccgaactgatctcaccatttcacccaacctagaaccaaagatttagatagtaagatcccatgtacaacatatgt

SEQ ID NO: 114116 - DNA, 357 bp, Arabidopsis thaliana columbia
ctggaatcgggctatgtagtatctctttagattttactataatgtttttggtcgaacttgaactagtcacaaaatatgatctcgttacaaatacttatacaaaagttactttcaacaacaaaaaaaagttctagtttacttacttttaaaaatgatagtgcacgaactactacgagtggttttcatttttcgcataatttaatttcatagtatgctaattgctaagtaagtaatttatatttgttgttttcttattgtcttctcctacgtaatgagccaaaaggaacgattttacaagaattcttaaagatcttccaaaacttcaaaatcacaaaaactcggttagaatcactgatt

SEQ ID NO: 114117 - DNA, 358 bp, Arabidopsis thaliana columbia
gttcttccttctcctcataactggaaagagcaacaacttcaacctaaccatcaaagaaagaaacagccatgacattcctgaaatttggaaatccttcttgctaataagcctagctgtaacataacatacattgaaaaagtcacttagaggagtttccttgtgtgcttcaggctttggaacagaatcccatatctgccacaatgaagaacaaaacaaaacggtgatcagcttatcaacttggaattagctgaaagtcactcactcctcttttaccttctgaatatcttctcttaagacaggctctaaattttccaacggtgtctgcagccaaaatcatcaatagacaatgtatgtacca

SEQ ID NO: 114118 - DNA, 369 bp, Arabidopsis thaliana columbia
cttagaaaaatcaaaatctccatgttgaggttattaatattgaaagcacgtgttgttgtattcgactcaattactaaactcgcatgttaacgcatgacacatgataatatcggcatattcagtgaaccaggttggttcatgatcccttccaaagcggactcacaccttagactcggagctcacacgccaaatcgctcggctaggttttgatagccaactccggccaaaaaaccaatcgcgagaatgtggtttttgattgacccaactcacattttgacctagcacgaaaaccaaacaccaacatgaaataagataaactattcaaaatatctagttttatataaaaatcttaatttaatgtcacgagaa

SEQ ID NO: 114119 - DNA, 375 bp, Arabidopsis thaliana columbia
  unsure (1)..(375): unsure at all n locations
gggcgttcaacgcgtgcgnttcttatcatattattctttttatgcacccgntatgtnatgngaatgtgtttattaaaattttgtagttctacaaccatcattgnttaatattcatgaaactttttttttttttcatgaaacttatatatctattaaaagtttaaaaccttattatacaaaatgtttgataatctattatctgtcaccacccgtttgtgaccagatagtagatttctaaagngtttagaataagtntagtgttttagagtattaaaaaatttttaagcacttttcattagactntatatatgacatatgtaaaataagattcctgaatttgaatttagctattacttatataccataactcattaa

SEQ ID NO: 114120 - DNA, 355 bp, Arabidopsis thaliana columbia
cccatataattggaatccagttctttatcgagacagacattgaccttggacctgttcttggatcttcaacaaaagaaaagtcaattgatgggatatactcagctttagctgctggggagcggaatgtttcccgaggaatgtgtgggttattccagctgagtgacgaggttgtgtctatgaagatattgtcacgcctgacaccaagagacgttgcatctgttagctctgtgtgccgcaagctatatgtgctgacaaagaacgaggatctttggcgaagggtttgtcagaatgcatggggaagtgaaacaacaagggtattagagactgttcctggtgctaaaagactcggttgggg

SEQ ID NO: 114121 - DNA, 232 bp, Arabidopsis thaliana columbia
  unsure (1)..(232): unsure at all n locations
acaaaaatactcatatatttaatcacttacagtcataaaaccncggagtcatcattaaataattttggtagacctctctattccatttctcttcacaccttcaccaaattattaaactccaaaaatctcataaaatttatatatcttcataaccatataaccaaaaccattacccattttattcaaaataaatggcctccattttatattatccaaacatacccacccattc

SEQ ID NO: 114122 - DNA, 168 bp, Arabidopsis thaliana columbia
  unsure (1)..(168): unsure at all n locations
cccnttcaccatatcattaacctaactctaaatccttatcatctatacacactcactacttttacctttagtcctgctaataaacagaaacaaatgctactcaataacaaggaaatatcactttctgcaaataaataccaaaataactttatggaaatacaaatacct

SEQ ID NO: 114123 - DNA, 328 bp, Arabidopsis thaliana columbia
  unsure (1)..(328): unsure at all n locations
gaaaaaggttattctcatcaattttcacaccgcaacctccncngggccagtcgacctaaaaagttgtagtgctaaacaaacccttnacnttcctcctcagccacataacgacagtaacccctacaaccaagacgtcctccaaaccacccaaactaccaacaataaaaccggcaacatcgaaaactgcaaccacaaccacacccaactccaaagaaatgaagctcacgtcacccactacataatataacaaccagaactgaacatccacacctgcttaactaacacaaaacaactcaacctctaacaagtaacaaacatcaacaaaaga

SEQ ID NO: 114124 - DNA, 115 bp, Arabidopsis thaliana columbia
ccgtttgatacgaaactctctacgaggagtctctctttactttgtctctctctcgcaaagaacgaaagaagtgcctcttttaattttctccgtccagagtgtgcggcgctgcaca

SEQ ID NO: 114125 - DNA, 275 bp, Arabidopsis thaliana columbia
tccaaattaaaagcaacttacttaattacatatcgttcgtgtttttttcttggaaaaatggcgtctaagcagctgagcacagaacagcttgatgagaaggcgaagcaaggagagaccgtcgtcccatgtggcaccggtggccacagcctcctagctcaagagcatctcgctgtaagcaggagcatgggaagcctgacgaggatcgagctccatagacatgaatgttatcacgtgatcggccacaaatgtataccggcgatgaaagatcatacagg

SEQ ID NO: 114126 - DNA, 245 bp, Arabidopsis thaliana columbia
catgccccaaaacccataactttaatctacatatcaaataaccacttcctatttatatacaaaatatctggatgcattgactgcacattacttcaaaatatttatatatatattattaaaacacatatacaacaaaactctgacaaaactacattctaaataattgcattttttgacccataacctataccgagtttttgttagtcctccctatctatataatccacactcacttactcattcat

SEQ ID NO: 114127 - DNA, 309 bp, Arabidopsis thaliana columbia
gggtctcagagggtttttgattgccattgggagaagaaactgatgtataccctccaaaatatccatacgaaaagtctttggtctcgattctgtctttgatggcttattaattgttcaagcaagttttgagacttgcttcgagatgttctggtattggtcctgaaaaatgctgggatttttgacggacgtatgtgacgacgctcatagccctgatcagagatcgaatggaaagagggtttgtaaatgggccttatattagagcctatctacataaaaccctaatccaagatctgattcagattcctattc

SEQ ID NO: 114128 - DNA, 368 bp, Arabidopsis thaliana columbia
gaaaagctccattctccttatattcttgtttaagtgaagtctcgatgtgtatagatcctcggtctgacagaacactcggtttcttggagaaattagttgactttgcagaaaatgaccggcaacaagtattggggttccatcggttaggttgtatgaggctattgaggaaagaataccgggaggctgaagaagcttttgaaacagcttttaacttaggccatgtgtattccgctactggtttagcaagactaggatacatccaagggcatcggctttgggcttatgagaagctaagctcggtaatctcctctgtttcgccgcctctcgggtggatgtatcaggaaaggtctttctattgtgagggtgac

SEQ ID NO: 114129 - DNA, 363 bp, Arabidopsis thaliana columbia
gtttcttgtcactcaagaaactatctaaactgaaataattgatctcttgtgaatagtacaaatttacaatcaatctatgtattaaccataatataacgattctaacttggacctttttcaattttgctcaccttcaggattctcaattcaattcagcaatatctcggcggacgcagatttggtcccatacctaaacacgacaaggacgtatctaggaaggccatggaagctatattcgagaacggttttcattaggaacaatatgagcgacgttgtgagacccgaaggatggcttgagtggaacgctgattttgcgttggacacactcttctacggagagttcatgaactacgggcctggttc

SEQ ID NO: 114130 - DNA, 335 bp, Arabidopsis thaliana columbia
  unsure (1)..(335): unsure at all n locations
tttttattaactctcaattttctacttaaaccgaaataatccaacgcttgggaatttaaaaatttgttcgatcaacccaccnattaaccataatataacaatttctaacttatacctttttcaatttttctcaccttcataattctctattcaattcatcaatatctatactttcacacattttttcccataccttaacactacacatacttatctattaattccattcaatctatattccataactattttcattaataacaatataatctactttttaaaccacaaatatatcttcaaacaaactcttatttttcttttactcactcttctac

SEQ ID NO: 114131 - DNA, 217 bp, Arabidopsis thaliana columbia
attcccacccccacccacgcgtacgactagttctacatctctagcttatcgccctctctccttttttctgtcacgctttcattccaatggttgtggaaatagaaaattctctttcttaacttgcatttcccacaaacactgactttctctaataccgcagccctttatttaaacctttccttttaaaaccctcaaatttctccaaaaaacccctaaa

SEQ ID NO: 114132 - DNA, 258 bp, Arabidopsis thaliana columbia
  unsure (1)..(258): unsure at all n locations
gttcctcaaacaacnccacaacccatagatcttcttcttcttcgacttactcatcttacaaacttctccacatatcttaataccagatccagccaaattcccgttacccaaacattttctactcaagctcacttacacacccacctaacataacttaacatatccaaaccaccaccataatcatattcaaaagcttatcacaatcatcattaacactttactaactacctacaatacaaccattgactctttcaacta

SEQ ID NO: 114133 - DNA, 329 bp, Arabidopsis thaliana columbia
  unsure (1)..(329): unsure at all n locations
ccacccgttacaaacaataaacttatcttttttattataaaaagaaacaaaactcgagcggtaatttttataattgtgtggtaaaccctcaatttnacccaaaactactaacccaataatgcatatccaacatatcaatatgattcaaaagttattaccatccctcttctaacgatctacttacttaattaactctattttcttccgaaaacctacaataaacactttgcttcaaaaaaaaccaacctccaatctagacatacattcacatgacagactggaaaatgttgatgactatctctttttgtcattgagaatttcatctaatc

SEQ ID NO: 114134 - DNA, 375 bp, Arabidopsis thaliana columbia
cgcggcctacacatattgccagattaaactctctctgggggacccttcttcctgcacgggcgcatttttatgggttgggagaattgctgattctctcttcgccttcacgggcccacagcaatgtcttcctagggttcctaagcttgctgcttcttctgctcgtgtttctccgggggaatatcctgagaagccgattgatcttctgttaaaaggacgaactcatcgaagtagaagatgtgtagctcctgtgaaaaggagaattggatgtatcaaagcggtggctgctccagttgcaccgccttcagctgacagtgcagaagacagggaacagttagcagaaagctatggattcaaacaaattgaagaaaatcttcc

SEQ ID NO: 114135 - DNA, 367 bp, Arabidopsis thaliana columbia
atcaaatatttggccagtctaaatagaattagaggagaataaagtaaaataaaacaacaggtttgaccaattaattaaaaaaggggcgagccaacttgtcgtatatcattcgtacagtggccatttactaagtgtgtgaccctatatatataaatcatatccttcatgcaaagtcacctgaacatttcatatataagaagatatacaagcctaccaaacataacaaaacatatttaaaacaccagcaagtttatattgcaaagcgtttcatcatgatcatgaagatatctatggctatgtgcaaacaaccattgcctccttcgccgactttagacttccctccagcgagatttggtcccaatatgct

SEQ ID NO: 114136 - DNA, 255 bp, Arabidopsis thaliana columbia
ttggggcacaacataccttggggtctgttagaatttttgccggaaaaaatggagattgcagcaaagagtaactcgaaacctatgtattcatgggggggggatagtcacaatacccccaagaattctaaatggcttcaggacaatctcgcaggtatgtttctacttctactgttatcttatttgcaatggtctaaatttgatttcttgctttagcttgctcttttgttggcctatgatattttcatcgttaagctg

SEQ ID NO: 114137 - DNA, 314 bp, Arabidopsis thaliana columbia
cgtcgttttttttttctttttttttttttaaagacattcacttggtctgttcagataggtgttttttaatttaccaaccatctcgagattttactttcattacatcaaaatattcgaatttggtttcaaacccgctttttcccgtcacaagaaaaccctaacattaccggtgaaactgagtctatagtgaggtttcagcacttttaaatttaattacgaaaatccctcttctgtttcaggatcaatttgctccatttaatcgctatctgtcgtagctcttgatgttaagtcggagagggaagatttctccacat

SEQ ID NO: 114138 - DNA, 366 bp, Arabidopsis thaliana columbia
caaaatcagtgttagtttctacaacccctgatcaaatcacatggttacccgcattttaagcggaaatagaaatgagaacaattttgtcaccttgttctgatttttcaatgggagtggtttagagaaagacacgatgaactaaacaaaaattaaaatgcttaggaagtacgtataaatttggttttaattaaatatctcagtggacaattttgtattgatgtccttgtatgcaaagttgcaaacaagcacaagtcaacaacaatcttagtctctttgtgtttgtagttttgtaggattatatatatatacataggagcttcgtctattttcatatatgattgcattaggaagttaatgccttacccg

SEQ ID NO: 114139 - DNA, 250 bp, Arabidopsis thaliana columbia
ggttcaatctgttggggtagaaacgttgtcgtttcgataaaggcagccatttattgaaacgttgtcgtttagatgcctctcatttttgttgaaagccctagaaaatggaattagacgtttaaattgatttcatctttctcagcttttgctaaacgcaaataaacaggtttttttttgaggctgacgctaacgtgcaatgcaaatgtaatattcaaaagaaggatttaaagctaatatgctcgaatcaatg

SEQ ID NO: 114140 - DNA, 218 bp, Arabidopsis thaliana columbia
aaagttagggtgatttggtttgtctacagtctatttgtttccaggtaatttgttagatagattgggagagactgagactgaggattttggtgcacaacatccttgtggtctgttagaatttttgctggaaaaaatggagattgccgcaaaaagttactccgaacgtatgttttcatggtggtgggaaggcacaattcccccaagaattctaaatggct

SEQ ID NO: 114141 - DNA, 231 bp, Arabidopsis thaliana columbia
atgctaccacataatatcctctatcgatctaagctaaatgtctatctatcataagtgtaacagatggctgacgagaaaatcagaatcagactcaacggtttccgaagaatcagtcgattggatgctagagttgaccatcagagggatgatgttatgctaaggcatgttaacgatcctctcattatcaccgagtacatgacctacatgtacaagaaggacacgacacacaga

SEQ ID NO: 114142 - DNA, 395 bp, Arabidopsis thaliana columbia
gaatttgttataacaaaattatttagtgtcaaagttagattaattaaaagattgtttttcacattcttatttggtgtcttataaacacaatcagtattatctcttatttatatattaatagattaataaaacaattataataggttatgtattttaataggttaagtattttaatttataataggttatgtatataataatttataatagattatgtattttaataatttataaatagataaatataatcattatctacagaaattttgtaataaaaatatattctaatgatagtttattcaaaatcttaatgttaattattttcatgagtttaatttaatattatttacaaaacatttattagtttattcataaaaattttattctaatagata

SEQ ID NO: 114143 - DNA, 357 bp, Arabidopsis thaliana columbia
aagagtttcattgaaaatttcaagaaccctagttaataacgataatgggttcgagagttttggcttccttctttgttttcttaatcttcacggtcatcacattgcctcccacgatccaagcttgcactccttgtactcgtcctcatcctccggttccgaaacctccacaacacggcggtggtggaggtggtggtagcaagccgcctccacatcacggtggaaaaggtggtggtaaacccccaccccacggcggaaaaggtggaggaccgccgcatcatgtgtgaggtagaggaagatgattcaaaatctcgacgttagttatacctatgagtgtaatgtagtattcttcacaaaaca

SEQ ID NO: 114144 - DNA, 412 bp, Arabidopsis thaliana columbia
gtaccggaacggaaggcccgacccgacccacgcgtacgatctcactacaatcccttagatcttcttttcaaatttcaaaggcggccggtgatgtttagtgtgggtgcttcattcaaacactagcatgggccactgatgacagagctcttgagactgccttcactcaatacggcgacgttattgattccaagatcattaacgatcgtgagactggaagatcaaggtgataccaattcatcacctaccacgatgagaaacccctaatggatccaaccgatggaatacaccgacgagaactacatgtcccaaacatgactcataacaaggctccgtcacgatgaccctgcattgactcttgcacatgttatcacagacattaagagtaataattcactcaagtatgtttatgttt

SEQ ID NO: 114145 - DNA, 391 bp, Arabidopsis thaliana columbia
cactgtaatcccttagatcttcttttcaaatttcaatggcgtccggagatgttgagtatcggggctgcgttagaggtctaacatgggccactgatgacagagctcttgagactgccttcgctcaatacggcgacgtcattgatgtccaagatcattaacgagcgtgagactggaagatcaaggggattctgattcaaaaccttgaaagatgataaaaccaatgacgatgcgaatgacggaatgaactgacaggagatcgcggacgtagcattactgaatacgaggctaagtgacgatgcagtcggagatgtcgacggctctcctaatacaaaaatatgaaataaaaaaaatctactgtttcaatttaatctctatcgaatttgaatatcag

SEQ ID NO: 114146 - DNA, 394 bp, Arabidopsis thaliana columbia
tatatatatatatatgataaaattagtgatcatttattcgtttctcaatgtatgatttaaagagccatagttcttctttagccaaaaaaaaaaaaaaaaagattgaaccataattctttcattaacaacaatgcagataatttcgttgatgatggttagtgtcctttttagttaatattggttcattactgaaaataaaataaactgatatgctacggctacctgttcacttttattttcaatttatgacaaaagctatatagcccatatgttctccaaggcccaagatatgtaaaattaggcctatgaaccaaacactggtttaataagaccggtaagcacaagttggattcggacattatttagaacaaaaccggttcaagagaatctacag

SEQ ID NO: 114147 - DNA, 266 bp, Arabidopsis thaliana columbia
  unsure (1)..(266): unsure at all n locations
agctgacgctcaagatcatcattaaagcacagaacataagaaacacagcgagatatcaaactgatgggcgactancaccagaaaatcaacactctcctctctccacaaacccatcaacaatctgcaaagagaaagcaaaaggtttttgtagaaaacccacttaaaaaacatctaaatcacaagtcaagaacatcattataagcccatcccattcaacactacatattccgatctgtgcattaaacctaacattatccatcatcatc

SEQ ID NO: 114148 - DNA, 394 bp, Arabidopsis thaliana columbia
ctcatatttgaaacactttgaagaaaatacataacacttttaaattccaaagcacaaaaaaggaatgtggagaggcattttttcatcctccttataataacctcatggttgtcggagaaaattacttcacttgctgctgattctcgagtattcgatcgtcatggttttcccgataattttgtttttggaacagctgcatcagcttttcagtacgaaggtgcaacaagcgaaggtgggaaatctccatctatatgggattacttcagccacacttttccagaaagaaccagaatgcagaatgcagatgtagcggtcgatttttaccatcgttataaggatgacatcaagttgatgaaagagctaaatatggacgctttcagattttcgatttcgt

SEQ ID NO: 114149 - DNA, 394 bp, Arabidopsis thaliana columbia
ggataaaagtgaaattttgtagttatgatcacaaccaagaaaatatatgaggctgatactattgatccagtccaatcttgtttatttatgtaatagaccaatgaaagattctgcttgtggtcgacacttttttgtaatgatgattttgttttgggtaagtttatgtatatacagtggcacagagacagaataactattaaatgatataaatattattttttagtcaaaactttcttacttaattgaaaatgaaataaaatatttagcagcaaattatatcttataaactcacatgcttactcatatcttgtaatcgttttatcatttgcttcgttttatgcagtgttaataacatttgcaacggcaaatcgtcttttgagtaaaacatgtattg

SEQ ID NO: 114150 - DNA, 386 bp, Arabidopsis thaliana columbia
aatacacttcactctgtagggagttaaaatcacgcagccatgtggtgagcacaaagcgaactattctgtcgccttttactaaagaataccgtgtgctctccacgctaagtggcatacgcctatttttggagggctctcactttacagtgggacccaacatctaccctagtgtaaactttttatgtgtggctaatggtctatcaatgggctcaaggcaccaaagctcattaaatgtggctatatatgttttgctatatcttcttaatttcttaaatgtggctatgtttctctctccgatattgtgagaattacccttatgttattatgtattaacgatctatcgaatgatatatccttttcttcttgttatgtcgcgttgattccac

SEQ ID NO: 114151 - DNA, 223 bp, Arabidopsis thaliana columbia
cagacaacaaatagaaagaacattttcccccacactataactacaatgcgtggagtacacatactgatgcaaccgaccaacaacagatctcctcaactacatcttcataaccacacacaacacgccacatcgttctctaacctccgtctattccaccacctatacaccacagattactactatgcaattatcagcttcccaccacctcaggttcatgtctata

SEQ ID NO: 114152 - DNA, 393 bp, Arabidopsis thaliana columbia
caaaagttaattagtttaatggttaaatcatgaaatgtcaccaccgaccacttgatctcccatgctgtagttgaagaagtttgcctcagaccactttagtagcatacaaaaaagaaaataaataagagggtgttattcagttatggatttttctagaattgaaatgcaacactaaaataaacttttaactcaaccgatccatatatgtagatgagttcaaaaccaacaaaaactaaaaaaaaaaactatagataaattggtcgcatattaaaagattaaaaaaacatggtgaattaagtatttatctacaaattatactaaatacaacattttttatgttcaaaaaaaattggactgtcattttatctgttatactaaattatatatatatat

SEQ ID NO: 114153 - DNA, 396 bp, Arabidopsis thaliana columbia
  unsure (1)..(396): unsure at all n locations
gaataatactaacagcatataaaggttaaagctttatcctgtgagagaaacagatagaattttcggaaaaagagcacaaggtaggtgaaagatttcttctttctttttttctcatcacaaactctctgcatttctccacgaaatcattacttgaatagtaacccgtctctcttatatttgcttactgtgagcctgcgactgtaatttatgttcttctctttctaaagatttgcgttttgtttgaatcggagtttaattcaagaacccttttttacacttctttcttctaagggttttaggttgtagctgtgtgtgtgtgtctcacttatctcttgtgggtttttatctcttttgaagaacangaacagttaaaagtcgggatttttgggtatttga

SEQ ID NO: 114154 - DNA, 391 bp, Arabidopsis thaliana columbia
caactcctcaatggcacgaaatcgggagggtttggttttggtgctcgatgtaggtcctgcgatgcgtagtgttctccctgatgttgaaaaggcatgttcaatgctacttcagaagaagttgatttacaacaagtatgatgaagttggaattgttgtctttggaactgaagaaactggaaacgatcttgctagggagataggtggatatgagaatgttacagttttaaggaatatcagagttgttgatgaattagcggcagagcatgtgaagcagcttcctcgaggaactgtagctggagactttcttgatgctttaattgttgggatggatatgcttataaagatgtatggtaatgctcacaaggggaaaaaacggatgtgtctcatcacg

SEQ ID NO: 114155 - DNA, 395 bp, Arabidopsis thaliana columbia
gtcaggtacgtaattctcttgaactgtcaccagcatatacttgcattaacgagctcgtattgatatctgtatgctctttggtaggctgcatttgttggttcaattaatgggcattgccggctttacagtgcagagggtatatatgctaaaggctcattctatttgtaaaccatgtctataaccttaattcttcataaagttaacagactcattttatttgtttttctgtaataattgatcagattgcaagttggaacaaacaaaccagatagatctgcagaacaaaaagaaggctcaagctaaaaagatcacagcttttcaggtgtcactctttctttttgaaaacgtttacattgctgatgttttttatgcctctacttaccatagagttagct

SEQ ID NO: 114156 - DNA, 382 bp, Arabidopsis thaliana columbia
aaaaagagagagagaacctaaaaagaagagaagagaaagagagatccgaggtgtcggtgacagcaacggtggaggagaaccaccagaaaaatccatcaacgccggcggcggtggaggagaagaagaagaggagatgggtgttttgggatagaaggaggaggagaaacaattacgagataccgtcactgtatacgcctataggatctaacacaactaacaattccttcaatgggtctcccaaatcggatgaatcgacacctaatcccggatttctcacacggatcgcgacgtcggcttttgagcagcgaaagacggtatctactggaaccgttatactaatctctgcagtagctgtgcttttgcttaacccggcttttgcacc

SEQ ID NO: 114157 - DNA, 363 bp, Arabidopsis thaliana columbia
gaagatctcgacgaggtattctatttttgctcggcttgcgatttggctattaatttagctggtggtgggaaaccgctagagttatctatatgccgtccaaagcggcatgagcatactcttgctctgtttccaagacaatctactttacactgcagcctctgtagcttagctgatctaacctccccgatctatatgtgtccgccctgcgattatgtggtccatctaagctgtatcaacttaccgtctctcataaggatatctcgccatcttcatcgtatctcttttacgccttcttttgaccaaggaaattggacttgtcatatttgtcgcggaaagatcaacaatgattgcggatgttattct

SEQ ID NO: 114158 - DNA, 381 bp, Arabidopsis thaliana columbia
gtttactgagagcaaatcaatctcttaatttgtttttgttttttgtttggcatttcctttggagggcgacaaataatattcgccgaaagacaagaaaaaaaagtgtttactttttgggttcctcttcggtgggttcactacactagtaacatctctgaacctgttctctgtctctcaacagcaaaacctcgaggcttctttatctttcattctctcaatttcttctctctgatctgaattctcgccgagtgaatctagaaccaggtttaagggtttcaagcactctgtttacaatgctgcttccgagatggtttgcaaaagcgtcgctgctcctactttcaattgttgcctgtacaaacgctgcatttatcggagtaaaca

SEQ ID NO: 114159 - DNA, 320 bp, Arabidopsis thaliana columbia
tgcatagacagtgaaaatgaatttgagagcttgaattgtatgaccatgagcgttgcctgctgtttgggcgatcaaaggggttgcctacatacgatgacacaaaacacgttgctgaaaaccaagcggaagaagcaaagcacacatgcaattatggaaattgagcacagcatggacagaatgattgtgtacaaactgatgacggccttgatggcgaagaagaagaagaatgctaaaataaccaaggttgaatagggagaggccaaggaggacaaaaaggcggtggtggtggatagtcacgaggacaaagtggcagtgcctac

SEQ ID NO: 114160 - DNA, 390 bp, Arabidopsis thaliana columbia
tttattttttttccctcttcttttctcttctctctctctcgttcattcgaccttcctccatgttgtctgcatctttcctctctaatctttttatcttctttttcttcttccctccttttaacgattccgtggagtctggaatatgatcttgtggaaatctctcagttgtttctcgttcgtcttcaggttgttgttgtacactgctagtttcgtttgtgctggagacatagttcaccacgacgattcgcttccgcagagacctggttgcaacaacaatttcgttctggtgaaagtcccaactcgagtcaatgggtcggagtacaccgagtatgttggtgttggtgctaggtctggcccaaccttctaatctaaggacaaacatgctaccct

SEQ ID NO: 114161 - DNA, 345 bp, Arabidopsis thaliana columbia
gggcaccatgcgcttggcatgttcccacaggcagctccggatatgtggcagtgtgatctttgcggcaccaagtctggaaagggatttgaggcaacgtttgatgtgcttgccagactaattgaaatcaaatttgcaagtggtattattgatgagctgttatatctggatcaccctcgagaaaacagatttcccaatggactgatgatgttagaatatagaaaagcagttcaggaaactgtacacgagcagtttcgtgttgtccgtgagggccatcttcgcatcatattttctcaagatttgaagatactttcttgggagttttgcgctcggcgtcatgaagagctt

SEQ ID NO: 114162 - DNA, 375 bp, Arabidopsis thaliana columbia
cttccctgaagattccgatgtatcatcagtagaaactttgtcaggaagaatcttggtgtgcacatggagacatgtgtgagtatgtgtgttctctggtcccggaggattacaagtgtgagtatgagtacaagcatgagaatctctcaaaagctcatcgaagaacgaatccatcgaacagctaggtaattcaccacccatgtttgaattcgaaaactcaagctcaccgtcgtccattactcaaaacccagtaacaaagaagtaacctttgactcttttgattgaatcttaaccaaaaagtatgagactttgtgatcaaaaaccaaacaacaacctaattgcagagtgaaaacacaatccaagcgattcagaaccaat

SEQ ID NO: 114163 - DNA, 365 bp, Arabidopsis thaliana columbia
ctctcttttcgttccgccgtcggtggtcgtacattactctgggacgtcaagcaaacctcaccatgcaactggaccggcgtcttatgcgacggtggtcgtgttactgctcttcgtcttcccggtgaaacgctctccggtcatataccggagggtatttttggtaatttaactcagctccggacgcttagtctccgtctcaatggtcttactggttctcttcctttggatctcggaagctgctccgatcttcggcgtttgtacctgcagggtaacagattctccggtgagattccggaggttttgtttagtcttagtaaccttgttaggttgaatctagctgagaatgaatttagtggagagatctc

SEQ ID NO: 114164 - DNA, 253 bp, Arabidopsis thaliana columbia
ctgcactatatttttcccattttttctcactcaaactctcacacgaaggaggccggcaatttcttaggggattccatcaaccctctcctctgatatacccataaaaacacaaaataaactaaaagataaaaactttggctttagttatagttgattttgtcattcgattcgatttctaattcttctttcaaatcctagggttgtcgatttggattcagtctaataacgggtgtgaaggccaaaggaactaaaa

SEQ ID NO: 114165 - DNA, 110 bp, Arabidopsis thaliana columbia
aacaaatcttaaacggatcactttgtgctgcactacccaaccacaaaggacaccttaacaatgtcttagtcctcccatgccttcgccagaaaggccaacaagctttgccc

SEQ ID NO: 114166 - DNA, 394 bp, Arabidopsis thaliana columbia
aacaaatcttaaacggatcactttgtgctgcactactcagcctcaatggccgcctcaacaatggctctctcctcccctgccttcgacagtgaggccgtcaagctttcccccgccgcatctgaagtccttggaagcagccgtgtgacaatgaagaagactgttgccaagccaaagggcccatcacgcagaccatggtacggatctgaccgggtcaagtacttgggtccatgctgtggcgaatcaccgagctaccttaccggagagttccccggagactacggatgggacaccgtcggactttcaggtgaccccgagacattcgcaaggaaccgtgagctagaagttatccacagcaggtgggctatgctcggagccctatgctgcgtcttccctg

SEQ ID NO: 114167 - DNA, 281 bp, Arabidopsis thaliana columbia
ttgagaaatttttgcaaactctcctagaccatgtgtggtataccaaatttttttgagtcatacaacaatcaatcccacaaacctaaattgaaaacaaatatatttccacctgaaacaacataaacagaatggaacctttaaaacaagaagttccaaatcttatggatacacctcctaacatattaaacaattcatcaacaacctagaaaagagattcaacaaagtatcatctacttctcaaacaaaatattcgcacccatattaatcaaagttttccaaca

SEQ ID NO: 114168 - DNA, 399 bp, Arabidopsis thaliana columbia
gtctttcaccatctgccagcggtcatggtgggacccatcagactagcgttccaagtaacggtcagttgcatactacacaaggtgtttttgatcactctgttcctcattcgtcgaattgggtatcaagcggtgtttcatctactgtggacactcattttagattgggtttagccgtccagttcctctcgatgatcttacgggaagcaactgcacccttaatgaattctgaagttgtttcatgtgagaaattctcacgatttcaacataagctacaaacagctttggagcaatttcaccagagattttcgctgtctgcatcttacctacgtaatatgatgattctgtcagcatacaaccgagggttactatccatgggacacaatatatttcaggaaaata

SEQ ID NO: 114169 - DNA, 387 bp, Arabidopsis thaliana columbia
tacacttcaacagttctccttttaaatagaaaattgtaaaggactgacccccacatcattttgacaatatccttctctggatctttgcagctttcccatttctccttcaatgtctgcaaataatctataatactaccagaaacaatggaaagaggagttacaatcatgtggacaaacatttcaagtgctcctataatttaaatagagaaaacagcacatactcttgatgatatttctctaaattcgagtaatatctccttttatcagccctcaggcattcctcccgtgaaacgatttgatctggatgagctttaccggagcagacagctgttcccctgaaaccacaatttagattcaaaacggagtcgaatttctgagcataaatta

SEQ ID NO: 114170 - DNA, 182 bp, Arabidopsis thaliana columbia
aacaaatcttaaacggatcactttgtgctgcactactgagcctcaatggccgtctgagcaatgtctttctcctcccatgccttcgacagtgatgccgtctatctttcccccgcggcatatgaagtacttggaagcagtcctgagacaatgatgacgactgttgtcaagccaaagggcccatc

SEQ ID NO: 114171 - DNA, 375 bp, Arabidopsis thaliana columbia
  unsure (1)..(375): unsure at all n locations
aagaaacttgcagagctttctatctcttatcctcttctctaccatcatttctccctataaatacgccaacgcacataagtgtttgcattcgaagagagttctagcaaaacaaaacaaaacagagcaaacagagtaagtgaaacgatgtctctagttccgagcttttttggaggccgaagaacaaacgtgttcgacccattttcactagacgtatgggatccgttcgaaggattcttgacgcccgggttgacaaacgcacctgccaaggacgtggcagcgttcacaaacgctaaaagggactggagggagacacctgaagcgcatgtgttcaaagcggacgtgcctgggctnaagaaggaagaggtgaaggtggga

SEQ ID NO: 114172 - DNA, 207 bp, Arabidopsis thaliana columbia
aagaaacttgcagagctgtctatctcttatcctcttgggtaccatcatggcttcctagtgaatacgccaacgcacataagtgtttgcattcgaagagagttctaacaaaacaaaacataacagagcaaacagagtaagcgaaacgatgtctttagttccgagcttttttggaggccgaagaacaaacgtgttagacccattttcact

SEQ ID NO: 114173 - DNA, 366 bp, Arabidopsis thaliana columbia
cccttgcaaacttcttgtctcttgggaaagaataatggcgtagttatatcaaaccaacttacccttttgtcaattacataaaattttacgagtttgaatctgaatagtaacttaacaacaatattagtataaacctcactattttatccaactgggccatttttaaaagccccttattttcctcattatttattttggattaaggggtattattaaattaaatagggagggcaataggtcatttaaagattgatgtgacgaatggccgtaatcactctggtggaagttgggttgaagttcgatcatttaaatttaaaacacttattttttatttgaaatatttaaataaaagagtttctaatttta

SEQ ID NO: 114174 - DNA, 375 bp, Arabidopsis thaliana columbia
  unsure (1)..(375): unsure at all n locations
ataacatgcacgaaactaagtagaaaaagaaacatcgatggaaaacaaacagaagctgaagaaggtattaatttcattgaattgatttctgaagaaacctataagaaaaaaaacgaggttaatatgtaacgaagtaagattagaagaaattatacccgatttcgtgccattgaggagttgtgctggaagaagaaggtgaagaagaagaagaagaagaagaagaagaagaagaatgatgagaaaaagagagatggtgaaacgaagaagacgaagaatttttattttattttttttaaaataggctgactgactctaacgtggccttaaaatgagataggcccattgngctaaactatctaagaaaaagtccatatg

SEQ ID NO: 114175 - DNA, 246 bp, Arabidopsis thaliana columbia
ctttctctaactcagagaaagttcctgagatacaagtgagaaacgcaacaacaccaccgaaagagttgagtccatatggtaaagacaaaatgattcaaattccttctccttacttaactgattttcaattatgacttcaatctatttttccgctctttattcttattattctctaagatcaatcaccgtgtagctttctttccatacttctttccgtttacgaccagtatacacaggctggttctg

SEQ ID NO: 114176 - DNA, 306 bp, Arabidopsis thaliana columbia
cttccaagattctactctatatcagttgaattccctgagtttagcaccaaggataagaccttggtcttccaatgttctgccaagcatgaccagaacctggacttgtggggtggttacataaatttggctatgggtgatgttgaccacacgaaatttgtaggagacactcctttcagcattatgtttgggccagatatttgtgggtcagcacttttaaagaacattgctttcctttctttcaatggatcctaccatttgatcaagaaagttgttccctgtttgactgatcatcttcttcacgtgttc

SEQ ID NO: 114177 - DNA, 380 bp, Arabidopsis thaliana columbia
gggacttcttggttttctttatattttccagctattgtattgctctttctgatctttgttggggtgtatgatgaacaatctcagccatcttgaatcagattactctgagtatgttgaagttgatcctactggaagatatggaagatacaatgaagttctgggtaaaggatcttcaaagactgtttacagaggatttgatgagtatcaaggtatagaagtagcatggaaccaagtaaagctctacgatttcttgcagagtcctcaagagctagagaggctctactgtgagatccatcttctcaaaaccttaaaacacaaaagcatcatgaagttctacgcttcttgggtcgataccgataatcgaaacatcaactttgtca

SEQ ID NO: 114178 - DNA, 381 bp, Arabidopsis thaliana columbia
ctcacaagcagcaagcttcttcgattttgctttgacaccaccaatcggtgttttcgaatctttcagttttattacacaggtctcatacaagacacagtctctagaagcatgatatcgtcgactctgttttgagttacccagcagtggttgaagcttaaggcggaggttcttatgtgccttttgatatcatgattgaggttaagcgacctggttcttccacgcggatcaccacaacactccttgattctttcatgattctcttcagaaacaaacacatcttattcccaatctttgcctttatagcgatccctcttgcagccttacacctctccataactcttacctcctttcgccttaaaaaccatgtctttcgtttagaag

SEQ ID NO: 114179 - DNA, 356 bp, Arabidopsis thaliana columbia
tataacatgctttaaactaagttgaaaaagaatcatcgggggaaatcaaacagtttctgaggaaagaattaatcccattgaattgatttctgaagaaacctattagaaaaaaaactaggttaatatgttacgaagtaagattagaagaaattatacccgatttcgtgccatttaggagttgtgctggaagaagaaggtgaatatgaagaagaagttgaagaagaataagaagaatgatgagaaaaagatagatggtgaatcgaagaagacgaagaatttttattctattttttttaaaataggctgactgactcttacgtgggctttaaatgagatatgcccatagggcttaacta

SEQ ID NO: 114180 - DNA, 231 bp, Arabidopsis thaliana columbia
  unsure (1)..(231): unsure at all n locations
agacacattcaaggacgcaagttaacgaaactttttacaaccccacnggctacccacaggtgctttatggcaatttttggatctcacaaaaaccacacattagatatggagattgaagagagggaaacaacaacgccgatcatctgcagaacgggtgcgccgaccacatgaccgactcctggaaacagatggcggctgctgggaggaagtatatcccaagcaacacccttt

SEQ ID NO: 114181 - DNA, 392 bp, Arabidopsis thaliana columbia
gtgtttgctgtgatgaaagctctctctttggttcatcctttgctgcttcaagaggagaagcaagtcaggggattgccaaggatgataaagttttcaccttttattgagactgtcgatgttcagtggccatcagagatgggtaaaggtcatgattttgttgctgttacggtctcacatcctccaggtcaatcatatgaacagaagcgcgaagatgacgagttggaaatagtttcaggcatgaccgcatgatcaatctgcgagttggtcaaggtggagaagcgggtttaagacagtgcacaatgtgtgagaaagctattcataaagatgagtctgtttgttgtagccattgccgtgcaaccatatactgtggtttagactgcgagaaacggcat

SEQ ID NO: 114182 - DNA, 385 bp, Arabidopsis thaliana columbia
aaagagattctggaacaaacttacttatgctggcctccattaacagaatcacagtactttttcatccactgcataaactccaagttatccaatggccttcccttaacgagtttgctcacttcgatgtgctacacaaccaaattaaccaaacaaagtcagttctattatatgcctcctcgaattaaaacccccaaaaatcgataaaaatgaaggaagaagaaagaggaccttagtgatcttgagtttattaaacacatcctgaagaaccttatagttctgaatcatctcatattcactcttcgcatcaaagttaaccttgtgcatcggaacagtcccaggatgcaccgaatccatcagctgacaatgaacagcgcctgaacaagcc

SEQ ID NO: 114183 - DNA, 372 bp, Arabidopsis thaliana columbia
  unsure (1)..(372): unsure at all n locations
cgtccgcaaatagntactgccaagcattgctacccccatactatgacagagnnagagtcganaagagttttcgagcatagtaagaccanaacacacgggcttctagaggggaaaaggctagatcacctcctacagtcgagcaggaacggcggaaatctgcggagagaagtgggccgggatatgagcatggacatagcagtagccccgtaaatttgcttgaggagaggaaaactattccagcatctagaacaagaaaaaatgttgctgcaacgagaataaatctatccgagcctccccaatgacccaaccaaggtataaagccacaacagaaaatggagtctgcaactactccagtagaaagggagaaacaag

SEQ ID NO: 114184 - DNA, 407 bp, Arabidopsis thaliana columbia
ggaagacccacgcgtccgacaaagagagagagagatggggtcaaagacggtgatgatggagagagacgcaatggctacggtggctccctatgcgccggtcacttaccatcgccgtgctcgtgttgacttggatgatagacttcctaaaccttgtaaaacctttctctcgctacttgcatttttttatccctaattgatttcaatatattgcatgccaaaaaatatttgatatatggttgaatttaagaaacccttttaaatatatggaattgccgaccctcaaaatttttaaaacatgcatatagaatgatgttcatgatcttatagaagctataaattgtaaaatgatacatatcctgtatatgatggtaattaataatgtattacccatgaacgtgcatgaataa

SEQ ID NO: 114185 - DNA, 364 bp, Arabidopsis thaliana columbia
gacgattttgatgtttttttttgttgtaaaaactcttttaaatattgatttcattattatatgaatttagtagaatttttaacatagcaaaagtattaaattttgaaaaataatgataactgaaatatgaaatagatttgttttaattaactcttaaataatctaagtaaacaatagaattataaagattttgtcataagatataattattagtttattactatcaaactttaatattactaaacgttttgtccattattgcgttatgtgaagattgtgggtccgagttactaattttttcggttagatataatccaacacatccaaaaaagtatataaaagaagaaagtgcatagaacaattg

SEQ ID NO: 114186 - DNA, 292 bp, Arabidopsis thaliana columbia
agaacctaaaaagaagagaagagaaagagagatccgaaatgtcggtgacatcaacggtggaggagaaccaccagaaaaatccatcaacgccggcggcggtggaggagaagaagaagaggagatgggtgttttgggatagaaggtggaggagattagattatgtgaaatgctcagcttctttcactgatcattctgtcgctctattggctccgttttatttcactaggtcggctctttgggtcacgtcgttgtgttacaccatgggtggtgttgggatcaccgtctcttatca

SEQ ID NO: 114187 - DNA, 414 bp, Arabidopsis thaliana columbia
ccgggggggtcccacgcgtccgttacgcttggtttattggagttgctcttcctcaccacgagcttgtagagtggaagctgttgtttcacagttccttacacggtcaaagcttcaacacatttctcggacacacatcgtgagtgtttctcaactgtaaggtaaatgatcacgttttctctctgtagtctcacttttcgccccctctaattttagcgcagcctttgtcgcttggcatgcacaccagtgttcgtcaaagttcccaaatgaatgttctcaaagtaacaactttaatcgattaacttgctttttgtttttgaagaattgatttcagagtttgtttgatcatggaacgatggtccggcgttttgaagattccgttggatgctactactagcaactactacagggttgcag

SEQ ID NO: 114188 - DNA, 390 bp, Arabidopsis thaliana columbia
cagttattcattgaaattcaaacctgttttggacgttttcgtattcttagttaccaattagcaaaactgaagcttcagaacttgtatctatcttatgaaagcaaaagggaagttgttttcttggctgcctaacttttcacacatttctttgtttcatctgcagagcaaagcggcaagcttgagtgtctttcagttcttgcaaaattggggcctcttttcacaatctgttcaagagccgagagtcctgctgcaatggaggatttacctgtctggaagcatgaaaatcgtgttcaatctctgccaacaaaggacccagttcttgcagtatttggccagaaagctactcaagttgatgaacccgaaccacatgtggacgtcagtctaggtgct

SEQ ID NO: 114189 - DNA, 257 bp, Arabidopsis thaliana columbia
  unsure (1)..(257): unsure at all n locations
gtaaatgcgttgtcatcacctttggtaacgagnnnagagtgtccnccagggttttttagtagtataacgcgncacttacnctnttaaaatctgcaaccagacacagttgctgcaagaagcaaagtttggtctggctgatgcacagagttttgtcctgtctgggtctcacagcaatacagtttcagtccttcccaagtcagaacacgtcttaagttataagctagtgcctctgacttgcggtgaacagcaactcccaa

SEQ ID NO: 114190 - DNA, 249 bp, Arabidopsis thaliana columbia
ctggattttttttgttcgcaatatcaaggaaactgccataaaggaaactgctgttgctaagcttaaatctgaccagtctgatttaggatacatacatggtcattattgatgattgctggaccaattagttacgcatctcaatgggtcaattggttcctcatactgaaaccttacgatcaggaataaagcatctagctgtttatgttcattcaaagggtgtcaaactcggcatatatcttgatgctggcg

SEQ ID NO: 114191 - DNA, 381 bp, Arabidopsis thaliana columbia
  unsure (1)..(381): unsure at all n locations
gtttttctgtggtgaagtcaatgacgctgatgacgtcatgtgtatatcgtaaatcttatttttttatacttcaaaaaatcaaattcatttgcatttaataaaattattagtatgaaataaacgcgttgacaattgttatgtccacttaattcgtttgatcaaattacctaggacaaatttcgaaattttactatgcgttaagtttcttgcatattcagtgaaaatgaagcaaagtagcaaactagtacaactctatttccctatagcataaagtttaatggacatacgactcatccaagtttaagaaaaaaaacaagaaatgatatgtatttgaattttgggaattatcaacattggggatatggttnttttttttctttt

SEQ ID NO: 114192 - DNA, 146 bp, Arabidopsis thaliana columbia
tctataagaaacaaagccgggcaacttggcctttttctaagcaacataaccaccatttttgggtcacctaatggtgagggggtttcaaaagacctctccacagcaactccttcaacattgatatccatcatctgagcctctcatcc

SEQ ID NO: 114193 - DNA, 400 bp, Arabidopsis thaliana columbia
caataatgctaaaaaaaactctgataaaaaaaataaataatgctaaagaaaactgctccaaactctccagaacgtcgccgttgttcatccttcgccgccgttgatctcgtcggatcagcaaacagaacgttcatggtttcagtttccctcccgaaagaactcatcctcgagattttgaagagattgcctgcaaagtcagttaagaggtttcattgtgtgtcgaagcaatgggcatcaatgcttagttgtccacatttcagagagttgttcctgaccaggtcctcatctgctcagccgcgtctcttattcgccatcgaaaaacataatcagtggagcttgttctcgttgcctcagcgtctgactccatatgagaagtcttcttcgtcgtctgttgtagtaa

SEQ ID NO: 114194 - DNA, 144 bp, Arabidopsis thaliana columbia
gaaacggacacgctttagcttatttttgatgaaaaattgcctatagaatagaccatcaacgcgttttgatgacaacaactctgcccaactttcaatgtctgacactgcaaaatttttctcactttgttaagcaattaatctatc

SEQ ID NO: 114195 - DNA, 407 bp, Arabidopsis thaliana columbia
gaaaaaggtcaaaaaaggaaatagtgctaacgaagaaggtccgtttattgttgtggaatcttccaaattcaagacggtaggcgagaagactactttaaggccagatttagccatagctcttcaagttagagccttccagagagtcacaaggctgtggaaatgcgatgttgaagcattaagaagagagatgagagacaacaatgttcctgtatcctattccggcaatggaattcccacaaaatctataaggagaccaaacttagaagagattctccggcgtctgcttaatgtcctgaaacctgaaactttccaaggagctattaaggccataaacgagaaaatcctctcggttcttgatgattcaaggtcgggaagagtcgatttgggaatgttttacgcagtgattg

SEQ ID NO: 114196 - DNA, 250 bp, Arabidopsis thaliana columbia
ccgacagcgagggcgtgtaagctcacgtgcgtggaccgaggagtgcacctgctgtgtcaacgacggtggcggctgcgctgcgagtcgtccgtaataaacatcaccaattagaccaaaaacattcaattcaacagaacacaatctcaatgtgacgtttataagattatgtaattgatcaacatggcttgcttaaattgcctgaaccatttctttattgacttttaataatgtaagacaaacaccaaaatat

SEQ ID NO: 114197 - DNA, 375 bp, Arabidopsis thaliana columbia
gagaaattgtgagaggattcacattgcgactcgaatcgagttccggtggaagaagagatccgggaaagaggagaggagggaagaggagagaagggaagaggagagaaggaggtgatcgatgtgggtttagttcattaagtttagatggataatggttgatgggtatatcataacccaacttcttacataaaccagctattatctcaacgaaaacttctctgtcttctctaacctttattttgcagagtggaaatcatcaaagttcttcttacggcaacgggggctctttcaatgtctgttggccatcaatctatcttgaatcatctggctttcttagtagggatgtccagctttacttcccgcgacgttcgtttt

SEQ ID NO: 114198 - DNA, 397 bp, Arabidopsis thaliana columbia
ctcagaatcaaagtttctatgttgaagaaaagagagctttgacgaaaaaatcatcctttagaatggcaaagactgatgtggatgatgagtatggtcttaaaccctctgagttatatggaaaaaatacatggaagattaagaaattttcacaaatcagcaaaagggagttcgctagcagtgtttttgaaattggaggctacagttggcatattttaatgtatccagaaggatgtgatgttagcaatcatctctcattatttctctgtgttgcaaaccatgatgaacttcttccaggctggagtcagttggctcagtttactatatctgtgatgcataaagatccaaagaagtctaagttttcagatacgctgcaccggttttggaagaaagaacatga

SEQ ID NO: 114199 - DNA, 369 bp, Arabidopsis thaliana columbia
aaatggcgtctggtttgatcggaagattggttggaacgaaaccgtcgaaattagccacggtggcgaggttaattccggtgagatggacctctacaggagcggaggcggaaacaaaagcttcctctggcggcggaatgatgatcgaacttgaagacttttcagatctatcgatggaatccagattatccagggtagcagagctttaaaattaccagttttatctcaaatgatttgtggaccaatggtattagatgctttaatttatttcataaagtgttttgacttattctctttacttttttaaataaatttttttaaaggtttttttttctaattttgtctattgttttttttttgtaaatttttttt

SEQ ID NO: 114200 - DNA, 374 bp, Arabidopsis thaliana columbia
ccacgcgtccgcctacagcgattcaattaatctcacgtgcttggaccgaagagtgcacctgctgtgtgaacgtctgtgggggttgcgctgctagtcttacgaaatatacatcaccaattagaccaaaatcattcaattcaacagaacacattctcaatgttacttttatatgattatgtaattgatcaacatgtcttgcttaaattgcctgatccatttctttattgactttcattaatgtaagacaaactccttattataaaaaaaaaaagtctgccgctcttgatgatccaatcttacttacgctttcatgcgacttcatatctcttttatagtgtctcctaaataaaatttattgaccgttgttttacaac

SEQ ID NO: 114201 - DNA, 278 bp, Arabidopsis thaliana columbia
tgcattgttactaacattgtttcattttcttcttctttagtggtgagctaggacgtcgtctaatgatccgtgactcaggaatgggattcctcactgtccaaaatcagaatcaacgcttcttcttctattgctttatctatcttcttgtagtgacggtgtgttgttcatttggattgtataaactgatttgcattctgatatctttgaagtgtgttgtgctgctcacttggattatgttacaaaactgatttgcagtctgatgcttttttatatgaagg

SEQ ID NO: 114202 - DNA, 291 bp, Arabidopsis thaliana columbia
  unsure (1)..(291): unsure at all n locations
gcgcctttaccagtaccttatgtcctgactatgatcngaccactcgaagaataggcagtttgatagtgttgcggccccccccacagctggtggttccctccttgttctctccagccttacccttgttggaactgtcatagctttgactgttgcaacacctatgctcgttatcttcagcccaatacttgtcccggctctcatcacagttgcacttctcatcaccggttttctttactttggagggtgtgacatttccgctataaccgtttagtcttggatttacaagtacgc

SEQ ID NO: 114203 - DNA, 163 bp, Arabidopsis thaliana columbia
ggaatccggcgacccactcgttttctgatcgttctgcgtctgtttattcgggtgattgtcaaaggttaatcaaatgggggaggtatcaaattagaggacttctcccaatcacttgcctcgttgtttgttttgaaaaagctaagatgctgtctttgtgaacact

SEQ ID NO: 114204 - DNA, 286 bp, Arabidopsis thaliana columbia
  unsure (1)..(286): unsure at all n locations
agagnnattatcataattctgcatataatacaagtactaatcataaaaatattatatattaattatcaatcgggctttagctaaacggagcctgcatcctccactttattagtccgatcacgcaaaccataaaaaaattgtgcaaatctaatatcaatctaaatactccctgcattaaattccactttactaatatgcgctacccgttacaaatctttgataaaacaatcaatccttccgagcgaaacagatgatatctcgatcgacggagaaaatggggaaatcc

SEQ ID NO: 114205 - DNA, 238 bp, Arabidopsis thaliana columbia
  unsure (1)..(238): unsure at all n locations
acacattttaaaagaaaacaatctttcgttttataggcaatgactggaacatacatggtggatgtatccaatgtgttgtggagcgcacgnanaaacactacaagaagtggaggaacgaaaaccacgtcttccaagatgccgtcggccaccacatccaaggttgcactatgcatgacggtgactgggactcccactgctccatcagatcatggaatattacatgcgatggaaagccgga

SEQ ID NO: 114206 - DNA, 412 bp, Arabidopsis thaliana columbia
atttctcacattttcgtagccgctagactcctttcagattcttacttgcagctatgggtaaagagaagggggacatgaacattgtggtcattggtcatgttgattctggaaaatcgaccacaactggtcacttgatctataagcttggtggtattgacaagcgtgtcatcgagaggttcgagaaggatgctgctgatatgaacaagaggttcttcaagtacgcatgggtgttggtcaaacttaatgccgagcgtgagcgtgggattaccatccattattgttctatggaagttcgaagaacattctatgtctacttggttagaaattttttgtccccagtatattgtggatttttttttataggctgtttttctggtatttttcccaggctgttttttttgtgttttttttt

SEQ ID NO: 114207 - DNA, 225 bp, Arabidopsis thaliana columbia
gaaacaatcactaaaacgaaacctaaatgtctcattcctaccacaacatatccccaaaggccctttaacaatatatcgagattgcactacccaacactattcattcacgggtagggaaactccatccacaaaactgtgtaccacgaaagcaacttttaaccgactatagctaccttcctagaccaaacttcattcgtcacaaatcttacactacattatattaac

SEQ ID NO: 114208 - DNA, 298 bp, Arabidopsis thaliana columbia
  unsure (1)..(298): unsure at all n locations
cggacgcgtggtcggacgcgtgggattttattgatttgagaattaatagttaatgtgttatttaggtaacgtatatgagagggttttgaggtttcatacgttaaattttntgcaaaaaatcagagaaacaattctaatcaaaatttcaaaacttgaaagaccgtagattctctctcaaggatcggnttgattctatttttgaaatgcaagaatctctntgaagtaatttggaatctttctccccaaattttattctgggatagcttcatatttctggctgattcatcctacttatata

SEQ ID NO: 114209 - DNA, 390 bp, Arabidopsis thaliana columbia
gaggtttgttttatcaccggttccatcttgccagaagaatattagttttgattttacctcgtataaggctgtcacagatgcatgagtcaaaattatgattgtagctgtagactttctcattatatagttgttggaaatacacttgaaatgtattgagattccttaaccgataattgtgtgaatgatgatgtgactatttacagtggctatggaattgctgcacaggccttaacggcggtgattagagctcatgatggccggggccacatacgatgcttacaagttccatcttaaaagcacttggactctcctcttcaaacgaactcatcgggtaccttctttttcaaactaatgactggtctcaaaacatatgcctttttttatttcctt

SEQ ID NO: 114210 - DNA, 163 bp, Arabidopsis thaliana columbia
agagacgcgtagctataaatcctctaaaacttaacgaaacttttcttaaaaagtatttggagaaaactaaaatattaagggaaaccacaaatacatatcacataaagttaaaaaggtctctcatattatctttatcctctctcaacacaaacagtctcataat

SEQ ID NO: 114211 - DNA, 309 bp, Arabidopsis thaliana columbia
cggacgcgtgggctgaggttttggtgacgatggcgacggcggtagtgatgaacggctagctgtttaagcaacctcggccaggtaaaggcggctatcagggccgtggattaactgaagaagaagctcgagttcgcgccatatcggagattgttagcaccatgattgagcgttcacaccgcaacgagaatgttgacctaaacgcaattaaaaccgccgcttgccggaaatacggcctagcacgtgcgcctaagctcgtggagatgattgctgcgcttcctgattcaaagagagagactcttcttccgaagc

SEQ ID NO: 114212 - DNA, 263 bp, Arabidopsis thaliana columbia
cttaaacaatagtataaaaacatgaatcttattcctttaaattctaaggtgaattctaatttactttctaatttgtgtaaaaatataaaatatagaaaaatgggtgaacttgattatcaagaaaaagatccaaattggaaagctaaaatattattatttagaaggtagaaccaaaatttatgactaaaaatatttttctttgaataaaatatacctcatatggaaaatattttttcagacaaaaacataactccttttctttt

SEQ ID NO: 114213 - DNA, 184 bp, Arabidopsis thaliana columbia
ctcaagccttctcatttttatttgtcactgcgcaccaaccctgggagggatatgcaatagacgagggtggagagaggaaaaccaaagcaggtgacatatactggattgcggctggttctgtcatttattttcataactctaacctaagtcaacgccattttgtcataaacagcattgaaccaac

SEQ ID NO: 114214 - DNA, 131 bp, Arabidopsis thaliana columbia
gtcagagagcactatgtactaatgtacagtcatggatgccccacgacatcgtgattttatcaagtgcaggatcactggttcctaccaagctcattgcagcttttcttatcagtgactctaccactgtatgt

SEQ ID NO: 114215 - DNA, 381 bp, Arabidopsis thaliana columbia
gcagatgataacgtggacactcaaaaaaccattgaatggtttgcaataattgttagtgaagtaattaatatattaaatgtggtcaggattaggtctgacattttggtaaatggggtcccttatttgcatgtccattttgatcttcatgcacctacagaatcatagatttgtatgtgatcagtgatgacgaattagtgatatggttttatgatcattaacattgttttaatatgataaattaaagatctattttgttagtgtccattgtccatattgatcttcatgcaactacagaatcacagatttgtaggtgatgacgaattcatgaatgataataatatgcgatcattaagatggttttaatttgataaattcaattct

SEQ ID NO: 114216 - DNA, 136 bp, Arabidopsis thaliana columbia
  unsure (1)..(136): unsure at all n locations
accgacgcgtncgagcnattctnactataaccttttttcacatttccttcatctaattccctagatctactggctatggctaagtgttaccgtattcaaagctagacagatcttttacagtcgagaatatcccacc

SEQ ID NO: 114217 - DNA, 390 bp, Arabidopsis thaliana columbia
gatcttaaacagactttttacattgtgtatatttagagcggtgtattcaatctaataatttatgtaaaatttataaattttatgttatttaattatggattttaaattttttaatgaaattgagtgttattaaattaaagatttaaaaatcaacctttttactgttactgaaaatagttagtggatttgattcttattaattttgaaggatttgaaaggatttgagaagatttttttaattaaaaatacagaaatctaaatctcatagttttagatagaatttgaaaagactttacagtaaatcacatcaacttacctaaaatcatcaaaattatataaaaactcacttatatcttaccaaaaaatatgttctttaataattcagtacct

SEQ ID NO: 114218 - DNA, 369 bp, Arabidopsis thaliana columbia
gttcttggtccggtaactaaatgcataatctctgcaaaaaacatcacagaaaccaaatcatcaaccattagtagtacaacaaccagacaaaacataggtacaggcttttataaaaaaaaaaattctgagagacatgacacaacaaagaaaagtttgttctttgatgatactgagactcgttcagatcatggaccaacggatcaaagaatagtcaaaactcaataccattaagctccacataatcacagaaggtgaaataaaaataaaaataaaaagcattttgttttgaatctgacccatttagcaaaaatgaatggatgagaagaaaagatgtatcagtaatcaaacctaacaagaaagctaaagact

SEQ ID NO: 114219 - DNA, 321 bp, Arabidopsis thaliana columbia
cattattttcactgagcgcattacatttttgagacaagagactctctctccctctctcctctctacctctccccctccctacgccgacggttgtagctatcgaccaacgcaccaatgtgaacggagatcccggcgcccgagaccggaagaaagaataaaggctcgatccgagtgcacaaccaccgttcaagatcggctatatcttggcggagacatctaaccactgatgggataggagttctttggaaccaatgaagcacttccccagagacattctcgtctacctccgttttggccatagctaccggctatagtgattgc

SEQ ID NO: 114220 - DNA, 342 bp, Arabidopsis thaliana columbia
gcaagcgcaggaccacacgccattcctagagcacttgcactaacaaaacccgcagaagcttgcatcctgatctttaacggtacacagtcgcttatatatctccggttcactgctctcgccgatcccaatctgaaaaaaacagtatgataagaatataagtaatccatcaagaagtgatactatgagcattttgaagtctaaagagacttacccacagaaaagccgcccgatcaagagaaccgctattgaattgaagtcaaaagctaatgcatataacaagttcccaatgaagagaacaatgctactgaatatgaatggtttgaagtaagatctattgggcca

SEQ ID NO: 114221 - DNA, 377 bp, Arabidopsis thaliana columbia
ctcacctcaagtgatccaatcttgatagagcaagaatgttttttctgagtaggcacttctgctttactagagcaagtagctgcagaaggacaatcaccacaagaacagccaagagactcatcaccacatgaataaatagacacattcataggcctcattccagacgacacaggcggtgttggcaaaaaagcgatcccatacggtgagcctggcaaattgacacccgctttctgaccaataaatgtaaaccactctgatgacacaacaaacatctcagttattccaagataagtaaacacaattgaactagtcttgagacatatcaaataaacatctacccttaaagttctttgcaccggctccgagaaagtctaaag

SEQ ID NO: 114222 - DNA, 238 bp, Arabidopsis thaliana columbia
  unsure (1)..(238): unsure at all n locations
taaacccactccgacanccacaggtgcttacaaaattattgtggcttcacaacaacaacaccacaacaacatccaagaaactcatcaccacataaataaatagacacattcatacaccatattccacacaacacatgcaaaattttcaaaaaaaccaacccaaaccactacccaaacaaataaacaccccacttctgaccaaacaaaataaaccactctcataacacaacaaacaact

SEQ ID NO: 114223 - DNA, 202 bp, Arabidopsis thaliana columbia
cggaagacacatattatgatctttagatataatatcaatcgcaataggggtagtagttatacaagatgcgttaaaactcgcacaactacaaatactaacattgggaagaaactgaaaggtggtgaaaatggtgttgtaaatcgaaaggcgttaaatcgagagaagataattactctctctcatcaccaccgagtacatgaca

SEQ ID NO: 114224 - DNA, 291 bp, Arabidopsis thaliana columbia
gtcaatttttagggtttgactctaaatcttacaattggaaactgtaacggctatatttcggagagagacgttgtaaaatttggttttacggtaatgcccctggcgctaatgtacactcttcgtttatttgcggaataaatctgcaattcttaggttaagtatagcaacagatcagaccaattttacacacagactagtaaatactaataaaattactggttatactcctctcaaatcttacaaaccaaagcaaaaaaccacttggtattacttatatgatttaacaagact

SEQ ID NO: 114225 - DNA, 349 bp, Arabidopsis thaliana columbia
  unsure (1)..(349): unsure at all n locations
tcggtcaatttttattctttgacatataatcccacaacnggagactgaagcggctattttggcggatagagaccttgacaaaatactcattacagataagcctctggtactcatgtacactctataggatatatgaggaataaatatgcaatacttaggataagtaaaaaaacagatcataccaagtttacacacagactaatacatactgataaaattgcaggctaaactcctagaacatctaacaaaccagagctaaaaaccaaccaggatttcttattggaaatcacaagacccaaaattttaatatcaagtttacaccaccgttacaaagcgatcctatatgggg

SEQ ID NO: 114226 - DNA, 137 bp, Arabidopsis thaliana columbia
catcacattcctcccacgaccaagctacactccttgaacaaatctatgctacggttcctaaacctacacaacacagaacaccggaatggtgatagcaagcctccccacataacggcgaaaacgtgggaaaacccccc

SEQ ID NO: 114227 - DNA, 374 bp, Arabidopsis thaliana columbia
gtggtgggcaaagaaaagaaccaaacacgccactaggagctaccatctgtgttttattgctgcttctgcttcctcttccattactcgtctcaaaacaaaggagaaagagtcaagagacatgcatgcgaagacagactcggaggcaacaagcatcgacgcagcggctttgtctccgccgcgttcagcgattagacctctttactatgtacagagtccatcaaaccatgacgtggagaagatgtcatttggttctggttgcagcctaatgggttcacctacacatccacattactaccattgctcaccaatccatcactcccgtgagtcatccacctctcgcttctctgaccgtgctctcctctcttacaagtcca

SEQ ID NO: 114228 - DNA, 369 bp, Arabidopsis thaliana columbia
gtcatagatagaatgaaagtagcccttgagagagcttgcccaggaagagtctcttgtgcagatattctcaccatcgcctctcaaatatcagtgcttttggtatataaatatacatacatgacgtatcttttattaaactaatcgaaaatgttatcaattaaaagtctatgttttatatagtcgggaggtccatggtggccggttccgttggggaggagagacagtgtagaagctttcttcgctctggctaatacagctctgccctctccgtttttcaatcttactcaacttaaaacagcctttgctgacgttggcctaaaccgcacttccgatctagttgctctttccggtaaaaaaattcatgttaca

SEQ ID NO: 114229 - DNA, 369 bp, Arabidopsis thaliana columbia
cttcttcttcttccttccttctctctccttattaagaaagaccaacacagacacggaagaagtagctgggttcttctctttgagaaggtgaatgcgggagatggggactggagaaactgctttgagactgaaagtttgggtctgcatatggcagccgtatttcttaggcaagtaaaaaagaagtaaagttcaacgttgtaaactttagggcacaataagtatgcttcctatccaagctactattctatatcttctaccaagttgaagatactttagtttgttttcttctggaatattctttatgagacttgtaatccattattgcttcattcttactaaaaatcctaattggtaagggcggccgcttta

SEQ ID NO: 114230 - DNA, 107 bp, Arabidopsis thaliana columbia
caagaaaatcctttgaatatagataaaagagatttgatgtcttatttcaatgaacagggatatatactcattctcgaataacatcttataatatttcttagcaaaaa

SEQ ID NO: 114231 - DNA, 370 bp, Arabidopsis thaliana columbia
gctctctctctctctctgccattagaagaaaaaaccaaacaccgagacaaaacacatcacgaagaagagagagatttgccattttcggcaaggaagtgttttattctagggcttctctagttgctgcgtagacaagatggtggagtgaaattgcggcggtgacttttcagattgacaaattgaattaaagatcttgaatacatatggcttctgtgggaacattaccagcttcttctatggctacaaaacaaagcaatgcttctatatgcgctgaaaaattacctgaagggattaatgagatgaagataaaagatgataaggaaatggaagcagctgtggttgatgggaatggaactgaaacaggtcacat

SEQ ID NO: 114232 - DNA, 368 bp, Arabidopsis thaliana columbia
agagaatgaagttctctatttcactttgatgtggaaacgtaaaattggggtttcgttttttaatactattatccttttttcctactttattaatcatatttaaattaatgatatttaatacataagttgaataagctaaaataaaatataaaataaaagtaaagtaagagagaatgaataaaactaaaggaaattttttacgaacgggcttctgaatgatcaacaacaatagctatcttggttcatagaaaataggattaacccccattgcatattggtacttatcggatatagaatagatccgcttccctttttttctatgaattgaattgttccattattactaacagaatagaacaaatattaat

SEQ ID NO: 114233 - DNA, 313 bp, Arabidopsis thaliana columbia
  unsure (1)..(313): unsure at all n locations
aaaaagattttgagaaatggatgtgtatattatataatataattatgttggntaatttattatatggatatattaggataaccaatatatcaaagaaatgatttgatatgattntatcttncttataatttaagatacaacaagttgtggttttgttcttggtatttgattctctggaaactggtaagaaacttggtgttttatgtcagtgacagtgctttgtgatcttgtacgatgataacgaaaatccaaatattaatttttaattttccatttgtttggcttttctaatcgtgcgtataatgaagatgca

SEQ ID NO: 114234 - DNA, 203 bp, Arabidopsis thaliana columbia
ggaaattgtataaaatctaaagtaaacgataatttgttattaaattagactgaagtttccaaattatctaataacatattaccaaaataaataagtttacatatatacaattcgaattaaaataaactaatatgttatggaaacgcttttaaatgatttccgaaaatattgggtatttattaatttattgatttaattcgttt

SEQ ID NO: 114235 - DNA, 378 bp, Arabidopsis thaliana columbia
ggcgccgcttagaacaccaatgtagttgtcaaggctacaaggaaaacaaaacaaaacaagagttcagcaaaccccagagatgcacatagggacctacattatacatcagtttcactctctctacacatgtttactcttgtctacgttgctaaaagtttatgagatgtatttatttcccgtctcaaaaccatcaaggcacaaagttttctagctaagtaaagttcccagacataattgcttcaaggcagtggtgttttttcaaatatgtgcaacttttaaaccgaaatgcacagactttatgacctcaacaaaactagaacatatattacttaatctctccaatataatgacaaacaacatttgatgtgacttaaatca

SEQ ID NO: 114236 - DNA, 368 bp, Arabidopsis thaliana columbia
cgtttctagtattcaacttgcgggttagatcttactttacattaataatatatcatatagtatttgtaattatttctttttaataaaaagataaaattaataatagaggcgatggagatggataatatagttgactgattgtttaatgttaactagcgttggggacagatggatccacacaactcgactcaaaaaattaatgcctggtttacgaacgtgtctttcttgacggaccccatgctttcattgtttggacatagatacttacttttgattccatattccaattttctaatctattagtaaatgattacgtttgtagaggtggtagctgatagatggcttcaaatgtttggggcaaacttaag

SEQ ID NO: 114237 - DNA, 377 bp, Arabidopsis thaliana columbia
atccaagttagtttccttcttaacattttaagcatttaggccaatgcgcatactaaatagcaaaaagaatcatatgagatatttgggtcaaggtgcttgtccacctgtatatttccattacaaacaaataaaatcaagtggtcggattatcgtgttggtcaaaacaaaactgtggacaaatttatactaacgcaccttaaacttttaatattcactatttaatcttatataattggtctagaagaatcgtttttaataaagcaagtagtcaagtacgaagtgtggaatggacctcgagagtgaatttgttagaatgatattgtctagtctttaaaatcgagggaatgattgagaaccaaagcatgcaaacatgtaat

SEQ ID NO: 114238 - DNA, 349 bp, Arabidopsis thaliana columbia
ctttggtgattcccagaagaagaacccagaaatcgatcgaagatatggttcacaacgcttatgattcgtttcagcttctcaaagattgtcccgctaggatcgatgctgttgaatcctacggctccaagctcttcgctggatgttatgacggttctctccgcatttactctccaccggaatcttctgcctccgatccgtcggagctgcatcaagagacttacgtgctagagaagacggtagctggattctctaagaaaccgattgtggcgatggaggttttggcttccagagagttgcttgtgactctctctgagtaaattgcgttacatggacttactaatttggagac

SEQ ID NO: 114239 - DNA, 366 bp, Arabidopsis thaliana columbia
ataaaagagaaaagtgagaggatttggtttttctcctatacatagctagacatgtgtcgtgtatcatgtatttttatttcaacattttatccatggcgttatcatttcaacattttttatttgtttgtttgagacgattacaaatgtttgtgccctttatttttcagtgattgataggatgcaccgttgatggaaaagacccaaaggatctttagcatgaaattttaagattgtgatcgacattgacattcctgagaatttaggaacaatagtagtttatggttttggagtttgtgttttttttctatgaaatttaagttataatgatgattgatcaaagatagaatcatcaataagtagatatat

SEQ ID NO: 114240 - DNA, 247 bp, Arabidopsis thaliana columbia
gcacccgtttggctcaagctatgttcctgcactcagctgcacaacaacagatgggccaactgatattgtatggtctaacatcatcaatccattgggaaatctgttttctcgagggtgatccatatataacaactcatcaataataccacttgcaaatttgatttcaattagtctggcaagcacatcaaacgttgcctctgcggattaacacgagaagtgacagttagctactattttgacttaatag

SEQ ID NO: 114241 - DNA, 489 bp, Arabidopsis thaliana columbia
  unsure (1)..(489): unsure at all n locations
cacgcccgtccnngtctaaacccaagcttnnactccgnngatatagtacccgagccttnncttaaaggggtcaattggatgtggacgctngnngcatcactttgccgcganngatatcncnntaaagggannagtgataccccagctaannntttttggagaaaatgccctatacntnngcagcnnccacnannttctngcnnngagatgnnntatgcctnncttcnntgtgtnntttgaaatattananncggacangcntacnncttcngnntttcccttcnntgaggaacccccggtgnnnggaaagnannaataacncnntttnnnaaagaagnntgctttnnntgaataannnttgccannagaaggcanntttgaaaggggtgctggcannnaattgaagggggaagagatnncagacaganntgactaatcnncagaccaagannaatggaaaagannatggataaagggagannaaatggc

SEQ ID NO: 114242 - DNA, 365 bp, Arabidopsis thaliana columbia
gggaggtctgtttggcttgaatggtttagtaagaggagtaatgtcatctctgcttctggcattgtggaatattcttacaggtttgtctccttctctgacaaatcttagtttcctgattaggttattgttttattgtcttaactatactcaggactagacttctcttgttatagtagttactttggttattatttcaaagtttgaaagttcattaaaaaggggaatgctgttgtggatatgagaaggtcttgcattcttggggttatattccgtttttgacatatggtctttggtgattgcttcaaggatttgcagaaagcgacgtgtaatttcacgactttgataggccaaggagcatttggacc

SEQ ID NO: 114243 - DNA, 240 bp, Arabidopsis thaliana columbia
ctcaaactaaatcttacctcatcgactgacgaccgagccagggggaagcgagatcataagttatttgtgatcccatactcaacactcgaagaagcgtatatcgcataacgttataacctctcattgccagagactttcaggtacatttacgcagccagcaaaacgcattactactacttacttgccagaaatcttaaaccgtctctacaaaccgtgttccgagccagatacctctctttc

SEQ ID NO: 114244 - DNA, 270 bp, Arabidopsis thaliana columbia
ccacctccaaactttccttcccttatttcaaacatctgatcccacggggggcataaatttttgtgaattaaacaaacaacaccttctaagggtattcactaggaaggaatggaaccagatccatagagtgggattcgacactaagataaaaaccggaaagagagaaataacaggattgctacaaccaccttaatccatcatcactggagactacgccggataagaacgcacgaagaactccgcccaaaacgcgtgagattggaagaaaaa

SEQ ID NO: 114245 - DNA, 370 bp, Arabidopsis thaliana columbia
ctttaggcttatagatatgtttttttaaagttctaagttagtgttgtggttgttactcttaatcatggttaaaaagctactaaatgagtgctattcaataatgttctgtttgatttcgatggaataatttagtgtgactgatgttgcttttatgtcgcttatgtattattggtgatctatgtgtaaaacatgtgttgcaggatagtaatgaaccgaagtaaagaagagaacgttgctccgacaatgaaagatgatagtccatttggaaagcttacagaggatctcttgatagagatatttatcagaattccaataacaaattgggaacaagtatcgtgtgttagaaagcagtgggctaatttattccgcg

SEQ ID NO: 114246 - DNA, 365 bp, Arabidopsis thaliana columbia
  unsure (1)..(365): unsure at all n locations
ggggcgtcccacgcgggcnctttaatcttatacatatttttttcaaaccccctaagncanngggggggtggttacacatatttttagtttaaaaacaacnaaangagngcaatacaataatgtacagctagattaccatggaataatatagagtgactgatgtagcttttatgtcgcttataaaaaatagacgatctatgtataaaacatgtgctgcaggatagtaatgaacccaactaaacaaaagaacgttgctccgacaatgaaacatcataatccaactggaaagctaacacacgatctcttgatagacaaatctatcataattccaataacaaattgggaacaaatatcttgtgttaaaa

SEQ ID NO: 114247 - DNA, 210 bp, Arabidopsis thaliana columbia
  unsure (1)..(210): unsure at all n locations
ctcaaactaaataccacctcatcaaccaaaaccancaccagaaagaagcgcagatcataaactgacatcgttcatcccaaacacaacactacgacaaacgcatatcaacataacctcaaaaccccaaaagcccatacaccctcagaaacaattacaccaccataaaaacccattactaccacttactgccaacaaatccaacacccacac

SEQ ID NO: 114248 - DNA, 365 bp, Arabidopsis thaliana columbia
ttcaatccaaaggttcaagactaataacctaaaaggtgcgtatgctaagagggcgtatattcgtttgccagtgatgcacgcgagattcctaaacaaacttttcattttgaaaatttcaggaaaaaagctgaagctgtgaagtggcgtggacatgaatctgtgagaagagggttaagagactccaaggtaacaccagagttcattgcttcaggaaattcaaatgtctcactcactaccccgtcgttcaagaaagaaaagcgctttacggataccaattcagtgatccatccaagctctaagagcaatgtaagtgaggtgaagccaagccgatccaacaacgtacctgctacaatgggagactactt

SEQ ID NO: 114249 - DNA, 350 bp, Arabidopsis thaliana columbia
  unsure (1)..(350): unsure at all n locations
cacgccacgcgaaacgaaaagctttctctacattttttaaaaacacgcacactaacacatttggccttctcaatttttttgttatctaancaagcttacctgactaaatctctttggactccttcttgcgttttctatttactacacagaccaaacaatagagagagactttaagctatataaaaaaagagagagatactctcaaatatgggttagtccacaattttcactaaacctcttcttcttaggattgtttttaggattagggttttgaggtgaggagagcaagtattcaccagtttcatcctttttgagttactctggattcctcaccctctaacgaccaccac

SEQ ID NO: 114250 - DNA, 216 bp, Arabidopsis thaliana columbia
  unsure (1)..(216): unsure at all n locations
ggtacccaacttattcaccactttctcctcccagattgaaaccaccccgggcgcaaataatataatttttgtatatcacaccaaacancccaacancctcataccacacacacccaactcactaacaccccggcaaaaccaatccaaccattttcaacaatttccgttaaaacgattcatggattaaatgaactattttgaacgcttttcaacatt

SEQ ID NO: 114251 - DNA, 373 bp, Arabidopsis thaliana columbia
ttcaatacagctattggatcactgaagaaaacacaaccaaactctacctttgccaattcctctgtccgcgataagagctccaataccagaaatgagtaaaaaaccaactccaatagttcggattgtactccatagctgttctttaaagtgagtcctttctgtggatatcgtatggatcggtgcactagcagttccaaggacaccatcttttgttggttttcctacgtttctaaatgccccaagacctccaaaagtctcttcctcccttgcaacaccagcaatacctaaaagaaaaacagcaaaacatttcccaatattatatagagaaatggctcagaagctgctaatacaaatatgaaagcaaggacacaat

SEQ ID NO: 114252 - DNA, 375 bp, Arabidopsis thaliana columbia
ccaatccggtgtagccaagcttttttctgccataaaggagaatggatatcagttactgtttttgagcgctcgtgccatcgttcaggcatatctaacaagaaatttcttaaataatctgaagcaggacggaaaagctctgccaaccggtcctgtggtcatttcaccagatggcctatttccagcattgtaccgtgaagtgataagaagagcacctcatgagttcaagatcgcatgtttggaggatatcaggaaactcttcccaacggattacaacccgttctatgccggatttggaaatagagacacagatgagctgagttacagaaaactcggaatcccaaaggggaagatattcataatcaacccaaagggaga

SEQ ID NO: 114253 - DNA, 364 bp, Arabidopsis thaliana columbia
cttctatggaaacaacggcatggtagttagtttccagttttggtggacaacttggcgtggttgtgttcaacgacaaactatggtccttgactccttgcattacacaactcaaaactcggaatatacttgagtatatcatatgcatacaattttcaactttttctgttaaatcgattcatggattagatgaactattttgagggcttttcagcattcgattaggttaaacggctgttgcgattattatttgttttcataggagcttatgctatgaacagtaatcatataatcatttgtataaaagtgtctatttctgatctaagcacagtaattcatatttgttaaacccaaaagcaaaaatcat

SEQ ID NO: 114254 - DNA, 328 bp, Arabidopsis thaliana columbia
ttcaatacagctattggatcattgtttaaaacacaaccaaactccaccgttggcaattcctttttttggggtgtgagctcccaatcccaaaatgggttaaaaaccaactccaatagttcggattgtactccataagctgttctttaaagtgagcccttcctgggaaaatcgaatggaccgggccccaaccagtcccaaggcaccaacttttggtgggtttcccacctttctaaaagccccaagaactccaaaaggctctttctcccttgcgacaccagcaatacctaaaagaaaaacagcccaacacttcccaatattttatatagaa

SEQ ID NO: 114255 - DNA, 369 bp, Arabidopsis thaliana columbia
gacccacacgacccaaaaagaaaatcttaagcttttcattacaccccaatacaacctgcagggtgcgtcacaacattatagggggcacaaaaacacacccacaaggggaccctacacagcaacagaacaaacgtaaccactacaacctcaatgctcacacacgccaccgaaactaacaacagtgaagccacaccagatctacacacagggaccacaaccacaccaacaaacacactcatgaattcaacaagacacgctataaactccaacaacgctctcagttactacccacactcacacacataccgaaacatatacaacgaaacctaaaaaaacggaatcagcgcaaagaacccccctgtatctgcc

SEQ ID NO: 114256 - DNA, 330 bp, Arabidopsis thaliana columbia
cacaaagaaattggtaaagcttatcatacttctagatgcaacctgcggggtgctactggtcattatcggctgcacggcgaggcacctactagtggttactactcatctacagaacaagcgtaaccactaacaacctaaatgttctgcacgccatctaaactaataagagtgaatccacacccatctgacatcagggaccacaaccacactgcaatatacactgatgagttctacaagactcgctatataattcaacaactctgtcgttactatctacacttacacacttactgaatcatagattacgaagcctatagtaccggtatcaac

SEQ ID NO: 114257 - DNA, 368 bp, Arabidopsis thaliana columbia
gcgaacaaagaaattcgtaaagctttttatacacctcgatgcaaccggcggggtgcttctcatcattatcggctgcatagcgacgcacccacaaggggatactacacatctacagaacaagcgtaaccactacaacctaaatgctcgtaccgccaccgaaactaatacgagtgaagccacacacatctacaccagggaccacaaccacactgacatacacactgatgagttctacaagacaggcgataaacttcaacaacgctgtcgtgactatccacagtcacacacatacgacataaatagcactcaatccattatttcagaaatcagtgacactaaaacaagttttattgacaataacaatacca

SEQ ID NO: 114258 - DNA, 377 bp, Arabidopsis thaliana columbia
gtttcaaggatactgaggttcttggtaaaggaggatttgggaaagtctataggaggaactttaccagtgtccgagcgtagagatagcggtgaagatggtttctcatgactcaagacaaggaatgagagagtttattgctgagattgcaaccattgggcgtctcagacatcctaacttagttcggcttcaaggctactgcagacacaaaggtgaactctacttggtgtatgattgtatggccaaaggaagtcttgataagttcctttaccatcaacagactgggaatcttgattggtcacagagattcaagatcatcaaagacgtagcttctggactttattatttgcaccaacaatgggtgcaggtcattatccaca

SEQ ID NO: 114259 - DNA, 360 bp, Arabidopsis thaliana columbia
  unsure (1)..(360): unsure at all n locations
agactagngattgtgatgttctttttaaatccggagactggaaaaacggaggcgcaactactgaattcttgtatcaagacctagccaggaatagttgggcttactacactgtgcgagcaatgaaaggtttaaacaagattgtgactggagagctacgaactatacatgagcaagatttgatcaattgtaacaaagaaaacaacggatgcggaggaggcaaagtctagacagcctatgactacatcatgaacaatggtggtcttgactaccgacaacaattatactcacaaagctcttaatggagtctgcaacagccgacacaaagaagacaacaagaatgatatgaacgaacggtatgag

SEQ ID NO: 114260 - DNA, 369 bp, Arabidopsis thaliana columbia
aagaaatattgttattaacatactctttttgaaactattgattgaatagagaaagtggatcaagcatagcggatcaaatgtattcaatggatcaagcgtaacaagtgtagatcaaaataattttttgacggtctaaatatatgtttgaatagtaaaagtcgatcaaataatgtgaatcaaatagaaaatatataatttaaataaaatatcttaaagaatagataaattcccataaatagcacactattaagttttttggacaaaaatagcattaaaaagttttttagacataaatagcactcaattcattatttgagaaattagtaacactaaaacaagttttatggacaataataataccataatttt

SEQ ID NO: 114261 - DNA, 357 bp, Arabidopsis thaliana columbia
gaccgaaaggcttaataatatttcagacatacgaatgtcaagaagtcttgggctactacatacatacatggcttcctttattaatctctttattaaaacattctttatgattattaaggatgtggaagttgtgaagaacaatcttattagcgcacgagacccaagttcaagataccccaagaaacatcaggccaagattgatcctgtgacttcatgagaagaaccctaacccaagcaatccagccttcccatgacattctcttgtcccaaggacttccccattgcaagagcagaagaagccctttctctgcctctctctctgcttctttgaatctcttctttcccaagtacacttga

SEQ ID NO: 114262 - DNA, 400 bp, Arabidopsis thaliana columbia
  unsure (1)..(400): unsure at all n locations
gaccggnacggaacgggcgggtcgacccatgcgctttattataatatagatattggacgttataaattactatagtagtacggagtggttttgaagtttatacaaaaggaagcgtcaagaagtggagcagaagcagtttgaaactatattggggaatggggattattgatattttaatcatgtttgattccatggaatgttgtgaatagcatatgcgtgttgcgaggttcttggcttgaatcgattaaccggaaagtaaaagctttacagatttggttttgcaatttctatattgtcggacgctgagattcgatagatatttcagttcaaatgtactgaaaacaaactaacacttgtgtgtgaaccaaatcgaaatttattttcataattttaaaacctg

SEQ ID NO: 114263 - DNA, 368 bp, Arabidopsis thaliana columbia
atcacaaacagatgattagattttgagttacacaattttatagaggagagaggaaaagggtgtttggcttgaagaagccccagttttcacaagcctctttgatcttctccatagtgattgctctctcttctccattaagcttctcgagattgatgatcgggaaactctccatctctctctctttttttttaaatgggtttcttggcctaactttatgtttgacgcttttgaagtttgatataaatctgatgatcaaagacttggttttatagagagaaaagaagcgcacagaggagctttgagttacttctacgagttatcattctacagtcaatatttggttttttggaccacacacatccataata

SEQ ID NO: 114264 - DNA, 375 bp, Arabidopsis thaliana columbia
gctactatcacaaacagatgacttatattttgagaaacacaaaataaacccgtgggagaaaaaatagtgatgtttataaaaaccccacacatcacaagcttcttcgatcttctccatagagatcgctctctcttctccattaagctgctcaagaccgatgatcacgaaactctccatctctctctctttttatctaaatgggtttcctggcctaactttatatatgacacttttgaagtttgatataaaacagatgatcaaagacttggttctatagagagaaaagaaacacacacagcagctttgagttactatctacgagcaatcatacaacacgcaatatatggttcttcggaccacacacatccataatat

SEQ ID NO: 114265 - DNA, 345 bp, Arabidopsis thaliana columbia
ctactctctattatcctggctgagagggtaaaagtcatgaataaactggagagagaattatattcttgcgttgtcataaaaaagctcttatcttcatctaatgaaacactttccttaatgggtaggtttaaacgacctcaacgagatggatacagatgaagactaaacgcaaactcagacaccgcatttaacttcatgagctggctctactactacgaataatacaacttgtatgtctggggtctctactaattatggtcgtagacgtgattgatatggagcgtggttagtgcacacactagacccattatgtttcataccacaagaggaggccatatacacgta

SEQ ID NO: 114266 - DNA, 356 bp, Arabidopsis thaliana columbia
ggaatttcagaagaagctaggctagtaggtcaggtttacaaacattcatatggacctgatgtctatgtgcacgggggcaccttgcagccccaggcaatgaacagcacactccaaactgctcctgttgaaggtacttgaacgaatgagtcaatcacagaataatacaacaccaaagagatggagtttaagagatgcagtgaagtacctccaacctccgtagataccaatcaagttcactacttaagccatctctcatggaaccatttcgcggtgaaaatagttgttcttcaccagtgtcctccccaaccaaagattgctgtcagagatagctaccaattaagttttgaataataagg

SEQ ID NO: 114267 - DNA, 393 bp, Arabidopsis thaliana columbia
  unsure (1)..(393): unsure at all n locations
aagaaggccgggggcgtcccacgcgtccnattcattcaatgattaactgatactaacgagccagctcctgagaggggggacagtagataatggggggatctacaacagctcaaatctaaagaacctagagactcggcattaccaatatcaccagtgaggtttccttcaaaatagttcgaagcaaggtcaaaaaactgtagattaggaagaccccaaatccctgaacgaatcattccagagagagagatgctacttacacaaagacgaatcacagtcttacatttagcataactctctggaaattgtactgtgaatctgtactgcaacatgagaagatgcgtcattacacctttcttgcacatataacgaggaatctgaccttccaagaagttc

SEQ ID NO: 114268 - DNA, 108 bp, Arabidopsis thaliana columbia
gataaggcaaacattccaatcattgatctatgggacacaaccactggaggagaactggagacattggtatccagacacaacagggaaagcacatgtacgtgcctctat

SEQ ID NO: 114269 - DNA, 392 bp, Arabidopsis thaliana columbia
  unsure (1)..(392): unsure at all n locations
gggggagctatgcgtccgggtttgctttgcagtttggtttaatgtttgggatctctctngnnnggggtgtggcacatggattttggttggtcttaatctaantttcctcattggtttttgtaatctttcttttgagctgaattaggaatctgctactgataggtttggtttgttaaagcgtttctgtttattactgatcatagcaggcttgcttagcctatctgtataagttttatcacatagatttgttgccttaaggcttgcttagcctggcgatttattctgttgacactcttaaactacaggctattgagagaagaagaggagctgggactggaggagacgatggccgagttattgagatcccaactcatcgacaagttggtgttctt

SEQ ID NO: 114270 - DNA, 375 bp, Arabidopsis thaliana columbia
atcttatcaggtttgaatcccttcttttccattagttcaagaacacctggcatctctgcaaacttttggatcctcccgtacgcatctaccagacagttaaagaacacgaggtctaaccttatgtctgagttctcgatgaaacgcaatactcctccaattttatcagctttactagctcttccataagcacgaacaagagaacatagtgtaacacaactcgggaaaattctctctgattgcatcagtctaaataagtattccatttgttttaagtctcctgccctcccaaacgcgtcaatgaccacattataggtgactatggtccatgaataatgatacttctgcatgtattccatcacagcactcatcttcttg

SEQ ID NO: 114271 - DNA, 271 bp, Arabidopsis thaliana columbia
atacttgctaaacctaataatgtgcgcgacacacattacgagcgaggtgcgcatcatacatttgcttgttgatcaaaatctgtaccagaagaagctggatagcaagatcctgcactatcaactccaaagacaatagctcatgaccttgacagaactcgacgaaagaaacgagagactgcatcacatgaacccgattgataatgctgaagagcttccttctattgtatacacttcatcaagtggaccatcttaccacacatggcgaagcttt

SEQ ID NO: 114272 - DNA, 240 bp, Arabidopsis thaliana columbia
gtcgtttgggttgtgcgtgctatcttctccagcatggctaggccccgtggcccctccgacgaataagagagagtccgaagagcggataggagaacacgagagaagagccctgctcacagaagatctaggactgagacagatgatcctgctcgtcgcgtaaggctttgtgatcaagctgaccgcaagagctcaccacgagatcttaagattgcacgttctgaccataatcgtgaggcacgc

SEQ ID NO: 114273 - DNA, 375 bp, Arabidopsis thaliana columbia
atgcgcgcgagaaaataacaccagcttataaattacgcttgtcaaaaagacatcagggcaggactcggtatctgtttctggtgcatataacggggaagctttgggaggagaggaatctacagttttcgatcgattatggcttgttgcgtgagacattatcatggatctagctgttagcaaaaatgtgtgcatataacaagttatgttgatagctgcttgtttctcatatgaggaccacttaaattatcccaaaaagcattacactaaacttgatgactctcccatgttccgcatacagttacaaatcatgtatgagagcgcagaaatattgcgggaaagaagtctcaagttttacaaatgatgccagaaatacac

SEQ ID NO: 114274 - DNA, 320 bp, Arabidopsis thaliana columbia
  unsure (1)..(320): unsure at all n locations
ggaannacgggggcgatccacgcatgcgatcttatcaagttagaaacccttcttttccatcagatcaagaacacctgtcatctctgcaaattttggcatcctcccaaacgcatataccaaacagttaaagaacacgaggtctaaccttatgtctgagagcacgaggaaacgcaatactccnccaacgcgagcaaccaaaccagctccaccacaagcacgaacaagataacatattgttacacaactcttgaaaacnccccctttttgcannagnnnaaagaagnagtccatttgttttaagtctcctgcccttccaaaca

SEQ ID NO: 114275 - DNA, 373 bp, Arabidopsis thaliana columbia
  unsure (1)..(373): unsure at all n locations
aattgttaggatttaaatttaaatccggttttcaaaaatgatcaaaggaggcagttaaaatgatcatgaagcacatgatttatagtgatgattttatcttgaatataaaagttacaactattttctcttgttgcggatttcactatcatcgaaaaagaagtttgcaaaaatattcacatataacaatnnnngttgttaggtacctaattttcatgtatttaccactagaggtgtgctgagaaggaaaaagtggaaaagtaaaaaagcagatgagagggcttcagccttcaacttcacatatattcgtcaaagcagaaaataaaggggacaacttcagagaatataatttgcagattttgaagccttattatgt

SEQ ID NO: 114276 - DNA, 376 bp, Arabidopsis thaliana columbia
  unsure (1)..(376): unsure at all n locations
aaaaaaaactcacctttaaactcatccataagtatagcttcaagagctgcaatctccatttcctgctcctgcttatactctacaagagacacatcataacacccaataattctcaaatcaatctgtcagaaatcaagatcaatcggaatctaattactctcccatctaatgataagcttaaggaatcaaagattcgatgttaaacgaagaaattaagaaacttttgaagtaaattgatcgaactcacccgtcatgatgaccaaatttgacacctttgtcgtggaagcttntgagattgcctgaatatcgaactccacagtgagagtcgcctcgtgaccaagagcgacgtttacgagagattaacctaaaggagaga

SEQ ID NO: 114277 - DNA, 317 bp, Arabidopsis thaliana columbia
  unsure (1)..(317): unsure at all n locations
gtccgagggcacgtcgtcacgcgtgcgagactcaaacctgagtaaaaggaacattctttcagtnctctacttaaggtgccacaatgctgtttcagtagccagcgataaagtcttaatctttgattcattcaaacgcgtctttgtttagtaatgtcagcgcgtgtgtctttaacggtggagtgtttgatagctctgctaccgtatgctgatggtataccgttgattccggcgaggatcacgagtgtcgatggtggcggcagacgaagatgtaataatgggtttagtaaacgtggtccgtttatggaagctccggagtt

SEQ ID NO: 114278 - DNA, 376 bp, Arabidopsis thaliana columbia
atttcatggttgggtttggggagcttccactatagaagctcagcgagggacccatacaaggtgtgttgttagagccgtacgcgtagtagtgtatacaggttcgtattggtgtgttgcacttttggtcctaaactcaactaataatacctcttttctttttcttttttcttttccaatctcttttctttctttaggatctctttagtcttatctatcaaaataccacttcgtatttggggtattcctatcaataaccaaccatacaaagcatcaatgcatcattctcatattcatatatcatacttgataaagaaagttccatattcactgactgtccagatatttattatttgaaaaagaaaaaattgttcaaacg

SEQ ID NO: 114279 - DNA, 277 bp, Arabidopsis thaliana columbia
acggccggaatcgctagttttcgccggtcagccatacggcggagaattagttccagggccttgtacatactgtttcgtcacactatgggagctggccatgcccgaagtcgttaccttaaccacacggaggggggtgcctgttaggaagattgtgcccggagtgatgccggacaaggtttccgttctgtaaggagctgctggatctattaatgccgagtcagatgctgtgatgcttgagactgcaagcttgacacaccttgtcacccttatagaaggg

SEQ ID NO: 114280 - DNA, 374 bp, Arabidopsis thaliana columbia
aggatttccaaaatatgaagatgaggctgaggcccagcatctggaatgtgccaagcgtcttgttgtagataaaagcatccagactgcatacatccagacaatcagatctgctcagcatttcatatatatcgagaatcagtatttcctgggttcttcttatgcttggccttcttatagagacgcaggagctgacaatcttattcctatggagttggcactaaagattgttagtaaaatcagagctaaagaaagatttgccgtatatgttgtcataccattgtggcctgaaggcgacccaaagtctggccctgtgcaagaaattctatattggcagagccaaactatgcagatgatgtatgatgttatagcaaaag

SEQ ID NO: 114281 - DNA, 372 bp, Arabidopsis thaliana columbia
tttaatttttttcatggttttttcacagggcaagcgctggacaacggtgggcctatggttggtcttgtgtacaggagggtttcagggtttgtgccacaagaagatgctctgtttccgtttcttacggtgcaagaaacactgacgtacagcgcactcttgaggctgaagacaaagaggaaagactcggctgcaaaggtgaagaggctgattcaagagcttggtctagaacatgttgcggattcaaggatcggtcaaggatcaagatctggaatctctggaggagagagaagaagggtttctattggagttgaacttgttcatgatccaaatgttatattgatcgatgagccaacctctggtttggattctgcg

SEQ ID NO: 114282 - DNA, 376 bp, Arabidopsis thaliana columbia
ataaaaatatatatctaaattttcaatgtgtgattataatagtatctaaaagacgttatctctaattccgtaattttgaactttggaaaaaacgactcaacatcgagatttcgaaaagatcgatacaaacacaaaatggaaaatgaatgagatcgaggaaaaactcacggaagtagagcctaaaaaggcggcagtgtgaagtactgtgtttccatatttatccggcttgtagagaagtttttctaggtggactttctgtgccatgaacttgaatgctttgagatttttgtgtctcacagctagatggaagactgtttcgttatgtggttgtgtgagtatatcgaaagatgaaggagtcttgtggctaaagaccttg

SEQ ID NO: 114283 - DNA, 265 bp, Arabidopsis thaliana columbia
aagatctccaaatgataaaacccactcctcgaatactctctcgaccagaagtaccacatctcccgtacaactcccaaactttgaatctacactatgacgagaaaaaacttccttcgatacgaaaccaagttctaaaagctagaataacacaattcaacactaaccagcttctcactgagcatccacacatctcagcacttgcccagaaaccactaatcacccgtacaaaagactccaacatcagactagatgatgtacctatcac

SEQ ID NO: 114284 - DNA, 412 bp, Arabidopsis thaliana columbia
  unsure (1)..(412): unsure at all n locations
gtacttnnccggagggacgagggactcgtacccgttcaaatagatgaagatgctcttgttgcaaaatctactaatgctgcgggaggactananaaagctgtgcagtaggtcgaaagagatcttagttcaagacacacccctgggccagcggtggtgaaggagttgcagggacaacatgtcatattgagagactgcatcgaacagctaggggcaatggagacatccagaacaagtcttatctcacatttgagagaagctttacaagaacaggaactcaagctggagcaagtccgtaaccaccttcagattgctcggtttcaatcagaccgaactggtgatctctgcagacagcttctagaccatggtggtagttcacagcctcctgctacagaagaagaagagtcaaaagaag

SEQ ID NO: 114285 - DNA, 397 bp, Arabidopsis thaliana columbia
  unsure (1)..(397): unsure at all n locations
agagattgatccgtgtcagatagagagttatgtgtgcttgctcttagtaaaactagggaaatagatttagcacagtnntttcatctttagtatttttttttattagtaccttnnattcaacataagttaatgtagtcataacaatagaaaagatatatgcttatcatgaacatttttagtcatattattttagagtcctcttttaggatcctcctagctcatttcatagatatcatagagagtcatagaaacaatatnttagaagtttcatatatgtgagaatacttgaatactctatncttttattcatcnatcgttgaaatctaanatcttggctattcttgaactcattgacatgactacgaaccctcatcaatacattcagtgctttttatat

SEQ ID NO: 114286 - DNA, 374 bp, Arabidopsis thaliana columbia
cggaagaaaatgaaataaacaagtcgaagagagtagtcatcgacccctaataaaatccagtgaagaagaagattgagtgagtgagagagagagagagagagaagatgggggttgatttctataaagttcttgaagttgatcgaagtgctaatgacgacgagcttaagaaagcttatcgcaaactcgccatgaaatggcatcctgataagaaccctaacaacaaaaaagaagccgaagctaaattcaagcagatctctgaagcttacgatgttttgagtgatcctcagaaacgagcaatctacgagcaatacggagaagaaggtttaaaccaagccccacctcccggcgccggtggtggctatcctggaggatca

SEQ ID NO: 114287 - DNA, 382 bp, Arabidopsis thaliana columbia
aaaaaatatgcaatcactactcttgccgccggcgagttcctccggcgtatccgccgtggcgctacgggcaggtgtccagcactcatttaaccaccaaagcctctctactcgctccctgccattggttaatccacttctcttcgctccaaagaagaaaaccaccatcttcttataccaattctttgtcgtctacgggttccaaaatggaggatctaaacctaatttcgcaccattcaacgggggcttttcattttccaagttctcctctttccgtttccaggataatgaggtcgacaaagcaaaactcgctcaggttgcaaagagattagagaagacttcaaggtacttcaagaggctagggagtattggtttctgggggcag

SEQ ID NO: 114288 - DNA, 377 bp, Arabidopsis thaliana columbia
ggtggctcaacattaagctctcaggctttgccaaaacaagaagtgtcaacagcaacttctaaaagttacacatgcaaagcaggtgacagagttaaatttgtaggtccttcggcttctgcaatttcttctcttcaaggccagcttatgggaccggccattggttcccagggaaaagtagcccttgcatttgaagacaactgtgcttcaaaaattgggattagatttgataggcctgtacaagatggcaatgatcttggtggcctctgcgaagaagaccatgggtttttttgtgctgctagctcacttcggttagaaggttcttctagcgatgatgctgataaactcgccgttaatgaaatctttgaggtcgcacttag

SEQ ID NO: 114289 - DNA, 378 bp, Arabidopsis thaliana columbia
ggaccgaggatttgcatcggtcagaacttcgctctgttggaagcaaagatggctctggctttgattcttcagagattctccttcgagctttcaccttcctatgttcattcaccttacagagtcttcactatacatccacagtgtggggctcatcttatcctgcacaagctttgatactatactccacgtgatgttatcaaaacttatacatatgagaaacaaaatttcatagaggaatttattcaagataatagtcatattaaccatgttttgaattgagaatgcttccctaataacaactaatccatctatttttgagtattattttataccaaatagaaatgccttagtggaagagatgatatttaaataagaatc

SEQ ID NO: 114290 - DNA, 279 bp, Arabidopsis thaliana columbia
  unsure (1)..(279): unsure at all n locations
cactcgtccgctctnaacctttccccccacctctactaactaaaattttcccaaaaagcgtagggtncaaccttcttatattcagattaatcccccnccnnnnnccactnatcaaaaaacctacctaaaccccccccactaacctcactaccacttttccccttcaccaatcccattctaaaaaaaaatccctcccaatccaaataactactccctcttctcaacaccaaaccaaccctaccctcccccattccatactcaatcactccaaaaccaccc

SEQ ID NO: 114291 - DNA, 228 bp, Arabidopsis thaliana columbia
gcgtgattggaagaacaagagaatcttatatttctagtacatggatgacttcgttgatttagttttactctcgtaatgattcttcgttgatcacagcattttagaaatgccaataaataaataaaaccggcgcggctgaatatatcctataattgtgagttcctcctcggttggggaacccaagagcacttattccaagtcaaattcgatacccattattagccattt

SEQ ID NO: 114292 - DNA, 332 bp, Arabidopsis thaliana columbia
  unsure (1)..(332): unsure at all n locations
tccgtccaggtttccatagagtgaatctcacttcaaggggatcganntgatgggacccgcnnactggaatcgcgatgggcccttgcgagtatttcagagttgtgttgaaagagagcagagaataggttagaggtaccttagagtgcttcgatattcattcaaancctcatcatnnccgacttgtaagaaccgtgagggtttaaaagtagaaggaagggagatannttttcgcagttccacgagttaccatccaatatggctcaaatatgtctttcaacaatagactcgcttagtannttcgttggagtttaccttatcttcagctatagaat

SEQ ID NO: 114293 - DNA, 241 bp, Arabidopsis thaliana columbia
  unsure (1)..(241): unsure at all n locations
ccacctggctgngctactcatatctccgatatcatcaaactccatcacacgactttaacaccgctaggcttactaaacaagaacgacatttttccacacttccaccttctcatccaatgactcaaacttctctcaacaataactccctagaatactttagatttaccacttctgccactaacaacaaacctcacttcttagccgatcaagactctactcattccatgcataaccagccacc

SEQ ID NO: 114294 - DNA, 150 bp, Arabidopsis thaliana columbia
tgaaaacggtgtgtcataagaaaggaagaagcaataaaaagtcttgggtcaagtttctgggcctatagaaaaataaagcccaactaaaagctcataaggtgggaaaacaatataagcccatccaaaagataataaggtgggaacacaaaa

SEQ ID NO: 114295 - DNA, 378 bp, Arabidopsis thaliana columbia
gtggtaacattaagctgaatcctcttgttcttccctaccatggaccctatatgttctccgtagatcttttatctctgtaaatgtctaaatggagatagttatgagttaaacattaagctgtgtttactttgattttatacagtttgttgctggatgtgggaagttttttgaagggacagctgagcagatgtatcagtcgttgtgtgtgactctggctgcattacctaaaccgacacaggtttactgcggccatgaggtaaaaaaatcaacagcttcattatgtcttttgagttcttaactcataaaaatggatgcctataaactgaataatccgctattcatttcttatggttctcagtacaccgttaagaacttgga

SEQ ID NO: 114296 - DNA, 360 bp, Arabidopsis thaliana columbia
gtgaccctcggaaaccacagcttcacatttgatatagctatagcctccatgctccaaacttattaacttgcagcaaaggatgcaacagcaatcagcgcagaacttacgttcaccgcagcaaatgtcacaaggcatagcaggtaaagtctcggcttcgcactgtggcatcaggctccggcatttttcattaccagccttacagaccgcagtatcagatccatcatcacgcattggatcttcatctgagctatacactggtaactgaacctgcttctgaggcaaaacacctatcaaacagagaacaaatcaccatgccaagaaatcagtaacttgttcagaatgttgaaacgtaattcatat

SEQ ID NO: 114297 - DNA, 464 bp, Arabidopsis thaliana columbia
  unsure (1)..(464): unsure at all n locations
gcgatcccactgcgnntccgctccnnatttctctnnatctttctctttctcagctgcnnttctcgannnatcttctagtatcgatctgtcttnnncttcttcaaagtagataaagatggggcccganntggtgagagaatatntcaagcccacccttgtnnctgtgacccaatggaacctnnggaataggtgaagagccctggttttgctaggtgaatgaatagccccgatgagccagtangttcccaaagtatttggttggtcagtccctagagcaccacntaggtgtcatagagttggtatagggtcaagaaaagatgcccttacgttggtgaatgaaagctcaaagtccaagagaagagtatcctcactttctgaagtattcccaatcgaacatggtatntgtaaagtaaccctgggatgacantggaaaaagatcttggcatcacanctttctacaatga

SEQ ID NO: 114298 - DNA, 382 bp, Arabidopsis thaliana columbia
  unsure (1)..(382): unsure at all n locations
aggttccataaaaaacttggtgttgccgacgtgttgccgagtaaggacacgggttttgtctacatattggtgtaacggtccntacaataatgcgttttcaataattaactaaaggttttttggacatatttagtggtgggttatcatcacttagcatgtattttaacaaacaattaacttttcaatgaataaaccccttaatggccaccttaaactcaaagcccagatcagaaccaaccagattttgccacgtggctctggaatataacaatcaatttctaaatgtcttcttttgaacccaaagaaaggctttcacactcagtcagtactcacacaccacacactagttcattttattttccatatacatgctctatagaca

SEQ ID NO: 114299 - DNA, 380 bp, Arabidopsis thaliana columbia
cggacgcgtgggctcaattgcatggtagtaaaaatgaatacgaaaacgtttattgtatggtttcttttggtagcggcggttgttgtagctgttgcggcagagacttccgtggatgacaagaaacaaggtgaaaagcaagtagagataccaaccgtagaaggaaaaaacgacgctaaggatagtctcaataaaggagacgttgagaaagaggaagaaaacaattatgaaattgatcaacatggtggtggaggcggtgctgagttagagaccgtagaaatagatagtgcgtcagatgaggatgtacaaaattatagaggtggccatggcggaggatggaagggaggcggtggccaaggtggaggatggaaaggaggcggtgg

SEQ ID NO: 114300 - DNA, 353 bp, Arabidopsis thaliana columbia
agcagtaaaaactcagatagtctcctttgacctcattaagaaaagcttttaataaacgtatccaagaaaaaacaacactcgatctctcttttgttttcttaacttcactttagttactttttttcaaatatagttcatccgtatctggataaaattaggattgtaaaattacgattaacaagaaagaggtatatttttagattaaacttggatagtatgagtatttaccagccaaaaaccattaaagaaaaagatgacaaattgattatccaaacaaaagcagactctataattagccaaattaattaactaaagtttccacggtcacaacaaaatccactttttcaataatt

SEQ ID NO: 114301 - DNA, 326 bp, Arabidopsis thaliana columbia
cggacgcgtgggcttttttgggtgaagaaagcaaacaagaccttgtaaagattgtaagaatcatctgcaatggacccattactaccatccattatcttttctgaaaatgaaaatgacaaaaatatttatctttaaatttaataccaagaaaaagaaagaagtttcaagaagggtcatcatcatcaaaccatttttggtattaacaacagaccaaacccgattcacctattttaacccaacctccaccatttgaaggctaaattcttattaaaaacctaaagctttgggggttcttatttagaaaaaaaccctggaatttttcaaaa

SEQ ID NO: 114302 - DNA, 370 bp, Arabidopsis thaliana columbia
tcctttttcatgttcagtgggcacattgctaggggcacttacaggagctttgataggtcaatgaaactgagagtggtttcattagaggagcagcaattggagccatttcgggagctgttttctctatcgaggtctttgaatcatctctggatctctggaaatcccatgaatcgggttttggatgttttctctacttggtgagcaacattacttgctctgttttttaagtagctatgaagtttggaatgtggtgattagtgtttcttttgtgaattttttgtgtagattgatgtcattgttagtcttctaagcgggagacttgtacgagagcgcattggtcctgcaatgctaagtgcagtgcaaagtcaag

SEQ ID NO: 114303 - DNA, 374 bp, Arabidopsis thaliana columbia
  unsure (1)..(374): unsure at all n locations
cggacgcgtgggcacgaatattatgatattttccatgtttcacagttccaatatgaggctcttttctatttttccaatttgtgatatttagacaacaaaatagaaatattaatttctagttatagagctactatcaagaaatccatcgctcttataatccaataattctataatcacttttcaaattttaatcattaatactttattccaacaactattgagctcacatgatcactacgctggtttttcaattntctcattgaattattttttgtatcaatgttaattatttatatcatttttaattttgcgactacataacaaagaaaacttaagatcccacactttcttgttacctacatggttgatcatga

SEQ ID NO: 114304 - DNA, 378 bp, Arabidopsis thaliana columbia
gtcaggatttatccaaaagtgcatcatttacagtaaatttacatttattgaatggtgaatatgacccacgtaataaataaaaaatggcatttttgagacgaaaattgttcataaaatataagagtaattggaggaataagatgaaaactagatttttctgcagcttattcatttcatttagcatattcgtttgtattcatttcatcactgttcaacattcatgttacttttgtttgttctttgtcttaacaactatttgcagtctctacaaaacaatatttagttgtgtatttcctatttggattcttgaaatgcgactagggtttataaattgatttgatgtgccttgattcttatattttgttatcatactttgat

SEQ ID NO: 114305 - DNA, 291 bp, Arabidopsis thaliana columbia
  unsure (1)..(291): unsure at all n locations
gatttttgacgactacaaaaccctatcgagctcaactggcattgccgcgctcttctgctattcttaagactnatatttctgcataccactagggtagctttcgttggcgaagaaatggatatggatatggacacttcccctagctactttcacccctatgccctcattgttagggaatcaattccgtcgcttatcaaagaaacactctacattcccacatgaagaaatggtgaattcaaatgtcaacgaaaacatattactgtatgacgggcataacattcatagtccaac

SEQ ID NO: 114306 - DNA, 375 bp, Arabidopsis thaliana columbia
cgcctacataattcgagccggatgcttctccagtcaattggacgactaaaatgttgttcctgacacgattctggcattccctgtgaaagtcatcagttatatggagttgattcttcaacgtagctaacacaccatcgcggtcttttgccaaggaatgactgaatgtggcggcaagcagagttgcttcgtacgctatcttcctcttttcctctgcagactcctgttcgatgttcaataggttcttcacatcatcactgatcatctataagcattttaagaaaacaaattttcagagaaagaacaattaattagctacgaatcgaatgtaaaatttaaattctcaataccataattcgaatgtaccttcttttcacc

SEQ ID NO: 114307 - DNA, 389 bp, Arabidopsis thaliana columbia
gaatcacactaattgtctatcaaacaaatgtagctagtttagtaaaatatgatttggagaagtagaatcactagtggcgccattatgtcatcttaatttgcattgcacactcagatgagctcattgctattattttttggtttggcatatcaagacaaaagcagcatatatccttagaagggtgctacatctgcttcggcgatagaatattttgcttctgaacttgtggaagctagtgctggtcctgttgaagtcactgagctagctgggacatgtgggaaaggaaatgtgccagtaaatgaaacaccagagatagtgaggacaaaggcgtggcatggtaaagatggaaagctgattgaggaagatgaattatcacttgaacgaactca

SEQ ID NO: 114308 - DNA, 376 bp, Arabidopsis thaliana columbia
gtgaacttaaccaagttgaagtatatgacgtctttcactccgacggcttattgctatgcgttaccaaggaccactggaggctcgtggtatggaacccgtatttggggcaaatcagatggattcgagccagaaaacaattcggcttatctaacatgtttagtctgggatacgacaacagtaatcgtaaccacaaaatcatgaagtttcttatgtttatgacaaaacagcatgtccacaatactcagaaatctatgattttaactccagttcatggaggctggttgagatcaatcccgtctggtttttacatagcgaccgcgtgtctttgaagggaaatacttacttttttgctcaagatttactaaaggatgcaaag

SEQ ID NO: 114309 - DNA, 372 bp, Arabidopsis thaliana columbia
cagacatctttataattaattattgagaaaagagaaaaacagaggaaaaaaagatggagagaagcttgaagaagacgaagaacaattataacaactccataaagagcaatcttatgaaagatgatgaattgtttcatgtgattcacaaagttccctgtggagacactccttatgtcagagccaaacatgctcagttgatagagaagaacccggagatggcaatagtgtggttttggaaagccatcaacactggagacagagtagacagtgccctcaaggacatggctgttgtaatgaaacaacttgaccgttctgaagaagctattgaagctatcaaatctttccgtcctcgttgttccaagaattcccaag

SEQ ID NO: 114310 - DNA, 374 bp, Arabidopsis thaliana columbia
gcgatgggggcggttcaagctggggtaaagagaatgatgctggtggtggatctagctggggaaagcaagacaatggtgttggttcaagctggggtaaacagaacgatggtagtggtggtggatctagctggggcaagcagaatgatgctggtgggggatctagctggggcaagcaagacagtggtggggatggttcgagctggggtaagcaggatggtggtggtgatagtggttctgcttggggtaagcagaacaatactagtggtggatcgagctggggaaagcagagtgatgctggtgggggatctagctggggcaagcaagacggtggtgggggtggttcaagctggggtaaacaagatggtggtggaggc

SEQ ID NO: 114311 - DNA, 373 bp, Arabidopsis thaliana columbia
gttcatcacaggcatttggtttctcttattggttattgtatggccggtgttcaaagattacttgtctatgagtttgctccaaacaacaatcttgagtttcacctccatggtaagggacggcctacgatggaatggagtactagattgaagattgctcttggatctgctaaaggactttcatatcttcatgaagattgcaatccgaaaatcattcaccgtgatattaaggcgtcaaacatattgattgatttcaaatttgaagctaaggttgctgactttggtcttgccaagattgcttctgatacaaacactcatgtatctacacgcgtgatgggaacctttgggtatttggctccggaatatgctgcaagtg

SEQ ID NO: 114312 - DNA, 284 bp, Arabidopsis thaliana columbia
cgagaccggccggtcgggcacctcgtcttataaactactttttttttaatccaaacatgcagggaccctcttttttggggatatcccctgttcctaaacgatgcttgaaaacaaaaacaacatccacctgcaaaaacatgtatgaataaccccaattttactcaaaccaacctcaacaacttctggaagcggcttataactgtgtaacttggattgtcacccgggatactgtttcatccgaagactactgggcttcattactgaaggtcaagagaaaaagatca

SEQ ID NO: 114313 - DNA, 209 bp, Arabidopsis thaliana columbia
  unsure (1)..(209): unsure at all n locations
aattatanaaatttgttccaactcttttcataaacaaagacaaanaaaggctcgcgtaaaaaacttttgtttcgtaaaaaacacttccaaagaaccggaaaaaagggtccaattggaccaaaaaaagagcccctccaaacagttcttcctcaaccaaaaaaaaaggccaaacctatatccaaaaaagggacacaaaaaaatactcttag

SEQ ID NO: 114314 - DNA, 356 bp, Arabidopsis thaliana columbia
ctcaggcgctagagtattgtaccagcagaggacgtgcactttaccatgacctaaatgcttatagagttctctttgatgatgatgcaaatccaagactttcatgctttggtttgatgaaaaacaggggagatggaaagagttatagcactaacctggcattcactcctaccgagtatctgaagacaggtcgcgtgacacctgaaagtgtaatatacagctttggaactctattacttgaccttctgagtggaaagcatataccttcaagccatgcattggacctcatacgggacaggaacattcagatgctgatggattcacgtttggaaggctaattttcgagtgacgatggaact

SEQ ID NO: 114315 - DNA, 376 bp, Arabidopsis thaliana columbia
cccgaagtacgtaccatttacgccggttaaatatttcagtattatgaatctatgatttataatccattgggcctctatagatttagcccaaataaattgtaaacagtttgggtttagacacgagagccgtgtaatttttgttgagttgtgtataattaattatttggtcattgtcttattatatagttttaaggaaatcaaaatgaaaaattaaaaacaaaaatgggaccagaaaccattcaatcatgtgattgagaaaagccagctgttttctagtacgaaaaaaaacaagcttcatcttttccatgtatttttctttctttcttttctcaagaacggtgaatccataacttataattgcaaggattaagagatt

SEQ ID NO: 114316 - DNA, 366 bp, Arabidopsis thaliana columbia
taaaaagataaagagagcagaaactccatcagcaaacactattgcgatacggagaagaatagttttagaacttgggttggcggctatagaatatgtgaaacaaacctcaggaacttgtctcatgtgttcaggaaactggttgagctgttgtccgattcttgccacacggccaagttgattgcacgagattgcgtcaaaaaagtcatccttgttatatgcaggctgcaacaatcaaaaaacagatatgaaccgctgtttgaaatatcatataaatcattaaatatgtcatgttaagagcttgaactacatctcgctgagatttaatcaaacttagaaaatacatgtaccttaccttatgcgtttggc

SEQ ID NO: 114317 - DNA, 469 bp, Arabidopsis thaliana columbia
  unsure (1)..(469): unsure at all n locations
ccgtccgnncgtcagataccctttgagttatctgtatttannacagccgctnnngaaagtaggtgctgtggcggannggaaacttcttagtacttagtganannaatgtntnnctagcannngaaattgggaggcannngagaaactgnnaatgaanngctagtnntggccattannttccggnncaaacaactctnttctcaagacnattannagcgagaggggtcgttctcgacttgggctgatctgannagcttgagttgcagcttttaccaaggggtccggtttttgctttctgacnncagaaacttgannagctggcgaaagcgcgaagtcnaagcatttgcgatgaacanntagctcaaaaaaggggactcnnttctatggcttcnttcctcttgaaatcccagctttgagtnatgctcatngggaatcatnccaaaggcttatgaagcttttgttggtctct

SEQ ID NO: 114318 - DNA, 379 bp, Arabidopsis thaliana columbia
cttttgtttcgaagccatggaaactgaatctgatgacgccaccattaacgtcgtcaaagacatgagagttcgattagagaatcgaattcgaacccaacacgacgctcacttagatctcctttcctcactccaatccattgttcccgatatagtcccatctctcgatctctcactcaaactcatctcttctttcacgaatcgacctttcgtagctacaccaccattaccagaacccaaagttgagaagaagcatcatccgattgttaaattaggaacccaactgcaacaattacatgggcatgattcaaaatcgatgcttgttgattcgaatcagagagatgctgaagctgatgggtctagtgggagtcctatggcgctt

SEQ ID NO: 114319 - DNA, 360 bp, Arabidopsis thaliana columbia
  unsure (1)..(360): unsure at all n locations
ccgtccgccgagaaatcacacaagtgagggttgctcttccctatcaaaatanaatgcataacgggatgggcattgtaaaggagagatacanttagagacaatacagtgagaaatttgtaatgtaacaccaatgaaaagaaccctcttagcataatctgatgccaaatctttgggtttttgaacatttttaacagatgtattcaaatgcgtcaactagttatgagtcataacaaacagttaccttcatgtactgtatatctagttccttggctcctacatgtgcatccatctcaaaaagctcatagaatttacccatctgcttgccacaaaagaagaacatttatcctggaatctcccatc

SEQ ID NO: 114320 - DNA, 198 bp, Arabidopsis thaliana columbia
agaaaaaggaccgttccaagttggtgatggggaagcttcttcacatctggaacttattatgaaaacatataattaattatgaacgattagctgtttaagggctataaaatcagatgatcgtttaagttttatactagcaaaaaatttcatcgatacaatatcaataaattacacaatttggaggtcgataccacaaaa

SEQ ID NO: 114321 - DNA, 373 bp, Arabidopsis thaliana columbia
gctgcttcttctgcccggtttttgctggaagaaacacctaccccgagcattgcagttccagaatcttgcatgactgccttcacatctgcaaaatctacattgactagtccaggtatctgaaaaagaacaaaatatatactgtttcctcagaatctttggggatcaatcaataagcattcatcaaccaacttgttatgtgctttattcaatacatagactcacagtaataatatctgagattccttgtactccttggcgtaaaacatcatctgcaagaagaaacgcgtcctgaagtggcgtctgttcatcagcaatatctagcagacgatcatttggaatcacgataagggtatcaacattcttttggagcttt

SEQ ID NO: 114322 - DNA, 347 bp, Arabidopsis thaliana columbia
cagagatttacagagatttgctccaatattttctataaatatcataattgatctttagttccattcacaacatccaaccattccaaaattttctatacatttttttctttttcttaactataatgcctcgttctactggatattctaacgaagaagataagtttttatgtcaagtttatatggatatttctcaagatccaatcatcggtgtttaccaatcctctgaccatttttgggatcgcgtggcagaatctttcgaaaatagaaaaaatccaacttggagtaaacgttcaaaaaaatctctccagtgtcgattacaaactattgagaaagctagcaaaaaatta

SEQ ID NO: 114323 - DNA, 377 bp, Arabidopsis thaliana columbia
atgaactagagaattgaagacctaaacgaagaaacagagactctaatctctgcacttacttcagacaaagattgcactgggaaaaatatttgcaagtgtcaacgatgtgtggcatactcacaatgatcttcaagctgacctcagtctccagagaagcttcaagcctcaagacaccgatatcatcgatgcttcgttccctaaatgctgcaccacttggctcaaggcgcttacattcgcactccttcatagatcaaaacagccttctcatgatgatgatcatcctcttctttctaataatccacacgttcttgtaccctactttgagatagatctctattattatagcgaagaccccgaccttaccaaggtctcatcat

SEQ ID NO: 114324 - DNA, 376 bp, Arabidopsis thaliana columbia
ctctctctctctatggcttcgttatcttcttctcacaattggtgatatgatgttttcttgagcttcagaggggaagacgtccgcgtaacattccgtagccactttctcaaagagcttgatcggaaactaatcactgctttcagagacaatgagatcgagaaaagccactctctctggcccgatcttgaacaagccatcaaggaatccaggatcgctgtggtcgttttctccaaaaactacgcttcatcgagctggtgtcttaacgagttgctggagattgtaaactgcaatgataaaattgtcataccagttttctaccatgtggatccttcccaagtgaggcatcaaatcggcgacttcggaaagatctttgaaa

SEQ ID NO: 114325 - DNA, 338 bp, Arabidopsis thaliana columbia
  unsure (1)..(338): unsure at all n locations
tataaccaatgctttccaatactctcccgaacaaactaaacgaggtgtggaaaacacaatggtgacgtcactaacccanancaaaccaatgatctacataaggcctacgacataaagctaaatcagcgcgtcgtggaatatcgtttgaatctaaagttcaattaactacaacttgtaatatgaaataataatgtacaaataattactacacttaaaggaactgatttgaaatcatctttgtattaagacttctatcgaacaacaacgaacgtcgtgtataaacaattcatgacacatcacatgaaactctttcctgaataaaaaatctataatacttt

SEQ ID NO: 114326 - DNA, 317 bp, Arabidopsis thaliana columbia
ctggtctttgttcacaggaaaaacgtaatggaaaacaatgagtccaagcaagaaccagactccgcagatgatcaaaagaccgctccgttgatcgaagatgagatctgtaggagcataagtctgtatcatgagagctctctgtgacctgcaagatcctgaaactaaggaggtgtgatgatctgatgatgaggaggtttactggagctcgtgacctgacattgaaaaagctttaacgatgtttctaaattatctgactgtgaagagaagcattctgatccatgggcacataccacaagcccagattgataatgatctat

SEQ ID NO: 114327 - DNA, 355 bp, Arabidopsis thaliana columbia
catagtcatgtctaatctctctcactcctacatcaattaataataacctatcctactatgggtcaattcctcagattaatccataacggagggtcttagaatccaacatcgaccatgacgcatgagatcttataagccttccctcttctcctcccacaacaactggcacgtctctctccttcgctctctcccttcttctccccaaccaggggcgctgctctactattattcacgcgccgttcatggcttctccgctcgtatctcccctatccaaaccgccgacctacgtcgtcatccttcagtcatcaacgttatacctgatcaagcgcgtgagatccacacaactaacacgcct

SEQ ID NO: 114328 - DNA, 376 bp, Arabidopsis thaliana columbia
tcccacttttggattacataagggtaaatatttctttaacttttcatggtaacattttaccagggaagccttaaaccaaccaaaaattcttttggcaaccatatgccttttcaactaatgaggatttggacctctttttttttttctttttttttttttttggggcacagccccaaactaatgaggatttgtacaaaagctaaatgaaaagagctacaaaactaagcccatacacatatatctcatgaagccactccagatcaccatatgctacatcaaactaagaatggttttaattaatatatgggcctcagatgaggaaacaaaagcccattaatttgcttcaatattggtttacccgtttattctacatgcc

SEQ ID NO: 114329 - DNA, 377 bp, Arabidopsis thaliana columbia
atcgagtttttaattcatgaccagaatttcttgtataaactaactactcgtcttgtctcccacgtaatagaccagcagggtgctatgattataccattccaaagaaacccataatgcactttggtgggttgtgtagatttatatatggtattaagttaatgatatgttttatgaaaaaaaagagagttaatgatatgttaattaagtgggttttgtttatatagttgttgtgtacatttatctcaaatattcaaacatacatatatgatgttttgtacaaaccttttttaaacgcatttatttaaagagcactaaaacatttgttaatacaacatttggcaaaccctgtagaatctcttaaacaaaattacaacttt

SEQ ID NO: 114330 - DNA, 349 bp, Arabidopsis thaliana columbia
cgagcacagttacgagcgaccaatattttgtttttttttgttaaagaactagcgaccaagagtgcaagatcatgaaactatacagaactaaaatgatatagaattctttttatggctggtttacgctaaagatgtgcccatgaatgaaatctataatttatcaacaatccataatgcgttgtgttaaaaaaaaaatatatgtgattcaggcttctccaatgtgtattatgctatgcatgttcacgacaccgcaaaaacactctacttgagtgatatggaaataagtatttatctatattatatatgatatttcttaaagagtacttaattatataatggttttggatat

SEQ ID NO: 114331 - DNA, 375 bp, Arabidopsis thaliana columbia
  unsure (1)..(375): unsure at all n locations
atcatcaccaacaacaacgcctgagagaaatcgatttgaaactcgncggggatgtttttgtgaggaagaaaacgaagaagaataacccagtgatcgtcggttactcaattncgnncactgaaggtttcgcctcagagctaatggcaaagctagagagaggagaaatcgatcaaaccggtgagttaaagcaaacccatttcgtcaagtttcatttttcgccaatggcgtccaagttcatgagaagagaagacgttgagctaaacataaaggagttaaggaagaaagtgctctctttaacaacgagtggcaaaaatgcaattatcttcactggtgacttaaagtggacagtcaaagagattacaaacaacaacagtg

SEQ ID NO: 114332 - DNA, 331 bp, Arabidopsis thaliana columbia
  unsure (1)..(331): unsure at all n locations
cacctgcaccgaaatttccggaacgaccgcacgcgatccacgcgtccgctttattaaaaaaaaacctctttccttggttgaattcgaactatttaaaattccttgacttcatagaaagaaaagtatatataggtactcttggcaaatgtattatacgcgatcctattccattttcctacacgaaattatgggagagcggttgacaaaaagcggaaaccccatacagtatctctttcttgaagtgttgaatgctctcaataattcatttacatatgtttctctaccctgtaaaatgccactccttttctgaataaaatctttctttccgntc

SEQ ID NO: 114333 - DNA, 322 bp, Arabidopsis thaliana columbia
gagccaccaaatagaccaactcgcgagcattcagggagcgactaaaccggtgcaactaaattttttgcgtttgttctcctgatacaacataccccgggcgaaacactgggggttgatgcgtatctggcaaacgaaaaatgcattcttgctggggttatcacaaccttgctcggtctcatggttgtcgcttttggcatcacaacatcaaaaaacaccaatccttcgaaaaaattcccctgtgcgataaaacagccccacgcgttgaacagttggccctactgatcaagagactggaaatgtctcatgaaactctctgacttct

SEQ ID NO: 114334 - DNA, 319 bp, Arabidopsis thaliana columbia
  unsure (1)..(319): unsure at all n locations
gagccaccaaatagaccaactcgagagcattcggttagagactaaacggagggagagagatttgatgcgaaggttcncgcttctacaacagagcgtgggggatccacttctgatggttccatttaggcgcatcggagtgttgaggcttggcgaaggagagcagccagaaatggaggatgcaatggaggttttgaaggtagagatgattaaagcgatgaagaacgctgatcaactccggtgtgtgacggttgggaaagtggtggaggttctgaatccacggcagtcgatcaagctgctaagagccgctggagagttttat

SEQ ID NO: 114335 - DNA, 371 bp, Arabidopsis thaliana columbia
gaagcttggtcgcaaaagtgagagtgtttctcaatctcagagctcatcaggattggtttctcttttagaaatgatgcggggccaaatggagatttctgaggccatggacatcagaacaagacaagggttgcttaatgccctagcgggaaaagttggcaaaagaatggacagcctcctggtgcctttagaattgctatgttgcgtgtctcgtactgagttctctgacaagaaagcatacttacgctggcagaaaaggcagttaaacatgttagcagaggggctcattaacaatccagttgttggatttggagaatcaggtcgtaaggcaactgacctgaagagtcttctgctaaggattgaagaatcagagt

SEQ ID NO: 114336 - DNA, 370 bp, Arabidopsis thaliana columbia
aaacaatcatgtggctttccttcttaagacccagagatcgattctccttagccgaactcaggtatttgactgaccagctgagaaagattcagatagtaaacgaggctaataaggatctcgttatcgaggcactgagatcgattgcggagatattaacttatggggatcagcatgaccccttattctttgaattttttatggagaaacaagtaatgggagagtttgtacgtattttgagggttagcaagacagtaacagtttctgtccagttgttgcaaaccatgagtataatgatccaaaacctaaaaagtgaacaagccatctattacttgttcagtaacgaatatgtaaactatttgataacatatac

SEQ ID NO: 114337 - DNA, 369 bp, Arabidopsis thaliana columbia
gttttgcacccatatctttactctgtaacccatgcatattcaccatgtccctcccacttaatgacatgtcaccattttgggaggacaattggtttgtcttctcctgccttgagaagctagctgccatgttgttgctgggcaatggatgcgggcgtaaaataactggctgaggcttagatggctggttccaaaactgatgttgcggagctgaaataccggatggtgagtcagacatcataccagaagaggaactctgctgaggcgagctggatgccaccagaggctgagaagcagacagcatacgttgatcaaagtcactactttcatctctttctttcacttgaggggtagacaactcagaagatgaat

SEQ ID NO: 114338 - DNA, 362 bp, Arabidopsis thaliana columbia
cttttgcacccatattttcactttgaaacccatgcacactgggcacgtgcgacctacttagttttttgggaccaacaacccaagacaattggattgtcttctcccgccacgagaagctacctctcatgtcattgccgtactatactttcagccaaaaaataactgacacacgctgaaatggatagatccaaaactgatgatacaaagctgaaataccctatggccaatcacaacatcacaccatgaataacaactctcctatacgcgatctgaatgccaacaacacctgataaacagacaaacacacctaaaccaaagacactactttaatatctcaccatcacttgacctgtacacaactc

SEQ ID NO: 114339 - DNA, 378 bp, Arabidopsis thaliana columbia
gtaatgaatgctacaaagaagatttaaagttaaacaaatttaaatcatgaaatcgaataattaaataaaatacaaagaaaaaggaaaaaaaaataaaaaaaaagggagggagacaagatgctgcgatggttcacgtgccaatgtgccttttacttttcatcaactagttttctttttaattattaataaatcaactcaatttcgcaattttatagttagtgacgtcacttctctctcctcacagagtcgagtttctctcctacgctcttcatttcatttcatttgatagagagagagagagagagagaaagagcttcgtcttcttcatctccatcattatctccattgacattgttctcaattgcgaataataatcat

SEQ ID NO: 114340 - DNA, 373 bp, Arabidopsis thaliana columbia
cttttaaattgttagttcacttacattaaatttacctaattttgattggtcagtattgaaatttgatgtctttgttcttcaggtttcctttgtgttatgcacagtacttggattagtccaattagttgcgtatgccgtgtattacagatcgactcagatgtttgatgagctcggaatacaattatggttgtgtgtttgcttttggttttgagttatgtgcgtgatttgttatagatatttgtatttttgtgtcgatcaataatgaatgagtcacatttacagacataaatatcagaaaaatagaacaaatacacacaaatgcaagaaaaaaaactcccaacgattgaaaactaacgatttaataaatatagtt

SEQ ID NO: 114341 - DNA, 377 bp, Arabidopsis thaliana columbia
cgccatcttagaaaagcgttcaacaaccacaaagatggaatccttaccagtcctagtcctaggcaatcctaccacaaaatccatagatatatcattccaaggatgcaaaggaataggtaaaggggtatacaaaccgtggggttgaaccttagccttagcttgcttacaagttgcacatcgttcacatagtcgctcgacatctcttttcatgtgcggccaatggaagtgttcttgcattaccttgcacgtcttagcaactccaaagtgtcccattaagccacctccatgagcttcccttaaaaataattctcgcaaagaagagtgaggcacacaaagtctattttcaaagaacaaatacccatcatgtcgataatatt

SEQ ID NO: 114342 - DNA, 215 bp, Arabidopsis thaliana columbia
aaaaaaaaaagagaaaacagcctaatactaattattgtatctacatcaattcttatccattagattctaatttcactctatttagaaacattttaaaaacaaatttcctggttaaattaataaggtcatgaaaaggatttcgattttttcttattttaataatataatggatttgcctggaccaatacatgattttcttttagtttttctggatc

SEQ ID NO: 114343 - DNA, 374 bp, Arabidopsis thaliana columbia
caagatggggacaaggagtacgtaaatgggtcatgtcccattatccaacctcaattgcaggagctccgaaattgggactgtatgacatggattttggattaggaaagccctgcaaaatggagatagtgcacatagaaacaggtggttctatcgcattctcagagtccagagacggcagcaatggagttgagattggaatagcactagagaagaagaaaatggatgtgtttgactcacttctacaaaaggggatcaagaaattcgcaacgtagcagcccctttctcatccaataacttgtagcaacgaaatgattcaacacaaaaccgaagttgttcagtcccacgaatcataacaagtctatccgttccaccaa

SEQ ID NO: 114344 - DNA, 410 bp, Arabidopsis thaliana columbia
ctgagcaattccggaacggaccccacccttccaagtgagttctcataaaatgagagggatggtgagttttgccgttagcgctgtctatgctgctttactctgacagcagactcatagctacagcggccatcactagggttgaggatgccaaaacatactacttatctcctccctctggctcacatggaactcctacatcacacacgcctccttcttctaactgtggaagtccaccttacgacccttctccttcaactccttctcacccttcacctccatcacatactccaactccttccactccatcacacactccaacttcacacactccatcacacacgccaactccacacacccctccttgtaactgtggaagtccaccttcccacccttccacgccttcacaccct

SEQ ID NO: 114345 - DNA, 382 bp, Arabidopsis thaliana columbia
caaaggagcaatcactggatgttatggaacctgtcgcacaaaaatcaacgcgagttcaatcctcttccagaggattgtcctccgctacctcaggaatcacctccccctctccctcctctaccaccttctcccccacctccatcccctcctctcccgccatcatctctgccaccaccgcctcccgcagcgctgttcccacctcttccaccacctccgtctcagcctcctccaccaccactttcacctccaccttcaccgccgcctccacctccaccgccttcacaatcattaacaactcaacactccatagctagccatcatcagataccatttcaaccaggatttcctcccccaacatatcctttatcgcatctaacatacc

SEQ ID NO: 114346 - DNA, 361 bp, Arabidopsis thaliana columbia
  unsure (1)..(361): unsure at all n locations
cctaaaataacttttacttctttactataactacacagggacaggggattctctgttctttgtgatttncactcttaacacgtatctgctatcaacaactccctattctaagaaaaatgacgcatcataccaagttgtcctatcaaatcctaagagcccacctaccaacccactcgaatcacgctttgaatcccaccaagaaaaaaccatatgaacttctttgactcactacaacaacaatctatcaagaaattctcgacataccaacctctttctcatccaataactacttgcatcctcaatgactaaacacagatacctatttgtactccaccacaaaacataactggcatatccgata

SEQ ID NO: 114347 - DNA, 377 bp, Arabidopsis thaliana columbia
gttacgttcttacacttctccctgatgtctttgtgttcttacatatttttctgtttcatctagaaattgctgttgaaaactaaatcgattgaccgttcgatggtgaagttgacaaagagaataggagggcttgtgctgcgattggcagcgtttggtgcggctcttgccgcattgatcgttatgatcactagccgcgagagagcttccttcttagccatctcccttgaagctaagtacaccgatatggcagcgtttaagtattttgtaatcgcaaacgctgttgtgagtgtttacagttttctagttctgtttcttccaaaggagagtttgctttggaaattcgtcgtcgtcttggatttggtgatgacaatgctgct

SEQ ID NO: 114348 - DNA, 383 bp, Arabidopsis thaliana columbia
tttaaactttatccatgtttttttgttaactcatgaattgaaagagaacaaccaaagtgaatgtagcctgataaaacaggatgaaactattgaaagattcaaactttgtttacagaatcatccttcttggccacttcactactttccaacggtggtaaactctgcacaaaagtaaaaagcaatcagattacaaatctctcatgggcaattcatcgaacaccttatgtgcattacaataaaagagagatcacagagccagagaacgaaatgaatggttttaaaccgatcacgcttatgggcattatcaagaacgaagaaagtgagcaaacctaatacatttgagaaccctaacatatgtacagaaagagaaggtgaagcttacg

SEQ ID NO: 114349 - DNA, 372 bp, Arabidopsis thaliana columbia
gatggatttagatgagacgggtttacatagtagaacatgtttggatgagacgagtttatatggtgctatgagtttagatgggatagatcttgataccacaggtgtattcttaaaattaaatcaaattacaactatacaatacaaaacaaaacaaacaataataacataacaaatacaatttcaattttaaatttttagttacaaaaatacattaaaattcaacattatattataagtattaatcttatttgacatgtctaaatgttattcttctttggtacatttaaatgtataattttatttgtgttgttactaatttacatatgttccaccggtaaaatctgaaaacaccaaaagtttcaattatataac

SEQ ID NO: 114350 - DNA, 371 bp, Arabidopsis thaliana columbia
tttaaacccagttttcaaatttggtttttggaagctaacttattgttggaggtggagagatatggctgactttgatgaatatatggctgatgagtatgacatggatgatctcgaggatgatatgaatgccgcgtttgatggaagagatatcgatgcttctgattccgaagtcgaagatttcgatcaattgaacaaggctgcagatacttctgctgctcaagcacggaatgggaaggatattcagggtataccgtgggatagtcttactcttactagaaaagattacagaaaaactaggctagaacaatataaaaactatgaaaatatacccaattctggtgatgaatctgccaagaaatgcatgaatactg

SEQ ID NO: 114351 - DNA, 374 bp, Arabidopsis thaliana columbia
  unsure (1)..(374): unsure at all n locations
gacccacgcaaataaggaaaaaaaatcgagtacctgtatcttcaaatgcattgctatattacgtcatatcctaaattcctaattatgttaatcttgaaatccaaaaaagaaattattaactcacctaaacatcagcacaacaaccacaattgtcattctttcggaatataaagctaatccgccatgatacaaaacccaacaagaagatgatgctccatgcgataatgtttgtggtttcggaactcattttgctcttcacaacgtatcacaacaattgttttcttttttgctttttaagtcaaatgtgttcgtgttttaattcttcttcttttctcgcacaattacattttatatgaagttacacnaaattaata

SEQ ID NO: 114352 - DNA, 368 bp, Arabidopsis thaliana columbia
gttgttctttaacaggatcgatcctttgatgacgaggcgaccaattgtgttgaattgattctagccttgggttcgaaccgacgtggtgttatttgattattatatttggtttcagtgtcatacactctacacgagcctccacttcaaatttaaaataacaaatctttgttaggtcataattgtctagctaatataacaatgctactagcagaatgtatgtactacataatcagattttatatattcttgatattctcttacagatttttgataacaactgattatatgtaatatatgaagtttagtgtcaacgaaaattatgataattttgttagaatcttgaaaaattaatacaagttatttacata

SEQ ID NO: 114353 - DNA, 209 bp, Arabidopsis thaliana columbia
tctcggcccgaattcccggggccgcccaacccttccgggtggccccgttaatttttttttggcaaccccacggatctctcttcgaatctgctagatctggtccttttcttacatctgtattgggaaacctctgatcggaagggttcgtttacagatctaccgatacgagtttcgcagtatttcccagttccgacgtatgctttggtttc

SEQ ID NO: 114354 - DNA, 377 bp, Arabidopsis thaliana columbia
  unsure (1)..(377): unsure at all n locations
cacaacaacactcacaaattcttttaaagctcacagacaagggctntgtgtggtaatcgggttttcggacaatacaganctctaataatggcgggtaaaggtgaaggtccagctatcggtatcgatctcggtacaacctactcttgcgtcggtgtttggcaacatgaccgcgtcgaaatcatcgccaacgatcaaggcaaccgtaccactccttcctacgttgctttcactgacagcgagcgtctcatcggggatgctgccaagaatcaagtcgccatgaaccctaccaacaccgtcttcgatgctaagcgtctaatcggaagaagatacagtgatccctctgttcaagcggataagagtcactggccttttaaggt

SEQ ID NO: 114355 - DNA, 153 bp, Arabidopsis thaliana columbia
ccacttacctgttatagcatcatcaagaatttaaccggtctaacaatactcaaatcaagaatttcatataactggtgaattaagtccacgggtacctgtttttcatggtaccatggcctccaagctgtcttgatgggtaattcgagtgcgttt

SEQ ID NO: 114356 - DNA, 355 bp, Arabidopsis thaliana columbia
  unsure (1)..(355): unsure at all n locations
tgcatcttgtattaaagaaaaaaagtaaaaaaagaatgctgtggtataacttctttactaggtgccgacgaaaaaaaaaaacttcttaactaggttttatgagttcaaaactagagtttcttgacaaggtttcacatgttccagaagctttagttttgtttttggatgaagtttgaaagattcaaaagcagtgttgtaaaaagcggtctagacggtcgtttatatgccgctaagcgttcagttgacgcctaaataatcatctcgactgcctaaaataacataaatttcgntttagtatattttttttatttttaactaatattgcttaaattttataagttttacttctacacat

SEQ ID NO: 114357 - DNA, 383 bp, Arabidopsis thaliana columbia
caaatcttagtggagagagagagtgacatcttgtttatattaccaaggcattgaactcagtttatcgaaatgctccaggatgaacatgatacaagcttgcctcagcgacatcgcatggaatgcttctgatagctcgtacatgtctcctatactttccaacgtaatatcctttcatattcaaagtaaccgtgtcagatttcgttaagtactacgcaaaccacatcatcactttacattgtgatataattctggctcacctgagcaattgtgtattcacagagtcgtttcaggccctccaagagatactgatccgctgctcttagaagatcttttgatatctcatttgttatgtcgacagatccagtgtatataaacctgaaaat

SEQ ID NO: 114358 - DNA, 243 bp, Arabidopsis thaliana columbia
agcttggagatatcgagaatcttgaaatcgcgttaaacttgagtagcaatagactcactgggaagattccttcaaagattgcgtctctcaacaagctctcgattcttgatatctctcacaacatgcttgaaggagatcttgctccactcgctaatattgagaatctagtctctcttaacatatcttacaatagcttctctggttatcttccagacaacaagcttttcagacaattatcttctc

SEQ ID NO: 114359 - DNA, 247 bp, Arabidopsis thaliana columbia
  unsure (1)..(247): unsure at all n locations
ggagaacaagagacatagtcaagtcctgcttcagcaaagaatcccacaggagatggatctcgttcttggtctccacatatcccaaccttgaggctaggcctagctgctcgtcctttttctgtcgccatcttgatcaattgccctacaccttgctgatcaagaacctggtccaaacacaaaaaaatggctatcaagattttatcctatggatagagagcaaacgaaatggtngtcattatacctcaaa

SEQ ID NO: 114360 - DNA, 370 bp, Arabidopsis thaliana columbia
aaatcacaaaaatgtctttttctgcggatgctctggagggtggactttcgtctcttaaattggccgccgacaagtaccgatcaatcttgaacgatgaaaaaacgggaaacatacggtggagatacggtggtcctccgattttcgacaccgtgaacaagcttttcgaagaagaaagaacccatgtgtggccagaaggttcgttagaagagacagtgcaaaacgcgatcaagtcatgggagatggagttctcacataagatccgtttacaggacttcaagactataaaccctgagaagtttaagctctttgtcaatgggagagaaggtttatcagctgaagagacgcttaggcttgggagttacaatgcttt

SEQ ID NO: 114361 - DNA, 383 bp, Arabidopsis thaliana columbia
  unsure (1)..(383): unsure at all n locations
gtgcaacacccacaatgcaaacatctgattcatcaacattcatatatcggaaaaaagagacattcttcgagtttagtgggctaataaaagtgttttgttacctctaggattcacagattctgatgtatgggccattgctaatctacaaaatggtgtcaaaagtcaacaagggaccaatctcattaagaaccagatcccctataaacatttgcgatctatgtgggatcatttaccttgattcttcaattccagaagagagcgccgaatggagagagctgaaagaagtgactcnttgtgaaaatgacagcgaattctacaataaaactggagagagaaacagggagagagggtcctataaaagaggacgctttcttgtgatgttg

SEQ ID NO: 114362 - DNA, 361 bp, Arabidopsis thaliana columbia
ctcaaacaaagtgaaacattcagtgaggcaaagtaagatcgatataaaagagtcgaattgttcataatggtcttataaatgaaacatccaatgatacaaagtagaaaaattatagagtacaattttaatcatcttatattattggttgaaacttaaaagataaagaaaatgataaaactaatgacgcaatggaggaaacttgccaatacaaatgcttttgaagattctaataaggtaagctctgccaggataaataagcaagaggcacgtatcattaagtgttctcactgccctgcaacaatctctatttagccatcggaaatctgcgtcgcctgccgctaatctcaatgcatcgaaacat

SEQ ID NO: 114363 - DNA, 339 bp, Arabidopsis thaliana columbia
gacaaggactacatgcttagtcatagaacagggtcaacagaaccgtctatctgtgacaggttcagcttttagatatactctgctcgttaaatcctagtatagcatctgcttacaatctgagctcgttcaacacttagttcccgtgtttccagttttagacaatggtggaaaatggttcatccaggtttcagaaaaaatatggatagaaatgcaagctagatgtcagaaagtatatcgcacatgcttatttaagtaacaccaactctcactgtacaaaactaggtagggagatatgcaaagtagaatttggaagtctgaccttcctgctgcttgatccac

SEQ ID NO: 114364 - DNA, 305 bp, Arabidopsis thaliana columbia
accgtccggattgtggtccacgcgtcgacggactatctctagtttttaacagccaacagaaccgcggtgtggacagtagttgtggatatacttctcgtaaatcctatatagcatctgctacatcgactcgtaacactattccggtttcagtttagacaatgtggaaaggtcatcagtttaagatatactgtgaaagcagctaatgcagaaagttaccgacatgcttttaagtacaccaacttactgacaaactagtagggatagcaagtcaatttgaagttgacctctgtgttgaccattcttat

SEQ ID NO: 114365 - DNA, 362 bp, Arabidopsis thaliana columbia
acccttccgatcggagttttagatactggcgtttggcctgaatctagaagcttcgatgatactgatatgcctgagattccttctaaatggaaaggagaatgtgaatctggctccgatttcgattccaagttgtgtaacaagaagcttatcggagctagaagcttctccaaaggatttcaaatggcgtctggtggtggtttttcgagtaagcgtgaatctgtttctcctcgtgatgttgacggacatggaacacatacttcaactaccgccgcgggatccgccgttagaaacgctagcttcctcggttacgccgccggtacggccagaggtatggccactcgtgctcgtgttgctacttataa

SEQ ID NO: 114366 - DNA, 355 bp, Arabidopsis thaliana columbia
aatttgacaaagcctgtgaatatcaacaagagctttccattgtatctatgtcccagtttttctcaatctctccagacacacaaacatatatgcatctgatcctaaaacaaactacaaattctcacaccatgtttctctcggatccaaaagattttccgagaacataaaagactgtttctagacaactaatactcaaaaagtttgtctccatctgcaagaatgatcctccaaaaaaaaatccctgcatcagaaagtcaactcactttaactcaaaaaacaacagcaaaacaacaacagatttcaaagatgtctcttcttaggtttccgttcagcagaatctcctgcagcaactgaa

SEQ ID NO: 114367 - DNA, 354 bp, Arabidopsis thaliana columbia
gacgagtacacacccatcgacctttttggttcaccggatccagccgcaatccgagcaaagaactagagttgaaaagcaacgaggaggtgggtaaatcggggcacaacaagattgaggatggacagatggagcaatttgggttggcgaccgactgtcaccagagatgaaaatagagaagcggcgccaagagaaaaagggtttggggtggagaggggcttgagagtgttttctctcacctctctctgactttacgtctcgttttgggtctgaaagctattcataagctgttgagggtaattgtttttatagtgactaatcccaccccgaaaagccccgcatccagaaaaatcccat

SEQ ID NO: 114368 - DNA, 361 bp, Arabidopsis thaliana columbia
  unsure (1)..(361): unsure at all n locations
aaaaaactgaatttgctagtgactatatgctaaaagcattccatttcaagtcttatttgctagtgaatatatgctacaaaaatcaacagtttattgtaaatccatcatgatagagatgcaacttctcatttgtaacactttatggcacttaccgttttaaatggagattcttcgcggagctcaactatgtaagctgctctcttgtccccaataccctatcatcatcaatgtaggccataaacaagttaggtactaacctataaacaagtcatttcaattttaaaaacattctgatcaatctagtcatctcacctttaacttctttagatcttccctgtnaacacaacaagagaagagaaaa

SEQ ID NO: 114369 - DNA, 352 bp, Arabidopsis thaliana columbia
ggagcttgacatgacctctttttggaacgatccaagtgagtttaaagacatattcgatgtggttcactgtcataagttcgttaaaaaatgaaattcggatacctaaaaaggtaccttcaaagcttaaaaaaagggttgagcttggagtgtaccacgaaatgcctcctattagttggtcaaacatgtgttactaccaaaatcagattcttccactggtgaaaaaacataaggttttacatctgaacagaacggatacccgacttgctaataatggactgcctgtggaggttcagaagctgaagtgccgagtaaatttcaatgggcttaagattactcctcagattgaggaatt

SEQ ID NO: 114370 - DNA, 358 bp, Arabidopsis thaliana columbia
cacaagttccttatcaaatcacatcaacaaatctaaaattgagaagcataccactaaatctgaagattccagacataattcgaagaagatttgaagaagaaagacgaagatttgaagagatcgaagactaagattcatgaaaagaagaagaaccctagaagattagggcaaaaagagaagatttttacagaagaaatgtttgtgatattgagaagaacaaggaagaaaatgagaaacgtctttaatggtgagagaggtgtacggtggaagttgatgtagaggataaaaactcttaagttcaatgtatacacgcgaaaaagtcggatttcttctccaccttctttgttcccacaccgaa

SEQ ID NO: 114371 - DNA, 336 bp, Arabidopsis thaliana columbia
ctcctcaggttagtaagcgtgagggttatgtacaagattttgtttgtgtctgaaagttaaagaaaacattttggcaagatcagatgaataacatgccgtcttagcctacatgacggggcgggtgttacatttatgctactttcttgaacctcaatccataacatatattcacatacatttagtgatttaaatctacttaactattttaacattttatgcctttctttctttttacaaatatttgtagtaaaagaaacttctcttaaatttaagattcgtatattatcgcgttccttttcataagtatttcaaaatagaaaatatgagaatttaaaa

SEQ ID NO: 114372 - DNA, 287 bp, Arabidopsis thaliana columbia
gcgggatattcgggtttgaaggaactaaccagggaaaataaattgtgaccaatgttttgttgaggctttcctatctctgatttgatgagcctcaccatctttgcaaacaactactctatggtccccaacactcgctatagctagcttctctccgttcaccaccataaccgaagcggctgagccaccggttctctcttcctcaacgtacgctcttctcatagtctctttacactttctcataatcccgagctgaaaatgtcccagatacattttgttgacacacattc

SEQ ID NO: 114373 - DNA, 351 bp, Arabidopsis thaliana columbia
gagagagcagaggtcatgttgaggaaaagaaataaaagaaagaagtaagagagatgtgcatttacattggtgacgaagaagagtcaatcatcaaaaggagaaatcttgacgattcatcaaagctttaatcatatcactttcttgatcgttcgttcatagtttgcttctggaacaaaaaacattgacattaagatcacaatatgaagatgtcaattagcaaggtcaagagcatgttctgcacaaccttaacaaagtcaatgccagccattgccttctttgggagaatggcattttcctttgtctttttcattactgcaatccaagattatgctgatcattatggcggtggag

SEQ ID NO: 114374 - DNA, 268 bp, Arabidopsis thaliana columbia
cccgtaccggtcgaattccgggtggccaacctccctgatcatcaaacatgattactgtacctccagctgatggctgtcttatcattgactcacactgagtttgagctggtatctctaagaggcagacccgtgagcacgctttttgctttacccttggtgtaagcaagattgctgtgacaagatggagcaccaccccaaatactcaggctggacgatgaaatatcaggagggtctcatactgaaaagggggatcaaccctacaaatcca

SEQ ID NO: 114375 - DNA, 356 bp, Arabidopsis thaliana columbia
catacgggaagtaactcctcaagcgaagaagatctgtttgttgattccgaacctggcttacagaactcaccggaaacacaatcaaccacagagagtcgccatgagtctccgcgtagacaacttgtgagaactaatgtccctaccaatgaacagatcgcatctctgaatctgaaagatggtcagaatatgataacatttagtttctcaacaagagttcttggaacacaacaggtcgatgctcacatttaccggtggagatgggacaccaagatagtgatttcagatgttgatggaactataactaaatctgatgtgttaggtcagttcatgcccttcattggaaaggactggaccca

SEQ ID NO: 114376 - DNA, 186 bp, Arabidopsis thaliana columbia
atgcgggagaaacggcaccctttctttaaacagaaagaaattaagagtttaatatcccactttgtgaagatactgattaatacctttattctcgcgccacatgtaacttctatttaccaagaggacctgagttgccaatttttatgcgattgccttaataaaaccaacaggtgttcctcacccatt

SEQ ID NO: 114377 - DNA, 359 bp, Arabidopsis thaliana columbia
aaatttttaattataatattttgtaatattatgatataaactaaaccataaattaaagttaaaatcttaaatgaaagttaaaatctgaaattaaattaatgcgattaaaccctaaattaaagttaaaatcttaaattaaatctcttaccctaaaccctaaaccctaaactcctaaaccctaaaccctaaattaaagttaaaatcttaaattaaatctttaaactctaaattaaagttaaaatcttaaattaaatctttaaactctaaattaaagttaaaatcttaaattaaatttctaaccctaaaccctaaaccctaaaccctaaaccctaaaccctaaaccctaaaccataaactct

SEQ ID NO: 114378 - DNA, 337 bp, Arabidopsis thaliana columbia
gaaggaaggaacctagatgggattccgggtgctacatcaatggcttggatcttggctcgcaggtcactgagtactatacacgctcgacatctcgtgttgtgacggcaagccccacacggatctcatatgtgtagaccgcagtccagctgattatctcaaggcagcatcaaagatgatgaagaagcagagcaactacctaaggaaatctccaaagactggaatactgtatgcgcacggatcatcaacgccctgttcctcacacaaatggacccactttaggatgtgaccctcaagctcttgtatgatccataagctactatcaattattcatttgaga

SEQ ID NO: 114379 - DNA, 292 bp, Arabidopsis thaliana columbia
tgtgtgaaagataaaatgtgaaagttgcagtggtgcgattaaaccctatggtggagtttaaatgtgctgtgagacctttgaccattgatcctggtctattgacagcgatgacgttagggatctgtgtaaggtagaaaattggatggtcaatggatgggatacaacgcgatggctcgactggacaaagtgactgtaagattacggatggtaagggctctgacaaatataaatggcttgagatcctttaggcttgctattaaacacagaccttgtctggctcatatattatact

SEQ ID NO: 114380 - DNA, 358 bp, Arabidopsis thaliana columbia
ctgtaagcgtttaaagatcttatatgcaggaaagtatcccatctgcagcgtcatcgaccgatcattcgcgacgtcattggccttgaattctggaccgcgattgtcaatgaaagacacgtcatatgttgaagaacgtgtgggatcatctccaaagatgatgctttctcacttatcagctgccgtggtgtcttatgattccggaactggttagtgatttatgtgcgagtacatacctaaaacagtattttaatggggtcactgagaatagcaccaaatcatgttgcctctcattccctttgtgacagctggcgtcgtaccaaagatgcccacaccgctggcctcaaataccaataaataa

SEQ ID NO: 114381 - DNA, 352 bp, Arabidopsis thaliana columbia
gataggtttgcaggtgagagggaaacgggaaatggtgggagcgacctttggaccactttactattgttggagatgattggctctcttgacaatggaggttctagcgctagtgggagtggtggtggatcaagatcccacaggtcaagggcatggaggaatcatcggcgttcatcttcagataggccgtacctttggggggagaatctattgggtctacaagatgagcgcaataacaacgatgatgaagagtttcgtttgcagaatgatgcaagcggtgcttctactcctgttccaagaagaagaaggagatttggacgtcctagatcaagcggaaatcatccgcgataagctg

SEQ ID NO: 114382 - DNA, 357 bp, Arabidopsis thaliana columbia
tgagaccaccattaatggttctacatccatacgtgctcactaatcactttgtgtgtgctctatttcctgaatttgttacgtgtgattagactaccggaaggaacagaagattgcattagtcgaaagaattttgctcttcttattttatcgcttagtagtatgtttcactttgtggatatcaaacttctgacttttattgaagctagctaccactacttttaataaactggttaatctcaattaaacaattattggtcacggttgcagttttttggaagctgccactctcaataaattaatagaaattgttgtcttgacttttaattttttgatacagtaccattaaaacttaagaaa

SEQ ID NO: 114383 - DNA, 343 bp, Arabidopsis thaliana columbia
aacaccacaatttgactaccacttcctgcttatccatcaacactcccggacaaggaaatgatgttggggccttcaagcacgaccgcttactcttttatgattgccaaaacactctccagatctatggtaatcggggatgcatgtggggcgtccaccgatgatagtcataatgatctggtgcacacacaacagcaacataaacacttacctgagccaataccttcacaaccttagaagctatctacagctccatcattcggtccaatgctctctatgggaaggcttgctacatttttctttgacagaaggcgctgagactatcttgttcgactcaaacccttac

SEQ ID NO: 114384 - DNA, 359 bp, Arabidopsis thaliana columbia
atcaaaaagtgcttaaacgtgtcacaattccttcaattaaatcagggaatcccgatttacctcttaatagcctttgaaaaaagcccatataagttgccagtcgacttcccacaaaaaaagaaaaggaaacgccgactttccaaaaagagaaatcataagaaatttcttataagataatgacaaggtttgaagataaaggtaacttggagattcaaaccctatatttaaggaaattgagtttatattcttttgttttttttccttctaaaatcattccattatattgaagttaaagtgttaaagttatacaagactacataatgaaaactattacacaagcagaaatgtgagccatcttt

SEQ ID NO: 114385 - DNA, 350 bp, Arabidopsis thaliana columbia
ggaagtgttcaacgaacacattccaagtcagaggtcaatgtttgaatgaccctatctgctctctatatatcaaccggaatggacccgacggttgggtcccggagtccattgagatctactcagaaggctcaaagtccgttaaattcgatttcagcaagagcgtccctcaacttaacacttggtacgggcacaacaactgcagcaccacaggcagaccattgtgtgccgatctgcctccaccacatttttcggcagagcttccaccggagacacctaccaccccaccgtctgctacaccaatgaccgctgttgcttcaaagcttggaaatggtgagagtgttttccttgcg

SEQ ID NO: 114386 - DNA, 355 bp, Arabidopsis thaliana columbia
cttgagtgactccgtaacagatccttcttagtttggttgatttttgtgtctgtgaaaatggtttatcagtttatgcataagattcatattcggtttagatttgttaaagtttggtttagattagtttgcttaacatgctctgttttctccaatagactaatataagtttaatcaaacaagtgcatttggtagcttgatcaaacttgctacaaaaacctgaactgtaaaatcatttttgtatttgtcagttcatttttgggcgccgacgttcaagtggggtataagcattgccaatattgcagactttcaaaaacctccagagacactttcataccctcaacaaattggtattata

SEQ ID NO: 114387 - DNA, 352 bp, Arabidopsis thaliana columbia
gccaaggcagcttcatcggccggaatatgcctccctctacttctcagtacggcattttggatccacatgcaagtgtagtggcgacaaagttgttagcgagaaaaagattcatagacaatggggaccaattcaacgtgatagcttgttcttggatccagttcatgatccatgattgggttgatcacttagaagacacccaccagattgagcttgaagctccagaagaagtagcaagtggatgtccattgaagtcattcaagttcctcagaacgaagaaagttcccaccgatgatcaccacaaatctggcgctgtcaacactagaaccccttggtgggatgggagtgtaatata

SEQ ID NO: 114388 - DNA, 356 bp, Arabidopsis thaliana columbia
gtgaaccaagacactgcatagaaatgagtagcaaaatgttcaagcaagccaataaggcagcacaaaatattactgaaacataattcatcttgtctttcactatcacaaaaggaaatgaactgtccatctgcttaggaaaacttaagctactgcaaccagattcctgagaagaggaacctatcaaaaaacttgatatttaggaaacatccgaccatatctgtatagccctgtctgaatctactgtatatgaaattacacaagcagagatacaataaataaataaaaacctgtggagggtgtatagattgcggacactcttgtctgcatcaggggataaatatcttccatcttctctg

SEQ ID NO: 114389 - DNA, 256 bp, Arabidopsis thaliana columbia
ctaatgaagaggaacatattatgacattaggaactcggaagatgtcatggagaaaactgaattgtccggaaaaccattatcctataggtgaaggggtatgcatcgatgaggttttgtattacattgctggacaagcaaagactgtgaagatagcttgctttgatgttagaaatgaaaattttagtttttttaagacagattctagtattatgaagttattggttccatcgtcgcctactaaactgataaattacaa

SEQ ID NO: 114390 - DNA, 255 bp, Arabidopsis thaliana columbia
accaaactcccatcactctcccatgctaataactccaccactcgacctgatcgttttctcctccataacctctcttcactcgacctcatctctgatccaaactcaaccatactttcattttctactactctcattcactcggcctcaccatctctctttctcacaagcactcgacttgaacgccatcatcaccaatccatcgccactcgaccccatcatcttctctcttcatatacttgacctcgccgcattact

SEQ ID NO: 114391 - DNA, 371 bp, Arabidopsis thaliana columbia
gtaaatgaatcatccattagtggtacccccgtgaaccttgttttagcccatggaccgcttctgcaataaggcttcgagcctctcatagttaaagcttgtgttggcacttgcgttgtaatctgaagcacaaagtcaccaaccgctggatcagtgtaacttttccaagaagtcaagacctgcttctcgccagtggcgaggttatacatcagagctgagaaaggaagcatagtatcaccaagatggtcaaagctttgccaaagagttcttcccgaaaaattgtctatgacaataagatttccggtgtctgaaagctctgcacgagacccgttagaagcaagagtttcaccactggaccatgcaacgccatgttt

SEQ ID NO: 114392 - DNA, 368 bp, Arabidopsis thaliana columbia
gtgtcattgcccaatcgatggccgtgaaagttgttgtcgttcctcctaggaagaattccataaaatatgcacaaaatttcatgtttattaacattgtgactaatttaaatagagtgagtttctaattcaaaggatagtgttgttaacttgttatgcaaaggatgattagtcttaattaccaaaatgatgagcctgatgtcgcttctttcaagctcaaattcgtttgtcttctctagttgaatcttaacaatatatcaacaaaatcaaatgtctctttgttctcaccttcatctacatgttcttgcaccactctctctagaaactccacaaaagttttgcttacttcctccattttacgatccaagccc

SEQ ID NO: 114393 - DNA, 158 bp, Arabidopsis thaliana columbia
gcgtaaacatagaggtcgtcttagtgcgatcgctagagactcgccatattcgttcatttaaagactgaatgctcatctattttggttgacggcgccaagggaggcatcgccccttacggtagatttcatcaatgaattgtcagtgtagctagacaagc

SEQ ID NO: 114394 - DNA, 376 bp, Arabidopsis thaliana columbia
aaataatccaaatatcaaaaaaccaaaaacagaacctagaaaccacaccaaaaaaaaaaaagctatttcatcaaacaaacaaaactcacatcacaaatcagaaacaaacaaaaaagaaacgcagttctaaagaaaaaaattataaacaagaatcatcgaaaagaagaatcgaaatcatcaacatattttgtttctcttcttcttttatttttataaaatataaattagttctttgataaaatctgtagaagataaagaattcttctttagaaacaaagaaaaatgacggacccccacaccgcccggacgatcgtcggaatcgttggaaacgtgatttctttcggctagttctgcgctccaataccaacgatggtga

SEQ ID NO: 114395 - DNA, 371 bp, Arabidopsis thaliana columbia
gaaaaatgctagagatcctctgtgtgtgttttttttgttctcttcataattttcccatacacatactaataagttctttgatgtttggttgaaaacttgaattggatacatttcatttcttcttgtgaaactctatcaattcacttgtgatttgatccagttgacaaatttattaagattctcacaagatattccatcttttgcaacacttttcatcacaatctctttaaccttcatagctcgttcttcatactctccaccgtctctcatgatctcatcgatcttcttcttaacctctaacctcggaaccactcctcgtgcgtctctttcaagtcctaatccaatcttccacacatcgcatatatatgctt

SEQ ID NO: 114396 - DNA, 376 bp, Arabidopsis thaliana columbia
tcggaaaaaatgccgggacccacccacgcgtgcgctctatcctattgtcttatcttcgaagcccaatctaaaaccccccggggttcccttaccgtttggtggacccaaccccgcccacccggcaaatctgtcgcggttctcttcacgcgatcccttgcttcatgtgctcctctcgccaaatctccggagtcttctgagatcaaccggtaccgtactctggtcgccgctttttcctacattttccgtgacggcctcaagtctgtcaaaggtctctagactcaggctacatcggcttctctgaacgacccgaatcccatctggtcgaacaggccacctaaggagacgatcctgctcgatggttgccatttcgagcact

SEQ ID NO: 114397 - DNA, 365 bp, Arabidopsis thaliana columbia
gtcatattcatatgcatatcgtctttttatcaattacatattcaataattattgttttaggtcgtatattctctttttctattagtattatgtataccagtaatcttatttagtctttattttaaggcttacatgtcaactgatcgccatgactgaatattatcttcggatacctccaagatatcaaataatataatatttgaataatattaatatcataattctgatttttttgtatataaagcaaaaggatacaaatgtatatgcttttcatattttcatctatgtgatgtatattattgatttttcttaccaagataccaccggattaatttttatatcttattatttattactggtatcgg

SEQ ID NO: 114398 - DNA, 367 bp, Arabidopsis thaliana columbia
gaaccattttgtctgatcctacaacaggctctttgatggctgatgctatgattttaccttgcggacacacttttggagctggagggatagaacaagttaaacagatgaaagcttgttgcacatgttcacaaccagtctcagaagactcgataaccccaaatctcactttacgagttgcggtacaagcattctgccgagaagagaattcacagtcaaaccatccatctaagagaaaacgagaaggatttgatcaagagagacgtgcatttggtgtcacgaatcattcaggtcgttcaagaaacaaaagtaaccatttcccatttgctgtggcagatcgagttataataaagggaaataagaggacacc

SEQ ID NO: 114399 - DNA, 373 bp, Arabidopsis thaliana columbia
gatgctttagggatagcgcagcaccatgatgctgtcactggaactgccaagcagcatgtaacaaatgattacatgaaacgccttgctcttggtgcttctgaggtaagatactatatatgaaaacttttttcttttttgtcttttttcttatatcagtaatcatctaattattccgtaggcagaagctgtggtgaattctgcgctggcatgcctaatgaacaaagcaccaaaaggtggctgcacaaagcctgcaatagcattcagccaggttaaatctccaagaaactcattttggatttcattttttttacagaaatgtgattgaagaatccctttcatggtgatgactagtgtgggagttatttctttcctc

SEQ ID NO: 114400 - DNA, 365 bp, Arabidopsis thaliana columbia
  unsure (1)..(365): unsure at all n locations
caaaaacaatgcatctgttaatcaaacaaaacagaaaccaatgcaaagaccatcaaacaagaaaataactgctaggaaaatatctcctctgtacctagtcgcttgaggatgtcagtgaaagtggcctgtcagaaaatgataaagcatttgttagatatctatcttatgtgctcaattactgtaatttaattacacagatgttcatggttcaaatcctcaccgtgttgaagtccacccctttcaagatatcaataattgcagttttcaattcttcatcgctaggctccttgtttttgtctttcccttttccgcctctctttcctattactaaaacanngataacaaacacagggtaaacatagtgt

SEQ ID NO: 114401 - DNA, 376 bp, Arabidopsis thaliana columbia
acccttccgaaaataacagtacagtatattgcaatttaaacaattaatacaaaattaattgacatcaagtcaaaccaacagaattagtaaatgtatacatttcaagtataatatatttactcttactaggaaatgattaattactttaatgattaaattggtatagaatctttcagtcttcaatttacattgtttccaatcttagagagattgcaattaattaaaagaaaagttacaaaatcaattatatacaagtcaattcaacaaaacttaaatctatatattactccctttgtcctaatatattatatgatttagtccttttttaagtttcattttctttttttttttctcaaatattatgcataatttatgt

SEQ ID NO: 114402 - DNA, 366 bp, Arabidopsis thaliana columbia
tttgcacttggcaatgttacagcgtttatgtttacatctaggattgtcttgtttgcttaccttatatgaaaagtcatctcgttcatatggattttttgcattctacattttagaaaagcaccgtttgccacttcaggtatgtaacaatgtgcacagctacaaatctttgcactgaacagatttggaataaagtttgagttaaagtgaatacatgacttggttaatcctggcttgggccatcttgtggcctcttgctcatatcaagtaaaatgccatgacaacaacgttaatggctaagttagcattgcagcatctcctctgacttctgcagataccaggagattttttgtctcatcattccaaaat

SEQ ID NO: 114403 - DNA, 273 bp, Arabidopsis thaliana columbia
cattatttatatgattccgtatgccaaccattaaacaacttattagaaatacaagacagccaatccgaaacgtcacgaaatccccagcgcttcggggatgccctcagcgacgaggaacatgtactcgggtgtatactatcacccccaaaaaaccaaactctgctttacgtaaaggtgccagagtacgattaacctcgggatttgaaatcactgcttatatacctggtattggccataatttacaagaacattctgtagtcttaataagaaggg

SEQ ID NO: 114404 - DNA, 317 bp, Arabidopsis thaliana columbia
gcgaagacacacagagtctaagaggtatatccgcgcgcaggactacctctggaggtcgtgggatgcaagcactactgtgggcggaagcacgcttaactgcggagtccgtatgggatccggtgcatgagtgcgggtatgatcgcatccgagcgtatatgcaacgcaatcgtatatattcttcgtgtaagtgttgatgaaccgatcgccgtgtgtgccacccgacatgtagggataccccatctagtcttagcgagctctgatgcatgaaatatgttcgaagacaatgcttgaaagactaattgagagtccgttttata

SEQ ID NO: 114405 - DNA, 367 bp, Arabidopsis thaliana columbia
ctcttctttagtaagaagttaatgattgtggattctcaacatagtgttggatcaatcgtgatgtgtgaaatttggaagttccaaagtaaaaacaggtagagctaattcgactagaattgtcaaattgcatccaaagaaaagtacgcattagaattacaaataaaaactattattcaatgttattaaatggataaagaaaattctcacaaacgttcaattttgttcttacaaaacggtttaatgcgttatcaaatcatacataacggtttcaataatttggtattaaatacatccaaccgcaatttgactgtcgatataacgtttgttgaccaaaggaaaaataggtagaaatttggtaagactagac

SEQ ID NO: 114406 - DNA, 361 bp, Arabidopsis thaliana columbia
gtcagcttggtggggagggttcaaaggctcagaagtggaaacttattatccgaaatcttcctttccaggctaaacctagtgatattaaagtggtcttttcagcagtagggtttggctgggatgtttttattcctaaaaattttgaaactgggctacctaagggttttgcatttgtcaaattcacgtgtaagaaagatgcagcaaatgcaattaaaaagttcaatgggcacatgtttggtaaaaggcctatagctgtagactgggcggtacctaaaaatatttacaatggtgctgctgatgccactactgcttcagcagatggtgacaaagaaggaagtgatggggacagtgaaaacagtag

SEQ ID NO: 114407 - DNA, 201 bp, Arabidopsis thaliana columbia
caatttgaaagatcatttaacgtagttgaaataacggaattttttgttgttcgatcaagtatgggaaacttaatggaattcataattgtttcaatggttttttttaccttttttttttttattattggatcaagtattcggtgaacgaactaagaccattccaatgctccttttctccctgccttaacttaacccagaatt

SEQ ID NO: 114408 - DNA, 195 bp, Arabidopsis thaliana columbia
gtttcagtttcaagaactatgattccaaaaatatgtttggttttattctttcacatatgcactaattaaaaaccaacacagagcctaagaagagaggaaaacagagcatgaatgattgagaagaaataatatttagaagcaacgtcatttgcattcaaaaataagcaaatataaaatccatttaatcatatgtaa

SEQ ID NO: 114409 - DNA, 366 bp, Arabidopsis thaliana columbia
cctccatctcccctcccaaccttcttcgctttaccagcagctgtagcaaatgttctttggcacacaaatcgcattacatctttggatctagaaatggaatccccaaacattcgaataaggttcatatcaacaaccttatacctgcaaattcacaaaataaaactaaataaatctacacaatcctataatgttcgttctcggatttagatcaagattcgagttttgtcgaagatttttgggtgagggtttaactcgcaagatagagataggtagcgagtgcatcgcgggaactggtaaaacttattaaaaagtaacggaccggaaaattaaaagacccgtctaaaagcccaccaatagtaatgcata

SEQ ID NO: 114410 - DNA, 263 bp, Arabidopsis thaliana columbia
acgcaatcttcgctcttctatttgctctctatctgtcaacgcggatcagagccgagtgtggtagattcaggctccctgaaaaaagccctggactttcggttaccaactttgctccaggatgtgcgggatctgtccataaggcccacaattgggatcacgttacctctgccaggaactcaatgtattaccttaaggacaagatgagtggtttacatgctaatacgatgttcatgagagctaacatgccaatggtctctaagaga

SEQ ID NO: 114411 - DNA, 358 bp, Arabidopsis thaliana columbia
  unsure (1)..(358): unsure at all n locations
aaggaaaactgaaaaaccatagtgaagtatagtccttgatgcatggattcaatcaacaagatcatcaacttcttgtttcctctcttaaccttgtatgcacttcttgtcttctacccaacttaccagaggctcaaatccgccgtctccatctgccggaatctgttctcggaaaatgtccccggaaaagttggtgtcatcaccggagcagcttctggcatcggcgaagctttagcgtatgagtacgggaagaggggagcgtatttagcacttgttgacataagaggaagacctctcttncatgtagcggctctcgctgagctctatggctcccctgaagtcttgcccttagtagccgatg

SEQ ID NO: 114412 - DNA, 369 bp, Arabidopsis thaliana columbia
gtgataatcctaaaccgctgctacattgtatcttttatagctaaatcgtttatataagaactgcatagtaaaaatagttgttaaacgtaccacttaccatcacaaaaaattaatttttaaggtttttaaagtgacaacaattattagaaatatgtgggcaaaataggtcaaacatgcggctaaatcgtttatgtagcaatatttgttttgaatagagtttacatatagcaatattgtatagtaaaaacagatgttaccatcacaacagttgaaaagtttagattataagaggttaactaacaataatgattagaaatatgcggctaaatgggtcaaacatgcgactatagaagccaaaaacaacccatg

SEQ ID NO: 114413 - DNA, 352 bp, Arabidopsis thaliana columbia
cgagcttgtgttagagtgttctgcctagagacatgctttagaaaatactttgcagatgctaaacccgctgttgaaaacatcggtgtccaccatcccctgcgagaattgaaaagcttaggagacaaagcttgcatgccaatccttaatgcagaaaaattcaaagcttttaccttttcttactaagatttgattttgtatctctgttagcaatgagaatctgcagaaagtttcattaattaaacaaactcgaaaagacgaaaaactcaagtatctatgcttctacatgtatatattatgtaccataatcagatttaaaagtcctgattctttatcaacgaaagaaaaatctcca

SEQ ID NO: 114414 - DNA, 369 bp, Arabidopsis thaliana columbia
cggacgcgtgggcgagatacttcatattcaaatcggatctgtatcgtcgacgagtaatcataacaatacccaaatcggaccgatttagggcaaacgagttatattcaagttaaacgaatcaaaccaaacccggattttagatcggcgtaatccaaaaagcaaagatttcacacgcggatcgtacatatatcaaacacaacccagcaaaaaaatcaaatcgattcaaagaaatcaaaacaacgagatcaacgataacccagattaattcaaatcgattcatagaattaagaacgacgatatcaacgataaacccattaaaagacgcgaagaacaaacctctgacttgttcaggtacgtttgctctcgtcg

SEQ ID NO: 114415 - DNA, 302 bp, Arabidopsis thaliana columbia
gcaaacgctcgacaataactactttcatagtaatacaacagttcattgtgtaaagagacgagcatatctttgtaaaactagtggatacagggaagctgcatacgaatatgaatcatgtttataaagagttgtttatattgaagaatgttttggctggtcctcgatcgattagaatatttcttactgatatagaaagatggccatcaatgtatatctatggttttcctatcatcatggactaacaatttaagtgtgaaataattaaacccattgttatattgttctgaaaactattgaactta

SEQ ID NO: 114416 - DNA, 367 bp, Arabidopsis thaliana columbia
cggacgcgtgggtgcaagtggcagattgtggtctcaattgttacgttttaaacaagaggggttcttacttggtgctggaagtccatcaggatctgatgttcatgtatcttccagtggcattgtgcaagggcatgcttactccgtcttacaggtgagagaggttgatgggcacagacttgttcagattcgaaatccatgggctaatgaagttgagtggaatggtccctggtcagactcatccccagagtggactgataggatgaagcacaagctgaagcatgttccacagtcaaaagaaggtatattctggatgtcttggcaagatttccagattcatttcagatcaatatatgtgtgtcgggtttac

SEQ ID NO: 114417 - DNA, 370 bp, Arabidopsis thaliana columbia
tatctgtctctagtatagtggtataataatagatcccaaatattgtcaacaagaaatatttcaatcaggaaaaaacaaatctacacaattaccttgataatctgatccatcatcaactatattctaaagtcattgtataacagttactgcattctagtaatttcatttacctgtccatccgcaccagcagaaaagactcgattatggctgggggctgctgcaagagtattgacatcacctttgtgattagagtgtgcttccaaaagggttccatgctcactatcccaaaactggacagttcctgtactatctccactcacaagaactgaacacctagagtaagcatgtagatactcagcaagagaaaaac

SEQ ID NO: 114418 - DNA, 355 bp, Arabidopsis thaliana columbia
  unsure (1)..(355): unsure at all n locations
gtcgctttcaatactccggtgtggtttgtcccgagtttcgtcgtggtggtgattgtagccgtggagatgattgtgagtttgctcatggagtcttcgagtgttggctccatcctattcgttaccgtactgaagcttgtaaagacggtaaacactgtaaaaggaaagtctgtttctttgctcattcgccacgtcagcttaaggttcttcctccggagaacgtttccggtgtctcagcgtcgccttctcctgcggcgaagaatccatgttgcttgttttgtagcagctctcccacgagcactnctttgggtaatttgtctcatctttctcgatctccgtctctgtctccacctatgtc

SEQ ID NO: 114419 - DNA, 240 bp, Arabidopsis thaliana columbia
gcatcgtttaagttagcagctgatatgtcaacgcatggtgagcgaggacggtaagacgaggtgaacgatctggatgattagaccgccgataataacaatgacccatgaaattgcacagctaaatgctgctgaccatgtcaatgcgtttgactgtcttgagggtggtgggaaccgtatgccacggctgttatgaccgaatggtattcgagcttttcttaatggaaccggctttggtatttg

SEQ ID NO: 114420 - DNA, 366 bp, Arabidopsis thaliana columbia
aaaagagaacattcgccaaaccaaccaacaaccgtttgggtgagcttgacgagaacgacgtcgcacccgccattttctccatccttgaagcaacaccttcttcacttcagatctcttcttcttcttcttcttcttcttcttctttgctcgcaccttccgtgctattgtatttctagggtttcggatcctgtgccttaccttagatccgacggtggagtagaaatcactctccctgtctcttcccttcttttttgtttccagtttttgattgaagatcccttcgtggatccactataatggcggattctcagccaatcacgcctggtcaggtttcgtttctactcggagtcattcctgtcttcatag

SEQ ID NO: 114421 - DNA, 358 bp, Arabidopsis thaliana columbia
atcttctccccctcactgtctgctctaggtcgagattttttagggtttatctccggatttgggttagcgaaatcgagctcacggggttgtctcgattattcctttttaggttgcttgaatctgaagctaatcttgggttaattggattgttagaatcgagacctaaatccttcgattggatcagagaaaatatgtcgcgcgttctcacttgcccaccgcttgtgtttgcaagaaaccacgttggcgttcaaaacttggtcgaatcgactaagcttaaaagaatcacacttgattcaaaaaaggcgcaccggatagagaagaaggaaaagaaggagaagagaaaagaaaagaaagaaac

SEQ ID NO: 114422 - DNA, 229 bp, Arabidopsis thaliana columbia
ctcgtaacagatggtcctccatctactgctttgggattcaacccccctggcaaggatattatttataagcctgctcgcaggagcgatgtctctattatcactgcgtggattctgtctcgctatatggcgatatgttcgtatgcgggagtctctaccgtgggagtatttattatatggttcacacacagcagctttcttggcgttgaccggctcctagtcatgttcaggc

SEQ ID NO: 114423 - DNA, 365 bp, Arabidopsis thaliana columbia
aacaaaacaagagaggtcagagactcactctaacgaaagcatgggaaaattcagaaaattagggtagacaatgaagagctagagagagcattgaacttagaattactagtaagaaacatcacaagcatcaagattcagaaatgaagtactcatgataaatattccatggattgtcacctcttcactgagataatggagattctcgcgttgatattgcagtagagccatttgttgatcagaaaggcgaccggcttcatggtatctgtgtttcaagcaaaaaaaacgaagtaagacttgagaattgtaaaaacatttgccatttgcaatataaggttgcgaggtaaagcaaagttttcatgaagact

SEQ ID NO: 114424 - DNA, 361 bp, Arabidopsis thaliana columbia
tcgaaaaatgtggaaaatcaaccaacggatagtcaaagtgttggtggaactcatgcgcaatcatgacaggcctgagtcactggtgattctcgcaagtgcatcagatcttcttctgcgggcaactgatggaatgcttgttgatggagaagcttgtacattacctcaacttgagctacttgaagccacggcaagagcaatacagccggtgctagcttgggggccatctggactagcagtggtcgacggtttatccaatctattgaagtgtcgtctaccagcaacaatacggtgcctttcacacccaagtgcacacgtacgtgccttaagcacgtcagtactacgtgatatcgtgaaccaaagc

SEQ ID NO: 114425 - DNA, 361 bp, Arabidopsis thaliana columbia
gtagttcaccgtcatcaccgttgagagaagtattggaaaaatgaagaaaaattgcagaagggtgaaagcgtaacataaacagagagagaagttcctatttttataagcatatgagaaggtacctaactagacaaaggcacagacttaattgtgctgatctcgtaattgatcccaaataagattgtattgtattagcctttgagttttgataagattttagataatatgacccagtggactttattttatagttgagtattgaatactgaatggtttttagttactacacatccatcatacaaatatgatattttgtaatatttaggaacaatttaggtaatgataaggtatatgcgtacgc

SEQ ID NO: 114426 - DNA, 308 bp, Arabidopsis thaliana columbia
  unsure (1)..(308): unsure at all n locations
caaaaaaacataaacattctttttataaacaaanaaaaaaacaggctggctcacaaaaatttctgtttgcgttgcaacaacacanacacaaaagtccatcataataaacatacgataacaaccctacctatactaaatcaccaacaacattgtacctaaccccaaaatgacccaccctaaaacacccaagaaataacacacccacacctataaaagagtccataacaacaaacacccgaccacattttataaaatcaataaaacaatctccctaccatctacaaaacactcactcccaaaaccaatat

SEQ ID NO: 114427 - DNA, 344 bp, Arabidopsis thaliana columbia
  unsure (1)..(344): unsure at all n locations
aaaaaaaggncgggccactcccacccgatcgctaaatacaaatatacttttttttaaccgttcaaatcaacaaaactcgtgcttaaaaagatttttttgctttnacccnaaaaactccatcaatctccctcaagtactgatcatccaacaaacgtaccaactgcatacagttcacaagacaagcctcacagcattcctcttgcatccacaaatatgaatcttgcagcacatgatatggcatggatactcacttactcacagtccaacattacatatcctactcaaanatcgcttcctttcttcataaagccaatgattttcctcctcataactatatgatcacg

SEQ ID NO: 114428 - DNA, 358 bp, Arabidopsis thaliana columbia
gtattgggatatacaaatatacttgttgttcacaattgtatttacttaagatcgtgtctagaaattttgtaaggatatacaccttgtaagccacatcacgattcccatttcatatattggattaacggaacccattagattataattacaaattagcatgttttcttgcaatgcatagttatgtgaatcttactttatttaaacactcacttcttatgaatgcacgttattggttgcgcctaccgtttttggagataacatcttgtttcgatagtgaattcatgtttatttgattgctgctgattctgcaaccaaatttcaaaaatttatgtgatcattaatcaccaaaactcattgc

SEQ ID NO: 114429 - DNA, 365 bp, Arabidopsis thaliana columbia
ctcctctacgttcttgacagcccatctttgtctcagtagagtctttcagtggcatgtttcggtccttttccccattactgagaaaaagtgagccaccggttcaggtacaagatactatcattaccgcctggacaattagacccccaccccgtatcggaaccacccaattgcaagaaccgaactttaccaacttaactttattccccgagccaagtggaacatgccttaaagggttaaaaccctcttatattcctttccttggcgcaacttggccattctggatttgaaccaaaaaccttgcccgtgaagtaaatcattgcacctattggtccacccaattgggaaagattcattaatttcttttt

SEQ ID NO: 114430 - DNA, 356 bp, Arabidopsis thaliana columbia
  unsure (1)..(356): unsure at all n locations
ggaaagcctcgtgagaaggtctttgatccgttcagatcaacatcactggcgcttcggtggaatttcggccttagacccgaaaaattccatcagtctccctcaagtactgagcatccaacagatgttggaactgtctacagttcgcaagacaagcctgacagcattcctcttgcatccccaactatgaatcttggagctcatgatttggcatggatacttaagttttggggtctgaattactatcctcctcataagttgcgttctttctccagatggcctangtttggcgtccccagagctgcaagatcaggaaacttatccctagataaagtgatgacagaatttatgctccgtgt

SEQ ID NO: 114431 - DNA, 236 bp, Arabidopsis thaliana columbia
atttgagcaaaattgaaaatcgctctgaaaccaaatatggagaatccgggatcatacggtaacttgcgggatttcctaggtcagtcatcctaatgacggtgtatgtcccgatgccggatattggacgccatgattacggctgagcttccgaatattttgaccattctggagcttgacgaatgacatatatgtgttgagaacaatttacaggcggattacaagctgtactatgtact

SEQ ID NO: 114432 - DNA, 364 bp, Arabidopsis thaliana columbia
ctcgagaaagaaaagcatgcttgtggggttattcatgagcttttgagcttaacgactgagaaaagaacgctggtggatcacttgactcatttccgtgaggaattcagattctcacaacaactgaggggaatgcttattaggcaccctgatctcttctacgtgtctttgaaaggtgaaagagactcggtgttcttaagagaagcttacaggaactctgaattgatagataaagatcctttaactcttgtgaaagagaagatgcgtgcacttgtttctgtaccaaggttcccaaggagaggaggacccaggaaagacgaagaagggagagaggtagagatcgatggaagcgatgcagatggtgagg

SEQ ID NO: 114433 - DNA, 288 bp, Arabidopsis thaliana columbia
ctcgagaaagaaaagcatgcttgtggggttattcatgagcttttgagctgggggactgaaaaaatttcgctggtggatcacttgactcatttccgtgaggaattcagatttttacaacaaccaacgttattacttagtactacacttttactttgctccgtctttgaaaggtgaaagagactcagtgttcttaagagaagcttacaggaactctgaattgatagataaagatcctttaactcttgtgaaagataagatgcgaacactgtgttttttgcgattggcttc

SEQ ID NO: 114434 - DNA, 289 bp, Arabidopsis thaliana columbia
taattaacccaaacctcttgtcagcttgttgacagcactgccccattcgattccattatttttagtacttttgggtttcatttgcaagaattgtcattttgaggagttcaaaaatgatgattttagttggatcacacagtagtttaagttgctaatccactagcacaaatgaatcatatcagcccatcgatataagatggaatagtttttcttttcttttgtaaaatctaccaaaccccgaaataatgttagcaaacacaagcacccttaacatatccaaagagctata

SEQ ID NO: 114435 - DNA, 352 bp, Arabidopsis thaliana columbia
cactttgtgaatcctctttgttccttcttcttctttctaggccatggcagggatacttgagtttgggcggtccctgttcaagcaatcaaacccttctactctaacagttgctggtttcaccccaaacttcattctaccacaaccacttttaacacgagatgcagatgggagaagaggggagagtgagggtgagacagtgttgagtttctcatctccaaagcgtgcatcttgagctaacgggtttgctgctcggctagggggagacccaaagaaaaatgggggtgatctagatgatactgattcctagagaaagaagaagacaagaaatagatctcaatacacaaaatgtgga

SEQ ID NO: 114436 - DNA, 207 bp, Arabidopsis thaliana columbia
gcaaggtgatcaaaattggtgcaccacttgtttaaagtgaacgttgaacttaaaaggcataaacgtaggcctaaatctgtctttacagacctcaaaagtcaaaaagcacattaacaacaaactgtttgaaatgggccgcaaggcccaacattccttggttgtgcatagaaacaaataaatgcttttattttggcataaaatgttata

SEQ ID NO: 114437 - DNA, 122 bp, Arabidopsis thaliana columbia
cagacctcaaaagtcaaaaagcacattaacaacaaactgtttgaaatgggccggaaggcccaacattccttggatgcgcatagaaacaaataaatgctttcattttcgcataaaatgttata

SEQ ID NO: 114438 - DNA, 366 bp, Arabidopsis thaliana columbia
ttttcatattgttcttttttccatttttgcatcttacttgacatttactatcactagaatcatatcaagcttccggatttcctacagtgcttgtaaattagctttcagttgatacgtggtgataatttaactctagtttcttcctttgcttttgtagggatataaagcctgataatttattgattactcgaaacggccatatcaagctttcagattttggattgagcaagtctctggaaagcaaaaattttccagattttaaggcggagcttgttgacaggagtacaaagcctgcagcagaacatgatagactctccaagcctccttctgcacctaggagaactcagcaggaacagcttttacatt

SEQ ID NO: 114439 - DNA, 156 bp, Arabidopsis thaliana columbia
gttcaaatccgagaattttgatatcggtggacattttaaccggtctgggccgggcgggtcactttccaaaacgcctgttgtgtgtgaaccatctgaatctgctatctagaaagctcttgtaatagcccatattgattcttaccgaacgctgttttt

SEQ ID NO: 114440 - DNA, 130 bp, Arabidopsis thaliana columbia
tttttaattcgggggaaagccgaatccgtttaaagcggattgaccggtttgaagggaaacttttattttttttcgaaatccaccctccattttggggtcaaaaggccaaaataaaaaatttggccccttt

SEQ ID NO: 114441 - DNA, 382 bp, Arabidopsis thaliana columbia
  unsure (1)..(382): unsure at all n locations
ntccgtgagaagccaaantcgagagaatgcgttgcaaaaatantcatcttcagcggaaggagatttgttcattcggagtcgttgtgcgtgagaggtaatgactgcaacctgtttctccctctttttccattttttgagagacgagctttctctggtaagactagttatgattacagagaggtactcagaactgggctgagtgatattgaattagatgatgcggttgatctgttcggtgttatggtacagtctcgtcctttcccttcgattatcgagttcagtaaactgttgagtgccattgctaagatgaacaagttcgatcttgtcatctccttcggggagaagatggagattttaggaatttcacataatctctatactt

SEQ ID NO: 114442 - DNA, 366 bp, Arabidopsis thaliana columbia
ctgttatataacaaccaagaagtagcttttagctttacccttcaaagttgaaaggaattatattttttgtggtcaatcatattctttttttttcttctaattaaacaactcttcttctactagtttcaaacgcaaacgccaaccaaattggatgttttcattgcgtttgacatttgcgtttacaattaagcttatgagtctgtttgaaaaagaagaaaaaaaaaacgtgtaggcaaaggtacaaaaataatcaaggtcatagacgttatttatataaacgtggttagtttacacaccaaacaaaagttgataaattagacaagtttagcacacatacacatatagttaaatagaccaaaaaataaa

SEQ ID NO: 114443 - DNA, 370 bp, Arabidopsis thaliana columbia
cgaggttgtctcgcttattactgatgatgctactaagagaataattggtgcccgaattcgtaacaatctgagaggccaagaatttaacagctatgcaaaagtagttgttaatgcggcaggaccgttctgtgattccattaggaaaatgattgatgaagatacaaaaccaatgatttgtccaagcagcggtgtacacatcgtgctgcctgattactattcttctgaaagcatggggttgatagtccctaaaactaaagatggccgcgttgtgtttatgttaccgtggttgggaagaacagtaagaggcactacagactctaacacttcaatcacttcacttgcagaacctcatgaagatgagattcaattt

SEQ ID NO: 114444 - DNA, 330 bp, Arabidopsis thaliana columbia
tttacaagttttgattcgaaaaacttaatctcccttttattggtttgaaatttttacaccaacccctaaattaattttggggaaatccgattttgggaaaaattaatttgtttttggaatcgttaacaccgttggaagaagacaagcaattgcccggggggaaatcttttttggttaaaaaaaaaccggttcgtggaaaaaagcccgaaattgaaaaattgacagtggcaaatgtggacgcgccaccgaaaagtaccggtggttggggttggggtttctctggcttctctgtgctttccgatctccaaaaagctgcggaagatatttctc

SEQ ID NO: 114445 - DNA, 332 bp, Arabidopsis thaliana columbia
aaagttttgaaattttgagtcttgatcattggactaattaagctaatgagtagtatctttttttttttgtttcttagttgtcgtctatgattgagctaaaacgataaaagattagtaaacattttgagattaatttgcttgatctattctatgctaattttgttgaattttggtactttctagtaatattctcaaatatgggaagaatatgaaatacttccaattcattaggtgtttgagtggaaaaaaataccatactttgattgattcgaacctaaacaaaagtgtcatttttcttcttctttctaattgcatgatttgatcaagaagag

SEQ ID NO: 114446 - DNA, 272 bp, Arabidopsis thaliana columbia
ccgggcccgaaatcccggggtggaccaacccgtccgggattgaacaccggcaagcctacaatggggaaatcatgctttcaaaagggaaggtacctttacagggtttggcgaactcaaagcttaacctggaagagtcggctcttgatgcttatcaagttgagaacctaatttagttttgccccaccagagaagagattgaggtacttaaaggttatactggtgacaaagacaagcttggaaaatgccaactggtctttttaaaaattattaaa

SEQ ID NO: 114447 - DNA, 324 bp, Arabidopsis thaliana columbia
aataaaggtattcaacaaactcgagagtaaatgtactacacaacatataagctttcagaatattaaaaaatcactcacaccatcagaaaaaaacatgatgattcaaaaactgcatatgacagacaaataaaggaaaactattaactggaccatcctcttcactcattttctaggttccttttaagatataggtacagcttctgtaatctgttagaatcatagatcaaaacaaaacaaaatgcttttctatttccataaaaaaaaagtttcacactttagaagtgagtctttctatttgatcctatagatagcctactctcaaaa

SEQ ID NO: 114448 - DNA, 185 bp, Arabidopsis thaliana columbia
atcctggtttgtaaaagctcagggttctaagtctgaacagccctgtttgcaggatttaaaaaattgggaaattgaaccccaacccaaaaagatatggcttgatagaagtgaaatgatctatcaagctgaacaatacctcagggaacgtgtataaactgtggtgcaagactacattctaacatgtt

SEQ ID NO: 114449 - DNA, 266 bp, Arabidopsis thaliana columbia
ttttaaaaaaaaaaaaaaaaagggtgtaaaatcattgtgtgggttactcaaccggaaagacataccctcgagtggaaagctccgacaccatcgacaacgtaaggcacaacatccaggataaggatgcattcctccggacaccagagcttattttcgctgcaagcagctagaggatggccgacgtggctgatgacaatatccagaaggaatcaccctccactggcctacgctccgcggggtatgcaaatcttcgttaaaaccctaac

SEQ ID NO: 114450 - DNA, 298 bp, Arabidopsis thaliana columbia
ttcttcttcttagtaaaactttgcattaatggctgacccaaatttggaagctctttgcttccttccttcttcttattcccgccttcattctccaaatttggttctacggatcttcagtttgagcaatgaacaaatctcaacttcgtaatttttccttacagattccattccggcttgtatagttcttattagttggtccgcgtttttacttgctacggatgaaccttcaaaatccattcactttcatgaccgcgtctgggtccaggtctgatgatggttaatctttttattttgctga

SEQ ID NO: 114451 - DNA, 263 bp, Arabidopsis thaliana columbia
  unsure (1)..(263): unsure at all n locations
attggacttgatctttcttaattagaacaaaaataactatctagcgtggtgaaaacgcaagcggtttggggagacaccnnctccgaacaacacagcggaatcataacaaagctcggccactatcgattctgtgagaatcttacaacactgttgttcttgtgcttttacaaaaaactacggttttgatactctttgcaagcagctagaggatggccgaacgttggctgattacaatatccagaacgaatccaccctccacttgg

SEQ ID NO: 114452 - DNA, 251 bp, Arabidopsis thaliana columbia
gtaaacatagtatctatttagatacgctcgaatgaccccttctcataatgagaatgtatataaccttattccggtctggtccggtatggaatgaacttataatcatggaatcgactcgatcatcagattatagattataagttcataaccttagtccattcccattttgggcggaaccgatctactaattctttgattccagttagtattagtaagagggatcttgaactaagaaatagattctagaagct

SEQ ID NO: 114453 - DNA, 302 bp, Arabidopsis thaliana columbia
  unsure (1)..(302): unsure at all n locations
aaaggcccggggcgtcccacgcgngcgaaaaaatatatttaaattagtttaccaacccaacacaaccaacggggggttaaaaaaatttttggtggctcatacaaaaccaagnaattatgcaacgggcatgaaaattccatcttacaacaatgaataactagcctcggcttataatatggcacggagaatgcttcctgcatttgatacaccgactggaatcccatatggatctgataattcaatgtacagacttaacaaacatgaaaccaacataacatcaactgccggaaatgccactttgt

SEQ ID NO: 114454 - DNA, 358 bp, Arabidopsis thaliana columbia
attcacgctccttgaacaatccgccatctctctcgatcagatcgataatggcgacaagtttctgctcctccatctccatgcaagctcctttctcggctacaacaacaaggttctgtctcaacaaacaggctacgattttcaacaatggaaagactaataatctctccttcagcctacgacgtttgatgcctgctcgtctcgcagtttcttgtgcagtcaagcaagagacagtagagaaagtgtctgagattgtcaagaagcaattgtcgctcaccgatgatcaaaaagtcactgccggaactaaatttaccgagcttggagctgattctctcgacacggttgagatagtgatgggttt

SEQ ID NO: 114455 - DNA, 362 bp, Arabidopsis thaliana columbia
ctaacataattgacaaaaggatttaactggaatttgctaatattccctagctgacgaagaataaaaatagtcagagtgatgttacgctaatggttagggttctagctaatggtgttgttagaatagagtgaatcaagttttggtgatcatatcgacagttaagaatgatccatagatagttttgatttgttaagttggtgatgatgtatgtaaagtttagtatgaaaggaaagatagagatgaaaggagcataattcacaaatgggaagaaaatgtattcactaaagataaatatgtttttataatagaaatatagaggtttttttttaagtgctaatttcttaattaattaaattattttt

SEQ ID NO: 114456 - DNA, 371 bp, Arabidopsis thaliana columbia
tctctttgtataagtaaacttcttattctaataaaaatgtaagatttgtggatctacaactttaatttgtgtcgattttagtatgattgaaacattaacaccgataaagtcaggtcccctggtcgtcttttggttcataaaggtaatcccattttggcgaaatttgtttgaacttggaagtggaagaagtgaaaatacatgtagcacaagactgagattgacgagccttattgattcggcccatttttattcagaccttatgttagttaactggcccgatcagccgcctgatggctggtgaataaacccgatcattactcaataaatcacacaattattattgtaaatctttttcatctaactaaaatact

SEQ ID NO: 114457 - DNA, 343 bp, Arabidopsis thaliana columbia
cttccgtgttagagataaagagagagttattaatgccaataagggcctcaacttgttttccaaccctttggtgggtttttacccctcctccatcaaaagcgaagagaccgacaccaaggagttcgtgttgaccttggatcacactaactttaccgataccatcaacaaacacgatttcatcgtcgtcgagttctacgccccatggtgtggacactgcaagcagcttgctcctgagtatgagaaggctgcgtcagctttgagcagtaacgtcccaccagtggttcttgctaagattgatgccagtgaggaaacaaacataaaattttcaactcaatactacgtt

SEQ ID NO: 114458 - DNA, 355 bp, Arabidopsis thaliana columbia
aaaatcttgttggccactgtgaagataaaataatgaataaagattggggaaatgtcggaaaaacgtcaatttttaaatttgggacgaaaagactttgaattttcaaaatgtcatttaagtcataaagttatttttgattctttgataagttttgttaactggatcatttcagacatgcagtaaatttccataaacagagttaactttccgttagaaatttctgttaaatcaaacgatgtcgtttatgagcttataacaaaaggacgtcggtttagatagacggctgtgatttgttatattttatctgtttagatagattttccaacacaagaaaactctttgacagctgagtgtt

SEQ ID NO: 114459 - DNA, 288 bp, Arabidopsis thaliana columbia
cattaatgccacacgaaaattcggaacacacgacatcgtttcaaaatctgaaaaagggtacttagcgggtgctatattacaataactgtacaacaatactaaccaatattctacattacttttaacatattctaaatcataatacatgcaataatgaacagtaactcatagtaatcctagactaatatgggattaggagaccttctatagatctgaacataagctagctgacatccataactactgctatggcatgttcgactgtctaagtgaatctatattgatcaa

SEQ ID NO: 114460 - DNA, 227 bp, Arabidopsis thaliana columbia
  unsure (1)..(227): unsure at all n locations
tggaagnnnaccaccacttgttagtcttgaagtttagttggttttcanacacaatcccacaaatgttggtgatgaaagtagatctgcaccaaacattcacgagaacaatgacggcctttaattactcaaaaccgctacacaaaatgctcaatacactgcaaagctattcatccaaatcccacaattacacttcaaacaccactccaaaaaaaagtacccacaactca

SEQ ID NO: 114461 - DNA, 174 bp, Arabidopsis thaliana columbia
aaaaaaaaataaatgattgaaattcacaaattgtctgcctaattaaaagcgtatacattacacaatatcaacaagagccaactaagctatgaaaccaatctccacaatttcataggaatcacctctccatataaaggttccccaagcacacttggatatgtaattggtgaatgt

SEQ ID NO: 114462 - DNA, 362 bp, Arabidopsis thaliana columbia
tagtagttgacccacgctacgcacgggcctttaatgttatttatattagtagaatcgttctttcacatggaagaggaagaacatgggggctctttacaatattttagttataaattttgcacaattcaaagttcagagccttatgagaagactctatttttttattcctccaatggtaaacccctattttggggccttaacaataaatcattaacaatggtaaagaccaaagagacattgtatgtttgtttcagacaaacttaaaaccaagccaagctagaactagttcctctccttatgtcatcatgtattcagctgcattccttctcataatccagtcgagaaaaaccgaatagtttcag

SEQ ID NO: 114463 - DNA, 364 bp, Arabidopsis thaliana columbia
cggacgcgtgggcggacgcgtgggcggacgcgtgggcttacttgcagcgatgggtaaagagaaggttggcattaacattgtggtcattggtcatgttgattctggaaaatcgaccacaactggtcacttgatctataagcttggtggtattgacaagcgtgtcatcgagaggttcgagaaggaggctgctgagatgaacaagaggtccttcaagtacgcatgggtgttggacaaacttaaggccgagcgtgagcgtggtattaccatcgatattgctctatggaagttcgagaccaccaagtactactgcacagtcattgatgccccaggacatcgtgatttcatcaagaacatgattactggt

SEQ ID NO: 114464 - DNA, 363 bp, Arabidopsis thaliana columbia
gaatcatggatcatgtttttggatctatgtcgtttactgttgttttccggttttcataaagcttgatgtgaccttttctcatgtgtgtagattaatgaaacaactgatctaaatgagctagttgaaaaggaaccttggctctcgtctgagaagctggtggtgaaacctgacatgttgtttggaaagcgtggcaagagtggtttggttgccttgaaattagattttgctgatgttgccacttttgttaaagaacgtttgggaaaagaggtaatgcttttgttttgcgcttttaagccattctatagagaccattttgactccatctctctatttgtatcatatgtaggtagagatgagtggatg

SEQ ID NO: 114465 - DNA, 368 bp, Arabidopsis thaliana columbia
tctatatagaacatatgtaattgattcttgcaagaacaaagattttcagtttttaccaaactactgggcaacttctacataacatatcggataaacggataaaagtatatatccaaaccctactacaaaggaaggggtgagacttgagagtttgtggaaaagaattgaaaggggggtagttggaactgagacattaacgtgagcgccttgattgagagatattatcgacattttcgatcaaccaaagccccttaacgaccagtcttccctcctccaacgtgtcacgttctataacaaatactttttgactttggccatttgtggatctttattaatattgaggcaacgtctattcatgttcactaaat

SEQ ID NO: 114466 - DNA, 374 bp, Arabidopsis thaliana columbia
atggacgttatgtgagtcttttagttccctgttctcatttacaggaaggttgtcggtattacttgatggaaagcggattagcacttatggtggcatttctcataaatgtctctgtgatatcagtgagtggtgcagtttgtaatgcctcagatttgagtccagaagatcgagctagttgccaagatttggacttaaacaaagcttcatttctgctacgtgtaaatccatgaatcctatatcttttgcttcaatttcttgcataacttctcacattattagaggatatatatatacttattctggttgtctcacagaacgttgtgggtaaatggagctcaaagctatttgcaattgcgttgcttgcttccggtcag

SEQ ID NO: 114467 - DNA, 376 bp, Arabidopsis thaliana columbia
cggacgcgtggggaaaattagtgcaaaaacgtatgacgtaaatgatcggtatcacgaaatgtggcacactctgagttgtcaatattcaattatattatacatcaatccattatccatattgacccaccaaacaaaaatctcactgcctttcattattaatctcactttctttccaaatcctcttttctatttagtttaatcccaattttttaatctattctcgtgactgcattcgtgtcccttttatttgattcttcatccctcgatctttgtttaatcggcgcatcaaacgagacgaatattttaatttttccttaaacaactattaatatgagactgagagcatgtaaaatgtaaattagtgactagttgaaat

SEQ ID NO: 114468 - DNA, 260 bp, Arabidopsis thaliana columbia
ttttcttattatggctgctgccttttcttgggccgcttggttcattatgcagactaagatgtgtgaagagatttgcaacaccgtacacgagcacactactaatgtgtttgatgggaagtatccaatgtggagccattgctttgatctccgatcatacaatctctgattggtctctcagctctcctctccgcttcatatccgccctttatgccggagtggtggcgtctgcgttagctttctgcctaatgtcatgggctatg

SEQ ID NO: 114469 - DNA, 337 bp, Arabidopsis thaliana columbia
ggatgttatttttaagtagtcgtaaacacctagtttgggaccattttgggaccaatgtggaagttgcaaatggcaggttttcttgtagtaatatgcatatatactacaaaaaaaaaatgaatattcttacgaaaaaattgcgaccattttttcgtcagaaaattgtggccatatacataaaaaactgtgacatatttatttggtcataaaaacgttactatttcgttatagtgttataaaaacgctcctttctcaaagttaaagatgttttggtaattatatattttctttcgtgttaatttctcgtaaaatattttttactatttcacttttgttt

SEQ ID NO: 114470 - DNA, 368 bp, Arabidopsis thaliana columbia
ggcacacaaatatatatcgtattcgctgaagagaactcactagtggctgtagctttaacactatcgagggtcctgcaactctaaccatttaaaccaaggaatctcttctatcatgtctctaacatatctcatgttatgtctaaacggctatgttccctttgtgcgcgctcaaaatacactgtaatacacacataggtgatcaactacattcgagttatatgttttggtcattcacactcataacaatgctgtcttgttcctcatgataatgttacccttactcttactcttttcaaactacaattgctcatattctttcactttcaactatgtatgatgactattgctactcaactgctctcactgaa

SEQ ID NO: 114471 - DNA, 189 bp, Arabidopsis thaliana columbia
  unsure (1)..(189): unsure at all n locations
attagaggagtccaaccatttttctcctctctcttgaaaaatcaataacgttatttctgcaatttcttgtttttattcaagctctnctccttcatcatccgacaccgaattcgccgatccaaaccctagctccgatccagatactaattcttagcgtgtccatagacaatctgattttattttattatc

SEQ ID NO: 114472 - DNA, 248 bp, Arabidopsis thaliana columbia
  unsure (1)..(248): unsure at all n locations
cggacgcgtgggtaaactttttagcattgtctcttttactcggattgtgtggagaaataatttgttgttatttacaacggnaatgatcaacaaatcgatgttggctcggtagttgaagcagtttcggctgatcattcctttggtgctcctctctatgtagttgagagtatgtgtatgcgctgcggtgaaaatggaacaactagatttctattgaccttaataccttacttcaaaaaggtcttaatatc

SEQ ID NO: 114473 - DNA, 327 bp, Arabidopsis thaliana columbia
gttcgaccatagtaatgagtttttgtccccagttggaacgtgaaaaacgcggaacccagttgtggcgtgttcattacaaaatcaattagggcgttatggaatcccctctcaagacctatctccatcatcataggtaaggccatcaataaaccaatctgcacaaatgattgagaagcaagtgcagcttgaacaggcatgttggatcgaaaagctttctggttgctcaatccttcttcaagaccactaagaacgagatacagccgtccatatagaaatacatagaccgtaagcacggttaactgtaagaaagacacagaaaattttcac

SEQ ID NO: 114474 - DNA, 292 bp, Arabidopsis thaliana columbia
  unsure (1)..(292): unsure at all n locations
gcaaacatggcaagaggattgtataaacatctaaagaggctcaatgcttgtaaacattaaattcttgacaaacttaaaggnnccttcnctcccaaaccatcttctctacctcacaagactagcgaaattcttcctcttgccctcatcatcacaaacagttcgaagaatccttaaacttacccagattttatatccatcttgaatcaaaaacatatccaattttactaacccaaccacaaaatcacaagacttaccctacttacttcattatttaaggacatatacccaactc

SEQ ID NO: 114475 - DNA, 280 bp, Arabidopsis thaliana columbia
  unsure (1)..(280): unsure at all n locations
ggaaggcattgatatgtgtcactggcagtgaatcaccagtggttgtttgtctctctcaaagtttttgatccttacttacacacagganatatattgttcttgcggatgactgatgagcctattcaagcaggcgagactgctgtcttcattgaaaaatcgccgggaaacacccaatgttaatcccgccttcaaacggcataacacggggtgttagctcacatgtccatattgtccgacagaagggttgttaatccaaactaaacctttgccggcgggggac

SEQ ID NO: 114476 - DNA, 362 bp, Arabidopsis thaliana columbia
tttctttcttctaccttgttatttacaacaaaagcttcctggtcaaaagggagccaaaccttatgtggggctatctctacatcaattgaatcatttcagtcacataagaaccaaatttcgaatcagattgttatatctcaatatctcataccggaagcaatatagcaacattgcctaataattttcatgccctattttggatgatacaagacacgcaacagatacctttggagctaaaggagctttacaatcatctttgggagctgcttttgattttgcggacccatcaaatatccaaggaagttcaccggtaagaagattataacctcaaaacccttttttcgcttatatcctaatcatag

SEQ ID NO: 114477 - DNA, 380 bp, Arabidopsis thaliana columbia
caaattctttgctgaacaatgctgggctcactgaagtaattgttgcatgatcaaatcagctcaggttgaacttaacagaatctctttttgagtgcattttcaggataattgagatgttgaacattttggaattgatggaaacagatgccattcctgataataagggattgtcagtttactgcaccaacagtaccaggacagaacgatattccccatatgtacttcaaaatttaacttctcttccgttggggtaccaagttttccaaggacatgattcagatgtgctaaatatatcagctccagtggctcagaactttgtgcaacccggttgctctgttcccatttatatcgataatagtgacacactacttattcctgat

SEQ ID NO: 114478 - DNA, 380 bp, Arabidopsis thaliana columbia
ttttcaaataaagattagggttttctactttcacgcttgcccacactacgtttttttttgtttaaatatacagtaaaaaaaaattgtgaagaaaaataaatacttacgtataggtgtatagccttttaaccaaaataaaaggacgtgatttacattttttttttttttggaatatttcagtaaaattgttgctactaaattagtttttctgtaagcaaagttttctagaattgattcagcttgcttccaaattccgtatctactagattctttcaacattgagtttctttcattaggtcagctcaaagcataaaggtgttcttcatataaaagacattaaaccagatagtaaaccataaacttaggtaacattaaatcag

SEQ ID NO: 114479 - DNA, 346 bp, Arabidopsis thaliana columbia
tgcttctttacagagcattaaaccgtgttgaagatatggagaatcttgcgtcttccggtaataactgtgttgtggaggagttggagactcttctaactgaatctggacacttacggacacttgcattcctctatgcaactaaggggatgggtgcgaaggctcttgctatttggcgtctctttacgaagaattattcatctggtctatggcaagactcagatgacttggtaccctatttacacgataacgagctcattaggttatctggtaaagaggctgctgccgcagaagcagccagaattcttgaggaaccctgtgatccagaactggcattgcagcatcttag

SEQ ID NO: 114480 - DNA, 362 bp, Arabidopsis thaliana columbia
aagatatttcatttgagatattttgttcgatcacattcccatgcatgtgtgaaaagtttaaacaccaacttggttcttctacgtacagtataaaactaaactctatacacactctccaactaacttttgttttctttaaatatttatccaataataaccaccaatccaagcaaaaaaatatgtagaagaagttgaaactatacatagaaaaaggctagtatatattgtaagttgttcatttgtttgaagtaacatcgatcgggggttttggaaaccgacaaccctaaggtttaggtattgcgagtttacgacgatagacaagaaaaaagttgggccatgtgaagtcacgttactcttggaat

SEQ ID NO: 114481 - DNA, 381 bp, Arabidopsis thaliana columbia
atttacaaatattcctaagctatggccgagtaaattaaaagaaaaaaacagtatttgttgattattctattaagaaagaatggaaaaataaaaaacagacatggatctgtttcagtaacaaattcgttgcactccaaatgattgttaacgacttcgacatcatcatcttcattattgagtatttctttgtttgttggagtttgaattagatcaaaccaaaactatctctcttcgtctatgacaagaagatttaaatcaaaattagaattcattaatgaaaattgtgatcttttttttttttgattcttttgtttgtgttgtgtcgatatatattagcatcatgagttttcagtttggcttcaatacaattttacaattttg

SEQ ID NO: 114482 - DNA, 376 bp, Arabidopsis thaliana columbia
atatttttgtaccttcatttgtttttatgtcttccttgaagaattttgtaaccaatgttatatttactgtatttatctatatatgtttgaccaccttttttccttcgtatgaatcgatcatattgtatataatatattaaaaaaaaaatcaaatttatttagtatactagacttctaggttttttggagcacatggaaaaagcaagcacagattcacaacagagtaggtatgacgaaactggagaatcttttcgtcaaatgtgaaaacctatttctgttaatgtaaataaatatactatttgttattagtaaatgtggaggacggattagtgcttgagaatgaggtaatactattaccgtatttgcgagaaggtgt

SEQ ID NO: 114483 - DNA, 280 bp, Arabidopsis thaliana columbia
  unsure (1)..(280): unsure at all n locations
tttacaaatattcctaagcatttaccccctaaatcaaaagaaaaaaacgttatttttaaattattctgtttacaaaaaatcnaaaaataaaaaacatacatgtatctgtttcattaacaaattctatgcactccaaatgatcgttaactacttctacatcatcatcttcattattgagtattcctttgttcgctcgaattcgaattatatcaaaccaaaactatctctcttcttctatgacaagaatatttaaatcaaatttacaattcattaatgaaaa

SEQ ID NO: 114484 - DNA, 256 bp, Arabidopsis thaliana columbia
cccccttccttgaagaatttttgtaccaataaaattttttcgttcttcaaaaatatatcatcaaccaccccccccccttcctattaatctatcaaatagaatctaatctattaaaatataaatcacaatctatttagtatactagacttctacgttttttcgaacacatgcaaaaagcaatcacatattcacaacaaaatatctatttcttaactccaaacccattacatcaaaacacaaaacccatctctgttaa

SEQ ID NO: 114485 - DNA, 370 bp, Arabidopsis thaliana columbia
ttgcaagatgactatatataccacaaccgtgaattagaccaaggaaagggagtatgacaatatggaagtgagatctgattagatcttatctcatgtaatgttatgttccaacagcactgaatactatcgagcctttccagattcgtcctgaactgaaagaactagacacattccgggtagaaacaatggtaagatgccaaggaacattttgcattggcagacattattacagggaagcactaatcgaacacagctgattttctcattcaggctaagcctatgccagcttctcagattcctttttctctacgagtttgatgaaattgcgaacaattgtcttgccttcggttgttataatactctccggatg

SEQ ID NO: 114486 - DNA, 379 bp, Arabidopsis thaliana columbia
ctcacattgcgaggaaaaaagattatttgactcaaggaaacaaaagataattcggaaatttcttttgttttcctctcagtgatgaaattacaaaacccagataagaaaaccctaagagaaggctttagtcaggaatctagtgtagtggctttagattctggagttttagctatgagtggtttgaaatgcgatgggaaattcccggtcaaggatgtattaatggaagaaggtggtgataaagtgaggaagattcaagtttctgggggaaatatatcacttgttgttgattttagtggagctaggactagttctaacaatttctttgagtctaatgctagttgtgtcaatgagaatctggttaaaggaaatgggtacagag

SEQ ID NO: 114487 - DNA, 369 bp, Arabidopsis thaliana columbia
caaattagctatttgaaatcaagagcatctgaaggtcatgtacatcattaacttccgagataaaattgatcctcctggtaccttttgcctttcattggcgattgctaattgctgctctaacatatttaaacgctccttctgcaacgaacatgtctcctgcagggtaaaactaaatatgagacaggaatgcgaaaaatgcacaactttgaactgacatccaatactaaaacaaaaaaagtactaacctccaacgatcctgattttgctgtcaagatgtctagctcttgcgatgactttccgacattctcctggtacttcctgatctcctcagacagcttctgtgactgtacaacttggcgatcacggtca

SEQ ID NO: 114488 - DNA, 374 bp, Arabidopsis thaliana columbia
gttgaaatatataccctaaattggaaatagagaacctaaatataacattttaaatttattttggttgaatagatttaatataaaattgtggttttattattgtcacttttaaaaaaatttcaaataattatttaagtgctatttatgtctaaaaaactttgtaatgctatttttgtccaaaaaacttaaaagtgtactatttgtgggaatttctctacatatactacttctacttgacacacacacacttgcaaacttgcacttagacctaatgatggctcttacacaagacaagtagccaccctacatgcattggaactctcaccccttgattcactcttctactctaactcttagacttacaacacaacact

SEQ ID NO: 114489 - DNA, 345 bp, Arabidopsis thaliana columbia
atcataaccaaaaaaccaactttatagcttctatcacaactcataccagttctctatccattttttgggtaccgacaaaaactatttcgattctgttcacgcgatcctttgcttaatctgctacactcgccaaatctaccacgtcttctatgctcagccagtcccatccattgatcttcatttatatctacaagcttcaatgcgaccatgagtctgtcaaaagtctctcgacacaagctacatcgtcttctctgaacgacccgaataccaactggtcgaacaggccacctaaagagacgatcctgctcgatggttgcgatttccagcactggcttgtcgtcgtgg

SEQ ID NO: 114490 - DNA, 240 bp, Arabidopsis thaliana columbia
tctgcattgtttatttccggaatatgagtgtgtgacttgttagaattgaccctatggatagtacagagaatggggtctgccatctctatcaagatggttttactttgactgatattcattcaagtatctacctactcgaatttcatgaacttcatcacatttatactatctattatgcataacttaaattctcaatcctcgtagccagacttcttttcatggtattagatttactatgaa

SEQ ID NO: 114491 - DNA, 374 bp, Arabidopsis thaliana columbia
aaaaaggatttgtcgtatgtctatttcagaaacgtaagtttttattttggaaatgtgagtttccatcgtgtttccaaacatagatatttaggaaatgcgtttccataacgattttcgtgtttccaaaaaatttccgtttccaattggaaacgggaaacggacctcggagcgactttccatgcaacctagctactcaataacaaaaaccttcatttctctctcattacaaccaaaccccactcctctttttacaaccaaaccccactccgaattccagtgtccatccacaaccatcatatcttaattttaagtttgcatcgtacggtccacaatttaacatattattttgctttctaactatttaagagtttgta

SEQ ID NO: 114492 - DNA, 379 bp, Arabidopsis thaliana columbia
tggaaacctgaaaaggcggataaatcaagaggaacacaccaggcataatcaaccctatcctcaacaggccacgaacatatgggcttgaatgtctccttggagaaatcggaactttggagcagtgaataacagaaacggtagtatgcaaaataccaaaaccaaactcttgggaaactggtagacataagagatctaaggtcaccggattcatgatttcaaccttatcatgataaattcgtatggatcgtttctataagagatccaagtgattgtcgatgaatctcttgtcgttgaagagagcgtaccattgtatgcatgtcgctttgaatcgtatcagagagtcgatcggggtcctgtaaagtatgtcttctactataca

SEQ ID NO: 114493 - DNA, 423 bp, Arabidopsis thaliana columbia
ggccccgggcacgcggtccggggttcgagcgctacgccccacgcacatcagcacgagtggggagaataatggcaagggctcctggctcagcgcggggtgacgataaccattgtcactacacctcaaaacgcaggccggttcaagaacgttcttagccgggctatccaatccggcttgcccatcaatctcgtgcaagtaaagtttccatctcaagaatcgggttcaccggaaggacaggagaatttggacttgctcgattcattgggggcttcattaaccttcttcaaagcatttagcctgctcgaggaaccagtcgagaagctcttgaaagagattcaacctaggccaaactgcataatcgctgacatgtgtttgccttatacaaacagaattgccaagaatcttggtataccaaaaatcatc

SEQ ID NO: 114494 - DNA, 322 bp, Arabidopsis thaliana columbia
caatatttgaatcggtcgataaggcccataagataatatagatgggcccaagtttctttcgaggtgacacttgtgacttgtgatccgatgaatagcttgttttttttctttctaagataacctaatttgcattttgtttgttgatatctaatcgaaagctgctggataatcagctcccattttccctagtgaggaagtatgtgccatagctaccaagggcactgatccaggttagatcaacctttgaacttggactacttaattatctctaggtctatgcataagtttgattggcacagtgattggttaatttgatgtcaat

SEQ ID NO: 114495 - DNA, 378 bp, Arabidopsis thaliana columbia
ctctggaaaactaagctgtgccaacctccaaaatgaaggtggctccttgtgttgaccgtccttggccaccttaacacttgctgaagtgtcatctgagtgaccaagagggcggctaaaagtctgtgaatgagagcgctcattttggggatctgatatcaaaaggggtgatataggggactccggatctgaaccatttgatttctgacgttgtggacactgaatgtcaatttttggtaattctggtaaccgcatctcgaaactatcttgtcttttgatggtgggttccttctcaccaacatccaacgacgagccattttctcccagtttctctggtgcagggctatgatcattgggcgattcttcactattaaagcacaa

SEQ ID NO: 114496 - DNA, 371 bp, Arabidopsis thaliana columbia
atctgaaggatattatgcgttttcattacagaattattatgaagctatgcgacttgaaatttatccggatgatcgaaattatatactctattatataagccttattcatacatttaatattgaacataccatagcttaataatattttatacgtatattacaacgataccgttttttaccacaagctaattatattatggctataatttattattatcatatctattttaattatcaaatctctatagcgcgtcatctagtttatttcaaacatgctaatattataaatgtgtgtcattatataccacaaagagattcaaaacaagttccaatttaaagagtgaagagatttaaggatttttcgggaagat

SEQ ID NO: 114497 - DNA, 379 bp, Arabidopsis thaliana columbia
gatttatgagacaagtcaaaagcccatgatcatgggaaacgttcttctttggacgtgagagtccgagacaaccaaaaagttatgacagcccactttctttcagaacacacattttaacctttttcattccaatagtactttccaattttcatatcataggtatataccaaagatagagtgttttgagagacggtcattatgtttggtttagaagttcttttatgattattgtttaattctcaagtctctataacgtgtcatgttaattattttaaacatcctagtaatagaaatatgtctaattagagaccacaaaaagattcaaaaaaagtgccaattaaaagagtgaagagatttaaggattatccgggaagattcg

SEQ ID NO: 114498 - DNA, 375 bp, Arabidopsis thaliana columbia
gtttatcaatcgtggttaagctcacagttgttgtgtatttggttctggtaggtttttgaaagtattaagcagcaagaagagacaaagcaaactgagtttgcaacgaaggcgcaagagtttaaagctatgcaagcccaagctgaaactgtgagatcatctaactttaagtttcttaaccaatatttggatgtctgtttatatattcttgaacaattgtgttaacaactaatggctacctaatagaaatgagttagcaactgtggcataacgattatgctgttatcttagtaaagttgaaaatagtgtcttgtgacaaaatctgcttccaatggtcactatgatacatattgattaataatattactcggtttagct

SEQ ID NO: 114499 - DNA, 250 bp, Arabidopsis thaliana columbia
  unsure (1)..(250): unsure at all n locations
atcaaaanncgtccaaacaacatcatanaatgacagaaatgcgtactttattttttcttattactgtaaccaaattcatcacaacatcatcatcccccactttcaccattacagaccttcaatccttcaaaaccctatctacatattcacacactttttttcctcttctttcatcctacttttttttctcttaaatatcccctttctctaatctacttcgatcaccacttcttctttctcaccttcttct

SEQ ID NO: 114500 - DNA, 373 bp, Arabidopsis thaliana columbia
gtttaagtactacagattcaaatcaatccaactaatggaaaatccagaaagccaatcaacaaacttaaggacatccattcccaacataatccacagaggctggagctaatctcactgctcttccttttacctcatcaaaacggttagtgttcataggacttgactgcttgttcagacctagttctttcttaaagattgttatctactttgttttaattatgtttttaggaggatgatgtattcttatgttttataatgtttgtaattttattttgtaatatggtattcttttaaatataattaataaaaatatgtttggaaataattaataataaatattaatattaatactgaaataaatacataaatactg

SEQ ID NO: 114501 - DNA, 278 bp, Arabidopsis thaliana columbia
atcgacgacctacagaatcattaccagccatgatacgaaaagtccacgatgactactgacagaaggtgggaccaccaaaacaacataaaccacagaggctggagtctaatataactgatcttactttcacctgatcaaaacgggaaatgttaataatactggactgctagttcaaaccaatggacttcttaaaacaagctatctactgggaaaaaattatggttaccggactgaagatgcatgcataacattcacaatgtggcagatggcataatagc

SEQ ID NO: 114502 - DNA, 307 bp, Arabidopsis thaliana columbia
aaaatatacactaaacagtaaacacaaatttgaaaatatctaaaaccaaaactcaaagtaagaatatgaaacaaattaacatgaaaaataattggagtttcccaaattcgtttgtttctctcgatccgaaatatgttaagtttagttataagaggaaattacattacaaacatatacaaatttttagattaagacagatggagaagaaaccagacttgttacatccaaaaggatttgatttttcttctctttaagcaaacaccgacatcaaaatctatcaaccaacacatcaatactatttaaccat

SEQ ID NO: 114503 - DNA, 358 bp, Arabidopsis thaliana columbia
cggacgcgtgggcggacgcgtgggtttgcatgtaaaactaataccctgtttctgcggcgttcttgtgctttcgcttctctgagttccgtatactcttcgagcattgaaagtaggcgattctgaatgaagaaaatcagattaagagatcaaatgaagtatataaaagagaaaaaggagaaaagagaagaagaggggtttttttttgagagaagaagataagatcatacaccatcaaagagaaactcatattctttctctgattcccatattgtaatcttggaagctaatgcttcaaccatagctaagaagagtgaaaaagatttttagtaagataagcattcatcaatatgacaatgtg

SEQ ID NO: 114504 - DNA, 374 bp, Arabidopsis thaliana columbia
gtcctgaatgtgtgaagagaatgattgaaacagcagatatagaaggtgatactgtaagtattctcaatcttcaattgcctcattccctctagctcttgctctctataatgtaattcatcccaaagtttttcttgttcacagcctctgcatcacgcagcaagaggtgaacatgttgacgtggttaggtttttgctgggttccggggcttcaccaacgacacaaaactcctatgggaaggtgaaaaaaaacatttgaaagcaatttctatctttggcttttgaagtatggttagcgataataacaaggttgtgataatgcagacaccaggtgaattagctgatttaaacactgatgctaagaggatactcgaagaa

SEQ ID NO: 114505 - DNA, 330 bp, Arabidopsis thaliana columbia
gaagaaaagtgtggacaaaatggcctgaagacaacagcttttatgaagcagtagttacacaatacaatgcaaatgagggtcgacatgcgttggtatatgatataaacacagtgaatgagacatgggaatgggttgatcttaatgagattccaacgaaagatataagatgggatggagaggaagatggggtaactttgaatgtaggacatggcggtggaacaactcgtgggaatcgaaggaccttaagccatggtggtagagggagaggtccaagaactcagccaagaagagaacatttagcaacggaaaacggtggtgggaggaagtttt

SEQ ID NO: 114506 - DNA, 373 bp, Arabidopsis thaliana columbia
  unsure (1)..(373): unsure at all n locations
ctttgccggagaaaatattccggtagccatgctccggtcattaacttgttcctcgaccattacttcgacctctctcttcttccgctctttccgccagctccctcgctcttacttgtctccctcatcgtcaacgaccgtcgtcggtgcctccggccgcaacattcgccggctttctactctagaagctgctgggagacggctatttctacgacgaggcttgaaactactctccgccgcgagtcgtggtctcaatggacagttctctcgcttatctattcgcgccgtcgctacacaatccgcaccttcttcttatcccggtcaagatgaggctgagaagctnggatttgagaaagtctctgaagagtttatctca

SEQ ID NO: 114507 - DNA, 378 bp, Arabidopsis thaliana columbia
gaagcttcaatgtctgtagtagcaattaacatgaacacgatcaatcacttgtccaaaacctgtaaaaccccaaatatccaatcaccgatttgcttcgatcgcaaacccttttcatattctctcattcctctgtttccaaaaaccctaaatggcttctcctcttactcttcttccgttagtcgcagatcgagattcatcattcccaagagacgacgattctctgtttccatggagtggcaagactgctcagtaaagatggaggtcgatgttccagtatcagtagcgtataatttctacttggatcgtgaatcttttcctaaatggatgccttttatttcatctgtcgaggtgttaaaggacaagcctgatctatcacgt

SEQ ID NO: 114508 - DNA, 377 bp, Arabidopsis thaliana columbia
acaacatccaacatgaatgctcaccaaacgcttctttctcaatcttaattcaccaatcacctcttgctttccataaagagataaactgtgtccaaggcttaaatatgtggcgaaatagttcttccgatgtgaacaacgagctttttaagggttaccgaaaaggaaatccagacaagaagatcaatgagtttgttggagcttttgaatttcagaacacaaatgggaacaatctcaatgttagtgtttggtacaactccaccttcaagaacgatacagtggttcgacctatggcactgattcgagtccctcgcttagttaatctggcatctaatgcatatcttgagttcctaaaaggttctaagacaaagatactcttt

SEQ ID NO: 114509 - DNA, 334 bp, Arabidopsis thaliana columbia
gttaattacctatcaaactggttgggtttaaaacccacaaaaaacccggtacaggttttaacatgaaggcatgtaacagataaatggctacacaaagaaagagctgaaaatataaacaaaacgagtttaagacacgcatcggtatgtaacatgcgactcactgagctcgtctctgtatgtgaccttcatgacttgcactgtctctagtccatagtatcgcacaatcgggtctttgctcgatcaccgtggtagctaaccaaaaaaaacattctaattcagagaaaagctggctcagagtcagagctactagtactagtgatgatcaacaccaaaa

SEQ ID NO: 114510 - DNA, 268 bp, Arabidopsis thaliana columbia
attttggaaagtaatttgcatctataaaagataatgtaccatgataacgttaatgtacttgcaaattgtctaagttatgtaacgaattaacgaaaataccccaaggcaaagtcttcttcatctttttttttattttcaacttgttatatacttacacagttttttttttgatatgtaaataaataaagttaactaaaattatgacgagaattgttacacatacattatttcatatctactattctttaattctaaattacatttttct

SEQ ID NO: 114511 - DNA, 378 bp, Arabidopsis thaliana columbia
cctcaatggcacgaaatcgggagggtttggttttggtgctcgatgtaagtcctgcgatgcatagagttgttcgggatgttaaaaaggcatgttcaatgctacttcagaagaagttgatttacaacaagtatgatgaagttggaattgttgtctttggaactgaagaaactggaaacgatcttgctagggagataggcggatatgagaacgatacagatagaaggaatatcaaagatgatgatgaattaacggcagaccatgtgaagcagcttcctcgaggaactgtaacctatggcactgattcgagtccctcgcttagttaatctggcatctaatgcatatcttgagttcctaaaaggttctaagacaaaaatactc

SEQ ID NO: 114512 - DNA, 378 bp, Arabidopsis thaliana columbia
cgcattgtcagaaccttggatatctgcacacacaaggccaaaatgtcactctaatcctttagcaaatagcacagtaaaagaatcagctttaggtctctacaagggatacaatgaagtaccaatacgtctcacatcaaagatttaaacaatacacatctaatggatctacaacaacactaaacaacaaacaaattgataacacacatagcttatggaaccattaaaaatcaatgctttaacaataccaaatattaaaaataacaaattcagtaccaaaatcaaaaccccaagagctgaaaactggtaatgttatcgaaaacgatctaaagacaccaaaaaccctaattagagacttataatataaattctgttaacgct

SEQ ID NO: 114513 - DNA, 372 bp, Arabidopsis thaliana columbia
cggacgcgtgggcggacgcgtgggcggacgcgtggggaaatttttgattatatatttttcctaactcgttggtttaatttttctttgttaactgtattaggcagtaatatcattagaagatcaattgagttatttcgaggagtacatagagaaagtgaagaatatagttggggaagcaagaaaagacttcatagtagccaacagcttattcttattggtcgcaggcagcgacgacatagccaatacatactatactctacgtgcaagacctgaatacgacgtcgattcatacactactcttatgtctgactctgcctcagaatttgtgactgtaagcttctctcatattttactaaaaagcctaatacgttt

SEQ ID NO: 114514 - DNA, 378 bp, Arabidopsis thaliana columbia
cattgatagtgacttagctactactagctagtctactagaatcatcggttgcataaaattagtttaatatgtacatcatgatatcatctaataaaataaaaaaatgaaatcatctaatatgtactatccttacgcatttgctaaatttatttctaaaatgatatattatatggtttagagtccgtacgtggattgtatatgaaccatgaacatcaatttgtaggtaaggtactacgtagtctcgattggactgactagtgactacttcgtcccatgctataacaatatttctattatttttttatgaccttttttaattgacatttgtcgtattttgttaaacaatttttttttaatgttcacataaccccaataaaa

SEQ ID NO: 114515 - DNA, 381 bp, Arabidopsis thaliana columbia
gattttcaggtttgtaataggtaattttctaggtaacgctattttattttttcttcctgaataacacatccacatttttcttgaaaatatgattctagtttttgagacaagtttttgccaattcagaattataattggtaaaactgttccttagcggtaaaatgttttggtccataatgtcaatcatattttttctgttgaaactgtcagtttttttcaaaagattctcggaaattttcagtgcttttaaaaattcgcaagttttcaaacaatatttttataagaaaaatttaataaagtttttggctttggaaagctcttattatattaaaaaacttttaaataaccttttcatgcacaataatagttgtttccaataat

SEQ ID NO: 114516 - DNA, 383 bp, Arabidopsis thaliana columbia
attattggtttcaattatcgttattttgtatagagactattttttcttaaatcgttttataagagtcacaaatcacaactcgtcctaagttctctctctattcgactaacccaagcacgacattgaccactatgcctgggcctattgaccacactacaataaaatcgcacactacatgaaacttgggttgaacatctaattttctctaattaaattatttttactttgcttaaaagtttttgttcctgtcagttatacaatttaaaattgtttgttatctttagttcttcaatttgatttatgatgtggcataaaatccagaaagtgcatggttcccactcgacaacggctaaattcctcaacggctcctttttgactctagc

SEQ ID NO: 114517 - DNA, 373 bp, Arabidopsis thaliana columbia
atttgttctattatagatcacaaatcgacgactctttcacagattgtggattctgttgctgcgttgagttgtgaggttacaaaggctgatatagcttcgtttagcttgttggattcaggagatgggaatggtgataaagatgtgattggtgttgctggtgatctcaaggttttgcttaacgggtataaaggtacagggaaattagaaatagaagagatttcgaaaatcccttggattcatgggaaattcaggtatgtggtgaaaagcgtgcacgcggatgctaggagagaattgaattccggtgttaaaggaggcaaaactgggtctggaaacactgggattggtgaggctttaggaacaacattgttacctt

SEQ ID NO: 114518 - DNA, 466 bp, Arabidopsis thaliana columbia
  unsure (1)..(466): unsure at all n locations
ccgtccgcannaccttnnngccggaaataatggggctttnctccgcganntttctttcttcttcctcgccccgtcggtcaccttctctcgtcgttgttccggtcaccacncnnactganntgcttcncnntctcgctnnnctctatcgcnnactccaccnnntaaaaccganacccgtaccctcgacngnntcgtttcaaatctcttccccagcaaaccacccaaactnnatcctnnctcactcngnnacccgacnntcgtntcnnctcactttcacncacnncaccaannnacccgagatcccccctatcccgnnacccnnngttttctnnntcaattcaagtcttcacccaccctatcnntctagagctnnntcactctcgagaacactnnnttcgtcgcgtcaccagcaccaaagactacccaaaagcttaaccactcnnagtcgactcgagccggcgactca

SEQ ID NO: 114519 - DNA, 375 bp, Arabidopsis thaliana columbia
ctgagaaagaaatgttggagtagcggacaaggcacagcgttggatcaagtgcccaataatacgcgtctgtctggttaacacagtcctgtatcaaccagcctgccgcaccctttatacaattaaaacagtcacttggagttgatcttgggatgcacatccctaatgcgtagactcgatcttgctcttctccaatcgaaccgtagtagaaaccatcttgagaggcggtattgttaggaagagaagagaggataagacgacgatttgaatcgtatgtaccgttgggtgtgaaatatttacggttctctatgcatgtttgtgctgaaacagaagcaacaccaaaggctagaagaataaaacagaggattgataagaaac

SEQ ID NO: 114520 - DNA, 306 bp, Arabidopsis thaliana columbia
  unsure (1)..(306): unsure at all n locations
atccaatccattattcatgactttgcacaccgttnnatcaagggcaaggagaaaattaaatgtgtggggacacacacctcaatcaaccaaccagccacaccctttatacaataaaaacagacactcggagttgatcttgatatacacatccctaatgcatcgactctatcttgctcttaaacaatcaaaccctcatagaaaccatcatcacaagcgctattgttatgaaaagaatataccataaaaccactattttaatcctatataccgttgcgcgcgaaatattaactgaactctatgcatgtt

SEQ ID NO: 114521 - DNA, 377 bp, Arabidopsis thaliana columbia
agagacacatggaaaatacgcattcaatatgcatatcaatgacttatgaccgacgtgttcgtggtgactaggatgacacacttcctaaaccttatttgccgagagcactacaagcacctgacatggaacacccacaaggaacaccagatcatagacataatggccttagtgttcttcagcaacatgtcgctttcttcgatttggacaataatggcatcatttatccctttgaaaccttctctgggttccggttactcggtttcaatttactcgcgtcgcttatcttggctgctggtatcaacatagctcttagctatgctactctcccgggatggttaccgtctccgttcttccctatatatattcacaacattcac

SEQ ID NO: 114522 - DNA, 288 bp, Arabidopsis thaliana columbia
ggaaaggagcaaaggaatacctgcagagtcctgatatatctttttggatagccaagatcattcagcgactgtagttccatgaactttgccagttgccgtcctgctcccaagaccctgatacacaaattggcacccaccattgataaaagcccctaaaaccaatgcccaaatattcaccattaaagaattatgggccttaacctacatggtactatttgacctggaatcctgctgagaaaccccctctgacccactctctgagaacgtgctctggcatttttgtgccac

SEQ ID NO: 114523 - DNA, 303 bp, Arabidopsis thaliana columbia
aaaaaatgaaaaatacgcattcaatttgaaataaatttgtttgatttgatttcggttatggtcttaaaaattttatggaataaatttgagtcagtttttctaataaaaaaatatttttggatcgttttctattacatatttgagtcggttatgattttaaaatatcttttagttgtttttccaatgctctttaactttttagtttttttcaatcataaataatgtgagaaatattttttaaaaaagatttttaattttaatttggatcattttaaccagattagaaattgttatgtacaaaac

SEQ ID NO: 114524 - DNA, 373 bp, Arabidopsis thaliana columbia
gtgctttgtagaaattagcaatatagtgctttgtagaattttatgaccacaagattggtaagatcatttagtcaaatatatgttttatctcttcttattgattgagatgattatttttctaatgagtcgatccacatgtctcattccaattgatctttatgatttagtttcatatttgttttctttaacatatgaaatttttttgttagtgtagaaaatctaattttcacacaattaaaaataatttttacaataaattatgattagcaaacacttcaaaaaaatctccattacttaaacacttcagtttcctactactaattaaagttgtttccttttgtttaaattgtgattttgctttaacaataaagat

SEQ ID NO: 114525 - DNA, 370 bp, Arabidopsis thaliana columbia
cccatttaacaggtgggggattgagactctagctggagaaaagggtgttgcgtctaatcggggagatcgaatttcacaaatgggcatttccaggttactccaacaagaaaggaggtggaagtaactgtaactctacctttcctatcgtaaaagcttctactttcatgtttaagatatagtgttcgttgattaatttatcaagaattctataataatgtaatgaaagagattaattgttggctattttcctaaataaacagactttaacaacgatgattacctttgatcaaaataaaataaaagtcaatttttgttagcacgagaccagcaaagagacaagtatccaaaaatgatgtataatgcaatataa

SEQ ID NO: 114526 - DNA, 375 bp, Arabidopsis thaliana columbia
  unsure (1)..(375): unsure at all n locations
ggaatacttggcggattttacaggtgacaagtgacacttcactctccaccgggttgatctaacctgtcgacagcttccnatcatccccgggcatgaatacaccgcagagcttaccgccatttcaccaagattggatctttgatctttcccacatatctttatctctcaatctatctatactaaaagattgcgtcttggtttctctctatacgttgagacttttgtggaagattgagaaagagacagagtgaataaaaccgtcacggtagagatttggaatattggtttatttggtcttttacgtccacgtggcgtaattacaagacgttacatgttatcaaagtcttgaaatctgtatttgcttactcagtcttt

SEQ ID NO: 114527 - DNA, 416 bp, Arabidopsis thaliana columbia
  unsure (1)..(416): unsure at all n locations
ccgtccgnngattttttctggtnnattcgannnaaaattctgtaacaannnaatttaanncatatttgtggtttagttanntgagaactatttggcgtagctannnttcaaanntccagagggttntnncgataccgnntgaaannaaaaaaacncnntgggacngnntatcgcnnccaaatnnncattggnntccggtacctgggnnatgtagcncnnttcccnncccgggcccaaaatgcncnntaatatttacccaatgggctctggtgnnggttaagggggtcgagganntactcttnnggtcaagannaattaatgggtgacttgggtgaagtnnacagcaatnntattaggannaataatcnngagttagaaagctgtagnnntatgagtgggcgacagagnnggtttaa

SEQ ID NO: 114528 - DNA, 374 bp, Arabidopsis thaliana columbia
ggagatgatgaagtacctgatgccccagtacgtttgaaatagaccagggtggcaatcaccattccagtcgtcgtgcgtccacgtcccatttgacaattgaaaatgatctccgtattaatgtcagcctgagatatcttcctaatctgaaatcatagtgtattgaatttttttattgacaggaacatattaatcacaatataatgttatgctcccagcaaataccaaatggcaagagataagatcattcaaggttgtcgactacgaggaatggcataggacttaccaacagatcaaaatctgtttcttttggtgacttttcatccgttataggaacacgttcataatcgacaaggtagccttcagcttgcagttct

SEQ ID NO: 114529 - DNA, 374 bp, Arabidopsis thaliana columbia
cggacgcgtggggtccttgttcacagtagctacccatccatgagatgcggctattgttacagttgtgtggttatacaccaccagctccataggcaccttcttttccaaataagtggagtcatcttcattagcgttaaaaatgatgagtgttccaaaatacggtccacaacgacgagcgccgattatgttacaatgagggctttgcaacaaagacgatgatgagaagccattagagagaagtagagaagacctaacggacgcaggtttcgaaaggcagagcttcgacagccgtctgagaagcagagacattgaattgttcacagaaaagtaaaaccctaatttgaagaaatggttattttcagctaaagttaaaa

SEQ ID NO: 114530 - DNA, 378 bp, Arabidopsis thaliana columbia
caaaaaaaaagtcttctctagggatactacaaatttaagtagaacttgatacattaatttaagagaatataaatcctaccaacccaacacattgtgaaaatcagaattcacaacatgagagtaatcatatcactaaaacgtcgtcgtttgatcatatcaaaataatcagcaaagatataaatgataagaaagtcgagaattcgacatgttccaatacgacacaagcaaagtcattggcatgctggagccattggagtagtcgccggtataatgacaacaagagaaaatgatgaaagctcccataatttctgatgctttgccaaagagaacaaggtaaataaagattccaaaaaccatgtacgtagctagctttgagag

SEQ ID NO: 114531 - DNA, 336 bp, Arabidopsis thaliana columbia
acagaaacagacaaacaataatgtagcttaaagacgatgatgaaaaggaggtgagaacatagtgcatcggcggtggcagagtaaaactattacagatggtttatgaagtccaagaagacagtggtggagtttcagaattcttgtaagtaactatataggtggctgacctttcccctttcacagaatcgggatgtcccatggcgtcaagctcggccatctcttcgatactgagtttcacagataaagctcctatgttctgattaaggtttttgatcttagaggttcctgggattgggcagacatcatttccttggtgatgaacccatgccaaagcta

SEQ ID NO: 114532 - DNA, 369 bp, Arabidopsis thaliana columbia
gtttccatggagttgcattttagttgattcttggaaggatcatttgttctagcctatcttcatcatgttatacaacatcagtttttgttttgtattcagattttaagacgttcctctattgtctatttgtcttgatctgtcttgcaatggcatattctgctggaggaaacctatgtcaaggaaagatacacaaaatttgccggatgaaatagtgttaacaatatttttcttagagcatactcattgctgaactatttttttgaatgtttcaaaaccaaaatattaaatattttaatatcaaaaacaaactaactattaaaaagaagacatacggagaaaagagtctttaaacaaacgttacaaggtctt

SEQ ID NO: 114533 - DNA, 371 bp, Arabidopsis thaliana columbia
gcagtgcttacgccacatccctagctagatccagtagccggcacgggtgctccaaggtgatgttggatcatccttattcattagttcaaacctctatgaaactggaccatgaattaacttcaatcatatatttttggatccattttgtagcaggaatcgattcttggtggatggagagtataaagacgaagatgggattggtggattaaggaatttggtgttgtggttttttcaactaatgattgtggttttcatctgaaagagtatattataacacagtagagagttatacaaattttctgctttagatttcagctcaaaattacaaatttctggtgcatatataattctttggaagcctttatcacttt

SEQ ID NO: 114534 - DNA, 243 bp, Arabidopsis thaliana columbia
  unsure (1)..(243): unsure at all n locations
agaatctaacctactcgggccaaacgcacctgatgactgggggggccaacacaggttgtggtgcangaattgcggcgagcaccgatgcacccagagatcaaaccgatgatcggactctcactgagaccgaagctgcacattcaaaggagaatctaccccaagtcataaactctatagagacaactataggagtccttcatcagatacaccttaccgacacttatagcacacccgtgtctgaac

SEQ ID NO: 114535 - DNA, 451 bp, Arabidopsis thaliana columbia
  unsure (1)..(451): unsure at all n locations
cgnntccgcggaatanngttctgatccagcaacccnatcaagttcatggtnntgatgccctcttggagagagagttgacanncttctcttgctagtgtgtgcgatgaccacngnnagctttnnnactcgaggggttgacctnnctcctccnnntagctcnntggtcanntaagcnnntcttgagagagtgagcncctcttnngttgcagnnntagagtcacccaattgagagatgccctttcggagggttcttaatcganntatagttgacccattgataggnagctcttcaattcaacccggccacaangaacggtggtgcaccagctcaggagaannaacggcagatccttcttgaaggattagcaacttcacttcaacttgttgatccttttagcaaaactggtcagaaaaccggattgaccacaaaggatgatatcgtgtttctccg

SEQ ID NO: 114536 - DNA, 331 bp, Arabidopsis thaliana columbia
gaaaaagcaaccccaaagatttgtgaccaaaagcggttagcggtgaccattgaataagtttcttcggcttgagttgggttaaaagcacggaatgtatttgcaccatcaccatcttcaaataaagtattttctacagtagcaccatgaatagcgcatagcagagccgcgcccagtacaccggcgactcccatcatatgaaatgggttcaatgtccaattatgaaacccttggaaaaagaggatgaatcgaaatatagccgctacaccaaaactaggcgcaaagaaccaaccagattgacctagtggataaattaggaagacagaaaccaaaa

SEQ ID NO: 114537 - DNA, 372 bp, Arabidopsis thaliana columbia
  unsure (1)..(372): unsure at all n locations
gtcgtaccggccgccgtatcctcctcttcctcagccaccatctcaaaagtgcgggggcccctgcgttgtgtgggccgacaaaaccccctactgctcctaccccaccaccgtcgcatcaaccgtacttatatcctacgccgccgccttctcctacgcatgcttactatcagcaggggccccactatcctcaattcaaccagctccaagctgctnctactacgacacctacctcagctnctcctgcgatcgctcccgatcctcctcgacaccagggtcccaatgaccacgagaaaggggcctccaaacaggttggaaggcgggagcgtgctaaaccggatccatcgaagcaccaccacaggtctcatcttcctc

SEQ ID NO: 114538 - DNA, 376 bp, Arabidopsis thaliana columbia
aaaatttcaaaagagttgtggcttgtgggaggctatagcatcgcttggtttgatcgtacacatcatggatggtgaatagacagggtccaagtgttaacgttgcgcaatcccataacgtgacaagaatgtcggtgaaaatattggtgttcttttctctccaaattaataaactacaactaagagtactatttaaaaaagagttaaaatgacacaaaataactcaattttttatatcattaacgcattatacgtatagaatttaaataataacatatacatttccatataggataaataacctcatcaaaaaaaaagaagaattttattattagtttagacttttttgtcaatattaatttattagcttcttaagttt

SEQ ID NO: 114539 - DNA, 377 bp, Arabidopsis thaliana columbia
  unsure (1)..(377): unsure at all n locations
gataggcatacctaataattgtctcatgtcatatacgaaaaataatagcccatcgtttgtgatgatatgatgtatatatatatattnnntttttcagcaagtgtaaagcttcacatatacgagaagagaataggacatccaataatgattatttttattttgttggtgtttatatatcgttttcatatatatgtcttcatataacataaagttaagattaaaatcgtaaagacacaacaccaacctttttatatataataagattcaaaaagataaaggataaacataaaccatattcactcacaataatacaagtgtaccgtaaatatggaaatgtttgaagtcacggattaaattcgtgttggaaaaagtttgct

SEQ ID NO: 114540 - DNA, 373 bp, Arabidopsis thaliana columbia
  unsure (1)..(373): unsure at all n locations
gaagaatatgaggttgggattaatctcaattcatcaccgaatctcattgcgcgactttgttcttgtctgtggcttctcctccatgccttctctttcgatattcatatctgcttgattatttctttagtagttgcagaagcttcataagcagcaaaactaaaaggttctaaagcttttgtcctaatttaatccattcgattcatacatgttatttcggtaaattttgctgtcttaattcgtaccatttctgtctttttttttcttggtcctactgaatcaaagtcatcatcagactggtccaattttagctttaagaaactcaactaatttactttcatctctntatcagatatgaagcaactctggactttct

SEQ ID NO: 114541 - DNA, 191 bp, Arabidopsis thaliana columbia
ttaaactgcaagaaacaaatgtcccagtagcatgaccacttcagcactggtcaaacatattatagtggggtaacatggataaagctatttcagatactaatccagtcgaaatagagtagttttgtcttagcaaaatcaccaaactttatctcttgataccaatacagagtgactgcacaagtctgagaaca

SEQ ID NO: 114542 - DNA, 373 bp, Arabidopsis thaliana columbia
gcggatatctacttgatcgatgaaccgagcgcgtttcttgattcggagcagagaattatagcttccaaaggcataaagagattcattcttcagatgaagaaggcggcttttgcacgatttcataatggctacgtatttggcagataaagttattgtgtatgaaggagaaccttccgtggattgcacggcatcttctcctcagtctctacgtagtggaatgaatttgttcttgtctcgtttgaacatcactttcagacgagatcctacgaatttcagaccaagaatcaataaactcgattcgatgaaggatagtgaccagaagcttgcgggatgttattactacttggatgattaagagagagatgacattgag

SEQ ID NO: 114543 - DNA, 368 bp, Arabidopsis thaliana columbia
cggacgcgtgggtgaaggttcatccataaatccattgttggagctcttctagaaagcgtctcaagttcgttggctcgttttttggtctgcaaatttctcctcattccttcaaaacttatggaccctttttgtccaaatactgatatttcttccaaatctagttgcctcaaagaagatgcatcttctaagtgggtattccaagttgtctttgattgttgagcctgaatttcaaagatagaacggttaaaattaccgataaaactgctggatctgttggctaatgtgtcctcattataagctttgtttgcttccttgtgagcttgttgttgggaaacacagaagatgtttgctaatgtgtcctgatccac

SEQ ID NO: 114544 - DNA, 373 bp, Arabidopsis thaliana columbia
  unsure (1)..(373): unsure at all n locations
acccacccacccnattctcaaattcaaaaaacataattttctanctcaccccacccaaaaaccccgcttccacaaaaactcgtgcgcttacacacaaaaaatatnaccctattctttcacacaccaccttaccaattcacaattataattcctcaaacacttccttatctctaaaacaaacaaccccataatctcaatcatatctctactccaaaaactatcaccctctttcaaaaaattctcaaaaattttcacccctcctaaaaattcgcaactttacaaacaatactcttataataaaaactcaccaacgtctttcccttccaaaagctcttattatatcaaaaaactcttaaataaccttttcatccac

SEQ ID NO: 114545 - DNA, 376 bp, Arabidopsis thaliana columbia
gtcacccattggaccatctctagccaaaccgaaatccgaaagctttgcgttgtagttctgcagatgcagagaaacattaagataaacttctctgactgcatccaaaaccaaagctacaaaaagtatcaatcatgtcataccgaatctagcaagatgttagatgctttgaagtctcggtatataacttgcggttgagcattgtgaagaaaagcaagtcctctagctgcaccaagagccatacgaacccgcgtgttccatgaaagtggctgatagaatgttcctcctattatgagaaaaaagaaagaaagattaaccattgtgtataacaagttcttccatgagcttctttatctttgaagatttgaacttacttctg

SEQ ID NO: 114546 - DNA, 371 bp, Arabidopsis thaliana columbia
ctaaaacctattaagagagaaagatatatacagagagagatcatggacggtaggggaggttgttgcatagccagatatggtggttactgtggtcgctacggtctctccaaagcagatcgaatcatgcttcgttttcgtcccattgctcctaaaccggccagcgacggtggaagtgtctctctcaccgggaagagcggctccaccacaactacaagtggtggaagctccgatctctcaggtaaatctgggagaggaaagaggaagtatcaaaaagatagttccggtgggaactcccgaaagtgcaataagaagaagagagatctcagtggagacgctgctactaccacggcggttacattgtctcttttacc

SEQ ID NO: 114547 - DNA, 372 bp, Arabidopsis thaliana columbia
atcacatcaaatgagaagaccccattaacagggttggcattagcagggactgtccggtctagaaactgtgcgagatgacggttaaaagttccgtcagggcgacgcaggagattgtaagctagcttaaagttggatattagaacccatgtattgagaggaaccactgtctgcaacaaaaaacacatgacagaccaataaatcagagaactttcagacacaaaaccataaggagatagccataaagatatcaaagatgagatttttgagagctttcacttgtaaaacaggggaactatacacaaacacaacaaaaccttataagagatatgattacaacacttgacagtagaaacagttcatgggataacaaaa

SEQ ID NO: 114548 - DNA, 303 bp, Arabidopsis thaliana columbia
acccaaacaacccgtcccacgatctaatttaacatttttttccaaaccagcccgccaaacagatgtgttcacaatttttgtttcagtataacacaaacaaaaactttcaccaccatataactcaacaaatacacctacttgttcaacactatattaccatacttacctacaaaacagaacctcaactctaacaattacaactccctctaccacaactaccaaaaaagcaacaaacatatgtcggccgctctacaggatccaacctcacgtacgcttacatgcgacgtcataactctcctctat

SEQ ID NO: 114549 - DNA, 369 bp, Arabidopsis thaliana columbia
gagcctagacaccctcaaaaaatataaactatggctgagctcatactcgttttcgcaactattgtcgtcttcattctactagccgacgcatacatctaccgtacagtggcggagttcgaggaagatgatgacgtgagcaaccgacaacatggtaagtgccagagggagtttgtgaagcatcagatactaagaggttctagcaatggatccttatgagagctcagcaaggaagaatcgtataccaagctgctgactttgagctcactcttgatgtacaacttgaagacgatgagaacacaatggggcctcaacaacagtcatatgtcaaaatgggtagatatgaatgaaggcaaggggacaagacgagtg

SEQ ID NO: 114550 - DNA, 370 bp, Arabidopsis thaliana columbia
cttgagcagattcttaagggtcagtccaagctagttgtcgagttcaatgggaagtttgatgctatctacacagatcttaataggaagatcgacaatttgagctctcacatgaagatactggatgttcaagtagctcaaactgttcagtctatcaagagacaagagggttttcttcttgatacccctgatactaatacaaggaagagctgtaacgcgatcatggtcagagctaaggaggaaagctggaaagaatgaaatgttaaggacgagttggagctcgctgctgcagagttgctgtcgaccgacacacattagtgtcgattgacacaaggcaattcgatctgggacgaatcagctgacgagacagtgt

SEQ ID NO: 114551 - DNA, 374 bp, Arabidopsis thaliana columbia
ggaactccctggttaacagcgaaggccatataatacccaggcggagaaacggcgccgttaggtggagccgtacactgaatcctataacgacctactccgtcaggcacagacggagcaacggtcaacttaacgagccgttgaccttgagaaaacgaatgagtcgcaaaaggcgcacttccccaattcatctgaattatccccaccaccagcaacggcacggtcacgaacacgtcgaaaacctctccgtaccgtatgatctgcgggatttcttggatctctggtcggagattagctcgatccggtgacagatactccggtgaaaacgcttcgatccgtagctccgttgggaattcggcgttgaatttgtagaaata

SEQ ID NO: 114552 - DNA, 372 bp, Arabidopsis thaliana columbia
atacaataaaatgataaatgtgttatagtcaatgaataaagaataagagagatggtgtgatctttacacgtttggggcctaaaccaaaaaaaaaggatgggtccaatatgccaactactactattgtattgagagtaggaagagagagaaaccttaatggagacagagggacagtggggttatgtcaattgtcatattattcaaccactcaccaatcactcactccaaatctatatctctctttttacaaataattatgatagatttgatgataagttggttctcaaatcccagccgttcaatttatccagatatgcaagaaaatattagattttaaggaatcggcctttccttatttggtaagactaaata

SEQ ID NO: 114553 - DNA, 312 bp, Arabidopsis thaliana columbia
ataccacataatacacactccatttttctcacctgtacctacactcatattgcgtgtttcaactattttcgtttttatcctaatccataaatcaatgatatgtcccacacttccaaatcttccaccaaaattatacccaaaacacccagaaacccaactaaaaccagaacacactatgaagcctcatcaacttacaatcttcaaaccactcatccgtttaaccaaataacaactaataattcttcacaaaattactattcatataacataactcgacatgcttcttcaaaccaattctctcaacacatccac

SEQ ID NO: 114554 - DNA, 369 bp, Arabidopsis thaliana columbia
cagccctgtcgccgttatgcgaaacccccaaatcgaaaaaccggatacccttgcatcgccactctaacggtgtcgatctatatcactcttcgaaactttcccaagttgctcgttttatgtatccacgctttattttgggtattgtaaattctctgcaattcaccctcaatttgaattttcacagcggcaacaatataagttcgagatgaaagaagcagaatgaagaagaaagagagcgtgtaaaccacgcacatgttatgtttggaattattatataaattacatcacatatagtttgaggtgttagtttttcaaatataaagtttttgttggttagttttgctaatttcccttttcttttttttaaca

SEQ ID NO: 114555 - DNA, 368 bp, Arabidopsis thaliana columbia
caacaaactccctccattaatattccaaccaatcaacaaaccaaatactcggacatcgacatgttgggggtatcaaacaatatcactcttctaaacttacccaacctgctccatatatgtatccacactttattttgcgtattctaaattctctccaattcaccctaaatttcaatctacacagcgtcaacaatataacttccacattaaacaaccacaatcaacaataaagagagcctgttaaccactcacatgttatgtttccaattattatataaattacatcacatatactttgaactcttagtattttcaaatataaactatattcgtatctattttttctaaaatcccttttctatttttta

SEQ ID NO: 114556 - DNA, 365 bp, Arabidopsis thaliana columbia
  unsure (1)..(365): unsure at all n locations
gtcgtaccggccgccgtatcctcctcttcctcagccaccatctcaaaatggtttggcccctccgccttcggcgccgtcnttaccccctcctgttcctcccccaccaccgtcgcatcaaccgtacttatatcctccgccgccgcctcctcctccgcatgcttactatcagcaggggccccactatcctcaattcaaccagctccaagctcctcctcctccgccacctccctcagctcctcctccgctcgttcccgatcctcctcgacaccagggtcccaatgaccacgagaaaggggcctccaagcaggttggaaggcgggagcgtgctaaaccggatccatcgaagcaccaccacaggtctcatc

SEQ ID NO: 114557 - DNA, 352 bp, Arabidopsis thaliana columbia
caaagaagtagtgccggaggtggtagccaccggagattattgttgttttccgacgagaaatttccatcgtggttccctctttccgaccgtaaactactggaagattccaaaactacggcaaaagccgatcttgtggtggctaaggacggttcgggtcactacagaagcattcaacaagcggtaaacgcagctgccaaacttcctcggagaaaccagagacttgtgatatacgttaaagccggcgtttacagagaaaacgtggtaatcaagaaatcgatcaagaacgtgatggttatcggagatggcatcgattctaccatcgtcaccggtaataggaacgttcaagatggca

SEQ ID NO: 114558 - DNA, 372 bp, Arabidopsis thaliana columbia
atcagctctcgactattttattgagagtgaaagagaagacaaagatggggagttcaagttacttgctacaaacgttaggccttctgctgctctgctgtaccgtcgcagctaataaagtaccactcgcaaacgccaagtataagcacccaaaagagccactgggagtcaggatcaagaacctgatgagccatatgacccttgaagagaaaatcggacagatggttcaggtggaacgtgtcaatgccacaaccgaagtcatgcaaaagtacttcgtcgggagtgtgtttagcggaggagggagtgtgccgaagccatatatcagtcctgaagcttgggtgaacatggtgaatgaggtccaaaagaaagctcttt

SEQ ID NO: 114559 - DNA, 321 bp, Arabidopsis thaliana columbia
acgatccaaccttacgtccccttccattctacctcatacaccttctataaaggggcctaaactcaattttttggccgtcacaatacaacatccatactctaaaaacccctaccttacccaacttaatcaaaatttagcacatccccctttctccatcattctttacaacgaataatcccacaccaatcaccctttccaacaacctcacacacttacatcttaaaccaactctccctataccaaaaaaagtttttcgaaagttctgcctaaattcacaaaacatgcacccgctctcttccgaagaatcgagaactacaaatt

SEQ ID NO: 114560 - DNA, 373 bp, Arabidopsis thaliana columbia
gagaatctccacctcactctcgccaaacgcatctctgttgtaacttgtggggggtccaacacagagtgttgtggcatggatatctgggagcaatggtacaatcagatatcaaaccaaagatgggacttcaactgtgaccgttgctgatgattcaaaggagaatctttcccaagtcataaactctattgagaaaactttatgagtccttcatcatttacaccttaccgtcacttctttcacacccgcgtctcaactccatcttctccagcgccttaactctcttgtgatggagctagataacatgactaagttgtctgagaaatgcaacattcaaatccccatggaggttcttaacttgattgatgatgggaag

SEQ ID NO: 114561 - DNA, 353 bp, Arabidopsis thaliana columbia
  unsure (1)..(353): unsure at all n locations
catttctcaataacaaacttatttaacccaaatcctgaccttccaaccgctggagcaatcactttttagggcgaaatacacnccncacccaccaaacctacaatatgctcctatattcttttaaataaaaaaacccttaaacaccaccaaaccgtcccctccattaacagactacagtccacaactatactttacccttctcacaatcactacaacccaaactggcaaccaaccacaacttacccaaaaaacgatataaaagattacattacctaacatacaaacctacacagaaagaaacaattagataccaaagacgcttcaaaaaacaaaaacaaaacttctctaatcac

SEQ ID NO: 114562 - DNA, 363 bp, Arabidopsis thaliana columbia
  unsure (1)..(363): unsure at all n locations
ctaatttaatgtcctccattattctcacttcctcctcatttacaccggcagcttatctccacgtggttgttcttcatccaaaaacaaancttacttattttgtcaatctctctcaataaaaaacctctatgctataacttactaatctccaacaaaaaaaatctatataataagccatcaaaacatctatataagaagataaaacaatgaccacaacaattaacaacttattattaccaacatcactacccctaacaccgatgataataccaatgctacataacaacaacactcatctctctatcatctctcaaaccctaaatcaccaccaatccaaatcttcctactcgtttaccatcacca

SEQ ID NO: 114563 - DNA, 370 bp, Arabidopsis thaliana columbia
aatctctttactctgtctttttctcatcgcctttgcttcgttaatcttcctcggaaaaaagatccaacgatctaaatggaattttcctcccagccctcctaagtttccggtcatcggaaacttacatcaacttggagaattgcctcacaggtcacttcaacgtctagccgaaaaaatcggagatgttatgcttattcacttagggtttgtccctgtaactgttatctcatcgaaagaagcagctgaagaagtgcttagaactcatgacctaaactgttgcagcaggcctaatcttgttgggacgaggctactttctcggggttttaaagatgttggttttactccatacggtgaagagtggaaggagcgg

SEQ ID NO: 114564 - DNA, 366 bp, Arabidopsis thaliana columbia
ctcatggcagtgatgcttgttgaagatttcattgatcttagccattcaatcatcattgctttcaccattgtcttgtttgccattcttcttgtacccatcttcataccaatcgcaacgagttgcttcacagcatcaaccgacccctgtgacacgcttgaagaacctctccttggcgatcagcaaggtcaggatccgggacagtccaccacccctgaccatggtcctgagcttatatttagtgaagtggaagacgagaaaccaaaagaagtagatttgcttcctgcagtggagagacataagagaattgctcagttgcaagcaaagctgatgcaagcagctgcagagggtgctgttcgggtcaagaga

SEQ ID NO: 114565 - DNA, 374 bp, Arabidopsis thaliana columbia
ctgaaacaaagaaaataataatccaatctacttttatttttgcgtacatcgctctccatcttccattaaagtcttaccctttcttcatcacttgctcttgaaattttctctcccaaaaaaggtcaaattccccacttgattccacttcccctttcatgggtttgcgtttgaattgtgtttaaagactttatatttgatcatcagattcaaattcttcatcaagatcgttgttttctctgaaagttgttgcctttttgctatggaggtattagggttctacagtggatggtgttgggtctcgctgagccattaaagttgttgtctttgttatggatgaattaggggttaggattttgagctgttgttgttgatga

SEQ ID NO: 114566 - DNA, 352 bp, Arabidopsis thaliana columbia
gagaccaactgcacgttgaattcctatccatgatcttagttgatgacgatgcaggcactttgtttgtgtgtgtttgatttcattactttccttacatgcgcagcttcttccaatttccctgtgcttgaatatatattggctagtgttacaaatgcagtttcagaagtaggatccagctatagaatcctctcagtctaccatcttccacgttcagtgtcacctatcgccatacacacattgagaagtgtggttcagacttcataatactatttgcatggcttgttaattaacatctgttctgtacctctttttcttcctgcattactcatctaattaaccatactttatattg

SEQ ID NO: 114567 - DNA, 370 bp, Arabidopsis thaliana columbia
cggacgcgtgggcggacgcgtgggcggacgcgtgggcggacgcgtgggcggacgcgtgggccgccattgaaatctacgtcatcctttgatctctagctctttccaaaaatccatgcgttgcttactttcggaatctggggaaattccaattaaatcaatggaaaaaaaaggttaacctttattggttttggaagaattggttgtggtgggatctattatttattgaacggaaacctagaggttgacagagagacgtttctaggggtgagtgagctgttcaaataagaacacaatctctttgttaaaattggggtgctttgagctctcatgtcaactagtgttcaaagagagacaatggatcttgatttga

SEQ ID NO: 114568 - DNA, 340 bp, Arabidopsis thaliana columbia
  unsure (1)..(340): unsure at all n locations
ccggggcgacccacacatccgcaaaaaaaaactttccatcaacttttaattcatcccgaaacactaagaaggagggccctcaaaaatgagggtctaccaccaacaaaacacnacttcaactaaaaaccaacctcatctataaacataccgcacacataccgattcctcccaacaaactcacacaggcacaaccttacctaccattaaaccataaacaccaccttcacatgaatcataaattcaacccccaccaagacatcgaaacacagctcacgataaaacataacctccaagaagaagcattaccaacacaacacaaactacaataaacctctaccaa

SEQ ID NO: 114569 - DNA, 365 bp, Arabidopsis thaliana columbia
ggagttctcaccacttccagactgtgctgacgcaattgaaactgattggccaataacagcaacccatggaatgtcagttgtttttggaggtccttgatttgaaagaagagcctgaacagctgcaagggctttcgagttctctgctgcctggtcaatttttccaataatgcctattgtcctagtacctataagtaggaaggagggatgttagctaatgagtattttaagcaaattgaagtgataataggtaggtaaatcaacagttattatcaggtatacaaataataaacaaaattaagataagacagatcggaaatacagatgtactcactctctggatcatactcctttgcaatcttcagggc

SEQ ID NO: 114570 - DNA, 367 bp, Arabidopsis thaliana columbia
ctcagcattatattttctgacttcatacataatgtaggacgcatgttgtagttcactaggagaacaggccatgtactgtggttcgtcgactgcatagaaaagggattcataccatctgtacataggccgagtcgcagatttcttggctcagcagcaaattgtggccattgatcattaatttgagcccaagttgctgaatccacagggtgtttcattgttccatccgtacttgcattgctgaaatgccaccgcagatcttcagacattctttttgatctaaacattcttctgaacctatcctttattgggaaatacctaaggactttagccggaatccctttcttttcttctcttgtgtgtttatcta

SEQ ID NO: 114571 - DNA, 317 bp, Arabidopsis thaliana columbia
  unsure (1)..(317): unsure at all n locations
atcaacattatattaactgactttatacataacgtatgacgcaaggggggggtcacaaaataaatcaggtgttttacacaccnntacacaactgcataaaaaanggaatcataccatatatacataatccaagtcgcagatttcatatctcaccaacaaattgtgaccacacatcattaaacagagcccaagaagcttaatccacaaacagcttcattgaaccatccccacttacattgctgaaatgccaccacaaaacaccaaacattctctttgatctaaacattctacacaacctatcccttatcgtaaaatac

SEQ ID NO: 114572 - DNA, 369 bp, Arabidopsis thaliana columbia
cggggggacccacgcgtccgaagactgatatcctcaagacacattaacccctcatattctcccacaagaggggaaaccaacacttttatgttttcaaagacaccttcattacaaacaaatcaacactcacggtgtaagacaccgaccctgcagagtccataacgaatatacaacattagtttgctaaacacgagccagtaaacatgtccatcgaagcctaccccaccttcaccgacatcgaacctgataccataaagcaaatcttcaccagaaaacttgaaccggacaacgacttctacgtatacacccgacactacaaccccaccaagctcaacctaatccatacaatcgcacctgtcgaaggcaccc

SEQ ID NO: 114573 - DNA, 366 bp, Arabidopsis thaliana columbia
agagaagaaagatagagaataattatgatacgcaaacatgtgaaaacgggggcgatacaatgttgtggggggcttctcacaacatctgaaaacaaaacaaacgctgaaccagctcagatgatgaacttcaacaacgacacgtgtccttaagccgaacacatcgtaccctaacaagtcaaactcctatacaaacgccacaagaacactcctctcctcttggtccctaacatcttccatgactacaaccttgaatcatgtgatcaaaacacatagctggattcaacaagaacacaacttgtagagaaagaacactacacgagcctcagacttagaaactagaagtacatcaaccatatcaaggaaact

SEQ ID NO: 114574 - DNA, 352 bp, Arabidopsis thaliana columbia
aacagcttcacctttctgggttttctcagattgtgtctaatcttgaaaaaccttttattcgtagaagcaggagtgaagcaaagaagaagaagaaatggatgtagtagtagcaacactatctctctactcttattcttcttcttagtcttcttttcaagaacaagcacaagtacaagttgtcgtagaagaactgttaaacacttatccacaacttcaacatcatctacaccacttgaatcaagaatcacttccaaggttattgcgattagtatcgtctcagggattttaacagggttggtttcagctttggtgttagctttcttggttcgtagcattgtcaaattcatgaaac

SEQ ID NO: 114575 - DNA, 363 bp, Arabidopsis thaliana columbia
gaataaccggtaaatccttaacttttcttccattggaaggtttcgaaaacggtggaatttaggtgtgtttgtgtgagacgccaaacgggtatgttcagatcccagtggggattgcatgacctttgttgcttgatggggtcgagtattcagtgccaatggctacaacagaaagttgtttggttgctagtaccaatagacgctttaaagctatacacttgtctggtggtcgcttttagtgttctagtgaaagatgccatgactagagctccatctgttagattaccttctccaagaagagctgctcttgtcatgtatcatcttcaagatccttctaatttcgagagattgtctctcattctcaac

SEQ ID NO: 114576 - DNA, 359 bp, Arabidopsis thaliana columbia
aatgggactattgttgtatccccttcattagctatcacagaaatgttaaataatgatgatggtggcctatgttcacatgatcttaacaagatcacagtcacagagacgatcaatccagatttgaagttggtacgtgaggataggcttgacactgatctttccgtgatgaatgaaaagatgctaaaaaaccatgttggggattcatcaagtgaaagtgccgtggccgctttgagtatgaataatggtatggctgctgatctgagagctgaaaatttcagtcagagttcacccatagacgaaaaaactttagatatggaagccaattcccctattactgactcttctttgatatggaattt

SEQ ID NO: 114577 - DNA, 459 bp, Arabidopsis thaliana columbia
  unsure (1)..(459): unsure at all n locations
gcgacgccaaacgcgtccgctttttcctttctggaggggttnnntggcatttgctcgcttattaaccnnngttttcttcttttggatgttacgannagtactgcaactgtggaggagcgtactccacagngtgatcagacnnaagttggnatcagtgcaaggggatgaagnnttgggaagctatagcttcnaaggatctgnnaaagacagagctttcagtacttanncggacagcannacatactgnngtggggaacaatgacncnngtgaccgtactttcgtgnngtggccagcacaactactnnntaagttactccactttgatgtcatcgtcattagtccaataacttccaatgtcggggaggttagtttaaatgaggaataaagtgtttagaaatttgatcaggngggagaataataaaagccgagntttgaatcttttttgttataagtaatgt

SEQ ID NO: 114578 - DNA, 234 bp, Arabidopsis thaliana columbia
ctttcctctagatattacagcatttcatctataaccacctccaacaacagtgggcaccaacaaaatggtggtgtactcacaaacaacacaacaataccacactgcaataacgaatttgataagcaaagctcaacatccgcaagacatatatcaaaactactgacataaacaaactgtatgtaaacatcaccataaccgtcctcatggaaaccaaaacactaatcaacattccca

SEQ ID NO: 114579 - DNA, 245 bp, Arabidopsis thaliana columbia
cggacgcgtgggacgatttccagaatttaatccaattcccagaagtggaagttggtgaagttcttttggggattatcagggttagaaacttaccaaatggacctaagggaaaggtctcggttatgttcagttaaacttaacccgaatttttttttaatggttgaccttaaactgcccttttattccagaattggggaaaggcaggtggttcttttccagtgtgaacctccagaaaagctggtttt

SEQ ID NO: 114580 - DNA, 200 bp, Arabidopsis thaliana columbia
  unsure (1)..(200): unsure at all n locations
ggaccgcatacggcaaaatttcttcaaggaccgttaaccaaccatccgcggagatcccacgagtggtggggttcgaaaaacacngccgaccctacaccgaacaaggctaaccgtacacaaaccacctatgtacccaacgacgacaactactccaacaaagagcacacaccaccttatcaacacatatcctcctccatacc

SEQ ID NO: 114581 - DNA, 378 bp, Arabidopsis thaliana columbia
gcgatgaacacatatgcgacaagaacaaacgcaaccgctgacactacaccgagtataattggcagtggactgctctttccattggttgatccacctgacccgataacaaatgtaattttttttacttgcataatatgcataactaaatgtttttttttttcttttcttcataatattcatgttatgatgattactgagagctttttctaattaacaaacccataagataacaagataaaatgaatagaaagatccaaatacaaacctggactcacttcattgctccctccagttcctcctttgctagtcccaccggagcctagcacaaataaaattcaatgtgactctcttttttttcactcaaacttcaaaggtgat

SEQ ID NO: 114582 - DNA, 376 bp, Arabidopsis thaliana columbia
cttatgacttttcaattcaagcaggttgttaacaagactgctgcaacctgtgcccctagagcttcggcgcgccagtaaaaaccctgctctccctggaactactctttacaaagtttttgaggttcaaggctatgcatcgatgttcctcggaggtgtcctttctttcaacctcctctttccctccagcgaacctgatttatggaggttgatgggcatgtggtccatttggatgttcagtatgtctccttctctactttcttctaactttatttattccaaggctgcatttttgcccctaatcctttactttctttccagctattccttctcttcgggcacgagactgtccaagtaaagagaaagaggctcttaacta

SEQ ID NO: 114583 - DNA, 370 bp, Arabidopsis thaliana columbia
ctctaatgtctctaaagtttggaaatgtgtctgctgttgtggcatcaactccagagacggtgaaggatgtcttaaaaacattcgacgcagagtgttgttcccgaccttatatgacttatcccgcaagagttacatacaattttaacgatctcgcattttcgccctatagcaaatattggagggaagtacgaaagatgacggtcattgagctatacaccgcgaaaagggtcaaatcgtttcaaaatgtaagacaagaagaagttgcctcattcgttgatttcatcaaacaacatgcttcattggagaaaacagttaatatgaaacagaagttagtgaaactctctgggagtgtgatttgtaaagttggatt

SEQ ID NO: 114584 - DNA, 241 bp, Arabidopsis thaliana columbia
cttaaatatttcgagttaaattttagtataatattttttatttttgttaataaaattaaattctaattatatgtagtttctgtttataatgttttgaattttaaaatgagaattataatttgttcacccaatatttctattaatagttaccaaattttgttgacatatatgttctttaaaacaacatttcagtaattttgttcaatctcatcttactctacatcaatttgcgttggcatcc

SEQ ID NO: 114585 - DNA, 379 bp, Arabidopsis thaliana columbia
gcctgcaatgcctgttaaatgatttggttcgacgaatttattttgagcagtcgatcgtgctccggtctggacgtaagtgaagctggaagatttatgtagagcttgttgattcaggatctaccatcagatttcttcctggtttccaaggccctcttcctttcgagctcgagaccgggtacattggtgtgggtgaggcagaggaagatcaaatgttctactacttcatcaaatctgagagtaatccagagaaagaccctcttcttctctggttaagtggaggtcctttctgttcttcgttcactgctcttatttatgagaatgggccaattgctttcaaggctgaggaatacaatggaagtatcccctctttggtctctac

SEQ ID NO: 114586 - DNA, 366 bp, Arabidopsis thaliana columbia
ctttttatcaaaagctaaaacgatatgtttgtaatttggaacttgataaaaaacagttccagtattttgtatatatgtttttggacaaaaggaagaatgtatcaatgtaaagtgtggtaatatattttgtatacaatatgcttatttatatttgaattgataatatattttgtaatgaatcgtggatttgttcccaaaagtaagaacagcatatttaatcattgtacggaaaaagttgaatgggttaataaactgtttgtgttctgataaacttttccgttaattactcaattatcgtaggcttctggcttcttcttttaccatgcctccttgctccagtccacactccacaataagcaattattt

SEQ ID NO: 114587 - DNA, 367 bp, Arabidopsis thaliana columbia
gggagagggaataataaaaaagaggttttaactaaaatctgtgcttcctgcacgctaacagatggggccctattatcgtattcagtactggatgttgacacgtgtttatctctttacttattttgccgtccgatgaatctatcatattcttcacggcatcttcatttttttgagaaaaataaaaaatcgaacatagtatcttgaagtgaaattttttactattgctttgataaaacaaattactcgatatcattttcttcatataaaagtaacaaagttgattttcgtttgtggtttaatccttggcctctccacccgactgtggataaattcaatatcattttcatcactaaattggaatatatat

SEQ ID NO: 114588 - DNA, 366 bp, Arabidopsis thaliana columbia
cgaaccgatacgatggattaagaaaaaaatccggtatggactgatttaactgaaccattcggtttcgtcccgtttccttagttcacttctctcgtctatccccagtcgtcgccgattctctcttaccggtgtcaactcgctccaccgtcggtaagttccacgagaaccaaataaggtttccaatctcaatccaattccaaatcaatttcgattctcgtagaactagtccagtgaatcagttttgctattcatactctgttctcttatgaactaagattactatcttcaattcatagattagggacacactttgcataggttttggtgaattagcctgaaatgttgtttagttttcgaattgaagta

SEQ ID NO: 114589 - DNA, 373 bp, Arabidopsis thaliana columbia
gaatgttaattattctcttagttttcctttaattatacaacttcaactttgaatggcaaaatataacaacaataaagacatactagacattttgtaactatgtgtaagatgttaaccatcaatattttagtaatcaatatgtgtttatcattttttttttatatgaagtcgtgtactcgtgtgcttttgtgttctttaaacatattttgtgccagaaagattcgaatttgccaaaggaataattaaatcggatggtcaaacaaaacatgatatttatcactcgtgctctaatcttgatttgctgaaatagtaaaatagtaaaacatgtcatgagatccgtatctctcaacttaacactttaggtctaggttct

SEQ ID NO: 114590 - DNA, 332 bp, Arabidopsis thaliana columbia
gtacttgagattcatttcccctatctcccgaaaaagacatcatatggacgggacacaaagggtatgttttgctaaaattacgattcatttcttgctacaaatatccactcgcaacataccatatctcaatacatagccgtaatttttcataccgcatgcacataaccataataagaggcatcggccatatagcgacttattggacctccatcaagcacaagccatcccgtataatgcatatccgaaaaatcattcttccttgagggcactatagcccctatgcttgcatggatagctacaaggatgcttcctacacaagagtggaacaagct

SEQ ID NO: 114591 - DNA, 374 bp, Arabidopsis thaliana columbia
gtttttggtaatcggatggcgcgaaatctgccatgggttctgcttattattgtggtatcgtgtcttgtttcaacacttgaagctagtgaaggagattctgatcctctttacaagtcatgtgttgatcaatgtcagaaaactggatgcgtgggggatacttgcttccaacactgtaaattttcagctgatggaaaagccattgacggtccatggtacatgcaagagccactttacctgagatggaaacaatgggattgccaaagtgattgtcagtacgaatgcatgatgacaagagaagaagaaagaaaaagaaacggagagagacctaccaagtatttcggtaaatggccactcaaacatgtctacggaattca

SEQ ID NO: 114592 - DNA, 367 bp, Arabidopsis thaliana columbia
agcaaataaatcagtaattatgaaagtggtaaatggtttcttaaatagtgttaagtccactacattttataagtccattagtttttggattcgtcttaaataaaaacttgggctgtttaaatcaataaggcccattcaacggcccattataaacaatacttacaaaagaaaacagagttaggttccactagtcctctgcaactctcattcaagaacttcccttacaaagctctgaaaataaaattctacaatttagagacaaatgaatcaaaaagataaaatggattcagaagagtttctctataggcgtcccaatcaatctccaaagaaggatacttgtgcaaacccatcaagaaacctttatttt

SEQ ID NO: 114593 - DNA, 290 bp, Arabidopsis thaliana columbia
gcttaacgtcttgaacaaaccacctagaaccatgtacatggcacatattgttggaacactcatcttatgttttgtttacctcacaacggattggtggctaatgaataccatccccaacatatgtgattcagttactaactcggattggacatgtccatgcgcataaccataatatgatgcatcggtcatatggcgacttattggacctccatgaatctctagacatctcttataatgcatatccgaaagatgattcttccttgatggcgctatagcccctatgcttgctg

SEQ ID NO: 114594 - DNA, 318 bp, Arabidopsis thaliana columbia
gtgaacttctgcttataccagtttgattaactttgtctactatcagagatgaaatgaagaagatcaatgagaataagatcgacggaagaacaactcatgatcggagatttgatcggagatgctctgataccatatcaagaatcttcaaactctagagagagagagtgaaggaagaagaagaagacaacagaaacaaaataatcgtctattctcgttaagttgttaatgtgtacaatgtgctgtatatatactctattacattttatactatagagtaaaatatactcattatatctactgtatatagtgttataacgt

SEQ ID NO: 114595 - DNA, 295 bp, Arabidopsis thaliana columbia
ccacgcgtcgagaagctgcatgatacgataatcggaaaacacgacggtggatgaaggtgttggtcatcaacaccaaggatcgcctaagaccccaaagctgcgccaggtacacaaggcaagtgttgatcaaccagctttctggacaatgatgatcgccagcacgtaccctttcctactctctttctaataacctgagcataaagctttgactcgcgcccgcgcctacgctctgccttaaagcgaagctcgctagtgcgacctataggcctagcttagataagagagccagaacaac

SEQ ID NO: 114596 - DNA, 417 bp, Arabidopsis thaliana columbia
  unsure (1)..(417): unsure at all n locations
agccttccgaaagtttcagccaggggagacatagatggcaaggaagtggttattttttatacctgaaaaaaccacttttgttggaggaaccaactactaaaacctaattggccgtttggtttacgttttcgaccaatgctttggcaacttcaaactcctaaagcaacacattttggcattgaatttggacattttttattgcacattaacgagataaaggatttatacaaaagaggaaaacataaacataatctaaaccaagaaactcacgtctttgcgtgtgcagaagcaacgganaggaagaaatatttctttggaaatgccttctggatctctgcataccaatgaagaatcttggctcagctctgaaacaaaatcacaaagcatcagaaacaaagaaatcgaatgaaaacagag

SEQ ID NO: 114597 - DNA, 403 bp, Arabidopsis thaliana columbia
gttaattaaaacagagaatagggttggacatatgagtaacccattcgagtttgggtagttacgttcgggtttgggattaaagggtatatgatttactacccaatagaataattcaaaatattcggttctggttcaagtcgggtccatttgggtttgggtcagtttgaataaaaagttttaggccctaaaaatacccaaaaaatagaaacgggtattttgtatgtagatagcgggtctccaaacaattttttttgggtattttggtaagctttaataaatttaattatatttgaatatattttactaaattttgacaaacataacaaataattttgaatagtttagttgttttggatatttaggtacaaaattaattgacatatttagatttataattataatc

SEQ ID NO: 114598 - DNA, 400 bp, Arabidopsis thaliana columbia
cggacgcgtgggctcactgtcgatatacggtcgtactttttcttctatgctcttctctttgcccggtgtttttttctctttttcttgattcaatgattgggtccctctctaagctcaagctgctgtcatctaaattaattaatatgcgaaaataaaaattattgggtttatttttgttggaagttttgtaattttgtgtagagattattgatcagtttttggttgtgtacatttatgagttgtacttgtgccctatcctttgaaggttacatggataaacaagttaatgtcttgaatcggctgagtctttattatagaatcaatttgatgaataagttaaaaatttgaagctggttttaatattcgacaccaatatagcaatcaacctaactgaaattga

SEQ ID NO: 114599 - DNA, 301 bp, Arabidopsis thaliana columbia
  unsure (1)..(301): unsure at all n locations
tccagaattcaggaagcgacccacacatcccaatcccacgtacgttcccattttactaatgaacaaggacccaaccncaagagacaatcaatattatatagcacattnaaccaccaacgcaactacacagacaccaatcacccccaaacatataatctctcaccttcaatcaactctctacagaaagagaatacccaacctccactgctacctatcacactaacactaatcaaaacaatcatgcacacatacactctcaaactagcaatactatcatctcttacactgctactcctacaca

SEQ ID NO: 114600 - DNA, 408 bp, Arabidopsis thaliana columbia
  unsure (1)..(408): unsure at all n locations
gtccgtagccgtatcatcgtctccgtcgaactgatgagagaattttgacttgtgagactcttctcttgttatttcgttttccacaattccgaaaatgcccctgatttgtgaacaatgagcgcgtctacttcccgctcctttgtattttggggtcatatgggccttttacaatagagaagcccataaaagagagccgttgatttgggctttccggcaaacactcgtaagaaccttgtgagtgatcaaaacactatgtttcttctcaatatactgaaatcgttcatgtgagaantatgaacattataaccatcaaaaatccaaattcagaaaacattactatncacaaattagaggccaggatatacaacacagttatttaactgggttgacatctatactgaacccaaa

SEQ ID NO: 114601 - DNA, 396 bp, Arabidopsis thaliana columbia
aaaatcactcgtacaatttcttggccgaaagagttctgagggttttgggtttgtcctttgtagctgtcgcttcatacttctcgctcaacgctatagctttagccacggctttcatcttccttgcattctttgttctcttcatgtttgtcctatagaaatcaagaaatatcatcacgattagaggaaagcaaagggttaagaggtccaaagaaaacattaagataagcccgaatgcaacttggtctccgaacaaaatggtatacatatgttctaaaactatccaatatcatcatcatgtcttggtaccatccacttgagggaccgtaccaaaccgtatacctggttcacaggcaaaactatattaatattctctcatgcaccagctggcatatgttt

SEQ ID NO: 114602 - DNA, 171 bp, Arabidopsis thaliana columbia
ggaattcgcatagagaaagtgtgcctaaaacgatcaacggcgcgctggaagacaccaccaccggcgtgcggtaattcaccaccaccgccgctctgtgaaaaaaaacactctctaagctcaagctgttgtcatctaaactaataaatatgcgaaattcacaaacccaagatc

SEQ ID NO: 114603 - DNA, 418 bp, Arabidopsis thaliana columbia
  unsure (1)..(418): unsure at all n locations
acccactcgtccgtaaaaactatacaaaaacattaacaataaaacacccccccaccaaatagaccttacaaatcatataagaaccaaacccannaccaacactcatacaaaaaaccctaaccatctccaacaaccacattcctattactacctaatcaccctctatactctctcttaaccttattcttctaattcccaacaaaactccctaactcacatcaaacacatacaccactaagctaaacacacacatcttaaaaatcattctcactaaaacacttcacctcccaccacacccacctcatccactccaatcattatccacacataccacaccacactccatatctaatacactctactaacttcacaatacactacacaactcataaaccatactcacaccatatcaattatc

SEQ ID NO: 114604 - DNA, 153 bp, Arabidopsis thaliana columbia
  unsure (1)..(153): unsure at all n locations
gcgatcccatcgcagtccgcagcctaccatagagctaatgtcttagcttatttcatgaccctagctcnnttcttcttgctagttanngttcttttaggttggatagcgcgatgtcacagccgagtcgagttcagaagccataatgtattctta

SEQ ID NO: 114605 - DNA, 422 bp, Arabidopsis thaliana columbia
  unsure (1)..(422): unsure at all n locations
aaaattctccattctccattttcctgcaatccaatatctttatcttcaaaggtgatggcccaacctgtgttggatttataagagatcccttttcttttgggccaattttccttggttacatttttccgagaaaacaaaaaagaaacttttttgcttttttttcttttcttctcttgcttttcccagcttttcaaagctttctggaaggtaaaagaaacgaaagcttttgtgttaaaaatctcagaattttggattatttcttcgggatagaaaaaaaactgttcccttttccttaaggtagatcctttcactcgttntgatttctgggtttcttcatcggcagattattttctgtttctttctttaaatactcatttaaaatctatactttctttcattactatgttcttctaggaatctag

SEQ ID NO: 114606 - DNA, 278 bp, Arabidopsis thaliana columbia
  unsure (1)..(278): unsure at all n locations
gaacacatcttctccaattgttaaaacccactacaacaaacccgggaagtatacacagatggtaggggagtctcccannccnccaagcccttctgttgatccaccaaaaggtccacggtcacactcaatgggccgctgacaacgtatccaccagcaagatcgaacaacaagccatcatgcaagcctatctagcacctgtaacaactaacaaccactatattaaaccactctctatctaatgcattcgcaacctctgcaggctccaagtgcacagtcct

SEQ ID NO: 114607 - DNA, 405 bp, Arabidopsis thaliana columbia
  unsure (1)..(405): unsure at all n locations
attaaattgaaacattaaatttttttcataccatattcctgccttacgaaaggccncnataaattggttgaatctnncnacnactatatatcacatacgaaatctatcgcgttcctgcctagacaaagagagcctttttacaatataataactcacagggcgtatcaatacccttctcgattcaacaacataacacgatcctacattctcttcgcattaagaaccaatttgtatcaaaaataaacaaaaatcgactcatactcataacttcagatatcaattaactatttccatattgatgcatccgagatgacaatgtaatgcgatcgaatgtccatgcgagaaataaactctcattcacactttcctataatttcattcaaatattgaatcaaatataaataa

SEQ ID NO: 114608 - DNA, 406 bp, Arabidopsis thaliana columbia
  unsure (1)..(406): unsure at all n locations
atgaaaaggactttgaaaagaaagagaagtactatataaaataattagatgtccagtttggtttttaagtatttnatatagnacttctctttcttttcatgccgtttgtgtctcataacttgaaaccaaactggacatcaaatcaaatacctaactactatgagtctagcttataaacactatataaaataattgtgcctacacacataaccaatgtatatatgacacacacataatttcagtttatcacacataactgatatgagtttagggttatgagcatgtacgtatcttgttacacaaattctatttgcgatggttactggttggtagtatttttatttcacatatacagacaggttttgggacaaaaaatttatgatagacacatcacatgctcttcatc

SEQ ID NO: 114609 - DNA, 401 bp, Arabidopsis thaliana columbia
gatgaatgtgagactccggtgaaaatgtcacaaggtctagatttgaaggcacatttcagcattggtgatgctgatgaaaatcgtaaaagcgattcacatgaggaagggccatttggtaaagctgcgcggtttgcggaactgagacgaagagcatcaattgaatctgatagtacaatgtcaagctctggaagtgtcattgagccaaatacacctgaagaagttgccaagcctttgagacatcccactaagcatcttcattcagctaaaagtttgtttgaagagccttctcgtatatcggagtccgagtggtccggaagttctgatcatggtatcagcagcactgatgactcgaccaatagttcgaatgatatagtcgcgagggacaccgcgattaactcctc

SEQ ID NO: 114610 - DNA, 404 bp, Arabidopsis thaliana columbia
  unsure (1)..(404): unsure at all n locations
ttcagccatatcggaaaaaactatatccgacgagccattcnnngtcagggcggcgaagctccgtatggagcggtgctancncttatcttttcccgccttatgaatctctctatcgcggcttcattacattcagtctaactcgagtgatgaaaccactctccgtgctagagctctttgatcccgcggctggtaggatattaccgcgttagcagctctgccgtcgtggatagagttagaacgacaaaatcagccttggtttcctaactcgtatttactctttagcctatgttttcaatttttctcttccgatcttaggtgtatctgaatttttgcaacaatgtctgagctaaaagagcgcctgctctcctccaagacctgcttcagctatgaacctcatagatgct

SEQ ID NO: 114611 - DNA, 406 bp, Arabidopsis thaliana columbia
  unsure (1)..(406): unsure at all n locations
tgagttttgatatcacatacatacgataacggggagaagaagaccagagcgagcttccattggtaggagttttgcagaaagnggagcataatttggaagattccctccttgaggattattgtggacacatcgaagttgcctcccatccttcatcttcaccatgaaaccatctggtccactttttacctcaacttatatacaaaaccaacaagagaacatcgatgattagaatcaaaacacaagaagaatagagagaactaatggtataaatacagatttaaccaggattaccagcttccaatacactagacttgacataatcctcatcgttctcgttgaaattctctgctgtgcttccggtaccatcagagtgcgagctgaaaagacatttgatactcttatacct

SEQ ID NO: 114612 - DNA, 407 bp, Arabidopsis thaliana columbia
gggaataagaataaaatgaaaacaatattggagatcttaacaacagaaatactctgatctaagtaatgaatttaacgagaatgtttctgaactacagtcagatttgatttgtgaagatttacagaaggagataaacctagggaacaatttacgcaccattccgtacaaggagagcgccaagcccagtaggataaccaaataacttcatgacatcagccgaaaacaagaaagtcaaaatctgataacaaaagaacttcatttattttggaaaatccaggagataccttgtagaatgacacaacaacaaaatctgcaggatactccgataaatcaggtggtagtgtagcacaaccctttgcagcatcaatcaagaccatccaccgcttgctccttatataaagtatata

SEQ ID NO: 114613 - DNA, 386 bp, Arabidopsis thaliana columbia
  unsure (1)..(386): unsure at all n locations
tcggattcggaggcgacccacctccgtaaatcataaacacaaacctttcaagccatgaaacactaggagtcccaaaaacacttttggatgccctcacatcactagagacacctctctaaccaaccaaccaacatctctatcaaaaacaaaaacaaccttcattcaacaaatctacaaatcctcattccactacatatacaaaccagcaangacatcaagaactgccaaaaatgtaaaatccttacagccatgtggcctactgctatctctatatttcacgctcgatatagtgctaacactccaacactccattactcactcctctattgtagcgtatataccactgctagctcctcatacaagagataccatgacaagattctctc

SEQ ID NO: 114614 - DNA, 369 bp, Arabidopsis thaliana columbia
  unsure (1)..(369): unsure at all n locations
aaacctctcttatccagcatattcaacaaccacacccctacncncggtaagctcccaaatatgctagatgtttttatccancccnncccnatntttattctcaccttctcctcttttttccccaaactgagcttttgccctcttctctcaattttaatccaccaaacaaatcgcacattcttccacaacttctagattgcacgccctacacctgattaagtcgggagaaagaaaactagggtcttgatgggaactgatacaattatgtctggacgagtaaggcatgatctatatcaaactccgactaatccggaaattctgatcatggtatcagcaacactgctgactcgaccaatgaattccctaatc

SEQ ID NO: 114615 - DNA, 301 bp, Arabidopsis thaliana columbia
ccggccgaagccgggtcgacccacctcgattttaccttgctccaatttttgaaacagaaaacctgaggacaaattgtgggggtatcaagggatcaagcctggttatccgttcgtactgcgcccttggatcggcggctttgttactctgaagaaaggagtttgaacagcgtgttttcggggagaaggcagaactacttctgtcagaagcaagccagttatcagctaagcttctttgtatcttggaaaggagtgactataagagatctctgtgtttcatagattacccattggacactgcatt

SEQ ID NO: 114616 - DNA, 381 bp, Arabidopsis thaliana columbia
cccaatcgatgtcccaagggaattgatatgggaattacctcgaagaacggtgtattttggtacttctgttcgtacgatattcaaaggtttatcaactgagaagatacaggcttgcttttggaaagggtacgtatgtgtacgtggatttgatcgaaagacgaggggaccgaagcctttgattgcaagattgcacttcccggcgagcaaactgaagggacaacaagctaacctcgcctaatccgttggcaagcaaacaaatacaagcttatggttaagagtgagagagcacactgttccaatctagttaatgtaagaaagtgaaaacgtaaagttaacagtcctagagttgtacaaggtttctaaatcccattttagtttcgt

SEQ ID NO: 114617 - DNA, 417 bp, Arabidopsis thaliana columbia
  unsure (1)..(417): unsure at all n locations
aattccggagagcgacccactcatccgatcccatcaatcattcattattaatttcgtaaatggtttcttacccagggaggactccactacatttagtaagcccaccccccnnnccatcccccttaaacaaaaacttaacctacttaaatcaatactgcccattcatctccccattataaacaatacttacaacataaaacacacttctgttccactagtcctctacaactctcattcaagaacttcccttacaaacctctaaaaataaaactctacaatttaatatacaactcaatcacaaacataaaatttattcatataaatctctctatagccccccaattcaatctccaaaaaaaacatacattgttcaaacccaatccaaaaaactcctcatcttctcttaacacatctccc

SEQ ID NO: 114618 - DNA, 448 bp, Arabidopsis thaliana columbia
agtaccggtccgtaactgggtgggccgacgcatccgcacagtcaatgtgttgtttctctacagcaacttttacatgacgctcaactggctcgagcgatttcagtccagtgtgaaacaaacgcatctataaagaatcataagaaagaaccgtcagaaacacaacagacgatcaccaaagttcatgagaaatgaaacaaacagacgaaatttgaacataagctttacctgagcagtgtggtgacggactgcttgtattaggagactacgagcttgtccttctttaagcgatttcaatcgaaaaatgcacattgtggcttcatcatgaaactcactgtaagcaggtcgagactcatgaggaatatgtctctctcctttactgcttttaggccttcctttctctttcactagcgacatctcatacacattcctgagagtttacaggtaaaga

SEQ ID NO: 114619 - DNA, 373 bp, Arabidopsis thaliana columbia
gaaggacgccattggaactcttcccttttaggatacgtcttactcgatttcatgtctaccactccagtgtctttaatttgctgtaaacaaaagttttacgtatgaatagaaccccaaaaatgaactgataactgcaaagaagattctgtagacatacctctgttcccccagaagtaaactgaagacctccagcaaggaaatcgagaggctgttcggtagcccgtctgacctccttgtaagctttccctttctcaattgcctcggctgcagcctcaaagtccagcctctcttgtgcccgagctgattccgacatgctattaactctgttggagtctgttgtacgtaacccttctttggatttctccttgagaaa

SEQ ID NO: 114620 - DNA, 468 bp, Arabidopsis thaliana columbia
  unsure (1)..(468): unsure at all n locations
tccggaaggtccgcgggtcgatcccatcgccgtccgggacaactcctattctctcatcatatcctacctatgccactagatcctcttcactggatcgctccagtatcgttggtgtggacgcgtgcgcagccccgcagccccacaatcaacccgttctctccatccgggagcccataatcccattgagcccattcatcaggataacccnntccctcacataggagtccctataagcctcatcagaatcccttgtccgccataggttatctatcttacaggccgctatacctccaccatccgactaagggttcgtagaccgtcgtggtcgccgcttctaaatccgtggccgagcagttcttgaaaatccacgacgccaatttcgctagccgaccaccaaactcaagagccaaacacatggcatataactatcaggatcttgtctttgcaccttacgggcaccgatggaga

SEQ ID NO: 114621 - DNA, 375 bp, Arabidopsis thaliana columbia
ggaaaatttcacaaattttcttttgtttttaattttttgtagtgcaaatgtaaaagcatataatttggcacgaaaaatttataccgaacagcatcatgtcacatatgtaaacaatatcatttgggagtgtctcgtttgaactctaattaatttcggttgacaacaacaaaatggtaagacataagtttactgtattatcttaaaacattggcaatttcatctttttgctctagtgtatcattagtagtatcttgcatatcctttatatattgaaattttaaatatcactataagccaattctgtagatatacgtatttcttttaaattatataatatttgatatgaaattttgaatattataatttaattgattg

SEQ ID NO: 114622 - DNA, 371 bp, Arabidopsis thaliana columbia
cagttatcttctatcctctgtttctccgcttctgtagcactgtcgatgaggtaccctataccggggtggttcttcctccactcactaaccaaatccaaaatcaacaatcatagaaaaagccctaactttctccggaaatggctttaatcttctacttcttcttcctattgactcttccttctccttcttcttctgcttactactcaaactccttgacctacatggtccacggcgaccacaaagctaaaccctcaatcttccccactcagtttcactggatcacttactttcttgactcactcaacctattctacttccttcattatacacacataccacaccgttttccatggcttcttcactagactcac

SEQ ID NO: 114623 - DNA, 367 bp, Arabidopsis thaliana columbia
  unsure (1)..(367): unsure at all n locations
cccacccgtgcgcgctgtctctttctctattttttgtgtgaaaacctacccaacgggtctttctcaattctgtatggtagagcctacatcccccaccaaatttatatcatatatttaggacacttatccttcgaagacagtcaagagaaagcctctacatgatattgacaccaaaatgagctttaacatgcagaagaaagacttgattccctgtatccagaagacaaaatctgtatatatggcccccacaaacgctgagagctctaataatccanattctgaatctgaggacaaacgctaaagctaataaagtcccaggcaaataggactgcttcaacagttatgaatcatctgatgactcttcttc

SEQ ID NO: 114624 - DNA, 375 bp, Arabidopsis thaliana columbia
ggcaatacgagcagcagatgttaaggaagttgctgaaacaatcaagagtcgcgggatgaaccatagtactgggagaacgtatacagggcttccttgatcgactggtaaatgaccatggaagtatcgatcttgaatggttgagagatgttccaccagataaagcaaaagaatatcttctgagctttaacggattgggactgaaaagtgtggagtgtgtgcggcttctaacactgcaccatcttgcctttccagttgatacaaatgttgggcgcatagccgtcagacttggatgggtgccccttcagccgctcccagagtcacttcagttgcatcttctggaaatgtatcctatgcttgaatctattcaaaagtatc

SEQ ID NO: 114625 - DNA, 279 bp, Arabidopsis thaliana columbia
  unsure (1)..(279): unsure at all n locations
acccactcatccgggcattaccagcagcttatgtttattttgctgcagaaccaatcaanagaggctgtttcaaccatagactagtgagttcnnanacacggctcccttgatctactggtaaatgaccatcgaagcactctatcttgaatggttgagagatcttccaccattttaagcaccaaaatatcttctaagcttcaacagattgacactgaaaagtgtgtactgtatgcaaattctaacactacaccatcttacctttccagatcatacaaatat

SEQ ID NO: 114626 - DNA, 386 bp, Arabidopsis thaliana columbia
  unsure (1)..(386): unsure at all n locations
gaattcaagaatcaacccacccctcccacccataccactctctttatttttaccaacataaaaacacacccancaggacacatccccatttgttagtctacttacactcacataccaacacctatccatcattttcagatctattcacactacaacccacttaaactcacgatttttttaccaccaactcaattaacacattacaaacccataaaatagatcacactctatgtttacctacaaaacaactccaaaaaccactttgacttatccatccacaacaactaccactaatacttcaaaaaacaaaaacccctaactactaacataataactatcttaaaactatctcataaacactactttaaacaacatactaaacccta

SEQ ID NO: 114627 - DNA, 375 bp, Arabidopsis thaliana columbia
agatctttatcaggtccttttgacgtgagcattggacaaacaatttggatgtagaattttcaaccggctccactttcaaccccgatatggacttgagaagatcatacatattagagcttgatacctgcattcatattcagaagcaaaagataggaaacaaatcagcactaaaaagacataaaaaccattgctgcacaatcttcacttacctctacaatggttgggatggattccatcttttgtataggttcaagggccaatacagaaagaaatgcgtctgtatcaacttcatacctgaaacaatgtttaacttaattgatttctcttttacaaactactgacaggtttcagaaaatatttatactttgttttcat

SEQ ID NO: 114628 - DNA, 302 bp, Arabidopsis thaliana columbia
  unsure (1)..(302): unsure at all n locations
tgaanaccaggcgcgacccatctcaacccgttccgccaaatcacttgccctttacttcacaccaaccancccaagaccagcctctcctacatatatatagacactccccctaaccacaccaaagcttaaatccacaatgagaaaaattcacatacccacatgaccacactccctcttcatatcacacaaatcgaacaagtcacacgattcgaagatataagcaaccaacacacaaatcaaatccccaaaagaaaccaaatcaaaacccccctccaaccatataccacaaacttcacacatct

SEQ ID NO: 114629 - DNA, 373 bp, Arabidopsis thaliana columbia
aaaagcctgtgctcaaggcagtagaagtgggaaaccaaacatctaattgtcacagctgatgatttggtagatgtaatctcagctcttctacaaccaccatttggtcaatgcactggcaaaactcgaaagctcaacgcatatttccctctctcaagacatcgatcatgttgtagattcgctgatctgctttcaatcgaatctgcatttcacaaaagtgttgaatcaacaattagcattatagagaagagcggtgagactcagagaaagctgagattcaatttcgcagaatcatgatgagcaataagagcaagctttagaacctttttggcgaggaagagcacggcatcaacagtaccctcagcataaatagatc

SEQ ID NO: 114630 - DNA, 379 bp, Arabidopsis thaliana columbia
tgctttttaagaggtgtcatcctcgagattgttctctcttcaatctcaggtttgcctcagagtttggaattgcttggatgttaatcaatcattaatgtttatgtatccttacattaagatctggagacagaaccgactgcaacaagagtttcaatattcacagcagcatgaagtagacgtagatgtcaagatctatggtctcggtccaaagagtgattcgagattcacaacagtggagacacctctagcatcaatagtttgctccctagagatacctttcagtgatgaaggtggatcaagaaaacagtgcttcttaaaccagagcaatgcaacaatggaagaatgcgaatccacaagtatcaaatccaggatctgatga

SEQ ID NO: 114631 - DNA, 358 bp, Arabidopsis thaliana columbia
  unsure (1)..(358): unsure at all n locations
cggactcgtgggttactacattcccaatcaaaaagaaagctcacgccggctctctcaacaatttgtcagagctccctncccttcccccacaaactaaacaaaaaaccatccacaaaaaaaatagagagaatcatctaagagagatctattaataacatgatcacatcttctcctacaatcccagaaacctccgatcacggtcttagatatctactacaaccgatacaaatgtaaacaccgattcttccagcgatccaacaccgccacaacctaacctttcttcaatctatcggtttcaccctacccaccaaaagcttgctgctcactacctaaaacccaaagcaaacttttgctcttt

SEQ ID NO: 114632 - DNA, 404 bp, Arabidopsis thaliana columbia
aaaaaggcccgacccttcccacccgttccgcgtctcgcgttagatttctttttaacacccaacgcaagcccaggctgtgtaacgaagtttgtgttgattgttctctaacaagacaagggttcacatttcgttcatcaccctcggccggctttctaacagccggactcccatcaaaagatggttgccaagaacatcttcgttactgtttgctaattctcggaataacatcaacaaaactaggggaaggtttaaaaaacccacggtagtatgaagtgctactcgaaatctttgctacccgtctagttccagttcctagccgcaaggtgtcgattcccatgggcgacactcacacctcgctcacactcgggacagcctaggcggatccatgctttccaacaaaacac

SEQ ID NO: 114633 - DNA, 266 bp, Arabidopsis thaliana columbia
atttacaaaccgacccaaacccagccaacaattttctcaccatcccaaacaaagaaagccccaatcccactaaaataaccaaataacttcatcacatcaccctaaaacaacaaagtcacaacctgattacaaaagaacttcatttattccggaaaaggcaggagataccttgaagaatgacacaacaacaaaatctgccggataccccgaaaaatcaggtggcagcggagcacaaccctctgcagcatcaatcaagaccacccacc

SEQ ID NO: 114634 - DNA, 265 bp, Arabidopsis thaliana columbia
  unsure (1)..(265): unsure at all n locations
ccaaatcaannccatcatacataacacttacaaattacaataacatcaaaaaaaaaacatttccccatttttcaacatatataaacacacataaacattacttataacaaaaacattcaaactccacttttattatctccccctaatcaaattctaaacactttattcctcataaactaactcccctacattgaaattattaaactataaccatcacatcattacattaacttaattaattttctttccaccactattactttca

SEQ ID NO: 114635 - DNA, 266 bp, Arabidopsis thaliana columbia
ccgaccaggaagtcagagccactagacgacgtacggaaacgacggaaccaacaacatttatgtaccagacgagaaatccgatgggaggaggaggactcagaactggaggtcgtggaggaactacaggtggccaaggatcacggaacaggtgaggcaaaggtacggatcacgtatccaagggtacggaacgggtgggcatggatactgaaccatgaccgatacttaaggctttggaactggcagatgagctaagcaccaccgccaag

SEQ ID NO: 114636 - DNA, 187 bp, Arabidopsis thaliana columbia
  unsure (1)..(187): unsure at all n locations
ctatcgttcacaatttatcacagaaacttaaagaagaccatagctacaaacacaagctattgcaggatgtgttcactcactactcagcaatgcctnacctattcaaaagctcagatctagtcacaaaataattatgcttagctgcgacaaggtgacacttttgtatcccatatttgaggacacaagg

SEQ ID NO: 114637 - DNA, 377 bp, Arabidopsis thaliana columbia
cttagatttatactagaatcagtatcagaataattaaagatggatctttgaatctatgcatgttgtgtgtgacaccgattaatttttattcgaataattaagtctatagttttggtacttgtaatattttataataatatttatctacttgtgaaggtttgatgagcgagtaagagacttactagacttcagtatctacttggacattagcaacgaagtcaaattcgcttggaaaattcaagtgaatttctttgaataattcatctacatttacaccattttatggaacgttttcgatttatcttataaaactgaatctgtaacgtttttgatggtcacagagggacatggctgaaagaggtcacagtttggagagc

SEQ ID NO: 114638 - DNA, 376 bp, Arabidopsis thaliana columbia
  unsure (1)..(376): unsure at all n locations
gctctgggaacttatttcacttttatatcccgacgggggaccccngcaggcagtganccaaattattcagctgatccaacnncnncanccngcgctaataaactaaaagcaaaaagtcccaacgtgagaaatccacgacacgatcctcctcatgaacccacgaggaaaaaatataatcgtcaagctcattccagtgtcacatacatcaagcttgtctacgacaaagactctaaagacatccccgcaaatgatcctccgaaaagaacacaactcgcacctgaagagctccttcttgaatatcctaacaaatatacaacatggcctgaacttcactacgacaaaatatcttaaactgacaagcaaatcataacaatgc

SEQ ID NO: 114639 - DNA, 380 bp, Arabidopsis thaliana columbia
cgcatgtgttcaatatgtggagggccagagagacattgagagtacagttgatgttttgagattgttggggaagcgtgagccacaagatgctattatggatgaagaccgattgagtaagaaaatggtagaggcaatgagaggaggaggatacgttggtgatgtttgaacaagatgatgataattatagtgaagatcaggtatataaacaaataccaaaacgaatatcaattgattagagatatacattttttaattttgggcgattatgttttcgtttgctacaactacacacgtttgcgctaattgttagaccagcctaactcaacttcgccacataaatgaattttaaaatatataaggcgaaatgtttttagtagaaa

SEQ ID NO: 114640 - DNA, 347 bp, Arabidopsis thaliana columbia
  unsure (1)..(347): unsure at all n locations
cataaactgacttattagacttttgtttcgaaaactgacaccaancaagggagtgctcaaagatattggtatggataccatacctccaggaacatcaacagacgacacctgcatcgtcaatgcaacgacatcaaaacaaggagaccatctcaacaagatctaccaccaacatctcaatgagctccaactactgcaacaccgaaaagacgtataaccctaatcaactaagaatactcaaaagaatgaactcaagatcctaatactaatactcagagaagaacaacagctcctacaagaacctaattcctatgtgggtcaaatgaccaaaatgatatgaacaaacaaag

SEQ ID NO: 114641 - DNA, 480 bp, Arabidopsis thaliana columbia
  unsure (1)..(480): unsure at all n locations
gaccggaattgcccgggtgcgacgccatcgcagtccgcgtgacagcgtaggtgcggtacgccgtgtggctgtgacgcgtaggagcgagcctagaatctggttcgtgtctctacacagtcgatgtgtctcgtgctcgtaagaatagtaaaacaactaacccgcgaagagcggtgatgataccaactataattgagtgggattttgaagaaaaaggtctgtacaataaaatctcaaagatgtggaataagctcgatggtgaaaagtcttcatacccggacctttcctagtagtccttattaggtcccgataataaagaagaagagttggtttagtatagttgacanttcttcagcatgncttctggagttggtaatagccaatccaagaaaagaagtttgactgagaaggctagtcaccgtgctcttgccaaataccttattaaagatcttgctcattacgctacttctactatatctaagc

SEQ ID NO: 114642 - DNA, 376 bp, Arabidopsis thaliana columbia
  unsure (1)..(376): unsure at all n locations
tcgcaagaaccacttcagactcattttaggaccccacatcaacccgaggcagtcctcctatacattcgatgggtctgcngagacatgtaaaccaataacaccaagaacgcactgtacaacaaattgaagaatctctgaaaaagccctgacaaaactctcacaaagacaacactcgccgtaaaacactcatcccagacttgactgattgctaattgtccccatcataacaaaacagctggactggataatgacactattgaccatgcttatgaagtagctaataacctactcaagaaaacatgcataactgaaaacgatagtcacaccgctcttgtcacataacagattaatgatcctgctgattacgcaccaccac

SEQ ID NO: 114643 - DNA, 437 bp, Arabidopsis thaliana columbia
  unsure (1)..(437): unsure at all n locations
aattcccggagtcgatcccacagccgtcccgagaaatagtaccgatataagagaagtagtaagtaggaaccgaccaccatananntaaaacccaagaggaatagggagaatatagtgttgactgcgatattaggccccctctctctccaggnnatctctaccttcttccaaatctcctcctcacgccagccagtaacctccatccgtccccttccagttaccctcctagatccctaatcttcttatcctttcctcaggaacccctccatgtggcttccgggaagagcttatagtggccctcagatatcctatcgtccagctctgtcccatccaccagtctatggccccatctgtcatccctccagctatcatcttcccgtccccgcccatatttcgttagccagatccagttccctatactcatcgagagctctcgt

SEQ ID NO: 114644 - DNA, 373 bp, Arabidopsis thaliana columbia
gaaaaattaatattcactaacatcatatattaatcaaaaacaaagtgtgaaatgagaactcgtacgttggggtcatgacccttagcagctacaaacaatccaccaatccgaaccagaggaagacaatattcagctgaaaattcataacaaacaactcagatccactttgaacactaactaataagcaactttgtttctagcactaccctacttgaaacttgtaaataatacctaagactctcatctccgcgacagctcttgcaatagccacatcaaacttctctctgtacataacatcgtgcccacaactctgttctataacaaaagtaggacaatgtaatttagaatcaccttactggctattaatgtcatt

SEQ ID NO: 114645 - DNA, 354 bp, Arabidopsis thaliana columbia
gaaaaaaggagagagtactgatccaacgagaacgagtgacatattttaatttcagatttcattttccttacttttgttatcaatacaaaagaatcaatcaaatgtaacactcgtgataaaactcccatgtgacaacaacatgaagcataacacttcatgatgacaatatataatacattgtcttatactttcttaatcattattataaattacgaattagcatgttctctgcttttggaatttcgcttaaaaatttacaaaataattttcttgatagttattttaacatgcaacatttggaaaatcaacatgatcattggaaatgattaacattcatccaaaacgtatttaaat

SEQ ID NO: 114646 - DNA, 372 bp, Arabidopsis thaliana columbia
gttccagcagatgctatccctcaacctattgttgttgatcgtggagaatcgaaaaacggtgtttgcgctgatgagtctattgatggggttgaccttcagtatatccctcctatgcaaattgtgatgttaattgttggaacacgtggagatgttcaaccttttgttgcaatagccaaacggcttcaggactatggccatcgagttagacttgcaactcatgcaaattttaaagagtttgttttgactgctggattagagttttatcctctaggtggagatccaaaagtgctcgccggttatatggttaagaacaagggctttttgccatcaggcccttcagagattccaattcaacgaaaccaaatgaaagac

SEQ ID NO: 114647 - DNA, 230 bp, Arabidopsis thaliana columbia
  unsure (1)..(230): unsure at all n locations
caaccaacacttcctaccccttcacctacccacgctaacccccnagagtcgaaaaacaattttgtcgctttctaaacaacccatncncctcaccttcacaatatccctcctatccaaattctcatgctgagccacccaacacttttatattttcaacccttaaaaacaataaccaaactgcttcataactatatccatctacccaaacttcccacccattcaaattttaa

SEQ ID NO: 114648 - DNA, 373 bp, Arabidopsis thaliana columbia
ctaaagaaggttttatcactcgtaagaaaaaacaaaacaaaaacccttggggttctctctgtcggtgagacatcatcaatggaggaagtagcgagagaagaagtagagatcgacaaggatctgcggaggaaaataaagaagacggtgaagaagatcttggaaagttcgaacttgtacaagataacagagattaaggcgcgagaagaagcttcacttaaattggatcttgatctgtctcaagatccttacaaggtaatcgtgaaagaagaagttgaaaatttcctcgaagaagcagtaaagttgatcggcaataaacttgcgatgcttcccaagagaatagagtcgacgagtatttagatattattaatctaaa

SEQ ID NO: 114649 - DNA, 318 bp, Arabidopsis thaliana columbia
gttcaagggtcactgctttctactacagattattactctagcttcctcgggcttctccaccatttttgtgggaagccaaacacctcaaggctctatcctctctctcaataagactgataacataacaagccgctcatgcggggacaaacacaccaagagggctgattatactagcgttggctcaatgcgttgctctgtttgctgctgtttcaacagccattaatgtctccggccgacacgttaacccggcaatcaatttttgtgctcttggtggaagcaaagttacaacgatccgcgccatctactactggatcgctc

SEQ ID NO: 114650 - DNA, 357 bp, Arabidopsis thaliana columbia
cccaacaccagatacattataattaatcccaactcaagaagctttaagagtcttcaccttccatttgctattgatcatcttcttacatctctctccctctaaatatatccaaacaagaacgaaaggaaaaagagtacatacaatggtgaactttgtggatttacaaaaaccattgttgtaccgcctcatgaaattggccggtgtcattccttacaccgtagagcttgaaccagggacaaagatgaacttctggatcccaaaagaaaccctaaaaaaaaccaaaaaatctgacaaaaactttgccgtggaaccccaaaaacctacgaaaccagtcctattgttcatccatggctttgc

SEQ ID NO: 114651 - DNA, 344 bp, Arabidopsis thaliana columbia
  unsure (1)..(344): unsure at all n locations
gccgaagtttttatcggtctttcagctcacccattcactatactctcgcaagatcaaaacaatagctctttaacaaacnnnannnanactaccaacatcaaacaaaccttttttttaatataaaaagaagattcattctaacttttattttcataatataaaaaacaattctacccaaaaatgaatataaaagaaactatgctccacatacaattttattcttttgagaccaaaactcccaatttctttattatactccaaggttaatattatagtaactaacttttcccactacatatttaaaaaaaatatacacatttctatgtaagattgcctcattcact

SEQ ID NO: 114652 - DNA, 347 bp, Arabidopsis thaliana columbia
taaaactttaaacaccgataaattgatatttaattagctttctttcacattgtaacaaatttggtggggtcttttgcaaacaatacattatcagttttgtcttaataaaggatttcggtttgattggaccaaaattcatataaagcttggtcgtggtttatatacaacatggttaatttgatttggctaagaaaatttattctagtttcatacgttatataatgaatctttgggtggacatgaagacagtaacaaataatgacatgaataacaagggtcttatttaaagacatgaaacttaaaaacaaggtttcttcagcttaatatggtgaaagggaaaagacatt

SEQ ID NO: 114653 - DNA, 289 bp, Arabidopsis thaliana columbia
aacaaaacatgttcttttccatatatagaccaccgttggcgacttacaaagattttgtgtgaagtacaacatacataacacttgcaaattacaataagagaggaaaaaaaacatggtaccatttgacaacatatataaacacacataaacactacttaaatcacaacgatgctgtcacggctataatcaaataactctgatgaaattctaaacacttaactacgcataaactatcataaccagatcatacaaatgataactatcaccatcacatgatttggatgactta

SEQ ID NO: 114654 - DNA, 364 bp, Arabidopsis thaliana columbia
agatctctattagttcctttttacgagagcattggacaaacaacgggggtgtaaaataaatttcggggtccactaaaaaccccgatatggacttgagaagatcatacatattatagcttgatacctgcattcatattcagaatctaaagataggaaacaaatcaacactaaaaagacataaaaaccattgctgcacaatcttcacttacctctacaatggttgggatggattccatcttttgtataggttcaagggccaatacagaaagaaatgcgtctgtatcaacttcatacctgaaacaatgtttaacttaattgatttctcttttacaaactactgacaggtttcagaaaatatttatac

SEQ ID NO: 114655 - DNA, 381 bp, Arabidopsis thaliana columbia
agccttccgaagacatatttgtgtatctgtttggatgctcacacatggatttctgttttgttttatttaataaagatctaatgattcatttttttttttaatttttttttttgtgaaactttttttttaatctaaaaggaaaattcattttaactcctagtttcataatattagaaacaattctaccaaaaaatgaatataaaagaaattatgctcgatgttttattttattttttggtgggcaatgctcgatgtttgtttatatactccatagtttaatattatagtaacgaactgagcacaatacattcaagaaagaaatatacatttctatgtaagattgcgtcatttactataaaaatatacaatgtaatattattt

SEQ ID NO: 114656 - DNA, 377 bp, Arabidopsis thaliana columbia
cccaaatacatcattgacattttaaatgctctatctggaatgcctgagatggaccttttgttgtagtgtgcactaggggctctcttctctctgcctgtccgtcagtgttctttgtttggccagctggttcaccagttattgtgtaggcaactgtatactgatgaaccaaatgcaacatggtttgtctttggtggccaaccactccgtttctcacttatggagtttgaggaggttacaggtttgtgttgttctgaatacccgccaccgtctgaaatgaagtctgtcctctcttaccctgatggtgaatcaccatattggtacaaacttattggaggcaaacttggttctgttactgttaagtcactgctgctacggct

SEQ ID NO: 114657 - DNA, 371 bp, Arabidopsis thaliana columbia
gaatttgtattgaacaattgaacttccacttaatattgagttattgactaactggtacgttaatcaagttttaattcttagtattttttatagcttaaattaaaattaacttttgttgaaacagtgctcatttagttaccacaaaatcaatctcaatagtcacgtgttctcaattgtttcttgaaatttggaaattatcattaccacatgttctctcttttactaacaaaagatcaaaccaataaaattttaagacaagttccgatggacccggtcaaccaaaactttggtcaaatctgtagaattccctataaattaaattttacctcttccttaatctctcaaaaataactcttttcttctttttaatc

SEQ ID NO: 114658 - DNA, 370 bp, Arabidopsis thaliana columbia
aaaaggtatagatggacaatatttttattatttttctctttttccaattttgcctaaagattataaattataaaaaacattcctttgaaacaagaccaatcatgataatattgaaaccaaaattttaggaaatttttcctaacaattaattttggacttcgttatatgcctatttcgtatttatctccttcctaattgtattaacagaaacagtgcatttgaataataaaaattaacttatttctcctcatatatgagctacgagatttaccattcttttatttcatttaatataaccctgtaccaaaatgcaaacaattgtgttattgtattatgataaaaaaatccttttattttatatatctttggt

SEQ ID NO: 114659 - DNA, 370 bp, Arabidopsis thaliana columbia
ccatggttaataagagaataagaatatgatgatattgctaaaactttgacccgtatgatgggtgtgggattatgaaatcatactatatttgagtgactgactcttcacagaatttcacaacgtctacagaggataccaactttactgatcattaaccttagtatacggtggcgaacaccggtcactcgatgattatccgggcggcttccaccgcttatgacattgcccatgatccaactttccgaaattgaaattgcaaatcgattacaaaaagatgaaagacagtgggaggaagcgtatcacaaaaggaggtcaactaactttgtcggctaagatacagggccacacgtatcggcccatataaaatacc

SEQ ID NO: 114660 - DNA, 368 bp, Arabidopsis thaliana columbia
cggacccgtatcatcaccatctcgattctcctaaatcataaccgatgggatctcctatagattttgggggatcccaaatttcttcccctgaaaagctgaatttagaggaggagccatccgacgatgaatctaagttctctaattattattcagacgattgggaaactttctcaaatgatcttcaactgttatatcaaaagtgaagcaagagcggaagttttgatgttaacttctcaaaagtgcgtcacagatttggtcgcggatctctacatctctacgactacaatatgattagctagcctcatgagaccaacagacatattctcacaggctcgccaacatgactatctacttctacaactacaaga

SEQ ID NO: 114661 - DNA, 279 bp, Arabidopsis thaliana columbia
  unsure (1)..(279): unsure at all n locations
tacagtatttgcattgagagataccttgcttgtttggttactcaaactaatgttttttattgtatcgttttggctctgtcttggaatttaaggaagccatcatattcgtataatctggactaatgtctttatgtgtttctgtgtagattgatttggaaaaaaatggtcaattgttatattcataccaagaagattctatgnngcatccgttacattgttttaatctcgataatgccggtgttttcaattaattggcaatgttaaatggtttcaaggctc

SEQ ID NO: 114662 - DNA, 370 bp, Arabidopsis thaliana columbia
ttatcataagatatgaataagaaaatagatcgtcttggagattgtttcgaagggaactaagaagcctatggcctctttggagagatcggttattgggtgtacattgagctatttgtacggcttagttaatggacgctgcacgattattatatgtctttttataatagaatgtacaatcacattaagtaaaatattcatatcaataagtactaaaccatgagttatctatattgcaacattttctattcacattacattcgcgagaggacgatgaatatctggccagagtcgttaagaatcagaacttgtagataacgaatcatagatagtaataattatataatatatagtatgaaaatggtatgtaagg

SEQ ID NO: 114663 - DNA, 369 bp, Arabidopsis thaliana columbia
  unsure (1)..(369): unsure at all n locations
gaaaacatgaatttccggggaggttgttgtattgcgaggtacggtggtagtggtggtggaaatgatgtgtgtaangatgatcggattatgctccggtaccgtccgattgcaccgagacctgattctggtggatctcctgcttcaccgacggagaagaatggatcggtgataactaacgtttcgtcgagatcacggagaggtaagagaaaatattcaaaggagaataatagtagcagtaccggatccgtaaatagtaacggtaacagcaaacgactgataaacgatgagacgaagaacgaatctggtggtggtagagagatcgtgacgttgcctcttcttccagagactcctgagaagaaagactcgccg

SEQ ID NO: 114664 - DNA, 362 bp, Arabidopsis thaliana columbia
atttactgatactgtgtcaaacacatataatccagtataagcaatcttggttttagtatttgtagaggttttagcagtgaaagtttgtagtcccatgagctgggagtgtgaatatgttttagtggaataattggtgcattactttagaagacagtttttgctgctttttccttgattcaattctgtttagcttctaccatgtgcgataaatgcagcatgtgcagcgcttgtcgatgcaggaatccctatgaagcatctggctggtacatttacactcttctctaattgactttgtgtgttacttcttactgtttcatcagctttttgttttttcagttgctatatgctgttgcctggctgag

SEQ ID NO: 114665 - DNA, 368 bp, Arabidopsis thaliana columbia
gaagagatagcgaaggacaattattaatttattttcctattttagttttcattacaaccttaatcttcgtgttgtgtgttctgtaacttcccagattttttttttctctttgctgggcttcgttgccttttcccctttttttctctttcctctgctctcgattcagtttagggcgagaaaaagtagctgtttttacagggtttatcacaaagatccttccttttttacttgaagctcgccattttcttagggtttctcttgatttcattcatctccagtgcccagatctctctctctactcatctgccatttggctgtgttcaatgattagggttttgatttagaaccaaagcttttgggttttactg

SEQ ID NO: 114666 - DNA, 153 bp, Arabidopsis thaliana columbia
gctttcagaaaaccggaaatatacctggcatagatgaccatcgtaactaaacgaattcgtaaacattaactttgattggagaaaattggtctaaattgtattgaacctctaaaacagtaattggaagacaaacataactaaataataataatt

SEQ ID NO: 114667 - DNA, 371 bp, Arabidopsis thaliana columbia
caggaccaaacctacattgtatcaaccacacattatatgtcaccagacgaccttataggtattggctggagatatacatgcaacaatatcatgcgttggatacatcataatatgtatatatctctgtataagcattggtacaaacacataaaaacctgtatcatgtaacgatgatagaccgtgtattttatccatttgcttaacacatgctactcaaagacgaccattactcatagaaatatgagagaagaggtctattgaattgtccatatgtgtctatctataaagacatactgaaagcaacattgaaacttgctcgactacagaatttaataatgcaacatgatgaccaatcaagcgcggagtttata

SEQ ID NO: 114668 - DNA, 383 bp, Arabidopsis thaliana columbia
  unsure (1)..(383): unsure at all n locations
ggtctttgtaagttgtgtttctttcgtatggtctctcattgttaagcttaggtagatactgacagtctgtcaggtaccctgtcacattctgtgaaacagaaaaaataatgttaagcttaggtagatactaatttgttgattttgcaagtttcctaataaactatggtgaatagagacatactttagggtttttgaaataaccactaggagcaagattatcctgcaaaagtcattcaaagattttaattaattttctaattgacgacttaaatcatatgatgtaaagagagagaaagagatcaatacttgaacaaagtcgctgtangggattttncttgcctattcccatttgctatgtcacanattaagccagacttgaacaa

SEQ ID NO: 114669 - DNA, 154 bp, Arabidopsis thaliana columbia
agaaaatgcaattgtttgaacttctttagattaatcttgtaactgagaaaacaaaaacatacttggaactttattaatctttcattatttatctatcaaataaatatatctataatcgctacataaatcacccctcccgttaccatacataaaa

SEQ ID NO: 114670 - DNA, 386 bp, Arabidopsis thaliana columbia
ggctggttggtggtctctcagagaattttgagagcgttgaagctggttggatggtatgtttccattgcggaaagtattatactttgctttagaagtaaaccgtgacccgattaacaaaatcctatatttcaggtgaatccagctgttttcggagactcacgtacccgtctcttcatctcctggactgttagtaacacttttatataactaccaactttgaaatatctcaatcacttacgtgagtttatataactacgctttctatttggattttcagacagatggatacactaaaacagggtgcatcaatctcttatgcgcgggttttgtgcaaacaagtaaaaaatttgcccttggtgcaaccgttgaacctgtttcgagttcct

SEQ ID NO: 114671 - DNA, 347 bp, Arabidopsis thaliana columbia
atttaaaatgttgattataaaagatcgacccccggtgtatccacaatcaaacataagtttataccaatgagattaaaatacaacaatatcataagtttataacaaaaaatatatatatatatatatataatccggtgtacctttggtcaaatcctgttattatgtaagtaagctaaacttttgatattattaatttgtcttaaacgtcatactcaaacacgacgattacacttagatcccccattaatctttgatattaatatatatatatatatatatatataattacatattgttatttacgttattatttgttttacgataatatatattttgggtgaatatgc

SEQ ID NO: 114672 - DNA, 354 bp, Arabidopsis thaliana columbia
cgtctaacagtaatcatgactgattctcatatgcatgcaatacatataggagggggcatctatactgtgggggaaggatcgatgacttacgaaattatgcacataacctagctaccttgcaccatcctaacccgggaaagctacttatcatagagctctatatagcatcaccatttatctcaaccattacaaaatatatggtcaatggttctttactaaatgcattgcaaaacaagtacacctattctaccggttagacacaccatctcaatcataccaacatcactttcaggatgtactatcccaccaacaaatttaaatattgcgatggattactgggcagctccaacttca

SEQ ID NO: 114673 - DNA, 370 bp, Arabidopsis thaliana columbia
atcatactcaagttaaactcaagaagcgtggctctgatactaagtatttggctacagtcttggccattggaactgaatgtgacattgctttgttgacagttacggatgatgagttttgggaaggagtatctcctgtggagtttggtgatttaccagctttgcaagatgctgttactgttgttggttatccaattggtggtgatacaatctctgtcacaagcggtgttgtttcccggatggagatattgtcgtatgtgcatggatcaaccgagcttttgggattgcagattgatgcagctattaattctgggaattctggtggtcctgcatttaatgataaaggaaaatgtgttggtattgcatttcagtc

SEQ ID NO: 114674 - DNA, 352 bp, Arabidopsis thaliana columbia
tagctctgataaagtatgagagtagcgttacaatggaggttgacgaagacattgagttacaaaggcatgaagaacaacaaagcagaaagctacaaagattctcagaggacaacactggactaatgaggaattggaacaatccatcgtctcgtatcattagggtttcacgagcttctggtggcaaagatagacatagcaaagtgttaacatcaaaaggtttaagagatcgaagaatacgtctctcagttgctacagcaatccagttctatgatcttcaagatcgtcttggatttgatcagccaaataaaagctgttggaatggttaatcaatgcagcttctgattcaatcact

SEQ ID NO: 114675 - DNA, 191 bp, Arabidopsis thaliana columbia
catccatgtggcagacattgcacttatcgagatctttccagtccacacggacaggtttgtaacgagttggctgactttgatgccttacgcaactattattgtccatggaaacatctgactaatgactggattttgctaaatactgcttcgtaatggtatattttggcgagcctcttgttgagtgtatacac

SEQ ID NO: 114676 - DNA, 367 bp, Arabidopsis thaliana columbia
cagaggagtggttgaattggaagaaactgtataaagcgcctctggggtaccctatggatagaggtatcttataaccaattgcctcaacggactatttacccgtaacatcaaagtttcaacaattttgtcttttgaaaattccaaacttagaacttcgaattttgaccaacctaattggttccaagaccatgggcctaatcacataagttcccgtatcaaaggcacattcggatatctagctccagagtactttatgcaccgtattgttttttaaaagacggatgtttttgctttagctgtattgcttatagagatcataactaggtcgtgagctgttgatacctatagccaggaaagcataattatg

SEQ ID NO: 114677 - DNA, 369 bp, Arabidopsis thaliana columbia
aggtgatccaaaacttaacaatatggtgattagtatgtttggagagtgtagtagtattactgatgctgagagagtgtttgatcatatggttgataaagatatggattcttggcatttgatgatgtgtgcgtatagtgataacggaatgggagatgatgcgttgcatttgttcgaagagatgacgaaacatgggttgaagccgaacgaggagactttccttacggtcttcttggcttgtgctactgttggtggtatagaagaagcgtttttgcattttgattcgatgaagaacgagcatgggattagtccgaagacagagcattatttgggtgttttaggtgttcttgggaaatgtggacatcttgttga

SEQ ID NO: 114678 - DNA, 371 bp, Arabidopsis thaliana columbia
ataatttataagatcgttaataattttttttgtttgatttcttgcaggaaaataaaatatgtaggatgctgctttttctatttgatctcatcttccaaatttttataaacatttgagcaattgatgtcaaagtgaatacaaaaacaggaaatatagtagtcttatataagacaactagatcataacccgtgctgtagcattaatattttgtataaattaaattgtatactttatttgaattatataagaaatagtatagtataaaagtgatactataatatttttcaatgtttttactatttggatataatattgcattggattgactttgtttaaaaatgttatttttataataaatacaacatatgtag

SEQ ID NO: 114679 - DNA, 229 bp, Arabidopsis thaliana columbia
tcgtggaggagtgatatgattaaaacaaaacactataaatgaactaggggatgtcattattaaaacagtggagacaaatttagggatcttacttgcaaaaacttgttgaaatcttattaaatatacttcacacaaactaaaaatagataacatgattttaccaaattagagagaaccctatatatggaaaagaaatgtggtaaccaaaagtctactagagagaaaatat

SEQ ID NO: 114680 - DNA, 321 bp, Arabidopsis thaliana columbia
ggcagtcattgagtggccaaaaatattttccttggccttcaattgtaccggaaccggagatagagagattgttgatgtaccagaagttgatccatgtgtcctggttaatgtccctagggtttgcacaagccaataaagtttcatcgatgacgaattcaatagaatttttgcatgacccacaaactctacaccaccgaggtagaatgttcctttcggtacgtagattttactacttccacttatccttgtgcatgcacgtttctatacacttgtgaatgcctaattttgtatatgttaagaataagataggttaattattaa

SEQ ID NO: 114681 - DNA, 342 bp, Arabidopsis thaliana columbia
taagtacagaaatttcatacacattatcctactgacaacacgaccagcgggggccctcaacaatattgcggtttcaacaacaacaccataatcatgaacatgccccacttcaagacatagcccacacatccaagctaccccccccactacatctgcaccatcaaaccaactatccccatgcaaaccccaacccacacactactactaccagaccacatctactactgtattcaaaccattacaccaatacacacatctctttactcaccacgccacaagccatctatcacaacccaccaacacaatacttcccataacccacattaatctcactgaaatatt

SEQ ID NO: 114682 - DNA, 252 bp, Arabidopsis thaliana columbia
gacacaccaacaatctccatttttacactcctatctgctaaacacatgaggatttctacattttttgagtttttaaaccaattcaccactcctttttacatcccatatcaagcacacctcacacttatattgatctcctttatatattctcttatgacaacaacaaaacgctaaatctaactacaaatactatcatgtgccataattttagttactacaataatcaaacatatgcttctttacacgaatatt

SEQ ID NO: 114683 - DNA, 375 bp, Arabidopsis thaliana columbia
agctgagttataaatcttgatcttcttactcaagagaattctagagttggcttgagagtgacgtgtgtgatgattatgaagcacagtaactgggcctagcgtggaagcataaagcccaatagaaaaggcctttttcttttttttcttcttattcccggaatccgacaatgttcaaagtgtgtagtagattgatgaagaaaaaccagtgtcattttggtagataatcgtatggaggaattttttcttgcaaaagtgatatatatggtggaaaaatatatatgtaaacatagatgtttattgctcttccgcatttgtgttaaacaaatagtgtaacaatatcaaaacagtttttttgttcgtccattcgattgataa

SEQ ID NO: 114684 - DNA, 326 bp, Arabidopsis thaliana columbia
atctagactatgcaagaacaggagccaatcaagatcatgaaccagggaaaggaagaccataaaagttaacttaaaccaattcaaaaaataatccataaacgtatatatactatttttaccaatatgctttttgtacgtggaaaaaatcatgcatacatatatgatgtaatggaccaagcttttgggaaatattaaagttttttttttttgtgcaaaaaggaaatattaaagttataaaagaaaaaaatatgtatgcatgcatataaattaaggttttatcatgtgagatattgattttaagtcattgacatttaagtgtcataaaa

SEQ ID NO: 114685 - DNA, 383 bp, Arabidopsis thaliana columbia
gataaatttagtggcaagtcccatcattaagccttttagagtagtttctttgttacctcaaatcaattaatgagaccatgcatttatgaaaacgattgtttgcaaatagttaagactaattatttcacacacaaaaagttaaatcaaagaactatgaccagtgaacatggtttacgacatggaaacaaaggatgggataagcttaacatctatcatatcattgattaaattattattattttgactaaatagtaatttggtcaacactattgtatttttttaaaacactaaccactatgattagtacgttttttggaacttatgattagttcgattattctcatgaacttatggtttaatttattcgcataaacttattgatc

SEQ ID NO: 114686 - DNA, 291 bp, Arabidopsis thaliana columbia
ataacagagaggatgacatcttttataatgagctataaaaaaaggccctcaggagacccaaaagtgttgagggtcccaaccaactacaacaccgaacgaaaagtgcttccagaacagctaataatcgcacacgacgaatagaggaaaattattaatgccataaatataagagagagctcgttcactctaccttcgccacaactccacacctttaccattgaatttattcaaaccctttttgctaaaatgcaccttactttttcctcatctacctcattttatcccccccac

SEQ ID NO: 114687 - DNA, 380 bp, Arabidopsis thaliana columbia
catgaattattttttctaatgacaaaatgtgttctcttgatcgtttggattgttgcagcatcaagtgaaatggaagcttacgtcgccgttttggcgttaagagtatggtttaccagaagtactagaataaaatacggctatatatcttagctgatattaccatgtatttgtttttgtctcaatgctttgtcttattttcatatcatatgttgtattgatgtgctaaaactatgataatagtaccttattagtcatcttctttctagatatctcctccaacgcatacgaacgtaataataatatgtgaagagttttataactattaagtaaccaataatattaagttcctagttttggagtgacattatttataaaaataa

SEQ ID NO: 114688 - DNA, 303 bp, Arabidopsis thaliana columbia
tctcttcgttccagattaccgtcattacatcgccgcagtgtagcttctgcgccaaccaactcttccctggtatctcaactcaactaactccaccgtctttcgtcctctcaccttcgtcagatctcgttccagcgaatccgacgtcacaccacaatttgaattggataaagcacaagacaaacagaaaccactaaaccaagcaaatggaatattcttgatcatacttatcaatcttgccatatttatagctcaacacttctatcaagttcgcgggatcaaatcgatgtatttgtctagcgattt

SEQ ID NO: 114689 - DNA, 382 bp, Arabidopsis thaliana columbia
cgctgagcaactaagagcctttcaggatctcatagttgaaggaaaggttcgctatatcggtgtctggaatgaaacttcatacggagtgacggagtttgttaacacagcaaaactcgaaggactaccaaagattgtgagcatccagaatggttacagcttgctagttagatgtcggtatgaagttgatctggtagaagtatgccacccaaaaaattgcaatgttggcttgcttgcttattcccctcttggaggcggctcgttgtctgggaaatacttggctacagaccaagaagctacaaaaaatgcaaggctgaatcttttcccaggatatatggaacgttacaagggatcactagccaaggaagcaaccatacaatacgtt

SEQ ID NO: 114690 - DNA, 380 bp, Arabidopsis thaliana columbia
aggaaaggaacaatgatgaaccagaagacacagtcagtaagcaaaactgcacctgcattcatctgtttgacgcgatatatatccaattaagaactcacgaaaattcgatataatcatggcgcatgattatgaattttgattttgattacctgaaagataatctggaaaacatatccccaaaaaccagctggattactagagtattgactctgttgaatagtattatcagctcctttggatcttgctctctctgagtctatggcttcaatgctatctactctatcgccagctgctcttttgttgtattggtaacatccgtgcaaagaaagaagcgagcctaactgttaaaagataccagatcaaaatgtaagaaacttgag

SEQ ID NO: 114691 - DNA, 325 bp, Arabidopsis thaliana columbia
cagacacacattctacactatctataaccccacatatacatcccacgaggcccaaaaacaaaatgtggggttatacacaccccacatcccaaaagacaaaacaagagtccggatcaaaccacacatcaaacagatgattcgcgttatccccaacaacctaccaaaacacaaacacaaaacggagacatataaacgaaaattgaacctatcatccaaatcctcaaattgcatagataaataaacttaaaacatcactaccaatgaaacccctcagggactgaactgtgatatgaacacacctttatcaaaccaaaacttctttcat

SEQ ID NO: 114692 - DNA, 310 bp, Arabidopsis thaliana columbia
  unsure (1)..(310): unsure at all n locations
ccggggctaccacacacgtccgaccaacaccatttcacatattttatccaccaccataacccacccancctgtcacattaaaatatgtctgtctacaaaaacncacaaaaaaaaacctaatactcattttcagcactcttcacactacaaacctgcaaatctgcttattttcatatatccaaaaaaaacacccctatttcttcttctgattctcattctcacacactgtcaaccaataattctactccatcaaatacctttcttacatactcactaacaatgttacaattctgtaaaaagacaaaaccac

SEQ ID NO: 114693 - DNA, 337 bp, Arabidopsis thaliana columbia
cccgaggagacactattctcgctgaagggacttccatgccaaaggcaaaggtcgagaaaaagaatttcgaggtatagattgaagaatcgtgggtccaatgtgataaatgtcaggcctggcagcatcaaatatgtgctctatttaatgggcggaggaatgatggggggcaagctgagtatacctgcccatattgctatgtaattgatgtggagcaaaatgagagaaagcctttacttcagagtgctgttcttggagcgaaagatctgccaagaacaattctcagtgaccatatatagcagcggttgtttaaaaggctgaagcatgaaaggactgatag

SEQ ID NO: 114694 - DNA, 381 bp, Arabidopsis thaliana columbia
gagagagacagggatcactatagagagcgagatagggacagggaaagaggcagagatagagaacgagacagaagagacagggcaaggcgcagaagtagaagcaggagtagggatcgtaagagacatgaaactgatgatgtgcgggatcgggaagaacctaagaaaaagaaagaaaagaaggagaagatgaaggaagatggaaccgatcatccaaatcctgaaattgcagagatgaatagactgagagcatcactgggaatgaaacccctcagggactgaactgtgaaatgaggacatctttatcaaaccgaaacttggttcatttgcccagctaaaccggttactatactgtgatcctactcactatagttttggtttttt

SEQ ID NO: 114695 - DNA, 271 bp, Arabidopsis thaliana columbia
  unsure (1)..(271): unsure at all n locations
accaacgtggcctaaaaaaaatttgttggacaaaacaaacattncaaacaacaccaaccatgcaaaaattcaaaccaaaaactaaggcaagaacccctaacaattaattttggactacgtcataaacctatttcgtatttatctcctccctaattgtattaacagaaacagtgcattcgaataataaaaattaacttatttctcctcatatatcagctacgagaattaccattcttttatttcacaaaaaaaaacacctaccaccaaacaa

SEQ ID NO: 114696 - DNA, 378 bp, Arabidopsis thaliana columbia
tcgcccacaccttctatcgaccattttgaattccctcaggctcgacgagaaggtgtatttaagggttttaggtgcacaacaaaaaggcataaatggatacctactcctcagaatacgccaacttcaactcctgtaacaactacatatgaatcctcttccggattacacccattatctcaagttttggatcgaacaaatccattgacacaaatcagccatgggagaaaattgacatatttgaaccctgtcagataaacaggtcaaactcctaatattcggataccagatatacatcctaatcactataggcgaaccagtcccattgacacatctgaaggaatcaatgttgtacttattggatctttatcaatacatgcc

SEQ ID NO: 114697 - DNA, 355 bp, Arabidopsis thaliana columbia
cttccgaatcttttttttttagggttttgaaatctcttaagaactctccacaaacgttagggaattgcatagcagagtaactaaaacttagaatctagggagttgtaaaacatgtaaaaatagttaggtctaaacaatgaccttgaaaatctatatataatgtctaaaaaacgtgtagggaagtattttggggtatattctggagacttcaattcttcaaaccgtcagaattaggctgagctgtgaatggtgtcgacggacacccgttcagattccaaatttgtattttagcttattttcctttgttttcgctccaaaatgctcaatattcttcaaaagtatccaaaagtgtaaa

SEQ ID NO: 114698 - DNA, 344 bp, Arabidopsis thaliana columbia
gactacagcttttacaatgtttaacccgccggcctatgcaggaccagggcttccttgaatctttgtggtgtattcaaacaccaaaccacacaaacactaccacacctgaactgattcccaatacaacaaaaaatatacggacaaatattcatatgattccacataccacatttaaagattccaatttaacaaaagaaattatacctctgactgctgttgcataaattatcattttaacaatcaactgctactataataatatctatgctaccccgtatcaaaataatatcatcccatatcattttttaaactagttcaactaaaatttgcaaaataataaaacc

SEQ ID NO: 114699 - DNA, 253 bp, Arabidopsis thaliana columbia
  unsure (1)..(253): unsure at all n locations
aacccncttcaaaggattgttatttatatatcaccaccaatgagctcgtaaccgagatgaggtctcttttgcaaaacccaacagaaactaatcttcaagacatgatcaattaagttgatgcatatgttaaccgaaccattaatttcccttagttcctgaacctgattgcaaggaaaataaaagacactgattcagaggaagaactcaatgaagcttttaagctttttgataaagaccacaatgaattcatatc

SEQ ID NO: 114700 - DNA, 346 bp, Arabidopsis thaliana columbia
cttgtgaacccgggtagaaattaagtggcccggaattttgctggctggtgggtctaagagctcttgggggcacaagaacaaccattcttggataccaaatggagatcaaatcctaaaacttccttcacaatctaaatttaccaaaaaaaaaaaaaaaaaaaaaaaaaaaaaaaaaaaaaaaaaaaacataaaaaaaaaaaaaaaaaaaaaaaaaaaaaaatataaaaaaaaaaaattatattaaaaaaaaacagggcgggcccttttaaaggatcaaacttttcaaccccttcaatgcaagaaaaaaaattttttttggggtaactaaaataaaactcattggccg

SEQ ID NO: 114701 - DNA, 383 bp, Arabidopsis thaliana columbia
cattactgtactatttatggaatattccactaagttatctagaaaagcttgtagtaatgcataatagtggtaatctgacaaatatcatgtagtaatcatggttatgtcatatgtgaggcaagaagattaaatgctttctggacctatacgtctctagttactcttttttaacaaaatagagcctttttcaggagttccttatggcactacttctaattcatctacaggttatcgttctgcaaaaggtaagctccatgtccttagtcaaactaaagtaatttaattgacagtataagaagtggtcatttttgcatgagagtttagttagtatgctgactcgatggtgatgtatgtaatatcatcgccgatgatctccaattgct

SEQ ID NO: 114702 - DNA, 375 bp, Arabidopsis thaliana columbia
gtggtttctgacgtttaaagctaaaaatctagagacttttggtatcccaaaagcaaagcttggtgaaattgaaaaatcaaaccccaaaaccctaaaaagctgattcctttctttgattctcactaccaattcttcccgccagtttcctttccccgattcatccttgacacttgcaacgccatgttgcggcctcgccgatctcttggggtttcatctccggcgaagcagaggaagaaagctgctcctaagaattccatggctacgagagcgaatcgaaagcgtctcccttcttacctcaaacctggctccgccgtagaaatcagctccgacgagattggattccgcggctcgtggtacatgggaaaagtaatcacc

SEQ ID NO: 114703 - DNA, 378 bp, Arabidopsis thaliana columbia
  unsure (1)..(378): unsure at all n locations
cggacgcgtggggttggagcatacaaagatagttcttaaaaatgctgagttgcanagaatgaaccttggtgctgtgtcgtctactagtgatagggtgggttttagcactggtcaaaagatatcatctcgagtcagcaattcgaagaaaccatctgattttgctgtgggttcggggaagaaagttcggcatcagaatgggacttctcgtggatggaatcgtggtacctcagggaagtttgagtcttcgaaagagactatgactagcactcctaacattacactgatgaagcaatgtgacacgctactgagaaaactgtggtctcatccgcattcttgggtgtttcaggcgccagttgatgtagtgaaactgaacatacc

SEQ ID NO: 114704 - DNA, 384 bp, Arabidopsis thaliana columbia
gccgatctagaccaagtattcaaaagggttttgagcctgaaaacagagaacaaagatgacaaagacgctatagcccagtgtaagttgcttgtggatgaagctaaagaagaacttggcacctccatgaaaagaatcaacgactcagaggttaataactttgcaaaaatagttcccgatttggacagttggctaagcgcagtcatgtcttatcaagaaacatgtgtcgatggatttgaagaagggaaactcaaaacggagatacgtaagaatttcaattcttctcaagttttgacaagcaattcactcgcgatgataaaatctttagacggatatctttcctcggttccaaaggttaaaacgcgacttcttcttgaagcaagatct

SEQ ID NO: 114705 - DNA, 373 bp, Arabidopsis thaliana columbia
tgatcttgatttggaaggtctaatatgattttttgtagggtggaggacccttgggatcaaaggtggttaatgatgatcaggagaattttagaggtggaactaacaatgatgctcattctaattcttggtaatttacatcgttggattaaaagatgaatccatttcttcttcttgttcatgttaatttattctctttttttcttcgtcaataactgattaattaattaaacttttatatctcccttgcattttttttgtgatccaatagaactatagactatatatttacactaagacttatgagaaaggattaaacctaaggtataagtataaacaatgtctctaagacattagagtgtactcaggtggagat

SEQ ID NO: 114706 - DNA, 381 bp, Arabidopsis thaliana columbia
gttgaaaaaccactattttttcaaatagttaaatttgcttttcatctgagggtcccatttaaccgagtgaccagttagttcaacaaatttttcttcgattctccgtttaccagcagctaatggtttcctaatcgtatagtcttccgcttctaattcagcgattacaagctctagaaaaatttaagttgttccaggcgtccatttatgctaaccacattttcaaattttaaacaatcacaattatattttaaaaataatatgtaggtaaaactataaaatagtatacacaaaactttaataaacatacattgcatcttgtattgcttgcacctctactcgatgttccttcaccagcattttcagaatctaaaagtcatcact

SEQ ID NO: 114707 - DNA, 382 bp, Arabidopsis thaliana columbia
tctcaatcgagaagaaggaacccaacactgagatccatggcgatggtatttgcacaacccaagaaaaacctacttcctctcattctcttcctcttctgtatctccgtcatcattctcctcgttctcgtctccgagaccactcactctaacgccggacgaggaactactttccggcgaaattacaatgatcccgctcctttcactttcctcatcaaggtcctcacctttaaccgtctccattctctctcccgctgtctcagatctctctccgccgcagactacggcgtttccggagacagaggacgcattcacctccacgtctacattgatcatttcaacctcgcgaggaacgatacacctgtggaagataacttgcaaatcg

SEQ ID NO: 114708 - DNA, 242 bp, Arabidopsis thaliana columbia
atttcatctaattatatatatttgctaatttatcatgtttctgtgtttctatattatatatttattaaggaaaattgctaaaatttaaaatattgaaaagctagatcctgagatggaactagaagtctaaaacagcttaacgaggaaaactctacaaacaagagaacagaggccataatttgttgaacatggttgcatatcatacaaaaaatggccaaacccatagaaaattgaactttaat

SEQ ID NO: 114709 - DNA, 361 bp, Arabidopsis thaliana columbia
gtgaatattaaaacttcgaacaaaatcgatttttttgtgttcaattatgatatctaagatatacacatggtaccaaattacttattaattaggtttagagagatgtggaaatacacaataatatgttctatcacacacatttcttcacatctctttatacgaaataacattttaagattattaagccggcatcaatatgctttcttgtcatgaattacatagttttaagaaataaaatcaaagaattttgaatatatgtcacacagaacacttgcacagtttcttgtataaaacacaaattatgctaacaaatcttataaaaccaaacagttttatttgtattgctctatcaagtgccaca

SEQ ID NO: 114710 - DNA, 393 bp, Arabidopsis thaliana columbia
ccgcaatatccggggcgagccacacgtgcgcgaaaactcacacgcagactttatagtcacataatgtggctcacttgttggcaggaggatagtggagagcagaaaatgttttttatgaggctaccttctgttcctttggcatcaacaccaacagaaaaccttgaaacaaggccaaatatcaaaggccccgttgagaagaagactgttgatttaaaagccttgccagaaggttacatgggcaaactgttagtctacaaaagtggtgctgtcaagatgaaacttggggaagtgctttatgatgtgagtgattctttttccgtttactaagtattctatgaccatagatcctgcaatatggtttttaccgggcataatactagctaatatctagta

SEQ ID NO: 114711 - DNA, 371 bp, Arabidopsis thaliana columbia
accacattaatattgtctaaaatactatagtgattcatttgagaagagaattacgttttttccccagctggtttggtactcgtagtgacaatgtcccatttcttgagccgtttctagagagtccttaaggtttttttggggaaatggttttctttgtaacgcatcgaccaccgatttcaccatctccttagaattcccaaattctctcgttagactctcctcagctaaatacttcccttaatgaaattacaacgagaaccgtgaatgatttgacatgtgaatagtagaacgatggaataacaaaaatgttagtataattaatgaaaacatcagaattttgcatgctaaaagattggtttttttatgtcttt

SEQ ID NO: 114712 - DNA, 389 bp, Arabidopsis thaliana columbia
cttccgcggacgcgtgggaaaatatatatatatataatcaaacaataataataaagtgattaaattttttaaatccaactaaacgtctaataccataacaaatatagtagtagatcaccaatgacggaaataaactagtaaaacatcgtgaatttacacaactaatatcgggtgtctcactcaccattcgtttcatttttaaggcggcattgtaaagtcttcgtcaaaatgtaaaccataaaatgagtttacgaactgaaaagatttctaaaaatgattgaataaagtctaaaatctcatattatattccaaaataaagagaatattttaaaacccacacccgaccggttcaccagatcataggttaatagtgagtttttgtgggtttt

SEQ ID NO: 114713 - DNA, 379 bp, Arabidopsis thaliana columbia
ggaatgcattgtctgagaatcgatgacatcgagttttcgcattttaaccgcgtagttcttgtaaaccctgtgaatttcagcaattctgtctttgtgttgatctggttttggttcaatcttgagtggtttcagctcttgtaatggagtctctgattcctcaagaatagtgcacaatcctcctgttcttgcagtccttagttctgttttcaacttctcaatcacatcactatgctcaaactcatcatcatctgaatctgaaccatcatcaaactcatcatatacctcttcttgttcatcaaagcccattttcatctcttcttctctctgcataaactcttcttcttctccataaggaaagtttgaaatctgtaaacttggg

SEQ ID NO: 114714 - DNA, 373 bp, Arabidopsis thaliana columbia
aataactccagcaacacaatccattatccatgaaagttagtttttgaatatcagtgttcatactataatatagaagcgatacctagaaatactacttgtaaatttgaaatacactagtttacaccggccttttactctagcactcaaaccaatataaacaacattaaatggtcaaaaaaatatatttcaaagttgagacttaaaaccgaagtattgtactctcatttactaccagattattaaagcgaggtaattaactaaaagtaataaacaaaaacagaaacttgtgtctaaacatattgtagatgacctaatttgaccagtgatgagaaaacggcatgtttatatattgcccctttctatttatatactc

SEQ ID NO: 114715 - DNA, 334 bp, Arabidopsis thaliana columbia
ccgcaatatccggggcgagccacacgcgtgcgagaacttacacgacgaccttataaactcattatgcgactcacatggagctctgtcgatctcggtggagatacaaagatcttcctggggctacctgttggtgctttgggatcaacacccacagataaccttgtgactaggccaaatatctaatttccaccgatcgtagaaaggtgcttaacattgacacgaatgactactattgtggagaaacatcttgtcttaatatgaatcagctttaaaagaaaaccaggggaaacgatatatcatctgagcatttatgtgctcgcctacataacaatgt

SEQ ID NO: 114716 - DNA, 377 bp, Arabidopsis thaliana columbia
cttggatattattaaggcccgcaataaaccaatagagcctccaaagaaacctgaaaaggcttcttttgtcttgccctcaattccctcgctgtccggagatatattattcaaggcaaatgactctgaggctgatggggagaatgaggaaaataataaaaaggaccagaatagcatgaagaactttgatgcattggaatctccattctcaaaacatctcaagtcttcatgggattcaaaacactttttagattttaccaactacatgaagagtttatccccgtcagctctcgacatggagcttcggatgcttgaaatcatagatgaagatgttgaagaagagcttatcaaaagacctgagtttatattgattgggcaac

SEQ ID NO: 114717 - DNA, 378 bp, Arabidopsis thaliana columbia
cttttggggtcacatgttttgtgaatgcaaacagacaaaaaaaaacagggaactttgtttgcctagggtgttaaattaatggggaaaaaccttattcagattactctatttgacagagtttatgtaaaacctctgaaaccgggaaaataaatcaagggaatatcattgcactgcagattctggtctttgatataagtgaatatgtgtttgcttccttcttgtgaatgtgtttgtgtcactgttccttagagcgattgttgtgtggatatgagaaagacagaggaacatatggaggaaaacacgtgtgttatctatgaagcttatctatcaatattacatggaatttgtgaatgtgtggttaggttgcatatattaagc

SEQ ID NO: 114718 - DNA, 349 bp, Arabidopsis thaliana columbia
tgcaaatactgcgagaataagttcacgagcgaaattgctggagagtacaatgtcaattttttttgcagtggcacatctaaaaaggagttcctcctgatcaacaatcagcaggacgcatcatccttgtcgacaacaatctttgctgccacaaacaagtgggtattattcagccagtgttattttttttgatcaacaagaattccgcccacaaccataatatattatcagtgcggaaagaaaggccacaccccatgtttgtgttgtcagaataattttgttttaaaagaattacctaaaagaaactggttttgctccatggactgtacgaggatcaactccacattacaaa

SEQ ID NO: 114719 - DNA, 339 bp, Arabidopsis thaliana columbia
caccgtgtcatagattttcagtacactataaagtacatatactattgggggtgcttaggtcgtgccatggtactatttaacataacatatgaattttaaatgcctctctatgtttaaccattttaggatgccaagaagtgcaataagagtggtgaaggcaaacacgaaaatacgaagatcatgacgaaccacttggtagtctaaagataaaagcaaggattgaagtctaaactgatacttttattatgatatgaagtttatgaaacgattttggtttttttttgttctcgccttttcctaaatttttgttcttcactattctaagttttagataaattt

SEQ ID NO: 114720 - DNA, 376 bp, Arabidopsis thaliana columbia
agcgaactttatgatcctagttgaggatatttagtgaatgatactgttttggttgaagctgaagtcgctgtacgtaaggttcttgattactggtcatatgactctaaaaaagagactggttttgttggactcaagaaccaaggtgcaacatgctacatgaattctctcctacagacactataccacataccttacttcagaaaggctgtataccacatgccaacaactgagaatgatgcacccacagcaagtataccgttggctctccaaagtttgttttacaagctccaatacaatgacactagtgttgcaacaaaagagctgacaaagtcgtttggttgggatacatatgattccttcatgcagcatgatgtgc

SEQ ID NO: 114721 - DNA, 375 bp, Arabidopsis thaliana columbia
gctctgggagcttatttcgctccttcatccggtcgtggtaccccttcagccactcagccacctggatcagctcaaccaactggatcagctggtgctaagaaactagaagcaaaaggtggtaacgtgggaaatccatgggacgatggtcctcatgaaggtgtgaggaaagtgtatataggtcagggtgattctggtgtatcatacgtcaagtttgtctacgacaaggactctaaggaggtccccggaaatgatcatgggaaaagaacactacttgcacctgaagagttccttcttgaatatccaaacgaatatataacatcggtggagcttaactatgacaaaatatttggaactgaaggtgaaatcataacgatg

SEQ ID NO: 114722 - DNA, 295 bp, Arabidopsis thaliana columbia
  unsure (1)..(295): unsure at all n locations
gccaanaaacatatcaccaaatttttattccacatcctccaanngcaccggggccttaaataatttttgggtatgaaaaccagatcatgaaccatttagacattatcatatgcacctatacttttcacaagcacagtaaatctttattaatatactaaacacatcaaataatagattatccatcaaactctacaccaacaaaaaaaaataaatctctcccgacctagattatacaaccttacctactccttcatcctacaccatattattcacatattaacacctaaattcaatt

SEQ ID NO: 114723 - DNA, 334 bp, Arabidopsis thaliana columbia
aaaaaagttaagccctcattgttgtcctctagcctctcactctgcgggggctgcataaaacattttgtgttggggtacaacttgggctcatagttcgtaatcctgacacagcatttttgagaataaaaacacaatgcacaattgtccagagaggctattcccaccaagagaagtcgcccacgtactagactcggcagcggcaagtttacagcctagctgctcgcagaactttccgatctatacagagattcagaagtgcatgtgaatcataagaaaccagattctaaccctcgtaccatactaaagttagaatcctaaaaccataacttaacct

SEQ ID NO: 114724 - DNA, 378 bp, Arabidopsis thaliana columbia
atcgactggcttgaaactttccggaaactgcgtttgggtttctcaaactcaaaagatgtctgtactgaggaactttcaaagtttgaagcaggaactttacggacactcttcttgggtttagcagactcagcctcgactaaaagcctgttctgaggttttctgcttatcgttttcttcggttgaggaactggtttccagaagcatgaggctgaccagttctctaaccagatcaagtttgagtttggattggatgtatcatatgcgtgtacaggtagcacttttggtgatgaagcgagaagctgtaaacaaaattatccatcaagatctttaaataaaattagagactccatagtataaaagagatattggatacagtga

SEQ ID NO: 114725 - DNA, 364 bp, Arabidopsis thaliana columbia
cgtcggctgtcagcggactgctcgagctgcttccgcggcgagagcgggtcgccgcgtgccggccgggggacggactgggaacggctctctcgggagctttccccgggcgtcgaacagtcagctcagaactggtacggacaagtgggaaatgttggggtaaaccagaaaagtttgggtagagccggatcgaaatgttggctaggtaaacgtcctgtagtaagaggagtagttatgaaccctgtcgaccatccccatggaggtggtgaagggagggctccaattggtagaaaaaaacccgtaaccccctggggttatcctgcacttggaagaagaactagaaaaagggaaaaatatagtgagactt

SEQ ID NO: 114726 - DNA, 402 bp, Arabidopsis thaliana columbia
tttcaatataatatgtatgaaattgaatataaatatttctaattatgactggttactcagtagaaagttgtcttaaatctatttttcacccgttataatattttttcatgtattgaacagtttatattcgtttttaaaaattcaaattgtggcatatgcgaaataactctaattatttttttataacgatgatattattttcccgcaaaaataaaatcatataaagatgagaagtgaactataataattaataaaaaattaatatgataatttagatatcagatatagtttgttgattttaatttgttatttttttaaaaattaataatgtatttcgtttttttaattaaattaaattaattaaaatttagatatcaaatgttatatgttgattttgattgg

SEQ ID NO: 114727 - DNA, 307 bp, Arabidopsis thaliana columbia
  unsure (1)..(307): unsure at all n locations
gggtcgtctccacgcgnccgnctctcttcttcccttctctttatctttcacagagagaaaccattgtgagcaccaaaattttatttgaccccaacccacccaccacccctaacttttttatatcatatatttcacantgtaacttcccttttacaaaaccattttttttcatactctaacaaactctacttattcttattttactataacattaatttccccctctacaaactcatattaaatccatcacctaccataattattcacaaataatccatttaataatttatatattttctttatccaa

SEQ ID NO: 114728 - DNA, 421 bp, Arabidopsis thaliana columbia
  unsure (1)..(421): unsure at all n locations
cggggcgtctcctcgcgtccgaagaaaaatgatttttgagagtttacttgacaattacaagagannnnnatgtatgataataagattatggttgtggaaaanagaattacggattttttgtttggtcatcgaacttcctatttttaggatgggaatatgtctaatattctttaccgtattatttcttaagatttgagttaatctttccttatcttcatggaggtcgatgccgagctcatcgacttttagttcttgaactgatttcacaattcagtcatatcattttggtgtatttttggtttgaaccgaattaatcggtggatactaaaccactctcttacattaaatataagaagtgaagactcataattatatacaatttattaatatttttataaaaatttgcacattgaatatttga

SEQ ID NO: 114729 - DNA, 408 bp, Arabidopsis thaliana columbia
gcgtggaggtcagtcagtgacccttgtgggaaaaagcttggagaggtttgttgaccaggatgcagagagatcgcttctgaacgatttgcatatacttgatttagataccatgacctgggaggaaattgatgccgtgggttctcctccgactccaaggtctgatcatgctgctgcagtgcacgctgagcgttaccttctaatctttggtggaggatcacatgcaacttgttttgatgatctgcacgtccttgatctgcaaactatggaatggtcaagacatacacaacaaggtgacgcaccaactccacgtgctggacacgctggtgtgacgattggggaaaattggtatattgttggtggtggagataacaaaagcggggcatctaaaacctgtgtattaaatatgtc

SEQ ID NO: 114730 - DNA, 399 bp, Arabidopsis thaliana columbia
tagacacattcacatcagacttttgatataataattttcaaatcttgtaggccaacctcacatataactggagcacttttcgcattgaaatcacgcaaagccgcccttttaatgtgctgcaagaatgttaaggttgttactaacaaaatacatagtaagtagatattgtaaggaaggcgctttgcttacttctctggtagatgtcttatgcaaggaataaactgcctttgaggcgacctgcgtagccaaacatcgaatgtaaacatgtaaccgagtgatacgaaattagaaaacagtaaaaagagatattcttttctggtgtttaccttcattgccgcagagagaaactccatgtcagcttctttcttccgtgtaccaaatggagggttcattacaacc

SEQ ID NO: 114731 - DNA, 428 bp, Arabidopsis thaliana columbia
  unsure (1)..(428): unsure at all n locations
cggaatnccagaggcgtctcctcgcatccggagagttattcacttacaaaaataattaaaacttgagtgtaaccaaaaaagatgtttgntatactttctagtggtctccntaacttttattctttacaaatccatcccccttagatctatttatttcccactactttgattcatttctgttaataatctgtctttcatataaaaaaaaactgatttcttggtttgtattttcttaaaaaaatcaatctttttttatttttgatcttcttgtgtttttttttctttgtagaattaatcgtttgtgaaggtatttttttaattcccttctctcataaatctacacaaaagttgtttattttataaacctctttttcaattttcttgaaaacaaataattcctttctttactttttttacaataaccaagg

SEQ ID NO: 114732 - DNA, 410 bp, Arabidopsis thaliana columbia
ggcctcctggaacaggaaaatcgtatttggctaaagctgttgccactgaggctgtctctaccttttttagcgtgtcttcatcagaccttgtctcgaagtggatgggtgaaagtgagaagctagtatcaaaccttttcgagatggcccgtgaaagtgctccctcgattatttttgttgatgagatagattctttgtgtggtacacgtggagaaggaaacgagagtgaagcttcaagacgtatcaaaacagagcttctagtgcagatgcagggtgttggacacaatgatgagaaagtacttgtacttgcagcaaccaatacaccctatgctcttgatcaagctatccggcgacgttttgacaagcgtatctatattcctctcccagaggccaaggctcggcagcacatgttc

SEQ ID NO: 114733 - DNA, 401 bp, Arabidopsis thaliana columbia
  unsure (1)..(401): unsure at all n locations
gaatattagaaggtgagaccagctattttcatgccacaaatcangnncatgaatgtttaccaaatattaataaggtccccanntnaccctnnacttttctatattatctcgtaaccccactcatacgttttagaagatttttcacacaacttttataagttgatttttaaagaaaaatattgtttattttttctatcaataaatcttcgtaagactttccaataagagatcatttttcttattcctctcgtgacagaagcaaatcatcccatccacacaaagtcacaatccaatacacaagcccaccaatagagactccatctcctcactaaattcatctacaatagtaattcattattgctattatgttactataattgctttaaaatagtttcctatta

SEQ ID NO: 114734 - DNA, 400 bp, Arabidopsis thaliana columbia
  unsure (1)..(400): unsure at all n locations
gtttgttcgatggaatgaagaagcaataaccagatgcacattgttggcagttcanccagccagactggcggccaatgtcaaagctatatttacttgcctgctagaccaggtgagcgtatacataactgagggacttgaacgggcaagggatagcctgtctgaagctgcagcattgagggagagatttgttttgggaacaagcgttagcagaagagtggctgctgcagctgcttctgctgcagaagctgctgctgctgctggtgaaagtagctttaaatccttcatggttgctgtgcaacgttgcggtagcagtgttgctatagttcagcagtattttgcaaattctatatctcgtcttcttctaccagtggatggtgcacatgctgcctcatgtgaagaa

SEQ ID NO: 114735 - DNA, 222 bp, Arabidopsis thaliana columbia
tcgggattgatctcaaacactcttctccctttcatgtagtcgaggcttagtgtgtcaccaggtgatggagccttcattagcctgtccagataacatattctgtgttagttcaccaggagcaaaaaaggagaacggaaatccttgcttaagaaaaaggtcagatcttacctctccatattggctgaccaaccaaatttaccagatacaagaacacagggggaa

SEQ ID NO: 114736 - DNA, 403 bp, Arabidopsis thaliana columbia
  unsure (1)..(403): unsure at all n locations
tccgataatacttaaatctttctttctactatgtttatattntagagttcnaatgtagtatgtaaactcgtattgataaacnaatgnnncccaatatntctaaaattcctgatttatagtatagcatataaaaaagactatactagaattattcttatctgtcgttngataaaatatctaatcatatgacgaacatatgatggttatttcaaaatacaatattagttacattgaatgtttgaatcaataataaactgcattattagcttttattttattcgtaatatttttctaaaatattacaaaattgctgtcttttttatcctatataatcttaaattcccattttttttttaatctatatacatctactatttttcttttttattctattcaatttatc

SEQ ID NO: 114737 - DNA, 253 bp, Arabidopsis thaliana columbia
cttggcaaagagattcggaaggtcgatcccatagccgtgtttgccttatgttgtatgtaccttggttaagacggtaatcaaatataccctcacaaactcgaaatgcatcaccatttgacacttccaaaccaaaaggataaagaaaattagctaaacagcgtaagaaggatcacaaaatattctaatttcatgaacacattttttttatttcatgttaagaaaatgagccactatatacagaggaaattctatt

SEQ ID NO: 114738 - DNA, 330 bp, Arabidopsis thaliana columbia
  unsure (1)..(330): unsure at all n locations
tttatcttcttaccatnnattttccgaaaaaataaaaatctgagggaattcgaggaaacgccattaacgagatctagcacaaactcgtagtgtggtgtagaagaagacaaaagcaaggagcttcttaataaaaccctagagaggtatttgtttctccaatttcaaaagacgagacgtgaagaagacgatcgaagatgaacattttcagattagctggtgatatgactcacctagccagtgttcttgtcttgcttctcaagatccacaccatcaaattctgcgctggtatgtacattttcctctaattcgtctctgaaattaactgaaatg

SEQ ID NO: 114739 - DNA, 406 bp, Arabidopsis thaliana columbia
tgcgtatcaaagtcggagatacatccttcaccatagtctctgatagcctgtgtcgttagcttcactggctgctagcatctgaagcaatagcctcaccacgataaactctccatggtcctcgatagaatactggcttcatcagaggcactgttttccctgggtgctcttcccaaaacttctcctgtttacagagagtggagtaacataaagttcacactcaaacaagaaacataactgatactaacacaaaacagtgtaagaaacacattgacaaagaatacaatatactacagaacaatgaattagattagatactaatcaagacgtaaaagcttcattgaaagacctaatgaaccattcccatgaaaagcaattcaagtatagttcttttcatgatcacacaaac

SEQ ID NO: 114740 - DNA, 434 bp, Arabidopsis thaliana columbia
  unsure (1)..(434): unsure at all n locations
cgggggcggtcccacgcgntccgaagttatcagtctctaataatttctctttgttagattctcaggaagctanggtgtgtggtagaagaagatgtttgatgaggatnctgacnatgaacgcgagattcctggaatgtgtttcttcgcgtaagtaagtagagatctctctacaatctcatgactcaagacactcgacttcatggataagatcacacgtctgaagattggaaaactcaactccgttagatcttcgaaccaaagctctgttttcgaatctttgctctgtttcttccggtcaacggtgaatatacctccgttgtttattggccaaccgtaaaacgacgacagatcggttgaggaagcttggaagacgatggagtctatacactgttccgttatacagagtgattcagctaaagacgagactgattcac

SEQ ID NO: 114741 - DNA, 403 bp, Arabidopsis thaliana columbia
gcagcaggaagagcaaggagtccggtgatccagctattagagacgaagcgggaacccgattttccaaaggtggatgcatactgagggacttttccagtcgcatgcaccacacttgctgcaccaatggctcggccttctgaaaacatataataatcaacgtatcagcaaaatgtaaacgaaacacggtttgtgacttctgttcatatgtgaataataaaaccaacagatcttaaatatcctctttatattaatgggaaaatcaataagaagtcttatgtaggcaaagcaacgatgagacaaaaaccggaatatgagagtctaaatttgtgtatccaatagtttcacataaaatgtgttagcaagaagtattctctcacaagaaacaaacaatttattttcttga

SEQ ID NO: 114742 - DNA, 384 bp, Arabidopsis thaliana columbia
  unsure (1)..(384): unsure at all n locations
tcccacgcatccgcttgaaccttgttcctacatgattcttatcaattcgatcaggcacccnatgtttattttcatagtttttatgtaagacaacacnaanaaaccattgntcaactcttttacaacatgaaaaaacctaaaattctgcccttctatccatattttttttttacataagccttaaaattccactccattcatgatttttatcctcacaatcactagccaatatgcttttcttgcatgcctttcttcattcatgtatctatacttttttattctatgactataggtacatcatcaatccatcctttacttattattttaatctttaatgcattattaattacattttttttttttttcttctaaaaaattatctta

SEQ ID NO: 114743 - DNA, 404 bp, Arabidopsis thaliana columbia
cggacgcgtgggtttggatggttcccttaatgacgcagagttgaatgatgtccaggttcgctttctctggtagacactgattattgcattcctaatccttctataaatatgatgctgcaaatttggttaacaggtaaattgttttggtgccccacttgaccctgttgaacttatgggagttaagaaagtggtacaagaaaggcaaccagatggagtaactgaccttggtcttacacttccgggtttcctttttcttttctctctattcatcgagagaggtcgccctgagacagcatgggctatcctacggaaatgtggttacaatgattctttagaactccacgctgagttactacccgttccagctaagcagtctcctgatcaggtgtgtgttgttttaaata

SEQ ID NO: 114744 - DNA, 415 bp, Arabidopsis thaliana columbia
gcgtccgaaatcattaaatcaaaactcattatctaagcacaaaattctactcacatttttgtatgaagcaatttcgtatgggggaaaacaaaaaaaaaaaaatttattggaaaacgtacaagaaacaaagaccgttgtccttgtcttttaacagcagacaccgtcacttcctgctgagctgaatgatattctctccagcttttctgacccaaatgtagtatttgatacctaacctagcatcatcatcctcattgaccacctcttcgcttacagagggaaacgaaaacaccaaaggcgacttatctcctcttctgttgctgccgtcgaaactaaattgaggaatctcggcatcttttctcgcttcgtgatgattcgtaatggcaacaccaccaccacttgctactggtgggcttgt

SEQ ID NO: 114745 - DNA, 383 bp, Arabidopsis thaliana columbia
ccaaatcatgatccaaaattcacataactgaaggatcaacctaaccgaaggcaatattcataaatggaagcgcaagatatagaaattgtggattcatcagatcaaattgatggagatttcacctgaatagctaagaagcctttgtaattaaggagacaatgagagaacgagatacaagcaggatcacgaacacgagcagcgcgtagatctgcgacggtggcgttacgaagagaaggatcggaggaaaaagtgtttaagaacagatcgtataaaagtgtggataaaagcgttgaggaacaaagcttgtttcctagatgaaacgagatagatcgttcaagagacgaatgagaaaaaatcggcgaatatagatagctagcttacgc

SEQ ID NO: 114746 - DNA, 398 bp, Arabidopsis thaliana columbia
ggatatgtatgattctaaggtcttttatagatgtgtgcaatcagagtagggataatcacttagagtctagagttagagataattggaagcgattgaaacttatgttatgtggtttgacacatgactaaatatagcttatctccgattgttgtgctgaagaaaatgattagtctgtagcatagaaagttattctaccactaaattctagttgggtcttgattcttgactaatatgttagatgaataattgaataatggaattttgaaatagtcaaatgatcgaataaaggatgtctgagttttgtaaaatagacataaaacgttcaagaactggttgtagttagtttataatgcttcgttttatctagttataatattagttcattcattgcggtaatc

SEQ ID NO: 114747 - DNA, 373 bp, Arabidopsis thaliana columbia
atcagtattcatttatagatgttgtattttcagatcgaatgaagttaaaaataacagatcaaatataacagatattttatttaattctttataaaatattagaatataataaatgagctgcaaatatgtaagagatacagaaaaaaagagagtaaaagaatcaacctgaaattgccgtatagaaaccaagcaaaagcaatattagcagaaattcacacacacgtggcttctaagtattatcctatttggtttcccaaggaacctttaacatcatcatctctcaagacttaactcttgcagcaatgcaaactaatttaaccaatcaccgcctacattgaaccgggttttcctaaatacgtcactacaatcttgt

SEQ ID NO: 114748 - DNA, 406 bp, Arabidopsis thaliana columbia
aaaaaaaactattaagtgagtgagagatattttgagatttgcatcatgactagacaaaaacctagatgtgagaaaaaaaaaaaaaaaagatgaattgtttgttcaatcactaagaggctctttagataattttgtgacaagagcaaatcaataaattttcatttggacttgctcttgtcacaaatttatctaaaaactccgagtgattgaataaaccattcatcttttttttttttttttcatttggacttcctcttgtcacaaatttatcgaaaaactccgagtgattgaacaaactattcatcttgttttctttttcttctttttcttttctaacatccatgtttttgtccagtcatgatgctaatctagatgcaaagtaaaaaagaagaatagcaccttgatt

SEQ ID NO: 114749 - DNA, 309 bp, Arabidopsis thaliana columbia
  unsure (1)..(309): unsure at all n locations
ccacgcgtcgcgtacatctcctaagttttcttttctgaattcgcagncncnancatttatatcgtatagagattggagggacaccccacancnnccaccaccgatatcgaacatttcacctcaaattttacagtctcgtgtgcctccgcctccttcttctcccccaccgttgcctctgtggggacgacggattcaggtgactactaaagcggacacaatcttgagaccgccttctcttacaccgccttcacatccttttgtgatcccatctgaaaacttaccagtgacttcgtctcctatagagactcc

SEQ ID NO: 114750 - DNA, 402 bp, Arabidopsis thaliana columbia
  unsure (1)..(402): unsure at all n locations
ccgattttagtgttataattattattattttagccaaatgaaaagncnacatgtttatcaaaacatatatagctgtgattaggttncaatttactataaaccgataacattgaaaacagcaacactgagccgatatctaaccacaaaaaccatctccatcgatctctgtctatatttaagaacacagtctcaatttcaagactacaaaaaacaacagaagaaaacacccaaacaaaagacagtgacaacaaaagagctctcttcttcttagcaaagccatagatcgagagagacaactaaagaactattcttctattaaacgatcaaaacaataattcaaatcctcatttaagcaaaacatcaacacatttccttcgtgaagggttacatcatctaaaactc

SEQ ID NO: 114751 - DNA, 217 bp, Arabidopsis thaliana columbia
  unsure (1)..(217): unsure at all n locations
ggaggggcccccactcccaaaccanctnctgnacctcacaagtcgagggagtgtcttcctctgggggtgatcatcaggatctggttgaagtatgcttagaccaaccgcgaaggtatctctatcgtgacgcaaaggcagatccaaggtgatggcaaaggcaggactgacaagacgtaccctgctggcaacagggacctaagtagccatcccgaagacc

SEQ ID NO: 114752 - DNA, 200 bp, Arabidopsis thaliana columbia
ggttcataggacaaaggggtgtgaagaagtgtcgggggtatgattggctatgttgcacatggtggtcactcacgcaaaacggtagtaatagctgagcaagaaagacgtctaaccaaaccataacatacacaccaccgtaaaacctgaagcagtaaagcagccaagagcgtaccaacagaagcgtgagccaagaaaacgtt

SEQ ID NO: 114753 - DNA, 407 bp, Arabidopsis thaliana columbia
gcacgccctcgagaagaaaaatagcttcatttatctccaacataaggaatgaaataaagggtagaagctgaaaaaccttagcttgtatatacttctccttgatagatatcatatcagcatagctgggttttccagtgaccatcaccctggatttatcagacctgcacatatttggcagagtaattttaacattatgatttctaggtgatcaaagttatcatcactttcaaacataaatggagtttttacactgttaagccggggtcaaaatggatggcgctccttgaatgaagcaattcctcccaaactgtgtttgcgaaagtatttccaagagcttggaacaaacttataacagatggctcccatactttcacgtcgagagtgagtgacctaacctgtagcaacag

SEQ ID NO: 114754 - DNA, 394 bp, Arabidopsis thaliana columbia
gtttccagatttttattcttttcttcttaataaacttttaaaatcctgcgtctcatagtccgtgagttgggaccggcatatccggttttggtgtcgtcggtaaattcctcttcattgcagtggaagctggttcattgagaaataatggatgcatttagagatgctatattgcagcgagctccaattgaaacctttgcactcaagactgttcaacactttatacaacctcagaaacaaacaaagttggctcaagatgaaaaccaaatgcttgaaaacatgctccggacattgctgcaggaactagtggctgctgctgcgcaatcaggggagcaaattatgcagtatggtcagttgattgacgatgatgatgatgatgatgatatacatggacaga

SEQ ID NO: 114755 - DNA, 369 bp, Arabidopsis thaliana columbia
  unsure (1)..(369): unsure at all n locations
gcgtttaaaccgaaattcaagagcattttaaacaagcagatcgaacaagaggaggcaactatgcatatttggggaaaaagagataataccttggggaggaggagcaccgacaggatgttgttcttgatgatacatctttcttcttcttctgagttctttgagcttttttttctctctctttgtttaaaagcaaactctgttcctttcctttataacgaagctatgccggtgaggaataatgatanagacttttaatttaataaaggaaccagaaaataaaggaaatattctttaaataaagtcttttttgcatcataaacgacacgattaaatttctttgaaaaataggtgatcttcttctaatgtgct

SEQ ID NO: 114756 - DNA, 428 bp, Arabidopsis thaliana columbia
  unsure (1)..(428): unsure at all n locations
gcgaaaaacttctctctgaattttcatttagtntctcatnaaaatgagcagggaggggggagtatttgctcgttgtgggcgtctctaatgcatgctttacttctcaacagcanngctctttgcttttctgttcgcttcacgtaagagtattgagcgatgcacannaaacactactatcttnaatctcctccctactggcgtcacaaatggaacatcctctcatcgacacaaacgcctacttcattctaaactgtggcaagtccactcttacgactcattctatcttcaactaccttctcaacccttcaaccttcatcacatacgtccaactaactttcactccatcacacactccaacttcacacactccatcacacacgccaacttcacacacccctacttgtaactgtggaagtccaccttcccac

SEQ ID NO: 114757 - DNA, 361 bp, Arabidopsis thaliana columbia
ggaaatactcctttatttagtattggaccatctatagcagcaaccggtgggttactaagttattcggtgagtccctcaaacaatcaccttgttttagcggatctcaatatcggtatttttttatggattgccatctcaagtattgctcctattggacttcctatgtcaggatatggatcaaataataaatattcttttttaagtggtctgcgagctgctgcccaatcgcttccttatgaaataccattaactctatgtgctatatcaatatctatacgggcgattccgtgaaacagaaacgtggattgctactattcctcatgttctcgaccaatcagctaaaacaccggatatctattta

SEQ ID NO: 114758 - DNA, 373 bp, Arabidopsis thaliana columbia
cggacgcgtggggaataaaccctgcaatttgtgcgacatgcttaaatgagctcatgctacggatcaaacaaaaatatgtaatctgcacactactgagagaagaataagtaaaagaggaaacgaacttacggatggggttagttttgtgctctgtgctgcagcgtcgtatatcaaacatctaaggctttcttcagcttttccatcaactattctgttgctcttaggtcgtgtttcacctgcgatgtttgccagtgcatgcagtgcagcctgcacatgccatttacgaaacaatcatataatttcatgaatgtctctactaatgaagcaaaatttcaaccctcaatagttagaattagaaatcctaaaactggaa

SEQ ID NO: 114759 - DNA, 369 bp, Arabidopsis thaliana columbia
  unsure (1)..(369): unsure at all n locations
cttctctgtctcttaagggttctttgttttagctgtttgggttttaggggggttcgtttctcacttgtgggtttgactatnccaagaacaagaacagtgaaaggttcggttttttgggtttcgatctgataatcaacaagaaaaaagggtttgatttatgtcggctgggtttgaatcgactgtgattttgtctttgattcatatctcttctccgatttcatcatcatcttccccatcatcgtcgtctttgaaatcttgtcttctcaacgctcttcacttctgctgtaataagcagaggcttgttctggagactccttctctttccatgcgcttaagacccaaaaggacttgttctagtgttgaagtctt

SEQ ID NO: 114760 - DNA, 376 bp, Arabidopsis thaliana columbia
  unsure (1)..(376): unsure at all n locations
ctggactgcaaacccatgcagagtgtagatcaaaggacgtacctgttngnngggtgtggagcaactttgttaggtggtctgcccgacaaaacctgaggctgtgtatatgctgatcttgaacaaatcacacacgcaagaggagtttatccggggatcaatgacaaaaaatccatattcgagtgctgagattggcccactgatgcgggatgtgaaaaacaagatttgtcagcagttggacctgctaggtctactggaagatgactatggcatggagttgcttgtagcaggaaacatcatttcactagacctgagcatagctcaagtttatgagctagtttggaagaaatcaaatcagtcttctacttcactgaccaac

SEQ ID NO: 114761 - DNA, 377 bp, Arabidopsis thaliana columbia
gtttaatatgtttcttcatcaatatttttataccttgtagagtataactagagagcgaataatgaatgcagattgacagatctagagcggaaaacatcaaaaaggaaactataagagcaaaaacaatcgatgtggagaaatatgaggcaaagacgatattggataatacattgaacaatcaacctacgtggttctcttacaatgcttatatcgtcgttgctgacaaatatcggtcagtttttaaataaaactttgcttcaaaattaggattgaattattttaagcgacaagaaacacatttataatagcgatccactttgttgttaattcatcgtaaatagggtttacatcaatatagcaacaaaaattaatttgtc

SEQ ID NO: 114762 - DNA, 285 bp, Arabidopsis thaliana columbia
  unsure (1)..(285): unsure at all n locations
aaacatcaaaaagaaaactatcacagcaaaaacaatccattcggagaaatataactctaattactattatctataatacataaaacaatcaacctactgccttctctaacaatgccaacaaccacactgctcacaaatatcgagcaataactaaataaaacatcccctcaaaaccaagaaacacttacatgaccccacaaaaaacacaattataataacctaaccaccttttcctataaaaacacacaaanacaaccccccacaaccaataataccacacaaaac

SEQ ID NO: 114763 - DNA, 372 bp, Arabidopsis thaliana columbia
attttctcaaaccaaccaaaaagcttcttctccttttctaaaatttcatcaaaccctatagggttttctcaatacaattgattttttttttcttcttcttctctatggatacgaccctttctcccgccgtggaggcggaacaaatcgccgactcaacgatcgacactgtttctcgtttgatcgccggcgttttctccggcgcacttactggaatcttcgctatggctggagcttttactggagctgtaactggtgcggtggcaggaagagctgcacagtatggagttctccgtggggctgcacttggcgctgttgctggagctatcctctctgttgaagtgttggaggcttctcgtgcgtattggtatttag

SEQ ID NO: 114764 - DNA, 374 bp, Arabidopsis thaliana columbia
gtactcatcgtctccggaagaatatggaggttctgcgcgggacttttttggtgaataatcatccctaggagagctgcgagagaatagaatcaagaacaagcagatctaagaacccaaaaccccacttagacttcaaggagatacctattcagcaacccgtcatcacagctatttgcatcaaggagttcacaaagtgcttcaccgatatcttcaggtaattcctagagcatgcacacattaaaagaacttcaaatcgagtcattttcataaaacttaagctattctagccagagccattatatggatttaagacaacaaacgcaaaaattctaggaaatgaaacaaatagaagaaactttaggtatacctggcaa

SEQ ID NO: 114765 - DNA, 254 bp, Arabidopsis thaliana columbia
gtgagttatcttagcaccacattttatcacttacaacctttttattatttggacgaatagaaagtttatagccatgtttttataccaattgaatttcttatatttttcaaataattgtaataccaaaagatattcttagagtaatgtactttacaaattataaaagttgaaaatagcgatatatgggctccatttctaatgatctcaatgcgggaccagcatgtgatatacgaatgtctatatacattattttc

SEQ ID NO: 114766 - DNA, 314 bp, Arabidopsis thaliana columbia
acatcaagttatttttgtagtctatattttggtatattcttggtggctaagaaatatatacatatgctttaattatattccaattcataagatttagtctatctcaacttgttttaatggtttttcttttcccatgcacgttgatattatcgtgtaaagtgtaaacttttgctaggaaaccactttctctagtaccaaactagtagaaagcatttttctcctccaataaatcacttttaattaacacttcaaacaccgtctttacattgtttattttatagaattccacctcgctaagcaagtgctgctttata

SEQ ID NO: 114767 - DNA, 229 bp, Arabidopsis thaliana columbia
  unsure (1)..(229): unsure at all n locations
ttttcacaaatctttgggcaccaaccaaactcaaaantctcttattttgggagagaacttcgttaaactcaacgcgaattggaatttccctttttccccgattttcgattacaaagcgaaataatttgacagcttaagatttaagcatttatgtgctgaaactactacaaacttgtcatccaccacccgatgcatattttttattaatggagatctaactcgtctatat

SEQ ID NO: 114768 - DNA, 368 bp, Arabidopsis thaliana columbia
  unsure (1)..(368): unsure at all n locations
ccaaantccggggcgaccacgcgnccgancaaacnccaaccaagacctgttgagaaaacccacacaacangaaggaggcccacaacgaaatatgggggctcaatccaacaccaccataagcccatccatggaaaggccagaccccgatgtccaaccagaccacacatccctctcatttatcgaaccacaaaccatccaacccgatggaacattatgcgaatgccacaaacaaggaagcgaaacacaaaaagctctgtcagagaactaacatcgatggccatcttaaccaccagattacgcactaccagcgctcccatccgctacataacatcttgaaagagccaaattcctggcaagaaccacacaaa

SEQ ID NO: 114769 - DNA, 396 bp, Arabidopsis thaliana columbia
  unsure (1)..(396): unsure at all n locations
gggggggggccatgcgtccggcataanctctctgatagttcatgtgcataaaaagtggtgaaaaatgncaagtgtgtacgtatacttgttgtggcgtcaagaagagagagatttctaaatgccaagactattggtcctagtaatccgcttgagctaagattcagggacttgatttgatgattattattgttgtcgctgcatccaacaccttcccaagggaataatcttggggagcaaggatcaccactccaaaccttgttcactttataagttgattttatgctttctatagcatgaactgcattaccaagagaaaatgtgactatgtgagtttcagtagaaatctcattctatctaaatagagattgaaagtggaaactcactgtcttcaattgt

SEQ ID NO: 114770 - DNA, 388 bp, Arabidopsis thaliana columbia
acccacgcgtccggataagtgtgcctcctaatatgttgctacatcccatttccagttccacctgagggatacaaaagtatctgaggagaaagaaagaaagaattcttttggccgcattgtcgtgtacatgtagcaaatttgttccatttcatgtaaacattacaaaatggacttaagggagagcaactgttttgacctgaaaggaggtactcttctgtgaactaactccatgatcgacttagcctgatcaagctgcccctttttcacaagccctttgagcaacatctcaactgtgtccaagtttgggtaccacttctttctcatacaatccttgcacattgtataagccaaatcaaaatttcctgccttgcacaaatagtgaatcatc

SEQ ID NO: 114771 - DNA, 358 bp, Arabidopsis thaliana columbia
aagcccggggcgactccacgcgtccgttcagatagtgaaccgttggccttaatcccaccttcttcatcatcgggtggctcgtctacgtgtgggtcgaaatacacgtcatcttcctctccctgcaacagccaaaagagaacaaggaatatgaaagacatcaaacacaacattcatgatagtgacaattcaaggaaataaagagagacgtataaggcaaaaacatcatacatctgtttcttctgtttcctcggcaaaagaataaaccatgttaagcctggccgattaaggttcaatctcccttgtctttaacaagttccacttgttcctgaaagaatgaattcaggaactcgggttagca

SEQ ID NO: 114772 - DNA, 379 bp, Arabidopsis thaliana columbia
ctgccagtgaaccgctggatgcatccgaggacatggaggaatctggtctggacatgatggtgacaaatgtggtcgacacgctcgcatgtttgggcaaagatggagacacggagacggctcgaaaaataagggaaactgtgatataaggtcaagggcggtaactccaagaagcgaaatgctcaattaccggcggcaccacggaaaaggataataccaaagggaggagaacaagtgagtgatagaattaacccgacgcaccatggcacggtgaagggcttaacggtggagtcaagccaccgaaaccaaaggttgacaaatgaaagtaataagttgggattgttttacatttcgaattcgggttcaaattaattattataca

SEQ ID NO: 114773 - DNA, 378 bp, Arabidopsis thaliana columbia
atataatatgatttgagtgatcatcagtgtatatatacatacccatccaaatgcaaatggaaggttgttaccggtacctaaaggaaccgtagcaattggaggtggattggataaattaagatcagaaacaactccaaggagccaaccagctgttccatctccccctgcaacctaaattaaacataactcatgcttaatgactaaatcattaacaccttttctacgtacgtattaaagaagataactcacaatgattttcaacttgtcctgaatcttgctagccaaactatcgtcttttaacctctctagattaagataaattctctgcagcaccttatctggagtctctacctccagatcaaaaacctgagtaccaaa

SEQ ID NO: 114774 - DNA, 380 bp, Arabidopsis thaliana columbia
gaaacgggttgttaaatgtcaaaatccagacttggttaaaatgtattttggaaaggtttttctacctctgcaacattgtgcccatgacgtcttttatcaactattgctaaaggtgcatcagataacttcttcgcaaaagcgcgagctcttgcgacgccaccaacatcaggtgaaactaccaccaaatcttcagaggatatggccttacttgctaggtaatcaagtatgacaggctgttcatgaatattaaagcacaaggaaaagaagacataagaaagtctattttcacaaaaaggaacttgatgctcagaggagtcatttaagaaaaacttttttctacctggccataaacatgatcgactggaatatcaaagtagccc

SEQ ID NO: 114775 - DNA, 375 bp, Arabidopsis thaliana columbia
gtgatccttatgttagggttcaatatggagagaagaaacagaggacaaaggtgatttataagacgtggcagccaaaatggaaccagacaatggagtttccagatgatgggagctccttggagctacatgtgaaagactataacactctgcttccgacttcaagcatcggtaactgcgttgtggagtaccaagggttaaagccaaatgagactgccgataagtggataattctccaaggagtgaaacacggggaggtccatgtcagagtcacgaggaaagtcacggagattcagagacgcgccagcgcaggtcctggcacaccgtttaacaaagctctgttactgtccaaccagatgaagcaggtgatgataaagt

SEQ ID NO: 114776 - DNA, 371 bp, Arabidopsis thaliana columbia
gagctacttgagacggaccggctgacgagatgcttcagacgggtaagctgacgagctggttagacgggagagctgacgagcttctctttgtctctaagtgtcctcctggcgtcccccttgacaagacatgctattccgtatttatagccttctgcgtgtaggacattcctccagggttttgacgagcctaccctcttgacttaacattctgcttaggcctttgacttggatttgggccttgggaaaagcaagcccaaatctaacccctaacatgaccactacatgatctataactccatggctttgaagtggcaatagaatctgctaaaatgatctcattattcaaaccacaacactgtcttctttgatga

SEQ ID NO: 114777 - DNA, 375 bp, Arabidopsis thaliana columbia
gattttggaaaacgtgaatgctcattttaacttagaatgaatgattgagacgagtagttaatgctgtttgtagaaatttggaaagataagttggcgaacgagtcattttctagtaagcgtaactaactatttcatcaattaattatgaattttcttcttcttatcaaaaaggtctttcttcaattacataagcttttgcgtttttattccgataatataaaattttgaaaaatcgaatcattaaagaaaataactaagaactggcattttgtatacacgccatgtatatatatatatataactattttatcaatagttacaaattgtaaaattttagtgtttgatggctaatttaagttggacctcaagtcaata

SEQ ID NO: 114778 - DNA, 367 bp, Arabidopsis thaliana columbia
ctttttaccagcaagatgttatcttgtccatgaaatttttaaaactagttgaattttgattaattatttgaaattgatcccattataaagtagaaattaatccttgtaaaatttagtttaagagcaaacaattagatattatataactttttaggccaatttaaatcaaacaaataaatataaaataaaaacatgtctattgaaatgatttcaacctcataattttgtcctcttgttagtctatcatttttttatcatcctttttttttcattcaccatttttcattgaaaattaagttaaaaataaagttataggttaagaaattaatatacattttaattttaaatacaatgttttgatgatttt

SEQ ID NO: 114779 - DNA, 283 bp, Arabidopsis thaliana columbia
  unsure (1)..(283): unsure at all n locations
taaaactactctttttaccataaactctcaccatttgtttctaaaaaactaatgtatttccaaaacccaaanncnnaaatcccttcactttcccaatatccttcacacaatacaaaaccctaaactcaatctctactatcactcctcctccncataacaaacctacactcttcacatgaatacccattnngttcctctcttataccaacaattccttataaaatcaatccttcattaaacctaaggcttataaacaaagctcgctctcttggttatgattata

SEQ ID NO: 114780 - DNA, 370 bp, Arabidopsis thaliana columbia
  unsure (1)..(370): unsure at all n locations
ccatcttggaaatggtgaatacgtttccggtctcgtaccgnnattgggctgttgtaaactttggtggtgggtttgatggacnaatgacaatcctcacagatacgtaggttcttaacaatgcgtattggtttgccagggctcgtgcttatcaacccaaacgctgtagcgatcttctcgctgtggtaatgaagtacattttctttatcttcttcctccaagtttaacaaaacctgtgtggtgattggtctatacccagctagtctcagtttgtctgagatttctacgagcattgagttgatttctttggcttttgggtgtgaatcatctttcacaacaaactcatgaagcacgccatcaatgtcgatcaaac

SEQ ID NO: 114781 - DNA, 293 bp, Arabidopsis thaliana columbia
  unsure (1)..(293): unsure at all n locations
aaaaccggccggacccacgccgaacgnnaaaatnttcttatacagnnnctaagattttgctaatcataannccccttggggggctncaaaaatattggttggctcaacccaaccncaaccaanaattacaagggaccacatcaattgttttaaccagaataggttccccaccaaaatttaccaataacccacctgcaaaacacaccctcccctttcttggttcctgtgaaacctgaacctgaaaaaccaaacctaaaacctcttaatttttcaaacaaattaaagccttcgtt

SEQ ID NO: 114782 - DNA, 396 bp, Arabidopsis thaliana columbia
acccggggcggcccaagccttccgaacccaacaagctttactctgccaaattttaatcagacaaagcaaaaactgggttaatcaaatattgattggtaaatctataaaaaagttttttaactgaaaaaggaaaaaaatattttatctaacattaaaatgattttagagaataagatgactgacccaagtttgggaacatgagtgtcggtcttaaactcatacttcacagtctttggcttcacagtccattgaaaagcaccgtttttgttctcatgaacaagctcagtggtttggtagtcgtacactgagtggatctcattctcggtgtacttcacgttcggagattcaaccttgaagctttcgatgaacatttttgcctaaggaagactttgagaa

SEQ ID NO: 114783 - DNA, 158 bp, Arabidopsis thaliana columbia
  unsure (1)..(158): unsure at all n locations
cttatccaatatcgaaagatcttccagcttcaattngaaacgnattggagacnnaaaagctttctgcctggtcacaataccnnttgcacccatcgtggaggtcaaaagaaaacatgaagcggttcacaacaacatcaagatttctgtgttctggctag

SEQ ID NO: 114784 - DNA, 289 bp, Arabidopsis thaliana columbia
gataggtaaaatatctaccttggttcaactatcttctagtaactataggtgtagagattaagagttgtggtgactcaaacattttgcttcttctagaatcattcgatagaggaatgtatgcgggacctattggattttttggtggcgaggagagtgaatttgcagtcgggatcagatcagctctagtcgaaaaggtgagcttatttgatctctttctccctttaaaaaacacactttaacactaattgttatagcaaaatcgatcattacggtttttgctacaacttgt

SEQ ID NO: 114785 - DNA, 373 bp, Arabidopsis thaliana columbia
  unsure (1)..(373): unsure at all n locations
ctcaagctaatgtccacaacctacttagtcgcgctttgccaagccggtgggctaagacatgttgttgtgaggctgaagaangcggttaaatcagcagtgagtcaggtggcgaaacgggtcttaaccgttggtgccaacggggagctacatccgtcaaggttcacagaacgtgatgtcctccaagtggttgaccgagagtacgtgttctcatacgcagacgatccctgcagcctcacttacccgctaatgcagaaacttagacacattcttgtagaccacgctttagcggatccagaacgcgaggccaattccgcgacatcggttttccacaaaatcggagcttttgaagccgagctgaaactgcttctcccta

SEQ ID NO: 114786 - DNA, 326 bp, Arabidopsis thaliana columbia
  unsure (1)..(326): unsure at all n locations
cacgcatgcggctcctctctcacaacagccggatctgtattaccgaagatggagtgcgaatggtgtgttgtgtgtaggaatgtgttgtgggatcgangctgctgatacatcggcggttcatagtatccttcttcacaaaaacaacgaagacaagatcatggtacttgactcacacaagctcgttgctgctagtggcgagcctggtgaccgggttcagtttacggagtacgttcagaagaatgtgtccttgtacaaattcagaaatggaatcccgttgactaccgccgctgctgccaatttcactcgcggagagctcgctactgctt

SEQ ID NO: 114787 - DNA, 383 bp, Arabidopsis thaliana columbia
taaagacttcgagatttgaaacttgtcatttgcatgacatgatgagagaagttggtttgttaaaagctggggaggaaaacttcctacaaattaccagtagccgctcttcaactgcaaactttcagtctactgtcacatctcgcaggcttgtctaccaatatcctactactttacatgttgagaaagatataaacaatccaaaacttcgagctctcgtggttgttaccttggataatttttggatgacaggaatttcgaagtggaacctatacggttcaagctttacaaggttagaacttctgagggtgttagatcttgttctagccaagttgaaaggagggaagttagcttcctgcattggaaagctcatccacttaagatac

SEQ ID NO: 114788 - DNA, 357 bp, Arabidopsis thaliana columbia
  unsure (1)..(357): unsure at all n locations
cggggggggcgccacgcatccgccagcttcgcatcttcttctccggcttgatcttctctcgtttctaaaccggcggtgatcggaatatgtttgtggatcgaanaattctgtcaatcacacaaaaaccgaaaaccaaaaaaaaaccatggcgtttgagaagatcaaggtggcaaatcccatcgtcgagatggatggtgatgaaatgaccagggttatttggaagtctatcaaggataagcttattactccttttgtggagttggatatcaagtacttcgaccttggtcttcctcaccgtgatgctacggatgacaaagttactattgaaagtgctgaagctactaaaaagtacaatgt

SEQ ID NO: 114789 - DNA, 391 bp, Arabidopsis thaliana columbia
  unsure (1)..(391): unsure at all n locations
ggtcgataacgcgtccggcaattagaaactgcgattgtttacaaaagtattacaaaaaangtgttggtgcaatataactttgttcagttagaanacacacatctacggtttttatggtttttatgttgtttaagcagcaagaatttgctctttagggttatttacttgatcatatatcgtgaacaaaaaattataggtaattgagaggtcatagacttttgtaatacacaagacatttgttaattgttatcacatactcaacaccatatatattttcaatacctctcgagcatcttctgttatgaattttcttattttctctaattttattacaaaccttatagttactaaatactattcataaccgttcctacttgaaaaaaaattaaac

SEQ ID NO: 114790 - DNA, 371 bp, Arabidopsis thaliana columbia
attacgacagctctattcagcttctttattcgggtaatcaagtcgggtttgtgttcatacccgtcggtggaattgattcgggtcggattcaatacatggccgccacttttaccgttcattctttccctatttctcctccttcctcctccgctatctccaccgtctctgccgccgttattccagactctccgattattcccggtccaccggatttcactgtaactccaagaaacccagattcaccgtattttccaggatatccagaatcgccggatttaccgggaaatccaggttcaccggatttttctgggaatccgggtcctccgagtttcccgagaaatccaggctcgccggagtttccaggaaaccca

SEQ ID NO: 114791 - DNA, 171 bp, Arabidopsis thaliana columbia
cacacaatttactgaaattttctgaaaaccctatttcataatagtgacaatcctctcttgatgttcaaagatcatccataaaaaaaaagtacgagttaaaacacacatctttaaaatcacaaacaacggttaaacttccttcaacaaccctcccaatctccatccctaaaa

SEQ ID NO: 114792 - DNA, 396 bp, Arabidopsis thaliana columbia
  unsure (1)..(396): unsure at all n locations
aaacatgtctttaagattttagaagcatcnaaagagggggaaagcgtcaaatctttaagttcttggcaaacccaanggngccttcgctcccaaaccatcttctggacctcacaagtcgagggagtgtcttcctcttgtcctgatcatcaggaacaggttgaaatatgctttgacttaccgtgaagttatctctatcttgatgcaaaggcatatccaagttgatggcaaagtcaggactgacaagacttaccctgctggtttcatggatgttgtatccatccccaagaccaatgagaacttccgtcttctctacgacaccaaaggacgtttccttctccactccatcaaggatgaggaatcaaagttcaagctttgcaaggttagatctatccagtt

SEQ ID NO: 114793 - DNA, 286 bp, Arabidopsis thaliana columbia
cacaggaaaaagtcgcccaatcaccagaactacccggcaaacacatgtcactcgaatgtcctgaaatcaccccttattacagtaagctcaaacacgagactgcatgtaacaacagaccctataacagcccatatgctcgaaccgagtaatctgtaacgcacgatatcccactcatagacgcgcatactgaagacgatcataaagtggaaaaacattcaaggagtacttgcaaccatcatcataacaagtctaacactcatgaagtcaaaaacgccacatgaatgtt

SEQ ID NO: 114794 - DNA, 409 bp, Arabidopsis thaliana columbia
agcacatgtttactataaatgcgacattctcacgctaattttcaatatcaacaatttgccccacttattgatatcgcttaactagttagtaggaaataaaatgaagagctctactacctctatgcagttaattccaacacttttcttcttaaccattcttcttgcttcaccaggtatgcaaatctagtttctcacaaactcacaatattaaaaagttactaaaacatataatatacgcttatattttaatatttaatgcatggggttttacgcatctacttgaataatttaatatttgatgatattgaagaataagtcaattattgattgtttatatgattataattatattattattcaattatttattgaataatgataatgtattatattatagatatagagatgg

SEQ ID NO: 114795 - DNA, 391 bp, Arabidopsis thaliana columbia
  unsure (1)..(391): unsure at all n locations
attgagtctggcagtctgaccatatatagctttggcccccatgtcatatgccaatgttgttggatatgaactgcanaaagtcccgagccacaacctagcacctccgtctggctcacggatctcagcaacccatttaccccatctcctctgtctaactcctatatagtcacaaatcccgttttcaggtccacctttacctttcatacaacccttcctcgaaccttttggaggaggctttcggattgattttggaccaccaccatcgatacaagattctgcctcaatctgctcattgtactctctccattgccttagaatctcagctacatcctcgtgttccacgagacttccttttcctggtagaatcaaaggggatagaagcaagattagc

SEQ ID NO: 114796 - DNA, 399 bp, Arabidopsis thaliana columbia
  unsure (1)..(399): unsure at all n locations
gggcgtcccacgcgtgcgatggactgattgttctaaagcttcgatngcaccannacaggggncnttgtaaatttttacgtttttaggacctcncancnatcctcctacggtgaagagcagtcctgatgctcctaagctggctcacgaaaagcttgacaagatgggacctatgtctaacaacgaatcgattatggctgccactatactcctcacggttggtctctggatcttcggagctaattcgcgtgtagatgctgtgactgcacccattcttggattatcagtccttcttgtgacatgtgttgtgacatggaaagagtgcttagctgagtcggtcgcatgggacacactcacctggttcgctgctctcattgcgatggctggttatcttaacaaata

SEQ ID NO: 114797 - DNA, 394 bp, Arabidopsis thaliana columbia
  unsure (1)..(394): unsure at all n locations
aagtaaaatgaatnaattttatgaacaagcgaaagcggcnnnagagttngtttataagtttgtagatctgcaaanacngcanctgcaaagtgtgccatttgatctcaaaataccagaagccattgaaaaccatccttcgtcacatcccgtgacactaaccaaactctcctctgccgtctctgcttctccttcacatctccgccatataatgcggtttcttgtgcaccaaagactcttcaaagaagtccccacaaaaaatagtttatccactggctacactaacacgccactctctcgccgtatagatgatcacaaaacgtgaaataccaaatctcctctgcttctcttgaaaacaagtcccaagatgctttctccatgttttaaacctaactca

SEQ ID NO: 114798 - DNA, 289 bp, Arabidopsis thaliana columbia
  unsure (1)..(289): unsure at all n locations
cttcccgccgtcaccttcattctcaccctcattnncancccagagacagtgaactttaatatgtttcagatgccccccaaaaccnncangaacggtaataacggttgaaagatcaatgatcatgactttgtacaaagatccatccatttatattgtaaacaccacacataatactttccacagtagttctagcagcacacccaccgtccaacattgagtccataaaaccatatccattatagacatcatctctacataaactactttctttcatttcatcatcatacac

SEQ ID NO: 114799 - DNA, 401 bp, Arabidopsis thaliana columbia
atgaaatgccgtgcatttatattagtactgtattaatcctttatgataggtgtatcgtttcaagaattatgataacgagaccggatcttaaaatccattgaatgcttatgtttttatgtattttatgaatctgattaatgtgaaactgacattggaaactgttatatgggtccataattaaatgattacatagacaattcacattaaacattcatatacataggtatcgtgtatatatcatatctacgtatcaacaaaatatatatatatatgctgtaaaaaattagaattaagataagctgagacaaaccagttaaattaattaacgttttcaatgctagtaaaattaattaatcagtttgattattaagttagtagtcgtattagtcaaccgcgtaaga

SEQ ID NO: 114800 - DNA, 398 bp, Arabidopsis thaliana columbia
gtcttttgggtctttcttgttcccataggagagggtttttgggacctggttgaattgttaggttctaggtctctactaaatacttcaagacagaggaaacaatttttcttttcttttttttcttctcccttttatgaatgagaacaaaatggttccaacctttaatttctgacacaaacaaagctttaattctttactaagacatgttctaatatttggagaattattagaaagtttagttattttcttttaaacgtaattcaagccgtgtatttataaactactagagtttggagcaagaaaaattaaaactaatgaaatatgttggaactaatagatatattttactttccagttccacttcttattctaaaatgttccccaatgtcaaacaaata

SEQ ID NO: 114801 - DNA, 266 bp, Arabidopsis thaliana columbia
  unsure (1)..(266): unsure at all n locations
tattcaatatacctcttatcctatcaataaaattatacatccatttaaaaataaaatcattattctttatacctatcactacaaacacaaacatcacatcaaatctactatacctactcctnctctanaacctatcaaanctcaaactataaaatttctcaatcaaaacaaaatctattacacacaaccttacatcctctataatcacacttttaacctttatcaattttcattttcttcttaaacccttaaaaattctcaacaaa

SEQ ID NO: 114802 - DNA, 393 bp, Arabidopsis thaliana columbia
  unsure (1)..(393): unsure at all n locations
gcgcnattttttttttcttttttggtttctagaaaaactggccagnaacgggcagngtgattttctttgatgtttgcggttcctnnnccaaatcccaaaagatcgaccacaactggttcacttcccaaaggagctttgaaaatagtctgaaagaaacattagaataataagattttaaattgcatctataactttttggtagctattgattttaatatctacttaccttgtaccaagccatagttcggttgaatggtacactttcacctgaccatgtcgaaagtgattctgaactaaacagtttgttctcaaacccgcttaaaccagttttgtagctccattatgagtagacaaatattttacaacagtttcatcaccatttctttcaatgat

SEQ ID NO: 114803 - DNA, 383 bp, Arabidopsis thaliana columbia
  unsure (1)..(383): unsure at all n locations
gttttggaacaagttcatgaactaaggctttttttacactttagaacatggccaattaaaagttttctgtttctgnagcaaaattaaccattcaaatcaattactctccaaagtgtttttttgttttgtttacacatatgtaaagagacgaccgtagttatcaaaagcattttggtcacaacaaagtaagcttaacaatcaatcagcaagtgaaatcaaatgattacaagtgaataaagagacaaagagacctcgtttcaagccttgtgacgcaattattaaacagtagcagcaagaactttcaccaattcacattctttaggcactgttagcacatgatcaaaccattcaacttcccaaaaatttcgcaacttttgcttctt

SEQ ID NO: 114804 - DNA, 375 bp, Arabidopsis thaliana columbia
  unsure (1)..(375): unsure at all n locations
gaataaactccaaacaatcatcaatctttctagtctcaaacttagcgaggcaaagcgcttcctttcacagagagagcaaccattacgagactcttcgctataatctccatttgcagagaaatacacaagctngatcagagtccctacgaaaccaagaaaaaaaaaaaccccaatttccggttaattcgagacaaacccagacccgaaaaattctaaaactgaatgaaacaaagccaagtttggatttttaaattacctccgatgtcgagagccaaatgagagatttgagtcggatccatggcgggttttttgtttgggtttttgcaaaattctcttttttcaacgttaaatagaaataaattccaccgatcaact

SEQ ID NO: 114805 - DNA, 214 bp, Arabidopsis thaliana columbia
  unsure (1)..(214): unsure at all n locations
ggataagtttgcaacacaagctatattgattgnctttntctgcatagttttgcttttgctaggtatgaggttgctcaaactagctttgttctgatatttgttaacttctccattccaatttggtgggtttatgaagttgatgacgattacgattatatacaactttgatcctaatttgtattatttgtatcacaaatttcattttgattcaaaa

SEQ ID NO: 114806 - DNA, 271 bp, Arabidopsis thaliana columbia
  unsure (1)..(271): unsure at all n locations
aatatcaccaattttcaacatttaatcgattccacncactttgttctagtgacatttacaagatttaaggccactaatananacccagaaagccaaaaaaagacactaacagaataacaaattaccctagcaaatacttctcaaacaatcctaacactaacaccaaaatagactaatagacatctataaatacacaaccaaacatcaaaaaaatcacaaaaaaaatcacaacatctaccttatactacacaacatatttaaacaacaaaaa

SEQ ID NO: 114807 - DNA, 403 bp, Arabidopsis thaliana columbia
gcgggctgagacccttgttcacaattttgatcattgggaccatttgtacatgttgaaagtcttgggttctatggtagacccaattctttcccacagatgacttacgagcacttcctccagaacgtccaacagatgagtgaaagcttttacgaactgagctgcctctgtgggcactgttccttcctttaccaccatagttatcacctaaaaattcattcaccgctacagcatcacatgggtctaatagtataaaatcccggtagagatgtgtagttgccaactgcaagagatgaaagttaaaacggagttcaagccccaagctctttctgtttttcatactctaagaagtggaaaaacatgctataccagataggattccaattctcctccgtcaccactagta

SEQ ID NO: 114808 - DNA, 353 bp, Arabidopsis thaliana columbia
  unsure (1)..(353): unsure at all n locations
gggggagcaacgcttccgnncttggnatacaanctttcaatgcttgttcatatacagcaaggncnttggaggtgctgcatttaaacgttttgggttaatcacacacccaaaaaacttagtggtaacgataaaagaattttaaatacaagttaccataatcttgcaacgccagtggaacatccatcctttgctggtttaacacatagtgtgagacactgaaacttcttgattaattcatcccaaacatttgggaaagtctcatgcattatatcctctgttctcttcacatctttgcttatggtatgaattccaaactctgaaagctattgattacaagaaacacacaacaacaa

SEQ ID NO: 114809 - DNA, 158 bp, Arabidopsis thaliana columbia
  unsure (1)..(158): unsure at all n locations
atacaaaccanatatcctcttcaatctacaaatgtcccaacgaccacatcgaaaaccctaatattataccgttcaataaaccacactcaggagccaagngggangtcacaggagaaacccaaaaactactactacatctaaagaatgatcacaatctt

SEQ ID NO: 114810 - DNA, 342 bp, Arabidopsis thaliana columbia
  unsure (1)..(342): unsure at all n locations
cgggggcgtcccacgcccgcgagagagagagatatgttgtcaattacggacatgatgganagatacccttgtgctacttgaagggttttaggcacccnacactnaccatcgccgngctcgtgttgacttggatgatagacttcctaaaccttatatgccaagatcatttcaagcaccagacagagaacacccgtacggaactccaagccataagaattacggacttagtgttcttcaacagcatgtctccttcttcgatatcgatgataatggcatcattaacccttgggagacctactctggactgcgaatgcttgatttcaatatcattgggtcgcttat

SEQ ID NO: 114811 - DNA, 380 bp, Arabidopsis thaliana columbia
  unsure (1)..(380): unsure at all n locations
agttattaaagttttggtttttctggattcactaatctacntagctnttttgaaattgcttgtttataggaatananacgnncnaagtaggcatgaagttttttgtttgcttaaaatttttaatttgagtgagataaaaccgttaaaagtttatcctaaaattagatagctacgctaattttccatatgcaaattctattttgtcgttatacataactctttacttgcaatatacaacagcttccgaaaacaaaaaacaaaatcaatgaatggccaaatcccaaacgattactgaaagagagggataaaaagatagttaatgcgcaaaggaatatgcctgacttgcctaattggtcgtattatttactctttnttttttc

SEQ ID NO: 114812 - DNA, 344 bp, Arabidopsis thaliana columbia
  unsure (1)..(344): unsure at all n locations
gcgacccacccccccgacaaaaactcatctctcaccactcttctcaaaacanncncgagctanatggcaatttcttaaggttctcggccnncccacccncncnnaancactctancatcccntccctactccctctctgacggatgatctccatgttcacctattcaaacgcagcaaataagacatcgcaaagaggggaacgagcaagtgcttcaaaaggcaatacactacacttgtgaaaaccgagctcactgtactcagatccatcccaccggagcttgctaccaacctaacaccttcaaaaaccactgtgacgtcaccgacaacagctactaccagaaaaa

SEQ ID NO: 114813 - DNA, 414 bp, Arabidopsis thaliana columbia
  unsure (1)..(414): unsure at all n locations
gggggaccaagccttgcggaaaagaaaagttnggnttctgtactttcttctctataaaccctnncgtgttcntgtgaaaattattagggtttcgaacaancaaanatgttcaaaaaccaatacgacacagatgttacgacatggagtccaacaggtcgtttattccaagtggaatacgccatggaagcagtgaagcaaggatctgcagcaattggactcagatctcgttctcatgtcgttctcgcttgtgttaacaaagctcaatcggagctttcttcgcatcataagaagatctttaaagtcgatgaccatatcggtgttgcaatcgctggtctcacaaccgacagtcgtgtattgtcttggtatatgagatcggaatcgattaatcactcttttacttatgaatctcctctt

SEQ ID NO: 114814 - DNA, 398 bp, Arabidopsis thaliana columbia
  unsure (1)..(398): unsure at all n locations
cgacccacgcccccgggacgagaacctttttaggcttttgtggcaacncnnncattgtcnnttgttnacttttcatgttattcggcacncaaanngctcatacctcttgtacgtgtcgttatgttatatcactctgcgcaggaatctttgacaagaattgatgtgccataaatatctttggttgctaatttactagatacttcttttacaggccaatcctgcagaagctctgaatgttccagttgttcctctgggtgctttgttggctgccgcttttcctctttcgacacgttctccaaatgtattatttttgccttaatgaattgatatcatcaacaaatatgatgcacccttaaatgttagaaaaacttgtcttgaataacttctgtaagtaaaaa

SEQ ID NO: 114815 - DNA, 340 bp, Arabidopsis thaliana columbia
tcaaaccacccttccgtatgcgatgacgacaacacgacaggtacggggtgtctcagaatgtcgagcatatcggtcaagttgcatgtccatgcccttgcggcactcgaggttgaccaaggcagcatggtaccactgactaccgtcacaatcaagttacgtctgcaagcccgtcttcatcaggtcaagcatgcagaaaatgccatcaaacgtaccactagtgtagatgttagatcgctgaggtaccacaagacaactcaggtacagtcgcgaatccacaatggttggtactgcttcgagtatacactcatttggtatgcatccccttacataatactaggga

SEQ ID NO: 114816 - DNA, 423 bp, Arabidopsis thaliana columbia
acgacagaagggggcagtggtggtgggtttccgttgaagtcgtttggtgatcggaattttgcttctcatgggtttaaacctaagaatttcagtaagcctgaacccaatttctctcaggatctggattatgatgatgagtttgatgatgatagagcagagagggaaggattcaacccgaggattcaaagttctaggagctcttcgcgggtgaatggctacagcaggaaggatgggagctatcctcgaaacactggtgcttccaatggctatggatcgtcttctaggttcaagcatgagcaaatgaatgcagcagcagaagttgagtctgacccgatcgatgaagttgtttcttctgttaagatgttgacagaaatgtttgtgacggtggagaattcgaagatggagatgatgagagaaatgggg

SEQ ID NO: 114817 - DNA, 418 bp, Arabidopsis thaliana columbia
gtccagtcacaatctcgggtcgacctcgcttccgctgacacatcactacagctgcgagaacattcaacttcggggcccaggatgaaagcttgtagctcattacatgaaactctctgcatgcagctgcacatgctacggagagtgacatagttagtatgctaaggttagtctctaaaagtggttcaccaatatgtgtgctgcagacgcatcccaacgttgcttcagctcactccattcacatcgcatattacttacgtcctcctgcttaaccgttctctcccggtcatctcagcacctagtctttctacaccaccgctaaatcagtctttacaccaattatcgtgcgtctaactgttacaggtgcgttccacactagattcatgaaaccagcagtctcgagattatcagctgcattggc

SEQ ID NO: 114818 - DNA, 404 bp, Arabidopsis thaliana columbia
gtcgagtcaagcgtcggtacggttgcgatacgacaacagaacgggatcgaaaggctgcagaacacgacattatagtcatgatatagaggaaatgatgaatttcatctccgatcaggtaaagaaactcgcaagctcaacaccagaagagccataccacaataagccagtcgaaggaaccgaaacagctacaagaccagctaccaacgccgagctcatgggaagttccatggtttgtacttaagctgctcaagccgcagctcgttaacaatcaaaccaactccaaaagggtaaaatcgccggagcctctgctgatatcttagacgctgccgagaaatacggtaagttccattaaaagagtaagaatggtcaatacctcgacaaagctgagaagtatctcaacgact

SEQ ID NO: 114819 - DNA, 122 bp, Arabidopsis thaliana columbia
actaaaaaaaaaaattgaaagatgggagccggtaaatggaagcggccgctctacatgatcaaagctcacttacgcgtgcttgctacgtcacatctcttcgatagtgtgacccaaattcaatt

SEQ ID NO: 114820 - DNA, 271 bp, Arabidopsis thaliana columbia
gactataaaaaaaaaaaaaaaaaaaaaaaaaaaaaagcggccgctctaaacgatccaaccatacgatccacgtccatgctacctcatatctcatctacaatgtcacctaaattcacatcacaggccatctcattacaactcctttactaggaacatcctggcgaaaaccaagttattcgccatgcaacacatcttccattagatagctcgttcaacagctaacatgccagcaacgatggccctacccatcacttgtccaaccagtatcgca

SEQ ID NO: 114821 - DNA, 385 bp, Arabidopsis thaliana columbia
gtgcaggtcctggtctagaaggcccgggtagacgtacgcgtacgcgtccgtgtgggtgcgatacgacgagacaacgggacaggagagaagatgcaaagcaagtcatacacgttgtcaagatcaatcagtcttctctgcgtcaccgtcgttcacctcagactgactccgacacagtgttgggtcagcgatggctagtgcggcgtcaggaatagcattccataagagactgccagccaagatttcggcggctgacagcgaacgagaaaaagagtttcactgacaaggacttcgaggagaagcaaaaccaagtgattggtgagaaagttggcgaagctagactaacttacgaggactttgcagtaaatcttccagctgacgaatgccg

SEQ ID NO: 114822 - DNA, 197 bp, Arabidopsis thaliana columbia
aattcgagcggccttctcaaaaaaaaataaaagaaacaaaaaaaaaaaaaaaaaaacagagacaaaagaaaaaaaatctaaaaaaaaaaaataagcctgaaaaaattgacacaagaggccactcaaaacgttcgaaacacaatttaatcgtggaggccccataggatcccttcttatgttgccgtgaatcgaacgtc

SEQ ID NO: 114823 - DNA, 275 bp, Arabidopsis thaliana columbia
acaaaaaaaaaaaaaaaggctctaatgatgacatttaatcggaattaaattgtttcaggcatgagattgtgggcgtggtgactgaagttggagccaaagtgaaaaaattcaacgctggagacaaagtcggagttggctatatggccggctcgtgcaagtcatgtgacagctgcaatgatggcgacgagaactactgtccaaagatgatcttaacgtccggagccaaaaactttgacgataccatgacccatggtggataatccgaccacatggtg

SEQ ID NO: 114824 - DNA, 367 bp, Arabidopsis thaliana columbia
gaaaagagagaagaagcaaaaagagtcatattcgttgaaaacatcattcactcttctctgcgtctccttctttcacccgaaattgtctctgacaccgttttgattcagccatggctaatgctgcgtcaggaatggcagtccatgatgactgcaagctaagatttctggaactgaaggcgaaaaggacacaccgtttcattgtctacaagattgaggagaagcagaagcaagtgattgttgagaaagttggtgaacctattctaacttacgaggactttgcagcaagtcttccagctgacgaatgccgatacgccatttatgatttcgactttgtcactgcagagaattgccagaagagcaagatttt

SEQ ID NO: 114825 - DNA, 369 bp, Arabidopsis thaliana columbia
gaaagagaagaagacgaagacgaagatgatgggtgtgttgaagtcggcgattggggatatgttgatgaccttctcttgggttgtagaaagattcacaaagctgttccattctaaaataacgagaccaacaccagctgaatgtcaaaagtctccttgtcattgtttagatccacacgcttattttagatatttgtgcggcgtaccatatcgcttttatgttcataaatcacatcagactctcttccggtttagaaacatttatgatgacatggctggtttagtacggtttcatgagcttggaactggtttattgaagtaaaatcggtcgctctagaggatgtatccttacgtacgcatgcatgcgacatc

SEQ ID NO: 114826 - DNA, 295 bp, Arabidopsis thaliana columbia
gccacgagtacataacgcagcgaaaggacagatatcggtgttgatcgtgagtaggtgaaatcacgggcaatccaaagagctagcttaccggagagttcaacggcgaccactcaagaggatccaaccgaagttcagcttgcaaccaaagtctcagctcgaccagtgagccacaaaatatcaacacaatgtcggtcatgctcggacctctaggctgggacaaccctgagcttatggctataaatcgccttacattagaacacgcagtcgatatcagggttagtacacagatggtcag

SEQ ID NO: 114827 - DNA, 255 bp, Arabidopsis thaliana columbia
ttccgctgacacatcacgacagaaggcgaaaatcgggtacagatgcgattgctcaacatagtggaaagctgctacagcatcacataatgctatcgtcgctaacattcaacccaactggattcacagttccatatagacacgcagataaacgatttgagtctctcattcacactcgttccacgcttcacactctccatcttcgtgatcagatcatcaaccacgattccactctacgaactaatccgagtagtcaac

SEQ ID NO: 114828 - DNA, 315 bp, Arabidopsis thaliana columbia
gttccacacatttctagtatggacaatgcctctctacttggagacgcaatttcttacatcaaggagcttcaagagaaagtcacgatgatggaagatctagagtacgaacagataagagcttatcagaatcatacacagtaacagtacaagaaagtccacaagttgacattcaagctatgaatgaagatgttgttgtaagagtaatctcgcctttggattcacatccagcttcaagaatcatacaagcaatgagaaactcaaatgttagtccaatggaagctaagttatcattagctgaaaacacaatgtttcaca

SEQ ID NO: 114829 - DNA, 228 bp, Arabidopsis thaliana columbia
cccacgcgtccggaagggggccattggattgtgtgtggctgcgtcagtaaaacgtattcttaaaagcaaccattggtgtgattgactccataagaaaattcgtcaccgtgaagcaatctcaaacctaaccggaccaaacctccccgaatcccaatccgccccggcaattaaacctcccggtaggcaaaaatgccaacttctccaagaattggttccgaagaagaaatt

SEQ ID NO: 114830 - DNA, 306 bp, Arabidopsis thaliana columbia
gacacatctcactgctcactactctcactgtaatcccttagatcttcttttcaaatttcaatggcgtccggtgatgttgagtatcggtgcttcgttggaggtctagcatgggccactgatgacatacctcttgagactgccttcgctcaaaatggcggcgttattgactccaacatcattaatgatcctgagactggaagatccatgggattcggattcgtcaccttcaaagatgagaaagctattaatgatgcgactgagggaatgaacgcgacaccatctcgaatgtcgtaccatcactgttaa

SEQ ID NO: 114831 - DNA, 173 bp, Arabidopsis thaliana columbia
gaaaaaaaatcgaaagaaaaataaatttgataatcatgtgaaaaaaaaaaagagatgcttcaatgaagcaaacatacagtgaaaatgagccgatctggaggatccagtgctaaattacggttgcaagaaaattaacatctctcataagatgtcatccaacttcaattcatggc

SEQ ID NO: 114832 - DNA, 294 bp, Arabidopsis thaliana columbia
aggtccaggtcgactacgtatcggtgcggcagccaaaagacgaggaatcggtaccgcagcaagtcgacgatcaaacggtacggctacaagatgaccacagaaggatacgttagcgcttgcaagaccgttgggtattgctgcggaaaactacagaccgcggctgatttcagaactttgaatctaacaaacttcactactccatggtgcctaacttaccatgtcattacatccgtctgtgctaacttatccaaaaatcacctcgacgtagtcctcatcagagtctatgtttactaa

SEQ ID NO: 114833 - DNA, 409 bp, Arabidopsis thaliana columbia
ggtctagaattcacgggtccatccacgcgtccgaagacgacagaaggggggggtcacactgaccaggcccgggcgactgtttaccagacacacaggtctcggcacaatcatacgaccatgtgtaggggctgacgcctgcccactcccggaaggttaatgaacttggagacctgatgacaggggagccgagtaccgaagtcccgatgaacggcggccgtaacgataacggtctcaacgtagcaaaattccttgtactgtaagttccgacccgcacgaaaagcttaactatctgggcactgtctcgcgaacaggctcggtgaccatagacatgtcttgtaacatgcggactacctgcatctgaatacagaaacctatgaagcttcaccgttccctgggattggctttgggc

SEQ ID NO: 114834 - DNA, 144 bp, Arabidopsis thaliana columbia
tagcgggaatgatactaccttcggtgccaatcataccagcaggcttcaaggatctggatcatggcagctgtaggctcaccctcgctctgcactagcacctcccaccgtcctgacagacacaagtagcgtatcatccgtcaacgt

SEQ ID NO: 114835 - DNA, 345 bp, Arabidopsis thaliana columbia
ggagaagagatcgagagacgaatagtttgatcatcttgtgataaaaggaatggctgcttcagtgatgctatcttcgatgacattgacatcagctggtttcaccgtggtgaagacggtggccagaggattaccgtcgctcataagagctcgtccctcactcataattgtccccagtagtgtcacgaacatcaagaccgacaagaccttcgcaattaacggcaacatggacttgagggactgcgtcgacgcctccggcagacagggcaacgtagaaggtgtttagaactaggtcgacacgtatggatctaatgtcgatggatacagtcctatttacaaccagaacga

SEQ ID NO: 114836 - DNA, 393 bp, Arabidopsis thaliana columbia
gtcgacgcatgcatccacacatccgtccgtacggcagcgaaacaacagaagggtacggctgcaaaaaaacaacagaggggcgcggccgagaaatacagtaagtgctatggcaacaataacactggtcagtacctcgacaacgctgagaagtatctcagcgactactagtcgtcacactccaccggtgctggtggtcctcctcctccgacgagtcaggctgagccagcaagtcagcctgagccggcggctaagaaagacgatgaagagtctggtggtaggcttggaggttatgccaagatggctcaaggtttcttgaagtgatttgatcgttaattgttgttcatcattttcgtaataatagattaaataactagtatcgtttgtgactaattt

SEQ ID NO: 114837 - DNA, 354 bp, Arabidopsis thaliana columbia
gaagacgacagaagggggggaaacaccaaaacagatcaccggcgatcggaaaccggcgacgtaagctatgagcagtacggcagggaggctcgtgacttcaaaatccgagcttgacctcgatcaccctaacatcgaagattaccttccttctggttcttccatcaatgaacctcgcggcaagctcagcctgcgtgatttgctagacatctctccaacgctcactgaagctgctggtgccattgttgatgactcgttcacaagatgtttcaaatcaaatcctccagaaccttgggactggaatatttacttattcccactatactgctttggggttgttgttagatactgtatcct

SEQ ID NO: 114838 - DNA, 319 bp, Arabidopsis thaliana columbia
taacgttgcaatcaaactacagtacgttacggttgcaaaaacacgacataatgctacagttgccagaattcgacagaagggtacggctgcaacactactacatcatggtattgctgccagtagacgacacacgggttttgctgccttagactacacaatgcggatgctgaatgaagatcagctgcttaatgctgtgttacttgtgtttgccaacatgcaagattttccatatgctatgaactctgcataaatcacaaagcatcttgctcttcactccctccatccgtgtcattggtatatctaaaccacatgtgccact

SEQ ID NO: 114839 - DNA, 390 bp, Arabidopsis thaliana columbia
ggtcttacgaatgctgaggatagagaagaagtagatgcaaaggaagaagaaggtcaaattgttggggacactctcactctcaaaagtagtcttcgaaaggttgattcaaattcaacagaagctgagaagagggagaagaagaaggtacaatgggtggatgtgattgggaaggaacttgctgagattcgagaatttgaacctagtgatgaagatgatattgattctgatcgaggcaaaacctgtgtttgtattatcctgtgatccgtccacttaagtttaactgggagatttaaggcaaaagacaaagttggtggcttcagcattaaattccatatacatggagattgtggagcaagtttcaaatataacaattgctatgcaatcatatct

SEQ ID NO: 114840 - DNA, 190 bp, Arabidopsis thaliana columbia
gaaggggacacttaaagagagaaacaaatccttcttctaaaatattcttcaatcttcttctcgaagcttctccaaaaatggcgattacttcttctagaaccagcagatcaaacggatctgcttcgctccgatccaaatcagcgtctacagcgtttttcagcagccacaatcagaacataataatttcgca

SEQ ID NO: 114841 - DNA, 355 bp, Arabidopsis thaliana columbia
cgcctgcctgtagcggtcttagaatcgcgggtcgacgcatacgtccgggggtcgacaacacgacagaaaggggacagtgaggataccaaacaaacactcatttcgcaatatcctggtagaagtaaacatcaaaattcattgacctcatcgcatcagggatagtggtcaccggaatcttcatcaactgggcatggatcgtctggccacacaggtacgcagatcatgtagaatttacaatcttacccagcctaagtaatgctgctcacatagttggcaggctaaagcacactgacttaggagtcaatgcatagggaaaacaatcatggatcgcttacattgattgagttggggtgtt

SEQ ID NO: 114842 - DNA, 324 bp, Arabidopsis thaliana columbia
  unsure (1)..(324): unsure at all n locations
ggagtggagcatgttgaggtaaacttctacatccgtgggcctcaaggagcagggaaagtgtacacggagatgtttaaagacaaggcagagaaggaatggaaatacacgtacctgatcgtagagattttaacaccttccccagccaaattgatgctggagtcttatttgcctgcctaaagcactcgtatttatgactcagcagatccggaaaacattcagaaacggcttagattgttttagttggggtgttggagaaaagagagagaattgtgttacacatgagctgtangaatgacttcttatcaagcaactgtttgctaattg

SEQ ID NO: 114843 - DNA, 224 bp, Arabidopsis thaliana columbia
gctgcaaacgacagacaggtagggcatcgagaagacaacagattgggaaacatgacatcggttaaaagtctgcttcactaattcgacctgctatgccactaaaactagcaggtatcacaggcgtcattttcaacgtcacaggcttcacgtccggcaaaattacgcatcgatcaatcacggttgacaccacagctctctcacacatgcgtctaaacatgagcttt

SEQ ID NO: 114844 - DNA, 418 bp, Arabidopsis thaliana columbia
ggtagtagagagagagagagaggtagacaatgggagttatgaagaagtgggcgtcgctgaagaagaagaagctgcaacaagaggaggaacaagtgacggctaaagaaacacagacatggcagcgattaaggaatctgttttcaacgtcgtcttcgtcttcgtcttcgtcggcgaagtggaagcgagttgagataataatgctgacagagatagtagacggagtagtttacaaggtcatgtatgtagttgaagctttcgttctcgtttccacgctctgcttcttctacctctgttgtggatgccacatttgatccaatttttgtttctctcattatattattctttccaattcatacttcctctcttatgggggttagtgttagtctcagttttatacaaataagcttatatgtaaccg

SEQ ID NO: 114845 - DNA, 347 bp, Arabidopsis thaliana columbia
  unsure (1)..(347): unsure at all n locations
ggagctcaaattgaaaacacgagcttcctaaaccctagcagcagagtcttccgtaaacccagctctcttagctctcacgcctcgtcaattgttgacctgtaggatagatatgggcaacgagagcaaaacctcggctttggaatcggagaaggtcaaagagactgatgctgtgattgaagatggagttaaggagaaaaagaagaagaagagcaagtcgaaatctgttgaggctgatgatgataaggagaaagtttcaaagaaaaggaaaagatcagagcctgaagagactaaagaagagactgaggatgatgatgaagaatcaaaacgtgggaaganagaagagaatg

SEQ ID NO: 114846 - DNA, 307 bp, Arabidopsis thaliana columbia
ggagatcaaatcaagagtagattgatcagcttgtcatatgagtaatggctgcgtcactgcagcgatcctcgctgccattgcaatgagctggtttcactgcacagaagacagcagcgaggcgattagagtcgcgcagatcagctcatctctccttcccatctgtcgtcactggagtcgagtcgatcaaatccggcacgcccttcgctactaacggcaccatagccttgacgtacgggatcgactcctcgcgtacagcaggcaagggatacgatgttgagtagtccgtcgactcgtatggtgctgacct

SEQ ID NO: 114847 - DNA, 333 bp, Arabidopsis thaliana columbia
aaacgtaagtacagctgagagagggagacagaaaggggagtgttcgtcactcgcttctcaagtgagatatagatatatgaatcacatcatctcttctccttttgacaatcttcatagagaggtgtttattgatgtttgcctgatggaatatatttcagttgaatatccatcacgagtggttcagagttctagacggtagctttcagctttgctagtggatatagccggtttacgtctggcagtgtgacgttctataaatggttttgctcggggtgatatctgttcacaccgtcgatccgtatagactgaatggcttacacttttactccatca

SEQ ID NO: 114848 - DNA, 385 bp, Arabidopsis thaliana columbia
  unsure (1)..(385): unsure at all n locations
ggagatcaacagattcgagagatgaggagaggaggcaaggaagaagacgaagttgaacagttgcttcaagcagctcaagatgagatgatactaaagctctctgttgattctcacacttctcgatcttcttccgattatttagatccagatcttcactctagatttctcgctctcaaatctcaaaagaagaaggatcagcagcaacaacagaaacaacggccgagaatgcagccgaaatcaaaggatgtggttgaggaaacaccagaagatctcatgcttagattcgcggctctgaaaacttctctcncctccgcgtcttcttcgtcctctgttcttcttcaggatgaaatcggagaagatggtgatgaaatcggagaagatgctg

SEQ ID NO: 114849 - DNA, 237 bp, Arabidopsis thaliana columbia
ggagaagagatcgagagaagaatagtttgatcatcttgtgagaaaaataatggctgcttcagtgatgcaagcttcggtgacattgatacgaggtggtttcacggtggagaagacggcggctagaggattacagtctctcacaagagctcgtcgctccttcaaaattgccgccaatggcctcagcaagattctgatcgacgagcccttcggcattaagggcagcatggacttgaagga

SEQ ID NO: 114850 - DNA, 389 bp, Arabidopsis thaliana columbia
acccatttcttggcttacaacaacaaatcttaaacgttttactttgtgctgcactactcaacctcaatggccgcctcaacaatggctctctcctcccctgccttcgccggtaaggccgtcaagctttcccccgcggcatctgaagtccttggaagcggccgtgtgacaatgaggaagactgttgccaagccaaagggcccatcaggcagcccatggtacggatctgaccgtgtcaagtacttgggtccattctctggcgaatcaccgagctaccttaccggagagttccccggagactacggatgggacaccgccggactttcagctgaccccgagacattcgcaaggaaccgtgaactagaagttatccacagcaagtgggccatgct

SEQ ID NO: 114851 - DNA, 326 bp, Arabidopsis thaliana columbia
acgcttgagcattgggtttatttctcgtgccatctcaatgaatgggaagcttttgatccaagatcgaaacggtggatgcatttgccgagtatgccacaggacgagtgtttcaggtatgcagataaagagtcattggctgtaagaactgatttgcttgtgtttggttgggaagtgatgttcttacgtaatctatacatacagtcttttgactaactcttggtctacagcgaagagtatgaacatgcctagatgtctgtttggctctgctagttactgagacattgcgggttcagcgggtgggtgccactcgagcggtaggattcttg

SEQ ID NO: 114852 - DNA, 323 bp, Arabidopsis thaliana columbia
taatggtggtataatacaatgtataacttggggtgaaatttaagatgtaatcttaatgttgtaaatgtgtactatttctttttatactttttctaaaagataaaggtgaaataattagaacacatacataaatacattttttataagtatagaagaattaagttttatagtggaagtgtttgatgtttagtttgtttaaaaggcatggctttgtcttgtgttgtaatgtaatgtgtacattaaatttttgttcatacaataataatatcaatgtgaatgatatattataaaaaacaaaaaaaattagaaaaaaaacaaaaagc

SEQ ID NO: 114853 - DNA, 144 bp, Arabidopsis thaliana columbia
  unsure (1)..(144): unsure at all n locations
tcacgctgcatatatacgacagaaaggtatggcttcaattgacgacacctaggtacggctcctctaagactatctagaggtacagcagctaaaatacgacagaacagttactcacntgcgagtaattacgatcagatcaggtac

SEQ ID NO: 114854 - DNA, 338 bp, Arabidopsis thaliana columbia
agtacggatgctacaagacgacagaatggcattaaaacagaaaaatacactagcataatttcaatagacgcctcaacaatggctctctcctcccctgctttcgccggaaatgctgtgaacctttcacctgctgcatcacaagtccttgaaagcggtcgtgtgacaatgaagaatactgttgccaatccaaaaggtccatcaggcagcccatggtactgatcagaccgactcaagtacttggatccattctctggcgagtcacccaactaccttactggatagttccctgaagactacggatgggacacagctggtctatccgctgaacccgagacatt

SEQ ID NO: 114855 - DNA, 188 bp, Arabidopsis thaliana columbia
agggagatcagaaagagttgccaagggaatttggatcttgttgattatggctcgaaattaacctcactggatccgaccgaagaggatttgtatcaggccagattgacgtagaacacgcccgactccgtttactgaaacgtggacgagatatggcaagacggattggaagacgattacgcagcagagaa

SEQ ID NO: 114856 - DNA, 203 bp, Arabidopsis thaliana columbia
ggtgctgctgctacaagacgacaacagggtactgctgctacaagacgacaacagggtactgctgctacaagacgacaacagggtcatcaaaaaaaaaaaaaaaaaaaaaaaaaaagcggccgctccacaagatgctagcttacttactcgtccatgatacgtcataacacttctacaatgtcatcaactttcatctcatcagt

SEQ ID NO: 114857 - DNA, 347 bp, Arabidopsis thaliana columbia
tgtcaccaaaaaacaacaacacgaagaagactgcaacaaaacaactaaataatgcaagctgctctcttacaacaacaaatttcccatcaggtacaagcagacagttctttaaacctgccgccccacgtagttcatctcttctattctcgttcctgcttctatcgtactccttcgactttaatactcccggcccccctaggttttcgtcttttcattcccctctttcctgcttatatccccctcttgcgggtccccttcgtcctctctcagggccccctttttctcatcttgtgtcgtgacaaccccggttttctccacaattatcccccattgatacaatccccctt

SEQ ID NO: 114858 - DNA, 189 bp, Arabidopsis thaliana columbia
ggaagaagaaagactctctatgaagtagaaggttctgttttgtaatcaaatgaatatcgagaaaagtgataaattattatgtctgtttgttctaatttaaatcttaatttaattttgcttaaaataaaagaataaaaaacaaatgacagtaaagaacaatttaaatccttaagataaaggtaatacata

SEQ ID NO: 114859 - DNA, 221 bp, Arabidopsis thaliana columbia
aaaaaaacaacaaaagggtacggctgcaaaaagacaacaaaagggtacggctgcaaaaagacaacaaaagggtacggctgcaaaaagacgacaaaagggtacggctgctaaaacactacagaatgggccttaatacatcaattaatgctatcgtcggtgacattggacccggctgttttcactgtgcagaacacggctgctatacgattaccgtcgctcac

SEQ ID NO: 114860 - DNA, 399 bp, Arabidopsis thaliana columbia
ggcgtcagaagaattttgactagaaagaaaaaaaatcaatttcgacggccatttttttctctcatcctttttgattcctctgtttcaccaagtagacgaagtagaagaagaagaagaagaagaaagttttcacctttactctaaaagtttcactttttatgtctgctttgaagctctgagatcggagaaagcaatatctatggcggaagcaagacgattcagcccagttcatgaattagatgttggacaaatactctcagaagcacgacatcgatggcttcgtcctcctgaaatctgtgaaattttacagaattaccaaagatttcaaatttctactgagccacctactacaccatcaagtgggtctgtttttatgtttgatcgaaaggtgctcagata

SEQ ID NO: 114861 - DNA, 340 bp, Arabidopsis thaliana columbia
cccaagcgtccgtacggctgccaaagaacaaagaaaggtacacaatcaaaatatcccctcaacactaaaataattgtaccgactctctctctctctccgtaacaaaaaaatcaccaatggcaaaacaatatctctttgtactcctctcaatctcctatctcttatcactggagctcacggcggccaccgcagcctcacagaccggagcttccaaaaaagccataaacttcatccaatcttcttgcaaaaccaccacataccctgccttatgtgtccactcactctccgtctacgcaaacgacattcaaacaacccctaaacgttaacctgagaacgctat

SEQ ID NO: 114862 - DNA, 226 bp, Arabidopsis thaliana columbia
  unsure (1)..(226): unsure at all n locations
acgtctgcgcaaacgtccgtacaggcgaaaaaacgaaaaaaagggtacggttgcaaaaaaacaacagaagggtacggctgcaaaaagacaacagaaggggagctttagcaaatgtattgaagatcactaccactgtacgtgtaacatanacgttgggtaatattatgatcagaatcgctggattgacgaatccgaaacatcgagatagtgctcgagatgttcttgt

SEQ ID NO: 114863 - DNA, 414 bp, Arabidopsis thaliana columbia
ggaagcagaacacaagaaacgtgagaaactttgagaagaccaagaagaagaagcagaagaagaagaaaatgaaattggtttggtctccggaaacagcatcaaaggcttatatagacaccgttaaatcgtgtgagaatcttgaaacgccggacgcggcggagttaatagcggcgatggcggcgggatggaacgtgaagctgatcgtggaaacttggtcagaaggagacgcaatagcttcaagtattggtttaaacgtagcaagcaaacacgcaaacgctaaacacatatgtatagtacaaaacccaggatcagaatctgcttacctcaaagctattcaagaatcttcaatctcccttgaactttccaagagactatcgtcgctgaagaaaccggtaaaagcgatgaagaagctac

SEQ ID NO: 114864 - DNA, 292 bp, Arabidopsis thaliana columbia
tgcaactttcaagttaacaaaaaaaacaaaaaaaaaaaaaaaaaaaaaaaaaaaaaaaaaaaaaaaaatgaaattacaaagggatccaaacaacagcatcaaaagcataaaacaaaaaaagtaaaaacaggtagaaaataatgaaacaaagggggcccccccaatgaataaccgctacgtttgcgatcatggaaccttaaccccctcttaaagggttacccaaattgcaacccagggccttcagtttaaaaatttattgtgggaaaaactctggcatttcccaacgataccc

SEQ ID NO: 114865 - DNA, 282 bp, Arabidopsis thaliana columbia
ggttgcttcaatggcgaaagacggacctaactgggacggtctgcttaagtggagtctctctcactccgatggtactcgacctacttgccaattaagtgaggaggatcgaaaatggtttgcagaagctatgcaatcacaaacggtagatgtagtcaagcggttgaaggagattacacaggtattgcagacacctcaacaagttttggaggctcatgaagtgacccttcaagatattgaaagtttgttggatgagtttcacgaacatgttgaatcgattgatat

SEQ ID NO: 114866 - DNA, 368 bp, Arabidopsis thaliana columbia
gattcacgaaaacaaaccacataaactagtcaaagaagaatagatgagttacattataaaaaagttcaagtgagagaaagagaggtccaatggcggagaaagaagaggatgtgaagcttctaggtttttgggcaagcccttttactcgtagagttgagatggctttcaagctcaaaggcgtgccttacgagtacttggagcaagatatagtgaacaagagccctttgcttctccagataaatccggtttacaagaaggttccggttcttgtctacaaagggaaaatattatccgagtcacatgtgatcctcgaatacatcgaccaaatatggaagaacaatcaattcctcctcaagatccttacgaga

SEQ ID NO: 114867 - DNA, 438 bp, Arabidopsis thaliana columbia
ggacttcgagagaagaagccagcaaggaacgatggagattattacggcatcatcatcatcatcatcatcatttggagattaggcttgttgtttgatttcgctacgagaaaatggacaagtacgagcttgttaaagacatcggtgctgggaattttggagtggcgaggctcatgagagtcaaaaactccaaggaactcgttgctatgaagttcatcgaacgttggacttaaaatggttgagaacgtggcgagagagattattaaccacagatcacttcgtcatcccaatattatccggtttaaggaggtggttttgacaccaatgcacatcgccattgctatggaatatgctgctggcggtgagctatttgagcgtatatgtagcgctggaagattcagtgaggatgaggcaagatactttttccagcagcttatctca

SEQ ID NO: 114868 - DNA, 257 bp, Arabidopsis thaliana columbia
cataaaaaaaaaaaacacaaaaaagtttcaatggccgcctcaacaatggctctctcctcccctgctttcgccggaaaggctgtgaacctttcccctgcggcatcaaaagtccttggaaacggccgtgttacaatgaagaagactgttgccaagccaaaaggtccaacaaggaacccaaggtaacgattcgaacgaattaaattattgggtccaatctctggcgaatcaaccaactaccttaacggaaaattccctgg

SEQ ID NO: 114869 - DNA, 385 bp, Arabidopsis thaliana columbia
ggtttcagaggggctctcttgatgaattctcatttgaaggaccgaaactcggcaaaatcagagctttttggattggtcttgagtctggtcaatggagagttggaagagtgagcttgtgggtggttaatcctcgtggtaaagaaaccgaggcaaaaaccttttgttaccgatatgattttgaagttgatgaactcttgcttggagagagcagtgacctatcaatggtggaacttagacctagccgtatcactgaactcgctgactccgatcaaatctcttcgtcttcagctctgaatcttgaccgtactatggtttccaatgaggaaagcatggaagaatacgcaaacttgaaactctctctgctactctataatgcggttctcat

SEQ ID NO: 114870 - DNA, 239 bp, Arabidopsis thaliana columbia
aaggaaaaaaaaaaagataaaactaaacaaaaacaacagattgaaaaagagagtcaaataaaatactaaacgggaatacgaaatagatttctgcctaatgcttacacttatgctcgtttactcttcatcatggactcagtagcctcagcctccgcttcattcgtatctttcaccggtcttaacaggtcagccatcaaatcatcctctaatgtcatagtcttgactgctgctgttgcatc

SEQ ID NO: 114871 - DNA, 433 bp, Arabidopsis thaliana columbia
atggtattaaaatattgtttctttagatatttatagaatatccaaagattttagtaaactgtattacgaaaatatctatcagattttgtcaggattatcgtcttaacattttcttggttttggtttgactagttgaccgtgccgccaccgaaatctgaagggaggcctatttactaccacatcgcggacgaagaaggacacgtggaggaagaatcagccgttggatatgcgttgactttcaaaggaaatagcgtggaacagttgacgcaggcgttgcaagaagagactagtatggatgatgttgtggtctgtacacgccatccttcaaacggcaagctgtttcctcttcgtttgcaacttccacctaatactggaacaatgcatgtcattctagtaacctcaaatacttaacggcaagctgtgtggttccccc

SEQ ID NO: 114872 - DNA, 425 bp, Arabidopsis thaliana columbia
gacagcaacacatatagagatatatactattaaacaataacataacaaagaaaccattttttctcttttgttattgacttaaacaaaaactatcaacgaataattatccttttttgagtttttcccatttcttcttcgtctccatttcatcgtcttctcgctgttcggctatattccgtttcgttggatgaggagaagaagaaagtgaaaaaagttgtgaaatagagagagtttgtttcatgggcaattcatgtcgtggttcttttaaggacaaaatctacgagggcaatcatagtaggcccgaggagaattccaaatccaccaccactactgtttcctctgttcattctcctactacagaccaagatttctccacacagaacaacaatccagctcttgtgaatcctgttaaagaaaccattatg

SEQ ID NO: 114873 - DNA, 421 bp, Arabidopsis thaliana columbia
gaaatcaaaagagagagagatccacaaaattggattgaatcgtcgccggatattccaagagtagagagcttagtttgtctcgcgttgcgtctagatttactgaatatggaggcggagaagtggaacagcgacggtggtgaatacacgtcggaggacgaaggtacagaagattaccgacgcggcggttaccacgccgttcggatcggtgactcattcaaaaccggccggtacgttgtccagagcaaactcggttggggccatttctctactgtttggctctcctgggatactcaatcctctagatatgtggctttgaaggtgcaaaagagtgctcagcattatactgaagcagccatggatgagataacaatattgcaacagattgcagagggagacactgatgataccaaatgtgttgtga

SEQ ID NO: 114874 - DNA, 370 bp, Arabidopsis thaliana columbia
gaagataaaagatcgagagaattgttcatcgatcatcatgtgtgaaggatgcttgatgcatcagtgctgctatcatctgtgacatagatggcatcagggttcacagtggagaagacagaggataaacgactaccatcgcacataatagctcgttcatccttcacaattgtcgccactggagtctcaaagatgaagaccgatacgcccttcagaattaaatggaccataggcatgacggacagcgtccacgcatccgggacaaaggacacgggatacagtgtttactcgtaccttaacaagtatagatctaacgtcaaaggctacagtcctacttacaacaataatcagtgattagcgacttgtgacatgt

SEQ ID NO: 114875 - DNA, 477 bp, Arabidopsis thaliana columbia
  unsure (1)..(477): unsure at all n locations
ggatggaaatacctttctagagtactcatcagacccagttacatgcgattatgatcgaacttcaggaatccagaccatgaaaaaggtgattacaattcctacatataagcgataagaagaattgaagacgaaaattggaaggaggagctgatgggaaacttaaaaaaatctacacgcagtgacgagttaagccgttctggtccccctcaaattccaaatcctgactggaacaatttgtatcaccgaaccacggtggcctcatgtttggtgcaaggagtttacgcaaaggaaagagacagggaaaacaaccgaaatggttccgagtcattagccacaccttggtggaagagtttcaacttcactttagatgaaagtgaaatcctatatgacgtatttgacggctccatatacggtgctgtcttccanaacatgatcaattatgagaataccccgaactcgatagtaatacctccgcgt

SEQ ID NO: 114876 - DNA, 242 bp, Arabidopsis thaliana columbia
gacccatttcttggcttacaaaaccaaatcttaaacgtttaacgttgtgctgcactactcaacctcaatgggcgcctcaacaacagctctctcctctcctgccttcgccggtaaagccgtcaagctttcgccctcgggatctgaaatccatggaaacgggcgtgtgacaatgaagaaaactgttgccaatccatacggcccatcatgcaccccatggtaccgatctgaccgtgtcaaatgct

SEQ ID NO: 114877 - DNA, 207 bp, Arabidopsis thaliana columbia
agggcttaggagcagatttctattaatgaacaaaggtgcttggactaaaggaagaagatgagagactagtctcttacatcaagtctcaaggtgaaagtcgttggcgacctcttcgtagatccgctggtctcattcttatgctgtcatagctgccgtcttcggtggcttaaatatcgccgacctgatttcattcagaggaagtttatt

SEQ ID NO: 114878 - DNA, 413 bp, Arabidopsis thaliana columbia
acggtcaagtattccgggtcgaccacgcgtccgcagaatcgtcagcagcgtgaggggaaacaaatgaggagacagatctttagatattgatttatgtgatgctaagtgaaattctagagagagatatagatagtgatatcgctcgtggtctctcacctggtcatatgacttcgtagaggaagtctcagccgcatagttatgtgcatggttttgtgacagagcaggatacagctgtggatcgaactgtgtggcaaatggtgtggcattgcactactgctactgattctgagagtgatttcgatcgagtaatcattcaattcactgtggacttcactgacgattctccgagctgttctcttccatgtgggtttttacaccggtttttctatccaactgtctatgtatgtcgcact

SEQ ID NO: 114879 - DNA, 185 bp, Arabidopsis thaliana columbia
gatattggttaaaactgagaatcatgatgcagactaaatccataagttacttttggtccgtcgtctaaacaacacatcaattaaatattctcaaaaagcagccgtgctacaagattcaagcttacattagcatgcatgcgaagtcaaaactcctccaaaatggcaacttaattcaattcaaagga

SEQ ID NO: 114880 - DNA, 454 bp, Arabidopsis thaliana columbia
aagaccgaaaagcccttcggaattaacggcaccatggacttgacggacggcgtcgacgcctccggcagaaagggcaagggatacggtgtttacaagtacgtcgacaagtatggagctaacgtctatggatacagtcctatttacaacgagaacgagtggtcagcgagtggcgacgtgtacaatggaggagtcaccggattggcaatttgggcggtaactcacgccggaattcttgccggaggtgctcttcatgtgtacaacacaactgctttggctcagtaaatcgtacagttgttagcgcatgtgtaatcatgtctctataaatgtctctgtgttgttctctttctctctaatgttgtaaaactcagacataccttgaatttacaagacttctagtgtgtgtatcacaaatatagttatatgtggtggaacggactctcattcactgacctta

SEQ ID NO: 114881 - DNA, 246 bp, Arabidopsis thaliana columbia
ggagatcaaatcaagagaagtttgatcagcttgtcataagaataatggctgcgtcacttcagcgatcttcgctgcggttgcattcagctggtttcactgcacagaagacagcagcgagacgataagagtcgcgcagaacagctcagctctcctttccatctgtcgcgactggagtcgcgacgatcagatcagagacgcccttcggttctgacggcagcatagcattgacgtacggcatcgagtcca

SEQ ID NO: 114882 - DNA, 111 bp, Arabidopsis thaliana columbia
taccgctgctatattaccacatacgcgtactgctgctataacatcacagaaaggtacggctgcgataacactacagacgggtacagctgccataagatcacacaatgatat

SEQ ID NO: 114883 - DNA, 141 bp, Arabidopsis thaliana columbia
aggtactgctgccataatacgacagaacggtacggctgctataagacgacacactggtacggctgccacaatactacatcatggtacagctgcgacaagaccacacaacggtacggctgccacaagacgacagacgggtac

SEQ ID NO: 114884 - DNA, 347 bp, Arabidopsis thaliana columbia
  unsure (1)..(347): unsure at all n locations
gggtcagatcacgagagacgattgtgcctactatctctacgcgtgaaacgcacgctccgccaagcagagagaaagagttggattctgtaggtgactgtgtcaggcgttggatgtcacgcgccacgagttttgcgtgtgtgctttggagggatcgatccatggctgggactggagagaagacaaaagatgaacattagcataacaatgaatattagggcaggaaatcgaagtactagaaagctatattgcgggcaagcgatattagggaattgctgatttttttctaatanaaaatcggatgatgaaaatatattctataactttattgtaaagcatacgtactcaga

SEQ ID NO: 114885 - DNA, 318 bp, Arabidopsis thaliana columbia
agttttcaaaaaaaaaaaaaaaaaaaaaaaaaaaaaagcgggcggcccaaaaggttcaagcctaagttacccttaatgccaattcaaaactcctccaaaatggtaactaaattcaattcaacgggcggccttttataacgttctgaacgggaaaacccttgcgttaaccaacctaaaccccctggaacaaaaccccctttccgcaactggggttacaaccaacaaggccgtaacgattgcccttcccaaaaatttgacaaccttgaagggtaatgggaacccccctggtaccggacaattaaccccggcggttttggg

SEQ ID NO: 114886 - DNA, 325 bp, Arabidopsis thaliana columbia
ccgggtcgaccacccgtcgtacaactggccaaaaaaccacaaaaaggggggtttgattgtaaccaagggccaataaaagttggtaatgggtggtggtttaataagcaagctccaaaagggtaagatctctgttttgaccgaagaagatttataaccaaatatattattgtcaagacctgttgcggctcagggaagaagtgtaaaattcacaagatgtatatctacgaagagaggagaggcatcaacagatgtgactccaatactccactttacaatatggacgacatctatgagggtttagaatgttatgatgatgagacgtcta

SEQ ID NO: 114887 - DNA, 127 bp, Arabidopsis thaliana columbia
gatctctccaacgccttaagcaaaatgtttagctctttgaccggaaactacgccaagttcttgaaagaggtgaaaggagacatgaaaaagccagagaattattgtgaaaaaccaattttggggaaca

SEQ ID NO: 114888 - DNA, 337 bp, Arabidopsis thaliana columbia
ggagctcagtcagagagatatcgccgagagcactacaatttcaaaaccctcggagaagttacaaccagagaatgtcagtcgaggaagacgccaccgttagagagccactcgatctgaatcggttgagtagcgaacagaggatctatgtcgagctccgatctgaccgtgaactccgcggcaagcttcacgcttttgatcagcatttgaatatgattctgggtgatgttgatgaggttattacgactatagacatcgacgacgagacatatgatgagattgttcggacaacgaagcgaacggtaccgtatctattcatgagatgagatggactgatatt

SEQ ID NO: 114889 - DNA, 394 bp, Arabidopsis thaliana columbia
gcgaccccaggtcaggcgggattacccgctgagtttaagcatatcaataagcggaggaaaagaaaccgctagttctcaaaaacaaatccccaagatggcatgagcagttgcagtgctggtgcctcaacttcaagggaagagtgactgtggcttcagttaagaatttccagcttgttgcagagattgacgcttctttggatgcgccgcctgaagaacatgagagggtgatcttacagtttggcaaaatcggtaaggatattttcaccatggattatcgctaccctctatctgcttttcaagcctttgctatatgcattagcagctttgacaccaaaccggcatgttgaagggtaaactttaccaccgagttaatcaatctcggcaaatcatcata

SEQ ID NO: 114890 - DNA, 325 bp, Arabidopsis thaliana columbia
aaaaaaacgacagaggggcaagtccaccaacaagacaaggttaacttacaaactcggtgttaatcactttgctgatttggcatggtaagattttcaaaggaccacacttggtgctgctcagacctgcactgccagttgaaatggcagtcacaaggtcacaatcgcagctcatccagacacagttgactgcatataacatggtatcgttagtccggtcagacatcacggatgtcgtggatcctgctgtacattcagcataactggagctcttgaggcaacttaccatcatgcatttgctcaacgaatattctctctctgagcaaca

SEQ ID NO: 114891 - DNA, 345 bp, Arabidopsis thaliana columbia
  unsure (1)..(345): unsure at all n locations
gatgaagggaataactctagagacagggacaaaagtactcactcagcaactgttgttgacgatctaaagtatcgtttgatggatactaccaaagagtttaaggatgttcttaccatgagaaccgagaatatgaacgtccatgaaagtagaaggcaactcttctcttcanatgcttcagaagaatcaacaaacccattcgttcgccagcgtcctttggctgctaaagctgctgctaatgaatctgtactccttcatggcaaatggtcctctcatctcatctcagtagtccatggagccggagaggagatctcacatgtgcacanatcacacacacacacacacaca

SEQ ID NO: 114892 - DNA, 404 bp, Arabidopsis thaliana columbia
atatcaagaaaatgattaatagcactaaccatcagaggtttagcgaggaacacatcaagtcacttgagcttatatatgagtctgagacgatgcttgagccgaggaagaaggttcaggtagctaaagatctagggctgcaaccaatacaagtggctatatggtttcaaaacaagacggctcgatggaaaactacacaacttgagaaagagtataacactcttacagccagttacaacactttggcttcacaatttgaggtcatgaataaagtgaatcaatctctggtctctgagctgcagatactatacgaagatatgcacatgcctaaagaagaaaagcatcatgagtgttgtggtgatcaatgactggatctaagcatcagcacagagtctcataatggaaac

SEQ ID NO: 114893 - DNA, 181 bp, Arabidopsis thaliana columbia
ggaaaacccttgaaggaataatcaatttgttaaccttgtaaaatcaaaatgggcggcttcattaaggcaacctccggtgatattgaaacaagctggtttcacggtggagagtacggctgctagaggattaccgtcgcgcacaatagctcgtccatccatcacaattgtcgccagtggcgtc

SEQ ID NO: 114894 - DNA, 242 bp, Arabidopsis thaliana columbia
ttcttgcacagaaacatcatcgtcatcatgatatcattctagattgtgggattccatcacttgtaatggcgaacctggataggtcgttaagttgcaattcatttgcaattctgtgacagtaacagcattggtataaaaatgatctcactcctttgttgtcagctgcgcagcgtcatattctctgacgagtcgtccttccgcacatctgttcgattactattacattcatgctgatagcaaaa

SEQ ID NO: 114895 - DNA, 336 bp, Arabidopsis thaliana columbia
agcagcgatcatgagagaaggtccgaatcttctgaagctagcgaggaaagagcagtgtttagctttggggacaaggcttagatccaagtacaagatcacttaccagttttacagagtgtttcctaacagtgaagaagttgttgcagctattatgcaagatgttgacacagacaaggacggacgaataagctatgaagagtttgcggcgatgatgaaagctggaacagattggaggaaagcgtcgaggcagtattcccgggaaagattcaacagtttgagcctcaagttaatgagagaaggttcattgcaattagaaggcgagaattaagaaaggtt

SEQ ID NO: 114896 - DNA, 229 bp, Arabidopsis thaliana columbia
catttccaaaaaaaaacaacaaaaaaagaaaaaaaaaaaaaataaaaaaaatataaaaaaaaaaaaaatcagataaaaacagcagacgatctaggggatagaagcttatggtacacatgtatgcgacgtcataactcttcaatcttgtcaccaaatttcaattcattggacgtcgtttttcattctcgtgccagggaaaactctggggttacccaccttagtctccttg

SEQ ID NO: 114897 - DNA, 331 bp, Arabidopsis thaliana columbia
tgggatttgcgctgtacgtgcaaatgcctctgatggtatcctctgcaccgttcttggacaaaacgctgttcatggtgcgtttgctggatacagtggaatcacggtaggcataatcaacactcactatgcatatttgccaatcactgaggtaattgcatatccaaaatcagtggatcctaatagtcgaatgtggcatcgttgcttgacatcaacggaccaacccgatttcatctagaaagatattattattcaatcacgagacagactgatgataacaataagccttgatatgtatagacagtagcattcttggttccttgttatgatgtat

SEQ ID NO: 114898 - DNA, 289 bp, Arabidopsis thaliana columbia
acgcataaccacttgggtccaaatgcttctgaaggggatgctgcaagccagggtgggtcaagcacagtgactttggatctggttaatggctgtcatagactagcgttggagaaaaacgaaagggataatacgatgcaagaggttctgattcaacaaatggcgtcatcgttaacaaaagattcgaaatttacagctgctcttgctgctgctatatctgggaggttaatggagcaatctagaacatgaacgtttttagtgaatgtattgtttttgtttgtttagaatgatt

SEQ ID NO: 114899 - DNA, 366 bp, Arabidopsis thaliana columbia
gagaccaacaaaaaaaaagagggaaaatctccttgttcaatagtcaataagttagccgctatcgatctagtcatgttgagcatggtaccgacatgtttcaggcttaaccatatggagaagggatgataacgagatctctctagacgtggatgggattttcggttcaaagatggaatattcatataaattcacatgcggattatagttaaatcggaataaagttttgataagtggactctccttacctaagtggggatggtagtccagtcttgtatcaatatatatatttgggctaacttagcatgcatatagaatcattatcaatgtgttaaatattccccacctaggtttcgttcatccaattcc

SEQ ID NO: 114900 - DNA, 200 bp, Arabidopsis thaliana columbia
tactgcaggagcacaaaagggtacagccgcaagtacacgacaatgcggggacatgagatcgcgagaataacaccttgatcatcttgtgagaccgtcaatggatgcttcactgatgcgagcttcggtgacattgaaaccacctggtcttcactgtggacaacaccgttgctacaggattaccgtcactcacaagagctcgt

SEQ ID NO: 114901 - DNA, 348 bp, Arabidopsis thaliana columbia
ggacttagttgtttttaaggaattgtggaccgtaggagaggagatttattatggtcccggaacaaattccagaggtttccgctcatatcatgcagtgatagtatccagtattgagatctataaaggagaagtggtggccatctgtaagatgagcaatggtactaaagtttgtgacgaaggatatgttagggtttctctagcgacaacatacatggttgtgggtgccagtcctaaaaaaagaacatgttcgggctacttctaagccgatgcatcttctctctgaattcatcatcatagatatagatgagaatgagaaagagaaagagagagagagagagaaagaaactg

SEQ ID NO: 114902 - DNA, 406 bp, Arabidopsis thaliana columbia
ggccaaaactgaataaagaaaaggtttacacaaatcttataatatctgacgcatatataggcgagattgctgacgataagctttttcgttttgtttccatggttttgtgacgaagaagagaaaaagaataagaagtcagttttttctcaatggcttctcatagctattcaacacttaggtttagtctccttcaagagctaagaagcaacgagatcatcaagacaagccgggcttatctggtgaatcctggaggaagaaaatatgagatattaccggagagctcctttaacctgaaatcacaactcttggagccattgaaacctttttcttcttttagtaagtctaagcactttttggagtttgattcaaccatggataagcatagactcatggatgttcatgaaac

SEQ ID NO: 114903 - DNA, 168 bp, Arabidopsis thaliana columbia
tgctgttacaagaatcgacagaagggtacggctgcgacagcagcactaaaggatacagccgcacgtacacgtcaatgcgatatcgcagctcttataacgtgtcaccggtattgatgtcacaggacgacatattggaacggctgcgactatgacaaccctgggatttta

SEQ ID NO: 114904 - DNA, 362 bp, Arabidopsis thaliana columbia
taccttatgaagtcaaaaaaaaaaaaaaaaaaaaaaaaaaaaaaaaaagaaaaaaaaaaaaaaaaaaaaaaaaaaaaaaaaaaaaaaaaaaaaaaaaaaaaaaaaaaaaaaaaaaaaaaagcggccgcccaaaaggatctaaacttacttacgcgtgaatgcaacatcaaaaccctccaaaagggccaccaaaattcaattcacggggggcctttttaaaaaatcttaacggggaaaaccccggggtaatacaacttaaaccccttgaacaaaaaacccctttttcaagagggggtaaaacaaaaaaggcccccaccgttgtcccttcccaaaatttgtgcacccgtaatgggaaaggggaa

SEQ ID NO: 114905 - DNA, 299 bp, Arabidopsis thaliana columbia
ggcagaaacagcttttcaacaacggagataagctctttagttgtaagctctaacactttcctccctcatattcacatctattagtgcaaatcaagaataacttaaaccaatccattacaattcttccatttctttgctttcagctcgacataaccgacgggtttcgatagaacaagtccatgtgacagattctctttccgtaaactcgataaacctgtttcataaacctatatgttatccaatatcatccatcatcacttcaagaaagagcaaaagccattttagtgtttgtgcaacaa

SEQ ID NO: 114906 - DNA, 298 bp, Arabidopsis thaliana columbia
tggggaggtggcggcggtagacgcgacggtggaggacgatacagcggcggcggcggcggttactcctcaatgggtggtggtggcggaagctaccgtggtggaagacgtgacggatgacggaagtctaagtgaattggtacgcaagcgatatgcaacttgggactctgagcttgggaagcaaatagaagaatgaaaagctgattttgagtatcttgagaagaaagctaaagagtttggagaaccaaaggtttcttctgctaaacacgaactcgctgagaagattttccaatctgcaatg

SEQ ID NO: 114907 - DNA, 317 bp, Arabidopsis thaliana columbia
gattatcaaagagagagagagatagagtgaaaaatggaagagaagagtgcttcacaattgggacttgtggtgtttcttctattgtttcttttggtcccaacccatacggagtcttccctgccttctcaacaagaatcactcccagtgatcggatcgtcaacgaggttgatgagtacctataagaccaacagtaacatagattttgagggatcaatcagtggacaagccggtggtggtcaacaaaatccctagtttacctttctccatcgtcgttcccgattactatggaggctactacacttcaaatatatgtatta

SEQ ID NO: 114908 - DNA, 326 bp, Arabidopsis thaliana columbia
ggaagagatcgagagaagaatagtttgatcatcttgtgagaaaaataatggctgtttcagtgatgctatcttcggtgacattgaaaccagctggtttcacggtggagaagacggcggctagaggattaccgtcgctcacaagagctcgtccctccttcaaaattgtcgccagtggcgtcaagaagatcaagaccgacaagcccttcggaattaacggcagcatggacttgagggatacggtgtttacaagtacgtcgacaagtatggagctaacgtcgatggatacagtcctatttacaacgagaacgagttgtcagcgattggtg

SEQ ID NO: 114909 - DNA, 226 bp, Arabidopsis thaliana columbia
  unsure (1)..(226): unsure at all n locations
tggaactaanaaaaaaaatgagtaatcaaaaaaaaaagcggccgctctacaagatgatcgaagcttaagtagtcgtgcatacgacataatacctctacaatgtcgtcaacaatcatcacatcagtggtcgtcgtataacatcgtcacgactaggacaatgctgtcattaaccatcataaccgtgctgcacaacatcctttcttcaccaggtggcgtaacaacgaag

SEQ ID NO: 114910 - DNA, 301 bp, Arabidopsis thaliana columbia
ctctcctctacccctcagcttctactggatctctccagcagacacgatcttgttcggagagattcgtaggggaccgatctatcacggcttcaagggcacacacaaatggaccacgacaagacaggatgccaaagcccacctgaaggtcccaagctatgtactaacaactgcggtttctttggaagcgctgccacaatgaacatgtgttccaactgtcaaaacgatatgttgttccaacacggacaaggcgctcagtttgcatcagcactgtctggaagatcggtcatccaagcaacaatca

SEQ ID NO: 114911 - DNA, 418 bp, Arabidopsis thaliana columbia
gaacgaggttgacattaggcgaaaggatcttctgccggtatatgataattttcacagtgtgtataccagtatgcgcaacagaggattttctggggaaagagattcagattcttcttcttcttctgaccctggacaagttaaagaaatgcatccattcaatggtatggtttaccccgaagatgaggaaagaagagggagtgcccattttgcactaactccaaaccaaaatcctcataccggaattgtaacatttaaacagcctgtagtttccatttcttctgctgtgaaagacactgattatatagacgacgacgctcatgtcttgccaaagaacgcctccctgcccgctgaaacaaaaattgaaaacagcagtgggataagtggagattcaaatgtaagttctaaccgttctgatatg

SEQ ID NO: 114912 - DNA, 379 bp, Arabidopsis thaliana columbia
gaaggtcacggcgagacgagccgtttatcattacgataggtgtcaagtggaagtgcagtgatgtatgcaagctgttgatgaagatattgatttgaagcaaatgagagacatagctgctgctaaaaagcgttgggatggtttgttaagggaaggaaaagtgaagcttcttacaccaagagaagcaggctatgctatttctctttcaaacaaacctctccttgatgttcgtccctctagcgagcgcaacaaggcatggattaaaggctccacttgggttcctatcttcgacaatgatgacaaccttgacgctggaactctttccaaaaaagtcactagttttgctatggggggatggtggagtggagcaactacactatct

SEQ ID NO: 114913 - DNA, 216 bp, Arabidopsis thaliana columbia
  unsure (1)..(216): unsure at all n locations
gaaagagacgcatttaaaagcaaatgaccaacaagcgacttcaccatccatctcttacaaccctccaagaacactggctgttttccttcactttctagacaaaacanaaaccatcttctagagaaaataaaccaacatgggagagacagaaaccatggcaacaaactaactaaaccatagtatatattatctatactaatattatcggcccatggg

SEQ ID NO: 114914 - DNA, 383 bp, Arabidopsis thaliana columbia
  unsure (1)..(383): unsure at all n locations
cgagagaagctctatcttcttgctgttgggtattacagaagtgggaattactcaaggagcaggcagctcgtggaccgctgtatcgagatgcaagctgattggagacaagctttggtcctaaagaagaccatcgaagacaaaatcacaaaggatggtgttatanggatanggatcacggctacagcctttggagctgtgggtcncatagccggtggtatcgcagcagcgatgtctcgcaagaaatgaaaaccacaaccatgacttcttctctgtgtatacaatggcagtttactttttttcacatttntttcttcctctttgagtgtgttctccactgcttacgtcacaatctatgatatagaaaaatcgaagctatttgcctc

SEQ ID NO: 114915 - DNA, 365 bp, Arabidopsis thaliana columbia
ggagagaatctttccggtgaatgggaaatggcaagaagaaggatacgagtacgatgaagttgagttagagcgggagagagagacataccgttgaccactaaagacgagagctttagagagagacgcaacaatggagctgagtatttccgagagtcgaagcagatcaattcgttgcattgtgaaacttggaggtgcggcaattacttgcaaaaacgagctggagaagattcacgatgaaaatctggaggtcgtggcgtgtcagttacgtcaagctatgttggagggttcagctccaagcaaggttattggcatggattggagcaagagacctggaagctctgagaattcctgtgatgtggatgaca

SEQ ID NO: 114916 - DNA, 305 bp, Arabidopsis thaliana columbia
  unsure (1)..(305): unsure at all n locations
gatcgtgcgtctgtacggaccacaaaaggctctctctttatttctctgtgagatttttttaggatctgagagagccaaagatcatggaggaaagccaagaacttgccttgacccagttgagaaaatcggtcgagaaactctcttcttctactgagggatatgacaaaccaacattgatgaggttcctggtggcaagatcaatggacccagtcaaagcancacagatgtttgtagattggcaaaaatggagagcctccatggttcctccaactggattcatccctgagtcagaagtgcaggatgaa

SEQ ID NO: 114917 - DNA, 407 bp, Arabidopsis thaliana columbia
gaaagccttaaaggagactcagcattccaatctcgttcgaaaattcaattccgagtaacccatttaggagttcacttacttgaaaaagtgaagcaaaatgcagaggagaaaactgtcgtgtcttattctccgatcctggtggcgagacttgagaatgttggtcttcattccatgttcactgaccagcaaaaatttaaccaattatgtatagaggctctaaatgtggatcacaaatgggcaggggcaccctttgcagccatgcttcgtcagcatcaatcaagttcaagtgacgcaaatggttgtctattcaaatgtgtattcattctagtatcaagtggttccagcgtcacacaagtcaagcactcctcgatagttttgcagccagtcaatttgaacctagacgaaga

SEQ ID NO: 114918 - DNA, 174 bp, Arabidopsis thaliana columbia
gagatacacacatttgagactcgatcatccacaagaaattaagaaggtcagaacatcaagtggtgggaagaagatccgagtggaagtgtcgcctagcggcaaaattcatgcggaaactaatcatgtttcgcttcgtgacttacaccactccgataaggctcacgaggagtccaa

SEQ ID NO: 114919 - DNA, 406 bp, Arabidopsis thaliana columbia
tggagaaacactttagcacggtgcgacaagatggcgagctcagtgacgctgcttctatggagtcttcttcttctcggtacactaagcgctattcaggccaaaaagtctaaggaaaacttaaaggagatcacacacaaggtttattttgatgttgaaattgatgggaaagcagctggtcgtattgtcatgggtctatttggcaagacagtccccaaaactgtagagaatttccgagctttatgcactggggagaagagttaaaagcgttgccgtacactataaccggagagagcgccgattccgtcgtcagaagaatcctcgtaaacaatcatgggtaaggtacacggttccttggctcgtgccggtaaagtgagaggtcagacaccgaaagtggcaaagcatgata

SEQ ID NO: 114920 - DNA, 405 bp, Arabidopsis thaliana columbia
caagtggctgtgatggcgatggagagcctcgtcggagctccggtgcggtggagaaggaggaagaaatagtgaaagatgaggagaggagatccaatgcgtcggtgtgttcggtggaaatagatctggagcttggattgcctgagaaagttgtacatttgtcgcaatctgagagagattgcaggatttgtcacatgagcttagatgcagcgaatcttgaatctggtgttcccattgagcttggctgttcttgtaaagctgatctcgctgctgctcataaacactgtgctgagacttggttcaagatcaaaggaaacaaaatctgtgaagtttgtgggtcgattgcgggtaatgttgttggaagtgttgaggtggagtctgaggaaagccggaatgaagcaaatggtg

SEQ ID NO: 114921 - DNA, 138 bp, Arabidopsis thaliana columbia
taaggctgcgaaatcactattgtttggtatagctgcgataatattacagacaggtaaggcgcaatacaatcagccttcggtacggctatgtacaagactacagatcggtattgctgcgagacgaccacacaacggtat

SEQ ID NO: 114922 - DNA, 289 bp, Arabidopsis thaliana columbia
cggcatcaaaaggcaagatcacacaaacgtttcaatggccgcctcaacaatggctctctcctcccctgctttcgccggaaacgctgtgaacctttcccctgcggcatcagatgtccttggtaacggccatgtgacaatgaggaatactgttacgaagccaacgggtccatcaggcagcccatggtacggatccgaccgagtccagtacttggggtccattcactggccactcacccacctaacttaccggaaagttccctggagaccaccgatgggacacacctggtct

SEQ ID NO: 114923 - DNA, 164 bp, Arabidopsis thaliana columbia
cggggagaagagatctagagaagaatagtttgatcatcttgtgaaaaagataatggctgcttcagtgatgctatcttcggtgacatgtggtcgagctggtttcacggtggagaagacagcggctagaggtttagcgtcgctcacatgatctcgtgtctccttca

SEQ ID NO: 114924 - DNA, 295 bp, Arabidopsis thaliana columbia
gcaatccaaacctgggtccgaacctatgttgaacgctactatccaaacccgaaccttatcaaaacagactctgagctccaatcttggtactcagaatcaatcaacgtcggccacgctgacctccgcgacgctgattggtggccggagttatcaaccgtcgacgacctcgtgtcgattctaaccactctaatctggctcgcctctgctcaacgtgccgctctaaactttggacaatacccttacggtggctacgtcccaaaccgaccaccgttgatgcggcggttaatccccgacg

SEQ ID NO: 114925 - DNA, 238 bp, Arabidopsis thaliana columbia
ggagaagatatcgagagaagaatagtttgatcatcttgtgagaatgataatggctgcttctgtgaggctatcttcggtgacattgtagccagctggttgcacggtggataatacggcggctagaggattaccgccgctcatgtgatctcgtcactccttcaatattgtcaccagtggcgtcattaagatcatgatcgacaagccttgtcggaattaggcgcagcatggactttatgga

SEQ ID NO: 114926 - DNA, 195 bp, Arabidopsis thaliana columbia
gggagatctcagcgcttaagaccttcacatcttgtatcttcttatagattactttcatagaagagagagataatgagggatggagaggatggggaagtttctagtagtagacttgtcgatgcgggggggtgatcagagagatgatatcatggctctaagttgtgaggcttgtgatagttggggcttctttgagat

SEQ ID NO: 114927 - DNA, 265 bp, Arabidopsis thaliana columbia
caaaaaaaaaaattaaactcaaaaaaaaaaagaaacaaatgaatttaaactccaatcaagtaaaaacaactctcaaaactcaataccagacgaaccaaatcaccgtaagccattctactgcaccgcttcatttacaacaccagctaccatcgacgatctcatcgcaagtgccaacgttgtatctgaagctgctcaatccccaactcgttacgaatcatatccactcgacaacggttatgtctcccgagcccctgctcatactctt

SEQ ID NO: 114928 - DNA, 430 bp, Arabidopsis thaliana columbia
cacgcgtcagtacgaagacgacagaaggggagagaaacaaagagagcgataaagagatgggtggagaagagagatcaggagatggagaaaaaagaggggaagaagtagttgatgctggttctctcttcgtccttaaatccaaagggacatggtggcactgcggattccacttgacgacgtctatagtggcgcctgcgctactgagtctaccgtacgccttcaagttcttaggatgggctgccgggatatcttgtctggtcggaggagcagccgttactttctactcgtacactcttctttctcttactctcgaacaccacgcttctctcggcaaccgttacctccgcttccgtgacatggctcatcacatcctcagtaattctttttctttttacatttgctctttcctataatcaaagctgggacaaat

SEQ ID NO: 114929 - DNA, 141 bp, Arabidopsis thaliana columbia
aggtacggctgcgagcggccgctcaaaaggatccagccgtaagtacacgataatgcgatatcgcagctcttcgacgatgtcacggatattgatgtcactggacgtcattttggatactgctgcaagggaaaaccctggggt

SEQ ID NO: 114930 - DNA, 381 bp, Arabidopsis thaliana columbia
cgtcagccctcaagtcggtgctgtaaaagatgaaagcttggggaagcatggttgcgaactcagactcgcagtctgatatgtctagtactattcgatatgtcgactgtccaaattgcaactccttttatgggagttgcctgatgtaacacagtgtgagttacatgcgtcaaatcctccattgtctatatggagtctcatgccactagagagaaagcgtagaactacattgtagttgcggaacccaaaggagcagtgctactgttgttgtcggaggggtttatccgtggctatcgtcgaggttatacgtaccgtttacccgatggcgttcataacgataaagggcgtgctgactttctgcagtaccacgcttctgctattcat

SEQ ID NO: 114931 - DNA, 388 bp, Arabidopsis thaliana columbia
gacccatttcttggcttacaacaacaaatcttaaacgttttactttgtgctgcactactcaacctcaatggccgcctcaacaatggctctctcctcccctgccttcgccggtaaggccgtcaagctttcccccgcggcatctgaagtccttggaagcggccgtgtgacaatgaggaagactgttgccaagtcaaagggcccatcaggcagcccatggtacggatctgaccgtgtcaagtacttgggtccattctctggcgaatcaccgagctaccttaccggagagttccccggagactacggatgggacaccgccggactttcagctgaccccgagacattcgcaaggaaaccgtgaactagaagttatccacagcaaggtgggcca

SEQ ID NO: 114932 - DNA, 323 bp, Arabidopsis thaliana columbia
ggagtcaacacaacatcttagcagctcaacatgtccgggtcgtgcgtactggtgatcagatccagtttttggcccatggattctgtactgaccaatcagcttaggacttgatccttccgtacctcactcacaactacagagtcgacctccatgacctagattgcgctggcaatgtcgacaccgaatacctcgatttcaagcgttacacatctcactatccttacgtcggtgatcttcccaccatcgatgatccacccgtgatcgagtactgtacgtacctaggccactctgtgtcggctatgatcggtgacagctcgtcgatt

SEQ ID NO: 114933 - DNA, 195 bp, Arabidopsis thaliana columbia
cggtactgctgctacaagacgacacaatggtacggctgccataaaacgacataatggtactgctgcgataagactacatacgggtaccgctgccacaagaccacacacaggtaccgctgctacaataccacagaatggtacggcgcaagatgacaacataatgctacagctgctataagacgacataatggtaca

SEQ ID NO: 114934 - DNA, 186 bp, Arabidopsis thaliana columbia
ctggtacagctgcaacaagattccagtcagtggaagtcgcatagattcatacattcctctgcagattagtgagttcacatctgtagacgcattgaatcagattcacattgcacattcagcatttctcgatagaatgcttctccagcttcgctccacttgcaagtactacagctgttaccctaatga

SEQ ID NO: 114935 - DNA, 219 bp, Arabidopsis thaliana columbia
tacagtagactacagaacgagaaggctgctacaatacgatctaacgggcaggggagatagagagaatgataatgtggtcatcatgtgagattaataatggctgcttcactgaggctaacttcggtgagattgaccatatatggttttacggcgtggaacacagcagctacaggattaaagttgcttacaagagctcgtgcctccttcaaagttgtcgcc

SEQ ID NO: 114936 - DNA, 404 bp, Arabidopsis thaliana columbia
tccgcccaagcgaacgcggacgcgtggtgcggttgcgtgggcggacgcgtgggcgagaccacgacagaaggggaccaaatccaataataataaaataagagaagaaaatttcccaaaatcaaaaaccgtgaatcgaatcaaaatcctttctaatatgaatgaaataacccaaaacagcacaaaccgcagcaacagcattgccttctttcaaaagaaccttaaacacaaatccaaacacttctcttgtaatcttacgagcttcaacaagcaattaccttctcgatttcccaaaaaacgcaagcaacagaaacaccgatatccagatcaccataaccgtcggaaccgcaaacgcagtcgccgcaaccatcgacatgggtctaaacacaggtccctaaaacacagac

SEQ ID NO: 114937 - DNA, 278 bp, Arabidopsis thaliana columbia
aagacgacagtagggatttcatgagcgaaaataaagagccaaacctccaaataagcggccgatctagaggatggacgctcaagtggatctaaatgtaacttcacatctctgcgacatcgtcacccatcttcaattcaatggacgtcgatttaaatggtcgtcactgtaaaacaccttgagtgagaaaactttgtcgtcatgcaacataatcgccttgcaccagatggcgttttcaccaacaggcgtacaaccatagacgttcgcaacaattgcgcatc

SEQ ID NO: 114938 - DNA, 394 bp, Arabidopsis thaliana columbia
  unsure (1)..(394): unsure at all n locations
tgggacccatttcttggcttacaacaacaaatcttaaacgttttactttgtgctgcactactcaacctcaatggccgcctcaacaatggctctctcctcccctgccttcgccggtaaggccgtcaagctttcccccgcggcatctgaagtccttggaagcggccgtgtgacaatgaggaagactgttgccaagccaaagggcccatcaggcagcccatggtacggatctgaccgtgtcaagtacttgggtccattctctggcgaatcaccgagctaccttaccggagagttccccggagactacggatgggacaccgccggactttcagcntgacccgagacattcgcaaggaaacgtgaactanaagttatccacagcaggtgggccatgctc

SEQ ID NO: 114939 - DNA, 333 bp, Arabidopsis thaliana columbia
tcattgaacaaaaaaaaaaaaaaaaaaaaaaaaaaaaaaaaaaaaaaaaaaaaaaaaaaaaaaaaaaaaaaaaaaaaaaaaaaaaaaaaaaaaaaaaaaaaaaaaaaaaaaaaagcggccgcccaaaaggatcaaagctaacttacccgtgaatgcaacttcaaaacccttcaaaagggccaccaaaattaaattcacgggccgtcgtttaaaaacttcctaacgggaaaaaccctggggttaccaaacttaacccccttgaagaaaatccccctttcccaaactggcgaaaaaccaaaaaggcccgaaccattcgcccttccaaaaatttgc

SEQ ID NO: 114940 - DNA, 310 bp, Arabidopsis thaliana columbia
gacccatttcttggcttacaacaacaaatcttaaacgttttactttgtgctgcactactcaacctcaatggccgcctcaacaatggctctctcctcccctgccttcgccggtaacgccgtcaagctttcccccgcggcatctgaagtccttggaatcggccgtgtgacaatgaggaagactgttgccaagccaaacggcccatcacgcagcccatggtacggatctgaccgtgtcaagtacatgggtccactctctggcgaatcaccgagctaccttaccggagagttccccggagactactgatgggac

SEQ ID NO: 114941 - DNA, 362 bp, Arabidopsis thaliana columbia
gcgtccggcgaaaagtcgatacagcgggaaaaagacggcagtaaggggagagggataaagccatgtctgcgattgataatcctagcatcagtagttttggtggttcacgtcgccgcatcatctagtggcatattatcggattcgattcatcagtcccgatccgagtggtcaccggatggtcgctgggacgtagaacactctgtttcctaaatcttatgtcaatctcgtcacgttctctcattcgctcgcttcactcaccgatctggtgcaacatatcattgcgtgacggagatgaagcttccagtctcgattttcaaggataatctgtatatgattagatccaccagtatgaaacgcttatc

SEQ ID NO: 114942 - DNA, 326 bp, Arabidopsis thaliana columbia
cggctcgaccagcgtcacccagctcgtacgtgcataaacacaaaggtgcgtgcgaaaacaagaagggaaaagatgaaaaaatatttgatatctgtgaaaaataatggtgctcatgagcacttcggtgcattgaaccactggtttcacgtggaaaacgggctaagattacgtcgccaaaagccgtcctccttcaaattgtccagtgggtcaaaaataagacgaaagcccttcggattaacggcagcatggacttgagggacgcgtcaccctccggcaaaaggcaaggataggtgttaaaagtactcgacaagtatgagcaacgtcat

SEQ ID NO: 114943 - DNA, 366 bp, Arabidopsis thaliana columbia
cgtccgcgaagaaacgacagaaggggatggttttgtgacttgtgtgcgagtttgtacaagctttactgatatagaaatgccgttgccgatgcagtctctcttcctctgtttctgattcctgaataaatttgttaaacgatggagaagatcgttcgttcttcttcgctgattctacttgttggcctccttctttttatgaattttcacggatttgtccggatcgccgaagcaacgaagcgacggatcgagatctccgatgacctagacgacgttgaagacaatgaagaagacgagtcatggaaagagtgggggaagaaagcaacgaccccggaatttgattcgcctccggatttcaccaatatggga

SEQ ID NO: 114944 - DNA, 104 bp, Arabidopsis thaliana columbia
cgatacggctgcgacaatacgacacatggataccgctgccattacaccacatgacgatacggctgcgagaacaccacagatcgatactgctgcgagttgaccac

SEQ ID NO: 114945 - DNA, 267 bp, Arabidopsis thaliana columbia
ggagatcgaatcaagagtagtttgatcagcttgtcataaaaataatggctgcgtcactgcagcgatcctcgctgccattgcaaccagctggtttcactgcacagaagacagcagcgagacgattagcgtcgcgcagaacagctcatctctccttcacaactgtcgccactggagtcgagacgatcaggtccgaaacgcccttcggtactaacggcaccatagccttgacggacggcatcgactcctccggtacagcaggcaagggat

SEQ ID NO: 114946 - DNA, 398 bp, Arabidopsis thaliana columbia
  unsure (1)..(398): unsure at all n locations
gcgaccccaggtcaggcgggattacccgctgagtttaagcatatcaataagcggaggaaaagaaagtgagcgcgaaggctaaggctaagcccgttcctcgtgccactgctgctgcaactaagaggaaagctgttgatgcgaagcccaaggctaaggctagaccagccaaggcagccaaaacggccaaggttacatctccggctaagaaagctgttgctgccacgaagaaagttgctacggtggccacaaagaagaagactccggttaagaaggttgtgaagccaaagacggttaagtctccagcaaagagggcttcttctanggttaagaagtgaagttagggtttgtaggtagaagaatggttaacgatagtttagacttgtataattcaatcatct

SEQ ID NO: 114947 - DNA, 433 bp, Arabidopsis thaliana columbia
ggtccggaatatcgggtcgacgcacgcgtccggcaagaagacgacagaagggggagaaaggcaatggagtcggctaaatcaatcatcggtggccaccaaaatgtcatcctgatgcgtcatggtgatcgactcgacaatttcgagccactctggacttcaacagctgcgagaccgtgggatccaccgcttgctcaagacggtaaggatcgggcctttagaactggtcagagaatccggtctcaacttggggttccgattcaccgtgtcttcgtctcccctttcctccgctgcatccagaccgcttccgaagtcgttgccgccctctcagccgtcgatttcgatcccattgctatgtcatctaaagacgtgctttccatcgacaatactaagatcaaggtggctattgaatttggatttgtccgagatacgcacc

SEQ ID NO: 114948 - DNA, 320 bp, Arabidopsis thaliana columbia
gggtactgtgcacgtacaggacaactcaacttggagtatgacattatgcccagcgggatccttgagtcgtttctttagaatcaaacaaatcaaattcttgactggtcacagagattcaaaatcatcaatcacataccctctgtactctgctacatgcatcagcagtgggttcaactaatcagtcacaaggatattacaccagcaaatattcttcttgatgatgacataaatgcgacactcggtgattttggacttgcgaagctatgtgactacgggattgactctcattcctcgaatgtgacaagtacatatggatacaa

SEQ ID NO: 114949 - DNA, 347 bp, Arabidopsis thaliana columbia
gaaccacgacttgtgttgtggcttaaacacagaaatggcttctttaccgttcggagtttcgaatctatgcagaaatcacgaggttctgtctgcgtctgtaaggcttcttccggttgggcgacaaaccacaggattcggagctgcgaacaaagtcctaaaaagaatccaaggaactaaaatgtcaacatcaattgaaaagggaaagaaacagagaatgagatgtacaattaactcaaactctactgaaaactgaaaacaattctgcaacaaaaccaaaaacaacccctttaatttcaccaagaaaggagttaaaatgaaaagaattggaattaatgcaacttggaacc

SEQ ID NO: 114950 - DNA, 207 bp, Arabidopsis thaliana columbia
ggaactttaccaaaccgaaccattggaacaattaggagaattcataaatggaacctcccttgaaaaaagtcaggttcagaacctaaacatgtgaagaaacaagacagaagagtgaaactcaacaggtcacaaatgtgaggagtgacatatagcacactctcaagagagagattgcgcatgagatactccacaaccccatagaaagtg

SEQ ID NO: 114951 - DNA, 355 bp, Arabidopsis thaliana columbia
tgcgatgcgacaacacaacgggagggggcagcactcaaacggataataagcagattctctggaaaaagaagaatacgactgattcaactgacgcaaacgtcgcagccagtgccgtcggctcaatgcagcctgtttaacgatgagttaacaggaagtctgtgcttcactagcccgatgcccaccgacgacgatgacttcactagcatagctttgatcgcgttcaacgccaccttcgatgctatcggcaacaagaacatggagatcagagtcggagttcacgctcagcttggtcttgtagacgatgtgtccaagcatctcgctatgattcgcgacgaacttgaaggttatgctgata

SEQ ID NO: 114952 - DNA, 341 bp, Arabidopsis thaliana columbia
ggggcccaaccgcgcatacgatcgtccacatcatggcggcaagatcccactagccactccccccgatccattgcgcctgggaccaatagtccgccatatgattcacatttcccgagagaacctcattgtggttccgattccgacaatcgtctctcgtttccgggtgtctggacactcggaatgccgtttccatgctttgtgatccgtacatgccgactctgcgcgatttgaggatttccggattgctttttcaaccgggtcgacagtctctccccaagatgtctgagcgtcgtactcaatgtgcattctgtacttcagcgatcaatggcatcggtatcccg

SEQ ID NO: 114953 - DNA, 308 bp, Arabidopsis thaliana columbia
gaatccatcacaaacaaaacacacatcaaaaacgattttacaagaaaaaaaaaaaaaaaaaaaaaaaaaaaaaaaaataaaaattcaataagttttgattcaaaaaatacaaaaaacgcggcagcgctaaaggttaaagactctatatccgcccgctctaaaggttccagccttacttgcgcgtggcggaaattttattccccttcgatcgtttccccaaatttcatttcccgggccttcgtttttcaacgtcgttaagggaatagccctggctttccctaactcaatcccctttcagcccatccccg

SEQ ID NO: 114954 - DNA, 363 bp, Arabidopsis thaliana columbia
ggagaagagatcgagagaagaatagtttgatcatcttgtgagaaaaataatggctgcttcagtgatgctatcggctgtgacattgattccacttggtttcaaggtggagaacatcgaggctataggattactgtcgctcacaggagctcgtttcacattcacaattgtcgcaaatggcgtcaataacatcaataacgacaattgcatcagaattaactgtagcatggacgtgaaggaccgagtcgacgcctccggctgacacggcaaaggatatggtgtttacaaatgcgtagacgaatatggagctaacgtcgatagatacagtcgtagttatacgagaacgactggtcatcgagtggtgac

SEQ ID NO: 114955 - DNA, 336 bp, Arabidopsis thaliana columbia
ggaacacttaagtaatggttacaaggacatcaaatttatgtcatcttcttctgtctttggttattctgctcttgtttatcttatctcaaattggattcgcccaggctaaacgtctccaacaaaggaacaaattgagtttggattgcgttcctcttcctcctcccctccacctcttcgtggtatcgttaaaccacttatcgcttcgtttcactccgcatcgcctaatgataatggctcataagacataaatcatcattctgcaggataagacgtcacgatagttttttaagtgttttgttataaatatacatgttgtcctcatactttttagttata

SEQ ID NO: 114956 - DNA, 345 bp, Arabidopsis thaliana columbia
gatagatcgagacaagaatagtttgatcatcctgtgagaaaagtaatggctgcttcaatcacgcattctgcggtgacactcacaccatctggtttcacggatggagaacacagcagccacatgaatagagtcgctcacactagctcatcactcattcacacttatctcaagtgacgtcccaaagatgtagatcaacctgcccttccgacatcacggcaccatgcacatgaaggacagcatcgacacctcccgcgaacctggcctgggatcctgtagtcagccgtacgtcaacgtgtatgcaactaacatcgatggactgattcctatctacaccgagatcaaatg

SEQ ID NO: 114957 - DNA, 290 bp, Arabidopsis thaliana columbia
aacaaaaaaataattaatccaaaaaaaaattacatcaagaaaaccaaaaaaactattaaaagaaggattcaacatatttgaaacacgcaaagatccataacaagatacatcgcacatcaaaaaaaaaatcggcccccctaaaggttccaaccttacgtaaccgtgcatccaacgtcaaaccccttcaaaagtgtccccaaatttcatttcacgggccttctttttaaaatttcttaacgggaaaacccctggctttaccaaacttaacccccttgcagcaaatccccctt

SEQ ID NO: 114958 - DNA, 432 bp, Arabidopsis thaliana columbia
  unsure (1)..(432): unsure at all n locations
gtagaaggaaaaggaaacgtgggagaaacggtacaagacttaatggcggaggacaaattaagagatcaggatcagggtcaagtagaagaagcatcaatggagaatcaaagaaactctattgaggttggaaaagttggaaacgtagaagatgatgccaagtcatcatcatcatcaagcttgatgatgatcatgaaggagaagaagaggaagaagaggaagaaagagaaagagaggtttggtgtgttaaaagggttttgtgagggtctagtgaggaacatgatagctcaacaagaggagatgcataagaaactcctggaagatatggtgaagaaggaagaagagaagatagcgagagaggaagcttggaagaagcaagagattgagagagttaacaaagaggtanagattagagcacaagaacaagccatggct

SEQ ID NO: 114959 - DNA, 280 bp, Arabidopsis thaliana columbia
tgctaaaaaaaaaaaaaaaaaaaaaaaaaaaaaaaaaaaaaaaaaaaaaaaaaaaaaaaaaaaaaaaaaaaaaaaaaaaaaaaaaaaaaaaaaaaaaaaaaaaaaaaaaaaaaaaaaaaaaaaaaaaaaaaacgccctcccaaaagaatccaacctaacttacccttgaatgcaaattaaaaccccttcaaaattgtcaccaaaatcaaattacaaggccgtcttttaaaaaattactcacgggaaaaacccgggttttacccaactaaaaccccttaaa

SEQ ID NO: 114960 - DNA, 487 bp, Arabidopsis thaliana columbia
  unsure (1)..(487): unsure at all n locations
tcggaactccgagtcgacccagcgtctgcaataagacgacataaggggacaaaaggaaaatatgagtgaggagaagaggaagcaacacttcgtgctagtacatggtgcgtgccacggcgcatggtgctggtacaaggttaagcctcttctcgaggctttgggccatcgtgtaaccgccttagacctagctgcttccggtatagacacaaccaggtcaatcaccgacatttctacatgtgaacaatattctgagccattgatgcagctaatgacttcattgccgaatgatgagaaggttgtactcgttggtcatagctttggaggtttgagtttagccttagccatggataagtttcccgataaaatctctgtctctgtcttcgtgactgcattcatgcccgacaccaaacactcaccatcgttcgtcgaggaaaagtttgcaagcagcatgacnacagaaggatggatgggctctgagctcgagaca

SEQ ID NO: 114961 - DNA, 131 bp, Arabidopsis thaliana columbia
attcaaagtacatttttatttatatcagtgacaccattttctcgcagatgcaccgattttaagagagaagaaactggagtcgctcgataagctagggcctcatgtactcgtgcatgagatgtgatagctct

SEQ ID NO: 114962 - DNA, 158 bp, Arabidopsis thaliana columbia
ggagaagagatcgaaagaagaataatttggttaacctggtagaaaaattatgggcggcttcattatgccaacctccgtgaaaattaaaccaactgggttcaacggtgaaaaaaacggcggcaaaagaattaccttcccccaaaaaacctcttcctccc

SEQ ID NO: 114963 - DNA, 158 bp, Arabidopsis thaliana columbia
tgggactcgtggttcgtcgcaactctctatactgagtcgtattaacgacagaagggggaaaaagacaataattcgaatcttacacttgcttcattatctcttatccgtactttatcgacgtcaccaccctcagtcacggactcacctgcagctcagat

SEQ ID NO: 114964 - DNA, 362 bp, Arabidopsis thaliana columbia
agggaaagtggagtttgctgtcagggccaacggttatcctcggcggagctgtaattgctgccgtcgccgtcggattcgtcttgcaaaacgtaacgaaaggggagcagaatatcactgtctcaacatgcaagtgagaatacaaatggacagatgctacaagatgtgatgatcatgtgatttgatacaatttagctcttgcagtgtacaagctcaataatgcttttgtaagcttttgaatatacatatcgttgtggtgtattcagattcctgttactaataatgcaatttcaatttccaaaaaaaaaaaaacaaaaaaaaaaacaaaagcggccgatctataagattcaagcttacgtacacgt

SEQ ID NO: 114965 - DNA, 353 bp, Arabidopsis thaliana columbia
  unsure (1)..(353): unsure at all n locations
cggcctgccaaaaaaacaacaaaaggggaaaaaccaaaaaaaaaaaacaacaaccaaacactcaattccccaaaaccttaaaaaaaaaaaacaaagcaggtaaaataaaaaatctcagtgcgattgccgtctccggagccgtcctcagtgggcttggttcttcgttcctcaccggangcaagagaagtgccaccgcattgacaagcggcgtangcactggagctcagagagttggcaagaaaactcttattgtcgctgctgcggctgctcagcctaagaaatcttggatccctgccgttaaaggtggtggcaacttcccttgacctgaatggctcgatggctcgctaccagga

SEQ ID NO: 114966 - DNA, 252 bp, Arabidopsis thaliana columbia
gtcagagataatggcgtacagtgcgtgtttcatagaccagagcgcattggtgtcatcatctgcactatcgtcatcttcctcctcagctcagcgtcacatgtcgcactccacacctgttcagtatatcgtgtcactcagcagtctcatgagctacgatagctcagccgtctcgcgctgtcatggtcgtagtctcatctgctgaaccggtactgctggttccatcatatctcctgctgatgggtcctatcgtga

SEQ ID NO: 114967 - DNA, 461 bp, Arabidopsis thaliana columbia
  unsure (1)..(461): unsure at all n locations
caagcctccattatggcgccaaaaaaccacaaaaagggaaggtttgaattcctcctccaaaccattaaaaagattggttgaaggaaaccacagaaatcaaccatggctccgtgcaaaaacttggagaaagctaaggctgcanganaaggtagccaattggaagctaacaagaaagctatgtcgattcagtgcaaggtttgtatgcaaacattcatctgcacgacatcggaagtgaaatgcanggagcacgcggaggcgaagcatccgaaagccgatgttgtcgcttgtttccctcacctcaagaagtgatgaaagctattatctcaactataaaggattccaatgtataacgtatggatcctcatctttcctatgtttgtatcaaagtctcgacaaattttatggtttctatttctctctacttgtttcaacaataagtctcttgctatgattatataatg

SEQ ID NO: 114968 - DNA, 125 bp, Arabidopsis thaliana columbia
ctgggcatccgaatggaacatacggtcatcatagtctaggaacgagtgttatgcagcatcagtgttgctttcttcggcgactacgacgatggaatcggctagccttgggagacttagaacggatt

SEQ ID NO: 114969 - DNA, 158 bp, Arabidopsis thaliana columbia
tcgcaacactctatagtgagtcgtaataacaaagaacggggacaacgcagctcaggctttaataaagctaatacaagttattgggaaacagagatgggtttggttacagatgatgttagagctatggcagagatttacaccggagatcacacatgtag

SEQ ID NO: 114970 - DNA, 282 bp, Arabidopsis thaliana columbia
ggccacacaacggagactacagatatgatattgtggagtttgatccaatagagtatcatgactgtcactgtccctgagtaaatgaaaacgttgctgctgccggatctatcaccaatatctcgggtacgtcaagttatgccgatgcagtttgtgagtcggaagaagctcttgatgcccatgactcgatccagtcgcttgaaaaccctcagaatcagacaatggaatcagaatcagctgcatctctgtgcagggatgatcaccggactccttcccagaagctca

SEQ ID NO: 114971 - DNA, 317 bp, Arabidopsis thaliana columbia
cggatatcgcgggtcgactaagcgtctatagtgacgtcgtgttaagcagcgagaggtcgagctaccgggagacatcgagagggtaatatttcgatcatcctgtgagaaggtacatcgctgcttcagtgatgtcatggtcggtgaccgtgaatccagctggttgcacggtggataagaccgccgcgataggattaccgttgctcacgagagctcgtggttccatttaaattctcgtcagtggcatgtcgaagatcatcaccgacgacccctacatgaagcttccgtagcacgcacttgagggagtgcttcgacggtca

SEQ ID NO: 114972 - DNA, 106 bp, Arabidopsis thaliana columbia
gcgtaatacgacgcaacaccctatagagagtcgtattaacgacagaaaggggagctcaaactcaaagtccaccaattgccgttctcggtcacacgggatgattcag

SEQ ID NO: 114973 - DNA, 343 bp, Arabidopsis thaliana columbia
  unsure (1)..(343): unsure at all n locations
ggtgacgttttaaattaaagccccaatagcaaagatagaaaaaagaaactttatttctcttagtaatacaataatccttatagaatgggtcaagcaagatatcttttttgtttgtttcccttgttaatcgttataaacttgtttctcaaaattatgtttctggttagtttaagagctatgaaggatacgactaagaagaagaagaagaaaaaggatgaggcttgtaaggtttcaccgagaccttcgatctctgangagactgtgaaagtanaggataaagaatggtggaatagaatgtctgaatcgagcacaaagaggagtggtagtagcagtagcaacaaca

SEQ ID NO: 114974 - DNA, 407 bp, Arabidopsis thaliana columbia
gacccatttcttggcttacaacaacaaatcttaaacgttttactttgtgctgcactactcaacctcaatggccgcctcaacaatggctctctcctcccctgccttcgccggtaaggccgtcaagctttcccccgcggcatctgaagtccttggaagcggccgtgtgacaatgaggaagactgttgccaagccaaagggcccatcaggcagcccatggtacggatctgaccgtgtcaagtacttgggtccattctctggcgaatcaccgagctaccttaccggagagttccccggagactacggatgggacaccgccggactttcagctgaccccgagacattcgcaaggaaccgtgaactagaagttatccacagcaggtgggccatgctcggagccctaagctgcg

SEQ ID NO: 114975 - DNA, 373 bp, Arabidopsis thaliana columbia
ggatcagatctcaacgacgacgagccatggcttcaactttcagcggcgatgaaactgctcctttcttcggattccttggcgctgccgccgctctcgttttctcctgtatgggagcagcgtacgggacagcgaagagcggggttggtgtagcgtcgatgggtgtgatgagaccagagcttgtgatgaaatcgattgttcctgttgttatggctggagttttaggtatttatggtttgatcattgctgttatcatcagtaccggaatcaaccctaaggccaagtcttactatctattcgatggctatgctcatctctcttccggtcttgcttgtggtctcgctggtctctccgccggtatggctattggaattgt

SEQ ID NO: 114976 - DNA, 383 bp, Arabidopsis thaliana columbia
agctgtcactacagcagggacatcataaggatatggacaactgtacagtggggtcgctcgcgaatcgttctcacacttcacgcctgtacaatctttgagacaggaaagtcttagaaacctcagggtctatgtaacatctatggctaagttccaacgtttacatgcatacaaggttaacgttaatctcagacacacggatatcgaagacacacagcttgcaataatccaattgatagctatatccagatgagatatgcaatcattcattttgtgctgtacgtccatatgtggtgtcctgacatagatggtcacctgagatggagatgttggaaaactcgtaacattggaaaaatcttaccataatttaaaaaaaagcgggcgct

SEQ ID NO: 114977 - DNA, 246 bp, Arabidopsis thaliana columbia
tacgatagacattgaatctgtgccaaagttccttaccactctcagattgttggatctttacaaccaccccggtgaatatgtggcaatgaattcagagatctccagcgcaatgcgagctgagaacaaagaatttctggagaagatggaaagctacgaaacaccaatgtcatgcttcaagaacaacaaaggagattccattcttcaccttgctgctgcttttggtcatcttgagctagtaaagagcat

SEQ ID NO: 114978 - DNA, 190 bp, Arabidopsis thaliana columbia
catcggtatagctcctataataccacagaccggtaccgctgctaaaaaactacataatcgctaccgctgcgacaacacgacacaccggtacggctgccatacgaccatagaatgctactgctgccagaagactacataatgctacggcttcgacaatactacagacaggtacggctgcaacaacaccaca

SEQ ID NO: 114979 - DNA, 234 bp, Arabidopsis thaliana columbia
tcgcaaaaaaaaaaaaaaaaaaaaaaaaaaaaacgggggcgctctaggagatacacgcatatatacgcgtacacgagatctcatatctcctctagagtgacaccaattcacatcacaggggctctcgttacacaatctcgacagtgagaaaaccctggtgttacacattatacgccctgtacaacatatccctctttcgacatggggtttaatacccaagaggcccacagatat

SEQ ID NO: 114980 - DNA, 253 bp, Arabidopsis thaliana columbia
ggcggtttccgaaactgcaaatggctcagtaaatcagtgtataatttgtttgatgggaactagctactcggataaccgtagtaggtctagagctaatacgtgcaacaagaccccgacttatggaaaggacgcagttattcgataggatgtcgacgccggctctgcgcgttgcactgatgattcatgctaactcgacagatcacatagtctctgtgctgtcgatgcatcattcacatttcgggactaccaggtt

SEQ ID NO: 114981 - DNA, 328 bp, Arabidopsis thaliana columbia
gactcaacaaagcttaaccataaactgtgagtaaaaaaaaaaaaacaacaaacaaaaaaaaaaaaaaaaaaaacaaaaaaaaaaaaaaaaaaaaataaataaaaaaaaaaaaaaaaaaaacaaagataaaaaaaaaaaaaaaaataaaaaaagaaaaaaaaaaaaacgggccgcctaaaaggttcaagcctaacatacccttcaaaggaacttaaaacccctccaacaggcccccccaatctaatttcacgggcgttcatttaacaccgcctagacgggaaaaccccggcgttgacccacataaacccccttcaagaaaacccccctt

SEQ ID NO: 114982 - DNA, 152 bp, Arabidopsis thaliana columbia
tagcttattcaattcctttgcttatcaaggacttataccttcccctttgtttgctgagccgatttgctctcatgatttagtgatgctgcctggtcaatgggtgtccaccggacttggatcactttttcacaacatgcctatgccaggaccct

SEQ ID NO: 114983 - DNA, 148 bp, Arabidopsis thaliana columbia
tatataaaaggtatggaagttcatgtgaaaaacccaatgacccaccagaaaaagcggccccgccacacgatacaatctaacctaaccttcgcttccacgtcacatcccatctctactataccctcacctaaattcacttcccggtccc

SEQ ID NO: 114984 - DNA, 331 bp, Arabidopsis thaliana columbia
  unsure (1)..(331): unsure at all n locations
ggagaagtcaaaagatgtgtccttttcaaaatctatcctttcttaaaaacatatcaccagagagaattgatcaaaaccacaagaaataatgattagagcgctgagcacgaggaaggttcgaggcagctacaagaagctcggcgacgaagaagaagcaggcgcagggcttttagaagtgaaaccggagagcgttcctacaaatccccatggtcaatccccgaaggtgaataaaccggtggagaaaaccaggggttcggctcaccctctatttagtttcttcganatgagtctaaagaggaagaagaagaagaagagcacgacgactgcaaaa

SEQ ID NO: 114985 - DNA, 158 bp, Arabidopsis thaliana columbia
  unsure (1)..(158): unsure at all n locations
ggccacaccaatctccaganaaggggaaaaacaaaattggtttcccgaaacctcaaaaaccggttcgcccaaccattgagaaattccggaaaggcaaaatttggctccattccaaccaaagctccgacatctccaagggcaattcccgccaaaacatc

SEQ ID NO: 114986 - DNA, 236 bp, Arabidopsis thaliana columbia
tggttagagagctgggagcgagaagatacttatgctgctcttgctgttgtctgtgctgctgcttccgtggctgttgcctatacttgctacaaacagttgtaacgaagaaatttgtagccctaagatgattgtgtattgtgttcttataagacattgtgattttgtttctgctttcaaactacattttcctttcgattttaaaagaggttcttgtcagaactgtttgatgatatgta

SEQ ID NO: 114987 - DNA, 255 bp, Arabidopsis thaliana columbia
ggcagacgcgagagaccttggtaactaggccaggtatggtcgccacttcatccggcgctgctgcttcttcatcgatcggtagccgggtggtctccgacattagctccatttcatgccggttcactaactggttcggattcggaaccatcagctcatctcccacgtaagcttggacgggtatcacaaaccggccgccacggttccgatgcgcattctcatcctggtatctcgacggttcacttgtctcggactacg

SEQ ID NO: 114988 - DNA, 397 bp, Arabidopsis thaliana columbia
  unsure (1)..(397): unsure at all n locations
ggtgtgtttggagaagaagaagaacagatcaaatacgaggagagatctctaaagagatttatcgtttcaaatttgttcacgttgagaagtttaatttagattaaacaacaaaaagatgggttactggaattccaaggttgttccaaaattcaagaagttattcgagaaaaatagtgctaagaaggctgctgctgctgaagctaccaagacctttgatgaatctaaggaaacaatcaacaaggaaattgaggagaaaaagacagaactccaaccaaaggtcgtggaaacctatgaagccacgtctgcagaagtcaaggctttggtgagagaacctaaggtggctggtttgaagaaaaactcaacggctgtgcanaagtactcgaggagctagtcaaaa

SEQ ID NO: 114989 - DNA, 350 bp, Arabidopsis thaliana columbia
  unsure (1)..(350): unsure at all n locations
ggaactttccaagagttgaagaaaatcacagaaagccttagcacagagaagagagtatggaagctctgaggtgggctctagacaacctcaagctctcttcgtcttcttccgattcatcattcgtcgtgctccacgtccagccgtcgccttctgtagccgccggcgtgagtcccggcaccatacctttcggtggtcccagtggtcttgaggttcctgctttcactgctgcaatcgagcaacaccagaagcggatcaccgacaccatcctcgaacacgctagtcaaatttgtgctgaaaaatctgtgaatgtgaaaacacaagtggttattggggatccangtataaaatct

SEQ ID NO: 114990 - DNA, 329 bp, Arabidopsis thaliana columbia
  unsure (1)..(329): unsure at all n locations
gaaagaagaaggtgggaaaggaatcatgtcacctattgctaatgattatgatgaagacgacaatatatctaagattgagaatggatcttctgtgagcatcgatgacagggaagttttacctcgtcctccgccattaccacctgggataagaccatctggatttgagtacgagtcaagaagaaacccctgttgccaagacagacgatgatgacatatttgttggtgaacgcgtcgattacacggttcctgntanagatgtgacacagagtcctatttctgacgacatggaagaatctcccagagataaggagaaagtatcttatttcgat

SEQ ID NO: 114991 - DNA, 175 bp, Arabidopsis thaliana columbia
gaaattctgagaacaaatgggttcgaagagaagagaccatccaagctttcacatcgtgagttgttacatttgctttctttgtttaaccaagctggaatttttttccatgatattacatcattacaaatggatctacacgaataatgagaagttttctttaatgttttaacacaga

SEQ ID NO: 114992 - DNA, 435 bp, Arabidopsis thaliana columbia
  unsure (1)..(435): unsure at all n locations
ggtccagattctacgtttcgttttctctgaaaaaaggctgctctaagattatatccatggcggaagaagttgggcttgatttggaagaactcaggcaactccagaacatcgccaagagacctcgtgttctcaatctcatcaattccgagatttcaaacttggagaagctgagagactctgcagtcagttcaaatgcgaaaccaaaggtaccagttacagttcctgcaccggtttcttcttcgggtaagccggtttcttcttcggcattgaactatgtaactctcggaacattcagctgggatcaagacaatgacaaagtcaagatgtacatatccttggaaggtgttgatgaggacaaggttcangctgagttcaagccaatgtctttagacatcaagatccatgatgtacaaggaanaaattaccgatgtgcca

SEQ ID NO: 114993 - DNA, 369 bp, Arabidopsis thaliana columbia
taaaaaaaaaaaaacacaaaaaagtttcaatggccgcctcaacaatggctctctcctcccctgctttcgccggaaaggctgtgaacctttcccctgcggcatcagaagtccttggaagcggccgtgtgacaatgaggaagactgttgccaagccaaagggtccatcaggcagcccatggtacggatccgaccgagtcaagtacttgggtccattctctggcgagtcacccagctaccttaccggagagttccctggagactacggatgggacacagctggtctatccgctgaccccgagacattcgcaaggaaccgtgagctagaagttatccacagcaagtgggccatgctcggagccctaagctgcg

SEQ ID NO: 114994 - DNA, 405 bp, Arabidopsis thaliana columbia
agaaggggaccacgagaaaacctaaattttattgaggtagcttattgcacggcggcgattagttgttttacttgttacaagaaaatcattccacggcggtggagaaaaaacaaaagagagcgagacaaagagagactacaatggctgttccaagaggaggaaatggtttgaatgaagaagaagatgttgacggagaaaacgctatctttgaggaaaacggtgttgactacgacaccgattccgagcttccctctcacctccgtgacttggccgccgctgctcaggccggagatgtcgccgccttgcgcaccgccatcgacaatttgaatgggagagtcgatgagccactcgaggataatgactcggcacttcacttggcatgtctatatggtcacctaacttgtg

SEQ ID NO: 114995 - DNA, 377 bp, Arabidopsis thaliana columbia
caataaggtaatagaagctgctgagaagcctgaggagacgatagtaccaaggcaatttattgatttaggccctacgagagcagtaggtgaggccgaggatgtgtcaaattcttcatccgaagatagaactcgttcggggggttcttctgcagccgagaggcgtagtaacgggaagagacttgggcgtgaagaaagccccgaaactgagtccaacaaaattcagaagacgagaatatcaaccaacggtagtgaatttaggtttccggtgagtctctcaagtattcgtgatcgtgaagatgaagatttttcatctggcgttgctggagataatgaccgtgaagttcccggcgaagtggatttcttctccgacaagaaat

SEQ ID NO: 114996 - DNA, 418 bp, Arabidopsis thaliana columbia
gactccaaaaaaatcaaacccaccattcaaacaaaacacaaaaacaacaaaaaaaccatttccccaaaaaaaaaaacaaaaacagaggatgaaacaaaaccagagctagtgagagctgcgtcggtgaggagtttagggcacaagaatgagatagacatgttgatacaagagaagctgcaacagcagaagcaacagaagcaaggagggttgcctaagagctcgagtactgggatggcgaggatagaggaagaggaagaaacagaggaaggatctgtgaatccgaaggtgaagaagactaagaaagtctctgatcttttgtatcctcgtagcaaatcttacgccgttactactagtacccctatcttgtaacttctcgtcatcctttttcttcttcttaattttagtattttgtggattg

SEQ ID NO: 114997 - DNA, 374 bp, Arabidopsis thaliana columbia
gatcttccagaagaacaagatagccagtgagagtgatcctttagtaagagccgaacttcacaaactaaacggaaatggtcaagaacatgatcattcatccacatcaccaaaatctgatgaagcatctcgctctaccgttggacctcaggaaccgcaaagcccttatgtggaagcaccgaaacttggagaagagcaaatcaactatcacttcccaaggcctgcgccgcctccaggagcacagagacactcttaaactggcaatggattgattcacagatgaacgaaaaggttattttttcctttttttgctatataatataagtctttatgcatatttgatatatttgcaggtgttggtattaccattatgtaat

SEQ ID NO: 114998 - DNA, 380 bp, Arabidopsis thaliana columbia
  unsure (1)..(380): unsure at all n locations
ggggccaagacggagcttatccgttacgactgcgtcattgcacggaaagaagaaatccatggatatggccgaacgaggtctcgaaactggccggagatctcttactgtttctcgttctcctttgggtttaacaggaggcgaacggactgtgaaacggttaaggctatcgaaagcacttacagtaccagcaacaacaactatatatgaagcttgtaaaaggatggcttcacgacgagttgatgccttgttgttgactgactctaatgaaatgctttgtggtattcttactgataaggacatagctacaagagtgatttcacaggaacttaatgtcgaggaaacacctgtatctaaggttatgacgangaacccaatgtttg

SEQ ID NO: 114999 - DNA, 328 bp, Arabidopsis thaliana columbia
ggtttttaaaaaaaaaaaaaaaaaaaaaaaaaaaaaaaaaaaaaaaaaaaaaaaaaaaaaaaaaaaaagacaaacaaaaaaaaaaaaaaaaaaaaaaaagcggccgcccaaaaggatccaagcttaagtacgcgtgcaagcgaagtcaaaacgctcccaaaatgtcacccaaattcaattcaaaggccctccgtttaaaacatcttgaccgggaaaacaccggggttatccaaaataaaccccctttaaaaaaaaccccttttgcaaaagggggtaaaaaagaaaagggccccacaaatttcccttcccaaaaattttgcacccccaa

SEQ ID NO: 115000 - DNA, 399 bp, Arabidopsis thaliana columbia
cattcaaaaaaaaaaaaaaaaaaaaaaaaaaaaaaaaaaaaaaaaaaaaaaaaaaaaaaaaaaaaaaaaaaaaaaaaaaaaaaaaaaaaaaaaaaaaaaaaaaaaaaaaaaaaaaaaaaaaaaaaaaaaaaaaaaaaaaaaaaaaaaaaggggggcccccaaagggttccacccttaatttcccggcattggaacttaaaaccccttcaaaagggcccccaaatttaatttccggggcccctttttaaaaacttcttttcgggaaaacccctggggttccccaatttaccccctttgaaaaaaacccccttttcccaacggggtttaaaaccaaaagggcccccacttttccccctcccaaaaattttcccacccaaattgggaattggaaccccccct

SEQ ID NO: 115001 - DNA, 360 bp, Arabidopsis thaliana columbia
caaaaaaaaaaaaaaaaaaaaaaaaaaaaaaaaaaaaaaaaaaaaaaaaaaaaaaaaaaaaaaaaataaaaaaaaaaaaaaaaaaaatagggccgctcaaaaggttcaaacctatacctacgcttgaatccaacatcatggctcttctcaggttttcactcaattcacttcacctggcggtctttttacaccgtcccgcttgggacatccttgcacttccctgaatttactccccttgcatcatatccccctttccccttttgcccttctaccttggaggccccctccgtttccccttcctaacatttgggccacctaccgcttttctcgggacgcgtccctgttcccgtacatttcccc

SEQ ID NO: 115002 - DNA, 404 bp, Arabidopsis thaliana columbia
gatggaagagaccggtggggctcagattcagactcagatgtggaaatgaatgaggaaacagatcccataggtgaatttgatgaagatggagagattagtatggaagagtccatactaataggtgaagttgatgaagatggcaagattgttttggatgacactcatgccagtagcaacaagaggaaacatgaagaactcggttccagtgaccttccttcgaagaagaagaataagaagaagaaaaagaagaagaatgtcgaagcaacatcgtcgtcatattaagtctgatatgttttgtatttcactttgtacctgctctatttcagcttgtgtgctcagttttgttataattggtgatggaaaatggtgatttacatattaatgaagcaatttatttttctcac

SEQ ID NO: 115003 - DNA, 336 bp, Arabidopsis thaliana columbia
gtaaaaaaaaaaaaaaaaaaaaaaaaaaaaaaaaaaaaaaaaaaaaaaaaaagcggccgccctacaagatgcaaccttactaactcgtccatgctacgtcataacacttctacaatgtcaccaaaattcatttcatcggcggtcgttttataacatcgtcactgggaaaaacctgctgttatccaacataatcaccttgcagcaaaacaccctttcttcaccaggcgtaataacaaagaagaccccaccaatgatccttctcaacaattgttcagcctcaatgatgaataggacgacccctgtagtagcgcattaatcaccgcgggtgttgtggtt

SEQ ID NO: 115004 - DNA, 393 bp, Arabidopsis thaliana columbia
gaagacgacagaagggggacggagacaaaaacacacacgacgaagaaatctccgggcggtcgagaaaaagaagtttctggttccaagagatatgtcagttggccaattcatctacatattgagtgctaggttacatttgtctcctggtaaagccttattcgtgtttgtcaacaacactctccctcaaactgctgctctgatggactcggtctacgaatcttacaaagatgatgatggattcgtttacatgtgctatagcagtgagaaaacctttggttgatccaataatgatgttagtgtctgtgtacatatactttaaacataagatgttcactacatcacaagacatcaaacacatgttaagctttatatgacagcggcgtgtgttatcac

SEQ ID NO: 115005 - DNA, 427 bp, Arabidopsis thaliana columbia
gagaaacggaagatctgcaactgaatctggagaagactgcttttccgggctcacaaacaggtgtctaatagaagttgtagacaaagcctatagcggaaccatcatcacttgcaagattcatgacatggttcgtgatttggtgatcgatatagccaagaaggattcgttctctaacccggaaggcctcaactgtcgtcaccttgggattagtggaaactttgatgagaagcagatcaaagttaaccataagctgagaggcgtagtgtcaacaactaagacaggtgaagtgaacaagctcaactcagacttagctaagaaattcacagactgcaaatatcttcgggttctcgatatctcgaaatccatatttgatgctcctctgtctgagattttggatgagattgcaagccttcaacacttagcatgt

SEQ ID NO: 115006 - DNA, 421 bp, Arabidopsis thaliana columbia
ggacacaccacaaccctggaccaacaacactgtgtatgtcgccaagaaaaacggggcagtgcgcgtgtgcattgactgcacccctgccaaccaggtgactgaggatttcgattggccgctgccgcgcctgcaggacctgcgccaccgtctggccggggccagatggttctcacgtatggatctcagcgacgcgttcttccgcatcagcgtgcctcacgaaatgcggtaccccaccacctacacatgcgacaacgttgactactggttcacaaaaatgccgttcggactcaagacggcaccgagtgtgtttcagcggttcatggaccacgttcttgcgcgttgcaagaacgaggctttctggtacatggacgatgtactggtgactgccgacagtcgggaagagctcgtccgccggacgcgc

SEQ ID NO: 115007 - DNA, 368 bp, Arabidopsis thaliana columbia
gaagcaaagagagagaaaacaaatcgaggatctgaatcgtcaaacactttactttgttttgtatgttcttcattgcaacacattaatatacttattccaaattacacaagcacagtggtctaagccagagacaaattcttgaaactaaaccatacgattcttgaaaccggaactaaacacttccagatatgccgagattggatcgcaatttactgtaaatttttgctttctcttgctgagatttagtgtctctttacatggtactctacttttattaaggtttagtataagaagaaagttagaagcagaaattttttggtcaaggagagatttggttatcgtgattttagccattgttcggttagtgt

SEQ ID NO: 115008 - DNA, 422 bp, Arabidopsis thaliana columbia
  unsure (1)..(422): unsure at all n locations
ggctttgatacgatgttgctgagataatagaccggagaaagacgacgaagagatcagcgattttgtttactcctccaatggattcagctcgagaggtcagcgatggtagacttaccgtcgaaggtttctctgtagcttctcgagcttttgccgataagtggaagatacataaccaatcgttccctccatggtcttgggttcctctgatcaatcgaactctacttgtttcaaagaagcaggaggaaggttacttgtcgctggagaagatcataattctcagttcacttgaggaggaaattccagaggatgaatctctaaatgtagctactgattgcttggaaaaagaagaaacagttgatcacgcgattttggtcncaaccatggaaaatgaagcacactactatgatttccatatagtttac

SEQ ID NO: 115009 - DNA, 418 bp, Arabidopsis thaliana columbia
aattcgagcggcatctttcaaaaaaaaaaaaaaaaaaaaaaaaaaaaaaaaaaaaaaaaaaaaaaaaaaaaaaaaaaataaaaaaaaaaaaaaaaaaaaaaaaaaaaaaaaaaccgggggcgctcaagggtttaaaatttaacgtccgcggatacgcgatcacatccctcctcaagggtgacccaaattcacatcacagggggtgtcttttaacaatgttgatagggaaaaccccggggtttcccacaatttaccccctgtacaaaagacccctttttccagagggggtataatatcaaagggccccacacatttccctttccaaaatttttgcaccccctaaggggaatgggaaacgccctgtgtcggggcataatacgcgggggttgtgtggggtatacgcacagtatgggcgaaa

SEQ ID NO: 115010 - DNA, 278 bp, Arabidopsis thaliana columbia
ggagatcgagagaagactacattgatgagcttgtgaatcaagtaatggctgcttcagtgatcctatcatcggtgacatgtgagccacctggtttcacggtgcgagtagacactgaggaccagatgattatcagtcgcgcacaagagcgcggctctccgtcaaaagtgtcgcaaatgggctcatcactctctcaaccgtgtcgcccttcgggtctaacagctgcatagacttgagggactcgcgtctacaccgccggaagaactggcaggggatactgt

SEQ ID NO: 115011 - DNA, 367 bp, Arabidopsis thaliana columbia
ggggcggggcacctctctcgtcttcctttattccgtcaatgtcacgtttccaagtcagttcctgagctgtatagctttgctcgagtctcgtctagctttgctccgcctctctctcacgacatgattcgatcagtccttcaaaagcacggatagtatcaagtactgtaatcagatcaatcacgtcacatgtcatgtcagtggagaggatggtgtaccattctacgttactcgagggagggcaatcgacagttctggccctgctgaatcaaaagcatatccaagagcagctcatatcagttcaatccataatgtgatggaatctcgtctggacgaaacagaagaagaatactacagtggcatggtacgt

SEQ ID NO: 115012 - DNA, 416 bp, Arabidopsis thaliana columbia
  unsure (1)..(416): unsure at all n locations
gatctccttgaaggtcttgcagattttgaaaagcaattaaatgttcccggaggaactgttgatgcacaagatgtgaaaagtggtggaactgataaagctgatgaatcgaagggtccaaaaggtacaaaaacaggttcgagcaatggatccaagtggaagtctatgctgaagaacatcgttgaacaagtttcccaggtcccaattactttgtctataggggtgtcttcgcttcgagggacactgtgtgtacacatgaagccgcctccatctgatcaactgtggtttggcttcataagcatgcctgatattgaattcaaccttgtctcctctgttggtgaacacanatcacaaacagccatgttgctatgttcttggtcaaccggttcaagacggcgatacgagacgtcatggtgctc

SEQ ID NO: 115013 - DNA, 402 bp, Arabidopsis thaliana columbia
  unsure (1)..(402): unsure at all n locations
gaatgatgaagatcctctttacgccgacgtacctaaacctccgaaggataaatcggagaggaaaccgtatccgactccgatgaaggagttgattcgtcgtgcgaaagaggagaaacaactgagaaaattacaaccatgtcgagttctcgaagatccaccggataatggtttacttgtgccggaacttgtcgacgtagctcactgtgttcaccgatgccgtaacatgttgctctctggcctctctaaaatcattcatcatgttcctgttcatcgttgcagattgtgcgctgaggttcatattggcaagcaaggtcatgaaatcaggacttgcactggtcncgggagtggttcaagaagtgcgactcatgtttggaaaagaggaagagtgagtgatgttgtgtt

SEQ ID NO: 115014 - DNA, 228 bp, Arabidopsis thaliana columbia
gaagaagacagattagcaaatttcagtggttttggcttattagatgaagaagagactgttgaagatgaagtatcacatatcactgttggattcattagagctactgagaaagaaccccgagactgtattcaatgacagattagcaagtttcacttgttttggcttagtagagattgttgaagatgaagtatcacatgggactataggatccactgaagctatggagaa

SEQ ID NO: 115015 - DNA, 371 bp, Arabidopsis thaliana columbia
  unsure (1)..(371): unsure at all n locations
gatcaccaaaaaagaaagcaatttgtcttcaaaacatatttctctctctaaaacctctttttcataaaaggttgcgtcatctatacgaatccatacgtctctttgcttttctccgatcggtcttcttttctcatcgccggaacgctttggtaatgtttctcatttctccgatcattattgttgtttcgccgttgagctgattatttcgtgttggtatgtataaacaagccgatcgttgtttccttttttctcttgtgattgtgtgatgatggattgtttctttttttcggtttaatccggtttattcncggttttgctgctacatcggtgacttttcccacaatcttcgggtatgatcgcgatcatgtccg

SEQ ID NO: 115016 - DNA, 281 bp, Arabidopsis thaliana columbia
tacactaaaaaaaaaaaaaaaaaaaaaaaaaaaaaaaaaaaaaaaaaaaaaaaaaaaaaaaaaaaaaaaaaaaaaaaaaaaaaaaaaaaaaaaaaaaaaaaaaaaaaaaaaaaaaaaagctggacctcttaaaggtttaaatcttactttaggttaattacaaattcattaattcttctaaattgattttaatttcagttcagtggccttcattttaaatgtctgaaattgggaaaaccttgccttattccattttattgaccttgattaaaattcccctt

SEQ ID NO: 115017 - DNA, 252 bp, Arabidopsis thaliana columbia
ataccggctgcaaaaagacgacaaaaaggggaaacaaaaggtccttttgatgggtttgggatttggtggggtccccccaaaaatgccaaaccaaggaacttcccccccggccctcaatccctccccggaccccttgggaagccggtccaaccgttaaaagcctccgggataaccatagagaacccaacaaaaattgatgacgaacaatgggcttgctaaatggattctctattctttccttaatccaacaaa

SEQ ID NO: 115018 - DNA, 399 bp, Arabidopsis thaliana columbia
  unsure (1)..(399): unsure at all n locations
agaggagtgtgaagccattaggaaacttatctctgcgcagccaccgaggtcagagacgcagaaggttatacatgaattgaagaaggagattgcagaactcgaggctgagaatacagcaagttggagacttcttgaactaaggaagaagcagtttgcattgttgttgcatgtggtggatgagttgcaggagacaatggaggatgaacagaagagtatggtggaagaaatgcggaggaacattaccgctgatggcgctgaagccatgtccatcgattagctcctaatcttagcaactttgtcttcctcttgaatgctaaagaaacaaacctttcattgataagaagaatctgttttataaaanaaatcnattggaatcaaaagaaaaaaagcggccgctct

SEQ ID NO: 115019 - DNA, 405 bp, Arabidopsis thaliana columbia
  unsure (1)..(405): unsure at all n locations
gattgttgcgaatttctgtgagattgagaatgcaggcggaggagataatatgccgtgtttcagacgaagagatcatcgagaattacctgaggccaaagataaacggtgaaacatcttcaatcccgagatatgttgtggaattggcagaggagctgtacactgtagagccttggctgcttcctcgacaagcagctccaattctcaaccctggcgagtggttctactttgggaaacgcaatcgaaagtatagtaacttggaaggtgttcattgcganggatcgtggatactcgaagacggttgcatcgcagtcctgtccaaggagacgggtgaggaaattggtggaacgacgagatttaggtattactataggaacaacggggataaagagagtcgtctgaagatga

SEQ ID NO: 115020 - DNA, 423 bp, Arabidopsis thaliana columbia
  unsure (1)..(423): unsure at all n locations
ggaggctgagataacagacgcggcgaagaggtcccttccgattaaaagtcgcaagcattcaacgatggcttccatcacgaattatgtccgatacatggctcacaagctcgagtactctctcactctcagccttaagaaacatactagagagaagctcagtgaccgggaactctttggtgtagtcatgaagaatctattctatggaagaataagctacttacactcggacaaaggaaaagagatggccccaaccatgggaacaaatgaaagcacgctacttgtccgtaagctaccagttgttgatacaaggtacattttcgtangggatgctgttgtcttgaaggacccgaatgaaacaaataagtatatagtcagaagactagcagccttagagggatctgaaatggtatcaagtgatgagaa

SEQ ID NO: 115021 - DNA, 313 bp, Arabidopsis thaliana columbia
tatgttaaaagaaacaaaaaaaaaaaaaaaaggcaaaaaaaaaaaaaaaaaaaaaaaatttaaaaagaaacatcaaaaatagctcacacaaccccaagactttcaccagaaaagatgtaaaaactttcccctcaagggggtcaactcctaggttcccggctatgttacccttaagaacactgttgccggcctccaaggtccatcacgcaggccattttttggatcctcctttaatcagaaaactcgggggaaacccccggtatttccccagctaaaaaacccggcattatccacccgttttaaaatcgggcag

SEQ ID NO: 115022 - DNA, 398 bp, Arabidopsis thaliana columbia
  unsure (1)..(398): unsure at all n locations
caaactatggagagcatcaggctaaaaaacgaaaaagccatcactgaaggaggaaccattggttctcgttacaaagaagctgacaagtcctgcaaagtgatgtcgggtagattcttccctgaaaatgcctgcctcaaaggtacagccattattactgctgtggttctagctgctgtagctgtactagcttccaacctgtaggctgaagaagatggtggactcattggttctgcacctatacttcaatgcaaacacctcagctttgaagaactaagagagatataccattgtccttgctttccttttgctaagagtttgtgaatatattgagatatgtcgtcaatcttgttgttgggtattgttcactcaaatagacgtttgacanaaaanaagtatat

SEQ ID NO: 115023 - DNA, 359 bp, Arabidopsis thaliana columbia
agaaaaaaaaaaaaaaaaaaaaaaaaaaaaaaaaaaagaaagaaaaaaaaaaaaaaagcggccgctctaaaggatgcagccctacatgatccagccttacgatatcagtgcatcttcaagtcatgtcatctacaattcaattcaccgagacgtcaatttaacagacctcttgatttagaaacaaccctgaccgttgaaacaccttgaagctccttacattaaatccccctttcgacatctggctttctacagatgaggtcctaaccaataggccttcacaaaagttgcttaccatgaattgcgaatgggaaacgcccagtagcagcccactaatcgcggcgcatttagcgcttacgctc

SEQ ID NO: 115024 - DNA, 396 bp, Arabidopsis thaliana columbia
gaaaaaaaaaaaaaaaaaaaaaaaaaaaaaaaaaaaaaaaaaaaaaaaaaaaaaaaaaaaaaaaaaaaaaaaaaaaaaaaaaaaaaaaaaaaaaaaaaaaaaaaaaaaaaaaaaaaataaaaaaaaaaaaaaaaaaaaaaaaaaaaaaggggccccccaaaagtttccaactttatttccccttgaatgaaatttcaaacccctccaaagggttccccaaatttaatttaaggggccttctttttaaaactccttaccgggaaaaacccgggttttcccaaattaaaccccctttaaaaaaacccccttttcccaactggggttaaaaacaaaaaggcccccaccttttccctttccaaaaatttccccaccctaattggcaatggaaacccccct

SEQ ID NO: 115025 - DNA, 411 bp, Arabidopsis thaliana columbia
attctataagaagcactatggagaagaggacatgaaggatcttatagaggacctggagtggaataaagtaaatgatttcaaatggaggaacttatatgagttgaaggttatagctgtgcaacaaaaggagaaggaacttggtggtcgactgaaagaacgttacaaggacgaaaatgaaaggaaacaaagtcgacaaactaaggtctgctcgaaagctcctccaagcaaaagaccattttggggtaatagtgcatcaggttacaatcttgggcatgtgaagagcaacatcatgaagaaggcaaaaatagatctgttgaagagtcaagaagtgaaaaatcttactgcgattaaaaggaacaccattcagaagagtttcagtagttctactccaaagaaaactggcttatctgc

SEQ ID NO: 115026 - DNA, 283 bp, Arabidopsis thaliana columbia
ggagcgaaaatggtgaaagcaactaaggcagagaagaagatcgcctacgataccaagctatgtcagcttatcgatgagtacacccagatcttggtcgttgcggccgataacgtcggatcaactcagcttcagaacatcagaaagggtcttcgtggagactccgtcgtgcttatggggaagaacactatgatgaggcgttccgttaggattcacactgagtacaccttccctcaagcagagaaggtcaaggaatacttgaaggattcaagcaagtttgctgttg

SEQ ID NO: 115027 - DNA, 427 bp, Arabidopsis thaliana columbia
agaaggggaaggcaatcaaaaaaatatggctgcgtctcccaagataggcatcggtattgcctccgtctcatcgcctcaccgtgtctccgccgcctcatccgctctttctcctcctcctcatctcttctttctcactactactactaccacacgtcacggcggctcctatctcctccgtcaaccaacccgaactcgctcttctgattccctccgcctcagagtctccgccaccgccaattctccgtcttcttcttcttcaggaggcgagattatcgagaatgtagtgattataggctccggtcccgccggttatacggcggcgatatatgcagcgcgcgccaatttgaagccggtggtttttgaagggtatcagatgggcggagttcccggtggacagttgatgacaactactgaagttgagaatttt

SEQ ID NO: 115028 - DNA, 356 bp, Arabidopsis thaliana columbia
cataaaaaaaaaaaaaaacacaaaaaagtttcaatggccgcctcaacaatggctctctcctcccctgccttcgccggaaaggctgtgaacctttcccctgcggcatcagaagtccttggaagcggccgtgtgacaatgaggaagactgttgccaagccaaagggtccatcaggcagcccatggtacggatccgaccgagtcaagtacttgggtccattctctggcgagtcacccagctaccttaccggagagttccctggagactacggatgggacacagctggtctatccgctgaccccgagacattcgcaaggaaccgtgagctagaagttatccacagcaggtgggccatgct

SEQ ID NO: 115029 - DNA, 314 bp, Arabidopsis thaliana columbia
aggcgtcagtagacaacagcaggggaaccggttcgtggattacaacatccaagcttactcatattaccttgtgacacacaactcactcatcaatggacgcacttacaatagatcccatcacacctgccttcaccgatcatgcagtcttgcattccccagtcgtatctaaactccctgtcactcgccctgtcacacagttgaatatcgttaccactcaacacgtccgatcaagtatctcaaggccttgattcaatcgtgtcaagtacttggctcgattctctggagaatcaacgatcaaccttatcagatacttc

SEQ ID NO: 115030 - DNA, 291 bp, Arabidopsis thaliana columbia
tacggctgctctatgacgacaaaaaggcaccgtcgctacaacacgatacaccggtactgctgcgagtctatcacacatcgatacagctgcgataagacaacataaaggtacagcctgcatgaagacgacagaatggtacagctgcaatcatacgacacattggcacactgtggaagtgtaaaagtttcaagcttgttgaggaatcgtttcggttcatctaaaggatcaaaccttatctatgcatgcatgtgtacccagacagcttctacattgtccactatcctcaattca

SEQ ID NO: 115031 - DNA, 369 bp, Arabidopsis thaliana columbia
ggacatccagatatgtctaccgccaagattgattagtctgtggtttaattttctcttcacaaagaccactattttgttataacaacgctcttatgcttgaacaaacatatcaagcggctaaagttggcaaaaacatttgttgattcaattggtatttgatacaaaaaaaaaaaaaaaaaaaaaaaaaaaaaaaaaaaaaaaaaaaaagaaaaaaaaaaaaaaaaaaaaaaaaaaaaaaaaaagaaatgaaaaaaagcaacaaaaaaacaagaaaaatcaacgacaggaaaaagggggccccccaaagggtttaaactttctttccctgtgaaagggaacgttaagggccttcaaagggtgccccaaaag

SEQ ID NO: 115032 - DNA, 300 bp, Arabidopsis thaliana columbia
tgtatcagcgaaaaagatgtcaggcttagatttgcatcagcttaatatcatcttgaaggtcgatgtacagggatccagtgaggcgtgtaagacaagcccttcaagtcctcgctcaggagaatgtcggcgtaagattcttgctacaagcaacaggggatgtgagcggcagtgatgttgatctaccatcagcgagtgaagctatcgtttttggatttaagtgtcaaggcgtcgggttctgttaagaaagctgcagaagagagacgtgttgagatccgagtagatagagtgatgtaggagctt

SEQ ID NO: 115033 - DNA, 328 bp, Arabidopsis thaliana columbia
cccacgcgtccgcccaggcgtcagtagggctgcgagatgactagagaaagggggaatacgcaatgtgaagaccctttacctatcttaggatcctcgtgagacacttacactatggtgtcatttgctaccagtattcaacaatttgactcatccaatgattgagagtcatcaggaatcatgatgtcaatcactgcaaaatctttccaacatctctcaatctcatgcaaactcttgtcttctcaaggcatctcgtcacagcacacaaaatagatgtcgtgatgtgtgcatgtgcaacagttcggacaacagtcactctagcttaatcaca

SEQ ID NO: 115034 - DNA, 301 bp, Arabidopsis thaliana columbia
gcggcaggaatgaacaccaatgtcaaaaccgtggttaagtgtgattttcttccttatggtatcaatttcgatagcttagttgccacggggatgattctgcgatgtactagtccctgccgatttgctatccaaaaaactgcgaagttacgtaactgtatgatgagacctagatgcgaatgtaatctcgaaagatctttttggcggtgtattctttgcctccggatgttctggttatgatcggagactcccgaaacttgtcgcagtaatatcattagaggatcagttcagttagttcgaggag

SEQ ID NO: 115035 - DNA, 279 bp, Arabidopsis thaliana columbia
tgatttcaaaaaaaaaaaaaaaaaaaaaaaaaaaaaaaaaaaaaaaaaaaaaaaaaaaaaaaaaaaaaaaaaaaaaaaaaaaaaaaaaaaaaaaaagaaaaaaaaaaaaaaaaaaaaaaagggggccgcccaaagggttccaaccttacttccccgtgcatgcaacttcaaacccctccaaaagggcccccaaattccaattcaggggccgtctttttaaaacgctctgacgggaaaacccctgggtttacccaatttaacccctttgaagaaaacccc

SEQ ID NO: 115036 - DNA, 174 bp, Arabidopsis thaliana columbia
ggagccttcagcttcgaggacgggctgaagcttgttaaacctaaaagaaaaaccatgccaggctcctgcaaatgctgctaaaattcccagggttattaccaaagggttggacccaaaaaaggttaaccatttttgtaatccaccaatccagaaatataataaacccaccaagtt

SEQ ID NO: 115037 - DNA, 341 bp, Arabidopsis thaliana columbia
gacccatttcttggcttacaacaacagatcttaaacgttttactttgtgctgcactactcaacctcaatggccgcctcaacaatggctctctcctcacctgccttcgccggtaaggccgtcaagctttcacccgctgcatctgaagtccttggtagcggtcgtgtgacaatgaggaagactgttgccaagccaataggcacatcatgcagcccatggtacggatctgcccgtgtcaagtacttgggtccattcactggcgaatcatcgagctaccttaccggatagttccccggatactacggatgggacaccgccggactttcagctgaccccgagacat

SEQ ID NO: 115038 - DNA, 416 bp, Arabidopsis thaliana columbia
tttttgaagcttctctctgcttatcgacacgatggttctcgaggcgactatgatatgtatcgacaactccgagtggatgcgaaacggagattactctccgtctaggttacaggcgcaaacggaagctgttaatcttctttgcggagccaaaacccagtcgaatccggagaatacggtggggattttgacaatggctggcaaaggagttagagtattgactactcctacctctgatcttggcaaaattctggcctgtatgcgcggccttgatgtgggaggagagatcaacttaaccgcagctatccagatcgcccagctagctcttaagcatcgccaaaacaagaatcaacgctgaaccaatggatgaggacagtgcgttgctagatcaggcaattgctatgtctgttggtgatgtg

SEQ ID NO: 115039 - DNA, 390 bp, Arabidopsis thaliana columbia
gacccatttcttggcttacaacaacaaatcttaaacgttttactttgtgctgcactactcaacctcaatggccgcctcaacaatggctctctcctcccctgccttcgccggtaaggccgtcaagctttcccccgcggcatctgaagtccttggaagcggccgtgtgacaatgaggaagactgttgccaagccaaagggcccatcaggcagcccatggtacggatctgaccgtgtcaagtacttgggtccattctctggcgaatcaccgagctaccttaccggagagttccccggagactacggatgggacaccgccggactttcagctgaccccgagacattcgcaaggaaccgtgaactagaagttatccacagcaagtgggccatgct

SEQ ID NO: 115040 - DNA, 229 bp, Arabidopsis thaliana columbia
gacgggtgccaaaagacgacagaaggggaaaaggttcactacgcaagtctttaatgtgcatctcgagatgtcttctaagataacatgaatgtttcaatagagacttagccacgttacgatggaagctgtgagatgtggatatgcctgcgcgggcgctctagaggatcgaagcttacgtacgcatgcatgcgatgtcaaaactcttctagagagtcacgtaaattcatgt

SEQ ID NO: 115041 - DNA, 385 bp, Arabidopsis thaliana columbia
gaagaagagaagaagaagaaccttacaattgcttttgtaaatattgtaagtagtttaaggacgtcactacctacatacatggatttatgtggaactcagatgctgcgcctctcatcgcctcatttcaaaacccttcatttggttagtcttgcatttatttatccatttcaatcttgatcgcatggaaaatgctagcaatctcgatctcatggaacattttcacgtgaggcatgcacaaggagtccacaatatagcattagaagagaagggagagaaacctgaatcagaaaagctttttgacgcccacctttctccaaagggtctgcaacaggtttcgggaaggcgcaaccaaatccttgaatcaggattacttagcactgtcgag

SEQ ID NO: 115042 - DNA, 175 bp, Arabidopsis thaliana columbia
tctgatgcaagtatacaacagacgggtatagagcaggcgaacagagcaagtttacaataggtgcttcatcaacggatctctcctcgactggtttcgctggtaaggctgtgaagctttcaccatgcagcatcacaagtccatggaataggcagtgctgttatcaagaacactgttg

SEQ ID NO: 115043 - DNA, 169 bp, Arabidopsis thaliana columbia
tacggatacgagaaacgacagaacgggggaaatagtgtttctcccaatccattccggtcgtggtccgcgtcacaattgcttcctcccctaacaaaccaatcgacgggttttaactgggaacaaaaaaaccttggtaatcaacaaaagttggtttaccaacttggaacca

SEQ ID NO: 115044 - DNA, 137 bp, Arabidopsis thaliana columbia
tcgagaccatgatccatcggtagcgattctaaaggacaacagcagggttcggcttccaacgggcgccccggcaaggaccagcctttctttatgatgatgcttatgttcgcatgcattagacttcataacacatctat

SEQ ID NO: 115045 - DNA, 394 bp, Arabidopsis thaliana columbia
gacttcagtctatagccgcgcaagaagacgattctctctcttgagttgaagaaatgaagcacaacaatgttatccccaatggtcacttcaaaaagcactggcagaattatgtcaagacatggttcaaccagcctgccaggaaaaccagaagaagagttgcgaggcaaaagaaggctgtgaagatcttccctcgtccaacttctggacctctccgccctgttgtgcatggtcagactcttaagtacaacatgaaggtcagaaccggtaaaggattcactcttgaagagctcaaggctgctggtatcgcaaggaagttggctaatgctactcaagttcaaggagactacttgcctattgtacgtgagaagcctaccatggaactcgtcaagctgac

SEQ ID NO: 115046 - DNA, 196 bp, Arabidopsis thaliana columbia
ctggggaagagatcgagagaagaatagtttgatcatcttgtgagaaaaataatggctgcttcagtgatgctatcttcggtgaaattgaaaccagctggtttcacggtggagaagacggcggctaaaggattacggtcgctcacaaaacgcagtccttcctcaaatatggtcccaattggggcaagaagattaagaa

SEQ ID NO: 115047 - DNA, 279 bp, Arabidopsis thaliana columbia
aaaaaaaaatcaaaaaaaaaaaaaaaagaaaaaaaagaaaaaaaaaaaaaaggaacaaaaaaatgaaacaaaaaaaaaaaaaaaacaaaacaaaaaagcgggcgccccaagggttcaagacaaaattaagctttaagtggacttccaaacccctcaaaacggcccccaaaatcaaattcaagggccgcccttttaaaactctttaaagggaaaaacctgggggttaccaaacttaaccccattgaagcaaaacccctttctgccacgggggttaaaacg

SEQ ID NO: 115048 - DNA, 385 bp, Arabidopsis thaliana columbia
caaaagcgatcagagaaagggagtgatcaggggagtgctaagtgacaaccaagtggtcatctaagtagcattgacaacatcgatgcttgcgaaaattgctagctcagttaatatggcagtgactctggttgtaggatttattggaggattttgctcagtacattgtactgtgcaaggaaattagtcaacacagaattcagctcagagtaacgatctgccaaatcaacttacatagctagacacattggtccatccagatcttcggcaggatctgatgaagcagccatatatacaaccatatctgttatgtcagctgatgtgtccgacgcttggctcgactatactcatagaaatgctgagagaaacgcattggatatcgcacagt

SEQ ID NO: 115049 - DNA, 398 bp, Arabidopsis thaliana columbia
ctgagcacaacaacatttccaagaaatggaaattctcgaagggagaactcagttgatgattctgacccgcccggggatagatatagagatgcttggcaacatgggatccaaaggaggcaaaattttggacggcctttagggagaagagattaatttataattccaactggtcctgaacatcatacactggtggagatactatgttacttgagatctcagagcatccgacctagctcatggtttcacagggtcaataccacgaaagggtgactcgaagtcatgaactgttgaaaagaggaatgcttgaaggctgtgtacgtcaaaaggtaacatgctcacctgatttgtgctggcgaaagatgattcatgccatttccttcaaagaactggcgctcttc

SEQ ID NO: 115050 - DNA, 234 bp, Arabidopsis thaliana columbia
gatccaagaaacaaataaacagaattgcagatcaaaacactctgtttcattcctctgttttttgctctgttttgctctcacgccataacgtgttctgcttacagtttcgacttcatttacttcggaaatggaactgatctgatgacattccatggagacgccgagtacgcttcaaagcctgatggtatgaccaagtcaggagcaattggcttgagccgtgacaatgtcccattc

SEQ ID NO: 115051 - DNA, 265 bp, Arabidopsis thaliana columbia
cgggctagacaggcaaccattgtgatgcgaaactgcaacagttcggcttagcgtggtcgcggccgaggtacaagctttttttttttttttttttttttttttggcattgtccaaaatattttattctttaaggggaacagccatgtattattcaaatgaagggatcacattaaaagaaacccactcataagaaacagcctccattaacattcaagcagcagtcattaaaaaaaatgtttcgacagccaagttttcttcaaaatat

SEQ ID NO: 115052 - DNA, 126 bp, Arabidopsis thaliana columbia
cgcatccactcacacgtctacccacacatctccgattcgtctgtacggctgcgaggtaacacattttgatactgctgctataagactattgaagataccgctgctatattactccataatggtaca

SEQ ID NO: 115053 - DNA, 464 bp, Arabidopsis thaliana columbia
  unsure (1)..(464): unsure at all n locations
gcctgccgttacggtgccagattcncgggaacattcacgggtccacccacgcgtccgcgagaggacgacagaagggaaggtctggcagtttgacgaagctatcatgtgtgtggcttggaatcccctttccaggcttccagttttagccgttgccatgggacgagatttgttttttctgaacactgaacttgggactgatgaggaacaggaaattactaaagagaggcttcactcaggaaacatcccagaaccagacgcatctgttgcagcaattgtaacctggctacctgatgagttatatggagggattaagataagacattttaagagcatatcgtctattgaccggcatcgtaaaggagactatctctcaacagtgatggcatccggggaaacacggggagtggtattgcaccaactgtcaaaacagaaaacacaaatgctcccatttaagattcgtggac

SEQ ID NO: 115054 - DNA, 339 bp, Arabidopsis thaliana columbia
tcacgcgtccgtaaggctgacaaaactacagaagggggaagacgaaacaatacagatggcttctcaaagttctatactttttctggttatcgtcttcatcttcaggtgttcctcttcaattccatggtcaagtcgcgctagtgcacatgattatgattgagatgagcatatcaggtgcgttgggcgtaatttctttcaacgtttcagggaaagtcctgaatagtgtaataggaccattgcctggtctgcatcatgtccttgagtcgcttgaagttcctccgagcattgagaacacaagtatgggtgtattgacagtggttaacgtagtcctttcaaatg

SEQ ID NO: 115055 - DNA, 335 bp, Arabidopsis thaliana columbia
  unsure (1)..(335): unsure at all n locations
tggggaccttttcgatttcgtctccattgatgatattcgatagttagtggctaatttgctatcatctcactgcttcaattttggctcctcatcggaaatggcgtttttactcaacacctcgatttcatctcacctccgatcttcttcccataagacggatggtgctttagctcaatcccgtcgcgggttccatgtggagctaggtgctcgtgagaaagctctcttggctgatgatgcatctttgaggagattcaagtcgcataagaaaggtgttcatagattganaagaagtggagatgtgctcacagttgtcgttgtcgctggatgctgctatg

SEQ ID NO: 115056 - DNA, 305 bp, Arabidopsis thaliana columbia
ggaacgaccagcccatgcacgaaacctgttaccagatcgctttggccatcaaggacgaagtcgaggatcttgagaaaggaacacttgctttgaagggaggctactatgactttgttaatggctcctttgagctttgggagctccagtttggaatttcccccgttcattctatatgaactaacacatcaccatcaccatcgctaccaccaccatcacatacatcatcatcgtcgtcatcatcatgatcagcatcttcatatatacatgttttactcttatctaattgctacctgtaatggtataca

SEQ ID NO: 115057 - DNA, 443 bp, Arabidopsis thaliana columbia
  unsure (1)..(443): unsure at all n locations
ggtacgcctgccggtaccggtcgcaaattcncgggtagacccacgcgtccgcccacgcgtccgtgtcggtcatagattgccaaaattcacagaagctgagaagaagttgctaaagggttctacagattacgtaggaatgaattactaaacttcagtgtttgcaaaagaaattagccctgatcctaagagtccgagttggacgactgattctcttgttgattgggatagcaagagtgtggatggatacaaaattggtagcaagccgtttaaaggggaactgggtgtgtattcacaaggtgtgagataccctttgaagtatattaaggggaactatggggagacacaaattatcactgcccagaaagggtacagagaaaaccttggggagaagcacattgacgtatactttgggacacacgatatcacagagaatattatatccc

SEQ ID NO: 115058 - DNA, 347 bp, Arabidopsis thaliana columbia
agacgagggacttgtagccgttctcgtttaaaagaagagatttggtgcttgtttgtttgtttgatcttgcatatgaagtattggcgaaagagacattctctttctacggataggtttttgaatctcatgtcgttatactgatgcatcacactgagaaaacgttcatattcttatagtttttaacctcgtgttttgtgtgttgggttaaccctggtaaattaattgataaatataatggaatccaaaacaacaaaaaaaaaacaaaaaggtaagaaagagaaaaaaaaaaaaaaaggtaaaagagcaagaaaaaaaaaaaacgggcgcccctaagggttcaaagcaaa

SEQ ID NO: 115059 - DNA, 279 bp, Arabidopsis thaliana columbia
cataaaataagataaacacataaaagtttcaatggccgcctcaacaatggctctctcctcccctgctttcgccggaaaggctgtgaacctttcccctgcggcatcagaagtccttggaagcggccgtgtgacaatgaggaagactgttgccaagccaaagggtccatcaggcatcccatggtacggatccgaccgagtcaagtacttgggatcattctctggcgagtcacccagctaccttaccgggagaatttcctggagactaccgaatgggacaca

SEQ ID NO: 115060 - DNA, 356 bp, Arabidopsis thaliana columbia
  unsure (1)..(356): unsure at all n locations
ggttgccttgaatttagtttctttccttattttgtttgaggtttattatattgatgatagggttttggaaacttttttaattgattttagcttatagagaccaaaaaccctagaaaaatacgattcctacgacggcgacggttgatgatgagccgggacagattaaacgtgctctgattgatgcttctgccggagctatctctggtggtgtttctcgttctgtaacttctcctcttgatgtcattaagattagatttcaggttcagctagaaccgacgacttcatggggtttggttcggggaaacttgtcangagcttctaagtatactggaatggtacaggcgactaaagatata

SEQ ID NO: 115061 - DNA, 367 bp, Arabidopsis thaliana columbia
ggtacgcagatggtgaagatggtgagatgtcgtggttcaacgctggtgtgggaattggtcttggtgtctgtgtatgtttttggcattggggttggtctgctggttcgcacctatcaatcaaccaccaaaaacttcagatggacgattatctagtttcattcaaattgcctactctctctctctccctctatgctctaaatccaatccgttgcacatcacttttgactgcagtactctaagctatatagtctaatctaatactgctgtctagtataatttttgatttatgtaccttttttaatcacattgtgccttcatgttttggcagaattcattttcccttcttcttgtgtttggtcacattcac

SEQ ID NO: 115062 - DNA, 379 bp, Arabidopsis thaliana columbia
ttcacgcgtccgtacaggcgtcagaagagcagagaaggggatatccacaggtacagctgacaactttcatatataaggtacagaggtataaagatggccaaaggcttgggatgacctgagggatttcaggcaggacactacgaatattcgccaccaactccgtttttcgatgcggacgagcttactaactggtctttatgcaaagccgtctctgccgagttcgtcaccagacgcctcttcgtgtacatcaccattttagatggcaccggtgataagattcagtccgacacaacagccggttgcgttgactgccgaagagtccgcatccctgaaatctcgtgggcgtctggtggcatcatcatcatccttgtctagtgca

SEQ ID NO: 115063 - DNA, 314 bp, Arabidopsis thaliana columbia
ggggaggggagatcgaatcaagagtagtttgatcagcttgtcatgtgagtaatggctgcgtcgctgcagtgatcctcgctgccgttgcattgagctggtctcactgcacagaggacagcagcgaggcgattagagtcgcgtagctcagctcatctcgcctttccttctgtcgtgactcgagtgacgtcgatcaggtccggaacgcccttccgttctgacggcaccgtagcattgacgtacgggatcgactccacgcgtccagcaggcatggcataggatgttgagttgtccgttgagtcgtcaggtactgacct

SEQ ID NO: 115064 - DNA, 215 bp, Arabidopsis thaliana columbia
gaaaaaaaaaaggggaaaaacaaaaaaaaaggaaaaaaaaaaaaacaatcaattcacaacatcatgaaaagagaggaacaaaacaattaaattataagatctcatggcaatggaggtctccggagctgtcctcagtgagcttggttcatctcatcgtcaaatcgagcaagagatgtgacactggaaatggaatgcggtgtacgcactggagctca

SEQ ID NO: 115065 - DNA, 285 bp, Arabidopsis thaliana columbia
  unsure (1)..(285): unsure at all n locations
acacaaaaaggtaacggctggcgagaaagacgacagaaaggggccgataatcagctgcagcaacccaaaaccaagggaatcccgccggtgcaaccttttgtagcgccgttgtcgtatctattacgaacatggagatgacaacgagaaggtgaatatcctactataccgtctttccgctacggcgaagagatccgtgtctcacattccggcaagccggtgatagcgtatacgcanaagacatggaaatttggatcaggagctccgatgcacgccgagagtggttac

SEQ ID NO: 115066 - DNA, 308 bp, Arabidopsis thaliana columbia
gatagtaaatccagagaacgtctcttcttcttcttcacttgccggagaagatggatttgttgttctgtttccgaccgaatcagacttgtcggggaatttcagttttgcctgcttttagcataagcaatctttccgccgtcaatcgtttccgttcgacgacgagtcttcgttttggatttccggcgacgccgtttcgtcggactccaaactttaccttcaaaactcacgcgaagaggaagaataaaacgagtactttcgaaccgaaaccgaataaagtcgaagagttgatcattgaagaagaagaagaa

SEQ ID NO: 115067 - DNA, 358 bp, Arabidopsis thaliana columbia
atctggactgtttttgtagtggcagcactggcgtaacaattcttaaacaggggtctaatctcttcatgggaaacatcggggattctcgggccatccttggatcaaaagacagtaacgattctatggtggcaactcaactgacagttgatctgaagccggatttacctacggaagctgagaggatcaaacggtgtaaaggtcgagtatttgcgatggaagacgagccagaggtgccgcgagtctggctaccttatgatgatgcacctggattagccatggccatggcgtttggtgacttctgtctaaaagagtatggagtcatttcagtacctgagttcactcaccgtgttcttacaga

SEQ ID NO: 115068 - DNA, 141 bp, Arabidopsis thaliana columbia
tccgaaaaaaaaaaaaaaaaaaaaaaaaaaaagcggccgctctacaggatctcaacatgattaaaccttaattacacgtgaaagctcttccatagcgctaccaaaatgtaactcaaagtcacgtcacttgaccgtctcttt

SEQ ID NO: 115069 - DNA, 389 bp, Arabidopsis thaliana columbia
gaaatcaaaaagcttcgctgtggaggtaagtaggaggaagacgatggcgttagagaagcacatagagaagatactcttcagcgatgaagtaattgcgcaccgggtgaatcagcttggaatcgatattacttctgatttctccggtgactcggaggaaactcctatttttgtcggcgtagccactggtgcttgcctcttcttggccgatctcgttaggcgaattgacttgccaatagctatagatttcattagagctgagtcttacggctctggtactgtatccagtggagttccagagtatcatttgacttaaagcttgacatcacgaacaagcacgttgtcttggtcgaggacattgtggatactggcaatacacttagctgcctgat

SEQ ID NO: 115070 - DNA, 378 bp, Arabidopsis thaliana columbia
gggagtttcaggtagtttccatcgttcctttgtcaggaacaaaccaacgactcaaaatttaaccagagatggtggaaggtgaagaacagaggaggatcacacacttggatctgagaaacgagccccagtttccaatggttttcgttagagaatcgacttgtttcgctaaggacgatctcgctatcttcccgtcgagactctcagattcgtccttctctccgtccgattcagacgaacaatttcaatttagccggaaatcgcattctcagccatcggaagatgtcgggaaatctccgtggaaatccgtaattgagattgatattatccaaggttggtggaagattcttctcgttcgagtaatgtcaaatttccagaatt

SEQ ID NO: 115071 - DNA, 410 bp, Arabidopsis thaliana columbia
ggtttttcagaagtctcttgctgcatacattaaaaatcacgtttattcaaacgcgaagacagaagatttatggacctgagccaagagaaaacacgaatcttaggttctttagcatcttgcccagaccccactatagttcaagatgttcttaacttcgtattgtctgatgaggtccgtaatcaagatgcactttatgggccttccggtgtaagttgggaaaggcgttaagttacctgggaatgggtacaaggaaagtgggaatttataagaaacacatggggctccggatttctcataacacgcttcataagtgcagttgtatcgccgtttgcgtcgtttgagaaagccaaagaagtggaggagttttttgcaacaagatcaaagccttcgatggcaagaaccttgaagca

SEQ ID NO: 115072 - DNA, 391 bp, Arabidopsis thaliana columbia
  unsure (1)..(391): unsure at all n locations
ggaccgagcttgatttatcgagctttgtggacatcgaagacgatcaagacttttgcaataagcttgccaaagaagaaaacctcgtcgttttaccagggattgcattcagtcagaagaactggttgaggcattctatcgatatggagactccggtattggaggatgcattggaaagattgaagagcttctgcgatcgccattccaacaaaaaagctcccctcaaagacgtcaatggtgttaagtaaagggtcaatatggttatttgcctaagtcatttacgtatgctataatgataaataaatgagtgtttcttggtttgaggtaaatcatgaacactttaagtgtattgtaacanataaaatgggtgcacttaatatcaatcgtgtgtaat

SEQ ID NO: 115073 - DNA, 218 bp, Arabidopsis thaliana columbia
gagggtgatcaggttcctggaggacatttcttccagtttaactgacttggctattaaagagttttccattttggtacacttgaagatgaaagaagaaggggagattccatttggcgtacaagatcttttacaccacataacgagggtacaggagttgcagtttgatcttgaatttggcgatatcaagcaatattttcctgtcaacttggtcctttccc

SEQ ID NO: 115074 - DNA, 373 bp, Arabidopsis thaliana columbia
gggcgtcttcttctcttgttcgaatcgctgtcgtcggagacatccatggcttctggaacctagatgaagatcgaaaggctctacgagttctccaggtgattttggtgaagaacacgtcccactggttcaaagtgttgccgctcttactttccctaaagcagtcagtattggggaatcatgatgcctggttcacccaagattttccaacgaaagaaagtcaaaaacaaaacggtgttcaaatgcaactcgatatccttggtgacgagcatatacgatagcagcgcatggacttcccatcttttaagctcagtagtgttggtggtcaacccttttcacatggtggggatcgattgtttcggaaaaatctgcttgt

SEQ ID NO: 115075 - DNA, 131 bp, Arabidopsis thaliana columbia
ggaaaaaataaaaaaaagatataaagtactatcgtcaactatacaaaaatcaattcaacacgtagcaaattacgtctcctcctatcgcttcactttgctctatccaatgcctctgttcaagatttctgtgt

SEQ ID NO: 115076 - DNA, 343 bp, Arabidopsis thaliana columbia
  unsure (1)..(343): unsure at all n locations
gaagaatctctttattgggattgcaatttcaaacaaactttacatcttcttcttctctctgcttttgccttcacgacgagtagagagagccatggacacactcattgctcagttacggagacgattttgtgatttcaccattagtctctatcaccaggggtttttggacgatcaattcacagaattgaaaaagctgcaagatgaatgtagtcctgattttgtggctgaggttgttactctcttctttgaagactgtgagaagcttatcagtaatatggctagagctttagatcagacaaganatgtagatttcaaactggtaggttctagtgttcatcaactc

SEQ ID NO: 115077 - DNA, 339 bp, Arabidopsis thaliana columbia
gacccatttcttggcttacaacaacaaatcttaaacgttttactttgtgctgcactactcaacctcaatggccgcctcaacaatggctctctcctcccctgccttcgccggtaaggccgtcaagctttcccccgcggcatctgaagtccttggaagcggccgtgtgacaatgaggaagactgttgccaagccaaagggcccatcaggcagcccatggtacggatctgaccgtgtcaagtacttgggtccattctctggcgaatcaccgagctacctttacggagagttcctcggagactacggatgggacaccgccggactttcaggctgacccgagac

SEQ ID NO: 115078 - DNA, 304 bp, Arabidopsis thaliana columbia
tgggatttgttggatataactcggactgactcggctgaaaaaaacccagtctgagacaagtcaatcgacgaagcggttcttgacacgccggaagcgcacaggttgtcagatgatatactctatgtcatgaatgaatcggatactgaaccagtgtgtcaggatgtcgacacggttatggttactttctgagacaagttattatgagtcaacaccatgatcgcgcattgctccactaacgaaggccatgctcaacctgatatcggatgtcatcttgaaacatccgatgatgatcttggcttagcat

SEQ ID NO: 115079 - DNA, 403 bp, Arabidopsis thaliana columbia
ggcgttgagagaaaaacgttgaacgatgggagccggtaatggagaaacgccaaaacctacacagatttcaatttctaaagatcaattcctcgcttggaaacgccaaaaggatgctgagttattagccaaacaagctgaagcagcaaggaaacgacaagaggacatagcttcaggtcgtgttccaatgaatggtcgtgagcttttcttgcatgagccttgggttttcgacgatacccatcattgattctggtctattcactacttcctcataggtgatttaagacatttcctcgatgatttgtgatccaactctgtttctcttttgttgttgtactctcatgttcccacttttgtctcaagtgttaaatcagaaatttagtcctcagtaattgtgacttaatcg

SEQ ID NO: 115080 - DNA, 414 bp, Arabidopsis thaliana columbia
tttttgaagcttctctctgcttatcgacacgatggttctcgaggcgactatgatatgtattgacaactccgagtggatgcgaaacggagattactctccgtctaggttacaggcgcaaacggaagctgttaatcttctttgcggagccaaaacccagtcgaatccggagaatacggtggggattttgacaatggctggcaaaggagttagagtattgactactcctacctctgatcttggcaaaattctggcctgtatgcacggtcttgatgtgggaggagagagcaagacaagaagctgctgccaagaaggcggccgatgaggcaggtcagaaagacaaagatggggacacagcttccgcctcacaggagacagttgctaggacaactgacaagaatgctgaaccaatggatg

SEQ ID NO: 115081 - DNA, 403 bp, Arabidopsis thaliana columbia
cataaaaaaaaaaaaacacaaaaaagtttcaatggccgcctcaacaatggctctctcctcccctgctttcgccggaaaggctgtgaacctttcccctgcggcatcagaagtccttggaagcggccgtgtgacaatgaggaagactgttgccaagccaaagggtccatcaggcagcccatggtacggatccgaccgagtcaagtacttgggtccattctctggcgagtcacccagctaccttaccggagagttccctggagactacggatgggacacagctggtctatccgctgaccccgagacattcgcaaggaaccgtgagctagaagttatccacagcaggtgggccatgctcggagccctaggctgcgtcttccctgagcttttggccaggaacggagtc

SEQ ID NO: 115082 - DNA, 291 bp, Arabidopsis thaliana columbia
aggatgagcaaaaaaatagaataaacatgtaaaaaaaaaaatggaagcatcaatgaaaaaaaaaatgggtgcgctcgaggatatcagctttcatgtacgtgaatacgacatcttaaagcttctcgacggtcacacaaattcaattcacaggcggtcttttttcaaattctcgaaagggaaaaaacactgatgatccccattaaactccctgcagcacataccccatttaccgcatcgagtcttatcgcaaagaggcccacggatatcgcgtttcaaaatatgtccacacct

SEQ ID NO: 115083 - DNA, 303 bp, Arabidopsis thaliana columbia
aacgtataatatggctggagtgataaagttggaaatgcatggtcatggcatgcaatgaattgtggccggtcaaagccgacgctcaagaggatacaagctgaggtacccttccatgccaccttggcaggcttcaatgccgacatgaaacttcgtgtcccaggcagtcattggtgcagctcctgcctgggaaaccccaggcgtatcgccagtaaaaccccataccgtcaacacgcctttcgttaccttgagtctgacgcaaaagcccttggtcgatgtcccatcacagcacttgcacctcgacat

SEQ ID NO: 115084 - DNA, 248 bp, Arabidopsis thaliana columbia
ccgagtcgacccacgggcccgtacagagaagaagacagaaggggaaaaatgtgtcgaattcaacatgtttttataatgctgctaggtgtgtgtcgaaaagtctaatgccaaaataccttccatcttcactatacacactatcacgaatcactttcgaatacaattcacaggcactcatctatccatttacgcatagagaatcacacactttgattaatctcattcgacctacagcacatccgcctttc

SEQ ID NO: 115085 - DNA, 319 bp, Arabidopsis thaliana columbia
tggggagctccgaagagtggaaacataaatggaggaagaagagcacgaggtttacggtggagaaatccctgaagtcggcgatacggatgttcgcgatccggataccgatatgtctgcagccgatgaggacgcggttacggagcttgctgggatgaagaggagattaggggacatggaggaagaacctgctgctctacgagagatgcaggcaaaactcgaaaattaaatgggagctactcaagatcctgctactatggctgcaattcaggacggaacggagaaggtggatgctcgatcagtttatgtgggcattgtcgac

SEQ ID NO: 115086 - DNA, 389 bp, Arabidopsis thaliana columbia
gatgaagacaacagaagggggaacaccaagaaggactaagacagcaccaggaacacgatgggtgaagcgggcaacgatgggaaagaagaaatgattcgggcatggtatctggacgatagtgacgaggatcagagacttcctcaccacatggatgctaaacaatttgtatcattggacaaacattgcatatctcggaatactctagctggagacttgatgctaataagtatggatccgattaagattataaaagtgatccgtgaatctcgtggttacacttatcatggacttttgtgacgtatgcctcgacaaacttccacgctacgaagtgaaagtcaagagcttattcaaagaacatttacgcactgatgatgagatacgttactgca

SEQ ID NO: 115087 - DNA, 174 bp, Arabidopsis thaliana columbia
acgtgataagcacgataatgtcatcgacaccaggtgctgttgtgttgggagattatgtgatagagccgcataaccgaatgggatggctttgtccttgccatgatgactctagatccagtaacccgttgcttagagagtcatctgagctgtaatcttcatcttcgtcctctgcat

SEQ ID NO: 115088 - DNA, 417 bp, Arabidopsis thaliana columbia
  unsure (1)..(417): unsure at all n locations
ggtacgaaaatggagctctgcaccaggtctaccacaatcatcactcatctccctgcgagcttcaacggccatggatatctagcgggaaaatctgttgatagaatctcacttcctctccagcgaaacgttgcgtctctcgttcttcaatcccgcacgttgcgttgtagtagaaagtttccaggagaaacagttactgaagaaacatcaacaggagtcaatgagtttggtgtggaggatcgtgatggagtagttgttgcagccgaagagaaaaactcgaatagtggtgcgatagttgctctctacttaacgtctgcaatcgtcagttcactcgaagcaatcnctctgtttcctaagctaatggaagtagttggtctcggatacacactctggttcactacccgttatctgctatttaag

SEQ ID NO: 115089 - DNA, 289 bp, Arabidopsis thaliana columbia
gaatcctagttttctccaaaaacgttttgtcaaggaaattttcttcatcgatggagaagaagctgactttgttgttgttggttgtggtggttttgttcgtaaatctaacacacgccaccgttaaggttcacatttgtcctagagaatctgcaaaagattatatcttatggtttcgagataagtcagccttgcaacgtcctgcttttgtcactgacggagatgatcggtggctataaatggctgcagatatggttgataagaagaataaatgtgactatgcggctttact

SEQ ID NO: 115090 - DNA, 397 bp, Arabidopsis thaliana columbia
cataaaaaaaaaaaaacacaaaaaagtttcaatggccgcctcaacaatggctctctcctcccctgctttcgccggaaaggctgtgaacctttcccctgcggcatcagaagtccttggaagcggccgtgtgacaatgaggaagactgttgccaagccaaagggtccatcaggcagcccatggtacggatccgaccgagtcaagtacttgggtccattctctggcgagtcacccagctaccttaccggagagtttcctggagactacggatgggacacagctggtctatccgctgaccccgagacattcgcaaggaaccgtgagctagaagttatccacagcaagtgggccatgctcggagccctaagctgcgtcttccctgagcttttggccaggaac

SEQ ID NO: 115091 - DNA, 360 bp, Arabidopsis thaliana columbia
gacccatttcttggcttacaacaacaaatcttaaacgttttactttgtgctgcactactcaacctcaatggccgcctcaacaatggctctctcctcccctgccttcgccggtaaggccgtcaagctttcccccgcggcatctgaagtccttggaagcggccgtgtgacaatgaggaagactgtcgccaagccaaagggcccatcatgcagcccatggtacggatctgaccgtgtcaagtacttgggtccattctctggcgaatcaccgagctaccttaccggagagttccccggagactacggatgggacaccgccggactttcagctgaccccgagacattcgcacggaaccgtgaact

SEQ ID NO: 115092 - DNA, 302 bp, Arabidopsis thaliana columbia
tcgaccacgcgctccgtacagctgaagacgacagaagggggaggaggttacggaggaagcggtggtggtggaggatggtaattcctttaattaggtttgggattaccaatgaatgttctctctctcgcttgttatgcttctacttggttttgtgtgttctctattttgttctggttctgctttagatttgatgtaacagtttgtgattaggtattttggtatctggaaacgtaatgttaagtcacttgtcattctctaaataacaaatttcttcggagatattatctctgttgattgattct

SEQ ID NO: 115093 - DNA, 435 bp, Arabidopsis thaliana columbia
  unsure (1)..(435): unsure at all n locations
ggagactcagaaaaaaattcaaaatccgtaaatctgatgatgcattccgtttcacggctcgcgaggaggttctgtgcaacgctcgctactgctacggcggagattagcggcgaggctgctgcttctgttccgacgaaggcgaaaaagcatcggtcaatatacaagaaactctcaagccttggcacgaggggaggagggaaaatggaggaaacgctaaatcagttcgtcatggaaggcgtacctgtcaaaaaacacgacctcattcgctacgcaaaggatcttcgcaagtttcgtcaacctcaacgcgctctcgaggtctttgagtggatggaaaganaggaaatagcgtttactggcagcgatcacgcgattcgtgtgaatctaattgcaaagagtanaggcttacaggcggctgagacctacttcaacagttta

SEQ ID NO: 115094 - DNA, 393 bp, Arabidopsis thaliana columbia
gataacaaacacaaaaatcaaaaggggtcatttactatcttttaagagacgacatatatagttcccgaccaataaaacaaaatggggtgacctgagttcttcaacacataacataatggccggagttttcaaaacggttacgtttcttgttttggctttcgctgccgttgttgtcttcgccgaggactacgatgttggtgatgatacggaatggactaaacctatggaccccgagttctatactacctgggctaccggtaaaaaccttccgtgttaggcgaccaagctccaaaatttgcatttcccctcctggggaagccatgactgttggcaatttgttatcacaaagcctgcaattctgaaaaacccgttgagaaaagagaaaaccccctt

SEQ ID NO: 115095 - DNA, 384 bp, Arabidopsis thaliana columbia
agacgcgagtaaagcagagaaaggggtacaaaaaggtcaagagaagaatagtttgatcatcttgtgagaaaaataatggctgcttcactgacgataggatccatgctaatgtaaccatctaggttaactgagagcactactagtaggtacacgaatattcatctcacagaacatcgcttcacaccgtcatgactgtcgaaaatgctgtcattaacatcattatcacattgccttacacattacttgcaccatctgctttaaggacggcgtcgaccgcaccggtagaacatgccaagaattacgcatttagaattgcgtctaggactcaccatgtaacgtcgcaggatacactcctagtttgaaggataaccactggttaaccac

SEQ ID NO: 115096 - DNA, 272 bp, Arabidopsis thaliana columbia
aggtgtcagtagagcagagaaaggaaccccagaaggggatcacatccatcacttataacatcgcggcagctctcaaggttccatgcttacatacccgtgaatgacaggtcagagctcatctatagtgtcaactaaattaaattcaatggccgtcgctttaccacgatctttaatggaaaaacacgatgcgtgatgcaacttaatcgcacttgcacgagattctactttctccaattggtcaatgaccaattatgtacgcatcgattgcccat

SEQ ID NO: 115097 - DNA, 388 bp, Arabidopsis thaliana columbia
atccgtacatactgctgccaaaacatcagtacgggtggaaaaggactacagacagggggggaagcatatcatgtgaaaggttaatctctgaatcactgttcagttcctctatgtaaaacggccgttacgttacctaagcggccaactgtctcggttgccaataatttgcacttcaatcaccgggtaactcgtaactgctctacagagtcgggtgatcattatgttgtggcagacgaccatcagtactgtcaccaacatgttattaatcgaacgcctcgactttacaagcacagagggaagttaccaacggatgatggggttattaccatcgatgaggaggtaattaccaatgatgaagacgtaattaccacggatgaggatgaacatc

SEQ ID NO: 115098 - DNA, 323 bp, Arabidopsis thaliana columbia
ggatacagatgcagagagaacaacaaccaggtcacgcagttctccacatcatgagagagccggacagatcaagtatacttccagatcacatggagatggtcgtctcaggcgctgtcctcaatgggcatggttcttcgttcctcatcggatgcaacacaggtgccaccgcattggaaagcggcgtacgcacagcagcacagagaggtggcatgcaaagtcttagtgtcgctgcagcaggtgctgaacctaagatatcttggctctctgccgtcaaatgtggtggaaacgtccttgacgctgaatggctcgatggctcgctacca

SEQ ID NO: 115099 - DNA, 391 bp, Arabidopsis thaliana columbia
  unsure (1)..(391): unsure at all n locations
agccgccagaacaacgacacaatggtactgctgcaagacgacaacaggagggtacagatgcaaaaagaccacaaaacaggtcactcatgctcacacacaccacagaaagggccggccagtacaagtaacctcccagatcgaaactgaaatttttcatcacagacgctatatgcaatagccattattcaacgttcttcatcgaatggaactccggtaagctgccataacatggcgaccaacgcatagcttcaccgaaaggtatcattcaaagacgcagtgcaactctatcaggaaatgtacctggaattcactggcactacaacatcagatcacacgcaactgacctaaccgctggatactacaacacaacacaccaagacnggtatctgcc

SEQ ID NO: 115100 - DNA, 214 bp, Arabidopsis thaliana columbia
aaaaggggacagcagatcgagacaagcataatgtgatcatcgtgtgagaaccataatgggtgcttcagtgatgctaacttcggtgagattgagacgagctgggttcacagtagggtaagactgcggctagaagattaccgtcgctcacagcaactcgtcgctccttcagtattgtcgccagtggactcaagaagatcaagaccgacagaccctt

SEQ ID NO: 115101 - DNA, 216 bp, Arabidopsis thaliana columbia
cgggtccacccacgcgtccggatacgcgtccataacgctgcaaaaatcagatgttggggtcataaaagattcacatacaactgtcatgttcacctcgtttgacatttaccggatgcttccatcatccgaactaccgagacatgttccacatctgtcttcaatgtcgccattacgtgagataggcgattaccttcgctctaaaagattccgatctcc

SEQ ID NO: 115102 - DNA, 338 bp, Arabidopsis thaliana columbia
gggctggaatacgacgacagcatcgaaatcgctggttggggtcctaaaagtggctctttcaactgtcattttcccttcttttgtcgtgaacctggtcaactaatcttccgcatgatctacacacgttccatgactgtcacagatctctcgtttaggtgatagttgcactagcgtgtggatcagaggttctgatttgaccagagctaccagccttgtgtacaggagctcgactttgtctacttcatcacgtagtgtcagcgtcatgacatgatcaaccagaccttgaacttctttatccgtatgtacagttccagcttctatgtacctgtccacagtga

SEQ ID NO: 115103 - DNA, 123 bp, Arabidopsis thaliana columbia
aagatgacagaaggcgggactttggtaccgctgcaatgcttcgacacttaggtccagattcgtcaccatgacatgacggtacggatgccactctccacaccaggtgggattcagttacacact

SEQ ID NO: 115104 - DNA, 422 bp, Arabidopsis thaliana columbia
gggtccacgcaagcctctagagagaatcctataaaaggggggggaatttgatttgcatcggaaacaacgattctggtcagctcaatgttattgctccagatcaacctaacctttactcggttccggcgataacggctgatgagttgagtacaattttggatccgagagttggatcaccggagctaggtgaaggagatgcggtggagctggtggcttatacggctatgcattgtgtgaatgcggaacggagaaacacgccgacaatgacggatatagtagggaatttggagagagcattggatttgtgtggggatagtcatgggagtatctctagtggcatttgttctattgtctctgattgacagattaaattcaaacagattgagtcacttctcgttttacttttaaaaaggaactttttt

SEQ ID NO: 115105 - DNA, 304 bp, Arabidopsis thaliana columbia
agatgacgacaacgagggagagggcccttcgctgttcatcggaatccccagacaactcaatttcagcaatctcttatcggcttcactgatcatcaatcatgttgggcaactgcagattctgcgattgtgatgacaggagccattgcgtgaagtaaggcacgaatggcaactgcgacagctacgccactgatgcaagctagaccgccgccatgttgattcacatcggtcccatagacacgaccgctaactgctactggtcctactgcaccgcttacatccgctgcagttgcaggtgccgttgcat

SEQ ID NO: 115106 - DNA, 320 bp, Arabidopsis thaliana columbia
atatgaaatgatattttagtgcattggtgtgtggcgtcattaagtgtcaattagagtctatatagatttgtaattagattgaattatgtgtttgggttttcattacggtttttgatgaaaaggtactggtttttggttgtatacaaaccacagtgtcatgttgtatctcttctttacgtgttactgcacttcatggagtcctgtgtctcctaagatcagagaattgatcgaaaaagtacggacaagaagtgagaaaactgtgcgaaaggctaacagagacgttgtcagagactttaggtttaaaaccaaacaagctcatg

SEQ ID NO: 115107 - DNA, 322 bp, Arabidopsis thaliana columbia
gttgatggaaagagtgataagtgcattgctatatttcgtcaagctatcgctagtggagtcacagtagtattgtactcaccgggcactttctatggatattgtcaccaccgtgttggtgtgaaaggtgctagattatggtggtgtgaatacttcttcctcagtttcttgccttctttcacgagatacccctccacatggacatctcagtctcctaagatcagagaattgatcgaaaagtacggagaagaagttagaaaactgtgctaaaggctaacaaagacgttgtcagagactttaagttttaaaccaaacaagctcatgc

SEQ ID NO: 115108 - DNA, 169 bp, Arabidopsis thaliana columbia
gggggagacagtgattaatgacgacaggatccttcgcagctgagatccatggacgagacttctctcaggcggatctgtttgtcatagcttatgtgaagcaccaacaataatgggtttgttggaagcttatcgcatttcgcttcatctcatcttcatcacagcatcaaat

SEQ ID NO: 115109 - DNA, 357 bp, Arabidopsis thaliana columbia
gaggcgtgagtgcaagaagacgagaggagggggaagagatctagagaacaagagattgatcatcttgtggcatcaataatggctgcttcagtgatactatcatcagtgagattcacagcagctggtttcacggtggaaagaacagcggctatcagattagcgtcgctcacaataactcgtctctccatcagaattgtcaccattggcatcaagaagatcatcagcgataagcgcatcaggattatcaggaacatggacttgacggacggcatcgacgccaccggaaaaaatgtcaacggatacggtgtttactagtacgtcaacatctatggagctaatctcaatggatacaatcct

SEQ ID NO: 115110 - DNA, 368 bp, Arabidopsis thaliana columbia
gagagagaaataatttgatcatcatgtgatagataaactggctgcatcagtgatgctagcttcagtgacactgacatcagctggattcacagtagataagatcacggttaaaagattagcgtcgctcagaatagcgcctcccaccttcacaattgtcgccattggcgtcaacaccattaagatcgacaagctcttcggcattaaccgcatcatggacatgagggacagcgtctacacggacggcatcaacggcaacggatacggtgtttacggatacgtcgacaactattgagctaacgtctatggatacaatctcaattagaacgataacaattggtcagcgaatgattgcgtgtccaatggaggag

SEQ ID NO: 115111 - DNA, 256 bp, Arabidopsis thaliana columbia
gctgcaaacgacagaaagggacccatttcttggcatacaagaagaactcctacacctcttactttgtgctgcactactcaacctcaatggtcgcctcaacaatgggtctctcctcccctgtcttcgacggtaaggtcgtcatagctttcccccgcggcatcggaactccttggtaacggccgtgtgacaatgaggaagactgttgccaatccaattggcccatcacgcagcccatggtacggatctgaccgtgtca

SEQ ID NO: 115112 - DNA, 382 bp, Arabidopsis thaliana columbia
caacacacaacgggatcgacgttaaggttactaaattgcgacagcaaggtacggattcttactaaacacagagcagtacagatgtggcaaaacaactcaacgccgttggcgtcaccgtactcttgctgggtcctttggtgacgtcaactcatctcattgtcatcgatgctgcatacttcacgttcttaggcaagtgtgtgccggattacatttacatgatcaaatgcagattgcgtaacatatcgtgtcgctctctacaagagtcaagcaatatgtgctgtacatgttaaaggagtcgcagatcaatgcgaatgtcacatctcgtaaagaggttaacgtgtaacatttcatttcaatcggtgtgcccacgggatttcacgtg

SEQ ID NO: 115113 - DNA, 207 bp, Arabidopsis thaliana columbia
gactcccaacggatatattcagaatggcatacaacaacaacctcattcttccttctcagtagccgcctcaggcataggcctcatgacaccggtatacgcgtttgacgttttaagggattcgcctgcggaatcaaagcctctatgcgtcacgatcgtgatgtcatcggctgaaaactcttcccatgaaagcagggtcgaatatgcaaa

SEQ ID NO: 115114 - DNA, 366 bp, Arabidopsis thaliana columbia
tggcataaaaaaaaaaaaacacacaacagtttcaatggccgcctcaacaatggctctctcctcccctgctttcgccggaaaggctgtgaacctttcccctgcggaatcagaagtcctatggaagcggccgtgtgacaatgacgaagactgttgccaagccaaagggtccatcatgcagcccatggtacagatccgaccgagtcaagtacttgggtccattctctggcgagtcacccaactaccttaccggagagttccccggagactacggatgggacacagctggtctatccgctgaccccgagacattcgcaaggaaccgtgagctagaagttatccatagcaggtgggccatgctccgaaccc

SEQ ID NO: 115115 - DNA, 154 bp, Arabidopsis thaliana columbia
agacgccagcaaacaaacgacaggggggatcctctgagctgccaaataatctggatttcagacacgtagatgcatgtgttcatcatctcataggtactaacgccactgtctgttcaaagatggtaaaaaatgtgtgcatatctgtcaacgaatg

SEQ ID NO: 115116 - DNA, 377 bp, Arabidopsis thaliana columbia
ggtggtactgctgcaagaagacaacaggatggagtagagaatatggaatcgacagattaggtcaagcagccgcatctcagcgtaacgatcagctccctgaaacccgtggggctgcatggactgtcgcaatagaacttcagagcgtagataaaagagctcatcggcacagcagccctgagacatcatcagcagaagaacaggaaatcccggcggtacaaccaattacttgagaaactttctgcgagtcaattctgtcagctcttagcgcacaaaccgtgcttcgtgtcaacagtgattgtcactgttactgctcgggacggtttggttactacaagttcagcatcttcatcccaattagaaacagtttctagtacaag

SEQ ID NO: 115117 - DNA, 159 bp, Arabidopsis thaliana columbia
tgctacaagacaacaacagggtgctgctgctacaagacgacaacagggtacagctgcgagtatacaatcgacaggttcggttacgaaaacacaacacaacggtacggctaccacaatacgacacatgggtgcggatgcgataacacgacacaaaggtac

SEQ ID NO: 115118 - DNA, 406 bp, Arabidopsis thaliana columbia
gacgaaagaaaggggggattggcttgtatgtggctgcgtgaggtgatagtattctgaaaagcatccattggcgtgagtgacgccaaatgagaattcgtcatcgtgagtcaatctcgaatctcatcggagcatatcttctccaattcggattcggcgctgcaattgaatcttctggtaagcgatgatggagacatctgcgaggatttgttgcggacgaggaagtgcatgctccgtgcgtcatgatcgtgcaacgttaaatttgagttctcgatcggcatgtgttgttccaatgatcaatggacggagtatgtgtgagatggggaagatttcgatgtcgatggacgttatgtcaccaccgtctgccagggtgaagattgacatgatcggtggcatgaaatgccgtgga

SEQ ID NO: 115119 - DNA, 380 bp, Arabidopsis thaliana columbia
gacgagtcaggcgacgggtcagtcggctgtaaggagacgacagaagggggaattggattcgggggaacacttgggaatgagagaatttgcattgatgaagactttgggaacatcagagtccgtcatcatgcaggtgatagaacttaccagtcaggctctcgtttccgagaccagggttatttaccagtacaggctttggttctagatattgaagcatgggggttaagtggaaacaaggctagggaaattcaacaaaaataacagaaaggtagaagagcttttcactaaacagcgtcgaacagatcgacttaaaaacgtttacgatctgggaagattcacctgagaaaatgatgatggatatgatgggtaatcctaatgct

SEQ ID NO: 115120 - DNA, 265 bp, Arabidopsis thaliana columbia
agatgtcagtacagcacagaaagagaacagaaggggatggaaacattctcaaacgctgcagtcagtattgtcttcagcatcatttatgcatctcctacgcaaggtctagtcaatctttgcgcaggtgtgactcttgatttaagttgtgtgatgtctggacctggatcatcaatcactctatccgagtccgtaattccctaatcaatagaatctcagcttcaattactccggatggatccgacacactcctatcgtttagaattga

SEQ ID NO: 115121 - DNA, 336 bp, Arabidopsis thaliana columbia
gatcgaaacagggaagaattaagagataagaaaacaaaaaacattttccatctctctctctctctctctcgcctgcttcaagatatggatcgggaaagttccgatgacatcatgaaatttctcgacggcatggttagttccgacgatgttcgttttggcatcatcgacgaatgaaatcactcaccgacgtatctagcttcctccgataaactggatatgagtgcgttaattcgaaatctaagtggacaagctcgcatgagatccctgcatgtgagcatgaatacttggaggacgtggacaaatcggtttcatagaaaggcgagatcctggtggtga

SEQ ID NO: 115122 - DNA, 414 bp, Arabidopsis thaliana columbia
  unsure (1)..(414): unsure at all n locations
ggaagaagaaatggggttccttaagccaaccatggcgattctttttctagcgatggtcgccgtttcatcagccgtggacatgtcaatcatctcctacgacgagaaacatggcgtctccaccaccggtggccgtagcgaagccgaggttatgagtatctacgaggcatggttggtgaaacacggcaaggctcagagccagaactctcttgttgagaaagatcgacggttcgagatctttaaagacaatcttcgtttcctcgatgaacataacgagaagaatcttagttatagattgggtttgactcgttttgcggatcttactaacgatgagtatagatccaagtatcttggatcataagaagaagaagaaactacaatagttaatcaatcanagagaagtaagagaaatggcag

SEQ ID NO: 115123 - DNA, 358 bp, Arabidopsis thaliana columbia
taaagggaagggaagaaatcgatttcagcacctataaggtaatggctgccttatcatcaacaccagctgaaccatatcacaacacaccgctcaaatgtcccatcgaatggattaaaacaattgccacactgacacacgacgacagttttgctggtgatgttgaaactgctcaatcctcatgctgctactgggcttgtggaccagtacaagattgtatcgcctacggctctgctgatatcatatattctgccaacaattacagacacttcaatcagttacaatcacactcgaactacctcatcagggcatgatattatctctctaatcacgggacatcactctctacatgtcatagttg

SEQ ID NO: 115124 - DNA, 238 bp, Arabidopsis thaliana columbia
tacagatgcgaaacagatgacagaacggtatcgtcgtcatcaatcatacatacgggtatcgttgcttgaagacgacagaatggtaccgctgcgagaagcttatagaatggtacggctgcgagaatatcacagattgggccataaatctcgccacgtgtcttccttcttactcacggtcgctctagagggtccatccttactctaccgtccatgcaatctcatcgctcttctataatgt

SEQ ID NO: 115125 - DNA, 448 bp, Arabidopsis thaliana columbia
ggtcgacacacggcgtccgcgtgacgacttgatgatctgcagaattcggcgtaccgtggtctcggccgatgtatagtcagcatctattcatgggcaccgtgaagagccagtctctggaatcttagattaccaggtaagactgacaatgctgattagtcgttgagctgaacgtactgttgcaatcctgctccgggtccttcgctaattctccagactcggtgtatcgactgcattggacaggaatggcctgtgggagccattgccatctcagcatcctagccagtcgggtttgatgcttccaaacttcacgctcatcagactttggctcaccagcttcacgtaatacgcacccttgaggaagtacctgtgaccgtcgctctgcaggtccacgacggcatccaagttatcggggatgtcattccatggatctgcgatgagcttgggaaat

SEQ ID NO: 115126 - DNA, 233 bp, Arabidopsis thaliana columbia
tacagaaaggggataaaaaaaaaaaaaaaaaaaaaaaaaaaaaaactgaagcggacgatcatgaagatctacgcttacgtacgtgtgactgcaacgttctaccacttcgacagcgtcattcaattcaaagtcagtggccgtcgatttacaaggtcgtgacagggaaaaccttaccgatactcatcgtaatccagtagaatcacatatcactatcaggagctggagtgataacg

SEQ ID NO: 115127 - DNA, 212 bp, Arabidopsis thaliana columbia
actccacgggggcgtcacaaaggctgctggcatactacacgagggagtcgatgccagaacgcactcgtcagcgttgcttgcgacatcatatgtctaccgggaagttcgtttcgttccagacctactaatcgtttgtccaacgctacagctctccttgtgagtcacccactttcacatcatcgcccgtcattttcgaacaaccgttgtttcaa

SEQ ID NO: 115128 - DNA, 191 bp, Arabidopsis thaliana columbia
gactccaacagagaagcaaaaaaaaaaaaaaaaaaaaaaaaaaaaaaaaaaaaaaaaaaaacataaaaataaaaaaatacatacaaaaacaggcgctcatcatgataaaaccggacgctctacatgatttaagcttacttacccttccatgtcatctcctagatcttctatactgtcacctaatttcaatt

SEQ ID NO: 115129 - DNA, 203 bp, Arabidopsis thaliana columbia
atgatggatatctgcagaattcggctttcgatcggccgccctggcaggtacgaattaactctgttcctgccgctgctgctgcacggaaccgacgtcacacccatccagggatgtggcgatgcgatccaattccgcttccgtaacgggcatgtgggtgtcctcccactccctcgcattccccagcaccctttccacgcaactca

SEQ ID NO: 115130 - DNA, 174 bp, Arabidopsis thaliana columbia
gattctccgaaaaataaacataaaaagaatcgtcctaagacttctaaaaatgtcaaaaaaagcggaggcactagaggatccaaacttaaatacgcgtaaaagagaggctcgagccacaggataaaatgttacctaaatctaattcaaaggtcatcgtttttcaacgttgtcacc

SEQ ID NO: 115131 - DNA, 390 bp, Arabidopsis thaliana columbia
gacccatttcttggcttacaacaacaaatcttaaacgttttactttgtgctgcactactcaacctcaatggccgcctcaacaatggctctctcctcccctgccttcgccggtaaggccgtcaagctttcccccgcggcatctgaagtccttggaagcggccgtgtgacaatgaggaagactgttgccaagccaaagggcccatcatgcagcccatggtacggatctgaccgtgtcaagtacttgggtccattctctggcgaatcaccgagctaccttaccggagagttccccggagactacggatgggacaccgccggactttcagctgaccccgagacattcgcaaggaaccgtgaactagaagttatccacagcaggtgggccatgct

SEQ ID NO: 115132 - DNA, 323 bp, Arabidopsis thaliana columbia
acatctcatagccatgggatacggcgctgttcctgacgttataaaaactggacgactctttgataccgtttttgatgttgaccacgatacaagaaagggcacaagctcaagttctagaacctaatggtttcagcttcgacggagctgatgctcctggtgttgattatgctctcaatatggcgatatccgcgtggtaccatggtacagagtggtttaactcgctgtgcaagacggtgatggagcaagactggtcatggaaccgtcctgcacttgagtaacttgaactctagcactctgcacgcaactaagaccacatcaaatgg

SEQ ID NO: 115133 - DNA, 421 bp, Arabidopsis thaliana columbia
gaaaaaagtaaaaagtaaaagtaaaaccatcattattagttggtactctcctctctatctttctctcacactcatgggtcgtccaacagatttcaaagagcttcagattccaggttacgtactaaaaacactttacgtcatcggtttctttagagacatggtcgatgctctttgtccttacatcggtctaccaagttttcttgaccacaacgagacctctcgatccgagccgacccgactcgctctctccacgtcagcaactcttgccaacgagttaatcccggtggttcgtatctccgatcttttaaccgatccggaagattgctgcacggtttgcttatccgattttgtatccgacgataagattagacagctgccgaagtgtggacacgtgtttcatcatcgttgtttagaccgttgg

SEQ ID NO: 115134 - DNA, 187 bp, Arabidopsis thaliana columbia
aatcacagtacaggtttagttaaagcagtgacaccagtttcgccccacaacacggaggtcaacttttgagagagagaagaagaaccgggcgctcgagaggatccaagcgtatctaaggatgcatgcgacgtgatagcgcatcgaatgtgtccctaaattcagctcactggctatagctcgatcatcg

SEQ ID NO: 115135 - DNA, 446 bp, Arabidopsis thaliana columbia
ctcacgggtcgacgcacgcctctatactgatgcgtaataacgacagaagggggtcgcaataacaataagaaagaaggaaaaagagaaccagagatggcgatggcgacagcatctacggtatttgttctaccggccaatgtcacctcggtcgccggcgcttcgtcgtccaggagctccgtgtctttcttgccgatgagaaacgccggttctaggctcgtagtcagggcagccgaagatcctgctccggcttcctcttcttcaaaagattctccggcagctgccgctgctccggatggagctactgccaccaaacccaagccaccaccgattggtcctaagagagggtctaaggtcaagattctaaggagagaatcctattggttcaagaacgttggatcagttgttgccgttgatcagggacctaagactcgatacgcggttgtggt

SEQ ID NO: 115136 - DNA, 387 bp, Arabidopsis thaliana columbia
gcatattgttgtctgcagctatatgaaaaatggtctaatgttgacaatatatgttctccttatgtaatcaatcaaatgctctacacttatgcatgcaaacgtgttcactacatcatgcaatctttgcatctcctagagataaattgtccacaaacaaccattctgcagtttacagttcgccagcgagcatgcctcaagttaccacaagggtctactttatcaatgattcatcatgtcttataaatgtcactttaaagaaaggcttcaaaatgttaaggacaccattggcatcaatagatcaatttaagcgtaattcctccatgcttataccttaacacaatctagccttgatccatctagttcatctagtgttacttcacatcttta

SEQ ID NO: 115137 - DNA, 375 bp, Arabidopsis thaliana columbia
cgcgggtcgacgcaagagtctatactgatgcgtgataacgacagaaaggggtgtggtagttaactggtgagagagttcaacatctaatctttctctctctctctctatcttttatctctcacactcgtaaaatgcttcttcgagctcagatctcagtctcacttccaacgtcgtttcaccggggtagtttgatccggagatcaattacgccgttaagtagggttgttgcataggccaaggagtacagtgacactgttggatttctggagacggcagctatagcgggtagtttagtgtctacgccggttattggatggttaatctacactttgagtgaccacgggatgtggcttacctcagggaccggccggttta

SEQ ID NO: 115138 - DNA, 309 bp, Arabidopsis thaliana columbia
gactccaacagagaagcaaaagaaaaaaaaaaaaaaaaaaaaaaaaaaaaaaaaaaaaaaaaaaaaaaaaaaaaaaaaaaaaaaaaaaaaaaaaaaaaaaaaaaaaagaaaaaaaaaaaaaaaaaaaaaaaaaaaaaaaaaaaaaaaggggacgcccaaaaggttcaaagcttaattagccttgaaggaaagttcaaagccctccaaaatttcaactaaatttcaattcaagggccttatttttaaaactcttaaagtggaaaaaccctggcttaacccaatttaggcccctggaaaaaaaaccccttt

SEQ ID NO: 115139 - DNA, 459 bp, Arabidopsis thaliana columbia
gtgggtcgacacaagactctatactgattcgtattacgacagaagggggagaagagatcgagagaagaatagtttgatcatcttgtgagaaaaataatggctgcttcagtgatgctatcttcggtgacattgaaaccagctggtttcacggtggagaagacggcggctagaggattaccgtcgctcacaagagctcgtccctccttcaaaattgtcgccagtggcgccaagaagatcaagaccgacaagcccttcggaattaacggcagcatggacttgagggacggcgtcgacgcctccggcagaaagggcaagggatacggtgtttacaagtacgtcgacaagtatggagctaacgtcgatggatacagtcctatttacaacgagaacgagtggtcagcgagtggtgacgtgtacaagggaggagtcaccgggttggcaatttgggccgtaactctc

SEQ ID NO: 115140 - DNA, 380 bp, Arabidopsis thaliana columbia
ggtagttgatcgatgtaagacaactatgatcaactcgggacatgtatcatggccgcttcagtgatgcaagcttcggtgacactgacatcaactggtgtcactgtggagataatcgcggataaaagagtacggtcgaccatatgagcacgtgtgtccatcatgattctctccagtggagtcaatcagattaacacagatattcgctgctggtctaacggcaccatggacttcaaggacggcttccacgcctccggcagtaacgggatcggatagtgtgtctacacgtacttgcactgatatgagatcagtcgacatatgatacaggccaaattactgagatactcaatggtccacgagtggcgatctgtgaatagtacgag

SEQ ID NO: 115141 - DNA, 425 bp, Arabidopsis thaliana columbia
ctcgcgggtcgacgcaagcctctatactgatgcgaaataacgacagaaggggaagtgagagaaagagaggtccaatggcggagaaagaataggatgtgaaccttctaagtttttgggcaagcccttttactcgtagagttgagatggctttcaagcttaaaagcgtgccttaccagtacctggagcaagatatagtgaacaagagccctttgcttctccagataaatccggttgacaagaaagttccggttcttgtctacagcgggaaaattttatccgagtcacatgtgatcctcgaagacatctaccacatatggaataacaatccaattcttcctcacgatccttacgagaaagccatggctttattctgggccaagttcgttgatgaacacgttggactagtaacttttaagtctgtggca

SEQ ID NO: 115142 - DNA, 315 bp, Arabidopsis thaliana columbia
  unsure (1)..(315): unsure at all n locations
cacaagactctatactgattcgaaataacgacagaaggggagatcaattctcagctgacattgaggtttatctcagatcgaaatcgagaagaagatgtttctcactangactgagtatgacagaggagtcaatacattttctcctgaaggtcgtctctttcaagttgagtatgccattgaagctatcaagcttggttctactgctattggtgtaaagacgaaagagggagttgttcttgcagtcgagaagcgtattacttcgcctttactggagccgagtagtgttgaaaagattatggaaattgatgaccatat

SEQ ID NO: 115143 - DNA, 202 bp, Arabidopsis thaliana columbia
acattcttataaatgaggacgcaggagctctagcgtttttcagtcaccttgtagttctatggattgcatgaactaggattaattatacaactttgatgatcgcatttgctttgtcggggcataccgatttgtcgaatctggtgtttgatcatatgattaatgatccagtggtcgttgttaaattgatcgcatgaaacatgtg

SEQ ID NO: 115144 - DNA, 326 bp, Arabidopsis thaliana columbia
gcatacgtcagaacagaattcggctcaaggacccacgtctgtgctcacctgtactacactgtggctacccaaatgggaattcacgtcgtcgagccttacaatgcaggccagggtactcgcgtaacacacagctgaggctgttgatctttacatctggcattataagcgcgacgacacgcgcatagggcctgcgtttgacgtaatgggtcgtgtgccacacggaacatcttttctggataaacaggccaaagaaaggtcttgcgacatctacctacgatcgttcttagagccagtgtatcgtagtgactagcacttctcgatcatat

SEQ ID NO: 115145 - DNA, 410 bp, Arabidopsis thaliana columbia
ggagaaagaaaaacaaaatggcttcgatgggtggattacacggtgcatctccggcggttcttgaaggaagcttaaagatcaatggctccagccgtctgaatggctctggaagagtggcggtggctcaaaggtctagacttgtcgtcagagctcagcagagtgaggagaagaagtcactcaaggatctcaccaccaagctcttcgataccatcgacaatctggattatgcggcgaagaagaagagtccttcgcaggctgagaagtactatgctgagacagtctctgctttgaacgaagttcttgccaagcttggttaagcattttaatttctgcatttttcttgtaaattattattcttggtttttgttcttgagtactttagactcaaattcgtgaatctgaatttatgt

SEQ ID NO: 115146 - DNA, 303 bp, Arabidopsis thaliana columbia
gatattaaatccagagaacgtctcttcttcttcttcacttgcccggaaaaatggatttgttggtccgtttccaacgaatcaaactttcgggaatcattttgccgcttacatagaacttcccctatcttcgttcacacatctcgttggtttccgcacccttctcgctcaacttactcactcaccaaagaaataacatacttcaacaaccataatcagattgtcatgaaaaaaagaaaaagaatattctccgaaaatcagaaacaacagttcacgatataatatacaaacatacatacttagtca

SEQ ID NO: 115147 - DNA, 330 bp, Arabidopsis thaliana columbia
  unsure (1)..(330): unsure at all n locations
cagtgcagggtacagatgccaaaagacggcaaaaggatacggctgctataatactacaggagggtccagctgcgaaaagacaattgaaggaaaccgttgcgaatagccgacaaataggtacagctgctagtccacgaccgacgggtacagctgcaataagaccacacacgggtatggctgcaacaagacaagagaaagggagagacactttttctaattttctcatcatcgtcatctttctcagcttttagatagaacaacgagattccgaatccatctgtttcacngagggagagaaaggcaacgacaatggcagattagctcaccgac

SEQ ID NO: 115148 - DNA, 194 bp, Arabidopsis thaliana columbia
aatcaaagcatgctctacagtctctgtcgaggatccagtgacggttctagcatgtcagtccatgcagtctgtaaaagtgggtcataccgacgatcatgacgactttctgagtgcataagatgcatgagcattcgtgtccgatgaacaatagccgtcacgacacaggtacaccaccgttgatcagtcgaaatgac

SEQ ID NO: 115149 - DNA, 402 bp, Arabidopsis thaliana columbia
ggtcgacccaagcctctaaagggagtcatataaaacagaaagggatagcgaaacgtggtaatccaagattgatagtggcaattcatggagctgcaagtggaattgggcaatctttatctttgctgagtaaagatgaaccctcttgtcacattacgtcatctctacgatgttgtcaatgcacctgacgtcactgctgacgtcaatcatatggacactggagctgtctgtctcaggttcttgggagcaatacagcgtgatgactcactaacgggtatggatcatgtgattataccagcctgtatatcgatgaaaccacggatgattcacgatgatctgtttaaaatcactgctgggattgttaatacactatgtgaaggtgtagcatcatgttgtcgtaatgct

SEQ ID NO: 115150 - DNA, 256 bp, Arabidopsis thaliana columbia
gaggtccagctgctaaatgaccacatcttggtactgctcctagaacactcctcaacgttaccgctgcaacaacaccacacattggtaccgctagctataagacgaccttaaggtctcgctgctcaaatcctccaccagggtacggctgcaataaggcgacattacggtaccgctgcctataagacgacataatggtaccgctgctacaagatcacagacgtatacggttgcgatacaactacatattggtacagct

SEQ ID NO: 115151 - DNA, 269 bp, Arabidopsis thaliana columbia
  unsure (1)..(269): unsure at all n locations
naggggagaagagatcgaaagaagaatagtttgatcatcctgtgagaaaaataatggctgcctcaatgatgctatcttccgtgacattgaaaccagctggtttcacggtggaaaagaccgccgctaaaagattactgtccctcacaagaactcctccctccttcaaaattgtccccaatggcgtcaagaaagtcaagaccgacaagcccttccgaattaacggcaacatggacttgaaggacagcgtccacgcctccggcacaaaaggc

SEQ ID NO: 115152 - DNA, 388 bp, Arabidopsis thaliana columbia
tcatgacagaaagggcaggagagccatttggatagactaaacgttcctgtgagctggctggggttaacaaaacttgtgagttggttctactctgatgagttgccaaagcctccatcgggttgcaagtggaacaacatggacactgaggcaaagctggatgagcttcaagcttatgtggagatatactcgctttctgaatggtggattatggaagaacttcaaaacgattgcgctcatgtgattctctcttgcttggaatccgctagagagttatctatcagaacaatcgaattagctgcgagtttctcgatgtcgaaactggtggaagctgctgccaatcatgcacctcctatttatcatcagcttcgtgactcaagtgagctcgatg

SEQ ID NO: 115153 - DNA, 310 bp, Arabidopsis thaliana columbia
gacgcaactctctatactgattcgtattaacgacagcatggtccagttgcgacaagacgattctaagggtgagctgcgccaatcacgacactgagttaacgctgcgctcacacgacagtgggctcacgtcctggaatatcctcatccggactctgggatgcaccgtcactctcttcactatcgggctctttcgagtctggtacatgtgacttctgccatctaaatctcttagggaggatctattgtgcgggaagtctggtgccgccagccgcggtcatgtcacctccacaagcttctgtttaaattgttg

SEQ ID NO: 115154 - DNA, 212 bp, Arabidopsis thaliana columbia
tccacgctaggccgcagtagcctcaaccaaagttgcaatcgcaactctatacggtcttagctcctctaccattgcatctgacgtcacagctcttctctcgtctccgccgtttcatttcccttgcttatcgtttagtcagctccttgaatgactatcggcgtctcggttactcacggcttgttgcctctacatgccttggcccgtaccgccat

SEQ ID NO: 115155 - DNA, 310 bp, Arabidopsis thaliana columbia
  unsure (1)..(310): unsure at all n locations
caaagtgataacttgatcattgcgccaacgangtgcccaataccgccgagaacttccgcgcgctgtgcactggcgagaacggcgtgggcaaatccgggaagccgctccactacaacggctccaccttccaccgcgtcatccccgagttcatgtgccactgcggccacttcacccgcggcaacggcaccggccgcgagtccatctacggcgagaagttccccgacgagaagttcgtgcgcaagcacaccgcccccggtgtgctctccatggccaactccgggcccaacaccaacagctcccagttcttcat

SEQ ID NO: 115156 - DNA, 277 bp, Arabidopsis thaliana columbia
aataacgaccgaacggggaagagatgcaaagaagaatagtttgatcatcgtgagaaaaaagacacggatgcatctgtgatgctaacggctgtgagcaatgacctcagatgagtttcacgcgtgttcaagacggcggcacagaggattaccgtctcgcatcatatcacatccatccttcacgattatcaccattgccgtcaagaagatgaagactgtcaatcccttcgggattaatggcagcatcgacttgatgagacagcgtcaacacctctggcag

SEQ ID NO: 115157 - DNA, 304 bp, Arabidopsis thaliana columbia
taaaggtcaccgccgataaagtacgacaaactcgctaccgcagcagcagacgacccaaaggtcaagatgccaatcgaaggaaccaaaggtactgctgcaacaacaccacacaccggtctcgctgcaagtacacgagttatagctaaagctgctcaaacaccacctcatggtaaagctgccagactccaacagggtggtatcgctgcaacctcagcacataacggtaacgctgccaaaagactacagtaagttcaagctgccagtagaccatcgcagtttgttacaaggctgagaagtatctcaa

SEQ ID NO: 115158 - DNA, 206 bp, Arabidopsis thaliana columbia
ggagaaaagatcaatataataatcgtttgataatcatgtgggatgcatcattgatgcttcagtcaggctaacttcggtgacattgattcaaggtggtttcaacgtgggcaagacggttgctatcggactaacgtcgctcacactagctcgtcactctctcaaatgtgtcgccaatgatgtcaagaggatcacgattcagaagccct

SEQ ID NO: 115159 - DNA, 341 bp, Arabidopsis thaliana columbia
ggattttgcaagaactatttccggaacctggaaggcttcaatttatttatgctgatcttggagatgccaaagctgtcaacaagatattcacagagaatgcctttgacgctgtgatgcatttcgctgctgttgcatatgttggggaaagcacacaattccctcttaagtattatcacaatattacatcgaacactttggtagtattagagacaatggctgctcatggagtaaagactttgatatattcaagcacttgtgcaacgtatggggagcctgatattatgccaattacagaggaaactcctcaggtgccaatcaacccatatggtaaggccaagaag

SEQ ID NO: 115160 - DNA, 352 bp, Arabidopsis thaliana columbia
ggaaaggcaaatttctcaaaggaagcgaagccctagcgtcctctctctgtcttctcgtttctgcgccgattcgtagtctgttgtgcgcttgcctctcctcttttggattagcatacctctcactcgcatcaggtaagaagtttggttcagatttagtgaatctcattgctttagtttcaaagcttattagctctctgtgtttttgcgttggttattaagttggaatacttaacccttaaagcaactactggaattttgctgaaacatagttagtctctatgctttgtttggattgaattgattatgatggaatgcaacatagttatcgctgtgccttgtttggatggaatgt

SEQ ID NO: 115161 - DNA, 312 bp, Arabidopsis thaliana columbia
aagatcggcttgaatgcatagcactgtcaaaaccgtggttaactgtgagtttcttccctacggtatcaatttccagcgccgagttgccacagggagactctgcgatggaccagtccctgccgatttgctatccgaacaactgggaataatgtccaatgtcccaatatacctaattccgattccaaagtccaaatatcctataaccggtgtcacgtttgcgtccggaggttctggttatgatactagatcaccgaatcttgtggcagtaacatcattagatcatcaattgagtgaattcaaggagtacatttc

SEQ ID NO: 115162 - DNA, 369 bp, Arabidopsis thaliana columbia
tacatgggagatgaatatggccatactaaagggggaaacaacaacacgtattgccatgacaactatatgaactatttgcggtgggagagaaaggaagaagcacattcggacttcttcagattctgccgtattcttatcaagtttcgtgatgaatgtgaatcacttggtttgaatgatttcccaacagcaaagcgtctgcagtggcatggtcttgctcctgagatcccaaattggtctgaaacaagtcgatttgttgcattttcactggtcgattctgtgaagaaagaaatctatgtggccttcaagaccagtcatttagccagacgtgtttccctaccgaataggccaggatacggatgggagccagtt

SEQ ID NO: 115163 - DNA, 399 bp, Arabidopsis thaliana columbia
tcgttcggaccacgcaatctcgtctagacttcaatcataatacagagaggatacttgatgcatgaaattagaaagtaactggtcgaccttctctcgtttcaagttcttcatgatacagttcaccgacagtgatcgctggatgcagccgatgtgtaggatcggtcattgtagtaacaccgttagatgaagcttccattacatatgatctaggtagatatacctatcactccatactcaatgagtcttaggatgatcatactgcactcagtctcccacatctgatcaatgttctaggcttacatcgtatctattagtggatctcaggatctcagcaactctcagtgcatactcagctacagcttcaatgatgacatagcatcgtctttatgggatcatcgt

SEQ ID NO: 115164 - DNA, 454 bp, Arabidopsis thaliana columbia
ctcgtgggacgacgcaagactctatactgagtcgtaataacgacagaagggggccgggaggaatgaaccggttgaaggagcaaaaggggccgaagttcgacggcgaagaatcacctccacctgattttgatgaagatcgaagtgtgggtgaggtagacggaggagatcacacgccattcgctggaggtaaagtcagaaggaaagcgtctcgctatagagagcatcgtggtgactatcttcacgtttcttctcgtcctggattgatgcgaattctggagaaacaaggtgatacatcgattctttttgctgataaagttttgaagttcaccggctcggggaagatgaaacggcgtatttttatcctcactgattttgcgatctatctaattgatcccgagactgaagctatgaccaggagaattgctttgtcatcagtagagaagatgtgtttaag

SEQ ID NO: 115165 - DNA, 404 bp, Arabidopsis thaliana columbia
ctcacgggtccacgcaagactctatactgactcgtagtagacagaagggggaaatcgaacgatttataaaatcgtcgtctggctttcgacgatctgctgacgaagaccatggcgccgattttcagatccacttcccttatcgctttttctctcttcttcttcttctttgcttccactcttccgatctcatctgggtctgaggatagttacacgatcacgggtagagtgagggttccagcaagcaccgtgattggtcatgcagctaaattctcaaatatcaaagttatactcaacggtggacagcatgttactttcctcaggccggatggatactttaccttccacaaagtgccagcggggactcatcggattgaagtttatgcactgggctacttcttctcccc

SEQ ID NO: 115166 - DNA, 354 bp, Arabidopsis thaliana columbia
agctgcaggagaaatatacggtggtaaaaggcggttaaaggctttaacagatgtttttccaaatgtggtgaggaaagaaactctactcgattcttctgatttgagtttttgtaaaaaccattcttctcaaatggctgctcttgattaccttatctctcttgaaagtgatatattcgttcctacttattacggaaacatggcgaaagtcgtggaaggtcatcgcaggttcttggggttcaagaagacaattgagctaaaccggaagctgttggttaagctgatagatgaatattatgaaggattgttgagctgggaagtgttttcaaccacggttaaggcctttcacgctacacg

SEQ ID NO: 115167 - DNA, 378 bp, Arabidopsis thaliana columbia
gacacacaaaaaaaaaagtcacgtgtaaatgtattatatgttctctgttttcttgtgaccaaagaggcagattttgaacctttggattttttttcggatcttgatcaaaataaagattcgttttggttttgaagcttctacaagtgtttgattagacaagaaggtgaaaatgtcggcttatacgcatccgatggagagggagctctccggtcaatccagccgaggcaattccgaattggggagtcagtattcgatataatctggatgttacatgacatctttagcatcttccatcttcatagcttctctagtaacatttggagttttgatgataacacttcgtattgctttatcatccatgttacaaagctgtgagaa

SEQ ID NO: 115168 - DNA, 137 bp, Arabidopsis thaliana columbia
aaatcaaatctgatcaaggcgagaatcttacaaaagccatttttagagctttgcaaaaaccatcttgcctgttaaacaaaaaatttggagctgcaaatgactctcataaagtggccgccctagaggatccatcctta

SEQ ID NO: 115169 - DNA, 452 bp, Arabidopsis thaliana columbia
cgggtcgacgcaagcgtctaaagcgagtcgtctaaagaagggggagcaccgatcttggtacggacattggcaagtatgtgttatttcgtgtttcggcagcggtttaggagcggcaacgattcacagagaaggattaggagagggagtagtaagtcgttttcatggtcttactctcatcatgtatccgattttgaagatgaatcagatttcgagaagattattgctctttgaattaagtttcttaagcgtctttgtatagatcgtctcttctctttgcctttcttccaacgcaagtctgtgttgtattcttagaataaatcttgttggtacatattagtatcatatatagcaataaagtcgccacaggccatatctgtattgtttcttttgttctactactggaagtggttactatatgtacaattcattcgagtactagtgaagtgtaatgt

SEQ ID NO: 115170 - DNA, 422 bp, Arabidopsis thaliana columbia
gaccacgcaagactctatactgagtcgtaataacgacagaagggctggttggatcatcactacctactaaatttaatccagctattgtacaaaaggttgtagatgagctttctcctagtaattttcgaattttttgggaatcacagaaatttgaaggacaaactgacaaggctgagccatgagcatatgcaagagattttggggttgctgttcaactacattcagctattacaacagactggtgtttgccagtggatttttgatgagctctcagctatttgtgagacgaaatttcattatcaagacaaaataccaccaatgtcctatatagtggatattgcatcaaacatgcagatatatccgaccaaggattggctggttggatcatcactacctactaaatttaatccagctattgtaca

SEQ ID NO: 115171 - DNA, 255 bp, Arabidopsis thaliana columbia
ggacataaaaatggcgacttcgatgattcacagattgttcaaacaaggcacaaagatcgtcggcgttggactcaattacgcttctcacgccaaagaacttggcaatgccctcccaaaggacccgattgtgttcttaaagccaacttcgtcgtacctggaaaacggtggaacaatagagatcccacatccactggattcacttcaccatgacgtggaacttgctgtactaattgggcagaaagcacgagatgtccc

SEQ ID NO: 115172 - DNA, 310 bp, Arabidopsis thaliana columbia
agaaaaatctctagagctagcagagtaaaatcaattaatattttggagaacatcaacgaatttactcaacaactatggcctcatggtgacggtaacgagaatatcggtaaaacgatccagttgtttgcggagaagtcagtggaaatagatgtgatggtgagaagaatggtaatggagagctttggaatagaaaaatacattgatgaccatctaaagtctacggcgtatgcgactgatgaagtatattgcaccacctgagggtgatgctaatactactgttgacgataatgctgatactcttggcaagctt

SEQ ID NO: 115173 - DNA, 347 bp, Arabidopsis thaliana columbia
agacgccagtaaagcagcgaaaggactacagagtggggtcaaagtgtggagcctaaggagaagcagactgtatataaaattgaccaaggatacatagatgctgcaggatccttggcacgcttgcatcctaaagtctcaatcaacacgatcaatgacgggaacgaaccatgcttcttcaccatctacttttcttgagatgccactaacactatcatacatggaaattcaatccagaaacaggcagcgttcatatctggaactcagtacgttatgtctgatcactcgaacagtgagaaccacggactaaagcagacggctcacgcaataactgacttatcatcagcatc

SEQ ID NO: 115174 - DNA, 440 bp, Arabidopsis thaliana columbia
ctcgtgcgtcgacgcaagcctctatactgattcgaaataacgacagaagggggagaagagatcgagagaagaatagtttgatcatcttgtgagaaaaataatggctacttcagtgatgctatcttcggtgacattgaaaccagctggtttcacggtggagaagacggcggctagaggattaccgtcgctcacaagagctcgtccctccttcaaaattgtcgccagtggcgtcaagaagatcaagaccgacaagcccttcggaattaacggcagcatggacttgagggacggcgtcgacgcctccggcagaaagggcaagggatacggtgtttacaagtacgtcgacaagtatggagctaacgtcgatggatacagtcctatttacaacgagaacgagtggtcagcgagtggtgacgtgtacaaggggggagtcaccggat

SEQ ID NO: 115175 - DNA, 348 bp, Arabidopsis thaliana columbia
tcgtccgtcgtcgcaaccctatatactgacgtcgtattatctacaagatccgacctaacgtgggagcggatacgacgtcagaactctactaggagtgaaagttgcattaccgatcaaaggatggtcgtcatgtctgctcgtcacagctcttttactgctctttctctatctcgcagctctgcattcctcggccatcgttcaatttcgcctatttcccactccgtcagctctcatgtcacttccgctgagtaaccatgtcttgttcgtgaatggcacacgcgttgtaaccgaacagaatgcacagcaggtattcttctgattcgccacatgatccatgtccagtttggc

SEQ ID NO: 115176 - DNA, 455 bp, Arabidopsis thaliana columbia
ctcgggcgtcgacacaagcctatatactgatgcgaaatagcgacagaagggggacaaaaaaagaaacagtgaagaagaaaaaaaagaaggtcattttcattttctccatttgatttttgccgaccggagaaaatatcttcttgccgtcttcttcttcatttcaccaggaacttttatttgaaatcggtttgatttagccatggcaaacgcggcatcgggaatggctgtgcatgatgattgcaagctgaaatttatggaactgaaggcgaaaagaacattccgtaccatagtctacaagattgaggataagcaagtgattgtagagaaactcggtgaacttgaacaatcatatgatgactttgcagctagtcttccagctgatgattgccgatattgcatttacgatttcgactttgtcactgcggagaactgccagaagagcaagatcttcttca

SEQ ID NO: 115177 - DNA, 299 bp, Arabidopsis thaliana columbia
tcgttcgacaacgcaacactctatagtgagtcgtattaagacgcaagaagacaacgtagcggcataaaaaaaaaaaggagagaagagtttcaaaggccgccacaacaatgagcctctcatcccctgctttcgcgggaaaggcagtcaacctttcgccagcgggatcacaactccttgcaagctggcgtgtaacgatgatgaagaatgttgctagcccaaagggtctagcaggtagctcatggtactgatcagagcgattcaagtgattgggtccattcactggcgagtcacccagcgaa

SEQ ID NO: 115178 - DNA, 460 bp, Arabidopsis thaliana columbia
tcgtaggacgacgcaacactctatactgagtcgtaataacgacagaaggggacaactgaagaagaaggcaaagccctttctgatatggttgccgagaaacttcagattggaggagaagaagagaagaaggaaacgacgacaaaggaagtggagaagatctctaccgagaaggcagcatcggaggagggtgaggcggtggaagaggaagtgaaaggaggaggaggaatggtcgggaggattaaaggatggttcggtggtggtgcgactgatgacgtgaggccagaatcgccacattctgttgaagaggctccaaaatcatctggctggtttggtggtggtgcgaccgaggaggtgaagccaaaatcgcctcattccgttgaagagtctccacaatcacttggctccactgttgttccggtgcagaaggagctttaagaatatgagaactgagattttcaag

SEQ ID NO: 115179 - DNA, 450 bp, Arabidopsis thaliana columbia
tcgtgggtcgacacaagactctatactgagtcgtattaacgacagaagggggagcctcgaagaaagcaaataaaatctagagaagcttgtttctagggtgtcgactctcgacggccggtacgatttttcaactgcttgttctaaggaatcatgaagcctgtcttttgcggaaactttgagtatgatgctcgtgagagtgatcttgagcggcttttcagaaagtacggcaaggttgagagggttgatatgaaagctgggtttgcttttgcctatatggaagatgaaagggatgctgaagatgcaattcgagcgcttgatcgctttgaatatggtcgcacaggacgcagactccgtgttgagtggacaaagaatgaccgtggaggtgctggaagatcaggtggttcgaggagaacatcttctggcttgaaaccttcaagactctgtttgcga

SEQ ID NO: 115180 - DNA, 454 bp, Arabidopsis thaliana columbia
gttggtcgtcgcaactccctatagtgagtcgtattagacagaagggggagagagatatagagagcatcaatggcgtcgtcgtcaagactttgcgattcgtgcaaatcgacggcagcaactctattctgccgcgcagacgccgcgtttctctgcggcgactgcgacggtaagatccacacagctaacaaactcgcatcacgtcacgaacgagtttggctatgtgaagtatgcgaacaagcaccagcacacgtcacgtgcaaagctgacgccgctgcgttatgcgtcacgtgcgaccgtgatatccactcagctaatccactctctcgccgccacgagcgcgtaccaatcactcctttctacgacgctgtaggtccagcaaaatcggcgtcctcctccgtcaatttcgtagatgaagatggccgtgacgtcactgcttcgtgggttttagctaaag

SEQ ID NO: 115181 - DNA, 433 bp, Arabidopsis thaliana columbia
gggtccacgcaagactctatactgatgcgaaataacgacagaaggggggtactgtagacgtaaaggagaactctacttggtgtatgactttatgcccaaaggaagccttgataagtttctttataatcaaccaaatcaaattcttgattggtcacagagattcaatatcatcaaagacgtagcctcgggactctgctacttgcatcagcagtgggttcaagtgattattcacagggatattaagccagcaaatattcttcttgatgaaaacatgaacgcgaagctcggtgattttggacttgcgaagctatgtgaccacgggattgactctcaaacctcgaatgttgcaggtacatttggatatatatcaccggagctgtcgagaacagggaagtcaagcacaagttctgatgtttttgcatttggagtgttc

SEQ ID NO: 115182 - DNA, 321 bp, Arabidopsis thaliana columbia
gcgggtcgacccaagactctatactgattcgtaataacgacagaaggggacccatttcttggcttacaacaacaaatcttaaacgttttactttgtgctgcactactcaacctcaatggccgcctcaacaatggctctcccctcccctgccttcgccggtaaggccgtcaagctttcacccgcggcatctgaagtccttggaagcggccgtgtgacaatgacgaagactgttgccaagccaaagggcccatcaggcagcccatggtacggatctgaccgtgtcaagtacttgggtccattccctggcgaatcaccgagcta

SEQ ID NO: 115183 - DNA, 465 bp, Arabidopsis thaliana columbia
  unsure (1)..(465): unsure at all n locations
ctcgttggtcgtcgcaacaccctatagtgagtcgtattacgacagaaggggctacaacataatcagcgacagctcaaacgttgatatttttctccggcttttctagggtttaaattttctttccgatcagagattaatggcgactctagactccgacgttaccatgattcctgccggagaagcctccagcagcgtagccgcgtcgtcttcgaacaagaaagctaagcgattcgaaattaagaagtggagcgccgttgctctctgggcttgggatatcgttgttgacaactgtgcgatctgcagaaaccacatcatggatctttgtatcgagtgtcaggctaatcaggccagtgccacaagtgaagagtgcactgtancttggggggtttgcaatcacgccttccactttcactgcatcagcagatggctaaagactcgtcaagtttgtccaatggataacagtga

SEQ ID NO: 115184 - DNA, 425 bp, Arabidopsis thaliana columbia
cgcgttgttcgtcgcaacaccctatagtgagtcgtattaaccacagaaagggagctcaagcttctacgtcatcttcgacatgagaatgtggttgctcttaaagatgtaatgatggctaatcataagagaagctttaaggatgtttatcttgtttatgagcttatggatactgatcttcatcagattattaagtcttctcaagttcttgcaattgacgattttgatgaaaatgagctccaagaggctgacaaaatgataaaggaggaggggaagtttctgtgtgtgtcaatgggacatgagaacaagacacttgatgattttgtagaagctcacaacacatgcgtgaatgatctcatgtatttccccactcgaagcgcttacgagctctcaggtgttgctgggaacgcggacaaagttgcagcttt

SEQ ID NO: 115185 - DNA, 445 bp, Arabidopsis thaliana columbia
  unsure (1)..(445): unsure at all n locations
actcgttgttcgtcgcaacaccctatagtgagtcgtattacaacagaagggatgccacaactgcatcaaacgccgaagaaagcagttggggtacctattgccctggagaggaacccagtcctccaccggagtatgaaacttgtttaggtgacttgtacagtgttgcttggatggaagatagtggtatgcacaatttacagactgagactctgcaccagcaatatgaacttgtgaaaaggaggactgcacctgttgggtactcttatggttctcatgtcatgcaatatggcgatgtaggaattagcaaggataatctcgatctttatatgggaacaaaccctgccaatgacaattttacctttgcggatgcgaattcactaaagccaccttcaagagttacaaaccagcgtgatgcagatcntgttcatttttgggaaaagtaccg

SEQ ID NO: 115186 - DNA, 399 bp, Arabidopsis thaliana columbia
  unsure (1)..(399): unsure at all n locations
ggtcctaaaccagaacaatatatgatcttgaaaatatatttaaaatcttttgttttctccttgtaggctttcctgttgtgtttgtaccaagcgggaaaactggcgtttttacacccaatgataagtatgatacaaaccgtcgccttctcctctcttctctagcttctcatgttgtagctcgaggtgacttctacagtaattcacttggccaagtctatgatcgggtgtatgctttggggatgttcatctcaagttgttgaacanaggtttgctcanactgtatcgaccttgcttctaaagaggtgttagangaatgtaccaaccagacaaaaggcattgcctggcccgaaaatgggattccttgtatggtacgttactccaaccgttcgttttctggat

SEQ ID NO: 115187 - DNA, 423 bp, Arabidopsis thaliana columbia
  unsure (1)..(423): unsure at all n locations
gtgggtcgacgcaagactctatagtgacgtcgtattaagcgtccgacagaagggggtcgtgcgatacagttctgggtttgctgaagaagactctggaaaaaagttcatccatcacaattgattcgtgttcttgaaacgaatctatcgattcaaacacatgaaacattcggtgaatcggcctccgacaccagatgaagacgatgtggcggatggtttcgagaaagacaaggtcacgcttcgagaaatcatcaacgtcaagttggtggagagtggagagaaggagaatctaatggagcttgtgagagatagattggtggagtgtggttggaaagatgagatgagaattgcttgcagggagcatgtanagaagaaaaggagaanagatgttacagtcgatgaactgattcgagtgatcactcctaa

SEQ ID NO: 115188 - DNA, 461 bp, Arabidopsis thaliana columbia
gactcgtgggtcgacgcaagactctatactgagtcgtagtagacagaagggggtacaagtggaattttgaaaaaagaagcagagagcgatggagagagtggttgatctcttcggagtcggagaagctaattcccagaagctactcgaaggaggcaaagatctcagcgagatccaacagggattgttcataggatcagtagctgaagcgaataacaaggattttctcaaaagctctaatatcactcatgtcttaaccgttgctgtggccttggctcctccttatcctgatgattttgtctacaaagtcattgaagtggttgatagatccgagaccgatttgacagtatatttcgatgagtgttatagcttcatcgaccaagctattcaatctggtggtggtgttttggttcattgcttcatgggaatgtctaggagtgtgactatagtggtggcttacctga

SEQ ID NO: 115189 - DNA, 395 bp, Arabidopsis thaliana columbia
gacaagcgaaaagaaaaaagttaagcgaagaagacgaaagagagaaaattttaggtttttgatttttcaatggcgacgacgacgggacacgagagatcaaagactcttatcaatttctcgttaccgaagttgtgggggactcaacatccgaaacagagtcttctatcgcagtcgctaagcgtcacattcacggagaatccacagccaacggcggtggtcacattgcaggagcagcaattgacggattggattacttctccggtgacgcgacggttcggaatcggcgccgggtttacctgggctgggtttttagctttcggtgttgtctccgagcagatgaagaagtcacgactcgatgtgtttcaggaagaggataacacaagaggtttagaaaa

SEQ ID NO: 115190 - DNA, 115 bp, Arabidopsis thaliana columbia
gcaactccctgatgtgagtcgtattaactacagaaggggacagatgagacattagtagaataggttattgattcgattggagtacacatggttacagctggcttacatatatatc

SEQ ID NO: 115191 - DNA, 451 bp, Arabidopsis thaliana columbia
gcgcgggtcgacgcaacaccctatactgagtcgtaataaccacagaagggcaggaatgatgacaattaaccttgacctaaagagaggaggaaacggaaggttcttgaaaactgcggcttacggacactttggaagagacgaccctgacttcacctgggaagtcgtcaagccactcaagtgggacaaacctcaagcttaaattttacctactctgtttctgtcttcattccacaaaccaattatctgctcacttttttatttctctgtttttgtggtttattgtgtttatgtatcattgtacttgagctatttcaattgggtgtttgtttttatggcgacttttacacggcttggagtaagtttcatgttgttcttatataattataaccatgaaaaattaatataaaaaaaaaaaaaaaaaaaaaaaaaaaaaagcggccgctctacagga

SEQ ID NO: 115192 - DNA, 450 bp, Arabidopsis thaliana columbia
gcgggtcgacccaagactctatactgactcgtattagacagaaggggatcctcggtgatagcggggtgggaaaaacctctttgatgaatcagtatgttaataaaaagttcagcaaccagtacgaggcaaccattggagccgacttcttgaccaaggaagtacagtttgaagatcgacttttcactttacagatctgggatacagctggacaggaaaggtttcagagccttggtgtagccttttaccgtggtgctgattgctgtgttcttgtatatgatgtcaattccatgaaatcatttgaaaatctgaacaactggagggaagaatttctgatccaggcgagtccatcagatccagagaattttccatttgttcttatcggaaacaaggttgacgtggatgatggaaacagcagagtggtttcagagaaaaaggctaaagcttggtgtg

SEQ ID NO: 115193 - DNA, 202 bp, Arabidopsis thaliana columbia
tgctaaacaacaacatcaacatcacacaccgataagaaataaaaagtaacaaaaaaaaaaaaataaacaacaaaagcggcagctcaaaatggatccaagcttaggtacggctgcatgcgacgtcaaaactctaccattatgtcagcggaattccgttcaacggctgtcgtttgaaacatatccgaatgaaaaatctgcttgt

SEQ ID NO: 115194 - DNA, 417 bp, Arabidopsis thaliana columbia
agacgtcagcaccacgcgtccgcggaagcgtcggctacaaaaaaacgacaggtagggctactttgtttaaaggtaacgataacgctgctaaacgtcgacattctggcacttttacgtgcaacaaaccccgacttatggaagggacgcatttattagataaaaggtcgacgcgggctctgcccgttgctctgatgattcatgataactcgacggatcagcgcaacattcttttagagaccattggagataagtttgagcaatggaacctcaagattcgcaaagaaaaagctatctatcacaccttgaacatgcttagtcttgatgtgactaagaagtgccttgtgggtgaaggctggagtcctgtctttgcagcaacagaaattcaagatgcattgcatcgtgctgcggttgactcca

SEQ ID NO: 115195 - DNA, 391 bp, Arabidopsis thaliana columbia
gaaagcaaaacacagaaaaagccattctttttgccccttgagtgctttcagctcttcccacaaggttacagaagtaatgtcacgtgtgtacgtcggaaatttggacccgcgagttactgagcgtgaacttgaggatgagttccgtgcctttggagttgtcaggagtgtttgggttgcccgtagaccacctggttacgcttttctagatttcgaagatcctagggatgcccgtgatgctatccgtgctttagatggcaagaatggctggagggttgaacagtctcacaatcgaggtgagcgtggtggcggcggtcgtggtggtgaccgtggaggtggtggcggcggccgtagtcgcactcctccaagatacagaaggagcctaagctatgga

SEQ ID NO: 115196 - DNA, 328 bp, Arabidopsis thaliana columbia
gggccgagaaaaaaaaaaatgttgccggtcacaagtcgccgccatttcacaatgtccctatatatgctccgttcatcttctccacacatcaatcatcactctttccttcttccttcttttgtttcctccaaattcaaacaccatactttatctcctcctccttctcctcctcctcctcctcctatgggtgcgtgcatcgacacctgccgcactggtaagccccagatttctcctcacgattggtgaaggagctaagattggtgcggggtctgtggtgttgaaagagctgccgccgcgtacgacggctgttggaaatccggcgaggttg

SEQ ID NO: 115197 - DNA, 420 bp, Arabidopsis thaliana columbia
gagagaagaagaagaagaagaagatgagtaataatactaataatacagagatgaataatctagcgatggaagaagaggatgaaggagagattttccttggtgaatccgatgttctccgtgaaatcgatgtcgacgaagaagatcttcctgaagcggatgatgatgatatggacgatgatggtgaacaatttgatgaaaacgatgactctgttcacacattcactggtcacaaaggtgagctttatgcattggcttgtagtccaacaggtggaatggacaagaagcttataatctgggatctgcagcattccactcccaggttcatctgcgagcacgaggaaggtgtgacatctctgacttggataggaacctccaagtacttagccactggctgtgccaatggtacagtgagcatttggg

SEQ ID NO: 115198 - DNA, 407 bp, Arabidopsis thaliana columbia
gacccatttcttggcttacaacaacaaatcttaaacgttttactttgtgctgcactactcaacctcaatggccgcctcaacaatggctctctcctcccctgccttcgccggtaaggccgtcaagctttcccccgcggcatctgaagtccttggaggcggccgtgtgacaatgaggaagactgttgccaagccaaagggcccatcaggcagcccatggtacggatctgaccgtgtcaagtacttgggtccattctctggcgaatcaccgagctaccttaccggagagttccccggagactacggatgggacaccgccggactttcagctgaccccgagacattcacaaggaaccgtgaactagaagttatccacagcaggtgggccatgctcggagccctaagctgcg

SEQ ID NO: 115199 - DNA, 341 bp, Arabidopsis thaliana columbia
ataagggggataacacatcgatagaacaacaatttgatcatcttgtgataaaactactggctgcttcaataatgctatcgtcggtaaaattcacaacaactggtttcgccgtggagaatacagccgctatcggattagcgtcgctcacaaaagtccgtccctccttcatgattctcaccattggcgtcaaatatatcaagatccactaccccttccgacttagagtcatcatcgacctgatggcacggatcaacccctccgacacaaagggctagggatactctttctacccctaccttcataagtatctagccaacgtcgactgatacagttcgatttag

SEQ ID NO: 115200 - DNA, 269 bp, Arabidopsis thaliana columbia
aatccataaaaaaaaaaaaaaaaaaaaataaaaaaaaaaaaacggccgctctaaaagatacaaggcatcagtacgcgttcatgcgacttcaaagcactctcgataatgtcacctaaattcaagtaactggtcgtcgttttgcatcgtcattactgggatagaccacccagtgggtcaacttaaacgccatggtttaaaacacgttttctcctcttggggctggtcccaagatgcccctatggatcgcccttcttaacggtttcgcaacc

SEQ ID NO: 115201 - DNA, 381 bp, Arabidopsis thaliana columbia
cataaaaaaaaacacacaaaaaagtttcaatggacgcctcaacaatggctctcacctcacctgctttcaccggaaaggctgtgaacctttcccatgcgggatcaaaagtccttggaaccagtcgtgtgacaatgaggaacactgttgccaagccaaagggtccatcacgcagcccatggtacggatccgaccgaatcaactaattgggtccattctctggcgactcacacagctaacatagcggaaatttccctggagactacggatgggacacagctggtctatccgctgagcccgatacattcgcaaagaaccgtgagcaataacttatccacagcaagtaggacatgctcggagacctatgctgagtcttcactgatc

SEQ ID NO: 115202 - DNA, 347 bp, Arabidopsis thaliana columbia
gtcgcaagaaaacacgagctatccgtagacgtctcaccaagcatcaggcttcgttgaagacagagcgtgagaagaagaaggagatgtatttcccagtgaggaagtacgctatcaaagtgtagtttcattctcccagctctagcttctagaaatgaatgattcagcctttgattatcggcgtatgttatctcctctctttttgtccaaccttagtaagtttagttgtactgaagttttgttatcacacaacctctctagaatcattagtagttcataaatattgaatttaagcgagatgggaggtgggaagggcaaaaagcggccgctctagaggatccaagcttagg

SEQ ID NO: 115203 - DNA, 396 bp, Arabidopsis thaliana columbia
gaaagcagatatcacacagatggctcaagcagtgacttcgatgactggcttacgttgatcatctgaggctgtccttataggagctttactgatcaacggttcagaccgtttgaagagctccacagtatccggaggctctcacctcattagactttgcatgagggtgcaacaaacagtgtcaatggcagaacctactctccggtcagtaactgtccacgtggaagctggctcacccgctggatcattcgtcaaagctgttttcgccgaagccattcgtataaaaattggtcgtccttcacttcgttacggtgaccgacctggaacagataactcagaccaagcaagagacatttcattggcattgacagatatattttacatacaaccattgttacc

SEQ ID NO: 115204 - DNA, 273 bp, Arabidopsis thaliana columbia
ggattacgcgaaaaatcaaaggtttttggatatggcgtcgaagcggatcttgaaggaattgaaagatttccaaaaggattcaactaaaacaagttacccaaggcctggtgccgaaaacaagtttcaacggcaagcaaccaataagggtccctcaaaaaatccctaagctggaagtggtttccctggaaacaaccaattccctccggattaaccaatcaaacctcctaaagtgggccttaagaccaaagtgttccaacccaacattaacaacaa

SEQ ID NO: 115205 - DNA, 250 bp, Arabidopsis thaliana columbia
ttgtcaaaacgacaaaaagggggaattaaaaaaaacatgaaaaaaaacgaaaaaaaaaaatcacaccggacgcaaaaggggatcccaacaggattcaaccttacatacacgtccatgcaacatcaggagagcatcaaaatcaccactgaaaggcactcaagtgactctcggttaaaatggtactaccagggaacaaccatcagaaatccaccataacagtctcgagaaacataaagctctcacaataagt

SEQ ID NO: 115206 - DNA, 277 bp, Arabidopsis thaliana columbia
attcgtaaaaaaaaaaaaaaaaaaaaaaaaaaaaaaaaaaaaaaaaaaaaaaaaaaaaaaaaaaaaaaaaaaaaaaaaaaaaaaaaaaaaaaaaaaaaaaaaaaaaaaaaaaaaaaaaaaaaaaaaaaaaaaaataaaaaaaaaaaaaaagggggccccccaaagggttcaaacctaacttcccctggcatgcaatttcaaaccccttcaaaggtgcccccaaatttcatttcacgggccttcttttaacaactcctggccgggaaaacccgggggt

SEQ ID NO: 115207 - DNA, 352 bp, Arabidopsis thaliana columbia
tacggctgggaaagacgacagaagggttgtttgacaaaaaaaaaaaaaaaaaaaaaaaaaagcggccggtcgatcggatggatgcatacttacgtatgcatgcaaggtaagacatcttccatcgagacagtcaactacatttaattgaccgtccgttgacaaagaccttactgacagaaaaatgcctttagtcaactaaatcaacctgcatgaaatacatctttcgttagctagcttaagtactaacaagcacgcacggatcgatcgtcctaacaattacttacccagactgaatagtgagacggaccctgtctgtgcccattaatcaagggcggtgtgtttggtagtcaca

SEQ ID NO: 115208 - DNA, 384 bp, Arabidopsis thaliana columbia
tgatatcaaaaaaaaacaacaaaaagggaacaaaaccggcggtccaaaaggttcaaacctaccttccccgggaatgcaacgtcatgcccctccaatatggcaaccaaattccaattcacgggcctccgtttaacacctccctgacgggaaaacccctgcggtaaccaaattaaaccgcctggaacaacacccccctttcgcaaactggcgtaaaaccaataaggcccgaacgaattgccctcccaaaaatttccccatcctaaagtgccaaagggaaccgccccgttaccggaccattaacccgggtgggtttgtgggtaagccgaaccttgaccccaaaacttgcaagggccctacgatcggtcctttcggcttcctaccgtc

SEQ ID NO: 115209 - DNA, 327 bp, Arabidopsis thaliana columbia
tggggtggcagagaggttacacatcgatggtaacatctttgcttctcagacattcctcagctgtcatcttctcacagtcttccctcctcaacattaggaaatcttttcgctcatttacatccaacacaatgggcgaaggtgaagcagagaatgcagtgaagaccaataagggggttgtctcaggagtaactgaataaatggcgatcaggattgtggagcacttgatgtctccatggctttgtcgtcatagctggggttcgtgatgtacacaaagcatgtacatctttcacaaatcacgggtcgccgcagaacattatagcaaacgtg

SEQ ID NO: 115210 - DNA, 400 bp, Arabidopsis thaliana columbia
gcatccaaaaaaaacagaacaaaaaattatattcaagagaagaaggaaaaaatgaattgcatctccgatcaggtaaagaaactctcaagctcaacaccagaggagccagaccacaacaagccagtccaaaggaaccgaaacagcttacagaacaaccaacaacgcccaacccaaggcaaattccaagggtgtaaccgaagttgcccaaaccgcaactcctaacgaatcaaaccaactccaaaagggtaaaatccccggaacctctgctgaaaacctaaacgctgcccaaaaatacgggaagttccaataaaagaataacactggtcagtaactcgaaaagggtgagaaatatctcaacgactacgaatcctcaaaatccaacggtgctggttggcctcct

SEQ ID NO: 115211 - DNA, 389 bp, Arabidopsis thaliana columbia
atgcgagatctgcatcaaacgccgaagaagtcaattggggtagctattgccctgcataggaacccagtcctccaccggagtatgcaacctgtataggtgacatgtacagtgttgcgtggatggaagataatgggaggcacaatttacagactgatactctgcagcagcagcatgaacttgtgaaaaggatgacagcacatggtgggtacccgtaaggctcccatgtcatgcaatatagcgatgtaagaattaccagtgacaacactcgtatggttatatgggaacaaaccctgccaatgactattttaccattgcggctgcgacttcactagatccaccttcaagagttatcaaccatcatgatgcagatcatgtacaatcttgggaac

SEQ ID NO: 115212 - DNA, 385 bp, Arabidopsis thaliana columbia
gagacaaacaaatcgacacagacggtcacttacaaccacagatcgctatgtgagcttgagcgatcgtggcattggcaaattacgtgattcttcgtgatttctggacgagtatgtacgggatgaagacaacgatcgcaatgagggatagaagtgttgaccttgagtacatggctcaagatcgaacgaagaagagtcctttgcatctccacgttaatctgattcatacgaagattcctgttctcatccacattggatgtaccggttaacgacatctatcatccaggttcagtacattgacgatgtctggactcacaaggatcctatccttcgttctattccttacgtgaaagctcacactaggttatgggctcatttcattgacaag

SEQ ID NO: 115213 - DNA, 375 bp, Arabidopsis thaliana columbia
gtatgcagaaggaagagaatgtagttgtaaaccatgagggtgttcgaagagatacctgttcaacgccactgaggctaaggaactcgcaaacgcagcaacaggtgagacagactcaacaaatcaaatctcaggaaccgggctatctacctcaccagatacgaacacagcgtttcagacggttaacattgatgaaactgtgtctactgagactacaacttcttacgattcaaacggtctcgataaggttggctacggccgtacctctgatgatgttctcggccatgtgaaaagatatagtacctacgatttccggcatgacactgctcagtacctccacagagcctacagatgacgaatgatcgattaatcgtcaca

SEQ ID NO: 115214 - DNA, 370 bp, Arabidopsis thaliana columbia
atacagctgcaataagacaacaaattggtaacgttgcgaaaatccgacagttggggaatacacacagagtccattacaattaaacaagtttcagtatatatcgtataacacgagttgcacaatggctacctcaatcatgaagaacattccaatggcgatcccaactttctccatgtgtcacaagctccagctccttaaagaatgcaaaactcgctacctccccaacaccgattaaaattaaaggctaatctgcgaattcacaaagagtttcgattctcttcctaaagatataggatcgaaaactcgttaacattacctattccaagggttttggcgccatgccaatgatattcaaaccatcatgtctttc

SEQ ID NO: 115215 - DNA, 135 bp, Arabidopsis thaliana columbia
tacgcgctgccagaagacaacatacaggtacatcagacagattcctacaaaatggtactgttgccatatagacccaccatagcgcgaaaatcacatggacagtaccaatcaatgtcatctcccctgattcacgat

SEQ ID NO: 115216 - DNA, 243 bp, Arabidopsis thaliana columbia
caccagtgacactaatctcacttcttgtcctttccagtagcttcctctcgtcgctcttcgtcatcctctcgaactctctcgctgatctcggttatctcgcggagaatccatatgagcactgctaggttagttactcgttcgccctttacgaaaccacatgtgtccgccgtcacttaggaggtcctggacagtatcagatctcatgatcacgatgggatcgttgttcatgcttgagcatactgt

SEQ ID NO: 115217 - DNA, 287 bp, Arabidopsis thaliana columbia
ggaagacatcgagagaagtatagtttgatcatcttgcgcgaaacataatggtcgcttcagtgatgctgtcttcggtgacattgaagccaactggtttcacggtggagaagaatgccgctcgagggatacagtcgctcacatgagcgcgtatctccttcaaaaatgtcgccagtggcgtcaacacgatcaagatcgaccagcccttcggtcttagcggcaccacggccttgatggacggagtcgacgcctcaggcagtctaggcacaggataccgtcttcacaactat

SEQ ID NO: 115218 - DNA, 343 bp, Arabidopsis thaliana columbia
ggatcttttgatccattcacaaggcagtgatccactggacaatcacaacggcaacatccagcatccagcactcaagtccgtctatcgacctgggtccaccgtcagaagcgtaatcgctcctccatgatctggatctgcatcaatattcaccggatgaggaccgacatagtaccacctcctccagcagcaacatcagcagcttcatctgttctggacagaccacagacaagagatcgaacaggtaaacgatttcaagaaccatcagctctctctaggtcgtatcaggaaaatcatgacagctgatgaagatgtgcgtacgatctccgctgaagcaccggttctc

SEQ ID NO: 115219 - DNA, 200 bp, Arabidopsis thaliana columbia
cgttacggttgctacaatacgacagaaggataccgctgccacaatacgacagaacgatacggctgcgataatactacagcacggcatcttgtcacgtaaacacttggagttccacatgaataagatccattacaagaatggcaacggtgctgcttagagtcacttcttatctgccttgagcttttgacttacaacatgtt

SEQ ID NO: 115220 - DNA, 263 bp, Arabidopsis thaliana columbia
tacggctgcgcgacaaaaagggccggcggctaccactgacgatgaagactctggtgctgggcttggacgttatgcgaagatggctcagggttacttgaactgatttgatctttaactgttgttcatcattttcgtaatcgtaaattaaataactactatcgtttgtgactaatttacgttacttcgtctacgtttatgtggagtgacaattgcgtgtgagaccctctggttatcatgattctaaaccagctctgtcgtgatta

SEQ ID NO: 115221 - DNA, 125 bp, Arabidopsis thaliana columbia
tttcgataaaagacatcaaaatgagggcaaagataacgagcgtccgacataaagggaaatcccctaagtatcatcatcgactactgtcaactgagcgctcatgcgcctgcaaatttaattacatc

SEQ ID NO: 115222 - DNA, 106 bp, Arabidopsis thaliana columbia
tggttacgacacaacggtatcgctcctagaacacgacacaagggtacagctgccaataaacgacttaaagttactgctgctacaatacgacagctaggtatcgttg

SEQ ID NO: 115223 - DNA, 135 bp, Arabidopsis thaliana columbia
attcaataaaacatctggaaaacgtcggtaatgctcagctgaagctccagccgctctatacgatccaaccctacatacccatgtatgcgaccttctacctcttcaacaatgtcccctacattcacttcactggcc

SEQ ID NO: 115224 - DNA, 374 bp, Arabidopsis thaliana columbia
gaaacgatcaacgaagtagacgaagacgatgcataaatgtggattcagcaatattctcaaacacgcaattccggttgcaggcgaccaatccaacaacatattcctgactcatcgcggtaagtttaaagatggagatctacgtgttaacaaggacagacttcgaatgatttctcaattggagcttgaattcctgtctcaaattaatccatctgatgatcagcttaacttgtcggatttggataaggttactgtcaatcgcagatgaaatactagtgttgttcatctggttcatcacaaatggagtgcgcaatttttcgccttgaacgtcattcagcttaatattgatcaagcaattcgcaaggcaatttcacatc

SEQ ID NO: 115225 - DNA, 310 bp, Arabidopsis thaliana columbia
agcgtcggactccaggtcgaccacgcgtccggaagacgacagaaggggagacgtcgaagatgaagttcaacgttgcgaatccaactactggatgccagaagaagctcgagatcgacgatggccagaaactacgtgcgttttacgaccagagaatctctcaagaagtcagtggagatgctttgggcgaggagttcagaggatacgttttcaagatcaagggtggttgcgataagcaaggtttcccaatgaagcagggagttttgactccaggccgtgttcgctttctgcttcatcgaggaactccttgcct

SEQ ID NO: 115226 - DNA, 102 bp, Arabidopsis thaliana columbia
gaacgaattcatgaggatgagagaaatgataattcttctgttgtgatggagcttattctcatcaggctgcaaccttttccgttccctcctccattttcaaat

SEQ ID NO: 115227 - DNA, 420 bp, Arabidopsis thaliana columbia
gatccgaggttgatggctcgggttcaagagctattgagtgagctaaagccacaggaagaagaagcagcggcttctgtgtctgtggaatgtgaagttggtatagatgagatagcggttgtcgaaggacttgatgagtttgtgaaggaatggaggaggccttataggacaagaagacttccgattttcgaagagatcttaccactgagagatcaattggcttgttgatgattctctgtgtgtttggattgatgtttgaatactgaataggaacctttttgggtagaagaatgtagtgagtgaatagagtttacctcttgtaagctttttcgggtgtcgttgtctgttattactgtaatgtcaaatgatctcattccaaaaaaaaaaaaaaaaaaaaaaaaaaaaagcggccgctctagagga

SEQ ID NO: 115228 - DNA, 422 bp, Arabidopsis thaliana columbia
actcctacatgcagatgtaagggggaggctaaggaatagagagttactgtctgagcatcatagcttcaacgacgtttcaactgtcgtcaaatggccgtctatttcgctcccttaacttaactcaactcaatggcaagctacctctcaccatcaactcgttttcctccaagattcaatctcatgctcgctgaggagttggtatacactagtcagatactacaaatccactgtcgctaggagccagacaacgactcatagaaaattctaagagtcacctgcttcatgtagttctggtcactcttcagactcctgcgaatacaagttgcaatgcacgatcatgtgatgcatcacctgttgatctgcacatagtcaggcaattaggtattcacgtcgatgacgccacagttaacctagctggtttg

SEQ ID NO: 115229 - DNA, 408 bp, Arabidopsis thaliana columbia
ggcagccatgactacagatgggggagaacaaatcgagggaagatgagttatatcaccatgtgacaaaaacatgggctgcatcagtgatactaccttcggtgatattgacaccatctggcttcacggtggagaataccgcagctaaacgattaccgtctctcagaagagctcgaccatccttcaaaattgtcgccagtggcatcaagaacatcaagaccgacaagcccttcgggattgaaggcatcaaggacttgaggggacgactcggaccctccggcatacacggcaaaggatacagtgttcaccagttcgtatacaagtattgatctaaactcaacagacacagtcctacttacaacgacttacgagtggtcagctactggtcacctgtacaagggacgagtcacc

SEQ ID NO: 115230 - DNA, 372 bp, Arabidopsis thaliana columbia
gacgacagaagggggaggaagataaagaaagttggaaaatggcaaaccctagaagagtagtgatcgagaaccagagattgtcacctttaatcaacctactgaagaagcctcaagcgattcctctgcttctctcgttgttcctcttgctcacatggatctccctcaggttacaacactcttcacaatcacacgtctcttcgtcctcttcacatccgaaatcgacggtaaatagtcatcccgatttgaaagtttacgacgacgacgataaggctaatttggtccggttcggtttggcgtcgctttctcctgctcggaaagacgaccgtggttggttgcttgatcccgttatccttgctcgtgaatctgagctca

SEQ ID NO: 115231 - DNA, 366 bp, Arabidopsis thaliana columbia
cccacgcgtcgcccaccgtccgccgaactcagcgcaggaacattccgtatgccgcaaaagcgtgaaggggacctattaaactctgatgacaagctggatgagatggacagacaattcatttcgtcgtaaagactgatggtcaaacctaggtggtcatcaggcactgatgaggcttcatcctctaacaggcagtcaatactgggccacgattgtgagaagacaggcaggattcactaggcaggaccattgattccaggataaagcaacttggagaatctaatcagtcttgatcaaatacaatgtagattcagcagatcacactgatctcactctgtattgactactgaaaacgacgtcattacgcat

SEQ ID NO: 115232 - DNA, 333 bp, Arabidopsis thaliana columbia
agccgtcagcacacgcctcagcgcatacgtcgccacaacactccgtaaggctacggctgccaaataacgacaaagtggtccggctacgtaaagaccactgaatgctacggctgcgacacaacgacagaagggtcctgctatgataatcagactgcaagctacggcgttcacaacatcacttaagagtactgctgccaaaaggctacatagagttacagctgcgaaacgactacacaacggatctgccgctataatactacagaacggtaccgctccgagacgtctacagtatggtactgctcctagcttaccacagatcggtacagctgctat

SEQ ID NO: 115233 - DNA, 191 bp, Arabidopsis thaliana columbia
gacaacaacgataacgatatttatcattagagtctgatttgagctaagttctctcatcataaggtctcgttggaaaatcatggcaatttgatatagctcttatagcatcacatctcggaactgttcctattctacgacacgtcgatacggatgctcaaagactcccgaaagatacagctgtaagcagacaa

SEQ ID NO: 115234 - DNA, 242 bp, Arabidopsis thaliana columbia
gaagaagagatcgagagaagagtagattgttcatcttgtcataaatggagaggttgcttcaatgatgctatcctatgtgagattgagatcaactggtttcaccgttggcgaagacgtgtgcgctagaggattatagtcgtccacaacgagccgtcgctccatcatcattgaccgtactgttgtcacgtgtatcaagaactacattcccttcggtattaacggtagcatagacttcatggaca

SEQ ID NO: 115235 - DNA, 397 bp, Arabidopsis thaliana columbia
acaacacatcagtagggctatcaaaggattaaattgtggtacggctacgaaaagaccaaacagggctacggctgcgagaaaacaacagggagttagtgctcgaagaatacaagagagagggtttagcatgccacactaccacataacggataagcttcaaggtcagcaattacgtcgatgtcaaagtgaatggtgcgatccacaagggtatgccgcagaacttctagatccgtcctaatgtacgctatcagtaaatctctaaactcttcgtcggtgttgatatcttcaattaacttgccatcatgataaaacggaataagagtcatatgcctgtcgtgcatctgcatcatccactatctgcagatgactttatcctcagcaagcataataacgatga

SEQ ID NO: 115236 - DNA, 156 bp, Arabidopsis thaliana columbia
acagccaaaaaaaacaaaacaaaaaattatattcaagagaaaaaaggaaaaaatgcggttgatctacagtatcgaagcttaactctcagtctcagcaacatcagagcccttccacaatgtcacattcgttcgattcactggaggtagattaacaac

SEQ ID NO: 115237 - DNA, 282 bp, Arabidopsis thaliana columbia
gacagctgatatctttagattagtgccatttgcaatgttcatccttgtgccgtttatggagtttttgctcccagttttcttgaagctcatccctaatatgttagcatcaactttccaggacaagatgaaagaagaggaagctttgagaatgaaattacttgccaagataaaatatgctaagtttcgtcaggaaagcgccgcgccttgggcgttttggcatccgcatcttcggtgtgtaaagagcgcgaagaattcctgagaatggtcaagaaagaggtggag

SEQ ID NO: 115238 - DNA, 281 bp, Arabidopsis thaliana columbia
taaattcagatgtcgttatgattactactgggcttctgtcttcaaggtagagtagatagataacttaatgggtcaaacacggttagcgttttcagaaggctcaaatgaagctctttctcctgagtgcagacctaactttggtgctgcattacctaccacagatcacttcaaggttaattagacgtacgattgctggtacagattagggattccaaagacgaagctttatcgggacagcattttcggtctccaagcagatgatccttccttcactgacagtg

SEQ ID NO: 115239 - DNA, 413 bp, Arabidopsis thaliana columbia
gacagacaggggtgtttatagttcgatcaatcacactgatgctggatgtgtgtgtgtacagatggttgccatcccagctatctcttccctcaccaagctcgttcgagatatatgtgaacgccccatggatcgatcaaatgctggctgcgcccttgcttgcattccatataaatgaaacagacaaatactccatccactttcatgcaagctcgatcgctttcacgctcactgttgggagtcatccttcagtaactagcaagttaattattcattcaaatatgtctctctcacacataatggagtgtgtgtgtctgtcggttgagtaatgcatccatctatcatccaccttccgttagacattgtttggtatgcatactaattgcatacagtctaatcactgtctgattctagct

SEQ ID NO: 115240 - DNA, 298 bp, Arabidopsis thaliana columbia
ggaagatatcgacgagaagatatatgtttgatccatcgttgtgacgaaatgataatcggctgccatctagtgactgctattcttcggtgacattgacaccagctggtttcacggtggatacgactgctgctaaaggattatcgttcctcacatgacctcgtccctccatcaatgtcgtcactagtgtcatcatgatgatcaccaacgaccagttcttcagtaacggcagcatcgtctagctgaacgacgtcgtcgcctccggcataaaaggcaagggatacagtgtttacaactacgt

SEQ ID NO: 115241 - DNA, 252 bp, Arabidopsis thaliana columbia
cccgggtcgacacacgtatctgaagggctgacgagacgacgaaaggcggccaagaaagggccatttgtccgaccatttttaaccgccgacttggtatcatcaaatcgaggagattccaagaagcatggtgggatttaagaacagatacatgttaatggaagtttttctggatccggacaaggatcttctcggagaaggagcaccgatcattcttacacaattcaatctctcgaaagcattcaaagacagtat

SEQ ID NO: 115242 - DNA, 168 bp, Arabidopsis thaliana columbia
gatacgggtgctataacacgacacaaaggggcttaaggtaatgcagcacatcagtttgagataagtcagcatgcaccaaaaatgccagcagcatttgcagcaccatcgacggtgataggactcggaggatcatccatcatcaccaggtcccttctcctcaaccttttt

SEQ ID NO: 115243 - DNA, 384 bp, Arabidopsis thaliana columbia
gcgtccgtccaagagtcagtaaggctgcgaaaggtagagcggctggggcaatagtcccagatacgggagcgacattatcatggttaggaacagctcacatggcgggacaccaaggcgatctcagtgaatggctacttgtaatacatacttcacccactgccgcaagtgctgacacatctacacctcaaaacacaccggtcttacaacctatccacggccgtgaaaatccagtcactcaagtcgacgatgaagattctgtcgtcccctctaccgtgaatctttgcgcttccgtggctagtgattgaaactagcatgagacggatggatcttgatgacaatgtggatccttaatgtccttattggggtggatacattccaatttac

SEQ ID NO: 115244 - DNA, 149 bp, Arabidopsis thaliana columbia
tggtgtttccagtggcgagacgggtgagtaacgcattgcaaactgccgttgggaagggaacatgcacgagatgctggtgctgttagctcgtatcctgaagatcatggggagcattccgccccaggaggggctcacgtccgaccaggctg

SEQ ID NO: 115245 - DNA, 417 bp, Arabidopsis thaliana columbia
cgggatagtcgtgcttggtcatcaccatgaaaacatctgcggtatagagaaagatcagagtccggtgttcgaaggtcgcacatatttttattatcaagcatagcctcagagattccaaagttactggggtgtctccagctcccggcgtaggagcatttcggggtattcccaagattattctctcggaatcggaattatcattcgccacatacatcagaattgcccagggtctattgacgatcaagggtgattacacataggagaacctaaaggaaatgttgtctggtgaagacagggtagggatcggtgagaccatgaagttactcgagggtcgcaacactggactagtatcttctaaaacaccagactccggtctatgcacattgtgaatccagctcgtcaggacagttgcggtgt

SEQ ID NO: 115246 - DNA, 336 bp, Arabidopsis thaliana columbia
ggaagaagacggaaacaatggcaattagcttaggtagagtcgtcgttccgtcgtgtaccatttctggagatcggctcttcatacctaacttctcggccatctgcagcgtctcttgtggacgaatcaatgtcggaaccggcgtaatttctgctcgtcgccgccgtgacattggcggggttttaatatctagctgtctctctacggattcatcttcgttttctgggccgaagacgaaactctatgtcagtgggctttctttccgcacaactgaagataccttacgggatacatttgaacagtttgggaaccttatacacatgaacatggtgatggata

SEQ ID NO: 115247 - DNA, 290 bp, Arabidopsis thaliana columbia
gagagagaaaaaactctctctccctcctccgttcaccgtcgcgactcggctcgatagtacattttgttgaccaatctcgtatttagaagatcccaatgtctggcacataggataatatatcttcccatgctcatctttcgtcccaaatttttcatgatcttgttgattcagtgatacctgatgtagcatatgagtgtcatccgatatcacgactaagacatgatcgtgatttggatatactatcagaacagttgagattgtcaatgggagcgcgtgagtagatcgctgat

SEQ ID NO: 115248 - DNA, 415 bp, Arabidopsis thaliana columbia
gaacgagaagaatactctgaaatatcttgaagctgcgacatgaaaaatggacgcggcgatagggaaggttttcgattccgtctcagacttcttctccggcgctgcttctgcttccgccgatgagtttcccttgtgcgattccgacatcatctccggatgtgagaaagaacttgcagaggctcaagacgaaagacgtaagaaggaatgcattatgcgtctttcatgggctcttgttcattcaaagatgccttcggatattcaacgtgggattgcaatgcttgaagctttggcggttaatgatacaagtgcaatgaaacttagggagaagctatatctccttgctcttggttactatcgaagcggtgacttttcacgataccgggattgtatacaacggtgtttggaggttgaaccg

SEQ ID NO: 115249 - DNA, 368 bp, Arabidopsis thaliana columbia
cgtacagatgcaagacgacagacaaggggagagagagatcgtgataagattagcttgatcatcttgtgagagagatatcggctgcgtcagtgatgctatcatcggtgacattgagaccaactggtttcacggtggacaagacaggggctacatgattaacgtcacccagaagagctcgtcccaccttcacaattgtcgtcagtggcgtcaagaccatcaagaccgtcaagcccatcggtattaacggcatcatggacttgatggacggcgtcgacacctccggcagaaaaggcaatggatactgtgtttacaagtacgtcgacacgtatggagctaacttccatggatacagtcctaattacaactag

SEQ ID NO: 115250 - DNA, 224 bp, Arabidopsis thaliana columbia
gacacaacacatacatctatacattgtaaacattatagtactaatcatcaatcgtctgtgctaattcctcctcctcttccatcaaaatcctgatggactcaagaaaaaacttgggcatagcagcgtttcgacagccacaagagatatgtgggatcgtcttttcaatgacggatacagagctgatgtagtcatctatacagataatggcagtatcatctatgctc

SEQ ID NO: 115251 - DNA, 172 bp, Arabidopsis thaliana columbia
atttgaagtttggttatggaagtttatctctttgtctcaaaaaggtgcaacaaacggaatcggttatgcaatagtaaaaaaaattaaataagtgggcgctctagaggatcaaagcttacgtaagcatgcatgcgacgtaataactcttcaatagtgtcacctaatttcaatt

SEQ ID NO: 115252 - DNA, 406 bp, Arabidopsis thaliana columbia
acaaaaaaaaaaaaaaaaaaaaaaaaaaaaaaaaaaaaaaaaaaaaaaaaaaaaaaaaaaaaaaaaaaaaaaaaaaaaaaaaaaataaaaaagataaaataaaaaaaaaaaaaaaaaaaggggccgctcaaagggtttcaattttaattgctcttttcatgcgacttcatacctcttcaaaattgtcacctaatttcatttcactggccttctttttaaaacttcttaattggaaaaaccttggctttacccaatttatcccccttgaagaatatccccttttcgccatttgggttaataccaaggaggcccgcaccgtttcccctttccaacttttcccaacctgaatgggaaatggaaccccccctgtaccggccaataaagcccgggggttttgggggttacc

SEQ ID NO: 115253 - DNA, 203 bp, Arabidopsis thaliana columbia
gggaataggcctgcttggtacaaggagaaagtatatccagagaacaaggttttctatttataactcacgagttcatatgtgacattccacttttggttatgacttagtggaaacttctcgttatctttttcaagtgccagcgcttgagcacaatggaaaaatcattggggagagtctggatttgattaaatatcttgataaca

SEQ ID NO: 115254 - DNA, 205 bp, Arabidopsis thaliana columbia
ggactccgtagctagtgttttagtttccgtctctgtttggagattgtgtagaatgttttagtgttattattaaacaagtcatttgaaagatttttggattcatactgagaagacccaaactatgttgcaagctctacttaccagaatgtttaagaatattgagtttgacaaaaaaagataaggaaacgaacaaaaaaagcgggcg

SEQ ID NO: 115255 - DNA, 213 bp, Arabidopsis thaliana columbia
attctcactagtgtcggtatcagcttacttacaacaagagaaagacatttcgattcaagatgctgaaggacgactaacacccccaaagtcaacagcagcggctctataggatccaaccttgcgtacgcgttcatcctacgtcgtacccctccggctctgtcaccacttctcatcggccatggcggtcctcgcataacgtcgtgcatgggatga

SEQ ID NO: 115256 - DNA, 383 bp, Arabidopsis thaliana columbia
ctggtactcctggacgtcacggtccggagtatccgggttcacgcagatgtaagcttagctgcgcgagaatacaacatgataccgctgcgataatgtcacctaaaggcaatgcagtgagacatcctatttacaaggtacgtgacggagaaaaccctagcatggcacagcttaaacaccatgacacacaggcaccgttcccaaaatagcataaaagggtacaggtgcgaaacgatcacacatcggtacagttgcgaaaacacaatagaaaggggtaagcacccagtatcccgaacagtagacacagaatgtatgtagactaagcgcatcataaactggacacatacatccatcctagtggctctcctcataccgatcgttcctac

SEQ ID NO: 115257 - DNA, 363 bp, Arabidopsis thaliana columbia
cagcgcggaaacgagatccaaataatgtagtttgatcaacgtgatgatgactgatactggctgcgtcagtgatgctatcttccatgacattgcgaccaacgggatgcacagtatataagacggcagtgagacgactaccgtcactcaaaatatcacttcacgccttcagaattgtcgccagtggcttccaggttatgaacatcgagtagcccttcggtattaaccgcaacctggacttataggacggcttccacaccacctgtacacaagtcatgggatacatcgtctaaacgtagttccacttgtacgaaactaagctcgattgacagagtcctatttagatcgaaaacgactgttcaccga

SEQ ID NO: 115258 - DNA, 263 bp, Arabidopsis thaliana columbia
gatgagaacgtcagtgcagttggacacgactggggaactcgcatggccttttcatggtgcctattcagaacagactgattccgagtccacgcggtgttccatggttggttcatcaagctgtaacagaatgcatcagtgtagccgtttgcagtacttcatatgagaacgcggtatcagcgatactttcatgcgtgcttggaacagagctagcatagagaatcaagatattcgcaggagacgtagtccccaagagctgccggaat

SEQ ID NO: 115259 - DNA, 409 bp, Arabidopsis thaliana columbia
gttcctgaacaggaggtgccaaaggtagcaacagaggaatcatcggcagaggttacagatcgtggattgttcgatttcttgggaaagaagaaagacgaaacaaaaccagaggagactccgagcgcttcagagtttgagcagaaggttcatatttcagagccggagccagaggttaaacacgaaagtcttctcttttctctccgctctaatcatttctaaatctcagatctctgattccgttaacggggtcgttttccctgttgttaaagaccttccaaccggtcaatacctcgcacagattcgactcggtgactcaccggatccagtcaagctcgtagtcgatctggccggctcaattctctggtgtgattgttcctcaacgcaagttccctcgtcaaggaaactaata

SEQ ID NO: 115260 - DNA, 406 bp, Arabidopsis thaliana columbia
ggatgaaagatcaatttttggcaattagtggtgaagatttgaatcagagatgggtttttcttctttcatttctcagcctttgtcttcatctctctcggtgatgaaacgcaacgtttctgctaaaagatcggaactttgtcttgattcttcaaagattagattagatcatcgttggagcttcattggaggatcaagaatctctgttcagtccaattcttacaccgtagttcacaagaaattctccggtgtacgagcttcataatctcttatatgttcatgttgtagggttaactactactcagattgcaagcagtgtatttgcggttggaactaccgcggttttacccttctatactctaatggttgtagcaccaaaagctgaaattaccaagaagtgtatggagag

SEQ ID NO: 115261 - DNA, 426 bp, Arabidopsis thaliana columbia
cggtccggtgatccggggagcgaccgaacggaatcttagagaagaagagaagaaaaagaggagaaatgacagagaagaaagagatggaagtggtgaaacggctcaacgtggagagatacatgggccgttggtacgagattgcgtccttcccatcaaggtttcagccaaagaacggcgtcgacgctcgcgccaccgatacacttatccccgaccgtaccagacacgtcatgaatcatccgtggagcaccgggaataggggttttatccatcgcagcacctagtcggccgatgctaaacgctaccattccccactcaaagtcccgttctacatctctcccttcctccaactcattcacgtcaccggagactcccgggtgttccccatccatccagatgaccagcatgctctcataggccaaccctccc

SEQ ID NO: 115262 - DNA, 410 bp, Arabidopsis thaliana columbia
ggagaagagatcgatagaagaacagtttgatcaacctgtcagaaacatactggatgcctcactgacgctatcttctgtgacattgaacccagctggtttcacagtggaatacatcgcagccacaggattagcttcgctcacaagagcgcgtccctccttcgggattgtcaccactgagcatcaagagcatcaagaccgacagagcctttcggtaaaaacggcaccaatgacttcatggacggcgtcaactcctccggcagaaagggcaagggtatccgttgtgtaccttacgtcgaccagtatggtcctgacctcgatggaaacaatcctatttactccgagaactagtggtcagctgagtggtcacgtgtacaatggacgagtcaccgtattggcaatgtgagccgtaa

SEQ ID NO: 115263 - DNA, 413 bp, Arabidopsis thaliana columbia
gaacagaacaagaaaactaacatttaggattgttgttcagctcgctcttgatctcgctagagggttgagttaccttcattcgcagaagattgttcaccgagatgtaaagacagagaatatgttgttagacaaaacccggattgttaaaatcgcagattttggagttgcgagagttgaagcatctaaccctaatgacatgacaggagagactggcacacttggctacatggcgcctgaggttctcaatggaaacccgtataatcgaaaatgcgatgtatacagtttcgggatctgcttatgggagatatattgctgtgacatgccataccctgaccttactttctctgaggtcacttcagccgtcgtccgccataacctgagacccgatataccgacgtgttgctcgagcgcac

SEQ ID NO: 115264 - DNA, 362 bp, Arabidopsis thaliana columbia
ggaacaaaaacaacatctgaaaaaaatcatgaatccagcagattccgatcatccacagcttccaaacatcaagatccatcaccctccatctccacgtcactctcaccatcaccactcctcttcggtgccgattggggacctctccctctgaaaactcaaattgaagatccaaacgctcaacctcaacctagtcaagaggattttgatgcttttacttcaacaaaagttgcggatctagctaaaccgttgaaggagttagggtttccttataagatccatatagtgaaagatcatgatatgagagagagattatgtcctgagattgagaaggttggtcgtagtgctgtgattatgggaagtag

SEQ ID NO: 115265 - DNA, 354 bp, Arabidopsis thaliana columbia
gttctataaaaaaaaaaaaaaaaaaaaaaaaaaaaaaaaaaaaaaaaaaaaaaaaaaaaaaaaaaaaaaaccagaaaaaaaaaaaaaaaccaaaaaaaaaaaaaaaaaaaaaaatacaaaaaaaaaacaaaaaaaaaaaaaggggccgcccaaaaggttccacgcttacttacccgtgcatgcaacttcaaaactcttcaaaagtgtcaccaaatttcatttcaggggccttcttttaaaaccttcttacttggaaaaaccctgggtttacccaatttaacccctttgcaaaaaaaccccctttcccaagcgggggtaataccaaaaaggccccacactttccccttccaaaaa

SEQ ID NO: 115266 - DNA, 206 bp, Arabidopsis thaliana columbia
cccacgcgtccgaacaagcgtcagtgcgggggacaaaggagctcaaagtgggaagcagaactcttgagataaatcgttatatgcactgtacagcttcgtacccttgaggaaatgttggcactcagttaccgtggcggcctccgcggtggagtagttaccacggtacaacggcgagatggagaaagctggtggctgatgatgaggaa

SEQ ID NO: 115267 - DNA, 392 bp, Arabidopsis thaliana columbia
atatcacttgaaatgtctacatgctcacaatataaaaggtgttccgaaatctgaatggcattgctcaagatgtgtgcaattatacaatggcaagtcttttcctcctaaatacggccgtgtcatgagaagcgccactacagcaaaaatgtcttctagtacagccgaagttcaattacccgcagagaagggggttggtaaaatggatcaaaaggttagtcaagagggaatgccacatctcgagacagcaaaaccaactaaggattcagctatggaacaaacagttgaagctgaagatgtagctatgaatccaatagttgaaaaagctatgagtgaaatggtggaagctgaaggtgcagctattaatccaatagttgaaactgaaaatggggctc

SEQ ID NO: 115268 - DNA, 250 bp, Arabidopsis thaliana columbia
ctcgcgggtccacgcaagcgtctatactgagtcgaaataacgacagaagggggagaagagatcgagagatgaatagtttgatcatcttgtgagaagaatagtggccgcttcagtgatgctagcctcggtgacattgaaaccagctcgtttcacggtggacactatcgcggctagaggactacacgtcgctcacaagacctcgtcgctccttcaagactctcgtcactggcgtctggaagattgacaccca

SEQ ID NO: 115269 - DNA, 386 bp, Arabidopsis thaliana columbia
ccttcgaaagcgcctttctgatttctccgacagcgtactccatgattgattggttgttttcaggtatctgatctctcttttatttcctccttcagcttctcatccattacaaaagaccagcatgtcgaagatcacttaagaaagaaaacgaagactaatggctttgagaaaagtcttgatcaaggtccagttttggatgagaagctgaaggaggaaataaaagagagatcagatgcaaacaaagatcacgcagccaatcacgccgagccggaagcaaagtcagatgataaaaccactgtttgtcaagagaaggcagtaggaaccctggagagcgaagaacaaaaacccaagacagagcctgcccaaagctaagcattcagtgttgt

SEQ ID NO: 115270 - DNA, 184 bp, Arabidopsis thaliana columbia
cgggagactggaatcactcgagtaaagtgttcgtagctgagaaaaaccctaagctctcgtttttcgtcctctccgattcagcaactctcagtcgatcaggtcagcctccagatctcaagaagtacatggactagaaactcgatattaagcttaatgccaacagaatggttgttggaacgctccg

SEQ ID NO: 115271 - DNA, 296 bp, Arabidopsis thaliana columbia
ggagacaaaaacacacacgacgaagaaatctccgggcggtcgaagaagatgaaatcgttcaaggaacaatacacgttggatgaaaggctcgcggagtcgcgggagataatcgctaagtaccctactcggattccagtaattgctgagaagtattgcaaaatggatctgcctgccgtcgagaaaaagaatattaaatgtaccttttggacctgaatgacaatttgagaataaaaaaaacaaaaaaaaaaaaaaaaaaaaaaaaaagaaaaaaaacaaaaggataaaaacgaaaagaa

SEQ ID NO: 115272 - DNA, 161 bp, Arabidopsis thaliana columbia
gcagctcacactgttattctcctcatgaagaaatagaagtcaaaattgattttagctctttatcatattccttaaagtgtctcatcttttaagaaaaacatacttttgattgtaaagtgtaatcatcctttaaaggttaattaatcgaatcgtttcgtaga

SEQ ID NO: 115273 - DNA, 370 bp, Arabidopsis thaliana columbia
acagggtggcaatcattgggtgcttgctatatatccatttctcattctcaagaatcttcgtcccatgtgtatcattcttcagtaatcagtccatctatcagaaacatttcgtgcaatgccgcagtaccatgtccatacagattattcactgatcgacaagagttcattccgcatctggagataaaacattatgctcactcggcagtttatgagggacatgatgtgtgacatacaagtctaaagatgggacatccaagtccgtttcctgtgactagttgtgatctcattgcgatactgaatcgaaattggtaaataacatttgcaaaatctgtcgtgcttcgtcatagaggatgtacaattttaccaaagg

SEQ ID NO: 115274 - DNA, 377 bp, Arabidopsis thaliana columbia
ggagaagaaaaaggcgaaaacctcgccaatccgattacgcgaaaaatcaaagaatctttgtttgatttttgatttttaggtttttggatatggcgtcgaagcggatcttgaaggaattgaaggatctccagaaggatccacctacatcatgtagcgcaggtcctgttgctgaagacatgtttcactggcaggcaacgataatgggtccttcagagagtccttatgctggaggtgttttccttgtaaccatccatttccctccggattacccattcaagcctcctaaggtggcctttaggaccaaggtgttccatcccaacattaacagcaacggtagcatttgcctcgacatcttgaaggaccaatggggtcctgcg

SEQ ID NO: 115275 - DNA, 247 bp, Arabidopsis thaliana columbia
caggcgtcagaccacgcgtccgtgggcaagaacaagactgaaagggcactcatcaagtcatcacatatcactcacacacacactttctcgtctcgtattttctcacttcttttagctcttttctctacatatattcacatggttaccatctaggttcaacaagtgtctccagtaacagtcgagaacatcgaggtgccaccaccaaatgctgtgtagtcggaggaagtcacgaacgtctccgagtctc

SEQ ID NO: 115276 - DNA, 264 bp, Arabidopsis thaliana columbia
ggcctgagaaaattttgcacccttttgcttcaatttgttgtttccttaaaaccttcaaagcaaaattagggtctctcatggttttcgcacattagggactttttctctcgttctcatgaaaagatgagtttgatgtccaaatccttggtaaaaattgaatgttcaccatttttgtatccaagagcttcagaatgcactaccggaaaacggataacctctccgcatatccgtttatacagggcggaggccgtcagcgggaaaact

SEQ ID NO: 115277 - DNA, 283 bp, Arabidopsis thaliana columbia
gacccatttcttggcttacaacaacaaatcttaaacgctttactttgtgctgcactactcaacctcaatggccgcctcaacaatggctctctcctcccctgccttcgccggtaaggccgtcaagctttcccccgcggcatctgaagtccttggaagcggccgtgtgacaatgaggaagactgttgccaagccaaagggcccatcaggcagcccatggtacggatctgaccgtgtcaagtacttgggtccattctctggcgaatcaccgaactaccttaccgga

SEQ ID NO: 115278 - DNA, 304 bp, Arabidopsis thaliana columbia
agggatgcactgaaagagtgtacagcagttgtctctactgtatgcttatggttaggtgcaactatggatgcgtttcttcttgcttctggttcatcagggaaacggtattgtatgcctaactctagaattataatacatcagccaattggtactgctggatgcagagcagcgtaaatgagcatacgtataacagaaattgtgtaccacacgattaaacttatcatcatcgtcgctataatcactgtgaagcctgaatcagacatcgatagtgacacagaccgtgataacttcatggatccatggg

SEQ ID NO: 115279 - DNA, 229 bp, Arabidopsis thaliana columbia
gagatgcgatgcaaggacggggacaagcatggcgttcctcgctcacacgggcgagatctcacatgaagacgtacttcactgagaccaaatctgcggcttcagcacatgtctgtaaaactcatgcagcccgccagtccttccccagcgatgctcagcatcgtggacggcatatgccttgggtccaactgaggagcccacagggttctgtctctctagtagtcttcgcaca

SEQ ID NO: 115280 - DNA, 300 bp, Arabidopsis thaliana columbia
gacacatttcgtggcatacaacaggatatcttaaacattttactttgtgctgcactactcaacctcacaggccgcctcagcatggggtctctccacccctgcattcgccggtaaagccgtcaagctttcccacgcgggatctgaagtccctggaagctgtcgtgtgacaatgtagaagacagttgacaggccagatggccgatcatgcaacccatggtacggatctgaacgtgtcaagtacttggatccaatctcaggcgaaacatcgagctaccttaccggccagttcccccgtcacta

SEQ ID NO: 115281 - DNA, 269 bp, Arabidopsis thaliana columbia
gtgtgtgtgtagtcacgttgtgtattgcatgatatgttgatgcgtgtaaccaaacaattagttgctctacgaatccaaaattgaggaaaaaaaaggagacaaaaaagatcaaaaaagaggtagtcctaaaggatacaagcttacataagtatgcaggcaacgaaatacaactccgagggggtcacctaagatcattgcacggggggtcattttgcaatgacgtgactgagaaaacctggaagagacccaccttaatcgcgctggagaaa

SEQ ID NO: 115282 - DNA, 122 bp, Arabidopsis thaliana columbia
ggaaccattgattagctgtcattgtcattgtcattccaacggagtttatgtaccctcaccactgcgtcggtcaagacatgatcgagcatgatgcactacaggtcaagtcacgagtgtttcag

SEQ ID NO: 115283 - DNA, 296 bp, Arabidopsis thaliana columbia
gatgcatagtttgctaatcatgtgattatattcaagagagcttcgatgatgtgaacttcagcgccaatcaggtaaagtggctctcaagctcaacaccagaggagccagacgataacatgccactcaaaggaaccgcactagctacaagaccagctaacaacgccgagctcatgtgcaagtgccaaggctgttcctgaagctgctcaagccgcagctcgtggcaagtcatacaaactccacaaaggtaaggtcgccagagcctctgctgatatcttatacgctgtcgagaaatacgg

SEQ ID NO: 115284 - DNA, 218 bp, Arabidopsis thaliana columbia
tttgatacaaaaaaaaaaataaaaaaaaaaaaaaatcggccgccctacaagatgatagcatattaagtcgtccatgctacgtcataattcttctacaatgtcatcaaatttcaactcattagccgtcgttttataacaacgtcattgctaaaaacatgctgttatccaacatattcaccttgttgcacaacatccttttttcaacagctgtcgtaata

SEQ ID NO: 115285 - DNA, 267 bp, Arabidopsis thaliana columbia
ccgagacgacagaacggggctgtgataaagttctctcctttcctttctaatcgaagaataaacgctttatctctcaaaaccctcatccacaaaatcccctttaaaccgctaatcatagggttttcctgtttatgtgttgcttcgctactatggttacatttttctcttcccattttgatttcacttaaccctcgtgataccttaagaagaggcaatttgtcgtttactacagaaatacgtctaagctcttgttatacaatagtggat

SEQ ID NO: 115286 - DNA, 369 bp, Arabidopsis thaliana columbia
ggacgtgagagaagacgaaacacaaaagatgcagatcttcgtgaaaaccttgaccggcaagaccatcactctcgaggtcgagagcagcgacaccatcgacaatgtcaaggccaagatccaagacaaagaaggaatccctccggatcagcagagattgatcttcgccggaaagcagctcgaagatggccgtactttggctgactacaacatccagaaagatgatttgccgcaagtgctatgctcgtcttcacccaagagctgtcaactgcaggaagaagaagtgtggtcacagcaaccagttgaggcctaagaagaagatcaagtagagagactcttatcaagaatcccatctcttgcctgcgttttttt

SEQ ID NO: 115287 - DNA, 253 bp, Arabidopsis thaliana columbia
aggcgtaagtacagcacagaaggggacacaatgcgtaactcaccacaggtaatctcacgggtcatagtttgtcagcctctgctcagccattatcactgtcacaacattgaaccgggctaactctggtttagcacgttaacgaatcaattcttaccgctccacatgggaataccgtcaattgatgcagcataccgttgccgcacccagttgcagatccaccgggcggacgaagtagacgattggacagatctga

SEQ ID NO: 115288 - DNA, 356 bp, Arabidopsis thaliana columbia
ctcaccaaaaaaaaacaaaaaaaaattagaattcagtacttttattttaaacaaaaaccaaaaaaaaaaaaccaaaaaaaaaaacgttggaaatggctccaccggaggctgaggtgggtgcggtaatggtgatggctcctccaacgccggggacaccgggaacaccgggaggaccgttgatcacggggatgagagtggattcaatgtcgtttgatcatcggaaaccaacgcctcgatgcaaatgcttgccggtgatgggatcaacttggggtcaacatgacacatgcttcaccgattttccctctcctgatgtctccctcactcgcaagcttggagccgagttcgtgggaacattc

SEQ ID NO: 115289 - DNA, 241 bp, Arabidopsis thaliana columbia
ggaaatcaagaagccattttcacaacgaaaatcattaatggccctcgaggcatggtttatggatgataccattgaggaccataaacttcctcatcatcgtaacccgaaaaaattcttccacgttggattacttggcaaatttggaattgttgtactggaatttgaaccctgaaaattacaaaaatgattctgaacttatcaggattaaaaaacacaggggttacaattacatgaatttcct

SEQ ID NO: 115290 - DNA, 354 bp, Arabidopsis thaliana columbia
ggaaacacattgagagggagcagcatccagacacccagttcacgacatcgtgagagaaaactttagagcaggtctctgagacatcccatggcgatggcggtctccggagctgtcctcagtgggcttggttcttcgttcctcaacggacgcaagataggtgccgccgcattggcaagcggcgtgcgcactggagctcacagagttggcaggaaagctcttattgtcgctgctgccgctgctcagcctaagagatcttggatccctgccgtctaatgtggtggcaaattccatgaccctgcatggatcgattggtcgctagcaacagatttcaggttcgacccaatgggtttgggg

SEQ ID NO: 115291 - DNA, 379 bp, Arabidopsis thaliana columbia
  unsure (1)..(379): unsure at all n locations
gaaccctagtcgtaccanaatctaaggtttaccttgaccggatctagacacataagctactcagatatggaagtggttgctgttgggtcaatgaagacgcggagacaagagacatgggcttgctctgtcactgagtcctttctcctcctcgtcggaaagaatctggcttgtcttctccttgtggcagaatcattactgataagtttggttgctgttgaccaaaagttgtctgtcaagganggttacaaaagaggaaaccgtattgaggaaaacaaagatgctaatgacagtgacgatgacgacgatgattaagacgctgattaagacaacgatgattaagatgatgctaatgatgaagatttctcaaggggttaaaggg

SEQ ID NO: 115292 - DNA, 409 bp, Arabidopsis thaliana columbia
  unsure (1)..(409): unsure at all n locations
ccaacccttcgtaacggctgcaaaaaacaacagaaggaaaaaacccaaaattccaattgatggaaaaattaccaacaaatttgaggtccttgttattccatcacaaaagggtcacgccctgatgttcccaaagggtggntgggagcttgatgaatctgtagaagaagctgcgtcaagagaatctctagaagaagctggagttgttggaaacgttgagagacaacttggaaaatgggatttcttaagcaaaagcaaaggaacattctatgaaggattcatgttcccaatgcttgtgaaagaagagcttgagctttgacctgaacaacatcttcgtcaaagaatttggatgaaagttgatgaagcaagagacgcttgtagagattggtggatgaaggaagcgttagatgtt

SEQ ID NO: 115293 - DNA, 194 bp, Arabidopsis thaliana columbia
taccgctgccacaagacgacattcgggtactgttgcgaaacgaccacacaacggtactgctgctagacgacgacacaacggtacggttgcgataatcacacagaaaggcactgctgccataatacgacataatggtacgtgctgccataagacgacacaaaggcaccgctgccaaaacacgacataatggtacg

SEQ ID NO: 115294 - DNA, 371 bp, Arabidopsis thaliana columbia
caaccaaaaaaaaaaaaaaaaaaaaaaaaaaaaaaaaaaaaaaaaaaaaaaaaaaaaaaaaaaaaaaaaaaaaaaaaaaaaaaaaaaaaaaaaaaaaaaaaaaaaaaaaaggggccgcccaaaaggttcaaacctaaggtacccgtgaatgcaaggtaaaacccctccaaaagggccaccaaattcaaattcacgggccttcgtttaaaaagtccgtaacgggaaaaacccggggtttaccaaatttaaccgctttgaaaaaaatcccccttccgcaaccgggggtaaaaccaaaaaggcccaaaccgttggcctttccaaaaatttgcccacccgaaagggcaaatggaaccccccctgtaccggggaat

SEQ ID NO: 115295 - DNA, 399 bp, Arabidopsis thaliana columbia
gaattcagacacctgactcgtcatctcatcgtacaccgaattcactattcgtcgccaatatgccgcagagacactcgaggtacatcaatgatcttgcgtaattcacttaggacgacaagaataagttaggttacggaactcagagagagagattggggacagactcgatcaaacccattgatgcttgttctctcagcgtgaagccttacactgatccgatgtgttgccatgagggtcatgtcatttgcagagagtgtatgcttgaatgtttccttgctcagaagagagatatccacaggaggcatgcagcacattcgtcgcagaagaagccagataacgatgaagaagacgagaggctaatgttacatcacgcgagagagctcgacgaatttgatcagc

SEQ ID NO: 115296 - DNA, 378 bp, Arabidopsis thaliana columbia
ggtttaagagttggtatagtatactcttacaatgacagggtggttcagatcgcaaggaaaatgtcgagtttcggtcttgtttcgtcacaaacgcagcatttgatcgctaaaatgttatccgatgaagagtttgtagacgagtttatccgcgagagcaaattgcggttagctgcaaggcacgctgagataaccaccggtttagatggtttagggattggttggttaaaggccaaagccggtttgttcttgtggatggatttaagaaatcttttgaagacagcaacgtttgattcggaaaccgaactatggcgtgtgattgttcaccaagtgaagctcaacgtgtctccaggcggttcgttccattgccatgaacccgga

SEQ ID NO: 115297 - DNA, 406 bp, Arabidopsis thaliana columbia
gacggtctttgggactctgctactgccacatctcacgatcttttggctcgtttggctatagagcattgcgttcacgaggctagagggcttgatgtactgcccacaacgatatctcggttcaggaatggaggcgataacgagacagcagatttactagcgaaagttgcgtaccctgaagaaatcactcactgtgcagctggagtaaaatggtttaagtatctatgtgaacggtccaaggatcctgaattcaccatcagcagcaaagaatcagatgatagcaatgaagagataatcaacaagtttcattcggttgtaagggggcatttcagaggaccgttgaaaccgccttttaatgctgaagcaagaaaagctgctggctttggtcctcaatggtatgaacctcttg

SEQ ID NO: 115298 - DNA, 390 bp, Arabidopsis thaliana columbia
gacccatttcttggcttacaacaacaaatcttaaacgttttactttgtgctgcactactcaacctcaatggccgcctcaacaatggctctctcctcccctgccttcgccggtaaggccgtcaagctttcccccgcggcatctgaggtccttggaagcggccgtgtgacaatgaggaagactgttgccaagccaaggggcccatcaggcagcccatggtacggatctgaccgtgtcaagtacttgggtccattctctggcgaatcaccgagctaccttaccggagagttccccggagactacggatgggacaccgccggactttcagctgaccccgagacattcgcaaggaaccgtgaactagaagttatccacagcaagtgggtcatgct

SEQ ID NO: 115299 - DNA, 411 bp, Arabidopsis thaliana columbia
cggggccacccacgcgtccgaggacgcgtgggcggacgcgtgggcggacgcgtgggcggacgcgtgggtgaagtacagctcttgttacttctcaaacgattcaagtagcttagaggatgcagaggaagcaattttggctctttattgtgaaagagctaaagtggaagatggtcaaagtgttcttgatatcggatgtggctggggatccttgtctttgtacattgcacgcaagtacagcaaatgcaagttaaccggtatctgcaactccaaaacgcagaaagcatttatcgatgagaaatgccggtaactaagtttctcatacatcttaagcttcgagttctagctgctacaaatggaacttaatataatctcaaatggtttgaaggaaactcgggcttcagaatatcgaaa

SEQ ID NO: 115300 - DNA, 258 bp, Arabidopsis thaliana columbia
gaaaaaaaaaaaaaaaaaaaaaaacaaaaaaaaaaaaaaaaaaacaaaaaaaaaaaaaaacatcaaaacgataaaaaaaaaaaaaaaacatacaaaacaacgtcaaaacacatccaaaaataaaaaaaaaaagcgggccccccaaagggttcaaaccttacttacccttgcatgcaacttcaaacccctccaaaagggcccccaaatttcatttcacgggccccctttttaaaacttcgtcacgggaaaacccctggg

SEQ ID NO: 115301 - DNA, 328 bp, Arabidopsis thaliana columbia
tcaaaaaaaaaaaaaaaaaaaaaaaaaaaaaaaaaaaaaaaaaaaaaaaaaaaaaaaaaaaaaaaaaaaaaaaaaaaaaaaaaaaaaaaaaaaaaaaaaaaaaaaaaaaaaaaaaaaaaaaaaaaaaagggggccccccaaagggttcaaacttaagtacccgggaaagggaagtcaaaacccctccaaaagggcccccaaatttaattccaggggcgcccttttaaaaacgccgggatgggaaaaaccctggggggaccaccctttaacccctgttggaaaaaaaaccgcttttgtcaaaggggggggaaaaacacaaaaggccccc

SEQ ID NO: 115302 - DNA, 373 bp, Arabidopsis thaliana columbia
cataaaaaaaaaaaaacacaaaaaagtttcaatggccgcctcaacaatggctctctcctcccctgctttcgccggaaaggctgtgaacctttcccctgcggcatcagaagtccttggaagcggccgtgtgacaatgaggaagactgttgccaagccaaagggtccatcaggcagcccatggtacggatccgaccgagtcaagtacttgggtccattctctggcgagtcacccagctaccttaccggagagttccctggagactacggatgggacacagctggtctatccgctgaccccgagacattcgcaaggaaccgtgagctagaagttatccacagcaggtgggccatgctcggagccctaagctgcgtc

SEQ ID NO: 115303 - DNA, 319 bp, Arabidopsis thaliana columbia
acgacagaaggggatgacttggaaaacttccaagccaaatggatcaataagtcttggaagaaggcagtgatttttgttgataattctggtgcagacataattttgggtaatttgccgtttgcaagagaattgctccgtccaagaactcaagtggtgctggctgctaatgaactgccatctaacaatgacataacatgtaccgagcttacagaaatcctgtcacaattgaaggatgaaaatggccaattgcgaagtgtttgataattcgaagcttccgaatgcaaattccgggaatgacttaccaattatcgatctctca

SEQ ID NO: 115304 - DNA, 361 bp, Arabidopsis thaliana columbia
cccgaattcccgggtagacccacgcgtccggaagacgacagaagggggaccgtcaagattacttgagacggcggcgccaccaccacaaccgttggaggagatgatcgcagcggaatccgacatggtggtgatcttgtcggctcttctttgcgctcttatctgcgttgctggtctcgccgccgtcgtacgatgcgcttggctccggcggtttacagccggaggagattcgccgtcaccgaacaaaggtttgaaaaagaaagctcttcagtctcttccaagacccactttcaccgccgcggaatcaacctccggcgccgccgctgaagacggagactcgacggaatgtgctatttgcctcacg

SEQ ID NO: 115305 - DNA, 129 bp, Arabidopsis thaliana columbia
taggtgcggtcgcaataatcagacacaggggtacgtttgccagattaatacttctcggaatactcgggaagtggtcgtatgcgtgttaattccggcgtagttcctgagcttgatgaagtttgtgcactt

SEQ ID NO: 115306 - DNA, 307 bp, Arabidopsis thaliana columbia
  unsure (1)..(307): unsure at all n locations
tacggtgtcaattccaaaactaaaacccaaaaaaaaaagaaaaggaagaagcaaaaacctcttagaagttctctaatttaaaaaatttattcatttttcttggggaggtttgagtttttgttcggtggtgatgttaggtagggaaccaaaagaaaatgggagaagtaaagagtcgttagacacacagcaatagcgagcgaacgtacgttcatatgctggccttgtgtgtagtttgtgttgttattagtgtgagagcatgaatcagtatgatgaatttatgattaanaaaaaaaaaatataaataaaa

SEQ ID NO: 115307 - DNA, 302 bp, Arabidopsis thaliana columbia
ggagagagatagaaagagaaagaaatcgtcatggctcatgggagatatgatacttacaagaagaaaagtggacagattcctcggtttggagaatgggaagaagcaaatgagatgccaataacacaatactttgagaatccaagacaagctggtctgattcgtcaccaatacacaacaacttcttctgcttcttccactaccacttcatcttcatcttcttcttcttctgcagaagccttagagcttgcttctcactatcgccgtccaggtcacctccacgctcaaagacagacggcggggac

SEQ ID NO: 115308 - DNA, 246 bp, Arabidopsis thaliana columbia
agatgtcagtagagtagagatagggcaacagaaggagcttcctggactcactgtgggaaattctataataatctacatacagggctatgggagactcgtctacacactgataatattctcaaagattttgtcatgttccgtgactcccgcttgaaatgattactgtacagaatccacgattctatccatcttggacatggtgcaggtgttggctacatgaagagagcagatgctatgcatactccc

SEQ ID NO: 115309 - DNA, 306 bp, Arabidopsis thaliana columbia
ggtcactcactcaatttggtttcttgttttgctctctagatctctcttttctctcttctttccatctccagcaatgggagcttgtttaacactctcgttctcttgtgatgaagttgtgaatcaaatctctcaaggtttatgcatcaacgtgggttatgtttgcgagctctccaagaatgtagtggctatgaagaaagacatggaagtgctgaagaaaaagcgagatgatgtgaaaagaaagggtagatatagaagagttcacaaggcgtcgtgaaaggctttctcaagtccaaggatggcttacga

SEQ ID NO: 115310 - DNA, 306 bp, Arabidopsis thaliana columbia
tacggctgcgacaagactacagtttggtacggatgcgagaaaacgacatacgggtactgctgctaaacgacgacatcaggggacaaacaacacacttactaatcatacaatcacatcttctttacaacagtgcagtactacgaattaccgtgagaaagactactacgatgtggctcaaagtcaacgcactggatatggccagagccagatccacaatcatgacggatatggtcatagccacaaccgtggtggatatcgccagattcataaccgtgatggttataaccaaaaccgtgacggatatac

SEQ ID NO: 115311 - DNA, 293 bp, Arabidopsis thaliana columbia
gaaagccattcatattaaactcatagcacaacaccattctttggttgtgcgcacatcgcacccttctctcacatgtcgtggttttgtgaccggaaggctatcattacatgaggtctgcagaacaaaaagaagacaccaagacacgggagagctgagctcacaccaatctcaaagggacaggataggatggaagctatgtttacgttaagatcaggcaatccactcagctcactaatctgagcatagcgtactgtgaaagctattctgttgacatcaactccattgctgtcttg

SEQ ID NO: 115312 - DNA, 303 bp, Arabidopsis thaliana columbia
gttagccagaaatcacttcttaacaaactggattcgcataaccgatctatggaaatggctccagtgatcatgtggcgagaagacaacaagcctgaatcttatcgggaatactggagacgcccgtcaaggagtcctaagaaaagtaacgactttgaaagtgctactccatgggacttgctctcagatgaaagagaaggtccagatgcatcctcatcaatccctcgagatgatatcgcacgagttgattttggagcggtcgatgttgtccagtgcctaattgagtcaccacagtgcgattttcac

SEQ ID NO: 115313 - DNA, 246 bp, Arabidopsis thaliana columbia
  unsure (1)..(246): unsure at all n locations
cggaattcaacaccacatgggactggattttttcgcgattggcgcgagtacgaaagcgatcagggtagattccttcataattggtactcaagagttctgattgaacagggggatcatgttcctgccacggcaaaattggctttcgaatgaacgtgcattgctgcaaagctctcatgtagacactggtggtatangacagcgtagtcatgctgctgaactcactgctggcttctacaactcctcaaa

SEQ ID NO: 115314 - DNA, 231 bp, Arabidopsis thaliana columbia
aggggttgtgcggctctgcgaatcttcagaaatgggtgcgtgcaatcaggttactgatcgttccgaggacgagacacttcacatgtcacgacattcctccaaagggttaagtactgtaaggatagaaaacaaccatcgattgtgcggctcgtaaagcccgctcgtcccgaactggtccaacatttcggttacaaggtctacctgggcattgctgtgtaccatgtacgtgta

SEQ ID NO: 115315 - DNA, 296 bp, Arabidopsis thaliana columbia
agcataggctaccaacatggatgaagatgccgatggaaagaaagagcaaactgatgatggtgtttcagtggaagatactgtaatgaaggaaaacgtggaatctaaagacaataactatgccaaagatgatgaaaaagagaccaaagagacagatattactgaggcagaccacaaaaaagctgggaaggaggacatacaacatgaagctgacaaagcaaatggaacaaaagatggcaatacaggagacatcaaagaggaagggacactggtagatgaagacaaagggacagatatgg

SEQ ID NO: 115316 - DNA, 355 bp, Arabidopsis thaliana columbia
tcccgggtcgaggcacgcgtcagtcctcgggacagaagagaaaaggaaggagttgggctccaaggagaatcctcagacgagcgtgggtgaattccggttggcgattgttctcatctgatctgctttcgcgctcatcaaatttaatgaaagcattaagtacttgaagggttgtgacaattcatggctactgcagcaagctctcttcacttgtcgcgaatttgtcctgccttgagttaaggagatatccttgtacatgtcttgtctccattatcaatcatcacatattgcatcgtccagtgactgcttcagtgcagcctcactagttgtcgacattggggcatgaatgcaacattgt

SEQ ID NO: 115317 - DNA, 231 bp, Arabidopsis thaliana columbia
tccgggtccaggcaagcgtcaatcctcctgtgattagagaagacaacaggacggtaccgatgctaagaagcttcaacaatggatgcgtgcaagtaaatgacagaacggtacgggagcgaaaaatccacagttagggatagtcttccagaaggttaagtgcggggaggatgcacaacaaccatcgattggtcctcccgtcaagactagacatcacggtaaggctccacaatt

SEQ ID NO: 115318 - DNA, 311 bp, Arabidopsis thaliana columbia
tctgttatacattttggatttctgacttataataaatatactttaagttaaaaaaaaaaaaaagaaaagaaagaaaaaaaaaagaaaaaagaaaaaagaaaaaaaaaagaaaaaaccaacaaaacaaaaaagaaaaaaaaaaaaacgggggccccccaaaaggtcccagcctaacgtaccctcgaagccaacaccaaacccctccaaaagggccaccaaaagccattccccgggccgccctttaaaacggccaccgccgggaaaaccccgggggtacccaacctaaaccccctggaaaaaaaccccccttc

SEQ ID NO: 115319 - DNA, 237 bp, Arabidopsis thaliana columbia
tggtacggctgcgtagatcgacgacaggatgcggagaagagatccagagagcaatagatcgatcagcctgtgatcacactcatggctccgtcagtgatgctatcatcagtgacattttgaccctctggtttcacagtctccatgacggcagctcacagattaccgtcgctcacatgagctcgtcactccttcaagattgtcgccagtggcgtcaataagatcaagaccgacaagccc

SEQ ID NO: 115320 - DNA, 102 bp, Arabidopsis thaliana columbia
ggaagacgacacaacggtacggctgcgaaaagacaactgataggtactgctgccataaaactacacactggcattgctgccataagacgaccgacgggtaca

SEQ ID NO: 115321 - DNA, 300 bp, Arabidopsis thaliana columbia
tcaacttaagggggtgactgtatctaatgcaagccctcaaagtcaccatgtgttcatccgcgagatcccatcggatatagtcattggtgcacatataggtaatctcaaagcacctctagcgggctcccgctctatacttcattgcgtgttgcgttctgtcgctccgtcagggataaccgtggggggaagtcccataatcgtctgctcacatactctcctctcggcaaggagcgtatcagcttgttcagatatccagatatctaatcgaaatagtttcacgccatgtcaggctttaggtat

SEQ ID NO: 115322 - DNA, 308 bp, Arabidopsis thaliana columbia
  unsure (1)..(308): unsure at all n locations
acatcanaaanaaaaaaaaaaaaaaaaaaaaaaaaaagcggccgctcgacacgctacaggcttaagtcttacttcatcctacatgatacctcatcgatcttctaaactatcatcaattcacaggtcatcggccgacaacttccagactggtaaaaggcagaagtctagccatcatacacgccatgcaccatatagcacattcgccattcggcatctgacctaatagcgacgaagcgatcacccatcgcaatacttacgaattccgaatcctgaatgggaaacgccatgtaccgggtaactaagcacta

SEQ ID NO: 115323 - DNA, 372 bp, Arabidopsis thaliana columbia
gaaaaagaaaaacaaaatcaaacaaaaaaatcaacacaaaaaacaaaaaataaaaaccataaaaataaaacattaaaaaaaaatcacaaggcgaatgaagaaaaaataaagttcaaaaaaaaaagcggccgcccaaaaggttccaaccttacttacccttgaatgcaagttaaaaccccttcaaaagggtccccaaatttaaattcatgggccctctttttaaaacttcatgatggggaaaacccggggtttacccaatttaacccctttgaataaaatccccctttcacaagtgggggtaatgccaaataggcccacaccgttttcccttccaaaaattttcccacccttaagggcaatcggaacccccct

SEQ ID NO: 115324 - DNA, 221 bp, Arabidopsis thaliana columbia
  unsure (1)..(221): unsure at all n locations
gaatcanaanaaaaaaaaagaaaaaaaaaaaaaaaaaagcggccgctcaaaaggatccactctaaagtatccaatctatactacctcataactctactatagtgccctccaaattcatctcatagatccactttatagaacgtcgttttagaaaatcccctggggtaacccactttaatcacctagcataacatccttctttcacaaccccctttcacaac

SEQ ID NO: 115325 - DNA, 248 bp, Arabidopsis thaliana columbia
acctggtttccaaaccagggttacttaccagtacaggctttggttccacatattggcccatcgcggttaagtgttgacaacgctcgggtcaagattatcaagaccgacaaccccttcgcaattaactgcagcatgaacttgacggacggcgtcgacacctcaggcagaaatgccattggatactgtgtttacacctacgtctaacagtatggatctaacgtcaatcgatacagtccaatttacaacca

SEQ ID NO: 115326 - DNA, 383 bp, Arabidopsis thaliana columbia
aggcgtcagtacagcagagagaggacaactgaagggggggactgtttctaattcaagccctcaaagtcaccatgtcgtcatccccgagatcccaatcgatatagtcagtggtgaacatatgggtaatctcaaagcagctctagcagcctcccgctccatactccattccgtgatccgttctgtttctccgtcagggaaaaccgtcgggggaagtcccataataatccgctcaattactctcctctcgaaaaggagattatcagcttgttcagatatccaaatgtcttatctaaatcgatttacgacatgtcaagctttaggtatcacagatgtcaccgggaatgaatggcgtgagaaataaatggtgaacgttccttgatttg

SEQ ID NO: 115327 - DNA, 332 bp, Arabidopsis thaliana columbia
agccgtgagtagaggagagagaggtcaactgaagggggtgacagtatctaatgcaagccctcgaagtcaccatgtcgtcatccgcgagatcccatacgatataggcagtggttcacatataggcaatctcaaagcacctctagcgggcgaccgctccagacttcattgcgtgatgcgttctgtcgttccgtcagggaaaaccgtgggctgacgtcccataatcgccaggtcacatactctcctctcggcaaggagcgtatcagcttgtacacatatccagatctcgtatcgaaatagattcacgacatggtcggctttaggtatcccagatg

SEQ ID NO: 115328 - DNA, 326 bp, Arabidopsis thaliana columbia
aggtggctggtccataaacgccttttgtgagctcgtggctcagtctcaaagggagagatggtcttttgataatgagcacttaggttccggacgacgaagactaagtgggtgtagtagtagcagattctcatgctccccttctgttgatcagcagacttgtgggcgttgctcaaagcttttaactgaaaggtctccagttgccaggtttgaccttccaattcctgctgttctagcgtgcggccatgtttaccatgcggcatgcttagagacaatgacaaatgaaacagagaagtatgatcctacgtgtcccatatgcacagagacac

SEQ ID NO: 115329 - DNA, 176 bp, Arabidopsis thaliana columbia
ggagatcagatcaagagaagtttaatcagctcatcatatgagtaatggctgcgtcactgcagcgatcctctcttccatgacatcgaactgatctcactgcacggaagacagcaccgcggggattagagtcccgcagctcagctcagctcgcctttacaacagtcttgactccagtc

SEQ ID NO: 115330 - DNA, 320 bp, Arabidopsis thaliana columbia
cccacgcatcagaccacacatcggtgaattaaacgacagcgtggttccgctgattcacgactatgttaagcttttgatgtgacactacatcaatgggcacggatgacacacctgacgaactgatacagcttagtaaccacaagaaaagggtacagctgcgattcccatactaacgggtaccgatgtgagaacaccctagaccgttacagctgcgacatgacaacacaagggtaccgtcgcgatactacgacagacggttacaggtgccacactacaacaaaagagtccagtagccagaagcctacataacgttaccgctg

SEQ ID NO: 115331 - DNA, 427 bp, Arabidopsis thaliana columbia
tcccgggtcgacgaagacgacagaagggggaacaagcaatttgctgtggttgagaatcctggattttggaactggacctttacccttattgatgaagatgaaaatgtgttggcccagattgaccgtaattggaggggaattggttttgagctctttacggatgctggccaatatgcaattcggtttggtgatgatggacaaagcagtagacttggtctcggttcagatatcgaagaactaaacgttgttcgcccgctgagtttacctgaaagggctgtagctcttgctctggcagtgtccctggactcagattacttctctatgagagggggctggggactgccttttctcatcgccacagagtagaccgcgcatacgaatgccatcctctcagttcacagcggaacttaaattgccagttctttcg

SEQ ID NO: 115332 - DNA, 201 bp, Arabidopsis thaliana columbia
ggagatcaaatcaagagaagattgatcagctcatcatatgagaaatggctgcgtcacttcagcgatcctctctgccatgacaatcagctgatctcactgcacagaagacagcagcgagacgataagagtcgcgcagctcagctcatctcgcctttccatcagtcttcactcgagtcgcgtcaatcagatccggaacgccct

SEQ ID NO: 115333 - DNA, 462 bp, Arabidopsis thaliana columbia
ggtccaaaattcccggggccacgccatcgctgaagtagacctctacaaggtcgagccatgggacctcccggcaaggtcgcgcctccgcagccgcgactcccagtggtacttcttcagccgcctcgaccgcaagcacgccaaccgcgcgcgcaccaaccgcgccactgcaggaggctactggaagaccaccggcaaggacagggaggtccgccatggagctagggttgtcgggatgaagaagacgctcgtcttccacgctggccgcgcgcctaagggcgagcgcaccaactgggtcatgcacgagtatcgccttgagggcgatggtgcagccgggatcccacaggattcatttgtagtgtgccgaatcttccagaaggctgggcctggtcctcaaaacggggcacagtatggagctcccttcgtcgaggatgagtgggaggcggatgaagatgatgattttgg

SEQ ID NO: 115334 - DNA, 348 bp, Arabidopsis thaliana columbia
  unsure (1)..(348): unsure at all n locations
gctgacgtacggctcgagattccnggggtcagacaagcactacataagggtgatacagttgttaaagccgttttgtcattttgtgacatggttgatttatttaaaaaaagccagaaaaaaaaaaacaaaaaaaaaaaaagaaaaaaaaaaaaaaaaagagaaatagaaaaaaaaaaaaaaaaaaaaattcaaaaacagaaatgtatccaaaaagtacggacgtccaatggggtccgccctaaggttcccatgttaggtaagccgaaatcctaccccagggccccccaagttcggttcaggggtcgtctttttggccgccgtttcgggaaaccccctggggtaaacccg

SEQ ID NO: 115335 - DNA, 467 bp, Arabidopsis thaliana columbia
taccggtccgaaattcccgggtcgacttcttctccccaagctgcggtggctgccgcgctctccaccccaaggtagaaattcttggccaaaagccccggttcgatccaacaattctgattccaaacactgcaaagtatactcaagcgaattcggttcttctgatgtgcagattgcgcagttcgctgagcggaatccggacgtgctgttcctgcaagtcaactacgagaagcacaagtccatgtgctacagcctccatgtccatgtcctccctttcttcaggttctacaggggagctcagggcagggtcagcagcttcagctgcaccaatgcaaccgtaagtctcacttgtatactgtaaaacgtttctgcttactacaaaaatgttcttcatacacgtttaagatgagatgaatgctgacatgcttgctgcaattcgatccgattacagatcaagaagttcaaggacg

SEQ ID NO: 115336 - DNA, 188 bp, Arabidopsis thaliana columbia
ggggaagaaaaatctgaacagagagacaataatcgtcgtcggcatcctcatcactgtagttttcacaatctattctctttgtctgccatgcgactgaccactgaattaaaaagtatagagaagagatatcagtgtatgataatagacaaatagaacggaaatatatctacttgggcggcacttccatt

SEQ ID NO: 115337 - DNA, 161 bp, Arabidopsis thaliana columbia
attcacgggtcgacgcacgcgtccgaacaggcgtcagcccacgcgtccgcggacgcgtccgcccacgcgtccgaattcgagcgggcgctctataggatcgaagcttacgtgcgcgtgcatgcgaagtcatagctcctctagagtgtcacgtaaattcaatt

SEQ ID NO: 115338 - DNA, 115 bp, Arabidopsis thaliana columbia
aggtacggctgcaataagactacagctaggtacggctgccacaagacaatataacgatacagctgctataatactacattctggtaccgttgccataatactacatcacggtacg

SEQ ID NO: 115339 - DNA, 466 bp, Arabidopsis thaliana columbia
  unsure (1)..(466): unsure at all n locations
taccggtccgaaattcccgggtcgacagtcccttgaatctctgcacttaaatggagccactagtgctcctcggttagctgaagacgatgaaaattctgttgctagcgacttgcattgctttgagttgaacatgcatggagatgctgtgcagactcatgaccttgcaggaactcgacgaacagtcgcggactgcatgtattcaccaatgagaagactggagttttccgatggtgtgtctgttgagggctcaaggatctcaaccgcaaggcctcgttcagaaaaaggcaaggtgaagccaagcagcagcaaagcacagctgcatacttcgacaccagaaatcagctctcgcaactgtgacaagatcgatcctatagatgagcagaatgaaacagtcatgacccaagtctctcgacggttgcacgatgacttgctgaagatcanatcagaggctcctcagcatgcattt

SEQ ID NO: 115340 - DNA, 464 bp, Arabidopsis thaliana columbia
taccggtccgaaattcccgggtcgacatcggtctttcacgttagggtaacatgggtgcttcggcggcagtttgtcgggaaaaagatggccagtaactcggagcatttgcggtgattttcgacggtctagtagatgcgccaagtcttgaagcgtacgcatgcaatgaagcactcgctctcgccatagatttctacatatcacatgtgataatagcctcagattgtatgcaggtcatctcagacatcaaccagggcacacaatcctcttattcaatggtcctcgatgagattaaatatactccctccgttcctaaatataagtctttttagacatttcaaatggactacaacatacagatgtatgtagacacattttagagtgtagattcacttatttcgctccgtatgtagtcacttgttggaatctctagaaagacttatatttgggaacggagggagtagaat

SEQ ID NO: 115341 - DNA, 474 bp, Arabidopsis thaliana columbia
  unsure (1)..(474): unsure at all n locations
cgcctgccggtaccggtccgaaattcccgggtccacgacggcctgaaagctgcccctcctccccttcaccagcggaggggggtacgtccggatctgtaaccagcggtgaggatagaaagccagtgttttttgaagggagagagaaagtgttactacccctatcttttttagatctggagaggatgagagtgtgtgaatagagcaaccctagcaagcaagcgcggaggctccggcctatatatacatagtggggtagttttcctttttcactccatcaaaacaatcgtttaaaattgtgtactactacatgccaggtcgtggtttttttagttgttgattgttttttgagatagctacccgcttgttccaagtggtgttacggtgtgccaggtcgcactttgtatcgttcaagtctggtactacaagtcnctccattaaatgaacaaccaacccctcgtaaaaattgtgaacaag

SEQ ID NO: 115342 - DNA, 467 bp, Arabidopsis thaliana columbia
taacggtccgaaaattcccgggtccacgagattgtcgttctagggcccgtattgctacacaatatgttcccctttgagaggttcatgggagtcctaaagaaatatgtccgtaaccgcgctaggccagaaggaagcatctccatgggccatcaaacagaggatgttatcgggtttcgtgttgacttcattcctggccttaagaagataggtctccctaaatcgcggtatgaggggagactgactggaaaaggcactcttggaagtgactcaataatatgcagggatggatattcttggtctcaagcacactacacagttctacagaactctaccttggtgaccccgtatgtcgatgaacacaagaacagtctgcgctccaaacacccggagtagtgcgatgactggattacatgtgaacacattaggactttcagcagttggttggaaacatgtctcagaggtgacaa

SEQ ID NO: 115343 - DNA, 216 bp, Arabidopsis thaliana columbia
gcgtcgctgctccgtaccagttgcactgcataaatttgatataaaactctgcaaacatgttggcttaacaagacctccttacatgtgatcagcttctctcggactccttccgttacaatgaaattgagaatggaatgctgtgggaagttgaggggaaatgggttgttaacggagcagttgatgttgacattggtgcaaacccatctgctgagggtg

SEQ ID NO: 115344 - DNA, 270 bp, Arabidopsis thaliana columbia
atcgtcttaagcttgatttctctgttttcgttctgtctttctttatcgtcgcggtgtcgtcctctgatgtcaacgacggcgatgatgacgtgatccgtcaggtggatggcggaaccgatcctcaggttttgacctcagaggatcacgtttcgctcttcaagcagaagttcgggaacgtcaacgcttccaacgaggaggatgactatacattctcggtttacaaagcgaatctcacgcgatcgaggcgtcaccagaagttggatacgtctg

SEQ ID NO: 115345 - DNA, 362 bp, Arabidopsis thaliana columbia
gaatccacattgtcggtaccttgatggtcttggaccctcaggaaatgattccagtgcacagaacgattggcatggagcgtggtggcacagcagcttcaccactctatcaggttatgtagaggaagacagcccttacacgccagatggcaagaaaggaacttactattttgagttttcaaggcccttgaggacaatggaccgtctccaacaggatgttcagttcacgcttggctcgccggccaaaatgtccgtcgcattctggtacccagtggacagcaaaccatggcatggatcaggacactacacgatcaactgcgattggacaccgctagatatctcctcggggtcttcttcgggtctca

SEQ ID NO: 115346 - DNA, 342 bp, Arabidopsis thaliana columbia
aaaagatgagaaagcgatgaaaccaactactccggcttcaccatggacgactctgaagcaatgctcgtctctttgctcttcgattttgagaaagaatagtgcttcaatgactgcttcgtattcctctgatgcttcgtcttcgtgtgagtcatcgcctttgagcgtggcgtcttcttcgagctgtaagaaggttgtgatgcgaagtgggtctgtctcttctacaaggaagctgagtgttgggaaagaagaagagaaggtttctggtgattgcttcgctgatggtcgtaaaacgtgtgcttggattacagctaaagctgacatgtgctatgttgctttccatga

SEQ ID NO: 115347 - DNA, 404 bp, Arabidopsis thaliana columbia
ggactcatttgcgatttttaagatttaggcaaaactcttctctgtttcgacgcaaaaggaagcatttttaatggacgcattgggtggttgcggcggcgctggtggtttctggggatggaatggcttcgatcaacggagaaagaagaagtcttccggtgatagaggtaagaaacgtaattctggatcgtcggattccgtcgatgtgagcagagacgccggcggttatcggtttcctttgaagcaagctgtgacggccggagcactcactttcaccggtgacacgattgctcagctatcagggagatggaaaaagagaaccgctcttaaacaatcatcttctgagcttgacgagggggaattgtggaacattttctcagaacatgactggattcgtgcgctgcgga

SEQ ID NO: 115348 - DNA, 175 bp, Arabidopsis thaliana columbia
acagtaaatgaagagatatatattctacatggtcttgcatcgttgttacatttcatcacccaaaacttggggagagggaaaggcagtgaataagcaatataaaacgaaagtttaaactttcaattaagtataacagcaacctcttttgccaactccagatgtgtcttcaacgtta

SEQ ID NO: 115349 - DNA, 250 bp, Arabidopsis thaliana columbia
gagaccaaagggactaataaccatatttctcctacagattgttttccatgggtgtgaatgggacgttggtgggactaaatatcccatatgcaatataaccccatcacacaagagatatcatggacaacaaaatggctgtaatgctggacccatcgctagagcccttgacacttgaagccgtgagacccgaagaagacaccgaggagatatctagcggtgtccaatcgcagttgatcgtgtaatgtcctga

SEQ ID NO: 115350 - DNA, 383 bp, Arabidopsis thaliana columbia
acattaataccccaattatattcgatactgaaaccatattacaaactcattttaataaattgcacacaactgaagatggtaggacactaacacatgcgataaatttattacatagaaattattgtcattagatgaaacgccttttgagagagatctaacataattgtcagaccctattggcataaagttactgacgtgtcatttcaagataacagcgcttcgaacaaatctttaaacctatctttcatgaagtcggaaattggcgaagcgatgatattgctggcaaccccgaccgctatgtccctctcccaattggtgccaccagctctgtcatttctagtgtgacgctgcacttgaccctgaccttgattcacaactctgta

SEQ ID NO: 115351 - DNA, 298 bp, Arabidopsis thaliana columbia
atacctcccaaccaataaatgtatataatatagacaaacaatgaaacaaacaccaccaacaacaaaaaagtaccactttgagagttcttttagactaaacatagatcacaacactggtacggagattgagattgatatcggaactgagacatccgttgtaaaaccaccgtctctattcccatttgtattccctacaaacccgtaaacgccagaccgcatcgctgcattttcccgcctctgaaaaacccgagcaagcgaagccgctttccgtctagcccgctttgtccccgtaaacaaa

SEQ ID NO: 115352 - DNA, 350 bp, Arabidopsis thaliana columbia
tattttttttttttttttgagggaaattactttcaattttattgaacctgattcgccaaaagaatattacaacaatggcgatcagatcaaggtcaagatgagttgtagaaatcggctctatacattattaataaatgcttgagagactaaatgaaaatgagaatttacagattcctcttttgaaaaatcaaaaagcttttgtttttcttcttgtttaaaagctcttcttcttcttcctttgtttcttcactgctgtgtattaccaatggtagtgtctttaccagaggatgttgttgctgcttgtcttgtttcagacacagagagtcttctagatttccctgttgatgttt

SEQ ID NO: 115353 - DNA, 179 bp, Arabidopsis thaliana columbia
gatgagaagagccttccatagtctcttggtaaacagtaattttgtatttgaaacctttcagaatgatatggtatcaggcagcgaggctgaagaatacaaatataaatgtaactacttgctcatagttgaagataagtagaagttccaaaacacagaacccatggacatgaacgctactc

SEQ ID NO: 115354 - DNA, 203 bp, Arabidopsis thaliana columbia
gaataagataatttcgatttcgactgtataaatgattaacaaagattaattaaattaattaattataaatccctcaaaaaaggtctaagacatacaaaactccggcgtgtttctccgccccatcctcaacgaaatacaaatccctcatcctctgaaacgcctgccacgtcagcaaactatccgaaccggcttgatgacatttc

SEQ ID NO: 115355 - DNA, 243 bp, Arabidopsis thaliana columbia
caaacacaccagaaacgatctttcctctcttcttcaattatttacgttacaccttcttcttcttcagattcgcttctctttcttttcctcgaaaggagtcagattcttctcccactacacaactaatggcttttcagttactcagatcgagaaaccctaatttcataattctgagattttgagctcatatcccaaatttcgaatctcactctgttttttcctctgtgatttctcagacttcta

SEQ ID NO: 115356 - DNA, 339 bp, Arabidopsis thaliana columbia
tcagctcaaatggtattacgttattgtagcttacattttcgcgccttctctggccttctgtaacgcttatggagctggacttacagacattaacatggcttataactacggcaaaattggtctttttgtcatcgcggctgtgacgggaagagagaacggagttgtagccggactcgccggttgtggactgatcaaatccgttgtttcggtttcttgtattttgatgcaagatttcaagacggctcattacacgatgacgtcacctaaggctatgtttgctagccaaatgattggaacggtcgttggatgcatcgtgacgccgttaagtttctttttgtt

SEQ ID NO: 115357 - DNA, 373 bp, Arabidopsis thaliana columbia
gttctagatcgcgagcggtcgccctttttttttttttttgttttgttgcttttcctctctcttctctcatctctatcctttagagagaggaaacgatcgaagcttcttaatctgataacgattgctacttcagcatctgttgatcgttcacgatggcttctgaacagaatcctatggctttctcagcatagatgtctggctcttgtccgttaacgtttgtcttttcgacaacgtttgatcggctctcttctgacaccatcttgtttctcttttacggtggtggttggcttgtgtctggcttccgttggcttctacagtagcggtgggctagctaagttctagaaattcaccatatagctctggtgtttctttt

SEQ ID NO: 115358 - DNA, 363 bp, Arabidopsis thaliana columbia
aagtgttcttaagggcatcaagcttaatatcatctttcaagactcaaattgcagtggatttatcggcaccatgggagctttgcagctgatggaaaacaaagtggttgcagccattggtccacaatcttcagggattgctcacatgatctcctatgtagctaatgagcttcatgtacctctcttgtcatttggagcaacggatccgactctctcctctctgcaatttccttatttcctccgcaccacgcagaatgattacttccaaatgcatgcgatcgcagattttctagcatattccggatggagacaagtcattgcgatattcgttgatgatgagtgtggcatgaacgggatatctgtcct

SEQ ID NO: 115359 - DNA, 320 bp, Arabidopsis thaliana columbia
aaaagcagagagcagcggcagagacgtctgagtagaacctgggatccaggttcagttattttaccattataccccttgaactcgtcttcttcgtcaaggtaatcttcgatttcagatggaatctgtagaaatctagattccaatttgcttaattgccaatagtttgatgggtttttgcggttttgcgaatccgaggctctcggaggtgagattttcgtctttgaatttagagttctcgggtctgcttagttcctttaagttccagagatgatgaagaaaaatctattttggattaagctcaaatatgaactctgtaattc

SEQ ID NO: 115360 - DNA, 251 bp, Arabidopsis thaliana columbia
ttctcccacagtttcatttcttcttgtgtggggaaatctgcatctttgtccactctcttttattttcccaagaaaggaaacaaattcccacaatttcttgtcttctcttaaagttcttcttaagttgaagcttcttgtctgtttttgagatttccagtaagaagaaacttcgctaattttcccgcggaaattctcttacaatcataaagttttcttttttttttgctctcgagaaagttttgagaattttt

SEQ ID NO: 115361 - DNA, 398 bp, Arabidopsis thaliana columbia
aaacgggcaatttatcaagtttgtttactgagttttattgcctaaaggagaaaggcaagagttagagatatatctcccctgttccagttccagagctgggagaaaacagtggactgtcacagccctggcccggggctaatgccagcgagttttaaagtgaaatctgcgccacttgagggaaatgatggttcatttgaggagtttttagatccagactttggtggatcagccattggacgtgttagccctgttgactctggtttgtggtggatcatattgctgagagcttatggaaagctcacgggtgactacacgttgcaagagagaattgatgttcaaacagggattaagttgatactcaagctttgtccaaccgacggttttgacatgttcccgac

SEQ ID NO: 115362 - DNA, 328 bp, Arabidopsis thaliana columbia
ctcgaaggcgtcaccggaaagtatttcggcgactgtaacatcgttgctccctgaggtatgactttcctcttttggaaaaatatacctcagggagcagcaacaacatgctacgttgcacttcatccagatctcgaaggcgtcaccggaaagtatttcggcgactgtaacatcgttgctccgagcaaatttgctaccaacaattctctcgccgataaactttgggatttcagtgtctttctcatcgattctatctctaaataatctatcatcatcaagacaaattcttagacattcaaaatttatttatccttcttgatattgttacatt

SEQ ID NO: 115363 - DNA, 278 bp, Arabidopsis thaliana columbia
catctcgttctctcttccgtcaatatggaaggcgtcaccgtcgtgtctttcttccttcttttcatcgccaccgccatggccgccaagtccaccgtctccttccgtgacggtaactctatttacacatatacatacacatacattcattacatattccggtttactacattaataacaaagttctgatttatcactttcaagtctgaaaattggaattggggtactatacaattcaagttttttttttccctcaaagtatattaacatacctttttttt

SEQ ID NO: 115364 - DNA, 363 bp, Arabidopsis thaliana columbia
gcggcactaccgttagagtttccagatggcaccacaccagtaacatgccgggtctctatatatgacaactcaagtgacaaaaaagttggtgtcggaaaattgatggatagagcttctgttcctcctctacctcctggcagtctgtatatggaagaagttcatgtcaagcctggcaaggaactatactttactgttggaggccagcatatgccttttggtgcatcaccacaggatgtatggactgaattaggtcgaccttgtgggatccacccaaagcaggtagatcaaatggttattcattctgcgtcagatcctcgaccaaaaacaactatctgtggtgattacttttacaactattttact

SEQ ID NO: 115365 - DNA, 199 bp, Arabidopsis thaliana columbia
gttctccaactcgtccaggctgatgtcgaacaagaagagatatgagaagagaagcgataagagcttttgtaatagccatgattctccacggggagtttatgatgatagaagttatcgcttcacttctcatatctcttcatgttctcgaactcgtccacgcggatgtctacgactcacaagcgaaatgtggttacgcacc

SEQ ID NO: 115366 - DNA, 247 bp, Arabidopsis thaliana columbia
ataatcttaaagctttgatttattattctcttgcgctcttcagcattagcttatgagactattcactagtttgaattcactctcctattcagtcagtactcaggcatctattatctatatacaacttgaatctgtgattgagaaaaagaaagaagtagcaagtgaccattaatcataggtggcgatgaacggaatgaccatcaacatgaagacatcgtaagagagcgttgcgtagcctgtgtaacca

SEQ ID NO: 115367 - DNA, 256 bp, Arabidopsis thaliana columbia
gattaaacagtctattccttctcgaatataacagtttaagggttttttctttgtgattgcaacactagggccctgtggcacagggagaaggacaaaaaagactttaagagccaaaagaaaaaaccaattcaagaagaaaataattcattacaaaaccataataaacatccattttctccatcttttttttccagatttaatgatgaaaacccccacagaagacaaggttgcaatcagactctgtgacactattaca

SEQ ID NO: 115368 - DNA, 180 bp, Arabidopsis thaliana columbia
atcaaccccaagtttccatattttttatacatgaaaaagtttcattcattgtcgatttgtaccaggattgcattatgaatctagaagttagcatgaaaaagtggtcggactgttctgtttatagtttcccgatgaagacaaatggagttaccaacagcacagccaaggttcatgtcttca

SEQ ID NO: 115369 - DNA, 352 bp, Arabidopsis thaliana columbia
caattaaaactggaacctttaaacattcattgattactcatatatacatgatacatacaaagtcaccagcttctggttgtggtccccggtttagccatctattaagccagctacatgattcatatcaagaccaatgcgggattaaggatcacgtttaccggcgattgcaacatcatcttcatcatcaccatccgaggcatattcatcttcactcatttcatcatcactagacatttcctcagtatccgcccttggctttgcgtatttctcacaatactctttaactctctgttcataggtacgacgatcacgcatcatcaatgcagctgcttcaccattcaatggatctgac

SEQ ID NO: 115370 - DNA, 126 bp, Arabidopsis thaliana columbia
agtggaaatgctaacttcaaactgttcacaggactgtttgtacaagcaaacacataaacgaggatgctgatgccgtgtgtgtgaacacaatacagcactgttttgagtaaatgtttatgcacactc

SEQ ID NO: 115371 - DNA, 274 bp, Arabidopsis thaliana columbia
gtttgattgaacaagcttatgacaatcctcatgaagctctatcacgaataaaacgtcatcttctcacccaacgaggctttaaagaggttggcatagaatttatggatctttatagctacttgattccagtttatgaaatagagcctctagagaaaattaccgatgcatatcttgatcaatacttgtggtacgaaggtgacaagcgtcacttgtttccaaactggattaagccagcagactcagagccgcccccacttctggtttataaatggtg

SEQ ID NO: 115372 - DNA, 193 bp, Arabidopsis thaliana columbia
ctttttctttccccttgctcactccaagtctccaagcccccaatttttttcacaatcaagcatgtctttgttgcgaaccaaacttgtgagatggcgacaccgagtcaggacacagtcaacactttcaccagcatcaccggtgcttctgacgccgtcgcccttcagatactcgaggagcatcatggtgatctta

SEQ ID NO: 115373 - DNA, 241 bp, Arabidopsis thaliana columbia
gtcggttgctttcgctgagttctggtttctttgattttcttagttacagaacacaacttactttgttttttggtttgggctgtgttgaaaattgagcttagggttttatgtaacagttgtcttagctcatagttacggttaaaaagctctcaactttgtctccctaatgataattgaattcaatcttgtttatgatttttctctattgggtcgatctttaactgaatctatctacataaag

SEQ ID NO: 115374 - DNA, 324 bp, Arabidopsis thaliana columbia
ataatatataagctcgccgtataattttcttgccgggaataatctccgatcatcgtcggaaatttccgaattgttgtaaaagaagtccaatttaggctttggatcctcagtttaatttatctgggacttttggttgctgaaatctctttcgggttttgtcctaatcctcattagtttgggtttcgtgagtctcgttttataagaacatgggacaaaagagattgttgttcttgctggcagtttttacttttcttgtttcatcttcatatggtatagttctcaagttgaagagcgatgatgatcgacctgtttacaaccatacgc

SEQ ID NO: 115375 - DNA, 355 bp, Arabidopsis thaliana columbia
gacatgaggttcttcggttacttgttaatgtttaccagaagctggcttctcctgattatttgagcatttgccaatgccttatgttcttggatgaaccacaatgcgttgcaagcatattggagaagcttcttcgttcagagaacaaagatgatgctttattggctttccaaatctctttcgatcttgtacagaatgagcaccaggcattcctcatgagtgttagagatcgccttccagcgcccaagacccgtcctgtagaagcaattcaagctgttgaaacctctactgctcacaatgagaacactgcaggggatgttcagatggcggatgatactccatctcagacaattgtgca

SEQ ID NO: 115376 - DNA, 287 bp, Arabidopsis thaliana columbia
atttcatacaacctttctatcattttccaataatggcccggacagtaagtctctggcggagagaggccgtgttcttgacggccatgctggcgacagaaaccggcgtagtcggaataagtactttgtttaaagtagcaacttcaaagggactcaatctttacgctttcctcggctattcttatcttcttgcttctctccttcttcttccttctctgttcttcaccgacaggtcaagatcacttcctccactaagtttgtcaatactttctaaaataggacttcttgga

SEQ ID NO: 115377 - DNA, 324 bp, Arabidopsis thaliana columbia
caatagcattgactggtctttagaccacacacctcgtgttcttatcccggtagccaacgggtctgaagcggttgaactggtctcaattgcagatgttcttagaagagccaaagtagatgtcacggtttcatcagttgaacgatctttgcggattacggcattccaaggcaccaaaattatcactgacaaattgattggtgaagctgctgagtcatcatatgatctaatcattcttccgggaggccatactggctcagaacgtctgcagaagtccaaaattctcaagaaactgctcaaggaacaacatgaatctgggcgaatata

SEQ ID NO: 115378 - DNA, 328 bp, Arabidopsis thaliana columbia
cactttctcgcgactcgtagtcgtcttctccacttcgatactcctctctcttgcctcgttcctcttgttcctcgccgccgctctattctacggctgtcttcttctttttcctcttcctctgaaaccggagctgcgtcagtgcggttgacatcaccgatagacatggcggaatcgagatcccctcctgtaacgaataaggtggagcatgtgatggagatgttcggtgacgttagggttgacaattactacaggctccgtgacgattctcgcaccaatcacgacatgctttcatatcttcgtgaagaaactcagctacactgatttcgtc

SEQ ID NO: 115379 - DNA, 334 bp, Arabidopsis thaliana columbia
ctcttgaagagcagagcggtggtgctctcctccgtgttcctcgtgccacacgagacgtgttgcgtctccgtgatgatgctgtgtctctgcgtggttctgttgctggaatcctccagaagctcaagaaggcagacggttcttcagcagattgtatagctgcgcttgctagagtggacaatgtcaaacagagaatggaggctgcctacaaaacactacaggatgctgcagggttaactcagttaagctcgacggttgaggatgtatttgctaatggcgatcttcctcgtgctgcataaactcttgctagcatgcgatattgcctgtctgctgttgg

SEQ ID NO: 115380 - DNA, 345 bp, Arabidopsis thaliana columbia
gttttcatgtggggagaaggaataggcgaaggtgttttgggtggtggaaaccacagagttggaagttcgttggagatcaaaatggattccttactgccaaaagctttagagtctactatagtacttgatgtccagaatattgcttgcggtggacaacatgctgtccttgtaacaaaacaaggagaaagtttttcttggggagaggaatctgaaggtaggcttggccatggtgtggattccaatgttcaacatccaaagctcattgatgccctcaataccacaaatattgagcttgtagcatgtggtgaataccatagttgtgcagttactctatcgggggatttg

SEQ ID NO: 115381 - DNA, 118 bp, Arabidopsis thaliana columbia
caacacagagagtcttcttgttaggtttgtaacgtttgtttttgactttggagaggctcaagttattaattatggatgatgatttgtaattgtcaacataatgatggggtcattttgc

SEQ ID NO: 115382 - DNA, 298 bp, Arabidopsis thaliana columbia
gtacgacgtcaaggatccaaatgcaatcttgcgagcctctccttcagctcagcctttgaaacattggctcttccagggtgaagaacatcactaacgaacggcctcctggagagaagtctgtctggtcatcgaatttcctggttcggatggtgagctgaaggagaagctagcaaggatgtacgacgtcaaagatccatatgcaatcttcgtattcatattcagaatccactttggacgtggtaaatcatccgggtttggtttgatctatgagactgttgagagcgctaagaagtttgaa

SEQ ID NO: 115383 - DNA, 312 bp, Arabidopsis thaliana columbia
ctaatctccgtaaattaatggcgagtagttgcgagctttgctgcgagatcttcatcgcaattcttcttcctcctgtcggagtttgtctcaggcatggctgttgcactgtaagtttcatctctctctatcgatctctgaactttcacagcttcttatttcagaaatcgaaaccgtagttgaaattgaattgattacggttatttaaattgaaattggttgcactccggtttacgggaaccaatcaatatgatgaatgtggagattaattactgaaaatataattgtggtgtttttgttaaaaagaaacactaa

SEQ ID NO: 115384 - DNA, 247 bp, Arabidopsis thaliana columbia
attctgactctgttaaagaaacgagtattcatgcctagtccagtagcttgtgactccaataccctttcccaattcaaggcagaggagtttgctaagaatggttctgggaggagtgataagatagaagatgtggaattaagcgaggaagaattgaatatgtatttggatttgcacccattctctaatgcctctccgtacactgttgtggagacaatgtcacttgcaaaggcccgtattctcttccgtg

SEQ ID NO: 115385 - DNA, 409 bp, Arabidopsis thaliana columbia
atgtagcgcaggtcctgttgctgaagacatgtttcactggcaggcaacgataatgggtccttcagagagtccttatgctggaggtgttttccttgtaaccatccatttcgacgccatatccaaaaatcaaaggtttttggatatggcgtcgaagcggatcttgaaggaattgaaggatctccagaaggatccacctacatcatgtagcgcaggtcctgttgctgaagacatgtttcactggcaggcaacgataatgggtccttcagagagtccttatgctggaggtgttttccttgtaaccatccatttccctccggattacccattcaagcctcctaaggtggcctttaggaccaaggtgttccatcccaacattaacagcaacggtagcatttgcctcgacatcttg

SEQ ID NO: 115386 - DNA, 373 bp, Arabidopsis thaliana columbia
ggagcagagtgaagtttaaaatcatgagcctgaaggtgaaaggtccaatggactatgtgcctgagctgttcgatgagcaaaaggatgatgtctctaaggagcaaatattgcgtgtgattttcttggatcctgagcgctccaaccctgcattggaaaaactgaagcgtcaattagcagaagcggatgcagcggtggaggcacgaaagaaacctccagaggaaacaggtccaaagatgattggagaagggcttgtgatcgatgaatggaaggagcgtagagagagatatcttgcacagcaacaaggcgaaggagctgactctgtctgagagactaaaagagttttctcaggacaaaaacaagtgcgcttgtgaag

SEQ ID NO: 115387 - DNA, 176 bp, Arabidopsis thaliana columbia
gtcacaaccaaaagagccatttacatgcgcaacaatcacaatggattcgtcaactatagatttgtcctctcctgccttcgcttgaaaggctgtgaagtctgccgaatcacatgtcctccgaaactgtcgtgtaaccatgaagaaaacagtcgcaaagccacaaggtccatcaggca

SEQ ID NO: 115388 - DNA, 394 bp, Arabidopsis thaliana columbia
ctttctcactcttttttatctctcaaatttgaccttctccgttgttctttcgcatcgctcaggagcagaagcttcaatctttgataatgtcgaggaacaagggtttggctgagcaagatcttaaaaaattggatgtaactgtgctacatcctctgtctcctgaggtcatttctcgccaggccactattaatataggaaccattggtcatgtcgctcatggaaagtccactgttgttaaagctatttctggtgtccaggtaaaatttgattatgcggttttcacaattgtaatcctagaggcttttctagcttgcagcgtttgatcaattggagtgggtgaagtgatttctatggtttccttatcttctctgtacagactgtccgttttaaaaat

SEQ ID NO: 115389 - DNA, 287 bp, Arabidopsis thaliana columbia
cattgacgcaggtgaagaatctacagaagataaacgctagggaatcagatttaggaatatctgatgaagcttcatggcacgctaagtacaaaaactctgcatatgtctacgtcggaggcataccgttcgatctcaccgaagatatggtgaaattgttgatgtcaatcttattcgagacaagggaacgggtaaatctaaaggttttgcttttcttgcttatgaagatcagagaagtaccattcttgctgttgataatctgaatggagctcttgtgttgggacggacca

SEQ ID NO: 115390 - DNA, 379 bp, Arabidopsis thaliana columbia
aaaaattctgctttagaaaaaaaaaagaagcaaacctcactgttctttcatcgtttccgagagaggagagacggacatggaaggaggaactgcgcactacagccctcgaactgtcgaagaagtctttcgagattttaagggccgtcgagctggcatcatccaagctctcaccactgatgtggaagattttttccagcaatgcgaccctgagaagcagaatctctgcttgtatggattcccaaatgaagtgtgggaagttaacttaccagctgaagaagtgcctcctgagcttcccgaacctgcactcggcattaactttgccagagatgggatgcaggaaagaaactggctttctctcgttgctgtccacagtgatgcg

SEQ ID NO: 115391 - DNA, 243 bp, Arabidopsis thaliana columbia
gtgaatcgcgtcaaaatctgcgactatctcaagggtttggggataatcaccgatgaattggagagtattgagctaccttccaccattgaagtcatgtgtgagcgtgttgagttcttacagaagctagggttaacgattgacgatatgaatgagtatcctttgatgttacgttgtagtgtgcgtaagaatttgattcctgtcatggcttacttagagaaaattggaatctcgagatcgaaatta

SEQ ID NO: 115392 - DNA, 168 bp, Arabidopsis thaliana columbia
attaagttccgtgaaataaatcaacaaatttcatatttatacctcacatcgcaggataaaatcaatagaaagcaaaacaaatctttgctattaggttttatcgtgcgatgtgaggtataaatatgaaatttgttgattaagttccgtgaaataaaatgtgagattttt

SEQ ID NO: 115393 - DNA, 270 bp, Arabidopsis thaliana columbia
acttaatcatcgactttttgaccatttctccatctgggttttattatcttcagttctttgtgtcacaactccagtttctttttgtattttgttgttttttgcacaaattgagattgttgtttcctataaggttttgttttattctatttatggaagtctcttgatttcgcttttataacctcaaaaagcatctttcttgatagcaccaagtatgatttgatcatcaaaagggtttggatttgacaggtctctattttaggtttgtttttg

SEQ ID NO: 115394 - DNA, 309 bp, Arabidopsis thaliana columbia
gtgggtcctaagaaggagagactggacattaaagcagccttgtcaaattcattcgggtttggtggtcataactccagcatcatttttgctccttacaagtgaaagcgaaagcagttgcttgtactccaaacctgattgtataacttgctgtaagtgttttacaagaagtttcccatgttatgctagtgttacgtcgagggaatcaacagagtttgttcaactaccaagagctaagctaagtttcttaggatcaagatctgatgagccaaagacttggacaggagctaaaacgtgctagagatatcagag

SEQ ID NO: 115395 - DNA, 299 bp, Arabidopsis thaliana columbia
agcaacgaagatatgcttacttcaccttcttcttcttctacatatgatccattctcttccaatttctctccgtcgctcactaatgccttctctagtagctggaccaggcgcatgggattgaaattgagtaggagagtcaccagagctcggatcttctctcgtaagattaaggatcgttcaacacttaaggtcacttgtcgtcgcgcacacgaacgtgtggttgaggaagaagcatctacaatgacggagacgaaattgtttaaagtttcttctggtgaagtatctcctcttggtgtgtc

SEQ ID NO: 115396 - DNA, 407 bp, Arabidopsis thaliana columbia
gaggaaacggagataaaggagaaaactttagagcgtgttcaagttaataacagttctgtcgataatggaaaagctcttcgtaccatcatttcccaaaacttgggtgaggtggcagactccagctaaagtagagaattcgcctgaacttcatccaaaatccagaaagaaaaacctatcattcaccaagaagaaagaacccaatatcattcccgacgagcaattcgattacttgtgtagaaacggaagtttgctcgaagctgagaaagctctggactcgttgtttcaacaaggttccaaggtaaaacgaagcacttacctcaaattgttggaatcgtgtattgaatctggttctatccatttgggtcgtatccttcatgctcggtttggtttgtttactgaacctgacg

SEQ ID NO: 115397 - DNA, 327 bp, Arabidopsis thaliana columbia
tgtgaagcctgccgcatcagatgtcctcggaagcggccgtgtgaccatgaggaagactgtcgccaagccaaagggtccatcaggcagcccatggtacggatctgaccgagtcaagtacttgggtccattctccggcgagcccccgagctaccttaccggtgagttccccggtgactacggatgggacaccgctggtctatccgccgacccagagaccttcgccaggaaccgtgagctagaagttatccacagcagatgggccatgctcggagccctaggctgcgttttccctgagctattggctaggaacggagtgaagttcggaga

SEQ ID NO: 115398 - DNA, 371 bp, Arabidopsis thaliana columbia
ggaacatcgcctgactctgtgccgcctcgtttggcccgtagaaactttcctatgcctcctggaaactacatgggatctggttatcctgctatgcgaggtcatccttttccatttgcttatcccagaggaattgttagtcctcgccctctaagtagctctcctggatctatatcacctggcatgtcaacacctttaggcattggtttgagttctgtggttcaaaccgaaggtccagaaggtgcaaatctgtttatctataacatacctcgggagttcggggatcaagaactcgcggctgcatttcaatctttcggtattgttctgagtgccaaggtttttgtagacaaagccactggtgtaagcaaatgttt

SEQ ID NO: 115399 - DNA, 234 bp, Arabidopsis thaliana columbia
gcaaaaaaggagaatccggatgcatataaggccgcctggaagttactcaagggtgctgatggcgttcttgtgccgggaggttttggcagtagaggtgtagaaggaaagatgctggcagcgaaatacgccagagaaaacagaattccataccttggtatctgtctaggtatgcaactcgctgtgatcgagtatgcaagaaccatactcggtttggcagatgcaaatagcactgaa

SEQ ID NO: 115400 - DNA, 348 bp, Arabidopsis thaliana columbia
ctcgagccgaacagagcttcttttttttggctcatcgtcaaaacaaaagtgttggcgatggaacgaactactgtaatactgttcgtcttcttcttgctctctgtagcaatgtgttctcttcactctttttcttccgtagcaatttcattcagaactcaaaagtacgtaaatacctctctcgttcatcgcttatctcctataggatatcgtaattatcctctaccgtgggcagtgacgtcaattgacgaaatccctcctaatgctgttcgccggaaaatagaccggaattggagaggtgggttcagtctcggcgtagatttaggtttatctcgaaccggaatcgctatt

SEQ ID NO: 115401 - DNA, 248 bp, Arabidopsis thaliana columbia
gttttctcttgatgttattcaaattagcaaagtgcaagctaaccaacgtgctggacacaacaaatggtggagcaaatgagataagcactgtttctagcgactttggactcatagttcgtgaagaaaacttacggaagataccacaacgtgttcgtgacgacgttcggatacgaaggagagcattgggactcctttacagtcgtcaacggagagtttcctgacgagaaagatctggagaaataccatgg

SEQ ID NO: 115402 - DNA, 248 bp, Arabidopsis thaliana columbia
caaatcttaaacgttttactttgtgctgcactactcaacctcaatggccgcctcaacaatggctctctcctcccctgccttcgccggtaaggccgtcaagctttcccccgcggcatctgaagtccttggaagcggccgtgtgacaatgaggaagactgttgccaagccaaagggcccatcaggcatcccatggtacggatctgaccgtgtcaagtacttgggtcgattctctggcgaatcaccgagct

SEQ ID NO: 115403 - DNA, 242 bp, Arabidopsis thaliana columbia
ggctgttatacgcttggatgatgaactcgacaatattgaaaagacattgacgctagctctgtttaattctacgggcaacaatgctactagcaagagcatcagcacaattgattcacttgcctcaagcacttgggagaaggttgcaccagaaaagacgttgatcacacctgtgcagtgtaaatcactgtggaggcaatttaagaacgagacagaatataccgttacacaggccatttctgcac

SEQ ID NO: 115404 - DNA, 315 bp, Arabidopsis thaliana columbia
gtgagactggaagatcaaggggattcggattcgtcaccttcaaggatgagaaagccatgaaggatgcgattgagggaatgaacggacaagatctcgatggccgtagcatcactgttaacgaggctcagtcacgaggaagcggtggcggcggaggccaccgtggaggtggtggcggtggataccgcagcggcggtggtggaggttactccggtggaggtggtagctacggaggtggcggcggtagacgcgagggtggaggaggatacagcggcggcggcggcggttactcctcaagaggtggtggtggcggaagct

SEQ ID NO: 115405 - DNA, 376 bp, Arabidopsis thaliana columbia
aagagtttgtggctgctgaaattcttcaaacccaactgatggtgatgctgatgttcttcttcttctgacattctctctctcttctctcttttcgcagcttcttcttcatcttcggcttaacaacaacaaaacttcacacacgtggtgagagagcacacaaaggctcaagctttttcaaacccttgttgaaattcgagctcttttggtgtttctctttttttttgttggtatcaatttggtgtttctcttggtcttgttgaggtactgaatcagcttcttcttcttctccgatcttaatcgattctaagtttcttcacagcttgggacgatttgacatctactctccaattcatttcccgtaaaattggtttttttt

SEQ ID NO: 115406 - DNA, 363 bp, Arabidopsis thaliana columbia
caaaggcggtggatccggtggcggatccggtggaggaagcggtccaacggccgccgccgccgccgcggctttacagaagcaaaaggcgttgttacagagagtggagactgacatcacatctgtcgtcgataacttcacgcagatcgtcaatgtttcaagggtgagtgatccgccggtgaagaactcgcaggagacatacatgatggagatgcgagcttctagaatggcatatggattagggaagttacataggccactcaagtgttgttgaaagattttcttatgagtctctggagtgttgttaacttacttcctcaccaatggtggcaggttcaagcagctgattctcttttgaaactcgta

SEQ ID NO: 115407 - DNA, 113 bp, Arabidopsis thaliana columbia
ataccatgcaattcatctgagtacggcgagactactgataatcctcggtactggtggtggtttacgtcatgcatctcatgactctccgactcgcgatacatctgagcaggttt

SEQ ID NO: 115408 - DNA, 144 bp, Arabidopsis thaliana columbia
cggctcgagcggctcgagtacgactaataataataaccagaacacggcgtggaacaacaaacctgtgagaagttataacgttaaagattcaaagtatagaccaccgggaaggaagagtccatcttcctccaattgttgcatttg

SEQ ID NO: 115409 - DNA, 336 bp, Arabidopsis thaliana columbia
gagatgcatcctctagaaatgcatgggaatgactccactgtgcagtattatgtgccttacttatccggtattcagttgtatgttgatccgttgaagaagcctagaaatccagttggagataatgaaggaagtagtgaaggaagcagcaacagtaggactttgccggtggacttgagtgtcggtgaactgaatagaattagtctgaaagatcaatctattactggctcgttgtctagtggagaagctgagatcagcaatccgcagggacgattactattcgagtacttggagtatgaacctccatttggcagggaacctctggctaacaaaatctcg

SEQ ID NO: 115410 - DNA, 357 bp, Arabidopsis thaliana columbia
ctggacggacagatgagtatctggcttcctcgtcactggatttggtgatagtgggtttgatttggaggacaacgcattgctggatacttgcaacgatctgacttttggtggctcatctacttctgatggccagaagccagcttctagtggcaagggctgtgaagaattacgggtatcgggtgacagtcagtcttctcggaaaaataaaaatgtagatcaaagctgctcaacctctaaacagcaatccaaagattttcctgccgcaggcagcaatatcagtgagagccagctagatgagcaaagaagaaagaataacgaagaggtttcacacaataacagatcagctgaggaatcaac

SEQ ID NO: 115411 - DNA, 398 bp, Arabidopsis thaliana columbia
aacaaatcttaaacgttttactttgtgctgcactactcaacctcaatggccgcctcaacaatggctctctcctcccctgccttcgccggtaaggccgtcaagctttcccccgcggcatctgaagtccttggaagcggccgtgtgacaatgaggaagactgttgccaagccaaagggcccatcaggcagcccatggtacggatctgaccgtgtcaagtacttgggtccattctctggcgaatcaccgagctaccttaccggagagttccccggagactacggatgggacaccgccggactttcagctgaccccgagacattcgcaaggaaccgtgaactagaagttatccacagcaggtgggccatgctcggagccctaagctgcgtcttccctgagct

SEQ ID NO: 115412 - DNA, 148 bp, Arabidopsis thaliana columbia
gccaccacatcaggaggaagagaaggtatcgataatggtggtgtgaagtgggtcactaaggtgagtcgcccagttgttgagcggtcctttaccggtgtcatgtaatgatgtaacgtcgttattttaaagaaaatttggcaccttttgt

SEQ ID NO: 115413 - DNA, 326 bp, Arabidopsis thaliana columbia
atcgctgctcgccatcgccggccaccggggttgccgctgatgcgattcgatccagtgggaacttttgtcaccttgcctcttctctctttcctaacactcagatctctggtcagccttcagatagatagtctttgaagcaaaccaaaggtgaaaactgttctgcagttggtgatgacaagaagaatcacaagcttttgacttatgtttgagaatcatcatgggacaaggcttccgcaatcgaaatgggactttttcagcagcatcctagaaagactctttgcctttatcgcttcacctagacaacgagcaaggataactccatcctc

SEQ ID NO: 115414 - DNA, 339 bp, Arabidopsis thaliana columbia
caggagatgttactcaaatttccagacagaatcaggctgttctcccaacaatctctgttcctattcgtttaagtacggtgatggaagtggcacttctggttactacatctcagatttcatgtcctttgatactgttattaccagtaccttggctataaattcctctgctccctttgtttttgggtgtagcaatttacaatctggagatttacagaggcctagaagagcagtagatggcatctttgggttaggacaagggagtttatcagtaatttctcagcttgctgtgcaaggactcgcgccacgagtattctcgcattgtctgaagggagataaaag

SEQ ID NO: 115415 - DNA, 287 bp, Arabidopsis thaliana columbia
atgagttcaagttctataacctcaggtgtcgccagagaacggggtatgccgacgaaatgtgtgtgtggcttagaggtcacgatgttcgtctcaaaaacgcaggagaaggcatgacgaccgttcttccggtgtattagcaaaaggaatgctaattcgtggtcaaccaaaagggatgatcatgtgttcaaatgggtcgaagatgctgtgtttgaagaagtagaagatgctttgccaagattagccatcattgcaaatgagataagcaaagctaaatctgaggcaaatga

SEQ ID NO: 115416 - DNA, 288 bp, Arabidopsis thaliana columbia
aacaacaaaactctttaaaaagcaagaaaactttcactagtagttgaagaatttctctcttcctctacttattattattatcaactggtgatttgatttctctctctctctctcacaatggattcattaggatcaagaagaaggacacataatagccgtacggttccttcaatgggaatagaaggggacgaagagtttcaagaagaagatgtgtggtcagttttacgagaaggagaaacttcaagtcctgaaatgaagatacccaagagtcatttctcttcctcatca

SEQ ID NO: 115417 - DNA, 329 bp, Arabidopsis thaliana columbia
tggtaacattgatattttccaggccaagaccattggtgagcgaatgcgtgttattgatggaaatggaaagctggttccccacttgtactgcatcggtgatgccaatggtaaactgatgcttgctcatgcagctagtgctcaaggaatttctgtggtggagcaagtcacaggtagagatcatgtgcttaatcatcttagcatcccagctgcttgttttactcatcctgaaataagtatggtgggattgacagagcctcaagcgagagagaaagctgagaaagagggattcaaagtaagtatcgccaagacaagtttcaaggcaaacacaa

SEQ ID NO: 115418 - DNA, 269 bp, Arabidopsis thaliana columbia
gtacaaactataaacaaaggagatggcgaaagagggaacaacggtgatcggagttccatattacgcggggcagaatccgtatcaggccggaattgtgccgccgaatgccatctatggtgatccgttgggtgctccgattcagcaaacgatttatcgagacacgcctgctcctttcaattgcctttattgcggcaacactggtcacaccaatctcagatcaaaacctggtgtagctgctgttgttgcttgcatgatgccgtttaagcttg

SEQ ID NO: 115419 - DNA, 152 bp, Arabidopsis thaliana columbia
caactttgttcgcggaaagtgagccaagttttatctgtattttgcttcagtctttgcttcgtgagtgtgagaggagaaagagagcttgtttagatgtaaaatttgcaagactttgtatttttttcattaatcaaataagtcgtttgtctctc

SEQ ID NO: 115420 - DNA, 367 bp, Arabidopsis thaliana columbia
gtcgaaatcttcttcttcttctctacctttgtttgctctgttcaattttttcctcataagtttttgcagatgggtttcttctacacgtatctttttatcaagattcgtccctcttcttcaacatcatcaacgcgttttcgacaaaaagaacaacacagaccaacaagagactttgaccaaacaagaagatgatgatgatgatgatgatgatgatgatgatgatgatgatgatgatattgatatttctagagaagaggcagagatggttatgagaagcttagggcttttttacaacgatgatcagcttcaacaacaatacagtgcaaaagaagtctcgagtttgttcgaagagaaagaagcgagtttg

SEQ ID NO: 115421 - DNA, 325 bp, Arabidopsis thaliana columbia
catcaacaatgtccgaacaccaaatggttgtgggagtgtgacgggacgagtctcatccccgggaaaccgttcgttttttctctcggtaaatcgagttggatctccggcgatccgatcgggatgagtaacatcgatctgattgggatgagtaaccgcgatctgatcgggatgagtaacagcgagcttcgcaccgtcgagcctctcgatcttcaattcccttttgaattgaagaagcagatctcttgctctctctatttgacgaacaagaccgacaataatgttgcctttaaggttaagacgacgaatccgaaaaagtattggtgtt

SEQ ID NO: 115422 - DNA, 403 bp, Arabidopsis thaliana columbia
caatgattgagggacgcagatcgccgtccaaacgcgatgtgactggccctagacatgacccaattcctcgaaattcatgacggaagacgagttcaacaagcagtttaacgcagatgaagacgacttcgtgctccgacagtcaaagaagaaggccgacatacgagtccgagatggacgtgcgaagccaatcgactacctggcgttcacccttcgatatatcgatgcagagcgcgacgtgttcgatgacgaagagggcgatctcgatatcgaggtaccctcgccggcaaagattgtacagggactcggagtggaggaattgaacgaacttgaaggcgacattgcttcgtaccatgtcttggagtcaaacgctcgtaatcgagcctactggaaggctttgcaatca

SEQ ID NO: 115423 - DNA, 354 bp, Arabidopsis thaliana columbia
caaattaatacaatggactaatgtcatagagcaatttttttttgctaaacttcaggatttaactcattcttcttcttgttcaagtggttgctgattctgaaatctcttcttcaataacttagctcctaagcaccgtgccacagcctccgccgtagttacacatcctccgaatggttccttccttagcacaagctctgaatcgtagatggttcctccactcactgatgcgtctatttccgtatccaaacacactctaaccgctcctgcttctcttaacaccacctcgctagctttgaccatctccttcgcgtgtttccacgtcgcgtcgaatacgattagtctcagcggcggggg

SEQ ID NO: 115424 - DNA, 375 bp, Arabidopsis thaliana columbia
agaggagcagctaatggaattgccatgacagcgatgtctcttttcaaagccataggtccagcagcagcaggaatcatgtatgcaacttcttctacctccttctttacattaaatatgcttcaacattttgttataaaacaaacaacaagaacaacatgaacttgttggtttatcgaattctcagttttgttttgcgcttaacaacggtttgttgacagtttttcgtggagcgagaaacgtcagggtgctgcttttctccctggcacccaaatggtattctttatactgaatgtggttttggcacttggagttgtattgacattcaaaccatttctagctgaaacacaacagtagaaaatgatgaagattttgatg

SEQ ID NO: 115425 - DNA, 159 bp, Arabidopsis thaliana columbia
aacacaatgaatcggatgcaaaattgaggttaactactcaggtgaccgaacaaaacagatgggtgcgtttaccgtttttcaaatttgtgtttgttgttgccgatgttttcagtgtaagattctctgccctgtgtatatattacaatgtttttttgtgca

SEQ ID NO: 115426 - DNA, 177 bp, Arabidopsis thaliana columbia
ttcagagagtccttatgctggaggacccattatcgttggaccgcactaaacagatgggtgcgtttaccttggggcacatttgtgtttgttgttgccgatgttttcagtgtaagattctctgccctgtgtatatattacaatgtttttttgtgcactctgtacacattggccatatgg

SEQ ID NO: 115427 - DNA, 131 bp, Arabidopsis thaliana columbia
ctgtaccacaactctccctgcatgctatcaagctgggaccaactattcctatgcatcgacaaccagatcggtcctgatggaattcaaattgtcacattacgtttgaatcagccagtggaaacagatcacaa

SEQ ID NO: 115428 - DNA, 212 bp, Arabidopsis thaliana columbia
tggcagcgccggctgcagccagatctaccgtggctaaggaagacaaggatgatgttaaaggcaaagtaataggaaaaggagggtaaactatttagtagatgattgttacagatactagataacaaaagatggtcaagtattttgtaaacacttttatatatctccttaatgtgaaacctatcttttattaatagcattttgttttgtttaaa

SEQ ID NO: 115429 - DNA, 292 bp, Arabidopsis thaliana columbia
gaaacctctgttttgaatttctctctgaggcaattcgtcgaacaacatggggtccaaacaaccatacctaaacggcgcgtactacggaccatcaattccaccaccgcctaaggctcaccgcagctataactcacctggattcggatgctgttgcttcagctgcctcggaagctgtctacgttgctgcggttgctgcatcttaagcctgatctgcaacatcctcatagctgtagccgtaatcctcggagtcgccgctcttatcctctggctcatcttccgtccaaacgccgtc

SEQ ID NO: 115430 - DNA, 322 bp, Arabidopsis thaliana columbia
gctaaaagtgcctctgcatcaatggcgatttccaagctccatctagtactctttcttctctcagtctttctcgcgcttcatcgtcctgttctttccaacaccggtaaactctctcattccgaccaagatcttctagatttttcaatttaggtttcttgatctagttctagtctgaaaatcgtcaaatcttgtttcattcaagcctagatcttgatcaatggcgattacgttgttaactaaactatactttcggtgttctgtttttgatatccacagatggagaaaaccttctatttacagtattcaaccaatacagagaatc

SEQ ID NO: 115431 - DNA, 229 bp, Arabidopsis thaliana columbia
gacattcaaaaatacaggtaaggttgaagctttcacacaatgtcacatacacatgccgccttaattttttggggggtgattcttcagacagaaacatgccggaagtactaaggataacgcgtctccggtgacatcgcaaccgttggatcagatcagtggacggcggataagagatgcgtgtggagaagagagagtctgggttaaatgattaagacatttcgtgggtaat

SEQ ID NO: 115432 - DNA, 322 bp, Arabidopsis thaliana columbia
attcaaaacaaaaactttcagaagaaacctgaaaaaacctttcggagaaatctccggcgaaaaagaaccctagcgtcgagcggcgaagatgggcgtaattgatttgatcactagggttgattccatctgtaaaaagtacgaaaagtatgatatcaatagacagagagacgctaatgtctccggcgacgatgctttctcccgcctttactccgccgtcgaatatgctctcgaaactgttcttcagaaaacagaggatttgtcgtctgagacagacaaagcgaaagctgtggcgatgaacgcagagattcgaagaactaaagct

SEQ ID NO: 115433 - DNA, 316 bp, Arabidopsis thaliana columbia
aaccaccgaaaagcacgattgtttatcgtagtgcgttacaagcgttttaagctctcactagcaagcaagtactagcaacaatggcgtcaagcactgcgactatgctcaaagcctcaccggtgaaatctgattgggttaagggacagagtcttctcctccgtcaaccttcctctgtctcagctattcgcagccacgtggcaccttccgctctcaccgtccgagccgcttctgcttacgccgatgagctcgtcaaaaccgctaaaacaatcgcgtctccgggacacggaattatggcgatggatgagtccaacgcgac

SEQ ID NO: 115434 - DNA, 283 bp, Arabidopsis thaliana columbia
gaggcaataaacttaacttaggtgctgcgatttatgcgtagaggtttgcttctcatgctctgaggaatctaagagcaaatgcagcagcccgaaattctagattcccacacatgttaattttgttgcctcagaaaccagccgatccttagtttcctatggatgaaacctagttttgtatagttgttgactctatctctctgtaatgtgatcgctagtgatttcttgcaaataacttttgtgtaaaccagtaaagatatttttatgtgaaataataatcaatagg

SEQ ID NO: 115435 - DNA, 313 bp, Arabidopsis thaliana columbia
gctcaaagagactttccatcatccatagaagatgaaaaaccaatcactggattattagatgggaatggagaatatactcttacatatgaagacaatgaaggagacaagatgcttgtaggagatgttccatggcagtaagaatcttttcttttctttttcgtttttttctgaatctgagtcagctttttgttctatctaaaggagaagtattagattcctagtcacatatttatgatatcttaatcacagtttgattaataacaaacttagtttggttaagctattagagattgtggactttttgatcactaaa

SEQ ID NO: 115436 - DNA, 287 bp, Arabidopsis thaliana columbia
atgaatatgaagtaagagagaatccaaatctggacacatggatggaggtaggacgggattttatcaggttgcagttcttgaatactgatgggatcagaaccataggatgtgttctgggccagagtattgctctggattactatggccggcaggttgatggtatggtagcagaatttactgagataaaccgtcagttggagataacaggaacgtttacaatgaaaaggaaaaagctgttccagttggttggaaaggctaatgtgattctggctgatgtgattctgaag

SEQ ID NO: 115437 - DNA, 176 bp, Arabidopsis thaliana columbia
cgactgacgctgcatgagcttcgtaacgcttattggtcccatagagatgcagaacatcgaccgaccaataagcgttacgaagcttttgcattgccggagcctgcaccaagggttttacctaagactgaggatcctaaactggttaatatgaatagaacactgctacggaatcttct

SEQ ID NO: 115438 - DNA, 358 bp, Arabidopsis thaliana columbia
gtagattcattccttttacgtatatgttcttcacgcgatgaaatgggttttttggatgaccggaaattacaaagctcatgctgattctcattacgatcctcacgctctaccggagataaccgggattaattacagagatattgtagctgagaatgtttctatggctggaaggttagagggaatctctggagatccttttactgggatttgtatttcgaatgcaacgatttctatggcggctaagcataagaaagcgatttggatgtgtagtgatgttgaaggagttacgagtggtgttgatcctaagccttgtgatttgcttgatggacaagaatcagagacgacgaagaagaagatg

SEQ ID NO: 115439 - DNA, 270 bp, Arabidopsis thaliana columbia
gttctatgtcatcggttactcgatgggaggacaagctacttgggcatgccttaaatacattcctcacaggttggctggagtaacgcttgttgctccagtggtgaactattggtggaagaactttccatcagagatctcaaccgaagcttttaaccaacaagggagaaatgaccaatgggcggttcgtgttgcacactatgctccttggcttactcattggtggaactcccagagctggttccctggatcaagtgttgtggctcgcaatct

SEQ ID NO: 115440 - DNA, 167 bp, Arabidopsis thaliana columbia
atttattccgcataaaacttgagaatcttccaacacagaatacaataagagagaaaagtaaactggcaggtaatttttctctcttcttgttttctgtgttggtagattctcaagttatttatgccgcacaacacggtttatcatttacaattagttgaattttggtc

SEQ ID NO: 115441 - DNA, 281 bp, Arabidopsis thaliana columbia
ggatcccgagaccggcgatgtggggtttgtgggccgtcgctagttagtagattcagagaagaacttgagttccatggtcttcaaggtaaagtgtcaattagcccatgttctcacataggtggtcacaaatacgctgggaatgttatcatctaccgatcaaacatcaacagggaagtcacaggacactggtatgggtatgtgaccccagaagatgtacctattcttttggagcagcacatcaacaaaggcgagattgtagaccggctatggaggggtgaaat

SEQ ID NO: 115442 - DNA, 325 bp, Arabidopsis thaliana columbia
tgactgatctagtacagtaccattcaaagaaaatgtttgaggtgaaactgagggaaatcaaaaccgttcttacaagcaaggtcacagaggaaagtaatgtaaactaagtcattgaatcggtgaagcaacagatcaaagatgctaagttacctgacattgaggttgtgcgtgttgtttgggatggtttaatggatgctgttcagtggtctggaaaaaaccagcagtatcatgcaaattctgttctgcgccaggtgaaaacatgggctccacttctgaacacgttctgtaccagcggaaagctagagctggaactgatgtacaaagt

SEQ ID NO: 115443 - DNA, 296 bp, Arabidopsis thaliana columbia
ctcgaggttgagagtgatagtcttgccagtgagtgttttcacgaagatttgcatcttgaaagagagagtcgcgagactatcactctcgaggttgagagctctgacaccatcgacaatgttaaggcaaagattcaggacaaggaaggcattcctccggatcagcaaagattaatattcgccggtaaacagctagaagatggccgtaccttggccgattacagcattcagaaagaatcaacccttcatttggttctccgtttaagaggtggtatgcaaatctttgtcaagactctgac

SEQ ID NO: 115444 - DNA, 233 bp, Arabidopsis thaliana columbia
ggtattgattacgcaatgcggattttcaattcagatggtagtgaaccacagatgtgtggcaatggaattcgatgctttgctaagttcattgctgagcttgagaacttgcacggaaaacatagttttacagtacataccggtgccgggttgattgattccagaagttcaagatgacggacacgttaaggttgccatggggacaccgattcttaaagcacacgatgtgcccacga

SEQ ID NO: 115445 - DNA, 275 bp, Arabidopsis thaliana columbia
ccggccgaatcaccatgcgcatagcctccaagcccaccggtccatccggcagcccatggtacggatccgaccgagtcaagtacttgggtccagtctccggtgagcctctgagctatctcactggacagttccccggtgactacaggtgggacattgccggtctatccgcagatgccgagaccttcgctaggaaccgtgagctagaagttatccacagcagatgggccatgctcggagccctaggctgcgtcttccctgagctactggctaggaac

SEQ ID NO: 115446 - DNA, 322 bp, Arabidopsis thaliana columbia
ggcgcagctttttcttcgtcttcttcaattattctattccctctgagagattctctgtgcgtttcttagatcgagcgagcgaagcgagagatcatggaaggtggagctgctctctacaatcctcgaactgtcgaagaagttttcaaggatttcaaaggtcgtcgtactgccattgtcaaagctctcaccaccgatgttcaagagttttaccaacaatgtgaccctgagaaggagaatctttgcttgtatgggttaccgaatgaagaatgggaagtgaatttaccagctgaagaagtgcctcctgagttaccagagccagctc

SEQ ID NO: 115447 - DNA, 269 bp, Arabidopsis thaliana columbia
agagaatctctccggcgagatcaccggcgttattccgataatttcgcctgagagttgtcgcatgttataaatgggtcttcctttattgtcttgtagttccacaagagtcactctctcttcttcttcttcttcatcttggtgtagtaccggaagcggtggatttaggagtagttctaagcttttcgattctccggcgtgttcgagatcggatttgaagaaacgtagcgggaagagaaattcacggttaaacggactttcgttagagaaat

SEQ ID NO: 115448 - DNA, 289 bp, Arabidopsis thaliana columbia
ctccaactccgaaggacaaaaccgagagacgcggcgagaaagacggtgacttgacgtggtctatgggtggtggtgggaatctcgtcgacggtgttcgtcgatggctttttcagcgaccttcttcttcatcttcttcttcttcttccaacaataataataataatcacgaacaacccattttcaattcttcttctttctcttcttcctctaaccccaatcattccgctaactctggagagcttattattgaacaagatctcgatttctctggtctaacgcttattaacgt

SEQ ID NO: 115449 - DNA, 273 bp, Arabidopsis thaliana columbia
ggcacctgtaagaaggataagttgaaacaaaaggttgtgacaattgatagctatgctggtgtaaaatcaaatgatgagaaagcgttaatggaggctgtagcggctcagccagttagtgttggcatctgtggaagcgagagagcgtttcagctatattctagtggaatattctctggcccgtgttcgacatcattggatcatgctgtgctcatagtaggatatggttcacagaatggtgttgattattggattgtgaaaaactcatggggaaaa

SEQ ID NO: 115450 - DNA, 350 bp, Arabidopsis thaliana columbia
  unsure (1)..(350): unsure at all n locations
tgaagcatgcgaaaatggaagagtagagaaatcacaaggtatatgaacatgatgactccattttcccattttcttctcagtcgtcatcttcatcatcactcctccttcaccttcaccttcactctctcttttaccgccaatcattaccaccgattcacctcctaagcttccggcgaaaactgagcttcctgtcatcggaagctgtatagattgaagatccagtttcaaatttctcgaatcatcgttagtttcccatcgacgttcactctgtaaatcagtgtctgtgaaacaccataacgtanaggagcttctaaagtctccggcggtgcgacctctcgggctagtatctg

SEQ ID NO: 115451 - DNA, 211 bp, Arabidopsis thaliana columbia
ggagaatgggaacaaaacaagcaacatcgtctccgcctttgtctccagctgataaagccgatgcattttcacggctgaggcgccgtcgcaccgccgtactaaacgaactgattagttctttagattccttaagtctcacggaagcacttgcagcttcttcatcgtctcccgttaccatgcccatttccacggcgacgatgatcgcttcatc

SEQ ID NO: 115452 - DNA, 331 bp, Arabidopsis thaliana columbia
gcagttgcaacacaagacagcaccacgtttcaagctgcttaaagatgctcactcccggagaaaggagacccgcaccggctgccaggccatgattcgccttcgactcatccactttgatcgatggaaagttgatcaagtcaaactcgaccacaaccactcctttgatcctcaacgtgcccacaattccaagtctcacaagaaatcctcctcctcagcttctcctgcaactaagacaaatcccgaaccacctccccatgtccaagtccggactatcaaattgtatcgaacccttgcccttgacacaccacccgctcttggaacttcactctct

SEQ ID NO: 115453 - DNA, 209 bp, Arabidopsis thaliana columbia
gatatctggcccactgtatgtggaagacttaccaaaccatcattggatatcaaagaacttgggtcagggaatggcatgttttttgtcccgcagcgaccttatacatgtttagggacactgagagatcaaattatataccctctatctaaagaagaagcagagaaaagggcagcaaagttgtacaccagtggagagagctcaacagaagc

SEQ ID NO: 115454 - DNA, 323 bp, Arabidopsis thaliana columbia
gttttatcttcggttagagaaagatttaaacgttaaagagtctaagggtgtagaaggtactacactagttgatgggaaaggtagccgccagagtagacgtaggattgaaaacattatgggtgatttggccaaatcaattgagaaagagaagaagatttctgtcaagatgcttaaggatgttggggagctattaagcctcactctcagccaggctcaaaaccgtcaacagctgtcgggtttgacaaaatttcgtcgcattgatgtgacaccatcactagatcccctagacggactttatattggcgcacatgggctatatacat

SEQ ID NO: 115455 - DNA, 293 bp, Arabidopsis thaliana columbia
aaaaaacctatctctctctctctctctcgccgccttcctctcaccctcttcgcatagcttcactttcgccgatggctctacctaaccagcaaaccgtggattaccctagcttcaagctcgttatcgttggcgatggaggcacagggaagaccacatttgtaaagagacatcttactggagagtttgagaagaagtatgaacccactattggtgttgaggttcatcctcttgatttcttcactaactgtggcaagatccgtttctactgttgggatactgctggccaagagaaa

SEQ ID NO: 115456 - DNA, 303 bp, Arabidopsis thaliana columbia
ctcgagccgattcggctcgagctcgagccgctcgagccgaatcggctcgagcggacgacaaaggaagaagtcggttcacttttaggcttctcatctcacacgtataggtctttctcctattgacgacacgtgatctgagatagagacaaattccagtttcttcttctgtaggaaatctctttgggccttgttgggtctaaataatttctgtaatcttgcattttgaataggcttttcttaggccttgtatgagttggatatgtttaatacagaatttctcttgtgaaaaaaaaaaaataaaaa

SEQ ID NO: 115457 - DNA, 206 bp, Arabidopsis thaliana columbia
gtccaacccagtagacccagtgaccagagaagtctccggcagcaacagctggtccaaaggaaacaagtgatgattcttgattcatgtttctgtgtttggttactttgcctcgatctttcttgttttgtttggagtttggtccggtttcgttgtaatttttatccaatttgtatgaatattatttaatggatggctgttttggttat

SEQ ID NO: 115458 - DNA, 177 bp, Arabidopsis thaliana columbia
gttttgtaagaaatgacaatgtcaatggccaaacacgaatatgtttacacagggtgttacaatacgaagaagccaatggtagcgaaagatggaaatattgtaacaccctgtgtaaacatattcgtgttttgtaagaaatgacaatgtcaatggccaaacgaaaaaacttttaggatt

SEQ ID NO: 115459 - DNA, 373 bp, Arabidopsis thaliana columbia
ggacaaggcttcgcaagcttcacttgtcgttcgttggttcagatgaagatcatcgtttggtgaaatcaggagctcttactgatctcgacatgttttatctggcttctttgtacttttcctttaggtgtgataccaataagtacggtcctgctggaacctatgtgtctgggaagcctctttgggctgcagatttgcctagctgcttgagttattatagggttaggtctttcttagctaggtcagctggttttcagactgtgttgtctgtaccagtgaattctggagttgtggagcttggttctttaagacatattccagaagataagagtgtgattgagatggtgaaatcagtgtttggtgggtctgactttgt

SEQ ID NO: 115460 - DNA, 384 bp, Arabidopsis thaliana columbia
atgcaaagaacgagacagttgttgctgtcgagtttggtatctccaggacaggaaacagtgcaagaattttagttggtagacctgaatctgctgaaattagaaacctttcgtttgtgggtgacttgatgatggacaatggaaggactctgagctgtatgattgagtatgaggcaagttctaagagaatgatggttcgattcagaaaatctggttcggtaaagctgtttgatccgttcttctctttctcggtagacttggccaagttatggaaaggtggtgaagtcactgtgggtttaagctctgccaatgggaactcttcttccaaggcacattttctccattcatggagatttgaaataagacatcctcctccgatgtggatgc

SEQ ID NO: 115461 - DNA, 364 bp, Arabidopsis thaliana columbia
ctcccacatacatttttgtgatcaaacaactaatcaatcaaaagatggaaggcaagactttgattgtaagtgtgctcataatgagtctgttcatggcacaaaatcaagttgacgcaaatatttgctgtccgtccatccaggctagaactttctataatgcttgcctcttcgcggtaggtagcccgtcaagctgtatacgcaactcgagttgtcttgacattagtgagtcgacatgtcctagaggatatacgaatgacattctcgaaaacacaggtgatgctgtcactgaatactgcaagttggggtgtgtatcctctgtttgcggtgctttaaccattctccagaactccgatgcaagtgaaat

SEQ ID NO: 115462 - DNA, 289 bp, Arabidopsis thaliana columbia
gaagatttctagttacacactacattgctgagcgggattcttccactgtcaccgtcaaggtttcaaaaactgaaggagactggcagaggccaaaccgccgtgttcatgtccaattattactaggaggcggtgcaatgcttgatgcttggggaatggatggagagtttatccacattaaggtgccttcagaaagtggaatttcagagttaatatccacaagcaatgagcgctttaaacttcatatggaaaatacaaaactgatacctgagaaggaagtggtacctggaca

SEQ ID NO: 115463 - DNA, 270 bp, Arabidopsis thaliana columbia
gtggtggagatggaaatgatggtggattttgggggaaattgttttctccttcaccagcggttgctgatgaagaacaatcaccggattgggattctcatggtttaccggcgaatatcgttgtgcaattgaacaagcttagtggtttcaagaagtataaggtatctgatattatgttctttgatcgacggagacaaaccactattggtactgaagattccttcttcgagatggtctcgattcgtcctggtggagtttacactaaagctcaat

SEQ ID NO: 115464 - DNA, 355 bp, Arabidopsis thaliana columbia
aatctttcagtgggaagagaatggtttgctcgggcggtgggtttcctcaattgcagaagctttcaatacgggaaatagagtgggaagagtggatagtagaacaaggctccatgccccttcttcatactctctatatcggggtttgtccaaacttaaaggagcttcctgatgggctgcgatttatctattcattaaaaaatttgatagtatcaaaaagatggaagaagagattgtcggaaggaggagaagattattacaaagtccaacacattccttctgttgaattcgacgactaggaatgctctcagcaatcacagaagccaggagtctcataagcctctgtttccacccaaaa

SEQ ID NO: 115465 - DNA, 256 bp, Arabidopsis thaliana columbia
aaagcggccccttaagtagttcgctgcgatctccatgtctgctcattgacttgattgttccttcgtctactattggaaatcatccccaatcgcgattgcggtgatatgcaacctttgcgcaggagatggtatggctgacattgtgggtcggcggtttggaacagagaagcttccttacaacaaaaacaaatcatttgctggtagcattggaatggccaccgccgggtttctagcatctgttgcgtatatgtactac

SEQ ID NO: 115466 - DNA, 113 bp, Arabidopsis thaliana columbia
ggggtttctcgcggtaatcaagagttatttaaacacattaacattgtacatggatctaaatctttaacctacttgacgtgtgggttgtgagaatatgtttcttgcacaggagt

SEQ ID NO: 115467 - DNA, 255 bp, Arabidopsis thaliana columbia
cgacatccaaggatatacttgcgttccatcgtctcctccacctctttatggtggctatcatcatagccagggaccattttgctatcatcttcacaagcagtaaagtacttcagcgtgcagtgtctaagctagcttatcttcttggtataaccatggttctcaacagtgtgcagccggttgtttctggtgtggctgttggaggcggttggcaaggcttagtggcctatatcaacttgggctgttactacatttttg

SEQ ID NO: 115468 - DNA, 217 bp, Arabidopsis thaliana columbia
cgaattgccaccgtctcttaagccgttaagtaacgaggaggaagagaatcacggaactatagtgacgacggagaaggagagaccggttcttggagaagaacacaccataatggaagctatgttgaccgttgacttttgggtgttgttcgtgtcgttcttgtgtggagtaggaactggtttagcagttatgaacaatatgggtcagatcgggcttgcg

SEQ ID NO: 115469 - DNA, 242 bp, Arabidopsis thaliana columbia
aaggactcacggtggtcatcattgatggagtacattggcttagaggttgtatgggcttcataaccaacagtagcagtaatggaacttcgccgtcgtctgattgttgtaactcgctgaggtctttgaccaccggaggaatgggatgtctttgtctaattgtcactggaactgttcctttcaatattcctattaaccgcacaaccgctgtctcacttccccgtgcttgtaacatgcctagagtc

SEQ ID NO: 115470 - DNA, 191 bp, Arabidopsis thaliana columbia
gttgttgttgtcaatgcaagcaaagtaaagtaacaaagacgaagaagaacagtgtatcatcatgatatacactgttgttgttgtcaatgcaagcaaagtaaagtaacaaagacgaataagaagcagacacagtgtatatcatgatgatacttagtctgcctttgtgaaatctgaacatatttgtatttgga

SEQ ID NO: 115471 - DNA, 359 bp, Arabidopsis thaliana columbia
ttttgttaggttcaacatatgatagagagatgcattctactccgtatgacgcgggacgaatgcgtcaaggcgttagaccaccacgcaagcattctaccactcgttacactcactggttagtctttacaacgttacacatataacctctatatgattcctcaaaactgttcgaaagcttcgttaactagaaggaattaataatgatatttagacatatgtttcgattttgcttcgtacgtcaaattatataattatatggaacaattgaagaaattgattagtgttttcttggatcatgtatgttcatcattatatattcgacataccttaaattgttgagttcacaacagtttttcaac

SEQ ID NO: 115472 - DNA, 362 bp, Arabidopsis thaliana columbia
tggctggccaaggaatcaatttagccttacctactggtgttggacataaacatgaagatagggtattaaagagccagcttttcgttgacaagtttactgaaaccgtccagcatacattcctagaatacttggcttctggatttgaattgaacttcatggttgcaattgatttcacagcttcaaatggaaatcctcgcctgccagattccttgcattacattgatcctacaggacgattaaatgcctaccagagagcaatagttgaagttggagaagtgttgcagttctatgactcggacaaacgctttcccgcatggggttttggagctcgtccaatcgacatcccggtctcacattgcttt

SEQ ID NO: 115473 - DNA, 153 bp, Arabidopsis thaliana columbia
agagcacaagagcaagttttacagacatcacagaatgttcaaaactgccagaatcaaaataaaaaaggtttgctagaacaaagaaaaagtttcaagacaaaaccaaaaagagaatcacagagagccgacagttatttgggggaggaacttgga

SEQ ID NO: 115474 - DNA, 215 bp, Arabidopsis thaliana columbia
cttgaaacacaaaccaaattaaaacacaaaaatagtacaataaccaagttgatttaacttaaatataaacacacattgagaaaattctccatactttttccggtgatgttgcctttctacctttctcaagaactctcctccggtgactccggttttctgcagagaatcatattcatcggagagaatattccggtttcacctcctctggtcaaata

SEQ ID NO: 115475 - DNA, 242 bp, Arabidopsis thaliana columbia
gagttcattccggatccccaaggcacaaatatgatgttcgcattctttgcccagcacttcactcagcagtttttcaagacagatcagaagcgaggacctgggttcacccgaggactgggccatggagtggacttaaatcatgtttacggtgaaactctagacagacagcatagacttcgacttttccaggatggaaaattgaaatatcaggtcatcggtggagaggtgtatcctcccacagt

SEQ ID NO: 115476 - DNA, 265 bp, Arabidopsis thaliana columbia
atacacctagccagcctcgtttggaacttaaaaatatacattataaacaactaactgaatgatcgtcagttgcacttattctttcgtaaaaggaaataaagtgttttagtttagattcaaattagtattcagaattcgaaccagattggtcgttttctatgccggcgggattggttttagtcttagtgtcacatttttaaggttgcttatttagatgcagtctatttactcaaattagtaagcgctcgtcatggtttagttaaaa

SEQ ID NO: 115477 - DNA, 348 bp, Arabidopsis thaliana columbia
acatatatacaaatttttaacttgcaagaaatcaagtcacatgatcacatgaagacttatcaacaaacagaggttaggattttcggagatgagaattattacaaacgaatcaatcaaaatgcaaagttgatttttctattaatcaacaaggttcacttgtgttcaagccaaattttaaacaagccaactaaatttgagacgagattttcaaatgatttataccaatcatatcattggacaatgaccgtaaattccgaaactcttgatgatcttgagagtgtatgtattcatgaccaaggccagttcgcatctcgccacgcaaagcgacatcctccaaaactactacta

SEQ ID NO: 115478 - DNA, 102 bp, Arabidopsis thaliana columbia
ttcggatgccagtgatagaggtggttgaattccaacgcgatgcggttgcgatactggaactgggctcggaacagcagctccgggtcaaacttgagctgcagg

SEQ ID NO: 115479 - DNA, 338 bp, Arabidopsis thaliana columbia
agtagttttgttgggtacccagttgaacgaagtgagaatcagaaaatgggggtttcgatgttggattcctcatggagtttccgattatcctcgaagatgtctccttcaccaacacaaaaactcgctagctctttgacagaaagagatccaatttctctgaatttgaggtttgatcattccattagggcatattcagctcgagctctaaagtgcaggtctgttaagtctgaggattttgttgagagaagtagcccatttgaggttaagaaagagcttgagatttgcttcgacctcgtacataggctcgggagaagcattgtgtacttaggttccgccag

SEQ ID NO: 115480 - DNA, 316 bp, Arabidopsis thaliana columbia
ggagaaagaagctgctgctggcaaaaagaagtcaggtaagaagaaacaacttcatgttgataagcctgatgatgatcttgtttcgggtccttatgatgccatggacgatgatgatttcatgtgagaaaatggcaattttggagattgcattttacctcctataggattgtaactgagaagaggtttaaatcgtcggcggttttttgttttgtatactgaattgcaaaagtgtttttcttctgttttctttgctcggtttgatttaaaaatttgtgtaataagatttgttgtgggcacactatttcctattatatga

SEQ ID NO: 115481 - DNA, 358 bp, Arabidopsis thaliana columbia
tgcagttgaagtcaaaaggtgatacgtgggacgaaatcgatttcgagtttcttggtaatctaactggtgatccgtataccatgcatacgaatgtgtatactcaaggcaaaggtgatagagaacaacaatttcatctctggttcgatccaaccgctgatttccacacttactctgttttatggaaccctcatcacatcgtgtaagtatataaagatacatacacaacttagaaacatgagttagtctttttgtttgttctaactataatttccaacctttgggctgacataatttttgtaggtccaaaacacgttttgattataattatggctgatccgcaaaatataaatcttttcac

SEQ ID NO: 115482 - DNA, 230 bp, Arabidopsis thaliana columbia
gtctcaagaaatctgccaccgccgtctcagtacccgccggatctccaccagtgcttccgattgaatccgctatggctccaggtccatcgctagctccggctccggctccaggacctggaggtggacacaaacatttcaacggcgatgctcaggtcaaagatttcatccacacattgttacattaccgtggatacaacgaaatggcggatattctcgtgaatctgacgtca

SEQ ID NO: 115483 - DNA, 303 bp, Arabidopsis thaliana columbia
cttccacataactaaaaaaaaaaggaattagcgatgaggggaggtgatggagaagaaggatcggagtcaagagttgcactgttgaaaagtcctcacacggcggaggaagacggtgaaggattgagggatagaattttggttgagacaaaaaagctatggcaaatagttggtccggccatattcagtcgagtaacgacatattcgatgcctgtaatcactcaagctttcgctggtcatctcggcgatcttgaactcgccgccatatccatcgtgaataacgtcaccgttggcctcaactttggc

SEQ ID NO: 115484 - DNA, 201 bp, Arabidopsis thaliana columbia
attgacatgaaatgtttataaatttaaagtttggggccattagtgtaattcttaaaaagatttaaaaagcttttatgttgaatgttgagagtcaaggtcagctattgcagaagcgtagattgtttcagagtcaagcatctcaatacattgtaataatatgcatgcgtgtgtttcaagctaacagagaaagcaagacgatag

SEQ ID NO: 115485 - DNA, 121 bp, Arabidopsis thaliana columbia
gaacaacaacactaagcaataaagaaaagctcatgccgagagacacagtggcatcaacattcaagagctcaagcagtgttcttaccccaacaggcattccgtggccagattaaagcctcaa

SEQ ID NO: 115486 - DNA, 315 bp, Arabidopsis thaliana columbia
atttgaaagatgttcaggcacagcatttgcttgagggaggtcctgagtttgttgaggaagatgaggagaggaaagttaggacttacgctgaggagcagaaagaaacgaggaaagctgtgactgatgcttggaaagctgaagggaacgagagtggtgaagatgatgattttttgagagttgtggagaaggaaggagatgatgatgtggaggttgatgaggagttagctaagaaaatggatgagtattatggtgatgaagctgaggctactgagaatcagtttttgaaagattacttggtgaaacagttgtggaacg

SEQ ID NO: 115487 - DNA, 293 bp, Arabidopsis thaliana columbia
gtggagaagagtgatcggaaatgtcgccgtccggcatcaattacagcgagcgctatctagtaaagccggtggaagtggaaagagcgccaacgtttcagctgcagtggattcgatgcttctgcgttccctcaaggaacattacttagaggtttctaagatgactcctcctccgaaagtgagtcctccgtcaccatttgagattgtgaaagggtcgcttgaaggaagtactggtgctgttctgaagaaatctgttgggaatgaagagatcaatcttttcgttatgcgcttggctc

SEQ ID NO: 115488 - DNA, 167 bp, Arabidopsis thaliana columbia
tttgggtgtttctcaagaaggtggaatcactatcccttgtccttactcatattcttcttcagcctctctaagaagctcaccaagtagaggatggttaaagtaaacgataggcatcaaaactctgtttggtgagcttcttatagagggtgaagaagaatttgggtttt

SEQ ID NO: 115489 - DNA, 268 bp, Arabidopsis thaliana columbia
caaacatgtttggcgaaaccattgatgagagctccggcgcagaagagtatgccgccgaagagcatcgagagccgccgtccgaactttcttgtcacggtggaagccaccagcgacgaaattagcgccgctagatatagagacgatgtgaacatcgttagcgtcgggctatcgtactgacagtactggttcgttgacgcgtcctcttgcttggtttcggtatcggtttcgctaatcaggctgtgccactgtacctctctgagatggctcc

SEQ ID NO: 115490 - DNA, 373 bp, Arabidopsis thaliana columbia
gttctagatcgcgagcggcctccctttttttcttttcaggattcttcttttctatgttttatctttcataatagatctgataattttgatttttcactatatatattatggttaatactagtagctttttcatttcaagttttatccttccattggttctttctgagtcaaattgtctcctgtttcgaaccatatataagttttcaatggttttgtattaactcaagtattcaacattatgtctctctttttcttgcttggatctctaatgctgttcatattttaaagcataggtttaggttagatgcatgtaactgccaattaaaagaaggtcaagagttttttgattgtatgaatatatgagttagtcaaa

SEQ ID NO: 115491 - DNA, 273 bp, Arabidopsis thaliana columbia
caccgcctccgtcggagtcttgtctccgcagcttgagcctcagatcgcggttaagtcaactaagcgagccagcatcgttggcgtgggactacaatgctatttcaaggagatctcacaaatgccggcttggtctaagcttgaattctgtaagttctctgctagttgggctggtcaagactgcgattgcaaggaaaagatcgatgaagacgaagacaaagtcttagcactaactaatggttttggagattcatcctctttcaatggaagcagtgg

SEQ ID NO: 115492 - DNA, 143 bp, Arabidopsis thaliana columbia
cggctctagcggcacgagcggctcgagctcgagccgattcggctcgagtgaagatctacccatataaaatagaaaagagatggttctgctacaaaaactttgggatgatattgtggctggacctcaccctgaccgtggccttg

SEQ ID NO: 115493 - DNA, 181 bp, Arabidopsis thaliana columbia
aagacaagaaacataagattgaaagtgataacaacaaatctgattggtgtatgtatcaacacacgaatctatatgctacatgtgccacatgagtagcttcaaattggttgctcatggtcaaaaatatgatctcttacagttaaaaattacgaaactcatcatccacgagtgggagtggttt

SEQ ID NO: 115494 - DNA, 187 bp, Arabidopsis thaliana columbia
tctttttttttttttttattcaattcatacttcaatatatatttctatcgaataaagatcaccaatccaagataaaaatattcggaggattcttctgaccaatgaaaaattaataattgtcagcaaagttgtttctttttttcttgaaatccaaagaattcttattagtttatacgtaggttatcaa

SEQ ID NO: 115495 - DNA, 308 bp, Arabidopsis thaliana columbia
cggactaagaatcacacgcgataaaaaaaatatttgttgagtgggaagagatacatatacttttgttctatgaacaaatcgaaactttaaaccaataataaaagtactctcttatcaaaaaaaacataaagacaattcttctctctctcatttaaacccaaagtaaacgccacaacaacaatggcacatcagtcaccgaccagattgtcccatgaatgaagtgcaagaacaacaaacccattaaaaaaacttacatttccagtatggaatgtagaatcaaacttgatatgccttttcatctcaacacc

SEQ ID NO: 115496 - DNA, 213 bp, Arabidopsis thaliana columbia
tcgcgatctagaacagacatcaaatcaaataacatattacttgatgaaaatctaaccgcaaaggttgccgacttcggtctctccaaacttgtgggagaccctgagaaaactcatgtcacaacacaagtcaaaggaaccatgggctacttggatccagagtactacatgacgaatcaattaacggacaagagcgatgtgtatgggtttggtgtg

SEQ ID NO: 115497 - DNA, 139 bp, Arabidopsis thaliana columbia
ggttggcacctcacaatttcttaatacattaaatttccatttacaaatggcatactaaagataactcactcttaatactaccagtagaatcctgctaagaatctctttctacatataatattaacagtctacaccttaa

SEQ ID NO: 115498 - DNA, 304 bp, Arabidopsis thaliana columbia
gggccctcttttttttttttaaaatttttttttttttttttttttttttagagagtgaaggcaattgcgtctaaacagttaaaagaacacttatttcatgaacatcatcattatcgacaaaacaaaggagaattgaaacaaagttcaagggccaaacgaaaccctaactctccagtcttcgttatcatcatcattaaacggtaaaaaaactcctcaactcccggagaataaggacataccaaatcaagcaaccggagatccaacggtgatgcttaatcacatgaatctccagcggtcgcgagct

SEQ ID NO: 115499 - DNA, 200 bp, Arabidopsis thaliana columbia
gtggtccccactctaaatgtcttcaaacattagaattaacaatgatacataactgaaaagtacgaaactaatggaaatacaaagtacaaaccataaaaattgcatatatgtcacaagaaaataaaataaaaaatcctactcaagatccatcatccatgtttatacacctgcaacagacaccacaaaaaatgaaaagtcat

SEQ ID NO: 115500 - DNA, 246 bp, Arabidopsis thaliana columbia
gtggaccaatatggtctgctccaatccacgatcaagaatgggtgaattcgatactaaacggtgttaaatccatgaaagacagatatcctgcttacgaccgaatttgcgctgttcttaccacaatctcagaggaattgccagatgttcctctctttttgagcctgcatagtctctctgcaacgctaaaatgtacttcaccatcagctgctttgtttcgatcagcggtaatcaatgcaaagtaccgtg

SEQ ID NO: 115501 - DNA, 246 bp, Arabidopsis thaliana columbia
gggacatctaaaaatgcttgacgggtacattgatttcttcatggatccaaatttggctgagtcctatgtaaagctgaaggaagaactcgataagcttcttcaaaaaaagcttgaagatccaagcatggacatccacaaagaaggcaagtacctcatgcttgcagttcaagaacttgtggctggagaccaatgcgaaggcagatttgtctttggccgtgacacaaagaggccaagccaaccgcaaat

SEQ ID NO: 115502 - DNA, 308 bp, Arabidopsis thaliana columbia
tggctggaaagaacagagtagggactactcgtgaatcatgatgggattagagcatgaagattctttgtcttttcttccttagaatggtacttcattcagcttatcgtgttaggtacgtgggtttaaggcaaatgaatgtgaacattgctctagaatgatatatgaactagccccttaaggaatatttcttgtaaatcttaaagttctgagatgaattattgttcaaaatacaagtgggagtacatatacgttttgttatcaagaatgcagctggtaaatttaaacaaagtaaaagaattgagtataaa

SEQ ID NO: 115503 - DNA, 322 bp, Arabidopsis thaliana columbia
gagaaagacagagaagagagtgacaatggtgaaatgtatgaagccaggaaaagccgtgatccttttacaaggacgatacaccggtaaaaaggcggtgatcgtgaaatccttcgatgacggtaccgttgagaagaagtacggtcactgtctcgtcgccggattgaagaagtacccaagcaaagtcattcgcaaggattcggcatagaagacggctaagaaatcgcgcgtgaaatgcttcttcaaggtcatcaattaccagcacgtgatgcctacgcgctacactcttgatttggatctgaagaacgttgtctccgccgacgcg

SEQ ID NO: 115504 - DNA, 419 bp, Arabidopsis thaliana columbia
  unsure (1)..(419): unsure at all n locations
aaaaaaaagaaaacacaaaaacaaagattataatggcttcctcaaccatggctttgtcctcccctgccttcgccggaaaggctgtgaagcctgccgcatcagatgtcctcggaagcggccgtgtgaccatgaggaagactgtcgccaagccaaagggtccatcaggcagcccatggtacggatctgaccgagtcaagtacttgggtccattctccggcgagcccccgagctaccttaccggtgagttccccggtgactacggatgggacaccgctggtctatccgctgacccagagaccttcgccaggaaccgtgagctagaagttatccacagcagatgggccatgctcggagccctaggctgcgttttccctgagctattggctangaacggagtgaagttcggagaagcggtttgg

SEQ ID NO: 115505 - DNA, 397 bp, Arabidopsis thaliana columbia
cacagctttaaaaagaaccaaacctttataagtgttttttagacattgggagagatgggaaaagatattgagctcccgggttttaggttccacccgactgaggaagagcttcttgatttctacctcaagaacatggtttacggtaagagatcgagtgtcgaagtcattggtttccttaacatataccgtcatgatccatgggacttacctggtttatcgagaatcggggagagggaatggtacttctttgtaccaagggaaaggaagcatgggaacggtgggaggccaagcaggacaactgaaaaaggatattggaaagcaactggatccgatcgtaaaatcataagcttgtctgagccaaaacgtgttatagggctcaagaagacgcttgtgttct

SEQ ID NO: 115506 - DNA, 248 bp, Arabidopsis thaliana columbia
aaaacatcgaggataagacttatcagcacatcgatgcgcgttcaaaggctagatttgacggtattgctccagaaccttggaagggtttaccgagtggtcatatacccggtagcaagtgtgtcccttttcccctaatgtttgattcctctcaaacactgttaccagcagaggagctgaagaagcagtttgaacaggaagacatatctctggacagtccgattgcggcctcatgtggaaccggtgtaaca

SEQ ID NO: 115507 - DNA, 122 bp, Arabidopsis thaliana columbia
agcgttaaatgccacttggcggcatataagatgatactaaccccaattattgttcaaaatacatcatagcccctaaagtttctacattttaggtttataaccctagactattgttctgcccc

SEQ ID NO: 115508 - DNA, 135 bp, Arabidopsis thaliana columbia
aaaactagaatattattatcattccaacggaagtacaaacccatcagatggcagagttgctagaaatctaaaagatatgatcaaaacaaacacaaacgacaatgatcggtcaaaagataagctgaagccattatt

SEQ ID NO: 115509 - DNA, 351 bp, Arabidopsis thaliana columbia
cgttattgttgatatctaagcttatgttcttcttcaaaaaaaaaaaaaaaaaaaaaaaaaaaaaaaaaaaaaaaaaaaaaaagggcggccgcccttttttttttttttttgatataatcattcactcaaagagaagagtgacagagtgtatacatacatataggtatatccgaatattaacagaatgcataatcttggtatatgcttcatctcatttttacacaaagatataatcctaggctaagcccctaagaggtactacttgttgttggaacagaagacgcctctggctgagcctcactagccatagtttccggcagtgaggtttcttgctgagccaccgatggagtt

SEQ ID NO: 115510 - DNA, 206 bp, Arabidopsis thaliana columbia
atatatataagaaatcataaagtaaaataatgttacacttctaaaacctaacgagttatttcatcattatctcagtgattaccacaaatcaccatcattaaccttcttcttcgtttttttagtcgacagagttaggaccagagcaagctttcaaattagggttccaaatccattgaactaaaaactttcttcctcctttatcattc

SEQ ID NO: 115511 - DNA, 201 bp, Arabidopsis thaliana columbia
tcttttttttttttttttttgttttttgtttttttttttttttttttttttttttttttttttcttttagataaacataaagacttggaaaagccattagatctcgttcaggtgcatgaaaatattgttataaaaatctacaagttttacaaatacaaataaaagagctttaggaacgtcaaatatcaccaatgtttttaa

SEQ ID NO: 115512 - DNA, 346 bp, Arabidopsis thaliana columbia
cgtcaaatatgactataaatagtgttacaaattttcttatgttacaaaattacaaaagatacataaaagtttagtaaatactatttggtacaagctctgttttttacgagagtaagaatatttaaatgtatttgttctttacatatcctaccaatatatgttaactattggtgtaagattctggagccatgggcttatactcaacaactggtcccattctactcctggttttggtaattgtagctctggtaaacttccaaacggtagcttcagtgatgaagaaggttctttggtctctgcttctctttgtttctcttcggttttcgcgttttcttgatgcatttgg

SEQ ID NO: 115513 - DNA, 346 bp, Arabidopsis thaliana columbia
aatcaatctccacaaagatgagaccaaactcaagaatcctgaatactgatgtataatactaatacaaccctcccagcaatttgttaaagtttaacacagaagtggatatatatttataagcttagcttggttcaatccatttctgtgttaaaccaagctaagcttataaatatatatccactggcttgtgatcttgtagctttttcttggactttcttatgaagaagaacccactatgggcaagtttggtgcagttgcccattcagtccaagacccatcatagattgccacattagtttttcccagacgataaagtcccaatgccaaaatacaagctgttacaccg

SEQ ID NO: 115514 - DNA, 198 bp, Arabidopsis thaliana columbia
aagtgattatgtttgttaacgcaatcatcttcccatggtttttacataagacaaaccaaaacaaagagaagaagatttcagatacctacacaaatcctcttctctttgttttggtttgtcttatgtaaaaaccatgggaagatgattatgtttgttaacgcaatttgtaatggaaaataattaagttctgggattagt

SEQ ID NO: 115515 - DNA, 356 bp, Arabidopsis thaliana columbia
  unsure (1)..(356): unsure at all n locations
ctcgagagcaatttataaagaaattaaggcacacatacacacatcaatttcgtaatcgttgcagagtaagaccgatcatcgatggctgatgtaatggaacagaatcttcttcaaaccgctgtgcttaaccggacgtccttccatttccaacctcagagaaattggctcaacgatccaaacgcgccaatgtattacaaaggattctaccatttgttctaccagaataaccctttggctcccgaattcagtaggacaagaatcatatggggacactctgtttcacaagacatggtcaattggattcagctcgaaccagcccttgtcncttctgagtcctttgacatcaacagctgctg

SEQ ID NO: 115516 - DNA, 348 bp, Arabidopsis thaliana columbia
atctcaacgacgacgagccatggcttcaactttcagcggcgatgaaactgctcctttcttcggattccttggcgctgccgccgctctcgttttctcctgtatgggagcagcgtacgggacagcgaagagcggggttggtgtagcgtcgatgggtgtgatgagaccagagcttgtgatgaaatcgattgttcctgttgttatggctggagttttaggtatttatggtttgatcattgctgttatcatcagtaccggaatcaaccctaaggccaagtcttactatctattcgatggctatgctcatctctcttccggtcttgcttgtggtctcgctggtctctccgccgg

SEQ ID NO: 115517 - DNA, 250 bp, Arabidopsis thaliana columbia
ctctatggatccattaatgtgtaaacagatttgccttgagaaacatttactgtgagcagtccaatgcagcaacacacagttggacctccacagtcgagtggcttcacaatgacatcatcaatgcaaccgaatatgttggaccgcccgtggatggccgtgtctgcgccgtttcaacaaagtcattacctctgatctaataaacccataccctagtagaaaaagtaaataacacagaggtttgtcagaaaga

SEQ ID NO: 115518 - DNA, 343 bp, Arabidopsis thaliana columbia
tggaaatcagcggttggatcgaaccagagatgaaattgttgttctccacacttactctgttttatggaaccctcatcacatcgttttcatggttgatgatattccggtaagagaattcaagaagctacaacatatgggtatccagtatccaatattgcagccgatgaggttatactcgagtctatggcacgcggaccagtgggctacaaggggaggtctcgttaagactgactggtcgatggcaccattcatcgcttcgtacagaaactttagagcggatgcatgtgtttcctcgggcggaagatcatcttgtcctgccggttcacctacatggttctctcaa

SEQ ID NO: 115519 - DNA, 362 bp, Arabidopsis thaliana columbia
catgaacttaaagtaatctccataaggagcactaccaaagacagaagatccaatcaagagggaatcatcgattgaagggttgtcacgagattgggaaggaagcaacgaagcttagtaataacagcctctggaggatgagcattgggagaagtttttcagagaagaatggtgaggctgagagagtcaggggactggttactgagttagatggcttgacaaagaaggtcttgtttgcaactttgctgcacaggccccttgagaagcttggaatctctctgttcaaaaaggagatcatgtgtgtttctgacagcttcgatgaggtccttgagagggttcttgtggaacatgaacagaaactggac

SEQ ID NO: 115520 - DNA, 247 bp, Arabidopsis thaliana columbia
aaacagagtcttgttcggaaacaagaggtacccagatggagaaaggtttgattttagatcaagagctatctccgggattgatttgggaagctttgaatctgttcttgaagctattgctgttctcacaacgatcatcgtcgtccatgaatcaggtcatttccttgcggcttctctccaagggatccatgtgagtaaattcgcaattgggtttggtccgattctagctaagttcgattacaacaatgtt

SEQ ID NO: 115521 - DNA, 369 bp, Arabidopsis thaliana columbia
aaaggggtcatttactatcttttaagagacgacatatatagttctcgaccaagaaaagaaaagggggtgacctgagttcttcaacacataacataatggccggagttttcaaaacggttacgtttcttgttttggttttcgctgccgttgttgtcttcgcggaggactacgatgttggtgatgatacggaatggacgagacctatggaccccgagttctatactacttgggctaccggtaaaactttccgtgtaggcgacgagctcggtgagttttattgttcttatagctgaaatatgtctttgtttttcttgttcttataacagtcatagttatgggatcgtgcatggatcatgtcggtgttgttct

SEQ ID NO: 115522 - DNA, 346 bp, Arabidopsis thaliana columbia
gatcgatacaacggcgaacgatgcaactcctcaagtgattccaccaaacagtggtgcgatgcctgagatggtagcgagtccagcttctgtggcgtcaagtggacactttccatttgctgcttcagacatgtcgggtatggtaatggacacttcagtacttgattcggcattcacatctgacgttggaccggatggagaaggagccgggaattccagagattccctcaggtcatttgatcagatcccttggaactttagcctttctgatctcaccgcagatttgtcaaatctgggagatttaagagccttaagaaactatccaggctctccatttcttccatctgat

SEQ ID NO: 115523 - DNA, 248 bp, Arabidopsis thaliana columbia
ctggacccgctcgagccgattcggctcgagctcgagccgcggctcaggaggacgagatattcccgaacatgttgctgtttgcagcagcttgcgggattccagcggcgagggtgacaaagaaagcagatctccgagaagctattcagacaatgctggatacaccaggaccttacctgttggatgtgatttgtccgcaccaagaacatgtgttgccgatgatcccgagtggtggcactttcaacgatgtc

SEQ ID NO: 115524 - DNA, 368 bp, Arabidopsis thaliana columbia
  unsure (1)..(368): unsure at all n locations
gagctagagagatgagagggtgaagaaganagaagaagctgatatgtgatattgatgtgagttaagttgattgatggatgtatgagatgtttatagggacgatccgtcttatacgaagagatccagaggctccggttgattcctcgtcagaagacggatcgtcgcggttgagctccgaagatcggttgaagatctgatctgatcttagatcatgaaccggcctcgaggttcgtcagatctgcgttactgagcttttgatgaggtgatgaatgatgaatccgtcaattctctatggagctagagagatgagagggtgaagaagagagaagaagctgatatgtgatattgatgtgagttaagttgattga

SEQ ID NO: 115525 - DNA, 118 bp, Arabidopsis thaliana columbia
gacacaacacgaattcatgcatgagccaaagtaaagtccaattcaagaagtaggctaggtcaaaatcgcctacagcacatcctcgtagtataatagtagaatgtctgagcaaaacttg

SEQ ID NO: 115526 - DNA, 307 bp, Arabidopsis thaliana columbia
atattcatacagtaaacggaattaaaacataccagtagtaaacatctgaattcagcacttttctatgtttgcgagttcagtgacatctgaaaattacaaacttggcatctactgatcagcaagtaaaggccggtttcgaggaacaggagtgcacttcagggaatgagccatactcaagtttagtcctccagcctcatccatttggaccttgtctcctttgatactccagtcaaagcattgcaccatcattccaactgcggtgccaacaaagatataacccagacttgatccaggacagcctctccgt

SEQ ID NO: 115527 - DNA, 274 bp, Arabidopsis thaliana columbia
atataaccgaacatcagacgtatataaaccggagataaccgattaaatggcggacatagcgattttggtggcggacgagtacgagaggaggatgaagcatacgacggtgggttcgagatcatcgccggtggaatttgattggtggaagataattccggcgaagatgactacagcttttgacatgatgaagattgagagtttgaagaagaattttgaagctaaatctgagtttgctttagccatctctcatggcttcttctctgcttgattccat

SEQ ID NO: 115528 - DNA, 354 bp, Arabidopsis thaliana columbia
atcagaataaaaacggtttgatttcgtcctctgagatccataaagttctgaatcgtcttggtatgacttgctctgttgaagattgtgtgagaatgattggtcatgttgatactgatggcgatggaaatgttaatttcgaggagtttcagaagatgatgtcgtcgcctgagctcgttaagggaaccgttgcgaactcttagagttccgattttctttttataaaaatttacattttaagttttaaaggtttttaacaacaaatttactttatatgtaagtaagcattctgctgtgcaaattttaaacttgtttcttttttttttcttttttttttccggcattgcatttaaattt

SEQ ID NO: 115529 - DNA, 109 bp, Arabidopsis thaliana columbia
cacaatgttgtgactatcgagggtttgaattcttctggaaatttgctggctgttggagatggcaatcacatatgttagcttcaccctgatggtaatagttctgactttt

SEQ ID NO: 115530 - DNA, 320 bp, Arabidopsis thaliana columbia
gacaatgaaaggaacctcgaactcagagaacttgagataagagagacgaatcatgggacaaggaccatccggaggattgaaccggcaacgagatcggaagcctgacggcggagataacaaggagacgaactttgagccggccgcaccaccggctcgtgtatggaggaagcaaaggaagcagaaagggccagaggcggcggcaagacctctgacggtgactccgtctaccaagtgtaagctccggttactgaacttggcacggatcacggattatttgttgatggacgaatagtttgtggcgaatcatcagaggttgaaac

SEQ ID NO: 115531 - DNA, 331 bp, Arabidopsis thaliana columbia
ctcgagccgattcggctcgagcggctcgaggaagtctcgaagctaacatgaaattcgtaataccaaaactacccttcagactctctctcttcctctccctctcttttctcatcatcttcctcttcgccttccccaccacattcctccgccgtcctctctcctcctcttcctccgtcacctccgttgccgacgaaggaatacggatccgtcaccatggatactcctcctacgaagcatacatcaaacaccagctcaacaaaactcagaacccgaagctacgtaaggtatggacaacgcgcgactgggacaggaaagttcgtgtgttctccac

SEQ ID NO: 115532 - DNA, 247 bp, Arabidopsis thaliana columbia
aaacatgtatgacagacatctttcttcgtataaaccaccttacataacaccaacacacagatacacacataaagaaagcatataagcagcagctttccctcctcatcttaagctttgagcatccgtagataatcatcgatgattgacatcgcagatgatcggtagcccgagccaaacaggttataatggttcaagtaatgatagagcaaatacagatgcctcctcttctcatatcccgcttgttttg

SEQ ID NO: 115533 - DNA, 251 bp, Arabidopsis thaliana columbia
ctattaacaaagcatcaatgtattgataaaacggtcgtcagtgttcaattccaaaatacatattgttaacttggtcacaagctataatccaatctatcaactaagttgcaagacaatgtcacacagaaattatttacgccattatgcactttaattatatttataaaatattaaacaacacaaccccatttcttaaacgcagcattgactttcatcagagttcaagactgatcatccataaacccagtact

SEQ ID NO: 115534 - DNA, 238 bp, Arabidopsis thaliana columbia
gagattatcaaccaaacccatttgttctgatttagttacttcaccaatcgattaaactgaatgaaacttatcggagaggttttatctgtacacaaaacctcagcagcagaatcagcagtttttaaatctgaacaataccagcatcaaatgcttttgatgaagtcccaatgtttttgtcgacctcatcttacgcattgtgctttctgctctttgcccataacggtactgcgggtgtacg

SEQ ID NO: 115535 - DNA, 374 bp, Arabidopsis thaliana columbia
gaaaactggaatcatcgcagcctccatctctgtcgcggcttctgccacggcgatctccgccggctctaccaacacctccgtgtcattctcttcgccggaatctaatctctctcgtcaggaggcataggataaacagaggaagaataagggttcgtcggaagatgggggagatgagaagtttgctccaaggtttgatgggttacgattcatcgagacgcttgttactgctcaccgataacatttgcattgttctgatttgtaagggttcttattgtttaccccatttgattaactacaaagatttactgattttaagtttcgttttttttctttctttcacatcactattgtaacttcggcttaaagtgtaccac

SEQ ID NO: 115536 - DNA, 348 bp, Arabidopsis thaliana columbia
tggaaaatcccacctactaaattatctctttagcccatggcatacttctgagtccagcttcgtgcagtggactcgtacttgttcttgtcagtcttgtacatgtgagctggactcagaagtatgccatgggctaaatggaaaatcccacctactaaattatctctttatgaagaaaaaaatctgccttaatttctatgtatgattcgatagacatctctttgtgtccttttaactttctgaagacaggaccaaatgaagtgggtcttgttttaaacgaaacagaaaataacatcatctttgtgaaaactagaatctgatcatcttctgttgtttcttcttgtggtgaaa

SEQ ID NO: 115537 - DNA, 199 bp, Arabidopsis thaliana columbia
ctctcgccgtcttatccttctccgtcacgctcacagttcctgggatgatctttccctcagagaccatgatcgtcctctaagtaaaaccggagaagcagatgctgccaaagtagctcaaatcctctcctcactcggttggcttccccaacttattctctcaagcgacgccactcggactagagagacactgaagtcgatg

SEQ ID NO: 115538 - DNA, 401 bp, Arabidopsis thaliana columbia
aatgattcggtgcttcgcgtggacaccactagtaggtgctcccttaatcaccaccgtccatttcacatctccgccatctctcagaatcttcgcatctcgttcttccgcaccatcatcatcatcatcatcatcatcgacagttgcagcagcatctagaagatcaatatctctgtcaattatcgccgtcacgtcttccgtcgtctcctccttttgcttctcgtctccggcactagccgacttctctgaaatccctaattccggcggcgttaaagctctcgacctccgaatcggcgatggtgacgttcccattgaaggagatcagattgaaatacattactatgggagattagctgcgaagcaaggatggagatttgattcaacatatgatcataaagatagta

SEQ ID NO: 115539 - DNA, 386 bp, Arabidopsis thaliana columbia
gctaacagtcaatcagaaaccacttccaaacactggtctgaagcactcaagtcatcaatctctgctgtcagtaaatatggtggagcaactgccggttatagaacgatgttagatgcgctcatccccgcttcaaaagtccttgaggagaagctgagtgttggggaggaccctattgctgcttttgttctgtctgctgaagctgcgaccgcaggagctgaatctaccattcatatgaaagcacaggccgggagatcaagctatgtatcagctgagatttttgcatcaattcctgatccaggaattgatgcagcggcatggtacagcgccgctgcaagagccgtgatagagcagaggcagaggttttgaatctgatggactacgctctg

SEQ ID NO: 115540 - DNA, 388 bp, Arabidopsis thaliana columbia
aaggatgagacgttgcaacctttttatatatattatgcaacagacatgaagttgaagaatgacatactgtaggagcaaaagttgcaaccatggaaaaagctaaaaattgaagctttgtaatgttccattctcttacacaaagatgctactatctggagccactagaccctcaagtttccatccaccaggcccggacagcgcaaaagcttcttcccaggagttgccaaaagcctgaagcaaagcagcattgcatgttttcaacttaatagaagctccagagagcatggaagctgcttcttcccaacccttattatgccccatacacatgatagtggagatatcaggggttgaatatttggagataatgttttgaagatgctcggctgtt

SEQ ID NO: 115541 - DNA, 350 bp, Arabidopsis thaliana columbia
actgtgaaacaaaacaagcaacgtttcgttgtctattatttagcaaccttttatttatacacacaaatgtaatacgaatgcaaagcagggagagaagtgacaaataatcaacttcatttacatctaaagttgaaatttctattcacttatccaaaagtactaggacaatatgactcatcggtgaaggcgtctggtgctgacaagttcaatgtcaaaaacgagagttccaagagtagaaccttctccattggcgagacgtgttgggttaaatatagtcgtgaagagtctctgtctgtcaaagaagtttggtgggagaggctcctgtgatgtattctggtatccctgagatg

SEQ ID NO: 115542 - DNA, 366 bp, Arabidopsis thaliana columbia
catgtaaaggcactgattttatatatcacacaatgaaactgttactacaagttaacgtaagagaatagtgaaggaacaagatcaacaacggaccaggcaaggcctgcatattggaagaaccttataccagtatcaatatcaaacgagtcgtggctcaaaaactcgcatagtttctgcaaatatccaactgaattcttgggttcgtctgtcttcttcccacttgcataccccttgagcttgggaatgtacatgctggatcttattggaatcccaagtgcgttggataccattggtaaagtccattttgcaagagatttactgcagaacttcactaatagtatcgtcggtattcccaccatgactcta

SEQ ID NO: 115543 - DNA, 343 bp, Arabidopsis thaliana columbia
attagaaatatacttcatttatgatgtacgaaaagaaagatcgaatgtgtaataccaaaattagagagaaaaatatcttaataatttttttcataacttaaaaaacgtaatagtttcgcagaaaagaccttcagaaagtgtaacaaaaaattataaaactaacaaaattcaaccaaagagaaacgaaagacagagatagcgaggctgaaggaccaggggtctttactagcccaacgaagggaactgagctgtgtctccaatcgccggagctgcagcttcttttgcatacctttggtttcctccttcaccacgaccaccgcgacctcctcttccgcgggagcct

SEQ ID NO: 115544 - DNA, 140 bp, Arabidopsis thaliana columbia
aaatttttctcagtacccaaaaacatatgaatttaaaggaccacatataaatcaaagagacagagaattcaaatactcacagcccatagaggaagaatcggggctcgaccggttgacgaaaagccaaacccaatccggta

SEQ ID NO: 115545 - DNA, 333 bp, Arabidopsis thaliana columbia
gtgttggggttgatttgtggagcacaggctgtatcttaggtgaactatattccgggaaaccaatcctggccgggaaaaccgaggtagagcaactgcataaaatcttcaagctatgtggttcaccgacagaagattactggaggaaactaaagctaccaccttcagctgcatttagacccgctcttccatatggaagacgtgtagcagagatgtttaaagacttgccaacgaatgttctttcccttttggaggctttactctccatagatcccgatcggagaggctctgcagctagagctcttgagagtgagtatttcagaacagagccgtttg

SEQ ID NO: 115546 - DNA, 136 bp, Arabidopsis thaliana columbia
ctacactattgatgttgtagaaacctaacaagtattggttaagcatcattgatccttcttggattctgttttactcttcatcacatgaacttcaacatagactacgttgttactgttaatagaaaacaataacaaa

SEQ ID NO: 115547 - DNA, 167 bp, Arabidopsis thaliana columbia
catcactcgaataattcactttataactatctccgtcactatcaaaaagtgttcaaaattaaaaaagaatatctcaatccttatccacttcatcattcctagcttccaagttattattatataactcaaatttttctgggcttaaggagtttttgaaaaatatcttc

SEQ ID NO: 115548 - DNA, 99 bp, Arabidopsis thaliana columbia
gtggtttctaatagcggtggcgacaatcgccgccgtcgtatcctacaagctaatccaacggctaagatacaagttcccaccaggtcccaagccccaagc

SEQ ID NO: 115549 - DNA, 396 bp, Arabidopsis thaliana columbia
tttctttcttcttcttcttccccaacttgaaaaaaaaaagtaaacacgaaaatgtctccgtcttggctccgcccaaccgccgatcacaatcatcctccaccgcaaccgccgtcgcaatcaccgtcccctctatcttccggtgatccgaatctcacaacatgtctctaccaaacagatcacggcgtcttctatctaacatggtcccgaactttcttaggaggccactctgtgaatctcttcctccattcacaagattactacaaccactcttcgccactctctttctcctccgctgatctctctctttcctccgccgtctctttccatctcaacttaaacacattagctttctggaaaaaacgtggatccaaattcgtttctcccaaaatcaaagtc

SEQ ID NO: 115550 - DNA, 349 bp, Arabidopsis thaliana columbia
ctttgatgaaagcaggagactttttgatttcgattttgattttgatttggggtttaggtttaagtttttagagaatcagatgaaggcgttacggagaagctatacttcaacgtcttctgggaattcatcttcttcgtcttcgttaccttcttcgtcttcttcttcgttaccatcttcttcttcttcttcacctccttcttctaattctaattcttattcgaattctaattcttcttcggcttcgtcgtcgtggatccatctacggtcggttctctttgtggctaatctttcgtctccgtcttcagttacttcttccgatcgccggcggaaatcaccgtggtctcgccgg

SEQ ID NO: 115551 - DNA, 358 bp, Arabidopsis thaliana columbia
aattcactacacacacacaaaaaataaattgagtgcctcccccaaaaacaaaattggtagataacgagcaattgttttttttcagatttgatcctgaatttttacatttttttttttgcaatctccccctaatctgttgtttctcgcttcttcttctgttaatcatctgtctttcaaaaagaaagaaaaaagaaaaattcgatttctgggtttgtttttgtcatacagaaaaaaatcaagcttatgaatttgtgtttaattttttgttttaatttgaaaggcaggttttttcagaacgagatcgttttttcaaatttcttctgattttacctctttttttcttcttagattttagtga

SEQ ID NO: 115552 - DNA, 203 bp, Arabidopsis thaliana columbia
aaaccgaattttgtatctaattgtatcgaaaccacatcaatcattatctgtatccataacacaaatctcagccatacagtctctaaatgggtaaagtacaagtatcatacataggttcactcacgagcaacaccagcaagttgtttcccaacattcataccatggtcgagtcccacaagagcttcgggagcattctcaagccc

SEQ ID NO: 115553 - DNA, 163 bp, Arabidopsis thaliana columbia
aaagataaaccgttttttgcggaataaataacttgagaatcttccaacacagaaaacaagaagagagaaaagtaaactggcaggtaattttaagaggggacgacgacgaaacacaggacaatacaaagaaacataaacttagagagtcgctgcgatctagaac

SEQ ID NO: 115554 - DNA, 358 bp, Arabidopsis thaliana columbia
cttgctgaaaagggacattttaccacttgtgcaaatatagacaatcaatacaaaatatctgtttttgttattgctacaaagaaacaaccagaaattatattcttctctttgttttatctatcttacacatttgctgatgatcttcatatatagaaccaccacacaaaggaaacttccttgaggaatttatactctttgtcttttcgagctcatgcgtggcgcgaacccttttaaaaagccgagtcaaagatgatcagatcagcttaaacattctcaaaaccactttctcatggattaagtgagcttctttcaccttataatccttatcccatatagtgttgtttccacacctaaagac

SEQ ID NO: 115555 - DNA, 337 bp, Arabidopsis thaliana columbia
caacgacgacgagccatggcttcaactttcagcggcgatgaaactgctcctttcttcggattccttggcgctgccgccgctctcgttttctcctgtatgggagcagcgtacgggacagcgaagagcggggttggtgtagcgtcgatgggtgtgatgagaccagagcttgtgatgaaatcgattgttcctgttgttatggctggagttttaggtatttatggtttgatcattgctgttatcatcagtaccggaatcaaccctaaggccaagtcttactatctattcgatggctatgctcatctctcttccggtcttgcttgtggtctcgctggtctct

SEQ ID NO: 115556 - DNA, 334 bp, Arabidopsis thaliana columbia
taaagagatgcaggactcgagcgcttttgctgcacggaagcttcgcctaatgatgtctggctcctctgctctccctcgacctgtcatgcatcaatgggaaagtatcacaggtcatcgtcttttggaaagatatggcatgactgagtttgtaatggcaatgtcaaaccccttacggggtgcacgaaatgcaggtactgtcggcaaaccgcttcctggtgtggaggctaaaataaaagaagatgaaaatgacgcaaatggagtgggtgagatatgtgttaaaagcccatctttgttcaaggagtactggaatcttccagaggtgactaaagaatca

SEQ ID NO: 115557 - DNA, 314 bp, Arabidopsis thaliana columbia
ctcggctttgcttgggattgagcaagctcctcaagaggagtttccacaatttacggaacggtaagatgggacagctaccgagaacagatcagaaaaacaagtcaaaatgaatgattttgatttgaatgatatctatatagactcagatgacacagacgtcgaaagatctcctcctccaacgaatccagcgaccagttctcttgattatccttcatggatacatcagtctagtccgcctcagacaagtaggaattcagattcagcatctgaccagtcaccctcaagttctagtgaagatgctcagatgcgcacag

SEQ ID NO: 115558 - DNA, 324 bp, Arabidopsis thaliana columbia
gagtgtgttatcacctgtaactgtatgatagagttagtcaattgaacaagattcagatgggaataactactttcaaataagatattgattgcctcttgtatccttattgtagtgtttgttagtatactatatcctcaattcatgatattatcttgttacaaaaataattgcagggaacaagacttggaagttcagatccaaaagggtgttataatatcggactgccatctgggaaatcactttttcagattcaagctgagaggatcttatgtgtccaaaggcttgcttctcaggcaatgagtgaggcaagtccaactcgcccag

SEQ ID NO: 115559 - DNA, 311 bp, Arabidopsis thaliana columbia
attccctcctcctcttcatctcttttgcagatatggatggttattattctctgtctcccatctctgtcctccaccggattaaagattccttccatttcgccgtctctgcccttctcgccaacctcttctccgctctcttcaccttcttcttcgctttagtggggactttgctgggagcattgacaggggctttgatcggccaagaaacagagagcggtttcatcagaggagccgccgttggtgctatctcaggcgccgtcttctccatcgaagtctttgaatcttccctcctcctttggcaatccgatgag

SEQ ID NO: 115560 - DNA, 379 bp, Arabidopsis thaliana columbia
ctcgagccgctaagatgtggtcaagaccacttcctgaagtttatgattcacaagctgttgcagattactttaattgcaggcctcatgtcgttgcctttaggcttctcgaggtattttctgcgttcacgattgctgccatcagattacgaacatcagcatcagttaagggcaaaagtttagaagcttcagagcagatttttgggatggtgttgaaagaaaccatgctacatttgggcccaacttttatcaaagttggtcaatcgctttccacgaggccagatatcattgggactgaaatctccaaggcactatctgaactgcatgaccgaatccctccctttccctggcctgaggctgtaaaaatccttgaaggggaatt

SEQ ID NO: 115561 - DNA, 241 bp, Arabidopsis thaliana columbia
cgtgaagcgccgtgattttgctacttgaagatcgggtaccgtttccctgagctattggctaggaacggagtgaagttcggagaaacggtttggttcaaggctggttcacagatcttcagcgacggaggattggactacttgggcaacccgagcttggtccacgctcagagcatcttagccacttgggctactcaagttatcctcatgggagctgttgagggctacagagtcgccggagatg

SEQ ID NO: 115562 - DNA, 382 bp, Arabidopsis thaliana columbia
tgatttcttcaggttggagctcaatagtagaaacgaaatcgacgatgacgaagacgaagatgaagatgatggagatgaagaagaagaggatgaggaagagaatttaaccgtcaacgacgaagaagacgaagaagatgatctgaggaggagaaatcgttttcctctcacgacgacgcagtcgagaaccggaagaaacagaattctcgattgggctgagattttgatgggaatcgaagacaattcgattgagttccgtatggaatcagatcgatacgcatgaaatccggctgattacatagacgatgcagccggatacgaagctttgctacagaatttagcagaaggagatggtggtggtggcggatgaaggagacgcgcacca

SEQ ID NO: 115563 - DNA, 314 bp, Arabidopsis thaliana columbia
caagagatccacgtacttctactaaagaatctagccctcaaccacttccgttaccgtcaccaagaactggttcttcattgaagaattggggaagctttaagtcgtttaacggaagcagcggtcggttatcatcatccgcagctgtatctggacctttacctttgccacctagcgggtcagttaggagcttttcatatgatgaagtaatggctgcgtgtaacgctttttcttcagaccgatgtgtcatggaaggtctttcatctgttatgtacatggcttcctttggtgatgaggcttcgacctcaggtttaaag

SEQ ID NO: 115564 - DNA, 372 bp, Arabidopsis thaliana columbia
cattgaatcgtcatattttattacttattgatgtatccatatatagtgtgcaaatgaaaaagaaaagaaatgggttttgaaacaaaagtcaaataaatttcacccatgttgcttgttttcatgagaaactcaaaaacataccacaaaagaaaacagagtaaaatataccaaaacattacaaggactgtagccgataagagagagagatactctggatttcactcggctctagactgaccagctcgagaagagaggatgataccaacaatgagaccgtacagggcaagtgcttcagcaaagatgagaatcagaatcattcgcacaaacaacttaggttgttgtgcattcgctctaacaccggcatcgccgaca

SEQ ID NO: 115565 - DNA, 383 bp, Arabidopsis thaliana columbia
ggtattgattcttgacattattgagtcaaagtacatgatacaggaaagaaggaaattacattttatgcatacgtgtcatataatcaaaagaacaaggagtagcaatgaaatccatggttgtctttattcttgattttccagagatttctttagctcttttttgttcacctttcccatggcgttgcgaggcaagctctcccatatcagcaatcttgttggtagcttgtaaggagcaagcttgtctttagcccaaccgcacagttcttctaaggttattacaggttttgactcatcctctcttctcttctttgctgcactctctgctataattatcgcagtcacggcttctccatagtcgttgtctgttaaccccaacacgcaac

SEQ ID NO: 115566 - DNA, 353 bp, Arabidopsis thaliana columbia
catgaaactttttaaaattcatgtttgaataacataggatttataaattctacacaaatctcttaaacttccactttcaatacacccccttattcatttaccttttggtaaacaaaaaagtaggacacgagtagcaaaatattttattctatacttatttaaaaacatgtatacacacatgtcattattggatttttgaagcaaagttagaaataacaagattcaagtttcttagctctctctcgtgcactactctcagcctctgcattgccttccatggagtaacttttctccagcaaacgccacatgaaaggaataccatctctggccttaatcctctctctgattacttc

SEQ ID NO: 115567 - DNA, 353 bp, Arabidopsis thaliana columbia
gatgaagccaagaataagtagcataaataaacaggatctccaagagatgagtgaagttacaatgattggtgcatcaaaatctgtgtaacgtgtaatctaaaaaaaatcaaggaagactactagtgtgtatatatgtgtgtgtgtgtatgcctatacctcatgtacaaagaagagaagaaagaagagttcaaaatcaattcaaagatgtcttctgcacaagggacaagaagcatgcctgcgaaaccatttgtcgatgcatggtaggtggaacatatgatggcagtgcggcaaacttctaactgtctctcccacctgaaagtcctgaaggcagacagagcaagagacaatctccg

SEQ ID NO: 115568 - DNA, 325 bp, Arabidopsis thaliana columbia
ccttgaggtctcggatattatgattagtcatatatcgttacgacaggcattgatcgtctgataggattagatatggaacgactctatacacgaaaatatttagtctttctgtagaatctatccctcttactaaggaaccctttgctttgggtcttgacaacaatatacattagtgattctggttctgtgttggtgtaggatgttcaggtaatcaggtacgaagtgcgactggagcagacagagataagtagttgacgtaaccttcagagaccgagatcacaaaccgatggcaagcaagcgcagtggtggtgagagacatgacaaa

SEQ ID NO: 115569 - DNA, 242 bp, Arabidopsis thaliana columbia
acaagaaaaaattgacctttatggaaccggattttctatttttgatctcagatgtctcgcttcttcgacaaataatacaatcaagcacatcacgatgatagactaaccaaagattaatctaaagagaaagagtaacaacaaaagtaacaacaaatgggggcatttcctccacttcagtaacgaaaatttgaaaaagaagaataagcagcagcagaatctgacacggtagaagttcttttttt

SEQ ID NO: 115570 - DNA, 371 bp, Arabidopsis thaliana columbia
cctatatatacccattccttccatttgtagattccatattattcacgattctcatcaaatcatctccgatactcacaaccgaaataactaacccctcctcaacaaaaaacaacaaaacatgtacactccatcatacttaaaatattcaataatctcaattatatccgtattattcctccaaggaactcatggagacgacggaggttggcaaggtggtcacgccacgttttacggcggcgaagatgcttccggcaccatgggcggagcttgtggctatggaaatttgtatggccaaggttacgggacgaacacggcggctttaagtacggctctattcaacaacggactcacgtgtggcgcgtgctatgaga

SEQ ID NO: 115571 - DNA, 275 bp, Arabidopsis thaliana columbia
taatatttttcacatactttaggattggcgaactgttcaagatcacccaacaagccttcgaattgcttcagcttcatcttctccggagcttctcaaaagtgaattcacaaagagcagagtcgaaaagcctccgtgacaaatcaatgacatacatacaaaagctttcacgctcattgggctttcattctttctgaagaggcaagtgtaaatcccagtgcctccatgattgaggtttttctcatcccctgaatcgctgtgctcgttgagagagagtg

SEQ ID NO: 115572 - DNA, 393 bp, Arabidopsis thaliana columbia
cctctatgctattattccaggacaaggagaggttctgctgcttcagtcagctcaagcaacgctactagcagggcaagagatttgaggcgccagagaaagagtgggaaaatccgtgctggcagtgcgggtgaggagatggctcttgttgatcatttgaaaggtatgcgtatgaccgatggaggaaagcgagagctgaagtcgttgttgatatgtctggtaacacttggtgaaatggagtctgcacagaagttgcaacagactgcagagaatttccaggtctcccaagtagcagctgtagagctagcacacgatacagtgtccagcgagagcgtagatgaagaagtttattgctttgaacgttacgctcagaagacgagatccacagcacgagat

SEQ ID NO: 115573 - DNA, 317 bp, Arabidopsis thaliana columbia
accttttggaaggatgcaaggaatggatgtgacctttcggaagggtgcaaggaacggatgtgacctttcggaagggtgcaaggaacagatgtgatgcttcgggaagcatccattcgccccctatataagggaggacgcccaaggcctttggaatcatctcacatcatctcacaacatccaaaacaccataaaacattcttaaaagagtcccaacacatcctgaagttgttggtcggaaagggggtgcggctcggcgagtataactcgaccgaactgatgcgcatactacctcccggtccaactgtttgatggagtgt

SEQ ID NO: 115574 - DNA, 289 bp, Arabidopsis thaliana columbia
cctttgtgacaccaccacaaagcttacccacgagagtcaagtatcctgtactatccatgactctcgtgggtaagctttgtggtggtgtcacaaaggtccgacagtttaattagttcagaaaccacttttcaaagtactgaagatcgttgtctgtcaaaatactgcaatagtgaaaagtcgaatgttttctctttggtttgttttaaactttttttagagtcttaaaaaatgggatggacccataagttgttatgctacataagataatattaatgaacgacccttgagt

SEQ ID NO: 115575 - DNA, 198 bp, Arabidopsis thaliana columbia
tttttgtaacacgaagcattttaaaatatacactcgaacatttatcagtcgctacaaacgattaacctcttgctttctgacagtgacaagagaatcccagacatgaccatcattaaacgccaaatcggatggaacccgaaaacatcgcgatgggacttgctcgagtcgaccttaacctaccagcacaggacatacgct

SEQ ID NO: 115576 - DNA, 366 bp, Arabidopsis thaliana columbia
agacggatgttgcggtagtagatatccgaaatccgacccggatcctgatcctggtctcgacgcgggtcttgaaccggcgcttgaaccggatccgagatcccagcttccttgaggactcgttgtcggcgtagacgccgttgtgcttgtaccgccggtaacatcaataacaaaactcccgccatttttcaaactgatcgacgacgatgcagaaactgcggtggctataccgtcttggaaaagctcgaaacgataacctagagtgtcagagtaaccagcctcacgccatgcttctagtcttccccatggcttccatgtgcaaccgtcaggtcgaagaataagccacgctccgggacttgaccgagtcac

SEQ ID NO: 115577 - DNA, 216 bp, Arabidopsis thaliana columbia
caatcaaatattttttctcattacacaatcaaaaacctcaaatccattaattttcaaaagatggaaaaaaaatatgaattgactatgcaatattacacattttcttattatttatacatcgaattttttcattccttatgggaaaaagggaatcaggttactttgaccgaatcaataacccagtgttgaccatcggttttgacctttaaccggtta

SEQ ID NO: 115578 - DNA, 340 bp, Arabidopsis thaliana columbia
aagatgaaagtgagtatttatttagctagcatgataaatgaaaatccccacaaataacactaaacaaatctcttttttttttagggttccttctttttttgttctcatcccttttccacacaaaagaaaaaatttacaacatagtaataatgtagacataacttgcgaaaagagataatgggaggagaggcctcgtttccttctggtgatactccttagcattcacaccctgtagacctctgttgattgctcgtccctacatcgattgtgtctggcaagtatagttcttcttcttctccgctcttcaatgcgtccttggcaatgcattggaaagcttcct

SEQ ID NO: 115579 - DNA, 288 bp, Arabidopsis thaliana columbia
aacaaacaaaaatagctcaccacattaggatattcatttatcggccgtatcaattatacaacaacaacaacaacaagaagcaatcaagcatgctcttacatggatcaattcatgaccaaaacaaaagaagcaacaaattaataaaaaaaaatagagatttgttgttgtttctgtacaacaccattccattgaagttgcagctcaagaaaagccaaagcatttcctgaaagagagaaatccagaaggttctgggatcggatccgagatattctgttttgcacttggaag

SEQ ID NO: 115580 - DNA, 336 bp, Arabidopsis thaliana columbia
atgaatgaatattcaagttagaataagattacatactgtagtacaaagcaaaataaaatcacttagataagtcagaaaaatcgaaacgttaatctaaaaactcagttcctacaagaaatttagcaaatattactatagccttagatcgagatctttcgaactttggccttcttcaatcttcataatatcatctttatcaccgtctgatttgatatgggccatggtttgaccaatggcgttatccggcggtctttgtgacgactggcctgcctctaatggttgaccggttacaatctctggcttgggaggataacgatgatgacctgcgttttggtt

SEQ ID NO: 115581 - DNA, 164 bp, Arabidopsis thaliana columbia
aatgtagcaaatgcaccttaatctcatagtacagtaacaataggaaagatacaaaacggtaaaggaaggttttgatgtttaaaaagcacaagcttattcagtcaaaaacagatgtagagattttcatgggcttatgaaaaccttaagcatccagctaaaggcat

SEQ ID NO: 115582 - DNA, 150 bp, Arabidopsis thaliana columbia
aagagaactaattaatggtattactatctttcatttttttacttgtacactttactttagtccacattttcggaatttaccaaacccttttttccttgtaatttcttgtctgcctatgtactaaaaccttcaatctatattcacatatat

SEQ ID NO: 115583 - DNA, 228 bp, Arabidopsis thaliana columbia
cgtaaaggatgaatcctttaacttatcgcaaatttacatatcttcgataaagaaacctaagtgtagagtgtaaagatacatatctgaactgaaccacactctagaacagacatggctgagtttatagacatggaaacgatgatgtatggatccattcagaaaatgtagttgactagagtctccatccaagtggggggagatgactacttagccgaggatgaagatgat

SEQ ID NO: 115584 - DNA, 388 bp, Arabidopsis thaliana columbia
ctccgttgaacgatcaagttcctggaatctctgaagaagtagtcgatttcgctgttaaaatctcgacgaaacctggttgttggacagattttccattgtcactcgatactgaatttgaactgtctgaggctcaaagggcacatgcatcagccattgaagatttggttcctggccttgtagctgtgaagaatcaagttagtagttacatggatgatgaacacttctggctgatttattttattttgctgatgccgagactgaatgggcatgattttgaactcttagcaacatgcaaggtatttgaaacaagggatcaacttttactaaagctgcaaaagaaagagacagggtcaagcaagagcactactggtcacgaaactcctgaaga

SEQ ID NO: 115585 - DNA, 310 bp, Arabidopsis thaliana columbia
gctaccaaaaaaaaagaaaaaaaaaagagctacttgtgttccttcttttaatggaacttataagcacaatcaatctcttaacaatcgttcttctactcttcgttgtttccaagatatggaaagcttgttggatcctccttttgcgtccattgatgctatcaaaaagattcaagaaacaaggaatctcaggaccaaagtacaaaatcttgtacggaaacctcagcgagataaagaagatgaagaaagaagctgacctttgtgttctggattccaatttcaatgatattttccctcgtgtgtttcctcagta

SEQ ID NO: 115586 - DNA, 292 bp, Arabidopsis thaliana columbia
ggaagagattggttattgctaataagttaaggaggagaggaagatctatgtcagcttcgaatttttactcgtggcaaaaccctaattcaatgcctttacttgcactccaagaacctaatgaagaggatcatcacattcacaatgatgattatgaggatgatgatggtgatggtgatgatcataggaagattatgatgatgatgaaaaataaaaaagagttgatggctcagactcgaagttgtttctgtctaagtagtttgcaagaggaagatgatggtgatggtgatgatga

SEQ ID NO: 115587 - DNA, 232 bp, Arabidopsis thaliana columbia
gaaaaatggaaaatattgagtatctgaatgagatccaagccgttgcggggaagctaatccacagctatggagtcccagttatgatcacgttgttcctaagatggctcgcgtccatcgttgcagtgtcagtcatgtctttcatattttaaacatttggatttatgtttaatttttaattttttaatgttggtttacttcttttatttgtgtgtaaagttttcttatgatattg

SEQ ID NO: 115588 - DNA, 322 bp, Arabidopsis thaliana columbia
ctattctctgtttcgtgttccacttcacgattgagagaacactttcctaagtttatcaagaacatttcttttcaatttctcgattctttctggctcattctctcatctctgtttcatatctaaattattgattgagaattcgacttgtggaaatggcaacagttgcatcaaatctcgcttgtatcggaaaagtaacgatgtctagagctagttcaatggtaggatggaggttgcagataaattgcagaaagaaagagaaaggaagagatcagagtcattatccttacaaagtcattgaaatcactcctcctcctaaatctct

SEQ ID NO: 115589 - DNA, 393 bp, Arabidopsis thaliana columbia
atttaggagactcctaaatcattttaaccttcttcctcaatcgtgaccatcaccaatgacgctacacgtcattgagactgcccgagtcacccccaccgactactcagtcatcaactcagccaacttgcacaaacttcctttaactttcttcgaccttccatggctactattccagccagtcaaaagagtcttcttctacgagctcaccgagtctactcgtgaccatttccactccattatcctccctaagctcaaggactctctgtcccttatcctccgtaactatctccctctcactggccacatcacttgggagccaaacgagccaaaaccgagcataatcgtctcggaaaacggcgtcgttttggtgactatagccgagagtgacgctga

SEQ ID NO: 115590 - DNA, 150 bp, Arabidopsis thaliana columbia
aaagcgtcaaacataaagttaggccaagaaacccatttaaaggaaaagagagagagatggagagtttcccgatcatcaatctcgagaagcttaatggagaagagagagcaatcactatggagaagatcaaagacgcttgtgaaaactggg

SEQ ID NO: 115591 - DNA, 320 bp, Arabidopsis thaliana columbia
aaaaaaaaaaaaaaaaaaaaactctgaagcttcttctttgattaattctctcctggggaaaaaaaaccctagctcttccttcttctctcttctcttgaattatctgctttcgaattttttgaaaagggagaaactttttcatctgggtctctctctctcccgagtttggatgaagtttattgaaacctagggtttttctccgacttggttgttgattagagataatgagtgcaatcaaaatcaccaacgtcgctgtattgcataatcctgctccttttgttagcccttttcagttcgagatttcttacgagtgtttgaat

SEQ ID NO: 115592 - DNA, 259 bp, Arabidopsis thaliana columbia
aaaactgcaaaattgaaattagggtttatactttaaagcagtcaccaaatccagccaccatctcttgctgaagccatgggacgctctcgagttcaagttaacaaagctcacaagactcgtttctcctctaaatcttctcgtaatctccatagaaccaaccttcaagatagtggccggattgggaaatcggatagtaactatgttaaaggagctaaagctgctcgtgttcaacgtggtaagatgcttagagagcagaaga

SEQ ID NO: 115593 - DNA, 381 bp, Arabidopsis thaliana columbia
caaacccttcactttgtcgagtcaccaaggcttgctccacctaaggcttagaagaagaaattacgaaaattttaagcaaaacataaaaattaatttagaacaaaaatatgccaaaaagaatattaggttgattataatgtgtaatttagtaacttgtgttcgtatcattattgtattaccattcaaaaggtataatgcatgatgttaataaaataaaacataattttggtatttaataaaaatttaatatatatatatatataatggtaatttccaaaatatagtatctatataaaaatataaaaataattaataaagtttgataaagatgattattgccttaagtgtattaaagaagtgagaaaagaaaatttaatgaga

SEQ ID NO: 115594 - DNA, 350 bp, Arabidopsis thaliana columbia
acaaatcttaaacgttttactttgtgctgcactactcaacctcaatggccgcctcaacaatggctctctcctcccctgccttcgccggtaaggccgtcaagctttcccccgcggcatctgaagtccttggaagcggccgtgtgacaatgaggaagactgttgccaagccaaagggcccatcaggcagcccatggtacggatctgaccgtgtcaagtacttgggtccattctctggcgaatcaccgagctaccttaccggagagttccccggagactacggatgggacaccgccggactttcagctgaccccgagacattcgcaaggaaccgtgaactagaagttatccac

SEQ ID NO: 115595 - DNA, 390 bp, Arabidopsis thaliana columbia
aacaagaacaagattgatgttaagatcgagacgaagaaaggatcgatggatgagtggcctgagccaatcgtccgagtccagtccttagccgagagcaacctctcctctctccccgaccgttacatcaaaccagcgtctctacgccccaccacgaccgaagacgctcctaccgcgaccaacatcccaatcatagaccttgaaggactcttctcggaagaagggttgtctgatgacgtcatcatggctcggatatcggaggcttgccgtgggtgggggttcttccaggtggtgaaccacggggtcaaaccggagctgatggacgcggctagggagaattggagagagtttttccatatgccggttaatgccaaagagacttactcaaactca

SEQ ID NO: 115596 - DNA, 233 bp, Arabidopsis thaliana columbia
ctcataacaattaagcttatcaatggttcaaccccatattccaaatgtatatgtatagtgagcaataaagaagaaaatttgcatatttttatcacatacaggacaaaactggaggacttccactaaaccaccaccataaattaccaaagaagaatgtcgtcaattcagagaaacttgaacatcatcatcttcatttaaaaaattcgaatcagagaagctgtgggtacagacgt

SEQ ID NO: 115597 - DNA, 293 bp, Arabidopsis thaliana columbia
aacataaaagttaaattcttattaattcatagaatcataatacaaaccaatacaacaatacccccaatggtaagagtatatataataggaaataatgaaactgtaaacttcaggaatcttacggatcaccccaatgaacaccagagcaagcagagtagaagaaaccacagatcaagatatataaagacacaatatctttaagtctactccttaatgtttgcagcaaacaacttcctcctggcttccaatgctaaaataccatattgatatataatttagatacacttatgtgt

SEQ ID NO: 115598 - DNA, 302 bp, Arabidopsis thaliana columbia
gggccgcccttttttttttttttttttttttttttttttttcttatttcttttttttttgtctgttttttatattttttttatttttttttttttttagagaggggttgcgagttttgcaacctgcttttttgcgacattaacgaatgaatccctgttaattacttgttctacagtcacaaacctaccctgtggttttaaatttgaaaaactccattgtaccaaatggagtgaagtaccatatgaaatatatcgaatctctcaggtttaaaatgccaaaggaaatgcttctgcaccatcttg

SEQ ID NO: 115599 - DNA, 164 bp, Arabidopsis thaliana columbia
aaaaaacctaattgtaaaattaccgaacagtaaaaatattacaaaacactgaaaacccatccccaccgttaaaacctaaaaactaacccaaatgggggaaaccaacggtcactaacaaacacaaacgacatgaaccaaataaaagattgcacatatacccaaaa

SEQ ID NO: 115600 - DNA, 159 bp, Arabidopsis thaliana columbia
gacaacacttttatctcatatatctacgaaatgcaacattcgaaaaattaacaggcggattgcaaattccaaactttcactcattctagcgacaatctttaacaagcacaaaaagggatgtatatataccttacaagagaagccaaattgttaaaatta

SEQ ID NO: 115601 - DNA, 313 bp, Arabidopsis thaliana columbia
cttagaaatgttttgatatttcatatgtaataaaagtgaacctcattgggatatgaatattatcagtaaaccagaactgaggaaggtgtacatattactttgggacatggcctgcttaaacaaatcatacagccattttttttgttgattttattattttgatgattcaagagaatccaaaaaagtgtcaaataagatttcatatcctgtcgtctgtcggtcattttttttgggtttgttgtctccacatctaatgtaaaaagtttctttattttggtcgcttgcgatatgggtccaaggaatcatccacagt

SEQ ID NO: 115602 - DNA, 130 bp, Arabidopsis thaliana columbia
caatgagatgcaagagggtgaagagattgagagcactaagaagagtaatagtggtgaaagaatcattcagtcgaactagagaagacggcaaatccggcgctactgaaaccgcactcgctgctccgaagtt

SEQ ID NO: 115603 - DNA, 348 bp, Arabidopsis thaliana columbia
atcccaaagtctcctaaggcgagaagggatccggtcgtcgcactaggtttccttttcttttttttttgggtttcaaattttttcatcatatctcctgaaaatcttcttcattcgcctccaattttgctcatgttcgtccgatccaacattcttcgtgctctgatttttactgtgctggaaacctcctcttgattcagttttgattcttcaaagcctcagagataatttggttttctctaatctcttgtaaggagaaaacttgcttggagatcaaaatgatgcattcaagctgcaaaggacttgtgctgcttctattcttatttgtcgttgtattcattggaaacaccg

SEQ ID NO: 115604 - DNA, 362 bp, Arabidopsis thaliana columbia
ttctagatcgcgagcggccgccctttttttttttttgtttttttttttttttttttttttttttttaacggtaatcacttttcattaacaattgttagtaaacacaaaactacgcacagatctcaaaatcacttcataactaaacatcctttaaagccttttcaaaaactcaatcatgtcaagcaactgcggaagctgcgactgtgctgacaagacccaatgcgtaaagaagggaaccagctacaccttcgacatcgtcgagactcaggacagctacaaggaggccatgatcatggacgttggtgccgaggagaacaacgcaaactgcaagtgcaagtgcggctcctcttgcaactgcgtca

SEQ ID NO: 115605 - DNA, 373 bp, Arabidopsis thaliana columbia
cgatcgtcgttgaagattcgtctcagtttctagcttagtgttttggaatcgaaaatggcgggtcgagttaaagaagacgagaagaacgagaagattattaggagtcttcttaaacttcctgagaataagaggtgtataaactgtaacagccttggaccacaatatgtttgcactactttctggacttttgtttgtaccaactgcagtggaatacatcgtgagtttacacatcgtgttaaatcgatatcaatggcgaaatttacctcacaagaagttactgctttgaaagaaggtggaaatcagcatgctaaggatatttattttaaaggattggatcaacagcggcaatcagtgcctgacggaagtaatgttg

SEQ ID NO: 115606 - DNA, 337 bp, Arabidopsis thaliana columbia
acattaataccccaattatattcgatactgaaaccatattacaaactcattttaataaattgcacacaactgaagatggtaacacactaacacatgcaataaatttattacatagaaattattgtcattagatgaaacgccttttgagagagatctaacataattgtcagaccctattggcataaagttactgacgtgtcatttcaagataacagcgcttcgaacaaatctttaaacctatctttcatgaagtcggaaattggcgaagcgatgatattgctggcaaccccgaccgctatgtccctctcccaattggtgccaccagctctgtcatttc

SEQ ID NO: 115607 - DNA, 347 bp, Arabidopsis thaliana columbia
gattcgaattatatatcaactattaacaataatggagcaatacatttaacgttgatacatgatactctgttggcgttttacaaatcctagagagtcaaaaccattatccaatcgctggcttgtttcctactttgcatctctcttctcatcatcatcaatatcctttatagcatcctttgcaaggcttgtcacatatgttccagccaatgcagtaaccaacagacccaccccgagagttaaaagctggccgtttcctccaggcaagccaacattagattcttcttgaatgattgctcgtccaaaagccccggcgctgacataagcctaagagcctggaagcataccca

SEQ ID NO: 115608 - DNA, 265 bp, Arabidopsis thaliana columbia
gcctcaagaaacaatggattaatggaaaaagagattacaaagacagggggaataaaaagggagggaacaagaatttttgggaatacaagcaataataataaataaaccagaaacaacaacacaagggaataaccttttgaccggtttaacgaccaaaccaagaaagatccaagaaaatgaatggaccccaaaaaaaccggacctaaaaggaaaatgggccccaaaagcctgggcccaacttcaaaacggttgcaaatttccggcc

SEQ ID NO: 115609 - DNA, 371 bp, Arabidopsis thaliana columbia
gacagtgtaaaaagattcatgtaacgatccaacatttcttcataaaattctaacgtaaaaaacaatcatattgtgagatggttttagagaaagaaacaaagttccaaaagacacattcgttctcaaatcaaaggtactatgtaaccttaaataagaccaaaaagaaacaagaaagtccttttcaaggaagatcagatccagcagcaccaccaccgaaaccaccagctccacgaccaaacccttgcctagctccaccagctccacccctgaagccaggctggtaatcagcaggtgctccagccttgtcaccatactctccacctgatttaggacctccacggtatccatctctgtcaccaaacctcctctct

SEQ ID NO: 115610 - DNA, 155 bp, Arabidopsis thaliana columbia
aaaagagagaagaaaaatggtgttgacaatctatgctcctttattcgcttcttcaaagagagctgttgtgacattggtggagaagggagtatcattcgaaactgtcaatgtcgatctcatgaaaggagaacagagacagcctgagtatctcgcga

SEQ ID NO: 115611 - DNA, 149 bp, Arabidopsis thaliana columbia
aaggtttgtgatgtttatgctgtcttgattctgtcttcctccttttcacgctgtctcaaaggagaaatgtaataaggagatcacgagggagattcaggctatactgagacaacttgcttccagcataacttgcttgccctgtcaccatg

SEQ ID NO: 115612 - DNA, 292 bp, Arabidopsis thaliana columbia
tcacatcttaataaccaaataaccttttacttgcgcgacactctcaccgcaatggccgccacgacaatggctctctcctctcctgctttgaccggagaggccattaaactatcgtcggcggcctcagaactatttggaaccggccgaatcaccattcgcatagcctccatgcccaccggtccatccggcagcccatggtacagatccgaccgaatcaagtacttggatccattctccggtgagcctccgagctaccgcattgaaaagttcctcgatgattacggatgggaca

SEQ ID NO: 115613 - DNA, 269 bp, Arabidopsis thaliana columbia
gtgctagagtcattgtgacagcagcacaaccctttccaacatcaccatatccacagataacagcaacctttccagcgatcatgacatcagtggccctcatgagaccatcagggaggaggaggacgataccaaggaggcggtgggcgacaaggatgagggggaagtgggggaagttactgccgccacggctgctgctacagaggttacaacggctgctcaagatgctgctcgtatgccggagaagctgttcagactcagcccggtcacta

SEQ ID NO: 115614 - DNA, 258 bp, Arabidopsis thaliana columbia
gagaaagttatcttccattccatgaccataatattccctaaataagtaattaccactaatttcacaaataaaaaagataagcaaaaaattaaaaacctaaattccaactgcaaaaccctaaaacagactttaaaaacaaataaagagaaattaaacgaaaaaaaaaaaaaaaaaagtttctccgaaaaaataaaaattaatcctaatcactttttatccacaatctttccgatcaccgtcaccgtcaccggactgata

SEQ ID NO: 115615 - DNA, 162 bp, Arabidopsis thaliana columbia
ggcaatgatcactaggggaacgacttctccgtttcgctagtaaaaacagagcttttatagcgttttaggtacaacaatcaatcaatctctctctctttcaatcactctccgaaacaaattaacgagaccaaatattcttaaaccctaaaaccctaatcaaac

SEQ ID NO: 115616 - DNA, 210 bp, Arabidopsis thaliana columbia
ccggtaacaattctaattggttggtcacttttcacttctataattaaaaattttgcaaacttgtcctttgtgacaagttggtacattaaaattacaataaccaccctccattaaaaatttttgacataaccaccctaaaccattgaaagatttcacaaacccacccattaaaattgtatacttttttaattcaaccctgttgtaaatttt

SEQ ID NO: 115617 - DNA, 149 bp, Arabidopsis thaliana columbia
gacaagtaaaccccttccaaatttccctttgatcggatgatccttaattacaaaaagtgcaagaaaatcacgaaaaaaaaagcaaaattagaaattcaaccaaaatcaatattcccgcccaaacttaacccttcgttaattgccctttc

SEQ ID NO: 115618 - DNA, 296 bp, Arabidopsis thaliana columbia
aatgtaatgtaactgtatatattataacatgaagagtttggttatacataaaaactcctgttaattgcatgttttggtactctagataacacaaggatgtcaaaaagaaggaagaaaaaacaaacagatcacggaattgagggtcttgaaaaacagtaaggaaacttgatatgatcggtgaactattcgtggtatagatacaagccgagaccaaatcgagcacatgctctgcagaatgctatttcctcagctgcagtaactggatcctcgatgtgatcatcagtcgtcgttactgt

SEQ ID NO: 115619 - DNA, 343 bp, Arabidopsis thaliana columbia
ctcgagccgaatcggctcgagtgtcattcttctttctgggcttagcaggggtatttgggaaccagttgttatttcttatcggtcttacatacacaaatcccacttatgctgctgccattcaaccatccatcccggtcttcacctttctcttggctgtcatgatgggtacagaaagagtgaatttgttgagaatcgaaggtcaaactaaggttggaggcacacttgtgtgtgttatgggtgctgtcttcatggttgtatttcgaggtccggccttgttaggagataaagatgcagactttgcgatgaacaatgaaatcagtgctaaaggtcaacctgagcctac

SEQ ID NO: 115620 - DNA, 216 bp, Arabidopsis thaliana columbia
ctcgagccggaaattatttagacccaacaaggcccaaagagatttctgtaatcttgcattttgaataggcttttcttaggccttgtattaaacatatccaactcatacaaggcctaacaaaagcctattcaaaatgcaagattacagaaattacttagaagacgcttttcttaagccatgtacgagttcgatatctttaatacagaatttctcttg

SEQ ID NO: 115621 - DNA, 270 bp, Arabidopsis thaliana columbia
gggcatgttttgttagattcaagccattgatcgatgcattcttgatgaaaaacatggtaacaagttgtcaagagtcgtaggaggatgtgttcttcttcgaattcaagtagacaaatcgcgcattcgagaccgtatttgtcttccctgagatctttgacggatgagaatggaaacaaagggtaggattggatgatgtgtggctctagaccagggttaaccggtggttgaacgggttcttgttgtgcttggatttgattttcgggcaatccg

SEQ ID NO: 115622 - DNA, 272 bp, Arabidopsis thaliana columbia
catgattcttccatgtgtgtaccatttaagaaactgataatggtggtggtgttaggcttacagtctcttaaatggtacacacatggaagaatcatggagacaaagaagaagagacatttgatgcgtattgtccaagccactgaaagagaagattcattccaaatcgatagagataaagctagagaagctctgaaacagcttgattaacaaatagaatctcaagctgatgagaaaccaagaatcatcaacaagacatcatcagatgtggtcag

SEQ ID NO: 115623 - DNA, 359 bp, Arabidopsis thaliana columbia
cactttttctctaattccttaattctctcaactaattacaaattatgactcgcaatattctcttgacggttacattgatctgcattgttttcatcaccgtcggtggccaatctccggccaccgcaccgatccattctccttctacatctcctcataagcctaaacccacatctcccgccatttctccagctgctccaacgccggaatccacggaggctccggcgaagactccggtagaagcacctgtagaggctcctccttctcctacacctgcttctacacctcagatctctccgcccgctccttcaccggatgctgatactccttcagctccggagattgcaccttcagctgatgtt

SEQ ID NO: 115624 - DNA, 232 bp, Arabidopsis thaliana columbia
atccggtggagagacggcggcgacgacgacgacgaatacagcttcggcgaagcgagttaggtcgaattgggcgacgagaaacgatggtgtagagcaaggagatgagaaattcagtggagaggaagaagaagaggaagaggatgaagaattgggaggagaagaagggtttagggatttcagcagagaagattcggagagtccgatgaaagaacgaagacggtacgagaataga

SEQ ID NO: 115625 - DNA, 370 bp, Arabidopsis thaliana columbia
cgacaatggtggctggtgcaacccgccacgctctcatttcgacctcgccatgcccgttttcctcaagatcgctgagtatcgtgccggcattgtccccatctcttaccgcagggtggcatgtaggaagagtggagggataaggttcacgatcaacggtcaccgttacttcaacttggtgctgattacgaacgtggccggagcaggagacatcgcgaggacgagtgtgaaaggttcaaagactggttggatgagtttaactaggaactggggacagaactggcagtctaatgctgttctcgttggtcagtcactttccttccgtgttacatccagcgatcgtagaagctctacttcatggaacatcgctcct

SEQ ID NO: 115626 - DNA, 385 bp, Arabidopsis thaliana columbia
gcaagattgggtttgtgactcaagatgatgttctgtttcctcatcttaccgtgaaagaaacgctaacctatgctgctcgtctgcgcttacccaagactcttacgagagagcagaagaagcaacgagctttagacgttatccaagagttgggtttagagagatgccaagacactatgattggtggagcattcgtgcgtggtgtatcaggtggagagaggaaaagagtttctattggaaacgagatcatcattaatccttctctattacttcttgatgaaccaacctctggtttagattccaccactgctcttagaaccattctgatgctccatgacatcgccgaggcggggaaaaccgtgatcacaacgatacatcagccctcgag

SEQ ID NO: 115627 - DNA, 377 bp, Arabidopsis thaliana columbia
ctaccttactttgtgctgatggctgctccatgatcgatcgaagaatgggggtttacgggtatccgatagagatccaagctctcttcttcatggctcttagatcagcaatgtcgatgctaaagcacgacgcggaaggtaaagagttcatggagaggatagtgaagcggctacacgcgcttagcttccacatgagaagttatttctggctcgattttcagcagctcaacgacatttaccgttacaaaacagaagagtactcgcacacagcggttaacaagttcaacgttatccctgactcgatccctgagtgggtcttcgatttcatgcctctacgtggcggttactttataggaaacgttagtccagctcgtatggat

SEQ ID NO: 115628 - DNA, 382 bp, Arabidopsis thaliana columbia
gggaaaggtaagattgatgatgaagacgtcacctttcaacgaatggttgcaaagatgcaagaggttgctggtgaacgtggaggctatcttcatggacgaggcgctttaaatagcgacgatttactttatctgaaagaacagatggaagcagaggaagatgcagaacgtcttctgagacgaactgagaaacgggcttttgctgcctttaaaaaagctgcaacccaagctgattcatctccagcatctattcccttgccacttcgtgtggagcccaaaccaaagagtggtatcaggcagcaagatttgctgaggaaagttgtagaggttaaacctaaacgtccaaagatctcaacaccatcaagcccaagcttatctccccctg

SEQ ID NO: 115629 - DNA, 398 bp, Arabidopsis thaliana columbia
gagtgcggcggcttgcggcgacttgcggcggcttgcggcggaagttgctatgcggctcggtgggtttcgtcgcgcgacttggtggttaacggcggatctgttcggatctgctatggctaatcgtgactcaaggctaattagggttgtcggagccaccgtccctgttagtctcgcgatttggtttccactagtccggatcgatcttgactggtctcgggaagggtgcgttgttcatcggacgacggaagggggttacatcttgcattcatcgatttgctaggtatggctcgtcattggaagcggatcggcgacgggaactgagtactcctgtcaaaggttgtttccggcgatgtagctgcaacgcagtggaccttgtactcaccggatctagtaggtgg

SEQ ID NO: 115630 - DNA, 374 bp, Arabidopsis thaliana columbia
gagctctcagagcaaaaaaacaaaaaaaaagaaaaaaaaaccctaaatctaaatctcaccttccacctctgtctttttttttttttttgttttttttttttttgttctttttttttttttactgtatcttctcttctctttgctctgcaaaaatctcacatccatggatccatctcttggtgatcctcatcatcctcctcagttcaccccttttcctcattttcccacctccaatcatcatcctttaggaccaaatccgtacaataaccatgtcgtcttccaaccgcagccgcaaacgcaaacgcaaatcccgcaaccgcagatgtttcagttatctccacatgtttcaatgccccaacctccttactccgaaa

SEQ ID NO: 115631 - DNA, 228 bp, Arabidopsis thaliana columbia
atcggaacaccgccgaggaggtaatcttaagttttggaacgtcaagtttatccgcaaacaatacgcaggatacagatagcacaagatggcggaaaagtgcgtgcaccaaggctgcggcaagctgtttaccgacgccactgaagagtgtaaatatcacccaggaccgcccatcttccacgaaggccagaaaggatggaaatgctgcaagccccgcgttctcacctttga

SEQ ID NO: 115632 - DNA, 266 bp, Arabidopsis thaliana columbia
aaaaagaccttcaagattaaagagtaattaacaagggaacaagtacttgtgaacccgtgattagtaataaccgaaaaagatattaaaaagagatgaaagttaacaaaaagttaaacctgttgtaaaatgggatcccctctgaacctaaactttttggaaccctttaagcccgcaaatttcacagaggaactgggtaacccaaaaaacaactgtccaaaccggttaacggtcccattaaatatcaaaggccctgaggtttttaaacc

SEQ ID NO: 115633 - DNA, 323 bp, Arabidopsis thaliana columbia
aacaaggagaagtatattatagaaggatcttcatacagcaaaaccattaacattacatgaatatctatctaaagcgtacaacaatcactaatttactatgtacacacgcttctagcttctgatatatctcttctacatgtcgtaagagtttggaatgtgacagatacaaaaccacaaaccaaatgaagaaggaaagagtctttacagatccgagtcttgccggctagccaagcagagttcatgtaattcattgagtatccattcctcaccagtgtgaccaccaaggaccaatactctagttcctccaacaacgcatgtgctat

SEQ ID NO: 115634 - DNA, 270 bp, Arabidopsis thaliana columbia
gcagaaaatagcatgtattaaaattattatttgtatagataaaagacaaataatatatcaaaatgctgaatacaaaatgtgagctgtaatacatgagacaaatgggagaggatcaaaaaagatataaaataaataaaattaagaattgaaaaaaaaataaaaaaaaagaagaacaaaaatttattagaaggctagaacaagtatagaccatgcgattgccgcagctcccaccatttgtatcacaacacttattctttgtgctccgctctg

SEQ ID NO: 115635 - DNA, 162 bp, Arabidopsis thaliana columbia
attacatccttacaacttcatttgatacaaaactcgaactttagcattcagcattagacgcaaatacattgggacgtaaaccgatataaacgttaaaaaactaagctggatcagttattgaacatactacaactatgggtttgttttccgacaattcacaca

SEQ ID NO: 115636 - DNA, 148 bp, Arabidopsis thaliana columbia
gagaaacgaatactaaatcgttttataaagcaagtagtacagagctgcaagtctggctgggaccatctaaacattcgacaattcagtttcgccattcagagggctttagtgagagattgtggagttatatcatgatgaaaagaaagac

SEQ ID NO: 115637 - DNA, 194 bp, Arabidopsis thaliana columbia
gtagaaatcagataatcggtggaatagattaacaataatcagtgattttattaggtaacaatcacaatagcatatagattaaaacttttgacataacacacgttcagaaagactagcctagccctgcgctttcgtcttggcgaggagcgtcctccttgatgcacggtggtccaacaatcttatcaataagtcca

SEQ ID NO: 115638 - DNA, 176 bp, Arabidopsis thaliana columbia
cccccaaaccaaatcccgagctaaagaacccgggaaggcaacgacaaacccctccaaaagggccaccaaaatccaatcaaagggccgtcgtttaaaaacgccctgacgggaaaaacccgggggtaaccaaactaaaccccctggaaaaaaaaccccctttcccaaacgggggaaaa

SEQ ID NO: 115639 - DNA, 337 bp, Arabidopsis thaliana columbia
ggaaatcatcttctttagattctctgcttcaaagttcaaactccaactaacccatttggtttcaacagttacaacaagtacagggctagatggcaaaagatgtattgtatcctaaagctaaactcttgtaagctttcgacaaaataaaaagcaagaagacttataggagattgcagggttatcactccactcagtcttcttcatctgaactatcatatgctaatcccaacaagcctttcggagcattttgaccttgcccattgctttccgtagcttttccgtcatttctgtctgcgccaggtttcttcaacactggcatagcttcttctttctgctt

SEQ ID NO: 115640 - DNA, 254 bp, Arabidopsis thaliana columbia
aaagggcaaaatgcatcaaataaattaagcccctacatacccaactgcctcctccctaaatatttgtcctgggattttattccgtaaaagtcgttacattatgcccctgctcctcaggaaaagaaaattcatgtcaatgctgtttgcccatgcctcatcatcaccacgtcaatgctggccttttttacgcccggccagctctgccaatctgaaaaatttcgcccgtcagagcctcatcgccacgcaataccggc

SEQ ID NO: 115641 - DNA, 387 bp, Arabidopsis thaliana columbia
aagcggacaccatcgcatagaaagccgaaaacatgccgcatacaagaggagccagccaaacggtgtccgcttttgtctctggtcattccaccgtcatctttccggtggttttggccagttatgtaccggtgttagatccggtttatttgtttctgttttacttttaataattctcattgagatgtgttggtgataatagtgatagcaatctcgatttctattgcttcttatccaatccactctcttttgagattcaatttgcaggaatatttacagagatttgagttttaagatgaagaaaagaagttgattccttcgcttattatcattgccttaatctgttggtttaattggagtttcgattactttataccggcgaaaaatcag

SEQ ID NO: 115642 - DNA, 357 bp, Arabidopsis thaliana columbia
acgttttactttgtgctgcactactcaacctcaatggccgcctcaacaatggctctctcctcccctgccttcgccggtaaggccgtcaagctttcccccgcggcatctgaagtccttggaagcggccgtgtgacaatgaggaagactgttgccaagccaaagggcccatcaggcagcccatggtacggatctgaccgtgtcaagtacttgggtccattctctggcgaatcaccgagctaccttaccggagagttccccggagactacggatgggacaccgccggactttcagctgaccccgagacattcgcaaggaaccgtgaactagaagttatccacagcaggtgggccatgctc

SEQ ID NO: 115643 - DNA, 268 bp, Arabidopsis thaliana columbia
ttttccttttttgttatgcaataatctgtgaatcagtgaaagtttatctctactgaactactgatcaaaaaaaaaaaaaaactcagagcagaggagatcgagagagacaaagagagagagagagagagagagagatcttaacaaaaaaatgtctatatccatggcgttattctctccgccgatctcttcctcacttcagaaccctaatctcatccccaagatctcaacctctcttctctccaccaagcgtttctctctaatctccgtc

SEQ ID NO: 115644 - DNA, 385 bp, Arabidopsis thaliana columbia
ggaaaagttctcagatttcaactagaatcgaatgtctctatctgcaaaacaccgccattgaagaagttccctgctgcattgaggatttcacgaggctcactgtacttatgatgtattgttgccagaggttgaaaaccatctccccaaacattttcagacttacaacacttgagctcgccgactttacagactgtagaggtgtcatcacggcgttgagtgattcaactgtggtagcgacaatggatgaccatgtttcttgtgtaccattatctgaaaacattgaatatatctgggataagttgtatcgtgttgcatacctccaggaacattttagcttccgtaattgcttcaaattggatagagatgcgcgagagctcatcctacg

SEQ ID NO: 115645 - DNA, 399 bp, Arabidopsis thaliana columbia
atcgggatgattgtacggtggcccgtagaatgtacggttcaggttgttacggcggagaaccgtttttcgtagctagggatcctggtaatccggaggcggaggaggatgatggttatgtggtgacgtatgttcacgatgaagtgactggagaatcgaagtttctggtgatggacgctaaatcgccggagcttgaaatcgtcgccgccgtgaggttgccgcgaagggttccgtacggattccatgggttatttgtcaaggaaagtgaccttaataagctttaacaatataggtaactgcaatagttaatagaataattaagtcttaattacgtcgcgtacaacaaatcgcatagtgttgttgcacacttgcactttatacattaaactaaagtacacatag

SEQ ID NO: 115646 - DNA, 295 bp, Arabidopsis thaliana columbia
catatagttcacatctccggcgaatttaacacaggtttgggattgaaaatcaactttctgatatccatcatctttattaccttactaattttgtctgtcaggttactttcattctcactacaacttcaataatacactttttgctgcgacaatcaacgaccattccgaaacaccggggccggatacactaataggagggcttttaaccgcagatttcgatgaaagttcttgcttgagtatgtaccataaaactttcttgtaacgcaagccatcatcatccaagccgtcagaatat

SEQ ID NO: 115647 - DNA, 331 bp, Arabidopsis thaliana columbia
attacaaattacaaaattatcttgctctgaaagtgaaatggtcaaaactcaaaagtgatccccaagaatatctttgataaaattacatgtggccaccgtagaagacccaccatcaccaacagctttcctcgccactgaagatttttctataaccttctttctcacggggttatcactatccatcaatgatcggacggctgtggctatttcatcggctgacacgatctccaaagtaaccctatcaccatccgccacgtagtcaagccttatctccactgctaagcccaactccttcaccatctcaaatgcgttcagttgttgctccgcatac

SEQ ID NO: 115648 - DNA, 324 bp, Arabidopsis thaliana columbia
ataagaggattagacatttaatataatctattttatttacatcttctctaattctctcatatgataaaatcggaacaatgcaaataaaattaggatgaccctacctttgggtttgagctagcttggtttctcactgcacccacacgtgcaattctcttgatcttttttcaaattctgaagttgatgctgaaggcctttgatgtgttgtacagctaaatccagcatgtctgaatagcttgtttgcttatccatgttggggacaagatcttgtagcttctttagcttcccacttattctcgttctcctctcccgctcagcgatgct

SEQ ID NO: 115649 - DNA, 338 bp, Arabidopsis thaliana columbia
acgtaaaactttaaccctttaaaatctctcgtaccaaaaacaaaattttatccattttttacactacttgaaaggagtcccaggatcacatacttctaaattctatcatagctcaacatgaaaacaagatacattggagtaggatctccaggaaacgaggattataaaattcctacatgagataatccttactagttgccattttggatgtcagccaccgccattactcaccactctctcttcgcgcccgtttgctaatgtacggttgtattttgactggttctgattctgtagagatgctttcagttttcactaacttccgtttttccttctcaaat

SEQ ID NO: 115650 - DNA, 207 bp, Arabidopsis thaliana columbia
ttttttttttttttttttttttttttttttttttttttttttttttttttttttttttttttttttttttttttttttttttttttttgattgctcaaacatattcatcattgtttcacctgatttcaaacttaactcaagaaagaataccagtcgaagggtgaaataagttcacacacgatgagtcatgatccaaaaacaaccggt

SEQ ID NO: 115651 - DNA, 355 bp, Arabidopsis thaliana columbia
gtgaatatatatatttataaacgaattagaaaatatataaatgatcgttttctcgaagagcatcaatttgttcaacatgtgcaccatctgccattgcaatcgtgcttcctcgtttccccaacttcttctcagctaagtcgaataggagttggatagagtcaggtaaaatgataagtctaccgttggaatcaccattgtttttgttatcctgactaggaggagcttgtccatgaattatcactctttttggaactccctctcttcttctctcttctatctgtccattttcatgtcttgagaccgttactatttcctcatcgttacattgtggtgtttcctctgactgaactgtttc

SEQ ID NO: 115652 - DNA, 207 bp, Arabidopsis thaliana columbia
aattaaacattgtttttcatttcacattcatatgggataaatatcaaatcccattgggttttaattataatattttacactttacattcatgtacccaaactaaccagatatctaccaaagtaacttttcaatcacatcttttcttgtttcttcatctttattactgaccccatcactaaaacttagacatcgcttgacgatgatgg

SEQ ID NO: 115653 - DNA, 225 bp, Arabidopsis thaliana columbia
attgtagatatattatatttatcctatgtttcaataattcaacattcaaatcagatcaaatgtgatcaccaatatctatagctcagcaaaaagcttaagcccccatatatcctcacaatacctaacaataggaacaactttccccgattcagttcaccatgcgtcaggttcacatccatgagtcagaggagtaaggaaacatggctccatcgacgtggatcgaac

SEQ ID NO: 115654 - DNA, 384 bp, Arabidopsis thaliana columbia
gcaaagaatcgacttcaccactatgggtgtcgttatagatgaagcttccctggcgctggtgtttcttggagatttttgaagcagcttctttgttctatccggcagatcttcgacgtttattggatttggattcgagatcgacaacaaggagaaggctatccatcactactagacggatcggcggtgactgatcgaaggcggtgatgctccggcgagatgaattcggcggtgctcgatttcctgacgcgtggaatggcgtagtacacgtttcaacacgtgttagtatctaaagttaaagtttttggattaaagtgatcgacaggggaatttaaaacgaagatagtcctatacttcatacttgttccataaaagcatgtagagcat

SEQ ID NO: 115655 - DNA, 398 bp, Arabidopsis thaliana columbia
aaaaaaaagaaaacacaaaaacaaagattataatggcttcctcaaccatggctttgtcctcccctgccttcgccggaaaggctgtgaagcctgccgcatcagatgtcctcggaagcggccgtgtgaccatgaggaagactgtcgccaagccaaagggtccatcaggcagcccatggtacggatctgaccgagtcaagtacttgggtccattctccggcgagcccccgagctaccttaccggtgagttccccggtgactacggatgggacaccgctggtctatccgccgacccagagaccttcgccaggaaccgtgagctagaagttatccacagcagatgggccatgctcggagccctatgctgcgttttccctgagctattggctaggaacggagtg

SEQ ID NO: 115656 - DNA, 265 bp, Arabidopsis thaliana columbia
aatcatcatcaacaaaaaaacaaaatacatttttcagaaaaaacaaattcaaatttcagaaacacacgaaagaactggatactctggcagggatcaaagattaaagaaaacgtatacgtggttctgaaaactgtgtgaagccctgagatctcgcgacgtcaaatctgtgcaccagatcttaagcccagatctggaatattggttccacggtcctccgccgcaacagtttttgatgcgcgtactcatgggaggtgtctctccgtct

SEQ ID NO: 115657 - DNA, 297 bp, Arabidopsis thaliana columbia
actaaactcctgagctcagcttcatcttgctcgacgttatcctcttcgttcagcgacaatggcgtcgattaggaacctcgcctcgtctctctcatcactctcgtacacctcgcacgtttctcgtagacctaacagcatttccttcaccctgcgcgaagtcagtaatctcattaccggagatatgggcacgcggcgcttcggtatctagcagcgccactgtatctgctccatcggcggaggaggagatagttggtctgaagaaatacgtcaaatcgaggcttcccggatgatttgctg

SEQ ID NO: 115658 - DNA, 273 bp, Arabidopsis thaliana columbia
gctggacctaagatcgaggaggtcgagcaccgcctgaagcagggggagcatcatcgtccataccagaggcacctggaccaccggcttcacctgcttcaggcggtgctggacctaagatcgaggaggtcgactaatttgttggacattgacctctctctttctcctatctctatctcttttacttgcttttttttgatctgttaagactttttatgttgggcttttttaaagaagcccattttgtggtgttttttggttagtactattttgaac

SEQ ID NO: 115659 - DNA, 385 bp, Arabidopsis thaliana columbia
cgcttctttcttatataactgtctcttcatattctcactccttctcctccctcttctcctttttctctcttaagttctataaatgttcatatttgtttctagctaagaagtttgtataaggcagtggacatggctcctgtttcaatgcctccaggtttccggtttcatccaacagacgaagagcttgtcatatactacctcaagcgaaagattaatggtcggactattgagttagagataatacccgagattgatctttacaaatgcgaaccttgggatttacctgggaagtccttgctgccaagtaaagacctagaatggttctttttcagtcctcgagaccggaaatatccaaacggatcaagaacaaaccgggcgaccaaag

SEQ ID NO: 115660 - DNA, 355 bp, Arabidopsis thaliana columbia
ggagaggcccaaagataagaaagcaaggccatcactctagccattgtgacacttccacgcattacgatctagaggaaaagatcaactttgctgtttttccatctctacaaggaggtccacacaacaaccatatcgctgctcttgccattgcattgaaacaagtggccactccagagtacaaagcttacatacaacagatgaagaaaaacgcccaagctttagcagcagctcttcttagaagaaaatgcagactggttactggtggtacagacaaccatttgttgctgtgggatctcactcctatgggcttaacagggaaagtctacgagaaagtgtgtgagatgtgccatatcac

SEQ ID NO: 115661 - DNA, 369 bp, Arabidopsis thaliana columbia
tgaaaagcgtggacggagttgcggcggagaaggaaggagagaagaaggagaaaacgtatcgattacatgatccaatttctcgaccggagactaagcgaagacggtaatcacgacgggatcggtgatggaaacggctccgattcgttaccggaatttgttggtaagtgtggtgaatctgggatcttcaaagttccgattaggtcagcggttcatccgaatcgaccacctagtcttgatgtgagacctcatccattgagagaaactcaaattgggaggtttttgaggacaatgactagtactgagagacagttatggactggtggtgaggatggtgcgttgagagtttgggagtttagtgaattgtatgga

SEQ ID NO: 115662 - DNA, 121 bp, Arabidopsis thaliana columbia
aagaacactagaaatactggaccaacacacatattatacattacatattcgagaaatgaaaagcttggcttgtgaaaacagaaattaaacatatactacaccaacgcatacgttatacgtg

SEQ ID NO: 115663 - DNA, 275 bp, Arabidopsis thaliana columbia
ggagaatcaaggtcagcttcattgggttcacagaaggctccgctcttggaaagttacaagaacgatgaacatgtatgagtatcatcaactagtgaagatcacgctatatatatatgtgtgaaaaaattcatatgtgaattgtctttgtaatttatttgatgagacaagtgtgatctttaattttaggatccaagtgttttctaatcacaatctaacaagtcctgttttatatcctttttttcttagtcgaaaatggaaaagttaaagcagaaaaa

SEQ ID NO: 115664 - DNA, 111 bp, Arabidopsis thaliana columbia
cacgcgtcgtcgccttcgccgtttcttcactgcggcggatcaatcatggttgctccaaaggagagaaatgttcaatgggtgtttttgggatgtcctgatgttggaaaacga

SEQ ID NO: 115665 - DNA, 332 bp, Arabidopsis thaliana columbia
acgaccttttttttttttttttttgtaacacaactcctaaataagtttcaagcaaaattatccggaaactgcataattgaaaaccataataaaaagtctcagagatatccaaaaaggagggagagagaaagtcacagaaataaagagaaaaaagaaaaaggctcaaacgccatcaaagttttaagaaccaaagaaaaccataagagagtcgatcataacgaaagtctcatcatttggcacccttcttcactgcagccttggtgaccttggctccagttgggtccttcttgtccacgctcttaataacaccaacagcaacggtctgcctcatg

SEQ ID NO: 115666 - DNA, 274 bp, Arabidopsis thaliana columbia
aatcaaaacagaaaagtgactgtgcacaaactcaatgatctctaactatcgacagtagtaaagtttcacagaaaatataaatgaaaacgcgttcttcgattttttaaccaattcaactctacaatcttgagcttatccctcttttcaaggtagggatgtgtgatgttactaatatatagtaagagtatccttcaggccaagtttctagataagtttcttcgtgtggaaatacctcttcagatacagtatctgtgaacccacaaccacaacgcaa

SEQ ID NO: 115667 - DNA, 238 bp, Arabidopsis thaliana columbia
aggttcccaacacttgattgacactagaattcaactgtttaaaaataagttataagtatgagactaacttattagatctcgagaatacatttgacttagcttttatgcttgcttaggcgaccaaaaataaagaacaatcaccaactgtgagaagaataatttcggaggaaaactatatgccaagtcagcctagtttacccatatgaagactgtcggtggtcgccggtgccgacagttg

SEQ ID NO: 115668 - DNA, 125 bp, Arabidopsis thaliana columbia
actcaggcaaaactttcacttccaatcaaagtaaagaaaaatatatctgtcagattatcattattacagcatcaaacagccagcattcgaggaagacacagaagacttaaccataacgattagac

SEQ ID NO: 115669 - DNA, 261 bp, Arabidopsis thaliana columbia
tacatcagtagaggtaaggaagttaagtttattcatctccttttcgtcattatatctcgtgagtagactcaaagcaagaagaatcttgctcgagcaagacccaaaggtaagagctcttaataagagctttaaaactagatctaaaaattgagatagctcattagagctttatttagtggaagtgaggaaaatatactaattgaagaacaccaagctaaatgattcctagataatttaatatcatagagagggaataaagag

SEQ ID NO: 115670 - DNA, 171 bp, Arabidopsis thaliana columbia
caaaggagcagtttcttggaccaaggtcttagcattggatttgagccctcatcttcagattgggaatgatggaagtttcttcctaggcgaggataagaaagtcgtcatgttctgtgagaaattgattgatgagaacaaggtcaaagacatggtctacattgttggggagga

SEQ ID NO: 115671 - DNA, 233 bp, Arabidopsis thaliana columbia
gcaaacatctttggatccgatgaggattgtcgcagctgtgaatctggatggacgatgtatttagcctcacagtcccatgatcgtgacgacgattgttactatggtgatgatgatgaagaagaagaagatagcgatggtggtgattcaatggattctgatgcatcttctggtcccatggaagccacatcatatctcaaacttgctcaagagattgaggagcaaaactctataaa

SEQ ID NO: 115672 - DNA, 257 bp, Arabidopsis thaliana columbia
ggtggggccaaacggaacggagtttgttataacggcggttgattcgccggagctggaggattcggttttggtgattgggaaagttttggaaggaatgggagttgttgagaagatgagagaagtgaagactgtgagggataacacttcatctccttatgtcagggtggctaaagtgatcggagatcagagagctgtggtggcggatagagggtttaaccggccttattctaaggttgtagtcaccaattgtggtttga

SEQ ID NO: 115673 - DNA, 258 bp, Arabidopsis thaliana columbia
tcgcgagcggccgcccttttttttttttttttgcaaaagaaaactccataacattgtttaaaggataacatcttcctcgtaagactcacagaggtctgcgtaaggttgcttgtattggtgcgtggcatcctgctagagtgtcctacactgttgctagggctggtcagaacggttaccatcaccgtactgagcttaacaagaagatttacaggttgggtaaggttggtactgaggcacacacagccatgactgaatatg

SEQ ID NO: 115674 - DNA, 197 bp, Arabidopsis thaliana columbia
  unsure (1)..(197): unsure at all n locations
ctcgagccgtgccaatccatctgctgaagaaaacaatcaataagcgaccatgttggtgatnatggcaatgtctgtaaatgtatcttcttcttcgtcttctgggatcataaactctcgtttcagtgtttcattggagccaaaagtttcgcacattggttcgttcaggttattgggtcgtgttcatgttgctcttgtgt

SEQ ID NO: 115675 - DNA, 277 bp, Arabidopsis thaliana columbia
tcgcgatctagaacggccgccctttttttttttttttttttttttttttttttttttttttttttttttcgctttgctgaaattgtgaggtcttttcctaaaccagttaacattttaagtagtataacaccaaagctatacacatcgcccgccatgttcgacatccctgagagtatgtattccggaggtgggtattgatatctaggtgctacatttgaaaacccgatggggtataccaattcatcgagagaaacttttggctttccaaaataggaaa

SEQ ID NO: 115676 - DNA, 345 bp, Arabidopsis thaliana columbia
agaaaatacgtttccacaattaaaacagaaatcgtagtgacacaaggacataacatcgatcgagtaagaataaaaacattggaactggaatttaaataaagcatagacacaaaatcattatataaaatcaaactaaccctttttgtctaaccgaaccaacgtagctatgaactacactgtagctatcattaccatcatcataatcatgattatccccatcatcttcgtcatcatcatcatcatcatcatgattaatgttgttgtgaaccctagtagtctccaccaaaaccatctcttcattagtctttttcttcttcttctttatagagttttgctcctcaatct

SEQ ID NO: 115677 - DNA, 281 bp, Arabidopsis thaliana columbia
ctataagtagtattttactccttgtagaaaatagaaagccaaaataaccaaaaatgaaacaaatttaagtcgtaagaaagagggaccagtcgatctctttgtatcttttctctccatttctcgaccgaacaagtccataagtgtcaagctcaagcatatcatctcaaaacctggacaagactcatggtacaaccaaaaagacacaaaaacaaactttgatgcaacaaagattcgacatgaatacaaatcacgagattaataaaacacaaactatatcactt

SEQ ID NO: 115678 - DNA, 280 bp, Arabidopsis thaliana columbia
caatctgaaaaagctagaggatattcattcaattaggtctcatactctcatctttgaataataagctcactactatactatataagtaaggtaaggaaacatatttagaaaattcgttatcatatatggaataatcagaagaagaacctaaattaaaaaaaaaattacaagaagaaaaagagaaatcattgacgaagaagactgtaaccaggataaaaacaaatgtgccgattagatctccaatcatcacgcgtctgttaataatctgaatagtcaacgc

SEQ ID NO: 115679 - DNA, 322 bp, Arabidopsis thaliana columbia
ggaaagaatgccctttctgtgtgttttatctacagtaacacatcagcgaaatgctttgatgaacaatgcgatattattcttatgaactgtgtggttggatacatctggattctgtttctcagtagtcagctctcagttcttagttagctgtcgctggatttgtttgttaggctcaacagtactccggtactgagagaaagtgcaacgacaccaagtgatgcctctgttgatatgtggaagccaaagaaatcaaggatcatcttgactcctatgaagccaagaacaactgctattgatggctgcaagtattccagctcgtcca

SEQ ID NO: 115680 - DNA, 140 bp, Arabidopsis thaliana columbia
tgggggttgcaatatatatttttttatagatttattcagtgtaaaattaatacatgtacatgatatatactatatatctgttgaatatggtgagtagagacaatgtttataatatactgtaacagtttttatccacggac

SEQ ID NO: 115681 - DNA, 310 bp, Arabidopsis thaliana columbia
aagacttctacagacaaaaaatatcatggtttcgtcttatgctagaaacaaagaagctagtcaggcaaagtatatatcaatattgaatataattcaaggagaagtcgatcccactcaggtgcatgagagtttgcagaggatacgagaaagaaagcttgttaatttcattgagtggggacctgcaagcatacaggttgctctttccaagaagtccccatatgttcaaactgcccatagggtcagtggtcttatgttagcaagccacactagtatcaggcacctattcagcaaatgtttgagccaatatgat

SEQ ID NO: 115682 - DNA, 245 bp, Arabidopsis thaliana columbia
atttgtaggcaattctcctatgagatagcattcattcatggccaagctactaatataacactacagtcggatttgtcaaagtggatggagaaaccattgctcatgaacagttttcgggtgaaggtagttagctatgaatagattgctgcaagtttaggtgtggtattacattcagcagtagaccatgacacggttctctttatcgcacaacagctcaagttttcagatgatcagatggagacatg

SEQ ID NO: 115683 - DNA, 384 bp, Arabidopsis thaliana columbia
  unsure (1)..(384): unsure at all n locations
aaccacttgaaatctccctcccagagtaagaacttccatactttgctctagatttcttgagaaaagatgcagccgatcttccatgcgatccttaaaaatgaccttccagcttttttagagttggtagaagatagtgaatcgtctctggaggagagaaacgaggaagaacacttgaacaacacggttttgcacatggctgcaaagtttggtcaccgagaactcgtctccaagattattgagctccgaccttccctcgtgtcttcncgcaacgcatacagaaacacacctttgcatcttgctgctatccttggagatgtaaacatagttatgcagatgttagagactggattggaagtgtgttctgcacgcaatatcaacaaccac

SEQ ID NO: 115684 - DNA, 267 bp, Arabidopsis thaliana columbia
aatctgaaatcctctgtcgagaaagaagccgtcgacgatatctgtacggacgcgtccgccgacgccatcggaagcttcgaggagtaggaaagggattcgtttggaggtgagctggtttgcggcggctaaaccagcgagtccagcgccgatgatgatgacgccagtttgattcttccgaatgtacggatcttccgtggaagattgagctccggaaaagcgttgatatcggtgatttgcatggccgcggcggcgagggaagaaatgaga

SEQ ID NO: 115685 - DNA, 340 bp, Arabidopsis thaliana columbia
ttccctttcatattccttttccttttctcattcctcactagcttcagagcttctgctcaagatcctcgtttcctagcctattattgtccaaatgcaacaacttactcaagtaacagcacttacttgaccaatcttaaaacccttttgtcctctctctcttcccgcaacgcctcttactccaccggattccaaaacgccacggtgggacaagcccttgacagggtcaccggacttttcctttgccggggagacgtctcgccggaagtttgccgtaactgcgtcacctttgccgtcaacaacacctttagtaggtgtccgaatcagagagaagctgtgttct

SEQ ID NO: 115686 - DNA, 331 bp, Arabidopsis thaliana columbia
caattcaaaaacttcaccaccgagcaatctcgccggaaacagagcctctcttcttcaccgccgtattttcttcttctccagaaatgtgggattgaagaagttgacgaagaagacgaagtttaacaatggctccagtgaaaaaatcagataagaaagcaacattagatgctgctgcttggatgttcaatgttgttacttctgttggtatcatcattgttaataaagctttaatggctacttatggctttagctttgctacaacgttaaccggtttacatttcgccactacgacgttgatgacgcttgttttaagatgtttaggatatataca

SEQ ID NO: 115687 - DNA, 304 bp, Arabidopsis thaliana columbia
gtcaataaaaatctcttacaaccacaacaacttctcagattcttcttcgctttgttgttcgttctcttcttcaagctctctgtctctccaaatgggcgacaccggtagacacaaatggttctccttccaccaccaccgttcagcctccgccacaactatgccacaacacaacagccccggcgaaactccaacagagttcctctgtcccatcaccggctttttgatgtcagaccccgtcgtcgtcgcttctggtcaaacatttgaacgtatctccgtccaagtttgccggaatctcagttttgct

SEQ ID NO: 115688 - DNA, 336 bp, Arabidopsis thaliana columbia
ccgggattgaaggagtttaaaatcttcaacaacaagttaaccggagaaatacctgcagagattggagttcattcaaagctggagagattcgaagtttcggagaatcagttaaccggaaagttaccggaaaatttgtgcaaaggtggtaaacttcaaggagtggttgtgtactcaaacaatcttaccggagaaatccctgagtcgctcggagattgtggaacgctcttgactgttcagttacagaacaatgacttctccggcaagtttccttctcggatctggaatgcttcaagtatgtatagtctacaggtgagtaacaactcattcaccggagag

SEQ ID NO: 115689 - DNA, 319 bp, Arabidopsis thaliana columbia
tggaagtgtattcgatgagattagaattggttcaagaacagattagagccacggtgaatgagttaaagacaatgcctaatggaggatgatgcataaggaaagactacaatgggttctttaagttatgagaaaatgatgaagaaagattatgatggtgaggtatagtattagcaaaagtaataatcttaatgaaaatttctgatggtgatgaaatcttttttagggttttagtatttttttttcttgattgaatctttttttaattttgtcgattaggagtgaataacctttgttcttagctgataaattatagtttttg

SEQ ID NO: 115690 - DNA, 279 bp, Arabidopsis thaliana columbia
gatagacccgattcgcaatggctgttggcaagaacaagcgccttagcaagggtaagaagggtatcaagaagcgtaccgtcgaccccttcacccgcaaggacgagtactccgtgaaggccccctccaccttccagacccgcgatgtcggcaagaccctcgtcaaccgcaccagcggtctgaagaacgccaacgactccctcaagggccgtatcttcgatgtctccatcgccgacctgcaaaacgatgaggatcactccttccgcaacgtcaagctccgcg

SEQ ID NO: 115691 - DNA, 315 bp, Arabidopsis thaliana columbia
atttttcccgtgaatagccgtctctagtgaatcgagtttttgtccatcatcttgtggctccgttagccaagatagctagcttctgtctggcaaatctagcttctataagcagttttggtgttagtcacttaaaatcaatctatcgacttgtatctctggaagctcgatcttgcaaatcgcctaaagtaaagagaataagagttgtttccagcaaatttggattgccatagccgtctctagttgtttttgaatctggtgaaaaacaaagtaaatcgatgtttaagaaatttacagcatcgattgagttcaccagaa

SEQ ID NO: 115692 - DNA, 348 bp, Arabidopsis thaliana columbia
cggctcgagatttctttttttcttccagaaatttcctccgatttcaaaattttccggtgaaatcgaaaaaaaaagcgagatcttcttctctaatggcgacgaccttaagcagagatcaatatgtctacatggcgaagctcgccgagcaagccgagcgttacgaagagatggttcaattcatggaacagctcgtaagtggagctacaccggccggtgagctgaccgtagaagagaggaatcttctctcggtcgcgtataagaacgtgattggatctcttcgtgcggcatggagaatcgtgtcttcgattgagcaaaaggaagagagcaggaagaacgaagaacacgtgt

SEQ ID NO: 115693 - DNA, 227 bp, Arabidopsis thaliana columbia
ctcctccctcacgtcttccaccaccgtagcttccgccaccaccacctcttgaggaggatacggtggtggtgaaggaggaggttacgggggaagcggtggtggtggaggatggtaattcctttaattaggtttgggattaccaatgaatgttctctctctcgcttgttatgcttctacttggttttgtgtgttctctattttgttctggttcggctttagatttgatg

SEQ ID NO: 115694 - DNA, 364 bp, Arabidopsis thaliana columbia
  unsure (1)..(364): unsure at all n locations
caccgaactaacaaaatttgaaattcccaaagcaaaaacaaattacatcattcaattcaattctcaatgcctcttcttctcnctacctcttccttcaaaacgacggccaccgtcgtaatcgccggcgtttcatctattgccacggcgatgattctcacggtcccttccgtttcccatttcgtagtctcttgctttccgattatttacgataacaccgtcttcctcttaaaaccaccgtatctttacttagtcatcaactctatcatcgtctgcatcatcgctacttctaaactcactcataaatcgtcctccgtcgatgactctgagatctcggaagtagtgactccaataccgataccggtac

SEQ ID NO: 115695 - DNA, 230 bp, Arabidopsis thaliana columbia
cttggctcactttccgggaacaaagttggtggcgaatgcacatgcgttgttgttaactggatcggccacattttatctgtattttgcttcagtcgttgcttcgtgagtgtgagaggagaacgagagcttgtttagatgtaaaatttgcaagactttgtatgtttttcattaatcaaagaagtcgtttttctcgcagaaacaaatgaagaggattccgataatggtaaatc

SEQ ID NO: 115696 - DNA, 315 bp, Arabidopsis thaliana columbia
cacttacactattaatcctgataccagaaggattctgttttcacaagtacctgagacgagaaagcctctgttgtcagtagagattgatagagttgctcaggattttagaattcatcgagatgaaatatacacaatactggctcagattatgagataaagactattggtgcatcttcatggtttgcccaaagttgttgagggctggaacagatctccatataccaagacacaaactaaagagtttgcatggacgctcacaagggaagttggctaccttcaccgtgtgttgtctgagacattgcacgaagccgatgt

SEQ ID NO: 115697 - DNA, 271 bp, Arabidopsis thaliana columbia
ctcgagccgaatcggctcgaggagcacatacgatctcgttgagcagatgcattacctctacgttagcgtcgtgaaagctcgagatcttcctgtcatggatgtttccggtagcttagatccttacgttgaagtgaagctagggaactacagaggtttaacgaggcatttggagaagaattcgaatccgatctggaaacagatctttgccttctctaaagagagattacaatcgaatcttcttgaagtcactgtgaaagataaagatcttttg

SEQ ID NO: 115698 - DNA, 288 bp, Arabidopsis thaliana columbia
ctcaaacctttcaggttcgaattgatgaaaaaatatttggcagtttggatttgacggtctctattgctagaagaactacagatgaagtgaccaccaagaagcccttcatacatcactatcatggtggggcagtggcggataatatcatcttcaaaggtgaattgcctgattggccctcagatgatgttttgaaagacagagaacgtttttacgtgattatgaatgaatcagagtggcgagctactgcttggatttctctgtatttggaacttgtactttgtgcacatg

SEQ ID NO: 115699 - DNA, 145 bp, Arabidopsis thaliana columbia
ggcgtttgctgcccaaaaggtctttaaggtgaacgctttggccaatgctttggctggtcaaaatgacgaggctcttttctctgccaatgctgctgctttggcttcaatgagatcttccccaagagtcaccaactatggtgtccaa

SEQ ID NO: 115700 - DNA, 303 bp, Arabidopsis thaliana columbia
aaatagagtacccggtgacgatgatgaccacgttaacggcgacagtgccggaatttctacccccgtcgctaaaatccaccagaggatatttcaattctcatagtgaatttggcgtttcaatctctaaatttagtcggagaagatttcacaatccgaccagagtcttcgccgtttcagatatcagtaagctcgtgacggagtttgatccgaagattccattggagagagcatctactccgccgagctcgtggtacactgatcctcaattctacagtttcgagctcgatcgtgtcttctatggag

SEQ ID NO: 115701 - DNA, 348 bp, Arabidopsis thaliana columbia
  unsure (1)..(348): unsure at all n locations
cttttgcaggaggtcttatagggatctcaccggatttgaatttctcaacagcggaaagcgtgcaagtcattgtaagtataggggacttgtggaaggaggaagattatctaaagaagaagctgaggcttacatagacaaggctgtgtctaaacctctctagtgtataattatttactcagaaaccgcccgtttgaacacgatttggagcttcgggtttctgagttattcaattaggataaaaaccacaagtttaggaatattgtgagacctttgaatttgtcttttgaaagagaggactgtgtcctctgttanctgtgttgtgcttgctccctaagcaaactctcaatg

SEQ ID NO: 115702 - DNA, 344 bp, Arabidopsis thaliana columbia
caaaaacctaacctaaaaatgctgcggcaaacgcagctttttcatcaacaaatttcttcttctcttgggtaatatagatctctcggcaatttgcagcttgttccccacgagcttcctctgttcatcatcgtcctcgagcttcctctgttcatcaagctcctctgttcttgaacatcgacgaaatcagaggctgtggcagatgcgaacaaagcaattgagttggatcattcattaatcaaagcttacctaagaaaagggttacaactcaagtgttttgagaaagaagatggctaaagatctcggagatagatttatctatgaagttgtggatgaagtgaataact

SEQ ID NO: 115703 - DNA, 310 bp, Arabidopsis thaliana columbia
caattcctccagaaaattcttccagatgtatcatgtgttgatgatcaaagtaggatgaaaatgatgtaactaaagagaaacattttcataggggaaggaagagagagcggttcaatggacagagacagaaagagggtgaaaatggagaaggaagatgacgaagaagaaaagatggagaagttgtacacagtgcttaaaaacgcaagggaaatgcggaaatatgtcaacagctccatggagaagaagagacaggaagaagaagaaagagcaagggttcgtagattcccttcgtttcagccagaagatttca

SEQ ID NO: 115704 - DNA, 331 bp, Arabidopsis thaliana columbia
ggaaggaaggaagagtgagagatgatgggtatggcgaggaagataagcaaagaggaagttgtagagaagcttaaggacgacggagattttgatcgtctccgtctcaaaatcattcgccgcctcaaagaaaacgaggatttacggaataatatgatatcagttgtcaaggagtcaacatctttgaaacgacatggtgctcaaaatatgaaaaccaggcaactctctgatgcgatattcgaagaagtcgggagcaagatgctaagccagctctcagatggtttatgggggataataagatcagaagacgggatgaagaatgaaatcagagaaa

SEQ ID NO: 115705 - DNA, 309 bp, Arabidopsis thaliana columbia
ttccagcgcaacgccgagcttgattcggagaagcgtttataccccggaggcaagttctttgacccgctaggtttagcggctgacccggagaagactgctcaacttcagttagctggaactcgatgtggccgatcactaacacctcgatccatatcaatgtcgagatcgagaaaggtaatggctgccccaagtaggacgatccatctacaagctccaccttgccaacgtcatgccatgtaacgccggtaagccattcgacggaaagagcgccgagagtatcgatgtgttagtgattcggtacatcgagtt

SEQ ID NO: 115706 - DNA, 340 bp, Arabidopsis thaliana columbia
agtgagagaagaaagatagagaaaaaaaatgggaggcaaaggtgtgatgatggtggcgatactttgcctttgggcactctctgcaacatctgaagcagtaacagaggctgagccaggtttgatgatgaacttctacaaggacacgtgtcctcaggccgaagacatcgtccgtgaacaagtcaaactcctctacaaacgccacaagaacaccgctttctcttggctccgtaacatcttccatgactgcgccgttgagtcatgtgatgcgtcgcttttgctggattcgacaagaagagagctaggagagaaagaacacgacaggagcttcggacttagaaac

SEQ ID NO: 115707 - DNA, 348 bp, Arabidopsis thaliana columbia
cggctcgagctcgagccgattctctcaatcttatgatcgttaagggtgaaacaaagattactaaaaacagaggaaaaacagagtaaagattactcaagagtcaagagctggtttgatcttaatgggaaacatctgtcctggctctggatcttccactgttaaccacgaacctgtctccaccaaacccctcccagtgagacgtgtgcagaccccagagaataaaaagtttcctccgccgctggtggcgatgccggcgttacatcccacgtttccactgccggaaacaggacataaactgagacccgccgctaccccgcctcgtgaaaaaccgcaacataggacgacgag

SEQ ID NO: 115708 - DNA, 323 bp, Arabidopsis thaliana columbia
ttcttctctctacacctcttaacatctcccatattcgaataatagctcaaagttccgatttttataatttaccttcataacaaacaactgattcacttacttatcagccggtgactgtttttgggtctgcttcaattgcagtggaagagatggtgttcttgagttggggccgtccatcttccgagcaacagcaacaagtcatcaacaaaacaggaaccttcaattatgacaacaagtacagaggagtttcgtctaggtctattgctaaacttaaggaagattcagagattgataaagatggattcttgatcaatcatgctcgt

SEQ ID NO: 115709 - DNA, 345 bp, Arabidopsis thaliana columbia
tcctaatgtacttaagttagaagggttgatcactgcctctgtttcatcttctctgtacttggtttttgagtatatggatcatgatctcgtcggacttgcttccatacctggtatcaagttttcagagcctcaggttaaatgttatatgcaacaacttctaagcgggcttcatcattgtcacagtcgtggtgttctgcatcgtgatataaagggctctaatctactgattgatagtaatggagtcttgaagattgcagattttgggttagcaacgtttttcgatccacagaactgcgttccattaactagccgtgttgtgactctttggtatcgacccccagagct

SEQ ID NO: 115710 - DNA, 341 bp, Arabidopsis thaliana columbia
gtcgcgtacaatgggttctgcattcgatccccttgtcacggccactgaggatctcgccgccgtcaactcggcgccgccactctcaaacctcacgcaagaagaactcaagaaaatcgccgcttataaagccgtcgaattcgtcgaatctggaatggttatcggtctcggcactggctccaccgcgaaacacgccgtggctcgtatcagcgagcttctccgagaaggaaaactcaaggatataatcggaatccctacttcaaccacaacgcatgagcaagcggtgtctctagggataccattatccgatctagattcgcatccggtggtggatctatcaatcg

SEQ ID NO: 115711 - DNA, 352 bp, Arabidopsis thaliana columbia
gaagattgtcaagaaatgagctggcttaacacgacgttgttttgggctatgttaccagcgggtactccgaagaccgtccttctaggtagacctacggatccagtattctttaagagtaaatcggattacgtcaaaaagccaatccccaaagaaggactggagaagatttggaagacaatgttgaaattcaacaatattgtgtggctgcacttcaacccttacggtggaatgatggatcggattccgtcaaacgccacagcgtttcctcaccggaaaggaaacttgttcaaggttcaatactataccacatggttggacccaaacgccacagagagtaacctgagtattatga

SEQ ID NO: 115712 - DNA, 288 bp, Arabidopsis thaliana columbia
aaatcatattgagaacaaatagatttggttatatatggcttttacgcacgtttgtttatggacgttagtcgccttcgtgctgacgtggacggtgttctaccttaccaacatgaagaagaaggcgacggatttggctgatacggtggctgaggatcaaaaagacggtgctgctgacgtcattatcgtcggggctggtgtaggtggttcggctctcgcatatgctcttgctaagtgtgcgcctggaagaaggaacggtgaagtctttactagaagaaaaaggagtggtca

SEQ ID NO: 115713 - DNA, 264 bp, Arabidopsis thaliana columbia
tatcaagctacctgatataaactcatagtcttgagcttgtcgagggagaaggtgataagctcgataacccatattgtttctgtctctgatatctattattttcttaccaacaatgtaacgtataagcggagaaccacaagacacagaagcagcaatatgtaagacagtgtttatatcaagctacctgaggtgtgacaccaagacttcagtagaagtggactctaaataggctgacagaaatgtaccacacatagggcattctga

SEQ ID NO: 115714 - DNA, 152 bp, Arabidopsis thaliana columbia
actttaacacccctcaagctctacggtttgaggaactactggccaacctactaaatgaacaacatcagatagcgaaggaactatttgaacagctgaagatgaagaaaccttcagccagacagcagaaggaggtagagaaggttaaaccccag

SEQ ID NO: 115715 - DNA, 276 bp, Arabidopsis thaliana columbia
gatgcaatgaaacagtcggtgcagtctgatctccggcatcaagtttccttactagttcgtccaatgcaacaggctcttgatgctgcgttccaacactacgaatcggacttgcagagaagaaccgctaagattacatagagaacgttttgtacttggaaagaaagagatttccttcgacaaaaaattaaacattggactgaacatttagattttgtagtgtaatagataagattcttaaagaacttgagtgagaagcatcattagcgggatttggcc

SEQ ID NO: 115716 - DNA, 409 bp, Arabidopsis thaliana columbia
atgatggagaacgttgagaatgtagcgaaagctgtggctaggcttgcgaggaaatgcaacgatcccaagttgaagtgctttgagaattgttttagtgatatgatgaagactggagctgacccttatggttggcagtttgggtggaagaaaatggataagaaagctaagaaaatggaacgtttcatatcatctaatgctagtctctaccaggagactgagattcttgctgatcttgaacagactttcaagagaatgaagagcaatgaatctgctactgacaatcttttggagtatcagaaaaaagttacatggaaaagacacgaagtgaagaatctgcgggatgtgtctctttggaaccgtacttatgactataccgtcattctcttggttagatcagttttcacaatcc

SEQ ID NO: 115717 - DNA, 344 bp, Arabidopsis thaliana columbia
tcttaacatcgtaggtatcgccaaccataaaaagaggaagttctagcttagcttcaacaagggacttgagatcaacaactggatacccatctcggagaagcagtaccagtgtttgaaaacctgtttcatttatcacttagcactgaagtagatttctgttggaatgttctaccaattctgcttgagaaatctccaaatctaaagactctcaccattcaggctttgcattatactactaatcactatggggatgagaacactgtttgcgattgtttggaggtgtattctttcttatcgtcctgccatattgaggttctaaagataacccagttcaagggagatat

SEQ ID NO: 115718 - DNA, 335 bp, Arabidopsis thaliana columbia
ttcttctcatctctcgcccagaggtgttgttgccatggctggatccggaaagtttttcgttggaggaaactggaagtgtaacgggactaaggactccatcgccaagcttatctccgatctcaacagtgcaaccttggaagcagatgtagatgttgttgtgtcacctccatttgtctacatcgaccaggtcaaatcctcgttgacagaccgtattgacatatcaggtcagaactcttgggttgggaaaggtggagccttcactggtgaaatcagcgtggaacagctcaaagaccttggctgcaagtgggtcattcttgggcattccgaacggagac

SEQ ID NO: 115719 - DNA, 249 bp, Arabidopsis thaliana columbia
tgaagatggaggagtaattgttatatgcaacatatgtatcattgttaaactggagtctcacatacagtctctttcgggttatttatctttgaaggctcttattgtgtcttggctagaacaagcgcttacctatgagatatgggttggtaccgaggggatatctacatcgaaaatctactactcagatcttccctgggtgatcagcaaggtcatgttttataagcagacatacttggcaaagaaccgttt

SEQ ID NO: 115720 - DNA, 385 bp, Arabidopsis thaliana columbia
ggtttgtgagggtgtatctgaaaaaaaataaagtttggttgattcaaaaaatattcttatcctcggagttgcgatccaacgattggtttggaacgttccgaggagtctgttgaagatcctcgattctaaaaagcttccagaggacaataatttgtgacggagtaactctcgaggacatggaatgcaacaaggatgaagcgaaaagggcaatggatattgctgagaggaagatgacagagaaggattacactggggcgaaaaagtttgctaacaaggctcaaaacttgtttcccgagttggatggtctgaaacaattgtttgtggcaatcaatgtttatatctcgggagagaaaacattcgccggagaagctgattggtatggtgt

SEQ ID NO: 115721 - DNA, 293 bp, Arabidopsis thaliana columbia
gctgccatgtcatcatggatcacaccaaactggtaccaccacaacttacggtactactatcactggtggtgttcaccacatagaaaaagagtgtgactcaaacaagttatcgataatctagcaggtcaccatgggtcacatcagactgggactaacacggcttagggtactaacactaatgtcgttcatcatgacaaaaatggtatagcatcatagattaatgagcaactgccacgtcatcatggaactcacataactgttaccaccacatgttatggtaatactggcgttgt

SEQ ID NO: 115722 - DNA, 362 bp, Arabidopsis thaliana columbia
atcgaaccatcatcccggttcgattaggctaggtggtaccggtagtgttagaggaaattcagtaacaagtccgagcggtgactcggtacgagcagaccggtgggcttttcttagaaacccatcgtttctctggaggaatacgacgccggttccttcgccgagagttgaagtcaataataaggacggtgaaggaacatcgtcagttcaacatatcggtacagttggttcaactagcggttcccttaggctaccggtttagtgttcggtgatgttttgtgcattgttcataaacacgcaatagattttacgtaattctttaattttgtttgtctttttctgtaagatatttaaatcgacaatcc

SEQ ID NO: 115723 - DNA, 197 bp, Arabidopsis thaliana columbia
ggaagatacaaatcatacaatcaccaatcagaaaaagcagaaccgtgactctgatgttctactatttcagtagcaactgtactgatccaccccaatgtattcacttactgtatatccacctatccaaaatttattcgtttgtatccattactttgtatcacgattcgaacacacctctctttttttttccccttttc

SEQ ID NO: 115724 - DNA, 361 bp, Arabidopsis thaliana columbia
  unsure (1)..(361): unsure at all n locations
caaaccaagacaatatttgatcaatttatcaaattctctcaacccctagtctaaacacaaaaatgaactccaatagtttcttaatctcagcagccttaatcttctctctactatcatcaaattctccaacatcgattcttgctcaaatcaatacaccatgttcaccatctatgctctctagcgttacaggttgcacgagttttctaacgggaggtggtagttttccgacctcagattgttgtggggctcttaaatcgttaaccggaaccggtatggactgtttgtgtctgatagtaaccgcaggtgttccaatcagtattcctataaaccgaactttagccatctctctcnctcgtgcatg

SEQ ID NO: 115725 - DNA, 170 bp, Arabidopsis thaliana columbia
ctcgagccgaatcggctcgagcaatgtttcgtttcatgtaaaactttgaacgtctgaggcataagacatagtataatccctgatgaataggtgttctaggatgtttccgttcctgttatctctttctttctagtgacaagtcaaacttcgtcttaaaacatgtagcaaac

SEQ ID NO: 115726 - DNA, 399 bp, Arabidopsis thaliana columbia
  unsure (1)..(399): unsure at all n locations
agagaagttgggagccgattcactgagctccctagcattgctgtggaacgtggaagcgcaagcatgtttgaaggaataggttctcgatccggtggttcctttggaggaggcatgagggatcgtggttcaagctttggtggtcgttcaggcggtggtggttatggtggcagcagtggtggttatggtggtgggcgttcaggcggatcaagcaaccgttattctggtgattctgaccgttctggttttgggagcttcggtatgcgttctcctgagggatatggttcggatcgttcatctcagtcaggtggaaggagcagctttggtggtggtcgttcaagcggatcatcaaacaatcgttcctctggtttcggngactttggctctgaccgttcttctcag

SEQ ID NO: 115727 - DNA, 271 bp, Arabidopsis thaliana columbia
ctctttttatctttggttgtgcgatcacctttctctttcaatctccaacgattttactgctgagatatttggcgggaaattgtctgcgaggggtgcgaacggtttgattatggggaaacccaggggtatctacagcgataacgacatcaataaccctatcactcgttcttctcgagctggtctccatttcccagttcgcatggtgcatcttctgttaacgccaatgtccactgcgcatcgcagggttcgagcaactgcagctgtttacaca

SEQ ID NO: 115728 - DNA, 386 bp, Arabidopsis thaliana columbia
agaaaaagaagagagaatgctctcagtctcagcctctcctcaccaccactaaccccagaagaatcctcacagacagagagagagagagagaatcagaatgggtttgatatcagcgaaagagacgaagaacaacactagaggaatgggtttgctcttagtcttcttccccgaccaccacaacaacaacgacgactctccttcttcttcttcttcttctccggcaacaacaactctcttccgctccagatcttctcgtcttctcctctccaaagctcaatccacaatctcaatctgcatcctcctcctcttcctcactctcttcctcttcactctctccaccttcgaaccttcctctggctttcccgccgtttcttcttctcgtcctc

SEQ ID NO: 115729 - DNA, 330 bp, Arabidopsis thaliana columbia
ttcttcccacgctgtgtgaccctaggagggcgacgaggccgggaagaactcactgtgtcaagctggtccatcgtttgtaccctgaggtggacccgtccttaaacccggaccacgtccctcacatgctacacaagtgtcctgactcgatccctgacccaaaggcggtccagtacgtgcgtaacgaccgtggcacccccatggtgctagacaacaattactaccgtaacatcctagacaacaagggtttgctccttgtggaccatcagctcgcacacgacaaacgaaccagaccaatcgttaagaagatggctaaggaccaggcctacttct

SEQ ID NO: 115730 - DNA, 417 bp, Arabidopsis thaliana columbia
  unsure (1)..(417): unsure at all n locations
ggagaatacgtgtacgacggcctcctatgtggcggaggagttgtcaccggagctggagctggagccggagtcgtcgttcccaccaaaatctcaaccacatcaacatcccacaagaaagaatccaatacatgagaagtgtcatgcgtgacagagttacgccatggaggaagtccaccgttggctcgaagcaagtttccgtatctagtcttgagcttcattttggaaccttctctcaccggttcccactctacggaggagtcgagtcgagccggtttagacaagaccactttacgtccagtggctccgagcaagaaccgctcattcgaagcggtgaggtagttaccgtagcagctccttaaacggatcacttcanaggaaccacgaaccggctcgacaatccatctagctctcttgtcg

SEQ ID NO: 115731 - DNA, 386 bp, Arabidopsis thaliana columbia
aaaaaacagagcattttttttggtcaagagcaagaaaaaacagagcatacttttgcaaaaagcagagcttggagcgctttcttgtcatctaaaattcaaaggcagagacgatgggagatgtagttttgttcatagatgaaacatatttgaaatcgagttttaatcgctgtagaatctgtcacgaagaagaagctgagagctactttgaagctccttgttcttgttcaggaaccatcaagttcgctcacagagattgcatacaacgatggtgtgatgagaaaggaaacacaatttgtgaaatttgtctccagttttcggttattttgttgataaagcatgcatttgatgcggtttatggaactgaagagtatccctatacaatattc

SEQ ID NO: 115732 - DNA, 390 bp, Arabidopsis thaliana columbia
caagaggaaacagagatgagcagagacggcggagatgtaattgagacggcggttaagagtcttggcaaaggtttcgatttgacggcggatttccggttgaaatactgtaaagacggcgacggctccgccggagatgacagattggttgtgcttgaccaaactcaaaacagagaattgcatattcctggtttcggtgtttttcaaaatgtctccgccgatataaactgcgacaaaggagaacgaactcgattccgttccgacattcttgacttcaacaagatgtcggagtattttaaccagaggtcgtcggtgaccggaaaaataccgtcgggaaatttcaacgcgacgttcgggtttcaaagcgggtcatgggcgacagacgccgcaaac

SEQ ID NO: 115733 - DNA, 290 bp, Arabidopsis thaliana columbia
tgaactcatcagaagctgaatcggagaagaagaattaacgatgacggcgacgaacaagcaggtggtattgaaaaactacgtgagtggtttccctaaggaatccgatttcgatttcaaaaccaccaccgtcgaatttaaacttccgggagggtctaactcagttctggtgaacaatctctacttgtcatgcgatccttacatgaggattcgcatggggaaacctgatccttccactgctgctcttgctcaagcttacgctcccggcaagccaatctttgggtatggagtgt

SEQ ID NO: 115734 - DNA, 319 bp, Arabidopsis thaliana columbia
ctctttcttgtatttattttcctcccaaaaaacatctttaagagtcctcatggcgatgtctttatcaggagctgttctcagtggcatgggttcttctttccacaacgtaggagcaaagcagagtggtgttggtaccgtcagagttggccggaagagtgagctcgtcgtcgttgctcagcgcaagaagtcgttgatatacgccgttaaaagtgacggcaacatcctcgatgacctcaacgaagccacaaagaaagcttctgatttcgtgacggataagacgaaggaggccttggcggatggcgagaaaacaaaagactac

SEQ ID NO: 115735 - DNA, 334 bp, Arabidopsis thaliana columbia
ggctcgagaaaaacgccaaataaatggttttgatctcgtgaagccaaatcgccattagtcaccaccttaaatgactcacctagtatatatatatatgcaccatatgagtttgatcaatctcattcaatacaatggctgaagaaaagatcaagaagagcttgcttgctgcggacgacagcgacgatgagtactcaagaggtgatacagtttcagatcagacagaactgagttcgattcttgataaacttagtctagaacctaagacggagaaaaagaaactcttggtcttgagtctaagtggtcttcttcttcacagagtccacaaaaaagagtt

SEQ ID NO: 115736 - DNA, 396 bp, Arabidopsis thaliana columbia
  unsure (1)..(396): unsure at all n locations
cagttcttcccggaagcaaatgaagtcaaatttgctcaaaagacagtctttggaggaacttacttcaagttggactatctaacaaaaccatctctttttgaggattttggtttctttgagagagtaaaaatggcagatcgagtgaagccagaagacgaactgtttcttgtcgcatacccgtattttaatgtcaacgagatgcttgtagtggaagagctctacaaggaagctgttgtgaacactgaccgaaaactaatcatcttcaatggagaacttgaccgcatacgatcgggttgtatcctttttcttctcataaatgaaacaaagtagattcttttttccatttgcatcacaacttgagagccanatgagaaagctgaatcaagagagagagac

SEQ ID NO: 115737 - DNA, 264 bp, Arabidopsis thaliana columbia
gaagttgttaaattgtcgcctcatgctcgtgccattagagatgttgaagatgatgagcttcgaggtttctttcaaggaatgtcagcttggcagtttatcttagtagttactgcaagttcagttggagaagagctcttctatcgtgctgcgtttcagggtgcactagctgatatattcctaaggggcacagatcttatctcggattctcgaggaatggttgctttgactggactcttgccaccatttgtaccatttgctcaagta

SEQ ID NO: 115738 - DNA, 278 bp, Arabidopsis thaliana columbia
attcccgatcagatctcaacgacgacgagccatggcttcaactttcagcggcgatgaaactgctcctttcttcggattccttggcgctgccgccgctctcgttttctcctgtatgggagcagcgtacgggacagcgaagagcggggttggtgtagcgtcgatgggtgtgatgagaccagagcttgtgatgaaatcgattgttcctgttgttatggctggagttttaggtatttatggtttgatcattgctgttatcatcagtaccggaatcaacccta

SEQ ID NO: 115739 - DNA, 258 bp, Arabidopsis thaliana columbia
ccaaaacctcccaccgtgaaaccccatcctaaaccaccaaccgtcaaaccccatcctaaaccaccaaccgtcaaaccccaccctaagccacggagcgtcaaaccaccccaccctaaaccacccagcaaacctcacccccacccaaaacctcccatcgtaaagccaccaaccaagcctcctccgtccacccctaaacctcccaccaaacctcccccgtccacacctaaacctcccacgaccaagcctcctccgtctact

SEQ ID NO: 115740 - DNA, 359 bp, Arabidopsis thaliana columbia
atcaatttgactgatttagtttctccagaaagcttgcttgttggtgtcatcccacacatcgtacagattgtcgcataccgtacggacacaaataccttagggaacttacgaaaagtttcaacaccacaggaagatttaacttggctgaaagttctgaaacagctgacacacagaaccaggaagctagaatttataatgaaatgttgatacatacttaaaagctactgcagctgtagctatactaaaataagatttcttcagggtttacttaccctgaaatgcaagaatacaagcataacaataatattactgtttttatatgcaccaatacctctctttaatatataaagctctacaac

SEQ ID NO: 115741 - DNA, 353 bp, Arabidopsis thaliana columbia
agcaaatccgagagcttagtgtgaagtgaagaagagtttcaatggcggcaattttttctctcttccttttcttcattctcttcatcgtctctcttctcatcatcttatctttcatcgtacggccaagatccgtcacgatgcccatcaagtttcgccacgtcttcatcaccggtggatcaagcgggatcggtctcgctctcgctcagcgtgccgtctccgaaggcgctaaagtctccatcctcgctcgttcaactgaaaagctcgccgatgccaaacgatccatccagctagctaccggtgtcgaggtcgccacgttctctgcggacgttcgcgattacgacgccgtttcgaaa

SEQ ID NO: 115742 - DNA, 378 bp, Arabidopsis thaliana columbia
ctctttatcagaaactcgatttctccatcgacgacatcgtcaagaacttaacttcagctaacgtgatcggaactggaagctccggtgtagtttacagagtcacaatcccgtccggtgaaactttagctgtgaagaaaatgtggtcaaaggaagaaaacagagcgtttaactcagagatcaacactcttggatcgattcgacataggaacataatccgtcttttgggttggtgttcgaatcggaatctgaagcttttgttctatgattatcttcctaacggaagtttaagctctctgcttcacggtgccggtaaaggaagtggaagagctgattgggaagcacgttacgacgtcgttttaggcgttgcacatgcactag

SEQ ID NO: 115743 - DNA, 410 bp, Arabidopsis thaliana columbia
cgtaccatgggctgcctgatgggccctttggcttggcaacagtcttcctcattgtacggatctgaccgtgtcaagtacttgggtccattctctggcgaatcaccgagctaccttaccggagagttccccggagactacggatgggacaccgccggactttcagctgaccccgagacattcgcaaggaaccgtgaactagaagttatccacagcaggtgggccatgctcggagccctaggctgcgtcttccctgagcttttggctagaaacggagtcaagttcggagaggcggtttggttcaaggccggttcacagatcttcagcgatggagggctcgattacttgggaaaccctagcttggttcacgctcagagcattttggccatttgggccacacaagttattttgat

SEQ ID NO: 115744 - DNA, 293 bp, Arabidopsis thaliana columbia
gttcttgagagtttctttggttggtactacgcttcttcatcagttgctgtcttgatcgctttcaccgtcattgtttacattcaagatcatctaggatggaaaatcgggtttggaatacccgcgattctcatgctgctcgcgggtttcttgtttgttttcgcgtctcctctctacgttaagcgcgatgtgagcaagagtctgttcactggtttagctcaagtggttgctgcagcttacgtgaagagaaacttaactttgccggatcatcatgactccagagattgttattaccg

SEQ ID NO: 115745 - DNA, 389 bp, Arabidopsis thaliana columbia
ggtttggatacatttgagacagttccagaggcggctccagcagagttgaaagagcctccaatcgaagatcagcttgcgtttcatactttatggccggaatctcataaactctatggtcatggtaatgaactattttctctctgctctgaccacaagggaaaccttgttgcttcatcgtgtaaggctcaatctgcatccatggcagagatatggctatgggaggttgggacatggaaagctgttggtcgtttgcaatctcacagcttgacggtgacgcacttggagttctcttatgatgacactctgctcttgtctgtctcaagagatcgtcacttctccgttttctctatccaaaggacagacaatggtgaggttagtcacaaactcat

SEQ ID NO: 115746 - DNA, 261 bp, Arabidopsis thaliana columbia
gatcattaacgatcgtgagactggaagatcaaggggattcggattcgtcaccttcaaggatgagaaagccatgaaggatgcgattgagggaatgaacggacaagatctcgatggccgtagcatcactgttaacgaggctcagtcacgaggaagcggtggcggcggaggccaccgtggaggtggtggcggtggataccgcagcggcggtggtggaggttactccggtggaggtggtagctacggaggtggcggcggtagacg

SEQ ID NO: 115747 - DNA, 324 bp, Arabidopsis thaliana columbia
ttcaaaagtaaaacaagacaaacaaaaaatacacttaaccatttatttttctctcatgaagaataatactcaacctcaatcatctttcaagaaactttgccggaaactatcaccaaagagggaagattcagccggagagatacaacaacataacagtagcaatggtgaggacaagaacagagagttagaggctgttttttcttacatggatgcaaacagagacggtagaatctcaccagaagagcttcaaaagagtttcatgacattgggagaacaattgtctgatgaagaagccgtagctgctgttagattgtctgatacgga

SEQ ID NO: 115748 - DNA, 333 bp, Arabidopsis thaliana columbia
gttctagatcgcgagcggccgccctttttttttttttttttgaaacgaaacaatttgtgaaattgataactaaaaccaaatgcgtttatcttccttgtcacagatgaggctcgtagagagttctctaaccttcgtcgtgctttcgatgaggttaacacacagctccagaccaaatttagtcaggaacctgaacctatagattgggattactataggaagggtattggagctggcattgttgacaagtacaaggaagcttatgacagcattgagattccaaagtacgttgacaaagttactcctgaatacaagccaaagtttgatgctttgttg

SEQ ID NO: 115749 - DNA, 264 bp, Arabidopsis thaliana columbia
cggatttgtataaaccaagatctccaaagattctacgaggtccaataagtccgttaattggttcttccttgtgggcgctatagcccctattcttgtatggttagcttcaaggatgtttcctagacaagagtggatcaagcttataaacatgccggttcttataagcgcgacaagctcgatgccgcccgcaacagccgtgaactacacaacatgggttcttgctggattcttatccggatttgttgtgttgacgtacatgctaaa

SEQ ID NO: 115750 - DNA, 130 bp, Arabidopsis thaliana columbia
agagaagtgagatatcaccaagattcagtagggggtgaacagttttccagtttctaagtatgttaccgcctctttggcgtggatctgaataaattttggttcttttcaggggctttctggcttcatttct

SEQ ID NO: 115751 - DNA, 324 bp, Arabidopsis thaliana columbia
ccttggaagcggccgtgtgacaatgacttcagatgccgcgggggaaagcttgacggccttaccggcgaaggcaggggatgagagagccattgttgaggcggcatctgaagtccttggaagcggccgtgtgacaatgaggaagactgttgccaagccaaagggcccatcatgcagcccatggtacggatctgaccgtgtcaagtacttgggtccattctctggcgaatcaccgagctaccttaccggagagttccccggagactacggatgggacaccgccggactttcagctgaccccgagacattcgcaaggaaccgtgaact

SEQ ID NO: 115752 - DNA, 544 bp, Arabidopsis thaliana columbia
agaagagcttgacggggcatgaccgcgtacgtaagcttggatcctctagagcggccgctcttttttttgttttttttctttttttttttttttttttttttttttttttttttcccaaaaaagctttttttttgggaaccaataataacaccagtttttggatggaaatttttttcccccaaaaaaaaacccaacggggtgggggggtttttcccaaaattttttttaatccaccacctttatttttttgggccgcggggggggcccgggaatttccggcccgggcctggagggggacccacttttccttatgggggggggattaaaagctgggggaaacaagggccaaagtggttcccgggggaaaatggttttccgttaaaattcccaccaaaaaaccaaccgggagccataaggggaaagcccggggggccctaaggaggggccaaccccccttaattggggtgggcccactggccggtttccaagcgggaaaaccggcgggcgccctggcttaaagaatcggcccaccgccggggggggg

SEQ ID NO: 115753 - DNA, 582 bp, Arabidopsis thaliana columbia
  unsure (1)..(582): unsure at all n locations
nnnnnnnnnnnnnnnnnnnnnnnnnnnnnnnnnnnnnnnnnnnnnnnnnnnnnnnnnnnnnnnnnnnnnnnnnnnnnnnnnnnnccacgcgtccgagaaaattagagttgttgtatctgcaaaaattttggtagagacacgcgaacccgtttggattttgttatggtgtaaagaaatttcaatcaaaaaactgttgtaataattgttaccaaaaagaaatgcttttctggaaaaaaaaaaaaaattttttttaaaaaaaaaaattaaaattttttaaaaaaaagggggggccgttttaaagaatcaaagtttacttccgcgggctggcaacgtattantttttttttggtggaacctaatttaatttaatgggcggccgttttacaacgtgggaatgggaaaaaccttgcggttcccaaattaattggcttggaagaaaatccccttttcccaggttggggtattagcaaaaaggccgcccccaatggcctttccaaacattggcccatcttaattgggaaagggaaccccccttgtagcggcaattaaaccccggcggttgtggtggtaacgcccaccttg

SEQ ID NO: 115754 - DNA, 262 bp, Arabidopsis thaliana columbia
gggcacatttggtcccaccaaaaaaaaattttgggtttttttaccggtgtttttttccccgggcgttcaaacccgggggggaaaaaaaagtttttataacccccctttttaggtgcgtgcccaaacagaggaactttattcctcgggtggtggaaggggggggggaaaaaaaaataaaaatgacatttcctcttcaaaaacacaggggccggtggggtgcccttccaagcgctggaaagaactatttttttaaggggggggg

SEQ ID NO: 115755 - DNA, 535 bp, Arabidopsis thaliana columbia
acgtcgcatgcacgcgtacgtaagcttggatcctctagagcggccgcccttttttttttttttttccttttttttttttttttttttttttttttttttttttttttttttttttttttttttttttttaaaaaaggaacccccaaaaactttattttttatacaaaacccccttttttgttttttacaaaaaaaaaaacaaaacgggttaaatttttcaacactggggacccccccaaagggaaacaaaaaaaaaagtttttcggggggggaaaaacccttttttcccttaaaagctaaaaacgggaaaaaaaaaagggaaacccaacccttaccccggttttttttgagctttgtttgcaggaatatgtccggcctaaaaaaaaacactatcgttatggggggcccctgccatactttaagcggccaaaaggccccttccgggtaatgtttaaaaaaaaatgcaaaaaaacccctgttttgagtttttaatatcccacccccaattccaaaaagggcccccattaaaaggggg

SEQ ID NO: 115756 - DNA, 511 bp, Arabidopsis thaliana columbia
  unsure (1)..(511): unsure at all n locations
atgatactccagctctctacgactcactatttggaaagctggtcacgcctgcaggtaccggtccggaattcccgggtcgacccacgcgtccgcccacgcgtccggaaagcggctgcggctgcggctgctgcttctggatctaacaacgcctgattgaagaaatcacactccgatatcaaattcaatggagatcacagttttgaaattcatttgatggtaataaagattctatagaagacagaaaacattatgtaaacagttgttttttttttgtcaaacatttttgttgtcagttaaaaaaaaaaaaaaaaaaaaaaaaaaaaaaaaaaaaaaaaaaaaaaagggggagcgatataaaggatacaagcttacgtacgcgtgcatgcaacgncatagctcttctatgatgaacctggggggggtccattggaagcaactttactacggggagactgggaaaaccttgtttttttttatcttaggcgccttgaatcacatccccggttggcca

SEQ ID NO: 115757 - DNA, 544 bp, Arabidopsis thaliana columbia
  unsure (1)..(544): unsure at all n locations
agctctctacgactcactattgggaaagctggtcacgcctgcaggtaccggtccggaattcccgggtcgacccacgcgtccgcccacgcgtccggacgaggaagacaagagatccatacatcattgtcaaagctagggatttgattaagcttctttccagaagtgtccctgctcctcaggcaattaagattctcgaagatgaggtgcaatgtgatatcatcaagatcggtaacttggttagaaataaggaaagatttgttaaaagaaggcagcggcttgtgggtcctaattcttctaccttgaaggcgctggaaatattaaccaactgttacattctagttcagggaagtactgtagccgctatgggtccatttaaaggtctcaaacagctcagaaggattgtggaagactgcgtacagaatataatgcatcctgtataccatataaagactctcatgatgaaaaaagaactggagaaggatccagctcttgcaaatganagctgggataggtttcttccacattcaggaagaaaaatgttaag

SEQ ID NO: 115758 - DNA, 552 bp, Arabidopsis thaliana columbia
  unsure (1)..(552): unsure at all n locations
aggtgaactnnnnnnnnnnnnnnnnnnnnnnnnnnnnnnnnnnnnnnnnnnnnnnnnnnnnnnnnnnnnnnnctttttttgttttttttttttttttttttttttttttttttttttttttttttttttttttttttttttttaggtccaaaaacatagattaaaaaacaaaagggggggttacagcctccattacatgtttgaacccccagcattaaaaattatttccaaaatgggaaaccgaaaatcatgtggccaatgctaaaaggggctaataattcacaagggatttgattggctccaaaattttggtcttggggggcctgaaaaaaggggcgaaccctagagggaaaggggggtccaggccacaaactttttttacaggggcttttaacctaaaaaagcaacgctcaactttagttggagcgattttggccccaaagccttttttaaaaggagcttcatgggtaaaaaaaaggcggccaggctttttcactgagggctaaacaatttccttatcccaagggatcaaagtcttgaaaattattaatt

SEQ ID NO: 115759 - DNA, 557 bp, Arabidopsis thaliana columbia
  unsure (1)..(557): unsure at all n locations
aggggactnnnnnnnnnnnnnnnnnnnnnnnnnnnnnnnnnnnnnnnnnnnnnnnnnnnnnnnnnnnnnnnctttttttgttttttttttttttttttttttgggctgccacccaaaaaatctaaaatttctagaagcaacaactgatgaaattcgagaagaacaatattcttacatataaaagatttaaagattatcccccttcacttaaaaaaaatactaaacacatgacctggtcaagaacaacacaagactcaggcaaacattggttgtgtgctttattcgaaactataataatatctgaagaaagtgacaagaagaccagaaaagagagaggtgaggtgaaaaacggttttggtgcatggtcctctctagcgagcgtccttggacaaaagaccttgcgcttcaactttccttgcgttgcgaagctcatcaactccatctcctctctcaaacacagctgctgcacccatccccgtcccaatgcacattgacactactccaaaacggcagtctttaccacggcgtttcatctcgtgcaacaatgtagcaacaca

SEQ ID NO: 115760 - DNA, 532 bp, Arabidopsis thaliana columbia
acggcgcatgaccgcgtacgtaagcttggatcctctagagcggccgtccttttttttttttttttctttttttttggcataatagttgagaacttaaatactactttgagtactttcactaatacatattgttagaatgaagcttcttcataacataaaactactttatttgttgtaatctttttaatacaaattttatttggagctaaactttattggtcacggtaaatatccaactaccagttgtagctttcttgccgcttaagctttacaaggagaaagaggagagccgcaaagacagtcattacccacaaacgcactggccgggaactttgttactggaagctttccacaaagatggttgtgactcacgttcaatgtctttagtccagccaccattgccggcaccttcccaaataccaagttccttgatatatctaaagttgtcagcgtctttgcaaacgttagcttccccatatcgaatcgtagtttgttacccgctgccttgaactccactagatactctgtttgg

SEQ ID NO: 115761 - DNA, 327 bp, Arabidopsis thaliana columbia
  unsure (1)..(327): unsure at all n locations
ttgtttaggactatagagacttgagtgctgccgcgtcgtagctgatcttaagcggcgtcttnttttttttttttttttttgaaatagaggccattttttatgaacttttaataaaggtgaaccctgaattggggaaaaaaacggggaggggggaaaaaaagggcttttccatttatggtgttttttaaaaccccggcgtaaaaaaattggggactccccagtttttttaccaaagggctcccccccccccattttaaaaccccaggggggggaaaatttttttttgggggggggggaaaaaaaaccctcccccgggtgaaaaaaaaa

SEQ ID NO: 115762 - DNA, 541 bp, Arabidopsis thaliana columbia
atagaagagctttgacgtcgcatgcacgcgtacgtaagcttggatcctctagagcggccgcccttttttttttttttttttttttttttttttttttttttttttttttggaaaacggaaaaatcgaaaagactatcattccttctatacattgaaaacattctctacccatgagagtccatttggacccaaacctaacaattccttcacacataaattgttcttgtttaaacactactaaacaacaacacacaaaatctcacaataaaacaatcaaccaaaccgctacaaacgctttaaatcaatttcttaccacattcaatgatttcacaagattagtttacatcactcactcagagctattggagttctcctctctactatcatcatcatgatcactctgtggctgcttctcttgatgctccaccgcattgttcgcttgttccgcattcgcgtttgcgtttccgcctcttgaataagccgagttcaaagcggctaacatcccgagattcgagtccggcatacttagtcctaagttctg

SEQ ID NO: 115763 - DNA, 557 bp, Arabidopsis thaliana columbia
atgatactccagctccctacgactcactattgggaaagctggcacgcctgcaggtaccggtccggaattcccgggtcgacccacgcgtccgttcagagaggcaatttgggtttatgaaaacagacatgatgcctgaaaaccaaggtggtcgtgatagactttcaagtatgccaaagagttcctggacatctgaaagttaccagctgaagccacaatctagtttttctgggtcgcacccctctggtagccctaacgcaagaaacactacaaatggtagtcagtgggaaagcagtttattttccagctcaatgtctgatttatttagtagaaagctgcggctacagggaagtgatatgctatccactatgtctgcaaacacagttgttacccaccgtgaagaagaaccgtctgaatctttggaagagattgaggcacaaactattggaaatcttctcccagatgaagatgatctttttgcagaagtgacaggtgaggttgggcgtaaatctcgtgctaatacaggagatgagttggatgagtttgacctcttcagcagt

SEQ ID NO: 115764 - DNA, 575 bp, Arabidopsis thaliana columbia
  unsure (1)..(575): unsure at all n locations
atgatacgtcnnnnnnnnnnnnnnnnnnnnnnnnnnnnnnnnnnnnnnnnnnnnnnnnnnnnnnnnnnnnnnnnnnnnnnnccacgcgtccgcccacgcgtccgctagttctagatcgcgagcggccccccttttttttttttttttttttgtgtcctttcttcaactttgaaatcgctttcgtaattcttaatggcttttgaataagcatcaatcaaaacgctgtatatcttgttagggtcgtttgctgttttgtctctttttttgttttgtaatttataaaaaaatttattctcaaaaaaaaaaaaaaaaaaaaaaaaaaaaaaaaaaaaaaaaaaaaaaaaaaaaaaaaaaaaaaaaaaaaaaaaaaaaaaaaaaaaagggggggcccttttaaaggacccaagtttacttccccgggcttgcaaagtaaaaattttttttaggggcccccaaaattaaatccacgggccgcggtttaacaccggcggaactggaaaaaccctggggttccccaattaaatcccctggaaacaaatccccttttccccagttggggaaaaaccaaaaagccc

SEQ ID NO: 115765 - DNA, 421 bp, Arabidopsis thaliana columbia
  unsure (1)..(421): unsure at all n locations
gcctgcaggaacccggnccggaatacccgggtcgatccacgcgtgcgggaaagcgcccgccaaaaaacacgacggaggagcctggagtgctaacgccgaaacgcaagccgacagatgccctgaacagggcaagtctcagtctctcacaacctctcgctgcgtaaccacaacggaaagtctggccgacaacaataaccacgatttttttttttcaggggtgggaccacggacgcccagccagcatgcaagggccccaacacagcaggacaaagacagaacggagaacaacgcgaagaggagagggctaggggagacgcgctccgagcgcctcgccgccatgatgcggccggccactcggctagaaagaacgcgagcaacgttcacgtacccagagagggtggaggagaggcgagacgcagac

SEQ ID NO: 115766 - DNA, 510 bp, Arabidopsis thaliana columbia
ttgacgtcgcatgcacgcgtacgtaagcttggatcctctagagcggccgccctttttttttttttttttttttttttttttttttttttttttttttttttttttttttttttttttttttttttttaaaggaacccaaccttgggcccgaccattataaaaacccttatcccccccccccccaaaaattcctattaataaccaatggggggaagttaaacccaaaactccaaaaacccatttccttttaaaaaaattttggccaaaaaaaaaggccttttggtggggaaacggaaattaaaaaagggttcgtctttccggaaaaaaagcccaccgtttcaaatctcggtttttcggtttccaacctccttagggttatagggaataaaataaaaaagggggtctttttaacaagcctttttttttttttttttttggaaaacttggtttcttttttcggcggttttttttccaccactttttcccttttccggggtaaagccggcggtt

SEQ ID NO: 115767 - DNA, 551 bp, Arabidopsis thaliana columbia
  unsure (1)..(551): unsure at all n locations
nnnnnnnnnnnnnnnnnnnnnnnnnnnnnnnnnnnnnnnnnnnnnnnnnnnnnnnnnnnnnnnnnnnnnnnctttttttggttttttttttagataatgaagcttgcatttcttgaatcattgcgaacatttacccatacgtaatatgccaaagcaagcagagccaaactccaaaaaataaataaagaagaattagaatcgaataagaagaaagaatgaatagtttgttgaatttgacagaagagctctttcccatctttcacatagaatgctttctgagtcttttaaataggctattcggatcgaatcatagggaagcagataatgatgatagggctttttcaatcataagaggaaatgctttatagagtcctctagaaactgatggctaggacaaaccatctccttcactttatctccattcttgtacatcttaaatgtcggaactttcctgatactctctgctttcgccaacgccatgctctcctccacatccaccataaagaaatgtactaatggataccgaagacataaagtgttgatgaatggag

SEQ ID NO: 115768 - DNA, 429 bp, Arabidopsis thaliana columbia
agagcggccgtctacggggggaaaaacccaggagggaaagaaaaaaaaagaaaagagaggaggagaggcccggcaaagacaaaacggggaggcaggcgacgccagggccggcgacaaacgagagggaaggggagagaagagacaggacacgaggaagagaaggttttttttttggggggggggacggaaccccgccgaagacgaggagacgcaggcgcgcgcgcgaggggagaggcccggaggaaggagacgaggaggcgccaagggcgagaaggagaagaggcaggcgcgaacagagaaacgaccgcgagagcgcgccagcgcggagaggcgacggacaaggagagaagcgagccggaagaagaaacccgcggggacgcaccacgccgacgccaccccgggacagaacgaaggcagcgggaaacaacg

SEQ ID NO: 115769 - DNA, 484 bp, Arabidopsis thaliana columbia
gattcgccagctcatactacgactcactatatggaaagctggcacgcctgcaggtaccggtccggaattcccgggtcgacccacgcgtccgcaacaatgtcacaaaaagtctgatcctttctctttagatttggcttcgagaaatggctcgcgatcggcgggaaggtctggagatcaaggtggtgaatccaccggcggcggcgacaaacaatgtggctgtagaaacgtctccggcgacggcgacgaggagacggagacaacaacaacgagcttcgttcgctgagtttagaccgtttaagctttggttaccatggcttgctccagctatcgtggtggctaacattgcccttttcgccatttcgatgtttattaacaatcgtcctaagaactcggcttattgcttagctaggtttcttgggagatttgctgttcagcctatgaaagagaatcctcttctgggtccttcttctttgacattggagac

SEQ ID NO: 115770 - DNA, 492 bp, Arabidopsis thaliana columbia
catacacgcgtacgtaagcttggatcctctagagcggccgtcctttgggtggggtaaatccttttaaacatagaaaaaggcttaccaactgggattttcaggctgtgaacatacataaatcgctacggtaatcactctgaaggggatgccacgggtgggacacgactgacatacgcgatggcataagatggagaactactacttattttttgggacgacataaacacatgtgtcgtgaattcttacggggcataaagcgatggacattggatgatcgattcgtaccttggggctaggggatggaggaaaacggggcgtaatctaaagagaaaaagctgacatcaggcagtagatggtgtgagtgtgtgtagtgccattaacgcagccgagattttgcaacgctccgtttggtggtcctacgggtaatcggccagggggttcagtctgatggaaaggtacgtgtagtgattcctataagggtggggtaaagat

SEQ ID NO: 115771 - DNA, 530 bp, Arabidopsis thaliana columbia
tacgactcacatattggagactgactgcctgcggtaccggtccggaattcccgggtctttccacgcgtgcgaaaatccctgatcattactctgctactgatcgggtgattgaatcgggttattgtgattcttttcgggttgattacgggtcggagtgtgtgattccgggggaggatagggttgattgtggattggatcagagcagtgtaagggaatcgttagtcgattgtgtgggatatgaatggggggtcgatgatggagaaactgggaggtcggcggatggagatgcaaggcttaaggataggagagtgaacagtggcgaaatatgcgggaagcgaaagtggtacaggagcagctacgcgtatcgcgtagtggggttaactgcgtagaagagccggacagcaaagatgctgaacagggcgtaaacgtccaatggttagttctttgaagggtgcgacaaaagaggcagggtgttagtgaaggataggagcagctagcagatccccagctgagttagaagcagggagatg

SEQ ID NO: 115772 - DNA, 546 bp, Arabidopsis thaliana columbia
  unsure (1)..(546): unsure at all n locations
nnnnnnnnnnnnnnnnnnnnnnnnnnnnnnnnnnnnnnnnnnnnnnnnnnnnnnnnnnnnnnctttttttggttttttttttttttttttttttttttttttttttttttttttttttttttttttttttttttttttttttttttttttggggggcaactttcccaaaaatcaaccaaaaagggtttttttttaaaaaaccggaccccttaaaaaaggcaaaaaccttgccctccaaaaaaaagggatttttttgcaaacccccttttggctttttcaaagagaaaaaacccccctcccaaaaaaaggggggggaacccctgggagacccccccccggttacctaaaccttgggggattggaaaccttttcaagggggaaagaacaaaaatccgtcttggcaacttttttggcgggaattcccagcttgaattccttttaaaaagccctcactattccccctggggccaaactatttaaacccaaattgttttggaaatgaaccccaggagtccccttaaagggatccactttggggaacccttt

SEQ ID NO: 115773 - DNA, 525 bp, Arabidopsis thaliana columbia
  unsure (1)..(525): unsure at all n locations
cccgcaggaaccgggccggaattcccggggcgatcaccgcggggcgaaaatcctcttgctgangagaagggacgagacggagggggagacgcagatgcggaagaaaagggacgcaacagaggggagaccagacggacgactatggggacgttagcacaattggctggatggttatacggccgcggcgggccggaaagttttttttttcgggggggggagagngacgccggaggacgaggccgcggcgcgcagccccccaccggggcgcgcggccgcgagacccccagcgggggaacgggcggggaggcgcagggcgggggggaaggggcggaaggaggacgagcggggagcgcgggcggcgagaggggggcggccaggagagaggggggcgaggaagagccgggggggaggggcggcgcggccgagagagggagagaggcgggggcaagcacggacggagcggcgcagcgaggtcgaggagggcggcggcgcggggaggtggcgcgggcgggctaggccgggggg

SEQ ID NO: 115774 - DNA, 549 bp, Arabidopsis thaliana columbia
gctctctacgactcactattgggaaagctggtccgcctgcaggtaccggtccggaattcccgggtcgacccacgcgtgcgcggagataaattccgtggtgctgcgtttggccttaccaaaatttgagatctcaattgaagaaagaaacatagcgaagaagaagacgatcaaggaattgaaattagattctgttatctctctatcatcttcaatttttttaatttgattgttttcaccaaaaaaacaaaaactatgaacacgacgttacgttacgatccgagacagatctcgaggcaaacgaaaccgtcagatacaccatcgtcttctccgtctcgtagtaaccggagacagcctttgcttcagagaagtctctcttctccgtcaccacgagcttcttgcggcggatctactcccgccgagttttgcggtggtacgacggcgagttgcgccgccgtgtggtgttgttgtccctgcggactcgttaacctactcgttctcgcgatctacaaagttcctaaaggaatctgccgtcgcgctatcagaagtcgc

SEQ ID NO: 115775 - DNA, 309 bp, Arabidopsis thaliana columbia
  unsure (1)..(309): unsure at all n locations
cgaaactagggcggcgggggggggggggggggcactcggggggcactcctgagggaccatctctgngcgcagcccccccccaccaaggcttgggttctctcttagaacggcggccccttcttcggttttatttttcaattataggatcagccaaaactattagaatgagacgctgatcacgcacacggccccacccactattgcgaatccgtcgccctctccaatgtatgggctctcgtgggacgacgcatcatttagattatcggaagatcctagctgagggacgaatgtcttttttggattatatta

SEQ ID NO: 115776 - DNA, 432 bp, Arabidopsis thaliana columbia
  unsure (1)..(432): unsure at all n locations
actcgcttaccatcatttggaagctggccctgcggcgccggattccggcacactcgggccgtgggatttcaagctgactcgcggatttcgccatagcgactcaagctcgaccttcagaagaattggttggactacacggggactgagtctggcacatcgggctcagaagtgtttcagacgtccgatcggtgaacgacggttagaggatgagtgtatcgagtgggacgctatgtctatcgtggagaagtgtgcgtcttattcctgggtcggncgtttgctaggaagaaattcccggttctatcagggagcttagtagaagagggtgtattgagctttgtgtgaatgtttcaagtggatgaagattcagaagaactactgtgcaaggaatgatatatacaatatgatgattaggcttcatgctaggcataattg

SEQ ID NO: 115777 - DNA, 564 bp, Arabidopsis thaliana columbia
atgatactccagctctctacgactcactattgggaaagctggtccgcctgcaggtaccggtccggaattcccgggtcgacccacgcgtccgatccgatctgagaaatttcgccggagctaggttttgttgtttaccgatcaatcctttaatcaatggcaatggctgttttccgtcgcgaagggaggcgtctcctcccttcaatcgccgctcgcccaatcgctgctatccgatctcctctctcttctgaccaggaggaaggacttcttggagttcgatctatctcaactcaagtggtgcgtaaccgcatgaagagtgttaagaacatccaaaagatcacaaaggcaatgaagatggttgctgcttccaagcttagagcagttcaaggccgagctgagaactcccgtggactttggcagccatttactgcacttctaggagataatcccagcattgatgtaaagaagagtgtggtggtcactctctcttctgacaagggtctctgtggtggaatcaactccactgtcgttaaagtgagcagggctctgtacaaattgaatgctggt

SEQ ID NO: 115778 - DNA, 574 bp, Arabidopsis thaliana columbia
atgatacttcaggtctctacgactcactatatggaaagctggcacgcctgcaggtaccggtccggaattcccgggtcgacccacgcgtccgctgacgcgtgagtggcgtaaggactgtcgtatggtttattctatcgctcattcaagctcacatattgaacactcgatttatcattcttctcattactcttcactctactcatcagatcaatcacaagcttctttacagctctctgattatcaatccgattcttaatcacagcctcacttagcgaatcaggcgtattatcaactctatctacctctttcgataactcgttcataacatcacctttatgatcaccttactcatacctcaagtaattcctgactgaaaacttgaccgaggaactcgtgcggttacgcatgtgcatatgcatattcatactcacagtacgaagcagcgcatgatcgagattctcaatgagatcagaagtgatctcaatactactataagtcccacgtccagaccagagttcatccgtgactgtcagcagacctgagagcgcattagcgataccatcacctaaatcat

SEQ ID NO: 115779 - DNA, 569 bp, Arabidopsis thaliana columbia
atgatacttcagctctctacgactcactattgggaaagctggtcacgcctgcaggtaccggtccggaattcccgggtcgatccacgcgtccggaaggttcatgttattgatttaggacttaaccatggtttacaatggccggctttgattcaagctcttgctttacgtcctaatggtccaccggattttcggttaaccgggatcggttattcgttaaccgatattcaagaagttggttggaaacttggtcagcttgcgagtactattggtgtcaatttcgaattcaagagcattgctttaaacaatttgtctgatcttaaaccggaaatgctagacattagacccggtttagaatcagtggcggttaactcggtcttcgagcttcatcgcctcttagctcatcccggttccatcgataagtttttatcgacaatcaaatcaatccgaccggatataatgactgtggtcgagcaagaagcaaaccataacggtaccgtatttctcgatcggttcacggaatcgctacattactattcgagcttattcgactcgctcgagggcccgccaag

SEQ ID NO: 115780 - DNA, 243 bp, Arabidopsis thaliana columbia
  unsure (1)..(243): unsure at all n locations
aatgatacttccagctctactacgactcactatattgggaaagctggtcaccgcctgcaggtaccccggtcccggannattccacgggtctgatcccacngccgtcgcgcgacactgcgcttcggtatctcgtatggtgaaaactgctccatatcactatctttatctctacatgctcctcaaatcttttggatgatcttcttatacctcaatcgaaaaatgtctccatggtgaggatattca

SEQ ID NO: 115781 - DNA, 555 bp, Arabidopsis thaliana columbia
  unsure (1)..(555): unsure at all n locations
nnnnnnnnnnnnnnnnnnnnnnnnnnnnnnnnnnnnnnnnnnnnnnnnnnnnnnnnnnnnnnnnnnnnnnncttttttttttttttttttttttttttttaaacaaacaaacattgtcttgccatttaaacagtaaaatataaaaacaaaacaaaaacgctttgtatattgtaatgggggcaactaaaagttggtttaatcaaaagctagaaaaaaccaacaaaaggatttatactaacattttggaacgaagtttattggctacatacaagagatgactgatgtttgtagttggatagtgttgaagtaacttcatattcgacgtgaaatccccagcgattagcctcctcctcaccagtaccagcatcgcacaacatatccccagtaagctttccagcggaccttcagggtcgcttaagagtgcatcccatatgtgaagactgtcaaagaaactaaactcttgtgttaggaggagagtgatccacctaaatgcatagaactgtggatttactttcgtggtgatctctagatgacgccacagttcctcatcatgct

SEQ ID NO: 115782 - DNA, 560 bp, Arabidopsis thaliana columbia
  unsure (1)..(560): unsure at all n locations
nnnnnnnnnnnnnnnnnnnnnnnnnnnnnnnnnnnnnnnnnnnnnnnnnnnnnnnnnnnnnnnnnnnnnnnctttttttttttttttaaaactgatgcataagtcttatatcaaacgacattgtacatcatgagcaccgagctcactgaacctcacttatcaagtcaggatcttactcggtacatctctcataagaggaacataaaacatgcaaacataaagctaagtttgagggttatttatatgtggaaaaagatgtaatgtgactatccttcactagacatgagccggagatccggtttccggcgttggaatatcagccaacatcgccttgcggcctctctctgaccggctgttttcagcaaatttaatgcttccttcgtgtagtcctaagctcttctcttcctctgtccattccgctccatagtaatgctcttcctttgatttctctccatcttgtgatggcctcaagaacatgcttccccactgcggaaaatgtataaacgcaaccggaagagagcacacaacagccataacgcccatcaacgatagtccttccg

SEQ ID NO: 115783 - DNA, 548 bp, Arabidopsis thaliana columbia
  unsure (1)..(548): unsure at all n locations
tttaggtgacttatangaagagcttgacgtcgcatgcacgcgtacgtaagcttggatcctctagagcggccgcccttttttttttttttttctttttttttttttttttttttccaaacttgaataatgtctgataattgaccacatactgatattgatagttccaaaaacactaatttccgaatccaaaatcaaaaaagagcggccgcccttttttttttttttttaaaaaaaaatgaaggtaaggcaggacaaagatacaaaaaatctttttatactctatacacatttttgagtaaatgatggacaatacatgaagtcctactagacacaatacatttcactggcggggaaaatcaatcaaattaccccaattttctcgatttgggtttctggaaaagaatcaactatataaacctcattatagaggcaccttcgtgttcagagaccagttgaaaccaaaccatgcaatgttacaattccaatcaatgtgttgtcttcattgaccactggtaaaaactgtacaggcgatggcggggattccatct

SEQ ID NO: 115784 - DNA, 543 bp, Arabidopsis thaliana columbia
atagaagagctttgacgtcgcatgcacgcgtacgtaagcttggatcctctagagcggccgtcctttttttttttttttttttagttggatcaacaagtattttgatatatacggtttgacctgattgatttggatctgtgttccaaaaggtcacaagacaacgaggaataacataaactcattcatacgtcccattttcaagttcctctgagaaatggaacaaattcggtgtgatatgttttgattgactccacagcagcaacagcattagcttcttcttcgggataataagcgatcggatcagatagatgcggttctggaatcttcagcaccccttcgagcatggcgtggaggcagtaagctgcatatgttacatgatacccgccttcttgcaccataagcaaccttccatggctgtgctcctctgcaactcccctcattatctgcccaatccttctgtatccattcattgtcaggctttgtctcccgtttggatcaaaagcgctagagtcttgaccaacaacgagaacaaccatatcgggt

SEQ ID NO: 115785 - DNA, 553 bp, Arabidopsis thaliana columbia
  unsure (1)..(553): unsure at all n locations
gnnnnnnnnnnnnnnnnnnnnnnnnnnnnnnnnnnnnnnnnnnnnnnnnnnnnnnnnnnnnnnnnnnnnnnnnnnnnnnnctttttttttttttttttgccaaagaaattcattattatttttatcaagagaaatttagttgcaattcctataattagagtctagttatatgttatatgtaataataggagacaaattacaagttaaatgagtgaacaaaattttacactaacagttccaaagagaagatcaagagaaagaaagcagagcaaactgttggttctagtaatcttcaacaagaaactatccatgatctaaataagcttcttcttttcaaagtattgcttcaagtacaaaatctgtaaaccagagaccacaatgcaaatccccagcgacattatactgtaccatgcgactctcgagtttgttttttcactcacaatcctcatctctgcttctctgtttctgaggtaaatcagattttcatggattgcttcaactgcaccttcaagtttcttaaactccagctctacaccctcgatcttttcttttc

SEQ ID NO: 115786 - DNA, 512 bp, Arabidopsis thaliana columbia
gcgtacgtaagcttggatcctctagagcggccgtcctttttttggtttttttttttttttttttttttttttttttttttttttttttttttttttattcttttttttggtccggcctttaaccccccagaaaaaaaccttatggcattctagttcacataaaccaaaaaaggggaaaaatatccccgcccgccctttttatctaaaaaaaagaataaaacggcggggcgaaccagcccaaaaataggggaaactttcaggaaaaatgaaggaaaaaacctagggggaaggggggcaaggggaaatgtaattgggaccggactcattgattgttcttggaagaaaaggggtttttgaaaatttgtttaaaacgatattccgtgaattggaaccaggaacggaccccgccccccccttatatgttaaagaaaaggggatgccccttccacgaaaaggccctccggcgagaggtttcctgtctaagtcagggggtggaggataaaccccccgga

SEQ ID NO: 115787 - DNA, 575 bp, Arabidopsis thaliana columbia
actgactcaatatttggagagagctggaccgcctgcaggtaccgggcacggaatacacgggtcgatccacgcgtgcgatggcactaaaaacatatcaaaacagtgagttgttatatatactcttgtaatatctaacagataggaagagctatatatattcacataacgcaaagaaagctgagggaacatgtgtacagtgctgactatgcacatgctacacataggcgtatgtaagcaacagctcctattcttcttaaagccagtctcaacgcggaaagaatctcatgttccacaagcgtcgacgtgtcccaggctcggctgatgcgtacaatgcacagaacgactactaggttagctgttgcgacactcctaactacacgtacgccttcaacatgggtgccttgaagatgaggagccaccacaacagcctcttctcatgtggtcatgcgccaccgacccttgatgacgacactatcgtctacagagccgttctagagctgatcagcagcgggggagatcatgatcaggtaaggaacacgctgtctttttccattgaagccttgacggacgtatct

SEQ ID NO: 115788 - DNA, 425 bp, Arabidopsis thaliana columbia
  unsure (1)..(425): unsure at all n locations
ttgacgtcgcatgcacgccgtacgtagctgggatcctctagagcggccgcccttttttttttttttcagtatcgcaacaaattngtgttccatctgatcgaccggatcaaaaaaacctacctttttggtgggggcacaattaattggtcccggtagcaaaaaatcccgggtttaaaaaaaaacttaattcaacccggttttttaaagggtttactttcccccccaaaaaaaaggggcgcgttttataaaaaaaaaaaatttttttttggggcaacaaaaaaaaattttttttttatttttcttcgaaaaaccccccaaaaggaggggggggggccgcccaaataaaagggcgcccggtgtaataccataaaaaaagaaaaggggttttttttttttttttcaaaaaaaaaaagggaggggcgggg

SEQ ID NO: 115789 - DNA, 565 bp, Arabidopsis thaliana columbia
atgatacttcaggtctctacgactcactatatggaaagctggtcacgcctgcaggtaccggtccggaattcccgggtcgacccacgcgtccgggggagagagctcaagttctaatggcgaacttggtcttatcagaatgtggtatacgacctctccccagaatctacacaacacccagatccaatttcctctccaacaacaacaaattcagaccatcactttcttcttcttcttacaaaacatcatcatctcctctgtcttttggtctgaattcacgagatgggttcacgaggaattgggcgttgaatgtgagcacaccattaacgacaccaatatttgaggagtctccattggaggaagataataaacagagattcgatccaggtgcgcctcctccgttcaatttagctgatattagagcagctatacctaagcattgttgggttaagaatccatggaagtctttgagttatgtcgtcagagacgtcgctatcgtctttgcattggctgctggagctgcttacctcaacaattggattgtttggcctctctattggctcgctca

SEQ ID NO: 115790 - DNA, 260 bp, Arabidopsis thaliana columbia
  unsure (1)..(260): unsure at all n locations
tgannnnnnnnnnnnnnnnnnnnnnnnnnnnnnnnnnnnnnnnnnnnnnnnnnnnnnnnnnnnnnnnnnnnnnnnnnctttttttttttttttactgcaaaagaacttttttattatgatcgtatttcttagcttcatttgaaactcggaaataacaaaggtaatataagcaagctacaaaaaacccgactaattacacctgaaaccaaaagacttgggctgaacaaaaccaaaaactaagcgagagatgagttttctat

SEQ ID NO: 115791 - DNA, 366 bp, Arabidopsis thaliana columbia
  unsure (1)..(366): unsure at all n locations
nnnnnnnnnnnnnnnnnnnnnnnnnnnnnnnnnnnnnnnnnnnnnnnnnnnnnnnnnnnnnnnnnnnnnnnnnnnnnnnctttttttttttttttaggatcaaagtaacgaagattattacttcattcatttattcagttgtggaaaatgcaaaaaggattacaaaactaaacatctagaagaaaactaaaatttgtgtttgtgttgtgtatgcacatacacaaaagggcaaattcgttaaaataacaattatttcactttcgcctgaaacggcatcggttacagaaccctctgagtatacatatgccattattatgccctgcaacttcttcacttagtgacctctttagtcacaggaggaatatc

SEQ ID NO: 115792 - DNA, 426 bp, Arabidopsis thaliana columbia
  unsure (1)..(426): unsure at all n locations
ttgatttaggtgacctatagaagactttgacgtcgcatgccgcgtcgtagctcgnnatcgctgagctcgtcttctctgcgctcaaaattctcgcgcggaaaaccatgtcgactcgaggtcangtccaccgattanngaaactactaactttnnccctaaaaaacctcccaccaagggggagaacctttccccttttcccaaaatgagaaggggctttgggtttttccccaaaaaaaaaaaggggggtttcccgggttttttcttttccgggtttttttaaaaaacccctccaaccccggggaaatggtttttaaaaaaaatttttggcaaaaaaaaaaaatcccttttgcgcaaaaaggggccccccccccaaaattttctccgggagaagtggggtgccccccccccccccccaaaaaaaaaaaa

SEQ ID NO: 115793 - DNA, 433 bp, Arabidopsis thaliana columbia
  unsure (1)..(433): unsure at all n locations
gatactccagctctatacgactcactataggaagctggccgcctgcagtaccggtcagaaataatnccgggtcgacgagctactagtncgcggcgnccttttttttttttttggagttagatgctatgattnccaacccagaaaattcaattaaccggggcctaaaagggtggtaaaacagaaaaaattttgggcctgaaaccttaccccaacggttacgggaaaaaaaaatcccggggggccctcaaatttttgggggggcccccccgaaaaagaggtgtttccccccggggggggccccccccgccctttttaaaaaaaaaaaattgggtaaaacaacaaggttttttttttaaacacccccgttttttttaaagggggggggggggctccccccccaaaaaggagaagagagtttttaaaaaaaaaaaaa

SEQ ID NO: 115794 - DNA, 551 bp, Arabidopsis thaliana columbia
atagaagagcttgacgtcgcatgcacgcgtacgtaagcttggatcctctagagcggccgccctttttttttttttttttttttttttttttttttttttgggaacccaagccttaaagcagaactcatcaagatatgtagttccaagcagttgttgttacagatttacaatagaaaataaataatctcacagccaaaatacttcattaacagtcagtgacaggacaaatatcataatactttcaagagctggatttcaaagaccagaggctcgttcgcatgcgatagaaggctgcgtcgtggtccaaactcctcggggattggcttcaatgtctcgtttatgtaccctactgatggaggtatcagtgccctacgcttccctccagctttcatgcccaccaagacttctttcaagccctcaattacgtcgttttcatcgagaataagtttgacaggagagctttcaccactgaattgatccaccgtgctatgaacgaaatatccatttgcacgccgacacacatagtttagttcgaccaggtccccttcatg

SEQ ID NO: 115795 - DNA, 563 bp, Arabidopsis thaliana columbia
  unsure (1)..(563): unsure at all n locations
ttgnnnnnnnnnnnnnnnnnnnnnnnnnnnnnnnnnnnnnnnnnnnnnnnnnnnnnnnnnnnnnnnnnnnnnnnnnnncttttttttttttttttttttttttttccatacaataatgttataaatttgagtttcttaagaaacgttcatattacatcattttctttgattcttctacacaaagattcttacttttattacaccccaactacacacaataacccacctagaacacaatccggctacaaccaattttacataactgatgtagatcattcatcatctaatacaacttacaaggacgtgaaataagcttggtggtgggagtctctaaggacttcttaacttaccctttgtgtttgtgagaaacagggttctacggatagctagaatgagaatccatgtcgttgctgtgattttctccttgatcatcaatagcaatgctgagctcaagacagtcttcaagatttgagcctgcaagcccttaaagaaccctaacattccttcttttctccatatggcatacacaacccctggaattgttttccttgttcttcttctcg

SEQ ID NO: 115796 - DNA, 541 bp, Arabidopsis thaliana columbia
  unsure (1)..(541): unsure at all n locations
acgactcactattgggaaagctggcacgcctgcaggtaccggtccggaattcccgggtcgacccacgcgtgcgatttttgatcagactcggtttatcgttatgggaaacttattctgctccgagtatagaatccagagacggtttgacctcaaagggtcttctcatgggcgtagcactgcaaagcctgaaggagaaattgatgagaccacgactctcaaggaccttgatctcaatttttctttccgtcttcagagaaactggtatcaagagcttatgaagcanataaaacgcgattgtgagttcttggaagcagagagaataatggattatagccttttagttggtgttcacttncgtgatgacaacacaggagaaaagatggngctntctccattcgttntgagatctggtaggatagattcatatcagaatgaaaaattcatgcgcggttgtcgcttcctagaggcagaacttcaagacantggaccggatttagctggcagganaccatcgatcagattaggcgcanacatgccagca

SEQ ID NO: 115797 - DNA, 573 bp, Arabidopsis thaliana columbia
  unsure (1)..(573): unsure at all n locations
gaatgnnnnnnnnnnnnnnnnnnnnnnnnnnnnnnnnnnnnnnnnnnnnnnnnnnnnnnnnnnnnnnnnnnnnnnnnnnnncttttttttttttttttttttttttttttttttttttttttttttttacccgaaaaccataaaatctctttattgacaatgcatattattagaacatatatcaattatccgataaatttataatgaaatcaatgcattatgttgccatatatatagaattatatatggatgttttttttcttaaaaaaccaactaatttcatcatcatcattattattgacccaaatcaaaagacaatgaagactttcctttcttagggaagggatcatcttcactggtgcttccaagtctcagctgaaagaaagaggaagatgaagccccaccaccgcctccacgtggcaaacttccaccggaagatgatgattcctcctccgtactggtgggcattccgctctcgccgcattccatatcaactccaaaaagcctnagtctcttcccggccgttccaacaagttcctgattagctctcccgtgcatcatcaccggcacaaa

SEQ ID NO: 115798 - DNA, 556 bp, Arabidopsis thaliana columbia
  unsure (1)..(556): unsure at all n locations
nnnnnnnnnnnnnnnnnnnnnnnnnnnnnnnnnnnnnnnnnnnnnnnnnnnnnnnnnnnnnnnnnnnnnnncttttttttttttttttttgttctgattcatttcattggctttatattgttgagatacactcgcctttagatgaaaactctctatataagtgaactaaaacgatgattctagtagattgttggacatgaagcaaaacaagttctgtgtttgtatgatttgtgaaggcagagagagagatgaaaagaggaacaggtttagagtttcttcatgttgcagagatttatttgtaccaaccagctagaaaatgcctaagcatgaaacaaaatgcgcaagcaagagcctggaaaacaagaagatgaatacatagagacttttctgttttcctaccaaaaatcctcaagtagacgttcacgagtgtcccatcttttgttcctgttaacagtcccgtagcaggatcatacttggggagacgatgtcgtggacatttgacaatgccagcaagctgcggaagtgacagtaaaaagttcaacacttgaggaagaaa

SEQ ID NO: 115799 - DNA, 516 bp, Arabidopsis thaliana columbia
  unsure (1)..(516): unsure at all n locations
ttgacgtcgcatgcacgccgtacgtagcttggatcctctagagcggccgccctttttttgtttttttttttttttttttttttttttttttttttttttttttttttttttantttnaannnngtnaaggccaggaaaggaaagcccctaacaagcccaaccgggaagaaaaaagaaagggaaatagacggggaaacaccccaaaacctcgaaaaatttctcatggacacacatacaaaaagtgtcatgcacgaaactggaaagggggaaccccggggtccgcgcctttttaatcctttgtatccttttnggcctggtcccctgttcccccaccacccttttacacaaattttttgaaagggggacccgaaggacccagaaccttaaaaacctttgaaaaacccttccttttccctaatgcaaaagggacaaagggggataaaggggttttgggaattagaggaaaggccttttcaggggtaaccgtgaaaaacccttaggcttggtggggaaaac

SEQ ID NO: 115800 - DNA, 520 bp, Arabidopsis thaliana columbia
  unsure (1)..(520): unsure at all n locations
agagcggccgttctggggggggaaaaggctttagataaaacaaactatcccccccagggggaaaaaacgaccgacaagaaacgcacagatacgcggaccgaccccccacaagcacaatcgtacccccgagacacacaagcacagcactatccacgagctggcagcgcagaacaaattcctcgcttgggggggttcacccngcaaaggcgcaaacacatacttctaacaacccccccccccacgctgctggagggcggcgacccccccccggtccaccaagccccgccccccggcgcgcgcggcccgcgcgcgcgtcacgcgccgcgcgacccggaacgccggagccgtctggcggccgagcgacgcgcacagccggcggcgggaacgccccgaagcacggcgaacaaccagacgaacgagacacacgaggcggacccgcagcggcgcagccggccggcaggccgcgaggggggaggagacggagagggagcgggaaggggcgtggcgacgccgaccagga

SEQ ID NO: 115801 - DNA, 527 bp, Arabidopsis thaliana columbia
cctgcggtaccgggccggaattcccgggtcttccccgcgggcggggggcgccggtaaacactatgatgcgacgctcgcgtgggtaagactttgcggtgccatgctcgcccagggtctggcctacgggatgaggggggtttctgcgcggaggtcgacgggtcggcgagggaccgaagcggggggaggcggcgcggttttttttttgggggggggacgagggcgggcgggggagggagggagggagcgcgggccgcggggcgcgctggcagcgggaggggcggccgttgcctcgggggggcggggccgggccggcctgcgagtgtctaggctggggtggtgtgtgtcgggtcgcccgtggcccctgggagggcggatcggatggcgccccccggccgcacgggtaaaggtgggagacagtgtggggtgcatagtggggcgtcgtggtgccgcgggtgcggctgcccgagggagaggaggagcccgcggcccgcaacagagtgagttgtgggtgggtgggggaggcgaga

SEQ ID NO: 115802 - DNA, 553 bp, Arabidopsis thaliana columbia
  unsure (1)..(553): unsure at all n locations
nnnnnnnnnnnnnnnnnnnnnnnnnnnnnnnnnnnnnnnnnnnnnnnnnnnnnnnnnnnnnnnnnnnnnnncttttttttttttttttttttttttttttttatggcacacgacttgattatatatacatatctcaatcaatagagggatgacaaatgaattcaaatcttagtacaacaacaaatctgctatggctaatgtttcacatcctaaaagccaagactcagatagaagactatagaagaaccaataattttacaaatatcaagagagaccaaacgctacctggcggatgttagaaataactggtacagctcttttgatctgaatcttcttttacccaatttgttttgtttctccagaagaagcacgagaaaactcatttgccatcgattggtagagcatttgatggtgtgaagttacttagctgaattttcactgggtctagcgacatgtttcctatacatgagtcttctcaggttttgtagtgttctctgagtgaccaggccctttgcttgtgtcagctgattcctcagtggtttcaacaatctcc

SEQ ID NO: 115803 - DNA, 547 bp, Arabidopsis thaliana columbia
  unsure (1)..(547): unsure at all n locations
aggtgacttatagnnagagcttgacgtcgcatgcacgcgtacgtaagcttggatcctctagagcggccgccctttttttgtgttttttttttttttttttttttttttttttttttttttttttttttttttttttttttttttttttttttttttttttgggggaaaaaaaaggggggttaaggaattttttactttgggggggtcggcccaaaaggcttttaaacaaggtccttttccccgggggacgggggggcccaaatttgcttaacccaagggacaaagttttcccttaagcctagagcccccaagaactggaaaaaacctttgaattccctcccaactgcagttgggggggggaaacccaaaaacggaaccccataaaggggcacccgggtttaaaggggggatccccccaatggaccggccattaatcctcctgggggaaaaggagggggtttccctaactggacttttttttggggcaaaaagaaaagggaacccccaaaggtggtagccaaaaaaagccggggcacaaaaaaaccaa

SEQ ID NO: 115804 - DNA, 462 bp, Arabidopsis thaliana columbia
  unsure (1)..(462): unsure at all n locations
taggtgaccntatagaagagctttgacgtcgcatgcacgcgtacgtaagctcggatcctcgatagagctcgnctntntntggcgctccatnnntctcgcngcgggaaacatgtcgacttcngaggtcangtcacggatattangaaaacaaccaatttttgggcttaaattaccttccgacaaaggggagaaacctatacctcttttcaaaattggaaaggggttagggggtttttcccaaagaaagggggggggaacccggggttttttgggggggggggggtaaactttaaacaaacacccctaaaaaaggggggagggtgttaaaaaaaatttttttttgaaaaaaaaaattttcttttgaaaaaataggggccccctgggatgttttttttaggggagagaggttggaccccccgcgcggggaaaaaaaaataaattaaaggggggggggaggggggg

SEQ ID NO: 115805 - DNA, 563 bp, Arabidopsis thaliana columbia
  unsure (1)..(563): unsure at all n locations
nnnnnnnnnnnnnnnnnnnnnnnnnnnnnnnnnnnnnnnnnnnnnnnnnnnnnnnnnnnnnnnnnnnnnnnctttttttttttttttttttttttttttttttttttttttttttttttttttttcaaattttttttattaaaacccaccaaaagttgttagaaaaaaaccaatttaggttgttattaaaacagacatttcggttttcatggaaagggacagctccaatcgaacagtacaaaatcgggaaagctaacccctcctaattttaaagacttaaaccccttaaacaccatggacttgggatccctaaaccccctcgccaccttgtcctaattgtgaaccccccctttgttctaagggggaacctccgcctttttcgtaagggggagcacccttctggatggggaaggggccccccatttgatcaggaatttcccttctcataaggtcaacaacgccctcgctgttaaggtaaaaaacccccccgatgttaaaaaagtgcgcagcctaaacgacttcgacaaaagtggggtcccaatttttaaccaattcgttttccc

SEQ ID NO: 115806 - DNA, 211 bp, Arabidopsis thaliana columbia
  unsure (1)..(211): unsure at all n locations
ctctacgactcactattgggaaagctggtcacgcctgcaggtaccggtccggaattcccgggtcgacccacgcgtgcgcccatttctatgtggtcaatgcaaatttaagaaattatttgccgacttaacagttgaggaactattgtttgaaagtgaaaatgttattcctatcagtttctctataattagntagttatcatttcatttttca

SEQ ID NO: 115807 - DNA, 536 bp, Arabidopsis thaliana columbia
  unsure (1)..(536): unsure at all n locations
atagaagagctttgacgtcgcatagcacgcgtacgtaagcttggatcctctagagcggccgcccttttttttttttttttgataaaagagagatcaaacattagaattgataattaaaatgaaaagagagcaagaacatatgttgcaacttatgtctaacacctatcgntcttattacactacatctatggacaatgcctcacgcaacaatagcaacaagcatgtggaagccaccacttgttcagacagaggagctcacatgtgcatgatcatgggaaaagaacaatatagttttcctcaagacacattactaactttctacaggaggataaaaattagacgatccagcggtattcatgtgctcaatcgggaacacacctgctgaatcctgcacagactatacgtacagagctcgaacataatctgttcttccattcgcaaaacatgacaagataatctgctgcccaagacgcgtcgactaaccatagacatgtttgagatttaacaggtgctaactgacgaaggaatacagcctg

SEQ ID NO: 115808 - DNA, 544 bp, Arabidopsis thaliana columbia
tctgactcacatcttggcgggctgagccgcctgcagtgtgccggtccgctatacccgggtcgacccacgcgtgcgctttgtcgtgaccatcagctgacacctttctgttaaggatcgagatggagatgtcactcgttatactcccaagagtgtcgagattttgggagctttctgacccggtgagaaaggagtcggtggcactggaaaaacctttcacttcacggtatttttgttacggggagtgcaccctagcttgatgttcgatggaggataatcgaccgagcctaacggaacatgcgttgctgcgttctacgggatcacgaacgatgaccagatcttctagaggggctcaccgcaccgtggctactgactatggttaccgcctatctaggctcgaccgtgactcatgctttcatccgtacggagaagaccgattgttttgctgctaagctcggacagtggagacacatcggggcttgccatgattacgtggtgggtccataccaaagtgggatgctcatattcactcccatatacccccgtg

SEQ ID NO: 115809 - DNA, 548 bp, Arabidopsis thaliana columbia
  unsure (1)..(548): unsure at all n locations
caagctctctactgactcactatatggaaagctggtacgcctgcaggtaccggtactgaatacccgggtcgacccacgcgtnncgccacgcgtncgnacttactactacatagtagnnttgaagaaatctgggaggaaagctccaagtggcaaagactcaacattttaaaatgaaagaggggggaagctttttggggggttggggcaattaaaataccccggcgtttttgtctaaaattttaaaaaaaagggtgtttgttaaaggggggtctctttttcccctttaaaagaggggcccccaaaaaaaaaaaggttttttttaaaacttctcttgtttgccccacgggggggaaaaaaaagggccctttttgttgggggggggggttgtgcccccccctgtgacaaaaaaatttttttttttgctcccccccccttaatacccccgggaaaaaaagggagaatttttttttttttgtgccaaaaaaaaaaaaggggggccccccccaaagagaaaaaaaaaagttttttttttttttttttaaaaaaaa

SEQ ID NO: 115810 - DNA, 550 bp, Arabidopsis thaliana columbia
  unsure (1)..(550): unsure at all n locations
atagnagagctatgacgtcgcatgccacgcgtacgtagcttggatcctctagagcggccgcccttttttttttttttttttttttttttttttttttttttttttttttttttttttttttttttttttttttttttttttttttttttggggaaaaaccgggggggtttttattaccgcaaacaaaaatgggttaaagggttccccccgtttttaaaaaaaaatccccaggggaatgttgggggcttaattttttggggctgggttttggacaaaaaccaaaggaaacttgacttgtggggggaaaaactcgttaacaccccctaaaaaagcccttttgaaaaacccaaaggcaggggggcccattaaaaaaaaaaaaactttaagtttcggaacgggggggaaaaaaaattccttaaaaattccttttcaaaacgggttttttaaataaaaaaaaaaccaaaaatctggggacccgggtggagacccacccatgaccgattcccggagcttggtttaatactttttaaaaggtgaaaccgggtttccg

SEQ ID NO: 115811 - DNA, 560 bp, Arabidopsis thaliana columbia
atgatacttcaggtctctacgactcactattgggaaagctggtccgcctgcaggtaccggtccggaattcccgggtcgacccacgcgtccgattttgaaggatggattatcagcggttcatgtaccttatgcttatggatttgcgattatcttgcttacgattatcgtcaaagcagcgacgtatcctttgactaagcaacaggttgaatcaacactagcgatgcaaaatcttcaaccgaaaatcaaagcgattcaacaacgttacgcaggaaatcaggagaggatacaactagagacatcgcgattgtataaacaagctggtgttaatccgttggcaggttgcttaccaactttagcaaccataccagtttggattggtttataccaagctctctctaacgtggccaacgagggattgtttacagaaggtttcttttggattccatctctgggtggaccaacatctatagctgctcggcagagtggatccggcatttcgtggctttttccgtttgtggacgggcatccaccattgggatggtatgacactgtagcttatc

SEQ ID NO: 115812 - DNA, 496 bp, Arabidopsis thaliana columbia
gcctgcaggtaccggtccggaattcccgggtcgtcccacgcgtcggcgaacgcctgaggaaatatgtaacatacactacaccaataaacgaaatcaaaagatctgatatacgttggatgctagctcaagaactagaacgagtgattcgatcatagatatcgcaggtaatgtcatcacggatataaaaaggaaccgacaacggttgttggcggtggacaaaaaccagacttacatctcgggttggggaaatgcatacctaacattgggaggacattacgcaagatgccttatcctgcatgccactacttcaaccatgactaaacatctgccttgactccattaaagctccttgcagcactaaccacttactcaaggggtgataaaatcaaaaagcccaattcctaaaagtcctatcaacacagtgggcatgatcgaatgcggaattggaacccacccatttccggcggcataaagcacatggagggtaggggtgtac

SEQ ID NO: 115813 - DNA, 128 bp, Arabidopsis thaliana columbia
agatctaggtactcgactcatatggagctggccctgcagtacggccgatccggtcgacacgctcagtactgcataataactttattaaacaactattgcagaatgtatattgtggatgatgcttacag

SEQ ID NO: 115814 - DNA, 517 bp, Arabidopsis thaliana columbia
  unsure (1)..(517): unsure at all n locations
atagnagagctttgacgtcgcatgcacgcgtacgtaagcttggatcctctagagcggccgcccttttttttgttctttttttttttgcgacttagattgagcctttttattactttcggagggtcacagaccatctacactttagtgacacctacccactgctcgaccttaaatcgccatgaaatcgactgctgatgatatatatgctccatacgcgacctaaggaaaggcggtagatggcgcgattaacaaaacagcgaatgagtgcggagctggttggatttaagagagttcagtctaagagtaaagggacttgtctcatggcgaaggaattgttagaatgaggacttgtctacaggagagagaagatgttnatgatcgggtttatctggctaaatgctcggggcaatccatgctggagaccccaactgaaataccctcgcaggccacagagctagaccacactccagaggcggtgcaaggaatctaataggagcccatccacgactaggcgcac

SEQ ID NO: 115815 - DNA, 304 bp, Arabidopsis thaliana columbia
tacgactcactattgggaaagctggtccgcctgcaggtaccggtccggaattcccgggtcgacccacgcgtgcgctaacccgagggcgaaaatgtgagaccagtaacagatctaaatcgcaaataaaagtgccacatcagcaggatgctacactgccgtggcatccggcgatgacgaagcggttgggctgatggcccagcccatctaacccgatggactattcagacacggcaggccggtgtttactactctacccttgggggcccacgaaggccacgtgatgcccctgcttacagaccatcga

SEQ ID NO: 115816 - DNA, 463 bp, Arabidopsis thaliana columbia
gacgtgctgccgcgtcgtagctggattcgtcgagctcgtcttctccgcgctccaatttctcgccggcgggaaacctgtggacttggaaaggcaggtccacgggttttaaggaacctacttcctttttgggcctaaaaaaaacttttcggaaaaaggggggggaaatctttttcctctttttcaaaaaaaatggaaaagggggctttgtgggggttttttcccaaaaaaaaaaaaggagggggggtttcccgggttttttctcttttttgcaaaaaagttaataaaaacaagtttcctcaaacggggggggggggttttttgaaaaaattttttttgtgaaaaaaaaaaaaatttttttttgtcaaaaaggggccccgcctctaaaattttttcccggggagaggggtggtggccccccccccccaaaaaaaaataaaaaaaaaacccctctgggggggggggg

SEQ ID NO: 115817 - DNA, 555 bp, Arabidopsis thaliana columbia
  unsure (1)..(555): unsure at all n locations
ttgnnnnnnnnnnnnnnnnnnnnnnnnnnnnnnnnnnnnnnnnnnnnnnnnnnnnnnnnnnnnnnnnnnnnnnnnnnncttttttttttttttttttttcggatgaatcaagcactaaagaagaagaagatgcatatgatcaattcatgttatttgacctctacacatttcatgcttacaaagtcgaaagaagaattggcgtacatatcccaaccatcaccaaacgccaaaatctacatctttcccaacaaatatgacaagcccatcaaattcaaagcttatctcgacattggagcagcatcatctataatcaaaccagacatacttgcagcttctcactggaattcctgttcagtagctttcaaggcggcaaatggccagatcttccacatctccttaatcaccaagcccatctacatccaactctttccaggatacatgatcaaagcaaagtatataggtctgaactccctggaaaagatttcatacttggagttgatgtccttcatagccttaagaaagtatcttggaatccaaaaagacttaagcacaaga

SEQ ID NO: 115818 - DNA, 224 bp, Arabidopsis thaliana columbia
ctatagtttagcggaggacaactgcatgcacgcgtacgtaagcttggatcctctagagcggccggcctaatctttttttttttttggagaatagaataatactttattagatggagctaaaccttgccattttgagctcgaacatacagataaacaaggtaaactcgtacactaggatactacgagacatggactgatggcggggggcaaatatatttttttat

SEQ ID NO: 115819 - DNA, 590 bp, Arabidopsis thaliana columbia
  unsure (1)..(590): unsure at all n locations
cccagcctatacgactactataggaagctgtacgcctggaggtcccggtccggaattcccgggcggcccccgccgtccggaaaattccattttttcttctcccggaaaaagcaaggggttttaaccctatctttcttggcaaatagccgcgggggaattgggaattttttttccaaaccctttaccctttttttgcccccctttttttcccgccccccacaaaaagggggggccctagcgccccccctccccccccgcccaaaaataattaaaaaaagggggggggggggcgggggggggggagacaaaaacccctctcaatttgggggggcgcgggggggttttttggtttataaaaaaaaaaaatatttttttgggcggggaaaaaagaggggggggggtgtttactacaacaaaaaagagaaaaaaataaagtgggggggtggggtccccctctattttattttctctccccccccctccttctttctttctcttttataaaaataaacagcgcgggggggggggggggggggagagaaaaaaaacaaaaaatattctttttttctnggagagaaagagaaaaaaaa

SEQ ID NO: 115820 - DNA, 619 bp, Arabidopsis thaliana columbia
  unsure (1)..(619): unsure at all n locations
attgagctgnnnnnnnnnnnnnnnnnnnnnnnnnnnnnnnnnnnnnnnnnnnnnnnnnnnnnnnnnnnnnnnnnncttttttttttttttttttttttttcaatatgaatccataattttcataaacatatgtaaaactttcagatttagctatagagaagatgtgactaactcagaaagaaaatccgttaattggagagtgaggtaaactccggctgtaatgtgacctgcaagtagtcctagacgatggaccaaagatccgggaatcacctctttgaattctcaaatggcttctcttcctactatcccagcctatctcttcttcaaccgctttagcaaatgcgctatgcaccggatcacagctttcacacaacagcctcaagacttgcttaattgatggcctagaccggccttctttctcggtacacaatctcacaaccgtcacaactgcatgaagtggttttcctccagcatcattaatagagtctttgattctcgggtctaccaactcgaggtgttttgttttcgccaacaaaaaccgctgagacattgccacaaggttcctaccttcatcaactgctcttctcccggttatgagctccagcaacacaactccgta

SEQ ID NO: 115821 - DNA, 577 bp, Arabidopsis thaliana columbia
  unsure (1)..(577): unsure at all n locations
ctatacgactcctatagggaagctggtcgcctgcaagtcccgtccggattccgggtcgcccacgctccggaacgccccggccccgaaaatattttgggggcccataaaatttttttgaaacccgctttggtttccttttttaaacccggggggggccccgggcccctaaaaaaaccccccatttttttggtttttgggaaaacaaactctctttttttttaaatattgggggggaacccccctggggaaaaaaaaatttttttggggggggggaggggggtgtttataaaaaaaaagggcccccttctttttgggggccccccccaaaaaaggaggggggggggggcgccccgccccttcccccctttttttggggggggggggaaaagaaaaaaaatatttttcttgttgtggggtggggggggggggggttttcttctctcccgcgcggcgagagaaacaaaaaacccnnnctctcacttttttttttnttttttttttttgtgatgtgacaaaaaaaaaaccctctctctctttatttaanagacggggggcgcgagcacaccacccccccccc

SEQ ID NO: 115822 - DNA, 596 bp, Arabidopsis thaliana columbia
  unsure (1)..(596): unsure at all n locations
gattgagctgaactatagaatgactatgacgtcgcatgcacgcgtacgtaagctaggatcctctagagcggncgccctttnntttttttttttttttttttttttgaccatccgaaacaagagacattggttttccatttacatgggggaaaccttcctggtgggaaactttgatttttttcttcttcacaaaacccccccagatgtttagggtgtggcaaaaaaaaatgcaaatacattttccccaaatttctctttttctttaggggccaaaagaggtattttgaggggttaaaaagaatttttttttgggggggaaaccttttttttttaaggcccttttaaaaaaaaaaaacccccccaaatttttttttttgggggggggttttcgccccccccccccctcttttatgaaaaaaaaaaaaaaaaatggttttttttgtgggggagaaaaaaaaaaaaaaaanaatgggggggagggagagagagaaccccttttttttttttttttttccaccccccctctttaaaaaacacaaaggagagaggggggcgcgctttttttttattatataaaaaaaaaaaaaaaaaaaaat

SEQ ID NO: 115823 - DNA, 499 bp, Arabidopsis thaliana columbia
  unsure (1)..(499): unsure at all n locations
aaattttgtattgggggaattttttttttggtggataaaaaaattttttttaataaaggggtctttaaattttttttaaaaaaaaaaagagggtgttttttttttttanaggaatataatttttggggggggggagggccgcnccccccgcggagaaaaaaaatgtggggagattttttttctccacccacaagattttttttttaataaaaaataccggcggggggggggaaaaaaatgctcccaccaataagagagcccccctccctgttttttttttgttaccaaaaaggagtttttttcaaaaaaaaaaaaaaaaaaagaaactcttttcttcttatactataaaaaaataatgaaatgaggggggggggggcgggcccgaagcactctatatacttttatgttgttgtcggagcgggagaagaaaaaaaattcgtgggggcgtggtgttccagaaagaaataaactcatgatatatctctatatatttagtttt

SEQ ID NO: 115824 - DNA, 583 bp, Arabidopsis thaliana columbia
catgcacgcgtacgtaagcttggatcctctagagcggccgcccttttctttttttttttttttttgatggaaacaacaacacattatatggagtatgaccaaaaagctgatcggactatacaatatactccatttagggttgaaagcagatctattcatctgcaacaccaacacagagtttttattatggttacagactagagacacatatgtcctgttctaaatcgagccaacaggaagatcatctgacttagcagcaccctcaactaacctctagtgtaaaagaaaacaagttaaaacaccaagatccatgccacaattaacgaggtactaagctgatgctaaaaacacccctcataacccaaggatacggtagctatagattcgaaagccaccacctatctgtaaccgccttatatattttccccatccaataatgtttacattatggaccaacaaaaggcaaaaccctggtcaaggctcggacaccccatatatgtgaggaggaatgttcgtgaaaacccggaaaggcacactcaaccagatgcatatatacaagactttttcactaatgaaggaaagg

SEQ ID NO: 115825 - DNA, 462 bp, Arabidopsis thaliana columbia
  unsure (1)..(462): unsure at all n locations
ctaatcgactttcttagggaaacctggtacgcctgcaggtaccggtccggaattcccgggtcgacccacgcgtccgatgtggggtttacatctacaaatgtgccaaataatctgacccaaaaagatttagggtccaatgggggaataatatcgttgttgcaaaacttaatccagttattgcttcttgcaatatggattcgtcttgtgtgttgtactgggggaaataccatttgttaaccttttattaattcaaattgccaatgtcaataactaaaaaaaaaaaaaaanaaggnnnnnnnnnnnnnnnnnnnnnnnnnnnnnnnnnnnnnnnnnnnnnnnnnnnnnnnnnnnnnnnnnnnnnnnnnnnnnnnnnnnnnnnnnnnnnnnnnnnnnnnnnnnnnnnnnnnnnnnnnnnnnnnnnnnnnnnnnnnnnnnnnnnnnnnnnnnnnnnnnnnnngcaag

SEQ ID NO: 115826 - DNA, 602 bp, Arabidopsis thaliana columbia
aacagcgaggcaagaaaagaagaaagagcaggggagacgcagacccacgaaagacacacccgcagagaaacaaagagcacgcacgcacaagacaacagcaacggccgccgcagaaggagaggagagaaaggccccgcttcggaccagggggggcaaaacacacacaacagcccagaacggaccaggacacagaagaagagacacgaagaaaccacggccagaggaggacggaacgcagaaaggaacgcgacgcaacaagccccgggggcacggcaacaaaggaaggcacagagcacacggaccgagacagaaaaacacagcaacacacaaccagcgacagcaccgagccacgagccgcagggcagcagagcaaacggacgacaacgaaacagcggagcaaacacaagagagagcggagacggaaggtgcgccccgcaacaggaaggagaaaacaagacaagggacggaaacaaagaaaagacaaacaaacagaaggggagcacagcgaggagcagcagcggagaaacagcgaagggagagaggacagagagggcgacagacgaagggagaggagccagcagcaccaaaggaggcagaaagga

SEQ ID NO: 115827 - DNA, 615 bp, Arabidopsis thaliana columbia
  unsure (1)..(615): unsure at all n locations
actatagnatagctatgacgtcgcatgcacgcgtaccgtagcttggatcctctagagcggccgccctttttttttttttttttttttttttttttttttttttttttttttttttttttttttttttttttttttttttttttttttggggggaaaaaaaaccccccctttatagaaaccccttttgaaaaaaaattaccccaattttaaaaaaaccccccctcccaaaatcaaaacccccccccaaaaacccgtgatccaaaaccgggttttttccccttttcttcaaactttgcgaaaaaaaaaaaaccccggggacccccaaagccaaactcttttgttttaaacaaaaaaggggggaaaggaacccccccaaccccccaaaagggaacaatgttggtttttttccccaacctgacacggccacgcctaaaactttcccacttttttaaacaacgggcccttaaacccttaaaaaaacaccccccccccccctttttaccccttcttgaacaaggaatttcccccttttctatcttaaagcgcgcagaaagggtcctaaagaaccctccgccccccctctttaaaaactccaaaaaaataaaaaaaaccccc

SEQ ID NO: 115828 - DNA, 608 bp, Arabidopsis thaliana columbia
  unsure (1)..(608): unsure at all n locations
nnnnnnnnnnnnnnnnnnnnnnnnnnnnnnnnnnnnnnnnnnnnnnnnnnnnnnnnnnnnnnnnnncttttttttttttttttttttttttttttttttttttttttttttttttttttaaaaaatatacactcgaacatttatcattcgctacaaacgattaaccttttgctttctgacagctccgacatacatggccaaacataccaaacaaaaagagaaaccttacaaacgaaaaggtgtacttggaacgaaccaccgggattatatcgttttcttaaaaagaaaaaaaaaaaaaaagttttctttgggatgaaaaaaatagaatcgaatagagtaaaatgccaaaatgacgcgtgttaaacgagtttcgttggggtcttggagagtttaagaagccactggtttggatgttgcctttttcacagcttcagcgttggccctgggctggtaggtaaagggcaactcgaccaagtcccatagggatgttttcgggttccatccgagttggcggttaaggagggccatgtctgggattttcttgccactggcataataaccttccccgaaaaacttttgggagctaacatcaaccggggggctttcaa

SEQ ID NO: 115829 - DNA, 597 bp, Arabidopsis thaliana columbia
  unsure (1)..(597): unsure at all n locations
nnnnnnnnnnnnnnnnnnnnnnnnnnnnnnnnnnnnnnnnnnnnnnnnnnnnnnnnnnnnnnnnnnnnccacgcgtccgcggacgcggggggaaatatgaaagaggagtaaaattaataaaataggaacaaagaatggaaataccctggctgctaacaaaaggacgccggcaggtagcgccgactcctccagccgcagtatcataagcttctccaccacatgcgccgaccattcatggcatgctgctcttaatgatgcaatattagacaaccataatcgccctgcttatgacgagctgtggacaatcttaatcgcaaggcttggcgatgatgtaaaaaagagagagcttgggaatctcttgagatggccgactggatacgaggcttatcaagtgaactttaagggagatgagcccatggggaatggtcttttatccacagctccatttagaaatggcagccacagataccgttcagcgtatggcgcctgatgctgagtcataatctgcgatacatacagagatggccaacaagaatccctttgctataagaggtattgtaggggattcaaatgctgatgatcaaagtaagcgcctac

SEQ ID NO: 115830 - DNA, 510 bp, Arabidopsis thaliana columbia
ctctatacgactacttaggagctgtcgcctgcaggtaccgtcggattccgggtcgaccaagctcggtaaaaaccacggtttcggaagggggctttttttttggaccccccggggaaaggggttttcctttttaaaacccataaaaaccttttttttaaaaaaggttttacaaaaaatttttttaaaaaaggggcgcaaattattttctgggggagaaccccccccccgccaattttttcttttttcttccggggggggggaaaaaatattctctccccggggggggggggggggcccaaccccccttttaaaaaaaaaacaccctcttttttaacccctcttttttttttttttttggggggggggggagaaaagagaaaaaaaaaaaatttttttgttgaaaataaaaaacaaaaaaaaattttgtgtgggcgcacaccccccccctcctctgggggggggggggggggggaaaaaattttttttagagaaagaaaacaaaggcgtttt

SEQ ID NO: 115831 - DNA, 462 bp, Arabidopsis thaliana columbia
actatgacgtcgcatgcacgcgtacgtaagcttggatcctctagagcggccgcccttttttttttgtggtgaaccgagaggatgctggggagaaagaattggtatctgtgttccaaatcacggcgtgtatgggcgaggaacccaattatagggggcggacgtggggggcccaccacaatgtttgacggggtcctttaaaaggaggggtggatgttgaaggggccccgttaggcagggcaatgggagaggtggcggctcgagagtggggggcgatggagtattaaaattgtgctgccaaagaaggggatcatgaggggtgggggagtggagggagggtgaggataggggaagagaaaagcgacagtacgttggcgcctgggctgcggagaggtggagggaaacggcaaatacgggagaccagttgtgtttcgggggtgcgcgagacggggaacgtgtcagagg

SEQ ID NO: 115832 - DNA, 358 bp, Arabidopsis thaliana columbia
caggcacgcgaacgaaagctgggatcctctatagcggccgccctaacccttatagtgagagagaaaacaacaggaacaaagagaaaagaggcccgaccacgccgacccacagcgccacaacaagaacaacccaaaccaaaaaaaccaacacgaaagagacgggagcagaaaccacgcctttaacacaagggggagcagagaggcaaacagacgcaacagctaacaagagccccagcgcggagggatcccgaaggacaaaaacgatacagggagaagcgcgggcgcaccagcgggagagaaagacccaagcgagcgaggggcccggggacacccacgagaagagcaaacgacagacaga

SEQ ID NO: 115833 - DNA, 505 bp, Arabidopsis thaliana columbia
ggccgcctggggtaccggccggaattccgggtcggccagcccccgatggacaagagttttgatggcataactagagctctaagctatgggtgcaccaagattatagtgtgtgagcgatagagtggaagcaacatgcctagggaacaaccgggagcaatcgtcctatcagggggtggagcgagtgaagctactgactcagcgaggccagattgatgctgggcccgttgggtgtgaagaaaagtgggtgcgtgacgtagcgggggggactattagtggacgggcaggtgggggatggcgaggagaggctctggggagtaagcgccgttaagggtggaggaagagttgggtagggcacgggagacgaccggcgaaatttgggggaacggaagcggggccaggacgggggaggggccggatgcgaacagagagaacgggggaagagggcgggtgttggtagtgttgatttatggagcggagggagggatcacagcacaggctttcatca

SEQ ID NO: 115834 - DNA, 625 bp, Arabidopsis thaliana columbia
  unsure (1)..(625): unsure at all n locations
nnnnnnnnnnnnnnnnnnnnnnnnnnnnnnnnnnnnnnnnnnnnnnnnnnnnnnnnnnnnnnnnnnnncttttttttttttttttttttttttttttttttttttttttttttttttttttgggaaatggggggggggcatatataaaaaaatcaaaattctataacagaataaaaaataagctaacatgtagctataattgatgaaggatcccctaagcttttatacttagaatcatcttcgaagaacatacaaatatttgagcacaagacttaaaaagccttccaaaactattatacaaactcaagaagaacaactgcttcaagttctgggaaaatcactatttcaataatcggctcctttggaaataatctttttgcaagttggccgcaacaggattgtatgctcaaactgaaaaatatagcttcctttgacatcacacactggaggacatggctcaattatgccaaaatcacaaagattctttaaagccatcaagttttttgtttcaccaaggcggtccaaataacgtctgcaaaaggctagcgtggagaagttcttgttaataggggcaaggagttgttttgcccttggtaacctaaaggacatgaccccatcatagttt

SEQ ID NO: 115835 - DNA, 562 bp, Arabidopsis thaliana columbia
cactatagaagagctatgacgtcgcatgcaccgcgtacgtagcttggatcctctagagcggccgccctttttttttttttttttttttttttttttttttttttttttttttttttttttttttttttttttttttttttttttttttttttttaacccaaaaaaaaaaataaatgggcaaaaataaaaaaaaaaaaagggcttttggggccccaaacgggagaataaccctaaaggggggcggggtgaaaaaagaacaaaaaaatcggggcccccccccccaaaaaaaaaaaaaggccccaaaaaaagggggggcctcaaaagggttttagccccaaagggggaaaaaatgcaagaacctaattatttttaaaaaccctccccaaaaaaaaaccgggaaggggaaaaaaaggggaaagggaccccccctaaaattttctaagaatacaggttttttgttttccccacccggaacggccccgggaacgagaagaaacccaaattcccctaccccccgaatccccaaaacaccccgaagccgaatcccccaggtccccggagc

SEQ ID NO: 115836 - DNA, 539 bp, Arabidopsis thaliana columbia
  unsure (1)..(539): unsure at all n locations
tccgagcttattcgactacttaggaaagctgtacccctggcggtcccggtccgaattcccgggcggcccacccgttccgggccccggggaaacttttccccaaaaatttggaaaataaaacaccttctctcggggattatgggaaaaaaaccttncgccccccaaagccggggggtttttgggggcccctttgggctttttataaaactttttttaaaaaggggttttttttttttttggggggaaagcccctgtgcccccccccttttttccaaaaagaaaaacccctttctggggggtttttccccagaaacatataaggggggtgttttccccccggggggggcggcggggggagaaaaaaaaaaaaaaaaagagaggggggggggcgggggtcttcctctctctccctcctcnngggggagaaagaanaaagcgnccgcgccccccagagaggagagagaaatctcctctcccctttgcggggggggggggggcgcggcccccccccccnaaagaaaganaggcgcctctttttt

SEQ ID NO: 115837 - DNA, 473 bp, Arabidopsis thaliana columbia
  unsure (1)..(473): unsure at all n locations
catagagactagacgcgcagccgcgtacgtagctaggatctctagagcggcgcctttttttttttttaaaaagaaaacacctttcctaaggacccaagttttttcaaaacaaagggcacatttactttttcctttaagggaaaagggcccaacacccaaaaaggaaaatcccgaaaaaaaatgggggaaagtttcccccccccaaaggagaaaaaaaatttttttcagaagggaccccccccccggggggggctttttttttataaaacaaaaaaggggggggggaaacccctctccaccattctcggaaagaaaaaaaacccccccctttttttctttttttttttccccccccggtttatataaaaaaaaaaaaaaacttttgttggtntnaggggccccccccccccccccaaaaaaaaaaaaaagggggggggggggccccaacccccttttttttttaaaaaaaaaaa

SEQ ID NO: 115838 - DNA, 636 bp, Arabidopsis thaliana columbia
aggatacgccgagctctatactgactctatcatagggaaagctggtacgcctgcaggtaccggtccggaatttacgggtggaccgacgagttcactaacccgtggccaaccttgttagagtagtatggagatcgaatgctgggaatgcccagccatgagatgagtgctatataaacagatgactaaaaacggctcgtcaaacagtaataatttgttgacgtgaactctaatccagaacgataacaggaaacgggggtgccgtctgtactcaccaaattgagggcacctacggaaagcaagtaatactactgagggtagacgacccagtgctataatgattgaaacatcattggtacaagctgacgtgtggattatcatacaccgtatcactttcacaagggggtgcaacattccgcatcttcgggagattgacttgaggaagagcctcaactttgcgcactggaccagggttaccaagagatggggacctatgattgctacgcttttcaggaaacatctgcttacaaggagaggcctttagcaaaacaggagtccttggcctgaggctgcgactaggagaaggaaacctgttattgcttcgctgttcaggagaaacttctctagcttgagaggttt

SEQ ID NO: 115839 - DNA, 596 bp, Arabidopsis thaliana columbia
  unsure (1)..(596): unsure at all n locations
nnnnnnnnnnnnnnnnnnnnnnnnnnnnnnnnnnnnnnnnnnnnnnnnnnnnnnnnnnnnnnnnnnncttttttttttttttttttttttttttttttttttttttttttttttattttttttttttatttttttcttctttctttaaaccgggggaaaacggtggccaaaaccaaacccacccggctgaaactgggaaaaaaagggattgtactcaactttacacacaaaaaaaagggttgaaaaaggacatggctcccaaggaaaaaaaaataaaaaggctttggaaaaagagaaagactcgtcggagctgtttttaaagctggaaaggaaaactgtaggggttctgcacacctgctttaaaaaaaaaaacggggtgtggaaaaagagccaaacaacaaaactggtgtgaaaaaaaaaaccaaaaccccctggcattgtccaaaaaagggctcaagccccccccaaaattttcaaaaagcgttgccaacgcccccaaaagaatgtaacaccgtttcccattgcgcttgaaaaaggcaaaagagaaccagaaattcctacaaaaacgccaagaaaaaaaaaaaaacttttttaat

SEQ ID NO: 115840 - DNA, 528 bp, Arabidopsis thaliana columbia
  unsure (1)..(528): unsure at all n locations
tctatacgactactataggaagctgtacgcctgcagtaccggtcagaatcccgggtccgaccagcctccggattttgttcaattattttcgggttttccgtttaattaaaccggggggccctttgttttaaaaacccgaaaagaaaaacgggccctttttccgggggggtggggcccttttaaaaccggggggggcgaaaaaaaattttgtttttggaaaaaaaaaaaaggtttttaaaaataaataagaaacctctttttgggggcgggggggggtttctaaaaaaaaaataaacacagggggggggggggcccccccccagagaggggagaggggttttttttttttcttcttggggaagaaagagaaaggatattttattaaaataaaacaaaccccccccccccacccaaaagaagagaggggggtgttttctttcttctcctnaaaaaaaaaaaaaaagaaagggggggggtgggtggtgtcactcacctcccccccccccccaggagggagaggaagcaatt

SEQ ID NO: 115841 - DNA, 590 bp, Arabidopsis thaliana columbia
  unsure (1)..(590): unsure at all n locations
nnnnnnnnnnnnnnnnnnnnnnnnnnnnnnnnnnnnnnnnnnnnnnnnnnnnnnnnnnnnnnnnnnnnnnnnnnnccacgcgttcactgacccgtggggaaacatgtaagattagtaaaattaataaattcatataaaatacctcgccataagttggttgctataaaacaaaaactaaaaaaggctgttcaaacagtaataattcttagacaatgaacactaaaccagaacgataacaggaaacagggctgccgtctttactgatccattttagggcacctacggaaagcaagtaatacttcttatggtagaccccccaatgctaaatgatgaaccatcattattacacgcaaacgtcgggaaacatcatacaccgtacccctttaacaagttgctgaaaccatcccgtttcatcaggagattgacttcgaaaaacaccctcaactttgcccctatgaacaaggctaccagcatatggggacatgtgattgctcctcctttcaggacacatatccttagaaggagaggccttttcccaaacagggccttttgcactgaagctgccataggacatggagacctctcattgc

SEQ ID NO: 115842 - DNA, 563 bp, Arabidopsis thaliana columbia
  unsure (1)..(563): unsure at all n locations
nnnnnnnnnnnnnnnnnnnnnnnnnnnnnnnnnnnnnnnnnnnnnnnnnnnnnnnnnnnnnnnnncttttttttttttttttttttttttttttttttttttttttttttttttttttttttttttttttttttttttttttttttttttttttttttttttttttggggaaaaacaaatttcccctcccccaatttggaaaaaaaggcccccccccccggggttttttgttttttccacctgaaaaattggcgttttaaacccccctttggggaaaaaacgggatttttcttgccctctttttaaaaaccaaaaccggcccctgggtccccccgggaattcccgaccggctcctggaagggccccactttcccctttaggggggccttataaacccgggcggaaacggggccaacctgtctctcgggaaaaaaaggtttcccccaaaaattccccacaaaaaacaagccgaaaataaaaaggtgaaacccgggggcgcccaaagaggggcccaccccccattattgtggggggccccccctgccccttttccagggggaaaa

SEQ ID NO: 115843 - DNA, 641 bp, Arabidopsis thaliana columbia
  unsure (1)..(641): unsure at all n locations
nnnnnnnnnnnnnnnnnnnnnnnnnnnnnnnnnnnnnnnnnnnnnnnnnnnnnnnnnnnnnnnnnnnnnnnnnnnnctttttttttttttttttttttttttttttgtttttttttttttctctatggtttagatcacagggaaaaaacatgatttgcctttagtacaatttggtttcaaacccagggggcctatggatattacaaggatcacacttttaaaagaacagaggttcaagctgagattgcaattcgagaaaacatcatcttttgcaagtgcaagtcccaacccttttttttaaaaaaaagttttttcaggttccaatttctatcttaattactccccctttggtttgcaccaagaccccattgaggacacttggggcttaaaatactttcaaaaaccctggaatccaatagctggaaaatgggagcaaacttcccgcatttcggggttttaaacctgttaacggatcttcccaagctgattgcgaaaaccaagggcttattgaaagcccttggttataaaattttgaactaaagcggcgctatgggcgtggtcataacccttgcttgtttataaacagtgtttaatggatttattaacggttaacaacattctctaaaaaccaaaggagggaa

SEQ ID NO: 115844 - DNA, 605 bp, Arabidopsis thaliana columbia
  unsure (1)..(605): unsure at all n locations
nnnnnnnnnnnnnnnnnnnnnnnnnnnnnnnnnnnnnnnnnnnnnnnnnnnnnnnnnnnnnnnnnnnccacgcgtccgcccacacgtccgtggacacgtggagggacatatgtggggagaggaagcctatgccaacaatcgaagaggagctcgtctggagatcactcctctacagtctcttgatgcctgtgatgagccagttcattactggtctcgaagacgacaacggaatgcctttcttgctcatcaagtccaaatcctagactgcaggaggcctnactgttcgtactgtcttatccagttcctaccaatcttcccatttcaaagagagatcttattagccttactccatctacccaagccctatcgagaccatactgtgctgtgactcttaccagagcatgtactctcagatgctgtgtggctcatgccaacaccatgaaggtccttagagtcggggctgactgcgcctgtggattcatcagatccatcaagtttcttgagaaacactggctcgagtaggtccatgacatcataaccggcactctaagttccctgatcaccactccttcagtgggtgaagctggcctccatgatcgttaaac

SEQ ID NO: 115845 - DNA, 615 bp, Arabidopsis thaliana columbia
  unsure (1)..(615): unsure at all n locations
cactatagnatagctatgacgtcgcatgcacgcgtaccgtagcttggatcctctagagcggccgccctttttttttttttttttttttttttttttttttttttttttttttttttttttttttttttttttttttttttttttttttttnggggnggggaancggaaatggaaaaaaaattgggaaaaaatttcaccagcccctgttggggattccacaatgggccccccccccaaaggcgttaaaccccctcccgggaaacacaaaccaaaaccccttaacccacccggtttttttcccccccccgccccatttttccccgaaacccccaaaagaggaaaagacgctccttttttaaaaaaaaaaagggttttttaaaaaccccccagcgggtgttccccctttggggtaaaaccttccagggcccccccccaaaaagggcccggggggttcctcttaaccccctgggttcccccattttttttcccgaacccccgaaacaaatacacccgggggcgggggaatatcccctttcttaaaagaccccaagtatttcccgggaaaccccccgggggataaccttccctttggacccttccaagggggtttttttt

SEQ ID NO: 115846 - DNA, 365 bp, Arabidopsis thaliana columbia
  unsure (1)..(365): unsure at all n locations
nnnnnnnnnnnnnnnnnnnnnnnnnnnnnnnnnnnnnnnnnnnnnnnnnnnnnnnnnnnnnnnnnnnnnnnccacgcgtccgcgtacgcgtggacggtctcacagcgtttcgattacagagtttgcagctgttgcagatggagtgactctctacactaaagcctttcagaacgctctgttctacctcaattctgtctctgataaaggcggggccaagctctattgactccgatgatcagcggcttaccgggagtttagaccttatcagtcacctcacattatggctagatacaggcgtcacgatcctcgagtgatcgagctgacacaatcgacgctcgtttgatctcataccattatttggacga

SEQ ID NO: 115847 - DNA, 494 bp, Arabidopsis thaliana columbia
  unsure (1)..(494): unsure at all n locations
aattgagacnnnnnnnnnnnnnnnnnnnnnnnnnnnnnnnnnnnnnnnnnnnnnnnnnnnnnnnnnnnnnnnnnnnncttttttttttttttttcccaaattcatttaaacgtataattgtaaaatacactgttacacattacaatgcaaaaaccggaaaatgcaggagattactacaaaactcagaaagatttcttaagtcctgttaagcttcaagaattttgttttcctattccaccactggggtttaggatatttactttgaaatcccttatttggattcctttttgcttcccctataaccagtgggaaaaaaggccctgaactaacggggcccaataaaactngggtgttaaatttccccgaaaaaaaaattgggggtgtttggggccttatttttcccccataaaccccttttttgggtgttataaaaaaggggaggaaccctttttttacaaaaaaaattggggccgctctccaacggtttttttttt

SEQ ID NO: 115848 - DNA, 615 bp, Arabidopsis thaliana columbia
  unsure (1)..(615): unsure at all n locations
gacactantagattactatgacgtcgcatgcacgcgtacgtaagcttggatcctctagagcggccgccctttttttttttttttgtttataaaggatacagtctcataaatattataagagtatatgatacaacaacaaatgaatatctcaaatgaatccgagggaaagtcacactcaaagaataacctgttgttttttggacagaactagaatataagcagacgacatgcatagagaagtcgtcactgcaaataaacagaaggttgtcacgaagactcgctagcggaaaaattttatggttctggctgttaagatttgactgagtcacacacagggaaatcttacgagggtggaagacattatcaacagaggagatgagatcaagggttgatcacagaagtagaagagaggcaagaaccattgcgaaaacagaaagtagaagagatagagtgattcgggtttgtccactaggtgcttgtgcattggttgatggggttccaggggatgaggttggggcttttgcggtaaccggaggtagtggtggctcagtgacatcagcatctgtgaaaaccgggtttggagcttcggctggaggaaaggcagtaggactcaca

SEQ ID NO: 115849 - DNA, 609 bp, Arabidopsis thaliana columbia
  unsure (1)..(609): unsure at all n locations
cactatagnagagctatgacgtcgcatggcacgcgtacgtagcttggatcctctagagcggccgcccttttttttttttttttttttttttttttttttttttttttcaagggacaaaaaggaatttgaactttggagtttagagccctttaaaaaaatccaaaagccataagaaagattttaagttttaaaactaaatattgcctttccttagggcctatgcaaaagacttttgaccttgaaaggaggatggatgtgggttgacttataacttatttttcatcaggcgtaagccgtcaattggaagcttgtctcgtccaaagtcaagtgtatgcaaccatcgtccgagagctgaaataacgcttactggtcttgaagcaggggaatccggagtccaggggcaatgttctaacagagaactgcgacttcagaccccgggatgtggatcgaaaattcacaacaccaaatcggacgcggggctcgaccctggaatggggaaccgggacctggggccggacagtttccactttgggggatcgttttagagctgggcggttgcagggaaaagggtgtttcctgggtgaagtgggaatccgctaacagttccaa

SEQ ID NO: 115850 - DNA, 403 bp, Arabidopsis thaliana columbia
  unsure (1)..(403): unsure at all n locations
nnnnnnnnnnnnnnnnnnnnnnnnnnnnnnnnnnnnnnnnnnnnnnnnnnnnnnnnnnnnnnnnnnnnnnnnnnnnnnctttctttttttttttttttttttttttttttttncctaacaaaagaaaataaactaattacctgaattattcttgagtacaataaaataagctctcattggacatcacttcctcttctgcttttcttttttttttttttggaatgaaagaacctccatagcctttggaggtcggaccattacacaaccttggtatttttttccttccaaaaaagggttccactttaacaaaacccttttaaccaccccaccaaattaactttggtcaagaaccttttttaattgtggtttttgaattttttccaaagggccaaccaaatctttt

SEQ ID NO: 115851 - DNA, 594 bp, Arabidopsis thaliana columbia
  unsure (1)..(594): unsure at all n locations
cgcgcaannnnnnnnnnnnnnnnnnnnnnnnnnnnnnnnnnnnnnnnnnnnnnnnnnnnnnnnnnnnnnnnnnnnnccacgcgtccggtttctctcacgttctcttttttaattttaatttctcgccggaaacaatctcatctcccggcgaacgaaacttccggtgtggtactgcaaacggagaaaaaaataaccaaagaagagagaaactcaaaagctactaagatggaatcagaattccagcaacatcacttccttctccacgatcatcaacaccagagaccaagaaactcaggattgattcgttaccaatcagcaccaagttcgtacttttcgagtttcggtgaatcaatcgaagagtttttagatcgacccacaagtcctgaaactgagcgaatcttatctggctttttacaaaccaccgacacaagcgacaacgttgatagtttccttcaccatacttttaacagtgatggaactgagaagaaacctccggaagttaaaacagaggacgaagatgctgaaattccggtgactgcgacggcgacggcgatggagggttgttgtttccggtgatggtgaaatctcagtgaa

SEQ ID NO: 115852 - DNA, 617 bp, Arabidopsis thaliana columbia
ctatagttgagctatgacgtcgcatgcacgcgtacgtaagcttggatcctctagagcggccgcccttttttttttttttttttttttttttttttttttttttttttttttgggggaaaatgataaaattaacatttcattattccattgatgatctgcatcggttggcaaaaacttcttcgtttccttcctagcctaaaccgaggaccgaagctgggcatcaatatggatactttggactttttcaagctctagccacctcaagagagagaaacaaacaaactctaaaaccgaaaacagatagtttttggtaataaacaaagctttggagattattcctctgtttattttaaattaaaaacccacgactatttaattttggcgcgtttcttgacgggtccggcatgtaacgggtgggtcttatgcaaagttagaccaaaggtcttgtccatgtccaaatcctccgaagggacacccttggggagcttccagccaaaggattaaagaagagaaccccgcctaaaaaacactggttttatagccaagggctttcccgggcaaattttacgtccgggtccaaagggtggaagcttataatctttacctctcacgtccat

SEQ ID NO: 115853 - DNA, 606 bp, Arabidopsis thaliana columbia
  unsure (1)..(606): unsure at all n locations
cgcgnnnnnnnnnnnnnnnnnnnnnnnnnnnnnnnnnnnnnnnnnnnnnnnnnnnnnnnnnnnnnnnnnnnnnnccacgcgtccgatggcccgtggctaatggagctggagtcatactgagtgtttgtgatgatgaagatgctcgatatgagactgttacgctgacagcggtcgctgtccctgcacttcttcttcctccgccaacgacatccttagatgagcatctagttgctggccttgcagctcttgaaccatatgcacgtttgtttcatagatactatgccattgcaactccaagtgctacgcagagacttcttcttggactcttagaagcaccaccagcgtgggctccagatgcacttgatgctgctgtacagcttgtggaactccttcgagctgctgaagattatgcatctggtgtaaggctacccaggaactggatgcatttgcacttcttgcgggctataggaattgctatgtctatgacggcaggtgttgctgctgatgctgcagccgctttgcttttccgcatactctcacagtcggctctgctttttcctacgctaagtcaagttgagggagtagacttcattacgcgcctattgg

SEQ ID NO: 115854 - DNA, 642 bp, Arabidopsis thaliana columbia
  unsure (1)..(642): unsure at all n locations
acactatagnatgagctaggacgacgcatgcacgcgtacgtaagcttggatcctctttagcggccgccctttttcctttttttttttttagacttcgaaaagcttttattaaattaacaatacattgttggagtgtttggagtaatctcaaaagggagagatccagctttgttttttgaagaatgaatgagaagtgatgccaagaatatttgaaaatagtaagagaagccaaaggggtttttagattttgctgacccacttcaagataagcagctaccacacaaggacgacctggttaaagaatcgaaaaatccaccagggatggtattttagctcgaactgactttgccccatgctttttctaagcgagagggtggttctggcctgaagaagcagaatttaccctggttcccttaaaattggggacaatcaagagtatttctcttggcgcaaattttccatgtgccaaattattcaacagtaggccgtgtggaatattgcacaccgcaaggttttgtaaatttgttgaagggtctttgtttcgccactttcaccccacaaaagaaattttccaacaaaaacaaatatagggctttagtaggagaccccttattaatcacatctcctgtggctaactctttt

SEQ ID NO: 115855 - DNA, 605 bp, Arabidopsis thaliana columbia
taatacgaccttctatagggagagctggcacgcctgcaggtaccggtccggaatttccgggtcgacccacgcgcccgcgaagaacatcatcgtcctcctccaaagaggagcttgcatttccaaagctataattctctcacagatcaggatcaaacatgggtttccttataacaaccctaatcttcagtcgtcgttgggataattgtttttttatgcgttaaaatctgctggaacagagggcccttcacgaatctgctacatcttaccgtgggcattactgcgacgggcctgctgtaggatgatggtggcaattggatatattgcacaaaaggaaactatggattgccccattctaagcgaaacagaagaaaatcctctacttagacaagaccaccccaaactggaaaagcctgcgcaaaggcaggccaatcaatacccaaccctggggatcttcaaacttaaacaatattcttggtggaacccttatcttgaagggggaacaaaactaaaaaccttaggccttgtccttgtgaaaatttcgggaagacgttttattatttttgaaaaaaaaggcggagcccgccgttgaaaaacgcaaaccctaa

SEQ ID NO: 115856 - DNA, 601 bp, Arabidopsis thaliana columbia
cactatagaatgactatgacgacgcatgcacgcgtacgtaagcttggatcctctagagcggccgcccttttttttttttttttggagaatcttatgggagtcattgcactcttacaaactctacatatgtgtacatacatacataaatacaagggaagaaaaaataaaagattatttagttagagattcttgtgagtataatcatttttatgtgcggatgggggggcaaaagaagtcttttcttggagagatatgacagactggaaagcaccaactaaagccttaactttgctcttgcgagtctgtactaacttattagctgtttccttaataactttgaagaaaacaacactgtggattctctcttcttctctgggtctaggagtacagaacaactctgagttagcgtaggtggaccttgtcgatggttaggtgggttccttgggtcttaaagagctcctaacacaagattgcgaggtggggtaagataagaaatgattttcctctctggacttgagcttcttggacggttccttctgatccaaatctatatctttccggtttgatctaagttcatcgcattgcagtattagggttctgt

SEQ ID NO: 115857 - DNA, 607 bp, Arabidopsis thaliana columbia
  unsure (1)..(607): unsure at all n locations
nnnnnnnnnnnnnnnnnnnnnnnnnnnnnnnnnnnnnnnnnnnnnnnnnnnnnnnnnnnnnnnnnncttttttttttttttttttttttttttttttttgtttttttttgtttttttttttgttggttttgttttttggttttttgtgaaaccaacaaacttttagaattttttttttaaataaaaaaaattgacgacgataaaattttcccccccgcgtcggggggacggggggttgaccgggaaattcgggacggggcccgggggggggacaagtttgcctttgggggggggcaataaaaggggggggaaaaaagggcaaagcggggtcccggggggaaaggggaatcggttaaaattccacaaaaaaatgagagcgggaagaaaaaggggaaaacgcgggggggcctagggggggaccaaccccaatttatggggggggggcacaaggcccgttttgaagggggaaaacggggggggccagtggtaataagaaacgcgcccacccgggggggaggggggtttggttatgggcgcccgggggggttttttttttacccgagggaggggaaaaagtgtgtgggcctttcacccggggccccagaaa

SEQ ID NO: 115858 - DNA, 620 bp, Arabidopsis thaliana columbia
tacgcgcgagatctaatacgactttatatagggaaagctggtacgcctgcaggtaccggtccggaatttccgggtcgacccacgcgtccgcggacgcgtggggaaatatgtaagagtagtaaaattaataaattaaaaaaaaaaatcgtaatagttggatgctaaaaaaaaaaaaaaaaaaaaaaaaaaaaaaaaaaaaaaaaaaaaaaaaaataaaaatttaaacaaaaaaaaaacaaaaaacggggggcccgtttaaaagaaccaaatttaagtaaccttgcaataaaaagtaaaacttttttataaggagcacccaaattcaaattaatggcccgcgttttaaaaacgcggaaatgggaaaacccttgggttacccaatttaataggcttggaaaaaaatccccttttcccaagtggtttaaaaacaaaaaagccccgaactatgcccttttcaaaaaattttccaacctaaataggaaatggaacccccccttttacgggacattaaaccggggggggggaggggttacccacaaaggaaacgttaaaatttccaaggccataaggcccattctttttgttattttccctttcttttttgacaaatttcccggctt

SEQ ID NO: 115859 - DNA, 606 bp, Arabidopsis thaliana columbia
  unsure (1)..(606): unsure at all n locations
attgagaccgnnnnnnnnnnnnnnnnnnnnnnnnnnnnnnnnnnnnnnnnnnnnnnnnnnnnnnnnnnnnnnnnnnctttttttttttttttttttttttttttttttttttttttttttttttttttttttttttttttttttttttggagggaaaaccggacaggaaaaaaggcaatggggggaaaccggggtcaaaagggaggaaagtacatttgggaaggacatccccgggggaaaacaaccccaaaaaaagaaagccagaatttttggtaagacttttttttagaacccaatgatttataaaaaccaatggcccaagctggttgcctttggaaatgaaacaaaggaggttaaaaaaaaaagtttttgaaaaaaaccggaccggggggtaaacccgggaattggggaccggaacaaataggggaaccaattttccaaatagagaggggtttaaaaagggggggtaataaagggcaggggggattccgggggaaaaatgtttcccgggaaaaaatgcacccaaaaaaaaaagcgaaaaaaaaaaggggcagggcgggggggccaaaaaaggggggggccccaaaggaagggggcgccccaaaa

SEQ ID NO: 115860 - DNA, 602 bp, Arabidopsis thaliana columbia
  unsure (1)..(602): unsure at all n locations
nnnnnnnnnnnnnnnnnnnnnnnnnnnnnnnnnnnnnnnnnnnnnnnnnnnnnnnnnnnnnnnnnnnnnnnnnnnncttttttttttttttttttttttttttttttttttttttttttttttttttttttttttttttttttttttttttttttttttttttaaaagagggaaaattaaaatgggaccggccctttaaaaaccaaaaaaaatccttttgtttttgtttaacaaaatttaaccccccccaaaccctaatttttaaaacaaaaggggggggtccccccaaaaaaaaaaaaatcccttaaaaatttgacccttacaaaaccaatttaaccaaattttttaaaaaccctgaacattttttacccggcccttaaaatccccttttaacaccccccaattttttggaaaaaaaactttaaaaaaaaaaaactcggccaatagggcggggggggttaacggaaatttttccccccttggagggaaaaaacccccggggggaacaaagggcctaatctttgggccccggggtggaacctttccccgaaaagggggacaaacctaaggcctttttggcgcgagaaaaggcaagggccccc

SEQ ID NO: 115861 - DNA, 593 bp, Arabidopsis thaliana columbia
  unsure (1)..(593): unsure at all n locations
atggaactgnnnnnnnnnnnnnnnnnnnnnnnnnnnnnnnnnnnnnnnnnnnnnnnnnnnnnnnnnnnnnnnnnnctttttttttttttttttttcaaaagaatccagttcatgatacttgatccccatgtttttcgagataacattgtcactttaaaaagattgaacaaactcctttggtatgaaaccataacatcatagaatacaaagtagaatgggattgttgtattctttattgaaaaattggaagaaaaataaagaaatcatcatcatttcttcttgaagaggaagtgtgcaaccatccactcttctccattgttgtatccgnaaagctcagcaaccgcgatgaagaaggttctccagtaaaccatccacttcactgcttcttctttcccataggtcacttccatgattttttttactgcaactatctccttatccattctttttagccactcttcacttgtttttgcataatgcgtcccgcttacgagccaatgatccacaatcgaaacattttcttgaaaatatagcagaagatctgctgatgggcattgtcctccgctgaagaagtgtcttgtgatccagtcatc

SEQ ID NO: 115862 - DNA, 382 bp, Arabidopsis thaliana columbia
  unsure (1)..(382): unsure at all n locations
atgannnnnnnnnnnnnnnnnnnnnnnnnnnnnnnnnnnnnnnnnnnnnnnnnnnnnnnnnnnnnnnnnnnnnnnnnnnnnngccacgcgtccgggcgacaacaaattcgatatatcccgatgagtctagctgtgtctgtttgcggctgcaaagactatagaagtcaggacacatgtagtggtgctcgatcatagctgctgcggttcatatcccactaaanattaccgtggtttggaagtaagagagngggagttctcttctgatcccgnacaaagaatcagtcaatgatntcagggcttcatgtgatgagggacatcgaagtcacgaaanacaataccagagcccattatttggtcccgtagggattgctttgagaaaaat

SEQ ID NO: 115863 - DNA, 591 bp, Arabidopsis thaliana columbia
  unsure (1)..(591): unsure at all n locations
nnnnnnnnnnnnnnnnnnnnnnnnnnnnnnnnnnnnnnnnnnnnnnnnnnnnnnnnnnnnnnnnnnncttttttttttttttttttttttttttttttttttttttatgcaaaccatttttgcccatccaaaagatacacataacaatggttttaccatacacaacaaagaacaaactatggacaataaagacaaagacaacacctaatcttaagaagacgagagaaacatacttggactgtgtaaacaacagaggctacttgatagtgatgtagcggtttgtcccgtgcctagcccaatagtctttaagatcaacaggacacgagagatcatatccttctggtgataaacggctgagtaatctcgaaaaaacgtttccgttcattttcctaccgcccatccaagaatgccttttgtttggcatctgcggaaatggatactgggataaggtggttgggcaacaagacgattgccagccgccatttccccatttgtaacactgacccgtaaagcctgtcacgaacacatgggtacgggcattgtcgtttcatcgaaggtgactaagttcaaaccgacatcttgactgtccca

SEQ ID NO: 115864 - DNA, 490 bp, Arabidopsis thaliana columbia
  unsure (1)..(490): unsure at all n locations
nnnnnnnnnnnnnnnnnnnnnnnnnnnnnnnnnnnnnnnnnnnnnnnnnnnnnnnnnnnnnnnnnnctttttttttttttttttttttttttttttttttttttttttttttttttttttttttttttttttcttttttgggtaagagaagcgttacccgggggggatttgaggggggggtatgaaacaacaaaagaaaaccacgggagaacctccagaaaaataccagaaaaaaggcgttttataggggcaacctttaaaaacatagatgggaaaagagattctccgaaacggtgttcaaagggattttttttgccccaaagaagacccaccaaggggaattgggggaaaactttggggtgataagggggcctaactttgggtgaagagaactctccgaggcccccccaagggaagacaaatggggtctcaaaggtttcccaaaactctttttttccaacaaatatttcaggggtttaatcgggaaaaa

SEQ ID NO: 115865 - DNA, 575 bp, Arabidopsis thaliana columbia
  unsure (1)..(575): unsure at all n locations
nnnnnnnnnnnnnnnnnnnnnnnnnnnnnnnnnnnnnnnnnnnnnnnnnnnnnnnnnnnnnnnnnnctttttttttttttttttttttttttttttttttttttttttttttttttttttttttttttttttttttttaaaaaaaaaacaaaccttttttttgttaaacaaacaacaaagtacaacttttttggaatttacagttttgattttaagccccatgatggcgtcctaaccgaaaccgcctctatttgcaccttattgggaaccaattttttcgctttttttcctgggcccccccccaacctccaagtttttgctgttttaacaatgtttccgaattcacggtaaaaccccccgcccagggcgttggcttttctggttttaacattgtttcggaaaccccgggcggagccaccaccgaaaccccccccaaaaccgtaagtttaaggtgttttgatttaaccccaaaaacccccccccttggggtgggttgttttcaccatttttccaatttcccgggtaaaaccattaccggggccgttaggtttggtttttaattcccaatgtttccc

SEQ ID NO: 115866 - DNA, 597 bp, Arabidopsis thaliana columbia
  unsure (1)..(597): unsure at all n locations
cnnnnnnnnnnnnnnnnnnnnnnnnnnnnnnnnnnnnnnnnnnnnnnnnnnnnnnnnnnnnnnnnnnnnctttttttttttttttttttttttttttttttttttttttttttttttttttttttttttttttttttttttttttttttttgaaacaaccaactataacaaatttttttttaaattaaaaaaattaaccactttaaaaatttcccccacccggccggggacccgggggtcaacccgggaatttcggaccgggcccggggggggtaccatttttcctttaaggggggggtattaaagctgggggaaaacaggggaaaaggtgttctcggggaaaaattgttatccgctaaaaaatcccaaaaaaatacgaggcggaaaaaaaaaaggggaaacccggggggccctaaggggggggctactcccctttattgggggtgggctaatggcccgttttacaaggagaaaacctggggggccctctgaattaaagaatcggcccncccccggggagagggggttttgttttggcgccccaggggggttttttttttcccaggagaaggggcaaaggggttcggcttccccccc

SEQ ID NO: 115867 - DNA, 588 bp, Arabidopsis thaliana columbia
  unsure (1)..(588): unsure at all n locations
gannnnnnnnnnnnnnnnnnnnnnnnnnnnnnnnnnnnnnnnnnnnnnnnnnnnnnnnnnnnnnnnnnnnnnnnnnnnnnccacgcgtccgcggacgcgtggggaaatatgtaagagtagtaaaattaataaattaaaaaaaaaaatcgtaatagttggatgctaaaaaaaaaaaagaaaaaaaaaaatataaaaaaaaaaaaaanaaaaaaaaaaaaaaattataataaaaggaagaaaaaaatgggggcgcccgttttaaagaatccaagttaacgaccccttgcttccaacttaaaagtttttttatggggccccaaaatcaattacactggccgcgtttaaacaacgtgggaattggaaaaaccttggcttacccaacttaaatggcttggaaaaaaatccccttttcccaagttggctaataacaaaaaagccccaaccgaatcctctttccaaaaatttccccaccttaattggaaaatggaacccccctttataccgccattaaaccgcgggggtgggggggtttcgcccagggtaaccttaaatttccaagcccctaagcccccgttcttttgttttttt

SEQ ID NO: 115868 - DNA, 513 bp, Arabidopsis thaliana columbia
  unsure (1)..(513): unsure at all n locations
cactatagactagctaggacgacgcatgcacgcgtacgtaagcttggatcctctatagcggccgcccttaaaacttttttttttttttaaaacgcaaagaacccaatccttatgtaaaaaatcaataaggcgatataggaaaaaaaaaaaaactggaaccgtggttgttaaacatatatgcccagaagcaagcaaaaccaacctttcttcttgggcggcggggggaaaacaaagaaaaaacgccccccccacttaaaacaaaaaaagaataaaggccccaaccaaaatcccaagctaagtaaaatggcccaaaaaaaaacatactataaaaaggactaggccaaagtgcggtaaaagtgggctccttcccctcgcctttatgtatcttaaagaacaccaagattntgcagaaaaggcagactggcctttcccagaagggaccaatggaagggaaatcgacctcaaaatagaagaccatcatccaatggcccaacatttccttatgcttcctag

SEQ ID NO: 115869 - DNA, 589 bp, Arabidopsis thaliana columbia
  unsure (1)..(589): unsure at all n locations
nnnnnnnnnnnnnnnnnnnnnnnnnnnnnnnnnnnnnnnnnnnnnnnnnnnnnnnnnnnnnnnnnnnnnnnnnnnnnnnnnccacgcgtccgcggacgcgtggggaaatatgtaagagtagtaaaattaataaattaaaaaaaaaaatcgtaatagttggatgctaaaaaaaaaaaaaaaaaaaaaaaaaaaaaaaaaaaaaaaaaaaaaaaaaaaaaaaaaaaaaaaaaaaaaaaaaaaaaaaaaggggggggccgttttaaaggatcaaagtttacgtacgcgggcatgcaacgtaaaagtttttttatagggcaaccaaaattaaattaacgggccggggtttaaaaacgtgggaacgggaaaaacccgggggttaccaaattaaatggcctggaagaaaatccccttttcgccagttggggaaatagcaaaaaggcccgaaccgatcgcccttccaaacagttgcccaccctaaatggaaaagggaaccccccctgtaccggcgcataaagcgcggggggggtgggggttacgcgaaggggaaccgttacattggcaagcgccttagggccggctcttttggttt

SEQ ID NO: 115870 - DNA, 595 bp, Arabidopsis thaliana columbia
  unsure (1)..(595): unsure at all n locations
gnnnnnnnnnnnnnnnnnnnnnnnnnnnnnnnnnnnnnnnnnnnnnnnnnnnnnnnnnnnnnnnnnncttttttttttttttttttttttttttttttttttttttttttttttttttttttttttttttttttggggccaaaatcatttcacattcaaaaaatgtttacaactgcatccaacaatcctttgaaattctaaaaggacttttctttaaaaaaaacagcttcgaaagctagttttttaagttttttaacattacattttatttttttaccatcatcttgaactaaaactttttccaaacccttttgaaacccatttttggggaagaccccattgataatcgggtttccaattctccacacaacctccaccggttttccggtaaatttttgatccccaaaaaagggcctggaaattatgggaaccccccccgaaacactttccaacaccgagttccatccacaaggcgtaacaaacaccaccgttgttttgggtttaaacagttccacttgcggggcccatggaacccctatcccctggctctttgggcctaaccaaaaacccttttgggaacagaaccaagtttttt

SEQ ID NO: 115871 - DNA, 628 bp, Arabidopsis thaliana columbia
  unsure (1)..(628): unsure at all n locations
gaatgatttagctgaactatagaatgactatgacgtcgcatgcacgcgtacgtaagcttggatcctctatagcggccgcccttttttttttttttttttttttttttttttttttttttttttttttttaaaaaaaatattatgggatattaaaaaataaaaaaaactggaaccgtgttttttaaacatatatacccagagcaagcaaaaccaatctatttgtctggcgttcgggtgaaatcaatgaatcaaagcttccccacttaaaaaaaaaaagaataaaagcaccaaccacaatccaaactaatttagatgagccaaaaaaaaacattctattaaaagcacaaggcaaagtgtggtagagggcgccacttcttctttctttttttattcttatgtaaaccaaaaatttgcaggaaaggaaagattggctttaccaaaaagaaacaatggatggggatgggactactagtggggatcatcatccattgccgaagtgtttttttgcttcctcggtttccggacgcgtggnnnnnnnnnnnnnnnnnnnnnnnnnnnnnnnnnnnnnnnnnnnnnnnnnnnnnnnnnnnnnnnnnnnnnnnnnnnnnnnnnnnnnnnnnnnnnnnnn

SEQ ID NO: 115872 - DNA, 604 bp, Arabidopsis thaliana columbia
  unsure (1)..(604): unsure at all n locations
nnnnnnnnnnnnnnnnnnnnnnnnnnnnnnnnnnnnnnnnnnnnnnnnnnnnnnnnnnnnnnnnnnnnnnnnnnnnnctttttttttttttttattttttcattaatgttgtaacgaatgggacttcattgtttacaaaatcataaatgattaagaagctgtatattattattatacacccattagctgctatagtaagtgttgccatactcaaaactatatcgtcattttccttatggacacaaatagatacccagtacagtacaaacgagtacttgactggatccaaatgcaacaatctcacaagctttgttgccaccacatttgggatcatataatttaacattcactcggtgtatcttagctggagtgatttcttagtcgattcgatgtacctgtcattggcacccaaacaaccttttgctgtttccagcagtctcaagcaaagttctttgactttctcattcatcactagtgctgatgatatgcaattgcaagcttcaagcgccatgttcccccgagaaatctgtgaagactcttgctcaatagcatctaatagttcacttagaactaactgagtacacgagacaagttcctgcttgtt

SEQ ID NO: 115873 - DNA, 578 bp, Arabidopsis thaliana columbia
ctatagttgagctatgacgtcgcatgcacgcgtaccgtagcttggatcctctagagcggccgccctttttttttttttttttttttttttttttttttttttttttttttttttttttttttacttttgaaaaaaaactgtaatggcttttaattcaaaaggttacagatataaataaataaagaaaaacctctttcgcccttttgcccacacggggccaatccttttatttctttggggcccattcttgctccgtttaaaaaaaaataaaaaaaccgcgatatttgcattcccgttgatttttcctgtcaactactaaccaagtcagtggctaacacaaaaaaaggaagccagtttcactcatttcaaaaagaaagggctgcctgaaccacaaccttggggaggaagggggggcccttgaacgcgggggctttagaattttccaaatccccagggaccgggaaggaccctttccccccagaccttttagcctccgaaacctggaactacaaagaaccggccctgcggagccacataagttactctggcaggagcccacacggctcggaggtttaagg

SEQ ID NO: 115874 - DNA, 614 bp, Arabidopsis thaliana columbia
  unsure (1)..(614): unsure at all n locations
nnnnnnnnnnnnnnnnnnnnnnnnnnnnnnnnnnnnnnnnnnnnnnnnnnnnnnnnnnnnnnnnnncttttttttttttttttttttttttttttttttttttttttttttttttttttttttttttttttttttttttttttttttttttttttttttttttttaaaacaaaagccattggacaaaacaaagtctacaggttggggaccccaagggggttcccttcccgggcaaaaaaaaactgttttaaaagaccccctttttgaaaaataaaactggtgcaagcaaaaccccattttttttttaaagcccctttaatttaaaatttggccggcaaaataaaaaactttcaaaacccttttcaaactaagggggggggttgttttttcccaaaaaaaaaaaaaaaaaaaaaccgcccggggaaaaaaaacccacggggccccataccattttttttttcccggtgaaagccttggcccaatgggggccccccccttgggaattttttgggggaaaaaacgggggggcaataaaaaggttttttttctaataaacaaaaatttccccggggggggggggccaccaaaaaaaaattgtttccagctaaccccca

SEQ ID NO: 115875 - DNA, 615 bp, Arabidopsis thaliana columbia
atgcacgcgtacgtagagctgggatcctttttagcgggcggcctaaacttttttattttaaaaaaattactcaaccacggaggtatgattacagatgacggccggcgtgactactaagaagcgaggaatggaccaggtcggagctggggaaggaaatctcacgatgcgctgtgctggtggcaagaaaggctagaacggaacattttcctcctttttggggggaaaaccgagagaagggtcgtatgtgagagagtaacccaccgctcccccgcaagaacaaccctcctcacctgggggcagaggaggaagcgggctcaactagacgacacgatgctcaggtgggttgcgagatacatgatataccccgtcgctccgaagaacgcagcaagtccttattgacgaatgaagatacgaccgcagaataaaaaaagagcaagccgagtagggagcgcaatagaaagaaaaagaacatacacgaaaagcccaaagacaaaccactgaaaattgcaccgcaataagaggcagacccgtacaacgctcagaggggcaagactcgcgcactacactagacgataaacaaaaaaacagaacgacaaaaagaagcggagcacaaaa

SEQ ID NO: 115876 - DNA, 589 bp, Arabidopsis thaliana columbia
  unsure (1)..(589): unsure at all n locations
gccgcctgcagggaccggtccggactcccgggggggccaaaactcgcgggcacgaagcgaaaacacagcaccaccaacacgcacaagcggacagagcagcgggagaagagcaggctcagcggccgaggggacgcgacggccgacggaaagcgcgagaagcaagacaaaattcttcttttatgagggggggagagacgcagaggggaggcggcagcgagaacgggccccaagggaaaggggggagagaggcacccccccgcagccaaggagaagcgcgcccgcccacaaaggacagagaggaaaaggaacccgaaggaaccaaggagagagccgggacacccccgagcgggcgccacaagaagaccccccagccgcgccccgcggcggccgggtcacccnagcgccgatgccgacccccgccgcacccccaacaggggacgcacggccaggggggccgcgcgcgccgcgaggggcggccacaggaaccccggaaggcgagcacaaccgcgggagccgaaaggaaggacggcggggaggcgggaagaaggaggaggggggaaggcaggggaggggaagcgggaggaatcca

SEQ ID NO: 115877 - DNA, 577 bp, Arabidopsis thaliana columbia
gaatgaatgagctgcactatagaatgactatgacgtcgcatgcacgcgtacgtaagcttggatcctctagagcggccgcccttttttttttttttttttttttttttttttttttttttttttttttttttttttttttttttttttttggggcccaatcatcaaacatggattgggttctctcaaaaaatcctgaacatacaatctcataaaaattttttaacacaaacaaaaaacaacttttgcaaattagtttaataaacctagccgaatcaaagacaggaacccaaacaaaacccccaagctttcatggaaaccatttatttgcttttaccaagaaaacctttaagaaaaaggggaacttgagggacccgggtttcttctagctggggagttttccttggaacaagtaaagattgaacggctcggccttactactttataaaccccatttgttggaaacaaataaatgtcttttttgttattccaaccaaagagaaaaacatcccctagggagagccctgaaattcccggggaatcactacattttatggggtgagcactgggcccagctgaa

SEQ ID NO: 115878 - DNA, 441 bp, Arabidopsis thaliana columbia
  unsure (1)..(441): unsure at all n locations
gccgagacctaatacgactctattagggaaagctggtacgcctgcaggtaccggtccggaattcccgggtcgacccacgcgtccgaagacggagaagagctttggcaaaagccgaaaccgggtctggtaaacttttatctgaatgtatatgtatataatgttttagagtagtagtaagtaatatagtgtactatttcttggggaagccatttctacttgcttttctttttatctgcatttggcttttgggtccccaaaaactcttatttctgttgacattatgtctgatttaatacctcttcttcaagaaatggctttcactcacaaaaanaaaaaaaaaaaaaaaaaaaagggcgggccgttcttaaggatccaagcttacttacgcgtgcttgcgacgtcatagtttttttatagggtcacctaatttcatttaactgg

SEQ ID NO: 115879 - DNA, 540 bp, Arabidopsis thaliana columbia
atgcacgcgtacgtaagcttggatcctctatagcagggcgccttaatccattttttttttaagagggatgtaagggtgtacttaatatgatacaatcaacgataattcatttaaaacgattgatagatttgagctataactattatgcgaagtttataatatagtaacccgacgattgtgagtttttttttttaggagtggggagggctaagagaaagaaccgagacgtgagattcttctcccaatgtatgcgtgaataggccaggaggtctccgggtaataagagtgcgactaaaaccctagcctggcgccttgttagaaaggatggccagcggggtaatttatgttgatttatttgtgcacagaagagagaataaggaggcgacagcgacaggatgttagtgtctaccacgagcagaggcagtgtagaacgcaagggcatagatatagaaagtaggttagttaataatgagaatagaagtgtcatagtgtggattgtaccagtagatagaagattaacgttaaattgatgatcagtac

SEQ ID NO: 115880 - DNA, 683 bp, Arabidopsis thaliana columbia
  unsure (1)..(683): unsure at all n locations
atgcacngcatgacagtgaagctgagagatctctctttagagcggcgcgccgctttctcttttttttattttattttctgttcgcaacgattgggatgtgactttaaggtacgatttttagagagccaagggcacgagcagagcttgactccggtcgaaaacaaacaagaacgagttacggcgtcaggaaggaacaacgcaggacggggcagaatgaatttctttttttctacagagggggggaagactgaccaaggctgtggagcacctgtgacattaagttgttacgattagacgcgaggtgaggtgcgagcagtggggtcgcttgcagactaggacaggtgtggatatactgggggtggggcggggcgggggggtgagtacctggaatggaagaccgcggccggtccggacgatagcaaagcgtctacgggcaggggacaatggggagtggagccgcgcagcaagagaacagagggggcgaggggggtggggaggggtgaagggagggggagggtggcgggggggcgggtgcgccgggagagcagcgaatgggggcgaggagaggcaagcgaagtgtgagaggcacaaaagagcgccaacacggagagggaaagagacggggaggcgggggagggaacgaggaggaaggaagaaaaagggagaggggagacggggggggc

SEQ ID NO: 115881 - DNA, 314 bp, Arabidopsis thaliana columbia
tggcacgcctgcaggtaccggtccggacctcccggggggacccaagcctccggtcacgcttgcacgccaccacgatggcggccggagaagccgacgaagtggcattagcgacggtcagtagctcctgtatcaacgaaaacttagggctgctactctgagaacaagaggacagggagagacatttctcttgtcaaggaggagggaccgctaagcaggcgatacccgggatgcgaggacgctgcggtgggggaggagacaccggagaacggggataagccaaatactatgggctgacacagaacgcagaaggaggg

SEQ ID NO: 115882 - DNA, 583 bp, Arabidopsis thaliana columbia
actatagctgagctaggacagccgcatgcacgcgtacgtaagcttggatcctctagagcggccggcctttcctttttttttttttttttttggttggtggtattactttgtttttctttgggatggttagtgttcatcggatttttgttgaagcaaccaacttttaggactttttttttaaaaaaaaaaaagtgacaaagattttttttttccccaggggaaggagggaacggggggtgacccggaaattccgagacagggacggaggggggaccaggttggcctagagggggggcgataagagctggggcgaaaaaggggaaaagagggtcaaggtgagaaagggggactcggcgaaaattcacaaaaaaatgcaaagcgggaaaaataaaggggcaaacgctggggggcctaaagggggaggaaacatacaaatatggggggagcccaaaggcccctattcaggaggaaaacctgggggccaaggaataaatagatgccccagcgcggggagggggggttggggatgggggcccctgggggttttttttccaaagagaaggaaaaacgaatggactcttaa

SEQ ID NO: 115883 - DNA, 557 bp, Arabidopsis thaliana columbia
  unsure (1)..(557): unsure at all n locations
gcacgcctgcaggaaccgggcacccaattccccggtcgacccacagcctccgcggacgcgtggggaaacatgtaagagtagtaaaattaataaattaaaaaaaaaaaccgccaatagttggatgctaaaaaccaaaaacaaaaaaaggacgacaaaaaaaaaaaaaagaacaaaccaatttcttctttcccccggcgaaaaaaagaaacggnnnnnnnnnnnnnnnnnnnnnnnnnnnnnnnnnnnnnnnnnnnnnnnnnnnnnnnnnnnnnnnnnnnnnnnnnnnnnnnnnnnnnnnnnnnnnnnnnnnnnnnnnnnnnnnnnnnnnnnnnnnnnnnnnnnnnnnnnnnnnnnnnnnnnnnnnnnnnnnnnnnnnnnnnnnnnnnnnnnnnnnnnnnnnnnnnnnnnnnnnnnnnnnnnnnnnnnnaggaccagcctagaggggaaatggaaccccccctgtaccggaacaaaaccccccccgcgtgggggggttccccaaattagaccccttacccttagcagggccctaaggccccggcaatttccctttctac

SEQ ID NO: 115884 - DNA, 590 bp, Arabidopsis thaliana columbia
  unsure (1)..(590): unsure at all n locations
nnnnnnnnnnnnnnnnnnnnnnnnnnnnnnnnnnnnnnnnnnnnnnnnnnnnnnnnnnnnnnnnnnctttttttttttttttataaatctagtatcgtttatacaagaaatggttacgatgaccactaacagagttacaacatcgtatattcattacaataaaagtgtgcgtaatgtcaaaatagtgtcgagatcaatcgacagaaacagaggaactattgattatgtctttcgcatatccctctatattacctaaggagtaaggaactgtgctacatttggtttgaggaatttaaacccgccggtttagccaatccaatatgactccagctatagtttcccgttctggttcaaagagcagatcgtgtaacaacccgtcgtacagcttgatcgacttatcggatgaggaagcctcattgtatagcttctgagtacctttaggatcagtaactgtatcagctgtgccgtgcatcacaagaaacggaaccttgattctgttcagattctgcagtaaatgagcaccaagtctaaggatctcgttaccggttcttgctcggataaatccagtgtagactagcgggtcagagtat

SEQ ID NO: 115885 - DNA, 537 bp, Arabidopsis thaliana columbia
  unsure (1)..(537): unsure at all n locations
cctaatactgacatacattagggaaagctggtacgcctgcaggtaccggtccggaatttcacgggtcgacccacgcgtccgcggacgcgtggggaaatatgtaagagtagtaaaattaataaattaaaaaaaaaaatcgtaatagttggatgctaaaaaaaaaaaaaaaaaaaataaatttaaaaaagaaaaaaaaggggcggccgntcttttggatccaaggttacgtacagcggggggggacgttttaaaggtcccatgttgacacccaggtgcatgcaactgcatagctttttaataggtgaacctagggaaaatcctggggccgccgttttaaaacgcctggatgggaaaacccctggcgtcaccaaacttaatagcttggaggccaataccctttgccctggcggcagtatgagcaaaaagaccggaaaatgggcccttccctaaagggggccattatggaaggggaatggggaggccccttgaagcggaacttaaacccgggcgggggggtgggtacccccaattgggacc

SEQ ID NO: 115886 - DNA, 627 bp, Arabidopsis thaliana columbia
  unsure (1)..(627): unsure at all n locations
gaatgattgaggcgnnnnnnnnnnnnnnnnnnnnnnnnnnnnnnnnnnnnnnnnnnnnnnnnnnnnnnnnnnnnnnnnnnctttttttttttttttttttttttttttaaaataaagacgatactaataatacagccgacaacacgtgaagattttatcaacacgtattcaactccaccgcttaaagattcacttgtccgatttataaaaaaaaaaaaaacaagtctaagcattaaattgagaaaacaaaagtacattatccgtaccggctccggtcagatctaattattaagcgcatcctcctggagcaaacccgacccgggaactcgctaagtcgtatacaacccggaaaccctgttgctgaattttccaattttgggatagtccgccattcgtcccggcaaacgcaaaacaaactttgccgttggtttccacagggatcaggtatttcgtcgccggaggtgatccgtcagctccacggaaatgtaaaaccaccgtcggtcctttaacctcgttcatatgggaaagatcgaaccacgtgtcgaaaagggagaaatccggagctcttttcaatgtcttagctccgacccggaacgcgtctctaatagcaatataagctggtcggat

SEQ ID NO: 115887 - DNA, 520 bp, Arabidopsis thaliana columbia
  unsure (1)..(520): unsure at all n locations
nnnnnnnnnnnnnnnnnnnnnnnnnnnnnnnnnnnnnnnnnnnnnnnnnnnnnnnnnnnnnnnncttttttttttttttttttttttttttttttttttttttttttttttttttttttttttttttttttttttttaaaaaacagaggaaacgggtttgattcaaaaaacagagaagctatttttttgcaaaagagcaagaacagttgaaaacaaaatcccctcgccttgtccaaagggtttttttaggggactgggatcatcggagggtaatccacgggtggggggggggcatttgctacaagagcagccggggcaacaacctgacggggggcatagagggcccttttttttttgggagaaggagggcccccccccccgggcaggggggttttgggccccgaattgcccttagggccccaaaaaagcataaccttcaccttgattcccaaacccccttggctaaacaaaacatgtttccctggaaggtctatgttttccttaggggggggaccaaaaa

SEQ ID NO: 115888 - DNA, 589 bp, Arabidopsis thaliana columbia
  unsure (1)..(589): unsure at all n locations
nnnnnnnnnnnnnnnnnnnnnnnnnnnnnnnnnnnnnnnnnnnnnnnnnnnnnnnnnnnnnnnnnnctttttttttttttttgttttttttgtttttttttttttcatttgacttgtcttggtcttgttttttttttattcatggtttctagaacccacaaatgttacaggggtttttttcaaatgaaataatgacaccctctaacattttccccacaccgggaggggaccgggggggaaccccgggatttgggaggggcccggggggtgaacacctttctgtataggggggcttataagagtgaggcgaaatgaggaaaaaagggtttcctgggagaaagtggatcccccacacttgggccacagaatgtgggggggggagaataaagggaaacgcggggggcgccccgggaccgtccaaaccaatctgttgcgggtggactatcggcccgtttatgatgcggaaaacgggggtgccctcttgtttaaaaaaagcggccaaccccgggagaaggggggtttggtttggggccccggtggttttttttttcccgggggggaggggaacggtgattggctttcacccccg

SEQ ID NO: 115889 - DNA, 612 bp, Arabidopsis thaliana columbia
ctaatacgaccctactatagggaacctggtacgcctgcaggtaccggtccggaattcccgggtcgacccacgcgcccgcggacgcgtggggaaatatgtaagagtagtaaaattaataaattaaaaaaaaaaatcgtaatagttggatgctaaaaaaacaaaaaaaatcatgtgatggctctttccaacgcctgctctctctacctttttctttctacggccgcgatcttgggggcggcccatttaaaggaccacaactcatcaccgcgttcatgccagcgaatacctctctaatggggtcaccaaaacccagtcctgtgcgccgcgggttaaacaacgtaggaaacgtggaatacccccgaaggatcccaattttattcgcttgccaggcactccgccttgtcccactgggggttaataccaaaaagcccgcccccaacccccttccaacctttgcccaccttattgggaatgggcccccccctgtaagcgctctttaccccggggggtggtggggatccccccagcgtacccttactttgccagccccttgcccctttctttgttttcctccttctttttccccagagccccggttcccccggaaccaaa

SEQ ID NO: 115890 - DNA, 624 bp, Arabidopsis thaliana columbia
  unsure (1)..(624): unsure at all n locations
gattgagccgnnnnnnnnnnnnnnnnnnnnnnnnnnnnnnnnnnnnnnnnnnnnnnnnnnnnnnnnnnnnnnnnnnctttttttttttttttttttttttttttagagtttctattactggatttttttaaaaccgaaaagactagaacgcccttcttgaaacgagcaactattaaagtgtttttttcaaagacaaaaagtgaaagaaaagatccttttccccaaggggcacaaacagaccaggggcttatcaattaatttaaaaccggcatttggacagtacagacctttaacataagaggattcataaggaagtctggggatagaaaggcacatcaaaaagcgggggccaatgtttttagctttgcctatcaccacaaatttagctgctgtgatcttagaggctaagaagtggctaccacctggatggggatggtttgataccatggcctggctgggggggcctttaccttttgggaaaatacagtgtccctgacgcaaaaaatgaaagcaccccccctgggagaaaggggttgctgaataccgccctcataagtttcttattttcgggcctggggggccaagccttgaatgcctcccacgctgggaccccataagaaccag

SEQ ID NO: 115891 - DNA, 598 bp, Arabidopsis thaliana columbia
  unsure (1)..(598): unsure at all n locations
tacgccgnnnnnnnnnnnnnnnnnnnnnnnnnnnnnnnnnnnnnnnnnnnnnnnnnnnnnnnnnnnnnnnnnnnnnnnccacgcgtccgcggacgcgtggggaaatatgtgagagttgtcaagattaatacatccttagaagatatcgtaatacgttggatgctgaggatgaaaagaagaatcctagatttctgaatggcgacaccatttatagcggcggttgcagtagctgcaacagcactatgctggggggctatgtgaataacaagccctggcttgcattcccggcaaggccaccaaggtccatttttaagaggtccactgagggcggtttccaggcccgatgacgacaagggaagcgtgtggtaaacctcggcgtcaggccaaagtgaatncggctgaaaacgtatccgatttcacaggatggtatagtagcaaaccgtccagatgcatgcgccttccataacctagcctctacgatcagggaaactgaaccccccctgctaggcacaactatagacggcgggtgcggtgggttacgcaaattggaaccaaaagacttgcttatgactcatctcacggtatatgactgtattgt

SEQ ID NO: 115892 - DNA, 583 bp, Arabidopsis thaliana columbia
  unsure (1)..(583): unsure at all n locations
aattgaggcgacactantagatgactatgacgtcgcatgcacgcgtacgtaagcttggatcctctagagcggccgcccttttttttttttttttttttttttttttttttttttttttttttttttttttttttttttttttttttttttttttttttttttttggggaaggaaacctccaatgttttttttccaaaaaccttcaaagggaaataccctttgttttggtgcaaaacatttgtggccaaaaaatgtcttttttaaaaaaacccctttctccaaaaaaatgggatgaggggggggcaaaaaaaaaaaacaaagattttgaaaattttttttgccaacccaattatcccgattaacccttcccccggttttgttttgcaaaaacaaatttttttaatttttaaacgggtaaacaacccccccgacccttagaagttgaaacccacccttaaggggagttttcaaaggagttaataacccttttttggccctaagaaaggggtaaagggggggaccctttttttggttaacccgaagccctttaaaagggggggacgcctcttataattcctttcct

SEQ ID NO: 115893 - DNA, 581 bp, Arabidopsis thaliana columbia
ctatagttgagctatgacgccgcatgcacagcgtacgtagcttggatcctctagagcggccgcccttttttttttttttttttttttttttttttttttttttttttttttgttttttttttttttttttttttgggttgggggggggaaaaaaaaaaaaaaaaaaaattggaaaaaagaaaaaaaaaaaaaaaaaaaaattttaaagaaaaaaaaaaaaaaaaaaaaaagaaagggggggaaaaaggtgagagttcgttaacctagggggcctgggaaacacggctggaaaagaaccgaaccttcaagccaaagatgggacgcgggggagcgtcttgctagaggaaataagaaaaggggccgaggaggaaaatttttaaattaaacccgaactgaggcccggctatagtttccataaaaatagcccgagaaaccggtttttcagaagtactaacaggaagggcggcggctccattggcaataggggcggaaaaaaaagctacaaatccgggtggggaagaagcggccggaccacatatgaaaaagggggggttgtcaaaaggacccgctgtaaaaggggt

SEQ ID NO: 115894 - DNA, 590 bp, Arabidopsis thaliana columbia
  unsure (1)..(590): unsure at all n locations
tgaatgagctgannnnnnnnnnnnnnnnnnnnnnnnnnnnnnnnnnnnnnnnnnnnnnnnnnnnnnnnnnnnnnnnnnctttttttttttttttttttttttttttttttggagcataatagaatctttgtcataaaaccgagttcagagaaatatcttcacaacaataaaaccatagaaaaaattcgggaagataatcaccaaaataacataagttttaacgaaaagaaaaaaagaaaaccatagtcttataacaccgctaataatttagtcgacttttgggggataaattagtcgacttcctccatcttgctaccttcggcatcagcatcgtcttcaaggggaggcatctcagcatcggcttcaacagcatcatcgtcatcaatgctcagtccaagcttcagcatcctgtggatcctgcttccgaaagtgtttggctcatcaaggctgaaaccagaagtgagaagagcggtctcaaagaggagaagcacaaggtccttcacagacttgtcgttcttgtctgcgtcagctcgctttctcaactcatccatgatggagttctctggattaatctccattgtcttcttact

SEQ ID NO: 115895 - DNA, 643 bp, Arabidopsis thaliana columbia
  unsure (1)..(643): unsure at all n locations
nnnnnnnnnnnnnnnnnnnnnnnnnnnnnnnnnnnnnnnnnnnnnnnnnnnnnnnnnnnnnnnnnnnnnnnnnnnnnctttttttttttttttttagtgagtacaatcatttcatttcatataaaacacatgctagaaaagagcgcaaagaaaaacaatgttaaagatccaatgtatatgacatattaatggaatgtaatgagcgaaaacccctaaaatggttgctatgtgttgggacaaaaacaacacaagacaaataaatatcagagcccaccacttttgaaagcgcaaagaatcttattcctaacatacacaaatgatacaacaagaggagattaagacatttacataatgacccctccttttgtgttaaaaaggggctgtgttacgcatgttatacctaaccatgactccttccagtctaatctatcgagaccgtccacgattgctctgcgaaactcatcattgtgaagtataaaggaagacacgtgtccacctgtgacccatctcacttctgaaccaggccacgccttttgaagctccaacactgagtgttttggtatgtatccatcatcagttgcagcaacaaagataacagcatcagggtttttgggaatagggaagcgagtgacgtctgtgaggg

SEQ ID NO: 115896 - DNA, 610 bp, Arabidopsis thaliana columbia
  unsure (1)..(610): unsure at all n locations
nnnnnnnnnnnnnnnnnnnnnnnnnnnnnnnnnnnnnnnnnnnnnnnnnnnnnnnnnnnnnnnnnnnnnnnnnnnncttttttttttttttttttttttttttttttttttttttttttttttttttttttttttttttttttttttttttttttttttttttttttaaaaaaacatctaagggttatcccccaacggaacccctacatatttgttaaggggggggaaaggttcccaaccccaaccccaaaaaacgggaaagagaacccctaatcccggggggggaaaaaccccaaacgggggaggggcccccccctgggccggggggggactagaaaacagctaaaacttttttttgggggtggggataaaaagcgaaaaggcatggggggtggcgtaaacacaaccaaaccctttggggattgggggaggggaaaaaaaaccttaacaaaaaccctcctaaagcaaaaacagaacccgatctttttggttttccatggccaaaacaaaaggtttttttacttctttgggggggaaaaaaaggcctccctaaaagggggatacatggacaagctttggaggtgacccccccgggttcggatacttgaag

SEQ ID NO: 115897 - DNA, 622 bp, Arabidopsis thaliana columbia
gacacttatagatagctatgacgtcgcatgcacgcgtacgtaagcttggatcctctagagcggccgcccttttttttttttttttttttttttttttttttttttttttttttttttttttttcggaaaaagaatgtaatccgttctccagggtatgtatctctggttttttactcgttctccattattaatttatgacgtttaaaaaagactcccaaccaggatgaataattgttcccgggggattttatggcatatgcagattttgttttgaagtaataatgtaacaaatcgactttgaagtcccttccacaatgcgcactatgcacaagaaaagactcgtcaaaagcaaagcaaaagggggggatggctcttaaggtcaacagcttaaaattcttgaggagtctcgaatctagtcggggtatcgatccccgccttacagcaaagtccactgatcaagatgagaagaaaaacgattcccactagtttgccctccaaaagggatgacttaaatttgcagagttcatcccagccagtaccattttcaggagtcctgtttcctttagcagtttcagctagaaacctttggagagttttataagatggtgcccattagggttca

SEQ ID NO: 115898 - DNA, 574 bp, Arabidopsis thaliana columbia
gacactatagtaagactatgacctcgcatgcacgcgtacgtaagctcggatcctctatagcgctcggcctttctctcgcgctcccaatttctccaccggcgggataaccatgtagcactacggatggtcatgtccagcggatataagagacaacctactcacttctcgtccctaacatcaccattcctaacgactagctgatgatctcttatactatattcgcaaagtactggaaaggacaaccgatgtgctgatgcccacagatcgaaggactggtgatacgagcggaactgcgtgcgtacgatctgagtctaaagactgagctcacaaagcactggaaaggctagatggaagagatggcgatggcagataaataactagttcagctgcgaaatctggtccaaatgctggataaatttgcgaaggacgagtagagcaacctccgacgaagtcacgaatatctataacccggtggcctaggcggagtcgtagttctaggaggagacgcatcccgcctagtcgtcttagtcccagaagatgccgcatacctattaggacgttccgagatgactat

SEQ ID NO: 115899 - DNA, 561 bp, Arabidopsis thaliana columbia
ctaatacgactcactatagggacagctggtacgcctgcaggtaccggtccggatttaatgggtggacccacgcgttcactagaccgtggccgaccttatgtttttttttaggaggagaacctatgaattcaagccataagatcaatcaacaaatactataagctgccgaacaggtagaaatcttgctcatgatatacttaaccagaaggatgaccggaaacagacatgcgatcaatactcagtactttagagggcacctacggaaagcaagtaatactacagatgggagaccttccagcgcttaatgatgagacatcatcagtgcgagcaaacgtgtgtgtaatcatacactgtatcactttcacaagaggctggagtcattggacaccacactggagattggcttcaggaggcaccctcaactctgcgcagaggatctgggataccaggagatggggacctgaaagtgctacaccttccatgagacatacccttacaaggataggcctttatgaaagcaagacttcttggactgaggctacacgtaggggagggagacct

SEQ ID NO: 115900 - DNA, 605 bp, Arabidopsis thaliana columbia
  unsure (1)..(605): unsure at all n locations
cactantagatagctatgacgtcgcatgcacgcgtacgtaagcttggatcctctagagcggccgcccttttttttttttttttttttttttttttttttttttttttttttttttttttttttttttttttttttttttttttttggggtcaaacggaaaagcttggtgtttttttaaaccctccaaacaaaaaccccgaaatccattttttttgtttttggaaaaaaaaaaaacaaactgggatacccgggaataggtccccatgaagaaaccggtttgttttatttttttaacaaaacattgggggggacaacttttaaaaaaagggaaaaagaaaaccggttacataattggggggactaaaaaagaaagacagagctggaaattttttccatttttccgaacccgggggaggacccgtggggggacccctgggcggacccgtgggtcccnnnnnnnnnnnnnnnnnnnnnnnnnnnnnnnnnnnnnnnnnnnnnnnnnnnnnnnnnnnnnnnnnnnnnnnnnnnnnnnnnnnnnnnnnnnnnnnnnnnnnnnnnnnnnnnnnnnnnnnnnnnnnnnnnnnnnnnnnnnnnnnnnnnnnnnn

SEQ ID NO: 115901 - DNA, 612 bp, Arabidopsis thaliana columbia
  unsure (1)..(612): unsure at all n locations
gcctaatacgacttacttagggaaagctggtacgcctgcaggtaccggtccggaattctccgggtcgacccacgcgtccgcccacgcgtccgcccacgcgtccgcccacgcgtccggaatgatggaaaatattgcaagctctgtctctctctgttagtcaccaaatgatgtaaccggttctctttctccctcttcttaaaagttgtctcaccaaatgttctgttaaaatactaaatcaaaccgatctcatcatgcgtacctattcccggttatcgcagtctgtttttttcttctcaaaaaactaaaatgttggatttcgtggtttttgtttggagtgtctaatatatcatcatgctcttccgtttgaacanannanaanaannnnnanananannanananaaaaaaaananaaanaaaaanaaanaaanaanaaaaaaaaaaaagggggcggccgctctaaaggacccaagtttacgtacccgtgctggcaacgtaatagttttttttatagggcccctaaatccattccacgggccggcgtttaccaacgccggaacgggaaaacccctgcggtatccaacctaattggcctgggagaaaaccccctttt

SEQ ID NO: 115902 - DNA, 609 bp, Arabidopsis thaliana columbia
  unsure (1)..(609): unsure at all n locations
atgannnnnnnnnnnnnnnnnnnnnnnnnnnnnnnnnnnnnnnnnnnnnnnnnnnnnnnnnnnnnnnnnnnnnnnnnnnnnnccacgcgtccgcggacgcgtgggcatatacagcatctccacgttgaagagtgcaatgaactcctctacttcaatctcccatcactcactaaccatggcaggaacctgagaagacttagcattaaaagttgccatgacttggagtacctggtcacacccgcagattttgaaaatgattggcttccgagtctagaggttctgacgttacacagccttcacaacttaaccagagtgtggggaaattctgtaagccaagattgtctgcggaatatccgttgcataaacatttcacactgcaacaagctgaagaatgtctcatgggttcagaaactcccaaagctagaggtgattgaactgttcgactgcagagagatagaggaattgataagcgaacacgagagtccatccgtcgaagatccaacattgttcccaagcctgaagaccttgagaactagggatctgccagaactaaacagcatcctcccatctcgattttcattccaaaaagttgaaacattagtcatcaca

SEQ ID NO: 115903 - DNA, 586 bp, Arabidopsis thaliana columbia
cactatagttgagctatgacgccgcatgcacgcgtacgtaagcttggatcctctagagcggccgccctttttttttttttttccaaaggcatttctacgtaatatcttaaagattctaggttatgttttacaaaagtcttttcttttttggggacaaatgttacagaagtcttaaaatgcctaaagctacagagaggctcccatcatttactactgctacactcggaaaactaaacacaaataaatgtatgaaaaacataaacataacagcttccaaaagtttaaagaccagaattgggattgtctcctgcaagaataagagagatctcgagaccgcggctgaaggcttggttaaacatcatacgtgtctggaaggtcgacacaaaagggaaccaggagcagagagcaacgggaagaaatatgagcattcccattaacgcatcatatagccttgctagggaacgaatcgatttccacatccccattcgctttaggactggcttccaagcacacgcaatagaaagaattccccatcctgtcggtataaaagccaatacgcatgcaaatatgtctgtcactgacaagg

SEQ ID NO: 115904 - DNA, 592 bp, Arabidopsis thaliana columbia
actatagctagacggtgacaccgcatgcacgcgtacgtaagcttggatcctctagagcggccgccctatccttttttttttttaaaaactttcacagtgcggtatacactcccaaacttgcaacgagacaaaggcggtttcttaaatgtacaaaatatcgggaagaccgaactgtagctggatgagtccctaataaaacggatttttcatttacgcgggggaaaacctgggatagatatcctactgagccagttcccaaacaaagactgaccaaaacacggtgaatccatatcttcacccctggacacaaaattaccagcaccaacaccagtgtgtgcgagacactgaacgcaaagccatcttgagtacagaacagcaaaggaagctctatactaaacctgacgaggggggggacacctcaagcgaacgcgtaggatcaccactgcccagactgcccggacatcagaagaaaagaaagggatcaagcaaggcaactcaggagtgagaagcaggcacgagcgatgcaaccccggccaaggagcagaagtgctgaagaaagacggccaaaaaggacgtggcggaacgcgggccc

SEQ ID NO: 115905 - DNA, 593 bp, Arabidopsis thaliana columbia
ctaatacgactcactatgagggacgctggtacgcctgcaggtaccggtccggaatacccgggtcgacccacagcgtccggaaatactcggagacaccgtcatgtcttccggcaggaaatccaacatggctacaacgcagcagcacgctgaggttgacaagaagttcatctagcagccagtgcaatcagacaggcacaatctgaacgttctgttccagtgaggcggggacgccaaatagtaaccaagggggtcttgaagaatatgaggacactaaccctaaccaagcccttcatcgcaaccctgactgcagctgaagcctttttgcccaagggcctgattctttctccacccgggctccgcgacataagcgaagtcgtccgatggccgccgcggacgggatggaccgagtgagctgagccgcgcccccgggcgcaacacagggtagtggccaccagcagaatcgccatactcgacgggatgagaccgttgaccgactcgcagaggcagcccccaccggggcggccaggcaggccgcataggggcggcagcggagaaacagtcccggagcaagagaacggacagcggggaaagct

SEQ ID NO: 115906 - DNA, 581 bp, Arabidopsis thaliana columbia
  unsure (1)..(581): unsure at all n locations
gacactatagtanactatgacgccgcatgcacgcgtacgtaagcttggatcctctagagcggccgccctttttttttttttttttaaaaactttcacattcgttatataatcccaaaataacaacgaaaaaaataactttttttaaatgtacaaaatatggtaagacctcaatgtcacttttgtttccctaataaaactgttttttcattttttgttggagaacttgggatagatatccttctgatccagtttccaagcaatgactggccaacacattctcaatccaaatcttcacccctggtctcaagattacctccaccagtaccaggtgctcccgagcctgaaccagagccatcttgtctcctgaacggccaaggaagttgtatactaaacctcggcgtctgctgaccctcaaccgatccttgtccatcaccactcccctgacttccttgactcctgttctcataatcaggatcatccgtaggcaactcgaatcgacaaacaggacacgaattatgcaactccagccaagggagcaaacagtcctgatgaaagacgtgcttacaaggcatctgcttaa

SEQ ID NO: 115907 - DNA, 405 bp, Arabidopsis thaliana columbia
tttaggacgacactatgagactatgacgtcgctgccgcgtacgtagctggatcttagacggcgccttggttttttttttttgcaaaccaccgcttgatgaaaacttattcggtttcccaaaggggaaccgggaaaattaaggggcccaaagggcccaggtgggtaaaaaaaaaaaggggtcaaaagggaaaaagttccccctggcccacaaaaaaaaaaggctcttttttaaaccccggggggggtaattttttcccaccggggggaaaaaaccccccccggggggggcggcccttttttgggggggggccctttaaaaaaaccccccccccccccccaagggggggggttccccccccccccccacaaaaaagggacgccccccccccccgggggggggggggg

SEQ ID NO: 115908 - DNA, 496 bp, Arabidopsis thaliana columbia
gcccgcgtacgtaagcttggatcctttagagctgccgcccttttttaaatcttttgtataaagagaatttttgatataccataagaaacataggactggatcagactgggaaccaagatgatatccataatggtgaatcctcacaaaagactgcatagacacaacacgcgagtgctggagaccgcgaatattttttttagggatgtcaaaagctacagtgattatcaaccggggagacaggagtcctactttttctggacataatcggctgctcgacgcagaaatagtacaggaggaggtgtgtgtcgtctaggcggaactctttgagtagttttcataatggactcccgagaggggggtaatgagaccgtttccatacgttgaggtggacctggccattggtctgcaaactaaggttaatcctgtaggcaatatgttgtgagccggaactggggccagtttccggtactggtgcgttatggctggcccgcgcagc

SEQ ID NO: 115909 - DNA, 390 bp, Arabidopsis thaliana columbia
  unsure (1)..(390): unsure at all n locations
atgacgtcgcatgcaccgcgtacgtagcttggatcctctagagcggccgccctttggttttttttttttttttttttttttttttttttttttttttttttttttttttttttttttaatttggaaatatttttntttnnntttttttaaagggccccaaggggggaaattgttaatcccccggggggggggaccccagaaaaanncttggaaaaagggggaggggggggactcggccgtttaacccccccccacccccggggcccgggggaacccacccaatgggattcgagcccaaaacccccctagggagggggcaaaggatcgcccaatttggaaacctctatccccaaaaattgccccgggggcactctgggggggaaaacgggc

SEQ ID NO: 115910 - DNA, 531 bp, Arabidopsis thaliana columbia
  unsure (1)..(531): unsure at all n locations
nnnnnnnnnnnnnnnnnnnnnnnnnnnnnnnnnnnnnnnnnnnnnnnnnnnnnnnnnnnnnnnnnnnnnnnnnnncttttttttttttttttttttttttttttataaaatagatctctcgacctagacccgaacgcacctaattggttagatgtttttttgtacttttttatagcaaatcgatatttccattttgcttctacttcatagagggaaactctttccccaaaatcaaaactcctaaaggcttatctctgtctctcatgacttggccaccaaaaaaacaacagcttcaaagtttccccatttacaaagccaccgcagatagaaagcaacgcctaccgatcgaggaagaaggcacgtttttccacccttcaccttccttaaaacactcaacagtgtctaatatgtcatcctcttcccctttgtatcctccgatcacatatattgagtctttaaccactgccactgctgaatatcctcttaaatccttcattggttctcccgtcatccatgtccctgtccttggct

SEQ ID NO: 115911 - DNA, 410 bp, Arabidopsis thaliana columbia
  unsure (1)..(410): unsure at all n locations
ggggggaatatcccttcaggagaaagaaaagagagcaagcacgagcagaagcgagagagcacagaaaacaacaaggccgagaagaggcaacgaccaggacaacgagaggaggaacgggagagaggcacaagaagagagccagccagagcagaaaagcacaccccgaccgacacggcacgagaaagacgaaattatgtgtcgggagagggggaccggcagggcgacaaggaagaagagacgaggagaggacgaccaacgcgcacgagaccaagagagaangcaggcagaagcgagccaagcaggggcaccgcgcggggaagcagcaaggcagaggaccgcgagacgccgcacagagcgaggagaagaagacggcaagaggcgacaacgacgcggaggagcgcgccagcaag

SEQ ID NO: 115912 - DNA, 495 bp, Arabidopsis thaliana columbia
  unsure (1)..(495): unsure at all n locations
cactatagnagagttatgacgtcgcatgcacgcgtacgtaagcttggatcctctagagcgtccgcccttttttttttcttttaaggaaactgttttattaattgggctatcaaacgcaacaaatctttaaaactgttgtgtaccaggaataacgcaggagatgaacgtacagaacgtctttcatagaatgagcttgctcttaactagatgactttggtaattttttaggcgagagcgggtagaagataccaacccttgatagaatgcgagcaggaaggtggacgctaagatggcagccgtgccaacccaatagaatctcctccgtagaccgatccgctaagatccttggaattaggagttcgcaaaactagaaccgacttagtcggagggtaagaagcggacccttaaagatccgaagcccgcgaatccgactataattgtgcagacggaacgcccctgacctgaaggagagcgaggggctccatacccttagga

SEQ ID NO: 115913 - DNA, 514 bp, Arabidopsis thaliana columbia
  unsure (1)..(514): unsure at all n locations
nnnnnnnnnnnnnnnnnnnnnnnnnnnnnnnnnnnnnnnnnnnnnnnnnnnnnnnnnnnnnnnnnnctttttttttttttttttgtaaaaccacatcgaaacatgacctagaccatggccgctcatgactacatctatccggagtaaaactatatccatcgacatatnctggatactctgaatcgactaaatgaacacagataatcttggtcttccttggatcatatgatcttatagacacgaatccattaccttctgcgacaaaaattctaaactctcagaatactcatttcgcaccttttgaacaaatctgaatctctttgacatcccagcgaatgcttttttcccgatagagaaccttccagccggaatgaccttcaggacattgaacctcaccgtcttagacaatggcctgcattgcccaatgggaacacaatctccttttgttgcacggaagcacggggaatcatgagcaggattgtttgagccgcttttctaatatctaagatccttt

SEQ ID NO: 115914 - DNA, 514 bp, Arabidopsis thaliana columbia
  unsure (1)..(514): unsure at all n locations
gcacgcgtacgtaagcttggatcctctagagcgtcncggctttttttaaacctttttttgagagaagaaggatttaatggaggggaaaaatgatgtgtgtgtgaaaaaatatattattttgaaaggttgtatgnagaatggtagaaagaggggaggttgggataaggggggagagtttaagggggatgaaaaaaaaaatttttttttaagggggggggaggggaggagaagaagaagagagtaggagtaggntgagaaatatatattggtgggtgggaaagaagtggtaattatttaggttatggaaggggtaatagagttggttagggaaaataatgagaggagtgttatttgtagatggaggaggttaggggtgtgtgaaataggaaaatatgtaatggggaggggagatgagatgagggggatattagtgtaataatttataggagaagtatggtgggaagggggagaagtggtgaaggganggtgggttgtagaagggtaggatgtaaag

SEQ ID NO: 115915 - DNA, 513 bp, Arabidopsis thaliana columbia
  unsure (1)..(513): unsure at all n locations
aattttnnnnnnnnnnnnnnnnnnnnnnnnnnnnnnnnnnnnnnnnnnnnnnnnnnnnnnnnnnnnnnnnnnnnnnnnnnncttttttttttttttttttgaatagcgcattagaaactcaagattatgcagttttcattcttcacttaaggatcattctcacactattttactgactacaaagggctgacaacccaccccgttatcggattcttcctacggatacgagattttccatgagagacagactgcaaccgttcaagcacagtgtaggtaatggaatccggtgtgagtccttgctgtttcatctttgagtatagatcaactgcttctgcggttctcccgttcttctctagacaatcaagcaaaatgttgtacgttacaatgtttggttgacaccctttaacaagcatctcttcgaacaaactatacgccatttcgactctctctgttttcccaaaacattccatcagagtgctgtatgtgaccacatcagggtttaatcctttttct

SEQ ID NO: 115916 - DNA, 507 bp, Arabidopsis thaliana columbia
  unsure (1)..(507): unsure at all n locations
nnnnnnnnnnnnnnnnnnnnnnnnnnnnnnnnnnnnnnnnnnnnnnnnnnnnnnnnnnnnnnnnnnnnnnnnnnctttttttttttttttgatcaaaattttgtgtattttatttaatttgttaattctgtttttttaaaagaaaattttctttctttcaaagaagaaaataatattattgtaaggctttgaagctgtgagctctgttcagcatcctctctctctctacgaagggactatgtctaagaacatctctctcaagtcaataaatattaatgtaacccagtgatgatgatccaatggtctgtctagtttccgaaacgccaccattttctcttcctctgtagctctgtttcagatgtatctctgtttaagtagatggcgttgtaatgaacctctgcccagaagctcaagaagattactgcagacaacaagagcaaaataaaagatcactgtaataaccagcaagagagaggtatagtagacaaacaaaatttacagtgaaag

SEQ ID NO: 115917 - DNA, 523 bp, Arabidopsis thaliana columbia
  unsure (1)..(523): unsure at all n locations
tttaggactacactatagnaaaatctatgacgtcgcatgcacgcgtacgtaagcttggatcctctagagcggccgcccttttttttttttttttttttttttttttttttttttttttttttttttttttttttttttttttttttttccaccccaaacccatggggggaaaacattttaaataccttaaaagcccccaaaaaacctaaaccttaaaaggacaccaacccccccccaaggccccaaaaggaaaaaaaaaaaaaaccgaattttaaacctttataaaaccaaataaatgtaaaaacccccttttttgaaaaatgaaccaaataaaggttgctgtttaccatccatgtatccagcataaacaagccttttttcctttttagcaggctaaaaattttaataaaccttaattttaaaaagtttttaaaaccttatttggggttcccacccaaacatttccttggccttgctggcatctcctgaaaggttttttacttaagcaggccaaaagcccctt

SEQ ID NO: 115918 - DNA, 550 bp, Arabidopsis thaliana columbia
cactatagaagttttaggggcaactgcacgcgtcgtaagcttggatcctctagagtttgcgcgttttttattcttttaagccaggggaaatgcgttaactgaacacggaacactagatatcgcggcaccacagaatggaaaatacgggccccataaataagcgcacttactttgaagcaacaaatagaataacgataatgcggccgagagccaaacagaactcttgtgatttaagcggatagaagcaacgctcccatcgcgaaccattgggagagactcaccgcacgaggatgtccgaactccgcacctactgagggaacagagggtgggaactaggctgagccaattagtcgactccgtgggaaagcaggcgaagaggggagaaggacgggaacatgcgagaacaccacagtcgtaccgaggcactagttgccaaatagagcaactgggcgcacatagagaactgggccttgagtaaggatgaacgcaggagtgggtgttgatagaggcccgcagaggtcgctgtaaggcggcgtcgcgagtcttgggg

SEQ ID NO: 115919 - DNA, 443 bp, Arabidopsis thaliana columbia
  unsure (1)..(443): unsure at all n locations
cccccgccacaaaaatttgggtctcccttaaagacgtccgcccctcttttttttttctcttgggggcgcgcccaccccaacttttttttttttctcgcgggagggaggggggggcgcgcctccatatactacctttctctattnatnatttcttcttcttcttttgttttttgggggtgtggggggggggcgcggcgtgggagaccagcaacccnaccaaccaaacacaccaacacacacacacattttcttttttttacaagagagagaggggggcacaaaaagcagcagcacgcgacgccaagaaagagacgagagcgcagaagacggcgcccacgacgcgccgggagagagttagcggcgagcgaggagtccgcgccagaggcggagcgaggccagcgcagagccccggcgcgcgcgacgcgaagcgagcaaggagcgag

SEQ ID NO: 115920 - DNA, 472 bp, Arabidopsis thaliana columbia
  unsure (1)..(472): unsure at all n locations
tggggacgacctatagnagatgcttgacgtcgcatgcacgcgtacgtaagcttggatcctctagagcggccgccctttttttttttttttttaatacacttgtttttttctttcttaatcgatgtgagaaacaagctatcagggcttgaccgcgcctgccttttccttttttggtttttatccttgtaggaacctgggttacctttttaacctttaggggttttttggtttgggttaaggggcccctttgggggggggttttggagttttaagggggggggcttttccccccccttttgggggtttcccccacttctggggggggggggggggtcccggggcccccttttgccatttttccccttttttggggttaaattgggggccccggggtgttcccagggggggggggcaccgggggttccccctataataatactcttgggggggtaaaaaaattgtgggggctttt

SEQ ID NO: 115921 - DNA, 520 bp, Arabidopsis thaliana columbia
  unsure (1)..(520): unsure at all n locations
ttaggacgcactatagnagtttctatgacgtcgcatggcacgcgtacgtagcttggatcctctagagctgccgcccttttttttttttttttttttttttttttttttttttttttttttttttttttttttttttttttttttttttttttttttgagagcaaccaactattaggattttttttttaaattaaaaaaattgacgacgtttacaaattcccccacccgttcgggggcgggggggtcgacccgggaattccggaccgggaccgggggggggaccagttttccctaaggggggggcgataaaagctgggggaaaaaaggggcaaagggggttccggggggaaaagggtatccgttaaaaattccaaaaaacatgcgaggcggagagataaaggggaaaggcgggggggcctaaggggggagcaaacctccattaatgggggggggccccagggccgctttccagggggaaaacctggggggccagttgtattaaggagacgggcacccgggg

SEQ ID NO: 115922 - DNA, 486 bp, Arabidopsis thaliana columbia
atgcacgcgtacgtaagcttggatcctctagagcggccgcccagtgtaaatacctttgaagagaaagaaggggcggacacaaccgaaaaacgaaggggaacgagccggaaaaaccaatcgacacagacacacaccaaaaaaaggacagggcaaaagaccaaaccccgaaagaagacggggagaccacaagggccatatttatcggcgggccagacaacgcgagcgacaagaagcgagcgacgaaaacaaggaggcagcccgatagacgaccaaacaagcagagaggtgaaaaaccgaagcccaacgaggcggggcggagcacgcgcaggaaaaagacgcagggaaaagaaaacgcgcaagaccgacaaccaaacaacgcggcacggcgcggagaaggggaacgagtgacgccggacaccgaccgaagcaaggacgaaagcggcgaccaccacaaaaaaacgacacaagagagacggaaccgacaac

SEQ ID NO: 115923 - DNA, 359 bp, Arabidopsis thaliana columbia
actatagaagattatggcgtcagactgcacgcgtacgtaagcttggatcctctagagcggccgcccttttttttttttttttagagagaaaatgggcttcaggatattctttatttatttttttgctagagcgcaccctgaccattttcaacacctaatccatgcaaaacaccagaatttggggggcagtgggaccaccagaagaatttctccccttgagctcgtgtttttgtgacacggaggggaagaaagactattgggaagccgagctttgggtgactagaatgcccaacctttcgtccaagtaaacaagaaaccttgcggaaaggtttggttggaaacccacccgcgaaagggct

SEQ ID NO: 115924 - DNA, 521 bp, Arabidopsis thaliana columbia
  unsure (1)..(521): unsure at all n locations
tttaggacgcactatagnaagatctatgacgtcgcatgcacgcgtacgtaagcttggatcctctagagcggccgccctttttttttttttttttttttttttttttcggcccctataacaagattattattattaaatcataacattttaaaataacagacaaacaataagaatagggttgtattattaagtgtttaagaataagagaaagaaaacaacacatgttgttgagaagactctcttgttttcccagaggtatcccaatgttttcttctttattggtgagtattaggattgagactaaagggcagatgatccagctaaacgccttcttgatgcattcgaaatggaaacttgaccaaacttatccttatccgaatcacttgataacgttcgttctctcactggctcgtaatgcctcatccacactccagtataggcctgttggggtctcatgatcctagggtcaggatcatctaacgactcacgccagtgtgacaagtatccagccatacgcggga

SEQ ID NO: 115925 - DNA, 471 bp, Arabidopsis thaliana columbia
  unsure (1)..(471): unsure at all n locations
ccgcgtacgnaagctnggatcctctagagctgccggccgttattaaacccttttttgttataaagggcacaacccaaatctcctggcgctttttcgggttactacttcgcgccctaactcgcgcgacaacgcccaccgcgtatcacgttccatattgagtaccgcccccccgaccgcgcccgagaccgaatttttttttatagggggcccacccccccccccatatgggaggcgcggcggtctccctctgtttcatccgtatcagccccctaccgatctgagtgctcccctccttcggctctcattacgcacaccctcgcacggtcgcgtatccctccggaccgatcggtctccccgtttgtttctcattgacgactcccattcaagagatgtgttgcacctgaccttctgtaccgcgtctgcgcgtgcttgccgtgggccgcgtgagggccttccgcgggctgtagccgc

SEQ ID NO: 115926 - DNA, 521 bp, Arabidopsis thaliana columbia
  unsure (1)..(521): unsure at all n locations
nnnnnnnnnnnnnnnnnnnnnnnnnnnnnnnnnnnnnnnnnnnnnnnnnnnnnnnnnnnnnnnnnnnnnnnnnnnnnctttttttttttttttttttttttttttttagaaaagattgattttgctcacaaccaaaaaccaacaataaagtatttacaggtttcaaatgcatgacattattggactagaaacaacaaccaccctgtcatgtaattttacaaacttgcaaacaaatcatcttccaaagatgaagtattatcacacacacaaggttcactggccaagtatatccgctactgatttcttgacaattttcgaaagctcctgtctgtccggtttgaacaagagatatcgatatgtgaaccactgcagaaatggagatatcaaatgctagaagaatcaaggatcataacatttatacttattgagatgataccaagccttattacttaccgtggagaacaagataccaactagttcgaatccgctcgagataacgggcaatttgtcgattgcccgga

SEQ ID NO: 115927 - DNA, 505 bp, Arabidopsis thaliana columbia
  unsure (1)..(505): unsure at all n locations
tttaggacnnnnnnnnnnnnnnnnnnnnnnnnnnnnnnnnnnnnnnnnnnnnnnnnnnnnnnnnnnnnnnnnnnnncttttttttttctttttttttttttttttttttttttttttttgggaaaacaaacacaaatattctcgctgtattaatacttactgcttcaatttacagaaaacatgaaaaaaaaaaaaaaatctgttttgtttcaattcaaaactttcattcacttttctttccctatatatctttaaacaaacgaaaagggtttttttgtcgagtcacgtatatgtacgtttgcgttactatgccgctggctgagttctggagttagaacgtcgcagtttagctcgagcatcagtgaggggtgatcccggaattgtatcaggaatgttgactccatcatcaccgttaaatgttccggcggagtctcggcctggtgttggtggtggtgttggtggcggccacttcctccctctgcttgtttgcttctctagcgatcgc

SEQ ID NO: 115928 - DNA, 506 bp, Arabidopsis thaliana columbia
  unsure (1)..(506): unsure at all n locations
gnnnnnnnnnnnnnnnnnnnnnnnnnnnnnnnnnnnnnnnnnnnnnnnnnnnnnnnnnnnnnnnnnnncttttttttttttttttttaactttgcagaattgacaataacactcttgatctggtgaacagcacacatacgtagacacagactatgtctaaacggattgatagtgcatcaagcactatagctttgttattggattcatgaaacatgctttcagacttcagccatgtcgattcttcttttgctggtatgcgccggttgggagagacttagtcgtcggtgacctcagattatcacgcctacgaccacatagggtgggtctaggggaagctactgtttaggaagagttgtgaatagctgggtggtatatgaacatggtgattacgcattattaacagcatgagagtgaaaccgacactgtgcatagataagtgcctgaggggctgaactagtgtgactaagctgtactgcgttcaaatgttcgatttgtccgatggtgtt

SEQ ID NO: 115929 - DNA, 416 bp, Arabidopsis thaliana columbia
  unsure (1)..(416): unsure at all n locations
nnnnnnnnnnnnnnnnnnnnnnnnnnnnnnnnnnnnnnnnnnnnnnnnnnnnnnnnnnnnnnnnnnnnnnnnnnnctttttnttttttttttttttttaaccgaaatagggtttttaccccaacttgtgattctttgaaaggccttttacaacccaacaaaacttacatttttgatgaaaccttaaggaattcccccctttccttttaaatttccaaattttaaaaggctttttggggggggggtgggaccctgggaaaaaaaaattccggggggggtcttatacacgcccgggggtatgttctttttttcaaaaaaaaaagggggtgggaaatttttccccccaacccccccttttttttttccccctttttttaaaaacccaaggggggggggcctttttttccccccccaaaa

SEQ ID NO: 115930 - DNA, 530 bp, Arabidopsis thaliana columbia
  unsure (1)..(530): unsure at all n locations
tttatttaggcgacctatagnagatctatgacgtcgcatgcacgcgtaccgtagcttggatcctctagagcggccgcccttttttttttttttttttttttttttttttttttttttttttttttttttttttttttttttttttttttttttttttttttttttttgggggaaaaaaaagggaggccaaggagttgtttacttttgaggggtctcgccaaaaggcctataaaccaagtccatatccccccgggcccggttgagccaaatttgcataacccaatggccaaagttctcccttaagcctagagccccccagaactgggagaatactttgaattccctccccactgcagctggggagggggaacccaaaaacggaaccccatcaacgggcagccggggctaaaggggtgatcccaccactggccctgccactaatcctcctgcgcgaaacgcaggtggtttccctagcttgacttttttttggggcataaaggatagggaagccccaaagctgttagccaaaa

SEQ ID NO: 115931 - DNA, 503 bp, Arabidopsis thaliana columbia
  unsure (1)..(503): unsure at all n locations
nnnnnnnnnnnnnnnnnnnnnnnnnnnnnnnnnnnnnnnnnnnnnnnnnnnnnnnnnnnnnnnnnnctttntttttttttttttttatcgtggaacaatttaattttgtttacaaacaaaactgtttttttcactagacatggggatttccgaagaaagaaatgggaacaggattcctagagcacttcataacataagggcgaagaaggtttattttgtattacgttccgggggaccagctaatcataaaacgggcccataaatggaatctcccatttccttgccattcctgatataatgtagcaaaagaaaaggattacaagaccgcttattcccgaggcttcgaccaaatcaaatcagccgaattaatcagatttagcaaattccttattccttcctagcagctctggcattggcgttttcaaactccaccactcaggattttgcgaagtctcttaaatataaccatctccccaatccccctcccaatccccggaaaaaat

SEQ ID NO: 115932 - DNA, 516 bp, Arabidopsis thaliana columbia
  unsure (1)..(516): unsure at all n locations
actatagagagttatgacgtcacatgcacgcgtacgtaagcttggatcctctagagcgtccgcccttttttttttcttttgagaataagaacttttaatcggaaaaaatcatcaacccgagttattgttattcttcaaatgattcagattcatgaaaaaacaataatattcacattgatgatctccatattcttccttcaagagagatcactatcacatttacatcatcgggatacctcctacgatctccttgcggtatctccaacaattcatgaatatccataccaaacttgttggccgcacgaaggaggacttcttgaattaagtgttgagctggaccgccttcagggaaagcagagatgaaagattcaacctcgaaaatggcttcttggttagagaaaatattcatacaatccatcagaagatatggattaggaatttagtcacgnggaacgttagctttgggatgacataatgatcggtgaacatgtaatatatggtgatggcccgatttaa

SEQ ID NO: 115933 - DNA, 404 bp, Arabidopsis thaliana columbia
ctatgacgtcgcatgcacgcgtacgtaagcttggatcctctagagcggccgcccttttttttttttttattaaaagcttctttattacctgtatgataagatccttaggatccaaggggcccagggaaccaactcaaaagttccggaatgaaaattaaaccccaaattttttaaacccaactcgaaggggggatttttttaaaaaaaaccccggggggttttttaagggttttttttaaacccgtttttttctttaaaaaaaaaaaaaattttttgccccctttttttttttttttgccacccttttggaggaggtttttttattaaaaaaaaaaaaaatgggggggggaaaaaataaaacccccttttttttttttttcccccagggttcccccccctttttt

SEQ ID NO: 115934 - DNA, 460 bp, Arabidopsis thaliana columbia
  unsure (1)..(460): unsure at all n locations
ggacgnnnnnnnnnnnnnnnnnnnnnnnnnnnnnnnnnnnnnnnnnnnnnnnnnnnnnnnnnnnnnnnnnnncctttttttttttttttttaaaattgtaaataaatgatcttggctttgctttaaattgattccgaaaggagatcttttgatgatggataccaaacattttttggattcggtttcctccctttggcgggttttactactgggttttatcaggaaaagccggaaacttttttttttcccgagaaaaaaaggggaaaaatggggttttaaacacctcccccattttccaaaacccggatggggggcctataaaactcttttaaaccccaccaaacgggggggataacattttgggggggaaaacaaaaccgcgaccttcgcgggcggagaaaaaactaacacacgggggttttctttttgataaacccccgcggagatatccccccccccc

SEQ ID NO: 115935 - DNA, 508 bp, Arabidopsis thaliana columbia
  unsure (1)..(508): unsure at all n locations
tttaggacgcactatangaagatctatgacgtcgcatgcacgcgtacgtaagcttggatcctctagagcggccgccctttttttttttttttttttttttttttttttttttttttttttttcattggaaaattaattttcattgatgagtcctaggggaaatacaaggagtcgacgatcaatacatgatcccgaaaactaacccgaaggataacaagatttcctaggaaactaagtccaaaaaaatggggagcaaataacacccctacaaaagaaacaggtcaaaacactgacggttaaaaaagcaaacttcagagggaattaaaactcataactcaaaatctagcaccaaacattttgcaaattatcaatccaaaaacgaaaaacgcttgaattaggggctagccaatggagacaaaaaaatccacgacaccggatagcgacttttcctataccaaatgaagactacctcacaaataaagagaaccaaagcttccatcccagcaag

SEQ ID NO: 115936 - DNA, 511 bp, Arabidopsis thaliana columbia
  unsure (1)..(511): unsure at all n locations
attgaggcgannnnnnnnnnnnnnnnnnnnnnnnnnnnnnnnnnnnnnnnnnnnnnnnnnnnnnnnnnnnnnnnnctttttttttttttttttttttccatgcaaactccgaattcatttaattccacgtgacttataagttacaaccaaataatataaatccacagctgcgaagatagccaaacaaatatataaatgtattctcctaggatcataagatttaaagactgctaggtaaaagagaaatttgtgcatagtaattgcggcgtggtctacctttcattgctttgggagaagtaaaagtggaatcatcttctcctggcagctggttgcacttgtgcacctcctgcctgtccacccgcaggttcttcagccatgtttgatgcttgtgtcacggcattcatcactacgagtcccagcggtatcaaatacatccaatatttcgcccaaaatgatctctctggtggtggttcaacttctccctttacattctcactgcctagaatctcct

SEQ ID NO: 115937 - DNA, 492 bp, Arabidopsis thaliana columbia
  unsure (1)..(492): unsure at all n locations
nnnnnnnnnnnnnnnnnnnnnnnnnnnnnnnnnnnnnnnnnnnnnnnnnnnnnnnnnnnnnnnnnnnnnnnnnnnnctttnttttttttttttttttaggattgaatngatatattatttggatagtattatttttcaattcaacaaaataacatcggnnggtttttataggtctttttggttggaagaatttctttggacggggaaggcctggcctttctaatggggccctcccccccccccatttttgggaaaaatttttttcggggtccccccacaaaaacccgcattgtgggggccccacaaaaacccgcgttaaagggggggagggggttttcccataaacccttggggggaaaaccaaaaaaaaattttttgtgtttttataaaaaaaaaaaacaaaaggggggcgctttttttttgtggggggggaaagaaaaaaaaaaacacccttttgttttctccaggggttttgggggggggggaaaaaaa

SEQ ID NO: 115938 - DNA, 528 bp, Arabidopsis thaliana columbia
tttaggacaactatagaagatctatgacgtcgcatgcacgcgtacgtaagcttggatcctctagagcgtccgccctttttttttttttttttttttaaccagttaagagattttattagtcacacaatctttaaacacacaaacacaaatgaatgaagagatactgaaaacaggaacagagcgctcaaacattgagcttcataagaaaaaacctaagcaaaatgtgtgtttcttttgtttctcacgctttaatcaaagacgcggtaagactttcgcgtaaaacagagtaaaccgatctccatccttcttctgtagggtgaagtccatcccaaaagaaagcagttttaggattatcacatacaatatacttcttcactcccttctcatccacacttccacagttatactcgcggctcacacctacgcaacacggctttaatggactctcaaaccttgtactccctggattagatcctttgttcttgaacacagtcaagaaagcattgtagagatcaaggatgatgaaag

SEQ ID NO: 115939 - DNA, 492 bp, Arabidopsis thaliana columbia
actgcacgcgtacgtaagcttggatcctctagagcgtccgcccttttttttaatcttttttttttttttttttttttttttttttttttaaccaaggaggctacaacttggtggtttttattcaaaaaagggcctaagaaacttggaataatgaaaggggagagggaaagggtgtgaccgctccggcgtgcccgggaattttttttgggggtggtagaaaatccaaagggccgaaagtttctgcgaggcacacatggatggcacaccaccctattctcccaggctgtggaaccacagattgtttaacaacgggggctttgcattgggacgggttcaagcttaacagaataatacaagtttcccttataattaaaccgggggtgtgactgtttactacatccagagcggggggttggactaggtgattcaaaaccggggggaataaaaccatctgaacggggaacgaacaccccaggtggcaggttttaattc

SEQ ID NO: 115940 - DNA, 514 bp, Arabidopsis thaliana columbia
  unsure (1)..(514): unsure at all n locations
cactatagaagattcttgacgtcgcatgcacgcgtacgtaagcttggatcctctagagcggncgccctttttttttttttttttcgtagcaaacacaaaattttattcaatacaacaaccaaaacagaacaaaaaccaaaatatcaactcaataaaaaaagacaaacacatgagacagattaaacaaagatcgaatgaaaaaagtggaaaacaaaaacaggcttcggtcaaacaaatagcctgtcaaaatgcttgactttgagttaacatgtcagtatctgttccgcgacgccgttttatgacttcgtacaatccccaccaacctagacttactaagcctaatcgctgccgtcgtgaccggtctttctttctaaaaaaggtatcttattgtaaccaccgtcttatcaccaatcccgagtatggatccgggccaactttagctcctactgatcttgatctcagcacaaagattcgacaacgaaaccggtaacgtttcttccggaactaatttttg

SEQ ID NO: 115941 - DNA, 516 bp, Arabidopsis thaliana columbia
  unsure (1)..(516): unsure at all n locations
ctatagnagagttatgacgtcgactgcacgcgtacgtaagcttggatcctctagagcggtcgccctttttttttttcttttttttttttttttttttttttagtattcaattattacgatttttttttttaatttattaatttttttaggggaacaaaatttcccaagtttttttggaaagctaaggattgacccgggaatacaggaccgcccacgggtggtgtgacggggggggctacccggagaatacggaagggggcctggagggtgaccaaatttcgttatgggggggaaaaagaaaggggggagaaaaaaagggaaaaaaggagccgggggggaaaagggtaaagcctgggaagtccaaaagagagaggtggcggggagtaaaaaggggaaggccgggggggcgttaggaggggggaaacccagaagtaggggggggggaaaagagcgcgcataccaggggagagaagggggtggccaattgggtaaaaaggggggcacaagggggggggg

SEQ ID NO: 115942 - DNA, 547 bp, Arabidopsis thaliana columbia
  unsure (1)..(547): unsure at all n locations
caacaccgcaggcacctggtgccactctcagagcagcacccccagaccgcccaacccccttctcctatcgatacaatcagaaagacaccacgcatattaagaccaacgctcgaggcatgggggaccccccaggggggggacccgtccgcccctttccaagaacaccccccccacagggggggaaaaatagtggttaaaaaagggggggaggggaacgcgcaacccccccccntttatgagaggnaaaaaaatataaaaccccttaatggggaaaacaccgtttcccccgcccccaaaagggcccccccccccccgccggttttaacccccctttaaaaaaaagccccccctggggggggaaaaaacacccccccccttcaaaaaaaaaaaaaaaccggggggggncccccccggccccccccctttttttgtggggggttgttgtttttttttctnctcttttttttttttttttttttttttgttttttttgttnttttgttttttttttttttttttnttntttnntgggggggaaaaaaaaaaa

SEQ ID NO: 115943 - DNA, 512 bp, Arabidopsis thaliana columbia
  unsure (1)..(512): unsure at all n locations
nnnnnnnnnnnnnnnnnnnnnnnnnnnnnnnnnnnnnnnnnnnnnnnnnnnnnnnnnnnnnnnnnnnnnnnnnnnnncttttttttttttttttttttttttttttttttttttttttttttttttttttttttttttttttttttttttttttttttttggggggggcaaaaaattactaaatttaaaccaacaatttgaaaaataaaaaaaaaaagcccaattttaaattttttattccccaaccttaaaaaaaattacttttttccccccccttttttttttcctccattcttccaacccaaactatgtacactttaatttcaattaccccaagaataaaaccccgccccaccaaaaaaaaaaaaagttccccatttattattatacaaacttttaatggcgaaaaattgggggttctggggtaatattttgaaataatgccccggtacaaaattgttgtccaaatccaaaatttcaaaattccaaaaaaaattttttttccaaaacct

SEQ ID NO: 115944 - DNA, 529 bp, Arabidopsis thaliana columbia
tattgaggacgcactatagaagatctatgacgtcgcatgcacgcgtacgtaagctcggatcctgtatagcgctcggcctttctttctcgctcccataatataccatcgatggcactaccatagctcactatgaaaagagtaggacctccaggatattatatgactccttactcactgatgacatcttaacatacatccaaacgctcgactgactgaagatataatctcgtgctaggcgaaaattttgggaaccggtcagctggtgtgtaaacaacgactatacttacagactgaacgattcggaagggttacagtgtctttcttatgagcacacacactaaccttacaaggcacatgcagaggtactgaggaagctagtgttgctagcagaatcttatctgaccattcacgtaaagaacatgccattagcagctaacttgttctttagttgagagaatgtatcaccgtcaggtccactattatcgtataacgcgcaacaaacccactttcctattctctacgaagagcg

SEQ ID NO: 115945 - DNA, 523 bp, Arabidopsis thaliana columbia
  unsure (1)..(523): unsure at all n locations
tttaggacgnnnnnnnnnnnnnnnnnnnnnnnnnnnnnnnnnnnnnnnnnnnnnnnnnnnnnnnnnnnnnnnnnnttttttttttttttttttttttttttttcagaacaaaagagacatactggtgagcattagaatttttataaaaccttatcaagcagatttgatattgagtttctccatacgagctctaatgtacttaagatgctcatcttcaggaggaatacatttcttgataacatcattacccaacaaattcttaacccatctatgtatctccgggaacttctccaccggaaccacctttaccccgacgatctcctccgttctcatcagccaaaacgccaccaaagtcgccacaatatccacaaaccctaaacttttcccaccgagaaaatctttcccaacaagctctttctccaaaaacatcaacaaatctctcgtcgcttcaaccacagcatctctctcttttccggtcttccccacaactttcatcgccgtcacataaatctgttcatcgacg

SEQ ID NO: 115946 - DNA, 516 bp, Arabidopsis thaliana columbia
  unsure (1)..(516): unsure at all n locations
ctatagnagagttatgacgtcgccatgcacgcgtacgtagcttggatcctctagagcggccgccctttttttttttttttttttttttttttttttttttttttttttttttttttttttttttttttttttttgtttcaagccaaccttaatgaaaaaacatggaagccctaggccctaggaaagtagaggggtccaacattaaaacaaaaaccgcaattgacgacccccaacccaaaagtaaaaaaaaattaaaaataaaccaaaaaaaacccagggggccacgaacaaaagaggagtttcggccgtttagttatgacccaaaggttaaaaaacgggcccctttttttaggtgttcggttaaagaaaaaagcaggccggaaaccgagaaggggtcggctaaggttaaaagaaaaacgcgattccagagaggcaggaaaaagctaaaaaaacgcgacccccaccaaaaattcggcaaaaaccgtcccatgggattcggggatcttcaccggagga

SEQ ID NO: 115947 - DNA, 510 bp, Arabidopsis thaliana columbia
  unsure (1)..(510): unsure at all n locations
tatagaagtctatgacgtcgcatgcacgcgtacgtaagcttggatcctctagagcggccgctnngttttnttttttttttttttttttttacaacatactacacgctgaaagcgcattaattattccttattactacaacaagttcccaatttttaaatacgcttacataaaaagcccacaagtttctaaggattagttgaaataaacttcatacttaaactgtcgatctggaatgaaacagtcccaaaaacttctaatacgttgggttccttcttattctcatcgaacatagcgaatatataagtctctatagcttcccttggccttctcggtgatccattcttaacatgttgaataaaatggtaaacataagtttttgcgttttcaacactcgtccggacgtgttcctttggggggccaaccgggtctccgaccccacaatttccaacgttccgccccctgatttttccaatgctggataaaccgagtcaagatttgcgtcgaatagg

SEQ ID NO: 115948 - DNA, 357 bp, Arabidopsis thaliana columbia
  unsure (1)..(357): unsure at all n locations
atgacgtcgcatgcacgcgtaccgtagcttggatcctctagagctgccgccctttgtttttcctttttttttttttttttttnntttttttttttttttntntntntnttttnnnnnttatntntttgggttnnnnntnntgggcccccggataacccccaccttttttggccctttgggggagcccggtttctcccccccggtaaaaatccctttcctcgggggggcctctctttttaagaaccaaggccttgggccacaaaaaactcctccttctctcgcgaggagattctgggctccccccacaaaaacaccggggggcccccacctttggcggggggtgtggggcgctcgccc

SEQ ID NO: 115949 - DNA, 480 bp, Arabidopsis thaliana columbia
  unsure (1)..(480): unsure at all n locations
tatgggcacactatgagatctatgacgcgctgccgcgtcgtagctggatctctagagcggcgnttttttnnnnnnnnnnnnnnnnnnnaaatcccacaggaccggctttatttgggggaaataccgggccctgaatggggaaaaaaattttaatttttgggagaacctttttggggggaaaaaggggttaaaatttttggtggggaagtttttcgcggactttttttttgggggttaaaaaaaaggggttttttaaattttttttggggggggttcccacccccctctcttcgggggggctctttctcccacaggggggggagattttcttttttgggggggaggccccctctttttataaaaaaaaaaaaaanccgnnaaccacccttttttttttttttttttcacaaaaacaaccggggggaggggggggggggtttttattttttttgtcacacaaaaaaaatttttttttttttt

SEQ ID NO: 115950 - DNA, 510 bp, Arabidopsis thaliana columbia
ttgaggcgcactatagaagatgcttgacgtcgcatgcacgcgtacgtaagcttggatcctctagagcggccgcccttttttttttttttttttttttttctcccccaaaccaataatagttcacacaactccacaaaagagtacaaaaacagaagacgatgcaaattagaaagaaaaagaaatctcctagtctcatcaaagcgtttcaatatgtcataccaaatcctaagatcaaacagggggataacaaaatgtacaccattatattcacaatgggaaaatacgaagcactcacactattgttaaatcattttccttcctcctatcatactctgctgcgtctgagacccagacaagttttgagaaccattactactgttcgccggtttattatgcttcccgtctgcgctcccaaacacatccagatcttcaaacaatctgtatgatggaacaaacggcttctgtcctacagatacacctgaattgcttgcagttgaagtagcctgagga

SEQ ID NO: 115951 - DNA, 513 bp, Arabidopsis thaliana columbia
  unsure (1)..(513): unsure at all n locations
tttaggacnnnnnnnnnnnnnnnnnnnnnnnnnnnnnnnnnnnnnnnnnnnnnnnnnnnnnnnnnnnnnnnnnnnnctttttttttttttttgtttaaaaaaagaagatatgaatatgtataatgtcttagaattaagttgagaaagaaatatcctagcaaaatccgagaaaattaagattgtacttttggcatccaaaaaaaaggccgaatcccaccaccagatagtatagaagaaattaaaaacaaccgatgcccccaaaggagtgtttcatatgacttgatagttctgggcaatcagctgcgtcctctgcacaaacctaggagtcgcaccaccacctcctctcagaggaatcattccagtcaccttcaagccactgtaggtacttgtcgctgcaaactgaacagagatggggaagaacaccgatgaatccactggaggcaccacaaacttcatttgagccactgcgggtggagttggcaataagtagtatagacccttccagaacagaat

SEQ ID NO: 115952 - DNA, 506 bp, Arabidopsis thaliana columbia
  unsure (1)..(506): unsure at all n locations
cactatagnnagattatgacgtcgcatgcacgcgtacgtaagcttggatcctctagagcgtccgccctttttttttttctttttttttttttttttttttttttttttttttttttttttttttttttaaaaaaaggggctttggtagtttattaggcccattaaatattggttattatatatatatccacaaattttcccaaagagcaaactggaaaaaattttttgaatgtataatattttttggctgaaacattttaaagctcatggtgctttttttttttatttaagcgcccccaaccgttttttcagttaattgattccagaactgccaacatcctttgtttttttcccaccaattttcccttttggaacaaatgataactgcggggcgatttcaatgccgattttataaaaaacctggtttggaaaaacctttgtttcgtcttcaacttcgggattggttaaagcattatttatggaatttgacatcatttcagaagtca

SEQ ID NO: 115953 - DNA, 511 bp, Arabidopsis thaliana columbia
  unsure (1)..(511): unsure at all n locations
nnnnnnnnnnnnnnnnnnnnnnnnnnnnnnnnnnnnnnnnnnnnnnnnnnnnnnnnnnnnnnnnnnnnnnnnnnnnnctttnttnnnnnnnnnnnnnnnnnnnntttgcagacattacatggtcgcataaaagcattgcccctaaacccaacccttaatcctaaccctgcgttgggcctgggacctttttttccgggatctttcaaaaaaaaaaacccctaatgggcccctttttttattggggaaaaaagggggccccaattggccctctccttttttggaaaccacaaataacccccttttttattgggggaccccccacaccccttttaaacccgctttttttttaactccaaaaagggtgcccccaccacggttttttccaacaagggggggagagagaacctttttttgtgtggtttgagaaaaaaaaaaaaacgcgccccccccccttttgtttttcccccccaaagattttttttttttaaaacccccccccccgaggggaggg

SEQ ID NO: 115954 - DNA, 501 bp, Arabidopsis thaliana columbia
tttaggacgcactatagaagagtcttgacgtcgcatgcacgcgtacgtaagcttggatcctctagagcggccgccctttttttttttttttttttttttttttttttttttttttgggtttttttttttttttttttttttttttttttttttttttttttttttggggaaaaaaaaaaccccttttggtcaaggggttcatttttttttttcccaaaaaccaacaaattcccccttaactttaaaatttttgggcttcggaaaaacaaaggggtttcaacgttcccaaaaaccctttttccattttttacagataaatttatgcggggttcgtggttttggggcctgaatttgatgatcatgaaatgggggaacccaacaggggttgccatgaacaatgggaacagaagggggagagttaaaaagcccctttttggccccaaagcaaaggaaagccggccaaatgaaatgatccccaatagggggaaaaaaggcaaaaca

SEQ ID NO: 115955 - DNA, 503 bp, Arabidopsis thaliana columbia
  unsure (1)..(503): unsure at all n locations
ttaggtcgacactatagnaagagctatgacgtcgcatgcacgcgtaccgtagctgggatcctctagagcggccgcccttttttttttttttttttttgatcaccctgacaacttggggtttaaaagaaccttacccctagttccaaaaaggcccgtccaaaaacccaaccaaacggttttttttttgggggcgccccttttctacgggcccacaatttttggggcccccttccccaaaatttttgaaaagcccctcgcgggttttttttttccccccaaaaaaaaacacaccccccctccgggggagaaacccccccccctccctgcggggggggggcccacaaaaaaaaaccgcggggggggggccccccacccccccccccctcttttttttttttggggggggggtggtttaaaaaaaaaggggggtttttataaacctcctcttttttgaaaaacccaacttttttggggggggggggtgttttttctttttttttttt

SEQ ID NO: 115956 - DNA, 287 bp, Arabidopsis thaliana columbia
gccgcctgcaggagccgggacggaatagctttgccgacccacgcgtccgctgaaacgcaaagacacataaacatatagacccgctgcgctcaccggagacatatcgagagtcgagaggcgcgcgttagcaacaacgaaatggctgatatatcagctgccgggcacgcggtcactgtgatcattaatcagtgcacccaaggcaccgaaaacgggggggctgttttttttgtagggggggcggggcggacacatacccagtcccagagatacatattaatccgccgaga

SEQ ID NO: 115957 - DNA, 516 bp, Arabidopsis thaliana columbia
acctcgacacattatagggcaagacctggccgcctgcaggtaccggtccggaattcccgttttcgacccacgcgtacgcttatcagcaggagagatcaactttcttctgcaggactggaaacttggatacgatagataatctccttaaagagaactggaggattgttagaacggtagctccaggagcagatgttatggaggctgaacatcttcttgatttgttttatgggggagggcagctaatacaccaccagagtatgacagcgacgatgaatattttgctctaaggtaacaaatcagacacccattcatcaatcggacagccgccccgggaactggtgggccacttgctcatacttcggaccaacgcacaagctgtagcgaccctccgagcgcacgcttgagggaaatagatgtgcttgagcacatgctgagttcacaaacgattccttagagtcacaccgggtccatggaaatgcaatctcaaccaaaacgagtgaagcggcggatgccccc

SEQ ID NO: 115958 - DNA, 474 bp, Arabidopsis thaliana columbia
  unsure (1)..(474): unsure at all n locations
tatacgactcacttagggaaagctggtcgcctgcaggtaccggtcccgnatcccgggtcgaccacgcgtccngataccagctgaagatgaccttcctctgacaagactgnaacctcgatacgatttatatttccctaaaaagaacctgaagattgnaaaaagggtaacccttggaccccttgtttttaagggttacccccttttggttgccccttgggggggggggcctttacccccccccccgggtttgcacccggggtggaatttttttttccccaggggaaaaaaaagggccccctttttttaaacccccaaacccccccctttaattttgtgggcccccctttctctccccttttttgcccccccccccccccccccggaccccccccctttgtgggccccttaagggaaaaaaaaagaggttggcccccccccgtgtataaaacacaacccccccgaagacaccccccc

SEQ ID NO: 115959 - DNA, 404 bp, Arabidopsis thaliana columbia
  unsure (1)..(404): unsure at all n locations
ccagcatctatacgactcactaagggaagctggtcgcctgcagtaccgtccggattccgggtcaccacgcgttcgaccgttaagaaacaaagtcttggactctggcctgaacttttggcatgaaatttaatggaggaggggggttttttccgccaacccttcccccccgggggggacacccccccccggaaaagggcggggcctttttataaaaaaggggccttttttccccggaaaaaatctttttttaaaaaaaaatttttttttttttttcttaaaaaaaaaaagaaaagagggggaaaatattttttaaaaagggggtttatagaaggggaggtantttttaaaaaaaaaaaaaatatttttttttatataaaaaaccttttcggagagaaaaaaaaaaa

SEQ ID NO: 115960 - DNA, 514 bp, Arabidopsis thaliana columbia
gccggcactaatacgactcatatagggaaagccggtacgcctgcaggtaccggtccggaattcccgtgtcgacccacgcgtccggatcgatttctaaagtcttcgtcttcttcttcttctgataactagctttttcaatcttctgaagctttaattttttcatacccatggctaatcgttatgatccaaatcctttcgctgaggaagaagaagtcaatcctttcgctaatgctagaggagttccacctgcgtcgaattcgagactttcgcctttgcctccagagcctgttggtttcgattatggtcgaaccgtagacattcctcttgacagagctggtacacaggatttgaagaagaaagagaaggaactccaagccaaagaagctgagctaaaacgacgagagcaggacctcaaacggaaagaagatgctgctgcacgagctggaatcgttattgaagtgaaaaactggccgcctttcttcccacttatccaccatgacatcgcaaacgaaat

SEQ ID NO: 115961 - DNA, 506 bp, Arabidopsis thaliana columbia
  unsure (1)..(506): unsure at all n locations
acacgacaaatttagggaaaaactnccgcctgcaggaccgggccggatacccggttcaccacgcgtccgccactataaaaaatacatattagctaaggatagaaaagccaaagatggataagaagcaggacataaagagattttgaatgtgatccgaacgaacggtgcgagagaattattaaaaagccaagcgggaagatttttttatgggggggaggagcgatattggagatgttgaaaagagaagattttttattatttgagaaaagcactggacgcaagaacagagaatagggtttgacggaagcaggcgctgtttgataatatatccctgcgaaagtgacgcaagtcgagaatgattggaggaagaggcagaatgtgagcgcaggaaatgtagaatgtggaaagagtactgtaaatggaaaagagaagagaagaagagaggtaaaatgaagaacgcgagggggataagaaagagggggagagtgggatgaagtaggccacag

SEQ ID NO: 115962 - DNA, 232 bp, Arabidopsis thaliana columbia
  unsure (1)..(232): unsure at all n locations
ccgnnnnnnnnnnnnnnnnnnnnnnnnnnnnnnnnnnnnnnnnnnnnnnnnnnnnnnnnnnnnnnnnnnnnnnnccacgcgtccgggcaggtgattacagcagcgaacgcttctattggtgtcttggaacacctgaccggagcgtgttggttgtagaagacgccgacgtaagaccttcactttgcatatggttatgagatgactgtctacttactctgtatagggattagat

SEQ ID NO: 115963 - DNA, 476 bp, Arabidopsis thaliana columbia
  unsure (1)..(476): unsure at all n locations
nnnnnnnnnnnnnnnnnnnnnnnnnnnnnnnnnnnnnnnnnnnnnnnnnnnnnnnnnnnnnnnnnnnnnnccacgcgtncgggaacatncatacacaaggtcacagagcccttggctcaagaagatttttccacccctggcccttgtggaaggcggtaaccttttcaaaaggggaaggctcttttgggttttggccctacctttggatcaaaaaccgcggccttggttttatgggggtaaacagaagggggtttttttggcccccctttaaaaaaatttgggggggggtccccccggggggaggggggaaaaaacaaaagagttttttcctttttgtgtggggggaagtttcccaccgagggggggggggggggaatttttttaaagaaatttttttttttttctaggggccncncgggaggagaaatttttgggggaacaaaaaaaaacccccccacggagggtgtttttttttt

SEQ ID NO: 115964 - DNA, 545 bp, Arabidopsis thaliana columbia
gacaactttagggagaagacgtgccgcctgcaggtaccgggccggaatacccggtgtcgacccacgcgtgcgccgtcacatagggaaataatataaatctgtgtagctatctagctgatgtggtctatcatgagtgcctcggcaggcaacacgaaaggggattttttcaacccaatacgaatcacaaatttgtaatagcgcccgtgaccggggacagatagaggtttttttttgagggggggcgggccgggagctcctgaacaaacccctagtgggatgtgttttccccggtgggagaggatcactagatgtccatagcgtgtggtatatatatgataacccgccaccggtgcttgctagaggccaggttagagggcgggtagagtgtgcgttgtaccaggcagacggcggatgatggatctagcactgctctatcccgatgatgggataagtagttgggggcgggtgggtcgatgctgtcatacttccactagagagagtcttttttagtctagtgggccgcgcaactgtgacacgcgaaggaa

SEQ ID NO: 115965 - DNA, 504 bp, Arabidopsis thaliana columbia
  unsure (1)..(504): unsure at all n locations
nnnnnnnnnnnnnnnnnnnnnnnnnnnnnnnnnnnnnnnnnnnnnnnnnnnnnnnnnnnnnnnnnnnnnnnnnnnnnnnnnnnccacgcgtccgcccacgcgtccgttctctctgaagacagtacttgtttctgtccggcgttaaaagcttcggtggtggtctcttgacttctctgagaagaagaaaaggaagctgagtctcattttagattcagctcacgaggaagtgacgacgatgtctcattctagaagactttcgttggaacctgctatagattcaatcactggtcgatttcgtgatttacagagaaatgatgatgacgtcaacaaacctgattttcgagaactcgatctaggttctcctgtttctaccttaatgccacgtggctctgcttcttcttccgctgctgcgactcctactagcagctctggctcttctggctctgcttctggtaaaccgtcggtgagttctcagatggctaaacggttagatgatgcttacaa

SEQ ID NO: 115966 - DNA, 434 bp, Arabidopsis thaliana columbia
  unsure (1)..(434): unsure at all n locations
taatacgactcatatagggaaagctggtacgcctgcaggtaccggtccggaattccgggtcgaccacgcgtncgcgtttctctaggcagttnttttttgttgtttgaagatggtgtcacatgaaagagacacaaggattggtggaatggtttctttggtcccacatccattccccgttttccccccttaagggttttgggaaagtttcctgggggtgttttgaagttttctttggggttttttttttttttttttttttccccaggggggggggggtttttccgagggggtgggaaaactctttggtttcccgggggtggaataaaaagagaaaaaattttttgtaaactctttctcaacaaaaaaattttttttggccggggaaaaacccccaaaaagaaaccttttttttttcttttataaaaacccccccc

SEQ ID NO: 115967 - DNA, 432 bp, Arabidopsis thaliana columbia
  unsure (1)..(432): unsure at all n locations
tatacgactatataggaagctgtacgcctgcagtaccggtccggaattccggtcgaccacggcgtcgaactntcgaagacaaaatctaaaaaccccaaaatttcctccaactccaagtttagggaaaatggtcccttttaacaccccccgggcttttttttccggccccggggaatttttggattttttttaaaaaaggggggggtttttttttttatattatggtgttaaaaaaaaagggggtttttaaaaaaaatttttttttttttcttcaagaaagtttttttccggggggggggggtcttcccaaaaaaaaatttctcggggaaaaagggggggtattaaaacccgcgggaaaaattttttaaaaaagcggggggccctttttttttaaaaaaaaaagggggggggggggtgaaaaaaaaaaaaaaa

SEQ ID NO: 115968 - DNA, 513 bp, Arabidopsis thaliana columbia
cctgcaggaaaccctgggcacggcaataccacggtgtccgaccccactgcggtccggcgccgacagcatgcaactgaaagagacactaaacagcagaactcaatagaggaaggaacgcgcaggcggcagagcaggagaagcgcgcggcgaccgcaaaggaggcagaccacacgcacgcggcggcagggcgaaggaaggaagggaggagcgcaaaccggaggcgtggtgatacaagaggggcaaacccgcccaagggcgaacagagggggcaggggcccaaaaagggctcgagaaagacgacccagggctcagcgagcgaaagaaagacagtcacggaagacaggaaggcaggagcggccggagaaagcccgagcccagagagaccaagggcgcggagcctcggccccgccgaaagcagcgcggaaaagaagagtcgcgccgcccaagagaaaaggagcgaagggagaagagccggagaagagggagggaggaaaaggaagccacagagccagg

SEQ ID NO: 115969 - DNA, 327 bp, Arabidopsis thaliana columbia
  unsure (1)..(327): unsure at all n locations
nnnnnnnnnnnnnnnnnnnnnnnnnnnnnnnnnnnnnnnnnnnnnnnnnnnnnnnnnnnnnnnnnccacgcgtnncgtagtttgggagagagaagaaaagagaagacaccctttaagcaaacagaggatttcattctctggcctgttggaattattcctaaccatccaccttggggtcccttccgccgccctgggcggggaaaccaaaaaaaaaagggctcccttggtgtccttgggaaaaaaaatataaaaccccggggggtccccaattttcccacaaaagaggggattttgttttaagaaaataaaaccccgtttttttgggtt

SEQ ID NO: 115970 - DNA, 508 bp, Arabidopsis thaliana columbia
gcacgcctgcaggaaaccgggcacggaatacacggttcgacccacgcgaccgcggacccacggggaaaagatggagcactagggaggcgacaacaaacgcaacgggcaagcagtgaacgaagaggagaacgaccacgaaggggacgaggccaggagcagacaaccacgcaagacgccgcgaccaaggagcaacagcgtgttttaccagaggggcgcaggcaagaaaagcgaaaaagagaccaaggggagcacgccgcagccaggggcgagcgcaaaagacgaaaaaaaggaagggaaagaagaagggggcaccgccccagggacaagggcaggaggcagccagcaaggaagggccagaagcgcaagtaggagcaaaccacagaaccgtgagaccccggagaagagcgagagcaggccagaggaaaggagcggggggcggagaaccaggagaacacggaggagccggagggaagaccaaggcgggcaggccccgaaaaggagaagagac

SEQ ID NO: 115971 - DNA, 448 bp, Arabidopsis thaliana columbia
atgatcgccgactatacgactcactataggaggctggtcgcctgcggtacggtcccgatccggtcgccacgcgtcgagatcaaacaaacttcagcaagcaatcattcatcaaaacaatcgaaactttgaaggtccttttttccgaaatgaacttgggtttggggaaaaccttcgggaaagggaaaggggtttttacgggggggggaataaaaaaattttgtttttttgggcggcggaaaaaaagggggggacccccccaaaacagagggggggggggggaaaacaaaagaaagggggttttttttttttttttttttttttttccgggggggggggagataattatttttttttgggggggggggggtttttttttcggggagggggagcggggggtgtttttaaaaaaaaaaaaaggagggccgtttctttttttaccacccccccc

SEQ ID NO: 115972 - DNA, 495 bp, Arabidopsis thaliana columbia
ttcgactcacattagggaaaagcacggcacgcctgcaggtaccgggcacggaatacacgggtcgacccacgcgtccggccttcgagaacgaacattaatatgaggttttgttcactgttaccatttgggagatagataaaccaccatatccttccctgagccataacacaacaattgccgcgtctctagaatgaccatgctctacgttgctctttttctggcggggggagatatcactaccggcttcttatcgtaaagtctgcgaagcgatctacattagaagacgtgcgatatgtatcgcagacactaatgaaaacggttcggcagttcctctagagccggtatatgtctgatattgccaccattatatgttatcatgatgaacaatccatgatcgtcatcatgagagcacatgctaagcaaatgaggcggtcatagactggtctctgtacctgaaagagaatccgacacaaatcccagagccttggaacaata

SEQ ID NO: 115973 - DNA, 341 bp, Arabidopsis thaliana columbia
ccgctctatcgctacttgggaagctgtcgctgcgtccgtccgattccgtcgacagggcgattttatttaagcggccctttcccaagaaaaggtcagcttggaatttggggtttccccaaccttaactttgggggggggggaaaaattcgaaagatttttttcctccggggtatcttttttgttttccccccggtgttaaggagggagatatccccccctttttttggtttttttgggggccccgcccctcccctcctcaagagagaggggccaccctttttttgttgaaaaaaaaaacaaaaaaacccccccccctgtggaaaaaaaaagggggggttttt

SEQ ID NO: 115974 - DNA, 517 bp, Arabidopsis thaliana columbia
  unsure (1)..(517): unsure at all n locations
nnnnnnnnnnnnnnnnnnnnnnnnnnnnnnnnnnnnnnnnnnnnnnnnnnnnnnnnnnnnnnnnnnnnnnnnnnnnnnnnnnnccacgcgtccgaagaatactatattacatggcattgtatttactgagatctcaactgttgctatgagaagcatagctactgcacgttgaccgagaggatagaacatctcgctataccgataagaggctctagcccagaggttatacaagcatactctatagtaccacaggatgagatatttctggtaatacatacagctgtgatcaggataacgacatatgtgactgactgaggcttgactacataagccatgctggcgaacgtgcatcaggagcaatgagcagtgctacagacgcgtcctctattgttgatgctatggcgagcatagcagagcatgatctagaaagtgcgaaccgactcatatgagacgggactggataaattctctgttgtgaacatatagtagaccatccgggtcatactccctgagagtg

SEQ ID NO: 115975 - DNA, 503 bp, Arabidopsis thaliana columbia
  unsure (1)..(503): unsure at all n locations
nnnnnnnnnnnnnnnnnnnnnnnnnnnnnnnnnnnnnnnnnnnnnnnnnnnnnnnnnnnnnnnnnccacgcgtccgcggacgcgtgggcggacgcgtgggccgactatgttgtgcctccaagctatgattctcttcttgggaagcttattgtgtgggctccaacgagggaaaaagcaattgaacggatgaagcgggcgcttaatgacactatcattacaggggttccagcgactatcaattaccacaaacttatccttgatgttgaggatttcaaaaatggaaaagttgatacagctttcatcgtcaagcatgaagaggagctagctgagcctcaagaaattgtggcagtgaaagatctgacaaacgcaacggtttagaatgatacatcagctctgaaagaccacccaattattgcaatcttcgtctccttttgtgtgttcattggtacaaacttcggtaacgataagactgttttactagagtctgtggttctatcaatgtt

SEQ ID NO: 115976 - DNA, 316 bp, Arabidopsis thaliana columbia
  unsure (1)..(316): unsure at all n locations
acgacaattttaaggaaaaaacggcacgcctgcaggaaccgggccggaatacatgtttcgacccagggcgtacgcgcggaataatatgaagacaatacaaatagggggaatggagggctgaatgcggagtaatattgggtaagaataagtacttggcgtgagagagaaatgatagatttaagagaggaatgaggcgncagggagagcaagagagaagaaagaaaatttagaaatataggcacaaactgaaaagaaaagacgaattatttttattttatagaggtggagcaaaacgaagagaggaaacgtttggaga

SEQ ID NO: 115977 - DNA, 484 bp, Arabidopsis thaliana columbia
  unsure (1)..(484): unsure at all n locations
ctaatacgactcacttagggaaagccggtacgcctgcaggtaccggtccggaattcccggttcgacccacgcgtccggctcgaagcttgcgattcacatggatggccatcaagccactcgcaattcatgttcttcttcgctacgtatttcagtttgatgggatgtaaaggaattggattctggtttggtttaaagaagcagatggattatgaatcttcttcattggtctttagctgttgttaccatgtattctagggtttatttaggttaccacacggtggcgcaggtttttgctggtgcggctcttgggggtattgttggtgcgagttggttctgggtggtgaattctgtgttgtatccatnttttccggtgattggagagagtgtattgggggagatggctatatggtaaagggtactttcgataattctgatgtggtgaagtttgaatattaacatggcccaagctgctaggaaggaaatg

SEQ ID NO: 115978 - DNA, 461 bp, Arabidopsis thaliana columbia
  unsure (1)..(461): unsure at all n locations
gttcccgcctatcgactcactatgggaaagctggtcgcctgcggtactgtccgtattccgggtcgacctacgcgtnncgtggacgcttggcggacncnttggcaaacngnntttttatttttgcttttggattaaacttccctttccagggggcgaaaaacctttttttctggctttttttttgagaaaattccccaccgaaaaacggggcccctttttttaaaaaattcggggctccccccaaaaaaggggttttttcccggggatttttttatttttttgggggggggcccccttttttttttttgggggagggagggaacccctcttttcttttttttttttaagacggccccccgctgtaaaaaaaaaaaaaccaccccctctttttttttgttggggggggggttgtttttaaaaccccccgccggagggaggttgtgtttttttaaaaaaaaaaa

SEQ ID NO: 115979 - DNA, 360 bp, Arabidopsis thaliana columbia
  unsure (1)..(360): unsure at all n locations
acacgactcagtanagggaaagaccgcacgcctgcaggtaccggtccggaattcccggttcgacccacgcgtccggtctgatccaacatgaaggagaatatagagcacgacgttcttcttacataatacgaggctaccaaaatctcagagagctacaccatgatatcggatcatctgccactcttgaactactcttactacaccaccgctgggacaaccagttttaattggggcggagaactccgcagacgctatgatccttatacagtaccaccaacaatgacaacaaagcccatgctgcttagcaatctgaaaatgtacgcgcgcatcaagctggtactataggtgacacaatccgcg

SEQ ID NO: 115980 - DNA, 348 bp, Arabidopsis thaliana columbia
  unsure (1)..(348): unsure at all n locations
cgcacttcgactcctagggagcctccctgcaggtaccgtcgatccggtcccagcgtcgctgatcacaganggaattgaccatgtntctatatcacctccaaattaaggtaatgcttggaattgaacctggtccttcccaacacctggtccgggttctttggccaaaatttccgggaaaacccctttaatttgggggggccccacccttttttaaacctttttttaaggccccccacggggggtttgtggattttccccccccaaaaaaaatttgggggaaaaaatttgggtaaaataaaaaaattctcccctgcccccccccccccccccttttttcccacgagaaaa

SEQ ID NO: 115981 - DNA, 520 bp, Arabidopsis thaliana columbia
  unsure (1)..(520): unsure at all n locations
atgatttgccggcannnnnnnnnnnnnnnnnnnnnnnnnnnnnnnnnnnnnnnnnnnnnnnnnnnnnnnnnnnnnnnnnnnccacgcgtccgcccacgcgtccggtttatggatcattctaagttgattgaagatttcaatgagtcatctttagagtttcagaggaagattcttgaacgttctggtttaggagaagagacttatctccctgaagctttacattgtatccctccgaggcctacgatgatggcggctcgtgaggaatctgagcaggtaatgtttggtgctcttgataagcttttcgagaataccaagattaaccctagggatattggtgtgttggttgtgaattgtagcttgtttaatcctacaccttcgttgtcagctatgattgttaacaagtataagcttagagggaatgttaagagttttaaccttggtggaatggggtgtagtgctggtgttatctctatcgatttagctaaagatatgttgcaagttcataggaatacttatgctg

SEQ ID NO: 115982 - DNA, 179 bp, Arabidopsis thaliana columbia
  unsure (1)..(179): unsure at all n locations
nnnnnnnnnnnnnnnnnnnnnnnnnnnnnnnnnnnnnnnnnnnnnnnnnnnnnnnnnnnnnnnnnccacgcgtccgtttctcgtcaatctcaatcaatggcttctgaagatanctctctctcgaaatctctattgcagaaatttgacttccttcgttttgactcgttgatgctcaccat

SEQ ID NO: 115983 - DNA, 506 bp, Arabidopsis thaliana columbia
  unsure (1)..(506): unsure at all n locations
tatacgactcatatagggaaagctggtacgcctgcaggtaccggtccggaattcccttgtcgacccacgcgtncgcccacgcgtccgcccacgcgtncgcccacgcgtccgcccacgcgtncgtccacgcgtccgtacggctgcgagaagacgacagaagggggaacatgaaaccgtaagctcccaagcagtgggaggagccctgggctctgaccgcttgcctgttgaagaatgagccggcgactcataggcagtggcttggttaagggaacccaccggagccgtagcgaaagcgagtcttcatagggcaattgtcacttgctnnnnnnnnnnnnnnnnnnnnnnnnnnnnnnnnnnnnnnnnnnnnnnnnnnnnnnnnnnnnnnnnnnnnnnnnnnnnnnnnnnnnnnnnnnnnnnnnnnnnnnnnnnnnnnnnnnnnnnnnnnnnnnnnnnnnnnnnnnnnnnnnnnnnnnnnnnnnntgcgttaaggcgcancagttgactgg

SEQ ID NO: 115984 - DNA, 517 bp, Arabidopsis thaliana columbia
  unsure (1)..(517): unsure at all n locations
nnnnnnnnnnnnnnnnnnnnnnnnnnnnnnnnnnnnnnnnnnnnnnnnnnnnnnnnnnnnnnnnnnnnnnnnnnnnnnnnnccacgcgtccgagacgacagaagggtacggctgcgagaagacgacagaaggatacggctgcgagaagacgacagaagggcgggagagcgagggttgttgctcaatgggctgatcctgaatccaaaatcaaagaagccatcgaagcttgccctgtatactgcatttcaatggtggagagatctgaccttgctccattggagttccttatgtcaaagcaaccacgaggcaacgtgaggatcggggttggaaacacggttggtgagcgtgtctccaatgtatttgttgatgtcaagaagttccaagaaagatacgctaaagctatgagcagaaccacaaaagagacctcccagagagaagtacaaataagtgcagtagaggcgattaggtccatttccaattggctatactggagatcatcaccgtacacgagaccatt

SEQ ID NO: 115985 - DNA, 512 bp, Arabidopsis thaliana columbia
atgattcgccggcactatacgactcatatagggaaagctggtacgcctgcaggtaccggtccggaattcccgtgtcgacccacgcgtccgcacggctgcgagaagacgacagaaggggaacaacgaaatggacgatttctcaatccctatgaaatctaacggtaacttagatgttccaccaccagcaccagctaacttcatccgtcctggaaaacgacctttgtcctctatgtcacccaccattgtactcaaggacggtaaagtgaaagccgctgtgggtgcgagcggaggagccaacattattgccgggacaacggaagtttacttgaatcattttttcctcaagatggatcctctttcttccgtcttagctccaagaatctaccatcagctgataccaaacagagcttcgtacgagaactggacaacagtattcaatgatcatttcgagattcctaaagcaacaagagttgtgttggagaagaaaggtcatgtcctatctcctattgccg

SEQ ID NO: 115986 - DNA, 512 bp, Arabidopsis thaliana columbia
  unsure (1)..(512): unsure at all n locations
gccggcannnnnnnnnnnnnnnnnnnnnnnnnnnnnnnnnnnnnnnnnnnnnnnnnnnnnnnnnnnnnnnnnnccacgcgtccgcccacgcgtccgctaaagatctcactggccaggcttttggtaccggcatacgggagcttcatcggcaggttccaaaaccttggagacatagggaaaaacgcagacaagtacatcaagtatggagttgaggacatagaggcgcgtattaacgagctgttcaaagggactaccacgggaagaaaatgaaggtaacgaacacaaaaatagcctcttgtaacatcttcgtaacgaaccacctgctaaatgaccaatagcgaagtcttgcagggaggatttgtaacatgtattgtgtatccttttagacagttagctcagctctgttgtgttgttgtgtaatgttgtattgtaactggatcactntntttgtcattgtaaaaagagaaaacagttgaaaaaaaaaaaaaaccaaaaaaaaaaaaaaaaaaaaa

SEQ ID NO: 115987 - DNA, 492 bp, Arabidopsis thaliana columbia
  unsure (1)..(492): unsure at all n locations
taatacgactcctatagggaaagctggtacgcctgcaggtaccggtccgngattcccgggtcgaccacgcgtncgaacatntacaaaaggcctanaaaagcaaagatcttcgctgacttcgtntctttttcgctggcgaagaaaatttctggggtttttgggtggatttccgggaagccgaaaatttttttttttaacccgtttaaccttttttaacgggggaaaaacttggggggggtttttaatttttgggaaagggggggtttgttaaaacccccccccgactttttttttagggccccctgggggcccccaaatttggggaaaccgggggattcgggaaaaacttcttcccccgggggcggaaaaaaaagttttttaaaaggggggggaaaaaaaggggggcgcccccaaaaaaggaggggggggggggcaaactttttttgtttttttttttttggggaaggggggtggaaaaaaaccgggggggtt

SEQ ID NO: 115988 - DNA, 297 bp, Arabidopsis thaliana columbia
  unsure (1)..(297): unsure at all n locations
atgattttcgccnnnnnnnnnnnnnnnnnnnnnnnnnnnnnnnnnnnnnnnnnnnnnnnnnnnnnnnnnnnnnnnnnnnnnnnccacgcgtncgcggacgcgtggnggaacctanaaagcttttcttttgggacgaagttttctagagaatttgtgattccgattcttagggttttaacaagccttcctttggggacaaggttctcaatttttgagggattggagtttttttttttggaccaaattttccggttttgttaagggaaatttttttttttaaaacaaggggggtttaaa

SEQ ID NO: 115989 - DNA, 415 bp, Arabidopsis thaliana columbia
ctacgacaaacgttaggagagagcacggcacgccgtgcaggtacctgggccggaatacacgggtcgacccacgcgtccgcactctcggacgcacactctaccgctctagcggtcgagacgactctgacgatggaaagcgcgccatatccaagagagagagaaggaagacactatgttctcagaagaaacaatgagccgagacgtccaacctctccgtgaggtggttctacattaagatggcaaagcaccggagaggaaaccaagagatgcatagccgggacagggatggcctccgcacaggatacgacgaggatgtgtatgcacctcgagggaataaaacaactcgagtggcgtgagaatggatatgatacagcgatctcgcatagctatactacatcctcgtgaatgcgcacac

SEQ ID NO: 115990 - DNA, 461 bp, Arabidopsis thaliana columbia
  unsure (1)..(461): unsure at all n locations
agagtatgacgtcgcatgcacgcgtacgtagcttggatcctctagagcggtcgccctttgtttttttttttttttttttttttttttttnttttttttttacaaaccaaaccctnacccacgaaaaaaaaaaaaaataattaatacattgctaagaatatattatctttttgttaagactggtgatgttggagcgaaaagaacgaggattttttcccaaaaaaaattcgaaaaggaggagcgaaagttctgttccggggaatcctgggttaggccgctgcacttttccgcctatccgagccatttaaacagattggaaggaggaattgaagcattggaatgaggagcttaatccaggcgactaactagggaaataccactcaacccctgggttaggagggctggattcggggtggggaaaaggcggaatttggacttggaaaaccctaatcaaggaactac

SEQ ID NO: 115991 - DNA, 631 bp, Arabidopsis thaliana columbia
  unsure (1)..(631): unsure at all n locations
nnnnnnnnnnnnnnnnnnnnnnnnnnnnnnnnnnnnnnnnnnnnnnnnnnnnnnnnnnnnnnnnnnnnnnnnnnnnncttttttttttttttttttttagggctaaaagacaaattcaacatatataatagtcacaaagagatcactgaaattggttctaagtttctatataaaaaaaacaaaggacataaacgcaatcttggtctattatcagacttggaccatatcacattatgtcgaaaaagaagaaaaaagaattgggacaaaatctctctaatggggacaacaaagcatcacctgctcttctaagcatcacctccaaagattaacaaccatttttcactgcagctctcaagatttatgatgatggaaagataaggaattgtattaagacaacatgggagtacaattcatattaggtcttcttgattttgccgacatatgcctgaacgagcttggtaagctttggtttcgaagcggatagataatggtcaatcttctcctgtgtttgaggaacgtttccactttgcattgtaccagtcactttctcagctaccttcttcactatgtttttgtaaccatctttgttcagcttaccttctatccaagctggttttaaaagctcttttac

SEQ ID NO: 115992 - DNA, 404 bp, Arabidopsis thaliana columbia
  unsure (1)..(404): unsure at all n locations
atacgactcactatagggaagctggtcgcctgcggtacggtccgaatnccgggtcgacccgcgtccgaggaataaagggttgattcttttttggaaaaaaaatttttgaaagggtcaaaggggaccccctttaacccccggggcccaaaaagggcaccttggaaagggcccacaaatttttaaaaagggggttcctaaaaaaataaaaaatcttttttttgggaaaaaagggggggtggaaaaatttatttttttgaaaaaaaatatttactccccccccttctggtgggccccccccccgcgaggaaaaataaaaaaaatttctcccgggggaagtatttctccccccggggggtttgtttgtttttttttattcccccacccccnctctctttttaaaaagg

SEQ ID NO: 115993 - DNA, 535 bp, Arabidopsis thaliana columbia
  unsure (1)..(535): unsure at all n locations
tgacgtcgcatgcacgcgtacgtaggcttggatcctctagagcggccgcccttttttttttttttttttttttttttttttttttttttttttttttttttttttttttttttaattttttgttttttgttttatannnaaaaaaaaaaaggtaaaggggaaaaaagtttttccgggagaaacaaaagaaacccccccccctccccaaaatcccccggggcccccccaaaaagaacagatttttccggagggtttccccaaaaaaagccctttaggggggaggccccaaaccccccccctttttttgggggggggggaaaaaaagggggggggacaaaccccggggaccctaagggggggggctaaaagggggggggacgaaaaccccaaacccaaaggggaaggggggagaaactaatggggaaaacggggaagaaatgcgggcggagggccttcaggggaggagctcccccggggggaaaaaaaaaaaggggtgcctctcaaattgagggggggcccctcacgggcccaaacg

SEQ ID NO: 115994 - DNA, 435 bp, Arabidopsis thaliana columbia
  unsure (1)..(435): unsure at all n locations
cagctctatcactcattaggaaagctgtacctgcagtccgtccgaattccggtcaccagcgccgtatttcattttttcaaaccctttcattctaaaacccaaaggtttccccaaacccattttaaaaccccttccaaacctaaaaccaaaaacccttttaaaaaaaaccttgtaaaaaattttccccccagagttttttaaatttttttggaacaccccctttttttaaaaaaaaaaaaatattttaaaattttnttaaaaaaaaagccgctgaaaaaaaatcccctcccccccccattttataaaaaaaatttttttttttaaaaaaaaaaaaaccccccttttttttnataaaaaaattcttttttnacaaaaaaaaaaaggaaagagaccttttttttctcaaaaaatattttttttttttaaaaaaaaaaa

SEQ ID NO: 115995 - DNA, 583 bp, Arabidopsis thaliana columbia
  unsure (1)..(583): unsure at all n locations
nnnnnnnnnnnnnnnnnnnnnnnnnnnnnnnnnnnnnnnnnnnnnnnnnnnnnnnnnnnnnnnnnnncttttttttttttttttttttttttttttttttttttttttttttttttttttttttttttttttttttttttttttgaggaaagaggaaacttttttacccaccgggctttgtttcaatctaataagcgtttaagccggttcacaatgttaccttaaaataaaaacctcacctcgggggggaactaactgacccataaaccaatcaggccgtaaaaacattcggtctggtttaatttgattaacccgtttaaaaacaacatacctattttaagctttcccggatttgctaaaggaaacaagttgtttttttttgtgcttttgaacaagggcttccaaatttttccccttttcggctccatctttgaaaaggacccttcttccatgtcccgggtttagccaattgaaatccagggtgagcaatttttctaccttctccagccggaaaggcactgaacccggattgtgcctgtctaaaaagcccaatccaaattccggcattattacatgggcccca

SEQ ID NO: 115996 - DNA, 266 bp, Arabidopsis thaliana columbia
tacgactcactttagggaaagctcgtacgcctgcaggtaccggtccggaattcccgggtcgacccacgcgtgcgtccacggcgtgcgccacgcgtgcggccactcgtgcggggggaatcatgtgatgagctttgattcgagggattggggtgagagcttaaggaaaggaggtggtggttgggtgggaagcttgtggtgtctggctgtggctgtgttttttatcgttggcccggggaggcctgcgaagcgcaggaggaataggtgta

SEQ ID NO: 115997 - DNA, 556 bp, Arabidopsis thaliana columbia
  unsure (1)..(556): unsure at all n locations
nnnnnnnnnnnnnnnnnnnnnnnnnnnnnnnnnnnnnnnnnnnnnnnnnnnnnnnnnnnnnnnnnnnnnnnnnnncttttttttttttttttttttttttttttttttttttttttttttnttttttttttttttttttttttttaaaaccataaggggatcaatttttttaaaaaaacctttttaatacacaggggaaaagctccgttttataggaaggggtttttttttttttttgaagggcacaagaggaaacttttttttcatttgctcatttgattggctaaacccttggaagcatttaaactactttttttatttttggcctttttggaggggggatgtttgggcaaaaaaatgcaattttaaaaggtggaagcatttttttcctncaaaaaaaaaaaacggggctaaacttggcttcaagtttttgttccggggtttctcctctcgctgaagccccatggaccctttaaacaaatttacttttttaacaaaatttttctcaacgggggcttttggggttagaattttaagcaacacaattccataactg

SEQ ID NO: 115998 - DNA, 641 bp, Arabidopsis thaliana columbia
  unsure (1)..(641): unsure at all n locations
nnnnnnnnnnnnnnnnnnnnnnnnnnnnnnnnnnnnnnnnnnnnnnnnnnnnnnnnnnnnnnnnnnnnnnnnnnnnnctttttttttttttttccaagaacatacaggcttccttcctaaaaggttcacatctttacaaaaacaaatatttccgctttttgccgattaaataagccattcttaggataagtggtttgccaaaatctattattttatacttacataaggtcaagagatcatggtacaatatcagaattcttcaggaagaggatggccgtccaagaacgccttgaacaggacaagtgatctctcaggctgtgagaatgggacctcgtgtgaagctcctcgcactgttgcaaaggacaagacatttccatagacttgagtccatcctccaacctgttggcctgcaaaccagactcgataaggtacacttgttctcagtcccaattgtttggccaatctactcactaaggttctacttcctgtcaacgggatcacagaatcttgatctccactgtagacaagaactggaactccagctttaacaaggctccctacgatattaatcgttggtatttccacatcaagncattggtaatcaagcactttgctgcaaactgtccattcacgtactccta

SEQ ID NO: 115999 - DNA, 352 bp, Arabidopsis thaliana columbia
  unsure (1)..(352): unsure at all n locations
nnnnnnnnnnnnnnnnnnnnnnnnnnnnnnnnnnnnnnnnnnnnnnnnnnnnnnnnnnnnnnnnnncacgcgtncgccacgcgtcgcaattcctcattacctnatcgaagctttcatactgggaaagtatgctggcatttttcccaaatagctgacttatgatttaggcaacaagaagcccctttgtcaaatcggaagggatttggttttgggaaatccaatttttgggggtttggggaaaaattttaacccccaggcgggggactttgggggaaaggggtgtttattgggttccctttaaaaaggggcacatttttggggtttttcccccccctgggggggggccccttaa

SEQ ID NO: 116000 - DNA, 674 bp, Arabidopsis thaliana columbia
  unsure (1)..(674): unsure at all n locations
ttaggacgcactatagnagagttatgacgtcgcactgcacgcgtacgtagcttggatcctctagagcggccgccctttttttttttttttattatgatgatcttgaatcttgatttgacattttagactttagattctgcaaacaaaaacacataggagcaaacacaatgagcatcttatggctcttgctataacatcgaaatcgttgtcttaacagagacagggattataacattatgaacaccatcactccatgtgaagctggcaaagaagtagccagtgaagactttgtgactaggggtagccttaaccgagaatgtgtgttctctgttagctgcaaacttaaccacgagtgtggttgggctcacggcgagagttataccgagaggagactcgatcacagctctatagactgactcgatgggttcaacactcgggacgagccttgggggggtgacttttcttttaagagagggaatcgtgactgttgtgccgtttgtcaggaagcaccagtggctcacgaactgggcaagaagctcttttaccgagcctcgaaggagtgaagaggcggttggccccgcaaataaaatatgcgtggacgaacgaaaaaagcgcactatcggtgaaagggatggttacccgctcttgcagggagtgcccccctccgctggggg

SEQ ID NO: 116001 - DNA, 698 bp, Arabidopsis thaliana columbia
  unsure (1)..(698): unsure at all n locations
taatacngactcactataggggaaagcntggtaccgcctgcaggtacctggtccggaattcccgggtcgacccacgcgtccgcacggacctccgaaacttgttatcatcctagaacttctatcgccctgtaaggtgtatcacagagtgctccgatcaactctgctcagttgagtgatctctcttcactcatcaggagacacattgcactcggtggcgactgcctacacatgtaactggtcatcatatctcaacagaaccaacggaacgaagcctcacttctctgaagaacgaaacactctgcctatctgcacaaagcgcaatgtctcacaaatacggcactagtgacgctgagcgatctagagctgccttgtctgatggatatcggcgtaatacgacacgtcatctggttagctacgcgtcagccaattgttgtatggattgtccatgtctctcggaactccttgaatgatcacaactgcatcctcagtctctgatatacttagcttcagcagcatgcatactatccataggaggcaccgttagttcagaataccacacacagacatggactcgatgctagcacataagtgtctacttctggagatcgtgggatacagcgtagctatgactccttgccctatctggcagctgatcaacgaatctaagtggtcacccatcaagatggcatatgcctgag

SEQ ID NO: 116002 - DNA, 598 bp, Arabidopsis thaliana columbia
  unsure (1)..(598): unsure at all n locations
acnnnnnnnnnnnnnnnnnnnnnnnnnnnnnnnnnnnnnnnnnnnnnnnnnnnnnnnnnnnnnnnncttttttttttttttttttttttttttttttttttttttttttttttttttttttttttttttttttttttttttttttttttttttttaaaaaaaaaaaaccccaacctttgcttaaaacccaaggggggctttgccctttttttttttaaaaaaaaaaaaaccctttggccaaaaatctcccttcgccaaaaaattttttaaaaaaggtttttaccccaaaaaaacccccccctttttaaaaaaaaaaaaccgttccctttgaaaaaaaaactttttttctccttgcccctggcaacctgggaccggataaccttccccccctcacccctttttttgggggccggcttaccccgggggtccctacgggtttggaacccccaggcggggttaccccaaggggttttttcttttagaacaaaaaactttttgggccccctgctgtgaattccccaaaaaaagggtttcttgggaaggggggtgtggaaaaccccgggacgcaatccacccccgttcttctttttttaaggga

SEQ ID NO: 116003 - DNA, 529 bp, Arabidopsis thaliana columbia
  unsure (1)..(529): unsure at all n locations
ctatagaagagttatgaggtcgactgcacgcgtacgtaagcttggatcctctagagcggtcgccctttgtttatttcttttttacataaaatgcgatttgatcggataaataagagggaagacaaaacaaacttcaccatgaccgggagctaagaaaagctagagctcacaacaccgtaaaaattaatgattcgagttgcaaaaggatatgacagatgtaacctatattatgaaccgtggngtggcgtgagggcattacaaagcccacacaagagacntctggacatgcaggggcgcactgggaaagcgatagaggatggatagctgaccagcagaacatggggagagacacggggacgatggatgggagatactggcaggagagggtggcggtagtggccgcggggagaccacgggctgggaagggcgagcggagccaggcaaggggagggggaactgcgcggggcggggggggacaggggatcgggggggagagggagcagcggaacgtgagcaaggagggacggaa

SEQ ID NO: 116004 - DNA, 211 bp, Arabidopsis thaliana columbia
ggcacgcctgcggtaccggtccgcaattcccttgcgacccacgcgtacctctctgggggactacacctgggctgcacatgactgaaagatgacgcctcccgcacgtggggctttggcctctaacatgtttcttgaccactcttcccttctgaggttccataccctggtgcacgggagtctcttattggaattagaggagacgagcaccggc

SEQ ID NO: 116005 - DNA, 255 bp, Arabidopsis thaliana columbia
  unsure (1)..(255): unsure at all n locations
gcacgcgtacgtaagcttggatcctctagagctgccggccttttttaatacctttattcgacaaacatacacacagggatgatagcctgggtcagccaacatacgggaaagattgcataggtgcgcggcggcctgatgcctggatgcggggctgcgacgccgggaagagcagggcgtgggtgccgggagagggtgggcagggttgggttttttttttgagaggggacagaganggaggggagggggaggattggg

SEQ ID NO: 116006 - DNA, 310 bp, Arabidopsis thaliana columbia
gcacgcctgcaggtacctgggccggaattcccgtgtcgacccacgcgtacgccctaggcccacagtatgatgtattcgcagacctatgtgggttacacaggcactatacaagtgcgtatctacggtggcgcaaaacaaaaacaaaaggggcggacaggtgtatcaggatcaccagctgtacggacagcggtggcatagcgacgcccttttttggtggtgtgggggaagaccgtagattgacagtgacctgccgccggcggtggtgacaacgaggcgggacggggggaaataccgctcggcgcgggaccac

SEQ ID NO: 116007 - DNA, 630 bp, Arabidopsis thaliana columbia
  unsure (1)..(630): unsure at all n locations
cactatagaagatgcttgacgtcacatgcacgcgtacgtaagcttggatcctctagagctgccgcccttttttttttttttttttttttacatatctataagagtaaagacacatcatttcctttattggacaaagatatacaacgaaaagaatcaaaaacagaaaaagaaattctcggacataatagacaagctataaacagagcattcacaattttcacataaaagaaagagaggaagtgtagataaataaatagaatataatttgagattctatgagcttgttgtgcattccttaggagctccctgtggaaacctcctatggtcagtacaataattggagatcatgtaattcttctgaacccatttgagtctagcttggcttgttgaatccatttcttgagtgaccaattggagtttgggttcgagtcaatcttaatgtttctgtaagaagccatgaatggagctttagaccaatcagttntaacaagaccgcctcttggtgccaatcgtctgcgttcataaactcgcgtacatcctcatcggcttgttctttggaacaagacaccgagagactcatagtttttaaactctctaatgggtgtgtcatcgacgggcaatatgattctt

SEQ ID NO: 116008 - DNA, 282 bp, Arabidopsis thaliana columbia
  unsure (1)..(282): unsure at all n locations
gacnnnnnnnnnnnnnnnnnnnnnnnnnnnnnnnnnnnnnnnnnnnnnnnnnnnnnnnnnnnnnnnncttttttttttttttttttttttttttttttttttttttttttttggggcaaaaaaggttgggggtctaactttgggaatatatgttcaattgaacacatatacgcacgttgacacaaaatggtgggacaaagagaatatgaatatagttgtggaatatgcaacgccacctataacttatggtgctccacacacgaaaacacaccaaaagagaac

SEQ ID NO: 116009 - DNA, 367 bp, Arabidopsis thaliana columbia
  unsure (1)..(367): unsure at all n locations
acactatagaagatgcttgacgtcacatgcacgcgtacgtaagcttggatcctctagagctggcgccctttttttttttttttttttttttttttttttttttttttttttttttttttttttttttttttttttttttttntttttttttttgggggaaaagggcaattaaagccccttttactaaaaaaatttttaaaaaattggggttttgacaacattttcaaaaagagggggaaaatcctttagtttaatatagcttgaaccccttttaaattccaatcccagttttgggttataagaagaggaaacccacccttttatttttaagctttaaagccccttatttggcaaaaatttttttttt

SEQ ID NO: 116010 - DNA, 565 bp, Arabidopsis thaliana columbia
  unsure (1)..(565): unsure at all n locations
cactatagnagagttatgacgtcgcatgcacgcgtacggtagcttggcatctctagagcgggcgcncttggtttttttttttttttttttttttttttttttnttttttttttttattttttttttttttatcttttttnatttttataaaaatattgttatcctcttttttttttaaaaaaggagtgtgttatatccccgccgggggagaaaaaaaggttgttttccccctttggggggagaaaggggggctttaaaatagggggcgctaaaagggggtggggggaccgggggcgcctgtgtagttaattattggtttaaatgcgggagggcctctgagggaggggggggcgggcggcccccgggggaggaggccgttgggaaaaagggggagaggtgtgtttggggaggtgccccctggggccccggtgggggaatntttaaagagggggggggcgggcgttctttggtggggggaggggagccccggctttctctacaattctggggagggaggggcgggggggggtttttttgtcgggggggcgcggggggcgaaaaaggg

SEQ ID NO: 116011 - DNA, 645 bp, Arabidopsis thaliana columbia
  unsure (1)..(645): unsure at all n locations
nnnnnnnnnnnnnnnnnnnnnnnnnnnnnnnnnnnnnnnnnnnnnnnnnnnnnnnnnnnnnnnnnncttttttttttttttttttttttgccaaacatcatatatcattaaacccaagaaacagatgtcttaggaactaaaacaatttataatatctcaacagaccgtcaaagaaatatcattaaaatagcagaaaatatgtaaagatagaacaaaatcttctcctagatcgtcatcactttcgtgccctgcgcctccggttaacctccgggaaattgagaggggtcggtaaggtagcaaccgtagtagaattctgcttcaggaatttgcagccaagctgtagaaaatgtttcctcagctcaactgtgcttatcctcagatcttttgctatgtcttctggatcggtcatgaaattatccacgtgaagggatagcacaagaacgtagcttatcagaaggttgatcttgtcaacaggtatcctatctgattcagaatccttgaacatgctgttgaatttttgacggaagatgtctggcatcttgtggtctttagcggaatcgaaccattcattgagtttctgtccttgaacttaaccagatgggtgagaagcgttgcagcaccacataccgtctgctttttcatatc

SEQ ID NO: 116012 - DNA, 645 bp, Arabidopsis thaliana columbia
  unsure (1)..(645): unsure at all n locations
nnnnnnnnnnnnnnnnnnnnnnnnnnnnnnnnnnnnnnnnnnnnnnnnnnnnnnnnnnnnnnnnnnnnnnnnnnnnnnnnnnnccacgcgtccgcggacgcgtgggtcgacgcggccgcgcaatggcccttcaagctgcttctttggtctcctctgctttctctgttcgcaaagatgcgaagttgaatgcttcttcatcatctttcaaggactcgagtctttttggtgcctccattaccgaccaaatcaaatccgaacatggatcttcctcgttaagattcaagagagaacagagcttaaggaatctagcaattcgagcccaaaccgctgcgacttcaagccctacagttacaaaatccgtggacggcaagaaaacgttgaggaaaggaaatgtggtggtcactggagcctcgtctgggttaggtctagccacggctaaagctctagctgagacagggaaatggaacgtgataatggcgtgcagagacttccttaaagccgagagagctgctaaatccgtagggatgcctaaagacagctacacagtgatgcatttagacttagcctcgtttgacagcgtgagacagtttgttgataatttcaggagaacagagacgcctctcgatgttttggtctgcaatgctg

SEQ ID NO: 116013 - DNA, 616 bp, Arabidopsis thaliana columbia
  unsure (1)..(616): unsure at all n locations
nnnnnnnnnnnnnnnnnnnnnnnnnnnnnnnnnnnnnnnnnnnnnnnnnnnnnnnnnnnnnnnnnncttttttttttttttttattgttaacttttctaaaaaataaaagaaaaaacgtataaattatgtcaataatatatggtaaaattgaaattccttgagattattggctactgagctgaggcattcttatatcatagtcggagacctcgtggtctgcttgtgcatccttcttcataaccggtatttcaatttcttctatattgggatcaaccaccagtccatgctgatgctgcataggaggaaatagagtcgaagggttatgggccgtagtagaattataggcttgggcccattcttgaaacatgtcaccgttatgatttgacacattggattcacccataatgttgttttggttcgagcttgagctacttccttgcaataaagtttcatacattgctgaatgtgccgatgcgtcgaataaatgggcttcgttaggcccattttcagtcagccatcctccaacgacgtcgtttccaaaaggcccacccatgctttgctgttgttggaaagcagatgcttcatatgaagataattggtcttgactcaatatat

SEQ ID NO: 116014 - DNA, 644 bp, Arabidopsis thaliana columbia
  unsure (1)..(644): unsure at all n locations
nnnnnnnnnnnnnnnnnnnnnnnnnnnnnnnnnnnnnnnnnnnnnnnnnnnnnnnnnnnnnnnnnnnnnnnnnnnncttttttttttttttttttttttgagcccaaaatggctgttaactttctgttaaggtctgtaacacacacaatgtttaacaacgatggctggagtacaagcttttaaaaacgctcacaaaagatgacaaaaaacacctaaagattctttaaaattaaaaccaaaaagaagaaataactgggaatagtagtaattcagtgactaaggctcagcctcatcttctgattcagcatactcgtcgtctgactcatcaggccaaacatagtcgacaacatcgagaggatgcctgtgcaacaaattcaagagctgttcaaggtttctcagctgactttggcccgcctctgcatccatgtcctgcccggcctctgcatccatctcctccatttttttcggatcattgtaactcaacaccttcaatccaaactttccattgtcatccacattctcaactcgaaatgattttgctagagatcttccctccactttgacatgtgacacgcatatatagtattggccatccatttcttgtgtctgaactcgacctagaaactcgactagcagatacccac

SEQ ID NO: 116015 - DNA, 543 bp, Arabidopsis thaliana columbia
  unsure (1)..(543): unsure at all n locations
actatagnagagttatgacgtcgacatgcacgcgtacgtagcttggatcctctagagcggccgcccttttttttttcctttttttttttttttttttttttttttttgattttttttttttttttttgtgcaggggtatacggcggagagaatcccccccccaaaaaaaaaagcgggcacaaaacgaacaaggggggggccgaggggggacaaatttcttttttttggaagaagggggtgagacaaaaaaaacctagaagagggggggagaaagcaagaccccgaaagaggacaagggggcgcccctcgggcgactcgggggaggcggggggttataaaaaaacataatgccaccttgttgagccaaggggcgcctagcccggatagcgagaatcaaaaaaacaagctaccaacaacgagtacgtgtaagggctacacttacgggtctcagacgagagggaaaagggaggttaaaagaaaaccgtccagaagagaccagaagtggcgggccccacctgccgcgaaccggagaggggggaacaa

SEQ ID NO: 116016 - DNA, 646 bp, Arabidopsis thaliana columbia
  unsure (1)..(646): unsure at all n locations
actcactatatgggaaagcctggtaccgcctgcaggtacccggtccggaattcccgggtcgacccacgcgtccggcaatgttagctgctgggttgcagaacatcggcggtggagatcctttaagacagcagtttgtacagctgcaagagcctcaccaccaatatcttcaacaatcagcttcccataattctgatttgatgcttcagcagcaacagcagcaacaagcgtcacgccatctcatgcatgctcaaacacagattatgagtgagaatcttccgcagcagaatatgcgacaagaagttagtaaccaaccagctggacagcagcaacagctacagcaaccggaccaaaatgcatatcttaatgctttcaaaatgcaaaatggccatcttcaacagtggcagcagcaatcagagatgccatctccctcgttcatgaagtcagattttactgactcaagcaacaaatttgcaacaactgctagtccggcttctggagatggcaatcttttgaatttttctataaccggtcagtctgtactccctgagcagttaacaacagagggctggtctccanaagcatccaacactttttctgaaccgttgcacttncacaagcctatcctgngaagagtcttgctctagaa

SEQ ID NO: 116017 - DNA, 626 bp, Arabidopsis thaliana columbia
  unsure (1)..(626): unsure at all n locations
cactatagaagagttatgacgtcgcctgcacgcgtacgtaagcttggatcctctagagcggtcgccctttttttttttttttgaccagagaacgacattaactcgaaacaaattcataagatcattacaaaaggaaaaatcaagagacacaaaccaaaccaaagaacccattttttttttttaaatagcaaaccaatcacccaaaactgatatataataaaccggaccatgactctgcaaattaaagaaacacanacctcggctcaaagacactcttcactcttcttcttcatcataactaagccaagattcttcacttcttcactgctgcttacattccggtggcctctcacctgcttgaccttccgcaagttgacttcttccagccttcttgtgcccagctgatgaacttcttttgctcttctttccttgatctgcttcttcctctcgaatcatcctcacatcnctctcctggcatcctcatatcttcctcgcctcttatcacatctcataatctcatcatcgcgccctatataaggcatctgctcacagctcacagtgaacatgacacagatggagatgatttctctttgattgtgaccgaatcatatatgctcatttgcctg

SEQ ID NO: 116018 - DNA, 648 bp, Arabidopsis thaliana columbia
  unsure (1)..(648): unsure at all n locations
ctcactatagggaaagccggtacgcctgcaggtaccggtccggaattcccgggtcgcccacgcgtccggtcgactcaaccgagtgagttctctctactgagtcttgatacatctccgctctcagctctttcccagattccacaaattccatcgccggagcttcttcgatctcaaactctcttatcctcggccacgttgccgcctgaatcggacgcagagacgacgaaaaaggtaacctaactgcagatctcatcggagaactccacgaacaaccacctccgttcaattgcattttcctcatcgacgcantaagttcaccggtactcggagatagcggcggagattccgacggtggtgaaaacgaaggagatacaagaatcgaagtcggagaagtagctaatcctgagaagatccaagatctggatctaacgaacaaggtaatacacgtaactgctccgtcgtatgagcgaagatacagattcttctccggcagctagttccgtctttacacggctgagtacggtaacgagaaggatggagccaacactcgaaaactccatgagagaactcacacgaatcacctcttctaccaacttccttacgaaactcaggacaagcggtgccggagtaaatgaaacttctcggatc

SEQ ID NO: 116019 - DNA, 605 bp, Arabidopsis thaliana columbia
gtacgtagcttggatcctctagagcggccgcccttttttttttttttttttttttttttttgaatattttttttttggtgtttttattgagattctaattgttaacaaacctggaaacaaaaaaaaacaagagcacgggacataaacaggagaaaagactcggagagagacccagcaccaaaagatactgttccaaggtgcctcacaagaggaggaacgcgtaatgctgctccctgctctattcactcatcacacgtccgtcatccaagggggcgcttgactctgggacccccggctgcttctttccaccagctttcaagtaccaaccaatccaaccgacaataggaaccacacctgccacatccgcataggttctgggcttgccctctgacacctttgggcccgactcacctgatgcagatgctggtggaccaggatcctttgtttggatagctgaccggctgctagttctaaggaccgtgtgagcaactaccgaggctcccccgcccatcctgcgaaggaaacaaccgaacggggccctccattcgtaagaccccgccaccagagaccaacaacacatggggaggagggcggcggggcaggga

SEQ ID NO: 116020 - DNA, 548 bp, Arabidopsis thaliana columbia
  unsure (1)..(548): unsure at all n locations
actatagnagagtcttgacgtcgcatggcacgcgtacgtagcttggatcctctagagcggccgccctttttttttttttttttttttttttttttttttttttttttttttttttttttttttttttttgtttttttttttttatttttggtttttatttttttttttttttttgtttttggggaaaaaaggagcttttattatgaggggggcggtctttttggggggggggtaaaaaaagcggggggaaaaagcccccttttttggggggcgggggaaaggggggaaccagagtaatcttgggggggaaaaaaggggggggggacttttatggccttgggaaaccattcgccagagggggtgggggggggaacaccgggggggaaagaaatatgggcggaaggaaatcccaatcggacggtaaataacgtgcagagatctttagtaccactaggagggggggcaaaaaccgcgtgcacggggacaatcatcagcttgaaagccatactgaggagacagaggcggctacagagtatatcgaccccgcg

SEQ ID NO: 116021 - DNA, 654 bp, Arabidopsis thaliana columbia
  unsure (1)..(654): unsure at all n locations
nnnnnnnnnnnnnnnnnnnnnnnnnnnnnnnnnnnnnnnnnnnnnnnnnnnnnnnnnnnnnnnnnnnnctttttttttttttttttttttttttttttggaactaataataaatatatcattttcatctctaaatattttttcaaaaacctgtcagcgaccaggtaaatctcagtttcagacacagtttaggtctatctggttcggggtacaacaagaattgcttctctcgccctaagagaagaagactcagtttccaaaacccgtggagaagacaaaagagagatactagttaaaatctatttacgtttttgtactgaactacttgttacttcatcttcttatttacgccatctgattttctcacttgcacttatccttgtggtgagctccagaggaagcggtttcgacgtattgctcggcaagtttcttgatcttgtctccttctttgatcaagaagttagcactcttggctttgctatgatacttcatcactttttctggggttttagtcactgcccatctgtattgttccacgtttatcactccgctcttgcacagtggtctaatatgtnctttgatgtatgcttccaccttcttggtgatggagttaccaaagccatcagctttgcctttttcctctttagacggcttt

SEQ ID NO: 116022 - DNA, 474 bp, Arabidopsis thaliana columbia
  unsure (1)..(474): unsure at all n locations
tatgacgtcgcattgcacgcgtacgtagctttgatcctctagagctgccgcccttttttttttttttttttttttttttttttttttttttttttttttttttttttttttttttttttttttttttttttttggggggttttttttnnnnnnnnnaaacaaaaaaggggtctgaacccaaacttttattttcaaaatttgggttttatttggcacaaattggaaactaatccaaccaaaaacgttaccctttttacataaagggaaaaagactgagtcaggttcattccctttctttttcattgggtcaacaccttcatgaacatagggtatacccatttatggggaaatttttcgagtttcgaacttttgacatattgggaggaacttactatttggccatctgaattccaacttggcgggaaattaattttgtgaaggaaaaaccccttaatccaaggcgacaaaaaaaac

SEQ ID NO: 116023 - DNA, 498 bp, Arabidopsis thaliana columbia
tatcgactcatatgggaagctgtcgctgcagtaccgtccggattccgggtcgaccagcgtccgaattgtgtaacatgggggaaagtttggaggacgtttgcttttcccggggacctcattttaaaatttttagggttgggggcccccaaagggatttttcaaaaaatttggcccgttttacccctttttacccggtttaaaccccccccccctgtttgttcccccaaaaaaaaagaaccttgggaaaaaaacctccccccccccggggtgttataaaattttttttttttcgcgcggtttttttaaaattttttttaaaacagtttgtaaaaaaaaaaaaaatctttgttggagaaaaaaaaaaattatttttttcccccccttttttttttttttgcggaaaaaaaaaaaaaatatttttttgtttttttttatctcgggagaaacccccccccccacccacaaaaaaaagaaattttttttttttttttttttttt

SEQ ID NO: 116024 - DNA, 669 bp, Arabidopsis thaliana columbia
  unsure (1)..(669): unsure at all n locations
atgatatcgccggacnnnnnnnnnnnnnnnnnnnnnnnnnnnnnnnnnnnnnnnnnnnnnnnnnnnnnnnnnnnnnnnnnnnnccacgcgtccgcccacgcgtccgtacggctgcgagaagacgacagaagggcactttggaggtagagagctctgacaccattgacaacgtgaaggccaagatccaggataaggaaggaatccctccggaccagcagaggttgatctttgccggaaaacaattggaggatggtcgtactttggcggattacaacatccagaaggagtcgacccttcacttggtgttgcgtctgcgtggaggtatgcagatcttcgtcaagactttgaccggaaagaccatcacccttgaagtggaaagctccgacaccattgacaacgtcaaggccaagatccaggacaaggaaggtattcctccggaccagcagcgtctcatcttcgctggaaagcagcttgaggatggacgtactttggccgactacaacatccagaaggagtctactcttcacttggtcctgcgtcttcgtggtggtttctaaatctcgtctctgttatgcttaagaagttcaatgtttcgtttcatgtaaaacttntggtgggtttgtgtnttggggccttgtataatccctgatgaataagtgttctactatg

SEQ ID NO: 116025 - DNA, 620 bp, Arabidopsis thaliana columbia
gcacgcctgcaggtaccggtccggaattccccttccgagggacgcgtaagccggctgcgaagacgacagaaggggttggatcaagcagatgaatgcgaagacccatacttgcgtttagtatatgcttcgtcatgggctatatctgtttactatgccttccaacgaacttggaagcctttcaattctattcttttttgagacatatgagatggtcaaccatggtgggatttcttttatttctgagcaggttagccatcatccaccaatgagtgctggtcatgccgagaacgagcacttcatttacgacatcacatcaaagttgaaaactaaacttttgggtaactctgttgatgtttaccctgtgggaagaacgcgtgtaaccctcaagaaagatggtgtggttctggatttggtgccgcctctcactaagattcacaatctaatatttggacgaacctgggttgactcacctggggaaatggtcatgacaaatttaaccactggagacaaagttgtgctttatttccagccatgtggctggttcggttctggccgctatgaagttgatggctacgtttacagcgcagctgaagaaccgaaaatcatgatgacaggaaaat

SEQ ID NO: 116026 - DNA, 653 bp, Arabidopsis thaliana columbia
  unsure (1)..(653): unsure at all n locations
taggtaccactatagnagagttatgacgtcgcctgcacgcgtacgtaagcttggatcctctagagcggccgcttttttttttttttttttttttttttttttttttttttttttttttttctttttttttttttgggcaaaaacacccttgtttcttacaggtaatacattcttttttctgggtcatcccaaaatttctcgcttaaaaaaggatcgatagacataaaccttttaaattcttttacaacacccaatttgacaattctgaaatggtctttacattttcttggctaagggctccctcctttcacctggacaaaactagaacgaggttcttgctaattttcccggacagggtggtcagggccctgttgttcccccattggttgacccaatataggattagggcctgactcaccctctcgggacgaaccttggggaggaacccttgggttttcggggcattggattcttaccaaagttgtggttactcaagccgacattctctgttgccgttggtacaccggcgttcgagcggtttgttccccataaaggggaacccctccctaccgatgcattttgaacttccaaagcttcgggagatgcgttaacccccgtcattttcagggcaagaaggcccgatcagagagctt

SEQ ID NO: 116027 - DNA, 649 bp, Arabidopsis thaliana columbia
  unsure (1)..(649): unsure at all n locations
tttaggacnnnnnnnnnnnnnnnnnnnnnnnnnnnnnnnnnnnnnnnnnnnnnnnnnnnnnnnnnnnnnnnnnnnttttttttttttttttttttttttttttaatctcagtttttggttttatattacaatacaaactgcaagtaacacttgagatccaagttataaccaacatggcgagttcaaacttaaaacataaagaagatgagtaagctcaagtgtattatcgtatactttacacaacccaaccagaatagtaacaaagaacactaactcgtcttcacaactgtcttttatatgtaatgtatgtgtttggaaaagaaaaaaagtatgtatatcgcttggaaattgcacatcccgtcaaagaagtggctgctgatccactccactcatgcctctagtttagggcagattggggagcttggattcgacatagaacatatatctgctagacaaggttgcttggtggctacatcctcctcaaaggccggaggtgcttgcccgtatatcatctcgcagctcatgtcttcataatttgggttcatggtgagtgggaggccaaactcattggtgaagaaatcttgggttggaatcttgcacatattcacacacattcctacacacncactgttctccagatacctgcatt

SEQ ID NO: 116028 - DNA, 436 bp, Arabidopsis thaliana columbia
ctcactatagggaagctggtacgcctgcggtaccggccgatccgggtcgccacgcgtcgcaccgtcgtcgctgcaaaacacagatgatcggctgcaaaagcgacagatgatccgctgcataaaccaccaagggtccggctccaaaaacccccaagggggcccccggccaaaatttttttttccggggctttttttttgagcggttttcctttttggccccccccccttggaattttttcccccccgaaaccccccccgggggggacaaaaaacaaaggggggggggaaaagcttctgcccccccaaaaaaaacccccccaaaaaaaacccccaaaaggttggggcccacaaacccccggggaaaaaaaaaagccccccccccacccaaaaagcggggggggggttttttttctccccccccccaaaagaaaaaacc

SEQ ID NO: 116029 - DNA, 454 bp, Arabidopsis thaliana columbia
  unsure (1)..(454): unsure at all n locations
actatagaagatcatgaggcacatgcacgcgtacgtaagcttggatcctctagagcgtgcgcccttttttaattcttttatatttaaaacaacgcgaagcgcttgagaggaaccaaatacactggatacgatgatatccagcctggtntagtcgtctgcgtagtataataacacggtgagaggggacacatcatatctgtaatcaccactcgtatcgagaacagtatatctttgagtgtcggagagaaggcactgatggccatacatgcagacgcttactctcatacagtaggcacctagactaggatctgtatgtaatgctgcgcgtgccgcgttcaggagcctcgagaggaacgggtagattgctcaaccaactcaagagtctaagagagatacctttttgtgctgtgcaacatgggctcaccagaggcgagcctggctataggacgtggaa

SEQ ID NO: 116030 - DNA, 531 bp, Arabidopsis thaliana columbia
  unsure (1)..(531): unsure at all n locations
acgactcactanagggcaagaccggcacgcctgcaggtaccggtccggaattcccgtgccgacgccacgcgtaccccccgcgtccggacacgtgtccgagggtttagacgaacttaaagccgcacgagcaaattgctaagtcggacatagcgtttccctatcaaagcaaacattcggatgtttgtcagcaccactttgcatctaaatcagggactggatttgtttgcgcaggagtgaaacgactccggtaacctgcgcggcggatgactactgcaatgggagaggaccgtccgcttatgcggctgagctacatagtgaagcggaggccacgacggcatctgtgatggactcctctcaatgctaaagctccgagcgatatataaccggggaagagattgaggcgctctctgagtaccgacaagatgtgatagttcttaagactgagttgtgactacggtcaccgtagaagaccgtgctggagctactcggattgaatcatgatgtgcactagggtacaatatcatgagcgat

SEQ ID NO: 116031 - DNA, 608 bp, Arabidopsis thaliana columbia
  unsure (1)..(608): unsure at all n locations
ttaggacnnnnnnnnnnnnnnnnnnnnnnnnnnnnnnnnnnnnnnnnnnnnnnnnnnnnnnnnnnnnnnnnnnnncttttttttttttttttttttttttttattttttttttttttttttttttttttttttttttttttttttaaggagaaagagtgtggcctcaaaggaatttttaaagagaccgtcncaaaattagctttatcttctacaaccaagtgagtgcctttttttgtaaggggaaaacaatgacaactgcgttccgaaaaaaatacaaaacattttttcaactgggacatactaaataaaaaaagcctccgccctatgtcctgaggcattaatcaaacacgggcagtttttccaccgccgaattttttaaactttggggctgttgaaacccgattaaaccactcgaccttcccccaaatttctttattttgtgcgcttttaaaggcaaatctctgcaccaaaaatattttcttctttatcccacttggaggttctaactttgcccaaaaanaaaccagtttcgcgccttattccgcttatttaacagatctttttttagcaaacttaggaggccctttaaaccctttaatttgctcca

SEQ ID NO: 116032 - DNA, 505 bp, Arabidopsis thaliana columbia
  unsure (1)..(505): unsure at all n locations
ttaggacgcactatagnagatctatgacgtcgcatgcacgcgtacgtaagcttggatcctctagagctgccgccctttttttttttttttttttttttttttttttttttttttttttttttttttttttttttgggccacaaaaagcttaaggtatttgttctgtactctttgaaaaaaacaaaaggcaaaaaaaaaactctgctgggtttgattttgacatccttttttttgggacataaaaaaactatattcttgctggagagccaaaatttgaaattatgattgttttgtgggcatactctagctgctttttttaaaaggggcttcttttgcttcaggttctagaggaaaaattctgatttttttgctctccggtgctggcgctgccacttgatcaggtgcgtcgcagncccttaagactttttgggttgttcaaccaaacatggtctgtatttcggacaattcatttgttgctaagccattttgattgcaccgaaggggg

SEQ ID NO: 116033 - DNA, 644 bp, Arabidopsis thaliana columbia
  unsure (1)..(644): unsure at all n locations
nnnnnnnnnnnnnnnnnnnnnnnnnnnnnnnnnnnnnnnnnnnnnnnnnnnnnnnnnnnnnnnnnnnnnnnnnnnnnnnnnnnccacgcgtccgtcggaagagagatctagaagaagaagaagaagaagaagaagggggaataatggcattgcaatggctgattctgtcgtatgtggttgccgccgaggtagcgatcgccgtcatcttgactctcccttacccaatgctcctgaagaaacgcatcgtatcacttatctcgctcatactcaatcctgccgcttccatcgtcgccttcgctggatttcaactcctcgatatttactggaagaatgagcataggctattgtgctcatctgaagtttgcactactacagagcgggatcgtcacgagatatccgtctataaggctcagaggaatggggttctgtgtgcggctgngatccttctctactggtgcatcttccgcatctgcaagtaccacaaagaccttgagcgtttggagcaattagagaagagatacaaggacgagtagatatcttcccaactgagagtctggtactactgttatagtatcactcggcgtgtgagtagtcccaaaactgaatgagagcatgatttgatcttgagaaaattttacacagac

SEQ ID NO: 116034 - DNA, 423 bp, Arabidopsis thaliana columbia
ctatagagatctatgacgtcacatgcacgcgtacgtaagcttggatcctctagagcggccgcccttttttttttttttttttttttttttttttttttttttttttttttttcctgggaacccccggaattaactttaatctcaagatttacaaacattacaaagtaacaaaatccaaaacacgtgaaacaacaacgcgttacaagctttaacaaattctaataaggaaagaaatccaaatcataaatttctgctgacgtggatattagatacgcgctctaatccagctggcaacgacttttccagagtttttaccttacctatgccgcgtaaccgtaaaaaactaaaaaacccaatttagcaccagccagtggcaaatcccccacacattataaaaaacccttttcgctcctttctttttgt

SEQ ID NO: 116035 - DNA, 655 bp, Arabidopsis thaliana columbia
  unsure (1)..(655): unsure at all n locations
nnnnnnnnnnnnnnnnnnnnnnnnnnnnnnnnnnnnnnnnnnnnnnnnnnnnnnnnnnnnnnnnnnnnnnnnnnctttttttttttttttttaatagaaatattttcttttgacaatgcaaaaactgtgttcacatacacaaatatcaatttcatggacttctgaacacaaacaaacaatacagaccttttcttctcccatgagttctctctactcaattctaaggttntacgaagatacaatatgtaagaattaagaaagcttcacagtttcatctttctaacttgctgagaacgtcatccattggcggtaactccttcgatatctcagcccaatccggcatccctctacccgatctgcggactcgaccatctaaccgcagtatgatgtacacatcatcgcccgggttaactccttcagatatctgttgatctcttatccacctttnccattcaccaggcgaaacagtctcggccttgaacctgatttcacctttcagcttcgattgggctacaaccgattgagcccgtgtatcaaaatcttccccaattgaaggaagagatgtagctgcctttgaaaagctccaaaaccttttttctcgatttccggtgttttgcgttcaccccataccacaggaactaagagaacacctcgt

SEQ ID NO: 116036 - DNA, 659 bp, Arabidopsis thaliana columbia
  unsure (1)..(659): unsure at all n locations
gaatttnnnnnnnnnnnnnnnnnnnnnnnnnnnnnnnnnnnnnnnnnnnnnnnnnnnnnnnnnnnnnnnnnnnnnnnnnnnncttttttttttttttttatttcgactgtcataaaatctttcaaggaacctaataatataacatctcacactgttcaaaagataaatcaagagtgtttagcataataagacataagcagaagaagtttgggagaatatgacgatcttaggcagcaatggtaaggccaccagatcgaagtctaagcagccaagacattctcaaacttgagttcttcaacagcaagaaaatctctctgtactctttcttcacaaacaaatccaacgcaaacaagtaaagatcactaccttgctcaacctcttccatggagtccaaacactcaatgcattccccaatggtatactcgtactgcctaaccgatgcactcactggactctccttcatcagctcagtttttaacctgtggcatcccggagttacaatttcaacatcttgtaaccgagactctgcaaaaccaacactgttaaatctccggtgctgcggagtaggctgctcatcatcgtcatcattgtcatcttcatcagctccaccttcactacctgagactggctcgtttgtgtaaagtgttgataatggagtt

SEQ ID NO: 116037 - DNA, 362 bp, Arabidopsis thaliana columbia
  unsure (1)..(362): unsure at all n locations
cgtacgtaagcttgggatctctagagctgccgcgcttttttttttttttttttttttttttttttttttnnaaagggaaagctaagtggatatcatattactacatccgcaaagatattaacctctttacacaaccgattttttccttgtgaatcaattaagatanttatatatctctaagaacattatcattattacagtgataaattaagtataaacggagaatgtaacggtatgtttaaggatcgacccttttcgaccttcctcgaccatgcgagctccggctccaatgtactgtacaatgctgaagattgttgtgtgggatggggcacacggagactgaggtgaggtgtgccgccatg

SEQ ID NO: 116038 - DNA, 405 bp, Arabidopsis thaliana columbia
  unsure (1)..(405): unsure at all n locations
tatagaagagttatgacgtcgccatgcacgcgtacgtagcttggatcctctagagcgtgcgcccttgtttttttttttaaatanaaaaacttcttcagttttggaaacaatgtttttgataatacaaaaaaagctgtaaaaagtccaaatgaaaaaaaaaattattcggattcgtcactagttaattcgatatcagaatttccatcttcagcatctgttccatcttcgggttctactactggatcatcaagatcttctggttgggcatctagatatgatagtgtctcgacttgtaatgaatcaacttgcacaatagaatcatcgttatcatgctgcattgcagtgaaatccagatttttgggatgcatacttggcctctgggggggggattaggggcgggtgccc

SEQ ID NO: 116039 - DNA, 511 bp, Arabidopsis thaliana columbia
  unsure (1)..(511): unsure at all n locations
atgacgtcgcatgcacgcgtacgtatgcttgtatcctctagagctgccgcccttttttttttttttttttttttttttttttttttttttttttttttttatatttcaccctttttnnnnnnaaaagaacacaaacagaggattttccttcagaaccaagttatattacagagacaaagcagtaacactctctccttcagaaccttgtctcagcaaacacaagccaaatcaaaccaaagggaactactctttttcctcgataacaagaaacaagagaccaattgtccaacagactaaattgtaggaacaaagagagtcgtgacaaacatatactcattgatgcttcttgattgaggatgaagcacttgtccatgcttttatgagcttggggaaatcaaactgcgagcccttaattccaatcttgaccacgttcccaaaatcccaagagcaagccgtggaaaaaaaattggagctgggtgatgtgagccttacaaatgggatggcgtttggg

SEQ ID NO: 116040 - DNA, 591 bp, Arabidopsis thaliana columbia
  unsure (1)..(591): unsure at all n locations
nnnnnnnnnnnnnnnnnnnnnnnnnnnnnnnnnnnnnnnnnnnnnnnnnnnnnnnnnnnnnnnnnnnnnnnnnnnnnctttttttttttttttttttttttttttttttttttttttttttttttaaccccaaaaaaccaaaaacacttttatgtgaaagttgtttattcgcccggtttacaatccacgcctgacctttgggttccaaggggcccataaagctttgtatccctaaaaaaaaccaacgggtttaaatgaaagagacacacacttggcgacgggggaacaaggaaggtttagaaaacgcaagaaagcttttccaccctgatgattaagaggaaaccatcggagaaaggtttcccatagccagccaagagggtttattagggggcgtacatgaaccgcttatgggccgcaattacattttgatagccaccatgatacatagntggagatcctgcagcaacatagactacaagacctgcttgcctcaaagaatggggagcctgaggatgcatcttggctagagccagttgcctctcgtaggctaagaggtccattgcaaacagagaagggactgatgccggggct

SEQ ID NO: 116041 - DNA, 665 bp, Arabidopsis thaliana columbia
  unsure (1)..(665): unsure at all n locations
nnnnnnnnnnnnnnnnnnnnnnnnnnnnnnnnnnnnnnnnnnnnnnnnnnnnnnnnnnnnnnnnnnnnnnnnnnnnnnnnnnnccacgcgtccggaactatgtatattatatagagcaggattctcaacagaagctggagtagagcgtctaattggtctaatgaatggacagatgacacagggtgatcagcatacggtgattgagacatgctatgaagctgcatcttcctttaatttatcatgctggtgttatgggtgatacttatatgagagcctggagacatgaggaaaccgtcctactggctataagacaactctggatgacatgtgcatgcgacacacatccattcgcacggaacagagataacattgaatgagataatggacagtactggtaccattgagagataaaaatctatgatagaggatacttcgtcatatcgataggatcactagtgggatcgaagatgacctacgatagctgtaatgactctntactgagggtgtctttcagatcattctatgaagattaatgagacgtatggatcggcggacaagatatatacgtcgtgagactagatcgtctccgaagctgaatatgagtcagacggcacgatagcgncatcgtcagagacacaattatgcacataacacatgatgggacg

SEQ ID NO: 116042 - DNA, 524 bp, Arabidopsis thaliana columbia
  unsure (1)..(524): unsure at all n locations
cctatagnagagttatgacgtcgcatgcaccgcgtacgtagcttggatcctctagagcggccgcccttttttttttttttttttttttttttttttttttttttttttttttttttttttttttttttaaaaaaaaacagtttgggattaaagatttaagatcttttatcataggaccccaaaaagaaaaataaatctgctttttatagcctaataaacttttttttaaaaactaaacaaaatagggttgggggatatatatttcccttgaaaagttttttttaaaggatcaaaagaaaaacaaattattgcctgaggggagctaaacaaaaaccaaaaactgtttttttcaccaaaaacaaatgtaggctcgaatcctggacgggcccaaaccaaaaaggttttttccccgggtttgagcaccctatgccccaggctggggtcgattgtcagcactcncgaaaacccttatgtttttttcccgttccggngccaacgcagggggtgcgaccctttttaggtca

SEQ ID NO: 116043 - DNA, 424 bp, Arabidopsis thaliana columbia
tagcttgatcctctagagctgccgccctttttttttttttttttttttttttttttttttttttttttttttttttttttttttttttttttttagacccttaaacaggggaggccaaagaaatcagaaatcaatggctttaaaacagggaaaaaggggccacaataataaaaaagggttttataaagcggaaaaagcttcttcctaaaaaaaaaaaaaaataaaaaaaacttccgcgcttttgcttaaaagactacctttggttcgaaactaatgggattaccattaggaaggaacggccccgggggcgaaaacaaactaaagtcttgggggggaaaccccccaaaagcaggagattatggggcgcggccacagacccctgggaaggaggtaaaagggaagtccggggtaacaccaccaaaaa

SEQ ID NO: 116044 - DNA, 181 bp, Arabidopsis thaliana columbia
  unsure (1)..(181): unsure at all n locations
gcacgcctacctaagcttggatcctctagagcgctcgcccggggggttaaacctntaagccacaggaacgaccccgcgaccgagcggaaaaccgacagccaccgccggggagcgcggagcaccgggaagagagggcgagagagaccacagctcggaagcgcgagaggcagacggaagggag

SEQ ID NO: 116045 - DNA, 283 bp, Arabidopsis thaliana columbia
  unsure (1)..(283): unsure at all n locations
cacgcccgcaggaacccgggccgcaatacccgggctgacccaggcgggcgagccctcagnngaagaagtcagccgagaacaggaccccaaagacgaaagcacgcccgcgcacgacgcgcaccagcgacaagcaagaacagcggagaagaacagcgacgggcgaaacgcgcacgacccgcaaagaagaagacgcgcaaccaacggactccccncggagggagcacaaccacgaacacgcggcagccagaagacacaaaccccgcagaccagcacgagacgacag

SEQ ID NO: 116046 - DNA, 636 bp, Arabidopsis thaliana columbia
  unsure (1)..(636): unsure at all n locations
gacgtcgcatgcacgcgtaccgtagccttggatcctctagagctgccgcccttttttttttttttttttttttttttttttttctcacaannanaananacacaaaaaaaaaaanaatcccttttccatggcaggggcaagactacacgaaatatccttgatcaggacataaccccaacagaacaatctngaaaatccatgattatttgtggggcgcttgagaatcctaacccagggagacatggcgccacattacccgaaactaacttgaatataaaacccccaaaacgtgtcggaacaaaaaatgcaaacccagctacagagcatttctaaaccctccaaaaaggcctaaagaacaaaaggcgggcgtaccgagtgaacacaagaancaaccgcggcccaacaaacccgagaaaagcccaaccaggagcgcatagtagtgacggacccgacgccaagggggatgggcggagcggcgaggcgcggcggcgacagaaggcgcgcgcgggaggagagacaaagagtcgaggcgcggagcgcgggcgggacgagaggcgagcggggggcggcgcgacacgcggcgggagaggggaacagcgacggggtagggccgcgggcaggcaggacaaggcaaag

SEQ ID NO: 116047 - DNA, 631 bp, Arabidopsis thaliana columbia
tgcacgcgtacgtaagcttggatcctctagagctgtcgccctttgttaatccttttatagcagaaatggcaaaggacgtacggggaaggaatgagaggaggaacgtggcgcgaggtggagagaggcagaggggggtagacggaaacaagagatagaacatggaagaggttggaagatggcaaacaagaggagagaattttttttggggagggccgaagaaagaaaaacggaacatgtaagagataacaaagaagtcagggacgcaacaatgggtaggtagcggcaaggccaagtagaagagaagtggaagaagaaaaaggcgtagaaagacaagatgcaaacaagtggtaaggaaataagcaccagaaaaaatcgaaacagaatacatgaaagataaataaaacgaacacgcaaatgcaagagccacactagcgaacacaaagagaatacgcagaaggaaggtcgaaataataaacaagagactataacaagaagaaagcaacatataagagaacagattatacaaaagttcaaaaaaaaggaaaaaaatagacgaacgaactgaaggataaacaaaaactaataagaatgaaaagcgcaactcctgatataaaacgaatatatagagaat

SEQ ID NO: 116048 - DNA, 549 bp, Arabidopsis thaliana columbia
gcacgccagcagggaccgggccggaatacccggtccgaccgcacgcgaaagccgcacgcgaccgaaaaaatgagagacccagacggaaggcgcagactcaaccaccaccgaacaaacgatcacaccacgagagggagagaaagcaagcaacggaagcacccacaaggcccaaagcgagcaaacgagacccagagacactctttaagaggggggcggcgagaggacaggtaaccgcaggcagaaagcaagaccgcgacacgagacggagcagacgaccggctgcacagaaggatagggaagaggagaagaaccccccgaccgaccgacagatgagagagaagaacagaagagaaagagagcgaccgccagggcggggcgaaccaggacaggggacaacggcgagacagagcgcccgcgagacccgcgaagaccgggagacaacacacggaggggcaaagggaggccgcaggacacacgaaggcgcagaggggaaaagaagacgagaacaggcgaaaaccaaaaaccgaagggcgaggcagcacacgtgag

SEQ ID NO: 116049 - DNA, 533 bp, Arabidopsis thaliana columbia
  unsure (1)..(533): unsure at all n locations
ttgatcctctaggctgccgcccttttttttttttttttttttttttttttttttttttttttttttttttttttttttttttttttttttattactttttttttgattaaagatgtaaaagatgggggggagaaagaaaccaaaaaaccaaaaaaaaggggcgcgagacccaaaacccttttagaaaagagcaccccaagggggaaaaagggtcctctggccctggacccttcgccccgcccccccggggaaaaacccccgggccaaagggccccaaaaaaacctgaacagtgctttccccaacacgcgtaggccccaaacggaacggcccgcccgcccacccaacccccccgggagccacccgaaacccgacccaaaagagaagcccccccccagagaaaccgcgggggacccccagggcaagaccgcacacccgcncgcgcgcggagccgcgcccgcccgcgggaccccggcgcggcgccgccggcggaggcgcggcgccgggggccgcaccggcgcgcgagcgccccgcg

SEQ ID NO: 116050 - DNA, 396 bp, Arabidopsis thaliana columbia
agaagatctatgacgtcgcatgcacgcgtacgtaagcttggatcctctagagctgccgccctttttttttttttttatttcaaaacgtttaacgtatacaaaaggaaacaactctgtctccaagtaatttacacattctcattccaaccaaagaatagtagaatacaaaaaacgaaaagttgacactgcatatacaatagcaacgaacctagttatgtaaggtaagccaaaaaaaagaagagtttgatagaaatttaccttacacaattagttttcatcatcttttagttgtttttttaccggcgtggttgattcatagactgtgcttgaacaactgacgcaacaatgttgtgagatgtggaagtgagtactggatgggtgtggtgacgatggggg

SEQ ID NO: 116051 - DNA, 458 bp, Arabidopsis thaliana columbia
  unsure (1)..(458): unsure at all n locations
atgacgtcgcatgcacgcgtacgtatgcttggatcctctagagctgccgcccttttttttttttttttttttttttttnttnnnnnnnnnnnngggaaagctgggacatcctactcctatataaaatttatgtatgttgtacaaatctcacaacatttacatatataaaataaaataaataaacattttccatcatcttttttatttttacaagcttatttgacatccaaagcaaactgctctcatattttaagtaactcgccagctttgagaccatcaatcgtgtttggccacattatcaatccttaggcgacgaccggtggcaaacttgtggcggacggggggaacagaagacagggacggtgccgaaattgcgggtgaagccgaagtgatgcggcaggggaagagaaaggcgtacttgatggactgagtcgttgtgtcgagagatgacatgagtt

SEQ ID NO: 116052 - DNA, 376 bp, Arabidopsis thaliana columbia
  unsure (1)..(376): unsure at all n locations
tagcttggatcctctagagctgccgcccttttttttttttttttttttttttttttttntnnaaaaaggagaagaagctatatatgtcttcattagttgaaacttcttaagaatttgcagcgtttcaggaacagaacaaacagagaacacccataaaaagtcaaaggaaaaacaaatcttgtttgtgagagtgtgacggaccgcgctcagcgtgaaggaaacccgtgcgagggacagaagaaacagggggcgcagaccacagggaacgggcggaaaaggcgaggggacgggcgaagacgagatggaggagggtcggcgacaggaggaggttcgcggcgcgacgcaggcggtagtacggcaccagcgagcccacgac

SEQ ID NO: 116053 - DNA, 295 bp, Arabidopsis thaliana columbia
  unsure (1)..(295): unsure at all n locations
ccttgagtgcttgacgtccatgccgcgtcgtagcttgatctctagagcgccgcctgttttttttttatatgaacggaggactataaaacataaaattgtgacataaaggccaaaaagatgcgccaaagggaaaaaaaaaaatttttaacacaaacaaagggggttaaagggggtattaggtgggggagaaaataaagggggatgtgggaagggcgctcgncacgagagggggcgcccaatcaccctttttggaaaaagaaaaaaggtggtggtggagatataattacgggggggg

SEQ ID NO: 116054 - DNA, 672 bp, Arabidopsis thaliana columbia
  unsure (1)..(672): unsure at all n locations
nnnnnnnnnnnnnnnnnnnnnnnnnnnnnnnnnnnnnnnnnnnnnnnnnnnnnnnnnnnnnnnnnnnnnnnnnnnnctttttttttttttttaatggaaagcattcattcatattcatagttcaaaagactttccactgccctttggctacatattttcgttaagcatcatatatagcctacgacactacaaccctaacttaaacgaaacaagaattctctgtgtaaataaaaatgaaccacaccgtttaacaatggcttcctaacactgtaactgtctcctacggtacctgcacatagaaacagaccgcgacactattacttatttcttaattctgttttttaagggttttttctttctggcgagactacggctacgacgacgcttcttccgctttcgtatcttttccagcattttcttctccttcctcttcctcttcctccttcttccccttcattnttttcctcttcgcatcaattccctctggtgacttcttcaagaagctcaccaacggctcttcatcagacatttcatcaacagctttttccccatcttcattgtcaccattttcttcatcagcggtattactcttaatcttttttgaggtgatcttcgatattggtatctctttctcatcatcagatgaattgttttaccattatcagagttgga

SEQ ID NO: 116055 - DNA, 495 bp, Arabidopsis thaliana columbia
atgacgtcgcactgcacgcgtacgtagcttggatcctctagagcggccgccctttttttttttttttttttttttttttttttggagggaacaccaatcaaatctaatatacagagaacacagccacatacgcagaagaaagacagataaagaatcagacagagaacatagacaaatcttgtttttcacaggataaaagaaaaaagctgtgtcttcttccacaatcaccatcatcatcatcaaatgaccaaaaacacaagaaagatcgacaactgcagagagttgacttctctccttttggggtaaagtttaattcgatgatttggagtgcttacaagccaatcaatgacttgatcgatgttggtagaagtcttgcaagatatcatgaagcaacagacttgtgtatctgagagagactggggacccatttgatgggtagggctggtttgggcggagtggagcggtgggaggaggtggggggatgacgggggaggg

SEQ ID NO: 116056 - DNA, 171 bp, Arabidopsis thaliana columbia
tggatcctctagagcggccgcccctttttttttccttttcccaagtatgaacatttgaatgttggcaaattgcacttgtgtcagatgctcattaagaaatctacactaattcgcaaaaaaaaacacaggagaactgacaactgcggtcggacaggaagaagccgggagaag

SEQ ID NO: 116057 - DNA, 642 bp, Arabidopsis thaliana columbia
  unsure (1)..(642): unsure at all n locations
nnnnnnnnnnnnnnnnnnnnnnnnnnnnnnnnnnnnnnnnnnnnnnnnnnnnnnnnnnnnnnnnnnnnnnnnnctttttttttttttttttcatatgtgacttttattttcatttccttgaattttttagccacaagatcaattaagttacaataaaggaaaatcattgtcagttggctttataatattatagcttttacaagaaacaaatattatatcgcaaaattcagcaaaggagataatttaatgaaatttctctgttggagttttgatccttgaattgctattggaattcttgattgctctctccatctcctttgagttatctttgtcttcctatgttttttttggatgatttgacaaagccgtctagtcccaacattcaatttacatagcaaggtttcgattttttcaaaggacatgcaccaccaagccaagaggagagagaactaaaattcttaccgatcacatcacactccatcttgattagaaaatataaataatgctttgttcctctaaagagatctctttcatgactagtccacatagctcattttcatcaaaacagagatctctaagcaagtgtaatcaggtgtcttgcttgactaataagcatcgatcgtctccgagtctaatctcttt

SEQ ID NO: 116058 - DNA, 562 bp, Arabidopsis thaliana columbia
  unsure (1)..(562): unsure at all n locations
tcctctagagctgccgccctttttttttttttttttttttttttttttttaaaaananaaaacanannacaaaacaaccaacaaacaaaaaaaacannaaccccaaaaaaaancaacaacattaaaacatccttaaaacaaatataggaaaaaatcttttctctccttntatttttttttaaaggggcggaaaaacaaacaagaaaaacctttattttggatccaatgaaatttatccacaatttccaactcttttctatatctcaacaatttcaaatctcttccataagtataccgttattacactgtgtttttactcttcgccggcatagtgggttgtctgttgtgtggcggtaagtatgcggacccgttgccacagtgcagagtagtgtacagagggtgtgggtgtgtggagcggtgggcgggagggttaggaggtggaggtcgcgtacaagatattgttatctgtccttcccgccttatgagcatacttattatttaggaaccgagacgatagctccatatcgatctctaaccacatattaagtcttgtatttagtgc

SEQ ID NO: 116059 - DNA, 618 bp, Arabidopsis thaliana columbia
  unsure (1)..(618): unsure at all n locations
nnnnnnnnnnnnnnnnnnnnnnnnnnnnnnnnnnnnnnnnnnnnnnnnnnnnnnnnnnnnnnnnnnnnnnnnnncttttttttttttttttttttttttttttttttttttttttttttttttttttttttttttttttttttttttttagaggaaaaaaaccggggcttgcccgggttatcccctttttaaatgtaaaaggaattgccccacccccaattttgaactgtggcccataaaacccataaaattggcccctaaagcccaaaaaattgccccaaagcaaacaacaaaaactttttaacacaaaaaactgggcttaaaggggatttttttggggaaataattatgggggaagggcataacccttttgttacaggggttggccactgttccacctttggaacatgaaaaagggcccgttgggtttttactctgccgggggtcccccttttttgtttgtagcaaatgtcatttttttggaataagctttggggtttccagcgttttgatcggccgcgtgggtccacccggaatttccggaccggtccctgggggggaacaaattttccttttatgagagcggatttaaaactggggggaataatgggaataact

SEQ ID NO: 116060 - DNA, 611 bp, Arabidopsis thaliana columbia
  unsure (1)..(611): unsure at all n locations
atgtctnnnnnnnnnnnnnnnnnnnnnnnnnnnnnnnnnnnnnnnnnnnnnnnnnnnnnnnnnnnnnnnnnnnnnnnnnnnccacgcgtccgatcaaatcgctggatacacgagagcttattccaataagatgacatttgctactatcaaaggaggtggacacacggcagagtatagaccaaacgagacctttatcatgttccaaaggtggatcagtggccaacccctgtaacaaaaggcttatgaccttcacctataattatctaccaactaatatccacgttaagcgcagttgtttgtgttgaaatgtttttgttgtttgctttgttgcattcttttgtgctttatgttacaattttatgtgttttatgtactacagttcattattgtgcgttgtgcaattccttttacatttaactagggactaacccgggctagccccggtatatttcctannnaaaaaaaaaaggaaaaaaaanaaaaaatatagaaaaaannnannnnnaaataaaaaaaaaaaaaaaaaaaaagggcggcccttttaaaggatccaacttatactacgcgtgcttgcaacgttatagtttttttatagtggcaccaaaattaat

SEQ ID NO: 116061 - DNA, 584 bp, Arabidopsis thaliana columbia
  unsure (1)..(584): unsure at all n locations
cactatagnagagctatgacgtcgcatgcacgcgtaccgtagcttggatcctctagagcggccgccctttttttttttttttttttttttttttttttttttttttttttttttttttttttttctttttttatctaccttgaaacaaacaaaccacaagagaaccaagaaaccaaatgaataaaaaaccacctacaaaattgaaaacccgttaaaaacttaacccatggaacacacttataagaaatacatgtcccaaaaatccgactatcccaaaacccaaggcccacatagcgaacctatccctagagaagaaaccccataaaaaacaaaaaccccgaaaacaccaaaaaccctaaaaagaacgatccccatacccatccggccccatgggtcaccccgggacgtccggaccgggccctgcagggtaaccagatttcccaaaggggaagcttataaaaactaggggtaataatgggaatagggtgtaacggggggaaaggtgcaaccggcaacaaatccacaaacctaacaagccacacgcataaacggcaaagccggaggggcctaataagtgaggggcc

SEQ ID NO: 116062 - DNA, 590 bp, Arabidopsis thaliana columbia
  unsure (1)..(590): unsure at all n locations
tgacgtcgcatgcacgcgtacgtaagcttggatcctctagagcggccgccctttttttttttttttttggcatcaataagagcactagttaagaagatatccaacgatatgctatgtctcataatatagcaatgaatttgctacaatactcaaggttttcaaacttagaaactgatggaagcaaactagaaaatgtgatagcatcatggcaagaacacctgaagaaatcatctcatagaaaaaggttaagctttcttccattaatccactctgaacatatccagatatcatgcaattccacgtcacagtatcagcacgagacatcatccgaaacaacttagacgcatcatcaaaacgaccacattttgaatacatagataaaagtgagtttttgatagagccttcaaaatcaaccccagaaacaaccactagaccatgaagctgaactccnagatcaatcaacaacttagatgcacacaccgatgaaacgcaatgaaaggtgacagcgtgaggactaatgtgatccatgctgatgacactaaacccttggtaacactatgcaaaggtgcagactggggtgccgatggagc

SEQ ID NO: 116063 - DNA, 325 bp, Arabidopsis thaliana columbia
  unsure (1)..(325): unsure at all n locations
tcgcatgcacgcgtacgtatgctttgatcctctagagcngtccgccctgttctttttttttttttttatgaattgattcatcttagaaaccatatattgaagatacaccaatcctgtttctaggcattcacaagcctacacatatgggtttgtttctgntcaaataaccctacaattgcagcattactagtaaccttttttatcatgtgtggcagactttacctcagttctgtgccgatgaatgggtcagtgattccgcatttgatcagccggaggattctctgcctggtgatgatggagggcggggaggacggcgggtcggttg

SEQ ID NO: 116064 - DNA, 563 bp, Arabidopsis thaliana columbia
  unsure (1)..(563): unsure at all n locations
ttgacgtcgcatgcacgcgtacgtatgcttgtatcctctagagcggccgccctttttttttttttttttttttttttttttttttttttttttttttattttttntnttctaaaaaaaaatcatgaactgaagcatcctgcagggaggttctgatacatacatataaagttttatttacacttaaaggatttgtatctttgacatgttaaaaaacagagaaggaaacagagcaaaaatttgagttgaagaaacaagatcattttcaaaagaaggggcaaaaatgatttaaccatgtaaatatatttattggtggttttgcaacttgggagactactcggggagggtaaaaattatccgccaccaacatcgcggggggggtttttttgctcccattgttgccataagattggaatgagggttttgagttaagaaggatctttgtgttgaaaaaaaaccgaagctggggtgccaaggggtgagaatagggggagaaggcaatagatggtggggtggagtggagaagggcggggtgttgagaaacgtgagaggggtggattggggg

SEQ ID NO: 116065 - DNA, 673 bp, Arabidopsis thaliana columbia
  unsure (1)..(673): unsure at all n locations
atgatcatgccagcactaatcgactactatagggaaagctggtacgcctgcaggtaccggtccggaatcccgggtnacccacgcgtccggctgtcatagatgaaaagatactttgtatgcatggtggactatctcctgagttgatcaatgtggaacaaattaagaacatagagcgtccaactgatgttccagacgctggtttgctctgtgaccttctttggtctgatcctagtaaagatgtcaaaggctgggggatgaatgatcgtggtgtctcctacacttttggtgctgacaaagttgctgagtttttaataaagaatgatatggatttagtctgtcgtgcccaccaggttgtagaggatgggtatgagttctttgctgatagacagcttgtgactatgttttctgctccaaactactgtggtgaatttgacaatgcgggtgcattgatgagtgtcgacgaaagtttaatgtgctctttccaaattcttaagcctgtggatcggaggtcgcggttcttttgaagagaaagagtccttcttaagttataaccctgattcanatcttatgggaagaatgggaggaganaaagcgacgacggatgttggtggcggataattctgaacctccacgagtagtctccgaangttgcaaagcaacaatatatatatta

SEQ ID NO: 116066 - DNA, 533 bp, Arabidopsis thaliana columbia
  unsure (1)..(533): unsure at all n locations
nnnnnnnnnnnnnnnnnnnnnnnnnnnnnnnnnnnnnnnnnnnnnnnnnnnnnnnnnnnnnnnnnnctttttttttttttttagaaagacttatatattacaaaaaaaaacgtagagaggtgttacataagaagctttcactttcacagtacttatatggatattcgaaagaaactcacctaatgatctcacttgtaaggtcacgaaccagttgtgttttcaggagaagataagccattcgatacggtttcatcatcaccaagttgtgaggattcttgatcagggaatagctccagtcgcatagacggtgcaatgttattcacatgaagccatgttagctcccataagctatctgcaccaagagcacttgtttgcaatagcacgcctgtggtgttgatcaccagggatgtgtggttggaaagctgtgagggcggtggtggtgggctgggccttgggggggctggactcggggtgggctcatgggcctgcaccagcgatcgcgagtgggtgtccttctgacattgttcatttct

SEQ ID NO: 116067 - DNA, 486 bp, Arabidopsis thaliana columbia
atgacgtcgcatgcacgcgtacgtatgcttggatcctctagagcggccgcccttttttttttttttttttttttttttttttttttttttttttttttttttattttttctttttttaaaaaaacaaaacaagtttttttcataccaaaataaagttactgaccccacaatttttgcaaacataacgaaccagggggggacatttttttggccggggttttaagctgcggctttcgagtttcagtttttattcaccaggctttaaaaatatacaaaacacagggttggaaataaggacccagggctctgaatatagcgtcccaagggtaaataattccaccgggaaggttggtgaagaaagctaagatgaggggggagtggccaaaaaaaagggagatgtaaagcggttaggagtgcgacgaaaagagtatactaatttatataactcatacgtgggagtctccttaagtggaagatataaggatg

SEQ ID NO: 116068 - DNA, 566 bp, Arabidopsis thaliana columbia
  unsure (1)..(566): unsure at all n locations
tatgacgtcgcatgcacgcgtacgtaagcttggatcctctagagcggccgccctttttttttttttttttttttncaatggaaaaaccaaatattttaatacaagttagaacaacgtcaataaccataactaaaccaaaaggtaaatgttgttactaaacaagtaaaaaaactgagtcacaaataaactcagaaaaaggtgaagaaattattcattatcatagatgcatcgatgagacaagtgcgccttgaagatatgaacacgaagatggaagaaatttgcttgcattcgttattaactctatcaactcctctccttgtcccttcaaaatgtatacttcttcatcaatcttcttcactaccgagctgttggaattagaaaacagatcctttacattagcgcttaactctaatgcggaacctggttcattttggctcgaggaaagaccaagcgaggaaaaggtgtttggatgcaaaataacatgtggaacagaggtgatgtatgtgggaacgggccatgagccggggaggggtgggggggtggagatatgggagtggtgatgggga

SEQ ID NO: 116069 - DNA, 610 bp, Arabidopsis thaliana columbia
  unsure (1)..(610): unsure at all n locations
nnnnnnnnnnnnnnnnnnnnnnnnnnnnnnnnnnnnnnnnnnnnnnnnnnnnnnnnnnnnnnnnnnnnnnnnnnntttttttttttttttttttttttttttttttttttttttttttttttttttttttttttttttttttttaaaccaaggggcaccattttggggaaaaaaaatatacccctctttctgttctttcaaaaaagaggtccctttcccaattaaaaacccctgttttacataaccccctttaaccccccccaaaaaaaacccgaaaattttttgtcaacccccgtttttaaaaaaatccccacccccttaaaaaaaaaaggaaaaacccccaatccccccgataaaaattcccccaaaaaacctgccccccccaaaatttgtaaattctccaacccctttaccccccccagggggggttcccccccaaaaacacctaattcccgttttttttgccccaaaaacttgaaatttaatcttggcccccccaatgccccatggtctaaggccccgggggcccaagcccatgattattgaaaggctgacccccgaacccgcttaaaaaaccaaagcccttgaacccccccaacagggaccccat

SEQ ID NO: 116070 - DNA, 143 bp, Arabidopsis thaliana columbia
  unsure (1)..(143): unsure at all n locations
ttttttttttttttntcnnccacaaagacagacggggngtaatgggagctaaaaaacagaacgtcacggctgttgtattatacagagaaacggcgggggataacttgggcgcatataagaaacgatgacatggggggggcgga

SEQ ID NO: 116071 - DNA, 670 bp, Arabidopsis thaliana columbia
  unsure (1)..(670): unsure at all n locations
atgacgtcgacatgcacgcgtacgtagcntggatcctctagagcggccgctttttttttttttttttttttttttttttnggagaggnaattnnatnnncnaatgagaagacaaacaacaatcttaaacatatggtattggatggactggatatggatgcaagcctaaggatcagaaagtacggaaacaagacgaagaaggagtttttttcaaacgcgcaagaaaaaagaaagaaaggaacagcgagagagacgacgcgcacgaaggaagatagagagagaaggcggaaactaaaggagaggaaacgaacgaagagtgagcgagaaggagaaacgacagaaagnagaaagagagagagagcggagaaaggaaagagaggagaaaagtataaaatagcagaagagagacgtactagaagagagagagagacagcgagaagacagaaaagagaacaagtgtcagcgaaggcagccgagaagagagagatagaagaagagagacaagaagagagagcggaaggcaggaggtgcctcaggagggaagtaagtagatgaagagaaacagagagaagaacagagaactgaaagaagcgacactagatcagagagaagagaagaaagaatagagaacgaagagacagagagaagagagagaagagatatgcgaagaa

SEQ ID NO: 116072 - DNA, 552 bp, Arabidopsis thaliana columbia
  unsure (1)..(552): unsure at all n locations
nnnnnnnnnnnnnnnnnnnnnnnnnnnnnnnnnnnnnnnnnnnnnnnnnnnnnnnnnnnnnnnnnnnnnnnnttttttttttttttttttttttttttttggggtaaagaaacttacatattacaaaaggcatgaaaaaataattatcaaaaagaagatacaattggtaaccattttctacacacacatacatatatctaccattcacacgactggttctgaccgaaactgcatatgttcctcttgtttgtgacgacgactcagttatgttctcctcagacaacaaccgtagaatgcatttgatagctggtagagagttgttgcgagcaagaagtcgtcaagaagatatataacttgttgagtgcacaaacagctaagagcttaagtgttcatgaccttcctagtaggttcaaagtcagggtttgacaagttcactgtgaggtttctcatcaacagcgaaacagttggcaaatttataggatccattggcttgagctttgtgatgcgggctttgctgggaggagcagccactgccaagaagggtgaacccga

SEQ ID NO: 116073 - DNA, 599 bp, Arabidopsis thaliana columbia
tgacgtcgcctgcacgcgtacgtaagcttggatcctctagagcggccgcttttttttttttttttttttttttttttttaagctcatgcttcattgaatatatatatgattcataatggttggtcacaattgcttttacaattcttctgtatctacttcgtgatatctttagacatttaatcaatcattacaaaacaaaaccaaatattcgaaacttgctgactcagtgtgattcacctgtgcaaaaccccccaattaccccagaatccgttaagttggttagtctcggaaatccaaatgtggaaatctcaataacccgattatgtaatcgtatgacccgacttggtctccgggtcaggatccgacacaatgccggtgatcgaagactctgaaaagcttgaactttttgccgattatttttacccttgaggagcagaattgcaattgaagaacggttgctgctggaacgggtcctgaaacgaatggcgaaagggggggactgtggctggggccgaggaacaatgcggtattgggtactagccattgatctggcttgtagcggcagttatgaattcgcacgtggtgtaacaattggggct

SEQ ID NO: 116074 - DNA, 639 bp, Arabidopsis thaliana columbia
  unsure (1)..(639): unsure at all n locations
ggcnnnnnnnnnnnnnnnnnnnnnnnnnnnnnnnnnnnnnnnnnnnnnnnnnnnnnnnnnnnnnnnnnnntttttttttttttttttttttttttttttttttttttttggagcagaggaaacaattgtaatttcctttagtagaacaagtttcaattgacaaatacttaacaagtgctgaaaaagcctgcaatgatgtgatcaattaacaaggattattctagaaacaggggggacaaaatacaagatgagatttgagtgttgggtttgatgatatatgatcataaagtctaatccacaggaatttcaacgtccatctccggtctactactcccaaagatctttatgaaatcctccagagttaagaatgaatcactcgtgtagcccgattccttcaaaacctggctcagtacttgctctctttgctcatcagacatgaatgatcccgataagtcacgcaacacttccatgatttctttaaagagaccttcccgttgcaggccgaatcatagaccttaaagaacaattgaaactttttgggttagactaagctggggccttaaccgggacaaggatagcaccaaaatgcttaatggggaagccttgaaccatcttaatgaggcggtggagaggggggtg

SEQ ID NO: 116075 - DNA, 647 bp, Arabidopsis thaliana columbia
  unsure (1)..(647): unsure at all n locations
nnnnnnnnnnnnnnnnnnnnnnnnnnnnnnnnnnnnnnnnnnnnnnnnnnnnnnnnnnnnnnnnnnnnnnnnnnnttttttttttttttttttttttttttttttgagaggaaacaaaaactatttgctcaatgagtgtcacaaagaagtttgaaaccaaaagcagagtcatgactgcttcaagtttttacaagattcaccctttgagctcaaaaccgatgccacgagtattgaaaatgcagaaaaaaccgcagcggcgaatgtcaaggcggaaacatactctgtatgacccctgattccggcagggatatcccagaaaacagacctggtttcagtcttcgatctgccaatcgacaaaaccaaacatctcctccgttcacgtcgctggttttgtacatggctcgagcacaagaacaagtctggctcgccaaactccactctagagtatccactgtcgtccagaggctgataccgagcatgtaaaggaagcttaaagcttatttcaccattttcataatttctagagctgatttcaacatgaatctcaacgacggatctgttcgatctaaacgaaggcagctcaagatttgtgtcaccaaacacagatacgtcactgaaagctctgcgttgttgaagactctgaagct

SEQ ID NO: 116076 - DNA, 647 bp, Arabidopsis thaliana columbia
ctatagagagtcatgaggtcacatgcacgcgtacgtaagcttggatcctctagagcgtgcgctcttttgtttttcctttttttttttttttttttttatttttgtttttttttttttttttttttttttttaaaccaagggggcaccattgaggggaaaaaaaaaatacccctctttcgggtcttttaaaaagggggggcctttcccaattaaaaacaatttttttacagaggcccctctaaccccccccaaaaaaggacgaaaaattttttggccaaccccgtttttcaaaaaattccccgccccttgaaaaaagaaggaaaaaacccccaagtccgcgataaaaattcccacagaaagcctagccccagcaagagttggaaattcccccacccctttaacccccccgagggtgggcgccccccaagagcacctgattcccggttttagggcgcccaacacgtggaagattatgtgggggcgcacaacgggcccgggggctaagtgctggggggcacagtccctaagtattgtaggcgggtacccgaaacccgaaagaagacgagcgctttgaatccaccggcagggcacacctgtgggtggaaaacggggaggcccacaccgagggcagccctctgggggataaa

SEQ ID NO: 116077 - DNA, 603 bp, Arabidopsis thaliana columbia
  unsure (1)..(603): unsure at all n locations
nnnnnnnnnnnnnnnnnnnnnnnnnnnnnnnnnnnnnnnnnnnnnnnnnnnnnnnnnnnnnnnnctttgtttttttttttttttttttttttttttttttttttttttttttttntttgggcaattttaaatctttttattatacagagaaaccaatactgctacaaacatttcatttgcagagattgagcaaatcaaagttacaaacttacaacaattcaaattgggtgtgtaaaacaaacaaaaggaacaatctttaagcattccttggatcactttctctttttcttttatacaaatcattacataaacattaaccaaactaccctggataaatgtaaaatcatctggccacttcttggctctctatgagggatttgaatgaggcaaagaaggttcttggatccaagggttgcggcgggttgggacaaagaccaagcacttggtcaccgtgtggctttaacccttttgggtcgccattttcgtctgcatttgacaaacggaaccattactggacttccggttatgcatacaccaattcaagcaatggttgcagaagaactggcnagactgtgtgcaacttcaccacagagtgaagattat

SEQ ID NO: 116078 - DNA, 618 bp, Arabidopsis thaliana columbia
  unsure (1)..(618): unsure at all n locations
tagagagctatgacgtcgcctgcacgcgtacgtaagcttggatcctctagagcggccgcccttttttttttttttaaatcaaaagacgatttcgtgtaaattcatgctcttacatgtttggatcattaccagttcaaattcatgttttatgtcacttacagatgagagaatcactcttgacaaaacgagcgaacagagaaaaaatgtagatgtaaagtctttagattctgttatctctgcgctgaaaatgtgaataaaatttcttgatcatattaccatcttgattttctggcattctggttctcgcctttcgaagcatccgataaccgcgactttgaatacagatccaccgcggaagttacttagtctcgaacccgagaggatatggtgatcttttgaagagccttgtttggttataagctggtgttcatctattaccctgaggctcaacgtcatagatcttccccatccaaccctccatctccacttttttgaagcttctcgctctgtacaacccaatcaacacaatccgatntgcttctttgtaagaaaggcttttccttggcgttgatttcttgctgtggtctcttaccataaggcctttatagctgttggggg

SEQ ID NO: 116079 - DNA, 665 bp, Arabidopsis thaliana columbia
  unsure (1)..(665): unsure at all n locations
ctctctatagggaaagctggtacgcctgcaggtaccggtccggaattcccgggtcgacccacgcgtccgctgataggatttgcaccattatgatgtaccattactccggaagtacatcaaggggtgtcaatcgtgctgtgatgaaacaancttgttgataattatcgtgattctcaccttggaagtcgtcttccagcgtatgatggtcgaaaaagtctgtacactgctggtccacttccctttaactccaaggagttcagaatcaatcttcttgacgaagaagtaggggctggaggtcaaagacgagaaagggaatttaaagttgtgatcaagctagttgcacgtgctgatctgcatcacctaggaatgtttttggaggggaaacaatcagatgccccacaggaagctctgcaggttcttgacattgttcttcgtgagctgccgacctctaggtatattccggtgggccggtccttttattcccctgatataggaaaaaaaccaatcattgnngggatggcttggagagctggcgtggattctaccaaagcattcgtcctacacagatgggcttatcactcaatattgatatgtcatcgacagccttcatagaggcaaaccctgtgattcagtttgtctgtgatttgcttaaccgggatatttct

SEQ ID NO: 116080 - DNA, 591 bp, Arabidopsis thaliana columbia
  unsure (1)..(591): unsure at all n locations
cctctatatctgccgccctttttttttttttttttttttttttttttttttttttttanaaaaataaaatcnactnaaaaaactacaccctaaaacaccaaaaaaaactatnccacccacaaaaacactaaaaaaacttcccatttcttactctcaaaaaccacaaacttttttttacaaggaagancaacccacagggaattaaaagacccaaaaagacccactattttagattcctcttgttatccataacaaaacgacagtccttcttgattgcaccacttcgtttgactcctgaactatatttttagttattttagcatataaatctttagacattattattatatgaatgatcaggcatacgnttaataatctcacactcacatatcatactttaaaaatatacttataagaatgttataattaaatcataatcaatatgttttaattacctatatatatattgacgactctaatataatcaatataatttatagatatccatcgctatacatctcaatcaccttcaactcaattcaattacactatttaataacatatacgtatttattcttctctctactcaaa

SEQ ID NO: 116081 - DNA, 527 bp, Arabidopsis thaliana columbia
  unsure (1)..(527): unsure at all n locations
actcactatagggaaagcctggtacgcctgcaggtaccggtccggaattcccggttcgacccacgcgtccgcggacgcgtccgcccacgcgtccggacaagtgttcatctcaccggtctcgttaaaagatcgggaagagaggaggacaaatcagagtttgttcagaggctcttgtcatcagccattttcgatgaagtctaatgcacatacaaagattgagaacatggaggaactaattcgaatcagacttgagagaatctggtttcgagaaaaacaatggttgggatgagaagaagacggagaagagcgagatgcagctatgttatcaatatctatatctatctatgtattgtgtctgtttggtgctactaaatacattgcgtagaaatgtgttttcttaagtttattaagcaattgaaaagtaagatataggaagaagaataagtcctcttgtctgtagcataaaccctattggtgttcttgtgttgtgtgtcttaatgaaatgaaaatgttcactctaanaaaaa

SEQ ID NO: 116082 - DNA, 618 bp, Arabidopsis thaliana columbia
  unsure (1)..(618): unsure at all n locations
nnnnnnnnnnnnnnnnnnnnnnnnnnnnnnnnnnnnnnnnnnnnnnnnnnnnnnnnnnnnnnnnnctttttttttttttttttttttttttttttttttttttttttttttttttttttttttttttttttttttttttaaggaaaaaaaagaccccagggcgnnnnnncntntnntnncnnnnntgacnnnnnanacanaagaattacagacagncctttttttcctaggggagactgctctccgggtttctcttctaccattagattgacttgtccatgtccttcttcttggtcactagctacatattcttcttcttctgccttattattcatgctccgtacaaaaccataacgacattgaccatcatcatctacttcgtactctatattatcaagcattttcttaatattaaccctgaccttcataatactcgtgttgaaacacttcctttgcataagggcataacattcatgacctgggcgacagagtgaaactaaagaggtgaaggacagcttcggttatggcagacgcgtgggaaaaccgggaattccgaccggaccctgcaggcgaacaagcttactatatggagaccataaaggtgagcgtaaaatggga

SEQ ID NO: 116083 - DNA, 497 bp, Arabidopsis thaliana columbia
  unsure (1)..(497): unsure at all n locations
nnnnnnnnnnnnnnnnnnnnnnnnnnnnnnnnnnnnnnnnnnnnnnnnnnnnnnnnnnnnnnnnnnnctttttttttttttttttttttttttttttttttttttttttttttttttttttttttttttttttttaaaaaaaaaacaaaaagggttttttttcattaggaccccctggcaattacctagcacaaaaggttttaaaacagaagatttttccgatccaaaattatgggccctttttggaaaaaataaaccaaccaaccaatccacgcctttaaaaaaccggttttaaccggccaattttgccggtttaaattaccggactcggaagttcccgggctttcgaagaaaaccatttttggcatagctaacattctcaccctatatgggtttaggtatttacatttccccccccattggttttactcacatcacagaacacccattggggttcttatcactaaacaactcaggggcccgcatgggaccataag

SEQ ID NO: 116084 - DNA, 453 bp, Arabidopsis thaliana columbia
gcacgcgtacgtaagcttggatcctctagagcggccgcccttttttttttcctttttcgaaagcgcagagggtctagtagacatgaacgacagggagaactctcgacgaaaccaaagaaggagctacgaaacaggaacagctctcgacctaacagatccacacgtaaaaacagcccagaagcagaaaaagacttctttccgggggggaacaaacctcctatcgcgtgaccaaaaaatcaaaccccgagcccaggaagccctggaataccaggcggacacgacgcgtacaacgaccgaaaccaggctcgcaaaggagcgataacctacgcggatcacagcctgggggagagctgcatctcccacaacactcaaccggggcggcaccgcctaagacgcacccagcgtggacagcaacggtccggacagagcagcgaactgaggcactgcgcgagg

SEQ ID NO: 116085 - DNA, 513 bp, Arabidopsis thaliana columbia
  unsure (1)..(513): unsure at all n locations
gcacgcctgcaggtaccggtccggaattcccggttcgacccacgcgtacagcccaccactaacgaacacacgtgtttatggaatggcgcatagagattacggatatcaaaaggacccttttcgacgttcattaggaagatgaggcgtgacctcacagacaagagacagtacttccagagacaaaattcgacggacgttttttgtttggtgggtagcacatgccaccgcgacggaagataaaagtgaccacgctatcctgggtcagacactgtgtaaaacactcggccgcattgcagcaaacgatattgccgacggcatctgaactgtgcgtagattcagtcggctgaccactgagcgtnggcgtataggtcccgggcaaagaaactcattgacaacgaatcgtgactggatcccacacgcttgtacacgtgctgtcttgtggagggacaaaggcccttaggggtggggcccctgatcgccgataggataaattcgctctgcgaaggccggccg

SEQ ID NO: 116086 - DNA, 491 bp, Arabidopsis thaliana columbia
  unsure (1)..(491): unsure at all n locations
actatgaggttatgacgtcgctgccgcgtcgtagctggatccttagagcgccgccttgttttttttttaaaatataaatcttagcttcctccgagaaattttccaaaatttttggagggaaacttattttagaaccccaccctttcccccaacctttggtgtttttataaaagaggcccaagaggtttgggaaccccaaatcccgggtgtttaaaactttttttgggaggagggaaacttcgggggggagaaaacaccgggggggggtgtttttcctttttttgtgagagaattaaaaaccgccgggagggtgtttgggggttttttttaccccccgcaaaaaacacccgccgcgggggggtttttttctaacaaaagggggggtggggttaaaaccccccgcccacttttttggggcgcgcccctccttttttttatanaagaaaagaaaacacacccgggggggtgggggcgccccccctcccccccca

SEQ ID NO: 116087 - DNA, 515 bp, Arabidopsis thaliana columbia
  unsure (1)..(515): unsure at all n locations
tttaggacannnnnnnnnnnnnnnnnnnnnnnnnnnnnnnnnnnnnnnnnnnnnnnnnnnnnnnnnnnnnnnnnnctttttttttttttttcgaaataccggtccaggaatatttgatttcaattgtaaagaaactaaattgcttctgaaagaattacattatctgggaggatantggagaagagccgaacggttgagcggtcatacgaatgcatatatggtaaaagctcaaagcgaggcgtaagttctgcggtcacgtctgtgatggaaaggtccatttggtctgcaagtgtcaagcacacattaaaagtgtctacattgcggatcacagatgcgatataagccaccgcgggactgtgttcttcttgtgtcgggtctctgtcttcagtctcgagagagccatttcctcttttgggtgggttctttaaaagggctactagcacccgaagtagatgagggagacatgacggatcatagattacatctgcgcctagaacaatatctggacgatattg

SEQ ID NO: 116088 - DNA, 445 bp, Arabidopsis thaliana columbia
gccgcgtcgtagcttggaccttagagctccgcctttttatcctctttttacatatatgctgcctatggcgaacaacggaagggcacagcgtacggatgcaaatgctgaagatcggaacgtactggcgcttgtggacagcctgcggggggcgccaacaaaattttttttagggggggggacgaaccgggggggaaaggcggggagaggggccgctgggccggaaggaagcgcgggtaatgagatcagtggaagaatgaggatggcacgcgcgggggctgggggtgcgagggcccgcgctgggcgtgtgagaggggtgtcctgaggccgcacaggggtgggggcatgaggcgcggaggggtgtggcaagctcgaggatagggaagggagggccgggatgggtggggatggcggggtggggcggggaggcgctttggcgtggatgggg

SEQ ID NO: 116089 - DNA, 488 bp, Arabidopsis thaliana columbia
  unsure (1)..(488): unsure at all n locations
cacgactacctanagggaaagacggtacgcctgcaggtaccggtccggaatacccgtttcgacccacgcgtaagccgaaaaataagaagaaataaaaagtggtagtggaaagatatagaagaaaaataataggagagatgatgtggattgaaatgagtgagaggagttaagggggagatatgtagatgaatgagaaggataggaaaggaaatatgggggagaggatttttttttattgagggggggggaagaagggaaggagggagagagagtgggggagaagagggagagaagaggtgagggagaggtaggggggggatgtgaggtggagtggtaaatggtgttggagaggatggtggatggatagtagggtggtgtaaggggtggtgttggtngtaggaagggaaatgttggtgtggtgattgaatttatggtagatagtgagttgtggggaatttgggtgggggggggagagaagagggaagggg

SEQ ID NO: 116090 - DNA, 487 bp, Arabidopsis thaliana columbia
  unsure (1)..(487): unsure at all n locations
actatagnagagttatgacgtcgcactgcacgcgtacgtagcttggatcctctagagcggccgcccttttttttttttttttttttttttttttttttttttttttttttttttttttttttttttttttttctttttttttttggtggcccctttttttccttttaaaataatgggggaggaaccccctaaaaaccccggggagaaaggggaaacactttttttttctgggcacaaaaaataaaaaaaacacggccggtttaccggaaaccccaaaaaggtagagaaaaaaaacccccccccaaatttaggcccccccacaaaaaaaagggggcccccattaatagacgggggaaaacttggggcaaaaatataaccccccgcggggagaaaagttttaaaaaaggggaaacccggggaccctctttggggggcgggagaacaccaaaaaacaggacgggacaaaaaacgggattaataaaaagaa

SEQ ID NO: 116091 - DNA, 506 bp, Arabidopsis thaliana columbia
  unsure (1)..(506): unsure at all n locations
nnnnnnnnnnnnnnnnnnnnnnnnnnnnnnnnnnnnnnnnnnnnnnnnnnnnnnnnnnnnnnnnnnnctttttttttttttttttttttttttttttttttttttttttttttttttcttaaaaaaaataaaattaagatttaactttcctttaaccgtcataggacctggaccccaaaaccaaaaaacaaaataaaatttatacttcccacgggccatgtttttttatattgccattagccttttcttttttctttctccaaacccccaaagtcaagagacaataattttttttcttctaacaaaaaaaaaaagaaaggttctggggcttttacatctttttccttttccccaaaactaaagtttaaagttttccttgatccttagaatctcggagaaaggacccaggtcccaatccatggtttaaaacgcaagaaacattattgtttatttaacctaaacccaaataaaatttttaaaggttcaaagttcctataatttttgac

SEQ ID NO: 116092 - DNA, 511 bp, Arabidopsis thaliana columbia
  unsure (1)..(511): unsure at all n locations
cactatagnaagagtctatgacgtcgcatgcacgcgtacgtaagcttggatcctctagagcggccgccctttttttttttttttttttttttttttttttttttttttttttttttttaaaaagaaaaaaatagtttgggaatgggaaagaaaaaaaaaaccggggaaaagttgtcatccaataatatacagccacgtcagcgcacctaatacacccaaaaattccttaaacaaggttcgcaccttggtttattacaccattctgatttaattttttgctattattcataaggatttttttaaaaaacttgcaaggtccctgcaatggacatgctcttatgattcttgacctatccttggccgtaaaaaggtagttcagttggaagagacagcgaggtttttctcaactagcttctcgagtatgtttgacttgtatgttgaaatgtctgaatcttccaaggaatttggagtcgatttgacgatagagagtgctccattagagcctaggaat

SEQ ID NO: 116093 - DNA, 474 bp, Arabidopsis thaliana columbia
actatagaagatctatgacgtcgcatgcacgcgtacgtaagccttggatcctctagagcgggcgccctttttttttttttttggacaaaaggtttcattggtccagcaattgggaaagagcttaacgcctcatttttttatagaccccaagggggcttttacctttttctttattaaaaagcctcttctgaggggtttaaaaaagaaacccccgggagcccacaaagggggggggaaaaagatatataaaaagagttcccccttttataaaaaaagggggggggcccctcttcaggggcggggggccgagggggaagtcccctcccggggggggggtttttttccccccccttttcgggcgcgcaaaggggggagaaaaaaaatttttttttgtcccccggggggggggggggaaaagagaggggcgccctcaaaaaaaaagagccttttttattaagcaaaataatttttttg

SEQ ID NO: 116094 - DNA, 521 bp, Arabidopsis thaliana columbia
  unsure (1)..(521): unsure at all n locations
gcacgcgtacgtaagcttggatcctctagagcgttcgccctttgttttttccttttttttaaaaaggatagaataaaaattagttaaaagaatttaaaacgaaaaagtagggaagatgaaaaggatacggaagtgtgaagtgaaggtggggtggactcgagaatattgtatacataagagaatatttgtaaaggatgaaattttttttgtatgggggtggaagaacatgagagtttgttacaacagcgtattagaaagcaacttttactgtataaagaagaaagaaatagtttattattatagatgacagaaaaaggaaaaangaaataggaaaagagagggtttgtcgtagaggcggaggaggggtagtaaataataagtggtatattgccagttataaggaaacgatttcagtttaagaagatgagttgaggttgatataagctgagagtaagagaaagttattctcgaatataggtgggttagatgtggggtaagcacattgaagagatacatatccg

SEQ ID NO: 116095 - DNA, 327 bp, Arabidopsis thaliana columbia
acgacacatttagggaaagacggtacgcctgcaggtaccggtccggaattcccgtttcgacccacgcgtccgccctccctctctgatcctcaatgaaaaactgtgtcggagaaaaccgcagaacaagagacggagcataatcctagaaaatacggcgccggaagaatctgttacgtttgggacatgaatcgggaatttggcgaatgggctggagaccgatgggatgttttttttttaaggggggggcaaacaaagatgcggtctgtctggacagaggaggttcgttgcaccactttgatagggcggtcggagactcgacgttggtgg

SEQ ID NO: 116096 - DNA, 494 bp, Arabidopsis thaliana columbia
  unsure (1)..(494): unsure at all n locations
actatcagagatcnatggcgtcacatgcacgcgtacgtaagcttggatcctctagagcggccgcccttttttttttttttttttatgtacgcttcggcattaaaaattagccagcgactcatggacaagcatatagatcgcactcacatgcatgtgtctgatatataaatagatatctgataagttattgcaacaatcaagcataggaacattaaacatttgtggtggttgaaagaagatgacagaaacttgcttatatattgaaagctcaacacccaagcaactctactacttcacatccattactcttcagtggggcggcttttcctcctactgtcccatctttatgaattagagtaggagaagtgcagtcgaaagctgattgaaaccttcctaagttctgacactcttgagccaggagggagtcacgaggtggaggcccaatccaaatacacacagtgttgttgcgagccgggatatagacaagtgcaggg

SEQ ID NO: 116097 - DNA, 343 bp, Arabidopsis thaliana columbia
  unsure (1)..(343): unsure at all n locations
actatagaagagctatgacgtcgcatgcacgcgtacgtaagctggggatctctagagcgcncgccttgtttttttttatcgagattatacgatttttaaagttgctaacttcgaactggcttatttgggaaatcctttgtcaagcccaggggttttgggtttccttgggaaatccctgaaaaccccaaaagggggtaaaggtgggatttccaaaaattgggaatttttcgggggggggggcttaaaaaccttcggggggaacccgaaaaaaccccaccggggggggttctcccaaggaaggggggcccggtttttttaaaaccccaaaaggggtttttttttt

SEQ ID NO: 116098 - DNA, 519 bp, Arabidopsis thaliana columbia
  unsure (1)..(519): unsure at all n locations
nnnnnnnnnnnnnnnnnnnnnnnnnnnnnnnnnnnnnnnnnnnnnnnnnnnnnnnnnnnnnnnnnnnnnnnnnnctttttttttttttttttaacgggatcaaataataattgtcataagaaagttgtttatgttcttatttctagaaactcaaactagaaaccatatagagaattcaagctacaccaaacccttcgaataaaaatttaaatattgagcagcaaagcactgccaaagttaaaggctatatgattggagaggtacaaacaccaaaaaaagtctttgagacgattcaactttgatcctattaccgagcagacaccatggttactattttgaagctaacagagagtaggagaacccataaacacatgaagactaacatagctcttgtcgccgtaattcctgtcttgcttcccgaggcagtcatcgcatcatcctgttggactaccccgaatgaaaggactacgttgaggttaccgttcttgtcatatgaccagcccataccgctgtccgctg

SEQ ID NO: 116099 - DNA, 517 bp, Arabidopsis thaliana columbia
  unsure (1)..(517): unsure at all n locations
nnnnnnnnnnnnnnnnnnnnnnnnnnnnnnnnnnnnnnnnnnnnnnnnnnnnnnnnnnnnnnnnnnnnnnnccacgcgtccgcggacgcgtgggcttgatcagacatttgaggacgcagatgtggatcgggatggaaagattgataagacagaatggagcaatttcgttatcaaaaacccatctttgcttaaaatcatgactcttccgtatctcagggatataacgacgacatttccgagtttcgtatttaactcggaggtggacgagattgcgacgtgaaagagacaagacaagctggtttatagagaccaagtcgtaggctggaccaagaataaaaagaagattgattccaacaatgttatatagcaggatcgagctctatttcctttggaatttttagtctattggatttcaatttcatgtattgcgattacctttggctctctttctttaaccagtttgaatactcaagttgtagttctacganaagattaatataaaaccacaatttctgat

SEQ ID NO: 116100 - DNA, 497 bp, Arabidopsis thaliana columbia
ttttgtactcccgcacgcgtctttaactaggatccctgcagcagccaccattattatatttagataaagagcgccagcgttatcttgctcccattcgacactgactagtaagtacagtacgtatacctacacgaacatggtacatttaagcccacgaatatgaaccgatcttagagcaggtcacgaactagtatcagtactttacaaaatatcgacctcgtcttgatacgccactgaaggtgcaccacccggctttgataccgctcgtaccacaaagagataggccttacacttacagcgtgtctttcactcttgtccacaaatactagtggcgcttatagttataacattctaaccatttattagcgtattatttatatcctgtatattcggtagttatctatgatgaggtagacgcgtgttcacacgcgaggcgatctataggagtaggtatttgatgattagtctacagcattcatcctaagtcctacgttaga

SEQ ID NO: 116101 - DNA, 506 bp, Arabidopsis thaliana columbia
gccgagcactatacgactcctatagggaaagctggtacgcctgcaggtaccggtccggaattcccgggtcgacccacgcgtccgcccacgcgtccggtcgtccctaacctcatctctgcaagctctcaagctttcgtctccgttcgcccatggctccactcctctctcatctctctctaagcccaattccttcccgaaccacagaatgcccgctttagttccggtcatcagagccatgaaaacgatgcaggggcgcgtggtgtgcgcaaccagtgacaagactgtggcggtggaggtggtgaggcctgctccccaccccaagtacaagaggcgcgtgaggatgaagaagaagtaccaagctcacgaccccgataatcagttcaaggttggcgacgtggtcagactggaaaagagcagacccattcagtagactaaatcatttggggcgcttcctgtcatcgcaagggccgccaggaaagccgaagccggaggagaagaactccttg

SEQ ID NO: 116102 - DNA, 505 bp, Arabidopsis thaliana columbia
  unsure (1)..(505): unsure at all n locations
nnnnnnnnnnnnnnnnnnnnnnnnnnnnnnnnnnnnnnnnnnnnnnnnnnnnnnnnnnnnnnnnnnnnccacgcgtccgcggacgcgtccgcccacgcgtccgcgataaagtcccccaactgttcgacgaaattcctcagaggtacaataagatcatccctgacaaaatctcttacggtatattgattaagtcatactgtgactctggtacccctgaaaaagccattgagattatgagacagatgcaaggtaaaggcatggaagttactaccattgctttcaccaccattttgagttctttgtataagaaaggtgagctcgaggtagctgataacttgtggaatgagatggtgaagaaaggctgtgaattggataatgcagcgtataatgttcgtataatgagtgctcaaaaggaaagccctgaaagagttaaggagttgattgaagaaatgagtagtatgggaattgaaacctgatacgattagctataactatcttatgactg

SEQ ID NO: 116103 - DNA, 531 bp, Arabidopsis thaliana columbia
  unsure (1)..(531): unsure at all n locations
atggggtaaactgcacgcgtacgtaagcttggatcctctagagcgtttcgccctttttttaattccttattttatgactaatcaacgtatatgcttttatggaaaaaataaggagtgcaaagaactgtaacagtggggaggcgcaggttaacaatcaggaagataagggagcactaaagggtgggagggatctaagttggatgagaaacgaaggattttttttctggagggaataagaagccatcggtactaaggactctgggtagagggtgtggctagatctgaggatgaagagagagtgtcagtggggaagtgatgatggaggagtagcggaggtgtgaaagcgaggggggggtgttgaggcgaggagaagttgaattgcagggagaaataggaaaagagagtaacgggcggatagcgaagatatagagcaaagatggatgcatctgtgagcgcgaagtgcgnagaaggatgtgtgagagagagttagaaataagagtggagaagagtaaagggagtgttcagagatga

SEQ ID NO: 116104 - DNA, 398 bp, Arabidopsis thaliana columbia
  unsure (1)..(398): unsure at all n locations
cgcctgcaggaaccggnccggaattcccgtttcgagccacgcgtaagcctaatttttccggatatcaaaaaggaacaacgaatacagaggcccggacgtagacctgctagacatgcttcgcaggcaataagacgccgctgatgcggcagataaactaaatcggcctatgccggaagagcggaagaacgagaacgtttttttttttttgcggggtaagagacaagacaggtgggggggatagtacgtggagcacgtgccgccacgtgatgctttagataatgagggacaaccacgagtgacaccgcgatgaggttggcaacgggcgcggaggagaagagagaaagtatgccaggaagcggagcgtgggtgtgggcagggagcttgccatgatgagtggc

SEQ ID NO: 116105 - DNA, 505 bp, Arabidopsis thaliana columbia
  unsure (1)..(505): unsure at all n locations
nnnnnnnnnnnnnnnnnnnnnnnnnnnnnnnnnnnnnnnnnnnnnnnnnnnnnnnnnnnnnnnnnnnnnnnnnnnccacgcgtccgcggacgcgtgggaacaaatcgagtcctttttctgataactcatttcgatttcagaaactcgccaagaactggatactctggcggaatcagagattaagaaccgagacgtggttctgaaactgtatgaagccctgagatctcgcgacgtcaaatctgtgcaccagatcttaaccccagatctggagtattggttccacggtcctccgccgcaccagtttttgatgcgcgtactcaccggaggtgtctctccgtcttcttcctccttcgaattcgtacctctctccgtcgtttccttcggatctaccgtaatcgcggaaggctgcgacgccgcgacatcgatttcttggatccacgcttggactgtagcgaatgggataatcacacaggtgagggagtactctaacacttctctcaccgtc

SEQ ID NO: 116106 - DNA, 504 bp, Arabidopsis thaliana columbia
  unsure (1)..(504): unsure at all n locations
nnnnnnnnnnnnnnnnnnnnnnnnnnnnnnnnnnnnnnnnnnnnnnnnnnnnnnnnnnnnnnnnnnnnnnnnnnctttttttttttttttgtcggaacagaatggactctccacatattatgagataatctagctcgctacacgatcggagaagccgaacagaacagagaagatccgctacgctcggtatagaacactccagattgcatgctactgagcccgacacacttgattccacagcgcagctaccagatttggtgctaatgaatactccatacaaaccctgataccattccatgctttgatgttgcgtaactctatgctggactcacacacgaggctggtacattctgcgtcgcacttcacggtacccagctctcatgtgatgatcatggacttatctgccctgcattctaatggacgaagcacactgggtgccgaggctgatgggctgtggacatccatagccttacaacgccgtgagagatgcattaccatcgcatg

SEQ ID NO: 116107 - DNA, 531 bp, Arabidopsis thaliana columbia
  unsure (1)..(531): unsure at all n locations
nnnnnnnnnnnnnnnnnnnnnnnnnnnnnnnnnnnnnnnnnnnnnnnnnnnnnnnnnnnnnnnnnnnnnnnnnnnnnnnnnnnnccacgcgtccgcgctcgcttgtgttgacgcgcgatcgagacgaggtgagaccacacgtgggactcgagccttataattgagtaatgcttaggggtgtgctggacgattattggaactataatgctaacggggatttgttaagaagcataaaaaccctatgatggacatgagggagaacacggtgagaattacacagttatccttcgagagcggagattggttaactaaagactttatgattctggagctatagtctggttatattcatgacacatccgatgttcgatgcatggataggaagtaagaaatacaacctggggagaagattgatagctgtaccagaggctaggtaaataacgcttagcttgttattgatagtagatcgggaggtaaagaatatgagctcttgaggaaggcaccttcggcatgagtgttctccgtacaagg

SEQ ID NO: 116108 - DNA, 485 bp, Arabidopsis thaliana columbia
gtaaactgcacgcgtacgtaagcttggatcctctagagcttgccgccctttgttttatcccttttttaataggacggctactattgtgggtgtggttgcccacgagaacacgcgtagcacagaaccgagatcgtgcgagccgtaacgagcgttgcgacgcctaaaaagtggcgctaactaaatggtcccggggcaggcattttttttccgaggggtaaaacgcgggtactatcagctatctcggttgcaatcagcgccctcttaagaactagaccagacgcgagcgcctggtcagacggcgcgtgtggtacgtcagtagaggtgtgccggcgtctagaatatcgcccacgacggttggccggtccgacctgaccccgggtcccatgatgcggagtgaagatcccgtcgctgcattgccgccgccgacgtgtgggaggcggcgccagcggcacgggggattggcgtggcgcgacacgcggggggac

SEQ ID NO: 116109 - DNA, 513 bp, Arabidopsis thaliana columbia
  unsure (1)..(513): unsure at all n locations
cgcctgcaggaaccggnccggaatacccttttcgacccacgcgtacgcccaacgcgtgggaacaaaagaaagtgcttggtggtgattagtcctggaagacataattaatcgagacatagagttgcgatactaatgacaggggtgtaggagataaaataaccgaaggacaggaaatctagaaactcggaatgaagcccagcggaaagttttttttttgtgaagggggggagaagccgggaccgaaaggaccgactatttggggagaagtgttgcctccacgggatactattaaggggtcacggctcgtagagtcggcagggacaatcggggggggaggaagtggtgagatttgtggcgaacttgagagagaaggacttagggtgagggagtgtggttacatggagatacgggaggatctacgaggggattggtactggatagatgagaatcgcaggggaacaacattataaaatgtcggagtaggtgtgcacttcgcagagacgcggtaacatt

SEQ ID NO: 116110 - DNA, 523 bp, Arabidopsis thaliana columbia
  unsure (1)..(523): unsure at all n locations
nnnnnnnnnnnnnnnnnnnnnnnnnnnnnnnnnnnnnnnnnnnnnnnnnnnnnnnnnnnnnnnnnnnnnnnnnntttttttttttttttttttttttttttttttctaaggctcgaaatatctttagtgaacagagaaaaacacagatgatctattctgatatgagaagagaagtctccaaactctactaagtaccaaaatcaaaacttgtactgaaaattcaaattgtgcatttaaatccgcctgtccttcaataatttccacaagttcttgcattctttctggaggagctttgcctccaaatatactcaaacttgtcaggaaatccataaacattttaaactctcctccagttacatcttctaggctctgtttgatcaaatctgttatatgtctttccatctccccttgaggctttaagagttcccctttaagaggaatcaccttatctctgatgaaattcaagaccttttcacgaatttgatcatcagtagttggagtaaccccagcatgggtaaataag

SEQ ID NO: 116111 - DNA, 140 bp, Arabidopsis thaliana columbia
tcaaagacaatgaatcgacgcacaggacgagcgtcgcagcgggaaattatttggagaaccacctatacgaagttatcttggtctatcccctgcaccccttacctagagctagagtccctctagagcgacccgcccaagga

SEQ ID NO: 116112 - DNA, 512 bp, Arabidopsis thaliana columbia
actatagaagagtcatggcgtacactgcacgcgtacgtaagcttggatcctctagagctgccgcccttttttttttctttttttttttttttttagccaaaactacagaggattttattatgcaaacagcaagtgttacaactcaaaccacataaaacattacataatcaaacttgattcccataggggcggttcttagacgatagggccaaaaagatttgttttttaggggtgtacaaaacgcaccacggttcacttaaaatcaaacgtccattagagccatacaggggaaggggctggagggttaattggtaaagtgcgagggaccaggccccagtaggagcaggtggggcgagtattcagccgggacttattatgagaagtaaggacttcggtagcgaggggtaagagcagagaacgccgcgagggcagcggcgcgggtggtgttgagtgaaagcttgttgggatggcgctgcatggcggttgggaggaaatagcaactgttgagaatg

SEQ ID NO: 116113 - DNA, 377 bp, Arabidopsis thaliana columbia
tacgacacctttaggaaagacggcacgcctgcaggtaccggtccggaattcccgtgtcgacccacgcgtacgcacggttgcgagaagactacagagggggatcactaagctttccataatgagagacttttcaacatttgaaacataacaaacggtttccaaggatacggttactgagagccgcttagctgctcttcatagtcacaacagatgtttttttatgatgtgtggagccacagagaatgcacacattaagatccatatgtgcaccacgtttcacagaggcttctgggggacacccggtggctaatttcctttttcttatcggtggctcccagaagagtgatggtcctacttagtcaaaggacgatcgatcg

SEQ ID NO: 116114 - DNA, 483 bp, Arabidopsis thaliana columbia
  unsure (1)..(483): unsure at all n locations
ctatagnaagatctatgacgtcgcatgcacgcgtacgtaagcttggatcctctagagcggccgcttttttttttttttttttttttttttacattggaagattttatacagacggttctttaacaaagaaagatgattgatgctaatatacacaattacataatcttatacttgaattatacagtagtttggaagaaagaattatacagtagaaaaatattaccgtgaaaaaagtaaaaagtnaaagtnnnnccatcattattagttggtactctccacttcatctctaaaccaatctgaagtaccccaatcaaacggcgtggacttttcctccggtaagaaccggttccgacaaatcgggcacgttatcttattacagtcaacgatccaacggtctaaacaacgatgatgaaacacgtgtccacacttcggcagctgtcttaatttatcgtcggatacaaaatcggattagcaaaccgggca

SEQ ID NO: 116115 - DNA, 503 bp, Arabidopsis thaliana columbia
gccaagctctatacgactcctatagggaaagctggtacgcctgcaggtaccggtccggaatcccgggtcgacccacgcgtccggattatgtaaaaagtaaaagtaaaaccatcattattagttggtactctcctctctatctttctctcacactcatgggtcttccaacagatttcaaagagcttcagattccaggttacgtactaaaaacactttacgtcatcggtttctttagagacatggtcgatgctctttgtccttacatcggtctaccaagttttcttgaccacaacgagacctctcgatccgacccgacccgactcgctctctccacgtcagcaactcttgccaacgagttaatcccggtggttcgtttctccgatcttttaaccgatccggaagattgctgcacggtttgcttatccgattttgtatccgacgataagattagacagctgccgaagtgtggacacgtgtttcatcatcggtgtttagaccgttgg

SEQ ID NO: 116116 - DNA, 519 bp, Arabidopsis thaliana columbia
  unsure (1)..(519): unsure at all n locations
ccnnnnnnnnnnnnnnnnnnnnnnnnnnnnnnnnnnnnnnnnnnnnnnnnnnnnnnnnnnnnnnnnnnnnnnccacgcgtccgtacggctgcgagaagacgacagaaggggacagagtcataggtaattggcattctagaggagtgagtggcggcgagaggaaacgcgtcagcgttgcgttagagatcttaacgcgaccgcaaattttgtttcttgatgaacctactagtggtttggacagtgcttctgctttctttgtgattcaagcgctaaggaatatcgctcgagatggtggtagaaccgttgtttcatcgattcatcaacctagtagcgaagtttttgctctctttgatgatctttttttgctctctagtggtgagactgtttattttggtgaatccaagtttgctgttgagttctttgctgaagcggngtttccttgcccgaagaaacggaatccttctgatcatttcctaagatgtatcaactcagactttgataccgttacagctacactca

SEQ ID NO: 116117 - DNA, 490 bp, Arabidopsis thaliana columbia
  unsure (1)..(490): unsure at all n locations
aagacggagcgggaggagcaccccgcaggacgtgcacgaggacgcggatgaagccacgggaaagacgggacggccaagagagagcacgacggaagaagcgaccgagcacgagcgggcagagcggagcccagagccggacgacgggagaggaagagaggagcgaggacgacagagacagccagcgcaacagaggaagcggaacgacacgcaaagcatgagaagagaagcgcgcggcgcagagagtgcaaacgaagggagagcaagcggacgtgaggaagaaaagcgacacagagcacgccaaagagaaagggngaccgacgcggagaggagcaggagcacagaagcggaggagacgagatacggtgcgaggcaataagacaggcgaagcaagacaagcagagaagagaaaaggagcacacaagacgcgtcagcgaggctcgcgggaaggcgagcacggacacgcaggaggaagtaaccagaggacggagga

SEQ ID NO: 116118 - DNA, 501 bp, Arabidopsis thaliana columbia
  unsure (1)..(501): unsure at all n locations
nnnnnnnnnnnnnnnnnnnnnnnnnnnnnnnnnnnnnnnnnnnnnnnnnnnnnnnnnnnnnnnnnnnnnnnnnncttttttttttttttttttttttttttttttttttttttggggcaacaagaaagtaatgaaatttattatatccaacaatggacatggatggctcttctggatacttcagttaaaactggaatgtcttacaaacacttgcccaaacagaacaaagacaacatccaaagatatacactgaacagactaaagcttatggcttactaagaacctaattaacaccaaatgctacaacggcttattggtttcatctaactatcattagctgcctctgcaagcttggcggaaaatctaagcttcttgatattcaatcttctttcctcaacacataacgctttccattcatcactcaactctcttctttttccagttccaaggttcatcagcttctcaagctgcaacttcttttgataaccacttaaaccttgc

SEQ ID NO: 116119 - DNA, 504 bp, Arabidopsis thaliana columbia
  unsure (1)..(504): unsure at all n locations
attttatttaggacannnnnnnnnnnnnnnnnnnnnnnnnnnnnnnnnnnnnnnnnnnnnnnnnnnnnnnnnnnnnnnnnnctttttttttttttttttttgcacaaaagcatttaagttaagttccacgacccaaagccaaaatcattacttcagtatgaggcaatctttcggaaaaaaaaaaacaagattcgacaaaaaacaagacagattaagctcttagttttgtttggcttcaaccttcttcttctgccacaacctgtcgacaccactgtcagcgtctccctgagcacggacaaaaccgcagagagcaaaggttgtgaactgtccggtgtacaagccattagcatctaaatgaccaatgttgagctgaacagaggcatgatccttggatgtgatcaaccggttagtagcagaacatttcctaggaatgtaaagctcagtgacctgaccctcttcgttttgcatcttgaaagcttagctttgaaagagtaaacgagtcct

SEQ ID NO: 116120 - DNA, 515 bp, Arabidopsis thaliana columbia
  unsure (1)..(515): unsure at all n locations
tttaggacgnnnnnnnnnnnnnnnnnnnnnnnnnnnnnnnnnnnnnnnnnnnnnnnnnnnnnnnnnnnnnnnnnnnctttttttttttttttaaatgtattcacttattattgcacaagataagatattataaggttcgattttcagagagatgaaaagataggcacaccgggcaatgtagcaccggaatcaacaatgtatgtattcccggatatatattgagaagagtcatgaatgagatagcgaaccagagaagtaagccctggatcaacggtctgttgcacctttaacggcacagtcctctcggtaacattcttgagccactccttttgcataagaccttgtgtgatctctgacttgaaaagccccggtgcgatcgagttcactctgatcttatgaacacctaactcaagtgccatcatccttgacatggtgtcaacaccgcctttggaacaagcataagcaagtccaccgggcaacataccccggatcccggcgatcgatgagatgtttat

SEQ ID NO: 116121 - DNA, 514 bp, Arabidopsis thaliana columbia
  unsure (1)..(514): unsure at all n locations
gccnnnnnnnnnnnnnnnnnnnnnnnnnnnnnnnnnnnnnnnnnnnnnnnnnnnnnnnnnnnnnnnnnnnnnnccacgcgtccggagcaatcatcaaactcaggtgttgaagctattggagccatggtgtgaacttaaagacaaagtggttcttgtgacaggagcttcctctggtattggaagagagatctgtcttgatcttgccaaagctggttgccaggttattgcagcagctcgtcgtgttgatcgactcaactctctctgctctgaaatcaacagcttcagttcaactggaatccaagccgcagctcttgagttagacgtttcatcagacgcagccaccattcaaaaagcggtcagggaagcttgggacatctttggaaagatcgatgcattgatcaacaatgctggaatcagaggcaatgtcaagtcgagtttggatttgtcagaggacgaatgggacaacgtcttcaagaccaacttaaagggtccttggttagtatccaaacatgtt

SEQ ID NO: 116122 - DNA, 519 bp, Arabidopsis thaliana columbia
gccggcactaatacgactcactaagggaaagccggtacgcctgcaggtaccggtccggaattcccgtgtcgacccacgcgtccgattctataatgggcttatcaggcccaatcaaatggaatttaataataataataaaaatataaattaaatttatcatttatataaactatatatgtagtatactgttgagctcattattgaatagcttgagaggtttgatgtacatagccaccacatgcagtgagcttcttctttttttggtctttaggaattcttttgatttcgtaataaatcaaccttgattgtttaattttcaattactttacatatatagcatttgatacgatatgatttatttatgatggtttagtaaaggatgagacatgaattagtattattttcaaaggctgcgtattgttataatattcgtattctacttaagaatattctaggggtgttggcgtttttaaatatcaatttggtataaagcatgttcattatttcttgttataggtg

SEQ ID NO: 116123 - DNA, 468 bp, Arabidopsis thaliana columbia
tggcgtcacctgcacgcgtacgtaagcttggatcctctagagcttgccgcccttggttttttcttttttttttttttttttttttttttttttttttgtagtttttttgggggtaaccaccgaaaatttattccataaaatacatattgggggaagaagaggaaacttggccctttacatttccataagcctctgggggattttatgttttgggggggggtaaaaattacagctcttaagacgggataagctgccgctgtgaccaatgtgggtgaacccaacgggacagccttttactggtttctaaccacaaaaattggcttatgcctcaaaggcacttgcgtgggcagagaggattttttgccgacgcttaagagtgttgctacatgggcggcgctctcagatggaatattcgcccgggtagccggtaaaacaaattgggacctcggctaatctccatccccccct

SEQ ID NO: 116124 - DNA, 515 bp, Arabidopsis thaliana columbia
  unsure (1)..(515): unsure at all n locations
nnnnnnnnnnnnnnnnnnnnnnnnnnnnnnnnnnnnnnnnnnnnnnnnnnnnnnnnnnnnnnnnnnnnnnnnnnnnnnnnnnnccacgcgtccgctaaaagagaagatgctcagcctttggttttcgaggtcacagagcgaagtaatcggggtttcgcagggacttggggccgagagaaagaaggtgggaaagggagtaatttacttcggtttgatgctccttgtgttctgcagaacaatcgagagttcgaggggaaggatggagtgaagaactatttttcagggctgtttctttgtagacctacagggcaagggaagtctatgcttattgttaggtttggggtcacaaaaagatcgcctttggtttcggtgttacctcaatggttctggcatcagaatgcctgcaaggtttttgaacaagacatggggtttctatcgtctcaaaatgaggttctgatgaaggagaaagtaccaactaaggacttgtatttgaatctaaagtcatcggacacatg

SEQ ID NO: 116125 - DNA, 515 bp, Arabidopsis thaliana columbia
  unsure (1)..(515): unsure at all n locations
ttaggacannnnnnnnnnnnnnnnnnnnnnnnnnnnnnnnnnnnnnnnnnnnnnnnnnnnnnnnnnnnnnnnnncttttttttttttttttttttttttttttttttttttttttttaccataattccaccatttttttttctatttataaacatatcttgaacagggggacacaataatcccctttagggtaatcatacattgtttaaaacaaagggaagaccaggattttttcaaaacaaaaaaaatcttaagctaatttaaacggtttgggaaaaatctcaatccttaaaaaaaaaaattggcccatatacctcaaaagcattataaaagaatcttgaggattagtaccgggaaactcccgaaatgtggatccatcgatgacccttaaggaatcagtgcctaaaattttgtaattcttgtccacaactattaaaaattggtaacctctatgggccctccaaaatgtaaacacagggccaaagcaaaactgccttaatttgaacatttaggtt

SEQ ID NO: 116126 - DNA, 514 bp, Arabidopsis thaliana columbia
  unsure (1)..(514): unsure at all n locations
nnnnnnnnnnnnnnnnnnnnnnnnnnnnnnnnnnnnnnnnnnnnnnnnnnnnnnnnnnnnnnnnnnnnnnnnnnnnnnnnnnnccacgcgtccggccaggtgtacgatcacgattgagccggacgtcttttagatacagcatgcacggcgcataccgcggggtctacagaccgtgttgggaattgcaggattatgagggaaccgtttattagcctcattcgtcggtgggttcagagcctttatcttcagcgggagggacttcagcttcaacagttactcaccacactatctacttactcataagtggactccactgacctcagcgacggttactgcctcctactctcatggctcctgtgagacactggagcagcctactctaagatacatatacgctctcatggccatgactgagcatatacaaggactgatttctcaggactcttgacattcgagatactgaggagttccacacttaatctccattacctaacactgttgagctatacataaa

SEQ ID NO: 116127 - DNA, 520 bp, Arabidopsis thaliana columbia
  unsure (1)..(520): unsure at all n locations
nnnnnnnnnnnnnnnnnnnnnnnnnnnnnnnnnnnnnnnnnnnnnnnnnnnnnnnnnnnnnnnnnnnnnnnnnnncttttttttttttttttttttttttttatataagattcaaaaaaaactatattatcgaagttaattatatattttgatcatacaagtgttaataatctaaacaggacttcattgaaatcataaaccctccccacacaatatacgaattactcacctaccccatgactctcaagcaaatagaaatttctaaaccaaaccgttgatacataatttcactcagatgctggcttactttacctctactccattagagaagatatagaaactttcagaatcataagcaattagagaggcaggaagctttgcggaaaaccggtttataaaccaagatcatctaattcgagtcactatgtaccgacctttctcaaggtcgtaaatcgttttcagctgcggttttctccacttagttaccaaatataccaaaactgtcataaggatcggtatc

SEQ ID NO: 116128 - DNA, 431 bp, Arabidopsis thaliana columbia
cctgcagtccggccggaatacctttcgccgagggtaaccttatcagaacaacacagggagccgacggcagacgcacgagagcagggggcagccgggcacgctgggaaactcatgatgaggtgatgctatggtcttagcttgagggagcaaagagaacaagttttttttttgggggggggaccagcgggaggaagaggaaaacgagaaggacccaaggaaaggagcgaacggaggcgggtgacgaagagaggaagaaacaggggggtgggtgtagtagtgatagggctagtttgggtgagacgctcagaggaggggaaggtgtaagaagccagcgtggtggatgttgttggtaaggagatagagatgtggtgtcgaaaggagtagacactaggatcgggacggatcagagggagggcacgagttgccgacgg

SEQ ID NO: 116129 - DNA, 496 bp, Arabidopsis thaliana columbia
  unsure (1)..(496): unsure at all n locations
cactantagaagatctatgacgtcgcatgcacgcgtacgtaagcttggatcctctagagcggccgcccttttttttttttttttttcaggaaataaatattcagagaagaaagaagcactcaagtaatagaaaccataaagttgaaacatcaaagagacactactctcaacgttaccaaaactgtatgaaagccaaaataacattattgcctaaaccaacaaacaacatcaaatcttcaccggtgagatttaagattcaagaatcaacaacacaccaaactagagcttgaggaaaacgaactcctcaaccgctggaatttccccaatcttcttcagtgtctctttgcttggtatgtcatctactccaatcgccataatcgcttgcttcctcggtgcaattctcccaacgctcatgaagttaacattgacattagactctccaaggatgcttccgacagtcccgatcataccaggttgatccacctgcctgcacagt

SEQ ID NO: 116130 - DNA, 503 bp, Arabidopsis thaliana columbia
  unsure (1)..(503): unsure at all n locations
ttaggacannnnnnnnnnnnnnnnnnnnnnnnnnnnnnnnnnnnnnnnnnnnnnnnnnnnnnnnnnnnnnnnnnctttttttttttttttttagttaaattcaatgttattgataaaagtcattacaatacagaggcttaaacatttgagaacccaacaaattggtgctcatgataaagcctttggtggtttccagagatacggctataaatatgtaccatgtctagaataataacaaaacagactatttgccaccattcttgactaaagaatcaaactagctagctcaattataaagtagttttatacttggcttcttaaacacgaaagacaaaagaagatggttgattctgtgaggaagagacatcagaagtcagcttaaagctgtgagaagcttttgaattggtgagaggatgagcaatcttgagatcgtagtcaccatggaagagagaagcttcaaagtatccatcagcatcagtgacacctgtggtttgtctgcggaa

SEQ ID NO: 116131 - DNA, 493 bp, Arabidopsis thaliana columbia
  unsure (1)..(493): unsure at all n locations
tttaggacgnnnnnnnnnnnnnnnnnnnnnnnnnnnnnnnnnnnnnnnnnnnnnnnnnnnnnnnnnnnnnnnnnnctttttttttttttttttgagatccaaaacgcttcatctacattttaaaacaagaagaaggaaaaaaatacaataacggaacgagctaagagctctgggcttgactcagtttttacctctgcttttaaagccgagtgcttcactgcctaaaaggagtgggatttaaagtttgaacaaatcaacaatggcaaccaaaaatagtattcctaatagccgaaaaaacattagcacaagcaacttcaatcagctcgtagcctcagaatctctttagctgttctgagtcggaagtatggcatgtgttcctggctgaaacatagccccaggcctctgctgaaaaaatcgatgtacttaagcataaacattccacagtcatacccattcttttgttggggaaggtcttccacaaattccatgtccc

SEQ ID NO: 116132 - DNA, 469 bp, Arabidopsis thaliana columbia
  unsure (1)..(469): unsure at all n locations
nnnnnnnnnnnnnnnnnnnnnnnnnnnnnnnnnnnnnnnnnnnnnnnnnnnnnnnnnnnnnnnnnnnnnnnnnnnnnnnnnnnccacgccgtccgcttttcttctacagaaaccctatttcatgttctaggtgtctctcgaatggttctcatctcattgattactcantctctaggggttagtggttcatncaanttcgtacccttatgggtgccggancgatcaattggaaacccagcggacaaatccttcaattcatttattaccaattaaccaaccttttccaaaatttcccggtttttccagcttccaaaaacgaaaaattttaatttcctttgtttagaaattttgggaacccaaggttttaaaacccaaaattttttaggggtttaaggggccccctttggtttaaaaatccctttttaaaaaaagaatattttctctcccctttaagggggttttttttttt

SEQ ID NO: 116133 - DNA, 516 bp, Arabidopsis thaliana columbia
  unsure (1)..(516): unsure at all n locations
nnnnnnnnnnnnnnnnnnnnnnnnnnnnnnnnnnnnnnnnnnnnnnnnnnnnnnnnnnnnnnnnnnnncttttttttttttttttttttttttttttttttttttttttttttttttgaggcgaaaattaaagtttatagctggaacatgaacttcataataatcagtttatccttaatagcataactaatcgatcattgacttcgaccaaaaaaacgaaacatctcgactacaacgctttgtcaagaatgttagatttcgaagagaaaaagggcgacttaccttacctttaaagaaacaagaccaaattctcatttttttgagtttccacattcctcatacaagtacaacatcctttgacttaacttttcgcaattcagcttggaattttcaatcttctccacttgtaaatgcaaagggtaaaaaagcctttctccttgagaccttgaaaatgacatgtccacaagaacaaacctatttttttctaacccacttaaaacattagatttcgaaaag

SEQ ID NO: 116134 - DNA, 505 bp, Arabidopsis thaliana columbia
  unsure (1)..(505): unsure at all n locations
nnnnnnnnnnnnnnnnnnnnnnnnnnnnnnnnnnnnnnnnnnnnnnnnnnnnnnnnnnnnnnnnnnncttttttttttttttttttttttttttttttttttttttttttttttttttaaaataaaaccttttatttatatataacatctttatatttacagggctttaaatatattaattaatatattaatttatacagaaacgaaagttatacaaagttttgttccgcatttaaatcaaccaggttgctctcaaaacctgttaaacataagttttcaatcctaattcgattgatcattgatgacatgcgtgtatgacatatagttaatatatatctcaaaggggaacattttttaattacctaaagtttccctgcaagcataaatgccttgtagggaacatccttgacttggtcataaataccccaagctttcttaaactcattaatcatttaaaaagttaaaagaacctctccttgctcctttgctttcactagagggtgcc

SEQ ID NO: 116135 - DNA, 239 bp, Arabidopsis thaliana columbia
  unsure (1)..(239): unsure at all n locations
gcacgcctagacaggaacccgggcacggcaaaaccacgggtncgaccccacgcggaacgccggagcagagacagaaacaacgcacataaaggacccgcgaaggaacaaacgaggggacgacaaaacagggaagccgcagagggacccaagaagaccagccaaaaaaaaacgccaaagaaaacagaaagcacagagcagagagacgggacgcgacaaacccgcggaggggggacaccaat

SEQ ID NO: 116136 - DNA, 509 bp, Arabidopsis thaliana columbia
  unsure (1)..(509): unsure at all n locations
nnnnnnnnnnnnnnnnnnnnnnnnnnnnnnnnnnnnnnnnnnnnnnnnnnnnnnnnnnnnnnnnnnnnnnnnnnnnnnnnnnnccacgcgtccgcggacgcgtgggcggacgcgtggggaagtagaagaagatgggtaaggaagatgaccgaggagaagagtacctgttcaagattgtcctaatcggcgattccgctgtcggaaaatcgaacttgctgtctcgattttcgcgggatgagttcgacacgaactcaaaagcgacaatcggagtggaatttcagacgcagctggttgaaatcgaagggaaagaagtgaaagctcagatctgggacactgctggtcaagagaggtttagagctgtcacttctgcttattacagaggtgcttttggtgctctcatcgtttatgacatcactcgaggtgacactttcgaaagcgttaaacgttggctccaggaactcaacactcattgtgacacggcagtggcacaaatgctagttgggaataaa

SEQ ID NO: 116137 - DNA, 466 bp, Arabidopsis thaliana columbia
actatagagatcatgacgtcgactgcacgcgtacgtaagcttggatcctctagagcgtccgccctttggttttttctttttttttttttatttttttttttttttttttttttttattttttttaaactggcccatcccaaattttataaggttttcgacaatgcattggttttcaatatggcccatggaaaacaagaagattggggagagtatccttttttctgaaagggagttccctttttaaacattcttatcaatgagaacaccattgaaaaactttttgtaggcagaaacgggccaaaagaaaccacggaagatgaccccacttgccaaaggaacatccaagaggaactttgttatggggggtttgttttcaccacaaataactataaagaagctttttccaacccacccgattcatccagcattgggtgaggaaaaaaatccctggagtaatgaactctc

SEQ ID NO: 116138 - DNA, 511 bp, Arabidopsis thaliana columbia
  unsure (1)..(511): unsure at all n locations
nnnnnnnnnnnnnnnnnnnnnnnnnnnnnnnnnnnnnnnnnnnnnnnnnnnnnnnnnnnnnnnnnnnnnnnnnnctttgttttttttttttttttttttatcgaatcggaaaaataaaatttcaaccgggttcaatgaaatatggttacaagtacaacgaagcggaaactccggaatccatatcatttcatatacagacagcagtaacacagacgccagaaccttcttgcttttctccgtcccacacttgtcttttacatttatacaacggatatggtaatgcgaggaaacagaaacagcaagcaacgttgcattgggtgttattcattctctctgttagacattgaagatcttcttgaccttcctgatcttcttacggcataccggacaaaaacccgaagtttcagctatccgtgtcccgcactggaagcaagcaacgcagtgtccacaagagaggaagaaacagtctctaggcgcatcatagcaaattgcacatagatatcttgtacta

SEQ ID NO: 116139 - DNA, 499 bp, Arabidopsis thaliana columbia
actatagaagagttatgacgtcacatgcacgcgtacgtaagcttggatcctctagagcggccgccctttgtttttttttttttttttttttttttttttttaataataccaaaatttagaaagtattttaggtattttttttctatataccgttgcacaggttgtaaaaacgttattttttcattgaatataatttaacattaaattaaccgttagcgcacctttgatttaatgaccgcgggcaaacaaagacgaaatagttgcataggacctgaatgccatctatgttgctgttttctataagcttcatacgattccggtaattcacattggcactcaacgtcatttaggaaaacgaatttccttccgtgaaggtgagcacgaaccgcaatgtccatatcctcgacggtagttttctcgagccaaccaccggaatcttccaaagctttgatcctccacacaccgggctgtcccgttaaacccgaagaaattcaagaag

SEQ ID NO: 116140 - DNA, 475 bp, Arabidopsis thaliana columbia
  unsure (1)..(475): unsure at all n locations
nnnnnnnnnnnnnnnnnnnnnnnnnnnnnnnnnnnnnnnnnnnnnnnnnnnnnnnnnnnnnnnnnnnnngtcgtcttcttctccaactttgctttcaatctcaagctttaactctccctggaaatgatgattaaacgcaagaagccttttggaaggattgccttaaaaaaatggggacaccaaaaaaccaccccctccccagggaaaaagaatttcattttcagaaatatacaaaggggtttttataaagagattttttttctgggaaaaaaggggggtttctggggtcaacccgggggaaaaaaccctttgtttttccaaaaaggtttttggggcaccctttttttcccaaaactttttaaatatttgaaaaaaaatgtgggttcccccagggggggagaaacacaaaggccccgcaaaaaggggtttttgtgggggtgtcttttaaaaaggccccaacaaaaaaagggggggg

SEQ ID NO: 116141 - DNA, 485 bp, Arabidopsis thaliana columbia
  unsure (1)..(485): unsure at all n locations
gctctaatacgactcactatagggaaagctggtacgcctgcaggtaccggtccgnnnatcccggtcgacccacgcgtncggctttgaagcttttaacatttgttgcgaagaacaaaactttcgaactagaacttggggagggaattccttcaacttttttggctcaattggggagcccccttattggaaaaccctgtttttttgggcccgcccctttttggttttaaaaacctctgggcggggggaagttttccccaaataaaaagaaaggttttttaaaaaaagaaaaaaaaaggcgggttgggaaaaaaattttttttttttggaggattttttttcccgggggggggggggggggaaaaaaaaaaaccatttttttttttatatagaaaaaaaaaaagagggggttaaaagaaatcccccccccccctatttggtgtttttaaaaaaaaaaaggggggagatttttttttttcccccccccc

SEQ ID NO: 116142 - DNA, 525 bp, Arabidopsis thaliana columbia
  unsure (1)..(525): unsure at all n locations
ttgaggacnnnnnnnnnnnnnnnnnnnnnnnnnnnnnnnnnnnnnnnnnnnnnnnnnnnnnnnnnnnnnnnnnnnnctttttttttttttttttatagaaattacttgcttcgaaattaacaaatattacaatttgaaattatcctaagattcaattatcagtgacagtgacatataaaaatttatatatatgtcatttgaatccattcatatttttttataacaaaagtaaaccgaaaaccgaaaacaaaacccaacttagtttcaaacttcaagcacgacgatgtaagttctcatcgtcgtcgtcagcagcatcggtggctccagcagcgagatcaagaagctgctccatctgcagtgtcatctccataagcgtcttggaagcagtgtcagtgtttttctcgaccaaacccttcacacgccttgtatcatcgccagaaaccatgacgtcgtagttggcagtgtctggtgagtccttgagttccagtagagcgctctttagagacgccaaaataccaacatagg

SEQ ID NO: 116143 - DNA, 518 bp, Arabidopsis thaliana columbia
  unsure (1)..(518): unsure at all n locations
nnnnnnnnnnnnnnnnnnnnnnnnnnnnnnnnnnnnnnnnnnnnnnnnnnnnnnnnnnnnnnnnnnnnnnnnnnctttttttttttttttactaaatcactgcatctcaactttgtaactagacccaccaacattatcagaaaaccatagtaatctacaccaattttaagagcagacagatgaaatgaggaaccgggaggataggtttttgtttttgtctttgtccttttagagctgcacttctctgtcgtgtatccaactgaaaggaatcttgggtcctttcttggctcttgcttgagctctctcatccaatctcttgatccttggagccaacccgcataaatagtcttgtgctttgtttccttcacctgaaagcccggttaagtcctggattttccacctaccaaccagaaactcaagaatgtctgcatagtctttggcggtgtaaacaccgagcctctgagccacggaagagaagttgtcaaagaggttgtcgttgcgcccatcatacatcaagt

SEQ ID NO: 116144 - DNA, 518 bp, Arabidopsis thaliana columbia
  unsure (1)..(518): unsure at all n locations
nnnnnnnnnnnnnnnnnnnnnnnnnnnnnnnnnnnnnnnnnnnnnnnnnnnnnnnnnnnnnnnnnnnnnnnnnnnctttgtttttttttttttttttttttttttttttttaagggaacatatcacattcaaatctccaataacgatcccaaaccacataagatgtgttattaagatccaattaatcgggactaaaaccaattcgagagaacaaacgaacgatgactcagtacccattaatctgtcttcctgttggtggcgatcctaccaaccgagagaagggttgctgctgcgtttggttgttgcggcttttgttaaaactgttgctgcttccaattccagatttagggtcagaaaaaggagaataggcttgagctagctcaagagcagaagctgctttttccgtgacgaatccctgttccatttggtgaatccagtttctggggaaccgggtttcgccatgtctctggggatggatcggacgcgtgggtcaacccgggaattccggaccggtacct

SEQ ID NO: 116145 - DNA, 527 bp, Arabidopsis thaliana columbia
  unsure (1)..(527): unsure at all n locations
nnnnnnnnnnnnnnnnnnnnnnnnnnnnnnnnnnnnnnnnnnnnnnnnnnnnnnnnnnnnnnnnnnnnnnnnnnnnnnnnnnnnccacgcgtccgatccatcaccagagacatggcgaaagccggttccccagaaactggattcaccaaatggaacagggattcgtcacggaaaagcagcttctgctcttgagctagctcaagcctattctcctttctctgaccctaaatctggaattggaagcagcaacagttttaacaaaagccgcaacaaccaaacgcagcagcaacccttctctcggttggtaggatcgacaacaacaggaagacagattaatgggtactgagtcatcgttcgtttgttctctcgaattggttttagtcccgattaattggatcttaataacacatcttatgtggtttgggatcgttattggagatttgaatgtgatatgttcccttannaaaaaaanaaanaaaaaaaaaaaaaaaaaaagggcggccggtctaaaggatccaagcttacgt

SEQ ID NO: 116146 - DNA, 540 bp, Arabidopsis thaliana columbia
  unsure (1)..(540): unsure at all n locations
nnnnnnnnnnnnnnnnnnnnnnnnnnnnnnnnnnnnnnnnnnnnnnnnnnnnnnnnnnnnnnnnnncttgggttttgtttttttttatntttttttttcgggctcaaaagtttttttttttagacccaatggatcagaacatacagtcagatgaaatccaagttctgattttcctataatatcctcaactcaaacttagcaaacaataaatacaaaaaagaattctttttaaactgtttttgaaaaaggacattatatctccctgtgcttgggatcttttgaacgtttcctcctttcttggcttccccgcttttttcctccttgcgtttggtccgctggctggggttcccaagggcccggacttcttttttctgtggcacccggccctgttaacaggattttgcggtgtttgcccatcatctaacttcttacctggattaagagggcttttttctttttttgggttccgttttctggctccttcccacacttccttgagtatcctttttctcccacgaacattaaaatccgggactttaa

SEQ ID NO: 116147 - DNA, 512 bp, Arabidopsis thaliana columbia
  unsure (1)..(512): unsure at all n locations
atgatttgccggcannnnnnnnnnnnnnnnnnnnnnnnnnnnnnnnnnnnnnnnnnnnnnnnnnnnnnnnnnnnnnnnnnccacgcgtccgcttaatcacacctcagttgcggcgtcaatgaacatagcgtcatgcaggacatggatccaaaccaacccatctagagaatctctgctcatctcaatcctcctaatgtgcatagtcagattgctgacagctcatgttagaatccgctggcttgtcaggcgtaacgtgagatcacccggataccaagtggcaattcttggagcagctggtggaattggacaacctcttgcgatgttcatgaaaatgaatgctgtgtattcagctcttgatcaatatgatgttgctaacgctcctggtgctactgctgatcttagtcatgtggatactaacgccgcggttcatggattactctgtcagtctgagttagaggatgcactgacggatatggattgagtgatcatgcctgccggtgttactaggaacc

SEQ ID NO: 116148 - DNA, 505 bp, Arabidopsis thaliana columbia
  unsure (1)..(505): unsure at all n locations
tttaggacnnnnnnnnnnnnnnnnnnnnnnnnnnnnnnnnnnnnnnnnnnnnnnnnnnnnnnnnnnnnnnnnnnnncttttttttttttttttttttttttttttttctcccttaaccggatatcaaattctcaatgttacataaggattcatcagatagttcttcggcaactttggttaagaccttggatatgtaaagtttgtcttactctgaaaaccgactacatatctctccacgacaatctatctaactagttcagcaacaagaagttctaagtagagaaactacatagaaatatatctctgatgcaatcaaccttcacgtgtacaagaagcaagaagagaggtaaccggcgaaccacagaagaggaaggtattgcttttgctttttttcacctacgcttgatcatccagtcgtgagctgttcgtggggcagtggagattccctcgtagtatcgagactcgagttttcctctgttccatctcttgacaaatcgtgagaaca

SEQ ID NO: 116149 - DNA, 501 bp, Arabidopsis thaliana columbia
  unsure (1)..(501): unsure at all n locations
tttaggacnnnnnnnnnnnnnnnnnnnnnnnnnnnnnnnnnnnnnnnnnnnnnnnnnnnnnnnnnnnnnnnnnnncttttttttttttttttttatattaatctaagaaacttcatacacttcgtaacgaaagagtgtctcttgagacgataaaatgaaagtgctaaaccaatctctacatggttgcttttattgcaaatcggagtctatactttatggaatttatatttctgcacaagattaaatctcgaaattccttgattgaagccattaagcacaagagtcttcactgcttcacttccttgctcgagtgcttcctcgatctgtttctgttccaatggactaaacttctgaagaagaaaagctttcatatccatgtttccaggtggtttaccaatgcctatgcttaaacgaggaaagtttcgacgaccatccaaatgccccattacactcttcactccgttgtgatagccttgacctcctttcggttgaagtctcaaa

SEQ ID NO: 116150 - DNA, 523 bp, Arabidopsis thaliana columbia
  unsure (1)..(523): unsure at all n locations
tttaggacnnnnnnnnnnnnnnnnnnnnnnnnnnnnnnnnnnnnnnnnnnnnnnnnnnnnnnnnnnnnnnnnnnnctttttttttttttttatatgtgaaacaatcaaactatatgttatacaaacaatatacatatactgcttcaacaaagcaattaggcagttcttgtttttgatttctctcttaagagtctgtcttaattactttagagaaggaaaaaaaaagcactttctaatcttctaaacagtccacaacactttcacacaaacgggacaaatcaatagagtccgtatgaagtactaatattattttttcctaatgattttgcattcccctgtaggtcataaacatatatcatgatctgaatggactccatttcgcgctggctttccgatctgtaagcaatcaatcggtggaacggttgcggaattgagctctccaaatgttttccaacaaaatggatcgtacatgtggtattgtagttgcactggttttagctctatgcctgataattgcacgtct

SEQ ID NO: 116151 - DNA, 486 bp, Arabidopsis thaliana columbia
  unsure (1)..(486): unsure at all n locations
nnnnnnnnnnnnnnnnnnnnnnnnnnnnnnnnnnnnnnnnnnnnnnnnnnnnnnnnnnnnnnnnccacgcgtncgnccacgcgtncgagcttgtgagcctactatcatncgaggaaaagttgtcccgtgagcctatctgaaaagaagagagaaccagttgcccagaaattaacggggatgggtatggtatttttttaagaacaaggtttttatttggttaaaccctttccggaaaaaaggggaatttttgttccaaccccctggggagggggcccaaaaggggcccccgcccccccaaaaggagaaatatgagggtcttttttgggggtttttaaagaaaccagaggttgcaaaaaaagagattttccccctcttttttttgggggaaaaaatttttctttaataaaaaaaagggttttttttggggcgcccctttttttttttccccccccaaaaattttcctccccccccttttgtgggggggg

SEQ ID NO: 116152 - DNA, 445 bp, Arabidopsis thaliana columbia
  unsure (1)..(445): unsure at all n locations
gccgcgtacgtagctnggtcctctagagttttccgcccggggaaacccgccccgcgaacgcccaaccccccgcgggggcgggcaagagacccaaacgcccagaagccgggcggggggcgaagggagacgcgaccggggggcgggcgggaggggagggaggggcgggcggcaggcaggacgggggggcccgtttttcgtttgaggtgggggcccggcaaaagacagagcgcatggcggcgagattggacccgtgaggggagcggtgcgcgatgcccaggtgtcctactagtagcagtcccgtgtgttggtagggcgaggggcagcaggaggtagttgtgggtgtttgtgggagggctggggcagtgcaggagcgaccccggccttgtgagcgggggggcgagggagggtgctgcgacgctaatagacgggtgcgagatctgaggcc

SEQ ID NO: 116153 - DNA, 533 bp, Arabidopsis thaliana columbia
  unsure (1)..(533): unsure at all n locations
acccgacaaatttagggaaagactnacgcctgcaggaaccgggccggaattcccggtttgacccgagggtacagccacacgtacgcacacgcgcacgagtttgtgggggctcgcttaacgatcagaaactaagaaaatcatgcggttaaacatagagggttttgagaagcggcaaggagagacctcatgggatagatgatcataacaaggcgacgttttttttttcggaggagggagaaagcgcagagcggcaagagagaagtggcgtggaatggagggagggataggcgagtaataggacggagaaagcagagggggcgtgggaggacggggagagtcggtgtagcagagacatgaggcccggttggttgtggggacagggaagaagagagagataacgttggaggaagataagcagtagagggtacgtattgtgacggagacggggcacaggggcggatgcgccgaggagggagggaagagttgaggggaatgagggtgaggatgattggtgccacatgttgagcgggggc

SEQ ID NO: 116154 - DNA, 252 bp, Arabidopsis thaliana columbia
gccgcgtacgtaagcttggatcctctagagttttcgcccttggggtaatccgttttatattttattcgatctttttttttatggggatacggtcgatgttgtgagaatgggtgttgtagagaggagcagacaaagccgcacatgctggtgtcagagtgaatagagctaggagatgggagaacgagtcgactcaatagtggcgcgaccaggatttgtggtagtttcaagggggggggggcacaaaaacgaggg

SEQ ID NO: 116155 - DNA, 236 bp, Arabidopsis thaliana columbia
  unsure (1)..(236): unsure at all n locations
cgacaaatttagggaaaaaacgacgcctgaggnaccgggccggaatccagtttcgaccacgggtaaggcgattctttgaacaacttggaaagagaaaagagagtatttgggagggacgatagaaaacgagagcagatgacaaggagcgatacaagtgtgataagagtgaagaactggagtacatgaaagggcatataggagaaacagggaaagggaggatttttttttttgggggg

SEQ ID NO: 116156 - DNA, 503 bp, Arabidopsis thaliana columbia
cgcctgcaggtaccgggccggaattcccgtttcgacccacgcgtgcgccgatttttaccacaagtacataagtgtctgtatcatggtaccgccgttatgagctggtcacagaggcatcagaatgaccaaaggctcgttgagctccggactactcccaagcgtgacactcggccgaagattggcgaagagttttttttttggggggggcgccccaaacacccggcgtgtcctcatagttatgcccccgcaccgttattcctggggcgacgttcatgattgtggtggcccgccgagacgaggcgcgctatcgcgtgcggaggagcgggcgaggcgtgtttcggtgcgcactcggaacgaggggatcagttctttcgtgaatcgcggagagtatctgtgtgttactaagaggactggggttttggggaaggtcgggggggagaaggtgaggagagcgcgtgtccgggttcgcgcgacggtcgtgagcgggtcgcagacagcccgcg

SEQ ID NO: 116157 - DNA, 521 bp, Arabidopsis thaliana columbia
  unsure (1)..(521): unsure at all n locations
nnnnnnnnnnnnnnnnnnnnnnnnnnnnnnnnnnnnnnnnnnnnnnnnnnnnnnnnnnnnnnnnnnnnnccacgcgtccgactctctctctctctataacanaattggacagaattggggcatcgagagagaaagatgcaagccatctncaaaggtttcttcctgcagcatcattcttttagatggtcttaggaagctagtttggccaggcattgggtggagggccttgcgttgggacaactttccggttcaaaaaggggtttgggtcctggggggcaggaaaccgggcttcctttcacccttttaaggctctttgcggggaggccggggaaatcccgggccgccttttaaagatatttgccggggggttcccaagggggttttttcctctttgggaaaattggacctgggggcgcccgtttttaccgggccaccactttgtcttttttttttcccacaatggaggaggcccccggccccccggggggggggggggccccctctttaaaacgggcccccct

SEQ ID NO: 116158 - DNA, 530 bp, Arabidopsis thaliana columbia
  unsure (1)..(530): unsure at all n locations
ccagctctaatacgactcactttagggaaagctggtacgcctgcaggtaccgggtcggtatcccgggtcgacctacgcgtnncgcaaacttcaaaccaaaaaaataaatgggagaggttccaggaaattcctaacttttatttcagcttttaaaattccctggaaaaattaaacaaaatgggcccagactttttttttttttttttgggggcccgggaagaaaaaaaaccccaaccccggggcgggaaaaaaaaaatgggggagaaaaaaaccccccccgggaaaaaaagggggggggggccccccaaaggggggtgtgtgttaaaaaaaaagaggggaaaatttttccccaaaaaccctctcctaagggagggggttttctcaaaattttttctcaaaaaaattttttttttgggggggcgggtggggggtggggagaaccaccccctttctctctcccccggggagggggggttttttttttttatccccccccggggggggggggggaaaaaaaaaacccccccccc

SEQ ID NO: 116159 - DNA, 508 bp, Arabidopsis thaliana columbia
  unsure (1)..(508): unsure at all n locations
nnnnnnnnnnnnnnnnnnnnnnnnnnnnnnnnnnnnnnnnnnnnnnnnnnnnnnnnnnnnnnnnnctttttttttttttttttttgaaatgaaacagaattatgaatatccgcattctcattattacatgtaaaatttgctaaaaccgaaagacacagagatactttttagggttgttgagagatttctagatgaggtatgttcataagcatcattattttaatgtgatttgtgatgatcagtgctctcaaatcacttttgcatttctccatttacatgagctagctcctacttgtggctttatgtaaatcctggtctacacaagctagagattccattgacgagtacaatggtgatgccttttttcaaagcaggtgttcctgaatgctccttcgttagttccatgcctcatacacgaatggtattcagtgcaggatccaattggacttgattccttgacagactttagcttttctttaaaccaaaaaaagaagaatatttttggtag

SEQ ID NO: 116160 - DNA, 516 bp, Arabidopsis thaliana columbia
  unsure (1)..(516): unsure at all n locations
nnnnnnnnnnnnnnnnnnnnnnnnnnnnnnnnnnnnnnnnnnnnnnnnnnnnnnnnnnnnnnnnnnnnnnnnnnnnctttttttttttttttctccatgtgtcacgttcaaaacattttccatctgcccgagtaaaacgcttcagacaatggattttggtatccgctggcaactctggtgtctccacttgggttccagacagatccactacacgtaggtaaaacattttctcaaatgatccctcaatctttgccagcttggcactgccggaaacatcaatgacttcgagattttctagtttctcgatgtttgggatggcatctaggttgatgcaatcacgtaggaggagttcgttgagactggacaggtcctcgatggtggtagccaactcgctaagattagttcccgagagataaagagttttgagttcaagcttatcctcgaagcacacttaaggcatttccactaagctcgtagtgccaaaaagatcaagaatttgaagtcctgacaggggct

SEQ ID NO: 116161 - DNA, 500 bp, Arabidopsis thaliana columbia
  unsure (1)..(500): unsure at all n locations
nnnnnnnnnnnnnnnnnnnnnnnnnnnnnnnnnnnnnnnnnnnnnnnnnnnnnnnnnnnnnnnnnnctttttttttttttttttgataagaaaacaaagaggatgtttgaatattaaagcctcatgataaacaaggaatcaaggatacataaaaatacataaacaccgaagaacaagcttcccgaagaaggataatcaatttggcggtcggggtaccgattccatccaagatgggagcacaaactgggataacataaggactccatcgcatctctcttccatgtacccctcagtacccgacgtgtttacgcgacaacaatcaccttcactactactcccattctctgactcttgatgaacaataaactcttgtgcctgcaagtaacccgataccaaacaaccgtgttgacgatcccacagatagacgatataagtatcaaacggattcattgccaggggaaaacagttgacatcagatatgaaagacggcatgaccactt

SEQ ID NO: 116162 - DNA, 414 bp, Arabidopsis thaliana columbia
  unsure (1)..(414): unsure at all n locations
atgattccagcctatacactattaggaagctgtccctgcagtaccgtcgaattctgtcaccacgcgtcgcacgcgtcgngatacgttataaatccncatgtaggattgtggaatggttgtttacaattttcctaaaaaaatttttttccaggggtttggggcccccaagggtttctttttataaaaaaagggttttaaaaaatacacccgggggtttttaaaaaaccccccaaaaaaaaaagaaaaaaaattttttggggggggggagggcccccccttttgggggagtttttcttccccccttttttattttttttttaaaaaaagaaaaaaattttcccccttttttatttggccgcggggaggggggggtttttttttttttttttttggggaagaaaggggggggtgttt

SEQ ID NO: 116163 - DNA, 534 bp, Arabidopsis thaliana columbia
  unsure (1)..(534): unsure at all n locations
ggacgaactatagaagatctatgacgtcgcatgcacgcgtacgtaangcttgggatccnntctagagcggcncgcccntttgttttttttttttttttttnnttttttaaggaccattgcttattttaatttaagaagatctctcttttaaatgagaaaaagggatcctccaaaagatttcccttggtccttggggaatatttacccggaacccaaaatttccccggggaaaaagagttttttttttaaaaaaaaaagaaaaccccccgttgtagaaaaaaaaaaaccggggaacccatttttttttggggtttaaaaaaaagaaaatttttgtttttttttttttgcaaaaaaaaaaaccaccccgggagcccccccgggggggtggggggcccatttttgttttttcccgcggggggggggtttcttatattattggggagggccccttggcgccccccctcttaaattttggggggggggttttttttaaaaaacaccccccagaggggggggagtttttttttttttctt

SEQ ID NO: 116164 - DNA, 496 bp, Arabidopsis thaliana columbia
  unsure (1)..(496): unsure at all n locations
actatagnaagattatgaggtcgactgcacgcgtacgtaagcttggatcctctagagcgttcgccctttgggttattcttttttttttatttttactcaagataaacgaatcaaaaccaaacgacaacgagataatgttctcaatagactagacagacgtgtcacatcacattttttttagcaagttttattacctcgagtaataagaaactaattaattttttttacaggggggtagcaccgccattacgaatgtgacgggggatgacaggaataacagagtcgggtgagctaagctgaggaagatgaccatcagaaggaataaccgcgacgaaggatccacagccaagattggagtgaacatacttggagacaacgactgggacagttaagtccttaaaacttgggaaagtgtgacacggaacactgacaaagggttagatctggcccagggcactttggaaaatggggttgcccgacggagaaagcttttttg

SEQ ID NO: 116165 - DNA, 520 bp, Arabidopsis thaliana columbia
tttttaggaacacactatagagagtctatgacgtcgcatgcacgcgtacgtaagcttggatcctctagagcggccgccctttttttttttttttgaaaaaccctagaaggccaccaccaccacttttggcatctgtttttccggttttgcccccacctttattctctttcccttctttcttacccttctctcctcctttaccctttttaccatcctttccatttttaccctcacccattcccttcatctgcaccggaatctcaaacccgccaccaccgcctttctttcctccaccgcctccgcctttgaacccattcatcatcatcattatctcattgggacccttaggtccaccaccattaccatgatgaccacccatctgaggcatcatcttgttaggcatcatcatcttattaggaggcatgtgattacccccacctcctccatgtccatgaccatgacccatctcatcatcatcatcttcatcatcatcgaactcatcatcatcataatcatcttc

SEQ ID NO: 116166 - DNA, 510 bp, Arabidopsis thaliana columbia
  unsure (1)..(510): unsure at all n locations
nnnnnnnnnnnnnnnnnnnnnnnnnnnnnnnnnnnnnnnnnnnnnnnnnnnnnnnnnnnnnnnnnnnnnnnnnnnnnnnnnnnccacgcgtccgaaatctgccaacagtttttgtctcattcccgatcagatctcaacgacgacgagccatggcttcaactttcagcggcgatgaaactgctcctttcttcggattccttggcgctgccgccgctctcgttttctcctgtatgggagcagcgtacgggacagcgaagagcggggttggtgtagcgtcgatgggtgtgatgagaccagagcttgtgatgaaatcgattgttcctgttgttatggctggagttttaggtatttatggtttgatcattgctgttatcatcagtaccggaatcaaccctaaggccaagtcttactatctattcgatggctatgctcatctctcttccggtcttgcttgtggtctcgctggtctctccgccggtatggctattggaattgtcggcgatgccggtg

SEQ ID NO: 116167 - DNA, 490 bp, Arabidopsis thaliana columbia
  unsure (1)..(490): unsure at all n locations
atgatctnnnnnnnnnnnnnnnnnnnnnnnnnnnnnnnnnnnnnnnnnnnnnnnnnnnnnnnnnnnnnnnnnnnnnnnnnnnccacgcgtccgattgaaaacgggaatcttgtttacaagatggaggttttcttgaactctagtgttntgagaagctaggaagactccattatagttctccagacgacgagatcattttatccgtggtctgaagatgtgaaactcgatgtacggtggttggagtcaatcgctttgaaagctgctttggatcctggaaaagtggttgggcttatccttttacccgaagaagcttctttcccccggaaggaacacaattacccgccccggaaattgggggggccaggattccccttggcccaaatttgttttatttttaaaaagagggttttacttttttaccaaaaaggggggggttttcccggggttttggaaaaaccttttggggttttgcgaaaaaaaaatccctggt

SEQ ID NO: 116168 - DNA, 511 bp, Arabidopsis thaliana columbia
  unsure (1)..(511): unsure at all n locations
nnnnnnnnnnnnnnnnnnnnnnnnnnnnnnnnnnnnnnnnnnnnnnnnnnnnnnnnnnnnnnnnnnnnnnnnnctttgggtttttttttttttttttttttttttttttttttttttttttttttttttttttttttttttttttttttaaaacaaatttaaaactttacttttaaaaaaaacccacaaagttccaaaacaagggggcaagaaaatcccccaaaaaaaactaaaaaagaaaagaaaagaaaggcgggaaaaattttttaaaactcaaagggaggggtgattttgaaacccattgggggggaacctaaaaaagggaccccacccctggggggaagcggccccatcaccaccttgggggggttaaaggggggcacggacaatgcttgggccacggatagggaaaccgggcggaccaaggggggccccaacacaaggggaacccgggtccacgggacttttggccatgtaaacaacggggggggggggggagaggggtggcctt

SEQ ID NO: 116169 - DNA, 538 bp, Arabidopsis thaliana columbia
  unsure (1)..(538): unsure at all n locations
aggaagtcgacgaacgagagagaggaggacatgcgagaggcacaagcgctaaccggcaggagggagggaagctaggggaggggccaacaaaaaaaagttagtaacctgacgggagggctaccaanacggactncacttttagagggaaaagctgcgttacgccctagcaaggttacccgggtccccgggaaattcccgggggttcggaacccccaaaaggggggggggccccggattcaaataaaaaaccaaggggaaaaaaatgccccttgttacaaaattttttgcaaccttttaatttctttgggccgttcttctgggggcgcccccgcgttatacaaggggggcctagaaggggaggaaaattcccgaggagagtccccaagagggggcgtgggaaaaatacaaaaaaacactcccggtgtcggggagctatacaaaaaaaaacaacccccaccttctcttttttgggggagaaaaacacaaaaaaacccccccaaacacacccctctaaaaaaaaaaaaaaaaaaaaaaaaaa

SEQ ID NO: 116170 - DNA, 507 bp, Arabidopsis thaliana columbia
  unsure (1)..(507): unsure at all n locations
nnnnnnnnnnnnnnnnnnnnnnnnnnnnnnnnnnnnnnnnnnnnnnnnnnnnnnnnnnnnnnnnnctttgggttttttttttttttttttttttttttttttttttttttttttttttttttttttttttttttttttttttaaaggggaaaaaactttaatttttgtaaacaaacacccttttgttaaaaaagggccctaattttattcggggatttcgtttttccccatttaaaatctgaaaacatgagcccaaaaactggaactcaaatttcaaaaactttccaaaacccataaacaacaaaccctttggctttgggaaaaaacaaatttaaggggtttttttttaaaaaaaaaaccaccctggttttgtctcgaagttccacaaaaacagttcctaaaacaaagctaataacttaaagttcccggattcttgtaaatacaattttcccaaggactggggttcaaaggtttcacatgccttaatgcttcccaaatggggctttt

SEQ ID NO: 116171 - DNA, 500 bp, Arabidopsis thaliana columbia
  unsure (1)..(500): unsure at all n locations
nnnnnnnnnnnnnnnnnnnnnnnnnnnnnnnnnnnnnnnnnnnnnnnnnnnnnnnnnnnnnnnnnnnnnnnnnctttgtttttttttttttttttttttttttttttttttttttaaacaaaacgatttttacataattatttgagttgtttttgaacaaaaatgagcgcggagcccaacccaaaaaagaagggtgggggctttcccctttatggggtttccaaaagcggtggacgggtacaaaaaaaaatatactggggaaaaagaagtttttttttttacgaaagctggggcaataaaaaaaagtttgaaaattttataaaaatcccccattgggggaaaaaggggaaaaaaatcctattaggcttaagaggttaaaaaaatcttctttccccctttgggaaggggcaaaaaaagggggggtagggggggggggtttttttaattttccttggggggaaagggagagagccttaaggccttaaaaaattttttttttt

SEQ ID NO: 116172 - DNA, 517 bp, Arabidopsis thaliana columbia
  unsure (1)..(517): unsure at all n locations
nnnnnnnnnnnnnnnnnnnnnnnnnnnnnnnnnnnnnnnnnnnnnnnnnnnnnnnnnnnnnnnnnnnnnnnnnnctttaggtttttttttttttttttttttttttttttttttttttttttttttttttttttttttttttttttttttttttttttttttttttttttggggcccaaacaagggttggaaggccccaaatccctttttttccttcccaaaattttattggggtaaagaggaaaaaccaaaggtggcaaggaaaggggccttctaaaaaaaaaaggggtcaaaaaaaccttgggtaaaacaccagggaacccccaaaaccttccaaggaagttggcccgggggccccccaaagaaaaaccgccgggctgaaagaaaaaaaaccctcccggtggggcccttaaccaaaaaatttggggacccccttttaagagggaaccccttggtccctaaacgggtaaaaagggtaaaaagggggaccttttaaacctggggacccctaaaaaaa

SEQ ID NO: 116173 - DNA, 452 bp, Arabidopsis thaliana columbia
  unsure (1)..(452): unsure at all n locations
atgatcttnnnnnnnnnnnnnnnnnnnnnnnnnnnnnnnnnnnnnnnnnnnnnnnnnnnnnnnnnnnnnnnnnnnnnnnnnnnccacgcgtccgcccacgcgtccgcccacgcgtccggtcgtcccctattaaaattacctgccagtttacttttctcatggtttgaaggaggtcaagtgctgagagagaagctctcgttgggttactgtggtcggtcgcagcgactctctaagtttatgtttctttatattgtcctgtgtttcgtcgtcgtcccctattaaaattacctgccagtttacttttctctcttcttgttttctgtgttggaagattctcaagttatttattccgcaaaaaacggtttatcatttacaattagttgaattttggtcgttaaaaaaaaaaaaaaaaaaaaaaaaaaaaaaaaaaaaaaaaaaaaaaaaaaaaaaaa

SEQ ID NO: 116174 - DNA, 513 bp, Arabidopsis thaliana columbia
  unsure (1)..(513): unsure at all n locations
tatagnagagctatgacgtcgcatgcaccgcgtacgtagcttggatcctctagagcggccgcccttgtgtgttggttttttttttttttttttttttttttttttttttttttttttttttttttttggagaaaaattttttttttatttttttttatgtttttttttttttggggggaaaaggggaaaaaaaattacatgggaggggaacccgtttttttatagggggggggaaaaattttgccctttacaaaaaaagaaaaaaagtttcggggaaaaaaaaaagaaggggcgtcccccaaaaaggctattggggtcccgggacatgggaaaaaaggaaggggggggaaaacccggaaaaactttaccgggacttgcccgcgggcccccggggcccaaggggagaccccgaaaactcggcgggggacggccaaattccccttcctgggagaaaatgaaaccgggacaaattccagacaaaaaaggggccggggggaaaaaggggaaacccgg

SEQ ID NO: 116175 - DNA, 479 bp, Arabidopsis thaliana columbia
atgacgtcgcatgcacgcgtacagtagcttggatcctctagagcggccgcccttaagttttgttttttttttttttttttttttttatttttctcttttttttattttactttttttgtggaaaaacccttttttggtgtacacgaccccgggtcaaaaatttaaaagggagcgcgggatcccttgtgttaaccacaaaaagacgctaataactttaggagagaggaacccgaggaggggggatagacaaaaaacaaaagacctttaaaggaaagaaaaaagatttcgaaagtgtgcacaaaaaaaaaaccgggggtcaaaaaccaaacacaccatttaaaagccccggaaaatcccgtgcaaaagaagggaaaaactcggcgaagagcctaaaaaaggtggaaaaaaacaatggggagaggttttgaaattcgggggattaaggctggtaacggaacccccccaagaaaaggagtccg

SEQ ID NO: 116176 - DNA, 485 bp, Arabidopsis thaliana columbia
  unsure (1)..(485): unsure at all n locations
nnnnnnnnnnnnnnnnnnnnnnnnnnnnnnnnnnnnnnnnnnnnnnnnnnnnnnnnnnnnnnnnnnnnnnnnnnctttgggttttttttttttttttttttttttttttttttttttttttggaaaaattttcgaatctttaaaatcaaccaaatcatgagagatactttagtgattggggcatgtgggattccaaagattctacctagttctagttggttttcacaaataatttattttatgggctaaacaattgaacatggaattgaaattttgatacaacacgaccctcatacacaaaagaagtaagccttaacgcatcgcaagactactcctcgagatattgacacgggggcttttgtgcccctttggatttttggtacaggatagttaaccccttttccaccaaccatattccggaaacattgtgggaaggtttcaaagtttttcccggggtttttacattgttattatttgaaaacatc

SEQ ID NO: 116177 - DNA, 541 bp, Arabidopsis thaliana columbia
  unsure (1)..(541): unsure at all n locations
atgatctnnnnnnnnnnnnnnnnnnnnnnnnnnnnnnnnnnnnnnnnnnnnnnnnnnnnnnnnnnnnnnnnnnnnnnnnnnnccacgcgtccgcggacgcgtgggcaaatccaggaagcctattctgttttgaatgatgagaataagaggtcaatgtacgatgttggactatatgatcctcatgaagatgatgacgatgacttctgtgatttcatgcaagagatgatctcaatgatgaacaatgtcaaagacgcgggagagagcttggaagacttgcaacgaatgttcacggatatggttggtggagatggcgtgagctatgactgtaacaataatccaaagggcaacaaaagaccacgtgtcaatatctcgaggagtagtgctgcgatgcgttaaggcttacttcttttgtgtatgagtgtcgtgttgtatcaaaatttcaattccatgttcaattgtctagaccataaaataaattatctgtgaaaaccaactagaactagggagaatctttggaatcccacatgccccaatcactaat

SEQ ID NO: 116178 - DNA, 501 bp, Arabidopsis thaliana columbia
ccagctctatacgactcaccttatgggaagctggtacgcctgcaggtaccggtccggtatcccgggtcgacccacgcgtccgtcattttttttttttttggaggtaaactttattttggatcaacaaatatgaacaagattagtatggttgttagggaacaggacatatctgaaacaaagtttttagacactaaatgtaagaaaaaatgtattttttgaaaaagagacttttttaaagtggagaagcaaagttgaggagtgtgaagtctctgtcgttgtttaatgtaagccattagaaaccagccgtgctttgttttttaattctttttcagcccaaccgggttggttcacctttgtgtcaaggatgtgatattgtttgaagaaaagtaaatttttttgtggatcaacagtaactgtattaattattttagatagaaagtttgattatatttttaaagccggattttggtttgaattagagtgtggagtagtgtatttgtg

SEQ ID NO: 116179 - DNA, 209 bp, Arabidopsis thaliana columbia
atttttctcgccgcctccttcaacgtcactagcgggcggtagtatcggccttacgcgcgtctcggaagtacgggcgtacttttgtgcacatcacgtagctccgccaaacgagcggaagtactgtcacgcaagacaaggatcgggcggctcggcggcgactatagacacaaacggcggcctagacggtcctcatccggccgtctccccac

SEQ ID NO: 116180 - DNA, 224 bp, Arabidopsis thaliana columbia
  unsure (1)..(224): unsure at all n locations
atgatcttnnnnnnnnnnnnnnnnnnnnnnnnnnnnnnnnnnnnnnnnnnnnnnnnnnnnnnnnnnnnnnnnnnnnnnnnnnnccacgcgtccggggaaaaggattctggtgatggaaaggggtatgcatttgtaacattcagaagtaaggacttagctgctgaagcatttgatacntctaataacactgacttcagaagttaaaagataaaaatgttcgacta

SEQ ID NO: 116181 - DNA, 465 bp, Arabidopsis thaliana columbia
cacccctacgtaaacctggaatcctttagaaggggccgccctgggggttttttttttttttttattaagcattagggttatattttatttcttctcaattcgctcagagcatctttaccggaacccttgaggctaattaaagaacacatcgaatataaaacattagctcttctacaacaccacatcatttctctttttaaaacttcaatcaagcgcacgcaaatctagagacatgatctcaaccgcacgttcgattgccctctctgatatacccaacggaggaacaatcctgacaacattgcctgtccccactggtaagatcaaaagacccgattctcggtagcaacatcaagtgagctagtcggctcataaaaccacactcctctgaaaagacgttggtgcgtacacttcccgtaaagacccaacttccataaaagtgatccatctaaacgcgttaaaaactat

SEQ ID NO: 116182 - DNA, 386 bp, Arabidopsis thaliana columbia
tactgccttgcagtgtacctggtcctcggaattccctgtgttcttactctacgggggctcgcctagtatatcagtatataatcactcatgctcttctttgctcttaacagacctctatctattcgttccctgactacgaccgataaacatggcatctcctctctatgcgtcaaaatcaacccactcgttcatcgcagcttctcataccgtccgatatcatatgctcacttcactactgctcgctcatatctggcagcttatttcgattcatttctgactcctctgtcatcagatatatcatacatgtttctaatctgctacagtcagtttctgttcttaatcgctagcggcgacccatacacctgttgtttatctctttacccata

SEQ ID NO: 116183 - DNA, 525 bp, Arabidopsis thaliana columbia
  unsure (1)..(525): unsure at all n locations
nnnnnnnnnnnnnnnnnnnnnnnnnnnnnnnnnnnnnnnnnnnnnnnnnnnnnnnnnnnnnnnnnnnnnnnnnncttttgtttttttttttttttttttttttttttttttttttttttttttttttttttttttttttaaaaaaaaaaaactaaatcgttttttaaagcaaagagtcccgggctgggagtttttttttcaccatttaaacattctacaattcactttttccattcagaggggtttagggggagattggggaaatttaaaaaggtaaaaagaagggccccttttaatcagccccggtaacatttgaggggaagataaaaaccgggggatttttggggcccttttttctaagggtcccaacattgaggtttttaggcatgggccccctccttttaactaccatccttaggattatcccggggattggcctctgaccctggcttgggagattcctcatttttttttggaccttcctccaggttctggggggaggctttaaggggcttctcatattca

SEQ ID NO: 116184 - DNA, 537 bp, Arabidopsis thaliana columbia
  unsure (1)..(537): unsure at all n locations
atgatctnnnnnnnnnnnnnnnnnnnnnnnnnnnnnnnnnnnnnnnnnnnnnnnnnnnnnnnnnnnnnnnnnnnnnnnnnnnccacgcgtccgcggacgcgtgggtggaaaagctgctggagacaagtggaagtccttgtctgattctgagaaagctccttatgttgctaaggctgagaaacgcaaggttgaatatgagaagaacattaaagcttacaacaagaaactggaggaaggtccaaaagaagatgaggaatctgacaagtcagtgtcagaggtcaatgacgaggatgatgctgaggatggtagtgaagaggaggaggacgatgactaagaagctgaatgttggtagcattagtatagatggctgcaaaaatctctctgtttttatctttacttgaaatgttaacggggctgattaaaatgggtctttctttttatctttttatatttccacaatctctcactaaagccctctgaatggagaaagtgaattgtagaatgtttagatggtgaaagagagacttgcagctctgt

SEQ ID NO: 116185 - DNA, 418 bp, Arabidopsis thaliana columbia
cagctacatacgactcactttagggaaagctgcgtacgcctgcaggtaccggtccggaattcccgggtcgacccacgcgtccggagtactttcaggatggttgcttcgaatttccgaaaaaatttggtggaaaatgctttaaaaaccttgttccaggaaaccccggagggggacccacacttttttttttttttggcggcctcctaaaaagaaaccccatgtgggggaaaaattttttttttaaaaaaacccccccttggggggaaaattttttttaccccggcgctccctgttgttgggggggggggcccaacaaaggtgggggtgtggccctctctctttcttttttcggggcgggcatatttccacacaaaagtttcgattatcgaaccatattattttcttttacgtcctcacc

SEQ ID NO: 116186 - DNA, 509 bp, Arabidopsis thaliana columbia
  unsure (1)..(509): unsure at all n locations
atagaagatgatgacgtcgaacgcacgcgtacgtaagcttggatcctctagagcggccgcccttttttttttttttttttttaaacaggaactaggccccttctttaagggtgtcattgacgataagccaaattacttaggaaccagacctaaagaagaacatatgtcagcttataggatttcacttgagctttagagatgttttgtgtcagaatttttgtctaagagtaaagacgagttgttgatggttttgtntaaagatgtaacagatttaaaccaattgggagttctattgctaggggtttttgcgtgggagatgtggattaaagattggttatgtggtgagtgattaatgggtggagggtggcggggctgagtcacctgtatcgtgtttctgttggtttcagtggatggaaagtgtgtttgatttgtagtggaaatggttgggagtgggtactgaaatgtgtgggtgggatggggggtgctatcagaaactgagtttgtatgtg

SEQ ID NO: 116187 - DNA, 423 bp, Arabidopsis thaliana columbia
gcgcggcggaccgggcggttttcgtttaccacggggaggcctgtgggtagtaatatcctctcgctagttcgatagcggcttaggaaccagagaataaagactacaaccagtacaagggcggggcgtaggcgtggtcaagggccgcaagactgatagttttttttaggacggtgccgtagtgtggatggatgtgtctaatgcactggctcaccccgactcaggataaaagggaggtgtgcgtcagggaacggttggaattagagcggaatcgtccgatatctcgtaatgtcgccgtccgctgtcctgagtgggccggcttggtagtgatttatcaggcgacgcgccgacagcaattgccagggggcgtgcggtctgttgttatttctgagactacgtaagtgctgttggtaggatgctaggcgc

SEQ ID NO: 116188 - DNA, 531 bp, Arabidopsis thaliana columbia
  unsure (1)..(531): unsure at all n locations
nnnnnnnnnnnnnnnnnnnnnnnnnnnnnnnnnnnnnnnnnnnnnnnnnnnnnnnnnnnnnnnnnnnnnnnctttggggtttttttttttttaaaaataacaactgccaagttcattaacttataaacacattccacctctcgaaaaaactaaaacctctttactcagcatgagcttacaatctctgaaagaatagaagaaaaactgcccaggatcaatcttggatcattcatatgtcattgcaagattggccaaagggtagaattccataaaacatatgttacatgttatagtgggcactggacggtctcattcctcaaatgagacccgctgaatccagctgtattgggttaaacccaactgtgccaaggatcttctcggccaaatcgttttactgctttcccttagtcaaaagggacaaatcaacactgaggctagtgacatatccaaagaccagaccaataacgctactcgcaacagccgatgatgcaatatatacatcactctgcataaaggtatcctgcctcaggt

SEQ ID NO: 116189 - DNA, 535 bp, Arabidopsis thaliana columbia
  unsure (1)..(535): unsure at all n locations
atgatcctgnnnnnnnnnnnnnnnnnnnnnnnnnnnnnnnnnnnnnnnnnnnnnnnnnnnnnnnnnnnnnnnnnnnnntgtcctacagaggccgttctctatctttcttaatgatgtcaggagtgatgactttctatgaagacggtgacagtaggtcatgcactccatgctcacgaatgaaaatgctgtccttcaatctaaggtgtttagattcttgaagatgtatctaactaccacgctctccgacgagtgcttatgaaagccgatgctgtaggtgaaacaagtactgatacagtgttcaaaatacttagaaacattgtctatcattaaataacgactgggatgcagatctagacattgcgcatatatagactcatactagggtcactatgatctcattctttgcatatgcgactctaaatatgtttcgagatggcactccaagagagattttaaggtctctagaccggagatacacgagctagatgggacatatacaatgttacagtctgcaccagcgtatattatacagact

SEQ ID NO: 116190 - DNA, 507 bp, Arabidopsis thaliana columbia
  unsure (1)..(507): unsure at all n locations
ttaggagcannnnnnnnnnnnnnnnnnnnnnnnnnnnnnnnnnnnnnnnnnnnnnnnnnnnnnnnnnnnnnnnnctttttttttttttttttttttttttttttttttttttttttttttttttttttttttttttttttttttttttttttggaacccaaaaaaaaagttttcataaacggaattttttaaatcgggggcaaaactaaaaaaggggggacaaaacaaaacattggcaaaacaagaaaaaaagattggggaaaaaaaaaaagggggcttctttatagctccattaaaggggggcctccaccaccccccattttaaaagccttgggggcaacactttgggggaaatttcccttcacttgggacttcgggggctttgaggcaaacccaaccttttttgcctttttttgggccttgggcttttggattctctccttgaccccacggaggggagtttttttagggggataaaaaacttaaggcttttttggtcgctttttt

SEQ ID NO: 116191 - DNA, 495 bp, Arabidopsis thaliana columbia
  unsure (1)..(495): unsure at all n locations
nnnnnnnnnnnnnnnnnnnnnnnnnnnnnnnnnnnnnnnnnnnnnnnnnnnnnnnnnnnnnnnncttttgtttttttttttttttttttttttttttttttttttttttttttttttttttttttttttttttttttaaaaaagggaactttttttcccttttttgataagcgaatttttcccggggggagacaatcgggccatgatgcccatttgatgaattaaaatagccccctttgggaaacatttttttgcaaaaaaaacgggtcccctcccgagaaaaaccgggaatttcttttggggttttttttccccggggaacaaaaaaaggaacgggaaccaaaggggggccgggttttattcggtctgaaaatttaaaaaaggggtaataacttgtttcccccaaatggggccggctttttgggggtaacccttaaaagctctttttttacaaacgcctttgttttttttaacaaggaaaattattttttttac

SEQ ID NO: 116192 - DNA, 536 bp, Arabidopsis thaliana columbia
  unsure (1)..(536): unsure at all n locations
nnnnnnnnnnnnnnnnnnnnnnnnnnnnnnnnnnnnnnnnnnnnnnnnnnnnnnnnnnnnnnnnnnnnnnnnncttttgttttttttttttttttttttttttttttttttttttttttttttttttttttttttttttttttttttttttttttttttttttgggggggaaaaaaaaaaggcccggtttaaaaaaaaaaaaaaccccccctggggttttggcccggtatttgggggggaaaaaaaaaaaaagggtccccctggctttttaaaaaagggggggttttttggggggtaacccgggggaaaagagggccttttttgatcctgaaaaacccccggggggtttacccgggggcaacattttggggaagggcctggggaaaaaaaacgttttaatcttaaacgggcagtttattggaaaggccctttgggggggcctttccaaagggggcccctaaaaaacttttgggggtggcaatggacccccccgaaaaaaaacccggggtgggaccttggtttgggcgaaatttttc

SEQ ID NO: 116193 - DNA, 519 bp, Arabidopsis thaliana columbia
  unsure (1)..(519): unsure at all n locations
nnnnnnnnnnnnnnnnnnnnnnnnnnnnnnnnnnnnnnnnnnnnnnnnnnnnnnnnnnnnnnnnnnnnnnnnnncttttgtttttttttttttttttttttttttttttttttttttttttttttttttttttttttttttttggggttttttttttttcttcaaaaagggatctttttggctttgggacccaccaaaaaaacgggggaaggcctcatcaaaaacctttttttggccctgaaacccaatttcccaatcctaaccccctttttttgcatacccaattgcccttggagcccctttcatggttaaaaatgccaaaacaacttttttttcccccccataaaaacccaacccgcgttgaaagcctcaagccgtttcttcaaaacttcaagggcatcttccccccctggttcccccgaccctgaggctatggctatggctttctcaaacccatcgggaactggaagcccccgaataaccccctcgggtaatggatctgaacttggggcacctttt

SEQ ID NO: 116194 - DNA, 511 bp, Arabidopsis thaliana columbia
aatacgactcactttagggaaagctcgtacgcctgcaggtaccggtccggaattcccgggtcgacccacgcgtccgggttttgccacggccggtgacgtttgtgactggaaatgctaagaagctcgaagaagtcaaagctatcatcggaaattccattcctttcaagtctctcaaactcgatttgcctgagctccaaggtgagcctgaggatatttccaaagagaaggctcgtttggctgctcttcaggtggatggaccagtgcttgtggaagatacatgtctctgtttcaatgctttgaaagggcttcctgggccatacataaagtggtttctagagaagcttggtcacgaaggtctgaacaacttactgatggcctatgaagataaatcagcttatgcattgtgcgcattctctttctcgcgtggtccaggtgctgaacctcttacatttttggggaaaactccgggtaagatagttccagccagaggaccaactgatttcggatggga

SEQ ID NO: 116195 - DNA, 531 bp, Arabidopsis thaliana columbia
  unsure (1)..(531): unsure at all n locations
nnnnnnnnnnnnnnnnnnnnnnnnnnnnnnnnnnnnnnnnnnnnnnnnnnnnnnnnnnnnnnnnnnnnnnnnnctttgtgtgttttttttttcgagtacctatattagttaaactatgaggactctgattacccaaacctgcacacacatactaaattaggtacgctactttgcttgctttatcattacacccacatacgcatacaaattacatatccgcccaaatttcctacgaacttagtgaggatagttacttccactgataggatgacccagtctaaacctaggatattggggcctgcattatagaagctacgcttaagctaactctagaaatctgtcctcctgaaaccactgaaaagctgatccatatcctcatgcatcctcccttgagtctccggcaagaatgagtgtaagatgacccagatcccagtctgaattcctccagacaagtgaaacgcctaacgagcacacatccgttttaacattggaagaaccgatatcgggatcacgcctctatacactttgttc

SEQ ID NO: 116196 - DNA, 521 bp, Arabidopsis thaliana columbia
  unsure (1)..(521): unsure at all n locations
nnnnnnnnnnnnnnnnnnnnnnnnnnnnnnnnnnnnnnnnnnnnnnnnnnnnnnnnnnnnnnnnnnnnnnnnnccacgcgtccgcgaactcgctgttgaaggtaggatggagactgatgcttgctaatagatgacggccttccgggatactcgatgctcggcgttctcgttatgccggaatctccacggcggttcgttatgcaaggtcgtattggtgatgccaagtgcgttctggacaacaccgctgaactcgccatcgaagcaactctctcgtttcgaagacattgaacacgccgatggtactctgcgtcgagtagacccacgacgtgcttgaggtgtggaagaggaacagtcatgagagaacgagtttggagagagcttgtaatgagaccaacaccagtagtgcgtggagttatgatcgccgtattcggaatccatctatgccaacaagctttacggatcgacacggaggctctcttattaccgagaattataagaccgtcggactcagaaccgagaac

SEQ ID NO: 116197 - DNA, 498 bp, Arabidopsis thaliana columbia
  unsure (1)..(498): unsure at all n locations
nnnnnnnnnnnnnnnnnnnnnnnnnnnnnnnnnnnnnnnnnnnnnnnnnnnnnnnnnnnnnnnnnnnnnnnnnnctttggtgttttttttttttttagtcacttgaaacaaactacttttcagtttttgaatcgctagtattatttacagagatgaaatggcgcanacctctatgcttacaaaatttacagagagtcgcgctcatttctccgtttctgtttggtactttctacagagcatttaattgcttaaacacaaattttttatatcttttctgcggtacctattctgacccaaaccaagtttttttggaacccattagggcccaaatggcttgggggtttcaaaaaacggggagggtcccttttgggcccttccaccgccccaccacaaaacaaaaattttctccccttaaaaaaacttttccggggccccccccccatttttgggggtttagaactttcattggtgttttcccgcccccccggggttggcctt

SEQ ID NO: 116198 - DNA, 517 bp, Arabidopsis thaliana columbia
  unsure (1)..(517): unsure at all n locations
nnnnnnnnnnnnnnnnnnnnnnnnnnnnnnnnnnnnnnnnnnnnnnnnnnnnnnnnnnnnnnnncttttgttttttttttatgtaaaggaaattaatctaaaataccagagaactaggatacttataacatcacctttctttccttcaaatttttaggaagaatggtcataacttaagataagaattgcgttcatagaatatgaatgcttaataattcatatgagaaaatgatgtatttcaaatgccatcgttttgctttgccttggattccttgtaaacgagagaatctgaataagcgatgttcacacgtcttttgcctttacggtgatgcctaaacttatttatatcaacaaacttctttccttctttgttgttattgccatcatgcttcctaatatcaacttcttggatagactcagagaccttaaccacctcacacattgtaggtctatacttaggatgttggcttagacacttgtatgctagggaagcagctacctgagccgcttctgtttt

SEQ ID NO: 116199 - DNA, 505 bp, Arabidopsis thaliana columbia
  unsure (1)..(505): unsure at all n locations
ctatagaagagctatgacgtcgcctgcacgcgtacgtaagcttggatcctctagagcagccgccctttttttttttttttttttttttttattttttttttttttttttttttttttttttttttttttnnnnnnnggggcacaaaaagggacacagctcttacattcatgtttcactaggcagtctcttgggtaccttttaccttttttcccatttccccaattgaccccgggtaccagattccgttttttaagccaagatcctaggcctccaaattccaatccttttgtgaccttggttaaaaccccctcggccccaggggcccccaatttccccggtggttacccggcccggtttcccccccccttaataaaaaccctggtaaaatttttgttttaaaaacccccccctggccttaaccattccaaaaacggccctttttccgggaaccccccccgttcctccttaacaaggctttgtaaaaacccccgccccctctccccc

SEQ ID NO: 116200 - DNA, 509 bp, Arabidopsis thaliana columbia
  unsure (1)..(509): unsure at all n locations
nnnnnnnnnnnnnnnnnnnnnnnnnnnnnnnnnnnnnnnnnnnnnnnnnnnnnnnnnnnnnnnnnnnnnnnnnncttttttttttttttttttttttttttttttttttttttttttttttttttttttttttttttttggacggacaaaggagggggatttgatcccaaaggaaaaattttccttttttcacatttataccatttccccatttttttactccaaagctaaagggatccccaggcctttaatcaaaaacgggaaggaagggcctaatcatcctcccattttaacaaaactaatgataagttcagtttccggcccaaaaatttgccccaaaaaagtttcggacccccataaatgcaataaaaaaccgccgtttttgttttggaacaaaaggatcatttttgcagggatcatgccagggaacacacttttttttgttttgggctgcggaaaaaaaggcaattggcgtttatatatgtggccgggaccccaatcttccatga

SEQ ID NO: 116201 - DNA, 528 bp, Arabidopsis thaliana columbia
  unsure (1)..(528): unsure at all n locations
atgatcctnnnnnnnnnnnnnnnnnnnnnnnnnnnnnnnnnnnnnnnnnnnnnnnnnnnnnnnnnnnnnnnnnnnnnnnnnnnccacgcgtccgcgaagaaccgtctctaaaactccgacgaacgaaaaatgaagtcattagcttcgccgccgtgtctccgcctgataccgacggcacaccgtcagctcaattcgcgtcaatcttcctccgcctgttatatacacggtggctcttctgtgaacaaatccaataatctctcattctcctcatccacatccggatttgcgtcaccactagctgtagagaaggaattacgctcttcattcgtacagacggctgctgttcgccatgttacggggtctcttatcagaggcgaaggtcttagattcgccatcgtggtagctcgtttcaatgaggttgtgactaagttgcttttggaaggagcgattgagactttcaagaagtattcagtcagagaagaagacattgaagttatttgggttcctggcagctttgaaattggtgtt

SEQ ID NO: 116202 - DNA, 525 bp, Arabidopsis thaliana columbia
  unsure (1)..(525): unsure at all n locations
nnnnnnnnnnnnnnnnnnnnnnnnnnnnnnnnnnnnnnnnnnnnnnnnnnnnnnnnnnnnnnnnnnnnnnnnnctttgggttttttttttttttttttttttttttttttttttttttttttttttttttttttttttttttttttttttttttttttggggggccaaacttaattttaaaagggcaaaagggccaaaatttagctcaaaacaacccgaaaaaaaaagttttaaaacaaaaggggctctttgaaaagcggcaaactaaagcgggggttggtttgaaacgggaaaacaaagcattgttttaactttcaagctgggggagcaaaaaggcttttccggggttcccaaagggggggcaacttaatccctttccccttgggaaggaacccccaggggtttggtcccttaccggtgggggccccatttcccaaccttggggaaaacccatggcctggggagtcttgaaagggggggggttaaaagccccccttggggtttcaagcggttttaaaaacacca

SEQ ID NO: 116203 - DNA, 512 bp, Arabidopsis thaliana columbia
atacgactcactttagggaaagctcggcacgcctgcaggtaccggtccggaattcccgggtcgacccacgcgtccgcccacgcgtccggaaaagttagagctcttctctcatctccaatttctctctctctctctccttcgctcttatcctctggcgattgtttccagagattctccgattctcgaggaggaggaggaggaggaggaggagggagagatggttaaggacattcttcgattcgattgatgtgaaacagctcctactcgactgccgtcgtctgagatcggagatctcatcgaggattgataatggcgcccggatcatcctaggggataatgagttgatctggcgatgattacaagggcaatattgatttcgaactctaggcaccgaagctctatgactgctctagacctgaccttcctaccgagactggagacatcgagctctggtagcagatccggaggaaactatcctacttcacctgacaacccaaagttcaatcggaaat

SEQ ID NO: 116204 - DNA, 514 bp, Arabidopsis thaliana columbia
taggtaccactatagtagagttatgacgtcgcccgcacgcgtacgtaagcttggatcctctagagcggtcgcccttttttttttttctttttttttttttttttttttttttttttttttttttttttttttttttttttttttttttttggaggatttgattttccccgtttttttcccaatttccctcctttttggtttttaaaacccctttccccccttttgaattttaacaaccaaaattttcaaatcaaagagagggtccttcctcccccctgttttttttttttttgaaaaatttgggagcaaaactccaaaattaaaaaagggaggttttaatccaccaagtttcacccatgggccccatgcgaataacaagggtgggggaaaaaagggctttcaggaaatggcctcttcccaaatttctccccaaatgttatggggggtttggccacaaaacaaaccaactttccatttttggtaaaaaaaaactcctcgttggcagtcctttaaa

SEQ ID NO: 116205 - DNA, 484 bp, Arabidopsis thaliana columbia
tccaggtgccactctgacacctctatgaaaagctgggccgcctgcgtgtgccgggccggtattcccgggtcgacctacgcgttcgcgccacgcgttcggacatgcatagtagggcacgtaaccatcttcttcacgcaagtgcaaaccatcaacaacagaatcttccagcttgatgattgactaactacttaggagaactactactccttgggaaatactggggcttttactttttggtgaagacagccatgtttcagagattattactcttccttctcatagctcttctggtccaatcttgtttgcttttagagatttcctctggtctcaaggtaggaaaaacatgtgtgacaaacagccaccggtggctctggattaccctggcggaacatagtatagccgacactgatttgtggaccctatatggcgccagagccccagcccactgaaccccatgacctaatggaaagggggttcagccttt

SEQ ID NO: 116206 - DNA, 524 bp, Arabidopsis thaliana columbia
  unsure (1)..(524): unsure at all n locations
ttaggagcannnnnnnnnnnnnnnnnnnnnnnnnnnnnnnnnnnnnnnnnnnnnnnnnnnnnnnnnnnnnnnnnctttgggtttttttttacatttttggatttatttattactatttattgtttttttttttaacatttcaacgcttttcatttttttaaattgggggaaactgaccacatctaaaagaaaaaatacacatcttgaacctatgcaaaacccgaaactttttttaggtgtgggggggaaaaaaaaccaattgtttaagggccccgtaaacgcgaaaccaattttgatcggggaatggggaccaggaccgaaaaaacccctcagggggtggtccttttccttgaaaaaattcaagagaaagctgattcccgggtttttgattctttttcggcccaaaactttagggaagagcttgggaaacctctgggaaactgaaggcagaaattcggtccttcttctaaaacggacccgtttccaaaaggaaaacatttcgagggggtggatttttcaaaaat

SEQ ID NO: 116207 - DNA, 527 bp, Arabidopsis thaliana columbia
  unsure (1)..(527): unsure at all n locations
ttaggtcnnnnnnnnnnnnnnnnnnnnnnnnnnnnnnnnnnnnnnnnnnnnnnnnnnnnnnnnnnnnnnnnnnnctttggttttttttttttttattttaagagagagacgaaaacttcacaaatatcacatatttcaatcacaaaatacattttatttcccatgattcgtcaatcatgtgatccattttacaagttggtcactctaatcaacaattaccatcatgagagataacatatgcttacattgtcccttcacagtaaaataacaacataaagatatcgcaaatacacacatgcatatatatggaaagattgcacacaaacacacactcacatatatagttgcacaaatttggcatatactaagtcgagcaagacaagtctggttctagaatttagttgtgaaacgggtgctttccattacgtggttggcgttatcgagttcaaaagcttcacgtctatgaaattctttgatctcatcaagcggcacatctttgaactctggaagaacttgacgctgagtga

SEQ ID NO: 116208 - DNA, 499 bp, Arabidopsis thaliana columbia
  unsure (1)..(499): unsure at all n locations
ggtacnnnnnnnnnnnnnnnnnnnnnnnnnnnnnnnnnnnnnnnnnnnnnnnnnnnnnnnnnnnnnnnnnnctttggggttttttttgtcccaaaaacttgaatatattgcaatgaaattatcaaattaacctagaggatttacacttagaaaaagcaacggagaaagtaatggctgctatcaagaacctataactatagctaaccgtctatgaattctctaactctgaagctacgcaacaacctgccgtgttcttgtaagccaatacaagtgatctatgctaccacttctcatctcatctctgacttatcgctttcttttctggcttcttttctttgtaaaggcacgcatagatgcaagaatgcctatgggttgtcggcctttcttacaaccccatttaactggcaaatcatggactatattggtggtatcatttggtccggttaatcgcaccaacgggtttatctgatcaaacatctggaggggaaatgccatcagc

SEQ ID NO: 116209 - DNA, 515 bp, Arabidopsis thaliana columbia
ctatagaagactatgacgtcgcacgcacgcgtacgtaagcttggatcctctagagcggtcgccctttttttttttttttcagctcaataatatcaataggttccaaaagaacaaacatcttcttggtgttgaaaatcacaatgaaggatataactatatctctacacttctaaagcagttcatcacttgatttactaccaaaaaattacctcctcacctataaaattcgtaaaccaaataatttccgtgacctattaccccaaatttccacagagatctgccataataacatcattaaagctgaagcagaaccctccaaccgaaccaccaacttcaaaatcaagaaagaatagaggtgtcatcacctgacatgagagtgagggagagacagatgcttctttgagaaaaatgcatcaacgtcatgatgctttgtcattatgagaatttaggcatgaataatccatatcagtcgacatctcagctgttagtgtctctgtttcacttgtcactcttcg

SEQ ID NO: 116210 - DNA, 509 bp, Arabidopsis thaliana columbia
tggggtcaactgcacgcgtacgtaagctgggatcctttaaagctttcgcccttgggggaatccttttaataaaaaatagatctcatattatagggtttgaggaatttacaacaagttgatagatattggaggatactggtgaggtgcaagagactagagagagagagagagaagggatgtaaacttttttagttacatagagggtatttttttttggagggggcggggtacattgcgtgtggatgctttttatactctttcgaatgttatgtctgggttggggcttacaacgagctgttcgtttattctgttgagttgttgaggcgagctagtctcataattaagctgtttgttgatgttattgagttatggcaataaaagatatgtgtgtgtggggaggaagttcacggtctgattatattagctattgctttgtgatgtgagtcgttgcgtttagagttgttccgctaagggttcggtggttaatatttttcgagtatgtatttggg

SEQ ID NO: 116211 - DNA, 522 bp, Arabidopsis thaliana columbia
  unsure (1)..(522): unsure at all n locations
tgtccgccagctctactactgactcacttnatgggaaagctccgccgcctgcagtgtaccggtccgcacttcccgggtcgacccacgcgtccgctgatttataccaaatccaacttttcttctttcaaaaagtaaaacaatcactcatttatcatttattatggcgaagactatatgctgtttttttttttttggtaactgatcaaagccttttttattaaacggataactcaattttgtgagacaggagtcccatcagtatctgcctaaagcccttcaccatcacaaatccggttccctccgatatttccccggacctcgttgttccccaagccccctcttactgtcttttttcgggtgagagcccatactctccctccccgctccccacccggtgccccaccggcgcgtctcctcctcccttactcgccgtccccccccccccccacgccccgactctcggcaactgggttcccctcccatgtttctccgtcgggccccccccccccttgccccccgcaa

SEQ ID NO: 116212 - DNA, 531 bp, Arabidopsis thaliana columbia
  unsure (1)..(531): unsure at all n locations
taggtgccactatagnnagactatgacgtcgcacgcacgcgtacgtaagcttggatcctctagagcggccgccctttagttttttttttttttttttttttttttttttttttttttttttttttttttttaaaaaagaagaggcgcttttttttaaaaaacaaaaagggggagaaaaggggggccgtcacaaaagaaaaaaaacaacgtcctaaaaattgggggaatcttttttaaagaagaagaaaaaccaccccccctgaacacccccgtcctttgaagaatcctcccccctcctaatttgtggaaggagacaacgtcgccacatttgacatattttttgttgggcggaacaacaaggagttcctttatcatcgtgggaaaaaaaaaaaagagggcttcaacaggggccaaaaaattcagcttcttgttaccaccacaaccagggggaaccttttgttgttcccccaaaaaaaactcctttcataagggagggcacacagagttccaaatgcttcttaagagactcct

SEQ ID NO: 116213 - DNA, 529 bp, Arabidopsis thaliana columbia
  unsure (1)..(529): unsure at all n locations
taggtacannnnnnnnnnnnnnnnnnnnnnnnnnnnnnnnnnnnnnnnnnnnnnnnnnnnnnnnnnnnnnnnnctttgtgtttttttttttttttttttttttttttaggaatttaactatatgcccttttatttcatataaattccaattagaacccatacccttaaaatacgacatacaagggagtttttttgtaattttacatatatccatacatggatagatttctttactctcaagcaaccttgagaacttgcttaccaacgttttttccatgaagaagtcctacaagagcagcaggaccattctcgagtccttcaacaatgtcttccacgtacgctaatttctcttcttttatgtagggaagaacaaactccaagaactttgggaatctatctataaagtcataagaagcaaacccttgcatccttatcttcttgaatatgatgtcaggtagattttgtaacctgtctctggtttcaagatggtactgagatattatcccacatacagcgattggtccatacg

SEQ ID NO: 116214 - DNA, 508 bp, Arabidopsis thaliana columbia
ctatagaagactatgacgtcgcacgcacgcgtacgtaagcttggatcctctagagcggtcgccctttggtttttttttttttttttttttttttttttttttttttttttggcttcaaactgattatacaatcaaaatcgaatatcctacaatgatgcaattaaaatcaacaggttcttaaatttttattactaaaaaccaaatttctctacacttgagaataataatattaggaatcaccctgaaccccaaaattgtctttcgaaagggaaaaatatctatgtacactgatcatgggattaaatcctgcaagtagttgcagacgtaaaagcatgactacgaagttccatgtgtaataaacctaattgcttcggaagttttcgtaactgaagcctgatgatatgggcctcaatctttcgggggctccttgatgttctaccctttcgctagagtccaggaaattttcagcatcagccaataggaacggtgatccctcgtagctctccag

SEQ ID NO: 116215 - DNA, 508 bp, Arabidopsis thaliana columbia
actatagaagagtctatgacgtcgcctgcacgcgtacgtaagcttggatcctctagagcggccgcccttttttttttttttttttttttttttttttttttttcaaaaaatgtatttgataaattaaaagattctacacttcacagaaatataaatagtagtgggaaccattatcttttctacgagctcaaatcaaaacgaaaaaaaaaaaaggtaacttttctctactaaggtttttgagtaaaatgcatatttagtaaaaattcaacaccccttgggtaaatgctttttttttgcagcaccctgaaccagggagtactaaactgagctgcggaatgaaaaaaatcagactttgccttcgagtttatcattattaacaaggggaagtaattccatcttgcttcttggggtacgaggagtcctaggagttcccggtgtttgctgtgaaagcatatgcctcacatatccataaaacgtgcagcccacaagcgtaattccgcatccaaca

SEQ ID NO: 116216 - DNA, 517 bp, Arabidopsis thaliana columbia
  unsure (1)..(517): unsure at all n locations
nnnnnnnnnnnnnnnnnnnnnnnnnnnnnnnnnnnnnnnnnnnnnnnnnnnnnnnnnnnnnnnnnnnnnnnnnnctttgtttttttttttacataaaagatatctagtattacattgaaaaccatagaacaaagtaagaggaagaaacaaatataaaaagtgtgagatgatcaagtatataagagagtgaaaaatgttttcacttaacactggacgcttccagaaaactttgaaagccttccttaacgatatattcctcaaaagagtatgttctaaaatgcggttagcataaccgggtcgccctagtcttcttaggtctcatacgattatggacccacgagatatatataacaggatttcggatgtacaaaagaaaaaaatcaaagatataactataataataaattataatccctttttgagataaaatgatttaaagaaaaaaacagaggaatcaattttggtgtttaacttttaccggattgtgtgtttgggttttgtttttataacttctact

SEQ ID NO: 116217 - DNA, 498 bp, Arabidopsis thaliana columbia
ggggaaaccggagggtgggagagggaataataaaatttggagtgaggaaaagccgaataaatgttatatgattgtagagagggtgagttaataagagaaggggcgggtgagttgaaagaaataaaggataacgatatgaagcaggtggaaggagaggaagtggagattaataaaagaagtaagcgattttttttatggaggggaagaagtttagagaggagaagagagagttcagagtgggcggagagagggaaagagttagtaagtaaatatgttttggacttggatggacgattaaaaaagtggccgtgtctctaatataagatgaattaagtcaatcagcaaaatgtaagtatataggattgaggtgagaaagggttgggtagacgtggggccattgagtggttggttagtccctgtggggttgtggagggggagtgtttgggttgatttttatagggatgagaggtaggtgatagatgggttaaatatatttta

SEQ ID NO: 116218 - DNA, 528 bp, Arabidopsis thaliana columbia
ttaggtacaactatagaagagctatgacgtcgcacgcacgcgtacgtaagcttggatcctctagagcggtcgccctttttttttttttttttttccgaggagacataattattaccatgctctggcaattctaaggacaccatccccagtttttcttatacattaaactgtaaaaagctgatagactaaaaacaaatgtgaactcgagttacagaaattaggagatgcaacttagttcttaatttaactgcaaatttgattccatgtccttaataattctcaaaacacactggaattttaacaacagccataatctggttccacttctgctttctcttcacttgtaaaactcaaagtccgtgtctggcttcttaacatttgcgcggtagcccttctcgaaatccttaggtagtatcacatatctgttctttcgcaccgcatgcataccagcttcctggcaaattgctgctatctcagcagcgctaattttatcaggccgtgaaacatagtcttccaagtcaacctcat

SEQ ID NO: 116219 - DNA, 180 bp, Arabidopsis thaliana columbia
aaataacagttaagaccaccaaacacccaagggcggggaccagcagacagggatctcacgccggacttttggagaggatcgagcgggggagggaaaggggagggaaggagcgagatatctgaggagaaacagaaaagcagctacggttacatacgcagctagggccgcaaggagaggagg

SEQ ID NO: 116220 - DNA, 547 bp, Arabidopsis thaliana columbia
gcacgcgtacgtaagcttggatcctctagagcctccgcccgggggggaaaacccccaaaggagagaaacacggcgccgggagggggaggagagaaacacggcgagcaggaaaaggcaggcgagcgaacagagcacgaggcggaagaggggacacgagggagagaagggacgagagggcgccgcgagaagacgaggggagggccttttttttggggggagggcgggaggttagtagcggggtgacagacatcgaatattgtttgtatggtgtgaggaagtggaggagtgtgaggatgaagagatacagtagctctatataatgcatgttggtgtgatgagatagccgagtggatgaggagggtaacagcgtggggtgtgactttgcgcgtagcttatgagacggacgagtcggtggcagaggggtgctttgataattgagtttgtgggagggggagatgagggcgaggcggcgaggggttaaactgagcaatggtttgtggggttatgtgtgtggaggtgtgtgagaattgtgtcagatgtgattatg

SEQ ID NO: 116221 - DNA, 541 bp, Arabidopsis thaliana columbia
acgcctgcaggtgctgggccggaattcacggtttcgcccagggggaagggccgctttaagattgaaggtggaaagctggggatgttaatagttccatctggatagagagtgaatatggtggtgatgtaggtacatataatgtgtgatgggaggaggaggagagaagtggtttgatcttcggagggtgttttaaaaaaactgtttttttttgaggagggggagtaagatatgagaggggaggatgatgagagatatagtagtataatttttggagaggagtggtgttgaatgttgtagaatagaaagtaacgaggtgatgtggtggggtgatgatagagggagcatgtatgaatgagagaggttgagaggggaatatgggtggggatagaggaaaatgagttaaggaagaagagacgtgggtgggtttgtaggatgtatgagagaggcatgtgtaatactgtagattgggggtgggaaatagtgaagaagtatggcatgtagagtagaggtagaaggttgtggtggtggaagggagggggcg

SEQ ID NO: 116222 - DNA, 510 bp, Arabidopsis thaliana columbia
taggaacaactatagaagagttatgacgtcgcctgcacgcgtacgtaagcttggatcctctagagcggtcgccctttttttttttttttactaaattgatgatatattctactaaatttccgaacaaagaaaccgatacactgtttgacggtcaaacacagagtcaacgttacaaaatattaccgtgacctctctgtgtaacaacaacaatcagaactcactcaaaacacaagtcaaaaggataaaatctccaagttcaagacaagactcttagagagttgtttctgggtggtagtgataatgagatcatggcttattactgtttttttactaagtaagataaacccccaaaaggatcagatatctccgtaaagaaccttgcgtggatcaagctgtccgctgcagtaacttgatgagacgatggatagttcttgtctgcctttccactcttcacgaggctttaacaataccagaggttcgattactccagaatctacacaaagcattgtt

SEQ ID NO: 116223 - DNA, 500 bp, Arabidopsis thaliana columbia
actatagaagagtctatgacgtcgcctgcacgcgtacgtaagcttggatcctctagagcggccgccctttttttttttttttttttgactttaaaactttcttactacgaaccagtagaatcgtggattcaaagaggttagaatctttggccagcaaaataggttcgacagacgactaatagtttctttactgcccaaataagagcatagttgctccgtgttttacttcctatttcggttacttcatcctgtgccggatctcgtataagtaaccaaatgccacaaccgcagcagcgactgcatccccgaacgcgctctgggccagaatcgagcggtctgcaactgctttgcctagctggggagtttgggtggacaccaagctcacatagtgtcttgtgcgataccgcgtagtctatgaagaaagcatgctcatcctttgcataaagctcaacaagacgacggatctccggggcttacactaagggcttgtcagttggaag

SEQ ID NO: 116224 - DNA, 510 bp, Arabidopsis thaliana columbia
cagctctattctgactcacattatggaaagctcgtacgcctgcaggtaccggtccggaattcccgggtcgacccacgcgttcgaacatacatacgcaaacctgtctatactagcatatagttgtagcaggtgatgctactaggtcatcctcacatatagttaatatccgccagaaaggattcaaatgtctgcccccatgaacgaatacttactagcgccgaacatacgtttccatcatcttaaacatgtcttctaccgcatgggactctttgataaggatcttgtggcactctcacgaggtcatactgtgataagggatcactcgtacaggtcatgctttgatgaaccattgcctgctgatccgatgaaatttgacaactcccacttcgtggaactgctgaaaggacaatcagacgtcttgttgaaactgtacactgacaagacctgattgaaagacccagacttgcctagtcttgtggatctttatgcagaggataaagatacattctt

SEQ ID NO: 116225 - DNA, 509 bp, Arabidopsis thaliana columbia
actatagaagattcttgacgtcgcctgcacgcgtacgtaagcttggatcctctagagcggccgcccttttttttttttttttttaaattcaatttttatttcatatatcaaagaatttatacatatacttgggaaaaaattagatcccatatatccaaattgtcatttggcgtcgttcaaaaaattagttactattacacatgaatcaattaaattcaaacccccatgagcctcaacaatactgaagatcaatcctatgaaatctttggaaacatatacataatatcacttatggggctgcataagtccataaaatatggccttagatctcacggattgtgaactggtcggcattggtgtatttgggtgcagctcccatctatcttctttaagcgaattaggggctttacttggttgacgattgcttcttgcgggtagattttgcatcatttatagtttctttggctcttagcttgattctcgattccggtaaccgtgtatgtcactaa

SEQ ID NO: 116226 - DNA, 531 bp, Arabidopsis thaliana columbia
  unsure (1)..(531): unsure at all n locations
nnnnnnnnnnnnnnnnnnnnnnnnnnnnnnnnnnnnnnnnnnnnnnnnnnnnnnnnnnnnnnnnnnnnnnnnnnctttggttttttttttttttttttttttttttttttttttttttttttttttttttttttttaaggaaaaaacacttttaaaacttttattttatggggttggtccgaggaaacaaacctaaactaaaagggggaaatttaatctcacgggacataatttttgaccgggagaaacccggcgaaacgaaacatttttccgattttggtggttcataagcgatcatacaattcacaggggtttgcttttgcaaaattaaacaaagaacagggggttcccccctaaggggcaaagcttaaactggggctgctgctacggggggggtcttgggagcgtaacttggtgattaaaagaactatgtcttggttccccgaccatgatggatcggttaaaccacgttctgggtttaaacccaccaaaaaagacccgccttcttgtaaaaagcccggcaaccacaag

SEQ ID NO: 116227 - DNA, 529 bp, Arabidopsis thaliana columbia
  unsure (1)..(529): unsure at all n locations
nnnnnnnnnnnnnnnnnnnnnnnnnnnnnnnnnnnnnnnnnnnnnnnnnnnnnnnnnnnnnnnnnnnnnnnnnnctttgggttttttttttttttttttttttttttttttttttttttttttttttttttttttttttttttttttttttgttttttgaaaaaataaaaaaaaacaaattttaagggaaaccaatttttttttttttacccaaaggcaaaaaaaaaaaacccttttttggggggggaaaaaaatccccccctttataaaaaaacaaaaaaagttattgggaaaaaacaacccaaagggggattctttttacaacaacttgcacaaaaaaaggtgagatccccccttaaaaaacctaggaaatggggtttggggccccttcctaaaacaaaaaggttgaacaccccccccaaaaaaaaaaaaattgggtgtctcccaaaggtggcggaaaaggggggggctttttgggattccccggaacaggaatcttttgaacaaaccaaccctcgggcgtcttcgt

SEQ ID NO: 116228 - DNA, 523 bp, Arabidopsis thaliana columbia
actatagaagagctatgacgtcgcacgcacgcgtacgtaagcttggatcctctagagcggtcgccctttgtgtttttttttttttttttttttttttttttttttttttttttttttttggaacaaaaaaacagcctttaccttccccaaagtttgaacccaataaatgaaagaagaagaagaagccgaaattaaaagtttttttagggggggaccaaatgcttaaaaagaagaagaagagttattttcaaatctgggggaatctactcaggatctggttatataccgatgggcctgaatctgaaaccggttcaaccttgggttccatccctttctggataattgcttaactcatcccaaccggttgggtcatatacgggggaggcaaacccggcattttccctggaccatacgctaaaccaggcttggaaagattaaccaaaccggtttggcctaagcgggggggaaaaccagaggggggaccccttggtggttgaaagctaagggggcgggttaaaggaga

SEQ ID NO: 116229 - DNA, 527 bp, Arabidopsis thaliana columbia
taggtgcaactatagaaagactatgacgtcgcatgcacgcgtacgtaagcttggatcctctagagcggccgccctttttttttttttttttttttttttttttttttttttttttttttttttttttttttttttttttttttttttaaaacccaaaaccaattttttttacttataaagggggattcccttttttgaaggggccacataaattacctccaaacaagttggggttttaaaacaacttttgcataaaaagtttacttgaaagcttggcaatttacttttaaagaaaaggtaattcccccacttgaaagccccctgaaaaatctcccataagtttcactcgcatttggtgagaaaaaggcatcatcccctgggtctctctccttaaaaaaaatttccattttttaaaaagccttttttatattaaaccttttttccacatttactttaaaaaaactcaatccaatttttaaaaaaatgagtatttgggcctaaaaatggcttgttttccccattttttg

SEQ ID NO: 116230 - DNA, 634 bp, Arabidopsis thaliana columbia
cacggcgtacggggaggtaggggatcctaataagagctattcacgcgtagggggagaaatacctaatgtgaatgatgaggagacatatgatgaaaagagagaagactagggagtgagagaagtacgtgtattaatattggagaagaagatatggatggtgcaagaagggagacgatacaggcagatagagagatcttggggagagcgacaaagagagctaagtgggatgaggaaatgagtgagaggagtcttttataaaaagagagagagggaggagaggggggaaaggaggtgggctgagagagaggaaaagagaagcagaggatggaaaaagataaaaggaaaagaggaacggaggagggtgtggaggggggagagaaaggggtgtgagaagggtgaaaggcgcaaggaagcaagaatagtagaggaagagaatatagaggagggagagtgaggcagatacgagcggggaagaggaggaggagagaaagaaagaatgaggtgagatgatgaaaagttgatgtgaggagaataaggtcgggatgacgaggacatgggtagggaagaggggatactaggggagggagacagtgaaagatggtgagtgatgatgagaatgtgggacggagaatga

SEQ ID NO: 116231 - DNA, 506 bp, Arabidopsis thaliana columbia
  unsure (1)..(506): unsure at all n locations
taggacnnnnnnnnnnnnnnnnnnnnnnnnnnnnnnnnnnnnnnnnnnnnnnnnnnnnnnnnnnnnnnnnnnnctttttttttttttttagttcaattatgattttaaattacccgctaatcaagttgattatgcctttaataagacaaattcaatatcattaacacacaaaagaagaaagaaaaacatttcaattttgcattaaaaagcagaagagaaaactcaaatgttaaataaaaacaatgcatgaagattatgaatgaaacgagtatttggagattcattagctgtatcaaaaactcaagcaatgtttaatctgactcatgttaaaaatctgatcatcatgctttattactactacccaataaagtcactagctcaactttcttcatctttgaaattcctttgagtcctcttgattttgctatggctctaagttctaccaacttcagtgcactcaaatcttcgtctttcgcagtctcttcctcggtagtcggtattgagag

SEQ ID NO: 116232 - DNA, 506 bp, Arabidopsis thaliana columbia
  unsure (1)..(506): unsure at all n locations
ctatagnagagttatgacgtcgcctgcacgcgtacgtaagcttggatcctctagagcggccgccctttggttttttttttttttttttttttttttttttttttttttttttttttaaaacgttcccaaaacagggttttttttagtagacatgaccaataaaaaagtctttaactatgaattatcaggggggttccccataatttggattaggatgaataaaaagtatccgtttttttagttcaaggaaataaaccaggggtcagggacttagcgatttttggggaaatacaaaaagccgaaaacatgactgggatcatagggttaacaccaacagcgctggggaccgcatttgctttgcacacaaacaacttttttggttccaaactttttcctttaaaatttatggccccttttttttttttttctccaattctaaaggttcccatttgaggagctgagctataaacgtcccatttcgcagaccttcccttggccccttccta

SEQ ID NO: 116233 - DNA, 499 bp, Arabidopsis thaliana columbia
actatagagattatgaggtcgaacgcacgcgtacgtaagcttggatcctactagagcggttcgccctttgggggttttccttttttttaacaaaattttatccattttttacactactggaaaggagtcccaggatcacatactgctaagttctatcatagctcgacatgaaaacaagatacgtttgggggaggatctgcagaacacgaggattataaaattctttcgtgaggagatccttactaggtgccattttggatggcagcgcaccgggcttactgagcagtctttcttggggcccgtgtagctaatgtgctggggtgtttaggcgaggtggtgattttgtggtaaaggcttgaggcgtggactaactggcggattgtccttgtgaaagtctgtccctgggtttggttctaaggcccggtgggcaagccgcgtccaagggggggttgtcgggtgggggtgcaagggggctcttcggtagcatgggcaccttttt

SEQ ID NO: 116234 - DNA, 530 bp, Arabidopsis thaliana columbia
  unsure (1)..(530): unsure at all n locations
nnnnnnnnnnnnnnnnnnnnnnnnnnnnnnnnnnnnnnnnnnnnnnnnnnnnnnnnnnnnnnnnnnnnnnnnnctttgggttttttttttttttttttttttttggtttttttttgagaaacacgagtggtctgctatgcaacacttttcatccacaacaagattagctgaaaaaagtttgcttgcttctgttgagagtaattgtctcagtttatgtaggaatcaattcaaaagacggcttgtttttgtgtgtaagaacatgtcatgtgtctaagatttgaagattcatcattttcatttagtttttgacagatgccagtcttcaagtcagaacagtaccctgggactcgttaccggcaaaatttggacttcaaactttcttccaacgaaccgaagaccctggagaacaatcctgagaggggactatctttctgctgcaatgatccttttataagcaacgttcctggcatctgttggaacaccaagatgcggaaagataggttatattcagggacttgcaaactggagcc

SEQ ID NO: 116235 - DNA, 535 bp, Arabidopsis thaliana columbia
  unsure (1)..(535): unsure at all n locations
nnnnnnnnnnnnnnnnnnnnnnnnnnnnnnnnnnnnnnnnnnnnnnnnnnnnnnnnnnnnnnnnnnnnnnnnnctttttttttttttttttttttttttttttttttttttttttttttttttttttttttttttttttttttttttttttttttttttttttgggggaaaaaaaaaaagccccggtttaaaaaaaaaaaaaaccccccttggggttttggcccgtttttttgggggggaaaaaaaaaaaaaggaacccttggctttttaaaaaaggggggggtttttggggggttacccgcgggaaaaaaagactttttttggtcctgaaaaaccccaggggggtttacccgggggcaaaaatttggggaagggccctgggaaaaaaaacggtttaagttttaacgggaaggtttttgggaagggccttgggggtggcctttccaaaggggggcccctaataaccctttaaggggggctttggcccccccggacaaaaaacccgggtgggcccttgctttgggggaaattgttc

SEQ ID NO: 116236 - DNA, 523 bp, Arabidopsis thaliana columbia
  unsure (1)..(523): unsure at all n locations
nnnnnnnnnnnnnnnnnnnnnnnnnnnnnnnnnnnnnnnnnnnnnnnnnnnnnnnnnnnnnnnnnctttttttttttttttttttttttttttttttttttttttttttttttttttttttttttttttttttttttttttttttttggggttttttttgaaaaaaaaattattctttttttggtagggaaaagggaacaatttgcattttccctcaaaatttaaaaaaaaccgggccttttaaaccggccccaaaacaaggggggaaaaaaaatacccctattggttattttcaacccttaaaaattaatccccccctttttttttttaaacttttataggtaaaccctaggaaaatttccctttttggttttaacaaaggaatcatttttaagcaaatttttttttcaaaaaaaaaaaaaatctttcccgggtttgggaaaaacccttaaattggaggggccttttaaggggggaaaaccccgggggggcgaagtggggtccaaggggaagggcaattttt

SEQ ID NO: 116237 - DNA, 519 bp, Arabidopsis thaliana columbia
ttaggtacaactatagaagactatgacgtcgcatgcacgcgtacgtaagcttggatcctctagagcggtcgccctttttttttttttttttttttttttttttttttttttttttttttttttttttagaaaaaaaaaaaaaatcttctgatactcttcctcaaaagggcaccaaacatttagcatttaacatatttgggagagcagccaagtaaacatttcccaatggccaacaaaatacaagtctaaaattttaagtagattcgaacacaaggggacatgaatttgaatcccaaagcacaatagccaactcgttgagcatttcacgcctttttttaaaattttcgagcttttcccttccgatgcgttttggggaaaaagttgcttttttcaaccgttttgcgttttctaggatgtatggggcaacttttttctcatcacctcggtggcattcatatcctatccacaagaatgtctcaagatggaacaacaaacattccggggcacattttgggggat

SEQ ID NO: 116238 - DNA, 515 bp, Arabidopsis thaliana columbia
ttaggaacactatagaagagttatgacgtcgcctgcacgcgtacgtaagcttggatcctctagagcggtcgcccttttttttttttttttgggtggacacaaatacacttctgcaaacaaacaaacaaaactgagaaacaaaataaagttggaaaatgtgcggtgtcaaaaaaaacgaactttttttttcaacacccaaagatcttaagcagaccgtcgaacgaaacgccgtcgtttaaatcaccaccggctaatcgaatcatagatttgatttcatcgtcggttacagctaaaccagccgaatccatataactcttcagatctccgtaactcagtctcccatctccgtctttatccatcaccttaaacacatctttcatcaatccatcgtctcctccgttaccagatctagaaaacggcgtcgtttctagaactttctcgaattcatcgaactcaacgaatccgtctttgttcgcgtccgctactgatatcatcgttccgatcatcgtctcgtc

SEQ ID NO: 116239 - DNA, 519 bp, Arabidopsis thaliana columbia
  unsure (1)..(519): unsure at all n locations
nnnnnnnnnnnnnnnnnnnnnnnnnnnnnnnnnnnnnnnnnnnnnnnnnnnnnnnnnnnnnnnnnnnnnnnnnnctttttttttttttttagtacctaatgcaaagataaattaccaaataactaactgacaattgaagtctcttcctttaccaatgtaaagttgagatcacaaagaagtaataacatgtttttgtttaaagttaagcaatggtgagattaagaagctgtgtaaactccaatctacgagtctcatggtaaaaagtcttgtacttatttggccagtaagtcaaccaaataaaccctttaatctcccactccattgttccccccaatgctccttttccaatcttccacaccacactctctccatactcgtcccctgcaaatatcacacctcctctcctcgtaaatgaccgatacgctcttgcatacctatccttaaaccaagaccttgggctcattattgaaaaccgtgacggctttgtcgaaaaaacctctcttcctccaacgctgctat

SEQ ID NO: 116240 - DNA, 519 bp, Arabidopsis thaliana columbia
ctatagtagcatgatgacgtcgcctgcacgcgtacgtaagcttggatcctctagagcggtcgcccttttgttttttttttttttttttttttttttttttttttttttttttttttttttaaaccccagctgaaaggtttttagtttttcccaaaaaaacaaacaaaaaacaacagggcctatcaggggtactacagtcttttaaatatatacacaatcttaatggttcccaagtttgcttgaacaaaccataagcaaaaatatgtttttaagaccagagaccaaaaacttggggaagatttgcattttaatggttcctggctgacttattcttgttttcaataaaaatgaactctctttttttttttttggctgtggctctctcccttttctttggaatccctctccatcgggaaaacccctctggcctaatgatctgtttcacaaagaattgcaaaaatcccttccacacacattggatttctttaggctttttgggggagggagacaaaccggttt

SEQ ID NO: 116241 - DNA, 527 bp, Arabidopsis thaliana columbia
  unsure (1)..(527): unsure at all n locations
atactgactcacgttagggaaagctagctacgcctgcaggtaccggtccggaattcccgggttgacccacgcgtgcgcccacgcgttcggaaagcggctgcggctgcggctgctgcttctggatctaacaacgcctgattgaagaaatcacactccgatatcaaattcaatggagatcacagttttgaaattcatttgatggtaataaagattctatagaagacagaaaacattatgtaaacagttgttttttttttgtcaaacatttttgttgtcagttaaaaaaaataattataagactagagggcaaacgtttgnnnnnnnnnnnnnnnnnnnnnnnnnnnnnnnnnnnnnnnnnnnnnnnnnnnnnnnnnnnnnnnnnnnnnnnnnnnnnnnnnnnnnnnnnnnnnnnnnnnnnnnnnnnnnnnnnnnnnnnnnnnnnnnnnnnnnnnnnnnnnnnnnnnnnnnnnnnnnnnnnnnnnnnnnnnnnnnnnnnnnnnnnnnnnnnnnnnnnnnnnnttgccttt

SEQ ID NO: 116242 - DNA, 602 bp, Arabidopsis thaliana columbia
  unsure (1)..(602): unsure at all n locations
nnnnnnnnnnnnnnnnnnnnnnnnnnnnnnnnnnnnnnnnnnnnnnnnnnnnnnnnnnnnnnnnnnnnnnnncttttgtttttttttttttttttttaagcaaaaattacatactagtagtatagtgtggttggtattctattagtggggacaactactttaacaaggattcttcccattttgcagtgattgagccacctgctaatagcacaggtgagtacccggtgctcttgcaatagacagagttcttccatcgcgcagctcttcagccgcgagctgcttggccagatcaatcgtgcagtcacaactatctnnacgggtggtgcgaaaagcaattgtgtctttttctttatattgagaacttgttagctaggtgtcttagaaatagagaaacttctaggtgtggtgtttcttgtaggatccctaagagtgggtgtttaaaagaaactcctcagacgtggtggtgtgcgaaaaccgaatatgcacggaatggctgannaacgagtaaagtctcctcgttccagattaaatgttgtgtttagagcattcttagatcacttggcttcactcttgtaaagaacccaacaaccgtgtcgggagcc

SEQ ID NO: 116243 - DNA, 190 bp, Arabidopsis thaliana columbia
agcaacgcacgcctgcaggtgccgaggccggtatagaccgttctgcccaggggtgcgacccataccaaagctgtagcttgaatatttagaagataccaacgacttgaaccagcggatatcttagagcgctagaagcaacgacggagcttgcactagtgagtagagtgacggctgaaaataggcggtgctc

SEQ ID NO: 116244 - DNA, 516 bp, Arabidopsis thaliana columbia
aatacgactcaccttagggaaagctcgtacgcctgcaggtaccggtccggaattcccggtgtcgacccacgcgtgcgcacatccctaattctcgagctcgaagaaagagacgaaaatggcactgagaaatgcaattcttcgtcacctgagggttccggtgcaaaccctaagattgaatcagtctaaaattgggttccttggtacgatccggtcattttcttctcacgatgatcatcttaacagagaagctgtcgtctatagagtactcgatgttgtcaagagcttccccaaagtcgatccctctaaggtgactcctgaggttcatttccaaaacgatttgggattagatagtttggacacagtggagatagtgatggctattgaagaggaattcaagctggaaattccagacaaagaagctgacaagatcgattcttgctctctcgccattgaatacgtgtacaatcatccaatgtctagctaatcgctgtgtgctctctcatggtttctccttcc

SEQ ID NO: 116245 - DNA, 509 bp, Arabidopsis thaliana columbia
ctatagaagacttatgacgtcgactgcacgcgtacgtaagcttggatcctctagagcggtcgccctttttttttttccttttttttattaatcacttcttttttttatatttttcttgttttttttggttttctttccgagacaaaaagggacaagcgttccaaaatacagtggtacttgggtaaattttgggaactttcaacattcttcccgcttccttttttgactccgcgaccaaaattcatttcttttatggcatgctttaggtattttggaccacaaaacttcttgatccacgcttaaacacccatgcgtattacaggcagagtgtcctcccatttatacggcacagatttctcccactttaatttaaactaagtcaaatttgttgttcaaactcccattcttgggtaacatttccaaaaagggccctttgagggtcacattcaagaccatcttacaaggctttgaaaaatccaatcaaactcatccccttgggcctttaattt

SEQ ID NO: 116246 - DNA, 528 bp, Arabidopsis thaliana columbia
ggagaagaacgcacgcctgcaggtaccgggccggaatacacggtccgacccacgcgtacgagcgttacgacgagaaaagctagttcaaggagcaggtcatgacactgaatgttcctctgtgctgatttcggctaggactactcggctccatcttgtagaagatctccttggcggggtccgatagcgtaatatctgggagagaagaccgtgcgtttttttgttgctggggggggtccagagttatggctacgggggcggtgtgactactgatagaaggccacgaagtgcagtgggagggcgatactaaatgaagataggtctggatggaggataccagtagcttaggggcgtgagtgcgagcacgaatcaggggggagaaaggatagacgggtgagatatacaatgggtgaggctctaggcggtcgtggtaagcatctagaaaaagggcatgtgtgcgggagcagtatcctggaggtagttcgatgtggctttacattacaaggcaaaaggaagtggcgaagactgaaa

SEQ ID NO: 116247 - DNA, 528 bp, Arabidopsis thaliana columbia
  unsure (1)..(528): unsure at all n locations
atgatctnnnnnnnnnnnnnnnnnnnnnnnnnnnnnnnnnnnnnnnnnnnnnnnnnnnnnnnnnnnnnnnnnnnnnnnnnnnccacgcgtccgggaggatatgtcactcggtcgactacgatctattcttcatccggcgacgtaagtggtagctcgcataggagaatcgtctctcacagacgcatatgcgtctggtctctacagctgattcttagtctgcaaacaggcgaagatttgagcacgactacagtgtcgcaaatcttccacatgctctgcttgttgtgacagtgacggacactagctcaagtgactggcagagaccatgcttacgatgttacaggtgcagatggctgagagtgcattatagaagatagacttgattaggaatgcttattctcttccttcgtgtaccgagctaccgataggatatttgcctcattcatagaattattctgaatctatgagacacgtgcttgtgcctgctaacctcaagggtaggagcgatgctgctacagatgatatgagcag

SEQ ID NO: 116248 - DNA, 961 bp, Arabidopsis thaliana columbia
  unsure (1)..(961): unsure at all n locations
gattgaggcgnnnnnnnnnnnnnnnnnnnnnnnnnnnnnnnnnnnnnnnnnnnnnnnnnnnnnnnnnnnnnnnnnnctttttttttttttttttttccggaaaaaaaaagagtaacaattgtaacaagtaaaaaagataactaaaacacaagagaaaagagacaaaatcacacactggaaaattacatggatccttcttcttaaactatattactaactttcaagcttaagtgacaactgttaatgagaaagcccttntttatacanccccaccaagtagtcttttgcaaaggaaaaccatcaaatgcctgaatctctttgtacacaaacggtgtcctatgttagttagtgattaaggcaaaacctaatacccaactactcgctcccgatgttatgcgaactgaaaccttcagatatggtatccaatctcttgttggctccttggtattctcctctgtcacgggagtccaggaggtttcagcattcggcacagggaagggtgatctatcgaagctctccagaatctttgagctctgagataaatagcagtcaaatcagaagggctaaagtacgaagaanttgcctaggacccanaagtagaagcttctgcttaagaagcggatcctggaggggtggttgttagactctttccggattagaatttaatttccccaagtgcggatgtccttcgggtattcgtttgccccctattaaatgagcggtttggaaggagtccaaatcctcctcctcccttctccgccgttgatagccgttcgtgtatgaattaaggtatttgtaaagatatagtttttatggttttatgtattgaaggggttgagcatggacggtagaccgggtatagaaataggagcggcgaagagattatatttgtgacttaatgttgttgagatcttcaataggtttccgctacaaattaatgtgattcattagataatttgca

SEQ ID NO: 116249 - DNA, 868 bp, Arabidopsis thaliana columbia
attgggacgacctatagaatagctatgacgtcgcatgcacgcgtacgtaagcttggatcctctttagcggccgccctttttttttttttttttttttcagttgagacgacattatatacatgaaatagagttttacatgtcaattcaaacaattcaaggtaaatctaaggacattgattattggagtataaaaaatctctgagaagacattaattttggtctgttggattcctctacacagttatgtagcatttctaattaaaaagtagaatgattatgtttcatgtcgtgccagattgcctcaaagcagttagactaaagccaagatgcaacatgacagggtaaggtcgaaaaaaatcggatgaagattgagtctctctgtgactctgatcctgaattgggaattcatatactgggcgtttggatcttggtccaaagtgggaagaggcatgacctgcccattccccattctgattctgagggggggggagtcatcggaatcctcgctttggcccggggggggccgaagttggggggagcataaggtagaccttattgttttgagtccggagatcccagaggttgaccgtattgattttgattcgagagagccaaaggtgacccttcttgtttttgagtcgggggaccaaagttgaccggcctagttctgagggcaggagccataggtggaccttctggttttgagttggggaaccaatggtggcctaactgattctgagggggctgcgaggctcgaatctacactgctggtctttttctctgccggtgcaaagatatttgcatattaaaacccttccgggaatgtctgtgtcatattcgaggcttctcttacactgacaagtctttt

SEQ ID NO: 116250 - DNA, 761 bp, Arabidopsis thaliana columbia
  unsure (1)..(761): unsure at all n locations
nnnnnnnnnnnnnnnnnnnnnnnnnnnnnnnnnnnnnnnnnnnnnnnnnnnnnnnnnnnnnnnnnnnnnnnnnnncttttttttttttttttttttttttgttttttgttttttcttttgctttctttttttgcttcttttttaagatcgatgatctttttaaattttgggaaaaggaccagctccccaaactttgatttttttcaaaagcaatggttctccaaaatatttatcctttgggccaaagggaaacctttaaaaagcccccgattctttgccaaggggctcttttggggataattaaaacctccaaaggggccggaaaaaaaagggggcccttttcatcccaaaattggggcccaaaggaaaacatttaaaaagggggtgttttggggaaaccaaaaggggttttttttaaggggttaccacaagggtttcccaaggacccggtatttaggttcacccccccttggcccaaaattaaaggggggttcttccgaaaggctccccagccctggttttttattttttggaaaccccctttttttttttaaaccgcttaacaaaccattttttttttatccccccgaaaacaataatttttctttttccccgggggttttttttgtagatcccggaaacaaatttttctttttttaaaaaaccggggttttgggaagggtgggtgtttttttataaaaaccaacacgggtgtttcccgggaaaaaaaaaaagggaaaaaaggtgttgggggttaaaaa

SEQ ID NO: 116251 - DNA, 528 bp, Arabidopsis thaliana columbia
  unsure (1)..(528): unsure at all n locations
atacgactctcttagggaaagctggtacgcctgcaggtaccggtccggaattcccgggtcgacccacgcgtccgcccacgcgtccgcggacgcgtgggcaacaattcacacaatttctcgttcttttttgtttatcatcaaaagttgtaatctaaattacgtatcatattccgagcaagatgactattcttggtgaacattgtgttcctgattcaagagtggatgacaagaaagtgatagatgagagggataatgaattggtgtnggatggagggttttgaggttcccaaatcaaaggaaactgatgcattgcatggttcctgatctgaattttttgggccattcctttaaggattattgataatggagaaagcgatagacatcaaggggtgaggatttttacggatgccacagatttaacatacttatactttggggataagatcgaggaaggatcttggaaaccttaccagaatggaatggaggattgggaacggttgggggttttcgacaatcgtggttgatgaa

SEQ ID NO: 116252 - DNA, 810 bp, Arabidopsis thaliana columbia
  unsure (1)..(810): unsure at all n locations
gggggggggagtccttgagtaactcatacgacctctatagggaaacctggtacgcctgcaggtaccggtccggaatcccgggtcgacccacgcctccgcctaagcgtcaaccgatgcccagggctgacatcacacatgacatttgtagctctctggacactatctacagtaccagtcggactctccgctgggattgcgcaagatatgactcctcatggcgaagactctcttcactgagccgcgaggaagatgactagggaagggatccacgagcatgacttcagaattggaggacgatggacgccatgagaaaagcacagtccttagactctgtggggttgaaactcctgccgacggaacttacctgggtacgcgcggtaatgcataaaaaagatcgctcacatgtatcctaccaccaaagtgttggaggcgctctctcgagtgcgatggcatttacaccacaggctattacttggacgtagagagcacaaacggcgcgaagcagtaggcgatgtcgcacaaacagggggggatcggtcccgggaggataaaaacgctttatgaaaattgtacctcgggcttcaatgagccccaatacggctatttggttccgacaacggggggaatgttgcggaggcgggctcgcggaaaacaagaacgtgcgacggctggttattaaatttaggtggccaagagggacgataccataggttcntctcacggactcacgaggagaggctgtgtgttcgttgggtcctttaggcgggagtgcgggtgtgccggcgtggggggcgggtgacgcatgaagta

SEQ ID NO: 116253 - DNA, 811 bp, Arabidopsis thaliana columbia
actatagactagctatgacgtcgcatgcacgcgtacgtaagcttggatcctctagagcagccgccctttttttttttttttttttttttttttttttttttttttttttttttttttttttttttttttttttattatttttattttttttttttttttttttttttttaaaaagggaaaaacccccccaaaaaattaaggggtttctcacaaaaccaaaaagaggggcctccattttggttcccggggaaaaaaaacctaaaaaaacacctcataaaaaaaaaaaaagcttgttttttttggggggcccgcgctataaaagggctggtaaaacccgggaaaaatttaaaaaaaaaaaatttttgaaccccccgggaaaaaagaaccacctcccaaaaaaaattttttataaggcaaaacgcaggggttccaaagaaaacccctttacctttagaaaaattttttaaaccacaaaacaaaccagggggggaacccttccctcccccaggggccacagaaaaaaaaaaaaatcctttaaacccgggaaccccgggggaaaaaaaaaaacttttttgggaagagaaacatcccccaaagcggaggtggtgttaaaaaaaaaaatttttatagccaaacaattttttataaaaaagggttaaatttgtgaaacaagggggaaaaagaaaaaacccccctggaaaaaaggggggtcttaattggaaaacggctcaacaaaaagataaaccccatgggggccatgttaaaaaccaaaaatccccccccctgcgaaaaataggtggagagcaaaaaa

SEQ ID NO: 116254 - DNA, 966 bp, Arabidopsis thaliana columbia
  unsure (1)..(966): unsure at all n locations
cactactagattagctatgacgtacgcatgcacgcgtacgtaagcttggatcctctatagcggccgcccttttttttttttttttttttttttaagttcaataaaaaactctatgatcaggaaaatccatattatatatataaatatacaagcaaaaaaggatagaaattggcatatgatcttgcatacattgctccaatattgtgtaaccaatatcccaaaatgattggtttgaatctcaagaagctttgataagatgaggaagacaaatgagaaatatgcatttggattttcttggttggctttgcattttccttatccatgaggaaaacccacttccctctntcttctttctaccttttttttncttctgaaattcttttagcatcatattttggtcattttttttaactttaaattccttttgtggactttcaactttagtgccttctcaaaaggcaattattaagttccaactggctttttggtaaactcttcatgaaccggaggcggttttgctgaactaaattttcctggtcacttacaaattttgggttagaacccaacaattttttattttggaatagaacaagagacggagaacttgggtccccaatgaaggatcttaactttaagaataaccgggtttggaaggggaaatttatatagaagggaaatctttggggggaaccccttgggggttaaattcttaaaaaatcttaatttcgggtttaaaaagaaaaactcaagagacttggaccagaaagggtgtgagtttgctctgcggtgtcgacctcttagagaatgacaaacgcatatagataggacagggaaagcttagtggcccaggttgtgggggggaggtgtggccgccagcggaagtgcgttgcggagtccaggcagaagcgccacgggcgcccggcccgctccccgcccgcaagagtcaaaaacaggtgtatctgagcg

SEQ ID NO: 116255 - DNA, 781 bp, Arabidopsis thaliana columbia
cactatagcttagctatgacgacagcatgcacgcgtacgtaagcttggatcctctagagcggccgcccttttttttttttttttttaattcataagcccatgtaagcccatagaatatttaatgaaacagttcctctttttctgataaactctcaatgtcgaacgttggtttaaaacaggtagaaaacaaacaaaccatgttacaggagacgcccaaaaccatgtggtgtgtacctaaatgcgataaccagatcaaccacacaccgacattgctggcgaagaattcataaacaacaggatgttttgcttgttgtcatccacctggagaagactttgcttcaatctttttttggagttgctatcgtcgtcctcctcctcttcctcctcctcatcttcatcggtacggccggaataatgcttcaggtcctcttctctcagctcctcctctctccgcttcatcctccgagcaatccttttgtcataatctttctgaactttgtccattatagtgtcaaaacccgggactgtcctctccagcttctggcctactcgaacactcaggttgtagaaaatccggaatagcctcatgacactcctattccactctctgatataaggaggaccagtggtgtaggtaccaagcgggtcacggtaccactctgcaccatagctgatctgaaccatagcttgctcgatactaatcacctcccatgcccttaaccctgagattactttggccaactctagtcgtaagtggtttggggatgaacttgttcggcat

SEQ ID NO: 116256 - DNA, 710 bp, Arabidopsis thaliana columbia
  unsure (1)..(710): unsure at all n locations
nnnnnnnnnnnnnnnnnnnnnnnnnnnnnnnnnnnnnnnnnnnnnnnnnnnnnnnnnnnnnnnnnnnncttttttttttttttttgacacatcactaatctcagattatattagaagaaactgtagcatggcttttactgtatgatatacactagtaaactatgcacataaagaagaagacaattaggctgttttgtgatgagaactcacaagacagagactaatttacgtgttaatctttttattcatgatctgctataaaattaggctgctcgtttgcgcagagatactcatcgcattctgaagcggttccccaatcttttctgagtcttaagatatcctctgtaaaagtggagcccgaggcaccaatgaacacgcttgacaatgcgcatatcgtcttatccaacattgcttccacctgtgagtcgccctcgagaccatgtctgtataacaatgcatcccatttctcagctgaatcacgagctggtcgtttcacaagggggacagtctttccattcagtatcaacagtgattgtagcagaccagtttcgctttcggctgcatcagtagaaaggtataaaaccggtgcctcgaccttttaatcagacgagtgatgcagctagcagctggaggatggggaaaaagcacttgggattcttggcattacaaaacttcaagattccatgcctgcggaattgaagagcatgtag

SEQ ID NO: 116257 - DNA, 686 bp, Arabidopsis thaliana columbia
atttaggcgaactatagaatactatgacgtcgcatgcacgcgtacgtaagcttggatcctctatagcggccgcccttttttttttttttttttatagaaaaccattgtttacttaagactagttcctgaaacagtttcaaaatgttaagaagcaagttgttaaattacaacactacagataatgttacaaaaagtaggttttacctaagtcttatctaccacttgctgccaaatttgactgggtctgatttagtactagcttcacctgtttcttcacccaactctttactctttcttaattccagaaccttcctatgaaagatttgagtgaatctcattcgagaacgtcggactatccggcggtctgtatttccggcagagcctaccagacttaaaccggactcccatgcttaacataaagtttttggaccgaccggaccggtttccactggggtgtgttgtgtggccacattggttgcatttcgtggaacacaaggaccagttcttggtttttcttccttaactgctctgttgtagctggtagtgattgggtgaaacaaggggccaacacgaatacgggtgaaactggtacgaaacggttgggatcttgggtgaccgggaattttacaaagctaggttaggtataatgtgacatctaaagagaggaagataggagtagcggataa

SEQ ID NO: 116258 - DNA, 703 bp, Arabidopsis thaliana columbia
  unsure (1)..(703): unsure at all n locations
atttaggacacactantagaattactatgacgtcccatgcacgcgtacgtaagcttggatcctctatagcggccgcccttttttttttttttttcacaacaatgatattttcaacagagtactagtagagtatgtttataaggagggatagggaatttttttcaaacatagaacagattctctgagagagaatgttttcataagagagtattatatagctaactctgatttcagcaggtcaagagaggagatgacccactgcatttgacatcagaagcatcagaaaggcgttgtcttggagagagtgttgtaatcgctgcaacatctaacgcaagattcattataaccttccttttctgcaactctggtacacggttccttctctcttctgacctttaaccattgggactcaaagtctgtgtttttgctgctccaacgtcttttccatctgttgcgtataggattttttttatggacccaccaagaggtaagtgctctgtgtctgggttttgcagagaatcttacttctctgagtttaaagaataaaaatctctctcttttctaacctgcaatggaaagttacagtctgtgattttttatcataagcggccctggtaagattgttagctgaggttttaaaagggggggaattcccattgaagatgggagtcccgtggtgttggattgggctctgcttccggtt

SEQ ID NO: 116259 - DNA, 708 bp, Arabidopsis thaliana columbia
  unsure (1)..(708): unsure at all n locations
cctatagacttactatgacgtcccatgcacgcgtacgtaagcttggatcctctatagcggccgccctttttttttttttttaattgaaatcagacttggtttaattagaatcaatcacaatagagaaaactggaattcttgtaggtacagtgtattacagatgcatcacagctaatagttataaatacaaacgtggtgtgttgttctgactcttatctacaaacacttaatctggacccaaccaaccataaacaaacccacactggtccattggtccacatagtctcttaattcggtttctttagcaattcttcataccacaatccatgaacagaacgtgacactgttgccacaagaacaagaatgtctgaaacctctatgaccttgtccgagagagaagctgctccgatctttcttagcattgtttccaccaactgctttctcttcgtgttgtttccggccaaaaccgcggctctaatggctaggtatatggtctgtgatacatgtgtgaacactgcgtctcctgcttgtagcttttcacaagcatgtttgcgattacttgtttctttgtctctgcatcgntagaatcaagaggctcggagaggtgttccatgatttctgaaagacctgcatcaggttttgcgtctagcatctcgtaaagacggtttatgcaagtccgtgtaataacctccatgtcaatcgaggatg

SEQ ID NO: 116260 - DNA, 934 bp, Arabidopsis thaliana columbia
  unsure (1)..(934): unsure at all n locations
cactatangactagctatgacgtaccatgcacgcgtacgtaagcttggatcctctatagcggccgccctttaacctttttttttttttttttttttttttttttttttttttttttttttttttttttttttttttttttttttttttatttttttttttttggggggaaaaaccggggcctaataaaaaaccaaaaaaaatttttgtgtgtgataaaaaaagggggggggggggggccctttttaactaatcttccccaaaagggcgccctgaaacaattcaaaaaaaaggaaacaaaaaaaaaaggtcccccggaaccccttggggaaaaaaaaaaggggtctcggaaaaaaaaaaccttgggaccttaaaatttccgaaaaaccacttgggttgcaaaagaggacaccagcaaaggggtgcccttggtttggaaaagcccccaaaaccccacccagcgggggggtctataaaaacccctttcactccccgtttttttttaaagggccataacaagaggggggcaccgcggaaaacctcgaaaagggttgggaaaccaaaagagagggtcaaaaaggggcccctgggggaacccaaaaaaaaggggggaaaggccgaaaatccggtggttaccctggggcccggggggaggcgccccaccccccctgggttaagggggaggagaaaaaaaacccctggaaaaaatcccggagaaagggggggcataaaaccacccaaggggaagaagcgcgcccctcaagggggagacccctccaaaacggcggccaatttgggcaaagattttttgggagctctaacaaaacaaaaggggggtgggggactccagtgaagaagaaacccggccaaggggcccaggctgggcggcataaaaaacaagccttatagaacgagcggaacaatagaaaaagaagc

SEQ ID NO: 116261 - DNA, 801 bp, Arabidopsis thaliana columbia
  unsure (1)..(801): unsure at all n locations
nnnnnnnnnnnnnnnnnnnnnnnnnnnnnnnnnnnnnnnnnnnnnnnnnnnnnnnnnnnnnnnnnnnccacgcgtccggtacgacgaagagccagatccttcagaaccaagaaggcagagtgattctctcgtggactgggaaccaaggtatgtggataaattcaatgcttttagctaacaagcctgatgctgctaaagtggaagtatacgcaaagggtttgaggagcctatcgaaatatatcatggacaaatacagccatcctgaaatgatgatcaccgagaatggatacagagaggatctatgcgagcactacacaagccttgtagtggcgctgtcagatcagcacagaacatactatatccagaaacatctcttgagcttgcacgaagcaattggcgatgatgaagaaaacgttacaggatattttcattggtcattgatggacaattttgaatggcagatggatacaaggcgagattcgggctctactacgtcaattacgaaataatgggacgcgccacgaaaaattatcaggccagtggttctcgagtcgcctccacgatggatcataagagctcgaaatcgagcacgagttcgcacacgatgaggtgtagagtgattctctacagacagactctgaacatttgagtgatatatatattatatattcatcaactatgggtttacagggtgctgcagtgaatgcatttacatattcaagaangtacatcagatactccatatacagacatgttaagtgtcggatggcgtgttgtaagcttttggatagttgatattga

SEQ ID NO: 116262 - DNA, 680 bp, Arabidopsis thaliana columbia
  unsure (1)..(680): unsure at all n locations
nnnnnnnnnnnnnnnnnnnnnnnnnnnnnnnnnnnnnnnnnnnnnnnnnnnnnnnnnnnnnnnnnncttttttttttttttttttttttttttttttttttttttttttttttttttttttttttttttttttttattgttttctgggaaaaaaagaaacccccaaaaaaaaaaaagggccccctttaaaagggcccctttaaaatcaaaaccccattaaattgggggttaccaaaaaaaaaaccggagggggaacccacggggggggggtccaacccaacccactttgcaacggggcgtggggggcaaggtttcttcccaaaaacggggccttaaaaaatcaaggtttttgaaacacgaaacatgggttgggggggaaagggggcgggacccaaccactttaagacacaaacagggccgggggaacgggggtatcattttttggggtagtcactggggggggggggacattctcaggcaaaccctctgttaaacaccagggctagaggaggaggacgcgtgggccgggaacacgagcgggggggctgctcgagccggggggggactaaaggagggacgagcggaagagccgggccaccgaacgcactagaaaagcggggccggagggggtagacccacagaggcaacgaacagggcccaccaatccctacaggacccgg

SEQ ID NO: 116263 - DNA, 628 bp, Arabidopsis thaliana columbia
  unsure (1)..(628): unsure at all n locations
nnnnnnnnnnnnnnnnnnnnnnnnnnnnnnnnnnnnnnnnnnnnnnnnnnnnnnnnnnnnnnnnnncttttttttttttttttttttttttttttttttttttttttttttttttttttcaaaaatggaacccttttgattaaagcaataaaaatatgttcccaaaacacattactttaacaggtttacaaggaaacttaaaatcttggtcggcacaaacaaaatctgctatttagacatactacagggactttctaaatatatgaggcccccccccccaagaagatatctaaaagtggttgggtatggaaagatcaccaaggaacaaatcgggccgtgaaaagacaaactgggacctcacacataattccaggtccgtttttctttgtaaactttgggataaaaagtcctctttattcttcagatccctgtgggagttgggacacaacagatgcggaatactgccttaggacaaaagagacctgaggggatacacggaactcatgtcattaatagctcccacccaaaggtgcatagattgcgcgtttctttcctttgacggacccccacgcgtccgaggacctgggggtcgaccgactatttgagaccgggacctgtgggcgtccca

SEQ ID NO: 116264 - DNA, 702 bp, Arabidopsis thaliana columbia
  unsure (1)..(702): unsure at all n locations
gnnnnnnnnnnnnnnnnnnnnnnnnnnnnnnnnnnnnnnnnnnnnnnnnnnnnnnnnnnnnnnnnnnnnnnnnnnnncttttttttttttttttttttttatttttttttattttttttttggaaacaaacaaagatatttttattggaggacactaatcaaactgtaatttaaaaaagggtccaaagtagaaggtttcatttaaaaatccataaaaaaactgtctacaacttaaaaaagggttttttgaatccacgaccggctataaactcctgattttttttaaactgtgccttcgtcatcccaatgtaataccgcggagctcgttccttttttagggggaaaccatgcccaaaatcaagctaaagtccttcattgataacgagtttaatcctcaaaaccatgcctgggtaattcttgaatatagcccatgagatttctctacctttgtttaacggtatatcttcttaaaccacatggtttacaaaccttaacttcccacccaagtttgcttgtaggggcctcgaggttaaagaaacttattgagctttgcttgctcggaggactctcgacagcttttagaaccaaccccatgagggaaatttccaaaccctggcggagagatccatgaacttagctcctataaaagccaccataatttctcaggccaaggtaatttcaaacccgggggtgatggaaaac

SEQ ID NO: 116265 - DNA, 586 bp, Arabidopsis thaliana columbia
tatagacttagcttgacgtaccatgcacgcgtacgtaagcttggatcctctatagcggccgccctttttttttttttttttttttttttttttttttttttttttttttttttttaaaaaaaaaaaaagggattgaattaaagaaatttcaaactcaaacaaacagctcaccattttggcggtttttcaccaaactcaaattatatccctttccatgaaattaattcctcaccctcagattttgatccagaaaatagatcagataaaaattttaccattccccataaaataaattttggaatttttatggggatgatttattttatatgataattttttcctcaaaacttgaaaccgagggtgggcctttttttagcagaagactctttcttcggaggccttgcttgtggaccaaaaaaattctggagcgacttggttttgtagttcccggaccggccagtttccttaaaaagctgggccaaacgtttcttttggttttaaaaatccggtttcgcagtccggagcttttcctttctaagcttaaaaaccggtttaattttaatgggatcctttttccttccatagc

SEQ ID NO: 116266 - DNA, 507 bp, Arabidopsis thaliana columbia
aatcgactttcttagggaaacctggtacgcctgcaggtaccggtccggaatttccgggtcgacccacgcgtccgggtcttaagatccacatccagactttgggtgatactgatccacgagttggagaaacttgcaggtactgagcataagcatatggacaagcgatagcacttcagtaaagcggatgagttatgcgatgaagactctagagattcaccgagcgcatagggaacctgcttcactggaggaagcacctgattggagagagatggcaattatctgctaggctaacggagatcatgaatccgctctagagcatcatggtcttgctagcatggctatgattgcgagtggacaacaatgtgaagacgcatagattgaagcagaatgggaagatacacatgtcactgtgccgtgttgatgaccctgtgtctaaatatgaaagggctctcactgtgttaaaggcttctaaaggagagactcatcccgacggaggcgtcagaggtt

SEQ ID NO: 116267 - DNA, 644 bp, Arabidopsis thaliana columbia
tatagaattagctatgacgtcccatgcacgcgtacgtaagcttggatcctctatagcggccgccctttttttttttttttttttttttttttttttttttttttttttctttttttttcttttgttttttttccggaaaaatcccaaattttttatttggaaaaccttactgaattttaaaaccctttacatgggcccaccttcaaaacatgggcccttttaaacaaaccacagaaatccaaattctttaaaaacttaaaacttcccaaccaaacaaaaccacatgggcttttacttcttagttaggcggtttgaagaactggcccttaggcccatgggggcccatactccaatcccccctttgggaaaccgccaggttgatggcagttccaacccatcctaacccgaaggggaatccccattggaacttgttttgcgcgggttttttatccaaaccccccttgaggcggggttacccctttggacccggaagaggggtccccccgaccccccccgaaggctctgccaaaagggggagacctcccccgtgaaaaacgggcccaaacccaaaaaggtctgggaaccctggttgggcccaatttgaacacggttggtgggtctggttggggaaaccatgttaaaag

SEQ ID NO: 116268 - DNA, 667 bp, Arabidopsis thaliana columbia
actatagctgagctatgacgacgcatgcacgcgtacgtaagcttggatcctctagagcggccgccctttttttttttttttttttttttttttttttttttttttttttttttttttttttttttttttttttttttttttttttttttttttttaaaaaaaaggggcccctttttttttcaggggaaaggtcccccccccttttggggggccaacttaaaacccccccgaaaaaaagggacagggtgggaacccgcctaaaatttgggggaaaaaaagggaacgcccccccaaaaagaaaaaaattcctgcaagagggcggacagttccccaggtttccccaagaaaaaaaaaaaaccgccaacaccgggtttaaatttggggggggggccccccgccccggggggcccttttttaaaaaaagggggaaacaccccccccccagggggccggagaaggggcctttacccctataaattccaaaaaacctttttttttggtgacaaaaaattttttcaccaacaagagggggggccggaaccccgagggggggaagggccccaaaagaagccaggggcacaaaagaccccaatagaaaaccccaacaaaacaggggaccgggggggttgaggaaaaataaagggggggaacccccaccgggggctct

SEQ ID NO: 116269 - DNA, 803 bp, Arabidopsis thaliana columbia
  unsure (1)..(803): unsure at all n locations
gacnnnnnnnnnnnnnnnnnnnnnnnnnnnnnnnnnnnnnnnnnnnnnnnnnnnnnnnnnnnnnnnncttttttttttttttttttttttttttttttttttttttttttttttttttttttttttttttttttggcaaccaaaaacacattttttcattttataattagggggatacaaacacaaaatacatcctgggaaaaaccttgggggaaagcacaaatttccccgacggggggggagaaacggttttacccaaagccttggcggccccgggaaaatggaagccacgataggggtcaaacggggagaaaaacgggggacccgcgggggaggatgcttgttttgaaacggaacgagacgggggcagttgttttgggcaccgggctaaagagaaaaatttcacccacacttgacatagctatgaaaatcgtattccacttgaaaagggccaatcgttcccgaaaaaaaacctctcttctctttcttgaaaactagatgtgaaaactactttttttgctttttcttttccgatagaaaatcttcaaagatagttgatgggctgtaaagttaaggggcggagagcatctcttttctccggggggtgtgaggcggggttagggcccatggttgatgctaaaagggggttttcctttaaaacagcccaagaaaacgggtcatgggcccctgtgggttaatggacctcacgggattaaattttggttttacggttgggggttgggaaatggacttccggggggggggagagttgccctgggttggggggtgtcttttttgaaagg

SEQ ID NO: 116270 - DNA, 787 bp, Arabidopsis thaliana columbia
  unsure (1)..(787): unsure at all n locations
nnnnnnnnnnnnnnnnnnnnnnnnnnnnnnnnnnnnnnnnnnnnnnnnnnnnnnnnnnnnnnnnnncttttttttttttttttggatataaaaggtgatgtacttaagcaacgaaacaccggttatgataccatcatcattacaccctattctgtgagtacacagacccagggtaaatatctaatgaactctctgcgatatctcttgatcgacttgaggagaagaaacaaggaaaactgtgattgagctacacaagatgaataggaggttgttctccggccctataattgctgatgggggtcaggaaggtacaccggaacatacacccgattatattgctgcagagtggtcatgagaagatacaccggattcgtaaactgtcgctcctttgctcacactcaaactctgctggtgcggattcaatcggtcgccttctgctatctccgctcgatggcacatgttaccgtgctgcaactccatctccctcttctgagtacactctatctcagcactagcatctcatactgattggatcggacacggctgattccttgctcagactgacttctacgatctggaggtccttgactttaaggaaccagagacccgccacatttgcctatgtgacgtcagattctagacttgcctccaatcttaatgctgctcggcgactactgagatgacctaggagccggaagaggtagacggatcgaacaggctcttgaccttgagggccaccccactgagcggctaggattagcggaccagtgacaaagacaggttctag

SEQ ID NO: 116271 - DNA, 673 bp, Arabidopsis thaliana columbia
  unsure (1)..(673): unsure at all n locations
nnnnnnnnnnnnnnnnnnnnnnnnnnnnnnnnnnnnnnnnnnnnnnnnnnnnnnnnnnnnnnnnnnnccacgcgtccgcatctttgaagtggtactgagattaatgatctattctctcttgaagagcagcttctcattacccaccttcttctttttgctgatctataagacctcttgagaactcaggatcattggaagaaggctgcattagccacgacgcatagagtgccaagagactatggagagggaaaactctgataatgaggatgcacaacacacctactacgggagtgacttcctgcctacgacatcactggtctattcatgatagcttatgaactctatgtgcagtatgatgccataaacactgtagtaatctcatcgactactggtcgggtatatgagtacgctctcgacattgctgacgggtacagttgtgatgatcaagaaagctcggtcacgatgcacggaacactacttgcgttaccggatctgatgctcaatactctcagctagaagcctctaagatgcagatgcagattctgtgtattcagaacacagataggcttcttgtaggggaatactacgtgcactgactagaaggaacttgaagcctaaacgactaatgtaaaggaatcatcgacacggtcaaaaaacgatctgtagcgcacaa

SEQ ID NO: 116272 - DNA, 834 bp, Arabidopsis thaliana columbia
  unsure (1)..(834): unsure at all n locations
actatagactagctatgacgtcgcatgcacgcgtacgtaagcttggatcctctagagcggccgccctttttttttttttttaattgtaaagatttttttcatacaagactgattcatcatccttcagggtcaaaggcttagacactcatacacaaaatctattatctacttccaaaagtcaagcaacaagactcactaatgaatctaaacctaacagaaaacaaaaaacaatccttaacgttgctcattgttctaggcgtgccttctgatcggtgagtgaaacacgatttccggtgaagattgccatcagctcagccacaagctgcttgtcatcatgtttgctaacatacaaatttaaaaacgactcactagtacttgtcaaaacagaagacattggagggagttcactttcaagcaatccttttgacatgagaactttgataacattacaccttgggacagtcctcttctctaggctgtatccaagtacctgagggattgaagccacagcctttactggccaattcatctccttgacccaaaactcagtcttcttcttcaccgnctctgtagaatatccaatacacggaggaaaccgcttgaacatcatcataaacacatctctgctgaatcctagacctagaaatgtttctatagagttggctaccttcttctncgatggttcaaagagcgtgggcactccttgaaatttgcctacatatcaacagagaaactacactttatagactcggatttttcttcatcgttttgcgctatttggaaagctatgcaagcgtgacaacgttgagggggtggatcaaaccatctaacacc

SEQ ID NO: 116273 - DNA, 939 bp, Arabidopsis thaliana columbia
  unsure (1)..(939): unsure at all n locations
agactgctatgacgtaccatgcacgcgtaccgtagcttggatcctctatagcggccgcccttttttttttttttttttttttttttttttttttttttttttttgtttttttttgtttttttgttttaccttttttttttgttttttcttttaaatttttcacatcccaaaaaaaacaaaccccccgggttgaaggggctttttgggagcaccgtccatactcccaacccggcgaagccctccaccccctggaaccaaggcgcaaattgcaaaaggacccaagggcctggggcttctcatgacccccaccttcaggcgaacaaggacctgtggacccgccgctgaagctccgaccaaggagggggggggccccctaaacaaaccccgccgggggggggaacgacatcctccggggctgggggacgggacaccccaccaccccctcctgtgaataccgaggagccctagaggcggggtagacacaaaccgtgggaccaacggagctggggaccgcagcgcccgtcggcgagggagtgaaggacctggaagggcaaaggtggccccagaaagaccacctcgcacacaggggaagcccggaggcctgggcgcggcaggacccgccgcaagaggaaagcccccacgggggcctccgccgaagaccttagtaaaacaccatatgcaagcagcgggacccaaagataagggggcgtggccacgccgacgcgcgcgaccggttagaccgggccggcccgggacgggcgatggcggagtgccgccgagaaagaggngccggcgggaagtggagtgcgcgggacgtgcctgcgagccgcatagtcgagaaggcgaccgggtaggaccgcaagaagacgcgacgcgcgcggggcgaggacgggcgcgacagaggacgcggcggcgggcgataggggcgagagaggcagg

SEQ ID NO: 116274 - DNA, 627 bp, Arabidopsis thaliana columbia
  unsure (1)..(627): unsure at all n locations
nnnnnnnnnnnnnnnnnnnnnnnnnnnnnnnnnnnnnnnnnnnnnnnnnnnnnnnnnnnnnnnnnnnnnnnnnnnnctttttttttttttttttttttttttttttttttttttttttttttttcaaaaggaccagggtaggtaaaaaagggggagagtaccgatccaaaacttcccaaagttttaaaaaaatcaaaaccccagagggaaattgttaaaactttcgcccaaaacaaaacctcaaaaatccaaaactttaaaaaacaactttgtttttgattctccaaaaaaacaaaataaacacttttacagggtttataaacggacctttttcaaatataacttaaaactctcaaggtacgatgttgtctccaagaaacagaaaagctaactgatcagctgccccacccgtttgctgctgggctacactcctaaaaacatccattgcttctgaaactttagctttaagggcctctggggattccagcaagggaagtacttgggttgggcccatttaaagaagcattcccgggactttagcgtgggattttggctccagctgctccacaggcgggtatagattctcaccaagcattgttctttgttgctctggacctgcattcccac

SEQ ID NO: 116275 - DNA, 545 bp, Arabidopsis thaliana columbia
  unsure (1)..(545): unsure at all n locations
nnnnnnnnnnnnnnnnnnnnnnnnnnnnnnnnnnnnnnnnnnnnnnnnnnnnnnnnnnnnnnnnnnnnnnnnnncttttttttttttttttttttttttttttttttttttttttttattttttttttttttttntttattttttttttttttttttttaaaaaagaaacccacctctttatacattttatttcccaatgttttggttttccggacccgggggtccacccgggatttccggcccggtccctgggggggtcccatctttccttttggggggtctttttaaagctgggggtaatcatgggcatagctgtttccttggggaaattggttaccccctaaaaattccccacaaataaaaacccggaagattaaggggaaaacccggggggccttaagggggggcccaccccctatattgggggtgggcccccttgcccctttttcagggggaaaacttgggggcccagttgtttttataaatccgccacccgcgggggagaggggtgttggttattggccccccgggggttttttttttt

SEQ ID NO: 116276 - DNA, 782 bp, Arabidopsis thaliana columbia
  unsure (1)..(782): unsure at all n locations
nnnnnnnnnnnnnnnnnnnnnnnnnnnnnnnnnnnnnnnnnnnnnnnnnnnnnnnnnnnnnnnnnnnnnnnnnnnnnnccacgcgtccggaaaaccaaaacattggaaaataagatgattagagaggttggtttcattaaaaanaaaaaaaannaaaaaaaaaananaaaanaaaaaaaaaaaaaaaaaaaaaaaaaaaaaanaaaaaaaaanaaaaaaaaaaaggggcggccgctctaaaggacccaagctaacgtacgcgtgcaggcaacgcaaagctcttctaaagggccaccaaaatccaatccaccgggccggcgtttaacaaacgcgaaacgggaaaaccccgggggtacccaaactaaaccgcttggagaaaacccccctttcgccagcgggggaaaaagcaaaaaggcccgccccgaccgccctcccaaacagtgccccacccgaaagggcaaagggaacccccccggaaccggcccataaaccccggcgggggggggggtaccgcccaagggaaccgcaacattggccagccccaagccgcggctcttgcgttttctccctcccttttccgccaggtgcgccggtttccccccgaaagcctaaaacggggggccccctaaggggcccagaaaaagggctaacggccctcaccccaaaaactgaataagggggagggcaccgaggggcccacccccgaaaacggttttccccttgacgggaggccaccgtcaaaagggaccccgggccaaagggaacacacaacccatccgggc

SEQ ID NO: 116277 - DNA, 598 bp, Arabidopsis thaliana columbia
  unsure (1)..(598): unsure at all n locations
ctatagaattactatgacgtcgcatgcacgcgtacgtaagcttggatcctctagagcggccgccctttnttttttttttttttttttttttttttttttttttttttttttccataaaaccatctgggtatataatggattaaaatacattatccaccactaattaaggattttcatttctacatagaaatattatccccagttgttttttatatcctttttctaaagaatggaactattttgaaaaagcattatttcaaaatggataaaaccttctaaaaccccataatttggacccaatgaaaaccagttttagcccttttctttgtttctttaaaacaagattccgacaaaaacccacggccgttaacccctcgggtcttttcccgaccaaaaaggaaaaggttnttgacccttaggaatataaacttttggtttttaaaatacctttaaaaattaaccggggggtatggaaaaccaattggggacggttaaaattcgggaaaaaagggcggcggagtttttttaacgtactgacaaacgggggggtcaattaaatcactcacggtggatccggggaaaattatatttggcgggt

SEQ ID NO: 116278 - DNA, 652 bp, Arabidopsis thaliana columbia
  unsure (1)..(652): unsure at all n locations
tttaggacgcactantagaagtactatgacgtcgcatgcacgcgtacgtaagcttggatcctctagagcggccgcccttttttttttttttttaaatgtaaaaggaattgcacaacgcacaataatgaactgtagtacataaaacacataaaattgtaacataaagcacaaaagaatgcaacaaagcaaacaacaaaaacatttcaacacaaacaactgcgcttaacgtggatattagttggtagataattataggtgaaggtcataagccttttgttacaggggttggccactgatccacctttggaacatgataaaggtctcgtttggtctatactctgccgtgtgtccacctcctttgatagtagcaaatgtcatcttattggaataagctctcgtgtatccagcgatntgattgtttatcatccatggcctccagttatgaatgggggagtaattgagagatcttatccaggcttggattgcaagaaaagggaccgcgatggcgtgatcaccactgtaaataagagaatcggatccactgatgctgttattcatgtgatatgggattgctgttacaatggcggggattggatggaaatagcccgattacatcgcgcccattttcctttctacccttttaatatgaaaa

SEQ ID NO: 116279 - DNA, 578 bp, Arabidopsis thaliana columbia
gcactatagaatagcttgacgtcgcatgcacgcgtacgtaagcttggatcctctagagcggccgcccttttttttttttttttttttttttttttttttttttttttttttttttttttttttttgggaaaaaaaacccaaattttttttatttaaaatattttacagacggggggctttaaaagcattatttacatttttggttggttttttcacacacatttttttttacattatgggggagaaaagaaacattccctatctaaatattattacatggggtttctccgggggccttatcttttttaaactataatcccttctgagcatggctacattttttatttaagaggatgggcaaacctcaaattcaaaaggagttggataaaaattttaagtggcgatccccccctggggtttttcgtattatcggggaaaaaattttttagaaaatcggcgggcccccaaggaactctgatagccggatccgtgctgttaatacagtttctccttttggaaaaccaagatgccggaaaacacccttttccaagggaccataaaaatatggctgcttataa

SEQ ID NO: 116280 - DNA, 565 bp, Arabidopsis thaliana columbia
cactatagacttactatgacgtcccatgcacgcgtacgtaagcttggatcctctatagcggccgccctttttttttttttttttttttttttttttttaagaaaaagaaatgcttttatttatatagaaagacgtatataagttatatatgttacaaggataagcatttcattgctctggaattttcaaataaacatggcagacaaaactgaagtcaggaacccaaattgccttatcgaaaggaccatgtgacacttctcttcatgtaatgacagtgggcttctccctccctgtgaagtccttcagctttgatacagacaatgcaagatcgattaaaggtttaagagctatttgtgcatccacatcatgttttgaaacgtctggctcaaattgttcaatgtatattcccactgtagctccagctgagccagttccggataaacaaatatgatttctggatccatccgtgaacacaaaccgaacaccttgcttggatgcaacacttccatcaacagggtctgtgtttgagaagtcatctgcaaactggagggacatagtttccata

SEQ ID NO: 116281 - DNA, 698 bp, Arabidopsis thaliana columbia
  unsure (1)..(698): unsure at all n locations
nnnnnnnnnnnnnnnnnnnnnnnnnnnnnnnnnnnnnnnnnnnnnnnnnnnnnnnnnnnnnnnnnnnnctttttttttttttttttttttttttgaatcaaagagtaagtaaattaagatcaaattcagtagtcgaattcaataggattcaatgaacagaatcaccaaaaattgaatcaaaatcacaattcccttatacacatgtctatactttagaatacatgtaagaaaaaatatctatgtacctcgttgtgaacctaaattagcagttgtggaagagacccatctgctcattttcccatgagctctcctaaactagcttcttgaatctccaaattaatcagccaaaaatatctcattctttcttgattcgcctgccatttggatcgttacttcaggcacgaacccttgaccccatagacagagaatataacatgtctgttaatcattcaggagtggaggccgttgtatcagcggctctctgccgcaccatctccatcaccgctgctctgcgtcttgaatctgcctgttgctgctttctactaaaatgagctctcaactctctgcatttggggactttgcattgaggatctctgcagtttcggaagtgcaatcggaagagggaccactttttcttacaagcgatgcaacctctggtcttgcagacaagaccatgcctaatgagacccttattacgc

SEQ ID NO: 116282 - DNA, 764 bp, Arabidopsis thaliana columbia
cctatagctgagctatgacgtcgcatgcacgcgtacgtaagcttggatcctctagagcggccgccctttttttttttttttttttttttttttttttttggctggaaattacaggtatgtttattaaaaatcgttgagcaaacattggtaggtctcaacaagaagccagcaaaggaaactgattcagtaaaattttaacacacttttctccttcaaggggggggtaaatatcaaagcgaagaaaagagaactaacacggatgggcttatttagcagcttcaagagcagaagctccagagataatctcaataagctctgttgtaatagaagcttgacgagtcctgttgtatgtgagggtgagacggtcgagcatttctcctgcgtttctgcttgagctgtccatggcagacattcttgctcccatctcactacatgcattctccagaaccgcattgaacatcacacaagagaattggaactcggccagattctgcaatatttctccctttgtttccccaccttcaatctcatatgagtcaagctcgccaagttttcctccaatttcagactccttctcaaaatctcaggtgacaaaaccggggacacaggtggcagaaatgcgacaactggttggaacttggtggagacattgcgcaaagcatcaaattcaccgttctttaggaggcatcaagctaaactgacacctgggcataagggaggggggtcttattaactttggcacgagaggacaatggggtctttga

SEQ ID NO: 116283 - DNA, 572 bp, Arabidopsis thaliana columbia
  unsure (1)..(572): unsure at all n locations
attgaggcgnnnnnnnnnnnnnnnnnnnnnnnnnnnnnnnnnnnnnnnnnnnnnnnnnnnnnnnnnnnnnnnnnncttttttttttttttgagaaacactttatgaaacaatggaaccttttggaccagttgctcaacaaaaatctagaaattgagcatacatgtgatcgacagtaaagggagaaacaaagagtatagaccatactctgttttgtctttggaagagacacagcagttgactagagacgactccatcaatcagcttcgaatggcatcgaaccagtcacattcaacgataagctcaaagtcaagctgcagccatgttagtagatagatgtccttgtccacacaccaaaggggctttcatacgtttataagactacggaactcctatcatggaggatccagtcatatccatgatttcacctctgattgagccatatgtacactcttaaatcagagagggggactgacctcgaatggctacaagagcctcactagatgtacgctcaacagggncttgaaccagtattcgctggaatttacggtccgtctcatctcgagcatttaaa

SEQ ID NO: 116284 - DNA, 819 bp, Arabidopsis thaliana columbia
  unsure (1)..(819): unsure at all n locations
nnnnnnnnnnnnnnnnnnnnnnnnnnnnnnnnnnnnnnnnnnnnnnnnnnnnnnnnnnnnnnnnnnnnnnnnnnnnnnnnnnnccacgcgtccgggtagatccagacaaggagcttcacaaagagctgacatcgagttatagagcactcgatgatgatcagatgagcgtatttctggacatagcatgtttattgaggtcagagaaagcagattgtggtgcaagcattctgaagtcagacgacattgatgctaacgatgtgatgatagaacttgaagagatgtgccttgtcaccatttgttacgataggatagagatgcatgatctattgcatgcaatggggaaggaaattggaaatgaattatccatcagataggcaggcgaacgtagtatgctgtggtaccacaaagatattcgtgatatcctggagcatagcacgggcacttgatgtgttagaggcctctacttgaacatgtttgaggtcagacgaatcaagctttttcctgctgctttcacgatgttagccaaactcaaaatgctcgaagtccacagttctcattgctctcagcggtgtgataatgaccatatatttcagagctgcaagtccctgatcacttccagatgagcttgttaccttactggcaggggatcccttgattgcctgccatcaattccatcacagaacttggcatcttagctgcgtctagcacatcaaacactgtgggaagtgaaagatacagaagtttagatgggcgatctcgcagcaaaaacttgctaattatcaggtattcaggcccaattttgaagatgaatctgaggct

SEQ ID NO: 116285 - DNA, 580 bp, Arabidopsis thaliana columbia
ctctagagcagccgcccttttccttttttttttttttttttttttttttttttttttcttccaatccaaagtaaaaacagcttgagcaggggcaaggactcccgaaagcacaccaccccgggacagctgtgacaaaaaaaggggcaaccccaacttttcctgccagagaacggaaaaagttaccgaagctcctacaacccgccaaacaccggggcaccagcgaaagcaaaacaaaggggggggctttcaccccccccacaaaatgccacacccccccccaccaacaaaaaaggccgataggggggacaaaagagggcccccccatcacaacgccgcccggacccggagaaaacacacgtagcgcgcccagagacgagaaacaccccgcaccttcggcaccacaactctataaaggcccccaccggccgacgaacccccccacagcgtaccgccgagggaaaaccgccgcccgacccccagcgccccccaccaccacaccacccaagacatcgacctgcaaacaaacacccaaaccaaagaacagccccccacaacacgacaaacaacgggggaaccggca

SEQ ID NO: 116286 - DNA, 769 bp, Arabidopsis thaliana columbia
  unsure (1)..(769): unsure at all n locations
nnnnnnnnnnnnnnnnnnnnnnnnnnnnnnnnnnnnnnnnnnnnnnnnnnnnnnnnnnnnnnnnnnnnnnnnnnnnnnccacgcgtccggttttgtggaggaacccacataacaaacacccgcgaagccaaagcatttgctcttctatcggaggagggaattgctaaaggtattcgtagggtaactgctgtgactactgaatgtgcttttgatgcattgaatgcggcgtccttacttgaaagagaagtagaggatgcctccagagcggagggaagtgcattggaaaagaaagtttctgctttgaaaagccgagtagatgcagcaattatcccagcagctaaaaaggcagatattaggactaagattgcttcgcttcagaatgaagtaagaaaagctcaaaagaaaatagcggaacanaacctgaaaaaatctgtcaaattagcaacagaggcagctgagtccgcagcatcagatgggaagactttctgcataatccagctggatgtgggtcttgatgcagcagctgtgcgagaggccgtttcaaaagtcatggaaaaaaagggtttgtcgataatggtgttcagcacagatgaaagcacaaaccagggcggttgtgtgtgcaggaagtgcanaaaaatcagacccatttaagccgttagaacggatttgatggtggaccactgggttggggcctttaaagggaggtgcgggggaaggggaagggggacttggtcaagcgagtggacggatgatactgagntgccgcggc

SEQ ID NO: 116287 - DNA, 938 bp, Arabidopsis thaliana columbia
tatagactactatgacgtaccatgcacgcgtacgtaagcttggatcctctatagcggccgcccttttttttttttttttattatccatagtaaactgaaaattcaaaaagggagtacggcttacaggtcggtctgatttcggtttaccaaaccggttcacagtttcacacagaatatcaacattactggttcatacacctttttacaggatcattcaacacaagtacacaaaacataggcaagaagctctccatttatcatcatcccctccactgatccttcttgttccgaacttccctcattgtatcaattggcgacttgcaaccgagtttctcctgtatctctggcttatcaacacgcataaatggatttgtttcaagctcttcctccagtgttgaagggattgtggggaagatctgtttggcgctgttgacggccccatgctaacttctgtggatcttcccgtggttaggttcacagttagagcaaattcacagtcttaacggggactcatggccgcagaaaacctgtgtcgggtaagggaatgaggcctgatgcccacacagcacctgatccatgtggtaagcgggccctgcaaaaacttcccacttccgcaccaaaaagtgtttttccgggaacacgggggggtttttgcttcttttcggggcactattgacaaggtccccttggggggacaaggcggaaggagagccacttggtatacgccgcgaaagggagcggagaacttttaaccggggcggggaccctcggcttacgcagagaccgcggacctggtgtgtgggaccactgtttatcttgtcctgtgaccggtagaccaacggaaggagaggaggagaccgagtggttggggtcaaacgcacacactttggagaagcgatcagaccggagtgccaggcctgactccatacgagagagcg

SEQ ID NO: 116288 - DNA, 861 bp, Arabidopsis thaliana columbia
aattgaggcagcactatagcagagctatgacgccgcatgcacgcgtacgtaagcttggatcctctagagcggccgccctttctttttttttttttttttttttttttttttttttttttttttttttttttttttttttttttttttttttttttttttttttttttaaaaccctttttcccaaaaaaaaaaggtttttttggggaaccggggaaaaggggaactcccccaaaaaaaaaaaaccccccctttttttggggggaaaaaaaacccccaaggaatttaacccccccccccccccggtattcttaaaaaaaaaccctaattttttaattttcccaaaaaaaaaccccgaggggccccgggcccccaaaaaaccacaaaaattccaaagggagaaaccctaaaaggccccccccctatcaccaaaaaattgggggccctaaaaaaacagcccccaaagggggtttttttttttgggacagcccccacacaaaagacgcccgttcccccacccagggggggcagagccaaaaacggggagggaaccgcttgggcaaaagcggccccgcccctctactgaggaacccttgggcgaaacccaaccccggccccgcttttagaaaaaacaaactcggagaacccgggggggggggcgaccttaaaaggagacccatagggccgcccccgagggccaaatttctaaaagaccccaagtggccaacgcccactggtgcggaaaaaaggccccaaaaaaaatctggcttccccgaaaaccccccctgtttaaaccccaaagagggtccccgacgcccggggcccagcgattcccgcccgccgagcgaccacgttccttaacgg

SEQ ID NO: 116289 - DNA, 458 bp, Arabidopsis thaliana columbia
  unsure (1)..(458): unsure at all n locations
gnnnnnnnnnnnnnnnnnnnnnnnnnnnnnnnnnnnnnnnnnnnnnnnnnnnnnnnnnnnnnnnnnnnnnnnnnnnncttttttttttttttttttttttttttttttttttttttttttttttttttttttttttttttttttctcttttttttttttttttaaaaaaaaaaaattttggggggcttttactttttgaaccccccccccctgggaataatctttttgttctctacctaaacaaaaaaaaaggggggcatttaaggttgggacattttgttccctagagggggttctttaaaaaggtgttggggggtccactccccataaagagagaatccaacccgggccaggggccctgtttccttgatggggaaggtccaaacttaattccccttctcaaggggacaccttttaantcgagaggcttgaagttaaaaagcgggggagggaaaccc

SEQ ID NO: 116290 - DNA, 534 bp, Arabidopsis thaliana columbia
cgcactatagtatagctatgacgtcgcatgcacgcgtaccgtagcttggatcctctagagcggccgcccttttttttttttttttttttttttttttttttttttttttttttttttttttttttttttttttttttgttttttttttctttttctttttaaaaaaaagggaaaactttcaaaacacccggggacgacccacttgaaaattattccaaaatcccctctttcttgaaaataagccctctcggaaaaaaaaccctccttccctgaatgacggcgattccaaaacaaatggacccccttatttccttaaccccttttattgaaatttagtctaatcgggtgcacttcactttaaaaaagttgggcagggttttttataaaaccccgatgggaactggcaaaaacaacgaatgtttgggcagaaagcgccccaccggcaacgggggaatcttgggccatataacgcttaaaggatcgggggggaaccccgccaaggcttttaaaaaactcaacaacctccgcccccat

SEQ ID NO: 116291 - DNA, 800 bp, Arabidopsis thaliana columbia
gcctatagcagagctatgacgtcgcatgcacgcgtacagtagcttggatcctctagagcggccgcccttttttttttttttttttttttttttttttttttttttttttttttttttttttttttttttttgggagaaaaaggagacccaaaagggggacaaaaaaaaaataaaaaagtgggacacgcacaaaaaccccaaaaactataaaaacaagggggacccgggcaaaacccggggaagaccagggcaaaaaaagggcagcgccgaaagaaccttgcccgagaggaaaaaaacccaagacatttctgcagagggggacaaatgcccggggaacgcgtgggaacgaaccccagaaacacggagaccgggaaaattgggtacaggacggcccggacttctggcccttattgtgagcaaccgcctggttatttccctcggggggaaagggggccgcggcattaccgccccagacaaggaggcccggacccaaccgggctgttggaagagtgtatagagcccctggggtcccaagggccgaaaccttgcgcctaccacctgaaaggacaaaacctggaaatgcccaacaacgaaaccgacgccgggaaaatcggcggagggggtccattcgcgggtgcgggggggacggtgccgcccaggaggccccaagagaaaaacacgcggacaaaacgcgagaagaacaggggtggaacggtgaggtggaaaaccagagggacagcgagaagggagaggagaggggaagggaggcttggggcgggggccaaggggagcaactggag

SEQ ID NO: 116292 - DNA, 769 bp, Arabidopsis thaliana columbia
agctaggatcctctagagcagccgccctttcttttttttttttttttttatttttttttataaatggtttaaaattttaatggtttttatactttgagcctaacgcaaaagcaaagacatgcagaaagaggaaaaggacaatgcgaaagagaaacgctaaaagaagacacaggcgctctcgcatgggggtacagaaacatgagtgaaacaacagaacatcctaaaaaccgccaaaagcgtacattttgggataaacgcaacgatcctccagaatagatggccttcccttcccaatggagcctagactcaacgaccgtctcggcgaaagaaggcaagcagaatgcagctgaatgaatctcggcatgggaaaaccgcaaaggaccattggaattgctggagctctcgccaattgggagcagagggagttagaaggcaacaaaagagagcctcagacaaacaaagcataagcccaccgaccccactgggcgaagaagaagcgcagaaacaagcgggggcgaccggaccgggaagatatggcggaaaaaaggagaaagggagcccgagggccgcgatgccgaaacgaacgcccaggggggagagaaggacccaccgagggccaaaagagtcgcgcagggtggaagaggcgcgggcgcccacacgacgcggccccgcgcggctggcgggcagcacaaagcacacccacggaagacccgaggcagccccaacgcgagagcggagacaagacggacaggaggagggcgcaggaggg

SEQ ID NO: 116293 - DNA, 651 bp, Arabidopsis thaliana columbia
  unsure (1)..(651): unsure at all n locations
nnnnnnnnnnnnnnnnnnnnnnnnnnnnnnnnnnnnnnnnnnnnnnnnnnnnnnnnnnnnnnnnnnnnnnnnnnnnccacgcgtccgcccacgcgtccgaacagttgaaatcacctggaacaacatgggacgagatagatttcgagtttttagggaattcaagtggagaaccttacacacttcacacaaatgtctacacacaaggcaaaggagacaaagaacaacaattcaaactctggtttgatccaacagctaatttccacacttacactattctctggaacccacaaagaatcattttcaccgtcgatggaactccgatcagagaattcaagaacatggagtctctaggcactctgtttcccaagaacaaaccaatgagaatgtactcgagtctttggaacgctgatgattgggcaacgagaggtggtttggtcaaaaccgattggtctaaagctcctttcactgcttcttaccgtggctttcaacaagaagcttgtgtttggtcaaacggcaagtcttcttgtcctaatgcctcgaaacaggggactactactggctcgtggttgcacaagagcttgactcaacagctcaacaaaggatgagatgggtgcagaggaactacatgatctataattattgtacggatgc

SEQ ID NO: 116294 - DNA, 558 bp, Arabidopsis thaliana columbia
tcagcgtctctacgactcactattgggaaagctggtcacgcctgcaggtaccggtccggaattcccgggtcgacccacgcgtccgtatagatagaggatttcttaattatttaataaagatgattcaaatgtatataattgttcaactagttcagttcgcttccaaaaaaacagcgacgtcttctctctcacggcgataaaaacagagaaccttccatttgtttctttgagcgcgtgaccggcgcgtggcggcttagttagcgccggcgtcggtcctccagtctggttttctttagggtttcattctctacttagtctggttcgtttttagatcctgatttgatgttggcaaggtgaagaatttttggatcttagatctgtaagagccatcgttgtgggctttgattcgtcgaaggttctgtgcgatcggaactcccttttctctgttttgagaaaattatgggtttctcctttgttcttgcagatcttgtttccgacgaaggttgcaaacgaaagttatgacggcggctaatgttattggtggtctggctccttctt

SEQ ID NO: 116295 - DNA, 455 bp, Arabidopsis thaliana columbia
  unsure (1)..(455): unsure at all n locations
gtcgcatgcacgcctaccgtagcttggatcctctagagcngccgccctttttttttggttttttctattctgattgagaactctnnaagcagaactttggaataataaaacataataacgccaaaaaaacaccttgnnnctttttgaagggggggtccctatagtanacccttcccacccaattaaaaacccccaacttttcttctttatttttttaagcgtttttaaaaatgagtttttaacccgggggaaataccacccccttttaaaaaaaaaaccccccttctttttaatcaaaaataaaaagccccaattaaaaaccgggttttacccctttttatgggctttttttttttttccaaaccttggggaanncnnnnnnnggaaaaaacccggtatgccccttttgtggcacacctttttgcccccccttcttggggaaaaccctccccccc

SEQ ID NO: 116296 - DNA, 520 bp, Arabidopsis thaliana columbia
  unsure (1)..(520): unsure at all n locations
atacaagacnatgacggggcatgaccgcgtacgtaagcttggatcctctagagcggccgctctttcttgtgtttttatctcctctgagattcctccttttgattttttgaccttcaactcattgttcagagttccactctgaaagaaggattttttgacggggagaaacgaagatcttgttcttatggggattctatagtatcgaatactgtctttccacggtggcttttttctcgagggtgtgggcatcaacggcggttaaagcgaccattacgtatttatactagaagtgaaaaccacactttttggctattgtacgccctaccctgtggcccttcataacaaccggaggacatttccacccaaaggtttaagcgcctaggcttgaccagtaagcccctattggtggagcaagaaacattcctcactggtttggaatctcaccaaatgttaatgtgtttgatagccattccactaattacctccttgctacaggagacaattgggggccccgaaggtc

SEQ ID NO: 116297 - DNA, 567 bp, Arabidopsis thaliana columbia
cgactcactattgggaaagctggaccgcctgcaggtaccggtccggaattcccgggtcgatccacgcgtgcggcaaaacccatgctcattgacaactctaatcttctctatgactaccaattgtgctagctacgtcctgcgcagggctcgatgttaaagaatgttctaaaatcaatcaatgatgtggtgatcgatgcgaatttagactgcttcatcactgtttgttgtttccagggtgttgatgcgactcacgctgctctgatgtatatcttgctaccatcctaatgcgtccaacactacctatgcaaccagaactctctccatgagtgattaaccctcggccacatcaggaagatgctctgatgcgccataaaatgatgaccaaccttaccataaaggtcttatcacctgtggagacaccgtcaccgtcatgttttagaagccaccagcgcaattacagacgtcttgagattgaatatgaagcagaccgaattcagacatgtgaacaaatggggaagaactagaaagatgagccccccttcagtggctaggactccctggcatata

SEQ ID NO: 116298 - DNA, 374 bp, Arabidopsis thaliana columbia
gagctatgacgtcgcatgcaccgcgtacgtagcttggatcctctagagcggccgccctttttttgggttttttttttttttttttttttttttttctttttttgttgttgttagttttttctgttcacactattctctacctattgggaagcgacgttctgaaaaggtccggtgggggaaaaaaaaaggagcccaaaatgccaaggaaaaaaggggaaccataaaggaaagggcggaggaaaaacccccaaaggggccccccaacgatgatgtaaacgggggaaccgacaaacgggggggcccccaagggggatccccccggggcataggctcgaaatatgacgcgtgaagacacttctcaaaaaacgcaaata

SEQ ID NO: 116299 - DNA, 545 bp, Arabidopsis thaliana columbia
  unsure (1)..(545): unsure at all n locations
acgactcactatttggaaagctggcacgcctgcaggtaccggtccggaattcccgggtcgacccacgcgtgcggttctgatggatactttctttggtccaccagaaactggtgtgtatagcccttctgtccaacgcactctctacctcatgggaagcgccgtactgaaaaggttcgctgatgtatcatcgattcacctaaaaatgccaaatattcattttctaccagtaaatctttcaacgaaggaaaacccttcaatggtgaagtttaaagatgatgtgtacctgccaaccgatgaacctcatggatctatagaagcaactctaagccgtataacctcgaaactatgaggttttaagacaatacatcatacatggaaatatcaaacacaatttcacaggttctgcaacttttggcgtttgcctcgtttatgaaataacaatttanatgaagtgtgtaaggtcaacttttggcttttgttgcaagaataatactgtaactgcaaacagtttcacataaaaatgtagcttacatatattatcaaaa

SEQ ID NO: 116300 - DNA, 548 bp, Arabidopsis thaliana columbia
  unsure (1)..(548): unsure at all n locations
acgactcactatttggaaagctggtccgcctgcaggtaccggtccggaattcccgggtcgatccacgcgtgcgtgagaagtcaaaggctgagaacagggcacaaaagaagatctctgatgtgcatgcttgggaaaatagcaagaaagcagccgtagaagctcaacttaggaagatcgaggaaaaattagagaagaaaaaagcgcagtacggtgagaaaatgaagatcaaagtagctgcaatccacaagttagcagaagagaagagagcaatggttgaagctaaaaaaggagaagagcttctcaaagctgaagaaatgggtgctaagtatagagccactggtgtagtaccaaaggcaacgtgtggatgtttctaagcctttattgaatttgtatctttgtaacaattcatctctgtttctttcttcttcttttgtttttgtgtgattcaacaactctntttagttnttgttatttgtttggtcgtttgtgtcttgtttacatattgggtgattgtgtgtaaaagtgaaagattaatggagtataattgg

SEQ ID NO: 116301 - DNA, 540 bp, Arabidopsis thaliana columbia
  unsure (1)..(540): unsure at all n locations
nnnnnnnnnnnnnnnnnnnnnnnnnnnnnnnnnnnnnnnnnnnnnnnnnnnnnnnnnnnnnnnnnnnnnncttttttttttttttttttttagcacacaacacaagcaatacatnagaggtcataagcaaacaacacacatatagcttaagtaaaaagtctgatagcgagtatatatgttgctcgagattaagacacacagattgataaagacaaactaaagaccacgatattatagataggagttgatcaggatgagattataaaatctcgatgatcaatcgatgaccaaagacataatcttttcctgaagatttggctgaatcggttgcactctatatccaaactgcccatcatgatctctcatcatcattcctcttgcgttgcttgctatagccatctcctgttgttgcagctggaaagtgagttgccgttgctcctccgccatcatcttctcatttctcctctttgatataaggatctccatctggtggtctcggactttgtcgaggccatgttcaatggcgtgctcgacagccat

SEQ ID NO: 116302 - DNA, 539 bp, Arabidopsis thaliana columbia
cagctctctacgactcactattgggaaagctggcacgcctgcaggtaccggtccggaattcccgggtcgacccacgcgtccggtagcctcctaattctggtcctaccaacaaggagcctgcgaaggaccaagcttctggcaagaagtcaaaggggaactcgaaaaaaaaggctgaaggaggtgataaagcgctctctggttcagggaacgatggtgcctctcatagtgatgaaagtgtcacagcgggttcatctgatgaaaatgatgagaatgccaatcaacaggaacagggttcaattcgaaagccaagctttggacagatgcttgctgacgcaagttctcaaagtacgactggtgaaatccaaggttcggtgcccatgaagccggtagccccggggactaatctgaatatcgggatggacttatggtcttcccaagctggtgtaccagtgaaggatgaacgagagctcaagcggcagaagaggaaacaatctaaccgtgaatccgctaggcggtctagattgcggaagcaggccgaa

SEQ ID NO: 116303 - DNA, 104 bp, Arabidopsis thaliana columbia
tcactactattggaaagctgaccctgcaggtaccggccggattccggcgacaccgtggctagatcccaagcagtatatctctcgctgatcataaacagacttat

SEQ ID NO: 116304 - DNA, 561 bp, Arabidopsis thaliana columbia
  unsure (1)..(561): unsure at all n locations
atgnnnnnnnnnnnnnnnnnnnnnnnnnnnnnnnnnnnnnnnnnnnnnnnnnnnnnnnnnnnnnnnnnnnnnnnnnnnctttttttgtgtttttgtaaaattgacaaagttttataaagccttcgtaagaaagaagtggcaactaaccacaaaattgaaacataacagaaaagacagagccgagacagagactccccattagcattagagagaaactaagaaaaccataatttggaaaaatagaatccttagttccttaccattgtttggcagactcgcgatattttatcatacgagaaaaactggaaatagattctgtaaaagattgcatccttaattatattctggagtctaaagccataatagtactaaggttcatggggttcatgtactcaaccgaaccagtcatgatttgttggacgatgagtcgggtggctttctcggtcgggtggaaagggtcccagaaagcataggcattgcggtcagagcataaagtcgacaatggggtgcanacgccttgcccgttgtatgctccttgtccacaacatgctacttttgacg

SEQ ID NO: 116305 - DNA, 428 bp, Arabidopsis thaliana columbia
  unsure (1)..(428): unsure at all n locations
tgannnnnnnnnnnnnnnnnnnnnnnnnnnnnnnnnnnnnnnnnnnnnnnnnnnnnnnnnnnnnnnnnnnnnnnnnctttnttttggtttttttctttaatgaatgattttttnttatnnnggttggagagaatcaatcaacagagataatatctccgaagaaatttgttttttagagaatgacaagtgacttaacattacgtttccagataccaaaatacctaatcacgaactgttacatcaaatctaaggcgggaccagaacaaaatagagaacgttgttctggacatctgcatttcctttttcaatcggtgcaattttttccttgattgaaaggaaagcatggcagaccctgtctagctccgccttgcttaaatcttgggtgggtaaataataaaagttccagggacaggccaaacatttggggg

SEQ ID NO: 116306 - DNA, 535 bp, Arabidopsis thaliana columbia
  unsure (1)..(535): unsure at all n locations
nnnnnnnnnnnnnnnnnnnnnnnnnnnnnnnnnnnnnnnnnnnnnnnnnnnnnnnnnnnnnnnnnnnnnnctttttttttttttttgccaaagggggttgtttccttgttagtgtcaatacgccgacgaatgtaattggagtcaaacaaatatccaaaactcaaaaaagagacaaaactagaaaactcttgaaggaataaaaacttgaaaatccaagatccatgataaaataaatgaggatatatataacctaaagcgacatgaacgaaagattattctacggcaacaagttgctttgaagaacagagacaaaaacatgagaatgtaagaaagatccaacttcattcaatgaccctggtcgctcatgcagcagcctggataggtgctccatttgatctgttgaatccaccacggcctcctcctcttccacgacctccccttccacggacacgtccacgtccctgaggcggaggaccatcatatccatggtctgctggaggagcaacattgttgtatccatagtctcctccatctt

SEQ ID NO: 116307 - DNA, 498 bp, Arabidopsis thaliana columbia
atgacgtcgcatgcacgcgtaccgtagcttggatcctctagagcggccgccctttctttttgttttctcttttttttactttttctttctattctatttttatagaatctaatcaaacggtataagaaagtcctaattcaaacacaaagagaaaacgaagaaaaggccaagggaaggcacccggtgaaagcaagagggatcgaggatcaaagtctggtggccgatggtcgcaaggctgaaacttaaaggaattgacggaagggcaccaccaggagtggagcctgcggcttaatttgactcaacacggggaaacttaccaggtccagacatagtaaggactgacagactgagagctctttcttgattctatgggtgggggtgcatggccgttcttagatgggggagcgaaaagactggttaactccgtaaacgaacgagacctcagcccgctaactagctacgtggaggcatccctgccgggcgggttctaagagggac

SEQ ID NO: 116308 - DNA, 540 bp, Arabidopsis thaliana columbia
  unsure (1)..(540): unsure at all n locations
atgtnnnnnnnnnnnnnnnnnnnnnnnnnnnnnnnnnnnnnnnnnnnnnnnnnnnnnnnnnnnnnnnnnnnnnnnnnnctttttttgttttttttttttttttttttttttttttttttttttttttattaaggaggatattacgacacccgaaccacaacaaacaagagattggtcacaagaccacaattttcattatgggcttgaagcaaaaaggctaaaacagccttcgtttttttttttaagaaaaaaaaaagatttgttttcaacaaaaggactaaagggattgtttcttaaacaaagattcagaggagaagctttggtttaaagaacaacgttgacaaccaaggcttatgaaatcttcctctccaggtctttttgctcgacccatagggaactgtgttcacgcaggagcttctttctctgtttgatcttctcttccctctttgggcccatcatgttccacatttctagcttttctggtttttcttttaacagaggttgcctgaacttttcgtcaggaatcttacgttccttagc

SEQ ID NO: 116309 - DNA, 552 bp, Arabidopsis thaliana columbia
  unsure (1)..(552): unsure at all n locations
tgatcnnnnnnnnnnnnnnnnnnnnnnnnnnnnnnnnnnnnnnnnnnnnnnnnnnnnnnnnnnnnnnnnnnnnnnnctttttttgtttttttgtaaaattttattgaattcaagagttggctcccgaaattaagcttaatacatacacaaactgcatacatacatacatacataaatgtatagattataagtatatatgtacgtctgtggcaactatagacgctctccaattagttcttcttcttcttattgttcttgtcatgtagaaggaccactggagccgctggtatactaaaccaccactctctcaaccgccttattaaccgttccgtgctagctctccttggtggcgagtatcttgtgagaagctcaacaaatacaaccgaaagcaagtagcgtcccggaacaaaggccatcatcgtcgctgcgaccacaatcgcaatcgcaaacttctggctcgcctgagggaaaagcgagaataataaagctcggaacttgagaagaacgatgtttgcgtcttgaatgttctgttcgagctccgagatcccgttc

SEQ ID NO: 116310 - DNA, 516 bp, Arabidopsis thaliana columbia
gtcgcatgcacgccgtacgtagcttggatcctctagagcggccgccctttttttgtgttttttttttttttttttttttttttttttttttttttttttttttttttttttgttttaattttttttttgtttttttttttttgggggggttttttgggggggggaaaaaaaaaaacacgttgggaaatcctcccaaagttttttttttaggggggggaaaaaggtggataaaaaccccggtattaaggaaaaaatgctttggggggtttttccggtttttttagcaccggggggttggggaagccgccctttggggaaaaaggcttttgtaaaaggacccggcaattagaaaaaggggggggaaaaccatttcccccccccccgggggggggggtaggggggggtgcgccccccaaagtgggtgaggaggccccccgcccacccctttttggggggctccccaccaaaaaatttggggctggaaaaggggcgccggggacaaaccgcgcttccctt

SEQ ID NO: 116311 - DNA, 550 bp, Arabidopsis thaliana columbia
acgactcactatttggaaagctggtccgcctgcaggtaccggtccggaattcccgggtcgacccacgcgtgcggagatgaccaagtggtttgacaccaactaccattacatcgtcccagagttgggccctgaagtgaaattttcttacgcatctcacaaggctgtcaatgagtacaaggaggccaaggctcttggtgttgagaccgtccctgtacttgttggccctgtctcttacttgcttctttccaagcttgctaagggtgttgacaagtcatttgatcttctctcccttctccccaaaatcctcccagtttacaaggaagtcattgcagagcttaaggcagctggtgcctcctggattcagcttgatgagcctctctttgtcatggatctcgagggtcacaaactccaggcttttagcggtgcctatgctgagcttgaatcaactctctctggtctgaatgttcttgtggagacctacttcgctgatatccctgctgaagcatacaagacccttacttccttgaagggtgtgactgccttcggattt

SEQ ID NO: 116312 - DNA, 503 bp, Arabidopsis thaliana columbia
  unsure (1)..(503): unsure at all n locations
agaatgaatcnnnnnnnnnnnnnnnnnnnnnnnnnnnnnnnnnnnnnnnnnnnnnnnnnnnnnnnnnnnnnnnnnnnnnnnctttttttgggtttttttttttttttttttttttttttttttttttttttttatttttttatatttattttcttttttgacagagaataaaattgtttttgtcaagcatacgcagagaaatggatatgaccgaagataaaagacgagcgaacaaagaggggaaacgttcatcgatggggtgaaagaaaactatgttggggggaggaggaacaaaagacaaaaaactatcggggaggtgatgtggaagagaagagccgagctaacgggggctaaggctttggtctgcatctgttgggacaattactaaaagggatcatcccaaaaggtgaggccctcgcccgcttctgttagattagatgtgattaaccaaacttggagaccaatgctggaacttgtgaacgtgttagagagattttttcctc

SEQ ID NO: 116313 - DNA, 548 bp, Arabidopsis thaliana columbia
  unsure (1)..(548): unsure at all n locations
atgnnnnnnnnnnnnnnnnnnnnnnnnnnnnnnnnnnnnnnnnnnnnnnnnnnnnnnnnnnnnnnnnnnnnnnnnnnnctttttttgttttttttattcgacaaattagaaagaagcttatttgtcaaggtaaaacaatatgcagtgttacaaaccggaaccttaacctagaagattacattccaatttggtttctataatttcctaaacaagaaaatcaattttaggttctgttcttgttgtgagactgaggaccatccacgaacagaagcaactagcttaacatttctcaccatgtcttaagatctttgttgcctagagagaatatccggggagttaatcatccacaacgagcttcttgtctacgcttgagaaagatcgataaaacgccttgaaatgtctgtacgcgatgtctatatcgtctgttccacaaatctctctcacactatgcatagaaagctgagctatgccacaatcaacggttcggatccctactcctgaagccaatataggtcctattgttgaaccacatcccatatcgtttctca

SEQ ID NO: 116314 - DNA, 532 bp, Arabidopsis thaliana columbia
gcttggatcctctagagcggccgtccttttttggggtttttgaaaagaaaaaatcgtttctttttacgtggggaatattgggctgcacattgcaggaacaaaaaaacaacgtggtcggactggggggaggaggggggagggggggggtgtatgagagtttggtggggggagggataggcgggtggtggggaggagcggggtttttttgggaggggggggtaggcgcggacgcggtgggtgggtggggggaggggtgcgctgaggacgtggcgtgctcgcgcgtggagggtggtcggggggaggggcggacgacagcgctagatgcgcggggcttgggagctgagaaagggaactcacgcccccgagtggcgacggcgccggaggtacgatgcagcgggccggcggccggcgggggctaggggcgtgcgatggaggtggggggcggcaacgcggcagtgggatgagacgagggtggaggaccaggccaggatctgagaatgtgcagcagggtgggcgaggcgacgggtacgga

SEQ ID NO: 116315 - DNA, 546 bp, Arabidopsis thaliana columbia
  unsure (1)..(546): unsure at all n locations
ggggannnnnnnnnnnnnnnnnnnnnnnnnnnnnnnnnnnnnnnnnnnnnnnnnnnnnnnnnnnnnnnnnctttttttgtttttttgaaaaaaacgaaattacattaaagagaatgagagcaatctcctacatacacacgtgcttctataatatataagtgtgtcaattcctaagttgttgttttctttctcctacctttagttttaagtcatttcacctaaactgaaactctttcactcttggtctatgctttcttcatcataatcttcctcgtcactagcactagcctgttgttgatcatcaggatctattttcatttcgttaatctccaacgggtaatctggacttctctctagctgtgtttccagccatgtagcattgtctccattctcatctaattcaacattaagatcgaagttccttacttttacctctgagttactactatgatgattgttgtgtgatgcaactttcttccaagatgtatcgtcgtgagaaaggctcccgttttcgggagacggggtcctgctgctttcgggagaacc

SEQ ID NO: 116316 - DNA, 351 bp, Arabidopsis thaliana columbia
  unsure (1)..(351): unsure at all n locations
ggggannnnnnnnnnnnnnnnnnnnnnnnnnnnnnnnnnnnnnnnnnnnnnnnnnnnnnnnnnnnnnnnnctttttttggtttttttttttaaaagatccaaacttctcaataagtttcactgaccaactcaaaaattaaccatcacgctagcaatagcacaaggaagatgatataaaaaaaacaaaacaaagaaattcgtctgccaaattctagaaaacaccataactataatctatacatcatgaccacttcccgtcaaattctaaacgccaaaggctctagtatggaggaggtngggtattgcctggatatggaccttgtgggtaatatgatggttgnggagggtatg

SEQ ID NO: 116317 - DNA, 562 bp, Arabidopsis thaliana columbia
  unsure (1)..(562): unsure at all n locations
gaattgcnnnnnnnnnnnnnnnnnnnnnnnnnnnnnnnnnnnnnnnnnnnnnnnnnnnnnnnnnnnnnnnnnnnnnnnnnnctttttttgggtttttttttttttttttttttttttttttttttttttttttttttttttgagaaagagaattaaaaacttcctttttaccacaaaaggaacaaagaggggggggccatttttttatggaccctggcttttacaatctttggggcgtgggttattcaagaacccgaacccctacccagggaaactggtaggggagaagagcttatcggttttggggggaacaaaggcagactactcggagaaagagggtgcattcaattgctcggtgggaagcggtttaacctttttgggcttgccgtgtttatttgggacatccaaaccggaaccctctttttttctctgggacactaggggtatgttaccgagtttttatttttggaagccctgaaacacgggacctgtttggtacaggttggtgaatgcctcaatgacagtgaaggggggcttcccaaaggccttgggacgggcaatt

SEQ ID NO: 116318 - DNA, 501 bp, Arabidopsis thaliana columbia
  unsure (1)..(501): unsure at all n locations
ggggannnnnnnnnnnnnnnnnnnnnnnnnnnnnnnnnnnnnnnnnnnnnnnnnnnnnnnnnnnnnnnnnctttnttttgttttttttttttttttaaattgaaaagaagaaaacaattttatgcatagttggctacatgaatatgatattattaatacatgtttcatagtaaagaccggactaatcaatcacctgaactttgatcctcattgcttttatttacttcactgttgtcacctgatgatgagtctccaggttgtgttgtggccttcatgttttctttcagcagaatcttcattgaaggctaattgaccagagtaaaggagaagtccgaacgcgttgagaccgaaaacaaatgttgctagatagcatataccgttgatgatagtccttacggttaccgtgatttgcctaaccgaaagttatcagagatagtctgacgattgagtcctgatcaactggtacagggaatttgtaaagaatgagagcattgactcctg

SEQ ID NO: 116319 - DNA, 560 bp, Arabidopsis thaliana columbia
  unsure (1)..(560): unsure at all n locations
ttgaatcnnnnnnnnnnnnnnnnnnnnnnnnnnnnnnnnnnnnnnnnnnnnnnnnnnnnnnnnnnnnnnnnnnnnnnncttttttttttttttttatgaaaatccaaacaaactttattgaaatccaacaacataagctaaaaaaataccaaatatccaaacagaaaaccaaataattgctaacataataaatcgtctaaagaaagatacaaatcctcgacaactaagaagaaacttaggccctaatgttgctggaaactatttcctccaccggaaagaagtgtctgttatgcaacataatagagtcagcggcgacaggctcgttgtcttggttcctatgccatgtgtactgcgcgtgagtcctattcataatctctaaaaccgcatggccaaaactcgcctctctatatgctgagtaacntcggttgtggatccacgaaactgtttgcaattccttcaatgtttcctccatctccgatagtaatgtaaataggagcattaggatctttcacaggagagctcaagccattggtgatgttggacttaatattggagatacg

SEQ ID NO: 116320 - DNA, 545 bp, Arabidopsis thaliana columbia
  unsure (1)..(545): unsure at all n locations
aatgaannnnnnnnnnnnnnnnnnnnnnnnnnnnnnnnnnnnnnnnnnnnnnnnnnnnnnnnnnnnnnnnnnnnnnnnnctttttttttttttttgtcacaaccgcaaattaagatcatacaagtacaacacaaagatcatccactgcattttctcacaaacttctctaacccaaaccaagttaatcctcaagcatcacaacaatgtaaaaccacaacaaagattctacatcaatctgcaaatttttctcacatgtttcaaactcaactatacatcataacctacacaaaccaaaacaatatcagattaacagaaacactactacacactcactttgatgccagaagaatctcaggttttttcgccttgcttggagtgttcacattcgatgagccattaacagtctctgcagctacggtctttcccgaggttcgtgcgcttgtatcaaggttaactaaactccttgtagctaaaatcgcctgtggattcagatcatgagaggctcttgcgtacaatgatcttactgcattggaagctgcatcttt

SEQ ID NO: 116321 - DNA, 559 bp, Arabidopsis thaliana columbia
  unsure (1)..(559): unsure at all n locations
ttgnnnnnnnnnnnnnnnnnnnnnnnnnnnnnnnnnnnnnnnnnnnnnnnnnnnnnnnnnnnnnnnnnnnnnnnnnnncttttttttgttttttttttttttttttttataaaatattacaagttgtattcacattggggaatttaatcatgacattaaaaaccctaggtggggaacattcctatacattatacacacaaaagttcaacaaataatttttcttattaaagaaagcaaattaagtggtaactagttaatggagatttgatggggtgaaattaataatagtttaattgagaatcttggcaaaatcaagggacttcttgccttggagcttgttggagacatagtgataactatagtcaccatgattgtagcttctatacttgcatgggtntggtctcatcatcaaccaactcactcattggttctatttcaacctcatagtttggtgcatagaatgtcactattgtaagcctctccttttccctgtttgttactgccctatgctctacactcttgaatttcccattacttagcacctcaatggtatcaccaa

SEQ ID NO: 116322 - DNA, 562 bp, Arabidopsis thaliana columbia
  unsure (1)..(562): unsure at all n locations
aatggtnnnnnnnnnnnnnnnnnnnnnnnnnnnnnnnnnnnnnnnnnnnnnnnnnnnnnnnnnnnnnnnnnnnnnnnnnnctttttttggttttttttttttttttttttttttttagtatcaaaaagatagcaggatccatggatttttttttaaaaataatttacataactctcgcatattgcgaatcacataacattactacccaatcacacaagtcactcttcaggtgataaactccaaccctgaatggactctggtttatctattatataatttatatctcaaaaaaaatattgcaaaatttttcatcgcaccctaatcaaagcgtcttcaccagattggatggatttatggtggacatgcaactttaatttaaggacccggtttagcgacttcagtgcaagccgctggaaccaactttccgctgagaataggcttgatgttagaacatgctgagacagctggtccctctttgccgttgtggaccaagttgatgtcagagagagcaatattggtgcaaggaacgcctttgctgcacattagcttcactgctaccttg

SEQ ID NO: 116323 - DNA, 431 bp, Arabidopsis thaliana columbia
acgactcacttttggaaagctggtccgcctgcaggtaccggtccggaattcccgggtcgacccacgcgtgcgaagagactcacactgtcgatgttcccaagacaggttgaacatatctatagcctgaagagagctgacgatagatgctcgatactcactatggtccgatgcattggctctgccatctttggactagactatgctattatgactatcggggaatacaatgcttcagatagccacagatggtcctatgagaagcaacactggcggtcgttctagaggactctggctcacgtgcgcgtgcatgactacgttacatctatcttatagcgctacctaacttgaatgcactcgcacggagtatgacacacgctactactcgtgtataccctaggcgttgcccagctgactcgccttgctgcacatac

SEQ ID NO: 116324 - DNA, 546 bp, Arabidopsis thaliana columbia
  unsure (1)..(546): unsure at all n locations
nnnnnnnnnnnnnnnnnnnnnnnnnnnnnnnnnnnnnnnnnnnnnnnnnnnnnnnnnnnnnnnnnnnnnnctttttttttttttttgtaaagtgtgatcttttacatttaaaatggatgcttttaacaaaagacacatgactttgatagttatgtaaataaatatatacagaagctttttaattgaggaaatggaatctgtttctatatgtgcagaatcttattccctctggttggttgagttttgtcttcaagattgatcagtggttcctttaagaatgttgtatttgcaaagagggcatgttgctctcatcttaagccatttcacaatacaagtcgaatgaaaatggtggttacaaggaagagcatgaagctctgcgccatcctcatatgaactcagacatatgcaacaatccgcatcctcagcaagcagtgttctttcagttgctaagcataagccattgatcggtataggaaccattttaccaggtccagtaatgttcttctcattgctatggaaagcctaaaatttgtacaagggaagaac

SEQ ID NO: 116325 - DNA, 531 bp, Arabidopsis thaliana columbia
ctatgacgtcgcatgcacgcgtaccgtagcttggatcctctagagcggccgccctttttgtgttgtgggttttttttttttttttttttttttttttttttttttttgagaacttagttgggagccctactacctgctatggtcttgaaacaaacactaagcgactgagcaaatggaacccagcaacggagaacggaaacgggaaaccccaacgccatgacggcgcgggggggagggagggcattgggtcgggaaaaagaaaagggcacgccttaaagaacaaaagaattccaagccacaaaccaccggggggggcaaaccgaaccgaggctggcacccccccccactaggcccgggccggggagccaccgagaaagccttcaccccgagaaaaaaaaacccggggcgaagacaaagccctttgggagcaacgaaacggcttggtcctcaaaccccccccttaccccccggaccgaaagcaaaaaaaccaacgaagcgcgggggggcccgggaatagggcccccagggatc

SEQ ID NO: 116326 - DNA, 553 bp, Arabidopsis thaliana columbia
  unsure (1)..(553): unsure at all n locations
ggannnnnnnnnnnnnnnnnnnnnnnnnnnnnnnnnnnnnnnnnnnnnnnnnnnnnnnnnnnnnnnnnctttttttgtgttttttgtcaatttattatttgatattaatgactgctctttatttattattacgtaaatgtgaaatattattacacaggtggatactgaaaagacactagtgactagactaataaagcttctttggtgctttggtttctgcaactagcaccaacgcttgctcttcttctgctgaccgcggtgaagttgacttatcctccggcgatttttgttgctccgggtgagttttttcttgttgcttcttctcctcctcatcctcggaatctaactgtagattctgtcgtctgtatctgattactactactatgataaacactgcaataaaacgggtcttgagagaagttagattccagaatgcagtaactgcagagcctgctacgaatttcttgtgtgtgcaaactccccaagcttcaacaaatctcctttgtgcacactcaactttttggttaagctgacttgcgtaacatgaatatag

SEQ ID NO: 116327 - DNA, 538 bp, Arabidopsis thaliana columbia
  unsure (1)..(538): unsure at all n locations
ctatgacgtcgcatgacccgcgtacgtagcttggatcctctagagcggccgcccttttttttgttttttttttttttttttttttttttttttttttttttcttatttattctatatgtgtatacaagtatatatgaaaaagaacataaaaaagaattactttctttatttgaatattcggttgtgtattggangtttaagtnctctttccatgtttttttgttctaggggtaacgcncttgatttcactctaaaacctattaaagtgtttcaaatgtgatctcataaaaaaaaaacaaacacaaagcagacaatcgggcaggccactgccaaaggtccgaacgccgcgcgcggcggacagggccaaggcgcagagacgtgaggccgggcaggttggagcgcggaggcaanagagagaaacaaggcgggcgagcggacaagagacggacaggcggcgggcggaggggacgccaggagagtgagtatggagggggggcgcccggcgggagccacagaggctgggcgagaatctgagata

SEQ ID NO: 116328 - DNA, 521 bp, Arabidopsis thaliana columbia
  unsure (1)..(521): unsure at all n locations
atgatacttcaggtctctacgactcactattgggaaagctggtcacgcctgcaggtaccggtccggaattcccgggtcgacccacgcgtgcgattggtttagtcatagtatcttgttccttttaccttccaaatttattctatatgtgtatacaagtatatatgaaaaagaacataaaaaagaattactttctttatttgaatattcggttgtgtattggagtttcaagtcctctttccatgtctaaaagttctatttgtaacgttcttgatttcactctaaaacctcttaaagtgtttcaaatgtgatctcatannaaaaaaaaaaaaaaaaaaaaaaaaaaaaaaaaaaaaaaaaaaaaaaaaaaaaaaaaaaaaaaaaaaaanaaaaanannaaaaanaaaaaaaanaaaaaannnnnnannanaaaaaaaaaaaaaaaaaaaannnnnnagggggggccgttttaagggaaccaggtttacaggccgggggttggaaagaaaaaattttttaaaggg

SEQ ID NO: 116329 - DNA, 546 bp, Arabidopsis thaliana columbia
acgactcactatttggaaagctggtccgcctgcaggtaccggtccggaattcccgggtcgacccacgcgtgggaactagctttctacaccggtcctacattgggtggtctattgaacgcaacgtgtggaaacgcgactgaattgataatcgcgattcttgctttgaccaataacaaagtcgcagtggtgaaatattcgctgctaggttcgattttgtcgaaccttttattggttctagggacttcactcttctgtggaggaatcgctaatatccgaagggaacagcggttcgaccggaaacaagccgatgtgaacttcttcttacttctactgggtttcttgtgtcacttgctgccattgttggtgggatacttgaaaaacggagaggcttcggctgctgttttgtccgacatgcaactgagtatatcgcgaggcttcagtattgttatgttgatcagctacattgcatatcttgttttccaactgtggactcaccgccaattgttcgatgcacaagaacaggaagatgagtatgatgacgatgtg

SEQ ID NO: 116330 - DNA, 532 bp, Arabidopsis thaliana columbia
  unsure (1)..(532): unsure at all n locations
agattgatcnnnnnnnnnnnnnnnnnnnnnnnnnnnnnnnnnnnnnnnnnnnnnnnnnnnnnnnnnnnnnnnnnnnnnnnnctttttttttttttttttttttttatcaagatcagattcttttactttattatgcgagttttgtttcacaagaggaaacaaagcgcatactcgttgtcccatccggaacctatagtatgaaaagagagtttagtggaacaaatggcccgcatcttattatgtgagaagagactgagtgggaaagaaattggtacaatcaaagaacgtttgaaggggaaaactcggggctccttttaaacagtttgggggggtctgatccttatgaccaccagatctgaaggagacaaagctctgggttttactacctcctaaggtatacagagggggatgaggttcttttttatccacttcacttaggagggaataggtgggagccgactgaataatttcggtcactttaaggaggactgttgtaaaaaaagcgtttgtctttgatcagctaaccgggtag

SEQ ID NO: 116331 - DNA, 524 bp, Arabidopsis thaliana columbia
atagtagagctatgacgtcgcatgcacgcgtacgtaagcttggatcctctagagcggccgcccttttttggggttttttttttttttttttttttttttttttttttttttttttttttgatatttttttttttttttttttgtttttttcttttctaaaaaaccaaaagggggaaaagctaactaataaaaaagagagagaaagaaatcggccaacgccattcaaaaaatcgggggaaaaagaccgtgttaggaaaaagaaggaaaaaaaggggattcgtcaaaacaaggcataaactgcccccaagggggggggacatattaaagaaaattgtgggtatcacaggagctagcgagaagaaagctctggaggggcccagcgccagtgataggcaaattgaagcagcgggggatgcgcctcacagaaaacctcaaccaagaagcaccgctggtcaaaaaaaacgctcggaggaacactaccccggaaaaaaagaccccggggggtgaaaaaaggccagcttatg

SEQ ID NO: 116332 - DNA, 541 bp, Arabidopsis thaliana columbia
ggggaactatagtagagctatgacgtcgcatgcacgccgtacgtagcttggatcctctagagcggccgccctttttttggtttttttttttttttttttttttttttttttttttggttctacatttttttgatgtggctggtagagtttaggtcctaaaacggaaccaatatacctgaccatagaccggcgaaatggaccgcctataaggaggaggactactcactacaagcattcctgaaccaggggggagtaacggaaacaagcttagatggagcggaagcgagaggacctccacttaacgacgaggacccaggtgcaaagaaaggcgtgcaaaacgcagcgaaaggggccatgaaagggcactaatcccacgatgtgtcagggagataacggagggaacccggcccgacaaatggggactcaaggcagacgcctacaccgcactcagggagctaaaaaagagagttagaagcagctgaacagaggaagagaggggagaccggggcaccctacatggggcgggcgagacctgggggga

SEQ ID NO: 116333 - DNA, 554 bp, Arabidopsis thaliana columbia
agctctctacgactcactattgggaaagctggtcacgcctgcaggtaccggtccggaattcccgggtcgacccacgcgtgcgagccactggcatgacagctgattcaaggtcattggtacaacaagctaggaatgaggctgctgagtttaggttccaatatggttatgagatgcctgcagatattcttgctaaatggattgcagataagtctcaggtttacacacaacatgcttacatgagaccccttggagtagctgccatggttctaggtattgatgaagagagaggacctctactttacaagtgtgacccagctggacatttttacggtcacaaggcaactagtgctggtatgaaagaacaagaagcagtcaatttcttggagaagataatgaaagagaaccctgccttcacatatgatgaaacagtacagactgctatatccgctctccaatctgttcttcaagaagacttcaaagcaactgaaattgatgtgggagttgtgagagctgatgaccctctcttccgttccctgagaacagaggagatcgac

SEQ ID NO: 116334 - DNA, 513 bp, Arabidopsis thaliana columbia
  unsure (1)..(513): unsure at all n locations
aggggannnnnnnnnnnnnnnnnnnnnnnnnnnnnnnnnnnnnnnnnnnnnnnnnnnnnnnnnnnnnnnnnctttttttgttttttttttttgacaagtcatcctcatcgtcatcatacttatctaaaaaaatccaaaaacctaacaacaacaacaacaacaacaacaaaaaaaaaaaaagagaactcaaccatattggtagtgtcatgattccctacatggtgataacgacaataacattgatatttaataaaaatcatgtggataccataaggttttaggtttttttttcatgataatgatatggtatggtgctaaaaagggttttgtgtgaatgtgatattgatnatncagncatgctnnatgccatgccaaaactatggtggggaatggggnggnggaggggggggggggggggggggggggggngagaggggggggaggggggaggggggagaaggggggggaggggggggggggaggagggaggggaggggaggggggggaggaggg

SEQ ID NO: 116335 - DNA, 406 bp, Arabidopsis thaliana columbia
  unsure (1)..(406): unsure at all n locations
tttaggacttagagacttgacgtgctgccgcgtcgtagctgatcttaagcggcgccttttttgttttttgaatctaagcctctttattaattaacggttggttggaatttacatggactgtttaaaaataaaattttccccaaattggtttttggccgtgtccccaaaattcccaacccccccngggggggggtttccccatttttttttttggggggggaaatttacccccctcccctctggggggggggtttttcccccaaaaaagggcgcccccaaaaaaaaaccccccccttgtgggggaaaaccccccccgggggtttggaaccccccccgcccccaccataaaaggaggcgccccccctcccctgggggggtaattttttttcccccccccccccccaaa

SEQ ID NO: 116336 - DNA, 469 bp, Arabidopsis thaliana columbia
  unsure (1)..(469): unsure at all n locations
nnnnnnnnnnnnnnnnnnnnnnnnnnnnnnnnnnnnnnnnnnnnnnnnnnnnnnnnnnnnnnnnnnnnnnctttttttttttttttttttttttttttttttagataaatccttttttataatgtttcaagacagacatgatttcctagaccaaccatttcagcatgaactttttaataggccgacacaactggaaaacttgccataagaccttgaacactaggaagggggctttcctgcctatatatgtctaaagagaaggttttaaaaggtataggctttgaacatacactgtacgcgcatttgtgcttctgttgactcaggacgcttcatggacgtaagcgatgtaaagcccgacttcattgtgaccatacttggaaaggttggatgtatatttccttgaaaggagaaccacaagtcaccgttcggttgccgcaccacaaagctcctgagccaagaacttcttaca

SEQ ID NO: 116337 - DNA, 544 bp, Arabidopsis thaliana columbia
acgactcactattgggaaagctggcacgcctgcaggtaccggtccggaattcccgggtcgacccacgcgtccgaggatgcagcattatctcttcttatctctagagggcgtaggtgctagatcatctatctaagtctgtgtcctgatggacacgatcgacgtactctccggcgtcagatcgatgctacgagctgctttctcacgcagtgacgctgcttctactggacgcttctgctctcaagcgaaatacgctccaccattgctgagagccactgccagaggaagaccactgctctgtgctctccaagatactgtggaactgagcttctgagtggagatattgataccatattactcggctacaggttgagcgctaatgactagatagatgtctatctgtggccaaacctatggctggctctctgacgctcgcaatgatgatgcgtgacgagctagccagaggaacagtgaatctacagatgatgtacacaacctgtaccttgtagagccttcttctttagaaaaacttaggaacgaaaaccct

SEQ ID NO: 116338 - DNA, 557 bp, Arabidopsis thaliana columbia
atgatacgtcagcgtctctacgactcactattgggaaagctggcacgcctgcaggtaccggtccggaattcccgggtcgacccacgcgtgcgcggacgcgtgggtccatctctcaagacgtctccgccgtaatcatgacgaacgcttcttcagcgccaccgccgccgcaggcaaaacgcagacttgggagaacgagtaggtccgctatgaaaccaaaaatccacagaacaaaaactcgtaaaacgaagaaaacgtctgcaccaccggagcctaacgccgatgtagctggggctgataaagaagcattaatggtggagtcaagtggagccgaggctgagctaggacgaccatgtgactactatggagatgattgtaacaaaaatctcatgagcattaatggcgataatggagttttaacgtttgatgatgatatcatcgatcttttgttggacgagtcagatcctggccacttgtacacaaacacaacgtgcggtggtgtgggggagttgcataacataagagactctgaaggagccagagggttctcggatacttgg

SEQ ID NO: 116339 - DNA, 545 bp, Arabidopsis thaliana columbia
  unsure (1)..(545): unsure at all n locations
nnnnnnnnnnnnnnnnnnnnnnnnnnnnnnnnnnnnnnnnnnnnnnnnnnnnnnnnnnnnnctttttttgtgtttttggctttgaagatttctctggaggagatgatgcttttcttggtttcgaaaacgaacttgaacttgactttctcacgggtgtcttcccacctgtcgatcttgcaggaggagatgatgatgatggtttgtctctggagtttcgttgcttgctcacttctctgatctgcttaacgcttcttcctttctcttgagtgatatgggttcttgcggcgtctctcctcacattatcagtcgtgagtgattctaagctctcgttgtttctcattgcttcttcgattcgtgctgctaacatttggtccttcctgctcactagacttgtcacttttcctttagcacccatccgagctgttcttccagtgcgatgaaggtagtcaatcgagttctttgggaaatcaaacatgactacatgatcaacgtcgaggtccagaccccttgcagccaaattcctgcccactagcgtggggacagtc

SEQ ID NO: 116340 - DNA, 556 bp, Arabidopsis thaliana columbia
  unsure (1)..(556): unsure at all n locations
atgannnnnnnnnnnnnnnnnnnnnnnnnnnnnnnnnnnnnnnnnnnnnnnnnnnnnnnnnnnnnnnnnnnnnnnnnctttttttttttttttatagaactcatccctaaggattgaagtatcaactgataaataaaactgaaatgaggtgataaacttcaacagtgatacaaggaagaaaacaaaatctgaatagataaaaaccaaaacaagagttaaaccaaaagatagatgctgattttcttcagtacttgatcgatgcaagaacatcgagctgggatccaagtttctcctctgcaaccttctcggcctttgccctgagcttggtgagttgcttcttacgctcatacaaagcttgtgacctctcctttctcttcacctcaagctccttgatggtatcgtaatggttccagccaacttcagaagacaaacgtcccaacaagcagtacttgtgaccagcctgaagcctcaacaccctaaacanaacanaacanacgaaaaccagttgacagctaaaacacattgaacataaccaaaattacaagatagaacaaag

SEQ ID NO: 116341 - DNA, 541 bp, Arabidopsis thaliana columbia
  unsure (1)..(541): unsure at all n locations
atgnnnnnnnnnnnnnnnnnnnnnnnnnnnnnnnnnnnnnnnnnnnnnnnnnnnnnnnnnnnnnnnnnnnnnnnnnnncttttttttttttttttattaaattagttagatgtttttttttttcaagaatggttcatttcttacaatataccaaaagctcaaaaaaataggtcattgcacaaagatatcaattgaagcatacagcatacactaagggtgtacatttagattgtgtattgagtttataatatatacacattctactttgcaggctttgtcacacgcctgctacacgctgtaggattctgagttctccacaagctatgttgatgcgttagagcataggctagtcgatgcaccatatgctccgcttatactggacgttcagctcctcgatgtgatcgttatgaatgcagacaacttgatacacaaacgttcaataagcattacttgcgagcagcctgtaggctctcaccctacacaagacagaccactcgatacccagtggacagttgatacacattgaacataaccgaaatta

SEQ ID NO: 116342 - DNA, 543 bp, Arabidopsis thaliana columbia
  unsure (1)..(543): unsure at all n locations
ttgnnnnnnnnnnnnnnnnnnnnnnnnnnnnnnnnnnnnnnnnnnnnnnnnnnnnnnnnnnnnnnnnnnnnnnnnnnnctttttttttttttttttaactaaaactctcgttaataatcaaaggttacctataacatactaaaaagtaaaagcagataatgaagattagttctctatgttgttaaacagtttaagtaacaattaactcacattttagcatttatatatgtagaattagaagccggaaaaaataattatttgctgagttgagtaattcccattaagtggtcacccaaaattgctgctgcttccaattaagcatagttttaggctcacatccattttcattgcatctcctttttggcctgttgctaacctttttatttccacttttaccctcaaagttctcattattccccacaatgccctcctcgtcctcttcttcttcttcttcttcttcttcttcttcttcttcatcttcttcttcttcttcttcttcttcttcttcttcttcctctgcatcggattgatcatcttcatctt

SEQ ID NO: 116343 - DNA, 536 bp, Arabidopsis thaliana columbia
  unsure (1)..(536): unsure at all n locations
ttgnnnnnnnnnnnnnnnnnnnnnnnnnnnnnnnnnnnnnnnnnnnnnnnnnnnnnnnnnnnnnnnnnnnnnnnnnnnctttttttttttttttgaataaaatgaaaaatactcttcttgttgatttcactctttaacaaaattgtactcgaaaaatttcattgaagcgtttaatttaagcaaagtatataaccgttaaagcgggaaaacaaaaagcctttcaaatttgctttttggatttagggttcttaagtttcttcttcaccacgttgttctgtttcttcaatggttttttctcttcagactgcaacaactccattctcactctctcgtcctcttttatatcccgaagaatagtaaagttctctttcaatttcttgctgagcttaaccatgtctatttccggaacattcttagcttcttcaggcaaactctcccgtttccgtttgttgttcaatttccgagactcgttcttcggctcaaacgattcctttacaagagagaaatctgcaaaagcctgttgtggagtcactgca

SEQ ID NO: 116344 - DNA, 520 bp, Arabidopsis thaliana columbia
  unsure (1)..(520): unsure at all n locations
nnnnnnnnnnnnnnnnnnnnnnnnnnnnnnnnnnnnnnnnnnnnnnnnnnnnnnnnnnnnnnnnnnnnnnnnnnctttttttttttttttttttttttttttttttttttttttttttttttttttttttttttttttttttggaggaacacccaaaaccaggggtttagaggaataattcaatataatcggggatcgggttaaacatgaaaagacccaaacttttcaataagtttcactgaccaactcaaaaattaaccctcccccttgcattagcccagggaagatgatttaaaaaaaacaaaacaaaaaaattcgtctgccaaattttaaaaaaccccataactataatctatacatgaggaccccttcccgtaaaattttaaacgccaaaccctttattttggaggaggggggtattgccctggatatggaccttgggggtaatataaaggttgcggagggtttggttgaggagggtaaccctaggatggcgggggaggggggatacactaaggga

SEQ ID NO: 116345 - DNA, 641 bp, Arabidopsis thaliana columbia
  unsure (1)..(641): unsure at all n locations
nnnnnnnnnnnnnnnnnnnnnnnnnnnnnnnnnnnnnnnnnnnnnnnnnnnnnnnnnnnnnnnnnnnnnnnnnnctttgttttttttttttttttttttttttttttttttttttttttttttttttttttttttttttngggaaaaaacatcttggatttcataaaaattgggggcaatttaatccttacgtaaaggccaccctattcaacttttgggcattaggatcccgttcaggcgggggtggctttcataagggattcctaacatatcaaaaaattcccgtttttgaaaatccgtctttttccaaacccaaaaaacgggtggaattttaggattcctcctgggagtaaattcttttatgcaaattttttccgtttgattaacacctttttttttttttgaaaaaaaatacaccctggttaaaaggccccctggtgccacttttttggcccttttggaacgtaaatttttgtacccttttccatttaaaattcccgcattaaaatgccaatttttgggttttattttgaaagtctttattcttttgtaattgaaccccaacgatcttttacaccacccgcttttggttaccaaacggacaaagggcccttgatttttttattctcccccaccttttt

SEQ ID NO: 116346 - DNA, 209 bp, Arabidopsis thaliana columbia
  unsure (1)..(209): unsure at all n locations
tgacgtcgcacgcacgcgtacgtaagcttggatcctctagagcggcccgccctttttttttttttttgtttgtggaagaactagcatctaaatacagcgtgataaggtattttaaagacagatcctagntgatacgtttcatgtgtcgaaatcttgaagcatcagaagcataggacttcgtaattagtctatctgtttctactaacaca

SEQ ID NO: 116347 - DNA, 715 bp, Arabidopsis thaliana columbia
actatagaaagattatgacgtcgcatgcacgcgtacgtaagcttggatcctctagagcggccgccctttttttttttttttttttttttttttttttttttttttttttttatttattattttttttttttttttttttttttaattgttttttttttttttttaaaaaaaaaaaaaaaaatatgttttttaaaaaaaaaaaaaaaatgttaaaaattggggcaaaaaaggaaaaaaaaggtttattcaagaaataaaaaaaaagggttttgggggagtttggggaaaaaaataaaaaaaaaccgtttttgaataaaaacggaaaaaaggcttaaaagggaaaacgggattgtttttcaaaaaaaaagactaaaaagtgttaaggggctttttagaaaaaaaaaataaattacccgtttttttctaaaccggggggaaagaaaagttagaaaaaaaaataaaaaatcattggggggggggggcttttagctcaagaagccaacggaacccagttgttttgtaaatatttgaaaaaagaggggtttcctttcttttgaaaaaaaaggaacgtgcgcggagataatttttttaaaaaaaaaaaaggctttgttgaaacgaaaggctccagccgtgatgcggggtttatttttttgtgggaccacacagaaggcctaagtctttcaaaatagggggggaaagggggaatgttgaaaaa

SEQ ID NO: 116348 - DNA, 488 bp, Arabidopsis thaliana columbia
atacgactcactttagggaaagccggtacgcctgcaggtaccggtccggaattcccgggtcgacccacgcgtccgatgtatctttccatcacccatccggtgaaattgtttgactgaaatataatgttaacaaatcactgcttattctacagaatctgaaccgccaaatctgcctttataaataagctgtgggcgagattgttctaaatcccacaggattgctgaagagatccattctgtcgcatgatacatcatcggatgcctaccgcatgtcccaacaggcgacaaataacagcctgcaccaaccgaacactccggattacatgctatcaggcaatactccatatcatataagtcctgctgtagcgccgccgtttgctcctccacgagcagatgtctgttgattcgacgctaacggaagccttaagagcatgcttagagctaccgttaacgtaagccaggggagagttctaaagcgcggcgaagaa

SEQ ID NO: 116349 - DNA, 542 bp, Arabidopsis thaliana columbia
agagagctatgacgtcgcctgcacgcgtacgtaagcttggatcctctagagcggccgccctttttttttttttttttttttttttttttttttttttttttttttttttttttttttttttttttttttttttttttttttttttttttttttttttccgaaaaaaaaaaaaaaattcccctttttttttttttgggagggccttgggccaaaaaaccccgttttcccaaaaatttttttataaaaaccatttggggttttcccccgcgaaaaaaaaaaaaaattccttttttttttccaacggggggggaaggggaaaacccctattttccctttcctttaaacccctaaaaaaatcccggtggggaaaaaattcgtgggcccttcttattccctggaccacaaaattttttttttcccccaaaaaaaagggcccaagaaatggggcaataaattccccccaaaaatcggtaaacaggggggatttggtttgcccgaacccctacctttaaaaaaacccttttttcgccggggaaagaggg

SEQ ID NO: 116350 - DNA, 491 bp, Arabidopsis thaliana columbia
  unsure (1)..(491): unsure at all n locations
cactatagangagttatgaggtcgactgcacgcgtacgtaagcttggatcctctagagcggccgcccttttttttttcttttgttttcttttttgttgtcttcaactagtattttacatcataagcagacatagggctgatcttgacatagacggcattgtcatagccaggaacctacactgaacccaactaaagaaattgatagagctctatgcctcactttttctaagctgtgaggtggatattactagcataaccaaaagagactccactctttctcctacaggttatgtgcaagtcagtgtttccagcggcgctttccctcatggtacacttactgatcgcgacccgggaaagctctcaatggctagtgcagtaggctgcatccgattgctctatatcgagcgcctacgttatgctcccagcctagcacggaggtcggagatactgctaagaattaacctctcactctctgaaaccacaggctgaac

SEQ ID NO: 116351 - DNA, 538 bp, Arabidopsis thaliana columbia
gactccttaagggaaagacggcacgcctgcaggtaccggtccggaattcccgggtcgacccacgcgtccggctcaacgtacggtgtaagattttatgaaaacggacttaccggactgaactgtacagctagcattatgcagtaacatagaagacacatcttaaggatcatgtgataatcgatgctcgagataatcttcatcgtgatgttcattttctaaacagacagaacagatgataacggggacaatatctatagctagactaatatgtatacttgatagattgtcacggcaacaggctacgtgctgaaatcctatgtgtgttatcactatctttgctggaactgatagcgggaatgctccagcttgccattccagtatgagttcaccccgcatggtctgatatatattgagcaagcttgataagacgtaggagtgaggaatcattatagcaactatctctgaatatcactacccccagggtgctgctaatgactagtacaaccgaatccgcttaccttgtttatgaccgagctct

SEQ ID NO: 116352 - DNA, 548 bp, Arabidopsis thaliana columbia
actatgagactatgacgcgctgccgcgtcgtaagcttgatctctagagcggccgccttttttcttctttcttttttttttctcttttgtcccttttccaaacccgtttttctcaatagatgggagaaaggaactgggttccaatttgagttaacaaaaaaggcctgctttgaaactctcctcaaataatattttgcaaggggtttctttctatattacaggttgcatcttggttattactttccgagttaagaatctgcctgaggtttgcctccaaaagcattttttataaaattgatttctcgaacggtgggcgctgattgatttttgcgtttgggctaggtattcgattggggggtgttctgagtaaaccgcgaaggtctgacattgtgccattgggggtgttttggggcgaatgggaatccaccctggcggggtgtgtcgttgtaccttgggggccggcggttgggggacctagcgtggattcggaaagcgtgggcgcggggggcgggcgggcttctggggaaggagatgcctgcgaaaaggtgt

SEQ ID NO: 116353 - DNA, 679 bp, Arabidopsis thaliana columbia
ctgaggaccggccgaattccgggtcgaccacgcgtcggtactaaacgtctgtgatcttacctcttctcacagaggaactctccacctccaagccagtcagatcctaccttaaattcgtcttaccaccaacattgcttcaccatcgaatgtgatcccatcttcgctctcgaatctggcaggcctgtatcattcaacacccctctggacaatattcacagtctgatagatacgctgagggggaagatgatggctgcctgtacttattgagtgtgctgtgtaaagaacgaaaaaggtctacattgtggggtagatgcacacttgatctctccagacgtagcttgaaccacatcgacttatgaatgtctcatgctctatacataagctggttgtacagacgttcaaaaatgataacaagatttgaaaatttgggaagggttgacgtgaaaggattacaaaaaaagggtgtggaacataaatagtggggcagggacgaagtcatgcgggtgtacctgccggactccagattcttcatgtggactgattcaaccgaactgtatatatatgcaacacactactcttctcccagactcggctatggaccgttaatctctgcggtggactctttctaatggactgtgctggaaatgtcactgtaaaaccatcgggggtaggtgagtct

SEQ ID NO: 116354 - DNA, 908 bp, Arabidopsis thaliana columbia
  unsure (1)..(908): unsure at all n locations
gacgtcgcctgcaccgcgtacgtagcttggatcctctagagcggccgccctttgtttttttttttgggttttttttttttttttttttttttttttttttttttttttttttttgtcccaatttttaattaaagaagggttttttagctttaaaagcagaaccatgaaaaaggaacccaaggggtccccccggccaaaaaaaaaggttggggggggggggaaaacaaaaaaaaaaaaaaagggaggccccccgggggggggccgggaaacccattttttttaatccaaaaaccaaaaaaaaaaagaaaggggggagccccnaaaaggggaggagaaagagaaaggccaagccaaaaaaaaaaaggtaaaaccacccggggcggggggcccccaaaaaaatgggtaaaatgagggggggggggaaacgaaaagggggggccccgcaccccacagagaggaggggcaaaagaaccgggacaaaaagaagggggaggagaaccccccgggggggccgaatcttttgttttaaaaaagaagagagggggccccccccccgatacttaagaaaaagggaacgcgggggcaacaaaattctagggacaagaaggggggaaaccccccgggagtcaaaaaaggagggaggccacctctgaaaagaggaaacacagggggggggggcgaaagagaaaataaacggggcccacaaggaggggagaaagggccgcggggggggccaacagaggggcttttttccaaccacacaccccggaagacatggaaaaaaagaggggggcggccccaaacaaaaaaaaagagggggggggcccacaaaaaagagagggggggccgcccaaaccagagggggtgggagaccacagggcggtgtaacacacccaaagagaaggggg

SEQ ID NO: 116355 - DNA, 585 bp, Arabidopsis thaliana columbia
actatagaagattcttgacgtcgcctgcacgcgtacgtaagcttggatcctctagagcggccgccctttttttttttttttttttttttttttttttttttttttttttttttttttttttttttttgaggaaactaaatcattcatagaagggtttatcctccaacaataccaagcttcccaaggattttttcgaaatcattttcttttcaaaggcaattaaaacttggggggaaaacatggagaattaaaaggcacaaccacctcctgaagggggaaaataaacccttagccaaaaacccgtttttttttgtagagcaaattataaacctttaaaaaccatttactttggattcacggcccccccaccaacagaagggttttgtcccattgttccaaacttattctgctgcatcatatattgggttgattcattgccctgggtactatactggtgataatatccctgcatacccatttgattcccatagcctggaataggccccattgacgggaccggaaccggaacccccaactttccgtttcttcctcccccggcttgaaagctttgttgaggaaccggcg

SEQ ID NO: 116356 - DNA, 634 bp, Arabidopsis thaliana columbia
  unsure (1)..(634): unsure at all n locations
ctatagnagagtctatgacgtcgcatgcacgcgtacgtaagcttggatcctctagagcggccgcccttttttttttttttttttttttttttttttttttttttttttttttttttttttctaggggtttaaatttttattttacttatggactattactgggtcgtttacctttaatcattacacaaaccattatacatgccaagatgcaaacattttttattaaaaacggacaaaaagggctgggcggtgcaaaagtccaaaaaccacttaaaaccgtggaattttccacctttcgcgcctttggaaaaacgaaaatttggataacccaacgacggataaaccctagccatccaatagttaaagggcgcaaaagggcatcctttaaaacattcctaatttttcgtttttatctaagatttttgggctcacatgtcaggtatatacaaataaataagttggggcaaataaaattcacatataaagaaactggcagcattcaccaacagaaaaaataaaatcctttagggatcgtaggaaccacaaatttaaataagtttgtgagaaggccggagttaaaatttaccaggggggcccaaagaggggattaaaaagattgcgaagttagaaactg

SEQ ID NO: 116357 - DNA, 770 bp, Arabidopsis thaliana columbia
ctatgaggagagttatgacgtcgactgcacgcgtacgtaagctaggatcctctagagcggccgccctgtctttggtgatattattgatacattcattcggtgcttgtctttaatgactctttagcaaccaaccccaacacattcttgtaatgaactactattgactagcctcttttatctgaatcgctaaacgctctacctttaacctatctactaaatttgtccatggggacttgtatgataaaaaaatgtgtcagggctgcagaccaaaagagctttaaagaccgccccgatgattgtatcctttttctaaccattgacagggatcccgatcttggggatccttgctaacccaccctggcctgggagggcaggacacttatctggggcaacctagaaaaacttgaccggccggggtttcttatcggcgagactgggaacaccgggaccaaccctttcttaggggcccccccatggacccccatttggccaaatgccaggctattgaacctggcgaaccagatacgccctccgaaatggcgcccccctgaattccattggaccgcccttgctccacaaataacccccggggttcggggaacccccaaattcttccatttaatgaacaaacccccacgccggctctgcgtctctcccctctcctatatacctgggcgatgcttatcctccccgttaaaaaatccctcgcttttttgccaattaaacggacccccacgaccgaaaagtggcgtttggtccgcccaaaaaca

SEQ ID NO: 116358 - DNA, 491 bp, Arabidopsis thaliana columbia
atgacgtcgcatgcacgcgtacgtaagcttggatcctctagagcggccgcccttttttttttttttttttttttttttttttttttttttttttttttttttttttttttttttttttttttttttttttttttttttttttttttttttttggaaaaaaaacgggggggcccttgggatttaaaaatgttcccctaaacaaaggtttggttttgggaacaacaaaaaccccggggaagctaaaggggggggggccttaaaattttttccttttaggggaaaaacccataacaagttttgttttttgaatttaaaagggtggggaatcaaaggggtttgtaccttcttccttttttttggggggggaagggttcctaaaaatttaaatttttttccttttcccccccccttcccccggaaacctaaggggggtttttttcacccccataataatatccggggttactcccccccctaatttttaataaggg

SEQ ID NO: 116359 - DNA, 691 bp, Arabidopsis thaliana columbia
ctatagaagagttatgacgtcgcctgcacgcgtacgtaagcttggatcctctagagcggccgcccttttttttttttttttttttttttttttttttttttttttttttttttttttttttttttttttttttttttttttttttttttaaaggaaaaaaattggtggcaaacgggtttttacttttgggggtttaaagccccccccgcaaatttttttttttttttcaaaaggggaaaggggggacttggaaaaagaggccccccctcaggggatattttaaaccgggcaaaaaagggctttaaggaacctccccccttttttggttaaaaaaatttttggattttttgacctccttttttaagggggggaacaccccctttgccttgggtttggttctaaaactttttggccccggttttattcccttccacaagaaaaaaaaatatctccctggaacctttggtttaacccctgggatggggaagatttggttcccctttttttttttcaaggttccccctaccctcgggcctttcggtgtgactttttttaaaaccttttttaccaaaggagactttatttggggattggaggccaccacccctttaaaaaaacattttccccaccccacaaaggggacattttggctcacatttggcggggtttaaaaaatttgttttttgggcaa

SEQ ID NO: 116360 - DNA, 793 bp, Arabidopsis thaliana columbia
  unsure (1)..(793): unsure at all n locations
actatagaagagttatgacgtcgcctgcacgcgtacgtaagcttggatcctctagagcggccgccctttttttttttttttaatatatatttttctttaattacttatcttgaaaaagcagcaaaagttttatttatttatatgagatgcaaaaacattacacgatatgaactatactgccttgacaaaataaaggaagatacaaaagaaaactatgaatcgtggggcctatcacatttacatatctaccaaaagacatgttccttaaaatgtgatagatccacgcaaatcttttgtaagagaagataaaaaaccgatagagaatcgagacgtaaacctaaaacggttttagttcgataatgaaatccacatgatttcaattccgcaatatctggagtattagttaagcccatttggcgataatcgacattccaccgcacccgagaagagccgcgattaaacacttgaactgcattttgatgctaccttgaagcttaggtcccatgaactccgcagctagatgatccacgagtgccatgtaaatgagcaatccagcggagcatgcatttagaagtccaaccgtgatcaaagcttttgggctatatcttggtaaacagtgaagacnatccctacgctattcgatggtgtgttaccggaaagacgcctacaattcttatattgtactagctgagatcaccgcagacatgctcgacattgaggaagaaagcgataatcttatgtgcaggatagtgtctaaatatcatgacacgtgacatatccagtcagacatgat

SEQ ID NO: 116361 - DNA, 786 bp, Arabidopsis thaliana columbia
  unsure (1)..(786): unsure at all n locations
ctctactcactttagggaaagactggacgcctgcaggtaccggtccggaattcccgggtcgacccacgcgtccggcaacttcaactgcgccggaagaatgtggaagcgagtcagcgaaccccgtgcgtcaacaaagctaaagctatgcctctcaaagtcatagcaatcttcgtaatcctcattgcaagcatgattggtgttggagctcctctctttatccgtaacgtttcgttcctccaaccagacggaaacatcttcactatcattaagtgtttcgcctccgggatcatccttggaaccggatttatgcacgttttacctgattctttcaaaatgttgtcatctatatgtcttgaagagaacccgtggcatagattcactttctccggatttctcgctatgttatcgggtctaatcactctagccattgactccatggccacgagcctatacaccagcaagaacgcagtctggatcatgccccttggtcatagtcatggtcacgtgaccgcanatgatgttaccttaccaatagaagaagatgattcngtcaatgcacagctcttgcgataccgagtcattgccatgagacttggacctngggatcatagntcactccggggtcattggatcatctctaggagcaactagtgacactggcaccattaaagaactcatagcagctctttgcttcatcaatgttcgaggcatgagctcgcggttgatcctcagcgtagatacaattgagaaattgtatgcgtcttttcgcggacacaccatcggata

SEQ ID NO: 116362 - DNA, 750 bp, Arabidopsis thaliana columbia
  unsure (1)..(750): unsure at all n locations
nnnnnnnnnnnnnnnnnnnnnnnnnnnnnnnnnnnnnnnnnnnnnnnnnnnnnnnnnnnnnnnnnnnnnnnnnncttttttttttttttttttttacactaatcagattttatagtatatatatgtggagagagaggcaagtatagttcagacagtaacatactaaccgtatacacaacggtattatattggtaacatatcaaagctctctatatgtctctgaagaaaagatcttgctcgaggcttagactcaccgatttgatggagaagtggaggaagtgtaagaaaggacacttcgctgtgtataccagagaaggcaggaggtttgttttacccttggattatctcaaacatccaatctttcaggtcttattggagatggcagaggaagagtttggctccactatttgtggccctttacaggttccttgcgacggaggtttgatggatcacatcctcatgttgttgaggaacaagagtttgtctgaccatgatgatgatggtggtgatgatggtgtgaaagaagacgatgaaccaggatgtgtcccccatgagcacgtcgtgcaagggagccttatcggtttatatttcttccctctctttcgttgcaacgcagcccatgatcagagcaagctccagtctctagttttttaacaggttatggttggggagagcgcttttatacacaaaaatcttttcgtgaagtgcgagataaggatggtgacagagcctcctgctagagttttgaag

SEQ ID NO: 116363 - DNA, 692 bp, Arabidopsis thaliana columbia
  unsure (1)..(692): unsure at all n locations
ctatagnagagtctatgacgtcgcctgcacgcgtacgtaagcttggatcctctagagcggccgccctttttttttttttttttttttttttttttttttttttttttttttttttttttttttttttttttttttggggttttttttttttttttttttttttttttttttttgggggaaaaaaaaaaaaaaaaacccccacccctcccccccaaagggggggttttccccccaaaaaaaaaaccaaaaaaacccctttttgccccttttccccgaaaaaaaattggccttccaaaaaaaggggaaaagaaagggcccccccttaaaaagagaaaagccgaaaaaaaaatttttttttttcctttcaaaaagggaaaaaaaaaccccaggggggggaaaccccgaaaccgggggggggggggccaaaaaaacaaccgtgggggggggggttttttttaaaaaaaaaaaatattccccccgggaaaccttttttttgaaaggggcaccccccgtttataggggttttttaggcttttttcccggggggtttttttcttggaacgggggcctaagggaagaggaccctggccacccccgagagggctgtcccgtgcccaaaaccggggggggaaaatatttggtgccccaaatacccgggggaaaaacggcccgcaccccccttttaaaaaggt

SEQ ID NO: 116364 - DNA, 572 bp, Arabidopsis thaliana columbia
ctatgagaagattatgacgtcgcctgcacgcgtgcgtgagctaggatcctctagagcggccgccctgtctttggtgagattattgatacatttatctggtgcttgtctttaaagactctttatcaccaaaccccgacaacattcttgtaatgaactactattcactgacctctttgatctgaatggctaaaggctctaccttttacctatctactaataaactgaccatggcgacttgtatgataaaagaatgtgtcagggctggagacaaaaaagtctttagaaacgccccgatgattgtatcctttttttcaccattgacagggctcccgattttggggatccttcttaccccaccctggcctggggtggcaggaaacttatatggggtaacctagaaaaacttgaacgggcgggggttctttcgggcgagattgggaaaaccgggaccaaaccttttggaggggccacacaatggagcccaattttgcaaaaagacaggttaataaaccggcccaaccagatagccctctgtaaaattggcgaccactgaaatgccagtggcacgcccc

SEQ ID NO: 116365 - DNA, 854 bp, Arabidopsis thaliana columbia
  unsure (1)..(854): unsure at all n locations
ttaggtacnnnnnnnnnnnnnnnnnnnnnnnnnnnnnnnnnnnnnnnnnnnnnnnnnnnnnnnnnnnnnnnnnnnctttttttttttttttgtttccaaggatagtttcatttcctcctgcagtaactccaaatttacatttcattttaggaggcaaaactgtatatacgtttcaatggctttccccacttcttactttcatcacccataagggtttcaactactaaaattgtaactcaactgcaaaaaacaccttttcatctgcagagttataaagtatacattgtaactcaagtatctatgttcgtttgtagatctcggcaaaccctggggaattacgaattggggaagcactgggacaggatttcacctcaagatcaagaccagatttacttctctggaactcccatatgtaatcagctttaagattctctttctcaggcttcaactcttcagaatctggtaactcctgatctgagcaaggagaagtgcaaccagctttgctggattcttcagaacacgttggtatctgagagtatgcaactttcaagttgttatgtatctcttccatctttcctgtcatctcatctgctctgtccatagcgataagaatctcggctggatatttctggaatatgggcgcaaacctttgccggcaatactcactaaatagaagagtgagaaggattaacgggatggtgaaacctgaagcaaccgttgatagctttaacccgaaaaagcctagagctataacttgcgacaagatcagtgaaaagattgtagtgttgtgaaaacaggccatattgtcaccgctttatactttgaatatagacgttgatatctgaattttgata

SEQ ID NO: 116366 - DNA, 777 bp, Arabidopsis thaliana columbia
  unsure (1)..(777): unsure at all n locations
taggagnnnnnnnnnnnnnnnnnnnnnnnnnnnnnnnnnnnnnnnnnnnnnnnnnnnnnnnnnnnnnnnnnnctttttttttttttttttttaggctaaaacggattggacttgaaacattgccaggtttaaaacagaccaggtcctcacccaacaagtaggctgtttcaataacggtttatacgataaaaaaatgttacatgcaaaaacttttgcttgtaccaccagagaaagataatatagagaagtgagtggcgatgtaatctctagcatggataacccgatgcacatcctctgccctttcatgagatcattttccggtgatctctgcctctgaatgatctcacaagaagcttaccgtcaacaggcttgcacaaaccgacatcaaccacagttgtggctgttcctcttttggaatctggagatgggtcatccacgtaatagtcgaacaacattgctaagcatctgatttgatgagataggagatagttttcttgatctgagggataatcttcacatatgaaggtcacttctgctccattgctcgaagttattggtatgggcacttttatttgtcccatttcatttcctgatgaagaagatgcgtggagagacagagaaaacaaaggaggtcgaagaggatactccatgctaatttggaccattgcttctaacttccacaactttccgccatctggtttcctggagaaacaagcccaaactctctcgaaccatattccaccatgaattatagcttctcaggcataactcttcaat

SEQ ID NO: 116367 - DNA, 645 bp, Arabidopsis thaliana columbia
  unsure (1)..(645): unsure at all n locations
gaacaactatagaagagtctatgacgtcgcctgcacgcgtacgtaagcttggatcctctagagcggccgccctttttttttttttttttttttttgatcgcagtcaagactctttgactcttatcttttgtattaaagataaatgaacatgtgataagaataataacagattagatgttgcatgtaatactactagactagatctacagaaggatcaaagaaagttgtaccaaagtagacatcaataatgaaattgcaagcaaaacagaataaatgttgtctcctcgattgcaagcaaaacagaataattattgcaaattctcccctcgatcatcttgtgttagatatctgtgccgctgaagacacttctctcgaaaggattcgataaaaatcacagatacacatctcccaaactaacaacacagcacaaccaagcaatgcaaaagctttncaatgatagaatccagctcccatatataagcttttttaagatataaccggaacaagtntgttacagttggacattcttttttagaatttccggaaaaacaacatcctagtttcacacaaaagaaaactcaagttcatatataccatgaaaaaggtagatctgctgtttcttataaaaccaacatacacccgtgt

SEQ ID NO: 116368 - DNA, 663 bp, Arabidopsis thaliana columbia
  unsure (1)..(663): unsure at all n locations
cacgcgtacgtaagcttggatcctctagagctgnncgcctttnttaatcctttttttttttttttttagggatacagtcgacaagcaaccttagatataaagattcttacagatgattaaccattctcagaatacagatttaacactcatcgctggctaaatcaggcatcttcagtgggaaactgcttctccacatccgcgactggcttctttgcatcttcgatctctggaccttccttctcatccgtctcttccaattccgccaaagtggacttgaggtcagccaatgcagactcgagacgtttgtggcaatccggaatcatcatcctagactcacccaacacattttcctgttgtttaaggtcgtagggatcagcacctttgtccttcatatcagcagtcttagccgcttctctctcaacttctttctcataagagtgaagctctttcacaatccttttacatgttgatgtttttatcttcaagttccttatcgttgccattggattcaggcgatgatgggagaagaaggttgcttccgatgaatctgagagagaggacgccgcgtanaccgaggaggaatcggagaacaacaattttccagttggccattggaatagcttcttttagctttgcttggcatggtgaattattaaaaaaaaa

SEQ ID NO: 116369 - DNA, 579 bp, Arabidopsis thaliana columbia
ctatagaagagtctatgacgtcgcctgcacgcgtacgtaagcttggatcctctagagcggccgcccttttttttttttttttttttttttttttttttttttttttttttttttttttttttttttttttttttaaaaaacaagggagccaaattcctttaaaagcagcttaactttcacattcagaggtcagccaaaaacaatcggggaagaggggaaaaatctcggctaaacaaaatgcaagaaggggggagagggggggccccgcttgaccccagctttaatatcccccccttgggggacccttttccggtacattcactctgaggggccccccccccaagttctgcccatggggggcagaaatggctttgttgagttcatccccgtgagacgttgggacaaaccccaatccacgggaaccacctgtttcacgggcgaaaaccaccctaggttccacaattttaccatgcttactgaaaaggtggtctagacggcccttggccccccccaggggagattccctacatataccctgaaagcagggtcatatccccggggcccacgttggggacggga

SEQ ID NO: 116370 - DNA, 621 bp, Arabidopsis thaliana columbia
  unsure (1)..(621): unsure at all n locations
ctatagnagagtctatgacgtcgcctgcacgcgtacgtaagcttggatcctctagagcggccgcccttttttttttttttttttttttttttttttttttttttttttttttttttttttttttttttttttttttttttttttttttttttttttttttttagggggaggggcccccacctaaaaaaaaagggcccccaaaaaaatgcccctttttggaaaacccgggggacatccccaaaaaaaaaattttttagggggtcttcaaaaaaaaggggaaaaaaaaatttccccccaaaaaccctgggaaaggggattccccccccccttaaaaatctaaatgccgggaaaaaacccgggtttttctccaaaccaggggaaaaaccctcaaaacttttaacctaaaagccaaacaggggttttcacaatggctttttgaaaaagatttgaaccggggcccttatttccctaaataaaaggggaaaagggtgttttggtttttttacacccccccgggaggagatttatagggggggccctaagcgctcgggcgcaacaaaaaaaaaaaaacagtggggggggaaaaaaaactgggggggaccccgggggagaaaaaaaccc

SEQ ID NO: 116371 - DNA, 774 bp, Arabidopsis thaliana columbia
  unsure (1)..(774): unsure at all n locations
ggtnnnnnnnnnnnnnnnnnnnnnnnnnnnnnnnnnnnnnnnnnnnnnnnnnnnnnnnnnnnnnnnnnnnctttttttttttttttttttttatagaaaatataaatgttcatatcataagagtaaaattcagagttttcatttcacaagcattttccatcgaagacaaacagtaacaaaaagtaaaaaaagggtaaaacacaatcaccgtaaaaaaagcaattactgtgaaagttgttcgacggcagtgacgatctgagctggctgaacaaccgttcattcttccaatgtaccggcgtaaggagttgggacatcctgagaagacaacacatcaccggaacatttaagtaatcatggaagttctcgtttatttgcagtcgtcaaactggctccgattcctcccgttctaatacattcctgcacaatcaaaacccggggtgctttcttaaccgagttgccaatggtgagagatcaaacggtttaacaacctatgtcgatacctgggatataccgttggtacacacgtttggagcctgcattaatggaccctaatctagatacacatatcgtgagtgtcaccgggtagaccatattgcggaccgtggtaacccggaattcggacggtcctgaggcgaccagtttcccaactgagaaaattaaatttgctaatcaagccatactgttcctggcaaagtgtatccgtacaataccacagaaacgacccgaacataagggtaagctgggtgctatagatagtaaccacattaatgatgc

SEQ ID NO: 116372 - DNA, 608 bp, Arabidopsis thaliana columbia
  unsure (1)..(608): unsure at all n locations
ctgcaggtaccggtccggaatcccgggtcgaccacgcgtccggctgagaatagtgttgaagagaagaattctcttaacagtttgagtgagcctgctaatatactgaaggttataaatgtgtangtgggaatccacctgttgaaaagctgtcttattgacagactatggaacatactagtaatatccggcactacaattgaggcattgaaggtatcttacgagagggagactctcaccacaccgaagaggactcgcacgcctagacgaaactctgacgtggatcatgttttaagctggcctggctacaaaaagaggtcacagaaggaagattagtcgaccgatctgcagatattttgaggactgtatcaaaagagagtaattgagatcaggctatgcccgagaaatgtatgagtgtgaggtgcgtacgagaccacataccctggtagtctgctgttgaggagccaacgccaataagaaagtagtttgtaaaaagaactggacatgctactgggggtccaaaaggggtgcatgggagaggaatcggtccagaaagggacagatgaacgccacgcgtggttattcggttatggagagattaccgggagaaa

SEQ ID NO: 116373 - DNA, 818 bp, Arabidopsis thaliana columbia
  unsure (1)..(818): unsure at all n locations
actatagaagagtcttatgacgtcgcacgcacgcgtacgtaagcttggatcctctagagcggccgccctttttttttttttttagaaacggaccaaactcgttattcctttttttctttgattaagttcaacactaaaaattaaagaacacaaatttcaaccgccaaaacgtttactcctagccttcgttgtttatagaaagaactaaagtttacttatcgaacagccagagaagatataaaaaactttggttaacaaagaagttttaactttttttctttagttgtctttaaaatccttcgcctgtcattacttctggtcgtgcgcctctgtgcttcttcgacatatatggtccacttcgaacagcttcttgcaacttgtcaccggtttttagacgacgagggtcatcaacaaagttactacacaagaacgcttcgtgaattgctttgcagcagttatcccttgcttccattgctatttttgcagtttcagtggttgcatcccgaactatgtttattatctcttctttggccaagatttccaccaggcaccatggccgagccactaatgctgttaacgttcgataacccgcaagacgaatctctgagctttgttgaagaactgagaggaataaaccggatgggggtagttttgtgctctgtgctgcagcgtcgtatatcaaacatctaaggctntcttcagcttttccatcaactattctgttgctcttaaggtcgggttcacctgcgatgttngccagtgcatgcagtgcagccaactgttttcatgtgcattacgatcaaggcagagctccacat

SEQ ID NO: 116374 - DNA, 810 bp, Arabidopsis thaliana columbia
  unsure (1)..(810): unsure at all n locations
nnnnnnnnnnnnnnnnnnnnnnnnnnnnnnnnnnnnnnnnnnnnnnnnnnnnnnnnnnnnnnnnnnnnnnnnnnctttttttttttttttttttttttttttttttttttttttttttttttttggaaccaattgcctttttaactgatagatttcgttaacaaccgttttgaagaaacaatacattccgaagttctttaaaaagcagaagaaaatgattcattcaaattacaaaaaaccttcgtcctgaatagcgggaaacttgcagtacattttttaagcgatattttttttttactgaaacaaaccagaagctgtagaaacatcaggagcttgttgagaggatcccgaaggggctccagacccagcaggggcagagtcgggggatatagcaaaaaccgcggttggagacggggcaggtcttgatccaggaccaggttgctgggggtacgggtaagctgctggaggcggggcataggggtgcataggactaggttgatgatgatggttaggaggatactgctgctggaaaggcgatggatatatccatatggtgggggggggtatggacggggggaagncanaaaaaacaaaaaactcacctccgtcgtcaccatgtcttaaccgccagggcgttgagtgtgaaaggcgcgggctggtgcgggggcgatagggggggtgcgcggggcggcaaggaagagagcatgaggtaaggatgccgtgcactggggagagccgacacgcggtgacggcttgcgccgctacctctcagagccatctcaggcgcacagtcgccgcggccgagcccgc

SEQ ID NO: 116375 - DNA, 748 bp, Arabidopsis thaliana columbia
tgagagcatgacgtccatgccgcgtacgtaagctggatctctagacggcgcctttttttttttttttttttttcaaaaactgattatatgcggcaccattaaatgtgaacaaacagaggaatccacacttttacaacctactacataatacctacacgagcagacaacattttcatattcgggaaattatgtggtaaccttaccggttacagagagagctgacaacaacttcttactttttatttttgacagagctttaaaacctatccatgggaaaaaggatcggcgaaaaaaaagagacctagtgagaagatctgatctgtcataagtggaccgcgttctgaaatcccaacaggggtagctcatagagctgaatggaagaggataatgctccgagccataccgaatcctttctgggatccaggacacgaaagccggctacaagtgaagcgatccgaccttccgagaacttcctggatgctacgaccgggggaccggatccgacgtcctgagggcagtttctatgggcgaaaactgggatatgcatgtgtccgggaatggaccgtcatccacaatcaccgagtaaggaacgggggcagaggacataatatgggggcctgcttcacgaacgcgcatgtagatccacccggaaggtgttgccgggttttcaggaagacatcccccgccgaatggggccgtgcggaacgggggagggtggctggggggccgtcgcggggggtcgggcgtg

SEQ ID NO: 116376 - DNA, 416 bp, Arabidopsis thaliana columbia
  unsure (1)..(416): unsure at all n locations
agggagagagagagcaggaagaggccgggagagagaaggagacaaggggagcgcgacgcagcgaagaacgcagcccgagaggcacgacgcacagaaaagagctccctaaaacagggagagagcgagacaagagccaccggagagaagcgagagcgcaccggccaagcacgggacggagcggagcgacgccgagcggcgagcacgaggcgaaaggcgcacgcaacgagcaggccagcacacgcgcagaagagacgcaaagcgagagaacagagcgaacaaaaggacgcagcgagcacgaggagagaaagagcaaaagggcggagcgacgagcgagaagagaggagagacaaacagagcggagagagaggccgagacagcgaaacccgcaacagacgagaagacgcngaaggagcgag

SEQ ID NO: 116377 - DNA, 787 bp, Arabidopsis thaliana columbia
  unsure (1)..(787): unsure at all n locations
ctatagnagagtctatgacgtcgcactgcacgcgtacgtagcttggatcctctagagcggccgcccttttttttttttttttttttttttttatctatctattggattttttttttttttttttattttttttttgtttccccaaaaaggaaagtcagaacaggatctaaacacaggaaaggacgcgacaaccacaagtacaaggaagaaggggaaaagatctctggccaccaaacccaacaacaggggggcgaaaaagtatgaatacaaaaccccctagcggagccaccctgaaggccccgtcctggctgggccacccccgcggggggcccccccgccccatttatgaaccttgggagagcagacgaaacaagcaattcggaaaataacaggccagctcggagaagggaacacaacacaccaaacggaaagaactcgcccccccgggagggacagaaatgggaaaaccctacctccttgcgtgcgaaaaagaaaagaaaactgggagaggaacgaaccctctttccttccttgcacagggtaggagaaacggctgaaagaacctcactgttctaattgaggaaggaggagggcctgcccctcccttctaaaggaggaaccaagggggagaggcttcccccgcaaccaaccccggggggagggaagatagaggcgcacccaacacaaaaagagcccccggggggggggataaatcccatagagaccccagaaggggcaacgcccggtcaaacacgccaggaaaaaaaaagggggagagacggccgga

SEQ ID NO: 116378 - DNA, 648 bp, Arabidopsis thaliana columbia
ctatagtaagatctatgacgtcgcctgcacgcgtacgtaagcttggatcctctagagcggccgccctttttttttttttttttttttttttttttttttttttttttttttttttttttttttttttttggggcaaagcattcttgtccataaacaaatgatcccacagaaaaccaaaaagggacaaggggggaaactaagttcctgcactcgttcaaattttatttaaccgatctttggcctaacatgatccatttttattttcagacagaaagaaaacaaaaattctaataggggaatttgatttaatacaataaaaaaacaaccagtttttctttggcagaattgggattttggacaaaaaaaaaatcaacctctcatggaaaactgaagttccctcccacctaagttttaccagccgggggattaagggcaacccaaaaaaaaaaaatggtattggccccaagaccaaaccaaacttacccaatggggtggggttcttccttttcttcccattagacctttagaaaagggataaagatgcgccaaaacccacaaacggaaaaacactcccccaaagagtttaccccactggggaaccacactgtaaatcggcctggtgatatcaaccgcaatcgctataaaatt

SEQ ID NO: 116379 - DNA, 939 bp, Arabidopsis thaliana columbia
  unsure (1)..(939): unsure at all n locations
atgatatcgccggcactaatacngactcactatagggaaagccggtacgcctgcaggtaccggtccggaattcccgggtcgcccacgcgtccggagaaccaggacgctattgatcagccatggttggaatgcttgctgatccgaaagaggcccgagctggaatcagagaggttcacttccttccattcaaccctgtggataagagaactgctttgacttacatcgactctgatggtaactggcacagagtcagcaaaggtgctcccgagcagatccttgaccttgccaatgccaggcctgaccttaggaagaaggtactctcttgtattgacaagtacgctgagcgcggtcttaggtcgttggcagtagctcgtcaggtggtacccgagacaacanaagaaagcccaggtggaccatgggaatctgttggcttgttgcctctttttgaccctccaagacacgacagtgccgaaaccattcgtagggcgttgaatctaggtgttaatgtgaagatgatcactggtgatcaacttgctatgtggaaggatacctgtcgcaggcttggaatgggaaccaatatgtatccatctgcngctcttctcggacccacaaggactcgaacattgcatccatccctgttgaggagttgatcgagaaggctgatgggtttgccagcgtctnttcagagcacaaatatgaaatttgtgaaaagctgcaggagaggaagcacattgctggtatgacccgtgatggtgctatgatgcaccgctttgagaaagcgatatcggattgctggcgcatgctcagatgctgtcgtgggctcagaatcgcctacggacctgnctagtgcatatagtgcgtctactacaagcatttcaagatgagactcaccttatcanctcacacatcgattggtggttatgctatgttataggattg

SEQ ID NO: 116380 - DNA, 441 bp, Arabidopsis thaliana columbia
tagagagtctatgacgtcgcatgcacgcgtacgtaagcttggatcctctagagcggccgccctttttttttttttttttttttttttttttttttttttttttttgtgcaaccgactttttatttcatttttaagttttattgttgctgcttgcgaaaactaaaggagaagaatatcaacgagttaattttttggggacaaagaagcttacatttttgttaactaggaaaactggctttgcgcctaaacatctggggggaaaaaggcctatggggacaagagaagaacgaacatcatcatcatcatgatctactgcgagcgaatcttctgcggttatgcacggggcatacaccatgaaggagcaaggacaaaaaacgtgccttccatcaaaggtgaaaaactccgcggagacatctagccgggttgaagcctgcaaataaa

SEQ ID NO: 116381 - DNA, 339 bp, Arabidopsis thaliana columbia
  unsure (1)..(339): unsure at all n locations
atgacgtcgcctgcacgcgtaccgtagcttggatcctctagagcggccgccctttcttttttttcttttttttttttttttttttttttttcttttctggtggtctattttttatattatcttgaacaaaaacacaacccgagccgggacggggggaggggggaacagagggcagaaacagccggaatccgcgccaggcttaaaccatagacctcaaacggcgaaacaccnagggcaaggggcggtcaaggggcccaccccggtcaaaaaggagtacaaaaaggggacgaaggacgacaagggcctgtaaaagggaagcagaaggacaccccgcccccc

SEQ ID NO: 116382 - DNA, 624 bp, Arabidopsis thaliana columbia
  unsure (1)..(624): unsure at all n locations
ttaggtacnnnnnnnnnnnnnnnnnnnnnnnnnnnnnnnnnnnnnnnnnnnnnnnnnnnnnnnnnnnnnnnnnnnnctttttttttttttttttttttttttttttttttttttttttttttttttttttttttttttttttttggggccaaaggccaaacacaaaggggtgccttgttttttcaaaaaagcaaattttgcaaaagtccctttttggaaaaacaagaacccttacaataggggtggggaaaaattatgggaataaacaaaaatctctccctatgggaataataaacataagaggggggggagaaaaaaagaagaagaagaagacccaccctgggggggtcgaagatccgccctttgtttggttttactacccaggggagggactgggagtttaaatggccaagccctttagcttcacaaatgattccacatgtcccttgagggggggcagctccctaagcctaacgatctcaacttttttcttaacttggtcagggaactcaaacaattcttttgaacttcctttctcagggaaaatgttaacagcttcttttgggtggaaaccgggaagggtcctttgagcaagtgcccattgagccttttttttttcttttc

SEQ ID NO: 116383 - DNA, 807 bp, Arabidopsis thaliana columbia
  unsure (1)..(807): unsure at all n locations
aatacgactcctatagggaaagccggtacgcctgcaggtaccggtccggaattcccgggtcgacccacgcgtccggagatattgttagcattaaattaggagacattatcccagctgatgcccgtctacttgaaggtgatcctttaaaggttgaccaatctgctctaactggagagtcccttcctgtaaccaagcacccgggtcaagaagttttctctggttcaacctgcaaacaaggagaaatcgaggcggttgttattgccactggggttcataccttcttcggtaaagctgctcaccttgtggacagcactaaccaagttggacatttccagaaggttcttacagccattgggaacttctgtatctgttccattgctatcggtatggtgattgagatcatcgtcatgtatccgatccaacgccgaaagtacagagatggaattgacaaccttttggtcctcttgatcggtggtatccccattgctatgcctacagtcttgtccgtgaccatggctattgggtctcacaggttgtctcagcaaggtgccatcaccaagcgtatgactgccattgaagagatggcaggaatggatgtcctgtgcagtgacaaaaccgggacactaaccctcaacanatngagtgtggacaaaaacttggtcgaggttttctgcaagggtgtggagaaagatcaagtcctattatttgcagctatggctttcagggttgagaaccaggatgccattgatgcagccatggntgggatgcttgctgatccaaggaagctagagctggatcaaggaagtc

SEQ ID NO: 116384 - DNA, 841 bp, Arabidopsis thaliana columbia
  unsure (1)..(841): unsure at all n locations
gatcgacccaacatcgaccccaggaacacattttaaccaaaaacttggcaaagcacagacagaaggaacccagagcaaacaggacgcccccaaacaaaagccaaaaacaaacgagcaaggcaccaaaaaaaacgcaagacaaccccccacaaaaacaaaaaagcacctcctcaaccaaagaggggcggtcccaaaaacaccagaacgacacacgagacaccgcacacacgccgcaccaccaaccgaacgacgcccgggaacccaccacgagaggagaaagccggcgcgaggggcgcggaccggagcccggcgcacccaggaggcgagagccggccgagggagcgaggtcggccaggcaagcgggagcggacgaaggcggggggagccggcgcggcgggaggaggcagcaggcggcggcgagagcgcgcgaggaggcgagcgagacaggcaggccagcgagcgacgagccgcgggagacgggcgagggcgaagacaagaggccagagagcgggaagccgcgagcgagaagaaccgcagagccgccgcgaggaggaagaggcggcgagagaggaagagaggcgcgtagagaagaggagagcagaaacagcgggccggcggcgaaagggcagaagagagagagggaagggagggcggaggcagaggagagnagggagaaggaagagacggggaagagaagcgagagcccaagcagcggagaggaggacgaggagccgagggaagcgagagcggagcgacagccgagccgcgagcgagaggcaagagacaggggaggaaagaggacgaaggagagcagacacgaagcaggaaggagagagagagg

SEQ ID NO: 116385 - DNA, 853 bp, Arabidopsis thaliana columbia
  unsure (1)..(853): unsure at all n locations
agggaaagctggccgcctgcggaccggcacgaatcctgggcgcccacgcgtccgccaacggacgaactcatagatgttccggtcaaccacaccaagaacagaaagaaaggggtttcagaccagcaccagagtgagagagacagctgaacagcgcgcagaagaaagagaagcttttcttgaggcggagcacccagaggctccgatgcctttgaagatcatagactgatgtagcagactaagaggggcggctctcagcagcgcgacgatctggtgagctgcgactgaccacgagtccgagcccggactaccgacatttagagagcaacgccatcggcgagctcaagtacatgcctggtgcgaggtgccataccgggtataaaggcgctgatctgtaccaggagctcatggcgcacacgcagagacgccaagctgggctccgcttattcctgaccatgcgcccgcgatgacgtcacaactcttgggcagggccgagaaaagggcggtacntgcaagggaacanaagacgggccgggaggaatgtgtgcgacgaggacgttagggtgagaggcacaaaggcggggcagccagccggcacgggcctggccgagcccccagactcgtcagatgagcgttagcgccagaccggggggggggagaccaaagaagcagaacgaggagggcggcggagaaagagaggaggggcgctggccagggagaaggagcgcgagggggagcgtagggcgggagagaggacccgacggcgcaggggagggcgcagaagggcagcggagaagagggccaggaggaggggcgcgcgggcgcgagagggaggcccgaagggggggaggggggg

SEQ ID NO: 116386 - DNA, 809 bp, Arabidopsis thaliana columbia
  unsure (1)..(809): unsure at all n locations
cgccggcaggagccgggcacggaatacacggctcgaccgacgcgttcagacaggccgaaggaaaaaaccacacagcaagcaagccgcgagagcagagcacgaaacagccagcacagagagcgaagacaagacaagacggcacgacagagcgcagacacagcagcgcagcaagggcgccgagaaacaaagggccccgtcaccaaggggggaggagacagccggggcggccacaaaggaaagacacaaccaccccggaaagaagagaaaggacggagcggcaacaggaaacaggccccaggacacggagacggcgcgggcaccggcggacggcggcaacgggaaggaagccaggagaagcggcggcgaggacggggggagaaaggggacgaggcgcgagaacggggcgggcggcgacggagggagggcggcggaggagggcgggcggggacacggagcgaggagaggggggacggcagggacgggggcggcgcagcgagggaaggagagggagacgtcgagggcagggcgggcagcgggagagggagagcagaggaagagagggaggagggcggggggaggcgaagggagcgagggaagagggggacaggggaggggggaggacgcggagagcacggacgcgggagcaaagaaggcgcggagagacggcagcgcgggaggganaagacgagagggagggaggcggcgcgggaacgaaggacgagcggagcagacaagcaggacaggaaacgacgcagagggccgcatgacgcgaggacggagcgagaaggccggagaggaagagcggagag

SEQ ID NO: 116387 - DNA, 588 bp, Arabidopsis thaliana columbia
  unsure (1)..(588): unsure at all n locations
ctatagnagcattatgacgtcgactgcacgcgtacgtaagcttggatcctctagagcggccgccctttttttttttttttttttttttttatacagccctaaaaaacccataagaatatcttgctaaattaacagagggatgataaatatttgacacttactcacacgaggagggacaatggaaactaacctactgccctatgtggaacaaaaccattttatttagacgtaactgctaatttttacagatttcaattgcgcgcaaaaactattctggactaaaactacaccttttaatccctactttattgtaacaatatgcagcagggaagcgccccctagaccccctacagctttatatttgaaaagactacatcggatgtgtcggataaatcccactgaaagaaggcctctaatctttggataaagaaccctccctattgagaagatttctcagtgtacaaaacgcgctggctatgaagcttgcctgaaaaattttatcgccgaaagcataataaaacacctaaactttagaacatggtactgagaaatggtattgtcccaccgactgataaaacatgccgaaca

SEQ ID NO: 116388 - DNA, 530 bp, Arabidopsis thaliana columbia
  unsure (1)..(530): unsure at all n locations
atacgactcgctanagggaaagacggtacgcctgcaggtaccggtccggaattcccgtgtcgacccacgcgtacgcagaaattgtaatggaccctctagctctcgggtctgtagtatcattcgaatagtgaaactttatcatcgctcacatgagaagtttggatgcgcagtaggatgagatatgactggtggagaggaagcatacttatgctnacattagttcgtatcctgagggaggagtgctaccatatgatggtatacaagtgactgtgtgatgcattggtggttactgcgttacacaatgaccgcttgtgttgatcttgtaattttacagggatagatgctgcctaagtaacgaataaaggatgataatgagactacgaatgtgtaaggatgcatttgtcgcatcatcattacatagaacaccgtggtaatggttgacacgaatgatgattgatgcacgaatctggaaatgactgaggaggatatcgaatggaattgtttacacatacaagatatggggaaataga

SEQ ID NO: 116389 - DNA, 709 bp, Arabidopsis thaliana columbia
  unsure (1)..(709): unsure at all n locations
nnnnnnnnnnnnnnnnnnnnnnnnnnnnnnnnnnnnnnnnnnnnnnnnnnnnnnnnnnnnnnnnnnctttttttttttttttttttttttttttttttttttttttttttttttttttttttttttttttttttttttttttttttttttcaaaaaagggattttttttttaaaaaaaaatcccgacccggcccccctttaaaaaaagaaaaaaaattgggggggtaaaaaaaaaaaaaaaaaacgggggatttaaaacagggggccattcccggggggggggggaaagggttccccttttttggaaaaacccccccaaacccccccccgggttttttttttttttaaaaggggcccccgttttcaggggttttaaaaaagaaccccctttaggggtttccccggggggggaaaggggaaaataaagggggggaaaaaccccggccccccgaatccccccaagggggggggcaacaaaaattttccaaattccttgggggaaacccaaaaccgggggggggcccaaaatttttccggggattaacggcacctcttaatccggggggggatttaaccggtaaggacccccggggtccctttgggaaacccagagggtcccggagcgtttttttggggggccccgccaaatggggaactttaataagaggggcggaaaccccccgggaacccgggaagttggcccccgggg

SEQ ID NO: 116390 - DNA, 823 bp, Arabidopsis thaliana columbia
  unsure (1)..(823): unsure at all n locations
atacgactcctttagggaaagccggtacgcctgcaggtaccggtccggaattcccgggtcgacccacgcgtccgggtggttgtaaacatgcaaaacgacaatgtcgtgactcttccagggatcgctatcgtttggggactcaccattatggtcctcatttactctcttggtcacatctctggtgctcatatcaatccggccgttaccattgccttcgcctcttgtggccgtttccctctcaaacaggttccagcttatgtcatatcacaagtgataggatcaacgctcgcggctgcgacattacggttgttgttcggacttgatcacgacgtttgtagcggaaaacacgatgtgtttatcggatcatcaccagtgggatcagatcttcaggcgtttacgatggagtttatcgtcactttctatctaatgttcatcatttctggcgttgctaccgataatagagcgatcggagaacttgctggattagcaataggatcaacggtgctacttaacgtgctaattgccgcaccggtatcgagtgcctcgatgaatccaggaagatgtttaggacctgcactggtctatggttgctacaaaggaatttggatatacttagttgcgccaactcttgtggcgattgcgggtgcatgggtttataacacagttagatataccgataaaccattgcgagaaatcactaanagtggntcatttctaaagaccgtgagaatcngtagcacttgtaagagataagaaacatgggtggagtgatggagtattttaaatgattgtacaccttcacacacctacgatatggccttga

SEQ ID NO: 116391 - DNA, 499 bp, Arabidopsis thaliana columbia
atgaggtcgactgcacgcgtacgtaagcttggatcctctagagcggccgcccttttttttttcttttttttttttttttttattttttttctttttttttttttttttatatatttttgtgcgccaaacgccgaaaaaaaaacacgacttgcctcactaaaaagacgagacgacgggggaaaacgagggggacgaaaaaaaacttttcttttcggaggggaaaaaaaaggaggggcgggaacgagaaaccggtgtcccgaggagagagcgcgggtcgagccgcgcgcaagggccgaaagcgccggcgggcgcccgcccccgggtgcgcgacatgtcagagccgcccgcgtaggttagccaccacgagcgcgcgaggcagcctactccaagcaccacccccagccgacaactaatccatacccccgcctacagtagcggcgcgccgacgcataatctcagccgcacagtccaccaacatttacctccccagcgcacatta

SEQ ID NO: 116392 - DNA, 461 bp, Arabidopsis thaliana columbia
  unsure (1)..(461): unsure at all n locations
cacgccngcaggaaccgggacggaatacccctgcncgagcgacgcgtacgcagatanggaaacaaagaaaagaacagacaggggacnagaggagggacagagacngggagggggacccaccaaagggggaccaatctgctctaacggaaaagaccctggcggtcaccaaacaccaggcgaaagaaagggactttttttttttatgggggggggcaagcgacaaatcgaggcccacagagatgaccactccccaactcatacggatcgaaggcaaaccaacttcaacatgaaggagagggggtaaccaacgggaggacaggggggggaggacnggtaaaaggggggaggaacatgcgaggggggcggaaaacggtgcgggtggtggggaatgggaatcgtgggggtgatgggtgggagggagagggggcgaggcaagagaggggaaggggacactccggagg

SEQ ID NO: 116393 - DNA, 695 bp, Arabidopsis thaliana columbia
  unsure (1)..(695): unsure at all n locations
acactatagattgagcttgacgtcgcatgcacgcgtacgtaagcttggatcctctagagcggccgggctttttttttttttttttttttttttttcttaataacaactgtgtttttatttatgaacaacgtaaacatatcatgaaaaccaactattaacccattcttaatagcttggtatcatacaccttttagtcttttcttgatcatattatggaaatttaagtcgaataaaaagaaatatagttggtagacaggactgacaacaggggggaaaccgagcaactgcttaaaatggagccatggttgaataaccacaacagagtcaagcttcctggcagagccattggggttgagggacttcaatccttagatagtatttgaggccagcgacgaccttgttctgaacaaaacctaccgggtaaattggcatgggattcaaaattgccgggctctgttttcgcaatggaccctttngttcccttgctcgttctgggctttgttgatagaattggtccacgcgagacccttcaaggttgtgaaatttccttgtgggccccaaggttagagaccgcgaacttcccnaggaaactacgcttttactgaatgggntcgccgccgatggggtcacaacaggagatcaccgaaaaccttaccatggcattacaagaggagacccttcacatgggagccatg

SEQ ID NO: 116394 - DNA, 918 bp, Arabidopsis thaliana columbia
acactatagaattactatgacgtcccatgcacgcgtacgtaagcttggatcctctatagcggccgcgctttttttttttttttgttttttctttttttttgtttgagaggaaaaagacacaaattaacaccaagtgtctcaatagtgttataacacaagcttgaaacaaacagaccaaaccagagtttggggagtgaaaatacaaatacttgttttaacacaaatcaaatcccacatacaaagaacctgttccattattgacataacattggtaaaaaaaaaatgggaaagggaaatgggtcaaataaaacgaattcctacttttgctttttcctgggaagacggttccttgtttttttttcaaaaccgttaaaaaaacccacttccacgggggaaacaatattcgccgaaacatttggttttgaattaaaagaaacctggaattttgtccctcggttgtggttctattattctaaaaaaactttgaacaaaattctaaaaatgtttaagggggttccccttccgctttttcctttaaatttttcttacaacggtgggaatctaatcctaaatttataaaaaaatttaatgttttttttccctacctaaccttttttttttgaaaccggggcggacccggggtcaccccgtaattccgaccgggacctggaggcggacaaattttccatagggaggggtttagattgggggaaattggccattttttccctgggaaattgttaacgttaaatccccaaaataaggccgaaacataatggaaccgggggccaagaggacaaaccaataattgggggccacatgcccttcaaggggaactgggccaatattaaaacccccccccgggaagggtttgttttggcccaggggtttttttaccagaaaggaaaaatatccttc

SEQ ID NO: 116395 - DNA, 500 bp, Arabidopsis thaliana columbia
atacgactcatttagggaaagccggtacgcctgcaggtaccggtccggaattcccgggtcgacccacgcgtccgcccacgcgtccgagagaagaaaggagaggagaggaagaaagagagatgaagatgattctgatgagtctgaggatgaagatgacagacgtgtgaagagaaagagtagaaaggagaagaggagaaggagaagccgtcgtaatcattctgatgattctgattcagagtcttctgaagatgatagaagacagaagcggaggaacaaagtcgcagcttcttctgactcagaagcaaatgtttcaggcgatgatgtttcacgcgttggacgtggttcttctaagcggtctgagaagaagagcaggaaacgtcatcacaggaaagagcgagagtaggagatcgatctatatgagccattttcactctccatttctctcttatcaatgttatgtacaataatgaaacatgtctttgtatgttggatttgatttg

SEQ ID NO: 116396 - DNA, 542 bp, Arabidopsis thaliana columbia
cctatagactactatgacgtaccatgcacgcgtacgtaagcttggatcctctatagcggccgccctttttttttttttttggttttaaataaattgtggtcatactcgcatgttgtgtgattgtgattattccagctcacaggtatccttattaaatcgatattgtctggctatatcatagtgtttatacacaaagcacaagatacattaagcaatggtacacagtatctctcactaaacatatttttctgggaaaccaaagattttcatcatgcttctcttgcaatgcatcttcctttttaatcacacccttcccattgttctgacctccaggtggcatttcactcattaagcagcagcagccgcagcctggttaaaaggataatctggtgaattctttcacatcttccatataaagtccttgacctgggtgtgagtaaaacttggttcttaagactggaaccttgaaggtccattttttatatgcttaaaaaaaagccttgagctttttttccggtggcgaatcaccggccaggtttttt

SEQ ID NO: 116397 - DNA, 908 bp, Arabidopsis thaliana columbia
  unsure (1)..(908): unsure at all n locations
nnnnnnnnnnnnnnnnnnnnnnnnnnnnnnnnnnnnnnnnnnnnnnnnnnnnnnnnnnnnnnnnnnncttttttttttttttttttacatctattttttgattgcattgttttggttttgtttatacatgaacatatgttgtatagtacattgactctttttggggcaggggccaaaggcgaaaaacaaaggcattccgtggttttttaaaaagacagagtcagctaaaacacatttttgagaacaaacaaaccccaaacatggggtgggggaagtttatacataaaaacaaagttccctccgtacggaaaaaaaaaccaataggggggggcacgaacataggagctaaggtggcccccctctggaagggtcaaacacactgccttgcctggggttaaccaccccggggtgcacggggagtgtctaacggacaacccctatatccctacatggagtcccaaaaatcgcatgggtggggacaccgcccaaaccaaaaaaaccaaattttttattaaactgcgccaacaaacaaaaaaaattttttgatcttcctttttcgaagaaaaaaagtaaaactgttttgtgttggaacaacagaagtggtcttttaaaaaggcccaatgggcctttttttttttatctccgaacctttgtttaaaggaagacccgtccgttaaaaaagagggagcccgcctttcccccaaattttttaaggagacccttaaaccccccgtgagaaggtgaaaatttttgttagcaaaaaacaccccctcccttcaaaccccaaattgggaaatccaggtggggccccggccaaaagacaaacagtgcattgagaaaacactaggccggttaaagagaaaaaaacacccttttttgtaaaaaaagccggtaagaacttcttgggc

SEQ ID NO: 116398 - DNA, 441 bp, Arabidopsis thaliana columbia
gggaaagcctggtcgcctgcaggtaccggtccggaattcccgggtcgacccacgcgtccgcacaaagacgcaaacctcgcatccattcctgttgaggagttgattgaaaaggctgatggatttgccggagtcttcccagagcacataatactgaaaattggtggggaaaaaaggttgcagggagaagggaaggcaatattttgttttgggaaatttggactggggttttaatttggtttgttccaaatggggaattgggcccccccttgggttttttttttaaaagaggaaaaaaaggacgcctttgaatttttccggggtgaattttttggccctcggaattgtggttttggagtggtttaacaaagaaaaggctgggggtgtgttgggggggctttttttcaaaaaattatgggggggtttcacctggagggggcccct

SEQ ID NO: 116399 - DNA, 772 bp, Arabidopsis thaliana columbia
  unsure (1)..(772): unsure at all n locations
gacnnnnnnnnnnnnnnnnnnnnnnnnnnnnnnnnnnnnnnnnnnnnnnnnnnnnnnnnnnnnnnnncttttttttttttttttacggccacaatgctccaacttattcagagaattatgaggttgacaaaaagagtatatggttagggcagatctcttttcggactatacgaagctctagggaagagttagcttatattaccaatttccttctgaaggatgttcgtaatacgaatgctgaaaactatggctgaatggatctaacctgcgagacaaaaaactangcaaatgacgttcatagcctgatcggaccttatcgagatcgcttgtactgacccagacagaagatcgatagctgaaccctgaggactcgatcgcagcatcttgggtgtatttagacgtagcatgaacatttgccaagtgcaggagagcaattggtctatgaactgaaactggtgggccctatgattctgactataagacatgtcggtgtgggaagcaatctgcttttctgcagagaacaatatatctgatccgtgattgcctcactaagcgtgctatccgatcatagagaatcttgaccaagactctgtctttgaaatcaactatgaataattgcgcctctcctgggattaagggatcccatctcagatgctgtggaaacacctcatatatcttataaactctcctggtatgcagtgtactagacctcacctagatttgggtgaataaccatccataagcctaattggtctcatagcgagttggtcat

SEQ ID NO: 116400 - DNA, 444 bp, Arabidopsis thaliana columbia
  unsure (1)..(444): unsure at all n locations
nnnnnnnnnnnnnnnnnnnnnnnnnnnnnnnnnnnnnnnnnnnnnnnnnnnnnnnnnnnnnnnnnnnnnnnccacgcgtccgcccacgcatgacgccgacgcgtgggactgttcaagagtgatgcgtcaatgctagaatcttctctgatatgcaaatccagagatatgaagatatcttcctggagactggatacatattccatataacagtggatactgtacgtcgctagtgctgcattgagtgactcgattctatacatagatctccgtcaactcgaccataaccgagacggccctgaggactctgtcgtgcacatgagagatatcgcgcaacgttagggtcggactgttatccacaccaatcagtacgaggatgcgactgcgcgtgatggtatagacccattactcatagatgtcgaattatgctctattgcatgattgcag

SEQ ID NO: 116401 - DNA, 643 bp, Arabidopsis thaliana columbia
  unsure (1)..(643): unsure at all n locations
nnnnnnnnnnnnnnnnnnnnnnnnnnnnnnnnnnnnnnnnnnnnnnnnnnnnnnnnnnnnnnnnnnnnnnnngccttttttttttttttttttttttttttttttttttttttttttttttttttttttttttttttttntttttttttttttttttttttttggggaaaaaaacccttttttttttaaacaaaagagaaaccatatgggcttgtttaaaaaaaagagaaaaaaaatgtgccccaaaaagggggaagaaacctttaagagggttcctgagaatccctttcttaaagggctttccccccaaaaacataaaccggtttttaaaggaccctgcccccatcccaaaccccgggtattcccttaaaaccccttttggggtttttttttttttaatccaaatttttgtttttaaaaactttttccttggtagaataaaaaacccccctcccttttttctttggaaaaatttttgggggtggacaaaaaaaaaaagaaaccctgggaaaaacccattttgtttttggaggtttaaaaaaggcctggtaaaacccatcccttggggccccccttctgggcacggggccccgcttacttaaatttcacaaaaaaaattttccttttttggggggcccaaaag

SEQ ID NO: 116402 - DNA, 602 bp, Arabidopsis thaliana columbia
acctatagaattactatgacgtcccatgcacgcgtacgtaagcttggatcctctagagcggccgcgcttttttttttttttttgaggttcgcatcttattgtcacgggaaagcattacatgattggggttcaaactgagaggtgataaaaaaaaacggaaatgtagtaacttgacataagtttttcaatccgacaataaaagtgatccgagttcgaatctatcaaaaaccaaacgacaaaaactaatcacgacgacatagcgttgttgactacaaacagttacacatcctaactttgtagaaattggggatccacttttaatactcgtcaagctgtgggcaaacaaggaaacgggtttttttgattggggctttttgaccattattcccaacaatcatggttttttcttcctttgacccaagggctttaacttgggcctttttcggggttagacctcaatctttttttcttttaaagggaactttcaacttaaccaaccccatttttcgaactctctttcttgaacggcctgggattagggctaatcctttctctcttgtggtggggactgcgggtgtccttagtaggggttgcaacttttt

SEQ ID NO: 116403 - DNA, 448 bp, Arabidopsis thaliana columbia
  unsure (1)..(448): unsure at all n locations
nnnnnnnnnnnnnnnnnnnnnnnnnnnnnnnnnnnnnnnnnnnnnnnnnnnnnnnnnnnnnnnnnnnnnnnnnncttttttttttttttttttttttttttttttttttttttttttttttttttcaaaaaaaaataggggttaaagcccaaataacctgacgggcaagggttttagggggggtttgctccttttgggggagggcccaaaatccaattatacctaaccagggggaaagattttttgcccaccgaactttttaagacaggtagaaaattcttaaagagaaccgggccggggttttttttttttttttatgtcttgggaaattgggtttttatggggtaagagggtcagtttcggaggccttctcctttctggtgacccatttttggaatcttgacttgggattctgggttatttattaacccttttttgaattttgggg

SEQ ID NO: 116404 - DNA, 897 bp, Arabidopsis thaliana columbia
ctatgacgtaccatgcacgcgtacgtaagcttggatcctctatagcggccgcccttttttttttttttttcaatcaaatcaactttccattttattcatcgaagtaagagatcagttcgatacatgtggaatataaagcacaactatatcatcatatgtatgtatatttctttcttttagatttgagtaattttaaatggtaactccaaacaaaagaagtaaattcaaagcttattctgggtaccccatggattattgtttgcccatttccactgatctctgacatctcatccacttcatattttgccttccagccaagttctttctaagccttctctgttgaagcataaaactggtgttgcatctcctgaccttcttcggacaagagttaatcgggaattttcttgccggaagccttttcaaaaggctggaaccatttcttacaacaaacgttcttgaccaggccctaaattggaaggcagacaaccaatccttggatcacacaaaaacttcctgaaccgcagcgattggccctttgcttaaacccacacaatgagaggagctcttaaccgactacattcctggggggaaagcctggccccgaccccgggttcacccggaaattccggccgggccctggaggggcccaccttccctttgggaggccgtttaaagctgggcgaatcatggccatagttgttccttggggaaatggtattcgttcaaattccccaacattacagccgaagcataaaggaaagccggcgggcttaagggagctacctacattaatgggtgcgctcatggccgttccaatcgggaacctgcgggccactggttataaatggccacccccggaaagcgtttggtatggcccaggggtttttttcccggaaa

SEQ ID NO: 116405 - DNA, 856 bp, Arabidopsis thaliana columbia
  unsure (1)..(856): unsure at all n locations
actatagctgagctatgacgccgcatgcacgcgtacgtaagcttggatcctctagagcggccgccctttgttttttttttttttttttttttttttttttttttttttttttttttttttttttttttttttgggataaaaacaaagttttattgacccggaaaaaatatggaggggctaaaaagggggcatttcgggagaacgaagctcccggggggagagatccccaggagcaaaacagaggaaaagaaacaggcggggaaaaaagggaaaactgaaacaagaaccccccagctgccgggggggttttaaagactggaagggaaattgcagagaaggaagttttttgaagggggcaagcccttgggcttgagggaaaacaaaaaaacctttcttcagtgcccaaccaggatgctcatgggcgggaaacgggtacgagggtttgaaaaaaaaaaaaacaaaacaagcgccgggccccggagagagaaaacaaaaagaaaagtggctggcggcccaaacatttacaaccacaaaggtcctccgcagaggcccaggaaaaaaaaagaaggcgcttagggggggctgcgaagaaacaacacacggtaaggcccccgcacgaaaaaagccaaagcttaacaacggccggagaaaggcgccctagagacnagaaaagagaataaagccgggggggaagcgaaaatccaattggacacccgccccgagaggagaacaagaaaaaaccccccgggagggaggaaacggttcgggcccacaacgagggggacgagaaaaaaacccacaagggggggccgcggggggcgcgaaaaaaaaagggagaaaggcagaaaaaaaaaac

SEQ ID NO: 116406 - DNA, 539 bp, Arabidopsis thaliana columbia
cactatagattgactatgacgccgcatgcacgcgtacgtaagcttggatcctctagagcggccgcgcctttttttttttttttaagagagaatcaaggatctagcgatcatcgaaagtgaaacccgaaagaagatcataggatgataacaacacaacatatggtgtgttcagcaggacctgaacatgattctactactggctctgtacatgaaaacgccggaactttgactgcacactagaagcaaggggaaaacacgttcttattagtcgcctccatcagcccagcggccattccggtcgatataaactctctaaacccaacacgatggttgcattcactgggaaggagacccgaaccgccacctgtcgctggcagagctactaccaccgacgaatccttgctgtaaatcctggctgtaactactgacctaccgaccttagcttcttctgaaccgaccgggatgaacctcaccaccggaatccaccagaggtcgccttcgctttctcgatcatatacttccacttgtctcttctttaa

SEQ ID NO: 116407 - DNA, 439 bp, Arabidopsis thaliana columbia
  unsure (1)..(439): unsure at all n locations
cccccccccggtagtatcgccggcactnnnnnnnnnnnnnnnnnnnnnnnnnnnnnnnnnnnnnnnnnnnnnnnnnnnnnnnnnnnnnnnnccacgcgtccgaacaagtgggctaccacactttctcttattattggacgtaaccgtggcgctcatcgcaatcacaggaactcccagcagaagacggaatggcagaacggcgggcaaacataagaattagctggtgaagagaggaacagacggctgtttacggagaggaggaactcgcctaaagagtactccagagaggatgctgagggacatctcagacctgtgttaggaaaatgatggactacgcgagaagcgctcaacactggacgaggtcactacagtgtacaaacggtagtgatacttgatgaaagaaagcacgcggttacatgctcacctcttgacgcgtcac

SEQ ID NO: 116408 - DNA, 479 bp, Arabidopsis thaliana columbia
acctatagattagcttgacgtcgcatgcacgcgtacgtaagcttggatcctctagagcggccgcgctttttttttttttttttttttttttttttttttttttcgatactgaaaccatattacaaactcattttattaaattgcacacaactgaaaatggtaacacactaacacatgcattaaatttattacataaaaattattgtctttagatgaaacgccttttgagagagatctaacataattggcagaccctattggcataaaggtactgacggtgtcatttcaaaataacagggctttaaacaaatttttaaacctatctttcatgaaatcggaaatttggcaaagcaataatattgcttgcaaccccgagcggttttgcccttttcccattggggcccccagcttttgctttttttagggggacgctgaacttagaccctgacttgaattaacaattttgaacgttttttttt

SEQ ID NO: 116409 - DNA, 498 bp, Arabidopsis thaliana columbia
  unsure (1)..(498): unsure at all n locations
nnnnnnnnnnnnnnnnnnnnnnnnnnnnnnnnnnnnnnnnnnnnnnnnnnnnnnnnnnnnnnnnnnccacgcgtccgcccacgcgtccggcggatttagatggtgatggaaccatcgatttccctgagttcttgtgcgtaatggctaagaatcaaggtcatgatcaagcgccgcgtcacactaaaaaaacaatggcggataagctcactgacgatcagattacagagtacagggaatctttcaggttattcgacaagaatggtgatggttccattacgaaaaaggagctccgtaccgtgatgttttccctcggtaaaaaccggacaaaagctgatcttcaggacatgatgaacgaagtggatttagatggtgatggaaccatcgatttccctgagttcttgtacctaatggctaagaatcaaggtcatgatcaagcgccgcgtcacactaaaaaaacaatggtggattatcagctcactgacgatcagatcttagaat

SEQ ID NO: 116410 - DNA, 700 bp, Arabidopsis thaliana columbia
  unsure (1)..(700): unsure at all n locations
tgggcgnnnnnnnnnnnnnnnnnnnnnnnnnnnnnnnnnnnnnnnnnnnnnnnnnnnnnnnnnnnnnnnnngctttgttttttttttttttttttttttttttttttttttttttttttttttttttttttttttttttttttttttttttttaaaaaaaacctgagtttgggccctttccttgggtaaacaaaatctttgaccaggttttttttgggggggggggaaggaaaacaaccctaaaaggttaaggtttccgttaaagacggaaggaaccggtcccctttaacctcccaaatttcagggggtgggaaaatggtggggtatttataaacccccggggaaaaccccgggggggggggggtggccttgggttccccggggggaattcttacttgggggtggttccgggaaaaggttttcccccggggaaattttcggggggggagataaaaaaaaagggttgtggggtagagtttggaacccgggggggttcgtcccgaggcccaaaggggttttggtaacaaccttagggggttcgggtggaaattgggttgaaaattcccaagggagaaaggtttttggtgttttggggcccagttttttgtgaacttttggaaaaaggtgggcgggtccccccttaaaaagaggtttggatttttttggaaccacaggcggggggttgggggttttccggggg

SEQ ID NO: 116411 - DNA, 754 bp, Arabidopsis thaliana columbia
  unsure (1)..(754): unsure at all n locations
ggcgacctatagaagtactatgacgtcgcatgcacgcgtacgtaagcttggatcctctagagcggccgccctttttttttttttttgacgtaaatatcatttccattatattttcagacaagtattaacaatgagagatctgaaacagagaacccgcctacaaaaacccatgacttttgtctcccctgttagaacgctttcgatgacatgagtggtttgggaggtgacatagatctaagctcaggagccgagcttgggaacatcacgttcatcttatgcatcaatatatcagaccgtgatgggatctcgttcagaagaaactgttgcacgatcggtttcttgaaccactccatcaccaactctcctggtgccctcaagacgactttgctgacttcaaaaggcgactcaccagagctcagcatttgagcatttacaatctttaatgtcggtcctgtgactagctttatacgtctcgggactactccgtagtaaagcattcgttttctgaacctgtggagagtggaaccacggctatgagcgcagctccgacagataagtttctcacatcgagagaccagcaatgtgttgatcaaagacgatggcttttggaaagagtttgttctcgtacgctactttccagacacatcgagctcgngttatttgaccatcaagacaaggagttgagaaggacatcacaaagtacctagcagctccttcttcgagttcgtaatcaatcccttggtaaaactctttg

SEQ ID NO: 116412 - DNA, 326 bp, Arabidopsis thaliana columbia
gggcaacactatagaattagcttgacgtcccatgcacgcgtacgtaagcttggatcctctagagcggccgcgcttttttttttttttttttgagaagaacgagaacatacgcattacgaatgaacggatacgatattttacacagaagttcagaagagagaaacaaagacaccagaaaagttcaagacatattaaacacctaaactccttttattgcactcgttgaacatccgaaggatcaagggaaacttttcttaacgttaaaaccttttgattttaagcatctacggtttcagctgaatctggtgcgggtaagaacagctccg

SEQ ID NO: 116413 - DNA, 518 bp, Arabidopsis thaliana columbia
agatttgccggcactatacgactcatatagggaaagccggtacgcctgcaggtaccggtccggaattcccgggtcgacccacgcgtccgtgttccttgacgagattggtgtggcttacgatgagcaagacacctacgttgtggttaagcacgcggctctgttcacatcaaccatcatgagcaagcttttggctcgtcctaatgtgaagctcttcaacgctgtggctgctgaggatttgattgtgaaaggaaacagagttggtggtgtggtgactaactgggctcttgtggctcagaaccaccacacacaatcgtgtatggaccctaatgttatggaagcgaagattgtggttagctcttgtggtcatgatggtccttttggagctactggtgttaagaggttgaagagtattgggatgattgatcatgttcctgggatgaaagctttggacatgaacactgctgaggacgctattgtgaggttgaccagagaggttgttcctggtatgattgttaccg

SEQ ID NO: 116414 - DNA, 391 bp, Arabidopsis thaliana columbia
cctatagattactatgacgtcgcatgcacgcgtacgtaagcttggatcctctagagcggccgcccttttttttttttttttttttgagaacataaactgtaatgcaatttattacacacaaaaaaacttaaagctgatcataatttcacttatcaattcatccaaattattgtaatataacatttaacaaaaacctaatggaaccatgttttattggtaatacttgaactagtaacagggatgatgctgcttgagttggcggcatcaagagcgttggaagattcgtcatggatctgatgttggtgctcctgtggctggtgatggatgtggttgtggtggttatcatccatgaatggatatcccatttgctctgtctgatacctcatttgct

SEQ ID NO: 116415 - DNA, 578 bp, Arabidopsis thaliana columbia
tatagactactatgacgtcgcatgcacgcgtacgtaagcttggatcctctagagcggccgccctttttttttttttttttttttttatggggaagacaaatatatctgactggaaatctatgatttgtctctaggttagatatatataaggtacttctaatgcattcatttacattttgctaatggactaagctttcttctctctaactttcagacatatttgcgagcaaaatgtttccaaatcaaaaacaacttgcttgaagaataaatattatgatccccaatctcagcttcaggcctttttcttcttctgcattctctgcagcttcctccatatcaggaaaattgggtaagacaatccaccgaacaccatcaacacacatcccaattgtttggaagaaaccggatcccccttcaaactgaaggtaccacgatgctcacaaacttctgggtgggggtattggccgtgttacctagaaacccaaatctcctaatggccaaaaagataacagtttggcctcctggcccaaataaccagtccttagaaatgccccatgctggctcaggcagttgtttga

SEQ ID NO: 116416 - DNA, 735 bp, Arabidopsis thaliana columbia
  unsure (1)..(735): unsure at all n locations
tatagctttagctatgacgaccgcatgcacgcgtacgtaagcttggatcctctagagcggccgccctttttttttttttttttttttttttggtttggagaagaatgtaaatatcattataatgaagagttttggtcttacataagcttaacctgatggacattttcatgaagctaacatggtcccatgccaacaaaagacattcgagattcaattcatcagcaaggccatgaagcgattaggctcatcgtttccgatatattgaaaaatgttacattccatttatatacaacatgttcaaaaaaattcagtaagaaaattgataattcaccagcaccaatccttagagagatagcttcttaatctcaacgacaagattctcttcaaactatatcccctttcatttcaattttgacagatgatttcagctaaactaaccaatctcaaaaacttcaaatcctcatgtcaaatcgaagatgaatgacttcttctatgtgtacctttgttcactgaggcaaaggcaatgcagcttcgacttcattccacaagtccacatttctggtaaacttctctttaactaccgcaatgagctcctttgcttcatcgacctttgaacgacttgctagtccattaacaagccacttcatgacactannaactcgaacccaattctctccatactcttctacaaaggatcaaagctggctcaaagtcccctcctttcacaaacaatgg

SEQ ID NO: 116417 - DNA, 740 bp, Arabidopsis thaliana columbia
  unsure (1)..(740): unsure at all n locations
nnnnnnnnnnnnnnnnnnnnnnnnnnnnnnnnnnnnnnnnnnnnnnnnnnnnnnnnnnnnnnnnnnnnctttttttttttttttttaaaatgaaatgtaaacaagattaaaccaaaaaggaaccaatcaatgtacaaatttttttggcagctctcttctcccctatgatctacatttatttatgggcaaacccaacactagatcaccaactatacaaaactcaaaaaacttttcaaactgcaaaacacaaatgaacatccaaatgctatcctctccgcccagaaacaaacgtgggaactaatctcagtttctcgtgttagatacatcagcttcaatgtgttaaaaaatctcccccaagaagaatgcttgggaagtcctctctgtctcgctctcgctctgtttggatgcggatgtggccaaagaattgaaagaattagcaacacatgtaaataaaagaatgcacaagaagaatccagtaaaagaatgtgtcaggtggctgatgctgttgttttgttcttccggcacatacaatcaggacaagggaatatgtaaatggagtcacttgatcgtttcagctcanaccccttggagtcactatgggacctcatacttagcatgtgccgtttaaaacttttccatcccaacttgggattggcaaagagtccggctaactttcgcttgtctggctgaatcgtctttgaatgtcctccaaacaaatacctccgatgccccatgaggaa

SEQ ID NO: 116418 - DNA, 563 bp, Arabidopsis thaliana columbia
gaactatagaattactatgacgtcgcatgcacgcgtacgtaagcttggatcctctagagcggccgcgcttttttttttttttttttttttttgattctttttttttttttttttttttttttttggggggaaagccaaattcagagagaaaagattccaaagctgttacatccccaaatcaatgagtggtagatagaggaaaacaaaaaaaaagggttttggagttacatctccaaatgtctgtgtttggaacaatgcatattgtttaccacaaagagttggtaatgagcaatttaaatttaggaaggttctcaagagccactgtgaagaggcccccaagaataaacttgcaaccagatgccaaaaatatcctccaaatgtatttagaactttgctttcgatttctggggttgataaatttgcaaaacccgtcgaaaatacgaaagaaacccggtggtggggatgggttttttccgttccaggtgaatcagtttaacaacttgttttaattccaaccaggtgcataattcaaaaaactagcatattcaccaaaactaaagggc

SEQ ID NO: 116419 - DNA, 517 bp, Arabidopsis thaliana columbia
cggcactaatcgactcacttagggaaagccggtacgcctgcaggtaccggtccggaattcccgggtcgacccacgcgtccgctaagagatgggatatgaaggagggagaggagaaagttgtgtttggtggcggaagagatgaggtggatgggtttggaatcaggggagaggtgaaatctaatgaatgggatgtgtcaaagccatggactttgatagcggatttttttggagttgtgtttgatcctggtcgcgaactgccgtttagctttgacactagcttgcgaaccggccgaagaagacttcgtttataccgatctccctcccacggacagaccgagctcccttctggtttccccgggccctgtcctagccttcggacacctcctccctattcctccctctgccctctcattcctctccatagttccccccccctgataacatttctatcccttcccccccttccctgctttcccttcacattgcccccctgccgcccggttatatttccagctct

SEQ ID NO: 116420 - DNA, 519 bp, Arabidopsis thaliana columbia
  unsure (1)..(519): unsure at all n locations
nnnnnnnnnnnnnnnnnnnnnnnnnnnnnnnnnnnnnnnnnnnnnnnnnnnnnnnnnnnnnnnnnnnnnnnnnnnnnnnnnnnccacgcgtccgcggacgcgtggggggaagagacattcggtacaaggtactggaaagccggtgcaatgcatagaggcaagacacctgtacctgtcacaaattctccttatgcttctgatgttttggtcaaagacccaactgcaaaagacgatttccagaatttaatccaattcccagaggtggaagttgttgaggttctcttggagattatcggggttagaaacttaccagatggacataagggaaaggtctcggttatgttcagtaaaactcagccggattctcttttcaatgctgaacgtagactgaccattttatccgaggttggggaaaagcaagtagctactttccagtgtgaacctacaggagagcttgttttcaaacttatttcctgttcaccgtctaagataccagtttcaagagagcctaaaaacttg

SEQ ID NO: 116421 - DNA, 946 bp, Arabidopsis thaliana columbia
ctatagaattactatgacgtcccatgcacgcgtacgtaagcttggatcctctagagcggccgccctttgttttttttttttttttgcttgaaaaaaacaagttctgaatataaaatctccgatggattatctatattaggactctataaacttactcactaactctcacaaactctcaacaaaacccctaccatagtccatggacttgatccagcggaggaataaaaagagtgctactaaccccccatttgtattgagaaaaaaacattcccatgttgaccacagacctgacccccactttggaaattttggctggagctgtcaatcattttaccgctctatgtgtcctcgaattgaacccatcaaaattcctgaccccattgggcggccgttcctgggggggaacggataatggtacaggctttgatttttattgcgcaaattccggtttgtgtaccttttacccaaaggttgccgctgctttgactaccaaaattgatagagaccgtccccaaccaatgttggtttcccaggccatcacccccggtagcttagaaacccttggtgtcctcaaccctaccaaagctaaccccttcctgctttaacctaaaaattcttcctaaccccagaaaaaccccttttccaaaaagtgtctcctttccccctttgccttggggtctttaaatttaaaagagttcgaggcgaacctatatccggggtgaaccaaataaccgcaagaggataaaaccatattagcttcccatgattccccattttccccttaccggcttaagccacattttccacccccttcccaaagtggaaggttcccttaagggtggaaacaaaaataagattcctttaacccaaaccttgcacaacctattgggggtgatttaacaacccaccccttgccacctgattttcctccccgtttctttccttt

SEQ ID NO: 116422 - DNA, 506 bp, Arabidopsis thaliana columbia
  unsure (1)..(506): unsure at all n locations
nnnnnnnnnnnnnnnnnnnnnnnnnnnnnnnnnnnnnnnnnnnnnnnnnnnnnnnnnnnnnnnnnnccacagcgtccgcggactcgtgggctgacgcttgtgcggtggtggacatccgttagatggaaaaatgggcggtggaggtggcggtccctactgtaatacaggaggtggaggagtccagatgatctgcggttccaactgtggcaaaacgggtgttgtatgtacgcggctgcttacgaggacgacccatgagtggatgcctcccttcatgtttacggcctatgataggcgacgctggtggaggtggaggacatcacattactaggtactcctggtgggaaagaattcatgctccattgcaaatatagcggaaagcttcttggtttcatggactttctggtgaagctcttgatgccattggacctcactgttttgctgcgaactgtttttttaagcactttaaatcgcacggcgggaaatgagggtattgttggggacgatgt

SEQ ID NO: 116423 - DNA, 511 bp, Arabidopsis thaliana columbia
ccggcactatacgactcatttagggaaagccggtacgcctgcaggtaccggtccggaattcccgggtcgacccacgcgtccggatttcgaaatggaggaaggtcgtgacgacgagtattgtagtttttctaattccggcgatcgcgacggtggattgagcggttgttttttcttggatcatgttggccaagttttgctttctcgaaatcatgatggtttgtcctggaaatgtttggattcttcagattgtgagggaacaacttgtttgggaattataatttgcgagaattccgaaactgagatcaaattctctgatatttatgctgtggagtttgttagctatggcttggtgcatagtccaaagttaggacttagacatgccaaagaatgtttccgggaacgcttgttaaatactcaagagatgtatcggttcactgtccacggatttcaaagttcaccaaaagagccttgtctttggaaccttgctgcattcacttttggacatatggat

SEQ ID NO: 116424 - DNA, 833 bp, Arabidopsis thaliana columbia
tatagatgagctatgacgccgcatgcacgcgtacgtaagcttggatcctctagagcggccgccctttgtttttttttttttttttttttttttttttttttttttttttttttttttttttttttttttttttttttttttttttttttttttttttttttttcgggcccaaaaaaaaaaaaaattttttctttttacccccttggcccccttggggcaaaaggccttaacccaaggaacccctggcacggggccaaaggggggccccccaaaaaaaaaaaccccccggggggggttttttgtaaaaggccttaaacccccaccccccccctcctgggggtggggcccctcctcccttggggcccaccaaaaaaaaaggggctttcccccgtttaacccccccccaaaaaattttccccccccggggttacccccccctggggccaaaagactccggggctttgggccccagtttttgccagaaggccccacttggggggagggggaaaaaaagggggtttacgtcttccccctcccaccacccaaaaacctccgggggccccccttttggggattctttttttttttgtggaaaaaaaaaaatttttctttttttccccccgcgcgggggggcccccgggatttttcgcgcccgcccccgggggggacccaattcttctaaagggggggccaaaagagggggggagaaacaggggaaaacggttccccgggaaaaagcccccccgcaaaccccccaacaaaaggcggggaaaaaggggggaggcggggcgcccaaggggagcaccccctattgggggggccccacgcccctt

SEQ ID NO: 116425 - DNA, 478 bp, Arabidopsis thaliana columbia
  unsure (1)..(478): unsure at all n locations
nnnnnnnnnnnnnnnnnnnnnnnnnnnnnnnnnnnnnnnnnnnnnnnnnnnnnnnnnnnnnnnnnnnnnnnngcctttgttttttttttttttttttttggctcgtcaaatcaaaattttccagagatgtcaagaagcttaaacattgtaatggagaaaataaataatggtggagaaacnccgaaaaagaagggagataaaagggtacaccatcgagagaaatcctcttgtagagtgggggagaggaacaaatnccgaaaaaaaaccaagaaataaaataaaaggacagggaccccttctctttttttgggtggcattggttctttcaaactttgaaaccccagcctttatatgagaaaaaacaatttattacacatttngggcatggntacaaacttccaaaaacaatttttcctgattccacaacacctgcggggaaaagaattaatttaaatcctcaaagttttgattccgggtc

SEQ ID NO: 116426 - DNA, 152 bp, Arabidopsis thaliana columbia
cggatacccgggagccgggaacaccccgtgggtcggacaccacggcggtcccggaatggagcaggagggcgttccaaaacgccgtggcgaaggacgtacttgccgagaaaacgattagagccctaaacagattctgagcaggagctaacgac

SEQ ID NO: 116427 - DNA, 476 bp, Arabidopsis thaliana columbia
  unsure (1)..(476): unsure at all n locations
nnnnnnnnnnnnnnnnnnnnnnnnnnnnnnnnnnnnnnnnnnnnnnnnnnnnnnnnnnnnnnnnnccacgcgtccgtgaccgaatacggactcgcgagtgggctatcgcattatcctatcaataaatccgatttcgtcagagcttcattctcaacacgtgattaatatgagcatgtgtcaccggagcaagagctttgagatattgactatgttttgaaacatgtgatttcaggtgaaaaccatacggattcaattcagggatgatccagggacagctcagtgataaactcaggaatgcctcggttgtatacacacactaggcaattctgatcgagcgaaggatgtctagtctagaactactttatcaggctaactaacacaattgactcgaaatctcggctagaggaagatacttctaatatgtagtgacagaggaagatagagttctcccggggtaagaaaagcaaaaggtggcc

SEQ ID NO: 116428 - DNA, 624 bp, Arabidopsis thaliana columbia
  unsure (1)..(624): unsure at all n locations
nnnnnnnnnnnnnnnnnnnnnnnnnnnnnnnnnnnnnnnnnnnnnnnnnnnnnnnnnnnnnnnnnncttttttttttttttttttttttttttttttttttttttttttttttttttttttttttttttttttttttttttttttttttttttttggggaaaaaaacccggcccggggcactttaaggggggggggggaaaaaaaaccccagggggggaaccccctccccccgcccaaaaggggggaaattggttttttttttaaaacaaaaaaaaaccgattttaggcggagaaacaaaacctagggggttaaaaaaaacccaaacaacttgcaaaaaaatggagaacctgggttgggaaaaacccggacaaaaaattgggggccccgttttacccccaaagcccaaggaaaaaaggttttcccccaacccggtggaacactttggaaaggggggggggaagccctttaccccccgaaaattgggggtgggaacccttgtttttagaggcccctttctctccggggaaaactttaagcgtttgttttttggcccccttaaagggggaaaaaaaaacccgcccccaaaagggctttcggaaaaaaggagggggttttaacccct

SEQ ID NO: 116429 - DNA, 612 bp, Arabidopsis thaliana columbia
actatagctgagctatgacgccgcatgcacgcgtacgtaagcttggatcctctagagcggccgcccttttttttttttttttttttttttttttttttttttttttttttttttttttttttttttttttttttttttttaaagggggggaaaatccccaatctggttaaaaggaaacgttttaaatttagtaaacaacccccgaattaacatttggtcccaaacaaaaaaaacttaaacgaaactgtttcttcaaaaaagtaacccaaacgaacgattccccacccagaaggggggacccaaaaccaaatttaaaccaaaaacagggcgggggcccgcaaacaactttttttttgattaccagccgccaccaccgcctccggaacttccaccataaccgcctccggagccacctccctcacggggtccaccacccccgtatcctgggcccccaccgcctccaccaaatccgaaacctccggtacgtgttttgaaaccccccccggctcctcctgagtatccccccccaccccctcctgagtttcccccaccgcctccggttggggaaccaccaccgtttacaccaagggctcctccgccaccgccggtacc

SEQ ID NO: 116430 - DNA, 699 bp, Arabidopsis thaliana columbia
  unsure (1)..(699): unsure at all n locations
nnnnnnnnnnnnnnnnnnnnnnnnnnnnnnnnnnnnnnnnnnnnnnnnnnnnnnnnnnnnnnnnnnnnnnnnnnnncttttttttttttttttttttttttttttttttttttttttttttttttttttttttttttttttttttttttggggaagaaaaaaaaaccttgtcctaaacctgggaagggcttaaaaccaaatttgtttttttttccagggaccaatttttccccaggcccagggtttgggccggaaaatttttaaaccatttaaccttttttaagggttaaaaaaaccccaaagggtttctccttttagattttaccataaaaaaaatttgaccttccactttaaaaatccccccccccaaaatccctccaagcttttgcccaaataaaatttgggggcaaaaccgggaatttcccccctttcccgtggaaaaaaggggattttggacctccaacccttccccctgggaatttttccaaaaattctaaacaaacttttttaaccctgggaaaaaaattttttaccattaccaacaaagggagggggttttttcccttttgaaccacccccggttgaaaaaaatccggtggaccgttaaaaaagcccaaaaatttcccttttttaactttgggttttttaaccctttcctctacccaaaaaagaaaaggtatttttgtgtttaaaaaaccc

SEQ ID NO: 116431 - DNA, 652 bp, Arabidopsis thaliana columbia
  unsure (1)..(652): unsure at all n locations
nnnnnnnnnnnnnnnnnnnnnnnnnnnnnnnnnnnnnnnnnnnnnnnnnnnnnnnnnnnnnnnnnnnnnnnnnngctttgttttttttttttttttttttttttttgagaaaatattattctctaaatcantggaggagatgagtttgaatacaaacctagaaaggtacagagcattgtacanagctatcaagtcaacaaataacaacttagaagaagtgtgccaaaaggcaaaaaaaaacaaaaaaaacaccattttagaagaacagccacactaatcgtttctaatattcagactttaatcatgtggtttttttttaggatctgacctgggacccgattcttggtttctggccccctagaaagaaggcttcctggaggctctttacctggtggggtaaagatccggggacaggcactggaggtaggttgatgactcggccttgcacaaaattccgggggcattgggggggtttctttaaagctgcctccttcatacattgggcctagctggtatggaccgtcacttgtgttgttcttcaacttcggtttatgagacaaacccgtaaaccatgagcttccgttggatcctgccaaggccattatcacatccgccttgttggggtgaacgtaatcaaagcggacgcgtgggc

SEQ ID NO: 116432 - DNA, 785 bp, Arabidopsis thaliana columbia
  unsure (1)..(785): unsure at all n locations
ggcgacnnnnnnnnnnnnnnnnnnnnnnnnnnnnnnnnnnnnnnnnnnnnnnnnnnnnnnnnnnnnnnnnctttttttttttttttttggaccatataagatctctccaaaatcaactcatataaatgctaaatcaatggagatgtaatgtgtttacatgtgtgtatctttacgtgatcaactgatttgggcagagttcatgctccaagcatttaagtttaagacatcaacactttgatatccataattaaaagcaaagagatgtgaactttttcctattgccaattttggatacactcttgaggtaatgcatgctcttccctttccaccgaaactctccactactgaatgatcaatcaaggctctgagggatagtggttggtgaggattaatatccacaaaagctccgtatgtcgttttgtcattatcttccttcagcgaagatctgctttggtcactgcacatgagcacaacgtacttattgctgttttgacgggctttgaagattctaaaataaacagatgtgtactcttccaaattcttagatgccaaaaccattaaaccgaatggacctaaaccagacttaaccgatacattcatcttgctacaaatcaactgcggatcagtccaacttggttctatcacatccgctttctccaagtctctcactttgaacaatacttctacatccgcctgtgcagctgtcacaccatagacttcaagcctagatcctgactttagaaacttgttgcgtaagtttttgacttgttttgtaccgaatcttt

SEQ ID NO: 116433 - DNA, 485 bp, Arabidopsis thaliana columbia
  unsure (1)..(485): unsure at all n locations
cgcctgtcagggtaccaggtcacgggaattanccggtgttgacccatcgcgtttcgaacccaatattttatgaaagtgatcaaggcaccgtgtgtaggttacagggggcacaaagacgaaaggtcacgtaagccagtgggtttgtatatacccagtacaagtattggtagtgctgaggaggaattaaagtggtgtgggagaacggaagggtgcggggtagaaggaggacatttttttttttgggggggaggggcgagcgaaagcagcggcggatgcgaggctcagataaggagcgcgtgtggcggacctcgcggctcagcgcatgggcgattgggcggccgcgcggggatggggagggacgaagacgaccgggtgggtagggcggacggcgggtaacgaacgcggtcgaggggcactaggcgagacgggaaagatagcactgtgtggcagtagcgatagaaggataacgagagatgagaaagctt

SEQ ID NO: 116434 - DNA, 444 bp, Arabidopsis thaliana columbia
acactatagactagctatgacgtaccatgcacgcgtacgtaagcttggatcctctttagcggccgccctttttctttttttttttgtgaggagaacgacaaaatcccttttcatagcgagaacaaatgatcattaaatacttgtggacgatcacaacgaatctaccaactgactgaaacacaacacttttattataacataacaatctcttttcgaagggtgatcatacgcggaccgcaatcaagatgcataatcaatgcgtattgtacaccaaggagccacaaaaaatcttaatggctaatccctgttaaacaggatgcggatgaacacacttggccaaggtaagagaaccaccacttagtatgcctgcctcccatatagagctatcttctaggacgattacgacgagacgcgattgcgcagaaccatcatgccttcaatctt

SEQ ID NO: 116435 - DNA, 885 bp, Arabidopsis thaliana columbia
  unsure (1)..(885): unsure at all n locations
gnnnnnnnnnnnnnnnnnnnnnnnnnnnnnnnnnnnnnnnnnnnnnnnnnnnnnnnnnnnnnnnnnnnnnnnnnnnctttttttttttttttggtataacaggatttttcatttgtaactaaatactgaacaaactctggttcgattctagatcaactaaaaacgaccgaaacaaaatttgatgaaggagaaaaaaccggcatgaatcacacaacaaacagagacatacaagaaccacaaagtaatcgtctagagataaatacataatcgagggataataaattatgtacatgatctgcagaacaagtccacattgctctctgcgtttaggacaaagaatctacggattcgacttgttgccgagcaaggtacttctctcttctctccttccattcgtctatgacaagaccctccccgacaactcgaggccctgtctctgggggaggcttctntcttgcttcaactgcagcttcagcttcatccaattgacgtttaagtttctccaatgcagcacttgggcgggccgcatcaattaaaatgacccgaagaacctgctccactgctacttgatccttttgctcattaaacaactcaggcacatactctactcctgggttaactttcaggctcataatcttaaacttaaccttgctcttctgattcaacggctgcttttcattggtctctggatgttcccaaacttgacacagaagcaaaacactctctcctggagccaaacaccttcgggaggacgctataacaactttaggtgccgttgtttgaacctanatgcagatgagattggtagggtcttagcttattcgctgcaactggtttcaggtcatagggaatcaatactagaagagctatcgaacacggcactga

SEQ ID NO: 116436 - DNA, 583 bp, Arabidopsis thaliana columbia
  unsure (1)..(583): unsure at all n locations
actantagatagctatgacgtcgcatgcacgcgtacgtaagcttggatcctctagagcggccgcccttttttttttttttttttttttttttttttttttttttttttttttttttttttttttttttttttttttttttttttttttttttttggaaaaccccaaaacggataaaactggggaaaaaattttatggggcttttttttggcaaaatgaggggggggaaacaaaaagagcattttgggtttcatataggggccccttttaaaaaaagggaggcatggttaaaagctttaaagactctccaaatgggggggggaacatttccccaaaaggctttggggttaaactttttggggttggcaatgggcttataaacctcggggaagggtttagacccgggttcattggcctgcggggggccggtttaaaaggcttggaccagggcttttaaaaaagcccatttgggctggtaaaacctcgcttggccataataaaagggggataaagccctttcccttaaaggacctctttaatggccttttcttttagggatttatgtttcgcccccggaaaaaaat

SEQ ID NO: 116437 - DNA, 482 bp, Arabidopsis thaliana columbia
  unsure (1)..(482): unsure at all n locations
tacgactccttaatggggagctcgtacgcctgcaggtaccggtccgngantcccgggtcgacccacgcgtccgcggacttgtgctaataatattacactgatggcatacctgagtagagagattaggatgatgactacccacgctttcatgtactactcggcgggctatcacaggatatggatgtgattcttaactgatgtgcgatatcaagagactcataatggttattctgcgaagcgagaggctgaatcttagtcactgtattactgagttcttatccgatgaaggctgttatgacctccgtctaatataacgtcctgatactatacacatatatgcttaattgcaacaccaagatattcaagatgcaattccaatcctgacagaccagaatctaattgctcatgtaagaggagcaggggcttggactccatcttcggtttaaaatctctaacctgatctggttactgatgaaaaaaac

SEQ ID NO: 116438 - DNA, 523 bp, Arabidopsis thaliana columbia
  unsure (1)..(523): unsure at all n locations
nnnnnnnnnnnnnnnnnnnnnnnnnnnnnnnnnnnnnnnnnnnnnnnnnnnnnnnnnnnnnnnnnnnnccacgcgtccgcccacgcgtccgaatctgaatacactcattgcaaaccttagaagaagaagaagaagaagaagaagaagcttccatagattccgttgggcttttactgtgtttgattgatcggatcgattgcgattacggagaagatatggctcaggctgtagaagaatggtataaacagatgccgattatcactcgctcttatctcacggcggctgttatcaccaccgtcggatgttccctcgatatcatatctccatataacctttatttgaatccgacacttgtggtgaagcaataccaatattggcgtctcgttactaatttcttgtatttccggaagatggatttggacttcatgttccatatgttctttctcgcacgatactgcaaactccttgaagaaaactcattcaggggaaagactgctgatttcctatacatgctcctatttgg

SEQ ID NO: 116439 - DNA, 416 bp, Arabidopsis thaliana columbia
cgccggctctatacgactcattatagggaaagccggcacgcctgcaggtaccggtccggaattcctttttcgacccacgcgtacgcccacgcgtcccgcaaatcttccttagccattgaacatctgaacaagtatcgttgaggaattcagggcgcgaacatggatggccatggagagaacattgcacgaacatttatgttttacttcgctaatgcgacaacgcacgtcggctggtctcggtatacagcggcaggattctaaccatgagcctactctgtatattgtaaccaaattaaggcatgcctcccgctcgtcgcagccccctcgccgcggacgaccacagcggcggtttgatgatggaatggctggacgacagcaacatctcagaatctctaagcggtaacacagaggatacc

SEQ ID NO: 116440 - DNA, 553 bp, Arabidopsis thaliana columbia
  unsure (1)..(553): unsure at all n locations
cacagaaccagagaaatcgggactcgggggggctagtatcgccnnnnnnnnnnnnnnnnnnnnnnnnnnnnnnnnnnnnnnnnnnnnnnnnnnnnnnnnnnnnnnnnnnnnnnccacgcgtccggaaagacatggtttcgctctcaggtggccacaccatagggttctctcactgttcttctttcgagtcccgtcttcaaaacttcagcaaattccatgacatagatccttcgatgaactatgcgtacgggcaaaccttgaaaaagaaatgcccggggacatctaaccgaggcaagaccgcagggacagtattggactctacttccttgggttttcgacaatggttactaacagcaaaattttgtcctcgtaaaggaggggtatgggtctgaacaatgcactatctaggccgatccaccggacctaattcggatctgtcgagacggtttgctcaacaaccaaaaaaggctttccttcagagcgagtatggcaggctcacaatgggaacagacgtcagataaaccttgcggcagctacaaaggagaactcggat

SEQ ID NO: 116441 - DNA, 577 bp, Arabidopsis thaliana columbia
ctatgacgtcgcatgcacgcgtaccgtagcttggatcctctagagcggccgcccttggttttttttttttttttttttttttttttttttttttgctgtatttttgggtctttcagaccttacgggggaccgggcggtgacaaaaaacaccatagcgccaagaagggacaaaaaaaaacaaagagcccgaaccttttcccaaagggagacgatccactaagcccctaaaaaaaaaaagaacccccaacttctcctaatgctccttcgcacccaaaagagggatacccctgcaatccccctcaccttggggaggagagcccaaagcctttgggggtggttatagacaagcaaagactttttggacgcggccgccgggtaacaccaaggaggcccctttccagagggctccctctggaaacccctcgttctttcccacccttttgctaaaccttggaaacctcccgacgaagcccctccaaaaaaaaaaactatcgcaaacaacgcggcgccagaaaccaaaagcaagcgcccttgtgtgccttctgcacccagccggcgcggcggccccttgggggca

SEQ ID NO: 116442 - DNA, 541 bp, Arabidopsis thaliana columbia
  unsure (1)..(541): unsure at all n locations
tgtggtccggggttggcggggggggtaggatcgcgggntactatacgactcatatagggaaagccggtacgcctgcaggtaccggtccggaattcccgtgtcgacccacgcgtccggcatttttgtcccagtattccttctacaaatcgttgttgatatgcttcatccagattttcttctcgtttatttcaggcgtttctggaaccagtcttttcaattcagttagcctgatggcttataacgttttctacaccagtgttcctgttcttgttagtgtaattgataaagatcttagtgaagcatcagtgatgcaacaccctcaaattttgttctactgccaagcgggaaggcttctgaatccaagcacatttgcgggttggtttggccgatccctttttccacgccattattgtatttgtaataaccatacacgcctatgcttacgagaaaagtgaaatggaggagcttggaatggtagctctgtctggatgcatatggcttcaagcttttgttgtggctcaagaaaccaattcctttacgg

SEQ ID NO: 116443 - DNA, 521 bp, Arabidopsis thaliana columbia
tgccggcactatacgactcacttagggaaagccggtacgcctgcaggtaccggtccggaattcccgggtcgacccacgcgtccgaacaacagcttcgtattcgctcatcttcttcgctttctgatcttggaaatcgcaggcattgttcgtctactcgaggatttcaattttggtcatacaagagaagcgaagcagcgtcgccgttcaagacgaggtacagagaaaacgaagaagaagaagatatgacgattaaaccggcggttcgtatttccgacgggaatctaatcatcaaaaaccggacgattctaaccggtgtaccagataatgtcatcacgacgtcagcatcggaagctggaccggtagaaggagtcttcgtcggagctgtatttaacaaggaagagagtaaacacatcgtaccgatcggtacgcttcgcaattcccggtttatgtcttgtttccggtttaagctctggtggatggcccagagaatgggagaaatgggccgagatattccctacgag

SEQ ID NO: 116444 - DNA, 653 bp, Arabidopsis thaliana columbia
  unsure (1)..(653): unsure at all n locations
nnnnnnnnnnnnnnnnnnnnnnnnnnnnnnnnnnnnnnnnnnnnnnnnnnnnnnnnnnnnnnnnnnnnnnnnnnnnctttgttttttttttttttttttttttttttttttttttttttttgttttttctttgttttttttttgtttttttttttttaaggaaggaaccctccaaatttttcacagttccaaaaggaaaaaaattccgggttactattcaaaattccgaaaaaaattttttgagccagaaagggggcccccatattgcaccgtagggtaaaccaaaaactgggggggtttctttcaaaaaaaaaggggggcaaaaaaaaattaaaggggctcggggagaacccccgggggagcgaattaagggttggggaccaaacggaacccttggggggggggggagaaacgaaggtttttaggagcggggggggcccggaaataatgggtttttttcccaaagtttagggcaggggcacaaagcccctctttaatgggaaaaggggggggcccttttccttctggtattggagccacctcaaaaggttgaaattccttggccccgcacaaaaattaggggaacctttgtctagggttttttaaagaacccacaaaaccccctgattttttggggggctctgggggaaacc

SEQ ID NO: 116445 - DNA, 519 bp, Arabidopsis thaliana columbia
agactactaggacgacaatgccgcgtacgtaagcttggatcctctttagcggcggctttagcctttttttttaactccgcccgcgtggtgtctctatcacacgcactcactcatgatcacccaaggaggagggcctcttgtgaatcaagaaaagagttgcctaggtgacggcacacactccaagccgggcaggcttgttctctcaggaggagacgagcttcaggggcgaaacgatataggaaggaaccccccgacatagatagcataaggtccttgagtctgccggcccagccacccggcggatgtcagctggcgctgagcggcgcgggcgcccgccgagcagacccccggaaacgtcgtgggctcggcctgtcggcctcacgtgttaagtcagaaaagggagggaccgcgagctgcgaggctagacaaaggcgaagctcgccaccctgctagtggtcagcgacctttttagtcctggggcatcgcgaggagggagccaacgcagctaccccaccgcga

SEQ ID NO: 116446 - DNA, 533 bp, Arabidopsis thaliana columbia
  unsure (1)..(533): unsure at all n locations
aaacgcctcaacaaccgaccgcacgcaccgcacgcccccccctctttcgccgagtaacacaatgggaaagcgtttaaagggggaaaacccgaaaccatccatattcgtagccacagcctgcagtacacgatcgaggccaccaggggggggtccctgtggtcggattctccgcttacctatgacccggatcgagacaacggcagcacccggcaggtgggatacaaaatgcgatgtgataatgcaggaccgcaagaaatgtataaggggngcgccgcaagagcaccgggacggaaattccggagtcagaactcaatacgacgatcagatatccctccgctaacccgcccgtgatgactacgctgatacgccacgaccccaccacaccgtaaatgaaggaaacaaccaaaggaccgcataaagcaatagaccaccacaccctacccaccagaacaatcgttatacaagtcgcgcagtagcagggtggttcacggggagaggcgagagtgaacggacatagcaatgccgacccaccc

SEQ ID NO: 116447 - DNA, 627 bp, Arabidopsis thaliana columbia
  unsure (1)..(627): unsure at all n locations
nnnnnnnnnnnnnnnnnnnnnnnnnnnnnnnnnnnnnnnnnnnnnnnnnnnnnnnnnnnnnnnnnnnnnnnnngcttttttttttttttttaacaacaagatccctgatattattttcaaattgactcataaagcattacaaaaggagatggtttttctgaaacatgaaatggttggttacagaagacgatacatacaataggcagctatgttcatcatctctttccttttcctttagcatcaaagtgatgagactttagtttcttcttccgactatcgcgcttgtgctgccaccacctccttccctgaagggatttccatttagacccataagtttctgtctttttggatcgttttaagccgtggggtgatgcttacttcatttcttttggtttttccaacggcataaaacttgatttcagggattccaccttggtctttaacaccattactgaagtttccgttccattaaagctactgggacttacacctgtgaattctcgagttctcggaagggctaagttgataagacgatccaggagggagtcctttccttctcctctgagagggagcagcatcccaagaggttgatcttccctgatcttagaagagcaatggaagctttac

SEQ ID NO: 116448 - DNA, 770 bp, Arabidopsis thaliana columbia
  unsure (1)..(770): unsure at all n locations
cttagattagctatgacgtcccatgcacgcgtacgtaagcttggatcctctagagcggccgcgcttttttttttttttttttctcaaattataaacttttttatacagacaaaaaaaaagttgaatatctccgaagagattcagattaatcgacataatatgcttctctgcattgttcttagctcatgagagatctcaagcaccaattgttgctgaatcttttccacaatatcagacacaccaccttcagattcaccaccaaaatccaaccaaagacatggctttattagatcagtttcaatgatctgatccaatgatcttgtaggagagtcagagcagagtaaactccagccaaaatgtctcatcgtctcgtgaatcagatcatcttctctaagggatgattctagattggggactctcgagctcttcgatggcgagaaaggccaaaacttgatgtcttgacggtaaatctcgcggagaatctcgtcggtgtaatcanaaacangaagaagctggtcgttgtgactaccgtgtgagaattcatcgagtagtgatgtgtcttcgttgcaccttgccataagattagtccaattcaatcttgaagcttcaagaactttcttcacaaactcatgaccagattctttttctataagatcaatgttaggatcatcaaatgataatccaatcttcttcttcaggttagattatttaacatttccggggataactgtttcgtcttccaatgaatccttcaagaacagagcaggact

SEQ ID NO: 116449 - DNA, 888 bp, Arabidopsis thaliana columbia
gcacgcgtacgaagcgaggacctccctacgggcggctgaagctcgaataagcaaaaagagagaggggaccaaaaaaacgagagacaacacaaagacaacacacagcgggaaaacaaggggggagagaaggacgagcaaaacaaaaaagaagagctttttaaagggggggggaaacgcaaacaagggcggaaagagcaagggcccgcggggaaagagccagcggagacagccccgggcaagaaacacgccggagaccgaccaagcagagcaaagggaaccaacgggacagaggccaacaaagaccaaagaggcgagcccagagagaagagagaaagcgacacaaaagaaaagggcagaagaaccaacaagaagaacagcacccagagagcacaaaggagacgagggaggaagagaagagagccaaggaaagagaaaggacaagggggcgccggcggaacgcgaagaaggagaggaaaggaaccgggggagcaaagaaggaaaggaaaagcagcacagagacagagaaggccacaccgccgagacaaaggcgccggacgaaagagaaacaacagcgagacgcagggaacacaaaccgcgcgcccaccagccagaggagacagaagagaggaagaagagaaagagaaaacgaaagcaaaagagagccaccaggaaggaagcagaggaggacccgacccaacagaacaagaacaggacggcaccccgcaacacaccgacccccgggacaaagagcgagcggaagaggacaagaaaaaggcacgaggggggagagagaaaaggaaccggaggaggcacagacagagcaagggggggacgggacacggaaaacaccgcgaaagagaagagagcgagaaaacagcaagccaacgc

SEQ ID NO: 116450 - DNA, 711 bp, Arabidopsis thaliana columbia
  unsure (1)..(711): unsure at all n locations
nnnnnnnnnnnnnnnnnnnnnnnnnnnnnnnnnnnnnnnnnnnnnnnnnnnnnnnnnnnnnnnnncttttttttttttttttttttttttttttttttttttttttttttttttttttttttttttttttttttttttaaaaagtaataaataaaggcttggggaaaataaccggggtctttttttttttgaatacaggggattttttccccccttgagggaaccaaatccaaagggggcccgggggcggaaataaaaaaaccagggggggcccattttattaccgcctttggttttggggtttttttcccccaccaaaaaaaatacggcgcccttggggggctgaaggaattttttaataaccttttttaaccctccctttttttcccccccctggttaaaaaagccccccataaaaaattcaaaatcttttcaaaaaaaatctccccggtggtttttttcctttatccgataaaatataatcacgcctagaatttcccccaaaaaggattttaaaaaccaccttttggatttttaggccctttcgggacctctatccttttttgggtataaccataactttccttttttttccaatatcccataacatgggtcagaaaaaataacccccacttttttttaaaccctcagtgtttttttccaaattaaacccacattaccgctccaaaacttttttaaatcccttcataa

SEQ ID NO: 116451 - DNA, 606 bp, Arabidopsis thaliana columbia
ccgtcgtattcgccggactcctatacgactcatatagggaaagctggtacgcctgcaggtaccggaccggaattcccgggtcgacccacgcggtacggttcatttatgactgggagcgtacttctccatgtcacctgccttgctgagtatgcggcatttcttcataccggaatcgttcatgagtgcttttatcacggactgcactttctgcctcacgtctcaaagaggcacgttcgcttgactcctcaactatagtcgcgccctataatcgcattcgggattgactaatatggaagcgaggtacataatttactagccttcgggacgcttattctactgacacaattggcttgctctacgggcatgccaccccgcgttcagagaatattgcgttccaccagatacactctgaaccaacgtctgccccctgcacacagcatatgacggtcatccctgcttggtagctcgctatcttgactgccatcttgtttcggctacaagaccgcccctatagccggcgccgctctagtcgtattaatgccaatgctcttccctgcacctcacgcgctttacaataagactttgttaaagatatttaaggagaat

SEQ ID NO: 116452 - DNA, 515 bp, Arabidopsis thaliana columbia
  unsure (1)..(515): unsure at all n locations
gccagnnnnnnnnnnnnnnnnnnnnnnnnnnnnnnnnnnnnnnnnnnnnnnnnnnnnnnnnnnnnnnnnnnnnnnnccacgcgtccgcccacgcgtccgcaatgatcggtgctataacaagcgggcctatagctgatttagttggaagaaagggggcgatgagagtttcctctgcattttgtgtagtcgggtggctagcaatcatctttgccaagggagtagtggctctggaccttggaagactggcaacgggatatggaatgggagcattttcctatgtggtgccaatctttatagcagaaattgcacctaaaactttcagaggggctctaaccacactgaaccagattctgatctgcactggagtgtcggtttccttcatcataggcacactagtgacgtggagagtcttggcattaataggaatcatcccatgcgctgcctccttccttggcctcttttttatccctgagtctccaagatggctggccaaagtggggcgtgatacggagttt

SEQ ID NO: 116453 - DNA, 614 bp, Arabidopsis thaliana columbia
  unsure (1)..(614): unsure at all n locations
atttgnnnnnnnnnnnnnnnnnnnnnnnnnnnnnnnnnnnnnnnnnnnnnnnnnnnnnnnnnnnnnnnnnnnnnnnnncttttttttttttttttttttttttttttttttttttttttttttttaacctaataaaaagaatttatacactggaaagggaaactactatacaaatatttcaatgtaaaagctccaaatcaattgtgagagagggtcgaaggaaaagagtcgtctttgttcatcagtggggatttctcagcaatctgcagaatatcaatgaggcccgaacaactgataaaagaaacagaaccgcgagaaacccgaaatgggaagcgtcattcgccgttatggctactccgagcataagcgattcagctagactggccactgagatctccgttgccccgataaaataacccttggatgatggaatgccggtttgaagtatttgagctccaacaacgccgaaaaacatggaacctacccttgataatccgatcatggacaaaaaaaaaaaaagggggcttttttgggatagagaagagctacaatacccagcaacagcaacgggagggagtgaagcttggaaaacaatcctactgcacccgccttta

SEQ ID NO: 116454 - DNA, 586 bp, Arabidopsis thaliana columbia
  unsure (1)..(586): unsure at all n locations
nnnnnnnnnnnnnnnnnnnnnnnnnnnnnnnnnnnnnnnnnnnnnnnnnnnnnnnnnnnnnnnnnnnnnnnnnnctttttttttttttttttttttttttttttttttttttttttttttttttttttttttttttttttttttttttttttttggggggccaaaaacaaacttttaaaatttataaaacaaaaaggggaaaaagattttcccaaacaaaaccaaaggggtccctggattaacatgcttgggggaaaacaaatcaaacccaaataggtcttttaaccttctttaaaggaactttaaaattcccaccccccctttaaaagctaattttttcccaatactgaaatgattttccctttaaaaacaggatgggtctgaaaaatttgggcctaaaaaaacaatccccacgaatgaaccccaagctggggcgttttttcccttttaaggaaagttcttggttttaacaaaatttaattttaacactaccctccccaaattgaccttggaaataccccgggtgaacagggggtttttcttctcaaattttcacaattaaattgggcaccgtaaaaacccctaa

SEQ ID NO: 116455 - DNA, 805 bp, Arabidopsis thaliana columbia
  unsure (1)..(805): unsure at all n locations
attgagacgacactatagattactatgacgccgcatgcacgcgtacgtaagcttggatcctctagagcggccgccctttctttttttttttttttttttttttttagataaaaacattatttattatttatctaacacaattcaaccaactgcaaaataacaaactgcaaaatataaatggtcaaaacattttttttaaactaataaattttacattaaaaatgagaacattataatgtaaaacaaaaaaaaattctctagaacatcaaagattttgaaacagaagaagtacgtatataattaattatggtaattccaagatgaaaatagcattgtaagaaatcaggcaagtcctgtcttgatatcctcgacaagctttttagcaattgttttgtaggctttctcggagggatgagcaaagtcatagaagacatatttatctgggttggagcatggtactattgccgtaagcatacaacaacatccattcttctcatgggtaaatccgtatttcctatgattggtgataacatccataagagagttgtacatgtcgacatagacaaacctagcacccctaaaatctgatgctcctctccaacttttaattccgcttttcaattttttggttgaatcttcagagattgtgtttgccaagaaattacaccacacgaagaacccaccaaaaataagtcttggcataggcaaacatcccaatggtatcactcccatcaccgcaaattttcttgctccgngatcatataaatcttttataaatttttttgtccaaccaactaatttactg

SEQ ID NO: 116456 - DNA, 548 bp, Arabidopsis thaliana columbia
ctatgacgacgcatgcacgcgtacgtaagcttggatcctctagagcggccgcccttttttttttttttttttttttttttttttttttttttttttttaatatttttttgttatttgttaattttatggttaaatgaacattatatttacatgggagaaggaaaaaaaaaatggggaaaaagcgaaaacattggggaaatgggggaagaaatactaccgggaaaaaaaaaatccaagctcaaagaagagggaacatagtggtgatctgaaaatttaaaaaagggggagactctatttttggagagtccaagagggggggataaaaaacagggattgtgttaaaaacatgggggagcgcggtcacgggaatactaaaggggagggggcttaggaacttatggtgtttaacctttaaagtgacagggacaagcgaaggaaccgggtacattaacgatgacggtgaacgaggatgctttgagaaaccggaggcgtgggagcaaacgggaattgcggaacgagacatgtatgcgaacaattttccctaaagg

SEQ ID NO: 116457 - DNA, 582 bp, Arabidopsis thaliana columbia
  unsure (1)..(582): unsure at all n locations
gnnnnnnnnnnnnnnnnnnnnnnnnnnnnnnnnnnnnnnnnnnnnnnnnnnnnnnnnnnnnnnnngcctttttttttttttttttgtacatttgaacgttgattcacgatcgaaactagttagtggaccacactttgaagaagatttacaaagaatgtgtttgagagatatatcatttaatgtaagcaactgtacatccatggttcataggatttgcctgttcataccttgagacacgagtgttctttcttaacctctcaagcactagctcctttataatgcctgcccccattccatgaataataaataggatcgagcccgagtctcttcccgagatggccatgtctagctggtgaaccgtttcttccgcccgcattcctcttagatccaatgtgtgttttgacggtttgaatccgcactggttcgttttgcatttgcaacacactgcctagctctttcatggttatcngcctcttcgacgtaaagaacgattggatgtttggctacttggctacgagggaagggctttatgccctttttctttatgcgtactcttatcttaccatgctgaactagaactgg

SEQ ID NO: 116458 - DNA, 560 bp, Arabidopsis thaliana columbia
  unsure (1)..(560): unsure at all n locations
cctcacaatagtccctccactcccccccctagtatcgccnnnnnnnnnnnnnnnnnnnnnnnnnnnnnnnnnnnnnnnnnnnnnnnnnnnnnnnnnnnnnnnnnnnnnnnccacgcgtccgatttaagaatgttgttttattgatattattaatctcttgtcatgtatgtttctgttcttgattttttctgaagcttgagcatgagtcgcatgatcttgataaacgtgagagggctcttctgaaaaaagaaacgcacacggtgcttgaagatctaaactctgctaagtcaaagatggacagactgttggctgaatttgaaagtcaactagaaatcactcaagctgatcaatacaattccttaatcctgaacacctccgaggcactctgccgagaattatggaatccttgttgtcctgtggatctctgattcctttagaacaggaatacagtcgcccactccaacccaagctttctcacaagagatctctgtaacctgtgctcgctaccataatgtccgtatctcgtctcttcctgcacctcctaaatcaccaaccatccc

SEQ ID NO: 116459 - DNA, 431 bp, Arabidopsis thaliana columbia
  unsure (1)..(431): unsure at all n locations
cactatagtaatagctatgacgtcgcatgcacgcgtacgtaagcttggatcctctagagcggccgcgcttttttttttttttttttttttttttttttttttttttttttttttttttttttttttttttctccaaaaccatattactatctttggaaaaactcaaaaaataacaaaggggttttaacccccgnaagaagaagagaagaaaggatggggtggaaaacgatttgaataaacaattaacaagggggggaataaaaggcaggggagggggaccaccaaaacattagaggtgtttccctcaaatcatttaacaaagattgggtttttttatagaaggcggcaccgacaaaatgggggggaccaaactgggggatctgggcccaaccgggcggatattgggaattgggacacccacacctgggttt

SEQ ID NO: 116460 - DNA, 523 bp, Arabidopsis thaliana columbia
ttatttaggcgcactataaaacttgcgcgcatgccctcgtaagctgatcttaagcggcgccttttttttttttttataatatctaaatttgctcttactcactacacttactttgacccacaattttgcgacatccaaagatgataaaaagaacacacagttaaatgtacaacaactcaacaacactttcagctaatattattcaggatcaaaagaaaaccccaaacaaatgctgaaatttacattgaacattcacattacgtggttaaagtgtcaggaagagccatggaaggagctccaatgatcttaccaccaacatctgggaaaggtctcgtaatcaggaaaagggcttactttaccatcaacgtctacttgaaaaggatactttattaagtgaccttggagctctgagaatttcgggtctatgaatcttttccagttttcttcagagattgggttcaccttcttcagacattccagatctgatggctccacaaactcatcttcaagttttgcctaaatg

SEQ ID NO: 116461 - DNA, 453 bp, Arabidopsis thaliana columbia
  unsure (1)..(453): unsure at all n locations
nnnnnnnnnnnnnnnnnnnnnnnnnnnnnnnnnnnnnnnnnnnnnnnnnnnnnnnnnnnnnnnnnnnnnnnnnnnccacgcgtccgcccacgcgtccgcggacgcgtggggtgttttgaaaaactcacaagagcctctttgggacgagaaattcaacatttctatagcgcatccgtttgcttatctcgagttccaggtcaaagacaacgatgttttcggtgctcaaatcattggcacggctaagatcccggttcgagacatcgcatcgggagaacgcatttctggttggtttcctgtactcggtgcttcgggaaaaccgcctaaggcagaaactgctattttcatcgatatgaaatttactccgtttgaccagatccatagctaccgatgtggaatcgccggagatccggagcgtaggggtgttagacggacttatttccctgtgaggaaagg

SEQ ID NO: 116462 - DNA, 824 bp, Arabidopsis thaliana columbia
  unsure (1)..(824): unsure at all n locations
tnnnnnnnnnnnnnnnnnnnnnnnnnnnnnnnnnnnnnnnnnnnnnnnnnnnnnnnnnnnnnnnnnnnnnnnnnnncttttttttttttttttgaaaaatcgtaattataatatctgattacaaacatgaaggctgaagcctagaaagaagaactttcatgccttgtaccacgaaagaaaaaaactcttaagatcaagggaattgaaactgcatatagtcctgtttccctgaaggagggttaatataaaccccaaagcaccgacacattaatcgacaacaaacctgaccacacaaacactatggtcggacctctgcctcttcttcccatcaatcctttaacaaacggatccagatgacaaagcacccaaaagctgaaaaacactcctccaacaggcttactccattgtggaaacggactgtccagagtcctcgctagccccaccgcatttgcaatcatattcaccttcatgatagttattggaggacccatcaaaaagctccattttacaacatacaaatccgcaaactcatcgtttccatcttctggggcagatgacttgagagtcaaggtaaatgagatatcaactcctgcaattaccttaagaagaccctgaaaaccagctgcagggtgtgccgcttgacctcctatgacccagaactggctctttcttccccattcatggagagttatgcctgaccatttgatctcaaggagtggtagcatacagagcgggagtgttatcgagaggagatagatcaaaaccgttatgtcaagtgattggattatgaattgacccgagaagagcgaaatccagggagaatg

SEQ ID NO: 116463 - DNA, 491 bp, Arabidopsis thaliana columbia
tatacgactcctatagggaaagccggtacgcctgcaggtcccggtccggaattcccggttcgacccacgcgtccgcccacgcgtccgatgggaaagagaaacacgtcttgggctagaaattctaatagaaaggttagatctaaggataagggttcagatgagtcagatgaggattatgtgatttccgacgaggatgaagaagagtctgaggctgatctcaaggaggagtatgcctcatctgttgacggtgagccatcctttgatggttttaatgggtctgatgcggtggaggatgaggaattagatgaagtggaagaggaagatgtgatgctgaggaatgttgaatggccaaaagtgaagactggtcctcgtggtaatcgaaaaatcacgggatgtaagtcaagaaagacgaaccaggtggatgcgcctgacaacgcggatcgccctctccctcgactcccctcacgacgatggttgtatccgcatttcat

SEQ ID NO: 116464 - DNA, 785 bp, Arabidopsis thaliana columbia
  unsure (1)..(785): unsure at all n locations
gnnnnnnnnnnnnnnnnnnnnnnnnnnnnnnnnnnnnnnnnnnnnnnnnnnnnnnnnnnnnnnnnnnctttttttttttttttttttttttttttttatcgattctttaataaatacagtattgattgttcaaaaccgttatgggcctaacaaaaaggcggttacataactgattatttaacagaataccaaattcctctaatgctatacactaatcagcaaagaaacttgctctgcttttgtttataactcctgcaaattgagtgttagagcacatttgcttccctcatatcaaaactaggattgagattctgcagctggagattccggaatcgagacttggctagtgtttggagactttccttgatttcctgcataaaacacactctctaaactctcttcacctatctctcttaaccgattgagctcaggcaatatctctttcccgaggtcaggtctatcttttcttcttagttccgcgcattgaagcgaaagctttgctaaagatagagcttcttctataggccagtccggtactgctggatcaagcatatccttaagagtcccttcttcgatcgcttgttcaacgtaataagccaaacccattggctgttttgcggttaagatctgcaaaagcatgattccaagagattaaacatcttgacttcacacccaacattcctggtttgtgggactcaagatcaatagtacagaaagttcctgcagctgaagtgactctgtactgtgtaacggtttccgctactggaaggactaatctcgctagc

SEQ ID NO: 116465 - DNA, 679 bp, Arabidopsis thaliana columbia
  unsure (1)..(679): unsure at all n locations
gacctatagatanactatgacgtcgcatgcacgcgtacgtaagcttggatcctctagagcggccgccctttttttttttttttttttttagattactctgttttctcattaaaaacaccgactcttcaagcctactaatttacacagcaatgtatcttttaacataaagaagatgacaacaattagctttcattagcataaacaaaatgaccctttctcacatatgaacagattttctcagagccaatgagacaaaaaaaaaaaaacctcaagcactgcctcattgttagctttcactagcaagatctttttctattttcctcttatttgccagcataccagttctgagcacacttagcatcaacagataagtcgactgagagaatattcttgccgttgaagggttcagacatgcagttcacaactatgtctttagcgttctccgctgactcacttggtccttccaagattacttcatcatgaacttgtagaagcaatttccaaccaagctcttttagccgttgattatttgatatctccagcatagcgcacatagcaacatcagccgcacttccctgaacaggagtgttgattgctgctcgctcgatatggttcttttgggcacgtgaacggtattcagggaatttacgagcccttcccaacaaagtgagtacatacc

SEQ ID NO: 116466 - DNA, 800 bp, Arabidopsis thaliana columbia
  unsure (1)..(800): unsure at all n locations
nnnnnnnnnnnnnnnnnnnnnnnnnnnnnnnnnnnnnnnnnnnnnnnnnnnnnnnnnnnnnnnnnnnnnnnnnnnncttttttttttttttttttttttttttttttttagaaaacacaatagctttctttattaaacttgatactttaacatcttagttacatttttgctccaccgacgaacaatatttcatacgaccacaaacacgtaattgatatatcatcattatttgctttttaaatcataggtaatttaaattcaaacattaaaccataaataattttaatgattcatatatccataatcccttggaacactttcatagccgagccaggaagtccaagcagcacattgatactcttcgtgtcactaccacatggcagaaacagaatcacttccttctcaggtaaaccgaccggtccagatacaaccggttcaccccaaccgaaatccttagtatgaaacgacagttttgcccacgacgtgatcagaagtgttgccgttaggctcggcctaactcgagtcacctcaaagtaatcaatcgctgacctcatgaaaccggcgttgaccatttcaacggcttttttgaccaaacacactgaatgagaaagagggttaaaggcacttcacctgccggtggaacgcaataagtgaacacaatcccgtgtccggaatatcctttaggaagttccggaacgaatctcgaccttctcatttgaagaaagagaaacttgtccggtgacagggttaagcctaaggttgacaagagctctcacagaacccggtagggttggaaaggc

SEQ ID NO: 116467 - DNA, 954 bp, Arabidopsis thaliana columbia
  unsure (1)..(954): unsure at all n locations
cactatagnagtgctatgacgtcgcatgcacgcgtacgtgagcttggatcctctagagcggccgggcttggtttttttttttttttttttttttttttttttttttttttttttttttttttttttttttttttttggggcaaaggggcaaaatgctctttttccccccctccaaaagacccaaccccgagagttagaaaggtaaagccgcaaggggggggggggggtagagggggggtttctggggtttgtaaaggggaaaaccgaatttttggggtagggcgttgggcctccggggggggttggggttttaggggcggggggggggtttggtcctttgggggggggttggggacccaaaggggggcatgggggaggggccccggctttgggggtaaggcccaattggggttgggctgggcccttgggatattcaggggcgaaggctttaagggagggggggctggggtcctttcccaaaggcggggggggggngcaaagcggggaggggggttttggccccctccaccccttcgggggatacggcccggccccagggaaaaagagagcccccgacccccggccgcttggtggggggggggggcgggtcccggggaatcttctttgagttggggcaacggcggttggtaaacggttccggcgggctaaggggggggtgccgggcccggggcgggagccggcgggggcccagaaaaaaagggggacagggccgggggggggcccctggaattagggcacgggcggngcctgcgcgcttcgggggtcagaacttaaactctatctctcccccagaaagggaaccccaaggggtggggcaggggaaggggcccccagcccngggggggggggggggtggggttcgccaaattaaaaagccaaactgcggggggggtggtggggggggcccaacccgccgggggggcgcgctggggg

SEQ ID NO: 116468 - DNA, 449 bp, Arabidopsis thaliana columbia
  unsure (1)..(449): unsure at all n locations
cactatagnagtgctatgacgtcgcatgcacgcgtaccgtagcttggatcctctagagcggccgccctttttttttttttttttttttttttttttttttttttattttttttttttttttttttttgtgtgctaacatagatttcttttctctttttttaaaagggcgccgggcgggaaaacacataaaaagagtgcccccgtcccgaacgccaaagcggggaaaatccgaaaggcacaaaaaggggcccaccaacaaaaccctgcggagaaggcgcccacacacaacaaaccaggggggttaaaaggggggcggcccaggcggcacaaaaaacccgcccccggggactcccacccccccccaaagccccgcgaaacccgccgggggggattaaaagacctccaaaagggggggaccccccgaatggggtacccccacaaaaaccccc

SEQ ID NO: 116469 - DNA, 537 bp, Arabidopsis thaliana columbia
  unsure (1)..(537): unsure at all n locations
gcactatangatagctatgacgtcgcatgcacgcgtacgtaagcttggatcctctagagcggccgccctttttttttttttttttttttttttttttttttttttttttttttttttttttttttttttttttttttttgggacaaaaaagtaaagcaaatcacttgtcaacgcccaaagctttggaaccaaaaacagtttgggtggttgtcaacccgacacataatccccaaccttttactggccggaaagaaaaaaaactccctgatcccccgacatttttaactccgggcaacattcaagcaggggacggggcggtcacgtatttgagcccgccagcttcagtaaaagcggggatgaacggtttaaaattcacgaaatccacctttgggcccacacggaaacaggttttttgtaatccaagggttcggcgccgaaaatgccccaccattttttcactaacatttttatttttcccctctccatgtgcgcttttttccctgggttttcccccggtttcaaacccgttggaaagaa

SEQ ID NO: 116470 - DNA, 793 bp, Arabidopsis thaliana columbia
  unsure (1)..(793): unsure at all n locations
actantagatagctgatgacgtcgcatgcacgcgtacgtaagcttggatcctctagagcggccgcgccttttttttttttttttttttttttttttttttttttttttttttttttttttttttttttttttttttttttttttttttttttttttttttttttttttttttttagaaaaaaaaaaaaaaattggggaaagggggttgtaaaaaaaaggggggaaaaaccccaatttttggggggaaaattgggaaaaaaaaaaaaaaaaaagggggaaaaaaaataagaaaaccccgggggggggaaaccaggcgcaaaaaaattaaaagccccccaaaaaaggctgaaaccccgggttttgaaaaaaatgggacaaaaacgcccgggggggaaaaaaatttttttttcttcaaaaaaaaaaggggttttcttttttaaaaacgggggtaaatttttgaggggggagagggggaggggaaaactttgagaaaaacattctttcccgccataaaaaaaaaaaaaccccccggcgcctcaaaatagaaaaacacccgctataaacctcccgcccttctccacgggggggaggaaatataatatttatatctaacggggggggtctttttctccctccccctttgaaaaaaacggcccggagaagaaaaagagaggttgtggggccacaaaagacttttggggaaaaaggcccccgcgggataaaaaccccgtgttaaagaggagggcgcgcacatctattgttccgccccccttgggcaaaaaagaaagggccc

SEQ ID NO: 116471 - DNA, 831 bp, Arabidopsis thaliana columbia
  unsure (1)..(831): unsure at all n locations
nnnnnnnnnnnnnnnnnnnnnnnnnnnnnnnnnnnnnnnnnnnnnnnnnnnnnnnnnnnnnnnnnnnnctttttttttttttttttttttttttgaaatctgaacaacttttattgataagaggacttgaaaagagtatcagttttagatactaaatttaaggagcttcaaaacagattttcggtcaggcatgctcggtattgcaccctttacttggacacaaagagaggcagctgcagcagcaaatctcaagcattcctcatgggacttgccctctaccatagcgactgcaaatgctgcagtgaaagtatccccagctcctgtagtatcaaccacttgtgcagccggtatgatagactgctggattggtttttccccttgtatgaatagtgcagatcctttggacccgagttttactagaacttgcttaactcccaacttatggcactttgcaacagcttggctaatctgttcaaaagtttcagttggcattcctgtcaagcgactgagctcagtttcattggggctcaagatatcaatggaatccaatagctcatttggtataggcgtatccattcctcccacatcaaggatgactggaacacctgctttcttcacagccttagcaacttgaatattgatggaatctgggatctccctttgcagaagcacaataccagcattcctcacaatctcaagatcatcatcgctcataatctcaggccaagctttcatatttgcaccaccaacgataatgatcgaattctgaccgtccgactgaagcatcaccaccgcggtgtccgtcggctcattttcacagatctcacgtag

SEQ ID NO: 116472 - DNA, 732 bp, Arabidopsis thaliana columbia
  unsure (1)..(732): unsure at all n locations
nnnnnnnnnnnnnnnnnnnnnnnnnnnnnnnnnnnnnnnnnnnnnnnnnnnnnnnnnnnnnnnnnnnnnnnnnnnncttttttttttttttttttttttttttttttttttttttttttaataaaaacggaaaagccacttccttcaatttccaagggtctaacatgtagtaataagagttaattaaatataaagacagagagtttccaagaaaagatccaattcactatgatctttatctacagctaacatgaccaatctctcacatgtctgaaagactaatttaaacaagaaagattatttatctgcaaatcacttccaagagaagaagaaaaaaagttggaacatcgggatatgaagggtttttgtcggcattaacttaaaatcacttaagtcaaaaaaaagtcacaaccattttctccaactagttgatctgagctcaccagataaaaaccttggaatgctcaagagactgttaaccctcgtcaatccttccaaagcagaccactcttcatcatcttgggcaaccgagatacattccgcaagggtcattgtcattattttcgactcaatcccgcaactctcagggattttctcgtctttaacggggacaatctcatcctcctccttgcttgggctgggagggacactctctatagactcttctttgggagaatccctttttacattgggtgagaccttcatggctactgatgaatcttggaaaaagag

SEQ ID NO: 116473 - DNA, 698 bp, Arabidopsis thaliana columbia
  unsure (1)..(698): unsure at all n locations
ctgnnnnnnnnnnnnnnnnnnnnnnnnnnnnnnnnnnnnnnnnnnnnnnnnnnnnnnnnnnnnnnnnnnnnnnnnnnnnctttttttttttttgttttttttttttttttttttttttttttggaaaaggaaaaagaaccaaggcattgggatttcgattgctaaagatgaaaaaaacaaaggagactgaaatcccaaacactaagggtcaacgacaccaggcgaaggggaaattgacagatacaaaaaaaaagaccgtgtgcgacgggttaaaggtcaaagttttttccttttccttgggggagggagagggatcaaggggggggggggggggccttgtcctcttgataacgaaacccaaaacgaaaccgccgagcccaaccaaaaaaacgaacgggaatgggacacctcggctttggttgtttttgctcctaaaccgaaccagatccatttgaatttggaggctgaggtgaatgggaaagggatactgtttggctagggtgagaatgagaacgatggccctagactaagatgtgtgatgttgaagctcagccttgacgatcactctcaataacgaaaacgaagatccatgtccatgttcagtatcagagacacagggcgtggaagacgaaccctattcttatgcaaccggaaacggggatggtggtcggaggagaaaaacatctgtaactttaagt

SEQ ID NO: 116474 - DNA, 675 bp, Arabidopsis thaliana columbia
taggcgcactatagatgagcttgacgtcgcatgcacgcgtacgtaagcttggatcctctagagcggccggcctttttttttttttttttttttttttttttttttactaagaagcaacatatcgaattttaggggaaacatagtactactacaagcatagctagaataacatttttccgaaatacagaagaaccattatcggattttcttctaatttattcgtattggattgacctcgttacatcatagggggaatgctctgctcgtgtctaaagaagttctctggatcaacctttgctttaatcatcatcaatctgttgaaaattgttttgaagtagttagctccccagacttgagcttggttgatgcatggttttacgtctttcgggtccttcccaggtctaaataacggtagttcacgtaagcttctcgggggttacttgaaacataagcgggcatgtaactaaagagatctctgatccagttgatgggtctggctcggctcttgccactggctagccaacttggttccgtcctgaaccttgaagaggactctttttcgatgcggaaaagggatttgggattcggggattttcgccatcattccctccgaggggttccttgtcatcaatggaatatcctttttaaggagcttcttagaagacccttgaggcc

SEQ ID NO: 116475 - DNA, 234 bp, Arabidopsis thaliana columbia
tgcacgcgtacgtaagcttggatcctctatatcggccaggcttttaaccttttttttaataaaaatgacctcaaagaatttttctctatctacatcattgcgagagcctacacgcagcgcgccaccacgaatgtgtaagagcattggcccacgacatgatagcgaaacaacgtaaccaggaaaaaattttttttttttggagggtggtggccctcgagagttcggagtttgttc

SEQ ID NO: 116476 - DNA, 642 bp, Arabidopsis thaliana columbia
  unsure (1)..(642): unsure at all n locations
cagagcacgcgccaaccgacgaaagaattttcgagacccacagaggaacgcgcccaccgagcgccgcgcagcgcgaggcccgcgcgcgcggacgcgcagacacagcacgagcggcagcgcgggggaaggagagacacgggcaagacacgacgacaacaaaacgaaaagcaagagcaaagcaaacagaggcaggaacgcggcagaaagagcggacacggaagaacagacaggaagggagaccccgcttcgaaaacaaggagaggaaacacaccgcgaagacggcggcgcggcagagaaaccgcaccgagaaccagccacagcgaagagcggacccgagcgacaagaagagagagggggcgggaaccgaggagaacaagagagagaggcaagacgacaagggcaccgaagccgacgaagtgacaagcgagagaagagcgaaaagcaacacaacgagaaggacgagcagccacgccgagcacagcgggagagcgaacggagaaggacgagagagagcgaaggaagcaacgcgcgaggaagcacgcgaggggagngcggcgagactgcgaacgggccgggccgcggagcgcgaggaccagacacacacaaagagccacaaaaacaaaaagatcagcgacaacacca

SEQ ID NO: 116477 - DNA, 893 bp, Arabidopsis thaliana columbia
atgcacgcgtacgtaagcttggatcctcttgagcggccgggcttaatctttttttttttttttttgaggaatgccatgaagattttaactagataaacaacaagatacatgactaaatattaagtggataacaataacatgtgcattttacatatcaatgtattgtcaatacattttctttttgattatcagactcagaggcgggaaaaaggagccaagaaaggataacccgtgtagccaacaactggatcttggagtgaaaacgtcctccgattatatgtatccaacgtctccatcaatctggaacgcggaaaccaaattcggggtggggataaacaggcggccatatgaaaccaagaggagctcaacctgggggaacagcgtgcatacctagggcctaatggaacccccactagacataaagggtgcattaaaaaccaagccaaagcgttgattaaggtgaggtgtgtcccaaaactcctgggctacaaacgttgttggcccgaaggcggggggcgaaggttggaacgtaaaggtaacgagctggggcctaaaccctgggagtaatgagacggcaaccagggtagccaagggagggggggcaaaacgtgggggcggggaggaataggggaaaccgtcagaaactgtaggtgaggggtgaacacgctgggctattggttaagaagcaaacggtgagagggaccgcggtgggaagggcggagtgcgcccctctaaataggagttgggcggctgcccggggagcaactctgagccgaggatgtgggggaaggaaggaagagtcgcgccgaggttggagggttgaacagggtgaggtttcgggaccgggagaagggcagaggtggaagggtcggagatagggatccatagcgaca

SEQ ID NO: 116478 - DNA, 519 bp, Arabidopsis thaliana columbia
ccggcactatacgactcatttagggaaagccggtacgcctgcaggtaccggtccggaattcccgggtcgacccacgcgtccgcccgagcagaaggagaaactgaagggttcttatgattttgtcggtatcaattacttcacttctacatttgttgctcatacggacaatgttaatccagagaaaccgagttgggaagctgattctcgcttgcagttacattcgaataacgttgatgggttcaagattggttctcagcctgctactgcgaagtatcctgtttgcgctgacgggttaagaaaagttttgaaatacatcaaagagaactacaatgacccagaaatcatagtcactggaaacgggtacaaggagacacttgaagagaaagatgtacttccagatgccctcagcgatagtaacaggaagtattatcatatgagacatctcatggcattacatggagcagtctgcgaggacaaggttaatgttaaaggttactttgtgtcgtcgcttatggatgg

SEQ ID NO: 116479 - DNA, 552 bp, Arabidopsis thaliana columbia
  unsure (1)..(552): unsure at all n locations
aggaccacagcctaagccacccatgcgccgcgccgcagtnnnnnnnnnnnnnnnnnnnnnnnnnnnnnnnnnnnnnnnnnnnnnnnnnnnnnnnnnnnnnnnnnnnnnnnnnnnnnnnnnccacgcgtccgatcaaaacgattcgattctgcgaaaccacttttcaattctcatcggattatttctcttccaatttctacaacgggagctaaactatctagatcggagcattcaatggctgcttcttccgaacccaaatctctttacgatttcaccgtccaggaggctaagggaaacgatgttgatctaagcatctacaaagggaaggttcttttgattgcgaacgttgcttttgaatggggctcgactcacccgaattatagctgggcttgcgcacctggatcacacgcacgcaggccatgggtccgagacgcttgcgtttgcgtgtcgccagatctggactcaatagcgttgtcctactgagagatagtccaaggtgcttgcctcggctgggagctggatacagattgatcgaaagggtggtgtgagagg

SEQ ID NO: 116480 - DNA, 679 bp, Arabidopsis thaliana columbia
cactatagactagctatgacgacacatgcacgcgtacgtaagcttggatcctcctgagcggccggcctttttccttttttttttcgaccaaaaaaacgcatttcggatttcaaaaggaatgctacaaatgtaacatcatcgctgatctatttacaacacaaagggtgactttaaaatcggtcatggcatgatggatgttggagatatattttgacctatgagagagggaatggagcgaaagagccacacggactcgacatatcatcccaggggagtgatgcctcgtttctttttgattacaagggcccgaacgcgggtgcctctactaattggctttaatcgcgggtgaggggccggctcagcacgtttgaaggaagacacattccgtatgagcgcgcttggggttagaagatcactatgccataatccgcatttattgggccaaggaagacggaaatgggcgctctaagaaaaagaagggggcgttgcacgaacagtgaagggacctagagaccaaatcattacattgtgagagagatgtggtgggagtacgtgcctgggggcccgtcgcgagcgccctggagtatacttgagagttgggttcgacacgcagcgagggggggccccggttcgagatgtcgagaggagaaacacgggcgttgggtgtggagattttgag

SEQ ID NO: 116481 - DNA, 763 bp, Arabidopsis thaliana columbia
  unsure (1)..(763): unsure at all n locations
tgnnnnnnnnnnnnnnnnnnnnnnnnnnnnnnnnnnnnnnnnnnnnnnnnnnnnnnnnnnnnnnnnnnnnnnnnnngcctttttttttttttttttttttgctcaaatggaatttgatattattatatattaccacaaagtttgaggcacattgttgtatcagtttaaagaacagatggacaacgtttttgccacagcaatttgtagaggtactttactgtttcctatgatttttggatttgtagaagagcttttttttactatcatgttaaaattgtacacactttgaaaagagagcaatcaagattgaccacagagaataaaagcatgaagaaggctttgagcaaagtgagcttgatccgatgtgcctgagacaaccaccagtccttctgtagtccctgcctttggatcatgcacaaccacattcgctcctgatacctgtttgatgtaattcaggttactgcagttctcaccatagacatgacctaagtatgcttgaggaatcacaatctccacatttgcacttgtcattactggattctcgctgccaatgggctcatttctcaaagcaaatccatggttcacatcaggaggaaccataccaccgggatggccatcgattcccggctggcggggccaagacattggggaaggtggcctggcaaatcaggaccaggtggcctatcanatncaggaccattgacatgctctcatggaatggccctctggagaatggaacgatctggagagctggatttggctc

SEQ ID NO: 116482 - DNA, 498 bp, Arabidopsis thaliana columbia
  unsure (1)..(498): unsure at all n locations
nnnnnnnnnnnnnnnnnnnnnnnnnnnnnnnnnnnnnnnnnnnnnnnnnnnnnnnnnnnnnnnnnccacgcgtccgctttattgtctcttattatagagatatataccttagacagattctacatattgctatgatgaccaccagacacatcggctttgatagtagtccaagaagaggtatatcatcaagacgaacttagcgcgagcatacgctgaattatctcgacttagaaccgcgctacgaacaaatcacgcttctgagtggctataggaagaccagtgaccaggaatcagtctttccttgagctctcgaacgagtttgcttacatcatgctatcagagcatatagcggtgcttgtggagaagctgacaatcgcaggagggactttattcacagccagtagctgctgctgcatactcagctgaaactctgctctgcctcatggtagattatagtagtgtgatcaaatctttggatccacggcagctcgtatggct

SEQ ID NO: 116483 - DNA, 643 bp, Arabidopsis thaliana columbia
tgatttaggcagcactatagcatgactatgacgtcgcatgcacgcgtacgtaagcttggatcctctagagcggccgcccttttttttttttttttttttttttttttttttttttttttttttttttttttttttttttttttttttttttttgaaaggaaaaaaggggcaaaaaagggaaaaccccaagggggaacccccccgggagggggggaaacctccaccggggggggcccaagcccaaaaaaaaaaaagggggccaggttttaaaccttttttggccaagtaaaaaaaagcggggagaaaaaaacgggaaaagaaaaccgggggaaccaccatttaaaggctggcccaaaaaaaaacctgggggcttagcccccggaaaaaaaaaggggggggaaaaaattccggagcccaaaaacaacctcccgtggacaaaaaaccccttgggaaatcgaaaaaaggcccaattttctcggggagggggcccaaaccacccaaggcgggggagagcccggcaaacttcggtccccggttttagggcacccccacttgggggactctgggctcaaaagggggggacccccccccgagagggctggacaaaagaaaaaaaaaaaaacgtctcccccgggaccaaggg

SEQ ID NO: 116484 - DNA, 529 bp, Arabidopsis thaliana columbia
gggggactcctctaggagttctatgacgtcgcatgcacgcgtacgtaagcttggatcctctagagcggccgcccttgtgtttttttttttttttccaaaacgacgaaaaggctttaacaactgtataacccttctgtcttccacaagtgtctgacactccgccggaatctaaaagactccgggccaaataaaataacaggcacctcttatgcttgagctccaccttatttatgaaaagcgaaatatgttgccaaaagtacatgggaaatctataggccccaaagcaatattgcagctggacaagaccctaggagaggtggcattaccagcatctctcatgagttattgcacgcaaggctgatagtggaaggagacaataatgatttagtcttctgtctcccttgagtagaaccaggaattggttcatgatattctgacgtgactttatcggagataacactgtgggcgggaatgaacacaagtcggttcaaaaatgggagcgaacgtacactcgctccctatccaccac

SEQ ID NO: 116485 - DNA, 473 bp, Arabidopsis thaliana columbia
  unsure (1)..(473): unsure at all n locations
nnnnnnnnnnnnnnnnnnnnnnnnnnnnnnnnnnnnnnnnnnnnnnnnnnnnnnnnnnnnnnnnccaggcgtccgcagatccatcggagaagaagacagagagcattgaagatcaatgacttcctagatatgtggggtggtgtctcttccagttgaaagagctctgcttgcttcgttatggaatcgattacaagagcagatctctaagcattcctttgatgctccacgttatcgggtgaacattcctaatattcgtgttggaaccttacattgtgtactcgctctcggcgaggatctgctgaggtcgaacagctctctcgaacgagtttcccagtatatcaggacaccggatctaataattcggcgaggataatctgggtgtagagagcaatcgctcttcgcacaagaggggcggtacatggaggaaccttagctgaccgcgggtttgctgttcatcgggcctaactacctca

SEQ ID NO: 116486 - DNA, 236 bp, Arabidopsis thaliana columbia
gggaaacaagacccgaagacaattgctaaggacgaaagccaaacgacgcgagccggaaagcgagaggagcctcccggagctgggcgaccatgggggaaccgcagacgagtaaaagaactagttctgaaactactcatgcaaaaaaattataccgtgcacgggtcggcgtgggataggtttaatgaatagggaggcggtgagagggtgaagcgaagaacacacacaaagccgaagag

SEQ ID NO: 116487 - DNA, 482 bp, Arabidopsis thaliana columbia
gacgtcacatgcacgcgtacgtaagcttggatcctctagagcggccgccctttgtttttttttttagaaaaacattgagaactaaagttacatataaacaaaacaaaattataactaagggatattctttaacacttttttttttatattaccctaaaacgaaattacttttggatataagtagcattaacaaaacttactatagcagacccaaaaaaactcaaaattgttagggaaaaacaaaagcacaaagctaattagttggttttcttgccatcttcttggacagagatcttctttgtatccacagactgatcctgacctgcaaaaccaaactggttgacacgtgttttgtccaaaggataaacccatctctgggacaagtatattaagaatttgacatcatctcggaagacagaaaggcgatgcaacattgggattttgatgacaaaagcaaagagaatcgtcaggatggggtgggg

SEQ ID NO: 116488 - DNA, 492 bp, Arabidopsis thaliana columbia
  unsure (1)..(492): unsure at all n locations
tgacgtcacatgcacgcgtacgtaagcttggatcctctagagcggncgcccttttgttttttttttataataacacagaactagtatatataaacttttatatatccacaatggtttccaaatcaattaccaaaataaatgaagtctattaaaagaaacaaacaaaaaagaataggaagaaggctttgtggtctcagcaatcatttttggcattatagtagccattgttgttattaagacaaggatttagagtagctttctttcaccattgtcttaacaaaaagctctcctgctctatatgaagatcttaccagtggaccacttgcaacataacgaaatcctattgattctccgtatgttttccagaaatcaaacttctcaggtgtgacatactctttcacagtcagatgcaatggagttggctgtagatactggccaagtgttagaatatcaacatctatagctcttagatcagccattgcttccttcaac

SEQ ID NO: 116489 - DNA, 512 bp, Arabidopsis thaliana columbia
  unsure (1)..(512): unsure at all n locations
nnnnnnnnnnnnnnnnnnnnnnnnnnnnnnnnnnnnnnnnnnnnnnnnnnnnnnnnnnnnnnnnnnnctttgttttttttttttttgatattttttttttgttttttttattgttttttttttttaaccacaatggacaatttcatataaaaaccccccataaaagtttaaatcccacctcacttttacccacagaccattacaaacaatacatgaaactttttaaacatttcccgaccaaaccaaaagaagataaaaggggtttttaaaaatcggtaatatcagcttttttcactcactcatgaaccaatatctttttttcatccgagtttttttcatactcgcctttgtcatttgaagttgcgttttggtattgctggaactctgagactagatcgttcatgatgctctcagctataaaaactccatcttgtccattcctttacctgggaacaaatgcaaaaaagctttcctcctgaacatacaagtgaactggtcggtcacccgctaaa

SEQ ID NO: 116490 - DNA, 551 bp, Arabidopsis thaliana columbia
  unsure (1)..(551): unsure at all n locations
gatggttcgccgcggcgttgccggcagacaagcccgaattattgggtcgcnnnnnnnnnnnnnnnnnnnnnnnnnnnnnnnnnnnnnnnnnnnnnnnnnnnnnnnnnnnnnnnnctttggggttttttttttttttttttttcgcaggaaaacgcgagggaactttgagacttcctgataaatatatgcttagaggatcaaaattcatacatgtttatgtccatatctatgcgaaactttggctgcatggttgacaccaaaaaaacaaaaaaaacctgcgtaggcctgagtggttgggtcaattgaataaaaagaatgcgattgcgtgtgacccagaacactcatactgggcattgggcaactgtcacctttcaccgggttggccaaagaggtgcaatggatggcccataaataggcgcccgagctaattcatcacgggttgtcgagaaactggctcatcctcagagggaaacgagatagagacggggcaggcataagtgcatttttcgcggggggaaagaggatcttttgcagctcaccgagcaagctgc

SEQ ID NO: 116491 - DNA, 553 bp, Arabidopsis thaliana columbia
cacgagcggcgcgcgggccgacgccgcggcgggggcggggaatatttgggacgcctatacaagtctatgacgtagcatgcacgcgtacgtaggcttggatcctctagagcggccgcccttgggtgttgtggtttttataaacaaaacatctctcataaaaggaaacagtaacaaatgagcacaaattcatgtgagtttatttttcactgtggggttaagctctaaattttaaagcttcatttggaggagacaatgaatagactcacctgatatgtcttttggggggggggacctttattatgggctaagacaaaatagcttgattaccacatagcaggcttcgcacgtaattctagatcttctgtttttgtgttaggccctttgctccacagaaggatccgatagtccttggtgttcaagaacatatacctttcccgttcagagccaagcccgttggatctatcttcaagtggatcatgtaaacggacgcgtgggtgcccccggaattcccgaccgggggctggggggggaccaggtttgcgtatatgcgggg

SEQ ID NO: 116492 - DNA, 535 bp, Arabidopsis thaliana columbia
cgcgcccccccccctagtatcgccggctactatacgactcatatagggaaagctggtacgcctgcaggtaccggtccggaattcccgggtcgacccacgcgtccgctaagatgatccacttgaagatgagatgcagcgggcttggttctgaatggggaaaggttactgttcttggaacctcaggactctcgggatcttacgtggagcaaagggcctaaaacaaaaagagaagatctagaattacgtgctaagcttggtatgttgctattgcgttattctgtcttagcacataataaaggccaatctgaccaaaggacatatcaggtgagtcttgtcattgtttccttccaatgaagctttaaaatttacaagctcaacacccattgggaactaaactcacatgcattgggcgttcctttgctactggttccttttctggagagatctttagtttataaactcaaaaaaaatgggccgcccgctttaaaggatccaagctttactacgcgcgcctgcgacgtgctagcctctttct

SEQ ID NO: 116493 - DNA, 562 bp, Arabidopsis thaliana columbia
  unsure (1)..(562): unsure at all n locations
acagtgcgacggacgcccggggggccgagtgggggggggcaattattggggacgacnnnnnnnnnnnnnnnnnnnnnnnnnnnnnnnnnnnnnnnnnnnnnnnnnnnnnnnnnnnnnnnnctttttttttttttttataaaataatatcgatcttacatctcaatgttcctacaagtaacaagctttttttttgttgttgtgtgcatagaatataacatcaacaacactcatgagaagaatccatttgcaaatttttccctatcacacaactgtaacacttctatttctccaagaggccaggatttaccacaatcttacttgtggcttgcatttcttcaggccaagagaatgcaacaaaagaatgtatcgataatccgaccttgaattaagcgagtttctttattagatcaaagagatgggcctgtgggtgtgggggttgggtgcttcattgtcaacatgctggattcctgggacaagctcttggatctttttctttaacccgtctactttagtttctaaagccgggacaacttccttaaccgtagtttgacataatattgg

SEQ ID NO: 116494 - DNA, 488 bp, Arabidopsis thaliana columbia
ttgacgtcacatgcacgcgtacgtaagcttggatcctctagagcggccgccctttttttttttttttgccttccaaaatgtttgtttctactatggatcaatctctcattttcactcctagaaaatgtactagtgttacaagttacaaatgcaagaaagcagcaagctttacgggatatggactgaacacaaacggttaagcttaaccagttctacaactacaacaagcactcgatgtcccgatgttgtttcgttcgtcctcttccatttccttaaagccctctacatcttgatcacattggtgctcatggccatcgttaatggggtttactggctgagactccggttgactcgagactcctctggggtttaatacttggctgagattctggttgactcgagactccactgcggtttactggctcagattctggttgagtccacactactttgtggtttactggctcagattctgggtgactccaccc

SEQ ID NO: 116495 - DNA, 501 bp, Arabidopsis thaliana columbia
  unsure (1)..(501): unsure at all n locations
tatacgactcttatagggaaagctggtacgcctgcaggtaccggtccggaattcccgggtcgacccacgcgtccgcccacgcgtncgcccacgcgtncgcccacgcgtncggaaaagaaaaaaaaaacagagtatcaaacatgtcaatcttgctctgtttcctctgtcttttacctgttttcttagtttctttatcaatcttgtcaaaaaggctaaaaccctcaaaatggaagcttcctccgggaccaaagacgctcccgatcatcggaaacttacacaacctcacaggtttgcctcacacatgttttcgaaatctctcacaaaagttcggaccagtgatgcttctccacttcggattcgtccccgtagtcgtgatctcatcgaaagaaggagcagaagaagctctcaagacccaagatcttgaatgttgcagccgaccagagactgtagcgacaagaatgatctcttacaacttcaaagacattggattcgctccttacg

SEQ ID NO: 116496 - DNA, 493 bp, Arabidopsis thaliana columbia
  unsure (1)..(493): unsure at all n locations
cctatagaagtattcttgacgtcgcatgcacgcgtacgtaagcttggatcctctagagcggncgccctttgttttttctttttttttttttgatagaaaccatttgatgtttttatggaaagaaacccaatgatgtttttatttattttgccaaaacaataagccggttgaatattttcagctctattccaagttggggaaatctctcttttgttcaaatttgggaaagccaaccttttttgaaattccggaatgactacagaacttgttagagcggtttgttcaatggtctgagaagggacaaaaaaggcttttggggggaagagaaatatagcccctatgatgtttttattttttttgccacaacaaaaacccggttgaatatttcccgctcaattccaaggtggggaaatctctctttttttcaaaaaaagaaaagcgaacctttcttagaattccggaatgactacagaacttgctaaaccggtttgtt

SEQ ID NO: 116497 - DNA, 518 bp, Arabidopsis thaliana columbia
ggacaactatagaagagtcttgacgtcgcctgcacgcgtacgtaagcttggatcctctagagcggccgccctttttttttttttttttttttgattacaataaatatattataaacaatctcaataatattcatcaactagtggcaacttttacaaactcaagaatcgatcaatcaataacttacaagacaagaaagagaacattctttgttcttccgtaagaaggaagtcacactccacatcgatggttcaagagacaaatagctaattaattaatgtttggttcgtacaaatccaagttcacgtgtcctcctcctgcttcaccatgtcggtatggcttcgaatcgatatctgtcgcagtcttgagcaccacatgcttaatttgtgtcctgttatatgtataggtgacgtggacattgccgtctccggcttgtataacagccgggtacgaatactccattcccggagattcctccaacgttaaaatatcggtccatgaatcaccgtcgtctaaagaa

SEQ ID NO: 116498 - DNA, 431 bp, Arabidopsis thaliana columbia
  unsure (1)..(431): unsure at all n locations
nnnnnnnnnnnnnnnnnnnnnnnnnnnnnnnnnnnnnnnnnnnnnnnnnnnnnnnnnnnnnnnnctttgttttttttttttttttttttttttttttttttttttaagggggggattctcaccttatttatagggggattctcaccgaaaactgattttattcgcgaaagaatgaaatgtccaaggatttgtttctttgtacaaaatcaacagacttatctgatacttgcatttgggagaaaatataacatggggaatatcaatatgctatagtttcatagggggataacttggtctccttcaagctctgatataacaatcaatgagtcttccatttcaagggaaacaggttctgtctttggaaccggatggattatttttttaccgccttttatgtagcctatggcaatttttttccttaccaagttcgt

SEQ ID NO: 116499 - DNA, 496 bp, Arabidopsis thaliana columbia
atacgactcacttagggaaagccggtacgcctgcaggtaccggtccggaattcccgggtcgacccacgcgtgcggctcatggaaactgacaaactattgtttattgcacctctcaagaaggactttttatatacagacatgaaaactgagaacatgacagtagatgagactgatgatactcggaagcaagtgtatgaggaaaaaaaatcacggctagaaaagattataacgcgtcctagtaagtccttatcaaagggatcagattctttcaaaggacccaaagaatctatacttttgcttggttggcgtggagatgttgtgaatatgatcaaggagtttgatagttatcttggtccaggcagttcattggaaatattatcagatgtaccgttagaggacagaagaggagtggaccagagtatagctacaggaaaaatcaggaacatccaagtttcacatagggttggaatcatatgggatatgatacattaaggga

SEQ ID NO: 116500 - DNA, 512 bp, Arabidopsis thaliana columbia
  unsure (1)..(512): unsure at all n locations
actatagaagagttatgacgtcgcctgcacgcgtacgtaagcttggatcctctagagcggccgcccttttttttttttttttttttttattactcgattcaatccaattttcataccatatatcaagaaagatgaacaacaagagtcattgtcatgaaacccaaacatttatttagcaaaagagtttcagaaaaactgactcagaagattcccacaagagtttttgtgaaatttataggcttgaaacaaaagaaattacttcaaactgtcaggttcttgtagaaaaggagtgacttcatgcttcagaatctgtgctcaagcttctcctgttccttgaaatactgagcataccagtaggttccaacgacaggggtaacgagaagagtggcgctgatccaattctcagagaccttgtggtggatcttctncggcagatccttccagagaccggtcatgatcttctgctgaaccggagaaagtgcgtaaaccaccgccttcaatttcaccggctg

SEQ ID NO: 116501 - DNA, 498 bp, Arabidopsis thaliana columbia
gagggagcgagaggcccccacgggggattaaggggacgcctatagaagactatgacgtcgcatgcacgcgtacgtaagcttggatcctctagagcggacgccctttggttttttttatttatttataagatcatgataatcggataattacttagtctttttattaggaggaggcaaccgcacagataattttgccgtgtgggaggacaaaggaagcaaaaacaaagaagtgtgagccccgaagagaggagaagaaataaagaaaaatcccgacgtcgccccatttgggagacaaacggtgggagtacttttggtctgccggaaagtgaacgcaaacgaaggagaacgagcccacgaaagaacgagcatcccaacataaacacaaacagacacgtcaaagcaagcaaaaagaacgcatatagtcgacgaagccgagaaccggaaacaggcgactacaaaaaacagcacagtacaataaatccacgccggggagggggt

SEQ ID NO: 116502 - DNA, 510 bp, Arabidopsis thaliana columbia
  unsure (1)..(510): unsure at all n locations
cccgccaacagcctcccccgcgccaccccggccgagcggtgtattcgccgnnnnnnnnnnnnnnnnnnnnnnnnnnnnnnnnnnnnnnnnnnnnnnnnnnnnnnnnnnnnnnnnnnnnnnccacgcgtccgggtggctgcaactgcattgcggctcatgttgaagaacaagaagaatcagaatccgatttgctggctatggcaaaaagtcagccgccggacaatgacaaggatttccagcgtttcttggacaatgttcaagtagccagtctaccgggatattgcgctgtgggcgtggctctggggagaggatatccgagcactggaggattctgcccacctaaggaaattgtggcgatgatgtgcctctaaaccgcgacagaaagcccataaatgttcgccctcgaatcggtgggggcgggttctccagggctaggaatggcgatgctcatgctcttggaagcgaattgccgagcaactgcacgctgccgcattggagcgcgcccccggc

SEQ ID NO: 116503 - DNA, 543 bp, Arabidopsis thaliana columbia
ggggaggggggaagggggtcaggccgggcgaggaaataatggggacacctatagaagattttgacgtcgcatgcacgcgtacgtaagcttggatcctctagagcggccgccctttggttttttttttttttttttccatcaatcaaaacatcatatagtaatccattggtttatacaaacatcaaaatacatttacctctgaaatgaggaaaaaaatgcaaagagatttttgaaaatttccaacaaatggagagaaaaaaaaaaccaaagaattaaatcaatcagtacatttataaaggttatgagacctatatgacacttattggtcaagtggcagccattccatttctagctctaattctccagactctacattctgaagcttgatctgaacctcctgtttcactttcccatcaacaatgttaatgatactgtcatctattaatgggttatcatgcgattttagcccatttcccaatctgcatatccccaaacattttttggatccccaaaagccattgcagatgttatcaaaggttggat

SEQ ID NO: 116504 - DNA, 472 bp, Arabidopsis thaliana columbia
agcttggatcctctagagcggccgccctggggggtggtgttttttttttttttttttgggggagttcttaaataaagttagtttgtctttaaaatagggtaaaacacagactgcaactagacgttacatcagagtatggaccaatgcaacaacagtctataaagcatttttgaatcataaaaaaagaagaagcaaaacattgcagatcattatcactcagattacattgtcatagatcaaatcctgataacctaaatcgagtcagattctttcaaagggaatgataaagctacagaacctgaggcgattcaaactctgttgggatctttctcttgcttgtaatggcaagagccaacatgtcctcactgggagttgcttatgtcattggccactgttataattatttgatgatcaggctcaagatttgcatcttcattcttatttaaaggaagattctgggctgtttgaggag

SEQ ID NO: 116505 - DNA, 503 bp, Arabidopsis thaliana columbia
atcgactcattatgggaaagccggtacgcctgcaggtaccggtccggaattcccgggtcgacccacgcgtccgggagatattgaaattgacgagagacagagccaaagctccgaaccacgccatgtctctagtccccggcggaatcgctgttccccttttttgttaagactaggaaagctcagagtcagaggcatgtccagagtttgatcgtcgtatccttgggcttatcaatatcagctgactctcagagtttgctctcatgctttgcccaccacaagggcttagtggcggatgccttgatcgtcctctcggagttgtccctgaacagaatccaaaggctagaagctcttttcagaagatttgaaacctgcttcttgctcataccaacatcatttgaggagcatgacaatcttctttccttggcatatgacaactgctcatctgatcctgccccaccctcatcctcgctacacgaagcccattcacttcctgattccgatgg

SEQ ID NO: 116506 - DNA, 496 bp, Arabidopsis thaliana columbia
atgacgtaccatgcacgcgtacgtaagcttggatcctctagagcggccgcccttgtttttttttttttaattaaatacaacaattggaactaatagtacacttatacacatagaatgtttttgaagcaaattaagcacattaatgacatgtctttaagatattaatttcacatcaacataagcataaaattcactgatacaacattcatgggataaatatatatataacatgcattagctttatattgcttgctcaacccaattctggtttttattcactcccggccatttccttcagcctatattacactaactggagagcggtttggtcttggcgacccgcggatgagtaatggtgattgttaggttgcaatgccgcgacttggaaataattcccggaatcaaacggttgagattgcgtttgaggggggggcataagctgctcgtagttaaatcctcctggcattagacttatactcggattgttcctctcatt

SEQ ID NO: 116507 - DNA, 507 bp, Arabidopsis thaliana columbia
cactatagaagattcttgacgtcacctgcacgcgtacgtaagcttggatcctctagagcggccgcccttttttttttttttttttacttaagtaacatagcattcaaggaattaaacatctagtcaacaacatttcagaaactgaaaattaaaaaagatctacatcaacaattcaacaaatgaaacagtataaacaagtcattacacaccaatggcatcaccagtagatgaaccacgatcatcttctacagggaccaccacgttatcatacactaaagcagctgtggctcctccaagcagaggcccaacccaatacacagcttggttcttaaagcttccgtaaaccatcgccgacccaaaggcacacgcaggattcattgaacctccagagaatggaccagcggctagaacattggctcccgcaacaaaccctataaatataggtcccactgctaaaggtagcccacgtctgggatcgctagccgtgaacacagtataaaccaagac

SEQ ID NO: 116508 - DNA, 498 bp, Arabidopsis thaliana columbia
actatagaagatcttgacgtcgcctgcacgcgtacgtaagcttggatcctctagagcggccgccctttttttttttttttatatggtaagataactgtttctcatatgaagaaataaacaaactgaaaatggctaaaaagcctggacaaatcaaaagaatagttgttccctaggttcagctacattatagcttctattcaagtttggcaacaaccacgttagtagaggattctactccagaagtttccctgaaaccactgttgggacctttgttgacaaccctttgtacattcctaaagcttgagcgatcatgctagcaggattgtcgacattactcggaagcagcattgttgtaccctccttagcaattttgccaaaagcttgaatgtattgctccgcaactctcaaactcgcagcctcctctccaccagcttccttgagggattgagataccatggccagtccctgggctgttgcttgtgctctagctataattgc

SEQ ID NO: 116509 - DNA, 491 bp, Arabidopsis thaliana columbia
acactatagaagactatgacgtcgcctgcacgcgtacgtaagcttggatcctctagagcggccgccctttgtttttttttttttttagacgctctttctttcttttcttcttttcttttgtttctttttttttttttcaccaacaaaaaaaaaaaacgggggggtcaattgcttaagacctttctttctgactcctttaacggaccttccccaaattttaattttttcaccatttttttttttcattattagggaaaggagctgagcgttttttttgggctgtgtcaccaacctttttggagtttttttggtgtgttacccgaatcacttttttcctttttgcccacccgtcatttgtggtgggcttaccctaccaacaaaatccaccccctgacccacccggaagaccggggggggttcggccccacccttaacggggggcccccccggcggtgtggtgtttaaatcccggccccccataggattggggt

SEQ ID NO: 116510 - DNA, 521 bp, Arabidopsis thaliana columbia
atacgactcacttagggaaagctcgtacgcctgcaggtaccggtccggaattcccgggtcgacccacgcgtccgcccacgcgtccgcggacgcgtgggttacatttccgatcatggtacatccgcttaacgagatcatagagcagaaactgaagaggatagactggcttcaaaagcatcataatgggtacagcaacgaaacaggttcagtctcaaaatttgcaatctttacaacgaggacacttttggtggtaggacttgcagcaatcgcgagtttagtcccagggtttggtacatttgcatctcttgttggaagtactatgtgcgcactcatctcctttgtgtcgccggcttcttatcacctcacgctgctcgggccatcactaaatgtattggaccaaatccatcgacgtattcattgtgatttgcgggttgatctttgctgtttatgggacgtacaacacaatcgtcggagtgtgaaaagggatagcatgtgatctgggtaaagcaccgatataactc

SEQ ID NO: 116511 - DNA, 509 bp, Arabidopsis thaliana columbia
actatagaagagttatgacgtcgcacgcacgcgtacgtaagcttggatcctctagagcggccgcccttttttttttttttttcggaataataaatgatataattttgtgttctgtacaattaattaatttacattttattttgaagtttatattactgacaaaatttaagattaacatgactattacaagacaaaacacctcttctcaaccagaccaaacccaaaggccaaaacctctcagttcactggccacgaccgtaatttgcgcctcatagtatgactttacaaagagaatgccactttggcttttctaaaattaaataattaattaacaaaaaataaataaatgccaaatgctttgaaaattaaacacgttcgtgcaactaataacgcaattacttaaataaataaagaatacagaataattaaactatttttccactatttctccaaaactgttttacaagctcctgacaaaactaaataaattattaaaaaagaaaaaaagg

SEQ ID NO: 116512 - DNA, 480 bp, Arabidopsis thaliana columbia
tatgacgtcgcatgcacgcgtacgtaagcttggatcctctagagcggccgccctttggggttttttttttttttatagaaaatataaatgttcatatcataagagtaaaattcagagttttcatttcacaagcattttccatcgaagacaaacagtaacaaaaagtaaaaaaagggtaaaccacaatcaccctaaaaaaagcaattattggccaggggggtcgacggcagtgaccatctgagctggctgaaccaccgtccattcttccaatgtaccggcgtaaggagttgggacatcctgagaagacaaacacatgaccggagcctttaaggaatcttgaacggtctcgtgtattgcagccggccaacgggccccgatacctcccgttgttatactttcctgcacaatcagaagccggtgcggcctcctcaccgggttccccatggggggcgagacgaacggggtgcacccaccttatgg

SEQ ID NO: 116513 - DNA, 489 bp, Arabidopsis thaliana columbia
  unsure (1)..(489): unsure at all n locations
nnnnnnnnnnnnnnnnnnnnnnnnnnnnnnnnnnnnnnnnnnnnnnnnnnnnnnnnnnnnnnccaggggtgcggcagaaatggtcagacccggtgaacacatcacgatactgacgtattcaaggatgaggtaccatgtaatgcaggctgcaaagactctggtgaacaaagggtatgatccagaggttatcgacataaggtcgttgaagcgcgtttgatctctacacagtgggaaactctgtgaagaagacacaccgggttttgattgtggaggaatgtatgagaacgggaggaatcggagccagtttgacggatgcaataaaccagaactttgatgattacttatatgcttcggtgatgtgtttgtcttctcaggatgtgccaactgcttacgcctgtacatttgtaagaatggaccgacgttcagccagctcagattgtgactggcgtctaacaactatgcgccatatcgccttttttacagggattg

SEQ ID NO: 116514 - DNA, 601 bp, Arabidopsis thaliana columbia
  unsure (1)..(601): unsure at all n locations
gaacatgcacgcgtacgggagcagaggatcctctaggagtggcccggccggggggagtgtcccaaatatagatgaaatagaggaggagggagggggggggaggcccatttcggagaggaaccatgaagaggtgggtcgaaagggcacgcgggtagaccagcgcgcggcataggcgccgtgacggccgcggcgggagcgcgcggccggcggatggggcaggggggcgccattttttttttggtggggggggggggctgaacggcaagaaggaaagcggctgataaggaggtcgctatgatgaccgggggcgtcgaggtnatgaacgacgagtatttgtggggacggtggaggagtgtggacgcgcaagggaccgagaagttgcgcggagggggcgagggacgtgcgggcagagttggtgaaggggaaaagggtctgagaggaggcgagagcgccgcggtcggggatacgcgcagacctgagagacgaagtgatacctagcggcggataaaagtggagggtcgagccacacgagccgaccttcacatatcccaagacgccggcgcccgggcacgaacgccgcgggagcaccgccgcgggccgc

SEQ ID NO: 116515 - DNA, 493 bp, Arabidopsis thaliana columbia
atgacgtcgcatgcacgcgtacgtaagcttgggatcctctagagcggccgcccttggttttttttttttttttttttttttaaaacaaatcttattacctttttaaacgcatcactattggctatggtaatgttacatcaattaacacctttttattgtctatgcatcttaactgcttaagatgagatatattgcacatttacattgtagtgaaaagtgtaagtctcctttgcaaaacacaaaagattagccacaagtcgcgaacaccattgctaaaccaatggattaaccggacacaaatatccctacagaagatatttaatcaggattttatgctccagattgggctcggtttccgatgttgaggattctcgatcgaataaacaagaagggctccatcttttgtccctgctaaaaaacacttttcctgagttactggcagagaggtgatttttttccctgcgccgttataccggtttactacttcaagggg

SEQ ID NO: 116516 - DNA, 514 bp, Arabidopsis thaliana columbia
actatagaagagtcttgacgtcgcacgcacgcgtacgtaagcttggatcctctagagcggccgccctttttttttttttttttggattaaacactttagattctctgtaaataaaattgaggaaaaatcaagattggagagcaaagtagtgtcaaagatataactctactaaaagcagcaacacctacaaagtttagttcttcaagtgatgatcaaaagtattttcttttacgagtctataagtgaaagcgaaggactgttgataagacttctacttcctgacgatattgagatcgatgtgtacatacgcaagcgaagccacaaatactaagaagaaagccgatacaagcatgaatggttccgctagcatgtatattggtttgaatgtatagtacacctggaagggtacgttgtgagtgggaactacgttatctttttgcacacaaccacggttcttcccacaatgtcaaggtatgagtatttgacctgcaactcttgattgactgtaaagggc

SEQ ID NO: 116517 - DNA, 570 bp, Arabidopsis thaliana columbia
ccacccacccccccggggcggacgggcgacgaccccgcgcgcggaaatataggggaacgacctatagagatctatgacgtcgcatgcacgcgtacgtaagcttggatcctctagagcggccgcccttggggtttttttttttttttttttttttatttttgtttttgtttttttcttctttcctttacactacggtgggcccgcagtcccaagggaaaaacgcaataaaaaccttcccaatgaaaagcaggtgcccccgggaggtcgacctaaagggggctaaactcttcaccgacggagttccaggtctcgcccaacccttctttgctcgggaacccgtgtgtgcgggagaaaccccgcctgtcgggggaagaaagcgcccaccccccacagggcacccccagcaaaacggggagaggggacacgggcgtgcaaccgagcccccaccccccccaccagcaaaccgccgtgatcctcaccacaacgacaacaaaagggggacagccccggaaagccaagacacaccctggccggcgctacaagaaactcgcgccccggagaggtacacgt

SEQ ID NO: 116518 - DNA, 541 bp, Arabidopsis thaliana columbia
cagaaagcgcggccccggccccgggagggggaagtatcgcgggactaaacgactcatatagggaaagctggtacgcctgcaggtaccggtccggaattcccgggtcgacccaggcgtgcgctcctctgctgccccagccgtgaaagaagctccagttggattcactcccccgcagctagacccaaacacaccatcaccaatcttcgccggaagcacaggaggtctcctccgtaaagcacaagtagaggaattttacgtgatcacatggaactcaccgaacgaacaaatgtttggaatgccaacaggaggagctgcgatcatgagagaaggaccgactctattgaaacgtggcgaggaaagaacagtgttcggctataggtacgaggtcgctgtcaaaggacaagagtgcttaccggctttgccgaggggcccctacccgacaggcgcaatatcttcacccaacgaaggagcacatccacacgaagtcgaggaccgacgaggcggggtgggacttccacgtgagattcatcggaacactggt

SEQ ID NO: 116519 - DNA, 517 bp, Arabidopsis thaliana columbia
gggggaactagagcgataatttaggggaagccggtacgatgaaggaaccggacctggaaaacagggtcgacccaggcggccgagcggctgatcctctccttaaatgcatgccaagtaccaaaacgagcaccattggatcttactaatgagtactagtccagtccaagtctatggggagcacgtaaagcggggagcatctgagaagagaccacagagagagaatgacggctatatacgcgtagggaggcagcacagtaacgcataaagatttgaaaagaaaatgaaagacaacccaccccgatatagcctcacaccacatagacgaacaaaacgagaaagaaccgaacccacacagagtcaaatgagccccccaatcatacattatcgcgcgtagcttagtcacactgctcagggcatcctgccctcggaaaaaacgcaacaatgaaaagaaacaccgcacctcgacaaaggcgcgtctcagtcgaagaggcgcggactgacgcgcacaatatgcatg

SEQ ID NO: 116520 - DNA, 499 bp, Arabidopsis thaliana columbia
  unsure (1)..(499): unsure at all n locations
tagggacnnnnnnnnnnnnnnnnnnnnnnnnnnnnnnnnnnnnnnnnnnnnnnnnnnnnnnnnnnnnnnnnnnnncttggggtttttttttttttttttttttttttttttggattaaaaactaatcaaaatgtgaatactaaagattttgtctacaaaacaaaaaggaagacttttactttaaactccatgacacaaaacagagctcccttatttgaaaactttacttcgtctggctcatcaggtatcttctccaagagtaaacttcacaaaccttctgactttgatgttttccccaagagtagccactgtttgcttaaccagaaccttcaccagaaccactgttgtctttgatgtaaggctggtcaagcaatgcccattttccaagcctttttgagaatcttccttcccaatcttctcccttatgtcccgtgggttcgacaaaagacccttctttggatctaaatctctttttttttctgtttaactccctgggaag

SEQ ID NO: 116521 - DNA, 499 bp, Arabidopsis thaliana columbia
ccttagaagttcttgacgtcacttgcacgcgtacgtaagcttggatcctttagagcgggccgcccttggtttttttttttttttttttttttttttttttttcccacaaaaaatttgtttcgagtttttaaggtatttacctaagggaaaaatactttttacctattttcaaaattttttagccctttggaagacctcctccaatgaaaaaaaacctttttttttttccaaacccggaaatattttacgccggataacttaaaaatcgcgaaattccgtcaggcctttgaagccagaggatgaaaaagaagagaaggagtttctcttattaggcccaaaaaaaagcggatcttcaaatttcgcaaacggttgtttaccgcataagaaattttcacttggttttcccggcgggaaaatcggaaatgtcggtaaataacccccgatgtttttcccccgacggtcatacatacccggtggccccggaggtgaggaggttaaa

SEQ ID NO: 116522 - DNA, 539 bp, Arabidopsis thaliana columbia
cggctcgctcgcggccgccggggggggagtatcgcgggcactatacgactcatatagggaaagccggtacgcctgcaggtaccggtccggaattcccgggtcgacccacgcgtccgaccaaaggtcgtggaaacctatgaagccacgtctgcagaagtcaaggctttggtgagagaccctaaggtggctggtttgaagagaaactcagcggctgtgcagaagtacctcgaggagctagtcaaaattgaattccccggatcaaaagcggtgagtgaggcttcgtctagcttcggagctggctatgtcgcaggaccggtcacgttcatattccagaaggtatctgttttcctcccggaggaggtgaagactaaagaaatacctgttggaggaagtgaaagctgaagaacctgccaaaactgaagaaccagccaaaaccgaaggaacaagtggtgagaaagaggagattgttgaagagacaaaaaaaggcgaaacccctgaaccggggccgtggagcagaagaaccagaggtagaagacaag

SEQ ID NO: 116523 - DNA, 487 bp, Arabidopsis thaliana columbia
gacgtaacctgcacgcgtccgtaagcttggatcctctagagcggccgccctttttttttttttttgcaaaaactaggatatatgataagagactatcatcaatgtttgaactccaattttggttccacataactcaaaaaccattaatacgaaagagtctcacattgagtttaagacataatcaaaagaaacaataaacaacctcacaagtctttcttgtccctaactgtgaaaaaagagagccaatcgtccatcttagtatcttctgggtgccctgccgccgccgaaagcagggattggtgccatagcttgttgtgggtcgactgcagagatgccgagagtgtcagacattcctagagaagcaagcatctcaagagtctttttggcgaccttgatctcatcagtcttgatagcagactcatcgggaacaaagtccatacggcgttcacgctcttcttcttgaagcttgagtgagattccacggact

SEQ ID NO: 116524 - DNA, 490 bp, Arabidopsis thaliana columbia
ggaaagctggtacgcctgcaggtaccggtccggaattcccgggtcgacccacgcgtccgcccacgcgtccgctctctcgcatctccaaatcgaaatcgctctctgcctctcttcgtctccgtctccatctttgtctccggtaagtaactgaaagatggggcgtgttagaaccaagaccgtgaagaaatcttctcgtcaagttattgagaagtactactctcgcatgactcttgactttcacactaacaagaagatccttgaagagggggccatcatcccatcaaagagactccgcaacaagactgctgggattctccacccacttgatgaaacgtatcccaaagggaccactcccgggaatgtgactcaaggcttcaagaagaggagcgagacccccgcgtggactatgcgccccatgagcctagtttcaaagactggggagatcaggggcgccggaaggaccctggacaggctggctggcttgggatgg

SEQ ID NO: 116525 - DNA, 513 bp, Arabidopsis thaliana columbia
actatagaagattcttgacgtcgcatgcacgcgtacgtaagcttggatcctctagagcggccgcccttggttttttttttttttttttttttttttcaaaccaattgattgattcattagataataatactgtttatcacaaagatccccaacatgtaaaaaagtagtcatagatcacaaaaggagacgattctcaggccctgatccattcaaatatgtatgtgcacaacagtgtacgtgtatatatagtctatagacatttaattcaatcttaaagaggaaccatcatcacacgcatagccacagaaatactcctcaaagatgctaatctcagactatataaaccagcattgtgtgacacagtatcccgcaaacaaaaacactgaatttcattcatgaatgtaacctacctgcgatggctgcaacctgaacctccatttgtgccgccctgactttagaacccgtggttcggtggaagaactgttctctagacaacaacctaacattcctaaa

SEQ ID NO: 116526 - DNA, 517 bp, Arabidopsis thaliana columbia
acactatagaagatcttgacgtcgcatgcacgcgtacgtaagcttggatcctctagagcggccgccctttttttttttttttcatgaaaattcaaacatttcataattatatactatatttgtaggaaaaagacatgcacctttaatatactctcacaaaattaaaataaacagagtattaattacgaaccaagaaaaggaaaaagataagaggagttaaccggcgattttgtaactcgggttagcgaggttctctaaaccggagacaacttgaatggattcgataacatcaccaactttaagatcagctagaaaatcttcgttatcagtaacgtaaccaaagacagcgtaacgaccatccaagatgttggaattgcttggtgtcagctcactctcttttagcagccaaaacacttggcttgatcctgagtcattctcaaactcttctcttgccattgccattgtcccaaaagcgttgaaaggaatcacaacctgagccttgtaaagaccaagtttt

SEQ ID NO: 116527 - DNA, 514 bp, Arabidopsis thaliana columbia
atacgactcacttagggaaagccggtacgcctgcaggtaccggtccggaattcccgggtcgacccacgcgtccgtgttcttttcggacagaacaaaactccctaatccaaatgtcaattcctttggtctctctctgaataatcatctctcttcaaaccctattcaattttaactatcgatcttcggctaagtctccaatggcggcggcgtttgcctctcttcccacatttagtgtcgtcaattcctccagatttcccagaagaagaatcggtttttcttgctccaaaaagcccctcgaagttcgttgttcttccggcaatactcgttacactaagcagagaggggcatttacatcactgaaagaatgtgcgatttcattagctttatcgggttggtttaatggtttcaggaccttcgattgctttgcctcccatgctcacgcagtggcgaatccagtgattccagatgttccagtgttgatctcccggcctccgattaaagacccggaagcttt

SEQ ID NO: 116528 - DNA, 442 bp, Arabidopsis thaliana columbia
  unsure (1)..(442): unsure at all n locations
nnnnnnnnnnnnnnnnnnnnnnnnnnnnnnnnnnnnnnnnnnnnnnnnnnnnnnnnnnnnnnnnccacgcgtccgggcactgttgcatactcagaaacaaacctctgatgacgatacacatctttgactttactacactcattcggaagagcctctatgatctgatgaaattgtgtgtaacctcctgcttatcggtatgtcacttggaggaagaatcgtggactacactgttgctatcgattaacatagcaaaatggaggagcataataggaatagagaagtggtgctctgcgactggatgccgtgactagagcgactatgcgatctcgacatgccttgctacaatgataagggggtgactacgcacatctatattgcctatacgctataggtacctaacaggacttgggtaacaggagaggctaagagcgatgtgtagtct

SEQ ID NO: 116529 - DNA, 508 bp, Arabidopsis thaliana columbia
actatcagaagattcttgacgtcgcctgcacgcgtacgtaagcttggatcctctagagcggccgccctttttttttttttttatcaagtgaattcggggtagtagttggttcttccttctgtttatcaccggttacagtggaagcctcttcagggtttctgttaccatgttgcttaagtttctgagttaagactagggacttcaaacgcagaccaagctcgaccattgatatgtgcacatcaggctcccatctgacggcaatattagaggcactgaagagcgaacagattgaaacttccttaccaccgcctattcgacgtacaaacttagcgttttggatgtcacaaagtgtcactctggaaacttggtgaggttcctccaaaaattcctggtagatcgcctttgctgtttcaagttctacctgtgtagactgaatctccttgtttagagtaaatccgaatttgagtatttcaaacgaaattatgtacttcaacttctcatgttcttc

SEQ ID NO: 116530 - DNA, 575 bp, Arabidopsis thaliana columbia
atgattccgccggacggcgagggttattatttgagtcgacctatagcagatctatgacgtcgcatgcacgcgtacgtaagcttggatcctctagagcggccgcccttggtttttttttttcgtttaaaataccactatagtatttggatactggtgatttggtgttacaacataaatgataaaagccaatgaatcaagaacgtatagtttcaactctttaaaccttttgtggagagtcttgtggagtcaaagtatttattttattgttgcttgaaaggtggaactttttcctacaagcgtctgttagggtgaggcaacagttccttattagaaactaaaacggtcaaatatgttgttgagccatacagcagcttcttataactttgagggattgaaatttctaaaccatttctgccgaacaatgttataaacgggggagatcagagttagtcctccatgggaacctggagtgctttctcacaccggctctaaagtacctaaacaagctagaacgtcccctggtgttaacacttgcatgggagagaatcgcttgttattgcgatattctttaggcc

SEQ ID NO: 116531 - DNA, 509 bp, Arabidopsis thaliana columbia
cactatagcagatctatgacgtcacatgcacgcgtacgtaagcttggatcctctagagcggccgcccttggggtgtttcttttttttttttttttttttgttttttttttttttttttttttttgttcattttttattgtttttttttttcctttttactgtgtatactttttcatttttccgtttgtcgggggccaagaaaagaacagagaacaacttttttttcccggggggggaacttttttttttcttttctgcgcgggagggaaaccccaagggtttattccccaccgcccctgggggaaacgtggggacaacaaaacaaacacccgagggaaaccgggggtgggattccttgtaaccacaacaaaaaaaagggggaaacggcgaaagagagaaagacaacacctgggtaagaaaattgcaccatggtaagaaaagaaaagagttggtcctcgagaaaacaaaactatactccgcagcgctggcggggggggaggaaaaatccg

SEQ ID NO: 116532 - DNA, 493 bp, Arabidopsis thaliana columbia
  unsure (1)..(493): unsure at all n locations
atgacgtcgcatgcacgcgtacgtaagcttggatcctctagagcggccgcccttgggttttttttttttttttttttttncaaaaaacagaattgatattgtggttcaaccattaaaaatgttttttcaaaagcagaggaggtgctcttagctttttacacacttttttctcatacctcacattaccatcgaaaccagcccaaactttttgtaataaataggggggagagttatgtgttggttaaaccttgaactggttttcaagcgggacaagtcttaaccgagtacactttgttaacgtttttctatgtttttggccaacagcttctaaaagggcttaattccgtggtggacactaggacctgcgcggaaaaaaataataggatctatattgggggcccttattgtgattttgacccataggtagaggccggggctctttgaaaaaatcttgacggggggtaaaatgcatgactttttcatattttctggc

SEQ ID NO: 116533 - DNA, 519 bp, Arabidopsis thaliana columbia
  unsure (1)..(519): unsure at all n locations
gccggcannnnnnnnnnnnnnnnnnnnnnnnnnnnnnnnnnnnnnnnnnnnnnnnnnnnnnnnnnnnnnnnnnnnccacgcgtccgatcagacatgccaaaggaagacaattctccggtgatggactaggaaagctggatctaagctagcacagccatgtacatgccatatgactaccttatgcatcccactggaagagtgttcttcagttacggactacggaggacattatcatccgggctgtacatgagaatctgtaatcgagcttaccactaatgtggatttctacgggggccgacagacacatcttagggaacatattctgagcctcgacgcttactatggtccgtcttatatgtctctggaccgaacctttcttgcacgatggactgaggctcttcgaaacgttcttgaccatgaaagtgaaaaaatgtaacttagagtctcgagctgtgcgacactgttcatgtgtgataaactcgcctcaaggttaaaccaactatatatgttaccacgaca

SEQ ID NO: 116534 - DNA, 498 bp, Arabidopsis thaliana columbia
attctatgacgtcacatgcacgcgtacgtaagcttggatcctctagagcggccgcccttgttttttttttttttttttttttttttttttttttttttgggcgacagaagaaatttaaacccaaagttttttaagcgcggagattttggcatcctttcatggctttttctttttttaaaccctggggaaaaccctcttttactttaaactttaagctttggggcacatatcagtttttttatatccttttgagaaaagaaaccccctaaactgaatttttaacatgggggatcataattcagggattccacgtgattttgaggagtattttggtaccaatttcaagaacatgggggatttggcttttaataaccgcgccggaggatcaaactttggttctctaccggcgggtgaaaaccaaaactagggcactgtctttaaacagtgtggttgccggtgaggcataggggggagacccggggcgacttcaaacttctg

SEQ ID NO: 116535 - DNA, 535 bp, Arabidopsis thaliana columbia
cggcgcaccccgcgggggggagttttcggggaacctatccgactcttatagggaaagctggtacgcctgcaggtaccggtccggaattcccgggtcgacccaggcgtccgggagaggccccagcaattatagaagatttccgcccgccttcctcgtggcctgcaacgggaacaattgagctagttgatgttaaggttcgttatgctgagaatcttccaacagtactccatggggtgagctgtgtgtttccgggtggaaaaaagattgggattgttgggcgaacgggaagcggaaagtcgactttgattcaagctttgtttcgattgattgagccaactgctggaaaaattactattgacaacattgacatttctcacattggtcttcatgatcttcgtagtcgccttgggattatacctcaggatcctacattatttgaaggaacaatccgagcaaatcttgacccacttgaagaacattcaaatgataaaatctgggaggcgcttgataaatcccaacttggagacgttggtag

SEQ ID NO: 116536 - DNA, 491 bp, Arabidopsis thaliana columbia
  unsure (1)..(491): unsure at all n locations
nnnnnnnnnnnnnnnnnnnnnnnnnnnnnnnnnnnnnnnnnnnnnnnnnnnnnnnnnnnnnnnnnccacgcgtccgaccgagcatgcgccctcgcgtacgctattctagaaatcattaatacatgatatgatctgcgatgctacacacggcggctgagctttcaccaatacaagatgagactcaccttgttgggtggagtacattatatatcgtgcggctctatgagctggctatggctgaacatgatcacaagtggtgatagagaccctcacattgtgaatgttgaagcacggagactgtagaatctatgatgaggatcttctgggactgaaacatacaggagatggaactagtatatcgagaacgagatgataggagataccacgaaaatgaactgccagcgagttgatgctagattgagatgatcgctgcgaagagatgtcgctacaataccattcgagtgacaacaggagtgatgcattcgatctgg

SEQ ID NO: 116537 - DNA, 504 bp, Arabidopsis thaliana columbia
  unsure (1)..(504): unsure at all n locations
aagagcacgcgcccggcgatcgcaccgaatgagccacgctatttaggaggtcgacnnnnnnnnnnnnnnnnnnnnnnnnnnnnnnnnnnnnnnnnnnnnnnnnnnnnnnnnnnnnnnnnnctttggtgtttttttttttttttttttttttttttttttgatagacaagaagttctccttgtctttagaaaaaaagatataacaggtaggggaaacaaagaaaaacccctagtcctcatgcgataatacggggccccgcagcccaaccccaccaagttgtactgggcgcgggccgctgagctccgtccgcgaacccgcgcgcgagattccgaaaccggcccccagcacccaggggccgaggcagagtgtgaagtgcccctggaaggggacgccgcgtcagaagcgaggggctccgtggagaggtaaatcccgcgccgcgagagaacttgcgcgggcccccgcgggggaacccccgcgcgcccggagcgcccgccccccgacggc

SEQ ID NO: 116538 - DNA, 529 bp, Arabidopsis thaliana columbia
cggccacgcccccgggggcggccgagtatcgccggcactatacgactcatatagggaaagccggcacgcctgcaggtaccggtccggaattcccgggtcgacccaggcgtgcgcagaatcttaaaaactttctctcaattctctctaccgcgatcaagatgcagatctttgttaagactctcaccggaaagacaatcaccctcgaggtggaaagctccgacaccatcgacaacgctaaggccaagatccaggataaggagggcattcctccggatcaccagacgctcattttcgccggcaagcagctagaggatggcgcgtacgtaggatgattacaagatgccagaaggaatccaccctcaacttggtcctcaggctccgtagtggtatgcatattttccctaaaaccctagcggcagagaccatcactcttgaggtggatagttccgacaccatgggcaaccgaagggccaggatccgtgagaagagggcctcccgcgggaaagcacagggtggcaatcccagagag

SEQ ID NO: 116539 - DNA, 556 bp, Arabidopsis thaliana columbia
agaagatctatgacgtcgcatgcacgcgtacgtaagcttggatcctctagagcggccgcccttggggttttttttttttttttttttttttttttttttttttttttttttttttggttttttttgggggaaaaaagtatacacatgttttttggacccagtttagccgcccaccaaataaccgtgattacattgaacattttgggcaattttttttttaggggggtcgaaaatgcaagatttttgccccacccgtccttttttttttttacgaggagttttttgagaattttttttgcgcaaattttgggaaaattttttttgtttttcccggaaaattctttttgtgggatttttctttttcagaagattttctctgttaagagtttcccaacacgggaaacgcttaaccgccgccaaatgttgattttccttagtttttctagaatgtgggtgcctcttggaaacactgtttttgcgtgacccttaggagaaagttaacatctcctggtcggatgcgaaacccttctttttcttgttttttccccccccgcct

SEQ ID NO: 116540 - DNA, 516 bp, Arabidopsis thaliana columbia
  unsure (1)..(516): unsure at all n locations
tttaggacgnnnnnnnnnnnnnnnnnnnnnnnnnnnnnnnnnnnnnnnnnnnnnnnnnnnnnnnnnnnnnnnnnnctttttttttttttttttttaagaaaaaaattagtaccactactactaagtaagtagtaattatacaattcgattttcaaatttaaaaaatgacacaagacacaatcaaaagaccataagtcttgccatcaagaatgaagctttataagtttaacacttaacaagctacatgctaagtacaacgtcagccaccgtacttgcaaaggttctcgaaacccatgtactcatgccgttggattttgccgatcatattcactattcccacgccaccaagcgatatcgcactgataaagatcatggacgcgaggatgaagatgatgagagatgcgcggccgatggctgcgattagccttctgactacatgctgtccaacccaagctgcaattgttgccactcccacagggtacaaagcatatggaacagggaatcgtttgagaagat

SEQ ID NO: 116541 - DNA, 512 bp, Arabidopsis thaliana columbia
  unsure (1)..(512): unsure at all n locations
nnnnnnnnnnnnnnnnnnnnnnnnnnnnnnnnnnnnnnnnnnnnnnnnnnnnnnnnnnnnnnnnccacgcgtccggacgaaacgcgggaaaatgaatcaagtttcttccttaaagctatcaattttctatgggaatctgatcaaataggttatcgtcatgtttggcctgaatttgagtttaattggcaaattgtattgggaacacttgttggattctttggagctgcgtttggtagtgtaggtggtgttggtggtggtccntccncnnttcctctcctcccttttccttttgccctttgcactttccccatcttcttctctcttccccacgccccctccgatcttcgccctgtttccgatcatgggccccaaggacgaagaagatgaaagatcctccgccccacggctgcaattacctttctcactacatgctgtccaccccaagttgcaattggtggccactcccacagggtccaaatcatatcggaccagggaattttctgaaaaaaagt

SEQ ID NO: 116542 - DNA, 493 bp, Arabidopsis thaliana columbia
atgacgtcacatgcacgcgtacgtaagcttggatcctctagagcggccgccctttgttttttttttttttttgtaaaaaagtgaaacttgttcataattcaacttgatatccagacacccaaagacaaaacagattaaaaaaaccaaaatcttttgactaaaatatggaaagtgttccaaagcagacgagattattactggctagcaccgagccatttggtgaagttatcaaactcggtgtaatcactgtcggagatcatagtcttgtaccacgacttgcctgctgctttgattgccaacgcctcctccttggtaacggttttcctcttcttggcgagcttctccttcttagccttaactctctgtgcttcagctaacagtgacatcctcttcgcggtcttagcataaggattcaacttcaacatcacattgagattcttcaatggattcttcttaagaacagccctcttcgcatccttcttgatcggattca

SEQ ID NO: 116543 - DNA, 507 bp, Arabidopsis thaliana columbia
  unsure (1)..(507): unsure at all n locations
nnnnnnnnnnnnnnnnnnnnnnnnnnnnnnnnnnnnnnnnnnnnnnnnnnnnnnnnnnnnnnnncttggttttttttttttttttttttttttttttttttttttttttttttttncccataaatcacaaatttcacattcaaagtctcaaaaatttacattttatccctcatcatgacctaaatatggcccaaaacttacaaaaaaaaaaaaaccgatttaccgatgcaaaaggcaaaagctaaaattttttaaatccatcattgaccaaaacacctcctaataattcaatcccaattccaattttttccaattttactcatcatcaagtagagttttgatccaacccgaatccccgacccaaccgggtcaaatgctgcaaacagtttttaaaaactgttcacaataaaacgaccctttgtttttctcttcccttcctctggtttgtgcaatgggtctaaccgttactttaattactccggggcaccacctgatcatttccctccc

SEQ ID NO: 116544 - DNA, 505 bp, Arabidopsis thaliana columbia
actatagaagattcttgacgtcacctgcacgcgtacgtaagcttggatcctctagagcggccgccctttgtttttttttttttttttttttttttttttttttttttggccatagactatatactatatttacatgtaacagctggttagattaaaaaaaaaaaaaattgaattaaaataccaaaaaattgttatcactttctaaatcgggattattatttatccccttaacccattccccactaggattatctttaattttcatattagcgtttttattgttatcaccactctgtttttaacgttcttgtcttgcagcaaaaatctcttggacgattttctccacatccattttcgtatttacatggggtcccttatcaccaccggcgtccggcgccgggatatacgggggtctaaaaaccaaaataaccttgttcccaatttattcctttgaaaaaatcatgacccttgatttcctaaaggtggatcctacgggtaggatctt

SEQ ID NO: 116545 - DNA, 523 bp, Arabidopsis thaliana columbia
cctctcgccctagtcccctctcccccccaccggctatgatttgggacgcctatagagtatctatgacgtcgcatgcacgcgtacgtaagcttggatcctctagagcggccgccctttgggtttttttttatgaattatacaaactgcttgcacaatttgaatctgaatatttatgactgggctttaacgtgagtgtgcttgcacaatttaaatctaaatatttatcgactggtctttacgggaaatggattcaggtataaatactaatttacgacggtgaagccctatcaatctttctatgacaacaatattatttgattaagtgggcgacctagactcggcgagcttcgtggttcctccaggaagaccatggttttatggactgcttctgattctttagtcttaccccacaagaacctctagagacctattatggtccctactgatccattatactttttagcaagaggcacaaaaataatgttagttcgtaaccctagcgttaccgtagactttaggcatt

SEQ ID NO: 116546 - DNA, 564 bp, Arabidopsis thaliana columbia
gcccggcgggacgccgcagccgcccgcgcggcgcgggggggtgggtatcgccggctactatacgactcatatagggaaagctggtacgcctgcaggtaccggtccggaattcccgggtcgacccacgggtccggtctttctaacacacaaactcacatagaattcaagaaagagagaacgagggagagatgggtgaggatatgcgaggagtgaaagtagtctcaaaatggccaccgatgatagttatggtgacatcacaagtagcgatgggttcatgtaatgcactggtgaagaaagctcttgatgttggtgagaaccatatgatcattggagactcagaccggccataacgttcaggctactggacgatcattggatccggcgctttgctcgggggggagtttcatggcacgttttctatttcgtatgggctgagctacaccgggtgccgctgctgcgcgaggctctggttagcttgatgcctggaatcacctgtggttttgcttcttattcggacgaactccagcatcaaatacctcaagacccccgcccggaatgatcgcg

SEQ ID NO: 116547 - DNA, 505 bp, Arabidopsis thaliana columbia
accttagagatcttgacgtccatgcacgcgtacgtagcttggatcctctagagcggccgcccttttttttttttttttcaaagaaaccactatgggattgtttaggccaaagatccaccacacttacaaataacaattgtctttttggagccggatttttttttttttgttctctgttttctcgcttctttgatgcaacatgcaaccaaccaaatattgttgagagactaagcaaagattaatctaaagagaaagagtaccaccaaaagtaccaccaaaggggggcatttcctccacttcagtaacgagaagttgaagaaaaaaaagaagcagcagcagaatctgacacggaaaaagttcttttttccctctcttcctcatattcagcatcatcagtctaaagctggaatctacagacaggacaggagttccttgttcctaaccatggcacaatacaatctccggggtaccaatgtccacacgggaacttctaaccagtttctcc

SEQ ID NO: 116548 - DNA, 526 bp, Arabidopsis thaliana columbia
  unsure (1)..(526): unsure at all n locations
ctatagnagatctatgacgtcgacatgcacgcgtacgtagcttggatcctctagagcggccgccctttggtttttttttttttttttttttttttttttcaaacagagaattttaaatattttttggagaaaagaaaaacaatcaaatcagtgggtgttattcacccaaacaagaacagaacactacgcctgggattttacaagctgaaatctgttaaattttaaacggaggcgtgagtcagtaaaaccaaaacccggaaagataatgttttaatcgccggtccgttattcaacacttcttagtttgagcgccccggtaggaaaaaagtttgaaaatgattaaaggaggaacgatcccaaatgtttagtgccttgttaaaaaaagatcttctttccaggcctttttaataaaacagaatttatgttgggggaaggaccatcccttgggggcaaccttttactggcgccgcgagaattttggaccatttcctccacttttaaaataaaaattgggggggggggggac

SEQ ID NO: 116549 - DNA, 574 bp, Arabidopsis thaliana columbia
  unsure (1)..(574): unsure at all n locations
tttaggtcgacctatagnagatctatgacgtcgcatgcacgcgtacgtaagcttggatcctctagagctgccgccctttgttttcctttttttttttttnttttttttttttttttttttttttttttttattttttttttntnntcttttntnttnnggggcaaagagaaaagtttgtttttttcaaaattgaaattagaaaaatggacccggatcctcgcccaaaaccaaagggggggtttaaatctatgggggtggggaataatccaacctttttatccaaaaggtttgccctatcactaaccgctttcgggaccccggagggttcaagattcttcgcctcctccctaaaaaccctggattttgccttttcctccaggagaccagataaaaaaaccaaattctaaaaaattgcccccccgggttagggtgtgttataacaaagttcccatattcccccccaccccccccccnccccttatgaacccctttttcccccccaaatttgttttttttccagaggggaggacccaagtttgtgactgtcctaccccccatgcttattggaaaagt

SEQ ID NO: 116550 - DNA, 207 bp, Arabidopsis thaliana columbia
  unsure (1)..(207): unsure at all n locations
actatagaagagctatgacgtcgcctgcacgcgtacgtaagcttggatcctctagagcggtcgccctttgtgtntttctctattaaaaggagttacacaaccttctttagagaacaacctgactaaccggaccaagacacacacccgcctaagatgggatatatgagacataacaacgcagaatctgatcggctagtaacattaata

SEQ ID NO: 116551 - DNA, 837 bp, Arabidopsis thaliana columbia
tatacgactcactatagggaaagccggtacgcctgcaggtaccggtccggaattcccgtttcgacccacgcgtccgagaaaatcgaacttttgattccaaaagcgatgagaccgattcaatcgcctccaggagtttccgttccggtgaaaagccgtccccgtcgccgtcctgatcttaccttaccgcttcctcaacgcgatgtttctctcgctgtacctcttcctctgccacctacttccggtggttccggtggctctagtggatctgcgccgtcttctggtggttcggcgtcttcaacgaacactaacagctccatagaagcgaagaactattcggacttagcgagaggtaaccgtatcggaagcggagcaggtggaacggtatacatagtgattcaccgtccgagttctcgtctatatgcacttaaggtgatatacggtaaccacgaggagactgtgagacgttagatctgtggagagatcgagattgtacgagatgtgatcatccaaacgttgggaatgggacgagatgtgtgacagatcggtgagatccaggtttgcttgaggtatggataaaggtggtttacaaagtgctctttgtgggaagaagcacatgtagggtgggtatgggcgggatggtgatggggggagtggtgtggtgtgggggggatggggctgcgggttgcggacgtgggatggtggggggggggggtgagactggggatgggggtgtgtggcgttgggatgtaagtggggcttggtggcgggtgggttggggcggcgcgtggtgtgggagggcgcgagatggcgcactgggcgtggcgtcgtgttgtgtgg

SEQ ID NO: 116552 - DNA, 879 bp, Arabidopsis thaliana columbia
tatgacgtcgcatgcacgcgtacgtaagcttggatcctctagagcggccgccctttggttttttttttttttttttttttttttttttttttttttttttttttttttttttttttttttttaaaaattgggactggaaaaaattgggggtttaaaaacggaaaatttgggaaaatcctttccataaatggtcaagggaccaaacttcctggggtcggaacaaaaagggaaaaattccccttttttttcccaaatataacggcccccagggggccctagccaaaggcttccccttgttctttaggggggggtaggggacactgacccgcaaaattaatggccccctttatgggcctggcccgcgaggggtggcccaaaacccttttaatcccgcaaaaaacggttttgggcggttaaaagtaaccccccgaaaaagggcccccccgggaattaagttattaaccggccccaccaagggggccctcaaaagggtttttgggaaacccgttttagcggtgattaaatgacccccgttgaaacaccgtttcttgggttcccaacccgagtgggcccgcctgggttctccaaatttcccaaatatttagtaaggaccgacccacttggtccttggggggggcaaatttggattaaaaagaaaaaattgaaccgcccctttgccttttaaggtttttaaggggggacgggggaaaccctttgaccattaagaaaacgttctggctgggaggacgcggccacacaaatttttttttgtcgggattatatacacccggctacaaaaaattgaaaaaaactggtaccgcacggtgtttgttattaacgatactttcggccgggggccttacgtctcgctctcctatg

SEQ ID NO: 116553 - DNA, 469 bp, Arabidopsis thaliana columbia
actatagaagagttatgacgtcgcctgcacgcgtacgtaagcttggatcctctagagcgtgtcgcctttttttttttttttttttttttttttttttttttttttttttaggagaacctgagaataaatttttttttagagatcaagtcttcaaaagaattatatttgcaacgatgaaaagggaaaaaatcatgttacaggccagacaaaagaaaaggaattaaaaaaaacaatcttgatgaaatctaagtagatatttgtaggaaaaaaaaaaaaaaaaaaaaaccatttgataataataataaacctccctgggagtgaaaagacaaaagggaacgaccacccttgcttaaaaactcatcagcctttctttcatctaaatcttccagtctctccagcaaagaactgaggcctactcgattttaatcttcttaagaaattcaaacttttattacaaaatggtttcaaa

SEQ ID NO: 116554 - DNA, 151 bp, Arabidopsis thaliana columbia
ggcccacgcgggcacccacgcgagcgaccaaccgacagcgccgcgcgcgcggccacgcgagaagcgaccagcgacgcgacaacggcaccgcgacagaccgacagcagagcagggcacaagacgagcgagacggaaccggccgccgcggggt

SEQ ID NO: 116555 - DNA, 230 bp, Arabidopsis thaliana columbia
  unsure (1)..(230): unsure at all n locations
tcactatagaaggcttatnaggtaaaacgcacgcgtacgtaagcttggatcctctagagcgttacgcgcgttgtttaaatcctttttgatataaaaaattggtttcatgtgaaatagtgaaagggacagcagagtggattgcataggggtgtggtaatgtgaggtgaatattgacatcgggggagaatgcgggaaagcattggaggtgaagacataggagaaaagacgtg

SEQ ID NO: 116556 - DNA, 691 bp, Arabidopsis thaliana columbia
  unsure (1)..(691): unsure at all n locations
acgcctgcaggtaccggtccggaattcccggttcgacccacgcgtaagcccacgcgtcggacgatcgatcttgctgacccatcaataaattgtgaccaaaaggcaaattcactataagaaaacagaattcattcgtgaaaattgcatgggacactgtgtgtgtctgttacagacgctggcttgacctccttctggggggagcaaaaggggccncttgggaggggggggcaactagaccccgggaaggggaggaagagaagcgacgacggtggggtgggagggggcgacagaggaggatgggacaggagcgggggggggagcatgcgtgcgagcgaagcgagggaccgggcggaggggcgccgggggacgagggcggagcgggagggcgcgggagacggcgatcgggagcgcggcgcgggatcggggggccggaggcgggcggcgcgggagcggggtgagcggggggccatagggaggggggcgggccgggcgggaggcgcggcgtgggagggagggtgtcggggcggagggggcgcctcgcgaggagcccggaggggagggccggggcgctggtccggcgggggcgcgggcgggccagtgggaggcgggcgcgggccgggaggcgggaggagcgagcagcagggggggacccgaggggcagggtgccggcgggcgggcgcgcgggcagggg

SEQ ID NO: 116557 - DNA, 969 bp, Arabidopsis thaliana columbia
actatagaagatctatgacgtcgcatgcacgcgtacgtaagcttggatcctctagagctgccgcccttttttttttcttttttttttttttttttttttttttttttttttttttttttttttttttttttttttttttttttttttttttttttttttttttttttttaaaaaggaaaaaaaagtttttttggggttaagggttttggaaacaaaggtttaaaaaaaaagggggggggttttaaaaaaaaaaaccccgggggtttttaaatttaaaacccgagggggggggaaaaaatataagggccaaacgggcaattattttttttttacaaaaataaaaaccctttccaaaggggttttttgggttttggaaaaaaaaaaattttggggaaagagggtttttttgtggggcccttttttaggggtgtcccccaaaaagaaaaaccggaaaacccccctgggggggtggggttttaaaaaccttgtttttaaaaaaaaaaaattttttataaaaaaaaggaggaaatattcttttgaataaagaaaaaaaaaaagagctcttttttttacccccttagaggggggggggccaaaaaggggggggggaacggggcaaaacaaccctgtggggggggataaaaatattttaaacaccttctttatctctttttgaaaagtcctaagaaaaaggggggaaaaacacaaaaaggcacttttttttgtttttttttttatagggttttcataggcaagaacaacaagaaattgttgaaaagaaaccattttgtgctccccatctttggaaaaccgtaatctttgttttccacaaattaatcggatatttgtttaagaaaaaacaaacccccgtttttttgttccctataaaaaatcctaaggaggggaaacgagggttttaaattttattccccggaaaaaaacgggtttaaaggaaaaaaaattcgcggg

SEQ ID NO: 116558 - DNA, 481 bp, Arabidopsis thaliana columbia
ggggggaggcctccagtcacaaatcggatactttaggggaagacggtgcgcctggagggagccgggcgggattggcgtgtggacccacgggtgcgaggcccaatgaggagatatggggagaaaggaaacttgagtgggtgtgatggggtgcgatggtggggtgatggatcggggggaggggggatgtgggtgggggggggggggggtgtggggatggggggtgagatgggggaggtgggtgggggggtgagtttttttgagagagggcaagtggtgcgtgagagtatttggcaattaggtagatggcttggggaggcgaggggagagtggtgaggtcagaagtaggatgggtggaagggtggtgaggttgtgatagtgtggtggagatgtgtggtgtttgtttgtattctgaggaaatgttatgaacttatgatatgatatacagataaaagtctgaggtgagtatgtagagtaggaaggg

SEQ ID NO: 116559 - DNA, 520 bp, Arabidopsis thaliana columbia
gtacgcctgcaggtaccggtccggaattcccgtgtcgacccacgcgtacgcgatcagtgaaatgaaccgtgtgacgcgaggctgggctgattggggcgctggtgatgcgagaggggcatgggcagatatgagggattgcatgcgctcaagcgggagaaggagcaccaagagcccgggggcgaggggggattcctcttgagtgggacgctaagaaaagaatccgatcggggcgaggctggcaggcgcaaggctctgcgacggtaccagaactagagctgacagtagacgacgacaaagaccccaggtggaaaaccgagcccaggcagagacgtaagcaaagaggacgcgagacccagcggacaagaagggcctgcgccaacacagagtacgcgaggaaagcgcagaggaggagagtgattagaagcacagagacgcagcgggagaagagaaactgacaataaaatggagaaggtaaggcgaacatcgcacggagaagaccagccacagaccggtaacgagc

SEQ ID NO: 116560 - DNA, 538 bp, Arabidopsis thaliana columbia
  unsure (1)..(538): unsure at all n locations
gcacgcgtacgtaagctgggatcctgtgagagctggccggccgttggttatatatcctttgtgtaagaatgagagcgctggttgggtgtaggagtattggcgtgggtgtagcttggagagcacaggtgaggncacatggcggtgtgagattgacgagcggaactgttggaggatggtagaggatggaaggcggggggagcgtgaggggggtgagaaggagggggggggggttctcctatggggattaagagggaagagggaggggggtggtggggcggcgaggccaagaggggaggggaggggggggggaaggagtcgagggcggggggggggggaggggggatgggaggtaggaggtaaggaggggggcgggaggggaggaggggggacgagagcggggggcggggagagggggtgcgcggggcagaggggggagggggggcgggggtgggcaggtgtagggagggagtggtgtgaggggagggaggggagggccctgcaggtagacgtgggggcggggggaggggggagggagagg

SEQ ID NO: 116561 - DNA, 1027 bp, Arabidopsis thaliana columbia
  unsure (1)..(1027): unsure at all n locations
gtacgactacttaagggaaagacggtacgcctgcaggtaccggtccggaattcccgtgtcgacccacgcgtacgcaaaaatgatggcagatgaagcttgggtgcgtaggctttgagcctgtgagaaccatgggggctgggacagcagtggggagggatgagactgggactgggaccttagggaagagagcgcgggggggagggtatgctggggttcataatatggattctgccgacaggagggnagagtcgggatgtgtttggacgtggatagtgggagcggaggtggagggagtggggacgcgcgagtacgtcggcgaggggggtggggagtgcgcggaggggacgtgcgagcgggggggggagggtgtggagagcggtgggggggtgtgggggcgcgggggggggggagtgagaggagggaggggaggggggagagcattatgggagatgaagagggtgaaggggggggctggggggaggcggggggagttgggggggcggagggggggggcgaaggtcggggggcggaggtggtggggagagaggcgcgccggcgcggagggcgagggcggctccggatgggcgaagggggtgggcgggctgtcagcggaggtaggcgggggtggaggaggggcttgcgagcggagcggcggctgttggggcgtggacggggtggtgggaggcgtggcgggcgggaggctggggggtggngcggagagcgagtgggtcgggggcgcggtggaggaggtgagaggcggatcgagggggcggggagagttgagcgaggtggggggacgggcggggcggggtagggcgggagggggtgcggggagcggggtggggtgagggggagggaaggatggtagggtatggggtggggtggcgggtgagaggtgtcgagcggggggtggtagagaggggggcggggggggcggagggggggtgaggtgggggagtgggacgggcgagggagtggnggggcgaggtgtgcgggggggacagacgggggaggaggccgaggagag

SEQ ID NO: 116562 - DNA, 520 bp, Arabidopsis thaliana columbia
  unsure (1)..(520): unsure at all n locations
ctatagnagagttatgacgtcgcacgcacgcgtacgtaagcttggatcctctagagcggtcgccctttgttttttttctttttttttttttttttttttttttttttttttttaaacttgaaagttttacgtttgtttcataatcacgtttcacacaaaacaaaaagtggaaataggggaaaataacccccaccccacactaatttaaacgggaaatttggaaatgttttcaccaccccacagtctaaaaaaaaggccgagaaaaagacctcccatagttaaaacctgttgaaacatgcgccaaaaaaaacccgcgcagattacaaccttggggagggtgagagcaccaatgcttttcccccgtagaaccccaacgggttgtttagagagacacattttatatcccggggaagcctgagggtttttgcccaaaacaaagactttttaaccgatggggggaaagaccggcacaagcaaaaattggggaaccagaaacggccgtgcccctttgggggaataa

SEQ ID NO: 116563 - DNA, 542 bp, Arabidopsis thaliana columbia
  unsure (1)..(542): unsure at all n locations
cactatagaagcattatgacgtcacctgcacgcgtacgtaagcttggatcctctagagcgtgccgccttttttttttctttttgcaggaaaaccattgcaaaaccgattcaatagtttgaggacacgaaacgttcattcagaataatcatcctcattaccatcactatattgattggcatcttgttccggctcgtgtttccaagatctaccaaggccgtcttcgtcctctaatcttctcatcttggagctcgaagcaccaaccctagaagagtaaacccctgaatctttatgttctatcactgatacagntgatctccgccttacagttacccttgaaggtactggaaagtgttcaatctcatcaaaagatcttcctgtcctggcccttttcttcctaaagtcaacctcatgggtaggggcagatagctagcgtgcccattggcaaatgataccaggtatgtgccaggatcgtttgcatttggtggtacatgccagaggtattcggcgacccaagggttaggagattgttgggtttgatcat

SEQ ID NO: 116564 - DNA, 344 bp, Arabidopsis thaliana columbia
gcacgcgtacgtaagcttggatcctgtagagctgccggccttgtgtaaatcttttatatggaaagatgactgggtgctcatgtgagaaaataaacagactggaaatgggtgggagggcagtgcagatgaagagaatgttgaggggcctgggtggaggtgcgaggataggggggtgggaggggaggagcgagctttttttaggaggattgtagtggagaacgggtaggtggaggcagtaaggaagccaggagggggggggggaatggaaagctggagcgtagcgaaggcgcaatggtaaagatgaggcaagtgtcagtcaaatagaaataaacacgatcctcaac

SEQ ID NO: 116565 - DNA, 848 bp, Arabidopsis thaliana columbia
atacgactcactagagggaaagacggcacgcctgcaggtaccgggccggaattgccgtgtcgacccacgcgtacgccggcgcgtgggctgtatgcgagtgagtgagactacaatgggtgaggggctcggggaaatggctctggacaagactggggggagaaggggacgcgtgtgaatgagaagatggggtgagggatgagagggggtgggggggatttttttggggagggcctgggagatgatatgggggatgtggtgggtgctagtgggagggtgagagcgtgggggaggtagggggggggcttggcgaggtcgggagacgcgatgagaagggggcgcgagtggagcctgcggacggtggtaataattgtaggtgtcaatatcctacctggaacggttgacgcacgccataatgactgttctgctgtgcatgagcgatctaaccgaacacacatggaggacttggccgagcggattggtaagctaacacatgcatttttgttagagactgagtggtaatgtgttattgcgatctccgctcttactgctcgtaacgggtggtgcactctttatgcatgacgcctatatagcctgtcttaagtcgtaactgtatgaacttttctttagtctcaactccgtgccggacaccgataatactctccttcgtaggttcaaggagtactgcagtgtaattagtgaggaagcatttggaaaggttgcttcgaggtataagatatatcagggtagataagaagaggtggtatcgcatccatctcgagagcttagccgaaggtagttgtgtcgtgattgtgatttgcacggtgtgtgagtaggaatcgacacgcggt

SEQ ID NO: 116566 - DNA, 521 bp, Arabidopsis thaliana columbia
gcacgcctgcaggtaccgggccggaattcccctgtcgacccacgcgaacccccccgcgaccacagacgcgtgcggcacattggccaccatggggcgcccgctgcgcggcagcatggaccgccagccgggaggagctacaccggggcgcgcaagcgccgcgacccccgcacggggcgcacgccgcgggcgggccctctttctttcagcccggtaccacgagcgccagtcggccggcgcggcaccccgccccgccccccgcgcccgcccgcgacccccgccccgcctcccagcgcacggaggcgccgcccgcccgcaccgccccccaccccgccgcccacacccccccccgtgtcgcacacgccgccccacgcaccccccaaccccgccgacccatcgcccctccacccgctcgccacacgccgttctcacccccacaccccaccccaccggcagccctccgcctcgccaccacgtgtccgcggaccgtcgcgcaccccccgctcgcgcccgcacccactcca

SEQ ID NO: 116567 - DNA, 589 bp, Arabidopsis thaliana columbia
  unsure (1)..(589): unsure at all n locations
nnnnnnnnnnnnnnnnnnnnnnnnnnnnnnnnnnnnnnnnnnnnnnnnnnnnnnnnnnnnnnnnnnctttgtttttttttttttttttttttttttttttttttttttttttttttttttttttttttttggggaaggaaacttcaatttattatgggcggcaacccctacatattattcaaaaatttttattaaaaaggaagcggggaattcaaggggctcaattgggggaaacaattcggatttgggtaaaattaataaggggggaaaaagatgggtttaaaggttaaaaatggcacccccccttgaaggcttggaggcaaaaagggaaagccccatattttttttttttaccacccctttttttacttttttttgggaggacttccccttgaccgcgggaatgaattgaggaaccggaaattccttgaccaagggcacagggcaacccgccccttcagttccggtaagtcttgctccaaggggtccattttccttgaaaacttgaacaagtttttttagctcggggcaaccgccctctgataggaaactggacccgaaggggttttatttataaaaacaccaagtt

SEQ ID NO: 116568 - DNA, 406 bp, Arabidopsis thaliana columbia
aatacgactcactagagggaaagacggtacgcctgcaggtaccggtccggaattcccgtgtcgacccaggcgtacgcgaaaattatattaccagcaaaggaacataatgggttatgttagagagatcgcgtgaagaccctctaaggagtttgctcttgagtaattattggacatagattgtcggtttgattttgtctttaaagaagatgggatgagtcgtttttttctttgacggggtggggagagatccggtgaactgtaagagagatcatctagtgttggtgagtgttttagactcgtgttgtgttttggatagaggtttcgttatagactggtgttaggaaaagggtgaggctgagctcgatgttgttcgggcgtggtagccgttgttaggcgcggtgattag

SEQ ID NO: 116569 - DNA, 490 bp, Arabidopsis thaliana columbia
gcacgcctgcaggtaccggtccggaattcccttttcgacccacgcgtaactctggcttcttcaccactgtgcagattcgatggatcttgccatcatactattctcaggtgtgatactgatcaacgtgttagccttaggctgctcttggactgggattgaaaagaagatcccttgtcctctgtagaggctttgttattctgacgagataagagatgccactggactcaaggtgttgacagtcgccattcaggtctctcggatgtgacagggttgagcacgacatgtattgctttaggcgcgtggaagggcacgtgggctctgggctggagcgaagggtcgcggtctgggggggcgatggggggaggggcaagggagggggtgcgcggccgcgtgggcgatgggagggggggggggcgggggaagacgcgggaggggagcttgtgcagggcgcgtggggatgggggggagagcggcaggtgcgcggcgcccg

SEQ ID NO: 116570 - DNA, 503 bp, Arabidopsis thaliana columbia
tcactactaggaagcgtccctgcggtccggccgatccgttcacccgctccatgaaaaaggatcaaaagtgtactgtccgtacagatgcttcttactagataaggtaacaccagtatctgtgtatgcgaggcaaatgaaaaggatgatgtgattgtattgaatgataaatgtaggatcctctgattatcccaaagcaccagtctgtctgtgtagggttaactgactacgcgcagacgcataccggcgtgttaccgcttccgcacgatgctgctttaagcctctacctgctgacactataaagataggctaactcattccagaagagtactagtactcaattctcccagatctgtctgtgctataagacaactggactcttgatttggttgaacactcggagtattcttctcaattaaatgtaatgttggtgatctccgcttactgcaacatggtattgaacagctttcaaaaaaaaaaaaaaaaaaaaaaaggcgcccttaaga

SEQ ID NO: 116571 - DNA, 986 bp, Arabidopsis thaliana columbia
  unsure (1)..(986): unsure at all n locations
actatagnagatctatgacgtcacctgcacgcgtaccgtagcttggatcctctagagctgccgccctttgtttttccttttttttttttttttttttttttttttttttttttttttttttttttttttttttttttttttttttttttagaggtctgccccctttttccttttattgtcttcctaagcctcccaaagaggggggacccccccgaaaatttatccggaaaaaaggggcccccccccccggcaaaaaccccaaaaaatatttcttttaaggggggggagaccgcccacccaaaaagagaaccaaacacccgggccggggcccgcccttttttacaaaataggtgtaaattgaaaaaaccaacaaaacccctaaaacgcccggctaaaaaggcccccgtataaaaaaacacacccgggacctcccgcgccccaaagaaacgccccacataaacatctccccggtgttcttttaaaaaacaaaaaccggacccgccctggagccaaaaccggcccacacccttttttatatattttgcccccccgccccccgcgcccggagacccaaacttcttaaggaaggagcccggccccccttggcncgaaaaccgccccccccctaacaaccccggggggggtgcccccaagggggggggtgtattccccctctctttataagaaaaacccagatgccccgttaaccgccaaaaggcctggnaacccccggggggccaccccccgcccaaaaaaccggagaacccggggtgccgcgggaccttatccggacccccagaaaattggggaggaaagggaacccgggcacaacgcctggggggggcccccggacctgtaaaaccgggcccttggcccctggcttgagaacaaaaaataaaacaccgcctcccacaccgggggggggcgcggggcccaaacccccggcggggacaggaaccaccccggcggaaaaccaaatcgccacg

SEQ ID NO: 116572 - DNA, 774 bp, Arabidopsis thaliana columbia
cacgcgtacggaagcttggatgctggaaagctgacgagctttggtaaaacctgtgggggagaaagagagagggaaggggggagagaaaagggggagaagagggggaaggggaggagaagggggagagggagagaggagaagaggggggcaggggaggataggagatggaagagagggggaggggggttttttttagaagagtgaagaagacgaaagaagaaggaccagggagaaaaggagaggaagaggagacgagagggaagggaggaggagaaggaagagagcgagaggcggcgaaaaggatacaaaagaaaagaagagtgtagaagactaaaaagtgaggtaagaagagaatgaagggaggagtaagaagtgaaaaggataaaagacgtggaatgaagcaagaaactagaaaggagaaaaagagggaagaatagaggagggagcgcaaagtgaagcggatacaatatagaggatgaaagaagaaagacagagggagtaagaggaagagaggagggaaagctaagagaagaaagtaatagaaggaccaagacagacagggataaagagagaatagagaagagagtatagagataagcgcgacgagaaagaaaagagaagaaataaaaaaagagaaaagacgaaagaagagttgagcgaaaaatgaaaaaagaagagaaaagcaaaaaacagaggtgaagagaagagtagggatatatagacgcggtaggagactagtatataagatggtgggaaattagtaaacgagacaag

SEQ ID NO: 116573 - DNA, 358 bp, Arabidopsis thaliana columbia
cgcctgcaggtaccggtccggaattcccctctcgacccacgcgtacgcgcaacttttatgatcagctgtataagtgcatggcgacacatgtgctgtggggaacatggggtctcgggacggactgggaactgtacctttgacgggcgcgaggggcggggagctgtgcggggacggcgggcgcgtggagggcgggtctctctcttaagatcaaacaacaggtacgcgggacggcggacctgcgcgaggcggcgacggacgcccccgacctgcaaccagacacacctcgaaagaggaccagcgacccacgccccgcgcggtcgcgcaaacccaccttccccgagacgatgaagggaggcgt

SEQ ID NO: 116574 - DNA, 451 bp, Arabidopsis thaliana columbia
cacgcgtgcagtaagctgggatgctgtagatctgtcggcgctttttttaaccctttgttgggggacattggagggtagggataagtgtgtagggggggggtgagggaaggaaagagagagtggcgaagaggtgtggtagcgggatatggagagaggttatgggagagagtaggtgtgagatagtgagagggtggagggttgggaggatcctttgttagagaatataacggagatatggagaaagtgggggtgtagataaaaacgaggaagagagaaagggatatgaagtgagtcatagacaattattatctatattgatcttacaggtatacaacctagtataaacgtaaaaggatatgaagagatataaataccgctcctaattcgccgaatataagtgataaaatatgaggaatcgcagcatacgattgtagataaaacaggacagagt

SEQ ID NO: 116575 - DNA, 263 bp, Arabidopsis thaliana columbia
atacgactcactagagggaaagacggcacgcctgcaggtaccggtccggaattcccggttcgacccacgcgtacgccgtcacacacacacacaatcgggacagatctagcgcgggatcgggtgcgtgtcagaagaagaggcggatcaaacgcaggtgggacggacgaagaggagcaagagccgcagggcggggcggcacggaggagggaagacggggactcttctctgcgccacaaacgaggggacagcggccgccagacgcg

SEQ ID NO: 116576 - DNA, 648 bp, Arabidopsis thaliana columbia
  unsure (1)..(648): unsure at all n locations
nnnnnnnnnnnnnnnnnnnnnnnnnnnnnnnnnnnnnnnnnnnnnnnnnnnnnnnnnnnnnnnnctttgttttttttttttttttttttttttttttttttttttttttttttttttttttttaagggaaaacacttaaattggcattaccatgaaatttgtcggagggaagtaacaaaacaccttgaacatgtccaaagagtgacggaaatgaaaaagttttaaaaatacaaaagccaacgggtttataaaaggcaaaccaaagagtttataccagagttttgaattaaacaagaaccatttttagtgtttctgagagggaccgagatgggattccatcacatcgggtaagggtttggaggaatgcagcttctttcgtccttggaagcacagtttttggagctcctctacattttcctcacaagaaattttttggtaagggttctctgccattatgggtcaatctcaaaggctggagtcctctttcactccttttttaagagattggggagattctgggcgttggacccgtttttgccggattttcaatcaggaaactttagaagataatattttcttggggccagggattatgactctgggtctctgaagtacggttccgggctgtggcatataccactaaagggc

SEQ ID NO: 116577 - DNA, 494 bp, Arabidopsis thaliana columbia
gcacgcgtacagtaagcttggatcctctagagctgccggccttggttaaatcctttttttttaattgttattgtgtcggataaaaaactaatcaaaatgagaatgctagagattgtagcgacgaatcagagtggaatattttgactttaatctgggtggcaaatagcgggagggcgtgtaggggaaagagggattttttttttagggtgtgcgcagggccggcaggggagaggaggtggcaatcgcggcacgtagagtatgggtggcgagagccgggagtgaggggaggaccgggagcttaacgaggaggtggggaggagctagatggagaggagagaaggcggagaggatgagaaaggaggagggtgagagggcgagcgggacggagaagggggcgtgaacagagtggggaggggaagaagccgagagtaagagatggtgtgcgggaggggggcaggcggaggcgaggtaggaggcaggaggggatgaggagg

SEQ ID NO: 116578 - DNA, 672 bp, Arabidopsis thaliana columbia
aatacgactcctttagggaaagacggtacgcctgcaggtaccggtccggaattcccgtgtcgacccacgcgtacgccagtgaagaggttccctcgtcagaaactcccaaggtagtagaagaagaagtgatagctaccaaagctgaagatgattgcgcggaaaaagaagagcaaacggaaacacttgctgcagcagctgaagctgaagaggtggtttctttctttgcagagaccaaaagtgaagaggaaattgttgagaactgtattcctgcaaactgagccactggtggaagttgatgtggcagaactgtagcgagggaagagggtgggaaggagcgaggggggggcgaaacaggtgtgggtggagggaaggctgctgggcctgggagggcaggaagctggtgtggggaaatggggggacgcgggctggggaggcgttgagaggggtgggcggcggggggggggagggggggggtgaggagcacggggtgggacgggggggctgggggaagcgggggggcgcgtgggtgggtatgttggtgggagtggttggtggggggggggggcggggctggggggggaggtgggggggggatggggcgggggggggggaggaaggggggctgggggggtgggggtgggcgcggtaggggggaggcgtggcgagggggct

SEQ ID NO: 116579 - DNA, 469 bp, Arabidopsis thaliana columbia
  unsure (1)..(469): unsure at all n locations
ctatagaagagctatgacgtcgcctgcacgcgtacgtaagcttggatcctctagagcggttctgcctttggtttttttcttttttaaaagagtataacaaccttctttcaaagaaatcctactnagccagaccaaagcacatacgcgtctaatgaggagtgaagtaaataaacaaccaaatctaatcgctaataacatgtatgaaaagacaatttactctttatacgggtacgctaaattaacgcggcgggaatcaggaaactgttatagattgagtagataccgctggacttcgacaccagatcttcgaggagagctcacttctccagcgcgtgattccggcatcggctggatccgcgaacggtggcaccttcgggatcttagtgagaatctgaccagctttgtgtgtagtcggcctctcacaggttagcgttntgccagaggatccgatctataaaaacggcggcat

SEQ ID NO: 116580 - DNA, 391 bp, Arabidopsis thaliana columbia
cacgcgtacgtaagcttggatcctctagagctttcgccctgtggttaaaatcttttttttttttttaggatcaaagaccttgtattgaatttggaatggggagtgagagcagagatcggaggggaacatcgcatgtatctggattggtgggtgcggcgcttgttttggagaaagggggcagcagggagaactcttctctgtggtttagggaaggggggggccttggcaagccgggggagtggccacggcgtgagaaacagagccgtatctagaagaaggaggaggaaacggggagaggcgaacgaggggagatgaatagctgagaggtgggatgacgggagtaagcgtgggtaggagagacgagttggggtgaggagtgcgggagggagag

SEQ ID NO: 116581 - DNA, 566 bp, Arabidopsis thaliana columbia
cgcctgcaggaagccggccggaattcccggctcgaccgacgcgggcaggcgaaaccacccaaggggaaaaggatagagctgtgctgaatgaaaagactgcaacagcacacattcagaacctagtaagagaaaagacagaacttgcgacagagggcgaaaactgtgagaaggaacaagaggaaatgaagtatgctcctggagagtggagccggcggatgggcggagaaggtcggggggaagcagacggaagggaggacaacgtcgtgacacggggagcggaggtgggactagggcgggcgggaggaggaggggaggaaggggcggggaaggcgcgaacggggacgaggggagaggcggggaggggcgggaggggggaggggggctggggacggggcgggagacccgggggagaggggggggagcggagcggcgggcgggagcggcgggggcggcggagggcggaggggagggcgcagagggcggacgggcgccgaccggagcggaggagggagagggacggggcggcagcggacgaggagagagcgcgggggcagggcgcggcgggc

SEQ ID NO: 116582 - DNA, 521 bp, Arabidopsis thaliana columbia
atgacgtcgcatgcacgcgtacgtaagcttggatcctctagagcggccgccctttttttttttttttttttttttttttttttttttttttttttttttttttttttttttaaaacaaacaagggcacaaaaggggcttatttataaaaataaggtttttgggggggggaaaaaaaaaaggagaaaaggggggggtattaaaaaaattttaatcttgagggggggagaaaataaacgaaaaacccgggggggggaataaagcaggcccctcaccaggggggggaaattaaccacgaaacccgtttttgagaaaaggggcaagcgacttctttgggtgaaggaggagaccggaaaccggaaaaaccggaaagggggggaaatcggttgtacccaccgccttgatggaataataagaaagccctttccaaggaagacctgtggccggcgctaaaccttacaaatttgacacaacttttgggaagaaaaaacggtcaacgggggggtgaaacccaccgttcggg

SEQ ID NO: 116583 - DNA, 694 bp, Arabidopsis thaliana columbia
  unsure (1)..(694): unsure at all n locations
atgatcctgccagctactatctgactcaccttagggaaagctcggtacgcctgcaggtaccggtccggaattcccgggtcgacccacgcgtccggacgaggcagataggctcgttacctcaaggctgctttggctgaaacgctgcgttatacccttctgtgcctaggatttcaaatacgtcgtagacgatgacgttttgccggacgggactttcgtgccaagaggctcgacggtgacctactcgatttactcgatcggacgtatgaaaacaatttggggcgaagattgtctcgagttccgtccggaacggtggctgacagccgacggtgaacggtttgagactcccaaagatggttacaagttcgtagcgttcaacgccggaccaagggacttgcttgggaaaggacttggcttataatcagatgaagtcggtggcttcagccgttctcctccgttaccgggtttttccggttcccggtcaccgcgttgagaaatatgtngtgcgctttatgaaaacggtacgtgtattgcactggggaggctgatataataggttatcgaatatgtgcattgagtaaatggttagacacctattatcatgttctcactcaaactatatgatttcctttggcttgtgtgaaaaaaaanaaaaaaaaaaaaaaaaaaaaaaggggcgttaagcaactaacctctg

SEQ ID NO: 116584 - DNA, 759 bp, Arabidopsis thaliana columbia
  unsure (1)..(759): unsure at all n locations
cacgcgtacgtaagcttggatcctgtagagctgccgccctttgtttaatcctttgtttttttttttggggaaaccaatggagtggatggatgagtataatgaggccggtggatggcgaggatcgcggaagatggagaaaatgggaggggggggaggacagggggggagctgtgggggaggggcggggagcaaggaggagtttttttttacaaaaaatgttgggcgggtggtgtgaaggcagatggcagtgtgaacgaggagaggagaggggagngcggatgcggttgcgctgtggggtgagaggaagaggtactacgaaggtagcgatgatggctagcgcaggtaggaacagcgcagaacgaaggccttagcgaaattgttttggcagtaagcgtatgtctaaacatatcgctatagacggtgcgggatgattaggtaatttatcgctggtgtgatgtgaagatgtagctttactgatgtactggtttactatggagcgacatatcaacgaccacgatggaacgcgnaaattggcaatatgccataattttaaaatgatactcgatccgagaggatgtagttatggcgttaacatatcaccgaaacattatgttattatgctactgtagtacatgaagaagaggagacatacagtacaaatgacactatctgacacattcctatagtagtacgttgtagtagactgcgaatcgtcgacactgcattacaagtaatttggaaatagtgaaagaacccaac

SEQ ID NO: 116585 - DNA, 871 bp, Arabidopsis thaliana columbia
acgcctgcaggtaccggtccggaattccccgtccgacccacgcgaaagcacgtcatcttgaattgggacttccaacgccgacaccggggaactgcgatggtggccccgggcggtaatgcggaggagcgggatgatggggctgtgctgtggcctgtggcaagggcggccatgcacgaggcgccggcggagagccctccatagggggtgatcgcggggcggggggactggacgtgatgaggggtgaccctagctggcgagccagagcgaggaggagggtgcgcaggggaggggggggggggggcctggctgagacggatggaggggagggggggccggagagtgcggggcgggagtgcgagacgggagagaggaagacggccggacgcacgggtcggagcgagacgagcggcaagagagaggggcgagagagcggcaggagaggggaggggggggcgagggagagacccactagcgacgcgaggtgaggagcgcggggcggaaagcgcgaggggcgaggaaacagggagaggacaggcaaccacgagaggaaagagtcacgaacgaggaaggtggagaactcccgcgagggggcgcccacgaagacggcagcaggacgaacagcagcaaggacaagaaggggggacggccagacaaagcagaggagagaagagggagcgacagaacagacgcgggaggggcaagcgagagcaagaagcagacaaagagcgagcaaaaagacaacacacgcaggggagagagcgagcacagcgaggaccaaaggactggaaccggcgggcaacgaggagagacgagggcagaggacaaaaccacagcgagcccgagcgtgacgagaacgcagagcacgagcgga

SEQ ID NO: 116586 - DNA, 956 bp, Arabidopsis thaliana columbia
  unsure (1)..(956): unsure at all n locations
aatacgactcactanagggaaagacggtacgcctgcaggtaccggtccggaattcccgtttcgacccacgcgtacgcgcattactaaccattaactataacttattagctcatagatgctgaggaaacctatgattaccatagaacgtgtcactctggatctatatattggtggccaacgatgctaatgagtgtatactggtccctaaagaaaacggatttttttaaaaagggagtcctgcgtactcatgggcgaagtgcaaatccttactacaggataatgcttgagtatcctgattgaccgtgcaaatattgcgaatgagggagagtgcagatggggggaggtggaggggcatcgggggggggaggaagggaggggaggaggggaggtgggttgaggggtcgctggacagaggcaaggggggggtgggggatgggtgggcgacgggatgacggggtgaggacggcgaagagggggggcgggtgagatgagggaggaggggggagggaagtggggaggggcagtgggtgggggtgtgtggtgagggtggcggagagagagggtgaggtggtgtgagggtggccgagtagtggaagggaacacgatgtaagtctgatagcgagtcggcggtggaaggggcatgatacaatgggcaaatcagcctaagatggtaattcacagagtcagtatacatatgacggtatcaaagcagacgtaaacagttagtgggataatatgtttactgaaagctgtacaagtagagttctagtgactacttataagcgatattatctatagctcgcagaatcgacccagagactagagctgcggtaggagaggatagagatgatgtcatatagacgcctcacattctgcgaagcggagggagtgcagagaattatatgtccagagagtgataattcgatcacgctgcgtacactgaccgctaatcattg

SEQ ID NO: 116587 - DNA, 638 bp, Arabidopsis thaliana columbia
cctatagacctctatgagcggacatggccgcgtgacgggagctgggatgcctggtagagtgtgcggcctttttttttcttttggtggcggagaagttggacgtagagatactaataagggcaaatgtgaggaatattaaataagatggtgtcaggcaggaagaattagggacgaattattcgtagggagtatttgcgtgagtaggagaagagggtgcaggggtggcgtttttaatcgcgatggcactgaattggtgtcacaacctgatttacaagaagagagtggaagtagttccggtctttctaaaatcgtacagtgagcgtagattgggaagcaaatgctggcgtggagtgcgatagattatgaacccgtagttgatggagagtggtttacgaacgctcaaggcacgttattggaatatgagcagcagggatagtatgaatacgcatcgatacttcatactaggagctcgagaacttctgaattgttagttgcttgtatatgttgaaaagatttatcggtgagggggaccgaaatctatattaacaatgtaaaatatgttctttatatgaatggtagtgtagtgtctcatatgctaactcgcatgccgatcctcggtgctagtagaatgtcgtttg

SEQ ID NO: 116588 - DNA, 1012 bp, Arabidopsis thaliana columbia
ggggggggtggcctcccgatatctatacggactgcattatagggagagctgggacggctgcaggggaccggggcgggaattgccgtgtggagcccacgcgtgcgggagacggggacagatagtgggagggtggtggggtgtagatgtgggatgaggagggatggaggtgaggagaagtaagtgaagaataaaatataacatagaagaatgtagtagtgggatggataataagttgtatgagacagaatagataattctttaggtagaggtatggagatacaagcagatataaatgtagaagataggagatgacgtcggattggttaaagagaagaaaaggtagatatagaataggggagatctgaaaaagttgagaacagagtggtgatatagagagtagtggagatgagccaatagataattgtagactgaaataaattaattaaagtaagtgagaaagacttttatagggatgatggagaagaaagctaagaggtgtatagagggttagagatgaataacaaagtaaacgtttaaacattaggagatcagtggagtacattaatgggtagatgatgatactagagaggtaggaccgtgaatagtgtacatgattataaaattatggaagattaatggagtgggtagtaagtaaatagcgcgagagagtagtaaaattttagtcatcttgcagaggaatgagagtagataagtagtcggagtgggaaagaaataagtgtaattagggatggatgaatgtgggcagtgtagactgtctatcgagtcgcgaaagaacaagtaggtggtaaatgatagttgaggaagtagtatgataaatagactacaatagtcgatgcagggaggcctgattgatatatgagagataatggtgcgagtaacctaaaatagagtagagattattgaatggtacgcatatgtgtaaggagttaactataaacgaataagaaaacaaaagcagtgaaagagtagactataatagtacatattatat

SEQ ID NO: 116589 - DNA, 482 bp, Arabidopsis thaliana columbia
  unsure (1)..(482): unsure at all n locations
ccgtgcaggtacctggcactggaatacccggtccgacccacgcgtacgccatgatttcgacttacgtcgtcagctcatgaaactaaatctctcgaatgtcagatttctacgtacccgaaaatcgttaatctaccagacgcgagcaatgactcaaaatccggatccaaaacctgatccatggcaggttcttgtctatatcctggtggtcggagcagcgtgatgggcagattgaggatacagtcgacacagcgccggcgagcttgggctctccaagtgcgggtgttaagcattgatgctacagtagagagaggttgagcacactgcgaaaaactggctagacgcaaggatatgggtggtgcgatgcgggatgactctgaggtgtgcgggagatgggtgtggcagagatacnggagctgaggctggggatgctggtgattgtgggtggtgcgatgggtgggctagagctgggacgtgtggaagtg

SEQ ID NO: 116590 - DNA, 895 bp, Arabidopsis thaliana columbia
  unsure (1)..(895): unsure at all n locations
actatagnagctcnatggcgtcgactgcacgcgtacgtaagcttggatcctctagagctgccgccctttggtaaacctttttttttttttttaattgttcagttgtttgttttatttttgtaaccaagttctcactggttctccgttcacctacacccgattttacaaacacccctaaaaaattatcccggaacaaaaaaaacacgagcgcaagaggttcctctctccgggggggagaaagccatccccccccctcgccgccagacccaaaaaccccccaggcagtagacaacgcacgcccctcgagcaaaaaaagagggcgaagaaagaaaagcaccgcgaagaagccagacgtggaggaggcgtgacgacgacccaggctggcagacacgcgacgacggagagatgcaacgaacagaacaggcgggcggcgcggagatgcgcgcgccagggagaggagccgagggagcccgcggggcgaggggaccgacggagccagtgaagagtcgggtgagcgagaagagacggcccggccgaggcgagagcgcgcggccagaggaagggggggggggggccggggccggaaagggcgcgagggaggcccgacaggaggagcagggggcgcgccgggcggcgagcgggcgcgggggagggcccggcggcggggcggcggcggtggggagaggccccggccaagacccgcgccgagaacagggcgagggggagagcacgcaccggcgatgccgcggaggggagaaggggggcgggagcagggggccggggcgggggagagaggcgggaggggaggagcgaggcggggggcgcaggcagcggggtggggcgcgaggagacagacaggagcgagggagcgagagggagcgcaggcgagcagcac

SEQ ID NO: 116591 - DNA, 691 bp, Arabidopsis thaliana columbia
  unsure (1)..(691): unsure at all n locations
actatagaacctcnatggcgtcacctgcacgcgtacgtaagcttggatcctctagagctgccgcccttggtgaatcctttttttttattttcttttttttttcgctcttttttttttcgaggtaacatccccgtcctcaattcctaaaatcgcgcgtctgagaccacccccgccccaagcgccgcagggggctgcaccgacccagcgcaaaaaagatttcttgttgaggggggggcggcagggaccccaaggagcgccaaaaaacagccctccggggccggagtagaggggagaaaacacccccgcgccggctcccggattcaccgggggtcgcccccccccgggcataagcccgagccccccaccagagccctcatgccgaggggcgcgggcagcccccaagggaccccgccggggcgggacggggggcgccccccacgcgacgcgccggccgccngcggagcgagagcgccgccgaggggtaggcagggagggggaggcagaggcgcgcagaggggagagtggcgcccggaggaggtcgcgggagcggggcgagcaggcgggagcggagcggcaggcggggggagggtcgtaggcgtcgaggggggcgtagggagtaaggtgccacgaggggggcgcaggggcagcgggggcagggcgcgtcagggggcgggcgcaggcgccgcagagg

SEQ ID NO: 116592 - DNA, 413 bp, Arabidopsis thaliana columbia
  unsure (1)..(413): unsure at all n locations
ctatagaagacttatgaggtcgactgcacgccgacgtaagcttggatcctctagagccctcgccctgttgtgaaactcctaattagaagcancatcgctagtggattggaggagaaactgagacattgggagcgcgcaatgcagggagaaatgcattgggggcgggtgcggggagaactaaagcgcgcaaagcgagacggatgcagaggggcgagggagacactgactctcttcgggatatagagcgagagcaggaagagccggagaagggacaagaggggggagcagggagggaagcggagtgagaccgaggcgaaggggaggagacacagggcggggagagaaaaggaaggggggagaaggcggcagcgcacgtaagagggcgagagggaagacagaggaggagagaagag

SEQ ID NO: 116593 - DNA, 517 bp, Arabidopsis thaliana columbia
tgacgtcgcctgcacgcgtacgtaagcttggatcctctagagcggtcgcccttttttttttttttttttttttttgcgaaacagagcatgttattttttgggtatgtcatacgaaacaaaccagatgatattcatctggctaagactgacggaacacaccacaaaagttcaagaacacgtagacattggtatcaaagccactcttggattagaactgcaactgggttaaaaccataatccttcgtgaataagctccagcggagtgaatccataaggcctctttagagactttaataactagaaatccgttccaattcactttattacttaaatacgttaaaggaccggaatttgcttactttccataatacaatgcgaagaagcgaaactgaccattccatgtgatccaagcagacggggcaatgtggctgtcaatgagaggaccgaatgatcactgttcttgaggacgacattgaaaggacggccagaggaccggttttacagatccttttacagg

SEQ ID NO: 116594 - DNA, 470 bp, Arabidopsis thaliana columbia
  unsure (1)..(470): unsure at all n locations
cacgcgtacagaagcttggatcctgtagagcgtacggggggtgggaaagcttgggggggggatgcggggagccgggagaggaagaccagggaggagggggggcaggagggnggggggagacgcgagaaggagaagcgcaggaaggagcacaacaaggaaaaagcgggagggcgggggggaaaggcgggaggacctctccaaaaccgacagcaacgacgcggccgacgagagcgaggccggaaggggcgggcggcggggggagggggggcgacgacggacgcagagggcaccacgcacggggacgggggccgagcgagggaggacgcgcacagcaggagggagaggcggagagcggcggcaggctgccgcgcgcgcggcaagcggcgagagagacagcggaggcgaggccgcgacgcacgcggcncggacgcgcccgcggcggcgccggcgcgggccacgcggcacagaag

SEQ ID NO: 116595 - DNA, 686 bp, Arabidopsis thaliana columbia
  unsure (1)..(686): unsure at all n locations
caatacgactcactanaggggaaagtacggtacgcctgcaggtaccggtccggaattcccggtccgacccacgcgtacgccttttcgtagccgcaagactcctttcagattcttacttgcagctatgggtaaagagaagtttcacattaacatgtgtggtcatttggtgcatgttgattgctggaaaatggaccacaactggtcacttgatctatgagctgggttgttctgacaagcgtgtgatggagaggttcgagaaggagggtggtgagatgaacaggatgggctggaagtgcccatggggtggggacaaacttaacgacgagcgggagcaggcgtgacgatgggagtgggggggatggaaggggcgagaccacagcgcctggtggaaacatgtgatagcgaagtacatggggtcgaatcacatactaaagacgcaactgggagaatcgttcttgagcgcgatttatgatgatatggagttgggggatctggtatcgctgctgtcgcgttatttcatgttgttttgtagtcatggcatgtagcttggagggtgttgcgtgttagtctgttgtgagtcagactgtgacctggctcggtgacactctattgttcggagagatcatcaaatggtacgcgttgtcgtatggtgttgcgaggtggtatgctcttgcagctggggcgtt

SEQ ID NO: 116596 - DNA, 926 bp, Arabidopsis thaliana columbia
  unsure (1)..(926): unsure at all n locations
atacgactcactanagggaaagacggtacgcctgcaggtaccggtccggaattcccgtgtcgacccacgcgtacgcgaaaatcgaacttttgattccaaaagcgatgagaccgattcaatcgcctccaggagtttcgcgtaccggtgaaaagccaggcccgtcggcggactgatcttaccttaccggttgctcaacgcgatgttggtgtcgctggacttctttctatgcgacgtacttggcgtgggttgcagggggctgtaagggatgtgcagccggcttctggtggggggagggtgtgggaggaacactggcaggggggtggaggcggagatcgaggggggtggtgggagacgggtgggggggggagggggggctggggggcggggggcagggggggggaggggggcgaggggggggggtggggggtggggggggtaaaagggggcggggattatgcgttgggcacgggatggggaaggggcgtgaggtgggcgaggcggaacacgtagattcgatcaaatagctgttattgggcgagagtgttgagttatttgtacgtattgaagtgtaatttcgcaggtgactagtacgttgactttatgacgccaggggctgatggatctggatcgggaattggactgcgttcattaggtccagacgggttaacgcttcgatgatggtagacgcattgtggttgagggaggtatgccaggcgaattgtagtgctgttcgtgngtgtggtgcgcggcgccacgctagtgtagtacgtcatgtatcctgcgtggagattggagattcgtgtgtgataggtttatacggatggtagagagacgtctcatccgctggtgctgcggcggcgagagtagaggcaggtctggtcggggaagtggagcttgtggtctaacgtccatcgtgtgtacggccg

SEQ ID NO: 116597 - DNA, 985 bp, Arabidopsis thaliana columbia
  unsure (1)..(985): unsure at all n locations
ccactatagnagagttatgacgtcgacatgcacgcgtacgtaagcttggatcctctagagcggccgccctttttttttttttttttttttttttttttttttttttttttttttttttttttttttttttttttaaccaaaaaaagttgggacgggggggagccctaaccataactaaaaacagggttgggtctttgaacgggaacaggaatagattcccacttccaacaacaaaaagaagcggcaaaaaattatcatcaacttttctttttctaaccaaattttttagggggggggagtccattttccagggggaaaggccttggaaaattgggacctttttgatacgatgtaaaagacgggaatctcagggatgaaaaacttaggttctttaaacacagaaggcaatggttttttttcgttaactttaaccatacccgaagaacctttcagggggggggggggttgggttgcgcttgggcccccttctccgggagtttaagcttggaaaccttttgtacctttaaaaaatacgggaaaactctcctcctaaggaagggaggtcctggactcgccctcgagtaaagctcaaaaacaacacgggagtattcggtgttcttatcccgggggagggggggggtggcctctgaaaaatcatataaagatgggtgggcaacagggtgggtaaaaaaaggcctaacaaagccccttgggtgggccttagggaaagaaccgggacacgcccggaggggtggtggtttatctaaaatgggtgttaaaaccaggagtgcggggcattggttggcgatttgactcggtggggagaagcgaagaaaacgctggtgaaccccacgtgaagcggaggcgatagggtgggtggcgggggatggggggggaagggtggcccagggggtcgatgcgtgccgggagaggatagagctgaggcggggtgcggccgagggtcacgggtagcggccacgagaac

SEQ ID NO: 116598 - DNA, 322 bp, Arabidopsis thaliana columbia
  unsure (1)..(322): unsure at all n locations
gggagaagaacgcacgcctgcaggaaccaggtcccgaatacccgttacgacccacgcggtacgccaatatcaaacaactgaaatgaatgactgtctaacaaatatcatagcggtggaactgtggcagatattcgtaccgggggnccagagtgagcaagccgtaacgattacgaccccaccctctaagaacagcagggtgaaacgttctgcgaccgtcgtatttttatttatcccagtgagaggtccgcggccacgccataatatgcgcacgagtacatcaagcagaaagactagaacgaaagttcaccatcacaaaagtgcg

SEQ ID NO: 116599 - DNA, 109 bp, Arabidopsis thaliana columbia
  unsure (1)..(109): unsure at all n locations
cgcctgcaggtaccngggcacggaataccacgtgtcgacccacagggaacgcgaaaanctaaggcaccatccgggggacacgcggctagcggcgtgctaccggaactgg

SEQ ID NO: 116600 - DNA, 970 bp, Arabidopsis thaliana columbia
  unsure (1)..(970): unsure at all n locations
cacgcgtacgtaagcttggatcctctagagcgtgccgcgcgtgggaaaacctacttntaggaaaaaactctgactgtcgtgtgggaggataatacatgcacttagcaaagagcgagaacacatagggcaaacgaatagagcggagatactagcggacacaaaggaacagcagaacacaaccaagcgaggcattctatcaaaggggggaggagagccagggaggggcccaaagagaaagaagcccgaccaaggggaagaggagagcgaggagagaggcaagaagaaacaagcagagaaggagagaggaaggggagacaagggacggagaaagagagagagcgcgacgagggaaagaggaggagccaggaggagaagagagagggaggaggacgtagggatacagagagacaaggaggggaggcagggagagaggcaggagggtgcagaggggaggcggaggaggcagagtaggtagggaagagcgtagggaggagagggggcaaagggcaagagagagagggtgagaggaagcggggaagtagagggagacgaggcagagggaggcagcgagagagaggggagaggaagaacgagcagagaagagagcagcgcagagagagaagaggaagaggaggccggagcaggcgagaggagaggcaagccggcaggagagggagcgggaggaggagagaggagcgacgnagaaagaggngnagaagaagaagagaagaagagagagaggaagagaaggaaggagacgagagcgggagagccagagaggggcagaggagagagggagaggagagagagagggcgagagagagggcggaggcaagaggaagggaggagaaagaaagaggaggagaggaggggaagagagaagcacagagcaggagagagggagcagggagacggagcagcagcagaggagaggnggtgagagggaggaggagacgaggnagagagagga

SEQ ID NO: 116601 - DNA, 621 bp, Arabidopsis thaliana columbia
  unsure (1)..(621): unsure at all n locations
nnnnnnnnnnnnnnnnnnnnnnnnnnnnnnnnnnnnnnnnnnnnnnnnnnnnnnnnnnnnnnnnnnnnnnnnnctttgttttttttttttttttttttttttttttttttttttttttttttttttttttttttttttttttttttttttaaaggaaaaaaagaaaaaaagggcttgacccctttggcataaaaacggttacataaggcggctaactccgtggaaaaacttcaaacaaatgttttttataaacgggggaaggcctggaaccaataacaggagcaaaaacccgggccgggggaagcactttttttacaaaaagtttcagttttcaggacactggaaatgctctgaagtcgagggttaaactggaaactgacataaaaaacacaacgggaactacggcggccctagagaggcccccatatgaacatttcaccgacggattctttttaaacacaaaaccgggcacgttctttgatcccattagctttccacaccttttttttaatctttttccaaccggggcctcagcctttttttttatagcttggggctaaggatttttccggttaaggccattaaaggaacctgggaaacgcaggctttttgagccatttc

SEQ ID NO: 116602 - DNA, 866 bp, Arabidopsis thaliana columbia
  unsure (1)..(866): unsure at all n locations
actatagaacgttatnaggtctacngcacgcgtacgtaagcttggatcctctagagcgtcncgccttgtttttattcctttttttttatatattttttttttttgtatttttgttggtagattgtggtgttgttgagttaagaagcctagaagaaaggcatggttgatgttgataggatgaaagcgaagcggatgaagaggtggaagtgaggcgggcaaaagattttttttttaggatttaagaaagacggcaagatagcagaaaggagcatgaggacaaagaaaaaaattttgatggtaggccgcatctatctatgtatggtgggctcaaaaacaggctcaggctagcgtatcccatagcgtgggaatatgagtgcaatactattagtgattaggagataggacgaaagcgcagactcaaactgccgccttgatagttaggatatacgcaggaatatataaattgtaaaataatagtcacaaagaacgcataataaaatataattgggattccgtttgtatcattgaaatagagactgttagtattattaactaatgtagatgtataacatcaatggatatatctgcgtattggtgttcggtgttctagcttgtaaataaatatctcaaattatatatacttaaactagagacagcactgtaactgtcgaagtagccatttagagaaatatcttatgaggagtacgtgattagtacggattgctatgttatacttttattaaaacaagatagatgtacgtgtgttgataagctttttataaataccagtagaaaatttattatataactaagtaccattaattggtagtcttaaaatgtagaactattaaccagattaataacat

SEQ ID NO: 116603 - DNA, 453 bp, Arabidopsis thaliana columbia
  unsure (1)..(453): unsure at all n locations
atacgactcaccttagggaaagcacgtacgcctgcaggtaccggtccggaattcccggtccgacccacgcgtccagtccaactcaaagccctcgctttaccgaagaagtaaaagaaataagagctgatcatgggtcatctaacaacaatggtgcttgttaccaaactctggatgaggaatgcggtggaggacatgggagaatgggnatgaggggctgtgttcctccttagaaagggcccctgggggggtgacattggcctgctaggggtgcttgaacaagaagtgcttgaccggtgtggggggttgctgagggggtgacagcgggggggggagggagggcactgtgcggggccttggggggggggctgatgatgggggcgtggggatggtgggcgctggggggggggtgggagggggaggcagggcactgtggctacgtaggccgggaggggg

SEQ ID NO: 116604 - DNA, 830 bp, Arabidopsis thaliana columbia
  unsure (1)..(830): unsure at all n locations
nnnnnnnnnnnnnnnnnnnnnnnnnnnnnnnnnnnnnnnnnnnnnnnnnnnnnnnnnnnnnnnnnnnnnnnnnnnnctttgtttttttttttttttttttttttttttttttttttttttttgttttttatttttttggggtgcacactcaataaatttggatataaaaaatttcactcaaaaaattaagaaaccccagaaaaaaaaaaaaatcttcagcgggaatttcttatctggcttaaagaccaaactttttaaagaaattcaattttaaaccaaacatttttgaaatgatcaatttaaaccccattttttgaaaaagaaaaataccctcaatcggacaagggacctggggaacccggggaacaaaaaacctcctcgatgagttttgggatttcaggctttgtgggacgactttctggttactggggtgttcaaattttaccggtggttaaaagcccgagcatgttttcattgcgtgccatttgagaccttgggagctgtggaaaaacacatttgagggggatttgtggccagggagcgaaaaaacccatttggggaaataaacccctttttgggggaactgctgaggcgggggaaattcccctgggagaatttaggatgaaaaacccgcgctggaacattagccttttggagattttacgggcttggttcccaaggagccggtgaccataatgcgggtggggtaaagcgggctatcatatgggcaaacagtatagagccttacttaaaggatttgaattaaagggagagaattatgtgccatgaatttgggggtcaccgaaggaggggtattgccttggggtcta

SEQ ID NO: 116605 - DNA, 699 bp, Arabidopsis thaliana columbia
  unsure (1)..(699): unsure at all n locations
ttaggagnnnnnnnnnnnnnnnnnnnnnnnnnnnnnnnnnnnnnnnnnnnnnnnnnnnnnnnnnnnnnnnnnnctttgttttttttttttttttttgtttaaaacaagttcagaatgtcacattaaaatcatatataccacaagcttatctatgatattacctacaaaaaaagctgaaccaccatcgagaagttggtttataaaaagctataaactttacgttgctgattatatgtacaagtttcctcaaacattacctttagccggaggacaggatgcatcatcacacagacgcttgtgtgattgctcttgatcttgacccataaatccattcaccagcaaacttcattcttgattgataaggtctcaaacctttcttgacatctagacaccttaattacgttgggtcacgttgcctagccgtccaactcgaactcaaagctggaagcctgtgaaaatactcccctattgctaacaaacctctagccgattgttgtgtgggtaagatccgaagcatatgttgcagtgtctcatgtatcagatgatcagcttgatttacaaagttgaccaaggcctacaatctctccatagcacatgtcatttgtggaatataacttcccttaccaagtttcccgggtgctacactctgtgctaacgaatgtcgcatgtactccatacctcggataacgcatcttgtgc

SEQ ID NO: 116606 - DNA, 936 bp, Arabidopsis thaliana columbia
  unsure (1)..(936): unsure at all n locations
atgatactgccagctctaatacngactcactttagggaaagctcggtacgcctgcaggtaccggtccggaattcccggttcgacccacgcgtccggacatgttcagacaacgagattttccatcccttattctatcagaccggtttaagctgcatattgctaggcttagcgttcactttcgctataaagtacaaacgtcatctaccttcacttatctctttacatggctgccgatgtataagttcgggtttcttgaagcccttatgacacaaaagaccagaacangttgaagacctatgactacaacctcaacacattatgttccaccgagaaggttcgtagtttacgagcctctcaccaaatcggatgtgaaagaagtgcaagacatgtaacatttaccctgctctatatgtcccgactaacgaataccagacagcttgtcagaggatacttctcatgggacataaggaactcctcacaagtttgacaaagacgcttccacatctatacatactgataagatacatagaatgctaccacagaatcaataggcagctagtaaaagctcgatgcgcaagacagcttatgttcagcagctagagactacccggttatagctatctcattcagagcaagtactcgatcgtgctanacaacacggcttctgtgtggggaacggagtatataccaatgctcttagtttctcagatacatgancgtcaggattgttgcatttgagatggatatggacattngttgaagacaaatcagcaatatgtgactaagacggtttacatgacagttagtgtataagctcctctctgtcaaatgcctaacatacttcactcttcatgaagcagcgtgaaaatnatgttttatcatgtcggattggaacttcgcaagcggtttctgtgaaggcgttaaacctcaagttta

SEQ ID NO: 116607 - DNA, 541 bp, Arabidopsis thaliana columbia
  unsure (1)..(541): unsure at all n locations
cacgcgtacgtaagcttggatcctctagagcgctcgcccggggcgaaagactcgacaacaaaaacctcaaaccagggaccagcaacacaaaaaccaagacgggaaggcgactaacacagaggcggatgaggcggcagacagcgaggggacgaagggcggcagcgcgagcagaaaaaaggaagagggccgggcggattcttcaccaaggggaggcccgaaaagggagcaaggaggaggggatatgagagccccaggggcaacagggggggcggaggcagcagggaggcaggagggaggagggggaggggagggaggaggagaagagcaccagggggcgcacaaggagaagcaacaagcagacaggagcgggcgggcgagcgaaaccgaccaaganagggaaagaccaaaggagacagcctgaacgagaagaggcgagggaacacggcagacagagaaggagagggaggagcagaggagagggacaacgaaagaggaggccggaagaggaaacacacgcagaagaaagtaaagcacaaaagcg

SEQ ID NO: 116608 - DNA, 162 bp, Arabidopsis thaliana columbia
ctgcaggtacccggtccggaatacccggctcgacccacgcgggcagagcgagcgaacacacgacgataacatcaacagcgctaatgcatcgcgcataggaagatgccgaccacaaacaacaggaggataaacgactgaggccctctgcgcacaataggaacg

SEQ ID NO: 116609 - DNA, 524 bp, Arabidopsis thaliana columbia
  unsure (1)..(524): unsure at all n locations
tatgacgtcagcatgcacgcgtacgtagcttggatcctctagagcttgccggcctttgttttccttttttattccatatctttttacattctctcatcatttctaattccattagtttcatattacatatacatttcttttttctggagaaaacaataggaaacaattttttcttttccaccaaaaaccaaaaaaagtgcccatttctcctaccatgggaggaaaaaaaccccccaccaaccgcccccccaaaaaccttcattcccccccttagaaactttcaacgggtgggaaaagtgaaaatctcggggtttttcaaaaaaaaattttttaacggtgacttctgtccccgggggggataaggctgtttttggacaatataaaaaaaaccttggcaaggggttgggtggccccattccccccccccaatactggggttttaaagcttggaattgaagcggcccaacggcccattataagagcgaaactgtgccttcaantacccgaggtcttatgttttgggg

SEQ ID NO: 116610 - DNA, 293 bp, Arabidopsis thaliana columbia
agggccgagccggatggccgtgagaccgacgcgagccccaagcggggacgagggaggggggggggagaggctgggggagcgggggggcgggggcggcggggcgaggaggcagggagagccgcagagacaaccgcaccgggcgcgaacagcggagggccgggcaggcgcgtttaccgaagggagcaccagaacgcaggacaggaaacagagaagagaacggacagaagagagcccacccccggggggaccgacgcgacaaaggcggaacaacaagcacacaacagaagccaaca

SEQ ID NO: 116611 - DNA, 235 bp, Arabidopsis thaliana columbia
  unsure (1)..(235): unsure at all n locations
tacgactccttaagggaaagacggtacgcctgcaggtaccggtccggaattcccgtgtcgacccacgcgtacgcccagtcttgcatataaatacatatatgatgggatcgggagcaataggtgcgatagatgggaatggctcgggcgatgggcagaatcatnggcagggcgtatataagcgcgtgaggaggggggatggctcggcgggctgtgggagaggtggaggaggtttttt

SEQ ID NO: 116612 - DNA, 458 bp, Arabidopsis thaliana columbia
gcacgcgaacgtaagctgggatcctctagagcgttcgaccttgggggtttccttttttaaacaccgaggatgaaggctgagacccacgggtgcatactggcgacatcacggaggacggataaataagctagcactccgaggacggataataaataggagtacaccacactgaccgccaactagacatgaagacgtttttttaaggccagggggagaaacgggcagtgtagaggagagaggagagggagactcaagagatgtgtaggaactagtctagcctcgaaccccctccctccacaacgcacgccgcctctgaacagcccggaggggacgtgccgtcgcggaaccggcaacaccgaggccacagaatctgagacactttgcatcgctgcctccgcgacggtgggtaagatgaataaggacatggatatacacgagaactaaacgagaccggggaa

SEQ ID NO: 116613 - DNA, 449 bp, Arabidopsis thaliana columbia
cacgcctgcaggtatccggacctagaattccatggttttgtccgcagggcgtgcggaccaacatctattgtcaaagtgcggctcactagagatgtcgctagattggggcagaacagctgggctgtcggtacgccagctcgtgagtttgggtgctttcgttgggtttgtagtcttgcaggtggtcctgacatggctcctacagtgcttctcgacgattagggttggtcgccggagaggttttttttgtggggaggggaggggaactctgtcggctccacgctggttaagttggaggcgccgcggctcgatcgagatgtcaagtcctgattgcgtccggttggctgtgtgtatgggtgcgggtacggagcctcgcgaaatggaggacagctaaagtacgatgtagtccattctcgaggcagaacctatgtcttacaccgaacttccacgga

SEQ ID NO: 116614 - DNA, 559 bp, Arabidopsis thaliana columbia
tgacgtcgaacgcacgcgtacgtaagcttggatcctctagagcggtcgcccttgggggttttttttattggaatagatattattttattgcaaggacaaaaacatatacaaatgcgcgatgcaggtgaaaagtatgtgacatacagcgcggtcgagcactagaaagtgtgaagacggacactagtcgatgggtggctggatttgtaagtcgagttttttttatgcagggtggtacaggaggccacatatatcatttagtataaagacggtagccatgcatccccgatacgagaatgaaagaatgcggttggctatgtcgcgatcaaagccgaagtcgtcgatctagcatatggtacgtggtgtgattttcatacgtgtagtgtgacatcgtataatataggaaaagcgcaggatgagaaagatggagggcgagacagggcgggaggatgtaaagacgtgatatagagaccagagcagaggtaatgcgtggctgctccttctgtggtctctgtctctagcttcttagcgtttagaggcagatatggggcaggctgcctcc

SEQ ID NO: 116615 - DNA, 507 bp, Arabidopsis thaliana columbia
atacgactcaccttagggaaagctcgtacgcctgcaggtaccggtccggaattcccgggtcgacccacgcgtccgcggacgcgtgggatgcttctgaaaccattaaccttaagcaacgatgaattcgaagttgatgagtcggatgaactgggcttctttgctcccttctataaagatttcaggataaggttctctaaactgttgagtgataaattcaagaagatggattataaacttgcaatgagtgttttgaaccctaagatcaacttcccagaggttgatttgactggaaattcaccagatggatttttgaagaaactcgacggagttctttcaccttatgatatggagagattcagagcatacactgccaatctcgttgacttcaatctaggttatgacatctgcaaaactctagctcatcattattttcaagagaagctcccagtctcgcttgcgtatgttcaagcttctggactcctgtgtttgggcttgcaggagtcagat

SEQ ID NO: 116616 - DNA, 501 bp, Arabidopsis thaliana columbia
atagaagactatgacgtcgaacgcacgcgtacgtaagcttggatcctctagagcggtcgccctttttttttttttttttttagcaccaaattattcttttagcccaaaattttccaaaagtacaacaacaaatccggcaaaaacacatacagaaaccaatttttgatttaccgacgaaaatttcaaatcagaaaaccggatttgatccaagtgggttcctaaaccgacggtttaaaacaattttttcaacgatgagcttttttcaagtcaaactagcgaaacagctatcagacctagacaaaacattagaaacacaatcatgatgatgatcttggtcgtctttagatggactattaggcatagatctaagcattcttggtgaatctaagctttttctcaagatctgtctcatgggagagatcaaatgtcctgtcggattcggtggtgggcttgaggatttgaacttattacacatgttcatgtgtctggccatagcttcct

SEQ ID NO: 116617 - DNA, 422 bp, Arabidopsis thaliana columbia
gccgcgtacgtaagcttggatcctctagagcggccgccctttttttttttttttttaaataagaacagtgcatgcgtgtataattggggtaggtaatgttgtcccacacgacagtccatgcatgtggacaaatgagtggcggatgggagtaccacacgacactataaattgtatataagagagtaggatgagaggagtgaatacttttttattgggggggtgctgacaaaggatactggcttgatggatcgtatacctttagtgccaaggtgagaaaaggtgcgatgcgaccgctcctagtgacagagtagtgtgatgttttcatttaagaggactatgaccgtcgaatgcgtaataaccatttgagaaagtggggcaagtgtgtgtgattatgatgtatgtgtcggatgtaatagtcagcg

SEQ ID NO: 116618 - DNA, 533 bp, Arabidopsis thaliana columbia
acgactcactttaggagaaagcacgtacgcctgcaggtaccggtccggaattcccgggtcgacccacgcgtccgaaattctcagctactatacaaacctttctcaatgcttgttgacattggggtttcctcttcctttgaaagggctacaacccgtaaatatccctgtcattgactaaagagttaagcctactgtatgtactggggagagcgaaattttttaggctgcgggtggaatgcgcctcgcagagaggattaaagattcatggaccctcaactaaacgctaaacaactacaaggtgtgtaaggatcaaaatcgaaatgactgtcagcatcaaacatcatgcatctcaccgatgcgcctgagtgcaaactttctcaaactcagaaatgcatagagtggcttgaatagtacagagccatatgtgttccctgtaggagctacacagatttgtggtagcgaaacacaataagttttattagcattcacgatcgatctctctcctcgagcgcgtagttctctttgcctatgtg

SEQ ID NO: 116619 - DNA, 252 bp, Arabidopsis thaliana columbia
gcacgcgtacgtaagcttggatcctctagagcgttcgcccttgggttagtccttttcaacaaaaaagaagtttcggaagaatctccaacaggccgaaacgtactccccatcgcaatcggtccaattttataatactctggccatctcaccggcccacggccagcctctgctcgcatcttacacacgtttcttcttctatgggcggctacccgcctcatccccatccgttctgttcgacatagacatatctaa

SEQ ID NO: 116620 - DNA, 267 bp, Arabidopsis thaliana columbia
tgggtaatgaagatttttagtcgggggggattcttttatatttattatatatggggtatgaagactagaggcgagtaaataaaatagtacatcggatagactcaagaaaaagcgatgcaaggtaatgtaagaaagggagacgatgaaggatatgataggaacagaggcacttaatacttttttttaagagaggtgagggtgttagtgttgtgcgcagagaggtgcaagagagataaacgcacggagtaaagtggtgttagattttat

SEQ ID NO: 116621 - DNA, 517 bp, Arabidopsis thaliana columbia
  unsure (1)..(517): unsure at all n locations
atagnagagctatgacgtcgcatcgcacgcgtacgtaagcttggatcctctagagcggccgcccttgagttttttttttattaaatctttttgtgcataatattatcattgatacattggaaaaaaaaaagaagtaaccttatattagagactctaccagcatataagacataataatgatacaaatctgttgtgcatacataaaaatggttttgcttgttggaaatagaaagggcagggactccatgcggtgaattagggagaagtgttcataaggaggcatacggggtcctgaactagaactcactttgtaagacttgaaaaaaaaagtagatcgtctgggatatctaaacaagggcttgggagaacttgggaaaaacttacccacagttcaaaaaggaaccattgttttgggacttctctcaactaaaaaaagaacttttttttaggggaggggggagaagccatggttggaccgacatcgttgtggaagctgggaggggagcccgtagacagt

SEQ ID NO: 116622 - DNA, 540 bp, Arabidopsis thaliana columbia
  unsure (1)..(540): unsure at all n locations
atgatcctnnnnnnnnnnnnnnnnnnnnnnnnnnnnnnnnnnnnnnnnnnnnnnnnnnnnnnnnnnnnnnnnnnnnnnnnnnccacgcgtccggagcaatcttctgatgcttcagaccaatcaaagacaaaatgggcggaacagtctgaggagctattgagactgattgtgaattcacttataacccttgatgcggctgttgcacaaggttgatcagagcctaaacaacgaccactctctgatcaaaagatagctcttgatgtagacagatcacccactcatttgcaaccagattctagtagagatggataccaaatctgtgtgagcattcagagcacccactggctgctgtagcacttatagaacggattcaaaagcctgcagctgaaccataggtgggtgaaccaatatacaatgctcttaaccaggtagaatgccacactgaagtgagggaggacattctatctcatactttcgagctcttgagcaacttagatgatgaatctgttgtggaggtcattctttcagaattaagactgt

SEQ ID NO: 116623 - DNA, 294 bp, Arabidopsis thaliana columbia
tggggtggtttcggtttgcgggagcgggagtagagaaatggtgatatcttagtattaatatgggcattagcgtggctctcggaattctattatagggggggggttttttaggagctgggtgtgaggttctaacgtacctgttttttggtgtgctgttggggagagtttgagtaattgattgtgtaaactggtcgaggtgctgctcgtagatttgtggttagttgctgggtttgttggtagtattcttaatgtggggcgtcgataccttagttatgaactaatagtcggcgagtg

SEQ ID NO: 116624 - DNA, 507 bp, Arabidopsis thaliana columbia
ctagaagagctatgacgtcgcacgcacgcgtacgtaagcttggatcctctagagcggccgcccttttgtttttttttttaaaaaatcctatagcgctagcgcttcgcgttctttctattttatctatctcatttcattccgggataggcggctaatactaatctaataagtgaagtagtcgtcgtctgaccaattgactcggacaccagaccgctcgtgcccgcccattctgtctcgccctaaatggaatggctctcttagttacgctgcaccccgacccgagtccccacgtccgctcttctccgtccgcaacctaagaagttggctttgccaacacaacattagggccgtccccttcattctatgctgaccccgcccggcccggggctggctttttgggaagcccgttcccaccgcgctcatggcccggttggcctgccagcggtagtgggaattatcccgttccttggtcaaagacttggttggatgcgggatctactccacgag

SEQ ID NO: 116625 - DNA, 514 bp, Arabidopsis thaliana columbia
aatacgactcaccttagggaaagctcgtacgcctgcaggtaccggtccggaattcccgggtcgacccacgcgtccgctttttagcacgcgataggtcagcgaagcgtgagcgggcgcggagaaggaaaggccaaacacttcggccgaacgggaatgagcaacgacgaaatgacaagatgaggtgctccgggcacccccatttagatttagaaagaagggtcgaaggttttgggcctctagctttccccgtcccccctgagttgggtggtgcttgtgtggggggcgtgccaccagaaatcgggcttgaagctctcgccttaccaaggagccgacagctgatggctatggctgttggtcacgactactaccaaaaggttccaatgaagatgaatatttcacatggaggagtgtgcatctgtatgttgggtgttcttctgtcgtgcgacccggcggtttatgtgcgacctgtggcccacgcctcctatttgttcagggcgggcggcgtgaactctga

SEQ ID NO: 116626 - DNA, 494 bp, Arabidopsis thaliana columbia
gcacgcgtacgtaagcttggatcctctagagcggtcgcccttttgttttttttttttttagcaccaaattatgtcatttattccaaaatttttcaaaagctcataaacacatatcggcataaacacatatcagaaacgcttttttcgttttacacgacgaaaaatttcaaaccaagaaaatcgggttttagatccaggaggtttttttaaaccagatgggtgtaaaacggcttttattaaacagatgagggttttttgcatgtcaaattatgagaaacatgttatagtatcctagacaaagacatttaaaaacactaatgtatgatcgatgattcataggtgcgcattgtagataggatctgttttgggtatgtattcttaaactttgcttgatacaatgctaaatctttctttctcaagattgtgtgcatactggtaatagatcaataggttctggtcagaattgttgtttagtgggcttaaaggtattagaa

SEQ ID NO: 116627 - DNA, 520 bp, Arabidopsis thaliana columbia
atacgactcactttagggaaagcacgtacgcctgcaggtaccggtccggaattcccgggtcgacccacagcgtccgttaaatcaatgaaaccatagtctgcgagtgttctaagtgatcctacattgctgctttcaacaccgggaggtaatactgtgtctcttccagcttcgtgctacctcaaatctgtcggatatagatccagtattcgagtgacgtagagatctggagcatgtttaacccgaggtagtgttcctcaatgcgtacatattagatatgtcagtaacagcgttcatatgagtgaaatgagaccgtgtcgtactctttttgctgaagccttgcaagttatgaacgtcagagataaacgaagcttatctgttaaccgaccggtaagaacgttatgggtcctgacccaaagagacatgctgtgattatctcttcaaatcgctcaaagcctccccatccgtatgcatacaaggacatttttatctaatggacataagaaaagattctggatataaa

SEQ ID NO: 116628 - DNA, 467 bp, Arabidopsis thaliana columbia
cacgcgtacgtaagcttggatcctctagagcgtgccgcccttttttttttctttttttatgaacttgttgctgtgtagatggtatgatggcgctcctacgacacgtcgtgcgtgtcgtgatcggtacttatcgacggaaattaagcaaaggggtaagagcgggacgtcttcgaaggcgctgcgtgtgctgattctttttctttgggagaggagagccgaagacagtacgctgtgtcttacatatcccctcatgggggttgggttcgatgtactctctctctgttgtgctgacttgacggcttgaggggcactttaatgtcaagcatcccccgactcagggctggtgaggatacgggggggtgaaccctgtgtccactcaaacttacaatccaggaacgatttgttgatagcaacagcgtggtcgtacacacagtatcgcaaggctcttcggtccaacgtgtgttttc

SEQ ID NO: 116629 - DNA, 491 bp, Arabidopsis thaliana columbia
agggaaagacggacgcctgcaggtaccggtccggattcccggtgtcgacccacgcgtccgcacaatccttgttcttgccgaaatagagaatgttgtgaatctgggttcttagttgaggtgtttatataagattttgtagcgaaagacgacgagattgtgatgccgatccgatgtgtattgaagaagaactggcgaatcggtatttttcttgtcggggcgcgagcggatgtgaataggcatgcggaatgagcaatgtccccatgagtagggacgagtcacatcgctcattatgttgctggggtgggctcgtggttacttctggagctggctggttacagtgcgaagcattagccatgatgggatttctattcactgggatctatctgatgataggtttcattggttgggatgggatttgtttcggaggatagcgtgcgtgtgttgaagctctgaactgactggggacaatatgggccattggtgtgcagttt

SEQ ID NO: 116630 - DNA, 516 bp, Arabidopsis thaliana columbia
cgcgtacgtgagcttggatcctctagagcgtttcgagctttgggggggttcttttttaaaaaaaaagaagtgtttatgagatatcgccaagaggacaacagtgtagatctgatatgtaagggtatcaaatactaaaagaaagctggaccatatatataatggacaatatagctaacagctgccattaatacatttttttttttgagggaggatgggactgggacgtttctaaaaaggtatgcagagtcgctttgataacggagaattcttaagaaacaagtaatggtgggtgctcgagaggattaactgggtatgtatttatgaagatgggggtcacgtatgattgattagtcggggtacactggactttaagctgattgttacgagaattatacttcttggagtaagctctaagagacgaatggtcacttctatgaggtaagaagcgagagatggttgttatgaaaatgtcgtgctagtggagttagacaagacatagcgtggggtggggaggtt

SEQ ID NO: 116631 - DNA, 310 bp, Arabidopsis thaliana columbia
ggggactccgggattggttagtatgttgaaggtgaccctcaatgacgaggatgataatgctgggaggaaagaaaggaaaaatggttggaatattcggttgttttaaagggggtgcgggtttttttggaaaaaattgacataaccattttatgctttaatagagtgtctgggttttccataatttttgtgaacataaataatccttcaagagtggatgtgctcttgtgcgattggtgattagactttgttgaggttgagggtcaaatgtcgtagggagaagtgagtcagggtaaagtcctgattaatttct

SEQ ID NO: 116632 - DNA, 507 bp, Arabidopsis thaliana columbia
ataggagagttatgacgtcgcccgcacgcgtacgtaagctaggatcctctagagcggccgcccttttttttttttttttttttttttttttttttttttttttttttttttttttttttttctctttttttttattttttttatttttttttttccggggggcattaaaaaagggaaacaacgaaactccttaaataaaaaacattcccccaaaaatttccaaaaaaaaggtggaccggaaaataaaacccccatttgaaaaccttccccaatgttggggggcgtttgaacccccctctcttttttaaaggggggctttgggccgaaaggaaatcttttttttccccttgatcccaaaaaagcccccccttgggcgggggggggcctggggaccccagaaaaccccccccgggggggggttcgaaaacccccacggggggctgcaactcctgggggggcaaagcttccagaaccaaaacaccgggctctggggtaaaaattgggggg

SEQ ID NO: 116633 - DNA, 411 bp, Arabidopsis thaliana columbia
gcacgcatacgtaagctaggatcctgtagagttttcagccttggggggattcattttacacaaacatgttggcagtaggtgtatatttgtcatagaagcgtatgtgcaggcatgaatggctggggtggctgtcacatagccgaggtcaggtacaagcattctatcataggcgtggggaactttatctagttaggaggttttttttgttgtggctttgtccgacggtcaaagtgtgtggtcgtaataggtgctttgattcggagtatgtgtgtttgatggaagtattatgatctgtgatatgttagggtaataaatatcatttgtgtctgctggagagattgtaagattagagtttatcgtggtctgggcgggtgttcaggcacttcgtttggcgagggggttggtgtcgta

SEQ ID NO: 116634 - DNA, 516 bp, Arabidopsis thaliana columbia
gactgcctgaggggagaacgtacgcctgcaggtaccggtccgctattaccgtttctgcccacgcgggcgcccttgttcaatctcgagtcaaatctctatagaggacttatcgagcactacgtagcggccggcgtaagccgagacgacaacgccgtctcgagttccttgccagtgaagtaggctcaattgttgggcccgcaagcccacacggccgtttttttctctgcggggttcccccacccgctaagctcaccatgtgcaggacccgcacggaccacatgagtcattcacacgaggcccactcacgactttcgaggccccgcgcacccgtctcgctcacacagtcggtcaccgccattcccggctatggccaggcggcaatgccccatcaggggacgtaaggggaacggctcgcttcgccagccaatactcatggcacaagttcgggtagagggggagggtagggtgtgaagtcgctccttcaggcgcagaccagaacatagcatcgaaagcctg

SEQ ID NO: 116635 - DNA, 405 bp, Arabidopsis thaliana columbia
cacgtcgtaccgtaagccttaggatcccttctagagcaggtccgcccctttgggtgtttttttttttatcttcaactttcgtgtgtagttcgatcaaacaatgtttcttacacttttattgggttgcaaagtctcaagaccattagtttgttacacctttatgtccacacacctatacacaatgcagagagtagatcgtaacgggtctagttcgtatagatgtggccggttttttcatggctgcggtggggttttttcgaggtagcacaagagaagaagtgtttgcgaaggtatgaaggttgggagatattcgcgctctcatattcgtgtaagcgccgtttgaccgcgaaacacttagctcgaaaagaggtagctctcttgggcgttaggacccatgacacgggg

SEQ ID NO: 116636 - DNA, 505 bp, Arabidopsis thaliana columbia
atacgactcacttgagggaaagcacgtacgcctgcaggtaccggtccggaattcccggttcgacccacgcgtccggaagaggtgaactggtagatgatgctaaggcaatagccttaaagtatctctattcttacttcatcattgatctactatctatccttactctaccacaaataagtagttttagacattcttccaagctgtcaaccaaccagtattcttttctaacacaagactaccttacattttccataatggctcaatatgcgaactcggactactgcgtatgtatacactttacactgaagggccatgaacactctggcatcgttactagaacattatggcctggtaactctcggaacctctctctctataaggcgccgaaccatgtcgcatcagctctatcttactaagtctaacgagagtcagaagactcatgctcgccgagccgctccgaagcacactcgacgtcgtacatcgcaccctctctccttgggaatcc

SEQ ID NO: 116637 - DNA, 177 bp, Arabidopsis thaliana columbia
aaggaggagatggatgggagtggttgaaggtatttgagatagggggtatattcggtacatataaaatctgagagatggatgtgtgttagggataggtgattggtatagggagagaatgaggatggattaataaggtagtgtgtagctgatgggaggggttagaggagaggatacgta

SEQ ID NO: 116638 - DNA, 323 bp, Arabidopsis thaliana columbia
aagcgaggtaccacagtcgagcgccgcggcggtagtgagaatcctcgagacaggtggctaggaccggatttttttaggaggcaaggatagagaatggaggggagttcaccaaggccggtggctcagaccgtatgccgggggccggttgtgaatattcggacgtcagccggtgacctatgtatggctaggaaggtatgttgaggtcgtccatgttgggtgtgggttggggggaaatgaagtcgtagggtcgcggagctgaacgctcctacatgtggtctgagctggggtctagatgacgcatcgagtgatgagggaattgtagt

SEQ ID NO: 116639 - DNA, 394 bp, Arabidopsis thaliana columbia
catacaagactatgacgtcgcacgcacgcgtacgtaagcttggatcctctagagcggtcgccctttgggtttttccttttatttatttttgttgtttgtttttttatttttctttttcttgctttagggcagggaatccaaccccttaagctaacccaaaattttctcgccaaggacatgatctccccaagtagtagaccaggcctgtttattacacctagttcttcttgggagaagtatttttttccgcgagagagagtgttttcggtcgaccgtcacataaaacagaagcccggcggagaccccccgcagtttcttttgtgcgcgacccggttgtaggagagcctaggcgcgcctggggcgcgacaagcgaccacctcgccctccgtccggt

SEQ ID NO: 116640 - DNA, 414 bp, Arabidopsis thaliana columbia
tacgactcactttagggaaagctcgtacgcctgcaggtaccggtccggaattcccgggtcgacccacgcgtgcgggcgcggtatgatttctgtgaaacctatgagaataatgtgccaaattgttgatagacgattgctttgagccatcttcaagtgtcctgcggtaagattctgttttttctcaaggcacataactcgttagatttcgcgaaactgcgggtatacttgacggtgtactgcctatcatccgatcgacagcactcggtgacagtttcgagccttttgtctggctttgactatccatctgagcagtctttaaaggtcgccactgcccagcaccctggcttaccacttgcggcatttcattgttcctgtgttcgcttcctgctacttggagcgaagtctgcgttactg

SEQ ID NO: 116641 - DNA, 537 bp, Arabidopsis thaliana columbia
  unsure (1)..(537): unsure at all n locations
nnnnnnnnnnnnnnnnnnnnnnnnnnnnnnnnnnnnnnnnnnnnnnnnnnnnnnnnnnnnnnnnnnnnnnnnnnnnnnnnnnnccacgcgtccggtttcaaattctctctctctttctctttctttctcaatttttgtagtttcatactctagcttactaatcaaagatgcgagagattcttcacatacaaggtggccaatgcggaaaccagatcggagctaagttctgggaagtagtttgcgccgagcacgggatcgattcgacgggaagataccaaggagagaacgatttgcaactcgaacgagtcaatgtctactacaacgaagcgagttgcggaagattcgtcccacgcgccgtcctcatggatctagagcctggtactatggatagtgtcagatccggtccgtacggtcagatcttccgtcctgataacttcgtatttggtcaatccggtgccggtaacaattgggctaaaggacactacactgaaggtgctgagcttatcgattccgttctcgatgttgttcgtaaggaag

SEQ ID NO: 116642 - DNA, 496 bp, Arabidopsis thaliana columbia
cgcacgcgtacgtaagcttggatcctctagagcggtcgacctttggggtttttcttcacagaaaacatgaagccaacattaagattagtaggagagagaaacaatggccaagtacgtgtaaaggaaaagacaacacaccgaataaagtgttgggctacaaaaggggtaagggaacgagaacacaagtgtgtggggagagcttcttgttcctgtgcgttaggctagacatgagtcagcattgttcgcaggattgggggagcctcgatgttgcgaaatcccggatcgtggaacgtgagggggacgtataatgaggtccaggcaagggtggggacgcataattgtgctctggagaaccgatttgggtggatgattaagaatggatagataggtgtggatatagcgtgcatgttaatgtttgaacgtcgaaaacacagagtgtcggtgaggagcgtggtgagggccggggggaagatgatttcgggccagcgggtcatat

SEQ ID NO: 116643 - DNA, 567 bp, Arabidopsis thaliana columbia
tcgcggccgggcgttggcgtgtgttggggtagtcctccagctacatacgactaactgagggaaagctactacgcctgcaggtaccggtccggaattcccggtttcgcccacgcgtgcgagcccaagacgagctccggtctcatttctcgttcttctgattgatagatcgctcggtacttggaaagcagtgtataaggcacggagggattagagtttcggcgaggatgcctatggtcgatgagcctttgtacgcggtaggtgtgcttatagagaagctaataaacgatgaccctcattccaaaattgacctgtctaatatggctttctaccattgttcaagctctgggacgagagctggcatgattgcgacgcgtatacatttcctttccggcagcattgatcagcgtttagatggcgccttccgctgctggcaacagagctcgtagcgcgccaacgccccgattcgtgcatgccgcgtgcattattactgacgcgcgcgggggcgtgactggcaggtcctactatatcgtgtcagtgttcgaatactggtgggcgccggcatggacc

SEQ ID NO: 116644 - DNA, 489 bp, Arabidopsis thaliana columbia
atgacgtcgcctgcacgcgtacgtaagcttggatcctctagagcggccgcccttgggtttttttttttttttttttttttttttttttttttttttttttttttttttttttaggggggggaacatgcattaattaagcaaaaaaatttacagcttttaagttccttttgaaaccagttttatttaccattttttttattgaatttttaacccaagagtaactttgaagagcttccaaaaaaaaacttccctgtaatcacttttttttttttgaaacactttttgaaagcgaaaacccgagaacggggaaagaaacccattagggacggaatccctaccacatgggcatgctctttaaatgcgggtgttgaaaagtctaaaatccaaaaggcttgcttaatgtagagggttcccggtttttccatagggaaggatgtcgaaaaaatcgtaccgtctggggcgcattgcaaacgcgtataaggagagaag

SEQ ID NO: 116645 - DNA, 535 bp, Arabidopsis thaliana columbia
  unsure (1)..(535): unsure at all n locations
gtgcccctctagnagagctatgacgtcgcatcgcacgcgtacgtaagctaggatcctctagagcggccgccctttggttttttttttttttttttttttttttttttttttttttttttttttttttttttttttttgggggggaaaaaaaaatgaactttcggagtttcaaattttgctcttttgctttgggggaagtccccccccggcggacaaaccaaaaggggcgggaagaaaccaccggcggtcctccgaaaaggaaaaaacccccccgcccccccccccttaagaggaaaccaaaaccccccgccccacttggaaaaccggaggaaaaaaggggccccaaacccccatgatgcccccagggcgggccccccaaacgggcttgggtgggggaagaagaaaaaaaaaccctggcttgggcggctcccctgggaaaaaacaaaccctgcttgggagaggggtggaaaaaaacacccccccccttggttgtcccaaaaaaaaggtccccctgcacaaagagggggggcaccct

SEQ ID NO: 116646 - DNA, 325 bp, Arabidopsis thaliana columbia
gttatgaaattttcgagtacgaggggggttaacctatgggttcagcagagtgttacgcgaggtgttgaaaggtgagtggagcgaaattataaggtataaactcagaccaacgatgctgtgagatgagcagggtgtgtgttgtggctcgtgtaggtacgacagtcacaacactaagagcgccggtagaacatgagaggcacgaattttttttttttgtaggaggagagggtatcgacgaacgccgcacttggcattcttagttgatagttagtgttgatagctatcgtgtaagagctattggagcatgatgtgtaaaaaagtggag

SEQ ID NO: 116647 - DNA, 512 bp, Arabidopsis thaliana columbia
aatacgactcactttagggaaagctcgtacgcctgcaggtaccggtccggaattcccgggtcgacccacgcgtccgcaaatctcaacattcgaatttttaaaaattcttcaaaatctcttcttcaatggcgacgggaaagagttactacgctaggcctagctatcgatttctcggcaccgatcagccgtcttacttcaccgcttccgattcaggtctcgaattcgacgaatccgatctcttcaatccaatccactccgattcaccagatttttgccgcaaaatctcttcatcagtcagatccggtaaaaaatcgtcgaatcgtccctccgccgcttcctccgccgcagcagcgtcgtcgcttcctgttaacgtgccggactggtccaagattctccgcggagaataccgcgataaccgacggagaagcatcgaggataacgacgacgatgacgatgataacgaagacggtggcgattggttaccgccgcatgagtttctggcgaagacgaga

SEQ ID NO: 116648 - DNA, 505 bp, Arabidopsis thaliana columbia
atagaagagttatgacgtcgcacgcacgcgtacgtaagctaggatcctctagagcggccgccctttttttttttttttgatttattgattattctattaactagtttttttgaagactttgttcacattttgagtttatatgcacaagtgaggaaacacattttgttttggacatgatttgctgacagaaaactagggaaaaaaaagagagccaacactatgtaacttacacattattcacaactataaaggggaagagttaataacattatctagagacaataagaaccgcgcgaaaaaggtggcgttaagaggaggatcaagattcatttttggtggatgggatgaaaaggtgcggggagcaaatctcacatgtggaggccttgccctcacgactggctcatcaacaaagagggccttgaggaaagatggagttggcaaggaacaccgatccgtcattcggggatacacaaatgccaataatgagtctgaataacccgctaag

SEQ ID NO: 116649 - DNA, 503 bp, Arabidopsis thaliana columbia
gcactaatacgactcacttagggaaagctcggtacgcctgcaggtaccggtccggaattcccgggtcgacccacgcgtccgtatggtgatcttagtacatcgccactctatgtttataagaccactttctctgggaaactaagtcttcatgaagacgatgaagagatctttggagtgttctctttcatcttctggacatttacactcattgctctttttaaatacgttttcattgttctctcagcagatgacaatggagaaggtggaacatttgcgttgtactcgcttctttgtagatatgccaagctaagcattttaccaaatcatcaagaaatggatgagaaactatcaacatatgcaacgggaagcccaggagagactcggcaaagcgcagcggttaaatcattctttgagaagcatccgaaatctcaaaagtgtttgttgctctttgttcttttagggacatgtatggctattggtgatagtgtcctcactccaacaat

SEQ ID NO: 116650 - DNA, 509 bp, Arabidopsis thaliana columbia
  unsure (1)..(509): unsure at all n locations
nnnnnnnnnnnnnnnnnnnnnnnnnnnnnnnnnnnnnnnnnnnnnnnnnnnnnnnnnnnnnnnnnnnnnnnnnnccacgcgtccgcccacgcctccgaagctctcttttctctccagatatcgattcccgaggctacagagaaaaccgtaaatcttttcttcgttcactcaatcaaccaaagatgcgtgagattcttcacattcagtgtgctcaatgctgttaccagtatcggatccaagttctaggaagtggtttgcgcctagcacagaatagatccagccggaaggtatcaccggagactcatatctgattctcgagcgcatcaacagtgttctacattgaaacgagtctgcatgagattcggtcctcgcgcattgctcttggatgatgagcctgggactatggatagtctcagatctggaccgtacgggcagacctttcgacctgataactcctgctttcgtcaagccggtgcgggtaacaactgaaccaagtggacactacactg

SEQ ID NO: 116651 - DNA, 504 bp, Arabidopsis thaliana columbia
tagaagacttatgacgtcgaacgcacgcgtacgtaagcttggatcctctagagcggccgccctttgggttttttttttttttttttttttttttttttttttttttctgcatctatatctcctttttcttcgttatataaactcaagtttaaagggattagtacagtattagctgattttattgatgactactaaaacaaattttagtatttgttttataagaagggaaaacccctaggatctttgatggcaacactttaaatatattgggatgcagttgggcgaataaccatataagcccccaaacgccccctcctgtctgaattcacccagttagccatcccggctcgaggtaccgcttctgctctcctgagttcaccacctgtcgaacaaattgttacctttaaaaagtgatccacactgaatgcctaggaatccgggcccaagaagccttcgtcattcccgcagactcacagctctattcgaccaccgaaaggaaacgtc

SEQ ID NO: 116652 - DNA, 519 bp, Arabidopsis thaliana columbia
atagaagagctatgacgtcgcacgcacgcgtacgtaagcttggatcctctagagcggccgccctttgggttttttttttttttttttcaatcagattcaatattgctataaaatttggttaaaacccgaataaaatccatatagcagatatttgagagaataaagggttattaaccaacagccaaaaaaacaatgcttcgagatttatatatcaatcttgaataatctgggataatgatgatgagagaaacttacacactctctaatctttcttcttgataaaggcaaaggctcctttaggaattttgctcatcaccttactcaaaaccttgacgttaaactccacgtattgcttcttgatctccctaatggccttttcaccaaaggcatctactttatcttcatacttttggaaaagcacgggaatcgtgaagagaagtacagttgcgatgtaaattaaggcgggaccgtgggtcgacccggagaatttcggaccggtacctgagggggaccagcttt

SEQ ID NO: 116653 - DNA, 324 bp, Arabidopsis thaliana columbia
aaaacgcaggggtgggtaagctgggatactcgagagggtttgggctggggtgagtttacgtttcactcctcgaatgaggtgtgagaacagattgagaaaatattatgttggagagttggaaatgtgaatgtgtgacagagcggttaagtgacaccgagtcatgtgtcaatccgcactgtgcgacaatatatagagttagagattgttttttgtatatggcgatagatggggttgtagacgtgagtagataggcgacctaaacttgtgtggcagtgtgacgagagattcgtattccgagtcaggagtaaataagttttgtatggg

SEQ ID NO: 116654 - DNA, 509 bp, Arabidopsis thaliana columbia
atgacgtcgcacgcacgcgtacgtaagcttggatcctctagagcggtcgccctttgtttttttttttttttttttttgttttttttttttttttttttttttgggattcaaatctctccttatgcaataaaaaaccttattggaatacaaacataagtttcttgaatcaggttatattctctttaaacagatacattcttgctcttttttttaagagtgggtgcatcagggaatacttttttccagaaccaatggttactccataagagggtcatctcttctattggaactcctttggtttcaggcgacaggaaatacacaaagataggctttactggcacccaaccaggtaagaagaggaagattcccaacttgactggccagaggagaccaaggaaaggttgggctttgatgaaagggaagaggagatttacagctactgggatactctgccccgctgaacgagtccttaaccgaaagatttcgctaggtctgggcccacctagagg

SEQ ID NO: 116655 - DNA, 520 bp, Arabidopsis thaliana columbia
  unsure (1)..(520): unsure at all n locations
nnnnnnnnnnnnnnnnnnnnnnnnnnnnnnnnnnnnnnnnnnnnnnnnnnnnnnnnnnnnnnnnnnnnnnnnnctttttttttttttttttttatgtattgttttattttttttttatatactttagagctttaaggggcagacttatacaaaaaacctatttgttaacacttgggggaacaatacgatggaatacatgtaatatgaaaataaaagaccgaaagaaggattagctctgcattgagtttgaaaattagtcaatatcattagcaggaacgttgttcacaaaggagaataggcttccaggactaatatcttaaagcatattctatatatagagttctgaacacaaaaacctgacgagagggtgcccctctattggctcaggggataaaggctcagcttaaagatcagacaagctatgcttctcggaattactaatataagaggctggcaagtgaccaatgggcttggagcgaaggataaaggctacatacgcgtgaaaggatgaggtaaaggg

SEQ ID NO: 116656 - DNA, 448 bp, Arabidopsis thaliana columbia
atagaagagttatgacgtcgcctgcacgcgtacgtaagcttggatcctctagagcggccgcccttttgttttttttttggttttttactcgttctccattattaatttatgacgtttaagaaagactcacaaacaagatgaataaatgatacaaggggattttatggcatatgcagattttgtttatgaagaataatgtaacaaattgacattgattttctttccacagtgcccactatgctcaagaaaagactcgttaaaagcagaaccaaaagggggggatggctctttaagggcaatcaagttaggaatctaggagggagactcgcagtctagtcagggtggattggaatcgctgatctattagcagaggttcagtcgatcggagatggggaatgacgaacggatccgcggttatgttttggattatataatctggttggcgtta

SEQ ID NO: 116657 - DNA, 398 bp, Arabidopsis thaliana columbia
  unsure (1)..(398): unsure at all n locations
cannnnnnnnnnnnnnnnnnnnnnnnnnnnnnnnnnnnnnnnnnnnnnnnnnnnnnnnnnnnnnnnnnnccacagctgcgtcttctttctctggatttgaaagttcgataaaaatctactgatacatcgacttctggaagccttctcaatctctctagaattgtttcggacgactgaagatgaagaagattcacattggtgcggtggcgctattggtgtttctatctgtggcctgggtctgtgaaatcggattgggttgtccgagcacagttgctgctttcctctggtctgcgcatgtgcagtctgatattggtgaatgtgatgacggtggtaattatcgggggcttgccgctaagggtctatgtgggtctgagcgcactcacgggggcctgggaaat

SEQ ID NO: 116658 - DNA, 471 bp, Arabidopsis thaliana columbia
  unsure (1)..(471): unsure at all n locations
nnnnnnnnnnnnnnnnnnnnnnnnnnnnnnnnnnnnnnnnnnnnnnnnnnnnnnnnnnnnnnnnnnnnnnncttgagtttttttttttttttttttttttaccaataatttcattttggtttaagaaatttcaaaggacaaaagcgcctttaagattcacttctctttgacttttgacagtacagaagtactagtacaatatttaatctagggatcttcatgaatgatcactaatgaggtggatgatcgccggacgatgataacaatgttggggtaaccggctgtggggaattttcccgccaagaagagttttgggaataaatccacgcagcgctagctcagaattgtaccacgtgggagagaagagccgtgatccttggctctggtgaagtcatgcagctacgcggtaaacggtggttgggggcaggtttaacatagagtgtataaaatggcttgtgggtgggggggagt

SEQ ID NO: 116659 - DNA, 531 bp, Arabidopsis thaliana columbia
tatagaagactatgacgtcgcacgcacgcgtacgtaagcttggatcctctagagcggtcgcccttgggggtgattttttttttaatttaacacctatgatttaagtctgggtaaataaagtgcaaaggataaattctgctgtaacatatttgttggcgtagctggctggccggaacagaaaatcggagacagagtgggctttgaggatgatcaagattatttttttaggggaggagtaaatagggtaggatacctgtttagatagttcgtgatataaggatagagagaggagccgagacaaatgtagattaatggttaactataagttaaatggttggttgataccttcatgactaggcttagtgttgagtgccgtcttttgaatgattgggaaggatccgtagcgttgggacgggcaaagtcggatgtggttatgatcctagtgggcatgataaatgttactgaaaagaagcgacgaaagaggaatgactaatttattaggttggtatatcatgatatagaagtatatat

SEQ ID NO: 116660 - DNA, 577 bp, Arabidopsis thaliana columbia
tgttattgactgaaggagtattgtagtacctgccagctaacatacgactcactttagggaaagctgcgtacgcctgcaggtaccggtccggaattcccgggtcgacccaagcgttcgcccacgcgtacgcggacgcgtgggccctgcaccattaagaaacgctttcaacgatgtttacatcgcgtatgagttaatggacctagatctccatcaaatattcggtcaaattaagcattatccgaagaacattgccagtattttctttaccagatcctccgtggattgaatcacattcactctgcaatggagcttcgcaagggatttgagatcaagtagtcttctgctggaacgcaactgcgatcgtttaatgctcgatttctgtgtctaactacgagtcacttcctgagagtgatttcatggactgtcactggtggtctgagaagggcgcgtgaaccatagttttttctaaactctttctggatcgtactgctcctatgcgaggtttagttctggagagctgatcttcatgtgagttatgaggatcgtcttcaattctttcttgataaagatgatggtt

SEQ ID NO: 116661 - DNA, 535 bp, Arabidopsis thaliana columbia
  unsure (1)..(535): unsure at all n locations
atgatctnnnnnnnnnnnnnnnnnnnnnnnnnnnnnnnnnnnnnnnnnnnnnnnnnnnnnnnnnnnnnnnnnnnnnnnnnnnnccacgcgtccgcggacgcgtgggcggacgcgtgggcagattcagggaaagatgcagggcgtctctcagctgcttgggagctatacaaagctcaagaagagcttgtgaaggttgctaagaaatatggagtgaagctaactatgttccatggccgtggtggcacagtcggaagaggaggtggtcctactcatcttgctatattgtctcagccaccagatacagttaatggctctcttcgagtcacggttcagggtgaagtcattgagcaatcatttggggaggcacacttatgctttagaacacttcaacgtttcacagcagctactctagagcacggaatgaaccctccgatttcaccaaaacccgagtggcgtgctttgcttgatgaaatggcggttgttgcaactgaggaataccgatctgtcggtttccaagaacctcgattcggcgagt

SEQ ID NO: 116662 - DNA, 502 bp, Arabidopsis thaliana columbia
acgcgtacgtaagcttggatcctctagagcggtcgcccttgggggtaaaccttttttatttcgttttttttctttgaaggacacaaaagaaaaccgaaagagtcactgtctatagcatttgattacaattgcaaaatccaagaaaataaagtatgatacaattcgaggactaagaatgcagaagggcgaaacagttttttaacaggggtacaaccaggcataatctccgattgtgaaaaaaaagagaataacaaaagagggggagtcgaaaacgagaaaatagagcacagagagcacgtacagggaggtcacttagacacagacgcagacagccttggaaatacgccgttaataggatgataaagagtatacacaataacgacgcgatacagaggaatctaggggggagtaatgcagaagaagccttatcatgatcatgtgcatcgtttggatacgcctcgcagctaaacggagggagggaacattaggcattatttctctc

SEQ ID NO: 116663 - DNA, 496 bp, Arabidopsis thaliana columbia
tggaacgcacgcgtacgtaagcttggatcctctagagcggtcgccctttgggtttttcttttttttttttttttttttttttttttttaaaaaaagaaagaagattcatgacatttacgatgggttacaggattatttacatccactcgaaaacgaatcagaatttttcctatgcaagtgtgaacatatatatatagatgtttttcgttcattactaaaacaaaaccaaacaagcgagaaatgtcttcttcatttctggattggagctctgaaatcacacatggtatacgggctaacgcgtctcgaagaggacacgacaaatgggacactttttgccttttttacaacatgtgctcgaaaggacttgatgtttactggggagaaaatccacgttgatcggattttcaaaacaaacttttacagagaatctttggggtttaaagcctttaggtcttttgcgggctatcactggggatttgtgttagctcacttaagg

SEQ ID NO: 116664 - DNA, 503 bp, Arabidopsis thaliana columbia
gtgcactatagaagagtcttgacgtcgcatgcacgcgtacgtaagcttggatcctctagagcggccgccctttttttttttttttttttttttactgaaatggtggtcctttcttctctatcacaccccggagatcacaaacgaacgaacaagaagctaggtaatatttacaattgttatgtatatctatatgatcgcacaagggcaaaacgaacataaccaatacgacaaaactaagtggaaatgtggagacccaacacttaaagtgtgtgaggaagaaacaaaatagatgtatgctaattatgtagtagactaaccaaacaaagcgccacaccttcaaactttcaagccaggggatagtaatgatgctagttcaagcgatcatcaaacacaacttccttatcacatattgggcatctatcgtttctttcaatccactccagaagacaagagaggtgaaattcgtgctcacactttgtcgttagtcttggattctcaacatc

SEQ ID NO: 116665 - DNA, 506 bp, Arabidopsis thaliana columbia
  unsure (1)..(506): unsure at all n locations
nnnnnnnnnnnnnnnnnnnnnnnnnnnnnnnnnnnnnnnnnnnnnnnnnnnnnnnnnnnnnnnnnnnnnnnnnnctttttttttttttttttttttgtattgtttttttttttttttagtttcttaaaagcaaaaacatccccaactgtattatatacctttttaggcatcataaaaaaactcactttgtgaaatacctgccctattttctgataaccgggtggtgttttagtttagcatccattaacaaaactgggaattatccttagcgggaccgttaattacgaaaccaaaaagcttttgacaactaaaaaaagttttagattggatacgcgggttttttccacaacccccgaaaaaagaaacttcttttattggcgaggggaatgatgactaaccgttctgagcttacacgatgtggtgcttgaaattcctaatttcctagggaaatttttgttcttcattcttgaaaaaggggataatcctttgatacccttctgatgttg

SEQ ID NO: 116666 - DNA, 477 bp, Arabidopsis thaliana columbia
gcacgcgtgcgtaagcttggatcctctagagcggccgcccttggggtttttttttgttaattatataccggtttttttgtggttgcgtaacgtgggaatgtttcaactcaggacacaggattatagaatcgggaactggcgagtaatgtgaagcgcgcgcgcacgaggaatgacagtacaatataggtaaacctttttttttagaggaggtgcagccatactcggggtcccaaggagaacgttactgtaagcacttgacgtgactgaatcgggggtagatggcgagggggggggaggtgaagaggatatgtagaggttttgtggttaggtagggaggagtgttaatatgttttggcggattggctgtttgcgagtttcgttgttagggggatggggaaatgaggttaggtcgttcgtaggacgagctggggacggcgtggggttgttgaggtgggtgctggggtgggggcggataga

SEQ ID NO: 116667 - DNA, 440 bp, Arabidopsis thaliana columbia
tacgactcactttagggagaagcacgtacgcctgcaggtaccggtccggaattcccggttcgacccacgcgtgaggcggcgccttagcatgaatcttgtgctgactcttgggcgaaggcgtgggtgcatataggccgtagactctgattgtagatgatgtaactccagaggatagagatagactaccaatgagctgatcctgttgtggggccattgaatttttttcgcggggggaagtggtgcctgactgtgatcacttcaagaagagtggatactggttcgtgtgggatggggatcgagggtgggtatgtgtggcgactgtccatgatgaaactgggtgacatagaggtaaatagattaggtattagctaatgaatctcgctgagactatgcggagaacggtaagaactaggcggacttcggtgagcttgaggggatac

SEQ ID NO: 116668 - DNA, 506 bp, Arabidopsis thaliana columbia
ctatacgagagttatgacgtcgaacgcacgcgtacgtaagcttggatcctctagagcggccgcccttgggggtttgtttttttttttttttttttttttttttttttttttggattttcaaaaaattttcatatttgggagaaattatttgaacagggcctattctttttaacaaaggacccaaacccaagtaaaacaaaaaacaaaaatagttcacttttttttaatcggatgaggggcccggacacttcttgaaacgttttggaagacccagactgcctgaagccgccattataaaacttctttcgcggggggaagacctaaggtgcactcccccaatttgggccttaaaccagggaaaattcgggaaacttcagcccataaaacctaaaaaagtgaaacgactccttccttgggttccccaagggggaactttcttgaaagaaacccactacgcggggcttgggggggccaaaggggggctcctggggggcccacaaataagt

SEQ ID NO: 116669 - DNA, 534 bp, Arabidopsis thaliana columbia
gatctccagctacaatacgactcaccttagggaaagctcgtacgcctgcaggtaccggtccggaattcccgggtcgacccacgcgtccgggtgttacttagtctcaatcttctctttgtctttgtttcatgtgcttcttccatagagtttgtttaccctaatttcacagcttctaacctcagattcgtcgatagctccaaaggagctttcctcttgtctcgtaattccatcttcaaagccggtttattcagtcccggcggcgatgattcctctaccggtttctacttctccgtcgtgcatgtcgattccggttcaacaatctggtcatcaaatcgagattcccctgtttcaagctctggtacaatgaatcttactcctcaaggaatctctgttattgaagatggtaaaagtcaaataccagttggggcaacgccgggtgtagcttctgcggttaagtcccttcggttaaccgacgccgggaatctccttcttcttgatcaccttgaacgttgctctatgggaaagcttttgatt

SEQ ID NO: 116670 - DNA, 339 bp, Arabidopsis thaliana columbia
  unsure (1)..(339): unsure at all n locations
gaaaaccggntacgcctagcaagtacccggaccggtaataccctcgtgtctaccgagcacggtggcgcaagattaaaaacatacaacccacagggccacaacccatcgtccactcgccatcagcattcatcacgaccccaacaaaggttagaattcctccccactaactaccatcaagagtacctcaaaatacatataaaagttacgattcgggtccaaacataggaaatccttgtacaccgtataaaactatacaattttatttttctaacaaaacagaagtgctcaaaataacacccccaaagaaagaacactattccctatcactaaaaaaccaac

SEQ ID NO: 116671 - DNA, 481 bp, Arabidopsis thaliana columbia
ccgtggcaggtaccagggcgcgggaattccgcggagtcgacccacggcgtgcagaccacgctggccagagcaatccataactagtgtaagattgagcgataggggaccaacagaagagtcactcgagcaggtgacgcggatgcgtggcatacttgtgccttgtatccatcgacggcatatgattcgaatagagtctacggatgattttttcataggtgggcgtgacagattgagcgtagacgccgagcacagggtgcgagtgaggcgtcagcggccacggacaggctaaccgtcacgcggacacacggctacacaggcacgtgcgcatggcagactggcgcatatgaaggggagaggatcagtttgtcgacgagtacgacgaatgaagagtgccacaggcgttcgcgcgagtacgtgaactaggcgagtcactccgatgggtacaaggatgagaagacggaagaacgaaagatgagtggaa

SEQ ID NO: 116672 - DNA, 519 bp, Arabidopsis thaliana columbia
  unsure (1)..(519): unsure at all n locations
nnnnnnnnnnnnnnnnnnnnnnnnnnnnnnnnnnnnnnnnnnnnnnnnnnnnnnnnnnnnnnnnnnnnnnnnnncttgtgttttttttttttttttttggacaaacgaagcattattctaaagatcttttagtttcgtacacaaaaacaaaaaaaagagaatcatcaacggatataataatttacacatcgactaataataaatctttcaaagccatctcttaacggcttaagtacacaaaatgttaaacgcctcagtgcacagtttctttctaagcttcttgttggattgcacgtctgagcctaagtccattatcaacatctccctctggtcctatcaagacaccatctcctgcatcctcactactttggttttggttttgattagctaaagcaggttccccaaaggtatgcagtctgcgaccaatgagataacggtcattacggatagagttgtgaaggtttctaaaccagacatggcatcctttttgcacagaagcagaaaaggctcactgaaaga

SEQ ID NO: 116673 - DNA, 510 bp, Arabidopsis thaliana columbia
actatagaagagtctatgacgtcgcctgcacgcgtacgtaagcttggatcctctagagcggccgcccttttgtttttttttttgttgaaaaatatgaataaattacagaaatacttctacaaatagaagaaacgatgaatacagatctcactgattacacacgaagccctcgtattcacttattcttctaccctcacaccccttaacactccctcatgaacatagactctatggggatactaataaatatgaatgatcaaacccaattatgaaatacatattttaaaaagactgataaaaaaaaggaaaaaaggaaaaccagaaagaaggaataaaaagactatctgtatactaagttctgacagctttaagtaaagttccccatgtgagaaaaaacaaaggatcatcaagtggcaactatatgaaggagggcaaacgaccctatagggagatgactgtgtgtgttggatgagctgttttgacccgtttttgcacatgaagattctgctg

SEQ ID NO: 116674 - DNA, 469 bp, Arabidopsis thaliana columbia
  unsure (1)..(469): unsure at all n locations
gcacgcgtacgtaagcttggatcctatagagcggtcgtgcttggggggtgttttatgtttggaccaaagcgtaacagtttgtaaaattagttagtggtaattggagtaatggcattataagacttgttcgtaagactcgtgtgtaggatataggttctgtacttggatttgaacagacggtactcgcgggacggttggagtttttttttttaggtgaggtagaaccgtagttagaggaaattagcattgatatgtagggagataggttgttactctttttacgagaagtcagataggtgcgagattttgngtgaaggacgcgtatgaagatgacacgttgtgaagcggcagaatactgttatacggactagtggcgagtcgtgatatgtagatagaagttcctgtggagtgagaatagctgtaagtgcagttagagcagagggaatcgagggtatgaaagaaatagatg

SEQ ID NO: 116675 - DNA, 517 bp, Arabidopsis thaliana columbia
  unsure (1)..(517): unsure at all n locations
nnnnnnnnnnnnnnnnnnnnnnnnnnnnnnnnnnnnnnnnnnnnnnnnnnnnnnnnnnnnnnnnnnnnnnnnncttggggtttttttttttttttttttttttttttttttttttttttttttttttttttttttttttttttttttttttttttttggagaaaagcttattggaattttcccgaaccggaaaaatttttcaagaacctggaaacccctcccccccggtaaaagctaaaaagcaccccagggggggggaattaagggggtctaacaaaccccaaggggggggggcaaataaaagattggcccttttgcccaaatgggccaaacagaaccttacccggggggggaaaaaaaaaaatttttttaccttatttttaggctactttcccctctggggtaaaggggggttgcgtctaagggggggggtggttagccctccctaaacggggggaaagttggggggaaaagggtttgcaaaaagggtgggcccctttcttttgggggggaggtt

SEQ ID NO: 116676 - DNA, 521 bp, Arabidopsis thaliana columbia
actatagaagactatgacgtcgcacgcacgcgtacgtaagcttggatcctctagagcggccgccctttgggttttttttttttttttttttttttttttttttttttttttttttttttttttttttttttttttgggagcaacagtttttgcggattggaaatgaaaaaaaacccccaaagaagtttcatgggtcttaaagccctcgaactgggaccgctcaaacaaaaaaaaatttgggggaaaaacaaaaagcgggtttatggagccctgaagccatcaagggggggggaaaaaggggggaaggggcgatcccccttagaggttaagcctcttgggacaaaaagtggggtgctccggggggtattaagggcctcttcccaaaaagggaagggcggagaaaaaaaaaactacctttccgtggaaccctggggcccggggggcgataaggaactccacaacgggagggggggaaaaaggagggtatctcgggtggaatggaatatgctgccgggggaaag

SEQ ID NO: 116677 - DNA, 494 bp, Arabidopsis thaliana columbia
ctatagaagagttatgacgtcgcctgcacgcgtacgtaagcttggatcctctagagcggccgcccttttttttttttttttttttttttttttcgggaaaaaaattcactacaagaacaaaccagtcgaggatcagacaaacgagaaaaagctaggtacggtttaagacattttcttacaacacaattaaagagaggaaaaaacgaagcaggacgattctttaaacaggatttatagaagcaagcttacggcttaataataacacagcgtgtgtttgtcttacttgatgtattgagaaacccatttgaaaccttctccgtaacccattttcctgacaatgctgcacatgaaaacctccaatggcctaacgttcgaatccgttagattcactttaccctttcctgtaatgaagttggagaggccgaaatggtaacggagctcgtcctctgatgcagcatacggtatgtctatcttgtttcctagaatgaggaatg

SEQ ID NO: 116678 - DNA, 463 bp, Arabidopsis thaliana columbia
ggggaaagcaacgtgacgccctcgtcacagtgaccgcggccgcgagtattccggtgtcgacccacagggcgcggcgccacacgctgcgcagcgagactcgtgcgtcactactctgggcggcgcgagcgcgagtggccatattgttctcccagacacctataagattgagcgggtgcatgtctggattccatggggggagagcagtagaaacaatttgaatgagaccagacccatggggggaggcgtaccatacgatctttattcacacggagcgagggaggctgtctagtactagagcatgtttcacctatacaagagaagattagaagaatagggaatctctgctaaggtaagtgaggaagggaagagtagggctttacctggggtcggaggcttgtttgaatgtcggaacattgtggtgagcctatacccattcatgcgtgcagagacaggggcgcgtgga

SEQ ID NO: 116679 - DNA, 530 bp, Arabidopsis thaliana columbia
  unsure (1)..(530): unsure at all n locations
nnnnnnnnnnnnnnnnnnnnnnnnnnnnnnnnnnnnnnnnnnnnnnnnnnnnnnnnnnnnnnnnnnnnnnnnncttgagtgtttgttttttttttttttttttttttttttttttttttttttttttttttttgggaaaggcaaaactttacctattaaacttaaaaatagataatagcttacccaaaaaagtttcctgtctttttaaaccttattggctttcactatcctttaaaacagcgggaactcaaaaagatctccgatggctttacattcaaaatacctatttttcccctcaggaaaaagcccttccggggcccctttggcataaatttttgggcactcaggggggttgggcccacgggtgaaagcccaatttaatcctttaaaaaaaggagggcttttaaactttgcagatccttgttttgaaccaaaacaatttttggggaccgtcaccaggagccttttgataaactccttttgcctggaagtctacaacggggtctttaaggaaaatttgaggggttgtg

SEQ ID NO: 116680 - DNA, 543 bp, Arabidopsis thaliana columbia
  unsure (1)..(543): unsure at all n locations
nnnnnnnnnnnnnnnnnnnnnnnnnnnnnnnnnnnnnnnnnnnnnnnnnnnnnnnnnnnnnnnnnctttggggtttttttttttttttttttttttttttttttttctttgggagacaaacttgtccatattaaaaaaaaaggtatttcggtggtaacagttttttttttttttttttaaaagtccaacataacgggaaggcccaaagaaatggaatcctctatcccaaattgcagggccttttattggttcaaatgaaactgggacttaagggggggccataaggcgggatggacctgcctatacccaattgtgtcatgatggtaccaatgtgttgggagaaccgaaacttgttggagtcccccggaagcttgttagggtgtcttcgtgggtagaactgcgacattttgaagtgggagcgggggagtggttccgcacgatcgagcgaggggtttgtgtgccggggggggaaatagggctcggcgttgtggaacgggcggggccgcagggtggagttgtttagctgcgggtggggtcgggggg

SEQ ID NO: 116681 - DNA, 529 bp, Arabidopsis thaliana columbia
ctacaatacgactcactttagggaaagctcactcgcctgcaggtaccggtccggaattcccgggtcgacccacgcgtccgcccacgcgtccggtttacttgacctagacgcagccgtttgtctatgtaccaccattaagctcaaacttctcaacatcgaccttgttctccccattgctcttgagcttcttctcgactgtggaaaaactccaccatctgacttcaaatgtcccgcttaatcgatgtagaacgttgagagtctctggacgactccaaaagtttcgtttcttcaagaaatttgttagtctcatgatctatttggtaatgggaggttaatgtgcatatgtgcgacctttaattacatgtttcatttgatgcaataaaaggcgttgtaattggggtttgagatcgaatgtcgtttgggctttcttggtatgttgtgtttttaagaagaagaaagaaagactggtaaacgatataactttctttttaatattgaacaagttgtgataaaaaaaaaaaaaaaaaaa

SEQ ID NO: 116682 - DNA, 526 bp, Arabidopsis thaliana columbia
  unsure (1)..(526): unsure at all n locations
nnnnnnnnnnnnnnnnnnnnnnnnnnnnnnnnnnnnnnnnnnnnnnnnnnnnnnnnnnnnnnnnctttgggtttttttttttttttttttggagcttaacacattaagcttcattatctccatatggttataacttggtagttaaaaaaataagcacaaattaataatagtaaatactttttcttggagagacccatattcattttaaaaattaagaaaaaggaccctcgtctggctcagttcaagggtttgcttttgagtttgctccgaggcttcaaatcaaccaccaccacactgtatgttggctttgcttcctctctggatagccggctttgacaaatactgagccggggacatgggcggagaatctttccctttctttttccggtcatgcgggaagaacgatgcatccccagggcaccgatttttttttgtgccaaaagaaaatccgtttcctttgccatctaaacgcctgttgaatacgtcattactatggaagaccccggtacttgggcaaatttagaca

SEQ ID NO: 116683 - DNA, 491 bp, Arabidopsis thaliana columbia
cacgcgtacgtaagcttggatcctctagagcggccgccctttggtttttgctttttattattagtaccggcgaaaagattcacgtagtgggacaaaccacacgaggtacagcctgacgaaaaaaggttagaagcaggttgacgacattttcgttacgtacgaagttgaacgagaggcaagaacgaaccaggaggattttttttttgggggggatgagaccaggcttgcggctaaaaaagaacccatgagggagaagtgcgcactgagaaagaagcggaaaaacctgtgttgaaccttctcacggagaggactggtcgtaacagagggtagggatggaagagcggcgaggggccttaggtgggccatggggatgaggacggacataaaagcgttgcgtgtattggaagtttaggagggccgcggctcggcgtcagttgcacggctggtgggagatggtgccaggtgcgcaaggcgggcgcgctgaagtgtgg

SEQ ID NO: 116684 - DNA, 518 bp, Arabidopsis thaliana columbia
atacgactcactttagggaaagcacgtacgcctgcaggtaccggtccggaattcccggttcgacccacgcgtccggatctctctctctctctctctctagaccggataatatcggaacatagatggctcgaggatctgagttaatcatgtacatgatcgattgattctatggcattgctctctgtagtagggctaagtcatacagaggcctagatcttgtttttgggacgggggaatgatggtaaaaccactctgctagacatgtcggaagacgagagattggtacagtatcaggctacacaggatccaacttctgaacaactcatcattgggaacatgaagcgtaaagcttttgatttcgtggtgctcatcagattactcgcaatgtactgtaagattactcttgcctaaggcgggatgctgaggggctaatctaggccagtgcttacaacaaacgatatatgttctaaactcatgagcaggaacttgatcccctttctcttaagactaatgacgta

SEQ ID NO: 116685 - DNA, 518 bp, Arabidopsis thaliana columbia
  unsure (1)..(518): unsure at all n locations
ggtnnnnnnnnnnnnnnnnnnnnnnnnnnnnnnnnnnnnnnnnnnnnnnnnnnnnnnnnnnnnnnnnnnnctttgggttgtttttttttttttttttttttttttttttttttttttttttttaacccctacaggcgtggtcttaaatcatatttaagatatccgaggcctaattacaaacggacagttcctatctttagaggcttttaaccatgaccaaagggttttttgtaaagacagtcttttttgtggcttgatttgaaaaaaattttggtgggttaggcgttaaatagggtagctaaaagatttttgccgaacttcggggggaactgggcttacaaaaactgggaataagctttggaatatgagggaagattgtaagaatggcttaccacggggccaaaaaaagaaataaaagccttatgtgaaccaaaaaagggtgtggttagaaaagtgtggagaaacaatagaaaagcgttctaagccagaaaattaggggactttgggctgtggggtgt

SEQ ID NO: 116686 - DNA, 530 bp, Arabidopsis thaliana columbia
  unsure (1)..(530): unsure at all n locations
nnnnnnnnnnnnnnnnnnnnnnnnnnnnnnnnnnnnnnnnnnnnnnnnnnnnnnnnnnnnnnnnnnnnnnnnncttttggtttttttttttttttttttttttttttttttttttttttttttttttttttttttttttttttttaaggaaaaaactaaaatcatttccctttctttacccaaaacttttttatacattggaaacgggttaaggtaaaaaaaaaaccaaataaaaagggggggttaaacttaattcccccttttttttccaaaaatttcacagggaaaaaaaaaacccttaccaagggggaaagtaatttaaaaagggccctttcgctggtggaaaatcttgggaagcctaaaatccccaaccttgagccggctcccattttcggggtgtagcgaaaacccgcccccaccgccccatttttgtgggggttgccccgggttcggggggcctcttaacggcgaggccgaaaacccttcttgaaacccgaacccaagtgggtggcaaaacttttggaaatttc

SEQ ID NO: 116687 - DNA, 539 bp, Arabidopsis thaliana columbia
  unsure (1)..(539): unsure at all n locations
atgatcctgccagctacnnnnnnnnnnnnnnnnnnnnnnnnnnnnnnnnnnnnnnnnnnnnnnnnnnnnnnnnnnnnnnnnnccacgcgtccgcccacgcgtccgttcttctccaagaacctctctctctttctgcttctctatattttaacactttcttccgaatttgcccctcaagttttattttaattgctaaaatggctggaaccctagttaactccgccgggagattctcaccgggaaattgtattcttcctcaacagagaacagccagattctacagcggaaccgcgagatttcccaccggagctccgtcgtttaaggcttcagctcagacgcttaacgccgagccagctgtaacggaatccgttcgtcggagagtttctagcctctacgaattactgaaagtgaatgaaacggcgtccttgacggagatcaagacggcgtaccggagcttagctaaagtatatcatgcagatgcgtcggaatcggacgggcgagattttatggagattcacaaagcttacgcgacacttgcg

SEQ ID NO: 116688 - DNA, 538 bp, Arabidopsis thaliana columbia
  unsure (1)..(538): unsure at all n locations
nnnnnnnnnnnnnnnnnnnnnnnnnnnnnnnnnnnnnnnnnnnnnnnnnnnnnnnnnnnnnnnnnnnnnnnnnnnnnnnnnnccacgcgtccgcccacgcgtccgtgaggcctctgctctgcattgctgtctgcgagcttgtgggaggcgacgaggctactgccatgtcagctgcttgcgcggtcgagatgatccacacaagctctctcattcatgacgatcttccgtgcatggacaatgccgacctccgtagaggcaagcccaccaatcacaaggtatttggagaagacatggcggttttggccggtgatgcgcttcttgctttggcgtttgagcacatgacggttgtgtcgagtgggttggtcgcttccgagaggatgatccgggcagtggttgagctggcaagggccatagggacaaaagggttagtggcagggcaagtggttgacctaagcagcgaaagattgaatccacacgacgttggattggagcgtctagagttcatccacctncacanaacggcggcgttgttggaggc

SEQ ID NO: 116689 - DNA, 465 bp, Arabidopsis thaliana columbia
actatagaagagctatgacgtcgcatcgcacgcgtacgtaagcttggatcctctagagcaggccgccctttgggggttttttttttttttttgcgaccctggtgttcagtttgggtggctgagtggcgtggccaaaaaaaagaagaagaggggagagcttgtggggaaaaaaaacaaaaacagggggactgttggggaaaacgcaacaataacctgtggcggggtaatttggaacgggaggtaatcccccgccggggcgaaaagagaaaacatagtcttcgcggtttgaaaaagagcggcgactcctgttggaagtgggacaaaacatggatagaaggtgggtggggctcgttaaacacgatggatgcgtggggggcctccgccgcaggaaagggcccaaaaaggagcgcggatacctatcgtggcccggctagaaggagctttccatcgtgtgggggcggttaa

SEQ ID NO: 116690 - DNA, 516 bp, Arabidopsis thaliana columbia
  unsure (1)..(516): unsure at all n locations
nnnnnnnnnnnnnnnnnnnnnnnnnnnnnnnnnnnnnnnnnnnnnnnnnnnnnnnnnnnnnnnnnctttggggttttttttttttttttttttttttttttttttttttttttttaaaaaaaacaaagttctttaatcataaaagattacagattgaaaatgctcttttgtaatattcaaaagagatcagaatttttcaattaaagaataatttgacaaattttttttttctcacccccaaagaacaaaacaaattgacaacacctttttttttcatttctatatctacaacacatttttgcaaaaataacaattctcggaacaaaataaaactttctttttcttttcatttttcatcatccaaggaacccgatgaaggagttttttagagggaaaacaatatcctctcttacctctttctgagcccgggggaattaaaccttttttacacaacccatccccgggcaattgaatcacagggggtctaaccacagatttcagaattagaccgccttt

SEQ ID NO: 116691 - DNA, 497 bp, Arabidopsis thaliana columbia
  unsure (1)..(497): unsure at all n locations
ctatangaagactatgacgtcgcatgcacgcgtacgtaagcttggatcctctagagcggccgccctttgggttttttttttttttttttttttttttttttttttttttttttttttttttttttaaaaaaaagcattgggggtcctttttacttggctcacttacccttatgcataaaagcttttcaatcacccctttaaaggatccaccaaatttaacccctttgatccctaaaaagaaggggggaaattccctaagggtccatgcggggacgttgtcgtcgttaaaaaagttgctcattttgtcgtccccacggggggggacgggaatgttcccgggacggtcactaagggtggacccatggcgaatagagttgtacctctccctaaacccggggggggtatttttgaaataatggccaaaggaagggaaattccgagggctttccgggtagggccaaaacttgggtctgttaccggttcttttcaccggcttg

SEQ ID NO: 116692 - DNA, 514 bp, Arabidopsis thaliana columbia
  unsure (1)..(514): unsure at all n locations
nnnnnnnnnnnnnnnnnnnnnnnnnnnnnnnnnnnnnnnnnnnnnnnnnnnnnnnnnnnnnnnnctttggtttttttttttttttttttttttttttttttttttttttttttttttttttttttttaaaaaaacaaaatttgtttcctaaaggaaaatccgttgggtcattccatggggaacaaacttttacaaaagccttccttttcaaaaaaagctgtttccaggtggggggttttacataacatacccaacttatcacacaattttaaataaaatcaaaaaagtgggttcttgaaaacttttaagaaaaacgagggggaagatgacagatcccttgtgaacggtgtgtactttttaacaaaaaaacccccgggaatttatcaagttgggggaggagtcgttggggctcgacctttttggttaagggtggtttccagaaatttttggctgcccaaatgggaagtttttttatttcttttgagcggcccctggggaggaatattttgttttt

SEQ ID NO: 116693 - DNA, 516 bp, Arabidopsis thaliana columbia
  unsure (1)..(516): unsure at all n locations
nnnnnnnnnnnnnnnnnnnnnnnnnnnnnnnnnnnnnnnnnnnnnnnnnnnnnnnnnnnnnnnnnnnnnnnnnnctttttttttttttttggacgagccatctgttcttaccatatacacagtcttgtgggatacatcagggcggttgtagtaccaaggttatatatcagatgatttacctactctgcacccgcaattaacgagaccatctcaatggatacgtcacagtagctcatgttgggtgagctgcccaaaatcctgcatgcttacagacttgaatccgaatctcagacaacgctttgcttttgttcacctcttgtttgatgagaggacagacacggtgtgctgagcacctagacgggagatgcgccgcctgataatggatggattttatgttatgattgaatcgtgtgaaccagttctcgtaccacaatacgggtgactgaccgaacttttccctacgtatcaaggacctagctgtcgcctgagcaaccacttgcaactctgaagggctcg

SEQ ID NO: 116694 - DNA, 461 bp, Arabidopsis thaliana columbia
  unsure (1)..(461): unsure at all n locations
atgatcttnnnnnnnnnnnnnnnnnnnnnnnnnnnnnnnnnnnnnnnnnnnnnnnnnnnnnnnnnnnnnnnnnnnnnnnnnnccacgcgtccggagtagattctacaccacatcatgtcctactgacagaagcatttgtgctccacagatagcactatctgaatacagggtattacattgctgccttgtagctggttgaaatatctgaagggcgctatggggatggtgtagtacattaggcgacgcctgccagtgtggtccacctgatgttaacaacgcttttatgcatgacacttgtggagagtggcaagaatagggaacatctacatacaacatagaattgacctttacttgacctagaagggacacatcntgttaataacacttctatagtggaacacctcgttagggctccttcactgacacgaaactgactggcacatatcgtgtgatactacatg

SEQ ID NO: 116695 - DNA, 542 bp, Arabidopsis thaliana columbia
cacgcgcacgtaagctggagatcctaaaaagcggacgccctaggggtgaccccacgcaaaacgaacaacgcccgccaaagcaagacgaaaacaaacgaaccaccccaaacaagaggggcgagggcgccagccgagtacagacgagcaagaaagaacccacggaaggaaaaagggcgcccacagagaaaaccacggagccgggacttttttcacggggagaagacgacaagaaaagacacacatcaggaacagaccggagccactcaggacgcggagcgaacgaggccaccagcgacacgcttagacctacgccagagacggacgtcggacacgaagcgaaacagccgagacgacagaggcagaaagaaaaaagcaaagcgcacagcacggacaagaaaaagccaagacgactgagaagaaggacacccacacgaccatccaagacaacagaagacaacaaagagaaaggaacgagtcaacacaccaccggggacaacaaagacaggagcgacaaaaccgacgacaaataaaagccggaggac

SEQ ID NO: 116696 - DNA, 527 bp, Arabidopsis thaliana columbia
  unsure (1)..(527): unsure at all n locations
nnnnnnnnnnnnnnnnnnnnnnnnnnnnnnnnnnnnnnnnnnnnnnnnnnnnnnnnnnnnnnnnnnnnnnnnnncttggggttttttttttttttttttttttttttttttccctacacaatttatatacaacacaaccattttttaatctacaaaacacaaaaatctgaaatctcagggcaaatactgtggcaaacactctttcagtttttgcaacgttacaggtttcaaaataaacgaggccataccattggcataacattcttctgaactctctgctaaatgatttgccggcatcggaattataggcagccggttggggggacgcatacaaactttgttcattctccgaggtcgatatatctactccggcttctatggcagagttccagttcccagtttttttatacgaacggatcagtctgtgggctttttaaacccttggagcaccggcttgcacccatgcttgagttccatgatcgtagctaggagctttaatcgggggtttggggtgaaacttctttttt

SEQ ID NO: 116697 - DNA, 510 bp, Arabidopsis thaliana columbia
  unsure (1)..(510): unsure at all n locations
nnnnnnnnnnnnnnnnnnnnnnnnnnnnnnnnnnnnnnnnnnnnnnnnnnnnnnnnnnnnnnnnnnnnnnnnnnnctttggtttttttttttttttttttttttttttttttttttttttttttttttttttttttttttttttttttttttggaaaaaaaaaaacaaaggggtttcaatttcaaaaagctttaacaaaaaaaagctcctgaaaccctacaaaaagaagggtcttaagaaacatttttcctttgggggccataataaacaaaacccaacccaaacttttacttttctttacaaaaaaataaagggggggacttttcccctggaacttttttcctttatttttggcaaaaggggggcctttaccccgggggggcctctaaaaaaaaaacaccggggggctttccctctcgacctttggttaaaaagaggaagggtttcttttacctcgggtgggggaaggggggggtttccctggggtaagggcttggtggaacctggggt

SEQ ID NO: 116698 - DNA, 530 bp, Arabidopsis thaliana columbia
  unsure (1)..(530): unsure at all n locations
atgatcctgccagctcnnnnnnnnnnnnnnnnnnnnnnnnnnnnnnnnnnnnnnnnnnnnnnnnnnnnnnnnnnnnnnnnnnnccacgcgtccgcccacgcgtccgaaaacgagttactatatggtgaatcattccctatttcagaagaagcccttgattcaagtttctgtcttcccataggcaaagccaagattgaacgagaaggaaaggacgtaacgatagtaactttctcgaagatggtcggtttcgccctcaaggcagctgagaagctcgcagaagagggaataagtgctgaggtaataaatcttcgatcaatccgtccgcttgaccgagccaccatcaatgcttcagtgaggaaaacgagtagattggtaacagttgaagaaggtttcccacaacatggagtctgtgcagaaatttgtgcgtcggttgtagaagagagcttttcgtacttggatgcaccggtcgagaggattgcaggagctgatgttccaatgccgtatgcagctaacctagagagattggctct

SEQ ID NO: 116699 - DNA, 523 bp, Arabidopsis thaliana columbia
  unsure (1)..(523): unsure at all n locations
nnnnnnnnnnnnnnnnnnnnnnnnnnnnnnnnnnnnnnnnnnnnnnnnnnnnnnnnnnnnnnnnnctttggggtttttttttttttttttttttttttttgggatagtaataaattacatataggcatcatcattatccatatcgcaccacatttggaacattaaattctctctattattcagagagattatcacagcgaagaaaaacacaaaggctcattttattcttctgaataataggagatctttctttcttttcgacaacatcattcaaagtttgggttttctaaaagataggaccagcggcgagaatctcctgcggaagcttaccatccacaccaatcttatgggtagcaaaaacctcgaaggttttcttgaacagacctgccattttcaccggaatatctgggggggccttcttatcagaccgagaggggagcgggggccaatatccgttgagagatccctgggaccccgcggggggtggaaatgccaggatgggggggtcttggatttcgcttaa

SEQ ID NO: 116700 - DNA, 426 bp, Arabidopsis thaliana columbia
gggcggggcgttgcgcagtggagttgggggtcacgggaaccggttttagtcttagagggggtgttgttctcaggacgatgtacgtcgctatgtaatatagaatattttgatttatacttgtagggtggaggcgagggaatgcatagagagagtgattccttgcttattttggagtggcgtcgagacatgtaaaaactcaaaaaaaagaggtgtgacgagcactattcgggagtgcacggtgctaggtatggtcagcgcgccgcgagggctaggcgaacggttgatgaagcctaccgtcttgtgacgcgcgcgacgcttaagtactttacgtatatgggtgtcggtcatgaagcacgtgagttggcagaggtttactatatgctggttgactaatattggggaagtgtagttattgaagagatgatt

SEQ ID NO: 116701 - DNA, 592 bp, Arabidopsis thaliana columbia
acgactcactttagggaaagcacgtacgcctgcaggtaccggtccggaattcccgggtcgacccacgcgtgcggggatattccttaagcatggtatgagatggtagattatttgtcgtagatgtgtggtcgttgctttgcttctagccgatcgtctgcgggataacgacggaggctggaggaagagtctcgctcttttaggtacgctgtctcggcggaccaggggcgtacttttttttgtgtcaggggcaggaaagtcatgtcagatacctacggagcagaacacgaactagcatcgattttggagtagaagttgtatatgtggtacgaatgagatgcctagaaacacctgcgaggccattgggagcgtgcaattggacgcgtgtcggtatgcctgtgattctagttcgatatgaagtttgagttgcatctctttcgctgtttcagggcgcgctcactatcgcttggtgattctagtttcgtggggatactcttgtcattcgccaatatgtgcattgcatgtagcagttgaagatacgcttatgtccgagagttgggtcgtcattgtaggtgcgttgataaatgaggaaagg

SEQ ID NO: 116702 - DNA, 506 bp, Arabidopsis thaliana columbia
  unsure (1)..(506): unsure at all n locations
nnnnnnnnnnnnnnnnnnnnnnnnnnnnnnnnnnnnnnnnnnnnnnnnnnnnnnnnnnnnnnnnnncttttttttttttttttttttttttttttttttacaaataaactctatttttttcccttctaaggttacaaccggaacaatcaaatggtttccactgcaggagaatgacctggacatataaaagaaatggacaaagcctatacttcccttgtacttggaaaataaagagaaagaatgggaagaacattcttctgaggaccataaaaaaacaaatgctatcacacgtgtttggacaatctattaggtagacttccaatctatgggggtaccaaaatccaaccgatttcgccaccgcctttttgggacaacaggagaacattagggacccggtgttttgtctttcgggttgacaagagcaaacccagaggtggtgaccataccgttcttttttgaaaacaagaaaacactgacagctttccgccttttgtttaaaaaccaaa

SEQ ID NO: 116703 - DNA, 413 bp, Arabidopsis thaliana columbia
aaattttatgacgtggaacgcacacgtacgtaaggcttgaatcctaatagagcggccgaccttggggtgtatttatttttctcggagaaagtaaggaaatgaggagtgataaagtgtgggtgaatgtatactacacatgctaagtgtagagtctagtatgaggtgaagtcgtagtgaggtttatataaggagctcaacggagcgtatctaaaacgacaagactccgacttttttcctcgatgttggagtggactaagagtctctctgggggtctatattaagtagatgatgactacgatgctgtattgattaatagtacagcgatcgatacacgactgatacactatggtttgttgagtgttcgggtggtagatgttcgaggagttattcgcaggttagcagtattaagatat

SEQ ID NO: 116704 - DNA, 286 bp, Arabidopsis thaliana columbia
acgactaacttgagggaaagaacctacgcctgcaggtaccggaccggaatttctggttcgacccaggcggggcggcgtcgttagagagtatcgctggtaggaaggttttattaactgtggattaccaagtcacctgtccggatcacaaagacctaagaagttggtaacgttgtgacgtgctgaatttaaaagtaggtgcagtatcgaagagataaaaggattattttttagacgaagggtaggacagactataaagcgggagaaaatcgtctgaagtcagatagac

SEQ ID NO: 116705 - DNA, 524 bp, Arabidopsis thaliana columbia
  unsure (1)..(524): unsure at all n locations
nnnnnnnnnnnnnnnnnnnnnnnnnnnnnnnnnnnnnnnnnnnnnnnnnnnnnnnnnnnnnnnnnnnnnnnnnnnnnnnnnnnccacgcgtccggagtaattaggttttttttttttttatctcatggccggcgccggaatccacccataccaccagcagtggccgccggcaggtgcgccgcctcctccagccgcagtatcatcagctgctccaccacatccgccgcccattcatcaccatcctcctcctcctcctgttttagttgacaaccataatcgtcctccttatgacgagctgcggacaatcttcatcgcagggcttcccgatgatgtaaaagagagagagcttttgaatctcttgagatggttgcctggttacgaggcttctcaggtgaacttcaagggagaaaagcccatggggtttgctcttttctccacagctcagtttgcaatggcagccaaagatacccttcagcatatggtgtttgatgctgagtcaaagtctgtgatacatacagagatgg

SEQ ID NO: 116706 - DNA, 523 bp, Arabidopsis thaliana columbia
  unsure (1)..(523): unsure at all n locations
nnnnnnnnnnnnnnnnnnnnnnnnnnnnnnnnnnnnnnnnnnnnnnnnnnnnnnnnnnnnnnnnnnnnnnnnnnnnnnnnnnnccacgcgtccgcggacgcgtggggacaagtttaagatgtttgaactcgaaaatcagatggaggagaaaaggatgattcttaagtcattggaagatctggattcgttacgtaaaaggtttgatgctgcagaacaagttgaggacgcattgacaggcttgaaggtgctcgagtttgacggaaactttattaggctccaactgcgaacatatattcaaaaactagacggttttcttggacagcacaaatttgaccacattactgagccatctgaattgatccatgaattgctaatataccttaaggataaaactacagagataacaaaatttgagatgtttccaaatgatatatacataggagacatcatcgaggcagctgattctttcaggcaggtaaggttacacttgcagtgctagacacaagatcttcagtccagtggg

SEQ ID NO: 116707 - DNA, 495 bp, Arabidopsis thaliana columbia
  unsure (1)..(495): unsure at all n locations
acnnnnnnnnnnnnnnnnnnnnnnnnnnnnnnnnnnnnnnnnnnnnnnnnnnnnnnnnnnnnnnnnctttttttttttttttttaaaaatatccagggatcagattataaccgtccgatgcaaaacattacggtacgcttgaccacagagcatagctgtctcacgtgctcacgcaatcataccaaatattaaaagtcaaaaaagcccaatagcagctgcaactaccaccagaagcggtcgagggtaatatagtcattacacaaaaagttctcacctccccaacgcgtagcctcttaactaaaaccaaatcaaaatacctttccccaattttggctcattaccaaaaaaaaaaaaaaaatagttgtaaatagagagaaaaataaggcggggaaaaggatcacgattcacaaaattagtggaaaaatcataagtgtttcgtcttcttcatcggaggttcgttttttttttctaattgttcttctctctcgatcttct

SEQ ID NO: 116708 - DNA, 477 bp, Arabidopsis thaliana columbia
acatgcacgcgtacgtaagcttggatcctctagagctgccgccctttgttaatccttttttttcttaagaacctacaccatgcaataacgtaaaccactattcaaccaaaaatcgaggagtgatagataacactgaaaactaaataagaaaagcatgaaggaccgaaaagatttaagacgaaatgcgccacatactttttatgagagcgctgcattacatacggcatatgcgtggaagcgacacatatcgacacatcgccaagtaacatgaagcacgacaaaaaaaacgaactggaaacacaagatggaacagcgcccatggggtaaagcaccacactaggtgccgaaggacgaggggagcaaacccggaagccccgggaccgcagcatggagaagactcagatggaccaagagggggagagaaaggaagagtgggcgggaaggaccgaaaccaccggggtcatgaggaaaagggag

SEQ ID NO: 116709 - DNA, 465 bp, Arabidopsis thaliana columbia
ccgacactttaaggcaagacggtacgcctgcaggtaccggtccggaattcccgtgtcgacccacgcgtacgctctcgctatggacagggacaacctcaatctgctcgctatttgatgtgggctaacacggagactctgtcatctcttctctactatatgtcttctccgtagattgcgcgccccacaaaaatgtctcatgagagggagagaggtcataatgatcgggcggaacattctctggtatgccttacgagtccttcatgaccttctcataactggagacaaaaaaatccatgtacggtcgatttgatggaaagaggaacgtgaaccgaattcgcaagcgtaatttactcactaaaggatacttctatcgaggggggtcgctgctaatgatccaacccaacgacacgagcgatgctaagaataactgcttagagggaaccgaaatgcaatcactgggcgcgt

SEQ ID NO: 116710 - DNA, 521 bp, Arabidopsis thaliana columbia
  unsure (1)..(521): unsure at all n locations
cgattgatttaggtactactatagnnagattatgacgtcgactgcacgcgtacgtaagcttggatcctctagagctgccgcccttttttttttttttttttttttttttttttttttttttttttttttttttgggtttcacaaaattttcatttatctatctgtctcaaaggtttttcaacctttttcccctgatataggcaacaaacaaagtctcaaacaaaacaacccaagaatttttatcccaggaaccccccctaattgaacttgtgctttaaccccaatctaaaatctcatttgttcaaatcaccgaactaagaaactcaacccaaatttggtctggtctctttggcgccccaccgggaattgctcaaccggtgtgtcgnccctttgctatgcaccgccttggggaactcttgggaagcccgcgacgcctccttgagaaactttgaccgaactcgcccttaaaaagaaagaacttagaatcaacgcgcaatattatgtggattttaaatttagcc

SEQ ID NO: 116711 - DNA, 502 bp, Arabidopsis thaliana columbia
cactatagaagatctatgacgtcacatgcacgcgtacgtaagcttggatcctctagagctgccgccctttttttttttttttttttttttttttttttttttcttaaaaacttcttcacacatatattaatataaagatatgtttcttaattaggggaattacatagcgtttatgagtaaaacttgtatccttttgcttgaataacgattgtccttatctcttccaattggcgatgggaccatcaagaaaagaccaaacacgatgcatacccagttggcccaccaagacaagctgtatttcttgggtttgtagatggctaaccaaatgacgcaggggaggaagtatgtggttggggcaaacgcgaatccaccaaagaacgccaaaagcccaccgaagaacgggaacgtcataccaacaaacatagttgcagcaacgtagaatttacggacaaagaaccgaagagttggggttggtctgaaatttagcttcttgaccaataaa

SEQ ID NO: 116712 - DNA, 771 bp, Arabidopsis thaliana columbia
  unsure (1)..(771): unsure at all n locations
acagaagaaaaggggaggagaaggggagagatggggcgcccgcggcgtgcgcgcganngactgaaaacggagaagtttaaaagggggaaaaaacggncgacgccnggaaggaaacnagggacacgggaagaaggcagttgagcgggagccagcgcggaaacacccgcaggagnaggagaaaagagagggcgagaggaggcgagaggagggcgaggagaaggaggagaaggaaaacaggagaggaagagagagaggagaggggcgaagnagaggggacaggaaagaagagaagaggaagaggagcgcgaagaggcacgaaggaggagggcgaggggagagacaggaagggaggagcagaagaggaggaggaaggggaaagagaaaattttttaagagagcgggagaggaagggaggaggaagagagagagagcaggagaaggagaagacgagcaagcgggagagaggggagagggaaggaggaaaaggcagaggagagaggagagagagaggagagaaagaagaagagagagaagaggagagagagaagagaagaagatgaaagaaagaaagaaagagagcgcgagaggacgaaggaagaaagagaagaagaagaagataaagagagagaaggagggcacagcgagagacggagagcagaaaggaagagagagcgcaggaacaagagaagagacacgcaaagagaggagaagagagagaaagagaaaggagcggagcgagggagagaggcaggaagcgagagagagaagaag

SEQ ID NO: 116713 - DNA, 495 bp, Arabidopsis thaliana columbia
  unsure (1)..(495): unsure at all n locations
nnnnnnnnnnnnnnnnnnnnnnnnnnnnnnnnnnnnnnnnnnnnnnnnnnnnnnnnnnnnnnnnnnncttttttttttttttttaaaaaatcctatacgcgctagcgcttcacgatactttctattttatgtactccatttcattcacgggatacgcggggtaatactaatctcataagtgaaggagtcgtctgactgaccgattgactgggacaccagaccgctcgtgcccgcccgttcctgcctcgccctaaatggaatggctctcttagttacactgcaccccgacccgagtccccacgtgcgctcttatccgtccggatcctaagaagttggctatgccaacacatcattagggccgtcccctttattttatgctgaccccgcccggcccggggctggctttatgggaagcccgatcgcaccgtgctcatggcccggctggcctgccagcggtagtggcaattatccccttccctgagaaaagacttgaat

SEQ ID NO: 116714 - DNA, 517 bp, Arabidopsis thaliana columbia
  unsure (1)..(517): unsure at all n locations
atgatttgccggcannnnnnnnnnnnnnnnnnnnnnnnnnnnnnnnnnnnnnnnnnnnnnnnnnnnnnnnnnnnnnnnnnccacgcgtccgctttttatgacgcgattggtcaatgaagtgtgagcggtcgcggatattgataggccaaacacttcggacgagcgggaatgagtgccgacaaggtgacttgatgaggtgctacgggcacgctcatttatatttataaagaagtggtcgactgttatgggtctttagctttccgagtactccctgagttgtctggagcttgtgtggggggctgtgccaccataaatgggtcttgaatctgtcgacttaccaggagccacagctgatggctatggatggtgctcacgactactaccaaaaagttacaatgaagatgagtattacacatggtaggtagtgtgcatctcgaatgttacagtgttacttttgtgcgagcgaccacctcagttgatcgtgcgaaccatgcggccctcgcctgctatgtgctta

SEQ ID NO: 116715 - DNA, 502 bp, Arabidopsis thaliana columbia
  unsure (1)..(502): unsure at all n locations
nnnnnnnnnnnnnnnnnnnnnnnnnnnnnnnnnnnnnnnnnnnnnnnnnnnnnnnnnnnnnnnnnnnnnnnnnncttttttttttttttttttgagaagtaaacaatggtactcttattgtctgtttttcttccaagaagttagttcagaaggaagtaattcttcattgcaacttaaaacagctttagacatgagtttcccaagccaagcatgatagagtagtccccttgatccgagccctgaaaatacccagaagttgcaaaactgaccagcacctatgagctgattaacacatcccaagagcggcagtgatccatggcttgtgacaggtggcattgctctcaagcccgcccttgctcccgcaaattcccacttttctatgtctggataaactgcacttgctttcggaagaagctcgttgagagctcttgaagcttcctctgctgggacatccgatgaataatttcttgattgccattcccatgtggatcccatgtgcaga

SEQ ID NO: 116716 - DNA, 481 bp, Arabidopsis thaliana columbia
  unsure (1)..(481): unsure at all n locations
nnnnnnnnnnnnnnnnnnnnnnnnnnnnnnnnnnnnnnnnnnnnnnnnnnnnnnnnnnnnnnnnnnctttttttttttttttttttttttttttttttttttttttttttggtttataaaacccatattcattaaagtttaaaactccggggcaaaaaagcccgcaataggaaacgaactaaaaccccccaagccttttttgggaagaagaaaaaaagtttttttaaaagaaagatctaaaacaaaaagcttgaaattttttaaaaggaaaaaaaaaaccgctagattccctaatcctttttggacaaaaaaaatgtggcataagcccccgctcctttacacttcaagggagatctaggtgatgcacagcccttaccaaccttaggaaaagtttggggcatcacaggtccactcccttttcctaaaaactcaaaagacctctgtgtgcccccttagtcttaaaaaaatacaaaaatccctg

SEQ ID NO: 116717 - DNA, 504 bp, Arabidopsis thaliana columbia
  unsure (1)..(504): unsure at all n locations
atacgactcactagnagggaaagaacggtacgcctgcaggtaccggtccggaattcccgtttcgaccacacgcgtccgcgccgggtacaaattagatggggagaaggaatggtgattagtgggtaaccaggagctcgcggggagaacagtttgcgtgagtatgatggtcttaatcaaggggagggtgagaagcgagtcggagatagggggggccgaggacgcgggtaggggagttttttttttggggggtgggcattgaggaaggtgagcgtggagcgggggggattagaggcggtgtggagatataggagggtgggtggaatcatagccggtggggggtgagtcggaaggtgggctctcggaggggagggagaaaggggcggtcgcagatggagagcgtcgaggggggaaggagagggggaggcggcgacagagtggagtagagcacgccgaagatgtcacaacgccggagctgccaggaatcaggagatgttaagcgaggga

SEQ ID NO: 116718 - DNA, 328 bp, Arabidopsis thaliana columbia
  unsure (1)..(328): unsure at all n locations
gggaaagacgggacgcctgcaggtaccggtccggaattcccttttcgacccacgcgtaacaagcctatcctatatcatctatctgcgctatacatcagcctaggcagcgatcgagagttgagacgcagcgggcaggtggtgagactgatgcagagagcttgaggcgaagctggagagtgtgagagtagtgaagagacagagagcgaagggcaggagtggggtttttttctcgggggaggganacagatgctgagggagaagaacttagggaagagaacaagaaatagagaggagaggaaggaggcgagaggctgaggaggagagagag

SEQ ID NO: 116719 - DNA, 483 bp, Arabidopsis thaliana columbia
  unsure (1)..(483): unsure at all n locations
nnnnnnnnnnnnnnnnnnnnnnnnnnnnnnnnnnnnnnnnnnnnnnnnnnnnnnnnnnnnnnnnnctttttttttttttttttttttttttttttttttttttttttttttaaaaaacttatttatttattggtttaagaaaaaaaaaaaaaaaaaaaaaggggggggcccccctttttttttttttttgaaaaaaattaaccttttaaattgaaaaattggtaatacctggttaaaaaaactttgaatctttatatcaaaagaatggtaaacgttcactgatattttgaaacatggggctaaaaaaaattcaaatacagagttgctttacccataaacattacaaaccccttttttttttttaattttggcacattggttaaactggtgcaaaaccaaaaacaaagtgtcttgctgaagcgaaaaaccccccaatttggagaggggagaaattttttacaaacccccaagacccaataaact

SEQ ID NO: 116720 - DNA, 467 bp, Arabidopsis thaliana columbia
ctgcacgcgtcgtaagcttggatcctctagagctgcgccttttttttcctttttttacttttcattacttgggattctttacacagatatgggatatggaaatgttgctattcgtacaaaatagttaactaagctaagaaacccatttttggggggcctaaagaaagggttacagatttctatcttatattttctcagtcattgggatctatacctttctctgcttcttttaactgatcttcataatcggccaacaagtaatcacaaatctccagtaactgatctgccaaaggtggtattcctgggttacgcccatcgttgtaaagatgagcattgtactttatctgccagacatcgggtctaacctgttctcggtttctgtactctatcttccgtaccttatcttggattgtcaagagatccgtcggggttttccacgaattcaagattatctgggagcttccttc

SEQ ID NO: 116721 - DNA, 300 bp, Arabidopsis thaliana columbia
gcacgcggacgtaagcgagagagcacaggagcttccgcgccggggcgaaaccccagaagaggagagaaagtgaagggagaagagaagaagagaagaagagaaggaggggaagaaaagggcagaccaagagagacacaacggctaagggcgaccgagcccaagcgaggaggtacagcgcggccgaggaatgacgtattggagacccacgagcgagtaacgcttttttttttaggaggaggccaaggcggggagaaaggaaagaacgggatgacacacgccttaacgaatacaggtacacgc

SEQ ID NO: 116722 - DNA, 438 bp, Arabidopsis thaliana columbia
gccgcgtacgtaagctggggacctctagagttttcgcccttttgtaaatccttttgtttagaatatgatggacgaggcgacctctaggccagccaacggaaagagttagaatagagaggggggcgcgggcgagtgttggcacgagggcgtcgggcggcgacgccgcggcggacaagggcgaccgacgcacagagggcgcgtttttttttgaggaataaggcgggcaaggaacgggggaggcaggacagaaggggggaccacaagggcgcgcccgaagcgacgtcgcgaatttgtagacaaagacgcgcggtagcgagggatacccagattatgagctggcggacgaaaggagaagcgaaggcagtagacacgagaagacccaacaccacgcatagaaactgaatacactagaatatccaagaaccacgcccggcagaa

SEQ ID NO: 116723 - DNA, 571 bp, Arabidopsis thaliana columbia
  unsure (1)..(571): unsure at all n locations
atacgattgacggagcacagtggggacagtaaaacaacggttgtttcgagtactacccgacaaagtanagggggaaaacagnacagcctgcaggtacccgggccggagataccttttcgacccacgcgaacgcctcaggactgaataaagaaaataagtcgaacgtattgagggggagtaaacagagaggtgtcaatggaaagagagtcactagaggagtgttagagacgaggagtgagtaagcggcagggggcggtgtcgtgagggaggtttttttttgaacgcgtaaagaacatgagtgggagagtattagctgaaatgtggtgcaagaatggctgttagcggggcagagaatgaagaaggaagcgggtagggagcgtaaaacggatgacccagcctgaatttgtgaagtgcaattaatagaaacgatgatgagatcatgtagagtatgctactagttcgcggatgggtgccgagacttaaaacaccacgagtgatggggaatgtaagcgagaactcagggtcgaagatgaacggtgaagctaggatggggagtaagtggaatacatcg

SEQ ID NO: 116724 - DNA, 408 bp, Arabidopsis thaliana columbia
cgcctgcaggtaccgggccggaattcctttcgaccccgggttggccttgtatgggggtgtaggtgcctgtggggtggagagggtgataggatgtggtgctgtcggggtgtgggggatgggacatagtacgcgggtagcgggaggtgcgcgcaggtggggcggtgtggcgcgggggttttttttttgggggtggacgcctaaggtaggtgggctgtgtgggcaaggcccttgtgtgccgattgtggattacgtgcgtggtgtgtgtggctgtgttgtgtgggtggttgatggtagttcgttttttatgaagagatgtgcagtgtgggattagaacgagtttgttgttgcgcgtgatgcctatccgacagagtgtcatgggatgcaggtaaggagtttgctatgtgttta

SEQ ID NO: 116725 - DNA, 488 bp, Arabidopsis thaliana columbia
  unsure (1)..(488): unsure at all n locations
nnnnnnnnnnnnnnnnnnnnnnnnnnnnnnnnnnnnnnnnnnnnnnnnnnnnnnnnnnnnnnnnnnncttttttttttctttttttttttttttttttttttttttttttttttgtttttttttttttgattttttttttacccccttaagggccttctggctttatacagaaagaaaacggcacccgaaccgcctttgctttaggtaaaaaaacccagttttttgaaaaaaacggagggtttttgtttccgcaattggccttattttttttttttcagtctccaggaggaggggccgttccaaaattttttttcagggggggcggcccaaggggattttttccatacccgtttttatgggtgtaatccccaatgagggggctccttccccacctgttgataaaaaaaaacccaattgtctatttttgcaaaacccctgttggaaaggaaccaacccggggacttttgggcgggccgttaaaaacccc

SEQ ID NO: 116726 - DNA, 492 bp, Arabidopsis thaliana columbia
actatagaagattcttgacgtcaactgcacgcgtacgtaagcttggatcctctagagcgtccgccctttttttttttttttaatataatctcttattctataaaaaatataacctcatcataacaaaaacattaagcgttatagaaattgtaggtccctgaatatatcattacgacaggctacagaatccaatgaaaagtttgttcctttttcttttttggtatcaccttcttcaagagttgaagctttgtgctgaagctttcttgagctcaagagctcgtttataaggcggtgcgatcggaggttgaatcgggtccaaactctggtatgatgatccatctgcttctctagggagtgggtaagaccggtctgagtcataaccggttaagtcaccacatgccaagaatggtatataaactttgttgggtccttcaagccaaccactactgcaatcgagatcgcttccacctgaagggcttccgactttctcca

SEQ ID NO: 116727 - DNA, 503 bp, Arabidopsis thaliana columbia
  unsure (1)..(503): unsure at all n locations
cactatagaagagttatgacgtcacctgcacgcgtacgtaagcttggatcctctagagctgccgccctttttttttttttttgaaaaaggaaaaacacanntccttatcgaaatcanctagtcgaagtcgcattttgtcagataccctattgttttaacttcaaactctaancttccaagttnctataactataagaaaaagaaaacaaaccccaacagctaaaagtatatttaaagaagcaacatttgagatctcaacctctgtgttgttgagcatgaagtgattgtttgggctcagcaccacgcaatgtaccaatccaagctggtggctgcatccctgtctgctcataaaccgtatcaagaaccggtggtaacatcttgtagagtccagcaatatcgttcatcgtagctttaccaccaccgttcatcccctgctcagcaccaccatggttccacacgctgatcttaggctgcaggtccctgatcgcaacagcattggtctt

SEQ ID NO: 116728 - DNA, 314 bp, Arabidopsis thaliana columbia
  unsure (1)..(314): unsure at all n locations
ctaagaccggccgattctttgcaccagggaaacccgaaaggaagaaggaaggggggggggaggggggggaggaggggaagagagaaagaaaggggaaagggggggggagggggnggagagaggggaagggggaggggattttttttgggggagagagcaacagggagggcgggagagaaacgatacgggtgggccgagaaggcaacgagatgaaatgcttatatgaaggttgggcagttaccctctcaaatatgacgaggagtacaaaaattacaacggaagagattcatgagaaggatagaggcatcgattat

SEQ ID NO: 116729 - DNA, 523 bp, Arabidopsis thaliana columbia
gcacgcgtacgtaagctgggatcctctagagctgccgccgttggggaaaaccctgtttgagaagaagagagggcccaagagagaccctgtagggatatgggcccaaacgagacgtgaaggaccacgacaaggagatgtgagcacagcgcgggagggagagcgacggccgcaagagaggaggaagcgcgggccttttctgttttggggagggggagaagacggggagggggaagacccggggaggagcagccacgaggggcgcggggggcagagcggacaggcagggaggggggagggcagggggagaggcggccgggggagagcgagggaggcatgaaaccgggagagcggggaacaggagagggaggagaaagcggggggaggccgaggagcgggggagaggggtggagcggaagggaagggcgggagcgaggcgggcgaagagaagggaggccggggggaagagcacgggagagggggaagaagaggggggcgggcaggcggaagagacaggggcacggga

SEQ ID NO: 116730 - DNA, 486 bp, Arabidopsis thaliana columbia
  unsure (1)..(486): unsure at all n locations
aatacgactcactannagggaaagacggtacgcctgcaggtaccggtccggaattcccttttcgacccacgcgtacgcccacgcatccgtgaggtctctgatgtgcattgcatggtgggaggcttggggaggcgacgaggctacgggcatgtcaggtggttgggcggggagagaggtgcacacgggcggtgtggttgatggacgaagttgcagtgcatttttttttccggaggtggggagaagggagaccgcgcagtgacggggggtgtggggacagaagtggggggggatgagggcgagaaagcggtgagttgctcgggcgggggagagcacataggcggggggaggtggagggagggtgtagggttgcagaggagggtgaaggcgggtgggtgacggagggggaggagagaggggtgccgcgcgggagagtgagggcaggtaggaaggagggtggcggagagggggagggaggatagaggaggg

SEQ ID NO: 116731 - DNA, 476 bp, Arabidopsis thaliana columbia
actatagaagattatgacgtcaactgcacgcgtacgtaagcttggatcctctagagctgccgcccttttttttttctttttttttttttttttttttttttttttttttttggagcatttaaccattacatatatctgtcaactgaaaggttctataacaaatctaaaatagaattccatttgataagaagaacatgaaaacacatttagaaaagtttttttttctttgaatcgaaaatctcaggaaaaaaaatttatcaaaccgccggataagggctgctgctatgccatcctttagtgcaagggggtatttccatgaactcgtcaaactccttcacgtgaacatcgcaacatttccaccctttcagtctgtcggggaaaaccccaagacctggaggatggtacatgcaagccaaagattcgctttctctttgaatggtgggccaaatcctttgtttttgcaaacttgggggtga

SEQ ID NO: 116732 - DNA, 562 bp, Arabidopsis thaliana columbia
gactaatttaggggaagaacgtacgcctgcaggtaccggtccggaattcccggtttcgacccacgcgtccgcccaggcatacaagattagttagcgagaatggtgagtgggaggtatggtaggagcggtgtggagaggggataaaaattgtggaagtgtttattgggaggggggggaggaggtgggttatgaggagagagcgggagggtggagagaattttttttatcggggggggtaacgggagagagaaggaggaggtgagggagggaaggtggcgtatgagagagtggaatagaggggcggaggtgcgcgagtgagagaggagcacaatgggatataggagggatgtgggggatggggcggttagtgggagggtgatggggtcgatgggtgtgtaggggcgcgagggaggagagagccgtaggagggtggggtagaaagagaggggagtgtgagagggtgtagggtggagagacgggagagagggggtgattaggggggtgagggagggggagagagagaggtaggtctagatagtggagtggagggggaggatagggg

SEQ ID NO: 116733 - DNA, 507 bp, Arabidopsis thaliana columbia
  unsure (1)..(507): unsure at all n locations
taggtacaactatangaagattatgacgtcgcatgcacgcgtacgtaagcttggatcctctagagcggccgccctttttttttttttttttttttttttttttttaaacaacaacaaaaaaagcttttagaaggaagctatgcatgagttttacagagagaaagcttttgctacatatgaaacctaatcaaaccttattattcattattcatattcaaaaccattgtttttccaccatcaccttcacaaagcaagcttattatacctctacagttccctcctgctttagctctgagtacattcaaatgggtgaaagtttccttctgcaaattcttgcatcctaaacctttgcattagctccacagacagaggattctctcgattgcggcttagcttctgttgattactctccattacttccactacattggcgggtgctggtccagctgatcctcctgctacaattgatgggactgatgcggttgggctccatatctttattgggtt

SEQ ID NO: 116734 - DNA, 510 bp, Arabidopsis thaliana columbia
tgccgcgtacgtaagctgggatcctctagagttgccgcccttttgaaatccttttataaagagaaaggaagagagatgaagaagagcagggaaaagaggggagggaaggaggggagaaagaaatggataataacaggcaaaagagtagtaagggatagtgcagacgaggaaggagaggaagacgaccagaggggcgcggggacaaattattttttttacgaggagggtgggaacggtagaaaaagaagaagggaaatgcggggagaaagacggaacgagcgagagacccggagggggtataacaatggtgctagggagtaggaaggagcataagaggagcactggaaagttaacggaaggaaagagaaaatagacagaagatgtcttatcgccaagagaggagaaccgcaccgagggagtgatgagaggatggggatggagtgacacggtggaggacggacgaggacgagacaggcgatgagacagagacaagaggagagaaagggggac

SEQ ID NO: 116735 - DNA, 511 bp, Arabidopsis thaliana columbia
accaacacccgcgggctggccgacactaaacgactcctatagggaaaacggtccgcctgcggtaccggtccggaattccctgggcgacccacgcgtccgcccttacctaaggcgcgtggtagttacgtgagggaagtcgagactgcgaaccacagaccacgagagcgtggaacacgcaaaaaagtggctcgggggagaggaggacggagatcggaagggcggggtgcgaacatgaggggcgagagtttttttttacaaggaggaaaaggcaagagaggggacgagggctgaaaaataatgggcgcaggagggtgacggctgcgggggacgggctgatggtggaagatcagggggggcgagccgtcgacgaagggagagaagcggaaggcagcgtgcgaggggcaagcacaaactgagttaaagaacagtggaccggtagaggcaggccacatgagcaatggagagacgggatgaggacggctgcgaggaatatgcaatctgactcagagcg

SEQ ID NO: 116736 - DNA, 407 bp, Arabidopsis thaliana columbia
  unsure (1)..(407): unsure at all n locations
ctacgtaagcttggatcctctagagcttccggccgngggcgaaaccgnggggaagaagaaagggggaggagagagggagggaggaggaaaaaggcacaggcaagnaggagaagcggccacgcgggagagcacagggaggccccgagccggagagacgacagagccacaagagaagggcgcgggcggccttttttatggcgggggggggaaggagagcggggcggggagacggagggaggcagggagcccagagggcgcgggggggcagaccacgcggcccgcggcggggagaggcggggagtggacgggagaagccgaggacggaaaagaggacagaggacagagacgggagcaggagagcgacggcgagcgacacggcctgcccgcccctggtgtagcgagttacc

SEQ ID NO: 116737 - DNA, 539 bp, Arabidopsis thaliana columbia
acgactaatttaggggaagaacggacgcctgcaggtaccggtccggaattcccgtttcgacccacgcgtacgccaatacttaaacagggatccagcagaacaaaatcaaagtgacagattgtctcatcgtggaggtaaccatgcgattgatggatgcacaacatggtaggaggcgaccgactggaggacgaactgcgggatatgtgaggcgtggagagagtttttttttcaacggggggcaggggggatgggagggggggcctgatggaagggactctggcacgtgagcgaggacgaggatgggggtggggagagaggaggggtgttcggggaggggggagagtgcgaagagaggtgggggagcgggggtgggatgtgggatggatgggctggtgagaagagagaggggtagtcggggagctggggggtggggtgaggggagaggggcaagtgatggaggagaggagtgggctaggggactagtgggggagggaggaagcggaggggtgagagagggtgcgtagagtgagtagtgtggg

SEQ ID NO: 116738 - DNA, 502 bp, Arabidopsis thaliana columbia
  unsure (1)..(502): unsure at all n locations
actatagaagattatgacgtcactgcacgcgtacgtaagcttggatcctctagagctgccgcccttttttttttcttttttttttgaaacgtaaatatatantttgtatatatanttcatttatataccgggtaccgtacgaaaaancgtcgaccaactacagtanaacgtctaaactatgaataaaaaatcttcacagaatctcctccaccaatatatgtttttgtttacataaatataaacgcgtatccctttttcattcgtcaaaattttaagttttccttcaggtaacccacgatcgcttggaggaagcagagaaggatacaagcggctgcaccggggaataatgcgtaccaaaagttcagtttatgcaactttgctccgtctataaacagtagtggtaaactcgccgcaggcggatggttggcacgagtgatgaccatgaccgcgatggaagccgcgagagcggtactgggggctaacccagttggcccaaaggcgg

SEQ ID NO: 116739 - DNA, 505 bp, Arabidopsis thaliana columbia
  unsure (1)..(505): unsure at all n locations
nnnnnnnnnnnnnnnnnnnnnnnnnnnnnnnnnnnnnnnnnnnnnnnnnnnnnnnnnnnnnnnnnnnnnnnnnnncttttttttttttttttttttttttttaaagcaaaacttacctatagtggtggtcattgttgtctgcaacgccgtcacgcagaagatgacattttacatgttgaaaagtttatttacaaagggagaggtagttgagactggtttaagccaaggacgggtaagtgatgctctagaagtcatccctagggtcactgtttcgatattagcaatttagcatcaatctacaactatctagcaatgtgtgaacacctaacaaactatcgagtaaacagagtgaattcgagatctgagagatcagaagaagaacaagaatcgcggagtgtgattcccttatcggcatgttctgtcccagcagtccactacgtgaatcaactcacaagaacaagcttagtctcgcacaagaatgctcacgagatcagagcactacaca

SEQ ID NO: 116740 - DNA, 483 bp, Arabidopsis thaliana columbia
  unsure (1)..(483): unsure at all n locations
tatagnagatctatgacgtcgcatgcacgcgtacgtaagcttggatcctctagagcggccgccctttttttttttttttttttttttttttttttttttttttttttttttttttttataacaaatgtttttttatttttttaaaacaaaaccggtcattttaagtttttgaaaactgggcattaaacccacttaaaaaatggggaaaaaaccccaatttcaaacggggaattttttttttaaacccgcaattctttgctggatctccgcggtggttttgtgtgggtcatcgcgtcgggtttgcgggcaaatccaacctttcaaccaagaaaaaaagcccctgaaacaccaaaaaagaaaattcctgacccccccccaatagaaagctcctcccgccccccgttagaaacctcatcgcaagcccggttttctttttgaacaccaaccccgtcttttttttgaaccacacggctcattaaccct

SEQ ID NO: 116741 - DNA, 518 bp, Arabidopsis thaliana columbia
  unsure (1)..(518): unsure at all n locations
nnnnnnnnnnnnnnnnnnnnnnnnnnnnnnnnnnnnnnnnnnnnnnnnnnnnnnnnnnnnnnnnnnnnnnnnncttttttttttttttttttttttttttttttttttttttttttttttttttttttttttttttttttttttttttttttttttttttttttttgggagggaaaaaacccctttttttaaaatttttcttacggaacattttttaaagaccaccttttaaaaaaaaaacgcttaaaaacctttaaacattggaggggataacccttaatggtataaaaggtttttttaaaaaaaacaaattaacaatttcaatggaaacaaaggagggtcctttaatgggaaaaggtggggagggggataaattggccccaaaaaggaaaaagcaccccattggtttttccatggaagcaaaaaattttggccccttctttttaaaaaacaaagggtggccccctttaaaacccaaagggggcaaacttttgtttatattttttaaaccaaaaaat

SEQ ID NO: 116742 - DNA, 508 bp, Arabidopsis thaliana columbia
tatagaagagtctatgacgtcgcctgcacgcgtacgtaagcttggatcctctagagcggccgcccttttttttttttttttttttaaacgaaccaccaaaagcagtatctgagatttcatcaccaagaagttccaagaacaactgtgatcaacagagcgagatcacaacaacaactaccacaagtactacatcaggagagaaatcaacggctctcaagaaaccggacaagcttattccatgtcctagatgtgaaagcgcaaacaccaaattctgttattacaacaactacaacgtgaaccagccacgttacttctgcaggaactgtcagaggtattggacagctggtggatctatgaggaacgttcctgttggctcaggtcgtcgcaagaacaaaggatggccttcttcaaaccattacttgcaagtcacttctgaggattgtgataataataactcggggacgatccttagtttcggttcttcggagtcttcggttacagagactgg

SEQ ID NO: 116743 - DNA, 504 bp, Arabidopsis thaliana columbia
cgaagagttatgaggtcgactgcacgcgtacgtaagcttggatcctctagagcgttcgcccttttttttttcttttgcttgaaagaataattcactaatggaacttttttttcacacatgagccggaaacacatacatcagcggacggctgaagatgttgacaacgacgtctgatcgagcgaatctaccgcgaaacgacatagagcgcagactattttcttgggggggtagcggcaagccggagaagtgtggggtataggcagaggagattgattatgggatgtgacgaggcgcgaacgaagttacgagtcggttgctttgaagggggaggggggaacatcgggggtgtaggatggagcagtgtcggtgccggagagcggcgcagggaggaggggtggggtggagtgcggggttgatggggcgcgggcgagccggtaacagggttgaaggggggtggaggagggcgcccggagggggcgggtgttgtgggctattcgtggagct

SEQ ID NO: 116744 - DNA, 506 bp, Arabidopsis thaliana columbia
ggtccggcactaatacgactcacttagggaaagacggtacgcctgcaggtaccggtccggaattcccggttcgacccacgcgtccgcccaacttttcgcaagtcgctgttaagtttcattcgcttctttatatatccacgcatactcttcctccatacagtttcgtcttgaatcctgagaaatttttgtaagccctaataccatctgaaagagcagagcaggaggtgattatctttaggaggggatgactcagagcagcatgcttgcgggggacgcggcttgttgcgaccgtatcagagggagattgcgttgagatggcgaggaagaacgtgtcgatacgaaaagcggtcgtgttgtgtgacgcgatggccgggcaggtgggttgtcacacacgagggcgggcctaatctgttgtgggccggggtatacgagagagggggtagagtctgaccggtagggcgggggcgggggaagggtgaccgcagcctaacgacctgtgtgaacgt

SEQ ID NO: 116745 - DNA, 455 bp, Arabidopsis thaliana columbia
  unsure (1)..(455): unsure at all n locations
cactatagnagatctatgacgtcgcatgcacgcgtacgtaagcttggatcctctagagctggccgcccttttttttttttttttttttttttagaaactcacgatcaaaatcaaaaccttacggacccgaacaagacgttgacctaaggacggagatgattttttccagagactgaatctgaaccaaaatcacaatatatattacccgtaacaattaaattgggggggcgggcgttcctaaccgaattagaaccggtcgatataaactactacgtctttgctctagcgacaaggcgattgttttggagcaaatggtgtggatattgagaatgtgagtttttgacatgtgatttaagttttggactcttggggtgtgcgctcctacagcgaaaggaacgcacctaaacttgaacgggattttggattgccacattggccttgcttggggctgggga

SEQ ID NO: 116746 - DNA, 493 bp, Arabidopsis thaliana columbia
aatacgactcacttagggaaagccggtacgcctgcaggtaccggtccggaattcccggtgtcgacccacgcgtccgcccacgcgtccgggcggtctggatacgaagcttatcaagtcagtcacaacttactcttgtcgcatgcttacgctgttgacgcattcagaaactgcaaacagtgtgctggaggtaaaattggaattgcacacagtccagcttgtttcgaaccacaagaccttgagcatgttggaggttccattgaacgtgtgcttgatttcatcctaggatggcatttggctccaacaacttatggagattatccacaatcgatgaaggatcgtgtcggtcatagattgccaaaattcacagaagctgagaagaagttgctaaagggttctacagattacgtaggaatgaattactatacttcagtgtttgcaaaagaaattagccctgatcctaagagtccgagttggacgactgattctcttgttg

SEQ ID NO: 116747 - DNA, 494 bp, Arabidopsis thaliana columbia
  unsure (1)..(494): unsure at all n locations
ttaggacnnnnnnnnnnnnnnnnnnnnnnnnnnnnnnnnnnnnnnnnnnnnnnnnnnnnnnnnnnnnnnnnnnctttttttttttttttttaagtaaaccaaatattgtaatacgcggtttattacaatagataatacatattaaatcttgagactaaatcaagctgaaaattcagataaatacgtactctgtatttactgcttcggagggatcaagaatggaataatcatagatagagatgctgtggggcggctcgatccagacaccaactttctgaccccaggtcagatactcaaagtagtacccttcagggtcttcacaagaactcctgctatataaggaatacttgtaggggtgatttctactgaaaggacaaggagacttggtggaacgcctctcgttgataaatctgctccagaaatacaaaatgttactcattgaccctgtgaggccgtaggtcatcacgcaagacccatcgctcaaaaatattgag

SEQ ID NO: 116748 - DNA, 494 bp, Arabidopsis thaliana columbia
  unsure (1)..(494): unsure at all n locations
tttaggacannnnnnnnnnnnnnnnnnnnnnnnnnnnnnnnnnnnnnnnnnnnnnnnnnnnnnnnnnnnnnnnnnctttttttttttttttgatcaaaataattttaaaaaacaaaacagagacacctaaacaacaaccaaaaatttgagttctctaacgtaaatttaaattagtctttttctgtcaatcgaatcacacaaaagaccagtttacaaaggagaaggcaagacaatgcagattgttgttgttttcttcagatgcagcaaacactttccaagcaacagcttgttcataactcacatgtcttcccatcgttgacacacagattcctgaaggcaagcaagcaaatccctgttgcattagcttggcgaagtccgaacagatagccttacgacccgattcatcgaatatcttttcgagtgttatatcttgtaaggctacaagtgttgtctctagcatgtctagaccagcttggttcgcaaacatgaacact

SEQ ID NO: 116749 - DNA, 476 bp, Arabidopsis thaliana columbia
ctatagaagatctatgacgtcacatgcacgcgtacgtaagcttggatcctctagagctgccgccctttttttttttttttgatcacaaacataatttatttatttatatttgtttggtttttttttgtttgtttgttattttaaatatctatctatagtttcacatctctaccaaaaacccagctaaacgaaacagaaggttttgacacaagtttgaccctatcattagctctttcctctaacctcttgatcctctgcggcaaggtgcacaagtactcctgtgctctccttccttctcctgataaccccaatcccaaactctccaccttccaccgccgcaacagaaactcaagtatcccagcgtaatccgccgccgtgtaaactccaatccgctgcgccacggcggcgtaatgatcaaacaaatcgttatctcttccgtcgtgcataagatgagccggcattgtgatccgtttctt

SEQ ID NO: 116750 - DNA, 533 bp, Arabidopsis thaliana columbia
ctatagaagagcttgacggcgcaactacgcgtacgtaagcttggatcctctagagcggcctccctttttttgtttagtctatagtaaccaaagaacattttatttaaatcaaaggtattgtttactttttaaacaaaacttgggggtggtaattagtcaaaactactggagcaaaataggaatttgggaaacgaatgacactttatgcctcctttgtaggtgtttttttgccgggggggctgaaaagactgaagccattgcaacctagatgatatctcgcgttactcagcttacaagatgcagtgtgtgtggccacatgcgctggtaagaggggaagaaaagcacgaggggtggggaagcgtcattaggggacgtgggtgaggcagtagaggtgggttgcaaggggctggggtttggctatatacagaagtcggcgaggggagatggaagagagagtgagagaaagagcggcgcgtgcagtaggggtaattgagaggagagtaaaggagagcaaaggcgggagaggggcggcg

SEQ ID NO: 116751 - DNA, 519 bp, Arabidopsis thaliana columbia
  unsure (1)..(519): unsure at all n locations
acgactcacattgggggaagctgacacgcctgcaggtaccggtccggaattcccgggnctacccacgcgtggaaaaacagagaccaatacaactaattaccatcctaacgagaaacataaacgaatagatatcaggtgttaaataaagtcgcacagatatactatcccatacacaaactacgaacctaagcgacgtgtatgccacggagagtaagggatgtttttttttggagacgggagctcaaggattggaaaattttatgaaaacagagataggtatatcggagagaagagaggtacctgatagctgcctccaacctcaatccgtggacataaacatacaacatgaaacacagacatgccaacgggatgagcgtgaaaagggccgtgcgccagcctccggagtaaagagccaagagaggcggggcgcccgggcggcgttcgagaacaaatagcggtgacggagtggcgagaggggtcagattcgccgagaggcgactagaggtgaaagcaccccgc

SEQ ID NO: 116752 - DNA, 562 bp, Arabidopsis thaliana columbia
  unsure (1)..(562): unsure at all n locations
nnnnnnnnnnnnnnnnnnnnnnnnnnnnnnnnnnnnnnnnnnnnnnnnnnnnnnnnnnnnnnnnnnnnnnnnctttttttggttttttttcttagagatatattttgatatataataaaaagatttcaaggcaaaaagcaaaaggtttgtttagtaaatgaaagatagatagtaatgttatgcaagcattgataacatttgcatttttttttttcactgtgtgacatattcttatatgcgatcatccttcaccattccaccgtgggtggaatgtatgatcaaacattgttgggtgtgttctcaggcggcgtagcagcagagcggacgcggcgtccaccctctgacttggcgttctcggcaaaccggaggcttccttgatgcatgttcttctgcttctcctgctcattccactcagaaccataataatgagcctctgtacctttcactggatctgtggaaggaggcaagaacatgcttccccattgaggaaagtgaactaaggtcacaggtaacgtgcaagcgactatcatcactcccatccacgttagcccttgttcagttg

SEQ ID NO: 116753 - DNA, 359 bp, Arabidopsis thaliana columbia
tttttttttgggggggtggagaagagaaagaaagaaggaagaaggggagaggggtgagaagaaaagagaagggggagagaaagaaaaggaagaaaaaagaggaaaaagaaagggtgttaaagaggagaagtgaaagtggggaggagtagtgtataattagttagagaagatgtggatagaggataggagataatgagatgtgggaaagggaaggtagtggatatataaaagagtgtatggagatagagggggagagggaagggtgggaggtgaagattattgaggttatgaataagtagggtggagatataaattgtatttaagagagagaaagagtataaatgataagaagtgaaaag

SEQ ID NO: 116754 - DNA, 571 bp, Arabidopsis thaliana columbia
  unsure (1)..(571): unsure at all n locations
atgatacgtcaggtctctacgactcactatttggaaagctggtcacgcctgcaggtaccggtccggaattcccgggtcgatccacgcgtgcgcccaagttacgccctttacttaaaaaaacgttgcccaagtccaacaccggacccgaacgccgtcttgtactcccgtaacgatcgtgagactccgatggttgtggacaacatgtattataagaacatcatggcccataaggggcttcttgtcattgatgatgagctagccaccgatcccaggaccgcaccgtttgtggccaagatggctgcggacaataattacttccatgagcagttctcacgtggcgtcaggctcttgtccgagaccaacccgctcacgggagaccaaggggagatcaggaaggattgtcgttatgtgaactaatattgatggtccttgcataaaggatatatattgtggaaaagtaataataataatatatatgtgtatgaatgtctgtcaatgttttggattcaataagaagaaataccanaaaaaaaaaaaaaaaaaaaaagggcggccgctctagaggatccaa

SEQ ID NO: 116755 - DNA, 530 bp, Arabidopsis thaliana columbia
  unsure (1)..(530): unsure at all n locations
atagnagagctttgacgtcgcatgcacgcgtacgtaagcttggatcctctagagcggccgccctttttttttttttttttttttttttttttttttttttttttttttttttttttttttttttttttttttttttttttttttttgggggggaaaaaaaaaaccccaaaataaaaaggggcaaaacccaccccctccaaattttttggcaaaccccccctttaaactgggaaatttggcttaaagggaaaaaagaatggggggaaaaaaccttttcatcaaaaaaccccaattcaagggcaaaaaaccttaacttttaaaaatccccaaaaagaaaaccaaaaggggccaatttttggggaccgggaaaatcaatttaaaaccaaatccaaaggggttatggggggggtattacttccccaaaacccccggttttaaaattggaccccaaaaaaaaacaaagggctttttgaacatattaagtaaaagggggaggttccgggcaaaaaaaaaacatttctgcttttcca

SEQ ID NO: 116756 - DNA, 540 bp, Arabidopsis thaliana columbia
  unsure (1)..(540): unsure at all n locations
acgactcactatttggaaagctggtccgcctgcaggtaccggtccggaattcccgggtcgacccacgcgtgcgcccacgcgtccggaaagagttcgcagctgaggagatttcttccatggttcttattaagatgcgtgagattgctgaggcttaccttggtgtcacaatcaagaacgccgttgttaccgttccagcttacttcaacgactctcagcgtcaggctactaaggatgctggtgtcatcgctggtttgaacgttatgcgaatcatcaacgagcctacagccgccgctattgcctacggtcttgacaaaaaggctaccagcgttggagagaagaatgttcttatcttcgatcttggtggtggcacttttgatgtctctcttcttaccattgaagagggtatctttgaggtgaaggcaactgctggtgacacccatcttggtgggggaagattntgacaacagaatggttaaccactttgtcccagagttcaagaggaagagtaagaaggatatcaccggtaacccaagagctctt

SEQ ID NO: 116757 - DNA, 563 bp, Arabidopsis thaliana columbia
  unsure (1)..(563): unsure at all n locations
gattgannnnnnnnnnnnnnnnnnnnnnnnnnnnnnnnnnnnnnnnnnnnnnnnnnnnnnnnnnnnnnnnnnnnnnnnnctttttttttttttttttttttttttttttttttttttttttttttttttttttttttttttttttttttttttttttttttttgggaaacctgaccaaaaattagggggggttacataaacccctcgccaaaagttaaaaaccgtttttttcatgaacatttttttcccccctaccgaaggggggggggggaacaaaccgaacccctagggcactagttttcgggaccctcatcataaaggggaaaatctcctcaaacccccggaaaaacaaacaaaacccttccttcccggatcaccctttgaattttttctcccaagtttggggataaaccaaaaaaatttccggaaaatgcaagcttttccatttggggggcctaaaaagctttttggggaccccaggtttcaattgaaaaatcaggtttggcattgaaaccccctccgaggattacaatcgggaggaaccttgggatgaaacatggaac

SEQ ID NO: 116758 - DNA, 519 bp, Arabidopsis thaliana columbia
ttgacgtcgcatgccacgcgtacgtagcttggatcctctagagcggccgccctttttttggtttttttctttttttttttttttttttttttttttttttttttttttttttcttgaaaacctaaaaatttttattaggacccaaaatggaaacaacaaacaaaacgtaaaaaaactttttacaaggcaaacacaattttttactaacccacaattttttaaaggggagggaaagccttgatagttttgcgccgaaatagaaaagaaaaaccccaaaccaggacttagaaacgggaggggggaatggcgttctcccgcgggcgaaacataaatgcaagggcccaagacctaaaaggtggccacacaagagggaaaacgttcaaggagagaggagctcttgcagggagcggcgcggccttcaaaatagaaatccgagctttcaggtgtaaagaggggggggggaggggctgaacatggtcctccatggcttgaatagagggcaaagaggccggggctggg

SEQ ID NO: 116759 - DNA, 519 bp, Arabidopsis thaliana columbia
  unsure (1)..(519): unsure at all n locations
cgtacgtaagcttggatcctctagagcggccgctcttnggttgttttaaagccttttttttttttttctaaaaagaaacagaggttcaggaactattgggacctgttttctttatttcatgctacaaagcaaaatctcatttacgattaccaacaatccaagatttgagggattgaaagaaggctgaaancccacttactcacataggggggggagaaacggaggcaggtccaaaacgggggcaaagcccacgaccggcaacaccacggggggcacaggccccccctgagaagccgactncaagacagccgaacaggagaacccgggggggctgcacaaagcgggggccncggcgaaagccttgggggcagcataggggatgaggaccttgggggtatgcagacttatgccctgggagggggaactggggcgctcccaggaaccggtggaaagggaaggatggggtatataaccgggggccacccactggccgaaagtcggggacctgtcggggggtgg

SEQ ID NO: 116760 - DNA, 544 bp, Arabidopsis thaliana columbia
  unsure (1)..(544): unsure at all n locations
atagaagacnatgacgtggcatgaccgcgtacgtaagcttggatcctctagagcggccgtccttttttttttttttttcagaaattggaatatcctgattaatgtagatcttttattttgtgtttttcaatcttgaaaacattcaagtcatgtaaaactttttttgattacaacatcaaaacaaggctgggtttaaatctggtgctctttcgctctcttcaatatttttccgcattgagaaaaacccgagagcgctggtttgcaagaaccaccccattgcatttcctgggtcgactcgtttagccagaaaccacgcatagattccttctgcaacatgtagtacccactgctacaatgaagacagcctttacaatcgtgattgtccggaaaaagaaaaggtgtttggctcttaggaaaggacaggtcctatgagagggaaccatgccgggggaaaagaagagaattgttatgggacaacctctcccagggaccaggtggggacccgggagatgagggggcgtacataagcgccgggccccccccg

SEQ ID NO: 116761 - DNA, 377 bp, Arabidopsis thaliana columbia
atgatactccagctctctacgactcactattgggaaagctggtccgcctgcaggtaccggtccggaattcccgggtcgtcccacgcgtccggttcgttctctggcggccgatcccgtcgctcgctaccttttaagatattttttttatctaatgaacctgaaattgtaattaggcatataattggggattatttgctgaaattctcatttctagatcgaaaaaagcgaataattcgttttcatttgattcttgcctaatcttagggtgtctttatttatctaccaaaagaatgtctaattatcgaggagatgatgctgagtacatggaagacgtagatgatgagatggaagatgttgaagatgatatggatgaggag

SEQ ID NO: 116762 - DNA, 524 bp, Arabidopsis thaliana columbia
atagaagagctttgacgtcgcatgcacgcgtacgtaagcttggatcctctagagcggcctgcccttttttttttttttctttcttttggcaactaggaaaaaattataaaacttgtcagaggatggagagagaaatgttttaacattccgtaatcccatatgagtattaataaaacgagacttaatctcgatagagagagtcccttcctttgggaaaaaggctagtttgagactgggggaagcttaatgcttggcttacacctcacatgggggagccatcaataccttcaatcctttccttttcctgatatcagccagaaaatctgaagcctgagctcctgtctcaagagggccagatgacatcatttcccagggatcaaacacacactgcgggattgcctgttctgaggttgctgccttaagctgccttgggaatccgaaggactccacatctggctggtctgctttgcagttgaccaaggaattctctggcctgtgcatgtactataacacttgtccacgct

SEQ ID NO: 116763 - DNA, 530 bp, Arabidopsis thaliana columbia
caggtccctacgactcactatagggaaagctggcacgcctgcaggtaccggtccggaattcccgggtctacccacgcgtccggaatgacgagaacgagctcatgggtaaacctctaatgaagcgtgatatgcacacttggctccctgcaagtactgcactacttgagatgatgatctttaatttgccatctgcccacactggccacaggtaccgtgttgagaatctgtatgaaggtgctcttgaggatcagtatgcaaatgccatcacgaactgtgaccccaatggacctctcatgctctacgtatgctagatgattccagcctctgacaaggggagatcctctgccttcagccgtgtctatgctgagaaggtttctactgttatgacggtcagaatcatgggtcccaactatatccgtggtgagacaaaggaactgtacactaagagagttcagaggactggcatttggatggatcagaggcaagagacagtggcggatgtaccttgcggtaacactgctgctatggtg

SEQ ID NO: 116764 - DNA, 543 bp, Arabidopsis thaliana columbia
  unsure (1)..(543): unsure at all n locations
acgactcactatttggaaagctggtccgcctgcaggtaccggtccggaattcccgggtcgacccacgcgtgcggggtatcaaaagtgccaagttccctggagtgccatacacattcttctcgcagagacaaggctgcaaagtttctctgtaccaagatgctcatattccagacaactttgtccctagaattcctctcgctggagggaagaactatgagcctcanagatgttgggaggatatttttgatgctattagcaatgcaaaacacttgatctacattactggttggtctgtttacgctgagattgctttagtgagggactcgaggaggcctaagcctggaggtgatgtgaccattggtgagctactcaagaagaaggctagtgaaggtgtcagggttcttttgcttgtttgggatgacagaacttctgttgatgtgctgaagaaagatgggctcatggctactcatgatgaagagaccgagaatttcttcaggggaagtgatgtccattgtattctgtgccctcgtaccccggatgacg

SEQ ID NO: 116765 - DNA, 561 bp, Arabidopsis thaliana columbia
  unsure (1)..(561): unsure at all n locations
nnnnnnnnnnnnnnnnnnnnnnnnnnnnnnnnnnnnnnnnnnnnnnnnnnnnnnnnnnnnnnnnnnnnnntccttttttggtttttttcatttttaattcttcttcatttccttacattcgtagtcttacttacttcattttaaaaattcagaaactaaagatattgatgttttgaaatttaaaaacaccaccaaaagatcgcacatattttgtatagttagaaagctttgtcatgttccatcttttaagctctcatcttcgatttctccattgctctcggagctgcagctaacccaatagcatcacaccctttcattatcttcagcttcttgcagacatcaataaacatctcccacggaacatctccaacaagcatccagtcaccatccttatcctcataagtgagcacatagtcttttccattcaaaagatccttgagcttggtctcactaagcatatccttcccagcagctccattagatccacattgaccaagagtgaaagtggtgaacattttctccaaggctgaagaaagctccccgtagttagtgtagctcctc

SEQ ID NO: 116766 - DNA, 549 bp, Arabidopsis thaliana columbia
  unsure (1)..(549): unsure at all n locations
taggtgcctnnnnnnnnnnnnnnnnnnnnnnnnnnnnnnnnnnnnnnnnnnnnnnnnnnnnnnnnnnnnnnnctttttttgtgtttttttttttttttttttttttttttttttttttttttttttttttttttttttttttttttttttttggggggggcaaaacaaatcaaatttttttttccaaaaccccaaatgtttaacaccccgatctcagcaaagttgaaaaccaaaataaaagtaaaatttcaaaaaccgagcttttgaaaaaaaaaaaggaaacgggtttttgctttttcgaaaaccattttcgcttaagggtttttattggatcctttttaaatttaaaaaaattttggaaggacgggttaaactgggactcgaacagggttaattctggcttgaaaactttggggaaatcattgtctaaaagggaaaaattgtaaatggttgaaatttttgggcaaaaatccaaaaacgagctcattgactttggatttggaccaatttccatgggaaaatttccgccctttggtgaaaaagaaaaaa

SEQ ID NO: 116767 - DNA, 563 bp, Arabidopsis thaliana columbia
  unsure (1)..(563): unsure at all n locations
attgannnnnnnnnnnnnnnnnnnnnnnnnnnnnnnnnnnnnnnnnnnnnnnnnnnnnnnnnnnnnnnnnnnnnnnnnctttttttggtttttttttttagaagaaacttgtcgctctattttaagatttttttcttacaaaactaaaatctacaaaattactgaagccactaaaacgaattaattatgatttgaccccataactttctaaacttcccaaaacacacccttttaaccgatttttgaaatcaaacttgctctgagctgttcttgcgtatagatcctaaaacccatcttcaccgtcgcttgttgaatcatcaaatcgttaaccaccgacatactcgcgtgattcacttccaactccaaatccatcaacgccgacatcaacctcgccgccggatgattcctcttactagattcaactctaatcattgcgtcccaaccaattatcttcacttcaatctccatccccaccggtttaatcgaagaacacgaagacgacatatctcctccactagcactcgcttttcttccggcgagctcgagtttcacttcctcgagct

SEQ ID NO: 116768 - DNA, 534 bp, Arabidopsis thaliana columbia
  unsure (1)..(534): unsure at all n locations
gtcgcatgacacgcgtacgtagcttggatcctctagagcggccgccctttttttggtttttttttttttttttttttttttttattaaagcttgtctatnattcaagaaaaaaaaaaagcgtgcttatccttcaagaaggaatttcaatgtttttggcctgaggccaaactctaaatttcaagaaggctgcgggggaacctcttaagatgttttttcccaccgggggaaaactgaagaggttctcccctcttttaaaaaactgataaggttatgagtggttctactccactacttaaacacaggggggggtgatggtcaaagggagccacaaacccttggagggccatgagtggtgcaactacatttgaaagccccggttgttgccgattttaaggaatttcatccttgggcctgaccaggaccttcaaagaggttggaactgggtttggtttttttaagcaaaaaacccgaaactactttttttttatttaaacagggttggcgggtggaaggctgtggagcttgagctcgcg

SEQ ID NO: 116769 - DNA, 520 bp, Arabidopsis thaliana columbia
  unsure (1)..(520): unsure at all n locations
cccgccgaaccggnccggaaccccggagcgtccacgcngcnaagaagccgcaaaaaaaaaaaaaacacagaagaggggacccaaaagcgcaaaaacacgacgaacccagaggagaggaagagaggacaagctaccaagggcacaaaagcaccaacacaaacccccgaaggagaaaaacacacacgggaaaaatgtctaacagggggggggaaaaagaccacgccccacccgggagaaaaaaaaagccccccccccgcaaacgggggaggaaaaaacacacaaagagcacggggaccgccagagagaaagaagacgaagcagggagagcaacggacgcaaaccaacaccaaaaacagcccacccccacacagacggaaagcggcccgacgccgaaaagaaacaaagaaaaaggaggaagaacaccaccaaacgagcgccccagagcccaaccagaccaagcgacacaaggaacgccccccaacccacaagaccaacagacgagagaaaaaccaaaaaaaaa

SEQ ID NO: 116770 - DNA, 541 bp, Arabidopsis thaliana columbia
  unsure (1)..(541): unsure at all n locations
cgattgtggtanggggcatctatagcagacttttgacgggcntaccngcgtacgtaagcttggatcctctagagcggccgttcttttgtttgttttattctttttttttttttttttttttttttttttttttttttttttttttttttttttggaaaaggataactactattgccttttatgggaaaaaactctaattatatcatggggacccatgttttacataaaaaccttattaaaacatttctgtttgagggggggcctcaagcaacacattttgtagcaatacaacacacggggagtttcagtttttaggataaagttttaaaattggaacacatttttgggctaaagtttatactttccctcgaaagatgcgtagcctgaaatcttgtatttgcctccccacctgttttctttggtttaagggatttggaggtaaatataatcatcctcaaagagtttaaaccccgggtggattttttaattatccccctcattaaagggggcggagtccccctttggaaaaattggttttgtc

SEQ ID NO: 116771 - DNA, 537 bp, Arabidopsis thaliana columbia
  unsure (1)..(537): unsure at all n locations
atagnagagctttgacgtcgcatgacacgcgtacgtagcttggatcctctagagcggcctgccttttttttttttttttttttttttttttttttttttttttttttttttttttttttttttttttttnngaggcattaaccagcattagacccaatttggaagatcaaaagcataggacatattttgaatttggttatttaacgcacaggggccaaaattttttttacaaacgggggggtggtacattttcatatttaaaagaccaagaagcttcttataacaaaaacacaagaccttaatcaattttgaaaattttagagggtttaacgaaaacacaaaggctaaacaggggcttgattaggattggtctttttaagctttttaaaaggtttcggtggggggtttcgagacatttcgagctcttggttcaagctctttttcttcataatccnattgaggcaaaggggatgaaaaatttaagcaaaaaccttgaacaacctggtaatatgaaggggatagattttggaaaagaaa

SEQ ID NO: 116772 - DNA, 529 bp, Arabidopsis thaliana columbia
agctccctacgactcactatagggaaagctggcacgcctgcaggtaccggtccggaattcccgggtcgacccacgcgtccgcggacgcgtgggaattgatgtggttgtccaacctggcaacactggtctcgacccatcccaaacatctttcttccaggtgcttaacatcccaaccaagattaacaagggtaccgtcgaaatcatcaccccagttgagcttatcaagcaaggtgacaaggtcgggtcttctgaggctgcgcttctagccaagcttggcatcaggccgttctcatatggtcttgttgtacagtctgtctatgacaatggctcagtcttcagcccagaggttcttgatcttactgaagaccaacttgtggagaagtttgcttctggtatctccatggtcacttacttggctcttgctgagtcgtaccctacccttgctgctgcaccggatatgtgcatcaatgcgtacaagaatgccttgactattgctgttgccactgagtacaccttccctcaagcagag

SEQ ID NO: 116773 - DNA, 540 bp, Arabidopsis thaliana columbia
  unsure (1)..(540): unsure at all n locations
aggtgaccttatagnnagactttgacgtcgcatgcacgcgtacgtaagcttggatcctctagagcggccgccctttttttggttttttttttttttttttttttttttttttttttttggcaaaaagaaatattgcaacacttgaaaacttaagatgagattgatacataattcacattatatagccgaaattgcaatggccactcttgaaaccaacggacaaggattcatttaaaagatcgaacgatcataaaccccttgatgattcgaaattacacaaacggaaattaaaaagaccttaaaattcaaattcaaagtcgaataaaattccccaagagagaaaaagagagattatttcactcctctggggttgggagctgctcctgtgcggtgttgatgaaaaaaacttcgtagatgagtccagcgattccaccgccgacgagaggtccggcccaataaacccaggggttggtccatgtccagctcaccaccgctggtccgaaagccacggggggattcatggaggctccagagaaagct

SEQ ID NO: 116774 - DNA, 554 bp, Arabidopsis thaliana columbia
  unsure (1)..(554): unsure at all n locations
nnnnnnnnnnnnnnnnnnnnnnnnnnnnnnnnnnnnnnnnnnnnnnnnnnnnnnnnnnnnnnnnnnnnnnnctttttttggttttttttttgctataaaaagaagtgattttattgtttctggtttttaagttacaaagaagattggcacaacattctctaataagctacgaaatacctcctttggccctctctctctctcacacaatcatacaacatttttgtgccctttatcaagctttacggtactcttaagacccttcctaatattacaaatcaggaaaaaaaatatagagagaggacgactcgataaggcttttaaaagttacagtgaagatctcaacctggctttgggcaatctatgaagaaggggcgtattcttggatggccgttgctaaattatctctagcttctgcgttctttgtccttatcagaaaggttctcggtgttacattctcgttggaatcatccgaggagtgaaatattgcaacaagagcgttcttctgtgggcttgtcttcattccagcgtacagtagtgcattcagaagcagtttt

SEQ ID NO: 116775 - DNA, 583 bp, Arabidopsis thaliana columbia
  unsure (1)..(583): unsure at all n locations
gcgtacgtaagcttggatcctctagagcggccttttccttgtgtttggatagatccttaaaaagangnacatttnttttagatatttaagagtgaatttggggttggaatttatatatattatttattgacggtggcgtggggcattattgtagtgttttagtgagagaggatgaaaataaggatagtatatttttggtggagggggaggtggtgaggaagattttgtagttttgggggggggggcaaancgcgcagaggtggtatttggggacaataagaccaccctggatcgaggaggggggacggggaccgaagtaagataaccggggtgcgggatggggtcggagggagggagaaggaagaaagggggcagcgtcggtgagggaggtatgtcgggaaggagacgcgcgatgggtgggtggggctggggatgggacgtgggagcggagacggggaggcgggtcgaagggagtgggtgtggtgcgcgtgggggggagagtaactagagagagagcgagggtgtggtgtatgttttgggaggggtgagagagtgtgcgtgggaggtgagagtggggcgaggc

SEQ ID NO: 116776 - DNA, 553 bp, Arabidopsis thaliana columbia
acgactactatttggaagctggaccgcctgcaggtaccggtccggaattcccgggtcgatccacgcgtcggaagaaaccttcctattactttttctattctacaggatctgtttctatacatctgctaggatcatttatgctcacatctaaggtaataatggccagtctctcctggtctgatatgtaaattctaaacacgaaaatcacccctatgacgacaattgtatttaccggggggggaataggcgctagctcagactcagaaatagaatacctacggcacacacgaaattctaaatcaacgagaatgtggggggaagtagctgttgagcaagatactctgttgatgcaagccagacctaagagtgatagggacgcgtgaggagtaagtgtaaagtgttggcgctttaaaacccaccgcatgatggttgcagaaaaatgcgtagccctaaggttgagaagtagtgccgaccactgcagaggagatgtaggccaccggtagttaggaggtgactggactgggaatgtggtggataattagttaaaggaaat

SEQ ID NO: 116777 - DNA, 559 bp, Arabidopsis thaliana columbia
  unsure (1)..(559): unsure at all n locations
ggtgaatnnnnnnnnnnnnnnnnnnnnnnnnnnnnnnnnnnnnnnnnnnnnnnnnnnnnnnnnnnnnntccttttttttgttttttttttttttttttttttttttttttggcaaaggagcttaaatccaaattgtacaatagattgcatgttttggagttgtcatgaacaaaatgtagaggtttttatttaccattgaacaaactgagaaagcaatacaattctaatacttagtttgacacctactgttcagtaacatacctgttcttccttgctcccaacgcaactcttgagaatattttggtgtaggctttgattccagttaggaaacggatgtaagtcggcttcatagatccgctagccggtattgcccttatttttgggacaaggtacttagccaccactttgggtggctctgccaaaacattaatgaagaacttggcttgttttgaagttgctccggacatgagcaaaatagttttgaccattcaggcgatagattatgcaccacgaaatttttgacattttcatttgcaactctgcctgtaatgactttggc

SEQ ID NO: 116778 - DNA, 547 bp, Arabidopsis thaliana columbia
  unsure (1)..(547): unsure at all n locations
aggtgccttatagnagagctttgacgtcgcatgcacgcgtacgtaagcttggatcctctagagcggccgcccttttttttttttttttcttttttttttttttttttttttttttttttttttttttttttttttttttttcaaaaaaaaaaaaactaggcattgaattttgcccttgattggtcaaatttctgaaaaaacaattcattggatggttaatctaatcctagggggcttttttcatctggaacccttttacgggcatatttaccagcttttgatcctgaactcagcttaatgaggacccctttttggggcaaacccaaagaaaccggcatttcgattccatcaatgggttcaaatgcttgatctgggtcttttgaactatggaaaagagccaatgccccatagccaccgccctgggtttttggttgcttcacatcaaggggaaactttccaaaaagaacttgcctaaggttttaagatggcccattgtgggggattttatgggaaaagaggtttgtttttcaaacctggacattctttt

SEQ ID NO: 116779 - DNA, 565 bp, Arabidopsis thaliana columbia
  unsure (1)..(565): unsure at all n locations
cgaatgaannnnnnnnnnnnnnnnnnnnnnnnnnnnnnnnnnnnnnnnnnnnnnnnnnnnnnnnnnnnnnnnnnnnnnnnctttttttttttttttagagaagaaaaacagacttaagttgataagataagataatatccgcaggaatgacacaaatatcatataaccgaatatccaaaaaggttcaaaatcataacacaaaacaaaagaaataaacaggaagctcgagtgccaagtacctccgccacctccgatcaagaacccaattccgagaattgagctccgacggacaataaacgaagcggtaacacaaacaaccaaccaaataccaaactactaaagtaaagaaactaaaatagtccttcatttcatcagcggaaagagttttgatgttcagagttcacttggcacccttcttgactgcagccttggtaaccttggctccagttgggtccttcttgtcaacactcttgataacaccgactgcaacagtctgcctcatgtccctcacagcgaaacgtccaagtggtgggtactcagagaaggtctccacaaccatgggctt

SEQ ID NO: 116780 - DNA, 568 bp, Arabidopsis thaliana columbia
  unsure (1)..(568): unsure at all n locations
nnnnnnnnnnnnnnnnnnnnnnnnnnnnnnnnnnnnnnnnnnnnnnnnnnnnnnnnnnnnnnnnnnnnnnnnnnnnnnnnnnccacgcgtgcgcccacgcgtccggtcagaaacgaccagcccaggcacgaaacctgttaccagatcgctttggccatcaaagatgaagtggaagacctcgagaaaggcggtattggagtcattcagatcgatgaagccgcacttagagaaggattgcctcttaggaaagccgaacactctttctacttggactgggctgttcactctttcagaatcaccaactgtggcgtccaagacagcactcagattcacactcacatgtgttactcaaacttcaacgagcccaagaggccgtcagacaagccccttcgtctcccacttcaggatgtctacaagattggtggtattggaacggtgccagtgggacgtgttgagactggtatgatcaagcctggtatggttgtgacctttgctcccacaggattgaccactgaggtcaagtctgttgagatgcaccacgagtctcttcttgaggcacttccaggtg

SEQ ID NO: 116781 - DNA, 537 bp, Arabidopsis thaliana columbia
cgtcgcatgcacgcgtacgtaagcttggatcctctagagcggccgcccttttttgtgtttttttcttttttttttttttttttttttttttttttttttttttttttttttttttttttttaaaaagaaaaacccttttttaataatggggaatgggaaaaataagggggtttccataaaaaggacaagggggggggatttcggttaattatttacggggggggggggaagaaaaccaaaagatgggggggtccaaaacgatttaaacccccttaaaagtcagggggggaacttggaaatgggttggttccaaacaacgggaagatttatttttttcctccaccaagattttggctggccaaaggggaaaccccgaaaaaagggggggggtttgcttttatggaaaaggggtggaaacctgttataaatcccggggggtggggatgaggatgggggagaagacagactaggggggggctctttggatgaggaggcaaagtgggcaaagttatggtatgaaattatgcgccttttccg

SEQ ID NO: 116782 - DNA, 523 bp, Arabidopsis thaliana columbia
  unsure (1)..(523): unsure at all n locations
atagnagagctttgacgtcgcatgcacgcgtacgtaagcttggatcctctagagcggccgtccttttttttttttttttttttttttttttttttttttttttttttttttttttttttttttggggggcaaaactgggggccgttttatttatagaaacgacaagggattataatggcaattaatattggcataacaaaagcagggggattatcagtttgtttttttaaaaaaatcaaatagaagttacaagtttatgaaaccaagtaggttaattgggacaaccatttttttcaattaacagttcaacaaatctttttttaaatctttccctttttgagggttaaaatgcatttttaggggataagctttttatcaatggaaggcctgaaggagaaccatatgaagatggttacaatttactttataaaatttataaaacctgatttattggtggcattgtttttgcttttacatgaaacacctggtagaaactgcagatatttataatgcttacttgagg

SEQ ID NO: 116783 - DNA, 465 bp, Arabidopsis thaliana columbia
atcccccacctttcgggttgctggtccccctgaagtcccgggccgcattcccagagcgcccccacgacccaagtgatcacacagttattccaacatatgctaaagtggcgagtcctcggtcttagttgcaacagaaatcacagctccaccgccccgcagagaacgattatattatcccgcccggtcgttccattctagttgatcagaagcagtattctcggtgatttggcagctttcacgcgttggatgcgttgcatgtgatctcccagagtattagggggaggaatataatagttaataaagcgagatttgttaccctgagaagcacctgactctctccgtatgtcgaatgagcagcgctatacgagggtccagtgagtacacactgaacgccgaaggcgcgccgcgaaagtataccacgatcacagcacctgctgagcctcacatatcgcatcacggcgcccc

SEQ ID NO: 116784 - DNA, 371 bp, Arabidopsis thaliana columbia
agccagagcccggagatccctcagcatcaccccctccgagtccagataagctcactagcgatatcctctcccctcacctagaaacagtatttgcgaggagctagacaggaagaagacgctgacaataattatggcaccttcctgtccatgcgacgcaacagggccaacgcacatatagtagatcccctgcgctgtcaataaaatcatacagagagcacgagagaaaaagtatatctcgcagcgtcgctcgtctgcaccacactgcgcggagtcaagctagctcagagcacagacgacgtcgaagcgctgcagtatttatgtcatcggcgtaagtcgcatgccgagtgtcagaggccacttgtgacgccccg

SEQ ID NO: 116785 - DNA, 171 bp, Arabidopsis thaliana columbia
ggagagagcgctgcgcgacctagctgccgagggagcacacgagcgagcccatgccatgcggagatgtacaccagtaagcgtgcgcgagaataatcaccctaaggacagacgcagcgagcgcaaatagtgcttgagttgagcggcatccgcagcggcgcggcagtgtcgatg

SEQ ID NO: 116786 - DNA, 511 bp, Arabidopsis thaliana columbia
  unsure (1)..(511): unsure at all n locations
taggtaccactatagnaagagtctatgacgtcgcatgcacgcgtacgtaagcttggatcctctagagcggccgccctttttttttttttttttttttaaaggagaacaataatttttcttttacttgtctttctcgtgagatgtcaaaaggattctagttacattacaatgacaaagctttttcccttctacatagcaaaaaaaagttatgattctacaaaatacagacactagaagacagaaaccaaccaaacaatagctgattcaatcaaattccaacactggtccttaccaaggtttcagatcagcgaccggtcctgccgtccagttcaacagcttctcacctggtctcagatacacactcctctcatgaggcagcttacgagccaacccattcaatacttgatgaaacgcatcccctggttgagccggttgcgggaacagcatggcttgtttcatcgacgggtttgccaacaacctctgttttctcagtataacctctggtgggatc

SEQ ID NO: 116787 - DNA, 513 bp, Arabidopsis thaliana columbia
  unsure (1)..(513): unsure at all n locations
nnnnnnnnnnnnnnnnnnnnnnnnnnnnnnnnnnnnnnnnnnnnnnnnnnnnnnnnnnnnnnnnnnnnnnnnnnnnnnnnnnccacgcgtccgaccacgcgtccgagctgtcaacgctgggcgtgagtgagatctacaatcggtagcgaattatgggaatagtgtgccgggtatgaagtgatcaatctccgagtttcggctttagcaactacttgttctgacatttcagatgttctagttgatctttatgtactctatatgatctgggatggtgaagagttcttaggcgggaaccagattttctgagagagaaaagtgacgttatagagctgcgttccgatctttcttctagtgaacacattctcctcgattactgctttccgtctgagtgggagtcaaccaactgagcgagcttcatgcattgctgcagatgtgtaggaagatgatcccgtggcaagactgtgagtctttagctatgagcttccgagcaaatagcacaagatgatacttgac

SEQ ID NO: 116788 - DNA, 497 bp, Arabidopsis thaliana columbia
actatagaagagttatgacgtcgcctgcacgcgtacgtaagcttggatcctctagagcggccgcccttttttttttttttttttttttttttttttttttttttttttgggacttggaacagggactgggaaccacaccggtaggcgggggttcccaaaaattgggaccggtcgtttggttgactaccttaggaaacggaagcttttgggacttgggttttatttttttattcaaagggatcaatttggttttacttttaccccataccaaactggtttggccaagccctttgaaaaccggcccgaatatgctttcgagaaggatttttttaaccaaaaccaatgcgccgggggagggaggggtgattcttcccattggacttaacgacgttgtaaaaaccgggccacggtggttaatcacaaaggtttggatggaataaggttttcccgaacaaacaattcagagtaaaccggggggaggggccctgaattcatgc

SEQ ID NO: 116789 - DNA, 525 bp, Arabidopsis thaliana columbia
  unsure (1)..(525): unsure at all n locations
gattgtannnnnnnnnnnnnnnnnnnnnnnnnnnnnnnnnnnnnnnnnnnnnnnnnnnnnnnnnnnnnnnnnnnnnnnnnnnncttttttttttttttttttttttttttttttttttttttttttttttccaaaaaggggaaaaaaaaaatcaattgccatcagttccaaatatcaaaggttttatcaagacaggtccaaggctactacactataagctgttattacatctaaaagggtgtaaaaatgggcaaaagactaaatagggatgataacccacatgtcatctaaatttcaaccatcaaccccatttcatttcacaaaaaaaaaactagttttcaggttgcaacatcgatctttttttgtaaatcccggtatacatgtgtaattgaaaatgagggaggctcatacctcgtttttatgcaaagtcgacccacggttaaaactttctggagttctttagagctatagtggttacctaaatcgggatcaatcatcttatcaatggagtttgcaatacacgag

SEQ ID NO: 116790 - DNA, 496 bp, Arabidopsis thaliana columbia
ctatagaagattatgacgtcgacatgcacgcgtacgtaagcttggatcctctagagcggccgcccttttttttttttttttttttttttttttttttttttttttttttttttttttttttttttttttttttttggcaaaaaaatttacagggtttcccaaaagaatcaaaacttttacaatatttcaacggggcccacaaaaaattgaaatttacttttttacatttgtctccccactttaaattacaatccacacaaaacacacactttaatcaacacttgaggttctctacaaatctaaataaatttttttccaaaaaaaagcagccccgggaaaagcccttgaagcttcttttaaagaaacccataccacctaattggtctttttttggctaattcaaaacaaacttttgatacaaattccttaaagcaatcaccaccgggttttataacgggcccttttttgtcccctttaaagaaaaggaaacagaggg

SEQ ID NO: 116791 - DNA, 492 bp, Arabidopsis thaliana columbia
atacgactcatttagggaaagctggtacgcctgcaggtaccggtccggaattcccgggcagataagtgggcaggagttcaaaaacaagctactcgagcctggtttagttgaccacatagatgtttcaaacaaatcagtagcaaaagtctacgtgaggagcacaccgaaagaccacaaacaactgacgttgtccatggtaatggtaacggtattcctgctaaaagaactggtggtcagtataagtactacttcaatatcggtagtgttgattcttttgaggagaaactcgaagaagctcaagaagcgttaggtgttgatcgtcatgaatatgttcctgtcacaaccgtctctgaaagggtctggtatcaagagttcatgaaggtttgcaccgactttgttgctcttgggtactctgatctatggtgccagacggatgcaaggtgaattgggtgtaggaggaactgcggtaagaatgggtcggggaattttaat

SEQ ID NO: 116792 - DNA, 490 bp, Arabidopsis thaliana columbia
ctatagaagattctatgacgtcgactgcacgcgtacgtaagcttggatcctctagagcggccgccctttttttttttttttttttgcaaaaaagaatgtatacagtcattatttcgggctaatatacacacttacatttccatcgtcgttcatttcacagacttaggagattttcaacagaaaagttatctattccacaaagagagatatctcacgcattgtaaaaacagagagaatcccatcaaaaaacttaaaaccaaaaatggcgaaaaagagagagaaaatatggcttctttcttttctcagggaaaatgtttccaagattcgaaaactgatgagtaattcaacgaagaatcattgttattatacgtaaaaacttcttcttccgtaccgcttaaccaccgaggcatgtacaccaaatcctccaacgagtcaaatatcacgaactcgttcgactcgtttaggctcgttcctagactcggtaacttta

SEQ ID NO: 116793 - DNA, 493 bp, Arabidopsis thaliana columbia
  unsure (1)..(493): unsure at all n locations
tttaggacnnnnnnnnnnnnnnnnnnnnnnnnnnnnnnnnnnnnnnnnnnnnnnnnnnnnnnnnnnnnnnnnnnnncttttttttttttttttttttttttttttttttttaacgaacatgttcttgtccccatcatcatatgatgatgattgcaaacctaatattgcatttttattttattttgccttttgttatgttttttggtagcacttttgggtccatattttggacacgttggcgccatgtgttctccaaaagaacaatacataataaatttggataatggtataactagtctttagaaactagatatagatgaggtgattagttgtgatatgctaattgctaaatacagcctattgtggtccgcttttggtaaaccaaacagattgtctttgatttggtcctctttttttttttttttagggcggtctgttctgatcggagttgatcctgattatggcagccacaatgttctgagggaacttccta

SEQ ID NO: 116794 - DNA, 490 bp, Arabidopsis thaliana columbia
  unsure (1)..(490): unsure at all n locations
tttaggacgnnnnnnnnnnnnnnnnnnnnnnnnnnnnnnnnnnnnnnnnnnnnnnnnnnnnnnnnnnnnnnnnnnnctttttttttttttttttttttttttacagaaaatcttaagcattgtcgacagtagaaagtttattaacatttgcttctgtctataatcgtaaattaattatccaacaaatgaaataaacgcataaaagagggtcgcaaaaaccgtgaaagagaccaaaaataagtatggatatctgaacagaacttggatgtcctgagacgcaaagttaggtcgtggcctggcctataggcgaatcgtcttgaggaatgtctcatacgcagtctggaggcggtttctatggtcctttcccttagtgtttttcagatagtgagccactttgataaacccagcgtgttgttgaaacaacacagacgttgcatcttcctcttgtggcctgagcgatacttcttgttctctgttaggttttggcatt

SEQ ID NO: 116795 - DNA, 126 bp, Arabidopsis thaliana columbia
gttccccccgcggtgcacggaccgaccccactggtatctactcactataatgggtttcaatgaacggagatccccctcttccgcatatagctctcgtcctttgcccaacattatctcttcatccgc

SEQ ID NO: 116796 - DNA, 516 bp, Arabidopsis thaliana columbia
  unsure (1)..(516): unsure at all n locations
tttaggacgannnnnnnnnnnnnnnnnnnnnnnnnnnnnnnnnnnnnnnnnnnnnnnnnnnnnnnnnnnnnnnnnctttgtttttttttttttttttttttccgtaaaaatcaaaatgttttagagtaaaagaaacaaccacatgttctggggatttaaaatacataaacacgaaaagaagaataatccaaagctgttactgaagtgataagtgaaagagtttacctatcatagagttaggacttgggatcatatatttttttttgaatacagaaaaaaacagctatttaccctctctatggctactattaacctgaggaaatgatgcatattttgaggctctaggtggttcgttgtctaacatgtcggctggtggtatcgcccccgccgtcagaaagttgggcccacacgctctgagactttgctcctccagtactggtactaccttcctggggaccagccaccggcttcagaagctcggactggagggtcacacattcatccttcatctgttgg

SEQ ID NO: 116797 - DNA, 499 bp, Arabidopsis thaliana columbia
actatagaagatctatgacgtcacctgcacgcgtacgtaagcttggatcctctagagcggccgcccttttttttttttttttaatatgatatttttttgcttagggacaaaaaaaaacagcatcatcacaagcatcctaaagaaaatagaagagataaaacagagatataaaactaaagtacacaagacttcttgacacaaccataaggttctaaagagaataaagaaaataaaatccacataacaacagatagttcaattcccatctcaactagggaaaatagattttttgtaacaaactcaccaccacgaaccagataagacaagacacacttagaagcatttcctgtgaacaatcgatggacctgactcatcgtactcactctttgaaatccacatctgttggaaggtgctgagggatgcaaggattgatcctccgatccagacactgtattttctctctggcggggcaaccaccttgatcttcatgctgctaggg

SEQ ID NO: 116798 - DNA, 167 bp, Arabidopsis thaliana columbia
ccgcatcaccgcaggcccccccgcggagacttcttttggcatccccttaggagtaatcttattatgtgagcggcggccacgtcgacgactttagtttctagcccctcgcccggcactccgcgtacacctccagtcgttgtcatagagttattatgtttgtgttcgct

SEQ ID NO: 116799 - DNA, 491 bp, Arabidopsis thaliana columbia
actatagaagatctatgacgtaacatgcacgcgtacgtaagcttggatcctctagagcggccgcccttttttttttttttttttttgtcatcagatgcaagcaatatagcaaatgagtagcatacatatatgtctatctatacaaaaccaattcaagcagaaacattagattgaagatcgaacaataaaagagaaggcactacgatgtaccgagtgagattgatctcagaagttttgaattttctgggcttaacacttaaacccatggcaaactgagagcacgatgatgagaatcagtgcgataatgatggcgagcactatgagttttatcttcatgttctgaagccacatctttcttctcatctgcgttcctgttgttctgaaatcttgtgcctgtgagcgaagattttcggttttgtccaccaaaagctcaattttctcaccacggtcaagaaccttctcaatgttttccatcattacacccttaactt

SEQ ID NO: 116800 - DNA, 502 bp, Arabidopsis thaliana columbia
  unsure (1)..(502): unsure at all n locations
nnnnnnnnnnnnnnnnnnnnnnnnnnnnnnnnnnnnnnnnnnnnnnnnnnnnnnnnnnnnnnnnnnnnnnnnnnnctttttttttttttttttttttttttttttttttttttttttttttttttaaaaccaaacccaaactggttttacaataccaaattttagataagtttcaaagccttttcttttgggagattaaaaaaacctttggtggaaaaaccataagggttatactaaccctttccaattatttcctcaaccaggaatttttaaaccgacctagttaaaatgaaatttggttgaagggggatttttaaaaacatcgggcagggaatgaaacttttctgggggaaaggatcaaaggggggggttttgaaaatacttccactttttgaatttgcctccccccccaaacatgccatggttcccgggctttccatgctttccgggcttgaatttgcctccatgctttccgggcttgaatttaccatgaccaccatgg

SEQ ID NO: 116801 - DNA, 477 bp, Arabidopsis thaliana columbia
actatagaagatctatgacgtcacatgcacgcgtacgtaagcttggatcctctagagcggccgcccttttttttttttttttttttttttccaactaggaaaaaaggaaaatcattcaggggatggcgaaagaaaagtcttcacaatcgggcataccataagagtctcaataaaacaagacaaggctaagagggggggagtacccaccctggggatttttttaatacgagtcttggtgaaccctaaagcttgccttggaactaagacaggggagtcttagtttggttaaaaccgttcatcttcctgatatcacccaccaaaaccgaaccctgagaacttggttgaggagggtcacaaaacctcttttcccaatgatccaacaccctctgggggaatgcctggcctgaggttactgccctaatctgtctttaaaaagggaatgattggcgccctgcgggtgttgcctgaagctgccat

SEQ ID NO: 116802 - DNA, 494 bp, Arabidopsis thaliana columbia
  unsure (1)..(494): unsure at all n locations
nnnnnnnnnnnnnnnnnnnnnnnnnnnnnnnnnnnnnnnnnnnnnnnnnnnnnnnnnnnnnnnnncttttttttttttttttttttttttcctccgtaaaacctgggaatattctcaattaatgaaacccaaacccattcgatataaattacaatacaacgaccaaaacaaatcaaacattataaacaaataagtataggtgtatatttgttttggtctaaaatgctctgcggggagaatagcttgccgggtgagttatgagtgaagggtatgtttcttctttattctaagagacaataggaaaatggtggccaggaaggttcggtggatcgcggctgatcagattggccatatattcgcaagaggtagcaagtaatgctctccgttccaactcaccgtcttgattcctggtactatgtcagtatttagcccagaaatgtaacatgtgggtgatgtggctgaggggatgcacgtttaaagcgtgaaagcgcaac

SEQ ID NO: 116803 - DNA, 493 bp, Arabidopsis thaliana columbia
  unsure (1)..(493): unsure at all n locations
nnnnnnnnnnnnnnnnnnnnnnnnnnnnnnnnnnnnnnnnnnnnnnnnnnnnnnnnnnnnnnnnnnctttttttttttttttttaaaaaaagtgattgctttattacacactgtaaacatattacatcaaaagcacacgaaaaacgttgacaaaaaaaacaaacaatatatatatatatacaacaacaacaacaaaaacaacaacaacatattagaaaaagcgttgcagaaaaaatttaaaagaaaacagataactcaatggttgtcgacatgtattgtagggtttcccctacttcaagtgtttactagaacatagaatataagcaatcctatccactgtggctaccaaaaatattggatacggacaacggatattgcaaaaatagcaaataggccgagaagcagaattgttgtgttgcaaaagaattgcaatttcaccaatttcgtaagtttgaccagccttgtaatatggatcaggaccaagtaagcaatt

SEQ ID NO: 116804 - DNA, 489 bp, Arabidopsis thaliana columbia
  unsure (1)..(489): unsure at all n locations
nnnnnnnnnnnnnnnnnnnnnnnnnnnnnnnnnnnnnnnnnnnnnnnnnnnnnnnnnnnnnnnnnnctttttttttttttttttttttattttttatttacttctttttctatttttgttttactgtttggaaaacaaaggtctttttatcgggaaatccgacttaatccacccggatccaattatgggcgacccggagtgctgaaaccacccccttggccttgcttcattcaacccatgaaagacccactctccttcccacctgagtggagtgcacagatttctaagagggtaaaaccaaggcaaccgttcgttaccctctaaacagacccaacccggttgatctgttatcggcggggttcacaagcgaccaatccctaaatggatgccgctcaagggcgcgtaccatggcacctgctaaaccggggctcttgtttcgaaaataatctgaatggacccctccgtatgttagatccaacatcccctgag

SEQ ID NO: 116805 - DNA, 436 bp, Arabidopsis thaliana columbia
gggagatatatttttcgggtgaagcccctgcccactcccagtctagttatcctggaccctggagctcacgcgtagtagcaccccctcccgtcccgaatgtcgtatccccgatttcgtcacgcaccgcgtgaacgatctgtgctgaacttaccttcatagccgcctgcgtcgtctcattttgtctcaacgtatattcatctcaggtaagaagcctcaaggcctggtcacacccctgccccaccgtcttcaaagatattgtagcggaacaagacgatgaccgcgaccaaaggtgatgaaacacattttctgtcgttatacgtaccgaagggatgaaacgcggggcgacgcgcgaaggcagaagtcgaagagatcggcactatctcgcttcccgttccaatatgatgtcgtgttgttccaggtctggccgggcggctcc

SEQ ID NO: 116806 - DNA, 500 bp, Arabidopsis thaliana columbia
  unsure (1)..(500): unsure at all n locations
actatangaagattatgacgtcgactgcacgcgtacgtaagcttggatcctctagagcggccgcccttttttttttttttttttttcaacatctaaaactcactctgattcagacaggtttcaacatggatttgataaggttttgttacatgacataactaataatacatgtttctgctccaaacatcttgagctatggatttaaccaagttggttctttttatgtttccctctagtaggtggggaagttggggttgacattgtctgcccaagcttcagtcctccaattatatccttagccgaatcaaaacccgactaacgaagatattgaaccagtttttggtaatcattcccgggtctggatacaacgaggacactaggattttggcaagattcaaggttcgcatggcccttctccttttttatagaaactgaaagaacttcttttacccgagtctcttaagttgcaagaggtatgtggattgaacccggggaaaaac

SEQ ID NO: 116807 - DNA, 494 bp, Arabidopsis thaliana columbia
actatagaagatctatgacgtcaactgcacgcgtacgtaagcttggatcctctagagcggccgccctttttttttttttttgctacatttataactctacttgtaaaaattctgtcatcactaaggtcaacaaagaaacgaatacataatcgaaaaagaaaaagaaaagaagaaacagagtaaacaaaagtcaaactatgctttgcttactcgttgaacatttgcctaatacaacagcttcactgaaccaaacagtatggtttttgcgtgttaatagtccttcataaaactccacaatcttcgctgatacaacaactcttacacttggtctcaatctgaaaagtgaaaccatctttctcttacagggtcactgaaatcaattggttcctgctccgatgtgaagcagctcctcggggattgcagctggatctaagtcccaacagttttcgggaaagccgctggttgcatctttaagaaaccaagacggcacttga

SEQ ID NO: 116808 - DNA, 348 bp, Arabidopsis thaliana columbia
gagagaattttttgcggggccctctactcggcgggcctagtattagggccagcgccgctaccgctctgtcgaagtactccggctaggaagcagctggcagccgatcctcgctccacatcggtataatcctggccgtatgggacaccgtcagagttgtagacgcgacgatcggctgcgccgtcctggaggtgatctatattaagccgcctttccgatacgtatcctgtgacctctttatgagcgatatgtggccctgcacggggcagcacccgcagatgtgcataaaggtgctcaacttgtcaacgtacaaccactcacccgccctagccgagagtccgccattgcaga

SEQ ID NO: 116809 - DNA, 466 bp, Arabidopsis thaliana columbia
gcacgcgtacgtaagcttggatcctctagagctgccgccctttttttttttttttaaaacataactatcgccattaaataacatatactttatataacttcaaaacattctattcatctcccgccagaaagttgagaatcagcgatggaagatccaccggtaaaccctttgaatacggaggaggaatacttttttcctaattcactaaatccgtcatgaaccccaaacatcatcccacttccggacaagtccaacggagacaattctggtaactttgcatctcctcttagataatgtagcacttgtctcatacttggtctagcccttgggtcagagtgagagcacaagagacctagcttcaaaaccatttccacctctttttcatcacattccgaacccatattcggatctttagcagccaagatgtctcccttgttccacaacccgaaaacccaatccacgagca

SEQ ID NO: 116810 - DNA, 486 bp, Arabidopsis thaliana columbia
  unsure (1)..(486): unsure at all n locations
nnnnnnnnnnnnnnnnnnnnnnnnnnnnnnnnnnnnnnnnnnnnnnnnnnnnnnnnnnnnnnnnnnctttttttttttttttttttttttttttttttttttttttttttttttttttttttttttttatagggaaaagtttttattagaacattacaatgtttaaacgactaaccaaatttgatacagtacaaacgatcccgggggattaaaacttacgctaagatcaacactgaaccggcgtcttaaacgttggcgtttaacaacatacactagtcatgggaagctacattacttcggggaaagaaaaaaaaaccttcaaaatctttagattgggaacctactggatgtacagaaaccaaaatgcatatcaatcagcagaatcgggccactcttccgggtggggagagagaaaaaaaactcgccggaagattggattaccacgaaggggaaataggattagggttgaatgatttggcaacggat

SEQ ID NO: 116811 - DNA, 491 bp, Arabidopsis thaliana columbia
  unsure (1)..(491): unsure at all n locations
actatagnagatctatgacgtcagcatgcacgcgtacgtagcttggatcctctagagcggccgccctttttttttttttttttttttttttttttttttttttttttttttttttttttttttttttttttttccgaggaaaaaagggatatgtatcacatttttgtgggtaaaggacgcccaaaatactttgataaagggatttaaggaatagatttttttaagaagaggtaacctaaaaggggcaaaaaactagacaggaaaccgatttttcctccggggggaagcttttttttttcctaccccaaaggggaaaaagtgtttttaccaagcttttagcgctcttttttcttttttaaacgcctctaacaatatacactgccttattattggctataagatcccacatccaatggggggccaagatataaaactggcccttggcggttatttttcggatagtaattccccggttaaaaaacaaaaccaaa

SEQ ID NO: 116812 - DNA, 489 bp, Arabidopsis thaliana columbia
  unsure (1)..(489): unsure at all n locations
ctatagnagatctatgacgtcacatgcacgcgtacgtaagcttggatcctctagagcggccgccctttttttttttttttttttttttttttttttttttttttttttttttttttttttttttttttttttttttttttttgggggggacaaaacattcataaagtctatttaagtttcctaaccattcaagtaaaaacaaaacagggtttggtttttttttaagattaccagaggaaaaaacccaaaaaaaaaaggcggtttaacaagaagctaatgaaccggttaactcttaaacatcctggcaaacaaagaatgtttttttttactggcccacacgggaaaggattttcccgggggtgaattacaaatcaaactctgcctaaaccctaaaaggctaaataaaacccttttctttctaatggttaacaacaaatgtccgggttttcccctctggccagaatttgtacccaaggaaccaatagaagg

SEQ ID NO: 116813 - DNA, 501 bp, Arabidopsis thaliana columbia
  unsure (1)..(501): unsure at all n locations
gaatttnnnnnnnnnnnnnnnnnnnnnnnnnnnnnnnnnnnnnnnnnnnnnnnnnnnnnnnnnnnnnnnnnnnnnnnnnnnnnctttttttttttttttgtgaacatgacgtaacaaatctaaatccagagtacaattagaatctgaattgaatcttacagaactaagtacaagtacacaatatttagattgaatggtataagctcgacgaagttgtctgcttcacatctttaccaccgaacaatcctttccccaaaacccaaccttcaatcatatcccttgaattcacagctttatctgtcggaacaaaatgaccagctcctgtaaccgccacgtggcacaaattcccccatctctgaacataaccagcgaccacaccgtcttcatccttccacacacgcctctccgccgtcgagaacattcccaatcctgaccagttcatagtcttcatccactcctccgtcgaaacgacgccgtctcttagatcaagcataccttgat

SEQ ID NO: 116814 - DNA, 516 bp, Arabidopsis thaliana columbia
  unsure (1)..(516): unsure at all n locations
nnnnnnnnnnnnnnnnnnnnnnnnnnnnnnnnnnnnnnnnnnnnnnnnnnnnnnnnnnnnnnnnnnnnnnnnnncttttttttttttttttttttttttttttttttttttttttttttttttttttttttttttttttttttttttttttttttttttttttggggcccaaaagcatttttttaaaaaaaccctttttgggggggtttaaaccaaaggggggtccttttttttggacattgggtcaacccaagaaatttttcgaaccctttaatttattccaaaggttttttaaaaaaccaaaatactggttttaaataaagagttaacccatgaaacatttgggtggcccctggaaaccaaaactgggatattggggggggttcccgggattccaaaggaaaccctttttctaaatttattcaagttttttcttttaattccccattccagtttcccggtggggagaaccccaatccgaaaaattcaactggggggctgtgtaaaaaactggtt

SEQ ID NO: 116815 - DNA, 513 bp, Arabidopsis thaliana columbia
  unsure (1)..(513): unsure at all n locations
nnnnnnnnnnnnnnnnnnnnnnnnnnnnnnnnnnnnnnnnnnnnnnnnnnnnnnnnnnnnnnnnnnnnnnnnnnnctttttttttttttttgggcagcatggattaaggagcttgagccctctttgcaagatgataggtgtttccccttttctcatcatgtctcagaaactcaatctcaaaaacacaaatctatacaacaaatcataacctaagaagaaagaaataaaaaccttatcttaaaaaaatcatctaagcaaaccatttcttatttcatcgttctcttgcggtcacaccgatatctttatcacttgtcttttgatctgctctatgcacggattgcttgaacgctacggttggagcgattctgctatttctcctttgatgctcgagaacaagttccccagctaaccagtcaagcttctcgaagttgctctgttcatcgattcttttacctccaaacaaaacagattcaacattcttttgtttaagcatctcctctgctactcccatca

SEQ ID NO: 116816 - DNA, 516 bp, Arabidopsis thaliana columbia
  unsure (1)..(516): unsure at all n locations
taggtacnnnnnnnnnnnnnnnnnnnnnnnnnnnnnnnnnnnnnnnnnnnnnnnnnnnnnnnnnnnnnnnnnnnnctttttttttttttttttttttttacgtcaacaacaacatagattacttttctgagggatcaacaaataacgcataacacatgattatcacagtttttcaagttccaaaatttcgatacagtgtagaccaagagggttcaagtttttttcagggacaaaatcgtctggtgtctcagcttgaagatcctccgttcagctttcgttttttcggggatggcgacttaaataggtttcgaacagatgttaacggatcatctaccttgaagagggaagaggatgatggtggagtctgacaagatcctttatgccgttgtaatgcagacagagtctgtcgccatccagggcctcttctacccgttgaccagatccaaggacagaaatgcctatgttgcttgattggatcaaattccatctgtttgtttgatgtcgctgatttttctg

SEQ ID NO: 116817 - DNA, 495 bp, Arabidopsis thaliana columbia
  unsure (1)..(495): unsure at all n locations
nnnnnnnnnnnnnnnnnnnnnnnnnnnnnnnnnnnnnnnnnnnnnnnnnnnnnnnnnnnnnnnnnctttttttttttttttgaaggtacaaagattgagaaacgaataaaaccagacagatttacatcgtcaaggacaagtacattcaacagtacatcgtcgttagtgtagggaaagattggtgagctatatgggaagaattggagaagtatcaaagtcattattaccaaggattccgtttgatggatcttctgatttcaacgaagagtctttcttgttccgttctagagatgttgcctcgaatattccaaaccctaatactaagcaacaaacgatgaaaccgggaagagaaaaatccatctaataagctaactccatgactattatgcatacacctgctaccatttaaatgcctcggcgaagaaaacaccatatgcaatctctcttctgcgatattatcaacgtagaatattaggatgatcccgaaaataaggg

SEQ ID NO: 116818 - DNA, 492 bp, Arabidopsis thaliana columbia
  unsure (1)..(492): unsure at all n locations
nnnnnnnnnnnnnnnnnnnnnnnnnnnnnnnnnnnnnnnnnnnnnnnnnnnnnnnnnnnnnnnnncttttttttttttttttttttaaaagctttattattcacagttttattcatggcaagcttaggaacagtccataactaagatgaaagcggagaagaagcacaagtgcgaaaaagaaaccaaattgaaagtgttattaaaagtattcagagagacgaattggcttcacttcctcgacgagggatactgttaacacgattgtacacatccaccttgaagttggcaccgcatagaactccttcactgtctaccctcggcatcgccttgatcttgttcattggatgctcaaagctcattaaccctccttcactatggaacatacaccctgtaggaaatggagcaaaagatttagcacaaccctctttgataacatccaaatcatctgatataacaacagatccatcagcagctatgccccagtatagcttc

SEQ ID NO: 116819 - DNA, 484 bp, Arabidopsis thaliana columbia
  unsure (1)..(484): unsure at all n locations
actatagnagtttctatgacgtcacatgcacgcgtacgtaagcttggatcctctagagcggccgccctttttttttttttttttttttttttttttttttttttttttttttttttttttttttttttttggggggccctaaaaaacaataatccataaatttttttacaaaaaagtgtcataaaagctttttgaagtaagcaaaatgatttgcagagatttttcctttcaatggcctcatcaaatagactctttaaacccatcctggattccaaaatgaaaataaaatcccgaccgaataaaaccgatgaaagatatggcttcttcaggttgcttttgcctttggagcctttttcctgagttgcctaccgagtttccttgagtttttcattccaatgaagaagagcagtcctccaagaagagccaagctctgggtaaattttgaaaataggtggccgaattcctttctgtcaacatcggaatt

SEQ ID NO: 116820 - DNA, 538 bp, Arabidopsis thaliana columbia
cttgacgtcgccatgcacgcgtacgtagcttggatcctctagagcggccgcccttttttttttttttttttttttttttaacaaaattccgttaaaatttaatcggaaaaaaggttccacacaaaccgatcaacacacaacaataaaaactaatctcagacgaagcaaagaagatacacttctttacgctcaaagaagtcctagaagagcggggcatctttatatggcactgggactctcaagcgtcttggatctcccttcaagcagtgggaccaatcgcaaccaagcaatcagtggtgttaataacacggtaacctctgttatagctaagtagctcatatatagtctagagcgtggtcttcccatactttcctcgatcgaagagacactcacgccgaggctttgggaatcaacattcaaatgggatcttgaccaatacgtccaccatatagagcagctatgagagactttccttcatgcagacttaaagcactctttcccactggaatggcctttaagggtacaaggaattgagact

SEQ ID NO: 116821 - DNA, 492 bp, Arabidopsis thaliana columbia
  unsure (1)..(492): unsure at all n locations
nnnnnnnnnnnnnnnnnnnnnnnnnnnnnnnnnnnnnnnnnnnnnnnnnnnnnnnnnnnnnnnnnnnnnnnnncttttttttttttttttttttgattntgaagatgacttagatttttgtttagccttgctactccggggaataagtatcgtcttgaaagattgataccagtcatggaggttaatgacatcagcgtgctcttgcgccagtttatacaaaatcgatgtatcatgcatggaaggcagtagagttgtgcctctctggctgcagcacacacagtggaggatatcgtgagattccagtagatctaattggatcctgcctctcgggtctccaagtaaagcagattgaagtttatcgacattcttgaaacacaaaatttcgtggaaaggaacactcttaactggcttcatatattcccttagcatgaattctatgactgtggcaaccttatcagtcatggctttaagctctttttcaagctttaattg

SEQ ID NO: 116822 - DNA, 493 bp, Arabidopsis thaliana columbia
  unsure (1)..(493): unsure at all n locations
nnnnnnnnnnnnnnnnnnnnnnnnnnnnnnnnnnnnnnnnnnnnnnnnnnnnnnnnnnnnnnnnnnnnnnnnnnnccacgcgtccggataattctcccatggcaccctccggcaccgtcgccgatcctccgcaatgttcaaccaccgattcattcaattccagcgacacagcagagaatgatattcggccattttttgtacttcacaaggcttcgtctggtaatcacaatgggaaattaactgggattgtgaaaagcaagcggaggatcgaatcaccttcacctaaaattgctaaaagatctgaggtcgaaagcgtggaagaggaagatggccagtttttctcaactcttcgctttaaagttttcgagactgtctggtcgaaaatcgagaaaacaattgaagatgtcctgagaaattcgaactctaaagtatttagtgggattcatgattggatacgggaatcatttgaatcgatcatattatctggagcact

SEQ ID NO: 116823 - DNA, 500 bp, Arabidopsis thaliana columbia
  unsure (1)..(500): unsure at all n locations
tttaggacnnnnnnnnnnnnnnnnnnnnnnnnnnnnnnnnnnnnnnnnnnnnnnnnnnnnnnnnnnnnnnnnnnnnctttttttttttttttttttgatattaaatttattatttgggtttccttttttaaaaaaatgaatccaccattgatacacctttacagtggaaaataaaaaaattgtgtttttttcttttggttttggctacacacacaaactcatctagaactatcacagaaaggaatggcgccaaaatcacatcttcgatgttgctcctccgtcgcaacagtcccacggcggaacacggaggcgcaatcaggtaaatcaccgagatcaccgaacaaagactcatcttcctcttggcctactgaaaaacctctctctagagttacgtcgaggaaattcgaagaaccagatgatgatgagatcgacgcgtcgtaaaaccacccgaactctccgatttcgctgtagcagccgcctaatagcaacggtgagtctac

SEQ ID NO: 116824 - DNA, 512 bp, Arabidopsis thaliana columbia
  unsure (1)..(512): unsure at all n locations
tttaggacgannnnnnnnnnnnnnnnnnnnnnnnnnnnnnnnnnnnnnnnnnnnnnnnnnnnnnnnnnnnnnnnncttttttttttttttttttttttaaatcacaaatgtgcatattcaatacttttccatcaatacaaaaatgtaaaaatacaaaatctccttgacaagtagtatttgacaatatttaaaaacctataataattcttaacaaagtgtaaaaagaccagtaaaaaaaagcctaggtagaagaaacacaagagattaacaataagaaaagttaattaagaaccaatcaattttgattagactagagtgagtgtgactctcttcagttcagcccaatgacttgtacctgcaaagaaccttacatctcaaaaccctatctaaaacataaaacccaggcattaccataaccttaacccgtgccgggccacgggacaatgctgatctctgcctatctgcacccatatcttccataaaacttgattcaaactctctgttctcctcaa

SEQ ID NO: 116825 - DNA, 611 bp, Arabidopsis thaliana columbia
cgcgccgacagcgggccccggcgggcgggcgtcggcaatcgccagttccccagccgcatccattattggggtaaggccggatcccccccggagtgccctcgacccgcgagttcccggattctcccccgctcgaccgtcagagaatcaattaacctgtccgctctcgtaagcgtaaaaagctgactcacctacacatacctagttaaccaactaacatagctatctcctctacgctagagattcaactctgtcatcacccatcctccctatcactaggagtacacgagaagcgctgttgtcttagtggcacggtgctgtcgtccagcgcttccgagcttctcttacggtcacctccgctgtcccgagcgaaagctgctaggagtgccctgattgtcagtcacacggtcactagagaagctccgggactcgcgctccaagctcttctattccctgtggaggcaactcccgtagtctagggagtggtgagagcccgcaggacgcggacggacacagcgacgcacagaactagattctaagcaagcttgctctgagcgctaactttatatatcttatctgaatcatggcgtcggtggtgcattttaagattataa

SEQ ID NO: 116826 - DNA, 513 bp, Arabidopsis thaliana columbia
  unsure (1)..(513): unsure at all n locations
cactatagnagagtctatgacgtcgcatggcacgcgtacgtagcttggatcctctagagcggccgccctttgtttttttttttttttgttttttttttattttttttttttgtttttgttttttttgtttcaaatattattggttcttctttttttaaaaagctacgaggtacctcctttgggcaaaaaaaaaaaaaaaaactttttacggcaaaaaaaatgcactttagcaggcgggggggggaaaatcaagaccgggggtttattacatatcacgaaaaaaagcggggagggagggacatttgatggggggggggaaagctacactgaggatctcaacccgccggggggctttctttgtttatggggggtaaaaaaaggttggtcgttgctgagggaacaaaaacccccgagaaatgggttcttattagaaaggaaacaccccgccccaggggggggtggaaatcaccccaaggaagaaaagtctggcggcgggggggggcccccccgggg

SEQ ID NO: 116827 - DNA, 512 bp, Arabidopsis thaliana columbia
  unsure (1)..(512): unsure at all n locations
ttaggacannnnnnnnnnnnnnnnnnnnnnnnnnnnnnnnnnnnnnnnnnnnnnnnnnnnnnnnnnnnnnnnnctttttttttttttttttttttggaataacattttaattatagatagtttcaatcatttaaacttacaaaattcaaattcttgacacaaagaaatacagactcatacaatataaaaaaaaacataaacataaattccttcctccaaaacatgtcacatttctatttctcccatccgatactaggaaatcaagagttattaattttcctgcaattctttctgatctcaccactcgaacctgtcaagggagagatattccccatcttgatcatcgactccgcgaactgctcgaagaactcttcttgatcctctgcatacttcttgacgagctctcttgattgctcattgctagagaacaagacctcgtcggaattcaacagtcccatgttctcgatcaagttcttgaagtagctgttatcaaatcttccagcgctgttgat

SEQ ID NO: 116828 - DNA, 146 bp, Arabidopsis thaliana columbia
  unsure (1)..(146): unsure at all n locations
ccaggctcttatccgactcacttatagggagagagctggnccccctgcaggtccctggtcctggaattccgcggatctacccagccggtcccagtgtgagaaagtatagctttcgacagcagtggatactatctcgcagtagctag

SEQ ID NO: 116829 - DNA, 428 bp, Arabidopsis thaliana columbia
  unsure (1)..(428): unsure at all n locations
gacgtcgcctgcacgcgtaccgtagcttggatcctctagagctgccgccctttttttttttttttttttttttttttttttttatttttntgantgaaaaaccagggaaaaggatttattttctggttaaaaaaaaacttaatcccaagaacatgtttatagctatctggtttctatttattccctttgggctctatacatttttttttaacgggggggggacttctttgtgaaacctactttgtataatcaacattattccggaaaattaccaagaagcggttcttttttcgagaagacaaaagcagggaagaggggaaggtccgccccccaagatttgggcgaatactttaaccgagcgagtcagctggccgggcgatcgtcgagagcgccgcgggtatagctgaggggttgccggcggggcgtgg

SEQ ID NO: 116830 - DNA, 505 bp, Arabidopsis thaliana columbia
  unsure (1)..(505): unsure at all n locations
tttaggacnnnnnnnnnnnnnnnnnnnnnnnnnnnnnnnnnnnnnnnnnnnnnnnnnnnnnnnnnnnnnnnnnnnnctttttttttttttttttttaaaaaaattggaaatattatttactttcattgttagtttagtagtaataattaattgatttagttatttagtgttacccccgcatgagaagacttttttttatccctctaaaactaattattctctacgaaaatttcagtcgtctatacattaatttagcatccgatttaggaaaaagaagaagaaaagaattacgatcaaaaacgaccagatttagtcaaatttggacgatgcatcttctgtagcttggtaaatcgatcgatatcgaaatcaagcattttaatcaaacgtttctgcttcgtctcgaaccggcttttgtaaaaaccttcaaaggaaggttcctttgaagttcggaggaagaaggcggtaccagccatgaaatatggcgaagttacgtaaaagcatatgg

SEQ ID NO: 116831 - DNA, 483 bp, Arabidopsis thaliana columbia
  unsure (1)..(483): unsure at all n locations
cgattgatctaggtacgactatagnnagattatgacgtcgcatgcacgcgtacgtaagcttggatcctctagagcggccgccctttgtttttttttttttttttttttttttttttttttttttttttttttttttttttntgtggcaccacccaagaatcgatacattcattaatattttactaacattatacaagtagaggggggaaagcttttacaagaaacacataacgttttttaaattctgggggtataaactcattggtttggtttaaacagcttttgccatgtcctatactgatgggagaaaaaaaatgggtgggaaaaggttagtattttaagacttctccctcattttgggtttaacaaaaacaattccggggacaaaaccaaaaagatggcttggtggagtttggaaacgggggcggagcattggaaaaaaaccacccccacgattgattgaggtttggtgtataggaatcc

SEQ ID NO: 116832 - DNA, 497 bp, Arabidopsis thaliana columbia
  unsure (1)..(497): unsure at all n locations
ctatagnagagtctatgacgtcgccatgcacgcgtacgtagcttggatcctctagagcggccgccctttttttttttttttttttttttttttttttttttttttttttttttttttttttttttttttttttttttttttttttttttttttaaaagaaacaagaaactttttgaccttcaaatgggggaaaaaaaaaagcaggtttctattcccctgtattttgaaggggggccccccaagaattaagaaggggaaaaatcttttcaaaagggtttaaaggggggtggggggttcaaacttcccccaaatatgaggaaagaaaacgcttttgaaaaagagcaaaagggcaaaagcccccctttaagggggtttaaaaaaacttttgggcggaaaagaaaaaaatttccaacccctagaagaaaccgagcggtttctcttaaaaaataccgggggggccctggggggggttggggccagggagttcctagaaaaaa

SEQ ID NO: 116833 - DNA, 496 bp, Arabidopsis thaliana columbia
  unsure (1)..(496): unsure at all n locations
nnnnnnnnnnnnnnnnnnnnnnnnnnnnnnnnnnnnnnnnnnnnnnnnnnnnnnnnnnnnnnnnnnnnnnnnnnnctttttttttttttttttttttttttttttttttttcaggagaaacagtcaaatccaattttggtcaaacgaatatgtatatgtgttatttaccaacaacgatttctatattgacttctttttttttatgtaagaacaaaaaatagaaaaccctcttgttttcaagtttcaatgtcgtcgtccatgttcttcaacttgggacttggaagaatcttttggagtttcaggcaatatccagctcgagctcgttgaaccactcatgaagctcattgcattctcaaatgttctctcagagacgtaccctggcttggcattggcttccgttatctccacatcaccggtcaacatacctaccactcgggacatagttggtcgtattgcatgatctgtttgtgtgcacaagaacgctactcctattaca

SEQ ID NO: 116834 - DNA, 498 bp, Arabidopsis thaliana columbia
  unsure (1)..(498): unsure at all n locations
nnnnnnnnnnnnnnnnnnnnnnnnnnnnnnnnnnnnnnnnnnnnnnnnnnnnnnnnnnnnnnnnnnnnnnnnnnnnncttttttttttttttttttttttttttttttttttttttttttttttttttttttttttttttaaaacaaaaatatttcccaaggtgggcaaaaccaaatccaaacgaagacaactttaatagaggaggtttttttataagaccccagcaaaatgttttaagatttgtgaaaactgacgaagttttataagaaaggccgcaaagaaaagttgggggggaagaaaaaggggacttacccctccttttgggactcaaactgagggctttgaagccactccaaaaagggtttaacatttttccaaaccggggagcttttgtcagttccggggaaaccctttttgtaccaatcaaaaactaccttttcctaaatggggccttggccgacaatgctttaaaaaccaaagccacctttttcaaagct

SEQ ID NO: 116835 - DNA, 512 bp, Arabidopsis thaliana columbia
  unsure (1)..(512): unsure at all n locations
taggacnnnnnnnnnnnnnnnnnnnnnnnnnnnnnnnnnnnnnnnnnnnnnnnnnnnnnnnnnnnnnnnnnnnncttttttttttttttttttttttaatccttttattcttcattgtaaatggtcaaaactgagtacactaacacagccgccatggaatcacaaagataaaaacacaaaactaaatttagtaatcaggtttctagtcataagctgaactgcgaaatctcttgatagtagaatcattaagtatgtcaagcataacagaattggtcgtacacctaggagtcttaaactggttcaagccaccgcatttcccaacgcacctttccgccactttcccaaacgttcctcgttccacaactcgtagctcaagcggtccgatcgagttcatgcgcctcgacactacataaccatagtccacaaaagcagtatccatctctctgcaacattcttcaagagccttatcatctgcttctcctctgatttcccagtagattacatagtgacca

SEQ ID NO: 116836 - DNA, 478 bp, Arabidopsis thaliana columbia
  unsure (1)..(478): unsure at all n locations
acactatagnagtttcttgacgtcgcatgcaccgcgtacgtagcttggatcctctagagcggccgccctttgtttttttttttttttttttttttttttttttttttttttttttttttttttttttttttttttatttaaaaacaaaaccaatttttttgggcaaacacctgggggttcttttaaaaaggcccccccccgggaaaaggaaaccacacatttcccagttgggggaatcttttttttcccaaagagtacccaaaaaaaccgtgggtcgaagcccccaaaaaaggaagattggaccccaaacaaaaacaaatcttttatgacaaggagggacccggccctcatcccctcctcttataccccctagaccgaggcggcccgggtgggggcaaaagagaacccccgaaaccccaaattcctttttccggggaccgaaggaatttagggacccagggcccggggcgcggggggg

SEQ ID NO: 116837 - DNA, 485 bp, Arabidopsis thaliana columbia
  unsure (1)..(485): unsure at all n locations
cgctgcacgcgtacgtaagcttggatcctctagagcgtccgccctttttttaaatcttttaaaaaaaaananatatagaagataaagtagggattttttgaatggttgtaggtgtataaacttnttataataagaagagagaaaaatttttatttgttctattaaattatactataaaaaaagtaaagaaaaaaaaaaaaaggttaggaatatttttattttggggggggganaaaaaaaataaagaaaaatttgagaaaaaaaaatcccggtttgtagtaagttaaagagaaaacaattcaacatgaagtagaagataaaaataaccaagaatcgggaataacaagtgaagggttttaataacatgtttctgtgtaataaggaggatttttgtatttagagagggggtggggataggcgagagaaaaataagatattttatttcacctgcggtcatagacatcgccaattactccccttatata

SEQ ID NO: 116838 - DNA, 455 bp, Arabidopsis thaliana columbia
  unsure (1)..(455): unsure at all n locations
nnnnnnnnnnnnnnnnnnnnnnnnnnnnnnnnnnnnnnnnnnnnnnnnnnnnnnnnnnnnnnnnnnnnnnnnnctttttttttttttttcatctgcttttcctttttgttttatatatatgaagaaagttggtagagagggagagataactcatcacagtcaaaggcacattacaaattacatatggggtagatatatattatatacgatgataataatgatgatgatgatggatggtcatgatgatgatgatgatgatggattgnttcattcagagctagntccggcgaggccatacctagtcctcaaaggtcataagcgcccttgtcaatgaaataatggcatccctacgatgggtgtgaacgtaaagaaggtcttctgtgacaattgaatatctcatgcccccggaaaatgaaaagtttaggaatttctgatcttactaccgaattcatatc

SEQ ID NO: 116839 - DNA, 525 bp, Arabidopsis thaliana columbia
  unsure (1)..(525): unsure at all n locations
tcgactgcacgcgtacgtaagcttggatcctctagagcggtcgccctttttttaaacccctaaaacaanaaagcacaaaaaacaatctcaagtacactatcacaacgacgccacagcgcgcgcaccaaaaatgcacgccgcccggagactatctaccaccaatcgcgcacaataacacaaccctcatgcccgaaaagccgaagttcacagtttaggtccattcacgaagacgaggcggcccaagggaagaagcgacgaccccaaaacccacccaccgaagaacaaaaaaaaaccaacaaaaaccccccccagcagggacgaaaagcataacttaactagaaacccggctcggaaatacaaccgcaaaataaaaaagattatagaacaaacaaaattaggaaatgatgaataagtatggagagagccaaaaacaaaacaaaaaaaaacagatatgacgactcacgaaccacccagaaccaaagcgaaatcacccccccaaaaacatatactacccgcagcaggctt

SEQ ID NO: 116840 - DNA, 536 bp, Arabidopsis thaliana columbia
  unsure (1)..(536): unsure at all n locations
cgactcactatttgggaagctggaccgcctgcaggtaccggtccgngatcccgggtctctcacgcgtcgccccacgcgtccgcgtcaatcgaaatcccaaagatcagcgatggtgactctaaacgcttcttctcctctcacgaccaagtcgttcctcccctaccgtcacgctcctcggccggcaatctgtgtgtcccctgactgagccgttcatagagtngtcgcttaggggggggcccaagacccgcagcgatgacgcgcgtacgctgcgcgtcgcgctgtacggcgtcccgaggggcgcgggtcagaacggggccggtggcacggcgcgcccccccccgctctgccgcagtactcgcttgctgcccacccgggccccgccgtccctgggggttctgcgtgactgcgttccacgaccccggccgggcgaccccgccccggagccggcgccgcacgggcggagtgttctgcacccgccgtgggcgcggtggcgcgcggcgcggggggtgcgccggcggccgctaccggccaccccc

SEQ ID NO: 116841 - DNA, 505 bp, Arabidopsis thaliana columbia
gctctctacgactcactatagggaaagctggcacgcctgcaggtcccggtccggaattcccgggtctacccacgcgggcgcgaaattgggatggtggggtaaatgcaaggagtattggaagaagatggatactgaaggtgttactaaggatcttttttcgtattccatttacatggatatcatgtgcaagagcgggaaaccgtggaaagctgtgaagttgtataaggaaatgaagagtagaaggatgaaactcgatgtggttgcttataacactgtgattcgagccattggagcgtcgcaaggtgttgaattcggtatcagggtatttcgggagatgagggaaagaggtttttattttattgttatagctacgagtggcatcattaccgtataatggtgtaaagcttggattgctcgggacttcttgtttgaattataccactctgtttataaaatggaattaccagaagggtgattattgaaagaattagtatagtgcaattga

SEQ ID NO: 116842 - DNA, 507 bp, Arabidopsis thaliana columbia
  unsure (1)..(507): unsure at all n locations
ctatagnagagctatgacgtcgcacgcnacgcgtacgtagcttggatcctctagagcggctcgccctttttttttttttttttttcgaaataaaattgaattatatttacagcagaggtacttggattaaagggaactaacaaagaacaatattcctgcaacataaaaactaatgacccttttctgtttccttcttcttcattgtagaagcataacaatacttgtaattcatcactacaaaacgttccaacgtgaaaacccaactttttttcattctttttctgcagaaaatgtggctgcaagttgaaatcaatcagcacgagagccgccgcccgtgttcgcagaagaatttccgtccgctatatttactgggttcctgttcctaaaagtatttttattatatactttctcatttcgcctttcgcaacaccaattttactcatctttcgcacaccccacctcacctttcccaatccccccccctctttttccttttcctttttttta

SEQ ID NO: 116843 - DNA, 489 bp, Arabidopsis thaliana columbia
  unsure (1)..(489): unsure at all n locations
ccggctgacccacgcggccgcccacgcgtccgctttttcgctgcgtcgncgagagggctctctttgaggaagctaatgcctgcttgttcggcaccatgcgggggaaggatggcacgggccggaagctgcgcgcgaggacgcgacccatgtacgcgttttatcaaaaatttttccttgaaaggggggaggcacagcaaccacaccctctcacaaccgccacagcacacccgaaagacataaagcgcattacacccccatatatatgtttagccagcgaacggacaccattactctcctttacaacataacaatcatctaaaccactacacacaccaattaatatactcgccagaccgggctacgagagttcactcattacggaaacatcagaaatctacaccgtaaagtaatccaagagctagtcaaagaaatactagtgaataaagcaagagctatattttacaaaagacatcaacgtacacacttata

SEQ ID NO: 116844 - DNA, 508 bp, Arabidopsis thaliana columbia
  unsure (1)..(508): unsure at all n locations
nnnnnnnnnnnnnnnnnnnnnnnnnnnnnnnnnnnnnnnnnnnnnnnnnnnnnnnnnnnnnnnnnnnnnnnnncttttttttttttttttttttgatctgtaacactgttttattacaaaacgtaaggtaaaatttggttttacattaagaagacgacaaaaaaaaaccagaattttaagaaaattttgacaatatataaaacaaattccaaaaaaatatggggttactacaatccatcatctaatggctcatccgcgtcgtgcaagttgttcaatggagtgttcttgttcaaaccccaaataacaatccgaaactaagatgagtttcgtatcctgaaaagaggttatanttgngaggtaactccatgcgtgtgatcagacgaccagtgaacgaaactctcttcacagcanagagctcagaagttgaagtatcaccaagaaccaaccaccacgcttcgtctttcacctttgggaatcgaggggccaatgccctcgagctattcctttt

SEQ ID NO: 116845 - DNA, 530 bp, Arabidopsis thaliana columbia
ctctcacgactcctatggggagctggccgcctgcaggtaccggtccggaatcccgggtctaccacgcgtggcgatcaaccttcgacatacgttgcaattcggcatcggactgcatcatgcaggtttaaacgaccacgatagatctgcagtcgaagagcttttcacgaacaacaagattcaggttttggtctcaacacttaccttggcatggggagtgattttaccagctcactgaggtattataaagggaacagtatattttcgtcggttgacctcagtgtacttgctgtctcttctcactctctattaatttatgtcttttcttctccctttttttaccttcctgcaacctctctcgacctacccctacctctaattattgtttttttttgtctgatcttctcgcaaattgatcatttaaattcttatttccttctcttcttttcctatccctctttattctttttactgcgcacccaccttttttacttgctctttcacattttcgattttattatgtccatttgttc

SEQ ID NO: 116846 - DNA, 473 bp, Arabidopsis thaliana columbia
cgtacgtagcttggatcctctagagcgttcgccctttttttttttttcttagattcaaatatgtttttcattgccaaaaagaaaaaaaaacatatgtttcacaatattcaggatttacaccaagaaacaaattttgaggagcttacacattagaaaccaagctaaaagcacaggactttttttcgatttctttttaaaggcgggggcagcccccacaaaaaaaacctacaaacgaaacacccaccacacaccccgacccacaacaccacaccatcccaaaccccaaaacagaacaaaccgaaccacccacccgagccctcaccgcgcacagaaggcgcggcgcacaaaaaaattttatttaaattaaaacgggttgatcccgttccaataaaaaatacttaatttacttctcccctccctcccctcccttcccttttccccacccctataatatatttctccctttcttatta

SEQ ID NO: 116847 - DNA, 506 bp, Arabidopsis thaliana columbia
  unsure (1)..(506): unsure at all n locations
taggtacannnnnnnnnnnnnnnnnnnnnnnnnnnnnnnnnnnnnnnnnnnnnnnnnnnnnnnnnnnnnnnnnctttttttttttttttttgtacatcaaagacttttatttgtatattcggtaacaaccaacaaaaaaaaaagtatttgaaaggaaattcttagttcgaaactcaaataacacaaaaaaataaccatacaaaaaagattagctaaggactcttttgtataattctttatagtaaaaaaaaaaaaaaagacaaaacaacagtggagactattatctaagtacaactttaaaatgtcgtgaagcttctcaagttgaagtagtctatgctctcttttccttcaaacaagaagaaaacttctcaagcagccataagaccgatgccctttccccttctgctatgcttttctaccgcaaattccgaacatgacacagatgcagatgggaggaaacttctgtaaggactcctagaaaacagaggatcagttcatttttagct

SEQ ID NO: 116848 - DNA, 446 bp, Arabidopsis thaliana columbia
  unsure (1)..(446): unsure at all n locations
gacgtcgcactgcacgcgtacgtagcttgnatcctctagagcagccgccctttttttttttttttttttttttttttttttttgannaaaacagaaatataagtttgttgactgaatattagacattacaaaagcttgagttttgttttatatgccattaatattaaacacaccagaggctttatgcttagctactaagagagtttttttttagaaagagaaangacagacaaaaacgaccaccgaggaagacaatccacccagagagagagaccccccggccgtaaccgagcgcaccagaaacaaggcaaaagcgccaaaacccaaaccaagcgaaaaaaaataaaattattaaataattataccgcgtataaaaaaaattataattacgtttcccaacttttaatattaaattatatccctaaacctttattccaaaattgttt

SEQ ID NO: 116849 - DNA, 436 bp, Arabidopsis thaliana columbia
actcactatttgggaagctggaccgcctgcaggaaccgaaaacgcaggataaaagattaaaacaggggggaggagccgtacaaaacccgggagggggcgcggcatcggcgaacccaggcacaacacacacgccgaacaacgaggcagaggagaagcaagtaacgcaccgagtcgatgcaacaacaggcgcaaaggacgataccgcggggaagcccgacacgaagtttaaaaagccgcggggggaaggagagaccgaaagcggagtacgcggacccgacaggatccatgaccgacctggtggcaaacgatgtacgcgcgaaatgcgcacgcgagaccgactcacgtgtactcggggacatagcgtccgcagaccaaaggcgcggcaggtgcagggcacggggcgacaacacaacacagaacaccgagtgatcccaac

SEQ ID NO: 116850 - DNA, 511 bp, Arabidopsis thaliana columbia
  unsure (1)..(511): unsure at all n locations
aaaaccccaaagaccaaccaagggcaaacgacgaaagcagggaggcagagacgcgcgagggccgggggancagaagaccgcacagacgcagacgagggccgatcgccccggagagagaacggaaaagcaaaggcccagatgcaacgaccgcgcgaggagacgaggggattccggcaggttgtttttttaagagggggacggcgcaggcagccgggacccgcagggaagaggaggaacagacagcaagagagagaggggaaggagaggccgggggaggaggatgtataaagaccgcccngacgacacaaccagagataaaagagcaacagccagcgcgagacgagccgaggaagggcgaaaagggccggaacaaggaggagaggggggaaaataaaaagaaggagaacaagtgacaacaaggggggggggggccagaggggaaaacaccaagctgaccggctcggcagcaagcgggcgcggggagaggccgagagagaaaagcacgcaccac

SEQ ID NO: 116851 - DNA, 539 bp, Arabidopsis thaliana columbia
  unsure (1)..(539): unsure at all n locations
cgactcatatgggaagctgactgcctgcaggtaccggtccggaatnccgggtttcccacggntgcaaaaaccaaaaaataagcnnnngtgagcagagagaatcgacatcttgtcgttggaagatatgaagagaataacggctccgcagctgccccggcgaacatgagacgaagtgaagacgacgatatatacaaaaacaacttagaaattccctcccattagagggggggagagaaaacagaaagatgaaattatagaagataatactcatcaatacacaaacgatataacaaagcagtgagggacattgagctcaagaaagaccggcactttcagttttccgtgaatgattgagagtgtcaaagagatagcatatttcaagatccagtatgtcgatagataacaagataactaaaataactattgtagttgtaattactcgatgagattattatccgagtttggtagattgtatggacttgagtgcgcgtggacaagttgcggaatagcgtaataaactgtggaaagaaatgaaacaa

SEQ ID NO: 116852 - DNA, 542 bp, Arabidopsis thaliana columbia
gctctacctacgactcactatggggaagctggtcacgcctgcaggtaccggtccggaattcccgggtcgacccacgcgtgcgccgatatcaaacaagctatggcgccctttccactctctttgatttttggaaagaaaaaacgtcgtcgcgacgacgagatacgaagacaaaagccgacgctcaagggtgttatgacggctttttttgccactgaagctgcaatatgcctcttgtttgtggccggatatctctaaccggcacagccgtggcactattcgcgtccatgccgctattcctcggttttagccctgatcttgttccccgagttttctgtcccctttttttagctttaggatttccgctcttgggtactctggtgtgttccgtctttttttctttacttttgaggtctcttatcttgcttcttgctctttttacttgcttttttttctgtgattgtttgtttcagtggatatcctatctccctgttctgtatcttttgtgtctctagtcttttggtatatttttgtggtattgtctc

SEQ ID NO: 116853 - DNA, 500 bp, Arabidopsis thaliana columbia
caccaccccaagagcacttccaggggcggaaaaacccacacaccagcgggacaacaaaaggagggaagaagaacggaacagagggaggaacccccacaacaccaaagccaacgaggaggaggaacgcaaaacccccgacacgaccagcagaagcgggaggagttcaagagctttttttttaaggggggggggggggacccaccaagaaaagggaagccacacgccgggaccccagagagcggaggcagcacacaaccacgcgacaaccaacccgggcgagccgcgggagaagcaaccaaacagaagcagaagcgccaaagaaacgaaacacaggcggaggacgacgagagggggcgagaaaagagagggaaggaggaaaacagagaaggggggagggcgagagcaaaacaccaaacacaaggagcagaaccagagcccggaacacaccccgaccccaaaacccacccccagaaacaaggagagaagacaaggcaaacgga

SEQ ID NO: 116854 - DNA, 582 bp, Arabidopsis thaliana columbia
atccgactcactatagggaagctggaccgcctgcaggtaccggaccgaaataaagaactttcatcacggagacgacaacccccacccacaccaacacgcgcagagagaggaagacaaagagggggcgagaacgcacgaggagaagcgggaggaaaacgcggcgagccgaagcggaagagacagaccacaagacgcgcacaccacgaggcagagagaacggtgagggaggttcttgttagggacgaggggaagcagaaacaacaacagagaaagcgggaaggaaagctagtcccacaactagcgagccgacccacccggaaagacagagcaacaaacacccggcgatgcaataccggacgacaggcaagacacgcggggccacaaaagcacgaacacccgcgccacgccaaaccaacgccagcgcgggaaccggcccagacgcgcgagcgcgtgcgccccagcgccggaacccggacacacagccacagcggaaacaaagagagcgtgccaaaccggcgaagagcagacggggaaagaggggaccacgccccggagcaatacaccaaagatcgaagaaagcac

SEQ ID NO: 116855 - DNA, 514 bp, Arabidopsis thaliana columbia
acgtcgcacgcacgcgtacgtaagcttggatcctctagagcagctgcacattttttttttttctttttacgcataatctgctctttcattttaacatttttccactctgaattagattattacatttccaacgaccatactaaaagaatacatgtataatattacgctgaatagaaaaacaagaaaaagactcaatctatcgaatttttttctaggactaaacaaagcatgaaccaagagtataacaaaaatagaatacgcataacccaatttaaatactatgatatatttaatataccacgactctatagttatacataatactaatactatccctttttcacattataatagaacatataaaagatctgtttgttataataaattttatatatctcttttaaaaataagaattgcccaaaacaaaaacaaaataaccatatttactgccgtctttcctcccaaagacatacatattacatccccatacttctttttataccgatattttgaa

SEQ ID NO: 116856 - DNA, 414 bp, Arabidopsis thaliana columbia
  unsure (1)..(414): unsure at all n locations
gcgctactacgactcactatttgggaagctggtccgcctgcaggtaccggtccggaattcccgggcgctcacaaaatcgtctctctactaatatctctctctctctctctctattgttgaagaagactcataatcggagattgtttgtttttggtttgctctgtaaattggagaagttntgttagagatcaaatggctgggatttgttgcggngttgtttgagagacttttttttttgaccgggggagacacaacaggagctgggctgaaacggacgtgcgcgccccaaacgacggccacaggcgcgcgaagacgggaccccaccccggcaccccacgaccacgcccgaagcaccgggcaccgcccggcacgcccgcgcgcggcgcacccccccgccagcccacacacggccac

SEQ ID NO: 116857 - DNA, 512 bp, Arabidopsis thaliana columbia
  unsure (1)..(512): unsure at all n locations
ctatagnnagactatgacgtcgcacgcacgcgtacgtaagcttggatcctttagagcggccgccctttttttttttttttttttttggggtcatcaacatatcacttactactacaacatttgacaacttgttccttcggatcatgcatgagttttacttttacaaacagattctgcaaactttaaaagaagtttctaatctcttctgaaaccgaacaaggtttttattagttacctccaagcacaagaagtgataagaggttgattcttccatcctaaatacaatgctccatctctttcttcaagtgaatacttctctgaataactctcaagcaatcctttgattgttgcgttcacatacgagcttaaaggataccggataaatctcagacatgtgaaaccgagaacttccttttccctagtgcctcggtgcctatctcatactttcaacacccttttcagggttctaggactccacacccttctactagccaaacccatgctgttatata

SEQ ID NO: 116858 - DNA, 501 bp, Arabidopsis thaliana columbia
  unsure (1)..(501): unsure at all n locations
nnnnnnnnnnnnnnnnnnnnnnnnnnnnnnnnnnnnnnnnnnnnnnnnnnnnnnnnnnnnnnnnnnnnnnnnnctttttttttttttttataaaacgtcaaagtcaaagggtgcacactcatttgaggactacataagcaaaccaaaggtttacctcagaaaaagcctaagcttagaaatcatcctttgctttccggataatccctaaagcttctgcttcatctgcggcctctggaatgcgtaaagcccgacggatatctgtatttgagctgcggaggaaggggttacaagctttctccatcttcactgttgtcggaatcgttggtaatttcttgcttcggagctctgcaacatgagctgcataggactgaagtacttcgttgtttggctctagagacaacgcaaacttggaattactcagtgtatattcatgaccacagtatatgcttgtgtcatctggtaaagatgtgatcttttggagagaagcaagcatctgcttag

SEQ ID NO: 116859 - DNA, 520 bp, Arabidopsis thaliana columbia
gtcgactgcacgcgtacgtaagcttggatcctctagagcggtcgccctttttttttaatcccaaaaataaaggaccctcaatatccaaccattttcgattcctccacaacatggacaaacacctcaacaatatcatcaccccaaagtttaaaaacacaaaccacaacaactaacccgccaccattacccaacacaccgcacacttcaaggactttctaattatccgatgcgaaacgaccaccccgataaaatctcatactacagttaataccaatccaaattctaaccgttaaatctatcaatctcactaccatctagcgctatacaaagatctataaacaacatacatctctccacatccattcgaaccacataaacaaggcggtggttgttcacaaaataatattttttatactctatttaattatcatatttcgccctagcccaaaacacaaaaacaatatacatgatggcgccggcgtcacaatcaatcccctattcccccccccgaaaaactatt

SEQ ID NO: 116860 - DNA, 515 bp, Arabidopsis thaliana columbia
  unsure (1)..(515): unsure at all n locations
gactcactatagggaagctgacccgcctgcaggtaccggtccggaatcccgggtctacccacgcgtccgcttgcaatgtgtagaatgtgtgctgttaatctctttagggtctttcctccgaattatcggtctagttctggtggcgaaaacgatgatgatgaaccgatgttagtccctgtttgatcttatttgctgaaagagaaagatttagaaaatttgtggnttttgcggggggaacaaccccaagaaaaacaccacacaaactcaaacaaaccacacccaacgcaccacggcaccggagaaacaaccaaaacaacacaccacaaaaagaccgaaacacgccccggcgccacgagactcaaaaaccataacacacagaccggcaccgaacccacaccgcgccaagaactaacaccccaacatgcttctaaagaatctctctatctcaacactaatctagttctaacatatttaatcgtcttttatttttactctaactctttaactactatcct

SEQ ID NO: 116861 - DNA, 415 bp, Arabidopsis thaliana columbia
aaaaaaagggagaccaaggaagagggacacaacaagaacaacgaggcaaggagagcccgaaaaaggcagaccccgagaatatggacggcgaacacggccagcgagccccgcagaggcaagaacgaccctcggactctcgtcctatgggggtgggggagccccccgagaaaaaagggggaaagaaaaccccccgcacggggaggaggaggggaaaaccaaacacgcgaagacccagaggggacgacggggccgcgcgggagccccgaagcaaggaccgcggcgcaggggagggggagcgaaaaaaagagaagagaaagaaaaaaaggagaagcgggaaagcaaaacaagaagacgagcgaggaaccgcacacgcccgccgaagccagcgcaaaaaacccaccccaaggaaagaaga

SEQ ID NO: 116862 - DNA, 501 bp, Arabidopsis thaliana columbia
ggaaagctgacacgcctgcaggtaccgggccggaattcccgggtcgacccacgcggggcgccacgcgtccgcttacatacatacacgtcttccacaagactcaaactccacagcatgggattctcacggtcgctcaaccgcaccgtgggcgtgttctgcttgttcatccttgacatttgttgttcgcgtggtggggttctgcggctttatttttcgtgggggggccgacccggcggtaccgtggcctctaatgtggttcttttttgttctgttgtccgggtctgcgtcttggtggggggttgaggcgttgggtgggccggtggcggctgatggagggtccgggtgtgcgtggcggggtccccttctggctgtttgggtggcctggtggcttgtggtggggttctgcggtcggtgttcgcatttgcggttaggtggctggcgttttcgcgtcggcgcccgtcgttgtgttctgtgccttgctgtgatcgtgtggtgtgcgtc

SEQ ID NO: 116863 - DNA, 479 bp, Arabidopsis thaliana columbia
  unsure (1)..(479): unsure at all n locations
ctatagnagatctatgacgtcgcattgcacgcgtacgtagcttggatcctctagagctgccgccctttttttttttttttattgaaccaagtaggagccataccatatatagacaaatgtcaacttagtttacaattcgtggttgatacgaaggtaatacagattatgtacttctgagggtttcttacacgcagtggtattcttctttgcctcacttttttaatcaatcgatagaaggaatagaaaacaaccattaagcacagaggataggctgagagaaaaggatgagctttcacaagttgccaccacattggnatttcaggtccttttccagcagcctttttgcaagagcttgaccaaaaatttctagtttagtttagctagttgtcatgcagtggaacacactgtacattgctcttgttgctcgggcttggggctttgcctttttcccccgaagccctttgttccgtattttgttt

SEQ ID NO: 116864 - DNA, 587 bp, Arabidopsis thaliana columbia
aagctgatctgcctgcaggtaccggtccgggattcccgggtcttcccacgcgtggtgggcactgtcctctcttttcgatccattatttagacgagcttttattattttccaatgaacacatatttcttctacgttcgccttcactaaccttatcatcttgctcccctattatcaagtcctattctttcttcctcttgatcacacaattcccgccccattttttcatctagtcgaggggcacacactctactaccatttttacttacttaactcaattctcacatcaaagtaataccaatatacaatataaccactatttccctcttcacattactatcttttatttttctcttcttaatagttcatatcggtataatcatgcttcgcttccgatatatttcgctcatacataacctccgtatttctacagcacatccttagtaagttacccctaactcgctcaatttcataaacaactattttaaatatttccactgccaactaacgcacttttcgcattcgtccactgaaatatctctatttccatactcttttatctacttcaacttgcacacgcttcattctct

SEQ ID NO: 116865 - DNA, 443 bp, Arabidopsis thaliana columbia
cgcgtacgggagcttggaccagagagcggttgccgggggcttaaaccatagaaagggtataggcgcagagggggggcgagttaaggaaggcagaggaacaacaccgtcaaagagcccgaggcaacccattgaagagcacgagcaccacgaggaggaaccacgggcggaagccgaggtttgggagtccctcaataggggggggggggacgccgaggcgaaagaggggagcgagagcaccagccggcggggcgaggaaggggaaccaacgcgcaagatccagccccaccgacgcagagacgtagggaagcgaaagagcgcccggcgaaagacaggatcagtggaaaggggtggtgtgtgaaaaaaaaaggcgtaatgaaataaaaaacggtggagggggaagaggaaaaaaaaaaaaaagacacgcacgcggacgcgcggagacc

SEQ ID NO: 116866 - DNA, 522 bp, Arabidopsis thaliana columbia
  unsure (1)..(522): unsure at all n locations
cctgcaggtaccggtcncggattcccgggtcgtcccacgcntgcacccacgcgtacgaacttatatatatatagtatctaaagcttntagtatactatttntatataagattgtggttatgaattaaagaatggaatttaatagtgaagtatatagattaatagaaaaatatataaaaataaatataaatttgaaaaaaagntttctttgggggggggcaagcccaaacaccaaaccacaaacacaaaaaaccacgacgcaaccacaggagacggaacgacagacctcgtataacaactaaaccccaaaaaccacaacgaacaaaaacaccaaaaaccttttattatcagttaactaaatatctatcccgtcaccttacccctctcactcatctacacgacttctgagtttggatcacattacttaaatatactacctgagctaagagaataattactctaccgattaaccctctgaataacaccctaccctactccccgccccaacatacaaaccttacac

SEQ ID NO: 116867 - DNA, 464 bp, Arabidopsis thaliana columbia
ggggagctgaggcctgcaggaccggccgaataaaaaacttacaaaagggagtaaacaacaactatctaactagatccatctcaaatataaaacatccacaaaataacctccctcccctcgcctacactcatccgtcacaacaccgatcctcctatccgtaacacgtaaaaaagcaattttttcacactaacaccacgaacctcaaattgcacataatacaattctattcccccctaatccactatttaactaatctctatcatttctacagacagtcatatctatacaattaacctccaattacgtcccctccctaatataaccaccgaataactatctaagatgaaaccacatataatcaactcacatctacatcacctaccttctcatcaacaataaattcctctcacacctcgtcaatcctacactccgctactacacctacccacttcttagcgtaccac

SEQ ID NO: 116868 - DNA, 493 bp, Arabidopsis thaliana columbia
  unsure (1)..(493): unsure at all n locations
acgtcgcactgcacgcgtacgtagcttgnatcctctangagcgtcgcccttttttttttttttttttttttannactttanaaacctaaaaacttaaaaggaagtagcatttaatcctcagagaatgttacaatctgtagctcaaacgaacagtgaaggaaaaaagaggtacagaaaaccttatgcacgcaacaatatccacatttttttttttcaaaaagcacccaaaccaccccaaaacaacaaacacacaccaagaacccaacacaacaaaaaccacagagaaacaaaaacacaaacaccccacaaacccgaaacgacgccacaacacaacaaacacacaccacaaacagaacccacaaggacgacgagagagcgagcaaaaaaaaaatgaaattttatttatatattgattcacccgaaataaaaaacaaaaataaaatattcgatactaaccgctccatatttacattctccttttacctccccattc

SEQ ID NO: 116869 - DNA, 528 bp, Arabidopsis thaliana columbia
  unsure (1)..(528): unsure at all n locations
cgactcactaatagggaagctgacacgcctgcaggtaccggtccggaatcccgggtcgacccacgcntgcgaaaaaaaaaaaaaaaaaaaaaaaaaaaaaaaaaaaaaaaaaaaaaaaaaaaaaaaaaaaaaaaaaaaaaaaaaaaaaaaaaaaaaaaaaaaaaaaaanggnnaaaaaagggcggccgtccaaaagaaccaaagctaacatccccgggcatgcaatctaaaaggtgttaaaaagggcaaccaaaatgaaattaactgggccgccgtttaaaaacgtaaaaaactggaaaaaccctggcgtaaccaacttaaatccccttgcagaaaatccccttttcgcaagttggaaaaaaaccaaaaaggccccaaccaacagcctttccaaaaagttgccaacccaaaagggcaaatggaaccccccctaaaaagcccaataaagcccggcgggtggtggggggtaccccacagtgaacccgtaacacttgaaagcgcctaaacgccggttctttccctttttta

SEQ ID NO: 116870 - DNA, 472 bp, Arabidopsis thaliana columbia
acgtcgcatccacgcgtacgtaagcttggatcctctagagcggtcgcccttttttttttattccctagtaaggaacatgtctaaagcattactataagaacaagcgttatagataagccaatgctcacatcaatacatatcatacacattaatgttgatcagataacaacaattctcacacaacaagaccccacgttttaccgcattaatcatttaaataatcgactcacaacaccccaaaacaaatatcaccactcccccctccaccacaattttcactgctcaccaccaccttaaagttaactccaactaactaaataaaaaattactccaaattctacatcacaataaatcacagccctcacaccaacacagtcatcaataaaaaatctcttatttaataaaaataatgttaaccgcaaaaaaaaaaacaaaaaaacaatcatactatccctccctccctctcaaacca

SEQ ID NO: 116871 - DNA, 214 bp, Arabidopsis thaliana columbia
  unsure (1)..(214): unsure at all n locations
tggaccgcctgcaggtacccggtccggattcccgggtctgtcccacgcntagggagaatccaanctaccagcactactacaacaaaaccgggcgagacgctctatgagcaggaaatccagccctaactacaaacagtggacgaaccgcaggactgtccagcgaccttcgcaacccgctaatgaaacaagcaccgcaaagtagcataatcgcacc

SEQ ID NO: 116872 - DNA, 465 bp, Arabidopsis thaliana columbia
  unsure (1)..(465): unsure at all n locations
ctatagnagagtatgacgtcgcatgcacgcgtacgtaagcttggatcctctagagcagccgccctttttttttttttttttggtatagaacaataacgtgaactgtagtataacattgaaagtagctacaatggtaaccaaaggtttacaaataataaagactatttaaaactgttttgagactgtttttgtttaatgaattgtatgaatcactctttatttctcaacttggatcagatgaaatcgtttgttctctataggcattttgtctaactcaaaggtgaccaatccagaggaggaatcgatctcgaatgcaatctcatttgactcaacaacgcatatcttaggcttcacagtagagtaagatctatatttttccaaaaaatttatattttatttaaaaatattattacgcacgggccaaaaaaaattaaaatatattatttaatcccacgcttacctaac

SEQ ID NO: 116873 - DNA, 413 bp, Arabidopsis thaliana columbia
cacgcgtcgtaagcttggatcctctagagcggtcgccctgggttttttatcctttctattttttcttcgttgtacatacagccataatcaaagcatcaaataagagtaactctatgagggggggttattcgctcgtggtgataagtccttatcaagcgtgttttattagcttatggcgagggtgaggtcggggcgtttttattgaaaggggaggacgggaggcgccgtaaggaaaaagtgggatccataattggtaacccgtattgtgatttgagtattgttaactttattagacactgaatagctaagatcggtttagtggttgagagaggtatctcgaggtacggatgtgtatggaagaagcacaaatgtgtcaaaacaggaggcctattatctattaaaaaaaattattt

SEQ ID NO: 116874 - DNA, 443 bp, Arabidopsis thaliana columbia
  unsure (1)..(443): unsure at all n locations
ccctgcagtacangtcagnattcccgggtcgacccacgcgtgcgcgacgacgaacatggcaacgagcagtgcggcttctgatgatatggaagagatgtaagctgtaatatatttaatgtatcttgcaatccaattaaatacatactttccttatgggatgtatattcatcactctctccgccctgctcttcatcactgttcataaagaaggangcgaaacgaaagccatccgaaaaatagcataatacatttacgctctattttcacaatacacgactattctccatgtatatcgtgtgttatatcaacacctcccttacatattcacgagcacctcaatcgacttcttataaaaccataactacaacgatttatgctttcaccctaatatgaaatacagccctgcaacccccacgcatctacaaatatctgaacatattttg

SEQ ID NO: 116875 - DNA, 504 bp, Arabidopsis thaliana columbia
  unsure (1)..(504): unsure at all n locations
cacgcgtaccgtagcttgnatcctctagagctgtcgccctttttttttttttttttttttaaactattaaacaaatttatttctccaaaattgtaaattgtgataatgatgtttcagtacctttctccactaaaacaaacatcatacacacacagtccacccccaaataccccattacaaaacccacatatcctctttttttttttccacaggaagtcccacacaccatataaacccaaacaccaaacccaccccaactattcactagacaatacctctactctaatctccaccaccacaccactatactattaacaaattcatctcctcgacaacattatatctaatctccaccaaccaaccgtttatttacaataaaaaatatctattttaaataaaataaataattaatcccccaaacaanaaaaaacacaacccttattcttttactcccacaaccacaaacccataccccaatcccccacccaatatataatatatctc

SEQ ID NO: 116876 - DNA, 530 bp, Arabidopsis thaliana columbia
agcgctacacgactcactattgggaaagctggcacgcctgcaggtaccggtccggaattcccgggtcgacccacgcgtccgagaaaagagaaattctcaaaccggttaaagccgccgctgctgaaggtggagataccgctggggatgctaaagttggattcctcgccaagtatccatggctagtcactggattcttcttcttcatgtggtacttcttgaatgtgattttcatcatccttaacaagaagatctataattacttcccttatccctattttgtatcggtgatacacttgttcgtgggagatgttaactgctagtttagttagctcgtgcatctttattattttatatactacttactctatctcccccagcttctacccgacttccttctaattttccacttactctttatgcttcatctcatttaaatactttctgtttcctatctttacatctcttttattacagcattacattactttttcttctcgactttcttatcaccctcacaatgatcttttcgt

SEQ ID NO: 116877 - DNA, 582 bp, Arabidopsis thaliana columbia
  unsure (1)..(582): unsure at all n locations
cacgccggcgtggagcnnnggacccaaagagagcgattcgngcggggggggaaaaccccgcaaaaaaaaaggggcccccgccgagcgggggcaaaattttaggcggcgagaacggagaggtcgccccgcacaaacaagactcggcgccacggctcaatagacacgacaaaccaacacacatgacaccgcccgcggagaacccaagggagttttgagcacttttcctgactaaaggaggtgggaggccaaggacccccccaagaaaacaggggccgcaaaacaagacgccgccgaacgcaggtggggcagaggcgaagcggcccacagagagcgcagcccgagacgaggggcagaggaaggcgacgggagccggaggagccagcggcgaacatcgggaggagagcgacgaagaccggcgaggggaggtgaaaaaagagagagaaattccagtaaacacgaaaggcggggcgggggaggacgaaaacaacaagaataaagagagagggagggggccgcaccctgcgggagaggcggacgcgctatacaaccgccccagaggtcatggatgcatgcccagcctgt

SEQ ID NO: 116878 - DNA, 433 bp, Arabidopsis thaliana columbia
  unsure (1)..(433): unsure at all n locations
ccagcgctactacgactcactattgnggaagctgatccgcctgcaggtaccggtccggaattcccgggtctacccacgcntgcncccacgcgtccggggttctcgggttgactacgaagctcctggtcgctggtgtacaacgatggcctacagtgctgatggaactaggctattttcttgtgaaacaagtcaagatccaccatcactacaattccgtaaacgcaactcccaacaattctcctattagaagggggcgccgcacgaagagaaagggaaggtaacgaaacctatacatcccgccgtctctaccctctcaatcaataacgcacaacccctacaatacaccaactaacaagtaatattaggtgctgatacttaattatggagacaacacaccggacgtccgcgtatcataattaatactttctcttat

SEQ ID NO: 116879 - DNA, 594 bp, Arabidopsis thaliana columbia
  unsure (1)..(594): unsure at all n locations
cacgcgacgaggcngggaccagagagcggtcgacaagggccgngaaacacccaaaggagagaaggaaaaagcggcgagacaagagagagcgaaggagcagcgagcgagaaaagaccggcaacgccgaggaagcgcaacgaggcagcgcacgccaggagagaggagaagacacgggaacggagcaagaanaacggcgcgaaggaggacgacgagaggcaccaacgactttttttttaggcgggggaagagaagcgaacgaggaaacccaacaagggcaaagcgacaagcagcggaacgggacgcagagcaaaggacgagaaacgcagcgacaaaagaacagacggaccggcagaaggacggcgaaagcgcgagagagcaaagaacagggacaggggacggaggggagagaagcgaacgcgaagaggaagggcgggaggacgaaagaaaagaggaagaagaacgaaaaaaagaggcggaggcgcgcggggagcgaaaaacaccaacgacgagggtggggggacagggagcgggcgggccagcaagagcacaataccccacccccgagagaaaaagagaggagcacaagaagggagg

SEQ ID NO: 116880 - DNA, 454 bp, Arabidopsis thaliana columbia
ttttaagttgggggggggttggttgttggttgagtggagtagtggatgtggaggagtggggtggggtagatttttttgaggatagaaagtgatcaagatgatagctataaatgagggtggcagaaataaataaatatatagaatagagaaatttttttatagtggggaagggaaataaaaaagaaagtaagaggggagtagttagaaccggatagggtgttaaagatacccgcgtcttcgcggcaaacccctgttaccggtggtgcggcggggggccccgccccggccgctcactgcttagaccccaccgccttacaccctgcggttgggttttggattagaattgtcaagaatccgacctgattgactgggatacttgaagagtgagcgatgattagcgacgcgcgcctacgcacttactacgccaaagagcgtgccaattaacatcgccgcg

SEQ ID NO: 116881 - DNA, 496 bp, Arabidopsis thaliana columbia
taggtacaactatagaagagttatgacgtcgcctgcacgcgtacgtaagcttggatcctctagagcgtccgccctttttttttttttttttttttttttcagaagaacacataacataaatcaaaatatttgacaaattctactgattacagaaaaactctgaaacttgatataatgttttttaaagtaccgagcattattatttaattatcataaggatttctgaatttcttcaagagatctggaatgtcgtatcccagcatatcatctactgcttgaatcatcttaggcttcagtttctcgaatttgtcaatgttatagcctcccaatacttctctaaaatgttccacacttggaaagtctccagctggaagatgaaactctcgctgcacctttccaaattcttcttcgagattgtccatgagacgttgctgagctttggatttgcccatcattgctggcatttccttcttaaggtgactcattatgtatgcat

SEQ ID NO: 116882 - DNA, 175 bp, Arabidopsis thaliana columbia
  unsure (1)..(175): unsure at all n locations
ccccggggacgccacccgcgagngagtgcagagcggcaaaaacccaaaaccgngacgcaccggccccgaagaaacgaacgcccagcccacacgccgcggacagcaccacagggcaaaccgcggccaggaacaccgcaccacagcaggcgagcccccgaaagcaccgagaacgaca

SEQ ID NO: 116883 - DNA, 538 bp, Arabidopsis thaliana columbia
  unsure (1)..(538): unsure at all n locations
acgactcactattgggaaagctgatccgcctgcaggtaccggtccggaattcccgggtcgtacccacgcgggcggctcttatctctttctctcatggcctcaccacaagcaaccaaattgtctcttataatccgatctcaaaggttggcttgttgggagcactgagacatcaaacatggtttcttctttctttcactcttaaaaaaaccaatttagccctaaatttctccttttagtgtaatcccaaaagttcctcaaatctcttctattctctctctctctccattaaaacccttcacaagcaaaaagctttgagctttaaatgagtttaaggtcctgcanaaactgggtttttcctcgtgtacttgttcatcttatctgctctgcataaacttcattgaagaaaaaggcttgcttattcgcggggagcgtgtggatggaacacgccttactggctccaatcgatctcgtcgcagctaggtccgtcgcgtcgactatccggtcgccttgcccgaagccgcgcgacatgtcttgtggc

SEQ ID NO: 116884 - DNA, 521 bp, Arabidopsis thaliana columbia
  unsure (1)..(521): unsure at all n locations
cgcgtacgtgagcttggatcctctagagcggttgcccggggtcntaaaacccacagccgtacaacaaagccaagagaagcagagcaaaaaaccgaaacaaggaggaggaaagcgccacccaagcgagacgcgagaccgaatgaagcagaaaccaatcccacaataaagcgccaggaagacgcaaaggtcggggcatttctccttaagaggggacaaagaaaaaccgacaaaagtaaagaccaccaagaacaggacaggcgcgcgaagagaggacaacacaaagggagaaaaccacgcgacaaggcgcaaaaaagaacagcggaaccaggcggccgcgcgccagaatagagaagaaaagaggggcgggggggaggagaaaaaaaaataggagaaacggaacaaaacaaggaagggccgggaagacaaaaacaaagaagaaagcaagagcgggaagagcgggcgacagagagcgaagccggatagccacagccaaaaaaccaagagaagcgcagccgggccag

SEQ ID NO: 116885 - DNA, 200 bp, Arabidopsis thaliana columbia
cctgcaggggccggaaccaaaaaaaaagggttttttgacagaagggagagacctaaggacaccagaccaccacacgtaacgtgcggtgtcttatacttaccaaagtaataaaacgaagttagtgggattgattattaaagtagaatatcgtgaaacggtaaacatgagaatcctcttatactagtggggtgtgcatacgt

SEQ ID NO: 116886 - DNA, 492 bp, Arabidopsis thaliana columbia
  unsure (1)..(492): unsure at all n locations
tactatagnagagcttgacgtcgcacgcacgcgtacgtaagcttggatcctctagagcggttgccctttttttttttttttgattaaagaaagtaaatttattcaccagactattattatatatacacaagggtacgttataagcatttatggaatgtaattagatttgaaccacaaagagacttttgacatgaaagttgatactatcttgtcattggtttttttttacagtggnagnnacctgacgataagaagaatcagagatcgatattcttatctatgaagattccttcatcaattcgaatgaagaaaaggaatgtggcgagagaacataggtaattctctcctctagcactatcgaaagctaatatggtgttataattataatttttattttattataatattagtttccatgaaaaaaaaagtaatttttatgtttccaaaaacaacctatatcttcactattcaacccatataattattaaccca

SEQ ID NO: 116887 - DNA, 550 bp, Arabidopsis thaliana columbia
  unsure (1)..(550): unsure at all n locations
gcgctactacgactcactattgggaaagctgatccgcctgcaggtaccggtccggaattcccgggtcgttccacgcgtgcgcccacgcgtccgcattggtcttgaaaagaatagtgacattgttgaaatggcaagttatgctccactctttgtgaacacanatgatagacggtggaaccctgatgcaatagtcttcaactcctctcatctatatggaacacctagctattgttttcaacggntgtttgcagagncaagcgggagcaactcttctcacttcaacactcaggggaaactctacctctcttgttgcatgtgctttgtgttggaaaaacaatgggcgagattacatacgcatgaaggctgaagactggggagctaactgagaaaatgtgcaagtggtgggagactggattgacccctatccgttttatgagtcgggcctagtctataggatccttgtctgaccgagtccaagttcgtgaatatcgataattttagtccattctttcatcttgtttagttaatttcattttatctcgtacgtctc

SEQ ID NO: 116888 - DNA, 398 bp, Arabidopsis thaliana columbia
  unsure (1)..(398): unsure at all n locations
cctgcaggtaccggaccgaaaaacacgacattttaaaaggaggaggaagccaaaaaacaaaccaccagcacaaactaagagagagaagcgaagccgaaaaggcaaaaaaacaaccacaaagaaacaaagaagaagaaaagaaaaggaagaagagaaacgaaaagcaggacaacccaagagacgaagggtcacnccaaaaattttttttgtgggagaagggagagacggaggaagaagcaagcaaaaggcacagcaagaaagccgaggaagccgcccaaagggcgcgcgagagcaagagaaagaagaaaaaaaaggaagactcacaataagaacacgccgcggaaaagagccaaagccgccgacgaaaagcatcaaaccacagacaaaaggagcgacga

SEQ ID NO: 116889 - DNA, 490 bp, Arabidopsis thaliana columbia
  unsure (1)..(490): unsure at all n locations
actatagnagagctatgacgtcgcacgncacgcgtacgtagcttggatcctctangagcgccgccctttttttttttttttttttttttggcaacagaaatcctaaaatctttttgtatgctttaagaaatgatcatgttacataaaaacgacatacatgaaagcacaaataacaaggcttctctatttctaacagtagttaaatagaaaaattctttttttttattgtaaagaaatataaaactccctgatatccacatgattttcccaaacccccccaacaaaatacagataaagaacatagaaaaactctatcggatatatgtgtttatataatcaatccttcttcttctttttttttcgtctgattcgttctggtctgctatacgtttgatgtatagataatttaacctccgcgggacaaacctcacacacaagctttcatttctgaacctctttccccgttggctgaaactcccccttaatatct

SEQ ID NO: 116890 - DNA, 188 bp, Arabidopsis thaliana columbia
gggagccgccccacggtgcacgagaacacccacgctcatgaccacccgcagcccagtccccgggcgaggagaatacgactgcaccgccccaacgggccgcgaaggaagaagagcggagcgcagcagcgatgtcgcccggaccggcggcagtcggtgccgggagggggagtgtaggataggaataatat

SEQ ID NO: 116891 - DNA, 514 bp, Arabidopsis thaliana columbia
  unsure (1)..(514): unsure at all n locations
cctgcaggtacaggtcgggattcccgggtcgtacccacgcgggcgcccacgcgtnncgaaggagaatagggannattgtcggttgtttgtatcctatttcccaggttgcgagaggaccggtttgagcggngacgggntnnnnngngggnngggggttgggnggtaggtggggggtgggggacggacggatttnnngnnnttnntttatttttgnggggggggagggcgggggcagtgaggcgtggtgggggtggtgcctgggtcggttgttgtgcggtgtgggttgcgcgcgttgtgggcggcgtttgagtgcttcgtgtgtcgtgggcgcggggtaagggagggggagttttttttggggacccccccctcgggggccggcggtgggggggggggccctcgggggngcggcgtgatgcggcggttctgggctcccgggtgtgcgttgggtgcgttgcgggttgtgggagcgggtgtgcgcttgaggtcgtgtgtggctcggtggggtagggcg

SEQ ID NO: 116892 - DNA, 484 bp, Arabidopsis thaliana columbia
  unsure (1)..(484): unsure at all n locations
atgacgtcgcactgcacgcgtacgtagcttggatcctctagagcggtcgcccttttttttttttttttttttttttttttttgngggacgatcacacaatgtataaataaattggaaaaaataaacaataaaagaaataaacgaatgataaaaatatagtaagcttttaggacttgggactgggaggaaccgaggaattaggaaatgtattcccgccaaggtttgaagttggttaagcatctcgaggagcgatccaatgtctcccattaacgaagctcttagcgataaatggatgggccgattcatagtccaaagctctagcccaagacacgcctttcgtcgctgntgttcctggcccatagaaattgtacatttcgataaaagtccgtttgcttttgctggataagnaagaccaatcgttccatcccccgttcgcaatcaaagccttcaaccaacggttaacttttatttatttatgtgttta

SEQ ID NO: 116893 - DNA, 463 bp, Arabidopsis thaliana columbia
cacgcgtcgtgagcttggatcctctagagcgttcgccctgttttataatccttcatctgcttttcctttttgattcatatataccgaagaaagctggcagagagggagagatacctcatcacaggcaaaggcacattacaaattacatgtggggtagatatatattatacccgatgcccacaatgatgatgttgtagtttgggcctgatgacgaccagaacaccgctcggacgtttcttctccccgcctcacatccacactcgcatccaccccctcacgccacacaccctagccaacaggatgctccccctcagccactcctatccaccaatgttcgtccaccatatagattatttatttaatgaggatattcccggagcgaaaacacatcactaggatcctcggccccccggcgcctcctccccttactccccccacacacatgattatcccactccttatc

SEQ ID NO: 116894 - DNA, 327 bp, Arabidopsis thaliana columbia
  unsure (1)..(327): unsure at all n locations
gggagctggaccgcctgcaggtaccggtccggaataacagaaactataaaaaacntaggaaaaaactttagcctatactaacaaatcgtcacctccacacgatctagtacacattaacacatgcggataagtgcagacgtccattgaacctaattgctagctaccctacgatgtagacgatcgagatataatagcgattaagcaggaccggagacaagcgtttcgcccggggggggggaggcgcacgctatccgaagacgaccggacatgtgagattgattccgaagcattttgctcaatcgctgtctgacagtacctggatagaag

SEQ ID NO: 116895 - DNA, 492 bp, Arabidopsis thaliana columbia
  unsure (1)..(492): unsure at all n locations
gacgtcgcacgcacgcgtaccgtagcttgnatcctctangagcgccgccctttttttttttttttgttttttttttttttanaaantaananacaaagaanngnagttaaaaggaataaaaagctaaacatactcaattacacaaccagggcgtatgagtagcatgaacatatggttttctctactccagatgctgtccacaaatttttttcttgagaatcgcacagaacccgcattttttctccatattatataccccttaacacgcttcagcgattcaaaacatcctaagcccctcttattagtgctattcgttttccgatgcccgacttagttgtttgctcattctaaactcgatgtctttgaaaaataatgttttgtatattaaatatatgtaggcccaatggaaaaaaaaataacatctatcctactcgtcctcccccacaccgtcccctatcccccaccacatttctttttttcccctttttcttc

SEQ ID NO: 116896 - DNA, 374 bp, Arabidopsis thaliana columbia
cccaaaggccgcgcgagggcgcgaagcgagaccgaggccgaagacgaaaaccccaccccagcaacgcaacgccgagggcgagaaaccaaaccacaaaccacacgacgggggccgaggggccacccgaatttttcttaaggcgaacaagcgcccccacaaaaaagcgaggcgcaagccccacgagaagcgcgaagaaacacaaagagacaccccgacaagcggcaaaggcagaagacaaaccagccccaacaccagacggagcagaaggggaaggaggaaaaaaaatgggaagcaaaaaagaagaggacgcgcagggaaacaaaaagcacgaaagagagcggaggcggcccgcagcgaagcgaagcccccccgga

SEQ ID NO: 116897 - DNA, 467 bp, Arabidopsis thaliana columbia
  unsure (1)..(467): unsure at all n locations
agctctactacgactcactattagggaagctggcacgcctgcaggtaccggtccgngattcccgggtcgacccacgcctgcncccacgcgtccggtaaaaatgtcgttgtgtttggttatagcttgtatggtaacatcatggatcttcttacaccgatggggacaaagagacaagagtggtccaaagacttggcctttggttggagcagcgatcgaacagttaactaatttttatcgaatgcgtgattggctcgntgagtatctttataactcaagaacagtaagtggttacaatgcccttcactacttatacatacataggctgtcccatgaacgttgaatagtgcgctggaaacaaacttgtgccaattgccctcaggggagaggcttgatcgtggctgatcttgggccaaatcgtcccggtgtcccgctctcacgcgcacctaacccacctctccttggggtgt

SEQ ID NO: 116898 - DNA, 522 bp, Arabidopsis thaliana columbia
  unsure (1)..(522): unsure at all n locations
cctgcaggtaccggtccgngatcccgggtcgtacccacgcgtgcgcccacgcgtccgctacattcgtcagtttcgcctctcggtttcttgaattctncaaggattcatgcttacacaagcccaagctcccaccccatcaggccctcccaccccctcccacctcccccccccatccaccaccgccaccagcaacaaatttttttttccggcgggggcgaacgccgccccccgcgcggagcactcgacggcccccacccgctccactcacccgcccccccccctcccaccacagccccgaaccccacaccccctgcaacaccgcacctccctccccccccgacattctccaccccccctacccctgctcgtcccattctcatttctatctactatcctcttgaccccccacccgtacactcacttctcccccccccctctcctctcttaccgttccctactccgctacctccaccaaacaaccgactcctctcatcccccgccaccactccacctactcttatt

SEQ ID NO: 116899 - DNA, 526 bp, Arabidopsis thaliana columbia
  unsure (1)..(526): unsure at all n locations
acccgggaggggccccaccccagaaaaccattccgcagcggggaaaaaccccagaaaaaccaaagaccccggcacaagaagcacggaaccagaaccgcacacgcgcaacacccagcgccccaaccaaagaccacgccccagcgcaagcggaacccccaagacaaccaggcaagcagccgcgagagcgccccgcagggcgccaccaggtcttctcttttcagagggcgcgcagacagagcccagcgagaagaggggagcggcgagacgacacgacccccaggagccaaagcagccgaccggccaagaaagaacaagaccaccgcagacagacccgaaggccgagacgccgaaccgaagccggcggccgccgaccggcggncgcgggggggcggccaggaggggagcgagaaaaagaggggggaaacagaaaagcagaggggggggagcgcgggagcgaaacaccaaaaaacaggcggcgcccccgccgagcgcccgcccggcccccgggcccccaaacaccccccaa

SEQ ID NO: 116900 - DNA, 576 bp, Arabidopsis thaliana columbia
  unsure (1)..(576): unsure at all n locations
aagaactctagcgctacacgactcactatttggaaagctgatccgcctgcaggtaccggtccggaattcccgggctcctcctcgcgggtcgaaacgcaagcttcacgcttgaaaatctccgttcgttttctacctcgtttagatcggagatggcggagaagccggcgcaagagcaagagcagaagcgagcgatggaacctgcagttctcgacgatattattcgtcgtttggttgagtttctttacacgagaccgtggatcgggaagcaagttcatctcagtgaaggtgaaattcgtcagctttgtgctgnctncaaagaaatatttcttgaacagcccaatgtggtggaatccggaagctctcatggagattgtgtgggcggcgtgagtcccctgcctctatttcattcggcgcgtcttctttattattgcgatatgctccgcgtagtctacctaggtcgtgcgtgtggtagcctgatcgtttcgctcactactgtcagtgcgtagacatcgaattcggtatgcttcttctcctccggttgttttttgtcggtgttggttgtctctcattctacgc

SEQ ID NO: 116901 - DNA, 552 bp, Arabidopsis thaliana columbia
cgcgtacgtaggctcggatcctctagagcggttgtccggggtttcaaactcccaacctacacgcgaccgccgatcaggcggagcaggatcacgacgcgcgaagcgcggaagcctgcaggcccaacatattaccacccccgattttagggaacactgaaccgacagaaataccccacagaggacacacaacgattttcccgcgttttctatattaagcgcacaaacagagcgcaccgaacaaaaaaaggcgaggacgcacaggaccaagcacgggagggcggcagcgggagaagacaacaacgcacaccaaacgaaggccagcagcggacgcggaacccgacaacacacaggacaaaaaacacatgcggcagcgccgaggaagcggcgggagggttgaaaataaaacatatgatgaagagagtataagaaggggggtgagcggcggagcggaagacacacaagaaccatgctatggcagacgcacgcgggtcctggaaagcataacccgtaactcccccccagaaaaaaatcgatatgccacggtcatagttg

SEQ ID NO: 116902 - DNA, 535 bp, Arabidopsis thaliana columbia
  unsure (1)..(535): unsure at all n locations
ctgcagtaccgtccggattcccgggtctacccacgcggcgaagacttgacgccagaaacacaactagaggacctntctaggcgatatgaagaataagaggcacaccaaaaagcagaataaaaagtatttaacccacatcgcataccaccctcgcaccgccaccccaaccacacagttttccacacattcctcncttaaaccgggccgacaccacacacacacacaccccccccaaccaccgacctaccacaaaaaaaaacaacccacacagctactaccacccacagacagaacacacaaccccaccccctaccacaccaaataccccacaccaactcccccccctcagcatccccatcaattacacgccacaaccacacacaaccactttaacatctgtgacaaacaacaccaaaccccacaacaatccacatagacaataccaccaatcaacaacaacgcataatcactgctcaacagaaatccagtaatacaacccaaaccaacacaccaacaaaaatactaaaaaccacca

SEQ ID NO: 116903 - DNA, 505 bp, Arabidopsis thaliana columbia
  unsure (1)..(505): unsure at all n locations
nnnnnnnnnnnnnnnnnnnnnnnnnnnnnnnnnnnnnnnnnnnnnnnnnnnnnnnnnnnnnnnnnnnnnnnnncttttttttttttttttttttttttttttttttttttttttttgggagcgatatttctttactaaagtatacaaatggatttaacttacaatgtttctgatgatgcatacagtaatgctacatatttagtagaggatctcccgctttttgacaacggaggcctttactatactcaggattccgaccaactaactcatacccacccaaaaatagaaagatttggggaaatagatatgaaagcaaagaatggggaagattggccaaaaagtgaattatatggatccatgaatagttagagagagagacattgtaccctgtctggaatattctgaggcattggagctatggtaacatatctttgtaggtttaacttaagtgaattcacggtccggttcatagatgaagatggcgggtggaacttcgcaaaacgat

SEQ ID NO: 116904 - DNA, 533 bp, Arabidopsis thaliana columbia
  unsure (1)..(533): unsure at all n locations
agctctcnnnnnnnnnnnnnnnnnnnnnnnnnnnnnnnnnnnnnnnnnnnnnnnnnnnnnnnnnnnnnnnccacgcgtgcgcggacgcgtgggcatggtttaaactatactcagcagcctataaggtccgagttctcaagaagtttattgcaagaacaccagcaactcccaaatggttacatgcatgggaaccttgggttgcagacaatgccgaatggggcaaatgttttgggaggtgatgtagaatctagtagggataagttatcagcaaggggatttactccagaacttcataatgttcctatgaggcttgagatgggagaatctgcggataattatgattgctttgctggctatcaccaatcaaacacacagttggtgtgccatgctccagtctttgctaaggcagtacgtgatatccaatgctttgcatctactgtagctcattgttttgctttagctattgctttattttcattgcttcancctgttttttagcttctttttgtgtctagactattcattttcttttt

SEQ ID NO: 116905 - DNA, 522 bp, Arabidopsis thaliana columbia
  unsure (1)..(522): unsure at all n locations
cgcctgcaggtaccggtccgngattcccgggtctgtcacacacgagtgggctggggctctatctattattatactaacattcaccacaaatattcttcaacccatacaaatcacctaatcaccacatcaaatataaacacacatctattaacaccaaatctaatacaccttcacctttttacacaaacaacacagaacaaaacatttttttctcaaagagggggggtggcagagaaaccagcgagccatcacgcgcaggacaagccgccgcaagaacgtctcaaactctgagcacgcaagtgtcgcagatacattcctataatcgcccaccagcacntcgcgagaacccccccaaaacgaagcgtgaggagcaccgtagcagaatagccggacgccatttcaacactcctggtaatacgttggtcctatgggtgtgcgatgagaggccgggacataggcgaggggaagcgggtcaaacctctgagcggcccactctcccaagacccgacccgccctcccagg

SEQ ID NO: 116906 - DNA, 569 bp, Arabidopsis thaliana columbia
  unsure (1)..(569): unsure at all n locations
tactacgactcactattagggaagctgatccgcctgcaggtaccggtcaggaattcccgggtcgtaccacgcntgcangaaggaganagcttcttctcattaatcagngacatgactattagatcaacaaaagcantgatacagtcagctatagtaactgacaggagtatttacttttatgataaaaaatatcttaagatattaattttatggatacctgagaccaaaaattctctataagagagggaagaaaaaaccaacacagaacgaaaacaaaagattagacaaagcgatcacagtatgaacagagagaaaacaaaaaaaatataaaaattatatataatactattagtaccgcggactcctaatattatatatttaacgaaatgacaaatacatatctttacatttttctcaatatttttaattaataagtataatatatatattttatatttaaaatatttaaaaacagaattttgagaattatagtattataattaatacaagataataactaacttaaaccatatatgctctaatgaaaactaatatgaaaatctttaatt

SEQ ID NO: 116907 - DNA, 416 bp, Arabidopsis thaliana columbia
  unsure (1)..(416): unsure at all n locations
ctggcangcctgcaggtaccggnccgnnntnnnnnnnttttatnnnnggagaagaagcccaacaaacacaaaacccaccaccacgccgcggagcagctgacagcaacggcaaaacggaaagcaccgcggatatcaggcacaaaagacacccaacggcccaacacactacccgtgagggcacagacctgaaggtttcgccctccattttctttagacgaggggggggagaggagcagacgaccagccagccagaacgaaacagaacgcgagcgcgagaaaacggagcacaccgaggagccacgacaagacccacgccacaaggggcagcacacaaccgaccgaggcggcgcggcacggcggggtacaacagagagacacaaacaaaaaagccgaacgaacggagagcangacgcgac

SEQ ID NO: 116908 - DNA, 487 bp, Arabidopsis thaliana columbia
  unsure (1)..(487): unsure at all n locations
gctctactacgactcatatgggaaagctgtccgcctgcaggtaccgtccggattccggtcgaccaccggcgggacgcgtggtttgatatatgacactagggcctcaatgtaatgcacacattgggcttgctaagctaaggaaggagtggattgatcgtcgggagaagctaggaacaccaagatacactcaaatgtactacgctaagcaagggatcataactgaggaaatgctctactgtgctactagggagaagctagaccctgagtttgtaagatcagaagttgcacgaggacgggcgattatcccttccaacaagaagcatttggagcctgaaccgatgattgttggtagaaagtactagtcaaggccagtgcgaatatggtgaactctgctggcggcagctgtatctgntaggattggttatcgttgttaagcttgttcaccatgcttggctctatcacatgctccaccggttcatatgtcccc

SEQ ID NO: 116909 - DNA, 542 bp, Arabidopsis thaliana columbia
  unsure (1)..(542): unsure at all n locations
cgactcactatttgggaagctggtccgcctgcaggtaccggtccgngattcccgggtcgacccacgcgtgcgcccacgcgtccgctgatccttctctcatcctcagaaagaatggctcaaaccatgctgcttacttcaggcgtcaccgccggccattttttgaggaacaagagccctttggctcagcccaaagttcaccatctcttgctctctggaaactctttttttgcactaccatctaggagacacagatggcgtcctctcgctctgtgcacccccaatctcacgcgctgtccctatcccgtgtccgctccctcgcttgccccgtacttctacgcccgctcctctcctccctccttccattctcgctcttcatctccacctccgcccagcccccctcacttccacccccctcccgtcccccctctgccccgcccccctcggtctacgcgtcgcccccccctcttccctctcctctgtatctctttcgcctcactgctttttctttctactcgcaattatctccgctcctgtttccttta

SEQ ID NO: 116910 - DNA, 510 bp, Arabidopsis thaliana columbia
gtcgcacgcacgcgtacgtagcttggatcctctagagcggtcgccctttttttttttttctatttcttataactcttgcattgatcaaggaactcagttctagagcacacgagatgtaaaaatctaccggagaagtcactaataagtagtccaacatcttcagatttgctctcccgtttgccggcgtgcgcccttttaagtttttttatttgaggggtcaaagcacaccacagaaataacataactgtccataacctccccccattttcactcgactcttcaacttacatcccactctcattatccctaataatatatttatctcatcactcccatcccacctaatacctccccaacaacaaacattatttttacaaaataattgtttattttattaaaaaattgcattaaggatattcaaaaaaacaaacgactgcctactatctcacctcatcgtaacacaatttcgaatacccctcacattaaatattaaaatacaaattttagatt

SEQ ID NO: 116911 - DNA, 544 bp, Arabidopsis thaliana columbia
  unsure (1)..(544): unsure at all n locations
cagctctctacgactcactattgggaaagctggcacgcctgcaggtaccggtccggaattcccgggtcgacccacgcgtggcgatttgggaactcgtgcgcggctgtggcagaggccaaacccacccgtgtactccatccgtcggatccaccaaaccaatattctttcatctctctctctctctctctctctcttcttcttcgtcttcttctctttttattctttcttcaggaacaaattcctctgcgtttgggcattttagggtttctcanatttttgacgctttctcttaaaagggttgacgaaataaccctttaagggaaaaaacaaaggttgaggaagaccaccaaggtgaaaaaagatagaagaatgcgaacaacagcagcaccaagataaagtctcgaatttctctcttttgagttaccttcgatcgcctactggctctccctacattcgcctccatctgggggcggcgccgggcctatactgcgctctctgatatgcgcctctctcgtggcgtagcgacgcgcgcatcacccctccc

SEQ ID NO: 116912 - DNA, 487 bp, Arabidopsis thaliana columbia
  unsure (1)..(487): unsure at all n locations
cctgcaggtaccggtcncgaattcccgggtcgacccacgcntgcncccacgcgtccggaagccccattatcacatctaaatctgacaaatcgtctctcaagctgtagatcggcagnagagagaggaagagagnaaagccaacaaacccgacagcagcaccacgggtcacaaaagacgtaaaacctcaacaaatagcggcaaaggttaaaaacaggagggggagacacagcacgacagccaaagaaagaaacagacatcaacccgccaccccacgacgaccacgnaccagcacacaacacacacaacgacgataacaccgcagaccacacacactaaagtgcctcgcaaccgtatcaacaccgaactaccaccaacgtacccagaagactcaacacatagcatcacgaagagcccaataactaagtataaagaaacacatacaaacacctcacagggaagagaataaaagaagagggaggaaagaata

SEQ ID NO: 116913 - DNA, 346 bp, Arabidopsis thaliana columbia
atgacgtcgcactgcacgcgtacgtagcttggatcctctagagcggccgcccttttttttttttttttttttttttttttttttttttttttgagaggcacaaaaaagcgaaaacgcaaaccaaccaagaccataatccctcaaagtgaagagtgcacgggacaccaggcgccgtgtgcacaagcaacacagatccaggacactagaatggagctctttttttttccacggagaggagggatctcgcggccgagaaaacagccaagaagatgggtggcacctgaggcgtgactgacaacatagcagaaaagaagtcccactatctgcatccgttgaaccatgagga

SEQ ID NO: 116914 - DNA, 505 bp, Arabidopsis thaliana columbia
ctatagaagagctatgacgtcgcacgcacgcgtacgtaagcttggatcctctagagcggtcgccctttttttttttttttttttctttgccgccattttagctccaagtagcacgtaacaaaagtatcattacaaagaataccaatgtgtataagagataaaaaccttcattgaagctaaaatcttaaagctaagcctaacatttcataacagggtgatatttttagtgttatacatattcctgatttcaactgcaaggaacaatgaatggtttcacaaattcaaggaattcggatgttctgacaccgagcttcagatcgatttctccaccacccaaccagaagaaatccggtttaagtttggttatagcctcatccaatataaccggtatgtttgtcttcataccaatacaggttaccccattatgctcaaaccccgtcaatttaatcgacgtctcctcaggagcaagtctcagattaaatcttttctttgggatcttgccctc

SEQ ID NO: 116915 - DNA, 517 bp, Arabidopsis thaliana columbia
  unsure (1)..(517): unsure at all n locations
acgtcgcacgcnacgcgtacgtagcttggatcctctagagccgccgcccttttttttttttccttataattaaccaataactacatgcatatatctcattcaaatatttcacgacaactctacatgtatagtatgacgtctgctggatatacttattctctttatcaacattattataaaaacggagacanactttaaaccactttttttttctaggtaacacaacacatccccgcaaaaaattcttccccaccacatattaaaccacctaaaacactaatataaaattcactacacaccccaacaacccacaaaagcaactaatctatatacctatcctacatactaacatccagaaaaaatcctttcttccaccatattttttatattaataataaaaagaaaatatgcgtcgaataacataaaaaaaatcaatcaactcacacttccctcccccccccacttcccttccctttttccccctccccattatacaatgaatccccgtccacgccta

SEQ ID NO: 116916 - DNA, 496 bp, Arabidopsis thaliana columbia
cgcgtacgtgagcttggatcctctagagcggtcgccctgttttttaaatcccaaacaacacggcgagcccgtgtggcgagacgggggttagaggggcgaaaagggataaggggaacgccggaagtgcacggcgccgagtaattacgagaaactgattccctaaatccgcgggaacgcaatgagagatgagttacggcgttccctcattgaagctcacgagaaggaccccgcgaggattagacggtggcgccggtgcgccagcccgggtgagtcgcggagctgactagggagcccgccccagtgggcggacagagaggcgcggtaagtgccggagtgcgggaatgaccaggccccggtgggaggatgtgtatttatagtagtttttgttgtatgtttaaaggatgtggaggggagaggaaaaaaaaataacaaagaaggggaggggggggcgggaaggcggtccagtacaccggcaaacttaatatagaccggcagg

SEQ ID NO: 116917 - DNA, 398 bp, Arabidopsis thaliana columbia
gactcactatttgggaagctggcacgcctgcaggtaccggtccggaattcccgggtcgacccacgcgtgcgcgcgttaatggcggcttcgttctcactcacgagcttcatctccttcatctcaccattcaaatctcaaactaaacctacaccaccaccaaatctcactcttccttctccaacaatctcccaaaggcgaagaaatgatctcgctatcgaatcattggcggtcgaagaaacttactcaaccgcttgttcactaggctgtgagcttgcttccgagattcgggccttcgtcgatggctcgagcaagctgctggtggagttcctgcttcctcgcactcggcctatcccactcccttgtacagcataggcgtacccccctcccactataccact

SEQ ID NO: 116918 - DNA, 405 bp, Arabidopsis thaliana columbia
acgtcgcacgcacgcgtacgtgagcttggatcctctagagcggttgccctttttttttaataccaacaagaaaatagctatgttattagagacctgtatccaacgacatatcgcgtaaagtcacgagacattaagtcctctcccccgtgataacgaacgccatccacacccatgcttaccccccgccgaacccggaagaggcgggggccgcgttgctttttgaaggacccggcgaagatacccccagatgaggacttccaaaatccgaagagcaactgaaaagcagacgccacacgaattaaaatacaacaatcacccccggtacgagtcgctactctgatggtcgggtccacaataagcgctgaccgttacatacacagatccaatataaagagcgtttgtttg

SEQ ID NO: 116919 - DNA, 453 bp, Arabidopsis thaliana columbia
  unsure (1)..(453): unsure at all n locations
tcgcacgcacgcgtacgtaagcttgnatcctctagagcagtcgcccctgttttttttttcttaaaacttaaattcgataatattaaagatagagaagtacagagaattgtagtacaaacggttacatggaaaccttaagatttatctaaccagccattacatactatttaatccgacataacctagacctctttgaaccttttttttttagcttaaggaaaaccagccagtaaacctactcatccacataccccccccacaaaatagaataattaatattatacacttccctcatcaattctaataaatacacaattttcttcctttaccaccatctttatctataaccaaaacacgatttagaattaaaaaaattttttattaattttaataataatatatggaccctatccaaaacacaactaaaattcatacaacacacactacttcctc

SEQ ID NO: 116920 - DNA, 449 bp, Arabidopsis thaliana columbia
cgcgggggccgccgcaaggcgacatagggggcgggaaaaccgaaaaacaaagaccggaggggcggggaagctcaaaccacaagggaaggccccggacaacaggacgccgccgggcagaagagagcggcccagcagccaggcaccaagacgcggcggttagcgatttctttataggggggggggcaggccccccgagagagggggcagaaacagcccccaggagggaggccgccacgcaacacacagagcgccccggcccaacccacgccgcgacaggcccaggggggacccgcagcacaggcaggccgccaagcgacgggggggagaaaaaggagaggaaaacggaaaaaagggggcgcgccgagcaacaaaaaacacagcgggcgcacacccggccccgcgaacaaagcccagacccccccaaacaacgaaggaacccgaacgaagga

SEQ ID NO: 116921 - DNA, 499 bp, Arabidopsis thaliana columbia
  unsure (1)..(499): unsure at all n locations
gggagctgacacgcctgcaggtaccggtccgaaatataaaaatttttaaaaangggaagtgccctcaactattaaaaaagcaatgtcggatgtcgcaatttcatcaagaatagtgtcatctcccaacacaagaagagcctgatgtgcatatgaatttatctgggaactgtaaggagaagaggtaggaggaaggaagggcattgtgtttgcgggggggggggggcccgtgtcaggtgaaggtgtcgcgagaagaggcactacgcagagataagcgggaggcagtatgataaggaggatcgctggcgtgacgtgtactgtgtcgaaggggatgaaggggtctaatgagtagaacggcggtgtaagagatgttgtagtagtgtgagtaattaatatgtttatggttaggcattgtgctcgtatcggtcggtgagaagtagtggaggcgggcacatcataggtggggcggggtatgttatgaggcgcgggaggcagctcaata

SEQ ID NO: 116922 - DNA, 503 bp, Arabidopsis thaliana columbia
  unsure (1)..(503): unsure at all n locations
actatagaagactatgacgtcgaacgcacgcgtacgtaagcttggatcctctagagcggtcgcccttttttttttttcttagtcgaaattgcaatggccactcttgaaaccaacggacaaggattcatctaaaagatcgaacgatcataaaccccttgatgattcgaaattacacaaacggaaattaaaaagacattaaaattcaaattcaaagtcgaattttttacaagagagaaaaagagagattaattcagtagtctgtggttgggagctgctcgtgtgtggtgttgatgaagaaaacttcgtagatgagtccagcgattccaccgncgacgagaggtccggcccagtagacccagtggttggtccatgtccagctcaccaccgttgttccgaaagccactgtgggattcatggggggctcagaaaaagctccttcagcttaaattgttggctccaacaacgaacccgatcgccatggtagtatttgtatcattgattca

SEQ ID NO: 116923 - DNA, 488 bp, Arabidopsis thaliana columbia
  unsure (1)..(488): unsure at all n locations
acgtcgcatcgcacgcgtacgtagcttgnatcctctagagcgctcccctttttttttttttcttttttttttttttttgancaannaannaaaaaaagggggaaatattaatggggatttttattagtattaaataacatgaacaagtgtgtgaaaattgaggtgatgaacttatacaattaataaaccacaccttgncagtttntgnntgagggggaaaccaacgcccaacaacagactagctgcccccacacctccctctccacccaacagccaaagctatttttctctgctcaccactcagtcagcccaccgagctctcgccatgagcccccacgtaccactgaccctctacccatgtctttaaaaaaattttttattaaataaattaatattttgcccatatctacacaaattcaatatttgctcaccccccccccctcatccatctcctttctccccccattaccattttcccttacataata

SEQ ID NO: 116924 - DNA, 554 bp, Arabidopsis thaliana columbia
  unsure (1)..(554): unsure at all n locations
agctctctacgactcactatagggaaagctgacacgcctgcaggtaccggtccgnaatttcccgggtcgacncacngcgtggcggtatggcttgaggaggtgtgcatcatccgtctataaataccctgacaaggaaaaccctaattttttttggcccaaagggttttatactttaatctcatactccgattcattgtcgaaaaacgatgatgcataattcaaccgaagaatcttttatgggaggtgagacctggtggtatgctcgtccaacgaagagacgacgccgcttcctccgaccacaaacctctgcaggatcccgactctgcttccggcgttttggctgaaaccatgagaatgacttgtgggtgatgggtgatggcgccacgatgctggatgtgggtgctgaccccccttttccgtcgtgttattcatngatttttgttctactctcctctctctttcatattttctattagtttgtcttacttcttatccgccctacatcgtctctttgcccatttcttctctttatccctccttcacctttaagctat

SEQ ID NO: 116925 - DNA, 603 bp, Arabidopsis thaliana columbia
  unsure (1)..(603): unsure at all n locations
acgtcgtacgtggagctcggcatcctcctagaggcgtatagcccgggggccttcaaatccctccacctttattttttttcgtccgtttttgtgcgattctttttttccctataagccatctatccagccatagcttgcttcgtccatcttgtttcctttctccgcgttataatgctgatactccgttacccctcaattttttctcaccattagtaaccccccgcgacgcacccacgggccatttttcttttccgccgccccccctcgtcgacccacccccctattaccaaatagctctatagtcatcatattcccctgatatgctgtantacgttagacgtgttgacattcagactaccccccgcccatatccatctccaaaccaattgcagctaaatcctctgtccttgttccccttattcttctagatccccactaagaaataaatattgtttttggttacattatgttgttttttttcttttatagtatggggtgtcggtccctagagcataacacaaaatcgaacgtccgggaccttccccgcacccctctcgactcctcttgcaccattatcacccccccagtcatactcatatatac

SEQ ID NO: 116926 - DNA, 394 bp, Arabidopsis thaliana columbia
  unsure (1)..(394): unsure at all n locations
cctgcangtacccgtccagnattcccgggtctacccacgcgtgcgcccaacagcataattatatataacaatanaccatgagtaccaaatcacatactactatacatcacacgttaacctaaccaaatacanacaatcacactacaaaaaactaaccaaacacccataaacgcacaactcttcccacgtccgatactactctaaaaatactttttccagcaacccaagacaaacacacgcaccgcggacacaacccaaaccgcaaccccaaccaatgacatcacacactcatcactcaaaaaacacaccgattatctaacactatttcaaccccgccactccactacactcgctacccaccataccctacacctaatcctaccccccatactaa

SEQ ID NO: 116927 - DNA, 465 bp, Arabidopsis thaliana columbia
  unsure (1)..(465): unsure at all n locations
acgcgtacgtagcttgnatcctctagagctgtcgccctttttttttttttttttttttttttttttnnagaaggaagnngagaaaannaaaaagaagctaatttatgatcctaacaaatggccaaccctaacaccactttgcgaaacacttaggtctacccggtaaaggagacgtgcaacattaagagacttttttcttacgggatgacgaaaacatcagggacaatccagattactggtctgcttataggcgaggggccacttaatcacatatcaagactccacagaattctttctaaattatgtttgtaaaacatactccttcaacaagcttgaatgtgtaaaaaaattctatttaaaaatattatgtattcggcattttaaaaacaaatccatcttcaatctcccgcccctcccgtatctttcccttatacctcccaaaatacaatatttccattctttctt

SEQ ID NO: 116928 - DNA, 489 bp, Arabidopsis thaliana columbia
  unsure (1)..(489): unsure at all n locations
ctacgactcactattagggaagctggcacgcctgcaggtaccggtccggaattcccgggtcgacccacgcgtccgcgtacacacgggtatctaaccgctctcattcatggtgacatagattccttgttaggtgtgcatttgatgaatctaacgtacaacacgggtatttaaccaaaaatggcatctacagtcaagcatgtggactaaacaatgagcatgatgttatgttgccatgacgactacatgtacatggaatttacactcaaggatgtggattaantaatatagttttggatagtttattattgttatatatgttaattaatttaattaatatttaattttatatttataatttttataatttattattatattaatattttgattatattttttaattattttattatattataaaaatatattaattattgaatatatttatattattaattttatattattattgatattgattgataaatt

SEQ ID NO: 116929 - DNA, 482 bp, Arabidopsis thaliana columbia
cgacgcacgcgtacgtaagcttggatcctctagagcgtttcgccgggtcttaaaccccgcaagcgggatcggggatactccgtgccagaaccctttcacagcaaccggtacaatcgcccccagagaaaccatcgggggtcaattaataaccaaacgcgaaatggctccacctacctggcgcggcgacgccccccctctaacatttcttctttagggggcgtagaggcccgccctacgttaacccagcccccatatgccccgccgccggaagcctgaggtgagatatcctacagcccaccaagagagacgctgaacaggcaggcgaacctccactcgctcgcaccaaccaaattacacccgaacgaactgtgcgacgtcacacaagattggctttgttattaaaaagaaagaagattcggccgggtgctaacaacaataaaacgaatcctaaggtagaacgttcggaagaccgaccgcgattc

SEQ ID NO: 116930 - DNA, 559 bp, Arabidopsis thaliana columbia
  unsure (1)..(559): unsure at all n locations
gnnnnnnnnnnnnnnnnnnnnnnnnnnnnnnnnnnnnnnnnnnnnnnnnnnnnnnnnnnnnnnnnnnnnnnnnnnnnnnnnctttttgtgttttttttttttttttttttttttttttttttttttttttttttttttttttttttttttttttttttttttgggggggtttttagggggaaacaattaaattgaaaacacccttttgggttaagcaatgaaatcacaaaagccttccataaattacactgggggggggatacccaacaaaaaaacagaagcggggcaaaaaaaaaacgggttttccaaaaaaaacaaagaggattttttttttacgccgggtggtgaaactccaagggaagggcaaggggttcattttctccgggtttggtttttctgggggcccttgggaaaaaaggaaaccccacaaaagatttaaccttactggggggggtggttttttccaggctgaccacgttgccaacctttaactgattttacgggggggggagagttggactttttctttattctaaccccccttttgtacttggggggg

SEQ ID NO: 116931 - DNA, 551 bp, Arabidopsis thaliana columbia
  unsure (1)..(551): unsure at all n locations
aggtgacttatagaagagctttgacgtcgcatgcacgcgtacgtaagcttggatcctctagagcggcctccctttntggggtttttctttttttttttttttttttttttttttttttttttttttttttaaccccaaaagggttttgtttaaatgtgaaagtcatacatggaaaagggcattgtttaaatgggaaaatcatacctgggagaattataaaaagaacaggggctggtaataaataatccagaggagattccagagacttttcaattttgcaaaagatagcaataaacaaacacccaaaccccctcctttgaaaaaatccgttttgtttcatccatcgttgaacctgactgggaaaagggtgaacctgatgagatactaaggcactttactcatctttgatgggtccatgaagatcggaaccagcaccagaaatcttagcctcaggatcttcataataataatcggaatcatccctacgggatttaacagggacaatagtttccctggaagctccaactttcccaggaagggcgcggaccttc

SEQ ID NO: 116932 - DNA, 545 bp, Arabidopsis thaliana columbia
  unsure (1)..(545): unsure at all n locations
nnnnnnnnnnnnnnnnnnnnnnnnnnnnnnnnnnnnnnnnnnnnnnnnnnnnnnnnnnnnnnnnnnnnnnnnctttngtgtttttttccttttttttttttttttttttttttttgttaccangtttttttcttttgaaaaacaaagtaaaattcatttggcaaatggccttttaacgcttggacacaacaaatttttagttcacattttttttttttttcctacccaattttcccctattaatagtggaacagtcccaaaaagcccctggcaaagatgggcttatttactaatggccaggctttgtttttaaaagcacaatactgatctcctaatttgaaaatggcctacccatcgaccgggtatagggaactttgactacttaaatgtggcctttccaacaaaaccataaatttggagttttggcggtcaacggagggggatcaacctttggaccctttattttttgattcgtttgggaaatttcgcaagcaaaatgggatgctaaatcctccgctaaaaaaaagaatttgcgaagccccctt

SEQ ID NO: 116933 - DNA, 543 bp, Arabidopsis thaliana columbia
  unsure (1)..(543): unsure at all n locations
cagctctactacgactcactatttggaaagctggcacgcctgcaggtaccggtccggaattcccgggtcgacccacgcgtgcgagcgtatctacagaggtgatagcaaccatgcgggcagaggtgtcagatgtatcaaagagcgcgatcagcaattcatttttactagacgacgattcgagcatcccattctcgcttgacgatatctccaaatcgatgcaaaacgtaaaggttgcagaggttgatcctcctccgttgatccgccaaaactccaacttcatgttcttgttggaaaggtcagattgaagtagtcaaagttccctatacccgatcgatcgctaggacattttcagattaggagatcagtattgtgctttcaaaaacaaagcctgtacattagtacatatgcctatctttgccagtggctttctggtactgttctactattaataggggtatattgggtaggaaaaaatatatatatgtgaactaaatatttgttgtgtccatgcgtngataggccatttgcttaatgaattttact

SEQ ID NO: 116934 - DNA, 535 bp, Arabidopsis thaliana columbia
  unsure (1)..(535): unsure at all n locations
nnnnnnnnnnnnnnnnnnnnnnnnnnnnnnnnnnnnnnnnnnnnnnnnnnnnnnnnnnnnnnnnnnnnnncttnngtggttttttttttttttttttttttttaaaagaaacatatcaaatcaaagtgaccaaggttttagttaactgaagtacaataaggtttagtgacaaataagaagaaaccacctatgtttcaacatctaaaacttttctctaactctgaaaaatattggcttaagttaacatcaaaccttgtcctttgaatctagccaacagtaaactttcaagatttgccctcttaagcccatgtgttaccctaaagaaaccgtacggaacagcttaagaagacagagtttaagaatcatttaagtcgtcagcaagaaccaagtgattccccactaaaacacttttctttcttctggctctctgntaaatcagatgcttacgtacttaaccccattctaaacaacaaaagacacttttatttcttagtaattaaacaaatgccctagggtcactgacttttgcttaact

SEQ ID NO: 116935 - DNA, 554 bp, Arabidopsis thaliana columbia
agctctactacgactcactatttggaaagctggtccgcctgcaggtaccggtccggaattcccgggtcgtcccacgcgtcggataatataggttgcagggccttatggactctctcctacaccagctagacgtgctttgttcatattgtaccagaccgcagttccatatatcgcagagagaattagcactcgagctgctacgcaagcagtcacctttgatgagtctgatgagttttttggtgatagtcatatccactcaccaagaatgatagatcttccatcttcatctcaagttgaaacttcaacttctgtagtatctaggttaaacgatagacttatgagatcgtggcaccgagctattcagcgatggcccgtggttcttcctgttgcccgcgaagtcttacaactggttttgcgtgccaatctgatgctcttctactttgaaggtttttattatcatatatcgaaacgtgcatccggggttcggtatgttttcataggaaaggcactgaatcagagacctagataccaaattctttggggttttccttcta

SEQ ID NO: 116936 - DNA, 546 bp, Arabidopsis thaliana columbia
  unsure (1)..(546): unsure at all n locations
attgnnnnnnnnnnnnnnnnnnnnnnnnnnnnnnnnnnnnnnnnnnnnnnnnnnnnnnnnnnnnnnnnnnnnnnnnncttttttgttttttttggatttttcagttttatttaaaaagtggcatatgatttgccataactcaaattattcttaatataatgcaagttggattgagtatttctgtttctggcatcttatattcagcatagtagatacaaactgaaaccagaagatgttttggcacaatcttctgctttcaacaggattttgctattgatcagttttacttccataactttatctgcaccagattggcatcttatgccttgcgtcttgtaagagtatacattttgcaggcatgaggctccactagggcagatagctgctttttaacacatgaatatgtcgaatgctcccataagtcacgagcattaacaatatctgatgaattgaggccaatctcagcccatcgagctgtgatgtttgcagatgctgatcctctgttccataggatgaccgctactcgtttcttgcttagtggacctg

SEQ ID NO: 116937 - DNA, 534 bp, Arabidopsis thaliana columbia
  unsure (1)..(534): unsure at all n locations
nnnnnnnnnnnnnnnnnnnnnnnnnnnnnnnnnnnnnnnnnnnnnnnnnnnnnnnnnnnnnnnnnnntccctttttttgttttttttttttacaaaagcaataatactcttttaagaaaatacataacaaataatggtgttgttaatggttggaagagaatgaaatcagcaaaagatgtaaaatgcaaaagctaatgggaaaattataagattgagaaaaagagaataaggtgcactgcttggtgcatcgctccctctactagccgaaggacccgacccaaatcctcctggtgattctgcacctgacatcgaacctggagcataggctggggaggctccctcgtctcccatagctacaggtgctccaacaggaattccaaaaagagaacaaagtgaaggatcgggagtgatcacgccgcanactccgggaagtttgagagcctttgccttatcaatcttgattccaagttgtgccgccatgtcaccggagaggaggtaacataagcattgcggcgagctctccactagccccgt

SEQ ID NO: 116938 - DNA, 526 bp, Arabidopsis thaliana columbia
ctttgacgtcgcatgccacgcgtacgtagctgggatcctctagagcggccgccctttttttgttttttttttttttttttttttttttttttttttttttttattcatttgagatcagtacatagttttgggtttaacgacgtaaacaataaaatagacagaaactttctgaccgggcatgttaattaaaaaaccgaaaaacggttccaaaaattttttttcggcggggggaccaaaaaaaggatttggaatttcggaaaataaaaacataataaaaaaggtgagaaaaaaggaagaagtgctaatttaattaaaatcctcagggttgctataaaggtgagagacgtcttgaggactttgacgccgcccggttttttttgcgtctggtgacgtttctgtttaccgtccgaacaaatatttctccgcaacataacttattccaattttttctgaaaaaacgggggccccgactttttgaaactttttaaaactttaaatgatcactataaaaatggaaccctttttt

SEQ ID NO: 116939 - DNA, 536 bp, Arabidopsis thaliana columbia
  unsure (1)..(536): unsure at all n locations
nnnnnnnnnnnnnnnnnnnnnnnnnnnnnnnnnnnnnnnnnnnnnnnnnnnnnnnnnnnnnnnnnnnnnnnnctttttttgtttttttatatgtctttttcacttcaattaaactctaaaccaaaattctacaaaattgtcatcaaaattggtgctttctcaaacaaccaagctaagtcgtatcttttgcatcctttataaagagagcacaaatcattttatgttacagttgtagaacttaattacgcgagtaagcttttggacgcaatcctaagtcgctctcccgcaattttcatcatatgctttccttctacagtcaagctcgtgcttcgtgaggactgcaacgtgataacgttctgaagaatcaaatcgatctcgggcttgaatgacgatattatcttcctaactttgacgtcgttgtgcatcagcaggatcacagagataatgcattgtatcatattcaatgagtttcgaccgctctccctgtcttgtaccgattctagcgcttttgtgttttcactaatcattgatcgcat

SEQ ID NO: 116940 - DNA, 459 bp, Arabidopsis thaliana columbia
ttgacgtcgcatgccacgcgtacgtagcttggatcctctagagcggccgcccttttttgttttttttttaacgtttttttaagggaaagcagaaccaactcaattcgagccatatattctgtgcaaaccgcgccaataacaggtttgagttttaacatttaagagaaacaaaatcttaaaaacgaacccttggaaatagactattgatcagttttaaagtaacatgagctagaagctacaataaataaacttacaatttccctcatgaacggacactacattcttgctgctcattcacaaaactctcttttagagcgttcactttaactcggcagacacacatccatctgaagccaattgcacgttcttagatgtcttatataggacttccggggtaaccttgtatgcaggagcagcccatttttttttcgggcattaatttcttggggggaaactggg

SEQ ID NO: 116941 - DNA, 539 bp, Arabidopsis thaliana columbia
tgatcttcagctctctacgactcactatagggaagctggcacgcctgcaggtaccggtccggaattcccgggtcgtaccacgcgtgcgggcgagagggaagatccagatcaagaggatagagaaccagacaaacagacaagtgacgtattcaaagagaagacttggtttattcaagaaagcacatgagctcacggttttgtgtgatgctagggtttcgattatcatgttctctagctccaacaagcttcatgagtatatcagccctaacaccacaacgaaggagatcgtagatctgtaccaaactatttctgatgtcgatgtttgggccactcaatatgagcgaatgcaagaaaccaagaggaaactgttggagacaaatagaaatctccggactcagatcaagcagaggctaggtgagtgtttggacgagcttgacattcaggagctgcgtcgtcttgaggatgaaatggaaaacactttcaaactcgttcgcgagcgcaagttcaaatctcttgggaatcagatcgagaccaccaag

SEQ ID NO: 116942 - DNA, 546 bp, Arabidopsis thaliana columbia
  unsure (1)..(546): unsure at all n locations
agtttaggtgacctatangaagaatttgacgtcgaatgcacgcgtacgtaagcttggatcctctagagcggactgcccttttttggtttttttttttacaagctcttgatgttgataaaaactaacaaatgtttacatgcattatataatttgagtagagaatacatatgcatctctcaactctttgagcgtctaatccaatacttgtgtgatttaagacttattattagaaactaattaattaattgagtggaagagggtggacgagcaaggaccggacatgattgacggtcttagccttgtcaggacagccatggccatcaccgtactgataaacgcactgagccacacgtccaagattagccgcagcttctaggaaaccttgatgtagcctacaactctttttctccatgtttaagtcatcccaagccacaccgataattccttgaatgtacgcgcgtgactctgcctccgaagctccagtttcatgcatgtgacattgtacggatttcatagtgtcgcctctcgctaattcctccgaagaag

SEQ ID NO: 116943 - DNA, 514 bp, Arabidopsis thaliana columbia
  unsure (1)..(514): unsure at all n locations
aggtgacctatagnagagctttgacgtcgcatgcacgccgtacgtagcttggatcctctagagcggccgccctttttttgtttttttttttttttttttttttttttttttttttttttttttttttttttttttttttttttttttttttttttttttttttatttttnaaaaaaaagaaaaagccccggaaattaacaaagggggaaactttccaaaaccgggcttgtttttttctttggcccggttattgttaaaaaaaattttcccttgaattaaccccccaaaaaaaccccccggggaaaacttaaacctgggaatttagggggaccatcaagctaggggcaaaataaaccccccgggcccccccttttttaaaccccctatttctcctaaaaaaccaaaaaaaaacccctacggggaccatttttaggccccctttttggggaaagggagtcccaaaaccaggcaaccccggctggaccccccccgccctttgactaatttttttggg

SEQ ID NO: 116944 - DNA, 542 bp, Arabidopsis thaliana columbia
  unsure (1)..(542): unsure at all n locations
cagctctcctacgactcactattgggaaagctggtccgcctgcaggtaccggtccggaattcccgggtcgacccacgcgtgcgcggacgcgtgggcgcagaagttgatctcaacaagtgtgagccttggcaacttcccgggagagctaagatgggagagaaagaatggtacttctttagcctccgtgaccggaagtatccgacgggactgagaactaacagagcaactgaggctggttactggaaagctaccggaaaagacagagagatctttagttcaaagacttgtgcacttgttgggatgaagaagactcttgtcttttacaaaggaagagctccgaaaggagagaagagtaattgggttatgcatgaatatcgtcttgaaggcaaattctcttaccatttcatctcaagaagctccaaggatgaatgggtgatctctagggttntccagaaaaccactttagctagcaccggagccgtctccgaaggaggaggaggaggaggagcaactgtgagcgtaagcagcggtactggtccatc

SEQ ID NO: 116945 - DNA, 535 bp, Arabidopsis thaliana columbia
  unsure (1)..(535): unsure at all n locations
nnnnnnnnnnnnnnnnnnnnnnnnnnnnnnnnnnnnnnnnnnnnnnnnnnnnnnnnnnnnnnnnnnnnnnnnctttttttttttttttgataatgccaccatatgattgccatatatcgtttgaacagtgccattccagactcgtttattgaacttaaaagtctacacatggacgtataaagcaatcagcacacatagaattaacgagcccatagttgtgacaacgtagatacacatctaaactgatatccatgcatagacatgacagattgagcaatgtatgaaactgcatatcatagacagcaagatgaggcacgagatcagaagcaattcaatgcttgacgtctgtctcttcacaattgactcatagacctgaatgtgatgacttccttatcctcaagtgccgtacaaacattacctgaatcactcagctgtatggctgaaggatgaggtattcctgcagagaacagcgagtgcaggcgcagaggactgatctgaagtctaagcaccagatgcctgaaccatgtatgagtaa

SEQ ID NO: 116946 - DNA, 538 bp, Arabidopsis thaliana columbia
  unsure (1)..(538): unsure at all n locations
cagctctcctacgactcactatanggaaagctggcccgcctgcaggtaccggtccggaattcccgggtctacccacgcgtcggcccacgcgtccggttctgatgaaatactggggggatacttgtacttccataaggctcccaacaagaaagaatttcatgaagaaacatgccgaaagatcaaagctctccaccaatttgattgtttgagagctaacaaatcaacttctgcgtggggtgtcgaagctcgtgtgcctttcctagataaagaatttttaaatgttgcaatgagcatcgatccagagtggaagttgatcaagcctgatctcggaaggatcgagaagtgggtgctacgcaatgcctttgatgatgaagaacgaccttatctaccaaagcacattctatatagacagaaagaacagtttagtgatggagttgggtatagctggatagatggtctgaaagatcatgcaaataaacatgtctctgatactatgctgtcaaacgcaagctttgtcttcccggataacacacctctg

SEQ ID NO: 116947 - DNA, 545 bp, Arabidopsis thaliana columbia
  unsure (1)..(545): unsure at all n locations
nnnnnnnnnnnnnnnnnnnnnnnnnnnnnnnnnnnnnnnnnnnnnnnnnnnnnnnnnnnnnnnnnnnntccctttttggggttttttttttttttttttttttttttttgatgacaaaccaagaacaaacttgaaaatttggtcgaaccaaaaatggtttattcagaatacgtacatatgaatacataagtaaccaaaaaataaaattttatagcttttgccaaaagactcgatcttggattgtctctaatcctacccagaaaatcttgctatcacacaaaaaaaaggaagaaaatgaataataacagggtaaaaattttcagtaagagaactcatggccgcggagtgaaatgtttttcttgacccaaatggcaatatcttcggcgcaggcctgtgcctgaggagtcttgagaagcatatcaagtgtagcaaactcatgaactgcgtttttgtattctaaaactggagaatctacgttaacctttttaagctcttctgaataagcaatggcttgggctctcatccagtcatgctcagctactact

SEQ ID NO: 116948 - DNA, 428 bp, Arabidopsis thaliana columbia
  unsure (1)..(428): unsure at all n locations
nnnnnnnnnnnnnnnnnnnnnnnnnnnnnnnnnnnnnnnnnnnnnnnnnnnnnnnnnnnnnnnnnnnntgccctttttgggttttttttttacatgtagactacgtgatgtattcattttgatagaaatggtccatacattccaataactctaagttgtgtggtgaaacaaagtaaatggccctaagactaaaacagtacaaaagtatggggcaccattattgttcgaacattcctacttagagaatataatacagagacgtctccgattacaatactgactatagagatatccccattctgaaaataaaagtctaacccaacaaagccaaatttctcagattgaccccaaaatttacgttcctcgtgaaagaccccgatttccatggacctcctgccgatgttcctggggtagtaagccactggtgc

SEQ ID NO: 116949 - DNA, 545 bp, Arabidopsis thaliana columbia
  unsure (1)..(545): unsure at all n locations
cagctctctacgactcactattgggaaagctggcacgcctgcaggtaccggtccggaattcccgggtcgacccacgcgtgcgggcattgggacagatataaggagtcttttcactgctcctagtgcgtctgcattgcagaaagcccttggatttggagatgtctctcttttgaatcccattcttgtgcactgcaggacttctgcaaagcccttttatgcgattatccacagggttacagggagcatcatcatcgactttgaacccgtgaagccttatgaagtccccatgacagctgctggtgccttacaatcatacaagctcgctgccaaagcaatcactaggctgcaatctttacccagcgggagtatggaaaggctttgtgatacaatggttcaagaggtttttgaactcacggngtatgacagggtgatggcttataagtttcatgaagatgatcacggtgaggttgtctccgaggttacaaaacctgggctggagccttatcttgggctgcattatcctgccaccgacatccctcaagcag

SEQ ID NO: 116950 - DNA, 545 bp, Arabidopsis thaliana columbia
  unsure (1)..(545): unsure at all n locations
nnnnnnnnnnnnnnnnnnnnnnnnnnnnnnnnnnnnnnnnnnnnnnnnnnnnnnnnnnnnnnnnnnnnnnnncttttttggtttttttttttttcatggttcatacggttttatactaatccttatatgtcacacaaaattaaaatcatatgttttctataatatatccgccaatttcattctgatgcttttggcaaaatttgtcatgggagctaatgtacatgtgttgaactgtttacagtcacttgagttggaaattacagggccaagttaacccgatcgagaagcattgcttgctcagtcaattcacattgctatctaactcctgcaacttttgagccatttcagagctatgtccagcccgcaaacttctggcaagcgaccgtatagctctagagatcaactctttcttctgcttcccacccgaagtgcttgtgccgcttgatccagaaacattatcttcctctttcaatgtcacacacaatcctctcaaccactcctctagaaatgaggcttttcttataagaaattctgacaacgcttcg

SEQ ID NO: 116951 - DNA, 540 bp, Arabidopsis thaliana columbia
  unsure (1)..(540): unsure at all n locations
nnnnnnnnnnnnnnnnnnnnnnnnnnnnnnnnnnnnnnnnnnnnnnnnnnnnnnnnnnnnnnnnnnnnnnnctttttttgttttttttagagtgaaatagtacttatatatcttctgattatgcacataaaagataccccacgaacatccgattacaacatactcagcatgccattatgcttgctacaagcctctgctacatacattgagactaatgtatgatttcttgatacattgattacaatataagatatctagataaattagaacttgtcttcaagcatggttgaccaaagcaagccccgcacaaacttgctcttctttgccttctcttgatcttcgtttgagaatgattcttgttgtattttgcttttagaggtgtccttaggtgagacttgtgctaccgagtctccttcagtgataggtatagccgaagggggtttaaacatanaggatgagagtagaggatcagaatctatattggaagagggaatgaaagtggaagaccctccaagagactggtagttagcttctcgaagc

SEQ ID NO: 116952 - DNA, 476 bp, Arabidopsis thaliana columbia
ggtgcactatagaagactatgacgtcgcatgcacgcgtacgtaagcttggatcctctagagcggtcgcccttttggttttttttttttttttatcataatatatctaagtaataataataataaaaaccgaaattaatgtcattaagagagacgtaccatacgtttaaaatattttggttttccacatcaaatattttcttaaaattatagttttctcatcaccaagcgatcgacgaagatgaacaccaccaaaaccctaaaatctcaagacggatcaacagtacggcgaccatcatctccagcggcggctctcggctgctgaaactgagtgatctgtccaatggcaagaatcccaccgtcgtagttgttaccggccggacatccaagccaccaaacatttgttctctaggaaaaaactgggggggggatagtgggctctcacggcggtggctgttcatcttgtgctccggggagt

SEQ ID NO: 116953 - DNA, 514 bp, Arabidopsis thaliana columbia
  unsure (1)..(514): unsure at all n locations
nnnnnnnnnnnnnnnnnnnnnnnnnnnnnnnnnnnnnnnnnnnnnnnnnnnnnnnnnnnnnnnnnnnnnctttttttgttttttttttttttttatggggggatctatttatataaaaaaagagtattgtgagacagtgagaaaagtataaacatcactacaccaattagaagtaacttggtcaagtatgtccactatttcaagtgaatctattctgtctgctatcgaactgccaataaccatcttaaccatgtaaaaatagagctacatctgccatcataagaataaactgcgaacatggttgagggaaagcatcccctcacttgtcagatgactgttttgtttgtttctagattgtgtagcgcgacctgtgacttaaagttcactgtagttacgccagacagcccggaattcttcacggaatgtgtttaagcgtgccttgagatttggggttcttatgcttgcatgaacaatgatcacagcaagggaagtgagaagtgcatagaggacccac

SEQ ID NO: 116954 - DNA, 531 bp, Arabidopsis thaliana columbia
  unsure (1)..(531): unsure at all n locations
nnnnnnnnnnnnnnnnnnnnnnnnnnnnnnnnnnnnnnnnnnnnnnnnnnnnnnnnnnnnnnnnnnnnnnncttttttttttttttttaacttggaaaaatcaggagttcttattcactcaaacacagttgtgtcatccaaaataaataaaaggaacaagacaacagtttaaccaacactacaaacagataatgtaaattcttcaaaatgtcttaggccagaatctgaaaattttgaagaagaaaaacaaagaagagcagagaacgaagataaaaacccagtaaggacaaactggaaaacccccagggcttctccggaagcagacttaacttcaagctcaaaagcatttccggtgaacaatcgacgggcctgactcatcatattctgcctttgcgatccacatctgctggaaggtactgagggaggccaagatggatcctccaatccagacagagtatttcctctcaggaggtgcaacgactttgatcttcatgctgctcggtgccaaagcagtgatctctttgctcattc

SEQ ID NO: 116955 - DNA, 533 bp, Arabidopsis thaliana columbia
  unsure (1)..(533): unsure at all n locations
tgnnnnnnnnnnnnnnnnnnnnnnnnnnnnnnnnnnnnnnnnnnnnnnnnnnnnnnnnnnnnnnnnnnnnnnnnnnnctttttttgtttttttgaattaaaaccatagccataagaaacacgatntncgtttaaaacagaaagatcgggtntttntttatgtacagaaccttaaacccagaccagagagttnnnnttntggttgttnnnntgnnntnnntnnnatgtttgttcaacagagtaagataatgatcgttgtttgcagatcacatggccattggttcaggaccagcagcgttcagaatgtctaagagtgagttttggggctccaattcttcgtgccaaagctgcaacttatctccagggtgaaagtttctcgtcactccctctgagttgattatgacagnccgnacgacaccaccactgggtccatcacgggcgatggctagtgaaaccgccttcacaacaagttgctctgctttttttttggtcatgttatctttccaagcctggtcgaagaacccgtagagatag

SEQ ID NO: 116956 - DNA, 563 bp, Arabidopsis thaliana columbia
  unsure (1)..(563): unsure at all n locations
aatgnnnnnnnnnnnnnnnnnnnnnnnnnnnnnnnnnnnnnnnnnnnnnnnnnnnnnnnnnnnnnnnnnnnnnnnnnnnnctttttttgtttttttttcaattctgtaaactcttcctaaaaaaaaacacatgtggctccctaatttgctatgcacacaaaggcactgcaaataaaataagcttgccaaaaacaagcaagaaagttcttattattatacacatagtcacaaagaaaaatgaatagactgtagttgtatacccataaatagattcagtaccctgagttctacagagtgattgacgcggggcttactagattatacagttgcggctttcggagacagaaaatcggagatcttgctggtgtagaaatctggttgtatcttgttctcagggctttccaacatagagattgaagtaacacccgagaggacgagtagagtctttacaaccgcattctgcccaaataaaatgtcagtgtccaatctatcaccaaccatgcatatctgtgactttnggattccaaatttgtctgctaaatagtccatcataaaagtggagg

SEQ ID NO: 116957 - DNA, 556 bp, Arabidopsis thaliana columbia
  unsure (1)..(556): unsure at all n locations
gattgatcnnnnnnnnnnnnnnnnnnnnnnnnnnnnnnnnnnnnnnnnnnnnnnnnnnnnnnnnnnnnnnnnnnnnnnnncttttttgttttttttgatgaaagacaaaagaaaaggaaacaaatgtatattcgattaaaccggtagtgacgctgtgttggttcgttcttaccgactaccgtacagttcaaaagattttacatcaaacataaggaaataaagcaaagaaagaaacagagtaaagccttttttttttgggttgtggtattcaacttatttaggctagatagcggtaaagtttccggtctgtactatccctttccaagaaatctcgttcaatgagcgactcgattctcttctttatctccgtgggattagctaggaaccgtggctgcaactgtttcgtcacctcggcgattatgttgttgtggtctagtattttcctggacttcatgatccttacgatggctgcttcaatctgaggttttctgtcttcctccactctctgtctcgtctcttgcttctccggttctgtttccttttgggcaaccacagt

SEQ ID NO: 116958 - DNA, 556 bp, Arabidopsis thaliana columbia
  unsure (1)..(556): unsure at all n locations
tgannnnnnnnnnnnnnnnnnnnnnnnnnnnnnnnnnnnnnnnnnnnnnnnnnnnnnnnnnnnnnnnnnnnnnnnnnctttnttggtttttttttttttttttttttttttttttttttttttttttttttttttttttttttttttttttnccgttttcgaattcactaaatttaacaattccaaagataataacctcaaaatcttttttttttcatcgggcctggtttttttttgattgtttaatagagaaagaagttgggggaaaaaaaatttaaccttgcccaaaaaaaaaagattctaaaattttttttttatacaatttttcccaaatttaaagtggctaattgaatttcaccaagttcaagctgaaaagcaattttttcaagctgttttttcacactcatttaaataagcttcgaaccggtttcaccttcccgaatggaaaaaccagccacaaaattcgctttattacccgttttaacccaaacatttttagctcgggttaatttttaaacctgtttcgaaatttgagttaattgcgggggccccgtgg

SEQ ID NO: 116959 - DNA, 539 bp, Arabidopsis thaliana columbia
  unsure (1)..(539): unsure at all n locations
nnnnnnnnnnnnnnnnnnnnnnnnnnnnnnnnnnnnnnnnnnnnnnnnnnnnnnnnnnnnnnnnnnnnnnnncttttttttttttttttttttcccactaaactttctatattttttattgtatgaagtaaaatagataaataattgatacaaaaaaaaaacaatttgaattttaaaaaatgcattttaaaagcagtggacatcacaatagtcttgttgctccaagacaatcgtagcaagtgcgagtctaaaagcagaagatcttaggtttctaactaaaacataaatctgcttcttcctccgtcttacatctttgtctctccattgctcatctcttagtctccctaacaacaccgcatcacagaaagcttcggccgccggctttttactacacacaataaagacaggtttaagagctcagaaaccaaatcagcctctggcgacctgtactcaatatttagtggttttttttagtttttacctcccacgtacaaatcctgttgttacaaacccgattggccatctatgagattgctctg

SEQ ID NO: 116960 - DNA, 495 bp, Arabidopsis thaliana columbia
aggtgacctatagaagagcttgacgtcgcatgcacgcgtacgtaagcttggatcctctagagcggcctgccctttttgtgtttttttaaacatagtgtacattttattccaatacatgcacattgcatccttattttgctctacacgctcatggtctgtatataaggatagctaagcaaatcctagcacaaaacggttgattgttatccacacagagtcacagcagattcatggtgccgcagtagcattcacaggtcttattatgaaccagtgcgaacactctgtgatagactccagagttactagcatacacagcaccaacttttcgaagatattatagtagaaaggtctgcgagtgaactatttatggagtatattgttgaggctactcaaacacacatagtcatgacactctctagcacagagagggtgagtcttactcatggcattctgcacgactataatggaggtgatgattgtagaccgagctatgca

SEQ ID NO: 116961 - DNA, 226 bp, Arabidopsis thaliana columbia
  unsure (1)..(226): unsure at all n locations
nnnnnnnnnnnnnnnnnnnnnnnnnnnnnnnnnnnnnnnnnnnnnnnnnnnnnnnnnnnnnnnnnnnnnntacccacgcgtgcggtcacgcatacacaggagacacttattcttagacgatgccgctctataccacagatgacactgctgtacacatgtctaatagtctgatctatcaccaaactagaggtgtatcttactgtctgagagatctacggcgcgtacg

SEQ ID NO: 116962 - DNA, 553 bp, Arabidopsis thaliana columbia
  unsure (1)..(553): unsure at all n locations
ccagctctatacgactcactatangggaagctggcacgcctgcaggtaccggtccggaattcccgggtctacccacgcggggcggacgaacaaaacttggcttccaaaagaaaaaaatcgacgaggtctcaaaggaagcagagaaagtaaaaagctggttagataagaatgtggctgagcaagaaaagacttctctgtggagcaaaccggtgttcacgtccactgaagtgtacgctaaagtatttactctacaagacaaggtcacaaaggtgaataagatcccaaagccaaagccaaagatagagaaagtaaccaagacggagaacacaacaaaggaggaggaacaatcaaaatcctctgatgaagctgccaaagaagaagaaagtcacgacgagctttgattaaggatatataataaatagagttttcgttaatttttgtgtttttaagaggggaaataggattaaaagtaggcagctgagatgagcaaaaggattttattcctttctcctcaacttcttcacatcaccattagaaacggaatattctgtgt

SEQ ID NO: 116963 - DNA, 528 bp, Arabidopsis thaliana columbia
  unsure (1)..(528): unsure at all n locations
nnnnnnnnnnnnnnnnnnnnnnnnnnnnnnnnnnnnnnnnnnnnnnnnnnnnnnnnnnnnnnnnnnnnnnncttttttgtttttttttaacttttattaatcaatacattattctgtagtatatattacaattgagtcaaggtatgtgtaaaaacaattaaaaaacaaacaaacatttctctctttgtaggcttctttcataaaatgctaaatgtaatttgacatttcaattgtcattctttttgccggacgaatgttgtcttggtggtttcctctatccctcttcttcttttcgtatcggaaaatctgaaagattttagagagatcttcaacgttataatccccattcatattcatcacatcgcctcgctgcaacagactcagaatactcctcccttcactgtatcttcttctcgacgactgatgatcaatgtctcgatttttcatcccatcaacacatttcacgattttttccttatgattttgttcaaagagattcatgatactttctcgacacaccttgtcttc

SEQ ID NO: 116964 - DNA, 527 bp, Arabidopsis thaliana columbia
gctctctacgactcactatttggaaagctgacacgcctgcaggtaccggtccggaattcccgggtctacccacgcgtgcgtccaaatccattacttctccaccctctttagccttagggaagtcaggaggaggaggagttatcagaagttcactatgtaacttaatgatgccaagcaaagttaacttccctagacaaagaactcaaactctaaaggttagccagaagaaactcaagagagctactagtggtggtcttggtgttacatgcagtggtggtgataagattctcgtagcgaatcgaggtgaaattgcagttcgtgttatcagaactgctcatgaaatggggattccttgtgttgctgtgtattctactatagataaagatgctcttcatgttaaattagctgatgaagctgtttgtattggtgaagctcctagtaaccagtcgtatttggtgattccgaatgttctgtctgcggctattagccgtggatgtacaatgcttcatcctgaatatggttttctt

SEQ ID NO: 116965 - DNA, 547 bp, Arabidopsis thaliana columbia
  unsure (1)..(547): unsure at all n locations
cgattgatcnnnnnnnnnnnnnnnnnnnnnnnnnnnnnnnnnnnnnnnnnnnnnnnnnnnnnnnnnnnnnnnnnnnnntcccttnnttggtttttttctttttttttttttggactaatatataattagcattaatgaagaaaaaattagaagacataagccagagaaaaacatatacttataatgggaaacaatcataatttcgaatccgaaaagaaaatgaaaaacaactgtagtgtctcatttatttagtgcataaatagcttcttcttttttgtgttgttggtaagaagtgcataaatagcttcttaattaacgaataataatacagatttcagaataaacattaacgaacgagagccatcttttgtttctggagttccgagggcaatttcacatcagtggctataccgagaacctcaaatagtcgaatgaggtaccaagttatgtctatctgccaccactccaatccttgcctcgccgatgactcaaacgcgtgatggttgttgtgccaactttctcccatcgtaaacaaacttaaccacca

SEQ ID NO: 116966 - DNA, 493 bp, Arabidopsis thaliana columbia
  unsure (1)..(493): unsure at all n locations
cannnnnnnnnnnnnnnnnnnnnnnnnnnnnnnnnnnnnnnnnnnnnnnnnnnnnnnnnnnnnnnnnnnccacgcgtccgcccacgcgtccgcccacgcgtccgctcagtttcagaaacccggaagagctgaggctgcatttgccaagcatgattgtttatcggtaatgaagaagttcttgctaataacaagaacagactacttagtggctcctcctgacacagagatcatagatcatcttgagataccgtcgacgattccagattggataacagaagaagagattcaagtgtatgcggaaaagtttcaaagatctggattcactggccctttgaattactacagatccatggatatgaattgggagatattggcgccgtggcaagactccaaaatcgtcgttcctactaagtttatagcgggagacaaagatatcggatatgaaggacctaatggaacaatggagtatgtgaaaggagaggtgttcaagatt

SEQ ID NO: 116967 - DNA, 543 bp, Arabidopsis thaliana columbia
  unsure (1)..(543): unsure at all n locations
nnnnnnnnnnnnnnnnnnnnnnnnnnnnnnnnnnnnnnnnnnnnnnnnnnnnnnnnnnnnnnnnnnnnnnncttnnttgttttttgttttttttttttttttttttttttttnntggaagagaaaaaagaaaacgaaatgggtaataacttaatggcataaagaaaggcttacaacacagcaaaaatgttcatgttcctaatcttaccctcactataccaatacaatcctctccacgtatcatcatccttgaaaggaacaaacggagaaagagtagagccactccacttctttgatgatctttcttttgcgcagaggtgctgtgaccactgttcctggagcactgggagctttccttcgggcttcttttcttctcttcgaatcgttcacagttcgaatgatacccatcgctttgtatattggttttggcaagtgcctgtgtctcacaatgcgcttaacctcaaaaagatgcttgtaccggttcttcacagcctcgttgaactcatgcttcttttgttcccttggaagataactcccaattgct

SEQ ID NO: 116968 - DNA, 543 bp, Arabidopsis thaliana columbia
  unsure (1)..(543): unsure at all n locations
nnnnnnnnnnnnnnnnnnnnnnnnnnnnnnnnnnnnnnnnnnnnnnnnnnnnnnnnnnnnnnnnnnnnnnctttttttttttttttgttacatacacacantgttcctncgttcttcgaatctccacgacccaaccgaaccaactgggtcccaaaagtataaggcancggaatatttncgggcgaaattgtcacaaaacgaaactactggggtaagttaaagtaaaataaaaacataaggtcacgttcgctaagtcttttttcttctcctctttatgacgacgtatctaccgccgcaactccgccgctagtttccacgccgatgcagcgattagaggtttcgtttgccacgcaagcattaggcttccgtcgttctcctccactctgtatccatctccaccgccagataacgccaatagcaaactcgcttgcttaaacgcgtctgatccgaggttaaccgggtcaaacccggcggatcccatacgttttcgccactgagccagcgtctcgtgtcgctcgatcctatcgcttccttccgtcgcca

SEQ ID NO: 116969 - DNA, 510 bp, Arabidopsis thaliana columbia
ttgaacgcgcatgccccccttccgtagcctggattcctttaaaggggccgccctttttggttttttttttttttttttttaacaaaccaaaacccgtttggggtttggatctcacactcataagctgataaacatggtggattaaaaaattaaaccattcaaccaacccaacccaaccaattgatcaggcaaaagaaaggaaaaaaaaagaagtctgctgcctataataaaactctacgcagcaccattgtttgatcatcagtagagaacccaaacttgcaccttccttctttgaaccagtgcgaaaaataaacaaaaggtagccgcacacaaacacacagaacaggaaattccggcgtcaggggaaaaatatcaggtggttcgttaatgacattgtcttcttcacttaatcatctggaccaagcagtggaacactgcaatcgaaagcgtattttcgagcaagggctatgggtgcgttacgttcgggttctgactcaaagtttattatga

SEQ ID NO: 116970 - DNA, 500 bp, Arabidopsis thaliana columbia
  unsure (1)..(500): unsure at all n locations
nnnnnnnnnnnnnnnnnnnnnnnnnnnnnnnnnnnnnnnnnnnnnnnnnnnnnnnnnnnnnnnnnnnnnnnnnnccacgcgtccgcccacgcgtccgcggacgcgtgggcaactatcaccaacaagaatcatgacgagctctgttagagagaagaagatcaagaccaacgggatttggttaaacgttgctgagaaaggagacgaagaagggcctttggttctgttactccatggtttccctgagacatggtactcttggcgtcaccagatcgatttcttgtctagccatggttaccacgtggtcgctccagatctcagaggctacggtgactccgattctctaccgagccacgagtcttacactgtgagtcacctagtcgctgatgtcatcggtttactcgatcactacggcactactcaggcttttgtggctgggcatgactggggagcaatcataggttggtgtctatgcttgtttagaccagaccgagtcaaaggtt

SEQ ID NO: 116971 - DNA, 547 bp, Arabidopsis thaliana columbia
  unsure (1)..(547): unsure at all n locations
ggtgcactatagnaagactatgacgtcgcatgcacgcgtacgtaagcttggatcctctagagcggccgccctttttttgtttttttttttttttttttttttttttttttttttttttttttttttttttttttttttttttttttttttttttttttttttngggggttaaaacccttctcaataaaaattcccacccatcccttgttttctttcccaaaaatggggttttttttccccccccctggaacaaaacacccctttttttaaacccccaaattttttttttttggcccccccagcaaatcaatttgaaatttttccggaatttattgggcttttggttgttcatcccctaacatttaaaagccccctttttctttttaaacgggccccccgggttttctttttttttccggaagggaggacccccgggggtttttttttttttaaacccaattttaacctaagggttggtccttaaatttcccccccttttttttggcccaaaacaaactgaactttttcccttgccttaaccgaaata

SEQ ID NO: 116972 - DNA, 416 bp, Arabidopsis thaliana columbia
  unsure (1)..(416): unsure at all n locations
ttgacgtcgcatgcacgcgtaccgtagcttggatcctctagagcggccgcccttnngtggtgttgttcttttttttttttttttttttttttttttagtttttttgtaaaaaaanggaagggggataaaaaaaaagggttggggggtgcctattggaataaagaaccggctctttgaaagaaaaagatctttttctcttcaacaaacggtgtttttattccccctgtggtggctcaactccatcaatcgattaattgggtgtgcggtgtgaaaatcggttttttgtttgggcgacacacgttttttctgtatattttcacccaagtttgtggatggttttttaggagggggggacaattcttttttttgagagaaactgaaaaatttttctttgggagtctttctttttccctaaa

SEQ ID NO: 116973 - DNA, 543 bp, Arabidopsis thaliana columbia
  unsure (1)..(543): unsure at all n locations
cgattgatcnnnnnnnnnnnnnnnnnnnnnnnnnnnnnnnnnnnnnnnnnnnnnnnnnnnnnnnnnnnnnnnnnnnnnnnnctttntttgtttttttttttttttttttaaattgaataattatcgatgttttatgtctgtttttgttattttgtatcccatacataataaaaaggattttcttgtggtttctcagtttcggttcgttgtttcttacaccacaagaaacatgtaatcaaacataagggtttaagttcattctagggtttaacttagaaactatttagtggagcttcttcttcttctgcaagtaatcttgcattctctggaatttcagaatggcccaaaccaaatgccatagccctaactccggccaaagagcctccgttctatgaagaagtgccctagaagtttgccacgtcatgaagttactcagccgatctcctcctccggttcttaccacaagatccggaaccggcacaaccgatgtatacatacactcttcaatatcactcaactccaaagctgaagaaccatctccag

SEQ ID NO: 116974 - DNA, 560 bp, Arabidopsis thaliana columbia
  unsure (1)..(560): unsure at all n locations
cgaatgatcnnnnnnnnnnnnnnnnnnnnnnnnnnnnnnnnnnnnnnnnnnnnnnnnnnnnnnnnnnnnnnnnnnnnnnnnctttttttgttttttttttttttgccaaatcaaaacggatatagcaatgctgttattcactagactctcaatcatgtattcaacttttgtatactcctaaaaaattgttcattattagtaaataaaagacccaattctctctcttgttccacaagatataatggaatggaataaaaccctagccaggagctccaccaagcggtctctctctctctctctttctctttttagctcttctctggctctaatggttccaaaggtttatcgtgggtaccaggcgaaggatcaacgatgtcagtaacgttgattctcaaggtttgttggggtccctcgtttgacgggacatggacaagtgcgtccattatcagaatgtcccagtccctttgctggagaaacccgaacatgctatcttctccattgcgaacagctttgagatgcaagattcctgtgccttgtggtccaatcacagggaatgaaca

SEQ ID NO: 116975 - DNA, 520 bp, Arabidopsis thaliana columbia
  unsure (1)..(520): unsure at all n locations
tatagaagaactatgacgtcgcatgcacgcgtccgtaagcttggatcctctagagcggccgccctttttggtttttttttttttttttttttttttttttttttttttttttttttttttttttttttttttttttnaaagcaaaaaaagggggttttttttgggggggaaattccttaacccaaacttttaaaaacataaaaggggccaggggcttattaccccctcgggggggggaacaacacacttgggggggggtccttccttaaaaggcccaatccaccgcccgggggggagggggttacaaacccttattttttttattaaaaagggatccccgatgggtcaaagcttaacggccccccccgggaagcttttccttgatcttggccataatcccctttttttgggggggctcaccaccggagccaccagaattatttccggatcccaggccgcccattgtttgagcttgaccaaactgatcatgaagacctggcaacttccccttgacctttgg

SEQ ID NO: 116976 - DNA, 542 bp, Arabidopsis thaliana columbia
  unsure (1)..(542): unsure at all n locations
ttgnnnnnnnnnnnnnnnnnnnnnnnnnnnnnnnnnnnnnnnnnnnnnnnnnnnnnnnnnnnnnnnnnnnnnnnnnnnctttnttgggtttttttttttttttttttttaaggagttgtatatacaattataacatacgtaatgatagtcgtacatggtttaggttttgggcaatcatagagtagcaattgcctaattatcacaaagttggtaaacacaattgttgtcttatttatgcattgcttggctcatcataacagattttggcattcgaagagttggtccgttgggttgaatgtgactgttattgagcttcctcttgttcatttccgcatacatctcttctatcatcggcttccatagcctaacccgcgcatttataaaccagtttgatacctgacttcttgtcaagccacttcgtatagctagaagatgtttctccgaatctttcgggtaagggtgaaggaagttttggaacatccaattccgtagaaccgaaacagatttctcaggcaaacctcgttgaggtctccaaatctgat

SEQ ID NO: 116977 - DNA, 540 bp, Arabidopsis thaliana columbia
  unsure (1)..(540): unsure at all n locations
nnnnnnnnnnnnnnnnnnnnnnnnnnnnnnnnnnnnnnnnnnnnnnnnnnnnnnnnnnnnnnnnnnnnnnnnctttttttgtttttttttatcccacaaccaaaatttatttaaaaaaatctctttctctatgcatatatctaaacaagtatacacgtttacttatatagacataggaatgcgtgtgttacatgtataaaaaatgaaagaacatcttcaaaatgaagattaagcagtgattaggttccttgcaacttcctgagaatcgaatttccggcacaaatccaggctcctgttaatatctgtcctgcatgagctctgatttccatattcgatgcggattgcttcaacgaggtcttctttgcttgatatctttgggtctagaggggaagatttagattcatacacttggcaatttatctttctgctgtgattttctttgactatcctagtttttaaggaatcaatgggcttttttagtgttctggacttagtagcatcattctcttgtacgacatcggttttagcatttgaagagcg

SEQ ID NO: 116978 - DNA, 544 bp, Arabidopsis thaliana columbia
  unsure (1)..(544): unsure at all n locations
tgannnnnnnnnnnnnnnnnnnnnnnnnnnnnnnnnnnnnnnnnnnnnnnnnnnnnnnnnnnnnnnnnnnnnnnnnncttnnntggggnggggnnnnnnannnnnnnnnnnnnnnnnnnnnnnnnnccncanagcaacagaatgtatccttatgtccttgggccgagaattacatataggctaaattgagggctgcagatggagctcaacatatagcaggggctcaacatatatagcaagggctgagttgacaaagggaaaaacctcaaaatctagtccaaaggaaagtaaattccctgcaaacaatttgcatctcactgggggagcagcttggaatcacatgccattattttcacccggctaacattcttttgacaatcggcactcttgaacattgcgtcctgtaatatgaaggcccaaactttgtcacaaaacctgtaagggtgcaggggtccctgaaataataaataaaaaccgatggtaaaaatctgattgtttcatctgccaaagttttctcttattttgagacccaaatataattttt

SEQ ID NO: 116979 - DNA, 547 bp, Arabidopsis thaliana columbia
  unsure (1)..(547): unsure at all n locations
nnnnnnnnnnnnnnnnnnnnnnnnnnnnnnnnnnnnnnnnnnnnnnnnnnnnnnnnnnnnnnnnnnnnnnnncttttttggtttttttttcataagaaaaaaggtaaaatattgattgatagcgatgagttcctgaagaacagtcttttttcttttccagaattagtaacactttccagaaaaacctcttcataaaaagagaagctttaatctaagaagaagaaagaacaacaccacagtagacacgttaacattgaatccccctcatcagattcatatacctaagaaagttagtctttagtaactcgttctttacaaagacaacattggagctaactatcaaaatgcctctcatgacttccaagaatatcctcccatgctttcatcaacctcattgctaaaaaccccgttattcccaaagttgagcgatgtattagagataatacccttcaggttttggctttggtctaaccccttgatgcctctgaatctgttggaggtgcttggtgtttcagctgctgcgggacataatctgtcctgtttcttc

SEQ ID NO: 116980 - DNA, 491 bp, Arabidopsis thaliana columbia
  unsure (1)..(491): unsure at all n locations
cgattgatcnnnnnnnnnnnnnnnnnnnnnnnnnnnnnnnnnnnnnnnnnnnnnnnnnnnnnnnnnnnnnnnnnnnnnnnnncttttttgttttttttgggaaaaaaaagtacagaaaaagaagcgtctctgaagcatacgttagagggaaagagcttccacccacctanggtttcacgaagtcgcatgtattgtatagctggagtaatcttatccacaggcactcaaggctctgttactcacacaatgctctggccatagaaggagctgatagactctaatgctgctcttgggatgtactgctaagcctccttgcgtatacctggcatgggtgcttctgggccatacacctctgtggggacaccgatgtgatatccacgggtttgtattttaccaagtccctcttggtagtatgatcctcgtctcctaagaattatatgcatattcggtgcttgcagttgtgcttacttacctttaagagcgcggattat

SEQ ID NO: 116981 - DNA, 491 bp, Arabidopsis thaliana columbia
aatacgactcactttagggaaagctcgtacgcctgcaggtaccggtccggaattcccgggtcgacccacgcgtccgaatggtgatactagctacccatcctgagaagctacctctatctattctatacgccgaccatcatgatgcgacgaggcaacaccatcaaagtatcctactacatagaggctgctcctacgatcatcgcaacagcctatctggcaccaaccttcttatcagatcggtgcagatgatcgacccacatgacctatgtgaactactcgagcaggaacctcggctttagtttaacatactaccggtgacaacagacatactgtttggatcgcggacttacagtattggatgtaccataatatcctatactgctgatgtggtcataccggatagataacgtctgctaaaggaggtagagacaagcggacccatcagaccgatagatacatgcatagttgatccatatgtcacgccgctgatg

SEQ ID NO: 116982 - DNA, 508 bp, Arabidopsis thaliana columbia
  unsure (1)..(508): unsure at all n locations
nnnnnnnnnnnnnnnnnnnnnnnnnnnnnnnnnnnnnnnnnnnnnnnnnnnnnnnnnnnnnnnnnnnnnnnnnnnnnnnnnnnccacgcgtccgaccacacagtagctataatgttactctagtctctaattttactcctcacttctcgaatgcttatcaaccaatcgcacatgaggatactggtagacagcctaacgacacattgacaggacagactgtactgtgtcaatgtgcggttctgactacacttgctatcgctttcaccagttaccacttactcggcgggacctcagatgctactgatgcaaaccaagatatatgctgggagggtcagtctaccacggagcctgttccagcgtcaaatcaaataaagaaaatcagtgaggacgaaccgatgcgcaatgaagactcggattctaaaactccgccggttatggcgatgattgctactagctatgacagggagtcacacatgacgagatatactccaagtgtgtcatatgctat

SEQ ID NO: 116983 - DNA, 488 bp, Arabidopsis thaliana columbia
gtcgcatgcacgccgtacgtagcttggatcctctagagcggccgcccttttttgggtttttttttttttttttttttttttttttttttttttttattcttttgtgtgatttttgttttttgagctttggtcacggacaagcggagcgtatcgaaataaaaaaaaaaaacagttaaaatgaaacggaataaaaaaaaaaaaaaaaagcgtttatacctggggggcgcgcaaaattaagcagaacctcaaaaaagaaaaaaaagaccgtttaaaaacggtaggcgaaaaaaagcgctgttacagccaaaaaaagcaaaaggaggtgggccagaaacaacatcacaaaaaaaaaccgaatggtaacatcgctaatctacaggagcgagaaagttcgagtgcaattaaatcaaaccgaagagagaccaataggtccggggacaaaaaatcgccagacgaaaccgaataaatccctgggtgttgaaatccaa

SEQ ID NO: 116984 - DNA, 536 bp, Arabidopsis thaliana columbia
  unsure (1)..(536): unsure at all n locations
cgattgannnnnnnnnnnnnnnnnnnnnnnnnnnnnnnnnnnnnnnnnnnnnnnnnnnnnnnnnnnnnnnnnnnnnnnnctttttttgtttttttttttttttttttttttttttttttttttttttttttttttttttttttttttttttttttttttttttttttttnggggaacctaccctttttttaaaggtaaattaactttcaaaattaaaaaacaatttcaatccccaagtaaacctttttggaagccgtgtttgttcatttttaaaaaaacccaccaaacttttttggccctcccgggcctaactagatttctaaataaccttaaaatccttggctttttggtgccccccaaaaacccccccttttctaaagggaaacattccccccgggggggcttatattttgcccctgggtttggtatccacaccattttttttttttgccccttgaaaactttttcccacattttaaacataccagggggggagcaggggcaatttttttgggggccaattttgcaaaaaaaac

SEQ ID NO: 116985 - DNA, 549 bp, Arabidopsis thaliana columbia
  unsure (1)..(549): unsure at all n locations
attgnnnnnnnnnnnnnnnnnnnnnnnnnnnnnnnnnnnnnnnnnnnnnnnnnnnnnnnnnnnnnnnnnnnnnnnnncttnnttgtggttttttttttttttttttnggagcgcgaatgtagtattaccataaaatgggtattgatattagttggtcagttcacagtcgcatatattacaaacaacaaatccccaaaccctctcaaagaatgtggcacatcctcataaaccacagaggccatttcagttcagtacgaagtgatcccttgagtctacatggctctccacgtcccagaggaaagaaccaaacgtcacagcctccaacacaagcctcttcaatcccttgaagctgatcttgatatgctcgtccttcgaggaatcaatagtgccttgtggcgttatcacaatctctggcctcccaaacaatgcttctgtatgcttctcaattatcccaaccgattctctagatcttattgtagcgtacctttgaagggtttctccatcaaaggacataacgtatgtctttacccgggattgcttcatatcact

SEQ ID NO: 116986 - DNA, 504 bp, Arabidopsis thaliana columbia
  unsure (1)..(504): unsure at all n locations
nnnnnnnnnnnnnnnnnnnnnnnnnnnnnnnnnnnnnnnnnnnnnnnnnnnnnnnnnnnnnnnnnnnnnnnnnnnnnnnnnnnccacgcgtccgcccacgcgtccgggtacaagctgatcgatctagaccaagaacctcagagaatgtattagcatcgtcaaaggatacaacaccacaaaactatgagagagtcgaaagaccaatctcttcaacaagacacgcaagttcttcaagaaaagctgttgtatcgagcgtacgagccacttcttcagctgatttcacagagaaccgctctagcagagttgtcccaagcaatggccgttcctcaaccgctcagaggactcagctcgtccctgacccaaccactagaccgtcatcttcttcttttacccgagctgcgccgtcgaggactgctcgtgacatcacgctccagagctttgagctactcaccatagggaatggaaagaggaagtgagaggcttggctttatcgtgagcgtgttg

SEQ ID NO: 116987 - DNA, 551 bp, Arabidopsis thaliana columbia
  unsure (1)..(551): unsure at all n locations
nnnnnnnnnnnnnnnnnnnnnnnnnnnnnnnnnnnnnnnnnnnnnnnnnnnnnnnnnnnnnnnnnnnnncttttttgttttttttattaccaatccatatattttttagaaacaaaactaataaagttatgacaaaaatgaaacggaaatgaaggctacaaaattaaacaaggaagaacatcgggcatttacttggcaattcatgggtcgcccattttcacatcagtcacatctagttgtattatctccgctctgcaccctaaaattgatcccatgctgggagtggtacgaccaagatctccatgaacaaactctttgatgtatgttccagcctgggtgcacagatgcaatagaaagtagtgagagtgtccttttatcttttcaactttcatccaatgtataatcttttcacggtccagtggacttcgtcggtgaagcactcttactggtgtcttctgcaagattttcaattctttcaggcaagaaattgagttgaagtctttctcttcaagtggacgagaaatccatacaagtgcaacatactgcttctg

SEQ ID NO: 116988 - DNA, 488 bp, Arabidopsis thaliana columbia
actatagaagagttatgacgtcgcctgcacgcgtacgtaagcttggatcctctagagcgtccgccctttggtttttttttttttttttttttttttttttttttttttttttttttatttaatttggttctgaacttgcgttagatgaataccacagcttcttctggcaaatcaagagcttctgattggctgaggcagactctgtttgttctttacggtaactccatctcagctctttagcaacagaagcaattgaatctgcgaagtagctcgattcgcgtataatcgcatacccggtaggacgtaagatcctatccatttccagcattacatatttcatatcacacctctggctttcagatgtaaacagcccatctacgtgaagaagatcataagttcttggatacgccgaaaaagcttcacaccagtcatgatatgttccgatcaatccacgatcaaacacaacgggaagtgtgtttgcagcataa

SEQ ID NO: 116989 - DNA, 497 bp, Arabidopsis thaliana columbia
  unsure (1)..(497): unsure at all n locations
actatagnnagattatgacgtcgcctgcacgcgtacgtaagcttggatcctctagagcggccgcccttttttttttttttttttttttttttttttattctctttcttcttttctttatgagttttagtgtgtttttttttaaataaacaaaagcttttgttttttttagcccaaaccccccccgccccgttggactaaaagaaacaaacatgaaaactatatttccggcctaggggtttttgaacaaaaacagatctagccaaaacatcaaaccaaaaaaacatcagaatgacaataaccctctggttattaccggagccaaaggaaaaaaaaacttgttgtatcttaacaaaaccagccacttctagggcattcgacaccctcttgggggcattttgaatacacaatgactctttgcagaggataacaacactatccgcaccaaaagtgacgaaagacacacctgctcgataggtaggactgataaaacccgggg

SEQ ID NO: 116990 - DNA, 495 bp, Arabidopsis thaliana columbia
  unsure (1)..(495): unsure at all n locations
nnnnnnnnnnnnnnnnnnnnnnnnnnnnnnnnnnnnnnnnnnnnnnnnnnnnnnnnnnnnnnnnncttttttttttttttttttttttttttttttttttttttttttttttttttttttttttttttttttttttttttttttttttttttttttttttttttttgaaaaggggggaaactaaattcccattttcccggaaaaaaagccccccaccccctaaaaaaaagggggtttgaggggaattcaaaagagggggaaacaaaaaattttttgggttaacccaaacctttaaattttaaatggggcaaacaaccctggggttggggttaaaaattcccccggggggggggcctttaaaaacaaaccccggggttttccctttttggccccccccaaaaaagaagacccccccctggtttccccattttccttgggaaaaatttggggcggaccccttgaatgggcggggagtttgtttttggggaaaagttt

SEQ ID NO: 116991 - DNA, 490 bp, Arabidopsis thaliana columbia
  unsure (1)..(490): unsure at all n locations
actatagnagagttatgacgtcgcctgcacgcgtacgtaagcttggatcctctagagcggccgccctttttttttttttttttttttttttttttttttttttttttttttttttttttttatttttttttttttttttatttttgtcttttttttgttttttttttaaagaggggaaaattaatttccttttttcccggagaaaaggtcccccagttcttaaaaaccgtggggtttgaggggaattctaaaagggggaaaagaaaaacttgtttgggttacccagaactttaaaatttaaagtgggtaaaagatctctgggggtggggttaaaaatgcccccggggggggggcttttaaaacaaagcgcggggggtttcccctttgggccccccccaaaaaggaaaccgcccccttggattcccaatttcctcggggaaaggtttgggggtcccccgggagttgggggggagtttgtttttcggggaaa

SEQ ID NO: 116992 - DNA, 460 bp, Arabidopsis thaliana columbia
  unsure (1)..(460): unsure at all n locations
ctatagnaagagttatgaggtcgactgcacgcgtacgtaagcttggatcctctagagcggtcgctcgcgatctataacctgtcccgacgcggcggcgcggccaaggcatggatgacaaaactgagccgattcaattccctgaacatatattctagcctggggatcagatcaatatgatcggatcggactgtcaagttgtttctgaactcaacaccaaatttttgtatgtataacacaacgagagcatatcatctaagctcgactggattgttatgaaagcaaagcatgacaaacacgtttcatgatactatggtgagaatagtacgtgacactgatattacgatctttacttcggtatatattgataatctatatgtggattgtgttgaggttattgtattaaaattttacgttgtgattgttttatcttattattgtttctaataaataattaatgatt

SEQ ID NO: 116993 - DNA, 449 bp, Arabidopsis thaliana columbia
acgacaaagttagggaaagcacgcacgcctgcaggtaccggtccggaatacacggtttcgaccgacgcgtacaacctttcattgatgttctttttctaccaaacaaaaagtttatcataaactagaatatatctaaatctcggggcacaaataaaaactgggtgacaaaacaaaacattgtcaaaacaagaaagaaagataagtgaagagagaagagtggttttttatatagctacatgaaacggctggctaaaccaccatccattttactagtcttggctgcagaactctcggggatatttcccttaactagggactgctgatgctttgatgcatacttgaacttgtttgccttgttgtgttggtgggtgctgcggagtctgtcctaagatccacgaagggcagctagtctagcgttgaggaaaactgtcaggcttatttgctccgtg

SEQ ID NO: 116994 - DNA, 522 bp, Arabidopsis thaliana columbia
  unsure (1)..(522): unsure at all n locations
nnnnnnnnnnnnnnnnnnnnnnnnnnnnnnnnnnnnnnnnnnnnnnnnnnnnnnnnnnnnnnnnnnnnnnnnnnctttgggttttttttttcataaacaaaagattatcatatttgtaccgttcttattgaacttgcttctgaactggccaaacaaaacaacccaaactttttctggcgacttacaaacttccaattgggcgcgtcactngacttctcgaaaagaaaatttacaggtatctacttcttacatttcttaaaagacaaacctatgaattcttcacattagattaatggaaaaataatgaatttcccgattgggcgtgactacctatacttatccccgatccccacctgcataactcaccaacggctaatacactcaatcagctcaatcgtatctcgagagagatatcatcaggtgaattgcctcacgcgactaaaagcttgacacatggaaacttgtgtgccggacatggcaacaaccaacacagatgactgtgttgttgcagaatatgaagat

SEQ ID NO: 116995 - DNA, 496 bp, Arabidopsis thaliana columbia
  unsure (1)..(496): unsure at all n locations
cnnnnnnnnnnnnnnnnnnnnnnnnnnnnnnnnnnnnnnnnnnnnnnnnnnnnnnnnnnnnnnnnnnnnnnnccacgcgtccgcgcgtccatagattatcctcagtccggcttccaaggtccgctagatagagaagagtctatagggctctctcgggcatcggaatatctcattctgatgaatacgacgagactattcgaaatcggaaatcgtgctatgaatcggaagctcacaatttccaggacgctcactccaacgaatctagggtgataactggctcagaaagggactacgctcatgcagtgacgcataaagatgagacgcacgacaacgctgatacgggttcaaggatgacgcccacagacagcagtactgattctcctttgcggactttcggtctatcttgtagggctgtatggcgggaagaacatcaattgacttagtgatgctgcaaaggctcaatctccttgcttacagtgcgatgactctgctcaag

SEQ ID NO: 116996 - DNA, 496 bp, Arabidopsis thaliana columbia
  unsure (1)..(496): unsure at all n locations
nnnnnnnnnnnnnnnnnnnnnnnnnnnnnnnnnnnnnnnnnnnnnnnnnnnnnnnnnnnnnnnnnnnnnnnnnnctttggttttttttttttttttttttcaggcattgtaatcaacttacgtgcttacactatttttatacacacgataacatactaacccccgatttcttaaacgaacagcatatttacaaccaaaacaagaaataacatagcaagcaaaaacctagtacataagtgaaaaagaaaaccagtaaatcaaagccaaaccccattagtttccacaaaaattacattaaaaacaaaccatcgaactgatgattttggccaacctctctctattccttgccatgttttctaggtgagagtgagaaggcgtgggaggtctttaaaacatgcaacctctttacagtagatacaaacatctcccaaggaacatccccgaccagaactttatctccttcagtgtcttcgtagaccaaagtgtattgtctgtt

SEQ ID NO: 116997 - DNA, 464 bp, Arabidopsis thaliana columbia
ctgcacgcgtacgtaagcttggatcctctagagcgtccgcccttttcttttaccttttgtttactttattctttttttttttttatttttttcatccttctgtaaaaaaacacctcacgggggttaattcattaacatcatcaccataaacacaaaccccattacataagaagaaaaaaaagacgagccaccccctttcttgattagcggaggcacaccaacgcccacacatcactgtcgcaaccactcccccagaccccctgctcgaaatcaaccccagaataagaacattcagactattatttaagaaacataaaagaggttcactgcgctgcgcacccccccttactttcaccacagggggcccacgcgacgtgaaatataaatcctcccagaattttgggcttcataaaagaatcacaaacgagaatagtcagagaacaaagagtctcgtacgccaacgc

SEQ ID NO: 116998 - DNA, 495 bp, Arabidopsis thaliana columbia
cacacacttagggaaagaacgccgcctgcaggtaccgggccggaattcccgtttcgcccacgcgttcagccaagtaaatctgacgttttagaaaatgggatcttcttctgggcaaagaggaaacaatcagactttaaagatcttgcagattaggtgatttcggtgcggataaaatcagtttgcttggcaggttaattcgtagctccgtttttttttcttgcgggactatacatgattatatcaggatcaaacaattgacagtctgaggggagaggttggaactcacaaagtgagacacagatggacaggaacagtttagaacagtgtgagatttttattacttggggtgcgtgagggaggaaggggggggagagggggtgagaaagcgtagggcgtatgcgagagatgaagttctgtatcgttatttggtcgagaggaaggagagcgcagagagcatcgaaggcacggcgacatgcggacaggggcaagggaggg

SEQ ID NO: 116999 - DNA, 599 bp, Arabidopsis thaliana columbia
  unsure (1)..(599): unsure at all n locations
caagccnccatcctctanagctttttacctactttttaaatccttatctcaaaaaaaaaagtcaccctctaaaccaacctataatacccattcttttctttntttaccccaccctcttataaaaacactaattacatatctctataaaaaaacttactacttttacntantaccncaaaatatacaccatactttttttaacatancacaaataacaacacatattacccacacaacattaatatatataattaattattatattacatatatttacatacacccacctcattctttctccttctatttaaccaattcttccccctatatacctatttcccctactctcatatttattaactatattacatattcttcttaataatatcttcccttaccacaacttatactcattaccactcatcaatccttctattctacattcactaatcctaaaaacctaaaaaatattaataattatatacctaactatccccaaaccatatttacttccaaatataatatataattcaataatatttattttttatcttaaaacaatcccaatatatcaacttatactatattctcatactcca

SEQ ID NO: 117000 - DNA, 412 bp, Arabidopsis thaliana columbia
ccgggccggaataaacgtttcgaccgaggcgctaaacccaaggagggcaaactcctgagagacccgaaagggaggacaacccgaggaaaacgagagagagccaccgcgaggagaggaaacaggagagggagaaagaagggaggaaagaagaggcgaagacgagaagcagagaagaaggagagagattttttttataggggggagagaaaggagtagagcagagcaaagcagaaggcgagggagcacacgaagaaagaggaatggagaagaacaagaggtgaagagagaaggaaaagaagaagtggagaagtggaggaagaaggaagaaaaaaatagaaaaaaagattaagagaagaaacaaggggtgccgcgcacgcgaacaagagagagaagaaagtacatcacagaggaa

SEQ ID NO: 117001 - DNA, 499 bp, Arabidopsis thaliana columbia
  unsure (1)..(499): unsure at all n locations
ttaggtacnnnnnnnnnnnnnnnnnnnnnnnnnnnnnnnnnnnnnnnnnnnnnnnnnnnnnnnnnnnnnnnnnntcgcgatctagaactagacgcgacgcctcggcgcggccatgccatggatgacagaactgtgctgtgtcaatgcacagaacatataccctgccctggggaacagatcaattctatccgactgtactgtgatgtggtttcgcaactcaactcgtaatatgtgatgtctcaacacgacaaggccatctcatctaagctgtactgctctgctctgaacgcaacgcaggacggacacgacacaagacgctatgatgagaagagaacgagacgctcaaataacatactttactcaaagtggattggctactctactgggtatgcaaatcaaacgagcagagcagactgacctgagggatgccattacagtagataacctaccctacatcagagcaaggatcgagtcaaccagagccgagacgagagcaagg

SEQ ID NO: 117002 - DNA, 495 bp, Arabidopsis thaliana columbia
  unsure (1)..(495): unsure at all n locations
ttaggacannnnnnnnnnnnnnnnnnnnnnnnnnnnnnnnnnnnnnnnnnnnnnnnnnnnnnnnnnnnnnnntcgcgatctagaactagacccgacgcgtcggcgcagccatggcactgatgactgaactgagctgtgtcaatgcactggacataaactctgccctggggaacagatcaaattgatccgattggactgtgaggtggttttgcaactcaacttgaaatgtgagttgccttaacacgacgaggcgatctcatctaagctgtactgctctgctctgtacgcaaagcaggacggaatcgacgcaacacgctatgctgagaagataacgagacactcagataacatacttcacgcaaagtggattggctactctactttgtatgctgttcaaacgagccgagcagactatcctgatggatgccattacagtagataagctgccctacatcagatcgaggatagactacaccagagccaagacgaaaggaa

SEQ ID NO: 117003 - DNA, 488 bp, Arabidopsis thaliana columbia
ctatagaagagttatgacgtcgcctgcacgcgtacgtaagcttggatcctctagagcggccgccctttgggttttttttttttttttttttttttttttttttttttttttttttatttaacttgaagctgaacttgcgttagatgaataccaaaggttcttgtggcaaactaagagcttaacattaggctgatgcaaacactgattggtctttacggttattccatataaggtctttagcaacagaagcaatagcatctggaaagcttcttggttcgagaataatcaaatacccgctaggacgcaagatcctatccataggcaccattacatatttcatatcacacctttggctttaagaagaaaacaggccatctacgagaataagaacataaaaggttggatacatggaaaaaacttcacaccactcatgatatgttccgatcaatccacgagcaaacacaacgggaagtgtgtttgcaacataa

SEQ ID NO: 117004 - DNA, 500 bp, Arabidopsis thaliana columbia
  unsure (1)..(500): unsure at all n locations
gctatacacgactccataagggaaagctcgtcacgcctgcaggtaccggtccggaattcccggttcgacccacgcgtccgcccgaccattactctgttgcttcctgactcacaaaagactactgagagggcaacagtcttaaagagacgcgtctcggatcatcaggattatctatcttctcaggagtgcctctagactattacaaggcagcaatcgcgcttggaatctgatgctcagagtctagacgactctaactacatagactctagggggttaactcttctaagatcaaggagagttgctaaaacaatcctngctagatcatgagaagaccacagaaagctgagattgtgtcaatgacttttgcccacaacaaacttgactgatcctcatgcgccgactttcatgctatctagaaggcttgtatcgcgggaacatcatactagctgatagaagctgcagcgagagctgaatcttttttcttagatgacgaggactct

SEQ ID NO: 117005 - DNA, 518 bp, Arabidopsis thaliana columbia
gaatttttttaggtacacactatagaagagtctatgacgtcgcatgcacgcgtacgtaagctcggaattcggctcgagcgaaaggaccacgtgaccggcgcgtgagactctcagctccgacggcgattcaattctacgatgttcaagatagacttggttttgatcgaccaagtaaagctgttgattggcttattactaaagctaaatccgccattgatgatcttgctcagcttcctccttggaaccccgccgatactcttcgtcaacacgccgccgctgctgctaacgctaaacccagaaaaaccaaaactttaatttctccgccaccgccacaaccggaagaaacagagcatcatcgaatcggagaagaagaagataacgaatcgagttttcttccggcgtcaatggattctgattcgatagctgacactataaagtcgttttttccggtagcttcaacgcaacagagctatcatcatcagccaccgtcacgaggcaatacacagaaccaagatctt

SEQ ID NO: 117006 - DNA, 515 bp, Arabidopsis thaliana columbia
  unsure (1)..(515): unsure at all n locations
atgatttnnnnnnnnnnnnnnnnnnnnnnnnnnnnnnnnnnnnnnnnnnnnnnnnnnnnnnnnnnnnnnnnnnnnnnnnnnnnnnnnnnnnnnnnnnnnnnnnnnnncctttttttttttttttttttttttgagctcatgtagctagagctaaacattgtaaaacagaattgaacttacagaacgttctctaattgatacaagatgaattcaaattaaccaaggcctaggcttttaaagacttaagaagaacctgaaactgttgatcagatttataggccatttggatattcgaaacacacaacaacgaaaaccgccttcactattccacgcattcgaagcgccctggaatatgaaaagaaacctgttgtgttgcacaatcttatgtgtttttggaacttgtttaatggcgagaatcggatgaagcagaggacggcttgttgtcgccgccgtgctcctcttgttcgccttgaaaccgtgctggtatacgaaaaccggagaattcaccacttgaa

SEQ ID NO: 117007 - DNA, 477 bp, Arabidopsis thaliana columbia
  unsure (1)..(477): unsure at all n locations
gcacgcgatcgtaagcttggatcctctagagcgttcgcccttttttttatttttttgaaatggagtaaatttgattaaatatgaataatccaatgatacacgaacaataaaattcttttaagaagttttgcgctacaatctgactctagcacgtacgggcagagacagtctcagaacctgaagctcctcacggtttttttcggaggtgagatactaaaaccnataagaggggatactgtgaggtcccaggaagtctaaagctgagtcgtaatactggaatgcctgtagggagagagagactggagggtcaaattgcccggagaggcatatgcgctgtaggcgggtgcagttgcctgaaacggagtgtcatgggtcgccgggaatgggactgtatgtaagcttaacgctggagatgtggattatgtgattggttggggggggtgggggnggtggctgtgaccttgggggagaatacat

SEQ ID NO: 117008 - DNA, 495 bp, Arabidopsis thaliana columbia
atacgactcactttagggaaagctcgcacgcctgcaggtaccggtccggaattaccggctcgacccacgcagctcagctcgtccagtggccgtccttcaattcgtcttcaaaaattcgttagatagagaagaatctaaaggcgcggtcagacataagaatctcttcttctcacgaatgacgcgagactattcaaaatccgaaatcgacgtggggaagctgatctaagaagcagaggacgcttactacaacaactaagctgaaactctctaagagaacgagtcttgcataaacagggaagaagagaaatcacaaccacgacaaacctgagaaggggtcaaggactgtgcccgagacagttttactgacgcttcttaaaggactctcgtgctatcatccacgggtgtatcgtaggatgagcatacttgcagaaaatgatgtccgcaaaactgcaactcatcccttagatgtagatgactctattcaaggcaaaactg

SEQ ID NO: 117009 - DNA, 499 bp, Arabidopsis thaliana columbia
atagaagagttatgacgtcgactgcacgcgtacgtaagctcggatcctgtatagcgtccgacctgagggtttatcaatttttaattggttttgctcttggcgatgagatctgaaagcacatccaccaccgaactccaccacaatgaacccatattataaacctggaggtcctgattccgttgccttaaacacctaccaacctggtttcgagcgggtttttttaaaatggagataacagttaaaccgctggtactgtacacgacccttatggaatggcaagaagctgaactagacgaatactaattgttcaaacaattcaacttagtccctatgcagacgagaacaatgttcgagtccgaactgatgtactgacactcgatcagtgaggggtcatgatacaagaactttagaagctgaggcggatatgacggcggagaattggaattacataggctctgactgaacgggatgaccaggggacctagcacatcatgattct

SEQ ID NO: 117010 - DNA, 495 bp, Arabidopsis thaliana columbia
ttacgactcacgttagggaaagcacgcacgcctgcaggtaccggtccggaattcccggttcgaccgacgcgctcacccatccgtgggcgaccttttttttgttcttatttttgaccaagggctgtcacgatgatcagatgcgccatcagcctttacaaaagagttggatcggttgatagctagactatatatacacaggcaccttgatgagaaagtcttcttttacgatccttacataaccaccgactacagatgcaacgtgttgctctatggctgtggctaccatctgagaaccccaatccactgagggaaggctcaaaagctctctgttacttgaaacactggccactgcggattgtatgaagaaacctgatggcatagcataggctgaggctgaagataacctaagtcgtagaacttactgctgaaaactactggcaaagacaaggactggtggtcactagactgacgtatccttaaaagcacgaatgtatg

SEQ ID NO: 117011 - DNA, 445 bp, Arabidopsis thaliana columbia
  unsure (1)..(445): unsure at all n locations
ccgcgcacgcaagctgggacctctagattttcgcccgtcggtaaaactttttattttcaaaaagaaaccatggtgtgatacaaaataatgcgcgcgctgcaatcactggaagtataaggaaccaacttgttttagagatgggaccacatgccaaggggcagaaaaattatgcgccatcgaacattgtcgtttggggggggggccgagacacaggaaaacgggacgaaagaggccacgcaagcaggagcggggggggcagaagacgaagcaggagacgcggggaaggggagggcggccccggagcggggggaggcggcgagacgcggctagggtgggaaaagcgacagacggagggggcgcacgcgccaggagagaggaacaaggcggaaaggaacgaaagacgaagagncggaaagagaggaaaagggggggggacagggcggac

SEQ ID NO: 117012 - DNA, 474 bp, Arabidopsis thaliana columbia
  unsure (1)..(474): unsure at all n locations
ccgcccgcaggggccgggccgcaattacactttcgacccgcgcggacagccataaaaaaagcgcgcactgtccccgctgtcaacgagctaacaaccaatacgtacggcacggcggaaagtcgctcccacagttatggtacctgtggcgcccgggacgccaaaggcaagtaacgaacgacaacaaccaacttttttttctgagggggcgcacggccggcagagaagaaaaagcacagacagcccccacggcagacgcggcggaaggagaaccagacgcacaggagaaagatagtgagagcgaggaggagggggagaagaagggagaggagaaagggggggggagnggggaagggagggaggagcggagccggaaagacggcgccgggcggcggggggcacggggggtgcgagcggagggcgcagccaggcgcgaccggagcagggcgaggccagaggaagagggccgaggcgggg

SEQ ID NO: 117013 - DNA, 499 bp, Arabidopsis thaliana columbia
  unsure (1)..(499): unsure at all n locations
cannnnnnnnnnnnnnnnnnnnnnnnnnnnnnnnnnnnnnnnnnnnnnnnnnnnnnnnnnnnnnnnnnnnnnnnnnnnnnnnnnnnnnnnnnnnncctttttttttttttttttttttttgatcagtagttcagtagagataaactttcactgattcacagattattgcataacaaaaaaaggaaaatgaaagattgtaagaacttgttcacttctttgaagaaactgttgatgaatctggctctttccatgcagcttgccattgtttgtcatataacgtagtctcatcgaacagatccttaagtttgtctaaatcttcattcttacggatgaagagaactccagctacagccacaaacaagagtgttttgcagaagaaatttcccatttgatcaacaagtcctactccggtaagactatcaacaaagtaagccatgaagaaccctatcatcgcagcacgaccattgagaagttcagcttcaggtagatggtatctctt

SEQ ID NO: 117014 - DNA, 454 bp, Arabidopsis thaliana columbia
  unsure (1)..(454): unsure at all n locations
cgccngcaggaaccgggccggaattcacggttcgaccgagggggacaacctnnggaatgaaaaaccgactccgcggaagggacgaaaaagacagcggagagacagcaaaccgcgagccacggagggaggagagtttgtggcgaggggaggccggggagggagagggacgggtggctcgcgaggcgcgcagaggtttttttttggagtgggggggagccagagagtaggagggtggaaaggggtgaaggagcgcggggtgggggaccgagggtagaggggtggtgatggtagggtagggagtgtgcggaggggcggggagagagggaggagttggagaggatggttggggagtgagctggggggggggaggacactgtgggggggagtgtaatgtttgtcagtagtgtgggtgtgtggacgtgtcaagggagctgtggggtgcgattgggggggc

SEQ ID NO: 117015 - DNA, 177 bp, Arabidopsis thaliana columbia
taggtagcaactatagaagagttatgacgtcgcctgcacgcgtacgtaagctcggaattcggctcgaggtcgacggcgagcggagatagttctctcagatggaggttcgttggtagatctacaatggggaactatgactctcgacgacggcagcagatctggtggatttcttcgtca

SEQ ID NO: 117016 - DNA, 504 bp, Arabidopsis thaliana columbia
  unsure (1)..(504): unsure at all n locations
aagctactnnnnnnnnnnnnnnnnnnnnnnnnnnnnnnnnnnnnnnnnnnnnnnnnnnnnnnnnnnnnnnnnnnnnnnnnnnnnnnnnnnnnnnnnnncctttatttttttttttttttttcttctttattttttaacacttttggagcggattaaacttaatttccccttaattttcgcaaagatgtgacagggaaaaaaaaaaccgtattcaaaggggaaagtcagttaataggggcccttctgctgctgcaaaatcataagaagcctaaaatcaccaacactgatccgtctgccatttccgggtcgaagcgtaaacccaccccgaccgacccatggctcctgtgtgtacccgtgtccgtggtactctaagcgtcgagtacgaaatccttcttgtaatcgaatccgcaagtgtcacgtaaactttgagaatctccataaaatctcgtccggcctattacgacgcatctggataatatacttgagctaagctcctggacaccg

SEQ ID NO: 117017 - DNA, 506 bp, Arabidopsis thaliana columbia
ttaggtgccactatagaagagttatgacgtcgcatgcacgcgtacgtaagctcggaattcggctcgaggcgctatgtcgctctggagagatgctagagcctcatagcagcttctttctttgcagtctacacagcagcgtgagggcatggctaaaagctcgtccgcgccagaacctgacttaaacaagagaatgtctcaggctgcttggactagagcgaaatctcctgataggattgcggtaatgaggaatatagcctgacatagtgatataccaaccatgtacaagaaaaagtacctagtcccggctgatctgactgtggggcagttcgtgtatgtcattcgcaaaagaatcaaattgagtgcagaaaacgctatcttcatattcgtggacaatgttcttcctccagcaggtgcgctcatgtcttctgtgtacgaagagaaaaaggatgatgatgggttcctctatgtcacttacagcggagaaaacacatttggatttggatctc

SEQ ID NO: 117018 - DNA, 496 bp, Arabidopsis thaliana columbia
  unsure (1)..(496): unsure at all n locations
nnnnnnnnnnnnnnnnnnnnnnnnnnnnnnnnnnnnnnnnnnnnnnnnnnnnnnnnnnnnnnnnnnnnnnnnnnnnnnnnnnnnnnnnnnnnnnnnnncctttttttttttttttttttttttttttttttttttttttttttttttttttttttcaaccccaaaaatgtatatggggtacaaattacagatgcataaactcgaaacctcctttaattcataattttttggcaatgaggaggacaaacccatatgtttatacaaaggaaataattattcattaaaagggtcttgacctactaaacctataacagggggaccaaaacttggacaataaaagaagttttatcatatttatcatcaagatcatcgaccaagaggggtgaaccttattttcggctgcagtcttcaaagctgatctaatagacgcggggggtgatcccatcgccgccgcaatatgtagtttcgcggaaactgccgccgatttctccattaa

SEQ ID NO: 117019 - DNA, 506 bp, Arabidopsis thaliana columbia
aggacacactatagaagagtctatgacgtcgcatgcacgcgtacgtaagctcggaattcggctcgagctcatttgggcgaccaagccagacatgcaaagagacacaacgcacccacatcatcacacgttgctggctactactcgatcctctccagggtgtctctgtctctagccaccaccataaggcttaagacgtagacactgctcttccatcgacggcggttaataacagatccgatcatgggacaaacgaaaacacaagactgtacactcctgaccagaactacgaagtgccagtcaacaaatgtgagtgccttaacaagctccactacctaccctgagtacctgttgacggaggaggctataaggcaacgtacagctcggggcgagactctgactctctacaccggagcagctgacgctcggggctccgcagccggagcttctaggggagtcatcactaggagaagaagctgcgaatctggcgacactactaagctcagcag

SEQ ID NO: 117020 - DNA, 486 bp, Arabidopsis thaliana columbia
  unsure (1)..(486): unsure at all n locations
cnnnnnnnnnnnnnnnnnnnnnnnnnnnnnnnnnnnnnnnnnnnnnnnnnnnnnnnnnnnnnnnnnnnnnnnnnnnnnnnnnnnnnnnnnnnnnnnnncctttttttttttttttttttttaatgtgaacctttttaatggcattaacactttcttagaaaaacaccattgaccagcgttttatttggaaatgagaccatacagttgataacttaaaacctgatactagaagatattttggaagaataaaccaagtgtatggtctcactcttaagcctcatttctttaaaaagcacgttaccgttgggagaatcaaaccatcactggaaatatactaaaaggggttggcgggttttactgtgggtcaaactgattgtataaacgaaaatatgaatacgcagtcctgtagaaacgaaataatgtggaagattgtttgctgccaagaacacactggacacacacatgccgagattttaccgtatcaaa

SEQ ID NO: 117021 - DNA, 336 bp, Arabidopsis thaliana columbia
cacgcgtacgtaagctcggaacccggagagcgttcgaccggaatggagacccgaagacaacaaccgaggcagcacaagcagaacatgaacgcgcccgcccagagcgagacgcaagacagaaagcccacaaccgccaaagagcccaagagcgcgaaaccaaaaaaggcagcgaagcggacccgagaaacagctttctgttaaaaggggcacaacaaacaacacaaccgcggcggccgccagactagacagcgcaacagcagagcgaacagtgccgaaccagcgcaaaaagcgcgccaacgcaggcagaaaaggatccacagaagagggcggggaaga

SEQ ID NO: 117022 - DNA, 220 bp, Arabidopsis thaliana columbia
gcacgccgtgcaggaaacctgggcacggaattaacgcgtcggagcgacgagcacacccgacggaggccgcccaggcacaccatgagtggaaatgactgcgcacagaacagcatggccacccaaaccagagacaaacgagagcatatgaggagacgtcctaacagcgggcaaatcccacaaaggagacgaattactctcggacaagacgagcacaagccga

SEQ ID NO: 117023 - DNA, 499 bp, Arabidopsis thaliana columbia
ttaggtcaactatagaagagttatgacgtcgcatgcacgcgtacgtaagctcggaattcggctcgaggatctttctccacggattggtgtggattttaaggttaagtatctgacaattggagaaaagaaactcaagcttgcgatttgggatacagctgggcaagagagatttaggacgctaacaagttcgtattacagaggagctcagggtataattatggtatatgatgtgacacgaagagacacgttcacaaacctatcagacatatgggctaaggaaatcgacctctattcgactaatcaggattgcattaagatgcttgtcgggaataaagttgataaggagagtgaaagagctgtttctaaaaaagaaggcatagactttgctcgggagtacggatgtttgtttctggagtgtagtgcaaagactcgagtcaacgttgagcaatgttttgaagagcttgttcttaagatattggaaacgccgagtcttactgct

SEQ ID NO: 117024 - DNA, 504 bp, Arabidopsis thaliana columbia
taggtacacactatagaagactatgacgtcgcctgcacgcgtacgtaagctcggaattcggctcgagctgataatgagagatgccctaccgttagatccaagggagttgatctacaagaaccgtgccaccatgggggacacatatctgatgatgaatagcatatgcgaatccaaatgaaccccaatgactctgctgacgcgctcaacgataagacagaaggcacagatcgcagatacgttgccggtgaagaaagctatagagaatggaatgatggatcgagctcggatctacgctgcgaaccatatttgaacacatagctggcagatgatctctctgcgaatctctcttatgatcgacgctctagtgacttgaatagagactcaatctaagatgaccaccataacaagctacatgaccaatatcttgctaaacatagagtcgagaatcgacacaggatatataagtatgatgtctgagacactgtacccattcaagaagcactt

SEQ ID NO: 117025 - DNA, 500 bp, Arabidopsis thaliana columbia
  unsure (1)..(500): unsure at all n locations
cnnnnnnnnnnnnnnnnnnnnnnnnnnnnnnnnnnnnnnnnnnnnnnnnnnnnnnnnnnnnnnnnnnnnnnnnnnnnnnnnnnnnnnnnnnnnnnnnnccttttttttttttttttttttttttttgactgagcagaacactctctaatgatcatctcaaaaggaaagcatgtcattcaaatggcataaactaaacacacacgaaggcggtttatataaagtactaaacaaagcatatttcaaagtgagcaatacacacaaatacgcccgcgttggcggatgatacaagcaacattacgataacgatcgtatgctaagtgcacggtgatccaatcctgaatgtttgttaacgcattaatgctttggctgtaagctcataaagcctccagactaatctcctgatcaactttgtgctcatattgatatgaatggcatgaccagctgctgaggaagccccacagagacttccagaccataggcatctgtcacctgatgcataa

SEQ ID NO: 117026 - DNA, 184 bp, Arabidopsis thaliana columbia
cacgcgtacgtaagcttggatcctctatagcggtcgacctttgtttttatcttttcgtggaacataaccttcattagagtataatggtatgggaaaatgaatacatcgaaagacaaactgaacaacatgggatatgctgtcaaccaactgactaactgagtaatgtgtgtcgagaggaggtgca

SEQ ID NO: 117027 - DNA, 176 bp, Arabidopsis thaliana columbia
caatgggaccccgacgcaagtgcaggaccgggcctctacggaattaaggagctgatatgaacaataggcgggcagctttggacccgacgggtccccggacggggcgttggaagggggagtagggggggggggggaggcgagggggggggggggaagggagcggggggggggggggc

SEQ ID NO: 117028 - DNA, 487 bp, Arabidopsis thaliana columbia
actatagaagattatgacgtcgactgcacgcgtacgtaagctcggattctgtatagagttcgacctaaaggttcttcatgaccttcattctctctatcttaaacaaccatagctattgaaactccactcatatgggtgaaaaccaaaccggagaaaactgttcctcttatataaatacgcgaaactgttttgttgcttctcgacaacttgtattgaagagactttttctcctaggggattaacattcttgctggccggtcatcaatacgactgttgacgtatacatcaccattttcatgatccaaacccttaaccttctcctttttctttatcaaatatcttataataagccgatcaaaaatctgccacagctgtttgcgcgaaagatttatataaccaaaatcatcacccacagctttataaccaccgttaaattatttaaagctgggcgtccgtaagcagttaaattacacatctaattgaggaa

SEQ ID NO: 117029 - DNA, 480 bp, Arabidopsis thaliana columbia
tcacgccgtgcagtgtacctggtcacggaattaactggttggaccgacgcgctcactaacccgtggacgccctcgtgtttccacaacaatcaaaactattactctcttctttaatattttgagtttatactacagaaactctttggtgcaaagatcccaacaaatcaatctctgccagaggagaataataaaacaaggaggaatttttttctgtctaatctcgaaaggatccgggacgacaagcgcctctacctttcatcgcctctattaccaagctcctctatcaaatctctactctaaccgctcaccgactaacacatgtgagatacttacccgaaggtaataaagacggcggcgatgatcccggttctgttcagataaaccttccgccgccgccacatatttccgatcggcttattcacagatatttgatacagaataaagaggaagtaaaggctttcgatgatgatattgggaatg

SEQ ID NO: 117030 - DNA, 359 bp, Arabidopsis thaliana columbia
cctgcaggagccgggccggaatgaagaggttggacgaggagctcactcggcggcggccgccctggatttgtcttgttgttgcggaaacagattgtggaggtcgcgaaaagcacaacgacaagatgatgttcgttccaccggcagcaccaacttatcccgtgggggaggtggcacccgccttaaagatttgttttttcgaggggcggaaaacaaggagcggcgtaaagaaaagctgaaggcctttttccccttagacccccgcctaataaaaaccattctatttggtgggtcgccttattggaagccccctaacacacggaagcgaggcctcggtaattctcgtgccttaattaaaaaaa

SEQ ID NO: 117031 - DNA, 400 bp, Arabidopsis thaliana columbia
  unsure (1)..(400): unsure at all n locations
tgannnnnnnnnnnnnnnnnnnnnnnnnnnnnnnnnnnnnnnnnnnnnnnnnnnnnnnnnnnnnnnnnnnnnnnnnnnnnnnnnnnnnnnnnnnnnnnnnnnnnnntcgaccctcctttattcgttttttaaagagagctgacgcggcattgaaacgctaaggaaagcttgaaagttcagagtcaacacccagagcagcacatgacacggagttccgtttcttattgaaacttttagacaatggacccgaaaacgaactccgtcaaagaacacaaagctaacacaaaccccccaagagaacatttccttgtttaaacaggtagagagtccttagcggaaacctccttccacgcagcacgggtactaattttatcccaccaagcgctaacatgcttcccta

SEQ ID NO: 117032 - DNA, 490 bp, Arabidopsis thaliana columbia
gccgcgtacgtaagctcggaattcggctcgagtctagacctcgggctgaccccatcaatcataagcgatgagaggagctggacccgatagaatacaattttagtacgaatccatcaacgccaaacactggtcagccgacaccgacgaaccccgccggtgttggaggcagaggcggtggaaggaataaggtttttttgggagggagcgggaagcctcttaactcgtcagggcaaacgctgcccgaggaagaggggaaacgactgcatttatgctgagaacgggaatacccggcgcattaacttagtattgtcaattcactgtttgtgggatgcatctactggcgttggggcagacagagatagtttggtgatgaattttgaataatgatgagggcgtctcatgactgtatcagggaaggtatggcaatggttaattcgtcgggagtctggcgagtagtgacgcattaaattagtagacgaggcacacgctg

SEQ ID NO: 117033 - DNA, 478 bp, Arabidopsis thaliana columbia
ctatagaagactatgaggtcgaacgcacgcgtacgtaagctcggaattcggctcgagttttaaatcttgctcaacacaaaatctcacgagacgccttattcgttcattcatgtgccatgtatcacgagggcactggcgtctcccagtggacacctgacactctgttatgagctacaatactctttacgactatagatcgtacagttcgagctcatcgctgtaaatttcaatagtcggtgtcaacaaacgagaggcccaccttgcgatattccccacgagacgcatatcggctgtcaaggtcgacaacgggacacaattatagacacgagccataacccaaaccctagcggatgaatccagtgagacgagagaaatgatcagatcctaagaccgccatatagtcaatgctcacctttacgtaacatttttaagagtcagtcagaagctagaccctaccgactgtgactaagaaaaaaga

SEQ ID NO: 117034 - DNA, 155 bp, Arabidopsis thaliana columbia
gctgatacactgacacactcatgggagagctggcacgcctgcaggagccgggcacggaataacgagcctggtcgacgagctcactactcggcggccgccccttctttttttgttcttatgaggcggatgcacgaggtcagtaaataattccaggg

SEQ ID NO: 117035 - DNA, 503 bp, Arabidopsis thaliana columbia
ctacaagagttatgacgtcaaacgcacgcgtacgtaagcttggatcctctatagcggccgaccttggggagcatgctttttttttttattttttttttttttttcattttctggatttaaagcggttatgaacacgcggtagatgaatgccaccagtttttctggctaatgaagagcttctcattggctgatgcggacatttgttagttcttgcacggttttttcctctggcggtatttagcaacagaagcgcttgactcgtgacaagcatcttcaattccagtatacacccatacccgctaggacttaacatcctatccatttccagcattacatatttcctatgacacctgtggctttcaaatgaaaacaggccttttacgcgaagaaaatcataagttgtgggatacgtcaaaaaagcttgacaccagaacatgatatagttccgagcaatctgcggactaacacatcgggacagtgtgtttatcatcaaaaaagaaacc

SEQ ID NO: 117036 - DNA, 489 bp, Arabidopsis thaliana columbia
  unsure (1)..(489): unsure at all n locations
acgccngcaggaaccgggccggaagaacgggttcgacgggcgggaacaggccgcaacaggcgacccagaagngagngcgaggaaacgaaagaaagaggacagccaagaagcgacacacagcgaccgaagnaacccccccgaacgaacgggcaggcaaccccacagaagacaggaaggggaacgacagaaaaatttttttttccgggggggggaccccccccacagagcacgcgacgcaagaaaaccccccaaccccactagggacgcccccaccaaaaaaagacgccagtggcgggagcccgcgggagggcccgaaacccgacaaaccgccgcccaggcgagcagatgcaacaaacccagccgggccccgcaaggccaaagacgcagccgaaaacggggcgcctaaaagaaccgacgggaaccaagccagagccgcgcgggcgccgacgagaggggccgaagccaggcccgagccggcggaagaccccc

SEQ ID NO: 117037 - DNA, 504 bp, Arabidopsis thaliana columbia
ttaggtgcactatagaagagctatgacgtcgcatgcacgcgtacgtaagctcggaattcggctcgagcagagttaaatggagtttgtgtctcgtaacttatcctgtgagcgaaaatggtgaaagcaactaaggcagagaagaagatcgcctacgataccaagctatgtcagcttatcgatgagtacacccagatcttggtcgttgcggccgataacgtcggatcaactcagcttcagaacatcagaaagggtcttcgtggagactccgtcgtgcttatggggaagaacactatgatgaagcgttccgttaggattcactctgagaacaccggaaacactgcaatcctgaatctgcttcctctccttcagggaaacgttggtttgatctttaccaaaggtgacctcaaggaagtgagcgaggaggttgctaagtacaaggttggtgcccctgctcgtgtgggtttggtggctccaattgatgtggttgtccaacctggcaacact

SEQ ID NO: 117038 - DNA, 470 bp, Arabidopsis thaliana columbia
cgaagcgggaaccggagaggttcgacgggggagaagcccaaaaaaaagaaccggaaggacaagcagagccagagaaagagagagggacgcgggggaccaaaagggacaaaaggagccagcgcaagggaagagggagacaaacccgagagaacggagggaaaaaacaatttttttagggggggaaaagaaattcaacaaaattttgaacagaggactggtgtggagaaaatgattagaagagaaaaaatatataacgcgacaaaggagcaagaattattaaacggaatagaaggatactgtgagaagagacagtgtatgttatataaaatgaagatgtgctgatgggaagtgatattagtgagagagagaaagaggaagggctgtgggggagtggagagggggatatattattcgtgggttaggcgaggagatgtgtgagagtgagaaaaggcaatgaggtgttaatgagg

SEQ ID NO: 117039 - DNA, 457 bp, Arabidopsis thaliana columbia
  unsure (1)..(457): unsure at all n locations
cggttgtcgcgtcgagaacgggaggggggtggagcgccagngcaaacgataaatttttttttttggccaaccgcggcaccgggaaggaaaaagagttggnnggggggagaaaacancgngggcggggggggaaggagggggggggggggcacaaaacgaggagcggcccccccaacggcgcgaggcaggggggcggcgccagaggccgagagggcacccggcgacaggaagacgggccaaggcagncgttttttagggggagcaagatccacaaagggggcggggaggaagagagacagcggagcggaagggaagggcgcacaaaaaaaaaggaggagcgcgacggacggaaagagaaggggaaaaaacgccaaaacaaaggggaccgcgaagacgcagccagcaccaggcgcggcgcccccagagagaagcgcccgccgaaagacagcggggcaga

SEQ ID NO: 117040 - DNA, 508 bp, Arabidopsis thaliana columbia
  unsure (1)..(508): unsure at all n locations
gattgtnnnnnnnnnnnnnnnnnnnnnnnnnnnnnnnnnnnnnnnnnnnnnnnnnnnnnnnnnnnnnggctcgagctcgagccgctcgagccgaatcggctcgagcagttttggggcatttccagtaccggtttcagagccgtcaaacaccaccggctttggggagattccagtagtcccggttacagaaccgccaaacaccaccgcgtttggggaatttccagtggtgccggtttcagaaccacaaaacatcactgggtttggggcattaccagtaaccccggcttcagaaccatcaaacaccaccggttttggggaatttccagtagtgtcggtttcagcaccacaaaacaccactgggtttggggcattaccagtaatcccggtatcagaaccgtcaaagaccaccggtttgggggaatttccagtagtcccggtttcagaaccgcaaaacaccacgggttttggggagttcccggtaaacgcaggtgctcatgagcaacataac

SEQ ID NO: 117041 - DNA, 512 bp, Arabidopsis thaliana columbia
attgttttaggtgcactatagaagagctatgacgtcgcatgcacgcgtacgtaagctcggaattcggctcgagggaagatgttggaagctaaagagagagcggatttgctaggtagagcgagtggagaaggagctcacattttgcagatatttgatgaggaagctcaagctatgagctctgtgaagaactcaaagagaatgcttgaagagtcgttttctagtggtgttgctatcctctccaaatatgctgaacaaagggatcgtttgaagagtgcacagcgtaaagctttggatgttctgaacacagtagggctctccaattcggtactgaggctcattgagaggcgcaatcgtgttgatacttggatcaaatatgccggtatgatcgcaacacttgtcatattatatctgttcataagatggacacgctaagccgaagaaaatcaaacggcttagttgcacagatggttgtttatgccctgttacaagacatttttggcatctgatcttag

SEQ ID NO: 117042 - DNA, 518 bp, Arabidopsis thaliana columbia
  unsure (1)..(518): unsure at all n locations
atgatactccnnnnnnnnnnnnnnnnnnnnnnnnnnnnnnnnnnnnnnnnnnnnnnnnnnnnnnnnnnnnnnnnnnnnnnnnnnnnnnnnnnnnnnnnnnnnnnnncctttttttttatttatttgttatttgatcttacatttttgatattttttgattgaggaagcttatgctatgagctctgagaaaaacccattgagaatgcttgaagagtcaatttcgtagtgaaggcgaaagaaactccttttacgctgaccactgggatcgcttgaagagtgcgcagaaaaaagctttgaacggggtgaacacagcaaggctgtccaataaggcactgaggttctttgagaggcgcagtgcccattttaactaggataatatatgcgaggagtgttcggagcactcgcgcgtatttttctgcacatattacggacacgctacctctgaatagaatcaaacggcttagttggacagccctatggttatgccctgttacaagactttactgggagcagatttt

SEQ ID NO: 117043 - DNA, 460 bp, Arabidopsis thaliana columbia
gcacgcgtacgtaagctcggaattcggctcgagttgactcttgagagaggacgaccaaggaaggacattagtttaagacgatgaaagggtgagacttgtgatatctacgtagaaggaagatggccttatctcaagtgactgcgtctctcgcctttgctcttcccaactctggtgccctaaagctagccacaatttttttccctacgggtacatggcgggttcatgttcctgcaacttgctggaaacccatccaccttcgcttctggggccggcttcttgccattgaggctgagtgtgacccgtataggaggacactgatctcggggattttgccatgacatgttaccaacgtgcatcaatgaccgatgtatatgccatatctagctgcggccgcgatcacgttccttgaatctgtaagtgagggagtgcttgcggaggtccgtatttggaacagacgcct

SEQ ID NO: 117044 - DNA, 533 bp, Arabidopsis thaliana columbia
  unsure (1)..(533): unsure at all n locations
caggaaccgggccggaattaagagcgctggtcgacgagctcaatactcagcggccgaccttttttttttattttaagagggtgagactctccattgatggatgtaaagaatacagcgatatataatacaggctgtcttaatacgaagaaaattgattctcaggtagcatcacactaacaagaagccacgatttacttgttcnacagaagacaagtcggaagacagaatatccgcagcttagaacgaccaaccaatgcatgttacgcgtttagagcgaacccgtaggtaaatgtactttgctaccttcaagaccccctaaaagaagggcatttctacaaaaggaaaatctttaacataaaaatgggaacctgaataaaccaaccatagcgggccacgacccaattcatatgatcgcaaaccaagtggcttcggttatggtattccggttcactttctatatggaaaacaggacgcctgcgtcaaaaggacttcttctaagggccatacctcaagcgttgaatggggaagcagcg

SEQ ID NO: 117045 - DNA, 501 bp, Arabidopsis thaliana columbia
  unsure (1)..(501): unsure at all n locations
aggtgacactatagaagagttatgacgtcgcatgcacgcgtacgtaagctcgggattcggctcgagctcgtctatggggagagacgggcttatagtaactgtgagganannatnnaanannancgnnnanaggatnagaagaatagaatctgagcagngggatatagattgagttnatgtattagncgttgatgacagtgtagttgattggattgaaatngagagtttgtttgggggggggtantgaaaaggtagggaggtagatagtggatggggtgttgtggaatttttaggggtagataatgagaaagataaggntgaatncgatngattgaangntgatnngatcatnantgggaactgtatggctggaatgactggttatgagcttatcaagatgattaaggaatngtacaattgtagagaatttngggatgtaatcatgtggtgggagaatggatggagcataatggagagatgccttgaggaaggggggtaaga

SEQ ID NO: 117046 - DNA, 523 bp, Arabidopsis thaliana columbia
  unsure (1)..(523): unsure at all n locations
atgannnnnnnnnnnnnnnnnnnnnnnnnnnnnnnnnnnnnnnnnnnnnnnnnnnnnnnnnnnnnnnnnnnnnnnnnnnnnnnnnnnnnnnnnnnnnnnnnnnnnnnncctttttttttttttttttgattaaagggacatctataaaatttgacggcgtcaagtcaacgtgcaattaaaaacaccgtcagaggtaaaaacgaagttaacggagatagataatattacacggcatcccagaatagttccactaatctaatccgggactcctcatcttctgccgtcgaatcggcgattcctccgacgacgacgtcaacacgtcatcatcttcatcgtctatcggagatgaaagtggcgaggtggaaaagatctccaccggagataacggcggagacgaatccgacgattcagtcgaaacagtcaacggcggcgacgattcangcgagatagtcaacggaggtgaccgtggaggaagcgaagagttaccggaactagaatcttccggaagcttccgtttgtttcc

SEQ ID NO: 117047 - DNA, 497 bp, Arabidopsis thaliana columbia
ctacacacactaggtgagaagctaccacgcctgcaggaaccgggccggaatatatagctgggtcgacgagctcactacgacggcgggcgcccttttttttttttttgttggtcgtagcgaatgctagtgagctgaggtaatacaaacttcaatgatcttgtaacatgagagcaataatttcatatgttgagctttgggttagggcagacgaagctattttatatttactctgtgcaaagctatgaatctcccttttagaccgaaagaagtgtgtctatagtaatgatggatgagattaagccaattccaagactgccttattattcgatgatgcacttaagaaatctcgccttcttggtatgaaaggagaatacgcttgatgacctctgcggttagcgtttgatagtttgtaagtgagtctgttaacgtgtgtagctgcttatgatgcgcgtttaagagagattaaactctttaatatgcttcattagaaagcttca

SEQ ID NO: 117048 - DNA, 320 bp, Arabidopsis thaliana columbia
  unsure (1)..(320): unsure at all n locations
gtgtattctactcactanatggtatagctggcacgcctgcaggaaccgggccggaagaacgagcctgcacgacgagctcactacatcggagcacgccctgtcttagaaaaaccatctcaagatgaaaacatcatgatcatcattattacaagaggacagnaattattcttgctcgtgaaagtggaaatcggtgcaaaacttcaaagagtgaggcccgaacgaatatcctttcgatagaaagttttttcgttggccacctcgtagaaagacccaccatccaacaacgagctttttttgggcacttgaaagatattttctat

SEQ ID NO: 117049 - DNA, 529 bp, Arabidopsis thaliana columbia
  unsure (1)..(529): unsure at all n locations
gagagagggaggcgaggagaaaaaggaggcggggtgggagcgccaggcgaaaacgaaaaaatatgtatgctggccgcccgcagaccggccggaagaanngcttgaaggggggaaaacccagcgggggagagaaaagaagaggagaaaaacacagaaaggaggacaaacccaacgaagccggggcggaggaggggggggcggaagcaacaagaacccagacagaacgggggggaggagaaggaattttttaaagggggggaaaaaacagcgcagaaaaacaaaaaagaaaggggacgcggggccgcggggaagcggagccacaaaaaaaaaaccaaaagaacaaccgggaaggaaaggcgnagagaccagcagacgagaggagagcgcggcgcacacaaacaaagaacggccagggcgcggcggaccccccccgaaagagacaaaagagaaggacagggaaaaaggggccgggagaagcgcacggggcgacagaacaagagggccaaggccggggcccacccaccaggac

SEQ ID NO: 117050 - DNA, 528 bp, Arabidopsis thaliana columbia
  unsure (1)..(528): unsure at all n locations
nnnnnnnnnnnnnnnnnnnnnnnnnnnnnnnnnnnnnnnnnnnnnnnnnnnnnnnnnnnnnnnnnnnnnnnnnnnnnnnnnnnnnnnnnnnnnnnnnnnnnnnnnnnnnncctttctgtatctgtttatggttttttatacttttctaatcttacttttttgataggtgtgtttttaccagcagactggaacgcttctttccttcgaaagaaagaaaaacccttccctaaatttagcccttattttatggcagggaatgcttcatttaatagtttcagattacaacaacaggaacaacaaacaggttgaaagaaaaatttagggaataaactaatcccagttttgctcctaccaaaaaaattttcacatggacttagattctgcaggctcaatgggcgtgttgttcttattgacattctttgttgggatacaataacaaactctttccaagcttattttcatataaacaacaactctttaaattgttgaacggggcgttggatccctttgaacaacttacaccgggat

SEQ ID NO: 117051 - DNA, 424 bp, Arabidopsis thaliana columbia
acgacacagttagggaaagacgcacgcctgcaggtaccggtccggaattaattgctgggtcgacgagctcactcgtcggaggccgcccttaaacttttttttttttaaagctaatatatattttaggactttataaccagaaaacacgtaatagaccataacagttgcaaaaagctgatgaaggataaaagagaccccactccaaggggagagaattttttttaggagcctttctcccgggaaaaaagcataagtatccttaaggacccgaaccgctttcccgcccgacactccagggatttaatgtggtaaactcccccgcgctcgacccatcctctccgggagctggctctcttccgagggatttttaccttgcgagtgataaacaccccttgtagtcggccccgcaaacttcacggacctt

SEQ ID NO: 117052 - DNA, 564 bp, Arabidopsis thaliana columbia
  unsure (1)..(564): unsure at all n locations
ccgcgnacgnaagcngggaangaggaaagagtccgaccgcgggggggagcaanagaacaaagagggaaacgaagcacgaggaggagaggacngaagggcagcagcggacacagcgagacacgacagaaggagggagcggaagcgggagaggagagagagaaangagcgcagacgagggggggaagcggcagggcacggcgcgggaaattttttttttaggggggggcgaagcaagggagacggcgagagaagaggacggccgcacgagtgggagagaacgagaggagagagagcagaagaggagggtggtggatatagagagaggaggctagggagaatagagcacaagagaaggaggggggcagggagggaagggcagcaggtaagcggggccgtgggagcaaggaagtgctgaggacggacgcgcgaagaatgagataggatgggtagacggggcgagagagtgagatatcagtagacgggagaaagtgcagaatgcccgtaagggggcgtggcgagagtgaggacagggagagaggcagaacatgtgggggggagggaggg

SEQ ID NO: 117053 - DNA, 518 bp, Arabidopsis thaliana columbia
  unsure (1)..(518): unsure at all n locations
atgannnnnnnnnnnnnnnnnnnnnnnnnnnnnnnnnnnnnnnnnnnnnnnnnnnnnnnnnnnnnnnnnnnnnnnnnnnnnnnnnnnnnnnnnnnnnnnnnnnnnnnnncctttattttttttttttttttttttaggtcaaaagatgaaaagttaaaagagttaaacaagtgataataataatcagacacacaatgatttacatgtgaccttttagaaactctaacaaaattaccaacaaacaaacctccaagataagaatcaattgatacattatgaggaatcaaaccggtttttgtatatagatcaaacatcattaaacaagagttgtgtttacgatcacacttcttattctgcatgcatgtccattgaagaatcaatagaacctggagagttagatcccctgttcacttcactgcttctggaggttccgccggatgtgtagcctccctgcggaatttggtagttctgaagactacgccgtattgggcttgaaagtgcgtttgagaaaaccgagt

SEQ ID NO: 117054 - DNA, 474 bp, Arabidopsis thaliana columbia
  unsure (1)..(474): unsure at all n locations
nnnnnnnnnnnnnnnnnnnnnnnnnnnnnnnnnnnnnnnnnnnnnnnnnnnnnnnnnnnnnnnnnnnnnnnnnnnnnnnnnnnnnnnnnnnnnnnnnnnnnnnnnnnncctgcttaagacttgtttacaacaagtggcctcaatcttcttttgttttcattgcaaggtagtgaagtttattctttccgccccaaattaagtcccacccaccttttgggactgatatcatagctcggaagatagaaaaaagagggcgatacagagtattttaaggtttaactgtgaagtcttcggttgggatgttttcgatttcgagattacgaaaactggttttattcctacggacgtagaacttaccccatttatagcctttgatttttggaggggtttgaggactgacacgttcttctaagggcttcactcgcacatcgggtgaaggcaacacgaagaatggttgcgagtgtctctctcttg

SEQ ID NO: 117055 - DNA, 280 bp, Arabidopsis thaliana columbia
  unsure (1)..(280): unsure at all n locations
ccgcgtacgtaagctnggaatttggatagagtttcgccgagagtggagaccctcccactaaaatggaggttgtaatgatagatgggtactatgagttaagtatggcgcgtgtgcgggcgcgggcggggttggtagtcgttgcttcatggcgcgagaagtagcgaattgtgagcatcgaatagtggccacggtgtgtgacttaacgtgagtttttttttccacgcggtgtgaaggaaacttgatataacattatgtaatggtacctagatgaccggaagta

SEQ ID NO: 117056 - DNA, 468 bp, Arabidopsis thaliana columbia
  unsure (1)..(468): unsure at all n locations
cacgcgnacgnaagctnggatcctctagagagttcgccctttgggtaaagcttttttatatatgatttttgcctaacctggaggaagcaactaagaaaccaggacacaccgngcgccaacaggaagccttttctttttgcaaactataggtcttgaatttgaaaaaaatcaccacacctttggtagtactttttttttagaggagaccgaactatacaaagtagctattaataagaaatgccatgctttgtcacagtggatacggttattggtggaacaccacttgcttattagaacattgaaagggaaaaggggttgggttctcttaattcccagataaaccagactacatgggccaaaaaatggtcgaaccattctccacggaccttgcaaacgtggggggtggaatacttttgctttaccggatcccgttagtatgatgatccgccctgcggacggcgaaagaac

SEQ ID NO: 117057 - DNA, 420 bp, Arabidopsis thaliana columbia
gcctgcaggaaccgggccggaatacaggggctgacccacgcgttcagaaccacagtgggcacctaccatctgctctgtgtggtgagattcattcaataagaaagcagatcgacctggcagctcaaggaggtgattcatatgaggaagcgttggatgtttagacagatacgatcacgaaacgaacacgtgctttttattaccaggacacgggatcgctaagaggtagtctttgaatatataacgctccttaccccgggagatgacagttaaaagaacaaaaagaactaatgttatttagtaccaaatgcgggggaaccacatggcacctttacagtagctgataaatcaaaaactatggctttcgaacagggcgcttaactgcaccctcccctatagaagggccgggaaagaacctcttta

SEQ ID NO: 117058 - DNA, 501 bp, Arabidopsis thaliana columbia
  unsure (1)..(501): unsure at all n locations
nnnnnnnnnnnnnnnnnnnnnnnnnnnnnnnnnnnnnnnnnnnnnnnnnnnnnnnnnnnnnnnnnnnnnnnnncttttttttttttttttttttttttttttttttttttttttttttttttttttttttttttttttttttttttttttcccgaccccaaaaaatttatttattaaaaaagggccaagggggcggggataaaaaaaaaagggaccgaaaaaccaagggctacaaaaactttttaaagggcttaaaatcataaaaaaacttaaacaggggcgggaacttgggattccactgattggaaaacctcctaacccatttctttgcatcccaccattttatttccaggggagaaaatgtctccggttttaaaccctttgttaaaagcatccacaaaagggttttaaatccttttggaagcctttttttttccaagcccatacttaaaaaccatcccccccctaaaaaggggggccaaggggtttgccttgttttgc

SEQ ID NO: 117059 - DNA, 497 bp, Arabidopsis thaliana columbia
  unsure (1)..(497): unsure at all n locations
taggagcaactatagnagagttatgacgtcgcacgcacgcgtacgtaagcttggatcctctagagcggccgcccttttttttttttttttttttttttttttttttttttttttttttttttttttttttttttttagaaaaaaagtctaccaaattaccacctaagccccgggtgaacactttgaaaacagccgctctaaaaaaattgttttctaaaaggaccaatttacgaaaaaaaagattttccgggaaaaattgcaaaaccctaataagaggccccgcctggttaaacagctagcgttaagaacaaaagaagaaccccctccaaatggggaaaagctattcattaaagatctaccttccgcgggatccttagggctcattggcaaggaagaaaatggtgcgactggttaaatcttgccctaataagacggcccacgttccttggctcggggggccaaggcaacaaccaccgcctttgggttggccaatatag

SEQ ID NO: 117060 - DNA, 471 bp, Arabidopsis thaliana columbia
  unsure (1)..(471): unsure at all n locations
nnnnnnnnnnnnnnnnnnnnnnnnnnnnnnnnnnnnnnnnnnnnnnnnnnnnnnnnnnnnnnnnnnnnnccacgcgtccggccacgtgtccgccacaacaaaacccatatctgcggacatgcttccatatctctaaacaccgctggcgaaccatcatagctcgcagatagttgggagccggcaggctctgtgaatagcacaagctgacatagagagcagacggctgtgatttggggcacgagagttgcctagacggcgccgccaggcccagatgaatcaacttctcgcgcaacgatgagaccgatggtgaaactactgccatcgaccgatattgttgcagacagcgctgcatctcctctgctggagcacggtctaccacgatgaaccctagagactgcatcgctcacaacaagccctgaatagctagaccgggatccgaccgtgaggtgcgagaggataaaggctacatca

SEQ ID NO: 117061 - DNA, 508 bp, Arabidopsis thaliana columbia
  unsure (1)..(508): unsure at all n locations
tnnnnnnnnnnnnnnnnnnnnnnnnnnnnnnnnnnnnnnnnnnnnnnnnnnnnnnnnnnnnnnnnnnnnnnnnnncttttgttttttttttattaaaagtgcaatgaaattactgaaaaagtacaaacataaataaggtcaagagagatttgattcactcgtaaactttagtctttcttgtgacaaaaatacagcacaataagattacataactttttcgtcatcagtcaaaagtctctaatcctaaaggccaacccagtacgaacggccattggtgttatgcatcggagatggagtaggtgaagacaccgaccattcataccaaacctttgaggaaccacaacacctccaaaagtgtacttctaatggagtatcagggtgaacctccacaggcttcctcaatgggaaaaagattgggaacctgccaaaaggaacacgattttctctcggttgaagtaagaggttcgatagaagaaagctctgttttaaaacatttatagacattaat

SEQ ID NO: 117062 - DNA, 507 bp, Arabidopsis thaliana columbia
  unsure (1)..(507): unsure at all n locations
gattgtnnnnnnnnnnnnnnnnnnnnnnnnnnnnnnnnnnnnnnnnnnnnnnnnnnnnnnnnnnnnnnnnnnnnnnnnnnctttggttttttttttttttttttttagagaagaaagctattcgattattgataatctcaacaacaatggtacatttattacaaagtaagtttgcttaacttgaactgtatgaaatccatgaatacaaaaattacataaaagagatagagagatctgtatagaaccaaaaatcaaacgcataaacattcacgtgtaaagagaatgaatattgctttgtgttttggaccttgttttttttactgcttcttctgcacaacattttccaaataccattcataagtttgggagaggccatctttaagcgaaatcttcggtgtccatcccaaagacgcaagcttcgagctatccatcagtttccttggtgtcccgtctggttttgtggtatcccaaacaagctttcctttaaacccaacaacttctttcacc

SEQ ID NO: 117063 - DNA, 504 bp, Arabidopsis thaliana columbia
  unsure (1)..(504): unsure at all n locations
nnnnnnnnnnnnnnnnnnnnnnnnnnnnnnnnnnnnnnnnnnnnnnnnnnnnnnnnnnnnnnnnnnnnnnnnncttttgttttttttttttttaatcaaatttcgacactctttacaaaggaaaacttgtgcgtatgttacaacaaaatgagaaaaatacagccgagagagagattacgtaaatattcttacactaacaacccaacaaactctctaccattcgtgaaatagtaagcaaccaagtgggaaaaatggaatatataaattatatttacgttggggctgaagggtataaagaattttgatttgagaatgtgttgttgcttcatatcatctccgtggaggatcctgaatcaggttcatttcaactcccacgggttgggattctctgaaagttccaagcttttcagcctccctagctatccgaacatcggaaggtctgtaatactccactagaaacttgatggcgaatctaggaagcaatgatgtcacaactattgctag

SEQ ID NO: 117064 - DNA, 508 bp, Arabidopsis thaliana columbia
attaggagcaactatagaagagttatgacgtcgcacgcacgcgtacgtaagcttggatcctctagagcggccgccctttttttttttttttttttttttttttttttttttttttttttttttttttttttttttttttttttttttttttttttttttttttttttttttttttttttaaaaaaaggggagggggaaaatctccaaaatttttggggagacccccccagtttcccaattttaaaagttaaacgggggtaaaagtcacaaattttgaaaaaaatggggacaaaaaaaagggttgggggagggcccaaaaacacacttttaagtcacaggtttggcaaaaaaggtttaaaaaaagggggccaaaacctcccgggccggggttggccccaaattgggggggttccaaaaagctaaaattttttttaaaaaaaaaaacgctttttttttcttttaaaaaagccgcccaaattgggaaaaaaccggggccaaaaagaacggg

SEQ ID NO: 117065 - DNA, 481 bp, Arabidopsis thaliana columbia
  unsure (1)..(481): unsure at all n locations
gcctgcaggaaccgggccggaatacccgggttgaccggggcgttcgagacttaggtcacctgtagcacagtctctgctcagccctaaaagcttactccttgcaactaaactggaaggccatcgtcgcagcctatcgtcataaatggattggatggtgactaacttggagttagtggagatacagatactagatttttcttccgatcgagngnggagcgcanctcggaaccccgtctattattcacgccgacggaggtgaaccgaatctctgttcttagagtggagataacactgcttgaatgtgggaacaaaatctttcccatcctacctggatttgcaagacagctgtgggagagaccccttcacagaactgttggggccgcgcccttggctacccctttggacagctattggcccactgcaaggattggatggtaccaactggcatttagcacgatcaacggttcggggccagaatgga

SEQ ID NO: 117066 - DNA, 496 bp, Arabidopsis thaliana columbia
actatagaagattatgacgtcgcacgcacgcgtacgtaagcttggatcctctagagcggtcgccctttgtgtttttctttttttttttcttaaactttgaattggtaatactccaccaacactcaccaacacacaccattgaagttcaatgtatttgataacatcacattctttacaaacaaagttgacatttaactttagatttattgcataccttgtacagtagtctcaacggtgagtttgaagaagatgacaatgtagaacgtaagagacaacagtgcaaagatgtgttgccagaatagaagtgccgaggcttctctaacagcgtaacctcttagactcgcgatggctccaagtaaaatggcactcggagtcgaatactgcaaaagaagcacaaacttgaacattggatctgctgaggaaatgagaccaagtttatcagctgacatcacaatccctattcccactaacggaagcaccaagagtcttgcaacat

SEQ ID NO: 117067 - DNA, 444 bp, Arabidopsis thaliana columbia
  unsure (1)..(444): unsure at all n locations
acatggaaggaggacgacgcaggaccggccggaaagcagggttgccgggcggcgaaacaaaanggnngaacanggggggacaggggaaccaagaacgcaccagagccaacccccccacggcgccgccggccaaaaacaagcgcgccgacgccgcaaancaccaaaccagagaagaggacagcccaaaaagccctttatgcgggggcggggacgggaaaccaccaccaccaaacaggagggcaccccaaacaccggcggggggagcgccccagccggggggaccaagagggggaacgccacaggggcggcgaccccgcccgcagagccaccaccacccaaaacaccggccgaacgcgaaacaaaaaacaaaaggaacggcccccggggacgggggaaaacacaggaacccccaaacaaaaacagccgggaccccccgggaggacc

SEQ ID NO: 117068 - DNA, 472 bp, Arabidopsis thaliana columbia
  unsure (1)..(472): unsure at all n locations
caggaaccgggccggaatacacgggctcgccgaggcgnncgaaacccaaaaggacatganactggaaagacaagggcaaaaaaaagnggacgaaagaaacagacaagcaaagcggaggcagagagccaaaaccacggagaagcagcacaccccgccggaaagacagaaggacaggacaaactctttgttgtaggcggggcaggacaaagaaagcaccaaaagacaaagcccgggcaaaacccgaaagccagaagagccaccaacaagagaaatggcgaaggcaggggacccggccgcgggggagcacagcacaaaaaatgcccccccaccccgaaggacggaaagcccccacagcaacgaaagaaaaaaccaaagccagacgtaacaaagacagcccccggcccaaaaaaaaacacgcacaaagaaccgacaaacaaaaagagaaaacaccaacaaaccccgcgacaaaaaa

SEQ ID NO: 117069 - DNA, 471 bp, Arabidopsis thaliana columbia
tactctgactcacatcattgtgtgagctggcacgcctgcaggagccgggcacggaatacccgggctgacccacgcgttcgagccctcgcaaggttattctgtgcctctaaaaaacataagcatagataggacagtttaccatcatgatcacgatgaggtcgagagagtgtgcatggaagacgatgaagaccaagcgtggcaagagctttcggtgcatgtaattctctttttaggcgtgggtaggtgttacgcagctctcgatttccacccgtctgaggtgtatacgatggcgaactctgaatcattgacgaagatcctcgtgctccgcttgataggcgcgatacaagcaaaggtttgcttgtggcaaaagctcctgcacggctgtctactatccacacttgtggtggagcttaagatgagagacttacactgtagtgtaacaaggatcatgcaatcgatttgccatcttgt

SEQ ID NO: 117070 - DNA, 494 bp, Arabidopsis thaliana columbia
  unsure (1)..(494): unsure at all n locations
ctatagaagagttatggcgtcgactgcacgcgtacgtaagcttggatcctctagagcgttcgccctttttttttttctttttttagtggaaacgtttatgcattataaaagaagcatataccaatcgtataccaacgtaatcacatggagaaaaaaaggactcttccttctatatttctcccaccaacgctacaaacaacagcaagactcattttcaatgtttccaacacttgaagagtgacttattgcctcaccatctacggcaactactcccataccaaaacgcgaacgctggcacagatgcatccacaacgactacagtcctctgtgtgccatacatacaaaggctgctttatcatgaccacacttgcagattgctcgacaatataagcgctaggaatanactcaacttcaggaactcactgctgactgacaaccgcgagaccaaacccgagtgcttgtgtctccaattcttccaaatcaatagtcacagc

SEQ ID NO: 117071 - DNA, 546 bp, Arabidopsis thaliana columbia
agcacgcacgcctgcaggtaccgggcacggaatacccggtttcgacccacgcgtccaagcactcgttatgccactgctgtgcctcttaaaaccataaacatcttacggaggagttaaaacagcattagagcaacgagtgaagacatgtcgccaagctctaatgtgggtgagattgattcaaggagagaaaccggtcggcgacagagacgaagacggggactgctaccttctttgttctgacagctgagagcacgggtggcatacaacaccttcaccgaagtatatagcagaactatgcgtcgtctcgccgagaaggcggaaacacatagtagtcatttgttttgcaagaaggccgctgagcacccgtttcgctaaggccgggccatcatacaaaaggtttttctgctgccgaaaagcaacatgaacggtgttccgttcaatccacacttcgggtagtaactgggggatcgaaagactctcaccctaaacggacaaagaggcaacggacttgaattggtacctgggtactccatgcttacgccggaa

SEQ ID NO: 117072 - DNA, 451 bp, Arabidopsis thaliana columbia
taggtcacactatagaaagattatgacgtcgcatgcacgcgtacgtaagcttggatcctctagagcggtcgccctttttttttttttttttttttttttttttttttttttttttttttttttttttttttttttttttttttggaaactaaatttattctccggctttgttattaaaggttttaaagttttacatcaaaagttaaaatattttacacagtaagtaatccctcaaaaggtcataaacaaaggagggggactagccttggggttgctccgcggggttgaaataaaaaacaccttcatggttcttgggaacttccaccttgaacttttcctttttttctccccttttcaacttgagaaacatgttgaattttggaacctcgccggttacctagttttagcatgcccaacctccaaaagtttataagggaacaaggggttaaac

SEQ ID NO: 117073 - DNA, 511 bp, Arabidopsis thaliana columbia
  unsure (1)..(511): unsure at all n locations
ttgtnnnnnnnnnnnnnnnnnnnnnnnnnnnnnnnnnnnnnnnnnnnnnnnnnnnnnnnnnnnnnnnnnnnnnnnnnnnncttttttttttttttttaaaagaaacacantttgtagaaaacactaaacagaatttgcaaagaaacaataatgagaatcatcaactgtggaaacagtttcttcagaagaaatcaaactcaagataattactctgatcagatcttacactcgaagatgcggctgctggcacagtaggagtaggattcaaagcttcaagatcaaccggtttaggaatctccggtggactggcacatcgaaccagagcccaattcactccttcaaagaaaggatgttgctttatctctgttgctccacgcttataagctaatctatgttggggctccttcacaagcaaactccttatcaaatccctagctgcgaagctaacaaccggagattcagggaatctaagaggctgaccaaccacgttgaagagcgttgctcgatttcc

SEQ ID NO: 117074 - DNA, 506 bp, Arabidopsis thaliana columbia
  unsure (1)..(506): unsure at all n locations
nnnnnnnnnnnnnnnnnnnnnnnnnnnnnnnnnnnnnnnnnnnnnnnnnnnnnnnnnnnnnnnnnnnnnnnnnnctttttttttttttcttttttttttttttttttttttttttttttttttttttttgtttttttttttgttttttttttttcttttgtggaaacaaaaaaaaacccgggtggggtttttgggccctttaaaagggaaaaaggggcgcgggcaacctggtttttaaaagcggggttttttttttttggaaaccttcctcaggtttttcaaaaaaaaacggggcccaaatttctttttttccccaagggggatatatttatggttacaacgcccaaaaaaaggacccctttttcccaaaaaggtttatggggctttggtttccccccttttaaaaccgaaaaggggtgggacaaaacctggtgggcacggcccatttttaaacctttttgttgccgtttaagggggaactttttttttattttccaaaacgggcc

SEQ ID NO: 117075 - DNA, 510 bp, Arabidopsis thaliana columbia
  unsure (1)..(510): unsure at all n locations
tgnnnnnnnnnnnnnnnnnnnnnnnnnnnnnnnnnnnnnnnnnnnnnnnnnnnnnnnnnnnnnnnnnnnnnnnnnnncttttttttttttcttttttttagagaaaatacatttgcaattgactattagcagaagaatcgtaactggctttaggaagtattcttttacacccaaaaatatgacgatatacagaattttaagctgagtatttgcttgagcaaccaaagattgttgtcttagtaatatatctaaaaatctggcacttcaacttgatgcagctggtttggctaatgttaagccttcaggtaccttggctggaccgaggctgcaacgatcggtattgtgcagttggattgcatcttttatcttctgaaacttagcaagagaacatgagaatgactcaagctgaccatcagctccacggtaaaagtggaaaaaaggaagcactctcacgttcaaactcttgcacatcggtttattctcatcaaagtttactttaaggaacactat

SEQ ID NO: 117076 - DNA, 482 bp, Arabidopsis thaliana columbia
acgcctgcaggagccgggcacggaatacaggggttcgcccacgcgtccgacagcactagaacctaagactcgtatgcgatcgcatccaaaggaccaattagcatcatgctcaaaagtctctacgcggcggacagcgggtagatagatggcccgcagctcggagataaccggcggattgacttccagcaactctttgtccttaggagggggaacaaaatctccgcccgtagggattcgggaaagatgcaatgctcaagctgctagaaccattcaggagctcagggctggacatgtgtatatataccaggaactggagacgggacagttccacgggcagatttacacggaacactaaggcaggcgaaagccaaaagccccccaggtcttaccacagtccaataagaaaactgaaagggcgagggcaccggtagcaccaaaaaatggcccaaaaagatggaaaggaactggacaaaatcattacg

SEQ ID NO: 117077 - DNA, 491 bp, Arabidopsis thaliana columbia
ccgcgtacgtaagcttggatcctctagagcggtcgcctggtgtgaaaccccctttctatgtctgtttgcttttggttttttgttttaaagggcagatgggctttcaggaaggaccagctcccttcgcgggaaaatttccttagaaagaaaacccccggaaagtgatcgaactcttatttttttaaaggggggggaaacaaagttatcagggcggtgcgggacacagaagagaaaacccaggaagattgggctgtctcgcgtgattagaaaacctagagtttttgtgtaataagggaaaaaatgagagagttattttttaaatactgaactcacgtggggggtgtaacccgagaaagaacacaaagaggggggcttgaacgcttcgcgagaccggtggcgccctctaaaaagcgccaaataaaaacgcggtgtttgtctatgccccctcccctactgaaacgcgtggagcggatgcgccgcgcgcggggaaa

SEQ ID NO: 117078 - DNA, 485 bp, Arabidopsis thaliana columbia
gacacaactagggagagctacgcacgcctgcaggtaccggtccgcaataccacgggtcgacccacgcgtccgaccacgccgtacgcataaatcttggctgatttagcgtacagatgtgctatactcctcttttccaactccctcatcgcgaccgagatcgcttcgataccttctccaccgccagaattacagccttgtcaatagaacggaacagctcttgcatctattattctaacggggggagcgtccaacactttgccctactgtctggtattcacagatcccgattctatatatccatcaaatctgatgcctacttcatcggatcgcatggaggacacattaggtttttctgttatcgtaccctggaaaagggacgagctcctaaggaaatccctaactttcacacccttccctcttgtaaccttcccaagggctcccagaaagattgttaattgcgcttccgcttgaaaatactctcaaag

SEQ ID NO: 117079 - DNA, 503 bp, Arabidopsis thaliana columbia
  unsure (1)..(503): unsure at all n locations
nnnnnnnnnnnnnnnnnnnnnnnnnnnnnnnnnnnnnnnnnnnnnnnnnnnnnnnnnnnnnnnnnnnnnnnnncttttttttttttttttttttttttttttttttttttttttttttttttttttttttttttaaggcccaattggctaatcatttaaaaaataaacttacttccccaagaaaatttttcttagcaagaaattaacttcaaagggatcaaacttttatttgggtaaaagggggcaatcaagttttaagggcttttaggaacccaaaataaaacccgacacactggggttcccggtccctatacacttttgactttattttcattacccaaactcgagaggaaggtctcacttctcactcacttggctgggacaccgcacaagccaaaaggggggatgcaggtaccgggaaccgcttgggcctttaaaagggagtagcaaacgagttttttttatctcacttttcataaaacttgagctggttcctaactttg

SEQ ID NO: 117080 - DNA, 459 bp, Arabidopsis thaliana columbia
cttcactcactaggggagctcgtcacgcctgcaggtaccggccgcttacagggtcgacccacgcgtcgaaaaacacggccgcaggcataacgtttgcgacacattgacaccgacgttgcttccttctcttaagctatctaactcgcgctcataactcgacacgcgcagatgattgtttgtcgtagatggacttccatatctattgctacagcggctaccatttgtactcaataaagttactatgctgtacatccgatgaatcggtcatgactgctataagactactattgaagctaccgtgcgagacgttggagccgttaacagagatagagttggcagagatcagtggacatgagaaaacgcagcatgttgtgggatacagtgtgttgacactgaagtggcatctgttgcacggagaccattgcttgaatatacgtggatgccgcacatgcttaaagg

SEQ ID NO: 117081 - DNA, 501 bp, Arabidopsis thaliana columbia
  unsure (1)..(501): unsure at all n locations
nnnnnnnnnnnnnnnnnnnnnnnnnnnnnnnnnnnnnnnnnnnnnnnnnnnnnnnnnnnnnnnnnnnnnnnnnnctttttttttttttttgaaaaataaaataatttagtatcagaagattacatgacccagaaatagataaaagaacgaaaaaaaccattattataacccttcatcgaatcacagaatctggtccgacattgaaggaagtcgccggaaaaagttgaccggaacggaaggcatatcgtctctaaacctcggatgtcgaatgtagtaaaaaccagatcccaaaaggaaaactttaaacggaacgatgtagaacaaaaacgacgcgaaaagacagaacactacgaatatacacgtggcgcgtgggtctctccagttgaacaacgcctcaacacgctccccttgagccgccacgtcacctaataaagtctgtgcccgaccggccaatgcccttaaccggtcataccttatacgtacgacctccggttgtctcgt

SEQ ID NO: 117082 - DNA, 530 bp, Arabidopsis thaliana columbia
  unsure (1)..(530): unsure at all n locations
gaatgtnnnnnnnnnnnnnnnnnnnnnnnnnnnnnnnnnnnnnnnnnnnnnnnnnnnnnnnnnnnnnnnnnnnnnnnnnnnnctttttttttttttttccctaaatagaatttttttatctctatttattattagtaagatatatataacgagatcaaaatgatcatatcctactaaattctacattgtcgaaatctggtacaagaataagaaacaatcataccagtgttgtctctctgaatcaaatgactgataccttcttaacagatatctatatttatgattatatttatatagagagaaacgagcttatacgatgtatatacacattcatgatctctaccgttttcccaacttacagctccattttgacctgatttgggtgcaaattagcagaagccaccattacattttcagaaactgccatcaaattgctgttatcattgccatgagcttgatcctcttctcttccccataccggctggttcaagccgtcaaaaggccattgttgtgttggtggttgttgcagt

SEQ ID NO: 117083 - DNA, 333 bp, Arabidopsis thaliana columbia
cgggacggaattgaaggagtttaaccacggggccagaccccgtagagggagcagagaaagttggtggttgtcttaaaacggtgaccagtagtaggaacccgtttgtggccatgatcccgtggtactatgttcgtacagcgatcgttacaggtcgacgctggggtgggccgacgaggcggcgacttttttttttgtgagggggggagaaccgaaaccgctggtagtgtgtctcgagtggaacaactgtgattgccgggagcggtcggcgggtgggaggacagcaaggcgacggtgggtggtttcttttttttcaagcagtgtcgcccggttggg

SEQ ID NO: 117084 - DNA, 511 bp, Arabidopsis thaliana columbia
  unsure (1)..(511): unsure at all n locations
nnnnnnnnnnnnnnnnnnnnnnnnnnnnnnnnnnnnnnnnnnnnnnnnnnnnnnnnnnnnnnnnnnnnnnnncttttttttttttttttttttttttttttttttttttttttttctttccaaggaacactcaaccaacaaaataccgtaatatttcaaagaaccaaaaaaaaaaacagtttaaaacattctcttcaccttgaggttatgttattgatgtgtctctgtacaaacgacaccatttacagtaggccgagattgagactttgtacaaaaccttagatacggctaatgtcacgaccaaaaacgaaagtggtgaaccagttgatagcgacatagaatcggtttctccagcttatgactcgagtcaggtacgccgatctccatatgaaccagctcacgaaaccagtcattgatatcccttttgcgtccttgctctcgcgaaggtcgactagggctttgtatcgaccgatagtagccatgcttccaaggtgcttatacacaaagggaa

SEQ ID NO: 117085 - DNA, 497 bp, Arabidopsis thaliana columbia
  unsure (1)..(497): unsure at all n locations
nnnnnnnnnnnnnnnnnnnnnnnnnnnnnnnnnnnnnnnnnnnnnnnnnnnnnnnnnnnnnnnnnnnnnnnnnnnctttttttttttttttggttgaaaaaagctttgtattcttagctacacagttttacattattgctcagcgaaaactaaaatttaaagtcaatgtcatctttggttctgtgttactcatcgaggcacaaaactttctaaaaactggcaaggacaaaagaaaccaaccagttctgattacttctgaatatgaacgaacagagcctttacttttttattcatattgtttcttctgcttatcagtaatctcttgaggtaaagacaggaactgagtgatcttctgaacctgagagacatcaatccggtatttttcagctatctcgttaacacccattggaccatggtgatcctgagattttccctgaaagagaagcatgatgtgtcgcacttgtgctacgttcaacgttccttgaggcaccgggttt

SEQ ID NO: 117086 - DNA, 505 bp, Arabidopsis thaliana columbia
ttaggtccactatagaagactatgacgtcgcacgcacgcgtacgtaagcttggatcctctagagcggccgcccttttttttttttttttttttttttttttttttttttttttgctccacaaattaatatatatctcatttcaaagtacttcccaaaacatgtaaaaacaatcaaagattctttccatcattcactacacagaaggtaaccaaattctcacaccataatgtacagggtaaacctccaaaagaacataatctctcagtggcccttgcttcgaggatcttcagagtgcatagcgttgtagtcttttgtgtaaacccggagcctcctttctctcgcatatataacccaaaacaccaaagatgacattacagaagcagacaccaccacaagacccacatagatccattgtgtgtatctcttaagtcccggacaatgatccctctctatatcagtgaatgtagacctcacgaagtcacacccttgtaggtctgccaagaa

SEQ ID NO: 117087 - DNA, 514 bp, Arabidopsis thaliana columbia
  unsure (1)..(514): unsure at all n locations
nnnnnnnnnnnnnnnnnnnnnnnnnnnnnnnnnnnnnnnnnnnnnnnnnnnnnnnnnnnnnnnnnnnnnnnnncttttttttttttttttcaatatggtttatttattcgactgaaattcaaatttcttgaaaactccattttttgcactatcaggagaccagagcaggctaaaactgtgataagaaaaaaagtaattgttgttacatgtaggaaaatgataattaaaccatgttgggacgttgaggaagaagaagattgtaaaacttgttgtgcaagaaaaagctttttcctttgctatcaacagcttttttccacccacaccaaccaccattgacgatcttcttgtgatcttcacttcctgtataatgcggatccaggatcaggaacgcgcaatccccgcttccttcatcgtaatccactcccaatagcgtgtatgcaagaaccccacctccaatcattattggagttccttggttctcaaagtgcatagctaactcccggcatttctctgg

SEQ ID NO: 117088 - DNA, 429 bp, Arabidopsis thaliana columbia
acgcctgcgtgagctgggacagaaggaatcggtttttcctagggggtgagagcccagttaaaggaaaaaattagatagggaggcgggttgattgcggactaggccagggagagagatcccaaaatctgaaggggagagttgtgtgagtagtaggtcggacgaaccgtaagttgtgaaacggtgggaggagagagggttttttttttagggggggagaggcgggcgcagtccagtatgggggcgaagaggggcatgctggtgaatgggggtgcgggagggggggatgaggaggggggacatgaggatatagatgagagatgggagtggggggagcgattgcggatgtggcggagatcggtgtgtggcatgtctgtgggtatggggcacgagggggagagggtgagtcggacgtgggagaggaggggatgg

SEQ ID NO: 117089 - DNA, 507 bp, Arabidopsis thaliana columbia
  unsure (1)..(507): unsure at all n locations
gaatgtnnnnnnnnnnnnnnnnnnnnnnnnnnnnnnnnnnnnnnnnnnnnnnnnnnnnnnnnnnnnnnnnnnnnnnnnnnncttttttttttttttttacgcataactcttcaagtctcttcttatcttttgcattctctgttacaacatcaattcttaaagcttatccctttatacaacacaaaattatgcaaaaagaaaagttgataaaattaagatccagcaaaaatgttaataatcttacattttccacataatattatacattcagaaggaacgctcttctttgccatagatccgctgaagttctctagtcgccgcttggaatgattctttccatatgcgaaatgctttctggttgataggagaaccaaatacagtctgaatcacatcaaacagtatgctctctggagtgttcctcagttcctgaactatctgataaatcgtcttcccgttttcaaagtaaatatgattgtttggatgctttgttttacatccagcgtgcct

SEQ ID NO: 117090 - DNA, 518 bp, Arabidopsis thaliana columbia
  unsure (1)..(518): unsure at all n locations
ggnnnnnnnnnnnnnnnnnnnnnnnnnnnnnnnnnnnnnnnnnnnnnnnnnnnnnnnnnnnnnnnnnnnnnnnnntctgccctttttttttttttctttttttttttttttttttgatttattatattttggttttttgtccgcccagaataagagaggcttgtactactaaccatgtttgggggacacacaaaaaatactgcttttgctcaaagggaaaccaaatctgaggatctaatgttttaaacagcacgcgcaaggctttagcttctggttattcaaattgccccattcctccatagaatgcgacttctcccattccagcgtctccatattaagattcgattaccctatacaacacttattttttccttatccatctcaaggttaaccatgtgctcaacaagcaagtttgtcatttcactcactccccgaacaagccccctttttaactacaggttgacccttgagaaccgcaattgccggaatgcatgctccaatggctttataacgaggca

SEQ ID NO: 117091 - DNA, 525 bp, Arabidopsis thaliana columbia
  unsure (1)..(525): unsure at all n locations
aatgtnnnnnnnnnnnnnnnnnnnnnnnnnnnnnnnnnnnnnnnnnnnnnnnnnnnnnnnnnnnnnnnnnnnnnnnnnncttttttttttttttttttttttttttttttttttccattggaatcttcttttcttattaatgaaaattttatcaaacataaacaacaaatgtccagttgcagaagaacagtcagaaatgaataggagacaaatgtcttaagctgcagtgactattgtttgaagcagagtttccaagtccttcaatttcacattgctgagatcagggtatacggcaatcgcatcattgaaattctgatcagaggttgaagaagtgtacgtgatcacacatgacatccctgcttttgtagcagcctatatatagattaaaagtcaaggcattttaagattttctttcaagaatagcgaggacaagcaaaagataagacttttgacctgcaggccaatcacactgtcctctacgaccaaacagtctttcactgaaacacctagcttctcggcagctgt

SEQ ID NO: 117092 - DNA, 513 bp, Arabidopsis thaliana columbia
taggtgcacactatagtaagactatgacgtcgcatgcacgcgtacgtaagcttggatcctctagagcggccgaccttttttttttttttttacataagaagatcacgaacatcaaataaaacagactgctacagtcactctcatatgccaaaaagccaaattgtgtcaaaataccaacaaaaaagacaagaagaaaatgcaacttcaactacaaccaatctcgcaggattcgaacagacaagaaacatgggttctctgctttaatctaattgttatctttctcaaaaaaagaccattccttaacgaccttcatgcatcaaaggcggataaagcctagcgtgcaccagcagtgagttttagttactgtctgaaaccgccattttccactaaccctatatgcttcaaagaaccctccagaatttgcattttttgagaatatgaaagaggtgtgaccgctcaaaattggcctataggtggcctagcctcagcctctgagactcttatttgtcttaa

SEQ ID NO: 117093 - DNA, 504 bp, Arabidopsis thaliana columbia
  unsure (1)..(504): unsure at all n locations
nnnnnnnnnnnnnnnnnnnnnnnnnnnnnnnnnnnnnnnnnnnnnnnnnnnnnnnnnnnnnnnnnnnnnnnnnncttttttttttttttttttttttttttttttggcgncactcaacatttattacaacagtaacacgatacaactaaccatttcagtaaattgtgaccgtcatcaaagagtgtttattgatggctcaatggctcattacgccaagcaaacatcaagagtcttctgacatgtttattacctttgcaatattatgacagcccaatatatctaaggacctaacattctaaagtgacgaagataacccacgaatatcaacataaccagctaacacagttttgttcctttccttcactttcgtctgatatataaccctcaagccttcaagccacatttcggttatcagagtttcgccaggaaaaacagtcgtgaggaatcgtccagatatggttttgacagcagttgggtcacccttgcaaacacacttgatgattg

SEQ ID NO: 117094 - DNA, 507 bp, Arabidopsis thaliana columbia
  unsure (1)..(507): unsure at all n locations
nnnnnnnnnnnnnnnnnnnnnnnnnnnnnnnnnnnnnnnnnnnnnnnnnnnnnnnnnnnnnnnnnnnnnnnncttttttttttttttttttttttttcatcaagtgttatcctttttgaaaaacatacagagagctaagcttagctcttagatctctctgttattatcagtaacattacaaatacaaacatcagctatgaattttctgcaggcacctaactttagctgaaccaaaaaaaaaaaaaatgcctatattaattgacattctaaattaaaaaaaaaagatgttaaaagagatataatacagatgggttgacaagcaaagaatatgccaatcctccaaaacaaactaatcatgaccctaagaagctttttcattcacgtggctgcctctgctacaccatttacccctcctatgttaccttcatccttagcgcttgaggactcagctctatcttcgttatgcttaccaaagctcaaaattccaccattaacatccaccagaat

SEQ ID NO: 117095 - DNA, 541 bp, Arabidopsis thaliana columbia
  unsure (1)..(541): unsure at all n locations
nnnnnnnnnnnnnnnnnnnnnnnnnnnnnnnnnnnnnnnnnnnnnnnnnnnnnnnnnnnnnnnnnnnnnnnncttttttttttttttttgtttttgttcaaaatatttccccatttatacctctttatagcattttgctgtttttcttntgttacattacatgtacatcgcattttggattcttcgtcgcttgaacaataagagagcggataacgcgtgtgcgcggcattttccattaggcgggaattcttcacaccgcggtagagttgggtaatagtagttagtaattaaggattctactatcttggctcacgctccacaactgttgccttctttcctccggacgcggcattatcccgctggtggggcttcccctttaccaccatccccttctttcttttcttcgtccgtcttagccttatcatccttcccttcttcgcctttggattctgcttctcccttttattctaccttcttctctccttccgttgccgcagccgcctcctcaggtggtggtggaggcggtgggtcgattttcatg

SEQ ID NO: 117096 - DNA, 479 bp, Arabidopsis thaliana columbia
  unsure (1)..(479): unsure at all n locations
nnnnnnnnnnnnnnnnnnnnnnnnnnnnnnnnnnnnnnnnnnnnnnnnnnnnnnnnnnnnnnnnnnnnnnnnnctttttttttttttttgttttttttttagttaacagagttctttgttgaaccaaaccaacatataatttttgtgaatggccgagctgtttaagaagttttaaaagggacctttttttacgctcgggaatttaaaattgtttttggggaataaaaccaaaagggcaaaagaatgtgttgtaattattcggccctgctgtgattggtttaaatatatagagggcacctggatatacaaaaatttgaaagggctgaccacgaaaaaaaagggtttagtaaaaaaaacaacatctggctcacgctcagatcccttgataacggattttaatacagagagggaaaaaggacaagtacttttgcgcaagagggaaaaatatctaaaacctggtttttttttatggagggggg

SEQ ID NO: 117097 - DNA, 435 bp, Arabidopsis thaliana columbia
tacgactcaccttagggaaagctggtacgcctgcaggtaccggtccggaattcccgggtcgacccacgcgtccgcccacgcgtgacgagactcattgggcagactcgaggacatgactgttcacatgatgcctattatgagtattacatccagagatatcgtctatagccttgggatttagattggcaactactggcagcacacgaagatgatatgtgtcaacacatctttgaacgaatggaaacgaagcactgagttgattacacgtggcaatctatacagacgcgtcgatcagactgcaaggacttcacaactgtgaatgctccgacggtgacttaatagagcgggtatgcaggtggttgctcaatgcacatatcgtttcagactagtggcctaaaagtgacatattgtgactagaggatagggtgcttcatg

SEQ ID NO: 117098 - DNA, 472 bp, Arabidopsis thaliana columbia
gcacgcgtacgtaagcttggatcctctagagcgttcgcccttttttttttttctttttgagaaaagttgttgacttttaaactgaacaaatagtatcaggttcggaaaaccgaaaacattgaaccgggtttggttactgaaaaatatttaatcgtaatataaggaacattcaccaccatcttctacatgaagtttattgtttcctgatggccaagatttaccgtccgattttggatcggcttgaaagtatttgagttcacttctgtcatgttgcacccttcctgtgatcattagacacaaatttgttttggtttttctatgttgctctttctatggtggtgagggctgtattgccttctttctcggattaggccctggagtctaacgaagacttgggaacggagttctgtgcatgtcaggagttctggtttttatttcttgttcaacattttttaagttataaggttggtcc

SEQ ID NO: 117099 - DNA, 507 bp, Arabidopsis thaliana columbia
gaatgtatttaggacaactatagaagagttatgacgtcgcatgcacgcgtacgtaagcttggatcctctagagcggtcgccctttttttttttttttttttgagctctaaaagcaaataattatacataaatcacaaatccatgcagatgcacttaatcgaaactaataaacttaaatcaagtattaaacaatattcagcaacaatcacataaaataaaataaacagccaacggaaaaaaaaaatagttgaaagatttcttcttcttttgtagaacgaaagcagatttataagatagaaacttaatggatcaatgatttaaattagccaaggatgacttcccttcattatctcatccaccacttgccggagctctctcacatgaggactgagacatggtggtttgatggataacctgagaacctgaattgtgggttttgctggaacatgtcgttgttgttcccggttatgtccgagcaagatgttgtcgagacactagacacaaccc

SEQ ID NO: 117100 - DNA, 494 bp, Arabidopsis thaliana columbia
cagctctaatactactcacattagggaaagctcgcacgcctgcaggtaccggtccggaattcccgggtcgacccacgcgtccggctgcgttgggcaaaatcccagacgaagatcagtgattagtcttttgataactcgagccatggcaactggtaaaactgtgaaagacgtctcgcctcatgacttcgtcaaggcttatgcttctcatctcaagcgatctggcaagatcgagcttcccacatggacagacattgcgaagaccgcaaagttgaaggagcttgcaccatatgatcctgattggtactacatcagagctgcatctatggcaaggaacgtttacctgaggggaggacttggtgttggtgctatccgtacaatctatggtggaagcaagaggaacggcagtcgcccacctcactattgcaaaagcagatgtggtattgccagtcacattctccaacagctggagacagtgaacattgctgagctcgaca

SEQ ID NO: 117101 - DNA, 479 bp, Arabidopsis thaliana columbia
  unsure (1)..(479): unsure at all n locations
gcgggcggaaggggggaagcaaaagagaggttttaagagggggnaaaaaacgagaggggggaaaaaagaagggagaagggagagagagaacgaggggaaaagaaggaggagagggaaaggaggggagggaggaggaaggggggaggggaaaaaaaaaaaaggaagaaagtaaagaagaaaggaggagagagagagaatttttttttatagagggaggagagaagagtagtgagaattatttgagaatgggaggaatgtaattgttttaggatgggtgaaagaagggaatgatgtatgggagggagaggggggtgaggggtggtggggggaaaagggtgtgtggtgttgtgagattattgtacgagagggggggagggggggattttgtaggaggtgtagataaaaggatagtagggttgaaaggggtgttagaagggaatggtatgataggtagggatggtggttggggtgagatgtgg

SEQ ID NO: 117102 - DNA, 514 bp, Arabidopsis thaliana columbia
  unsure (1)..(514): unsure at all n locations
gcctgcnggngccgggccgggcctcccgggttgtcccgcgcgggcggggcgcgcggggggggggnnggggcngttgggcgggcgcgggcgcgccgggggccgcgggcgcgggggccccgcgggcggcgcccgcggccgccgcggcggggggccggggcgccccgccgggccccggcgggcggcgccccgggggcgggcttttttttttggggggggggcgggcggggggcgctgcgttngggcgggccttgggcctcgtttgcttgtggcgtctgtgggtcggggttgtgtgccggggttttgttcgtttttgttcgcgtgggggggtggggggtgcgttgcgcgttgtcgctgggccgtgtggcgtggcgggttcccgtgtccgtcccgtcgggtctcttctgggccgtgggtggtcgtgtttgcgtcgcgggtccggtgtgtctgttcgtctggggcgcctggcgttccgccggtgggggggcgggtgggccgttcgggggccggggcgtgt

SEQ ID NO: 117103 - DNA, 442 bp, Arabidopsis thaliana columbia
tggagagaaattaacgggggattaaaccgagacacaagaggaggagaagaggaggggccagcgcgcggcgggacacaatgccgcggacgcgcgaaaacggccggaaaggccgaggcgaggagacacacaaaaaagacaaagcacggcggcgggcgggcgcccgggtttttttttcagggggggaaggaggcgccccccacagccgacgcgaggacagggcccccccgggaggagcagccgacccgcgaacacgcggcgccggccggccggagcggggagcgggggataaatggttgtttatttgttgttgcccccccctccgaggcgggcctaatggggagttggcaccaagaacccgctggttccccacggcgggccggctgcccctgcggggggtgcatgggggggtggcgggcgtggggggggcgccgcgaacgcggct

SEQ ID NO: 117104 - DNA, 430 bp, Arabidopsis thaliana columbia
  unsure (1)..(430): unsure at all n locations
acgccgcggaccggccggaatccgggttgcccagcggcgagcacagnnggaaacngcncgggcaaaagccaacgggcgaggggaacagcaccaagcaagagaaaggaccaaggggcacagggcgaagaaaggacagccacagcgaggcaggaaggacaaaacttttttaaaagggatacataaacggagatgcaatactgaggcatagggtgacaaaccggacgagagggagccaaggaaaggggaacgaaatgattataaaggaagaaggggcagacaaatcctttaaccaaaacggcaaccccgcatgaccgaggcgcgccaaggaagaggcatagccctatagcgagaaaagacaactaataaaaagaccctagaaagaagagggggagatacatccagatgcgcaggagatatgtaaaaagccaaa

SEQ ID NO: 117105 - DNA, 277 bp, Arabidopsis thaliana columbia
  unsure (1)..(277): unsure at all n locations
cacgcggacggaagccnggaagccaaagaggggttggccgggggggggaaaaacccccccaaagaaaagaaggaggagggcggacgggaagaggcgcgacagaggagacacacaaacaacgcgcgaagaaggacggcagcagagagacgagcgcgcgagaccggggcgcaccgcgacaaaccaancacaaccncaaacgaaagaggaaaagggggagcagngaagaaagcgcgggcgcacgaagaaggagaagggctcattaggcaagggggggggc

SEQ ID NO: 117106 - DNA, 492 bp, Arabidopsis thaliana columbia
cgccgcctgcaggaacctgggcggaatttacgggtttgcctacgcgttcgggctttggagagaaaggggttttttgttgggttctgccctgctactacagatagaggagcccctagaatacccaatgacgaaaactacataaaaatttccaacttcaatccgtgaagacaacttacgccaatagacagttcattgaggttctttttcaagcggggcgatgaccatcgaataactcagatcatgtcctaatggtacaccaacgctatgagtataacatactgaggtctttgacctttgatatatgatacaaaagataccctgttcgccgtacttgccagaacgaatcataatcctttaccgcgaactatgtccgttcacgcccccatagaacacagtctttccctactagaggtaagtaataaagacgttccctgtaatgccatgaagatacagcacggcactattacacaccgattgtaaagagaacagaaa

SEQ ID NO: 117107 - DNA, 477 bp, Arabidopsis thaliana columbia
cacgcgtacgtaagcttggatcctctagagcgtttgccctttttttttatatcttttttgagctctaaaagcaaataattatacataaatcacaaatccatgcagatgcacttaatcgaaactaataaacttaaatcaagtattaaacaatattcagcatcaatcacataaaataaaataaacagccaacggattttttaaacgggtgaaagattacttcttcttttgtagaacgaaagcaatttataagatggaaactctatggatcaatgatttaaaatagccaaggatgacttcccttaattatctcattcaacatttgccggaactctctcacatgaggactgaaacttgggggtttaatggaaaaccctgaaacctgaatggggggtttcgcttgaacaatgtgtttgttgtaccccgttatgtcccaacaaggaggtggtaagaaaataaaacaagccgcccccttgaatg

SEQ ID NO: 117108 - DNA, 489 bp, Arabidopsis thaliana columbia
atactctacacacattaggggaagcacgcacgcctgcaggtaaccgggcacgcaatacacgggttcgacccacgcgttcgatcttttgggaaatttggacgctatatttgactactagctctatgctctgacaagaacatttaaccattatctgggagctaggatactgaataaacatatcttgactctcgatggctctactatggactggagattaacgcgttttttgaactggtgaatgagacattgcaagagtgccataggagcacagattcattggctagacctgcaactgatcgggatactatgtcttcacagactcaaatgcccaaagatcatcatccctcgaccgatcacaacactttaagctgagcaattggaaatgaaacaaactggggtttcacactgcaaaccttataattgctgctttacttaaaacctttggaagaaaaatcatcttatagaagctgctcacataatgtggaccct

SEQ ID NO: 117109 - DNA, 468 bp, Arabidopsis thaliana columbia
  unsure (1)..(468): unsure at all n locations
cgcgtacgtaagcttggatcctctagagcggctgccagcagggcgctaagcccacagcagggcagggcgtctgccggggacaggggcgatggcatggcgccgggcgcaggcgcagaagtgggtggctgtccctggaagggagcagttgttgtcctacaatcagtaagccttcgggaggcacaagcgcagtttttttttgggggtgatnacaaagaggtactgcgcatgctgagagaagcacattcagaggccgattcccagcatggggttttctttaggaggaggcccaccttagaccgcggaaggaaaactgcagttagaatgggttccgatagtcgcgaggggcactcctgtttatagccgtttctgcaaatcagagattgagaacctggagtagcaacgcgaacaactttagcgcaaccctccctgtgcgatgaatatgccgcgcctatacccccccttacattc

SEQ ID NO: 117110 - DNA, 453 bp, Arabidopsis thaliana columbia
  unsure (1)..(453): unsure at all n locations
agctactacgcctgcaggtaccggtccgcaatacacgggttgacccacgcgtgcggtgctggaacgcaagctgcaggaaatccaggcgtcgtgcgaagcggatgaggcgatgccgagcaccatgaaagctgaggatcggcatgcaagaaaagagcggtagacgtaccatcgtatcgagcaggtgcggcgcctacggaatcttacattgggccaaagcggacggaggaacggaaggagcagaggagaaactggaaaccctacacccaggagggtgcaacactaggtcgancggcagctaatggccgaggctgagacggactgggccgatctcacataggacgacctgctggctttgattcacgacgcggccacgggcggaggaagagggacgatgtatgccagtcggggaaggcctagattcttggccttgcgcacggaagctcaggtctggct

SEQ ID NO: 117111 - DNA, 509 bp, Arabidopsis thaliana columbia
  unsure (1)..(509): unsure at all n locations
nnnnnnnnnnnnnnnnnnnnnnnnnnnnnnnnnnnnnnnnnnnnnnnnnnnnnnnnnnnnnnnnnnnnnnnnnnagcaaggcgctgggctcacagcagggcggggcgtcggccggggacaggggcgatggcatggcgccgggcgcaggcgcagaagtgggtggctgtccctggaagggagcagttgttgccctccgatcagtaagccttcgggaggcgtcagtgcagctggaacctgtggatgatttcgaagtggtactggcagtgctgagagaagcagagtcggaggccgagtcccaggagggggtgtccgcgaggaggaggtcgacgtaggaccgcggctggagactggcgcgcagaagggccccgggggtggcgaggggcacgctgctgagggcgctgctgcaggtggagatggtggacgtggagagcagcgtggacgactctgccgtcgtgccgccggtggtgtcgctgctgggcgtcacggcgcttacgtcgggcgacagctgg

SEQ ID NO: 117112 - DNA, 510 bp, Arabidopsis thaliana columbia
  unsure (1)..(510): unsure at all n locations
nnnnnnnnnnnnnnnnnnnnnnnnnnnnnnnnnnnnnnnnnnnnnnnnnnnnnnnnnnnnnnnnnnnnnnnnnnccacgcgtccgctggaggaacgcaagctgcaggaaatccaggcgttgtgcgaagcggaggaggtgatgcggtgcacgatggaagctgaggagcggcaagcagaagaagagcggcagaggaacctccgtatcgagcagctgcggcgcctacggcacctcgaagcggcccagcagcgggcggaggagcgggaggagcggcggcggcagctgcagaccctccacgccgggcggttgcaggacgaggtcggccgccagcggctggccgaggcgcagcggcactgggcggctctgacagaggacgacctgcttgcgttggagtcgcaggtggccacggccggggaagaggaacgattcatgcagtacgtggaggcccacatcctcgccctgcgccgggagctgcggctgcctcagcccacatggccccctccactggcagg

SEQ ID NO: 117113 - DNA, 476 bp, Arabidopsis thaliana columbia
cacgcgtacgtaagcttggatcctctagagcggtcgcccgcaaggcgcaaggcttcacagcagggcggggacgaagaccggcgacaggcgctatggcatggcggcaggccgcaggcgcaagagatggccgggtgttcctgaaacgaaacacctggtgaccttcgatcagccagccactccgaaggcacccaagcagttttttcctgtggatgattacaacacagcctctggccagcgctgacagaagcacacttcagaagcccagtccaaggagggccattactatagcaggaggtccaattaggacccttgctgtagactagacctcagaagggccccctctgtatggaggcatacacttcttaggtcacctctgcgcggggacatggtggagcgcatagagtatcggggtcaaattctgcccgtgagcctgccacagcccccaacttttggtgcgttatccgcggtaacataca

SEQ ID NO: 117114 - DNA, 452 bp, Arabidopsis thaliana columbia
tggagagcaacgtcacgcctgcagtgtaccggtccggtattcacgggtcgacccacgcgtccgatgcttgtacgcaagctgaatgtatacgggcgtcttgcgcacacgacggatgggatgcggtgcaccatggaatcttggaccgcttagatatgaaagctgtggaggtacttacgtatacatcaggtgcggcccttacgaatattttcagcgggctgatgctaactggttagcgcgatgagctgagactgaacgtgcagaccctacacgcgggtcgggtatagatcaaagtggggctccacaggttagcacgggctcactgtactgccaggatgtgacagaggaccacctggttgcggtcttatctttaagctctcacggccggtgatgatgaatcatttatagcagctgtgaagaaccatatactatgcctgcgccagtatctcaatgtg

SEQ ID NO: 117115 - DNA, 524 bp, Arabidopsis thaliana columbia
  unsure (1)..(524): unsure at all n locations
ttgnnnnnnnnnnnnnnnnnnnnnnnnnnnnnnnnnnnnnnnnnnnnnnnnnnnnnnnnnnnnnnnnnnnnnnnnnnncttttttttttttttttttttttttttttggaaaaagatgatcatgtgacgttcgatcggctgcgaagcggtgttcgaaggctctcccgagctttgcaaaggctataagccttgggaggctttggggcccccaacgcgatggaacccaaatggaatagtgggattgcagtttacaacacaccctgtgccagcatggcctcagccaccttcacaaatcccgcgatgttcgcaccatcaatataactcacggtgccatctgcacgcttcccatgttggacacatgcggcgtggatgctcttcatgatgccatggagcttctggtccacctccgcgcgtgtccatgtgaggcgcatagcattctggctcatctcaagccctgaagttgccacaccaccagcattgcttgctttcccgggagcatacaggactcccgcagcctcgaaagc

SEQ ID NO: 117116 - DNA, 530 bp, Arabidopsis thaliana columbia
  unsure (1)..(530): unsure at all n locations
atgatactgccnnnnnnnnnnnnnnnnnnnnnnnnnnnnnnnnnnnnnnnnnnnnnnnnnnnnnnnnnnnnnnnnnnnnnnnccacgcgtccgattttttttcgtcacaaacaatgtcaaggtggtcatcgtgccaggagtttttgaagcatgttgagtctcgcaatcctggacaacctgagtttatgcaagctgtgacggaggtgatcgagagcttgtggccgttcattgagaagaatcccaagtacgctgatgctagcttgttggagcgtattgttgagcctgaacgcgttgtcatgttccgagtatgctggatggatgacaagggcgttgtgcaggtcaacaagggctaccgcatccaacacagcatggcgattgggccttacaagggtggccttcgctttcacccctccgtgaacctgtccatcctcaagtttttggcctttgagcaaaccttcaagaatgccctcaccactctcccaatgggcggaggcaagggtggctctgatttcgaccccaagggaaagagt

SEQ ID NO: 117117 - DNA, 520 bp, Arabidopsis thaliana columbia
  unsure (1)..(520): unsure at all n locations
aggtgcacactatagagagctatgacgtcgcacgcacgcgtacgtaagcttggatcctctagagcggtcgccctttttttttttttcttttacacatacaaaatgcataagagcatcagtggaacacatccatcacagatccaagctgctgtgtcaacacatatgccgcaaataagcgagagggtgccagccactgggagcgctanggggccccccacgccacaccacctaaatagcattgcgccatcgcaggccacactacacctgtggccagccaggcctaaccacctcaacaagaggatctgggccctgaccatcaatagaaccaagggccccatgaggcccctcgccatgccggactcatgcagcacccgatgcttttcatgatgccatagaactactggcacatcttcgtgctgcaccatgggaggcacatactattcttgctaaggtcaagccctgaaggtgccacaccatcagcatggcttctttaccgggcaggattcacgactcacgtaac

SEQ ID NO: 117118 - DNA, 484 bp, Arabidopsis thaliana columbia
  unsure (1)..(484): unsure at all n locations
nnnnnnnnnnnnnnnnnnnnnnnnnnnnnnnnnnnnnnnnnnnnnnnnnnnnnnnnnnnnnnnnnnnnnnccacgcgtccgaattttttttcggactaaccaatgttcacactctgtctttcctgccagtaccttttgcatgactccgatgctcggactgcatgacaggcagacagcacgcatggagaagagacctcctgacgcagatcccgatgctgaacatctagaagatcggagctacgcctcatgctaatgcggccgagcgcaatgccctgcctagactccgtgtcatgttccgagtatgctggatggatgacaaggacgttgtgcacgtcaacaagggctaccgcatccaacacaggatggcgattgggccttacaagggtggccttcgctttcacccctccgtgaacctgtncatcctcaactttttggcctttgagcaaacctttaagaatgccctcaccactcctccaatggggcg

SEQ ID NO: 117119 - DNA, 529 bp, Arabidopsis thaliana columbia
  unsure (1)..(529): unsure at all n locations
acgcgaacgnaagctnggatcctctagagcggtttgcctgggttttttataccttacacatacaaaatacatacgagcatcagtggaacacatgcacgacaggagccaggttccttggtcgtcacaaatagtgcaaactaaggaaggtgtgccagggactagggagcgcattagtgcgaggacacggcacaccacctgaccgagcgtttttttcgacgggggccacaaaccagccggaggccgaccaggccaaaaccgccccaacaagagggatcggagccctggacctgcgggcgaaccaagcgccggacgaggacaccacgacaagcacggaatcagggaggacccgcagcaagggcaggggccagagagaaagaacgggcaagaacccccgacaccccagaagggcaaaacaaccaagccgcacaccccagacgagaaagaagggggaagagacacaaatggatcgaaagacgaccttaacaaaagggggcataggcataggaaaataagactgaggggagacaag

SEQ ID NO: 117120 - DNA, 490 bp, Arabidopsis thaliana columbia
cgcctgcaggaaccgggcacgcaatacacgggtttgacccacgcgttcgaatccttatacagacaaactatgttccatctgtgtttactccccgcgcctttagctagtttctggtgcgcagacatgtatgaaaggcagacatccccatggacaaggacctcctggcgcggctcacgatgcagaacctgtcgaggtcctgctctacgggggccactgacgcggtggagggttacgccctgccaagcctcaacttgacgatctgggccctggacagggattcgatcatgtttcgatagaaacccttcgtgcttgccggaccccttcaacacccccattgatggcatggatcaagtgtccctaactcgccactcctctcaatacaaagacgggtaagacactggaggtcatgcgagcggtcagatagagggggggcccactacttgcacgattgatcctagaaaggccctggatcaggagattacctaaacgg

SEQ ID NO: 117121 - DNA, 412 bp, Arabidopsis thaliana columbia
  unsure (1)..(412): unsure at all n locations
acgcgnacgtaagcttggatcctctagagcggttgccctgggtgtttaaatccttagcagcctaaggctcggtgagagagggggcggcacgtttgtaagcaaagtgaggtcccagagacggcaggcgcaaaggcgcggtatcgaggagagaacaagcaatatttcaataattatggagaaggaaacagacaggtctacactccgctaactttttttttttagaggggggaacacaaatagaaaccagcaagtgtgaactgggcgaaatggcccccacaaaaatcgtgaaactgagagacgccagccagctgacctttgtgtagccctatcggatacttgaaaacactcatagggtaatgcggttgattatttgtaataacgccacgcacatgcgcaatgggtgcgctatata

SEQ ID NO: 117122 - DNA, 482 bp, Arabidopsis thaliana columbia
  unsure (1)..(482): unsure at all n locations
cgcgtacgtaagcttggatcctctagagcggttgccctgggggtttaaatctttaggaaaagatgaaaataaagggaaggagggattatgagatgaaataggggtgggaaaatggtggaaataaggggagtaggaggagagaaggggtaataaaaaaattagagaaaaaaaagggggagaatagagaaagttttttttaaggggggganaaggacaaatgggattcgcactggacaaaacgcccccccagtgtagatgccgccaccacaccatcgatgtaagccagctgagatagaactccaaaacagcggttgggatttgtaatctcaacaacgatggttggggcaatagtggcccgtagagagaccgcctaatagcgagaggtgtggcctgggacacaaggggaaggaggaagtcgagagggggttatggaaccagggggaaattcgcaagtacgcgcagacagagcgacacggaaacgt

SEQ ID NO: 117123 - DNA, 416 bp, Arabidopsis thaliana columbia
  unsure (1)..(416): unsure at all n locations
cgccggcaggagccgggcacggaatacacgggctcgacccacgcgtccgagccgcatgcggacacacacgaggaggagcagggcacaccaggagaagtaggggcaccccgaggcagcggaaaacgaggagacgcagagcggacacgggcggagggaccagctggcgccgaacacagagccgcacgtctgggagcttttgtccagggggggccgagnacccaaacgggccccacgggggaggacgagctccaggcagaggcagcagaaggacaaagaacgcaaggagaaagagaggggagaaggagaacacagggacgggcgcgaaaccgcaaccgacgcaagctgaacatggcgaccaaggccgcccccagaaccgcctaacaaaacgagaagggagacaagacgcgagaccccaa

SEQ ID NO: 117124 - DNA, 402 bp, Arabidopsis thaliana columbia
gcgtcgtaagcttggatcctctagagcggtcgccgggttttaatccctataaggaataaaatatgaaatcaggaaggtaagacatatcgtattcattcattgcatagatatgggagggtcacacacagggcacaaaaataaagatcttgaataaacgggaatgaatcattataactttttttaaaggggtgacataggcatgccgttgatcaccattataatcatataatacccagggcgtgcgataattgagcaacaccggaagtgctgaattgaacatcaaaaaggagggattttggatttttttatatacatgacagtggggaaaatcaaaaacctgtgacgaatcccaaagctttagtgagggagcgtcgggaagaacagagtgagtttcgggcgggg

SEQ ID NO: 117125 - DNA, 530 bp, Arabidopsis thaliana columbia
tcgacacaactaggagaagctaccacgcctgcaggtgccgggcacggaatacacgggttgacccacgcgttcggtccatgaaacgagtaacaggatatagtctcagacggaagttctagcgtgaggaggtgaccataaggatcatagcaccgctctataaggacagcaatcagcacagagacttgacatcgtgaacaccgttcaagacaaacgacaccactttttgtaaaggggcggcagcaaagatctcctcttgctactactattgggatcattcgactaactctgctcgctgcgaaattggacgctaataatatacttgtatcttaacacacctccgatcgttggcagctcacggctcacagcaccttttaccctcgcgcaatactaaaaacccgacgtattcagcacaggacacggtctgaatggataagagaccaatatccatggttgctcatggattggggcatggcgcttatttcttcagactggtacagtgtggactattaaaacttgccgctgtcttttat

SEQ ID NO: 117126 - DNA, 124 bp, Arabidopsis thaliana columbia
atataatatggatacgtcgccgcgcacgagagaatggtccctttgggcgcccagaccaggagtggcatagacgatccgtacattgagtatggcgggttttgtccgtagagtacggcccaggtgt

SEQ ID NO: 117127 - DNA, 472 bp, Arabidopsis thaliana columbia
  unsure (1)..(472): unsure at all n locations
gaggaaggcagaggaaaggaggggggagtgttcttccggttactcgactcatgtaaggaaagctaacacgcctgcaggtaccggaccggaattcccgggtcgacccacgcntggcgaactcgggttcaaataaaaacccttaatcaaatcggaaaacgttttacaaagctagcgcagttttttataactgatacagggaggaaccatattctagttctctggattggaaggagagagagaataattgtgcaggggactagtcgggtttctccataaaaggtgggtaattcaagttgcgatctccattgattgatacgaaagaagatctaaaccttattatgacctgcttaatgacaatgaagataacctcctttcgcctgaagactggagattcacaacaggaagtctgagcaatatgggggacggcagggagatcgtcagcaaagactatcgacaagacactcaatgtcca

SEQ ID NO: 117128 - DNA, 494 bp, Arabidopsis thaliana columbia
ttttgccatcccactcactattggaggacgacccctgcaggaccggccggaattccgggtttcccagcggggccacccgtcgacacaattggaatggacattgcacaagatacaaaccgtcttacacttcaccggaaaggagataggcccgacttttaccggaatacgcagcaaactcacaccaaacgcagccaactgaaccatctttgttctagaggtggtccaggaagctttaaaacgttcgatgaaagtgacttcaagcttgtgtctcacagaagaggattgtttcaatctgatgcagctcttttagacaatcaagagactaagtcttatgtcctcaagagtttgaatagtgatgggtctactttgtttaaagactttggtgactccatggtaaaaatggagtcggattggagtttaacggcgcacgttggggaagttcgcaagaagtgcataatggttaagtgtaggatatcgtacttcacatattggtg

SEQ ID NO: 117129 - DNA, 444 bp, Arabidopsis thaliana columbia
  unsure (1)..(444): unsure at all n locations
gcctgcaggtaccggnccggaattcacgggtctacccacgcgtgggaaaacccgttcggtgaaagacaattgagatgagcgagggaagaagaagatagtgatgaggacatctacgaaggatggcatgagaaagcgtttttttggcgggaaagaaggggaataggtggccaccaactctgattattaacaagaattagtagtttacgaggaggagcccccaacgaacggtggggagaaggagaaacgtttttctgaagaggaagagctcggggaaggagcgtgtttttgagatgagaaggagagagagaggcaaagacggggtggatgcgatgccaaggagggagtagtagaggagggagaaggggagggtagggggaggtgggaggcaggggggccgggaggagggggggatggggaaagagcgaggaaggcgagggtggggag

SEQ ID NO: 117130 - DNA, 512 bp, Arabidopsis thaliana columbia
  unsure (1)..(512): unsure at all n locations
gactcactacttggaaagctggtacgcctgcaggtaccggtccggaattcccgggtcgatccacgcgtccggtattatctgtaaaaacatagaataatgttcatattagcaacggtacttgcacttgctgaggattgggaacagcattgctaaaagattactgaattaacacacagcataggtagtcatactttaatgagcagctgatgctgagcaacagcaccttattatgcattggttgcacacagctataccattattctgacaaaatgaatgagcactcgaagctgacacagaagtattacttccatgactactgcatcatgaagagcttgttcatactgcaaatatacttactatcaaacgnggtgtgcatctcgttcctattgataggagcactctacgatccatatacagacttgatcagaggatctactaaccatcatacagcgtggctcgttctgtgcagtagaagatgatagcatatggaatttacactgtgaatactccat

SEQ ID NO: 117131 - DNA, 543 bp, Arabidopsis thaliana columbia
cgcctcactattgggaaagctggaccgcctgcaggtaccggtccggaattcccgggtcgtcccacgcgtccggtttgtcttaacgtacaagataattcgaaaggtagacgtagacgttggatacttatttggtaggctcttaagaatcttaggtgtatctctttagttcgaaggctagattcagaatctctgtagattcattagtagcttttcctgtgtgatcgtcgtgttgtatgtatatagatcgaattgattctagctggtgaaaggtgaagctctgtgttgaatatgaagaaacacactttggatgagtcctgaaagtcattgatgctggctcctcctccaccgcttgttgctccctctcacggatctcgatcaagaaagatcgatggagacagcgtaaccaatgatctgatcagggagctgctgggaccagaggcgcaccatcgacgaggatcatcggtatctctgctatcaaggcttgcacctactgtgcagatgctgcgaatgctctgcgaattaggactcccgtcggcgtggaaa

SEQ ID NO: 117132 - DNA, 540 bp, Arabidopsis thaliana columbia
  unsure (1)..(540): unsure at all n locations
cctgcaggtaccggnccggaattnaggggttttttcaggcggggggaaaggcatnggatgaaaagaattagccggtcataggggtgtagtggggggagttataatggtgatgagtagtaagataagattgtaaagttttgattgtaaatgtattgagtaatgggggttggattggtgtgaagagggaagtggaagagggtttttttttttttggggggttgaggagaagagagaggttgtggggattatgggaaggggggaagaggggggttggaggtgaggggagagttgggaagggagagtggagggagtgtaggtgggaggagagtgagtagatagtaggggaagtggttagtgtataggagttgagtagagttaggtatagaggtaggggggtgatagtgagatggtgttaagtagtggagtgagaatgtggggcgtgtagtggtgaagagttgggtgaggagagagaggttgagtgagttaaggagttgaggtgaggagggggaaagtgggtcatggtttgggggggggaggagt

SEQ ID NO: 117133 - DNA, 235 bp, Arabidopsis thaliana columbia
ctgcggaaccgggccggaattcccggggcgtttcacgcgggggatagtatccttttgttcttccagatttgcttgcagtgggagggtcagagccgtggccttgtttccagatccggacgtaaaatggtttagcgttgttaattaacgatggttggcgggatgagcgtgttcgtgggtgtggagatgtgggagtaaggcggagcgggggagcatttttttttactagagggggggg

SEQ ID NO: 117134 - DNA, 329 bp, Arabidopsis thaliana columbia
cctgcaggtaccggtccggaatacccgggtcgtcccacgcgtccgaaaaacaccttcttacactaccaaaatattcatccacattcgtagtactaatcccctatctgtcttacagatccgaactcaaggccctatcaggtacacaaatcaatcgcgcacacacgacaggcaccatcaccgcttcaagatagttcaaccagctccaacagcaattttcctattttcagagggggggaaccacgcaccccgcttgataaagacattcatagaaaaactcccccacgtgtgtccttgtattgacacgaaacccaccgcctctttctatagca

SEQ ID NO: 117135 - DNA, 501 bp, Arabidopsis thaliana columbia
actatagaagattatgacgtcgcctgcacgcgtacgtaagcttggatcctctagagcggccgccctttttttttttctttttttttttttttttaacgtcaaaagttctttttttaatagattaaaaaagaggactttgttctttgattctttaattgttacaatacaacagcttatcggatccatcagtctgatcataaccatctaaaaataaatcatgttataccaactaatcttaaggtaatttagtcgcctctgtggattcataagcagcatctgctgaagaagtatctatgacgttgagacccaactcctggttttgatcccatgacctctcgtactcttcaaatgtgagctgatggtcatctctgatatcatctgttactggtgcaataaaggaatgtgctaatttatcatcaagactcaatgtccacggctgctcaaagcttaggagcttaatgagcctggctacaaactctctccatttgttcaacttactct

SEQ ID NO: 117136 - DNA, 478 bp, Arabidopsis thaliana columbia
  unsure (1)..(478): unsure at all n locations
acgactcactatttggaaagctgagccgcctgcaggtaccggtccggaattcccgggtcgaccctacgcgggcggccaaagctagattagattccctctctatcgattcttaattccttgctcctatgctcgtttctctaccggagacataacctctctgtctctgttatgcaccttgcctagatcgagagcgcatattcttggaatcagctgactctgcggtcatctgattaattgggattgagtaggagaaactttggaggtgatggacaacaaaaaagatcatgatcttgaggttagatcacaggttgaagctggttccgccgatcttttctttgtcgctcacctctatgnggttgacagcatgtacatgccctgccaagaagatgaaacanacatattcctattgaccttaatcactgactcaataaaggtcttaatatctgcattagattgccgcaattgcgccgaaaggaat

SEQ ID NO: 117137 - DNA, 499 bp, Arabidopsis thaliana columbia
  unsure (1)..(499): unsure at all n locations
ctatagaagagttatgacgtcgactgcacgcgtacgtaagcttggatcctctagagcgtccgcccttttttttttttttttttttttttttttttttttttttttttttggacattgaaatgtatctattgttttcaactatcgtgtaggttttccttcaggttgtatctcctcaataggagacatttctccttgtatatcactatcaacatctgaacctacatcatctaaattcaattcatcatcatcatcctcatcatcagctgtagctatagctgatgcaacggatgtagctgatgttgtgttagtggatggagatggattggtttgggatgtagatgttgatcgnnancaccccggcgntatcctaaaacaaacaccatttccccctgattggccaaccgagtagaggtacgaccgagcctgaccatttgatcattcatcccaacgttactggatttgtcttattacataccctgatcgatttcatactcgctcg

SEQ ID NO: 117138 - DNA, 476 bp, Arabidopsis thaliana columbia
cacgcgtacgtaagcttggatcctctagagcgtccgccctttggtttattcttttttttttttttttttttttcttgtcttgtgtgcctgaaagaagaaatcaggatgagggcccttacccgaaatcatcataccaccaatttgcaaatagcattggagccgtgaaatccccagctgcccttcaagagaacgaatttctctttttgcggggtggggaacaacgaactaaaaggcagcccggagaggcgggaataaaaggagccccacaggaacaaaccaagcggggggaaaaaaaggggtaatcttctgtcagaggccaaagcgaacaaaaacccgacctgctttttttgggatcggcaacgatggggagtgctgcgaccgtttagcgagaaagtcgccgcgtaaaaacacacaaaaatgtgtaagagcaaatagagaggcggaggagatacctagctggcgtggctgtaaagtag

SEQ ID NO: 117139 - DNA, 512 bp, Arabidopsis thaliana columbia
cctgcaggtaccggtccggaattcccgggtcgtcccacgcgtgcgagcaaaccctaggtcatggatgggatgtacaatcaagacagagagcggaagtgcgcctattccgtcgtacggtggtgatggatacggcagaaggttttgttatggaggaggagatggtggatatccccgacgctgtgcataagcaggttggtagatagagggtgctacggaaaccgtggaggccagaggataaaaaatcgatcttagtagaggacgcggccctagggcgaagagaaaataggaaaggaacttagggatgaaaccaagtaccaaatcgctagaatgggcacgggcaaacgcaagagaagagaacattggaatgagagaaggagagaaggagagttgtgaagaggacgtgcaagcgatctggcgatgggaccgcggggcgggagattggtcggcgagctgaggcgtaggttggcggacaccttcggggttaactgagatcgtggagagtatagggggaa

SEQ ID NO: 117140 - DNA, 468 bp, Arabidopsis thaliana columbia
ctatagaagattatgaggtcgactgcacgcgtacgtaagcttggatcctctagagcttccgccctttttttattcctttttttttttagaaaggcaaatttgtttattttctactcaaaagttcaaaacaaaaacataatgaggcggagatgtaagaaaaaaaacatataaggagaatataggtccaggaaaaaataaaaacatgtaaaacatagtttctctctacaagggtgggactgacaaaagaataacaacaccttgaaattgctttagagaaagaagagatcaacggctgagattttggcgacaaggtttcaatgggattttgacagaggaaaagagatagggggcgaactataaggaaggtgaggaagcccatgggttccagtgccggagcaagaattgcaattgggcataagcagagagcagcgcaatgctaaagcatatttgaaacggggcccccttaaa

SEQ ID NO: 117141 - DNA, 401 bp, Arabidopsis thaliana columbia
ctgcacgcgtacgtaagcttggatcctctagagcttccggcctttgttaattcctttttttttttttttttttttccaagaaaggaaatcgtggtcgaattttttcttttgtgataaataaagcatgacatgtgtttacaatttgacattgcagttggacaatacatatgactccacacaacagacgtaagggaattagtccttagatgggcgataaaacaaggctccgaggtctgtatgatggaaaatatgcttgaagtaggcagtggggaggtgtcgagcgaactggccgaagcatgaccgagggaaactgcatggagtccctggggaggcattgaagcaccaaggtgtttagaagaaggtggggcccctggccggtggaactcgttggggtaaaagcg

SEQ ID NO: 117142 - DNA, 458 bp, Arabidopsis thaliana columbia
  unsure (1)..(458): unsure at all n locations
cgactcactattgggaaagctggactgcctgcaggtaccggtccggaattcccgggtcgtcccacgcgtccgcccacgcgtccgcacacaattgggaatggacattgtccacagatcacaaaccgtctctacaacttcaccggaaaaggagatagtgacccgaacttagacacggaatacngcnnagtctaaactcagaaggaaaatatggcnagagcccaacttggaaataaacccccccccagcagganaagaatttttttttttttttttttttgtcggtagcggccgaacgcaccaacaaccaaaaaaaagttgctaggcgcgtggctgggcggccaaccgccgccaagggagtaaaacaagaaactaatacagtattttttcggttctgtgttggaggggcagtctagcagtaaaataacgacatactttaacatccagtcggtgctctcttg

SEQ ID NO: 117143 - DNA, 398 bp, Arabidopsis thaliana columbia
  unsure (1)..(398): unsure at all n locations
actatagagatcnatggcgtcgactgcacgcgtacgtaagcttggatcctctagagctgccgccctttttttattctttttttatgataaactatactccaagaaaaaaaaacgcaaacccattctctctttatgggactaatataacatgacctattttatgatttaacaacccttgggacaccacatgtaacaccacacaacattctgagaagagtttttttttcgtaggggaaaaccggccccgaagaacctctgtcttaaaatactacctcaaccaaccatagtgcgcttctacgcaaactcataccaaaaggcccgttagaacgccagtccaacccacggataccatggaagaacccgacgaccttaaggaaaggcgacccggcgtcatcaat

SEQ ID NO: 117144 - DNA, 430 bp, Arabidopsis thaliana columbia
gactcactatttggaagagctggaccgcctgcaggtaccggtccggaattcccgggtcgatccacgcgtccgctcacgcctgcgcacacaataagggaatggacatcgcccacagatcacaacccgtctttgcaacttcgccggcaatggagatagagacctgaactcagacacggaatacgcagtcaaactcacaggaacatgcaagtcttcagcttccacatcttatgtacacatggacccaggaagctttaccacgttcgaagacagtgacttcacgctcgagcctgacagaagatgattgacccaatctagatgctgatctgtaagagcatctagatactatgttttatgtgataaagacgacgaatagggatggggtctactctctttaaagactctggagaatccatggaaagaatgggtccga

SEQ ID NO: 117145 - DNA, 549 bp, Arabidopsis thaliana columbia
agctctccacgactcactatatggaaagctggtacgcctgcaggtaccggtccggaattcccgggtcgacccacgcgtccgggaggatctgcttcagatctaaaggcaatcaaagagaagaagaagaaagctaagcgttcccgcaaaaagcagcttgttcaagaagaggaacgagtaaagggaaaagtcagcatgaaggtgtacttgtcatacatgggtgctgcatataaaggggctctgattcctcttattatactcgcacaagctgctttccaatttcttcagattgctagtaattggtggatggcttgggcaaatcctcaaactgaaggtgacgaatctaaagtggatcctactctgcttctcatcgtttatacggctttagctttcgggagctctgtgttcatatttgttcgagctgctctggttgcaacttttggtcttgcagctgcacagaaactgttcttaaatatgctcagaagtgtgttccgagcgccaatgtcattctttgattccactcctgcaggaagaattttgaatcgggtttct

SEQ ID NO: 117146 - DNA, 531 bp, Arabidopsis thaliana columbia
ctactgcgactcactatttggaaagctggaccgcctgcaggtaccggtccggaattcccgggtcgacccacgcgtccgcgaagtccttggaagacgccgggtgacactgaggaagactgtggtcaatccatagggcccatcaggcagaccatggaacggatctgacagcgtcaagcacttgggtccattctctggtgaatgaccgatctaccttaccggatagtatcctttagactactgatgggacaccggccgactctcatatgacctggatacattctcatggatcggataactagaatgaatccacagcatgtggcccatgctgggagccctatgctgtatggttcgtgagctcctgaattcaaacggagcctagatctgagaggcggctcggttcaaggtcggttcacagatcttcatcaatggacgactccaatacttgcgaaaccgtatctaggttcacgctcagagcatgtttggcatttgggccacacaagttaattggatgggagccgttgaatggtacat

SEQ ID NO: 117147 - DNA, 538 bp, Arabidopsis thaliana columbia
gcacgcgtacgtaagcttggatcctctagagtttccggcctttttttaacccttttttttaatgaacaaaacggtagcgtattaaacagtctgaagaatttatttatatatgttttacaacaaaatggtaaaaatatgtgaatctaaaatgaacctagaagtatgaagagaacacatgaggttacgccggggtcagtaaagctatatcttttttttgacgggcggtgaaaacttagaaacgtgtggagattggtgtataaatgaatagccttcgactaggcggaaagattgtaagaactccgcgagcaaaagtgttggtgtgtgacattggggagacagattccatggagggtcagctgtgtgttgggggagaaattggtggtggtgtaatggagagtatgggcccgaagagtgttcttgtgctgtttgtggttggtggttggaacccgcgttcatgtgggtggtatggggaacagtgggacgcggtggcgtggggttgtcaggggaagccggtgagtaatggacacggcgctgtggg

SEQ ID NO: 117148 - DNA, 534 bp, Arabidopsis thaliana columbia
  unsure (1)..(534): unsure at all n locations
gacccctangtggagggtggacgcctgcggtaccggtccggaattcccgggtcgtttcacgcgtgcgattatatctttttgccctaccaaattttcttcgaacgtgagctgagatcccttgcttcttgcagatcgatgttgagatctgtgtggtctgtaagactgggtctcaagcgaacctggggcgctggagatgtgcaagaggtcgacgtgggaaatgtgtctttcgagggggggctgggaaaagctgggcacggtggatggagggatgccatatccccggcccgtggacaagccgcggtgcgcggcggtggctggtgaggcgtggggtgcttgggcgggggtggcgtggggagccttaccgcggggaccgtcgtgtcctcgggggtgtggcgcgggggcgcggcggcgtttcccgtctttagtccaggcggcggctgcccgcggagccgggtctcccgtattcgttcgctctgccggtcccgcgcctcgggctgagcgggggagcgcgcggccgggtggcggtctctctag

SEQ ID NO: 117149 - DNA, 544 bp, Arabidopsis thaliana columbia
ctcactatttggaaggctggaccgcctgcaggtaccggtccggaattcccgggtcgttccacgcgtccgaaaaaaccttatttaactatcgcaacttcaaaatatagtacctaaaatcaaacgatcgtttcagaacgaaggaggaacaataagatcaatcagagtggttcgaactgggaacaactgacaactacgatacttacaatattaacacctttagtttcttttataaaagcattacttatagaagactggacactataacagtaatgactaccatgatgggtcaagtcttggagaaccgaggaacgattttgtaatacacacacaccgggtggacctgcaagggttgtgatcagtgcgaactcgcgcagctgctgttagctcaggtttccgggtctcaatttgtggcgtgctctgccggattgatacacatcagacagtatgatacctgatacccgagcctcgaagatgtccatacaccagcgtgctgaaacagcgtatgcagtggggaggtacgaggcgatatgtgtagagacatttg

SEQ ID NO: 117150 - DNA, 438 bp, Arabidopsis thaliana columbia
gtcacctgcacgcgtacgtaagcttggatcctctagagctggccgcccttttttattcttttttttttttttttcgagtatttctcctatttcgtgtaagttctctatttttggtttttggggacacgaaaaacccaaggggggcgtcagaaatttattaaaaaagcacaagagacgcgggaggaaaagcctcccaagggttttttttaaagagggtttgtccctggggtggaccacggagcagggggtagtaaccgtaattttacccccgggaaaagaacaaaaaaatacgtggggtgggagtcctataagctccggagaaactgattttttttgggccggaaaagctggcgccgccatgggtgagcccccccaggaggggaagacccagaggggggaacgaagatgtgcaccattggaggccatcaaaaggggggt

SEQ ID NO: 117151 - DNA, 405 bp, Arabidopsis thaliana columbia
  unsure (1)..(405): unsure at all n locations
cagcctcccccccagcgccagggcataggntagcactgctcaagtctactcgactcactattgggaaggctgacccgcctgcaggagccggaccggaattaccgggtcttacccacacgtgggaccacccgtccggacaaaccacattatccatacctaaagaggcttaccagggatctctttagcccagaaggccatcagcgacgactatcgctccccaacgcacaatctagaagcatccacagcacagacccaagcctccgactcagcgcgcgctttttttgatcaagcgttgagcagcgcccatcaatagtatcactcaaaatgcacaggtgagactagcagaaacatgtcctctaggacctccacggagcgcatgctacaggaatcgcccaccccccccag

SEQ ID NO: 117152 - DNA, 529 bp, Arabidopsis thaliana columbia
  unsure (1)..(529): unsure at all n locations
cactgcaggatactggtcatggaattagaagggattttttcaacagggtgggtgtagtatgccttaagagtataaaagattaggtgtatgtttaaagtgtgatgaatgtgacgtgatagttatcgaatgatgtgccgcgcgttagttaggatatgagatatgaagggagactggagatttgctttacaagcaggatgtagtgattactgaggtataagtagagctttggtggctgagaaaaataggagggttttttctttttgacgctttttaagggcgagaaaggatgtgttatgtgagtgttattatgttattttgtttctatgtataagacattttgtggtatatgttttctttctagcatggtgttgtgtcaatttatgctnctacgacgtagtgtggtgaggattgtgttagagggaggtgtgtcctagtaattagatagttgtatttatgtggtgagtagatcagagctgtattttgtagtttttatatgttgggttgtgtaatatacggtgatgtgttatgt

SEQ ID NO: 117153 - DNA, 557 bp, Arabidopsis thaliana columbia
cctgcaggtaccggtccggaattcccgggtcttccacgcggggggagagactataggaaaaaaagaaatgggaataaagagcaagagagagggaaagggacaaactaggaggcaaggagaatctcttaagagaagaaatgagtgtaatatttttagtaagaagaaggtatggacagagctcccctcgaaggatgttagagagggaatttcctatttttggggggtggagcaaacccaagaggtgggaggggaaagaatcgataggtgacttcttattggggcgatgccccctaagagggaaatgcagtgtactgagtgtgaggaagaggacaaaccgggaaggtgaaagaggagagtgggaggtggaaactgtggtatggggtgggaggctgttggggaatgaatgatgatgggaagaagtgggtgtaggagagaagagaactgggggggggagggggggtgtgggggtttggaaggcgaggaaggggagggtgggaagatggggggacagggaggaggtgggtggggacggaggggtgggaaggggggctgagaat

SEQ ID NO: 117154 - DNA, 372 bp, Arabidopsis thaliana columbia
tcactaatggaggctggacgcctgcaggtaccggtccggaattcccgggtcgatcccacgcgtccgctcacgcctgattggaaggagcatttgacagtgaaccatacagctgtagaacgaaagctcgaggtcataactatccagtattgattccaagagagctactttagagctatttgacactgagaagaagcccaacagcttccacccctatatatcgtgggtctccctgatggacaacggctaagacatattggttgaaacctaagatctggcaaaggtgttgagaagttttaagagcttacttatcaagtatgcgtaagagacattactacctgaacagcatcttcatagataatccggagaatcctt

SEQ ID NO: 117155 - DNA, 357 bp, Arabidopsis thaliana columbia
taaagaggacggcccgatgggcgccgcgacacaccgccggaggtgctaatgagacgggggtcacgatttttagttatgttctcgtgttgcacgatagtggcgcctcgaaatacctttcgctaacagaaagaaaacaatcagagtttgttgtcacaatacttatatccctactgtggagcagggtcccgacaagtaattcttgtagtccgcccatgtaccgcaagagcctgtaatcccgtcccggtacaagcagtgagtagtttaacgaggccacttgcataagtccggcgtcgcgagatgtgcggtccgccaggctcaactatatatatttcataccgccccgcggcgcgggatgaa

SEQ ID NO: 117156 - DNA, 541 bp, Arabidopsis thaliana columbia
gactcactattgggaaagctggaccgcctgcaggtaccggtccggaattcccgggtcgatccacgcgtccgcccacggccttcgaggacgcgtgggctgacattggcaaaccgggctggatccctcgtgttctcgggtatgatcaggagtagcatatacgaccgggaagcacaaaggcacgctcactggtccgtgattgatccacatgacgcccttagatgcttttgttttatgtgggtatacttgacatcactcataatgtcctggatactgcatcatcgattgcatgttgagaatgattcttgagcgtgggaccaaggctgtgtacactcatctgtatggtaagatcccgacctaatatctatgggcccttttatatatgagcgggctcagctaattattctttggatattgtcttcaattgtacgatccagatgctttcgaacctgtatcaagttttacgttagatcttgatggacctttggggcagacgacatatttggaattgaatccgatgaattctagcattaaaaaagaaaga

SEQ ID NO: 117157 - DNA, 545 bp, Arabidopsis thaliana columbia
cgactcactatttggaaagctggaccgcctgcaggtaccggtccggaattcccgggtcgacccacgcgtccgattcattcttggtactgtacaccagctcaatctattagttaagacttagagatcgtaacagttaccggatctgatcgtaaagatctgttggacacatatgaataaatcacctctatatcattctctgataacgattattaacttgcgactgctgcactttatggagatagggtgacggacttgcgcatgtcaaagaactatccaaacctttgactttccatatgcactctagagagcagtttgaccatagtaagaacttatcttgtgattgttgctacagagatgacagtattccctgaagctagtctataaagcaaaatggaacccattcatgactgttcgagatctgtccggtacacgttaaggaactaatgttagtttggacttgactccgaatacgtagcacctcgccccaattggaccgtattaccaggatatttgcctaacctgatgatgacacttctgaagataca

SEQ ID NO: 117158 - DNA, 129 bp, Arabidopsis thaliana columbia
ctgcaggaaccggaccggaatcccgggccgttccacgcggcgcgaaaacccactaaaaagcctacaccacccgccaccgagcgagcgccacgacgacgtcgccccacagccaccacagcgaacgcacca

SEQ ID NO: 117159 - DNA, 433 bp, Arabidopsis thaliana columbia
acgcgtacgtaagcttggatcctctagagcttccgcccttttttttaatccttttttttttttaaaaccatatacctttatcacatataagtttgtaatcaagatgatagttcgatttatctccttaaattgaggaaacctgattaattctcgctgagataaaaaccaacagtctccatcccatataataatgtccgcagggcgcccttcactacttcttcacggattaaacccaagccctctcaccttcctctttttcgattacccttatgggggaggtacctccaaaagcttcttggagccgtgtatgttaacagagcaagccccttgaacggcggcgactttgggtaaaaaaaaagaaaaatgaactgctcttaagggttgcggtcaagggaccaaattgggattccttttaggcggcgtgaagaaaccg

SEQ ID NO: 117160 - DNA, 475 bp, Arabidopsis thaliana columbia
  unsure (1)..(475): unsure at all n locations
ctatagnagagttatgacgtcgcctgcacgcgtacgtaagcttggatcctctagagcggccgccctttttttttttttttctcaacagattatttattctcatcggcaaaatatttattccccaaaacaccaacacctttttcgatagagaaaactccttaactaaatatgcattcccactcaaaaccctggaaaagagagcctcaaaatctttgggtgtttttgcggcgtgggatttaaacaaaacggatcaatagctcccccctctccttggtttgttgcttgtctatgatgtcctctcatgcgattttccaacacgacgtcgctactgattgctgcgatggacttcccggacgatcacccttaaccaccttacagaacgacccacggaggaggacaaggaaccggtacagcgggagcggctagggtttaacccgtgggtcacttggagatcaggaatccgatcggacttcaa

SEQ ID NO: 117161 - DNA, 490 bp, Arabidopsis thaliana columbia
  unsure (1)..(490): unsure at all n locations
ctatagnagagtctatgacgtcgcatgcacgcgtacgtaagcttggatcctctagagcggccgccctttttttttttttttttcaacagattatttattctcatcggcaaaatatatatccccaaaacactatcatcttttttgatagagaaaaatccttaactaaatatccattcccactcaaaaccctaagaaaagagagcctcaaaatctttgagtgttttgcgtcgtcggttttgaacaaaaaggttcaataactctcctctctccttgtgttctttcttgcctattatctcctctcatcccattttcccaacacgacggcgttacagattccaccgatggacttcccggacgatcacccttaaccaccttacaaaccgacgacgggaggaggacaaggaaccggcacagccgggccggctagggttaacccgtggttcacttggagatcaggatccgaatcggacttcaatgggtctcggttaac

SEQ ID NO: 117162 - DNA, 450 bp, Arabidopsis thaliana columbia
  unsure (1)..(450): unsure at all n locations
nnnnnnnnnnnnnnnnnnnnnnnnnnnnnnnnnnnnnnnnnnnnnnnnnnnnnnnnnnnnnnnnnnnnnnccacgcgtccgattgcgatgctctaatacccgacttctttcgtcagctttacaagctgtgttatagcatgctcaagtcttctaaaatatcgaatatatttctatctcaaatgttcatcaacatttgagtaacagaggttgtaaacgtcttcctaaacgttgtagagactgatgtatgatacgtgcttgtcttcaatggaacgaacacggataatcacaaggacacagatacgacttactgctaagtgatgatctcagagctagtctcatgtctttcatatctctacgtacctaaacaccacgaccggcgttgcttagatgagctgtgcttgacccacgactgagatcgtcgaagccggctaactgagagtccgatatgct

SEQ ID NO: 117163 - DNA, 488 bp, Arabidopsis thaliana columbia
  unsure (1)..(488): unsure at all n locations
ctatagnagagtctatgacgtcgcctgcacgcgtacgtaagcttggatcctctagagcggccgccctttttttttttttttttttttttttttttttttttttttttttttttttttttttttttttttttttttttttttttttttttttggggacaaaaccggaattggttaaagaattgggcccttaaaccaaacccgggaaaaaaaaaaaaaagccctttccccgatttgggggtccccccaaaaaaccaatttgggggaaattaaaccttaagggtaatggtccccaatattattatgggggggggaagggccagccccccctggggttattggaaaaaaaaaaaaacccctggggctctttttggggaagcccaacgaattttttttggggggcaactttggggttttattaacccggcttcccaaaaaccccgcgggagaaaccttaaacttttcgcaaaagggaacccctttttgggaac

SEQ ID NO: 117164 - DNA, 448 bp, Arabidopsis thaliana columbia
  unsure (1)..(448): unsure at all n locations
gcacgcgaacgtaagctcggatgctgtagattttgncgagcttttttatttcttttggagaaagggaatttatggaccgatactaatattgtactattcaacattggggaattgtggaggattgaatggtatgtgaatgagagtatgggaaagaatagggggatctgtatggagtggaaggtgaaccgcatggtttgactgataagtttttttttttttacaggggtgtattgcaggcttggagagagtaatgatgatatggaggtgaggtgaggctgctgataggttgtgcagggatggggtggagaggaggtaggtagttgagggaaaagtgatgttggaaagtggggagtgacttagggagcaggcgttaagtgtatattaaaattgtgagtaggcgggtgagatgagtgaggtcgggcagggtttaagtggtgagagtgtgagg

SEQ ID NO: 117165 - DNA, 454 bp, Arabidopsis thaliana columbia
  unsure (1)..(454): unsure at all n locations
gcacgcgtacgaagctgggatcctntagagttggcggcttttttaattcctttaaagaaagtaaatctattgaccagactattattatatatacacaagggtacgttataagcatttatggaatgtaattagatgtgaaccacaaagagacttttgacatgaaagtggatgctgccttgagataggtttttttttagagggggaggggagtgacgggaagaagaatgtgagattggccgtctaatgttggggggaggcgtgggcaatttgaatgaagaaaagggagggggggggaggacagggggcgtatggaactttaggacctgtggggggaaggagtgggggaacaaacttgtgtggggtgggagatggacaggtgatagatgaaatggggggagggaagtgctgggtatggggaaagcgagaaatatgatggaggagaaggggcggggga

SEQ ID NO: 117166 - DNA, 502 bp, Arabidopsis thaliana columbia
cctgcaggtaccggtccggaattcccgggtcgttccacgcgtccgcccacgcgtccgcaaataaacattcttatacctccactcctcctctgtctgattccttcacccaattcttgtctcgtttccatcaatccattgtctttgattccagaggttcttggtttatttggatgtggtgattatggatatggattcgtggttattgctgagaagggcatgtgtgctttcttttctccttggctattgttccgtgtatcaaagcctttgtgttgatgatgctcatgatgatccaaaaccaggcgtgactttgcaagtagatgcttctaatggacgtggaccacccattcctggaacgctctttgagattttctcgcggagatcaaccatgctggtgccaggagcatattggcccaactcttcaaccccagagggtgtgacctctgacgggcaaacacaaccctgtatattcggccatggcacaactgttcgtgatcattcaatc

SEQ ID NO: 117167 - DNA, 420 bp, Arabidopsis thaliana columbia
actatagaagttttggagtcactgcacgcgtacgtaagcttggatcctctagagttgccgcccttttttaatcttttttttttttttgcataaaagaccttttactatatagaagttatgggtttcaaacttcaacgtacatcagaaaagaatcggatcaaaagaaagcaaatgaaaaacaagcaaaaggatccaaagagttgataactcgggttttttttacatgcggtgcaaacaaatgatcataattggtgtgatgaacgaaccacgaccggtgactacgccgaatcaagaaaaacaacaaactggtttgctggttcacttggctgtggcacagaacttgtttttttcgaggcttgagaacatggcgcggagtggatctccccccttgacaaacgggcagcggtacttgggctcaaa

SEQ ID NO: 117168 - DNA, 491 bp, Arabidopsis thaliana columbia
cctgcggtccggtccggattcccgggtctccccgcgtccgaaaacctttgatcttcacgtgtctctcgtttttgtggccgactacgatcgctgattcgactgccggagattcctttaatcgttagattctcgtggagggataatgaatcctgaatatgactatctgtacaagcttttgctaatttgtttgtttggggggggtgaaagatgctcagctataaaatttgctgatgattcttccctggatagctacataagcaccatctggtggtgactataaaattaacacacgtggagaggaccgggagaccgtgctactgcagtagctgggcgcaggagggcagaaacgtttgaggacattcgtcgggggtagtacggatgagcgggtggcatgctgtatacttgtggtgggacgcgaagtgaaaggttggacggctgtctagaagtgggtgggtggaaggggccagggctgtggccaaagtgggaaccta

SEQ ID NO: 117169 - DNA, 412 bp, Arabidopsis thaliana columbia
ctactcacactgattcgaccggtctagaactgagggtgatgatgagggagtaagacaagagtaatatgatgtacagcaatccctatattgttacaagcgagtgagtgcagtgttcacgttcaacactacaggagaggaatctatgattgcacacacggcgtcaccacacagcgccacctgaccgaataattctgcgctgtcactatcgtggtgaacaacatcgcttgtggatagagtaggggtgggtcccgacccgccttggagattagagtgcggtcatactttcagattcccacccagacggggcgcagcgcgcgcgtaagggcgcacgccggcgcgggaagggtcatgtagttgggtccccggcgcgagtagcctttagccaactatcgtaagtgtaccccctccaccg

SEQ ID NO: 117170 - DNA, 464 bp, Arabidopsis thaliana columbia
  unsure (1)..(464): unsure at all n locations
ccccgtacctatcccccgctgttgatttttatgtttttaatagtaacaatataatcatggaatgataaaatagagccggtgaggggttataaagtatgtattaaagtgagtttgattgatatacgccgctgtgattggagtgagagcgtgtgtcgtggagagattggagctccacaccgtcgtccgctgtagcgtttaggtaatcagtcggaggcgaaagttgtggaggtaggcacgtgagtatgcggcttgaagctggattaagctaggaaagcatagaggattctgcagccctatcaaggttggataagatccatcgatgtacattataacatagatcggtagagatttttattatgttctggcagatccattgangtgtgtccatcacgaggttcggtgcgtttatatgctgctagagataatgggcccagcgccatggttcgagtatataagcggatgag

SEQ ID NO: 117171 - DNA, 185 bp, Arabidopsis thaliana columbia
gcgagcacctcatgacggagaagactatatgatgagtacatcccatgacgtgcgacactgattcccgatgaggtctcatgatagagaagaggccgcccatacaatgttaggctgtgtcgacggaggaggtgttttcccaggcctcgtctatagcgaccgcggagagatataaatccactcagatg

SEQ ID NO: 117172 - DNA, 535 bp, Arabidopsis thaliana columbia
cgacctcactatttggaagctggaccgcctgcaggtaccggtccggaattcccgggtcgttccacgcgtccgcccatgcttacagagataaacatgcttatacctacactactgctctgtctgattcctttacccagttcttgtctagctaccatcaatgcattgtctttgattccagacgttcttgaattattcggatgacgcgagaatggagatggagttcgtgtatgtggggagaacgaaagcgagcttgcttttctccttcgatactgtcccgggctcacagccttgccggcgacgacgctactgtagatccaaacccactcgtgacttctgacgtggaccgctctttaacgggggtggacctcgcaaaaggccgagacagcggtgccgggactgatgtgctggggagatgacgcgctctttgtgcgcagcggcttattgctcccaaatttggcttggccccattgggttgtgcaaccaggggggaccactccatccttctaatttttctgcgcccctgtctgccgtgatc

SEQ ID NO: 117173 - DNA, 487 bp, Arabidopsis thaliana columbia
  unsure (1)..(487): unsure at all n locations
ctantagaagattatgacgtcgactgcacgcgtacgtaagcttggatcctctagagcggccgccctttttttttttttttgtcgactattgagtgtcaaccatattatttggaaacataaccatacaagtataaaaaacaattactccgaagtccctagtgatataaattcacaacaattcaaccattcatcccaagtaaccaaaagcctcagtcccttgtaaggtgtaaacgggtttaaacatcagcctcaggctacaaccggatacgatgaacatgttgcaacaccacacatgttctttcccatttccatcttgaagtagccattgtctccccattcacctccccatgagttctttataagccagtacgggacgtcgtcttcaactccataaccaactgctaacactgcatggtttacatccattggagtgttaccacatgtattgctagtaaaaactcccttcttataaaacctgaattcatgt

SEQ ID NO: 117174 - DNA, 512 bp, Arabidopsis thaliana columbia
  unsure (1)..(512): unsure at all n locations
gcacgcgtacgtaagcttggatcctctagagttgncgccctttttttattctttttatattaccgtgatacatattccgaaggaaaaaaaaacaagataatacatattgcggattttttctgtacatattgaaacctggagttacaaactgtgtgttttttgtgtcatcaggccagacgatggcaaccggaaaaatatttttttttatcggggggaggaggggagatgaagtaagggactatagcgccgatgtgggcgcccaagtggcaactggaatgggtgtggcgcttgagaatttaggattttgaactaatgtgctcagatgggtgtagaggaagcgtgaggaggggtccatggaggaggaagtgggagagagcgtacggaggaaggtagagatggcggggaaaaggatggaaggagaagggagagatgagaacggtgatttgtaacacgataggagaaagggtggtatcgggtggaggggtaactaggaggaacagagagagttagaa

SEQ ID NO: 117175 - DNA, 501 bp, Arabidopsis thaliana columbia
cgactcactagtgggaaggctggaccgcctgcaggtaccggtccggaattcccgggtcgtcccacgcgtccgcacacgcgtccgcttaacaaacaattttcttcataatattaattctcaagatcttaaagattatattaatacgaagagaaaattcaaatgggtcttgatgattcatgcaacacaggtcttgctcttggtttaggcctctcaccaacgtccatgaattacaatgatgccatcaagaaatcttcctccactgtggaccatcgttccatcaggctcgatccgtggttgactctaagcctatcccggagagagctacaagatcaagactggtgccggcgccggcgaccaaatttgcccggagacctggtgcccacacggggtgttatctttgtggagcggatgggtacagagagaaagagaactctggggcgggtatggcgagaacatgccgatgacacaactgggacaggcgtgtgttgcagagtgagtgac

SEQ ID NO: 117176 - DNA, 488 bp, Arabidopsis thaliana columbia
  unsure (1)..(488): unsure at all n locations
ctgcangaaccggtccggaattcccgggtctacccaggcgggcggaagccatttgaacattcacgtctctctcgttgtgggggccgacgacaatcgctgaattgactgccggagattgctttgatggggagattctagaggggggataatgggtgcgtgagtagactgtgggggagagggggcgggagttttgttctttgggggggggaaggaaggtgggcggtgggattttttgaaaaagccccccagagagcgagctaagcagcagcgcggagggtaagaaggtggcgcgagggggggagaggggaaaggtacggagaggggaggggggagaagaggggaaagaatagagatgcaggagaagcgaaggcaaactgagggggataggggcgggggaggacagagcggaggggagaggcggaagacgaggggggggcaggagaagggcaacgaaggagcggacgcaggaaggaggagaaacaaaaaga

SEQ ID NO: 117177 - DNA, 184 bp, Arabidopsis thaliana columbia
  unsure (1)..(184): unsure at all n locations
ctgaggaagagaattttaggagaggaacccgccgcggcntcgagggaaagttcggggggctgtaggagatagatgtagaacacaaagaatacaccgaggatgagagcaaggtagcggaacgcagccgcacagaaggaaaagcgcacagagagagcagcagcgcggcagataataaaaagcggag

SEQ ID NO: 117178 - DNA, 274 bp, Arabidopsis thaliana columbia
actcactatagtgaaagctggtacgcctgcaggtaccggtccggaattcccgggtcgacccacgcgtccgatctgcatgctctcaacacccgacttaaatagacactttgcagatgttgctgtaacaagatggagactcccataatattggatatatacagtttttcacatctcgaagaacaaatgagatgagacggatatatagctcttctatactgtcgcagcgaaacatgcatgcttctgccttagcttgaatgcatctaatgcgacgaga

SEQ ID NO: 117179 - DNA, 357 bp, Arabidopsis thaliana columbia
  unsure (1)..(357): unsure at all n locations
tgatcctcagcgctacacgactcactataggaagctgtacgcctgcagtaccgtcccgatnccgggtcgaccaccgtccggcccgnagggccagctttctnaccgnacttctttgaaaagcttttgtcttagggggcctttactaatgggcttaacccgggaccccctttgggggctgtgggttggacttaaaaaggggggtttttggccctttcccaaatctcaaatgggaaaaaaagtgttcccctttaaaaaagccaacaggggggggaaaaaaaaaaaaattttttttttcccggggggaggcccaaaaagggggggggaatttattatttttttaaaaaaaaaccccccccc

SEQ ID NO: 117180 - DNA, 163 bp, Arabidopsis thaliana columbia
ggtgataaaaaggcaaagagacaggtatatgacgtgagctcgcgccagaaagcaaacgaaggaagagaagttagcgcggtggaccccgccggtgggataataactcgcgggtgcatgagaggagggggagacgaaatggagtagaacgtgagtgggggaggct

SEQ ID NO: 117181 - DNA, 458 bp, Arabidopsis thaliana columbia
  unsure (1)..(458): unsure at all n locations
aaccggnccggaattcccgggtcgtcccacagggggcgcactctttctaataacaacaaccccccccagaaggggaaaatcaaaaccacaaacacactcgacgcccaaaagacgacaagcggaagggttttgcaccgacacacgaggggcagggcacggagaggaagacgacggacggaaaccaaaactctcctcataacagggggggggagcaagaaaacgcgagaccacttttttacaaaaaaacccccccggagggtggacgcgggtggaaacaacaccatcgtataaaaagagagggggcgcagagagggcccgccaggggggcgcccggcgcggcgggatcgacaggacagcgaggggcgggacggggggccggagaggggcgggggagcgagagtgaggcggccgctgaggaggcgggagacgcgcgggcggagaaacacgcacagagcgcg

SEQ ID NO: 117182 - DNA, 238 bp, Arabidopsis thaliana columbia
cgtcgcccacacaatctcaccctgctgggtcggtgaaagactccatgacacagtatgtatcacattttgcagcgtgttgaagggttgtaccgacgagtaacacacttcagcgtacgaaccatatatgaccatacacagtgtgtggtgcgcgagatgatcgatcatgtgtaggccacatctctattccacccgcacacttggaaaaatcacccggtctcgtccgcgctcattccgcgtt

SEQ ID NO: 117183 - DNA, 282 bp, Arabidopsis thaliana columbia
aagaggtgggaggtttttttttaaagagaacccccccgcggtttgggtcggcgcgcccccccccggtaaaaaggtgccccgcgagaacgcgggcgaggccggggagatccacagcaaggccgtgcggggccaccgcaagccccaagagggccgccggcagtgccgccgccgctaggccgaggcggcggagcggagccgaggcgccggggctggcaaagccccggaggggcggacccccagaagacgcgggcacgtggcgcgagcgccgccgcaggcgggaaa

SEQ ID NO: 117184 - DNA, 480 bp, Arabidopsis thaliana columbia
  unsure (1)..(480): unsure at all n locations
gacgcgtacgtaagcttggatcctctagagctttcgcgcgtggtataaacctatatttaggttattacagggtacgagaggggaggcaggacgattgggtgttgcccagactgagggagatgcgagcggaaggttgtttagggataggcgaacgcggtgagggctgtgggggccgacaacgacgacgaacgcccatttcctcatttggggggtcaccagaaggcggaggggagagacagggagagaaggagggtcccggngccggcggagagcaagagagggagcgggtgccgcgggggggggagggggagggggagagaggtgagggaggggcgtagagggccgagaaggtactggcacgatggaggagacgtgggcacaggccgcgccgcgacgcggaaagaaggcaggaagaggctatgccacgcacagagacgagtacatataatgtgacacgccgcgacggcggggtggagatcg

SEQ ID NO: 117185 - DNA, 410 bp, Arabidopsis thaliana columbia
ccgcgtcagaagcttggatcctctagagctgtacgggggggggaaaactttttataaaaccgaaatacatctcccgaaggggaaaaataacatgaggtgacatggtgctgtcgtttgtttcgcctaggacactgagatgctttttactctacgaaccgagggtgagttgttgtcgttggggtggtgggagggggggggcggcgagagagcgaggtttgggtcgtttttggggggggggggggggcgacgcgcgcgggggggggtttttttttgtgtgagggcgccccctgagcaagtggtgggggtgggtgggagcccggcgcggtagagagtgaggggggcgggacgcgggagattgatggggtcggagcgggggtggcgcggggtcgggcatgcggtgggtgggtccg

SEQ ID NO: 117186 - DNA, 426 bp, Arabidopsis thaliana columbia
  unsure (1)..(426): unsure at all n locations
tgcaggtaccggtccggaattcccgggtcgttccacgcgggcgcccaagccttcgcttaacaaacaannnnccccataagaggaannctcaagatcttaaagattatattaatacgaagagaaaatccaaacgggtcttgatgatccatgctacacagggcttggtcttggctgaggcctcgcaccaccgcctttgtgctattagggggttgaaaacaaaacagaggggcgattttttttcaataaacccccccccgcccgtgcggggggtgggaccccccctattgaaaagaacataccaccccaccgcccaaaacccaaacgcccagcgcacaacacaccacgcacaccgccgcacacgccgcccccaaaagacctggtcgcggcaagcgcgcccgagcgcagcccacccggctcccacaacat

SEQ ID NO: 117187 - DNA, 364 bp, Arabidopsis thaliana columbia
  unsure (1)..(364): unsure at all n locations
cccccaagggggagaancacaaaaacccaaagagccgctcgaaacgacgaagaacagcacaccgggtcttggaagaaccaacgcccaacagagggccgaacacgaggacagggcccaacccaacaaacccctacattcgggagttgggcaccaaaaaaacaggcgcgcccttttttaacaaaaccccccccaggtggggggcgggggggccccccccccccaaaaaacaccaccgcccccaagccgaccacgggggccggcgcgggaaacaaaaatacgccgggcagagccacatccccgacggccaggagacgcagaccacgacccagaggggcccacgccagcgagcccaagcctcccgccc

SEQ ID NO: 117188 - DNA, 483 bp, Arabidopsis thaliana columbia
  unsure (1)..(483): unsure at all n locations
gcacgcgncgtagnttggatatntagagttgacgggtttttaaaactttttgtggggggcggaggggcccgtgggggcgggatccgcgggaatggtttggcgcgggggtaggtggtcgtgcggccgtttgtgggtcgagttggggggggcggcgggcggggggggtggggggacgacccacgggtttttttttttggggggggggggggcggggcgggggtggggggcgggggcttggtggccttgcggggtgggggcgcgtggtgcgtgtgtggcggtgcgggtgggggggccggggtggggggggggcgtgggggggggggtttttgtttggagtcggagtgggtggtggccccgggcgtggttggctccccctccggaaggggcgcgcggcgccgcgggacgccgctggtaaggcatcttgtggggagaggagtggggggacgaagggagggaaggggagggtgtgttgaggggtggggg

SEQ ID NO: 117189 - DNA, 531 bp, Arabidopsis thaliana columbia
cctgcaggaaccggtccggaattcccgggtcttcccacgcgtccgaaaccctttacacttttcaacactgtctcgcatagaggacagctactcaacactgaaattgctgtgccacaaacatacaatcatagaagttttcctgcaagggcggtgtacccaccgacgtaagatcttagggcaaaagagagagggcaggttttctcctttttcagaggggtacgaacgccgagcgagtagcagggactgtgtggcacagcactccgcgacgagtggttaggttgaggagacccggcagggtaaagacgcaaagaaaccgacacccgaacgagacacgccggagggacgagaacgcacgggcgcgtcgcgaccaaaccgcggagcgcagagaagcgccgcggccacacgtgacgagaagcgacgaagccgaggaacgtgccgcattggccagacgcacaacacaggagaccggcctacgtcacacagacacggccagatagacggaggagcgacgcgacgagtgcgcgaccaccc

SEQ ID NO: 117190 - DNA, 110 bp, Arabidopsis thaliana columbia
gagtcactatagtcgaaagccggcgctcgctgtcggtccatactacgcgatcatttgattctgggtacagctgccccgtacagcaaggttacgttgagctatttcctgta

SEQ ID NO: 117191 - DNA, 215 bp, Arabidopsis thaliana columbia
actaactatagtggaaagctggtactcctgcaggtaccggtccagaattcctcgcgtcaacctccgcagtctcaatgattccgtgacagtgagacctcaaagatgaggaaggacactagaagacctgagcccaagaggcacgagcaatggatggttcggggagcttttgccaagaagaatggtaacccgcagagaagcgcgtaatagcggggaag

SEQ ID NO: 117192 - DNA, 591 bp, Arabidopsis thaliana columbia
  unsure (1)..(591): unsure at all n locations
cgggaggaggagggaggcagagagagaaggcagaagaggagaggcaattgaggggaatcttggggggagcttattatagggagaagaaccgggggcgaagcaggaagctgagaccaggaaagagccaggagacggaccccagtcaggaacgagccagcagtggagaggaacggagagggaggagagtgagtaggacggcgaggggaaagaaaagaagacggaagcaagaggaagggagaaagaagagtcgaagagggaggaggagagaggaggagggaagtaaacggggagggaggctattttataatatttagagggagaggagagggagaagagtagaaagaagacgagggggagagggtgaagaccccccccccccccccggcgtgacagaagagtgaagtataggagaagaaagaggagaagagaagagagagaggggaaggngagcagaggagggagagagatggaggaagagaagagagcgagcaaagaggcaggacggagagagaggagggcagagagaggaggaaaggagagaagaagaagaggagcacaagaagcaccaggatagacgacgtgcacggagag

SEQ ID NO: 117193 - DNA, 234 bp, Arabidopsis thaliana columbia
agggacggagatggtgaaggagtagagaaagagaggagagcggagaatcattgggggggcttgctagtaggggagatttataggggtgaaacttgtagatcgagatgtagatattattatgatggaggaggaggcccttgagtagagaagagaagcaggttttgagagtagtgtgttagttagaagatttagatggagagtttagatagcgagaagatagttttttcttaggag

SEQ ID NO: 117194 - DNA, 499 bp, Arabidopsis thaliana columbia
tgcgtggtgaggcgagaagggaaggtggctgagcgcggggtgctttcttgtgggccggcttgatttgattccctagccgccaaacacttagttaggcaggggtcgacctacccttcagagtcaataggagtaagccgagcgcaatgcggtggagagagtggagagacccggcaagtgcaagtgaaatatggagatgcagaaagactgagtggagggtgagtagatgcagagacagaccgcggaaacgaaagtcgctaaggttttctgcaaaagcatcgagagaacaagcactataatgatgatgttcaacgctgagtggccgcgacgtcaacgtaatcccgcccgcgttaatatgtccagtcgactacaagataggcctcgcactacgtgtgttcagtcaacttaagaagagtaaatgaggatacacgctggtccaagcgcataatcaataggccggatattgcgcgagcgtaaagccaggaacgcgagacttcgctcg

SEQ ID NO: 117195 - DNA, 567 bp, Arabidopsis thaliana columbia
gggcgcttcggggggagaatttggggggaaaaaaccgagccagcgaagaaaagggcggcaggtgacaaaaaatagaaattgcgacggccagagaacgggtggggggggctgggagagcgaagaggacgcgcgaggaggaggaaccagcgcagagaagaatacgagagccaggacaggcgagatacgcacgtagcgggccgtcgacaggaagagagcatgggagggtgtagagggagcgtcgcgatgggagcgcgcgggacgcgacgcggcggcagacggcgaatgatccccccggagaagcgaccacgacgcggaagaaccacggtcccgtacccggcacggggaagtagcagagaaagtaggaagataagaagtgacaaggagcgctagcgtagccaaaagacggagagaggacggacgaaaacgggaccgacgaggtcagcgcgtaacgaaacgcaaaggggaagctgtaaagccgaggatagcgagaagtgtgggggggagacggagagggtagaaggcagaggcaaagggacgcgagaagaggcgcagataaacaccgagaag

SEQ ID NO: 117196 - DNA, 424 bp, Arabidopsis thaliana columbia
gaccgccggcagccacattacgcgggatcgagcaagtccgaagtcctactaggtaaatgagcgctggcgtcgaaataacgactgagcccagtactcccgggaagcttgagagcggggactccgccagaggatgacggtgcagattaaccgagttgggatagtggagattatttgagcgttcgacggcacgatcgctctatattctcttttcattggtggcacgacagttaataggtaacgggctcaaacgtaagtgacacgcgcatatgcatctcatgccccctgagagtctcatacataaaatgactttcgatgaggagcacgtacaggccatcataggttgcacgtaggcacgtcgctctccacgttgacccggcgcgaacgtgcgtggaactgagctgacacgctccggtagtaagcaaga

SEQ ID NO: 117197 - DNA, 630 bp, Arabidopsis thaliana columbia
ggagttccttatatgtagatcttagtggggggattttttgtgggtcttctggatttaaatttttggcttgatagcagctgtcattgtgtggggccatactgcgtgtatcttttttgttatggtcgcttctgagttcgctatttgcgaacattgatatgttcattctatacttattatatgagttcgtgtgtattttctactgtctttagttcttttgtagtcgttctgtcttagtcgttctctatttttatttgttcgagattaatgactagttattttttttatgtttatgtatgattgtgtgaattagtttttgagagtgattatgtttttttgcttactcgtattttatgtatcgttgtagtattttcatatactttcttagtcattatactggtacttagatttcgttctttgtcttagtttttctgctatgtagctacctattactatgcgttttcttttattttttcgtttttatttattttgtcttctgttgttgttttttttgttttttcagatgtgttcttgtttatattctgcgtttagtttgttgttatgagtgttttttgttttattgttttctttcttgtttatcctgttttttgtttattattattattaagttat

SEQ ID NO: 117198 - DNA, 479 bp, Arabidopsis thaliana columbia
  unsure (1)..(479): unsure at all n locations
actatanaagattatggagtacactgcacgcgtacgtaagcttggatcctctagagcttccgcccttgttttttttttttttgaacacaacgaacccgaggagataaattacaatctgaaacctcccggagacgcgatacaaaatccaattgtcgctacctcgactctacatgttgcactgctagaataaagaagccatctaatcttttctacctactggtctgggcgcaaacaaattcttaccattccggatgatttaaggcgttcgattgtacttgagatgttgctcatagaattcaatcaggaaatgaggattgtgagccttgagaaatctggcgtccaccaatggttattttcccattgggacctagcgcgctaaaagggtacgccccactttctgcttgtcgttgttgatcttgcctaatgacgtgcatgatgttaatcgtgcgggctttattacttagttaaccgcatcctgc

SEQ ID NO: 117199 - DNA, 446 bp, Arabidopsis thaliana columbia
gccgcgtacgaagcttggacctctagagcgtgcgcctttggaaatcttttggaagaacaagcaggagttgctaggatgaacaccaggaagatgatgtgaagacagagaaggatagtggccattgtttgactgaagagacagaaaccgaggcgcaggagagcggggcaaaaggggcaaaatttttttgttggggggggggaagaagcgcggaggaagcggagagggaggaagaaccgtagaggcgtggaaacgcgggacaggtgggatgaagtgggggaggaaaggaaagcggcgagagggggggggcgagccaaaggcgagaaaggggagggggggagggaggacggagggcagaagggcggaaagggagaggcgagaggggaaagacggggaggaaaggagaagcgaggagagggggcgagcgagcgaggggaggggcggggggg

SEQ ID NO: 117200 - DNA, 375 bp, Arabidopsis thaliana columbia
ggggaaaacggtacgcctgcaggtaccggtccggaattcccgtgtcgacccacgcgtacgccttgatctacatgatatcatctggccctgagagtgattgagaagtatgctagggcctccccagatgatgcaaggttgcgtaggactgtgcccaagtgtaagctggaaggaggcagtatgaaacgtgtactaagggttacgggaggttttttttttttatggggaggtgagagaggagcacgggaaggcacggagctactgtgtattcccatatacggttgagacgccgaagggaactagctggatgagttggtgggtgagtagtggagcgtgatgattcaagtgagttgaattagggcatgcgcgcttggcgag

SEQ ID NO: 117201 - DNA, 491 bp, Arabidopsis thaliana columbia
  unsure (1)..(491): unsure at all n locations
tttaggacacactantagagatctatgacgtcgcatgcacgcgtacgtaagcttggatcctctagagcggccgccctttttttttttttttttttttttttttttttttttttggaagaaaaatcaatacatatcagaacatatattacataaggttttacagacaactggtttttatcatttatggaaactttacactctcaaactttacatcttctacacattaaaatcatcataagatcaaaatcataagaccttcaggaccaaagatattttttcaactcaaagaacacaaaccaggatccgaaacgttccaaacttgccaggcttcagtttcccacagaccatctttttgatctgagtaaaaggctgcagcccccgtcttgagtcggaaaggatcgatgaaacagaaagctgaacatacagctcaaatcagtaaaccttggtcagacatgaagaactaaattaatatctattttggagtcatggct

SEQ ID NO: 117202 - DNA, 126 bp, Arabidopsis thaliana columbia
aaggaacggcgaacggcgcggatcttttcttgaggcccccactgtagaatcttctcatggactctcaccatgccacgctaaccatgaggccttcggctgcccctcagagcaggcccgctcctttca

SEQ ID NO: 117203 - DNA, 346 bp, Arabidopsis thaliana columbia
ggggcctccttagaatattatggatgaacttgccgcggcgtaagctggactttggagggccgccttgtttttttttttggagcagagggtgttcaggattctgggtaattctgcgatgtgctattttggtgggttgggtagatgagacctcttcagaagcgggaaaagaggagagattgagtgcttcggaacggggactctgttgttgtggtagagacaagtctgtgcggtctgacgtttatagttgcttagggctgatgtgctagaaccagagggttatgtattctctatgagtagtttttctccaaggaggagaggtgtggagagaggggggctggatccagtg

SEQ ID NO: 117204 - DNA, 559 bp, Arabidopsis thaliana columbia
ctatgaagaatttggcgagcctgcccccgcctaagcatggatcctctagaagcgggccgcccttagttttattttttcgggaggagaagtggatagcgcacggcactgagggaactggcaacagcggaagcgagatgttcacggagatcccgcagagacatcaccacagatccataacaacgagggagagagaaagatgaagatcacagaaatcgcacagtccgttaacagagttaaagagttagatgagtccagagcagctactgtataaaataggagttaagctttgcaagagacaaatggatgaggggctgtggagagaacaacacgcagaggaagagaacgaaaagtctaggtaagaagactggcgtttttcgcagatgaaggtgcgtgctgttcaacagactacgaagtacgcagaaagaagtattgtcagagaagggcagaagaagagagaataacgagaagggtggcgacctggcatatgagagaggacgcaaggacatagagaatcatggcgggcgtggcgggagagcaagaagatgagatccatcacagg

SEQ ID NO: 117205 - DNA, 687 bp, Arabidopsis thaliana columbia
  unsure (1)..(687): unsure at all n locations
agaaaagacagagagacgaaggagnagagggagagggagcgggggacaataaggggaggaccttactataaggaagaatttagggggggaaaacttgaggagcagtacgaagagaattattttgctagaagagggagaccccgcgaagaagaagagaagaggtgtattagagaggagaggaagtggagagatacacaggcagaggctgagaagcgagcgagagggagataaatggtaggagagaagagagaagagatgacgaggaaggaggcagcgggcgatgagagagcagaggaggagaagaaggagagagacagaagaagcagaagaagagcaaggaatagagagaattgaatgagagcagagtagaagatagaagcgcgtaggagaggagagagggagagagtaagcgagcagggggtagagggacggagacagaggagagagggcagtgaggagaggggagggagaggaggaagagaagatgagagagagagaggaaagagagaaagaaagaagatagggagaaacagaagagaaagaaggagagatgtgagaggaagaagaccgaggagtggntgcagtatgggaggatagatgagaagagagaaaagattaaagaggaagagaaacaagcacagcagaaagaggaggatgaagagcgccggtggtgagggagaagaaaag

SEQ ID NO: 117206 - DNA, 491 bp, Arabidopsis thaliana columbia
tcccttgttatgacccctcctatgaccgccttctcgatcctactccgcgtatttcgtttactcccctatgtctctctgtcttctaccattgtcctttttctccgcctccgctctctccttcgaatctctcattcgatcccggtcgtcttttattttttttttttattacttcgtcacggttcgcatactgcagacatatgtgtaataaattctcccctccccccctccctcctacctatggtatgttattttttctcctgtcttccgtcccctctgcagcgcccgctcccgcatcccccatcctttctcctctctccttcgcccctctgatattttctttgcttcctcctccccctcgctatgtcatctctcctcctgtcttcttcttactctctctcattcgtcttcagctccccctcctcaccatctcccgtcacgctcctcctaccttccgcttccccgattcgtactcccgtttgcttttttcgttt

SEQ ID NO: 117207 - DNA, 412 bp, Arabidopsis thaliana columbia
aggaccgagcccggaggaaaaccaagacacaggggggagacgagcacgagcgaaagagggagacagcgcgacagaagcagagcagagagagcattataattacgataaagagggcgcaggcatgagcaggagagatgtcgagagagcgaccaaagataaatagtgtgtggaggtagcacagaagaaggcggataaaagatggagacggggcggcaggatcagcacgagatcagagtagaaggcggggctacattaagaacagaaagaaaacagacggaggcgcgacaataaacaagcactagaaagaacagacgagaacgaatagagaggcttgatagacctttaatggccacgagatacgtagagcgcaacctatgagatcaaaagctctacgtacgacgcagcgaccagc

SEQ ID NO: 117208 - DNA, 657 bp, Arabidopsis thaliana columbia
  unsure (1)..(657): unsure at all n locations
cgcggagggaaagatatgaggggaggaaaaaccccagaccacaggggaggaagcgaggagaaaaccgggaaaagaggcagaagcgcaagtagagaagagccagcacccgcgcaagcacgataaccgagtagacaaccgcgcaggcgcgatggcgagcggacacgagggcgagatgggaagacgagcaggcggaacaggagtgagggaaggagcagacaagacagagacgaagcacgagacgaagaggagcagaagagcaacggccgcaggaacgaaaggcgcaggcacaccgaacacgcgcaccaccaggccgcaaaagagcgcgcgcgacgaagacagagcatcaaggaaacgggagaacagacaacgaggaaaaagagagagacaagagcacgcgggaacagcagagagaacacagacagggagacagacggcaggcgcgaagaggagggcgagcccagcggagacggaccggggaaaagaggagaccgcaaggcgcaccaaagaaacacgaggccggganaaagagccagcgggcacgggagagaaagacgggcccgaagcgcgacaagcaccctagccgccgcgccacaccaggcacatgccaaaccagaagcccgagcggaggagagacgagacgagagaggagaacgaccg

SEQ ID NO: 117209 - DNA, 557 bp, Arabidopsis thaliana columbia
ggggtttgccttggaggcccaagaaaccaagcgaaagcgggcggggcgcggacggcggctcgagcacactaaagagcgggcggcgcggaaccgcactgcgcgcataccgcagggaggcacggtgtcacacgccagtaggaagacacacaaacagactacgggcagggcgccacggtcggagggacagtgtagttcgctacgcatagccgagaagcacgagcgcagccgcgcggcgcccgggtacaccactcccagagaacggcgcgcccgaaagccaccgcaccgcgcaggacgaggtgggagaggcgacaaagtccgggacgcccggcgaaaggagaggcggggcaacaggacgcgttagaggcgggccaaggagtggaagcaggcgtatggacaaggtgtaagggagcactcgaacgccgggggggagggaacgataaaacggcacaatcgcggagagggagagacgtagatcgccggtaggtaggggctttatgcaataagcaccgaagagatgtaatgtgcagacgggcgaggacgcgcggggccgagaccgg

SEQ ID NO: 117210 - DNA, 488 bp, Arabidopsis thaliana columbia
accgcccgacgcggggtaaagtgacaaatggcaccgggcattggggggctctaataaaggaatcttgggggggagctggacgcatatgcagtatgggacatcagagaggaaagaggtgctggcgatcgacggagatacgacatacgtctcttgaagtccttgcatacagggcgactaagaggccgacaccgcgatgaacgtttacttggcgcagggagacagatgacgagcgggacggagtagcgacgaatcgagcagtatcggctcgacgctcactcgcgcacgccacccgcgcaacccggatacgagtggactgtgcagacctctgtcgcgtggagtgcactcttggtcgaagtcgcgagcggtgccgcgcacggcgatgcggttagaaacccacgcgcaattcgtagtactgcgtcggggccggctgagcggagcgcgcgtaagacttgcctgggatgatgacgatagcacgtaccgtggacgac

SEQ ID NO: 117211 - DNA, 491 bp, Arabidopsis thaliana columbia
  unsure (1)..(491): unsure at all n locations
ctgcacgcgtacgtaagcttggatcctctagagcgtccgccctttggtaaaactttttttttataaaatgtttaagcaaaaccaagaacatatagcgattgggacgaaacagcagtctactagtgttggggacacagagggattacctatctctgactaacagtaacatactatgaagagacgagagtttgagagacttgatagattcgagtggttacaccaacccntggttcaagctattcttaaaactaaccctgctttgttgattagaaacattcagactctaattaaactaaagaggctgatgagttttttccattcacaaaaaacaccctattacatccccgtggatcaaaaagacaggggggggcatttgcgatcttacgttttggtgttgaaagcatcttgcacaatagggatgtgaaaccttttgggattcctctggggagtaaattggggtgggaaaaaaaaattttttttttgtatagaaa

SEQ ID NO: 117212 - DNA, 514 bp, Arabidopsis thaliana columbia
  unsure (1)..(514): unsure at all n locations
ttaggacannnnnnnnnnnnnnnnnnnnnnnnnnnnnnnnnnnnnnnnnnnnnnnnnnnnnnnnnnnnnnnnnctttttttttttttttttttgaaacaaaataattgattgtaacagaaacacaaagtttgagtaaagtgataaccaaaaacaaacaaacaacatcaaaagatctctcacattctgcgtcggtttggcaccaattctggatttcccttcttcatcatcgctacaaattcttcgtagttgatttttccgtcacgatcggtgtctacttcagcaatgatctctttgatggatttatcatcacccatgttgtatttcttcatggctagctctagctcttccattgttatgtagccgctgttgtcattgtcaaagaactggaatgcggtgtacaagtgatcctcacgttcgattctgttcatatgcattgtggctgatataaactccaagtaatcaattgatccatctccatccatatcagctgcttccattaactgccttatttca

SEQ ID NO: 117213 - DNA, 485 bp, Arabidopsis thaliana columbia
  unsure (1)..(485): unsure at all n locations
nnnnnnnnnnnnnnnnnnnnnnnnnnnnnnnnnnnnnnnnnnnnnnnnnnnnnnnnnnnnnnnnnnnnnnnnnncttttttttttttttttatgtaaaacaattcttatttgcaaaatctgatatagtgaggcacctcatgaaatacgttcaacacaggaagcgacgttatcctagaaatctttactaagaggtcgcgacggaaataaaattgtacactcatttggattggatgcccgagtttgaggccttgtttaaactgtgcaaatactatcgctggcacatgtgacactttcccgctcacccaatcgggtgctaatacctcgcgcttagcgcttttttggtagtagggttggactaagaagaccactttttgatgcacaaaagatcatctttagagactctccaccccaattcttataaagtgactgtaatggctcatttcttgggcatttctgctgtagattccttgaacacctgtttgtg

SEQ ID NO: 117214 - DNA, 493 bp, Arabidopsis thaliana columbia
atgatatgccggcactaatacgactcacttagggaaagccggtacgcctgcaggtaccggtccggaattcccgggtcgacccacgcgtccggatagatcaaatgtttgacgacgtttaggaggccgatttggtatgctgcatatgaagacatctgctatgatatgagataatgtcgccgagcacctcactgatatccacttgctccgcgtatatgacgtaggagagacagatgttcgtttatgacgacttggtttactcttgacgagacctcatacatgctatggatacgcactatggcttctacggacgtccagttattgcggatcttcgagctacgccatatccccttatgtgttcggcggctagttccacccctaattccagcatcgtgatcttggtgaggtgttactagacgcaggatgtaaaactggagatagactcagagggagttgagcattggtaatcattgatagttggcactattggtggttt

SEQ ID NO: 117215 - DNA, 466 bp, Arabidopsis thaliana columbia
  unsure (1)..(466): unsure at all n locations
caaaaaannnccgcccccaccggggggcaccacacgggggagggggagaggaagggaagacggaggcagggttttttcaggaagagccgagagagagggccaacgcgcggagcgccgaccacaaccacagcacccgccgaccttttcgtggcttttaggggggggggcggacacagaaaggagagacccgtttttttaaaaaaaaccccccccagagggaggggggagcggaaccccccccggaaagaaaggaggcgcccgaagagacgcaccgacgagaaggccccgcgcgcccacacacacgacgagacgacagagaccaccagcaacacagacagcccgcgagcagagccgacgagagaagaagcgccgaggaggaccggagcgccagacgccccggacccacgacaccggaaaagacacggcgcgacagacacgggccgcaccacagggcgagaagcgacgg

SEQ ID NO: 117216 - DNA, 482 bp, Arabidopsis thaliana columbia
gcacgcgtacgtaagcttggatcctgtagagtgtccgccctttggttaatctttttggtttgttattatagaagtcttctcggcggacacgggacctcccgtgcgtgcagcggagctggccagctatgagaggcacctttctcaacttacacatcgtattgcggctgcgtgcgcggccggcgcgaccgcgagaacaaaatcttctactttatgggggggggcccgccaggggagggggggggcaggaaaaggcacccccacaggaggatgtgccgaggcccgcctggttgctaggtcgacggcgcgcggactgcagcgggggccggatgctaacgtcgaggtggaggcggcgtcgggcatagggcgacgtaggtggaggtgggaggaggggagcatggagcggcgcgcaggccgcgccccgagggccacgtgagcggggaagggaagtcggggtacggatttgtggcgcgcagcacgccccc

SEQ ID NO: 117217 - DNA, 456 bp, Arabidopsis thaliana columbia
  unsure (1)..(456): unsure at all n locations
tacgcctgcggtaccggnccggaattcccttttcgacccacgcgtccgcccacgcgtccgatctgcagatcatttatacacagccatttgcggaatcataccaaacatttctagcccagggtgcaggatatttcattgtggaggatcgggtgattaggacagctggaaatttcttgagggctgaacatttttttacaaggggggaaacagccatttccaaaattgcatccatattggagaaccagtttggcaggatggatgcccctactcatttgcttggggggaaagacgaagtaactatgctggggacaacccttagacaagaggggtatagaacagggagcaggtgcttgaagcccttaacaagaggccggagagagtgccacggacattattggggagagagggaccgatcggcgttgtggcactggagatatacagagggaaagtagagag

SEQ ID NO: 117218 - DNA, 311 bp, Arabidopsis thaliana columbia
  unsure (1)..(311): unsure at all n locations
cgcctgcaggtaccggnccggaattcccttttcgacccacgcgtaaccctaaaacgccctgactagtgaagaatccgatcgaatcgacggctctgtcagagattgaacccaggtgctcactttcgggtcccgaaagatatggctggctggggaacagtacgagccttattgtcccatggcgggggcaaacggaggattttttttttttgatagggggggggtcaccgccgaactccatggctaggtgagggagtaggaagcccccgcggtgtgggagacctccttaggttcgggtcgagttgagggtgcag

SEQ ID NO: 117219 - DNA, 485 bp, Arabidopsis thaliana columbia
  unsure (1)..(485): unsure at all n locations
ctatagaagatcnatggcgtcacctgcacgcgtacgtaagcttggatcctctagagcggccgccctttgttttttttttttttttttttttttttttttttttttttttttttttttttttttttagctaaactatattttggattcccgggaaaaatacacatttaatgacctcctgaggacttttaataccgtaacaagttttttaaaaaaacacttttttttataaaggaaaggggttcgtcaaattttggggggattggacccgttaaacagaaaaacatcaatttgggcttttaaaaagaggggacgtaagaaacgacggcagggatgtcatcaaaattttctccgaaatacctggagccaggctcctgaaccccaattgcgaaagggctctgccgttttttgtcaaattgtttttgacgtgccaactctgaaatgttttgagctgggccttttgggtgtaaacacggcctttaccggat

SEQ ID NO: 117220 - DNA, 216 bp, Arabidopsis thaliana columbia
gatactcgatcgcgggatacacaggcgtcggagccgatgcagtgccgaaataatgcgcagtgataagtgacacgctgtagtacgatgcaagtaaattagtcgcacatgtactcgatgggcgcgcgagggagaggggtgcatctaagaaggttgtaagagggagttgaatataggcgcgccggagagggaatgggtgggaggagagggggctaagct

SEQ ID NO: 117221 - DNA, 232 bp, Arabidopsis thaliana columbia
gaattccgggggtaagatccagggaacgcccaatcatgaccgttcgcaggtggacattctggtatgagataagtactctaaaagatctgtgactcacgcaagagagtaaaatgagggaggcagtaaaagatctctaataacagataaaaaaaagcacctacaaatataactcgtgaaacatcgaaagaagcctgtgcgcatacagaaagcattagtagcggattggagagtg

SEQ ID NO: 117222 - DNA, 492 bp, Arabidopsis thaliana columbia
ttggcgtagcatgcacgcgtacgtaagcttggatcctctagagcaggccgcccttagttttttttttttggtagaagaggtatgcagatagagaaaccatcgagaaacgcggcgaggaatcgtattgtttggaagatggcgcgtgttcggaccggtttcagttaacagacggagcgggaccatggagacgctgctcggtggagcacagtagcatcgtagttgagcatgttgggtgagggagaattgtgtaaggaaaaggaatatcataggggaataacgctgcgagaagcgtggtgagtgcgatagtgattttgagaggagaaatgaggagtgcgtgtagagaggcttactttttctacttatgagatcgcaccagcagagttgaggagacatgagcaatcaatcagcataaaggttacaagtagagagatttaagagatgtgaggaagcctaactccataggccccctagtgctctaatagacgttaggtg

SEQ ID NO: 117223 - DNA, 454 bp, Arabidopsis thaliana columbia
  unsure (1)..(454): unsure at all n locations
tcctaagggtcgagccggacacggagaggccgggactttcaggaatctcagggcacttctttgggggaaaatatccgagacgccaactaggtgtccaagaattgagaagatccagtgtctagaccttcgcttagcgagcgtggtaaggagaaatagcctgcgagacgtgttccataggccggctaggaaagttgcgtccgcgagacgcgcgacgtggaccgaacgagcataccccgtactccgccgcacagagtggacagagcaaatactcatactacagcgaccaggggcggcgctctctctttattttntttagcggcagacggcgaggaagagaagtagagaagggcagatttggcaggaggatgaggcccccccctctcccccgccatgagaggagagagaatgaatgaagcaggatgcacaagacacgcagcagcgacgatacacgcag

SEQ ID NO: 117224 - DNA, 602 bp, Arabidopsis thaliana columbia
tcggagataagagatggaaggttgttttctggcggcccctcagaggaaatcatttagagggagaagcctggcgacgcccggcgtgttacacggcccagacattcctagggtgggagcatgggtcgaccggcatgggtaggcattttagtcagcgctgctgctgtgtattatgtctctgatgtcagtccccgtgcgattgcagtcttgagctggagtgtactacccgcctgacggcgtcggagtatatgcagggccttgccttgcacgcgatcatgtccgcacaacttgctaaatatctgattagaaagctctctcatgagctcgagattgaccgcgtgcatcgtaagtgccagagcgtcgacatgagccaaggagtaacgcgagtagactgtgggtctagttatttacctccttagtcgtacggagtcaggcgctttcacgtgctgccatccaccctggttatatataattgcgtcaaacccggaactcagggtaattcagatgatcacttatgaggagcaacgacggctccgcgtgagtgtaggtcatcgctcttctatggccacatggcggtattagcgtacacctaagagctgtatgtg

SEQ ID NO: 117225 - DNA, 523 bp, Arabidopsis thaliana columbia
  unsure (1)..(523): unsure at all n locations
attttnnnnnnnnnnnnnnnnnnnnnnnnnnnnnnnnnnnnnnnnnnnnnnnnnnnnnnnnnnnnnnnnnnnnnnnnnnncttttttttttttttttgtgtgaagagtgatataacacacatcttaatgaaatatcatgtatgcatgttctgtttggtttttccgtgctcagactctaattttaacacaaaggaaaagaagatgatacacaatttatacaacaatatcacatcatgagttttgactagaaacaaatttaaaacaaaacattaccctttttaacctctgtaaaagggctttgttttgagcttttgggaggaagaaaatttcaggcttttgccttcttttctcctgcaagtagagcaagtaagtaaagataacaatcaaacctctgcaaaaatcatactctgtacacaaactgtagttttctcctccacgtgtgaccggtttcttctcccatgcgtgcacacacgatctcttcaggcatcttcccccacctttggaaggattctgattgctacta

SEQ ID NO: 117226 - DNA, 520 bp, Arabidopsis thaliana columbia
  unsure (1)..(520): unsure at all n locations
tgattctgccnnnnnnnnnnnnnnnnnnnnnnnnnnnnnnnnnnnnnnnnnnnnnnnnnnnnnnnnnnnnnnnnnnnnnnnccacgcgtccgaaattattccgtgacagcaaacctgaagatgataaagttcctaaagaagtggatgatgaggacaaagatgggttccttaagaaacttttcagggaaaaaaatgatgacaaaagacatggtagtgaaaagaatgaagccaatggaacagtgtatgccgataagaaatctggtgaagaggatgagagggaggggtttttcaaaaaattctttaaggaaaaatctgatgacaagaaagacattgtcaaggttgatgacgggaatgaaagtgagggtgatgaatctccagaattttctcttttcagaagattattccgtatacatcccgaagatgcaaaacctacttcagaaaatgaaaatagcagcaatggcttagttgaaagcagtcctgggacagaaaactttttccgcaagttgttcagagatcgtga

SEQ ID NO: 117227 - DNA, 546 bp, Arabidopsis thaliana columbia
  unsure (1)..(546): unsure at all n locations
ttaggtacacactatagaagagtcttgacgtcgcatgcacgcgtacgtaagcttggatcctctagagcggccgccctttttttttttttttctcataaaggttaggttgttatttaatatcagtatctacataagtgcaacatcttgaagaatttgaatataaatttttagttttcatataaacttctcatgaaagaacaagaatgtgcctgctaatgagacattgatgctaaaagctattaacattctacaatcttcttttactactaagagccagggatgagttgagatgagactcttctctcttggccatcacagtactactagcaaacacctntttttggtctncttccgtttttaccccctggtggagcaaaactccaattcaaggaatgggtttctgctcanggcggatcctggaaagggaagtgaaataattcagacctgatanncaagaactgaggggacannnaaggcgtcagggctttgcaacannactccatttggaacttaccccaaacatntgnnaagtatcaaaaagctttc

SEQ ID NO: 117228 - DNA, 473 bp, Arabidopsis thaliana columbia
tgcacgcgtacgtaagcttggatcctctagagtggccgccctttttttttttttttgaccaaccaacatgaataccatatggcggacattctatatcgctggtacaaataagataccttcaggttgatccaggaggtttcaaggtcaaataatgcactcttcaaacatactagctaagtgtgagaacgaaacttttttttttacgggagaggaccccacaacttcaatcctcggctccgattactcccccccccactttcgttaggcttgacaacaaagtgcccagtcattggcggcgcctgattcttgaggcttgtttgagacctacatccaggatccttgagatttcgccctcaccagaggatcgcatgggtgggggctgtgcccgggcgacccgctcaccgcgaacggcggcgcgcggagcccgcgcgtcgactcacacatcgaggaaagttgataggtaggaaggcggc

SEQ ID NO: 117229 - DNA, 506 bp, Arabidopsis thaliana columbia
ggcacgcctgcaggtaccggtccggaattcccttgtcgacccacgcgtacccccagagacgatccatcttggtgcttaactcagttgaactacatatctaactggaggctgcgacatattaaaaagtagagacatgaaattgaacctaaagataatgacgagttggatggcactatcactagagaaggttgaagccatattttttttaaccggagggggcgagcccataccgattgaaaccagaaagaatataatcccacattcaactttcacgactaatcagcaaaaatcatgtctgcaaaagtgtacccctagaacatcaatgacgctataaactgcatgaatgaatgagaggccaacaaatccggcacttcaaaaaagacccatcgcctgtcgtaagaccgcgataacgtaatgctacctgggtgagcaacgtaaacctagctcagtatgtgccacgtcgccccactgcgtaaagagctggaagggcagcaggaaaatacatg

SEQ ID NO: 117230 - DNA, 382 bp, Arabidopsis thaliana columbia
ggagtgggatgtggtgcaaaggaggagggtgggagccgcgggggggagagattattgcataggctcgtgacctagagtactatatggttggagagtctggcactctcgtgcgtgctactcggcccgagaattaccggagcatccactccactgcttcccgcaatctattctcgttacatggatgctctttaagtatagagttaatgttatgtaatatcattctagctctacattgagagagcatgggatgaggagagctatcgaggactcctatgtaccatgataataatattgagttacagatagttcctacacatctatatcaaaggagatgcagggcgtcaaagtgaatgacttggtatcggcgctagtgcataggatc

SEQ ID NO: 117231 - DNA, 402 bp, Arabidopsis thaliana columbia
  unsure (1)..(402): unsure at all n locations
agaagaagaagacgattgagcccgaaggaagagacgagggggggcgcggggggaaataattggagggaccttcctatggggggagaatttagagagggagaaaacagacggagcgagttagataggagaaataatatggatagagagagaggatgcacccagcagggcaagggagagatgcagacatataacaaaaggagaggaaggaggaaatagagacatcagaagaaacagaaagagcagcaagaacgtgcgagcgaatagagaatggagcacggnacccagagtagcagaaggagaggagaaagaagagagaggaggagcgcagcagtggaacagcgcgagacagagagacgaagagagcagagtaagagcgagaggtagcagacaacgagccgagga

SEQ ID NO: 117232 - DNA, 364 bp, Arabidopsis thaliana columbia
agtttaaggctgaatttcgggacgggttagctgggttccgagtcttggagtttgtattatccagagccacgcttgtttagtctatgtgtgatggttctcagatattaatccgatgtttagggttgtatagtgattctgtcaatttctctccgctgagtgacagtggtatgtgagaagctaccgtggagacgatgtagtatctattacggagggaggcggctttgttttttgtatttttggtggtcgtcgatttcatgttcttggtggcgagagtcgtgcgtaggagtacgtcccctccccctcttcttgcaggatttgatattattttaattatttatgttatactttctcatgcgcatcgttc

SEQ ID NO: 117233 - DNA, 340 bp, Arabidopsis thaliana columbia
agctacagatacagctaagatatagatcaagaagcgacggtagttaaatgcacttcgaagccgaacactgtgcgcattgagagtgtactcacgtacagagaggacgtccactataatatgtataatagagggagcgcatacactaggaatccgagtccgtatgagtgcgaaggagtgcatagagcttagtgagcgataagagagaccaatcttgccataagaaacgaatactgattatgaaagatacttccgacggacgaagaatggaagtgcggatgtaacgagcgacgggtttgtttacgtgtttagtagaagcctttagcacacttatagtctgata

SEQ ID NO: 117234 - DNA, 245 bp, Arabidopsis thaliana columbia
  unsure (1)..(245): unsure at all n locations
gttgtaaggctggggcaacggacaaacgggagggggccacatcctggggggactngcgggagggcattttagggggggagaccctcggacccaccagggctcacgagggcacaggatccgttacagtcggtcgccaacataagccaggagacggcgcacgaatgttgaaggcgaggaaactggcgaacgatgagaatgataggaaacgcaagagtactctggacgagaagcgggcgaaataccaa

SEQ ID NO: 117235 - DNA, 386 bp, Arabidopsis thaliana columbia
gggtttttacgtttcgagaaacgtcaaaagaggggagcgtaatctggggggctcctaagagggattttgggggggaacctctgtcgcggacggagcaatacacgccataaaaagctatgagtacgtggagatggccacgctgaagtagtgtgaaggtgtgtgcgagtgtacataattaatagggtatgtattgcgtaagtaaacattagtgaataatactatcaagtcgcatttagaaaattatgaacgtgtaaaggtagtaaattgtttaagagcttaattcgacgtaacattatgttctatatggttagagggttgggcggggcgtatggcgagactagttaagttttaaagatatgtggctattattaacacggacgaatgtt

SEQ ID NO: 117236 - DNA, 164 bp, Arabidopsis thaliana columbia
ccaggaggacgttcgggatagagaagcagtagcaaggaggaagtaagggacttatatttatcagtcaagcgcaatgagggactacgtgcactatccagctgttgaaccccgctgagccataaaccccgcggagggtgatccgtcggaagtcaacacagaggagc

SEQ ID NO: 117237 - DNA, 429 bp, Arabidopsis thaliana columbia
  unsure (1)..(429): unsure at all n locations
cgattnnnnnnnnnnnnnnnnnnnnnnnnnnnnnnnnnnnnnnnnnnnnnnnnnnnnnnnnnnnnnnnnnnnnnnnnnnnnncttttttttttttttacgtgcagaaaaaagacatttcatcaaacaaatatattggcgacagcaagaacatgacaaacgttgcatcaagtccaagggatgctagtaactctgtctctctcaacaagaaagaaaccatgtgcatcacatctaccttcaactaaaaatatagctactaaagttattagacctaatacttgacatccattctagagaaaacagaccgtgtccttgtttaaatgatgctctgattaacttggcactggcgagctgggagcggatgagcttagccgcatcaaccatgttctctattgcatgcttgacctcggagtacttacgcgtcttgagac

SEQ ID NO: 117238 - DNA, 478 bp, Arabidopsis thaliana columbia
  unsure (1)..(478): unsure at all n locations
nnnnnnnnnnnnnnnnnnnnnnnnnnnnnnnnnnnnnnnnnnnnnnnnnnnnnnnnnnnnnnnnnnnnnnnnnnnnnnnnnnccacgcgtccgcggacgcgtgcgctatttacttactactctccgattcttcctccgtcagctaatgaaaatcactatggcttcacacatggttctatacccacgcttgggccttaatagagagctcgagtttgcattggaatcattatgagatggtaagagcactgctgaggatattcaaaaggtgtctgctgatctcaggtcattcatctggaaacagatgtctgctgctgggactaagtccatgcctaacaacaccttggcttactactaccagtctctagtcactaccgacatgctcgttgcttgaccacctatgactggatacactggtggtgagatcggtcttgatgantacttatccatggatagaggacatgcctctgtgcctgccatg

SEQ ID NO: 117239 - DNA, 508 bp, Arabidopsis thaliana columbia
  unsure (1)..(508): unsure at all n locations
nnnnnnnnnnnnnnnnnnnnnnnnnnnnnnnnnnnnnnnnnnnnnnnnnnnnnnnnnnnnnnnnnnnncttttttttttttttttttttttttttttttttttttttttttttttttttttttttttttttttttttttttttttccttgggggggttttctcatttttttggggggaaaaagcaagggaatgctcccaattccttgaaaaaaaaacaaaattttttttgcaaaacaaaactaacaaaaaacatttccggttgaaaaccaagtttttttagttgaaaaacggggcttaaaaaatcttgaaaattggtttgttttccccataaacggaaaaacccccccaagcccattttttttttttccaaaaacacgtgcggggaaccaaattaaaaggttttacggggttaggggcttagttccaaaaaaggcctttttttttttcccccccttttttttaaaccgtaaaaaaattttttgggggattttaaccccaaaggaattg

SEQ ID NO: 117240 - DNA, 512 bp, Arabidopsis thaliana columbia
  unsure (1)..(512): unsure at all n locations
agctccctacgactcacttagggaaagctgctacgcctgcaggtaccggtccggaattcccgggtcgacccacgcgtccgcgaaaccaatgaagaactgggtagtgaggggtttcgtgagttcatatctcttgttgatcttaagaaaaatggtttccttattggagattgttgtatgtttggtgtcaagttccatgggattgaacctgctaaacccggaacagcggatagttttagcttaatagagaagcctcttaatcacagagtcacttggatgatgaccatgttctcgtccttcaaccctggaaacgttcatcagtctaatgaatttgtcgttggaacccggaaatggagaattaaagttcatccaagagggtctatgggtgaaaaagacanatcattttctgtgtatctatcggcactaggggtttgtcaataatgcaccaaagactnaaacttacgcgaggttcaagctgcgtgtattggatcaagttagcaggaatcatgttgaga

SEQ ID NO: 117241 - DNA, 495 bp, Arabidopsis thaliana columbia
  unsure (1)..(495): unsure at all n locations
cggattcnnnnnnnnnnnnnnnnnnnnnnnnnnnnnnnnnnnnnnnnnnnnnnnnnnnnnnnnnnnnnnnnnnnnnnnnnnnnctttttttttttttttttttttttttttttttttttttttttttttttttttttttttttttttttgggaagaaaaaaaaaacatttttttttttttcgaaaacaaaaaaaacctgttttttttcgaccccaaacctgggaaaacctggggccccccctatttaacccgggggggatccttcttcgccccgggggggcgaacaccctccctctccgggggccgggggaaaccacccccgttggtgggggaaaacctggggggggtggggggggatttttctgaaaaaaggggaaggtttttttaaaaaccatctggccccccccagaaatccaatggtgaccatccaggccccccgggagactccactttgcccctccaaagggctcctggccttttcattggaccccccaa

SEQ ID NO: 117242 - DNA, 517 bp, Arabidopsis thaliana columbia
  unsure (1)..(517): unsure at all n locations
agaagagctatgttgttgcatgcacgcgcacgcaagctnggancctctagagcggttgnccnggngannaaaccccgaaagcaaagggaaggcacccccgagggagggagcggaacacagaggggggcgaggccgaaaaaagcggagggagcgacacccgaccgcggcggcgcggggcccagcgcagagaccccgaacgcggcgaccagccccgcgtttttttgaggggggagggaaagaagcgccggggggaggggggacaagcccgacagcgccaaacgggaggaagccccccgccacagacgcccaaaaaaaacgcgggggccccagagaaacgagaccgatcccggaccgagcgaacccacccgcgccgcccccacgggggagaacccaacgacgccggagagggaccgagaagaacccgccagacggggaggagcgggagggaggaaacgcgagcccagagaagcgtccgcccggacggagaaaggcgaggacgccaccgcagcgaagcggg

SEQ ID NO: 117243 - DNA, 405 bp, Arabidopsis thaliana columbia
gatacgccagctctattctgactcactactgggaaagctgcgcacgcctgcaggtagccgggacggaattcccgggttgacccacgcgtccagggcctcggccgatattaagatttttaaggaggtggggggggaacaaagagtagaaaaaagaggacaaacaatctgacgcgtttcacgaataagaaaatcctgcccgttccccaacattttttttatatttatcacccccaaaccatcccttattctttccggggctaaccattaccgataaacccgtagccgcgtcgcccggccaccacgaatcggatgaataagtagttaccggcgcaatctcataacgtgcccctatagtgtaataatacccacctgacataatatttactccccgcatatttatcatca

SEQ ID NO: 117244 - DNA, 511 bp, Arabidopsis thaliana columbia
  unsure (1)..(511): unsure at all n locations
cgnnnnnnnnnnnnnnnnnnnnnnnnnnnnnnnnnnnnnnnnnnnnnnnnnnnnnnnnnnnnnnnnnnnnnnnnnnnnnnnnncttttttttttttttttttttggtaataaagagattcgtaactgaaagtttgaaacttttttttctccccacatgaagaagacgaaacagagagagatgattattactgcacaaagtaaaaagacaacaacaaatccacatgaatattacacaaactttttatctcaacaagtctttcagtttctcactcgtttttagcagcttcagcttgtctagctccaacagaaaagaactctgtgatgacttcaagtggcatgcctttagtttccgggactttaatgaacacaaagacccatgaaatgcaacatacgattgcgtacattccaaacacaccagctagtccaatggatttgagcagcacggggagactgtaagtgacgattatgtcacagatccagaaggtgagtgcgcagatggcgatgcagatt

SEQ ID NO: 117245 - DNA, 516 bp, Arabidopsis thaliana columbia
  unsure (1)..(516): unsure at all n locations
cgnnnnnnnnnnnnnnnnnnnnnnnnnnnnnnnnnnnnnnnnnnnnnnnnnnnnnnnnnnnnnnnnnnnnnnnnnnnnnnnnctttttttttttttttggtaaaactctttgaagaaaggagagagcgacatatcttagagaccaatgatatatatatagagagaaaacatcttgaaaccatagaaaaagttgttgttcatgcctacattgatacacattcgccggacaagtgacagtttgaaagttgaaaacaaagactaaagttttcgacattcataaccagttcagtggtcatgcactctgtgttaggagtcttcaaaatggtgatcagtttcgtcaaagatctcctcctgcagaagttcttcaatgacatcctccatcgtaatgattccgactgcttcttcttcctcagcaagtttaggcagcggattgccattcaattgcaggatgtctgcatcattgtcttttgaccacttcttgctctttgaccctcctttaaacgaacttgctcgatt

SEQ ID NO: 117246 - DNA, 378 bp, Arabidopsis thaliana columbia
aaacaccgagcgcgaggggtggggaggccgcagacagagaggaccgcgaaggcggcagagagaaggccggggagcagggcgggccttttctgtagaggtgccgagcaagagaaaaacaacaacacacctatacgccagtcggccaaccgcggcagggcagcagtacccacggagaagaacgcaagagcgcgaagaaggacgggtagatgacccgctccgaagcaaagcagcagcgcccccacagctcgtaggttagaagcgacaacaagagagagagggagtatggcgggcacctatacggctaaagcaagacgaggagagaagtgacccaacacgagaaatatcagaccaggagagcagataagagcgaaaccgaag

SEQ ID NO: 117247 - DNA, 478 bp, Arabidopsis thaliana columbia
  unsure (1)..(478): unsure at all n locations
ccggggggccgaacccccaccaaaaaagaaaaaaaccgggggggggggggaaaaaaagagaagagaacaaagaaaccgcagagggccgcgggggcgcgcgggaggaaanccccccccgaagccggccagaaaaggaagggagggccgcccgacccagctttgtcttttgcggttggcagggagcgaggagcccaatggccgacgcgaagagccccgagtggagagagcggggcagaggcaaccgcaacacctagcctgacccctgagtctgatatggcgggcccgagggcgggataatgggttcccgcgtggaaggctcgtgagcccggccgctctgtatgtggtgttatgcggggatgccgatttagcgggtacggcctcggcgaaccggcggcgggtgcggcggtggagggagttggtggcgtgaggataggtgtagtggagtgaggagggtcggggtggggggtgcgagtggaat

SEQ ID NO: 117248 - DNA, 442 bp, Arabidopsis thaliana columbia
  unsure (1)..(442): unsure at all n locations
ttcnnnnnnnnnnnnnnnnnnnnnnnnnnnnnnnnnnnnnnnnnnnnnnnnnnnnnnnnnnnnnnnnnnnnnnnnnnnnctttttttttttttttttttttttttttttttttttttttttttttttttttttttttttttttttttttagaaaacaaagcccttttttaaatcattggaaaaacttttgaagatcttttggtcccaacttgggtttcttccagcccgagtttcaaatcttggggtttttgaaacttgaagtagccctgtaaatgataccctccaaaaaaaaatggtctggaaaaaagcttttttagtttcctttcnnnnnnnnnnnnnnnnnnnnnnnnnnnnnnnnnnnnnnnnnnnnnnnnnnnnnnnnnnnnnnnnnnnnnnnnnnnnnnnnnnnnnnnnnnnnnnnnnnnnnnnnnnnnnnnnnnnn

SEQ ID NO: 117249 - DNA, 512 bp, Arabidopsis thaliana columbia
  unsure (1)..(512): unsure at all n locations
ttnnnnnnnnnnnnnnnnnnnnnnnnnnnnnnnnnnnnnnnnnnnnnnnnnnnnnnnnnnnnnnnnnnnnnnnnnnnnncttttttttttttttttaaaataatatcatatatttacaaatcatctttacaaaaaacgtttttagtttaattaaaatataagcctacccgaagtataccgcgggttaatatctaggtagtactatattagtatagaaccaagctcttttgcaattgcaagggatatgtaacaataagtcttgggagccgaaagatcagaagatagtgaaatcatgcttccatcaccaatgacctttcttttcaaagtttgagaattctgcacaaatcaaatatttgacatttacaaagagttattagcagccatttaaggtcttaaggctagagtatatgtcaataaaaatacttatgaaaaatctattacacatcttggtcaaatcaaatgtgagccttgaccatcttcaagcagcctcaaaggaacttagagcgctgata

SEQ ID NO: 117250 - DNA, 506 bp, Arabidopsis thaliana columbia
acctatagaagagctatttatttttcatgcacgcgtacgtaagcttggatcctctagagcggttcgcctttttttttttttcttaaactggtgaccagtaaaatacattcttaacaacgaacactaaactccgggcggatttctagtgcttgacaaacacaaaccccatgttttggtgaccctcaccatcccattccctaaatccaaatgagggtaaaccatttttttctcctgggtggggcggccccacaacacaattcaactctttccgctcgtgctagctcctccctcctgcgccccaacccgctttaaaagacagcttccttagtttcgattccaacccccaggttcgttctccgcccctccacacatcgctctttattcgtcaacctccatatgttctttttctatcccgccgtacactaaaataggtcaaaacttctttcgtgggccgctgatgtctacacgccttacattatgcgaaatatctttccgggcaatggctt

SEQ ID NO: 117251 - DNA, 586 bp, Arabidopsis thaliana columbia
agcccccgattgtcccacaaaaaaagagaagaatagtagcgccaggctgtattatgactcactactggtgaaagctgcgccgcctgcaggaaccgggccggaatacccgggttgacccacgcgtccgtatcataaacgcaaaatcgcaagagagaccttgtgcgacatcatttttaagatgaagagacaccccccaccgattgccaattgggctccccattggctaaacctgccccccaccccccatttcggatacccaacacccccgccgaccaagccctttttttgttcggaagggaggacctccctatgacccaatggggacatgcaaaggagaagttaacgcaggaaccccgcgcaacaccccccacatcaccttccacccccagaaactataaatccctgcaccctaaaccttttttttctttcccccattttatcgtcgccgcccccccgctcgcaattagaccctccccactcccactttatgcggtcgcccatccgagttgcacgatcaccacccccgtctagttgttataccccatacctaaaaatacatccgccaaagcgaatttctaccgccacc

SEQ ID NO: 117252 - DNA, 201 bp, Arabidopsis thaliana columbia
  unsure (1)..(201): unsure at all n locations
gggggacgccacgcgaacggaagnnngggaacctggaggagcggttcgaccgggaggggaaaaaccctaggaaaagaaggaagaggaggcaaacagagggcgagagggagaaggagccaggggcccaacagaacaccaaaaaagccggggcggaagggcggcaaacaccggtccaggaatgaatggagagagcgccgaacg

SEQ ID NO: 117253 - DNA, 304 bp, Arabidopsis thaliana columbia
  unsure (1)..(304): unsure at all n locations
agagggaggagagaacccccacacaaaaaaaaaaaaaaaaaagaaaacgtcattgttgcaggcaacaaaacttaggagagggaacgaacgcnngcaggnacnnggaacggaagancagaggaagaaccagcgggaaaagagcgcgggaaaaacaagaaaaaaaaggagagggggaggggaagaggagaaagaaaaggaggaaaagaaagaaaggagggagaggagganggcgggacgaaaaaaaaaaagaaaaaacaaagaacacgaacagagaggaagacagagagaagaaacgcgcaaagca

SEQ ID NO: 117254 - DNA, 515 bp, Arabidopsis thaliana columbia
  unsure (1)..(515): unsure at all n locations
cgnnnnnnnnnnnnnnnnnnnnnnnnnnnnnnnnnnnnnnnnnnnnnnnnnnnnnnnnnnnnnnnnnnnnnnnnnnnnnnnnnctttttttttttttttttttttacttttgaatatcttggatggtacattgcgtcttctatggggacaaacatacattgatacattgaatgaagtattactaaatgttttacaatgtgttttcgagttaaaaggcacaagaaggagaagcccgtcgaaaatccatgataagaagactggcaacactatgagcaagagctcctaagactacaaacacatggaatatctgatggctatgtcctgcaatatcaaaagccccaggcttccatctttcaggtatgcgggtaacataaaacgctgctcctgttgcatacaacacagccatcgcaagttcatatacgagagctataagcacgtttgggtgatccttatgaaggtaaagcacatgtgtggctggtattacgccagaaaatcccattgttaggaacagagct

SEQ ID NO: 117255 - DNA, 516 bp, Arabidopsis thaliana columbia
  unsure (1)..(516): unsure at all n locations
cgattcnnnnnnnnnnnnnnnnnnnnnnnnnnnnnnnnnnnnnnnnnnnnnnnnnnnnnnnnnnnnnnnnnnnnnnnnnnnnnctttttttttttttttgttttttttttaacggtcctggtaaaataacagaagtccaaaaaaattccacaaagtaaagaaatttatcgaagtgtttcatcaatttcaagaaaacagaagagtcgttaatctgaatcaatacatcaatcaagctttcgatttcttccctttggtatcagcaactacgggcttggccttgaaaggcaaaaacgtctctccgcccataaacggctgcagaacctcaggaatgtcgacaccatcctctcgctggtagttctcgagaatgcagcanatggtcctctctgttgcagtaagtgtcgaattcagcatatgcacatactgctttgtctgctcattgctctttttctgaccgtatctgatctcaagcctgcgagcctggtagtctgtacagttggaacaagacacaagctccct

SEQ ID NO: 117256 - DNA, 496 bp, Arabidopsis thaliana columbia
  unsure (1)..(496): unsure at all n locations
nnnnnnnnnnnnnnnnnnnnnnnnnnnnnnnnnnnnnnnnnnnnnnnnnnnnnnnnnnnnnnnnnnnnnnncttttttttttttttttttataaagaaacaattgatcatatgtaaaaaagatatcacaaatgaataaacaaattattttttctttcttataatgatataccaactaacatatgacaaaactgcctgctctatatgtgaaaatgctttgaatcatttatttcccaagtggtggacttattatagaacccccacatgtcacccatactatggtgcctatctatgttatcatattgactcggtttcatcaacccggcttgtattgctatggggcttcccattgtggtcgcaccctagaacgccgccaatttaacccgacattaaccttaagcctttgagcctcacctggattcaccaatcactatgataaacacacattggacctaacccgcccctgcatttgaaatattccacccgtctccatttgg

SEQ ID NO: 117257 - DNA, 426 bp, Arabidopsis thaliana columbia
gggaagctgcccgcctgcggtaccggtccggaattcccgggtcgacccacgcgtccgtgattttctgatggagccgctgttgcctttcatatgtctaatgcacatttgtatgaggaagaatcatgatgagatagatttcgagtttcttggtaacattatgagaagactattggactagctctcacaaacatttaccggtaatgtttttttctccattccgcgaaccagaagcagagatactaatctcctggttcagatcctcactgaagattttacatcaagactgtgtcctactggtctgattcttacatgatattctttgtagacaatgttcctatccgagaggtccccttcctgcggacatgggtggttacttttccatccccgcgaattctctctacccatcaattcgggaccgctctgaat

SEQ ID NO: 117258 - DNA, 525 bp, Arabidopsis thaliana columbia
  unsure (1)..(525): unsure at all n locations
cgnnnnnnnnnnnnnnnnnnnnnnnnnnnnnnnnnnnnnnnnnnnnnnnnnnnnnnnnnnnnnnnnnnnnnnnnnnnnnnnnnctttttttttttttttttttttgataccaaacatatttacattctaacaacatanccggtcactccagatcgtatcagacaagatagtttccaatagggagctttagagagttatttggtttttttgatggtacttacattggctaaacaacagaagcaaagaagaaacaacatctaccctttagccaaacatcactagaagaactaaacttagcaagccacaaatggttaaacaagttgatgtaccgtacatacaggatttgttaagagtcagggcttttctttagctgatgcagttaagatcagtgtttctggattctttggattgaaacttgcaagccttcttcattctctttgcagcttggacaaaccccacaataacctgaagctcatccatttgctgagacatgaagtgcctttgaacaatgtcaattagttgctc

SEQ ID NO: 117259 - DNA, 477 bp, Arabidopsis thaliana columbia
  unsure (1)..(477): unsure at all n locations
gcaagctcaggagccgcgagagcgggtgccctatatgggagagccccaaaagaaagaaaggggagggcagcagggaagcgaacgagagggcacccgccccgaacgcaagaagagccggcagaaaccacaccaccggccgcaagcacaacaacagccacaacagccaacacgccaagacacgccagcaaaagaccctttttgtacaaacggcgccacaccggcgaaacggccacgcgccacgagcgagaccacccccgggaaacgcggagcccgcgacgaacggcccaccgcgggcgcggcaaaaaaaacccaaagggcgccaaaagaaaccataacgcaaaacgcccacacaaccagacacaccccgcagcgccccccgaccgaanagggactagccccccaagcgccgcaagaggcgcacaagcacgcccccacgccaaacgcggaaaacggcgcgcgaaacggaaggagccagcc

SEQ ID NO: 117260 - DNA, 445 bp, Arabidopsis thaliana columbia
  unsure (1)..(445): unsure at all n locations
cgggcaccaagaagcgacaaangaanaaaaaaaagaaaagaccaagtgttttccacaccacctccggggggggacacaccgggggacngggnaggaaaaccgggttgaccaagcggacgaacacgggaagggaaaaggaaaagagaaagggggggggaggaaagaaagagagaagggaaagaacccacgacgcgggggagaaagaacccaaaaaagaaaaccccaaaggcaccagaggaaaggaaaaaaacgccccgagcccacgtttttttcaagggggagaaacgaagaaagaaaagcccaaagagaggcgaacacaccccacgaaagagcgaggaacccggaagaaacgacccacgaaacaccgacccggacgcggaaaaaaaaaaaaccagagagccggagcacaagaagagacaaagcgcaccgcgcaaggaccacgggc

SEQ ID NO: 117261 - DNA, 522 bp, Arabidopsis thaliana columbia
  unsure (1)..(522): unsure at all n locations
aaaaagntttttttttgggtgtacaaccacccaagcacggaaccagagaanggtttnnngggggnaaaaacccannaaanaaaaaaagaaccccaaaggggaaaaaggaaaacaaagaccaaagagcagaaagccgaggagacccacacagcagccaagacaggggagacaccaacacggacaccccgggcccgagaaaaaagcggtctttttttcaagggggggccagggaaagagaggcgccggagagaaacagacgccaccaaccgcgacgacacacgacgacaccacccacaaccggcagaagaaaggcgaaggacgaaagggaacggaacgcagccacgcccgaagcaaacgaacgcgcgaccgcacccacaagaagaaaaacgccgccgccgaggcagaggcgggacagcggaccggacgcagccgggagaaaaaggagcataaagagaaaaccaggccaggaagagcgaacagacgacaccagagaaaacgaggacgacaacgaggcgaaagcgc

SEQ ID NO: 117262 - DNA, 508 bp, Arabidopsis thaliana columbia
  unsure (1)..(508): unsure at all n locations
cgnnnnnnnnnnnnnnnnnnnnnnnnnnnnnnnnnnnnnnnnnnnnnnnnnnnnnnnnnnnnnnnnnnnnnnnnnnnnnnnncttttttttttttttttttttagagaaaacgaaaaattaattgatcaacaaagacatgatgattatacaaacaaaaccaacttatttaaaaccacatcattatttctcgaatcgttacagtccatcatcaagtagaacaaattcatcaatgatatgattaagctgtttattaatcgtttttaggagtgcactttcgagcggtggtaactttgacgggtttggtcttgaggacagggtttcgctcgaaaaagttggtcggtcggagctcaaagccaccggataaagtaggcatcgtcgggtaatcttcctggctaggaacatggtggaaaccgacggtgtaccacatcactatatcttccttctctatttttctattcctttgagaccacactgccaacgtatcgtcgccttggctcctgtcagcgt

SEQ ID NO: 117263 - DNA, 483 bp, Arabidopsis thaliana columbia
  unsure (1)..(483): unsure at all n locations
cgcgnacgnaagctgggatcctgtagagcgtgtcgccttttttttaattctttttaaaaggatggcgcataccataatgaatatgacaactctataaaactttctgttgtaagaagggaaagaagagaaggacacgtcgtaggagcgtcccctcctttctccgttggaccaggaaccctagtagataccacccaggttgttttttgggcgggtgcagggaaaagacacggggggaggtgataataaaaaccggccccacgggtcggccgtcgagacacacccccgcatatgccggaaaacggtggcgtgaatgccgagtaacttgccgaacgcgtgccgcactgcaagggatcccacggacggggccaccggaccgtggtgtaagttcgatcgnggctcccatgaggggaaacggagggggcgaggcaaacgggaaagctagggtggaaagagtgattagggcaatcgcaagaggggacgttc

SEQ ID NO: 117264 - DNA, 476 bp, Arabidopsis thaliana columbia
ccggtgtgcgacccaccgcggcgcagcccgccccgaagaaccagaagagcaaaagaaggaccggcccgagcgagaaaaacaggaagaacacaacccggcgcaggcgggccagaggaacgccgggagagaaggcagccaagccgacacacgccaccgcacgcacaacaaaaaacaacacgcggcggccccacaccagaattttttttttccacagggccgagaacccaagagacccggggaggccgcgacgagaacagcccggaacgccgacctcgcgcccagaaagacccggggcacactgcatgcccgccccgcaggtctcagccgccgcggcggcctggcgcgcagcacgaggggagccaggcgcggatagcgcgacgccagggcgccccaccgcgttagcgtgccacggcgggcgacccgcgaagaggccgagggccggcaacggccttgccccgaaagcgagaccaccggag

SEQ ID NO: 117265 - DNA, 368 bp, Arabidopsis thaliana columbia
  unsure (1)..(368): unsure at all n locations
gggtttttttttggtggcaacaaaccacacaaccgngggaacngagaaggggttgggnagggggggaaaaaacccaaaaaanaggaagagagaggaacagccaaggagaggaaaggaagaccgaacgaaggcacgaaacacggaaaagaccgagggaagagggccacaagcaaacgggccagaaaggaggaggcgaagaccgcaaacccaggaagacccacagaaggcaagcaagagggagacacacacctatttttgttttgggcggggtgggaaaaaaagaaaccgccggcggacgaggggaagagacggaggcccgagccgcgcaccgaacagccaaccgaggcgcgcaccacaccaaaacccac

SEQ ID NO: 117266 - DNA, 506 bp, Arabidopsis thaliana columbia
  unsure (1)..(506): unsure at all n locations
gggggtttgaaccagggaggggaaaaaaaacccccgaagagcagaanaaaaaaagaaagaagagcgcgaggagggcggggaggggaagagaaaacaagaaagagaagaagagaagcaggaaacgcgaagcccggagaggcggggcggggagggccgcggagagacgaaaaaacgaaagacaagaaagggccgcgcgaacaggggaaagagaaaagaagagcccgcggagacccaacgacaatttttttttttggggagggggaggaacaaaaccaaggggcgggagagagggcgaaagaggggaaaagaaacgaaagaggaaagaacgcagagaaaacccaccagagagagccgcaaaaacgagcggagcagagaacggaggagagaggagcacggaggccaggaagaaaaagagaagaccaccggaggaaaagaaagaggaagcccgaaggacaaaacgaagaccaaggagacgcgaaagcgaaacaagcgacagagagacgaag

SEQ ID NO: 117267 - DNA, 400 bp, Arabidopsis thaliana columbia
aagcaaggaaccagagagcggattgacctgagggggaagcccaggaaggaggaagaaggaaacacgacgcaggaaccgaacagcaacccgcgcaaagacacgaggacgcaggaatgagcccaaaagaccaggcggaagagagggagcaccgccaacagcgaacaccccggaggcccgcagaagacggagccgcaggaccatttttctccgaggcgggggggaagagccgcagggggacagggaaccacccgaccagatgcgcgcgaacacggacccgcggcggcacgccgagccccgcggaaaagaaagcgcagagagcgggaagacagatcgggaacgcgacgcaggacccaatccgaacgcgcgccccggcgccccgccggcaggcagaaaaagccag

SEQ ID NO: 117268 - DNA, 495 bp, Arabidopsis thaliana columbia
  unsure (1)..(495): unsure at all n locations
nnnnnnnnnnnnnnnnnnnnnnnnnnnnnnnnnnnnnnnnnnnnnnnnnnnnnnnnnnnnnnnnnnnnnnnnnnctttttttttttttttgtacaaacacataaataaaagcatataagaaagaagaagtgtgcaacaagacaaaaggaattggtaaacaagaaagttcaaagtcaactttttttgggttcaacgtcacaaatacgcaaagtaaacgactcatttgctttgctctatcttggccttcctcttctcattgacaaagaagacgacaagagccacgacggagaagacactgaaacagatggaggcaatatctagggacgcgtggcggccactgatagcctgaacgctgaagagattgggtttcttgggatagtcggtgctctgtccataggcaacttcatggccaatggaatcaaccgcgtaggcacgaaccaagtacgtcccggtggggatgccaccctcaagagtccaaatattgattgatggttt

SEQ ID NO: 117269 - DNA, 487 bp, Arabidopsis thaliana columbia
cgactcactatatggaaagctgccacgcctgcaggtaccggtccggaattcccgggtcgacccacgcgtccgtccacgcgtacgagaagatcctctttgcttcacttctcatatgctcactgatccaatccatccacggggcggaaaaagtaagactcttcaaagagctggacaaaggtgcacttgatgtcaccactaaacccagccgagaaggaccatttgttgttttggatgccggcaaggatacgttgaacattacatggacgctaagctcgattgggtctaaaagagaggctgaatttaagatcatcaaagttaagctatgctacgctccacctagccaagatgaccgaccatggcgcaaaacccatgacgagctcttaaaagacaagacctgcccacacaagatcatagtcaagccttatgacaaaacacttcaatcaactacttggactcttgagcgtgacatccccaccggaacctactt

SEQ ID NO: 117270 - DNA, 527 bp, Arabidopsis thaliana columbia
  unsure (1)..(527): unsure at all n locations
nnnnnnnnnnnnnnnnnnnnnnnnnnnnnnnnnnnnnnnnnnnnnnnnnnnnnnnnnnnnnnnnnnnnnnnnnnnnnnnnnnnccacgcgtccgctcaaaaattcgatctttagggtttttcttttatcctcttatcgctaatctggagctctatagagactataaagggtttttgattgattcgggagctcgagatttgacttcttttagctgattcggcaagtttgtatctagaaaggatcgattggtgaggtcaatagtggttggtgggttttagtaatggaagacggtgagcttgatttctccaatcaggaagtgttttcgagttcggagatgggtgaattaccacctagcaattgttcgatggatagtttctttgatgggcttttaatggatactaatgctgcttgtacccacactcacancctgtaccccactggaccagagaacactcatactcacacgtgcttccatgtccacaccaagattctcccggatgagagcgatgaaaaagtttctactgatg

SEQ ID NO: 117271 - DNA, 507 bp, Arabidopsis thaliana columbia
  unsure (1)..(507): unsure at all n locations
nnnnnnnnnnnnnnnnnnnnnnnnnnnnnnnnnnnnnnnnnnnnnnnnnnnnnnnnnnnnnnnnnnnnnnnnnncttttttttttttttttttaatgtaagcatttttttattctttcaagagttagggaaattacttgaaacacggaagtctgaagcttgttgttgctttcaaaggtgttgtttatggagtctgcgacgagatatctgcatggccttgcaggaaagagatggaaaattccgaagaagtctattttggtctgaaaacaggacagggtcttttagagttcaagtgcaagagcaagattcagaagcagagatgggttgctgggattcagtctaatctccgcttagtaagttgcctcgaggctgccaaatgctctctggaatctctgagtctcagcaatcgcatgcgatagagaatcctgtaaatatttactattcacagttttttctgctgtaaatactgcaaatgaatcaacaatcttatagaaattcgtatcacctt

SEQ ID NO: 117272 - DNA, 544 bp, Arabidopsis thaliana columbia
  unsure (1)..(544): unsure at all n locations
agaagagntttttttttgtgtgaacacccccccagccaggaancngnagaggggtttgacaggggggaaaaaacccaaagaaaagngaaaggggaacacggngaagggggaaacanaacaagcaccaccgacgagcacgagaaaacccgagagaggcgcaaacacccaggccgaaacaaaagagaaaccgcgaacacaagaagccccggacccgcaagggacaacacacggtttcttttttcccggggggggaaagaagccgcgcggagagaagagaccaaccaccacgaccccccaagacgcaccggcgccaccaccaccaaccccccaaaaaaaaaccaaagcgcggcagagaaaaacgaatcgcgggccgcgcccaagccaacgccgccccggaccgcaccgaccagaagagatagacgccgaacagcgcaaggcgcgaggggagagaccccaccagggcggaaaacagaaggggggaggagcaaaacacgaacgcggaagaggcagagcgccgcacccaaaaaagggggagacgggccgg

SEQ ID NO: 117273 - DNA, 494 bp, Arabidopsis thaliana columbia
  unsure (1)..(494): unsure at all n locations
nnnnnnnnnnnnnnnnnnnnnnnnnnnnnnnnnnnnnnnnnnnnnnnnnnnnnnnnnnnnnnnnnnnnnnnnnnctttttttttttttttgttttatcatattttttctttatttttttttttctttttttttttggaccataaagaattccgatttttacccaaattacactctttattaagggaaaagctcatttgggccaaagccctaaatttaaaatttaccccgttttgtttttaattaactaacttaactccccccggttggagaaaacccgaactcgacaaccgtaaaatttaaaacaacttttagcgtttggtggtgaacattcacaaataaggcagcggtactgatatctctttttcctgcaaacgccaaacaaacgtgatatattttaaacactttaaataaccctgtcaaaccaagtttaacaacggcacctccgctgaaagaaaacccctttttgggaatgataaccgctttaaacccggtt

SEQ ID NO: 117274 - DNA, 498 bp, Arabidopsis thaliana columbia
  unsure (1)..(498): unsure at all n locations
nnnnnnnnnnnnnnnnnnnnnnnnnnnnnnnnnnnnnnnnnnnnnnnnnnnnnnnnnnnnnnnnnnnnnnnnnnnnctttttttttttttttttttttttttttttttttttttttttttttttttttttttttttttttttttttgaaaaggaaatagtttaatttattatttgaaaaaaaacaccttaataaaccggttcaggggttcaacaatttagcccagggaataaaaaaaaaatttttgggggaaaaaaaaagggatgaacaaaagtttggctggaaaaaagtttaaacaattccaaaataccaaaaaattggtgggggtttaggggtttgaactaagcgattttcaagtttttcaagggaaaagggaggggggtgagcttaaggggagctttttggttggactctcgctccaaaggaggtgcagccaaaaactgaagctttggggcaaccatgtccttggcctctttggtcctgccttttgaaaattggg

SEQ ID NO: 117275 - DNA, 521 bp, Arabidopsis thaliana columbia
  unsure (1)..(521): unsure at all n locations
cgnnnnnnnnnnnnnnnnnnnnnnnnnnnnnnnnnnnnnnnnnnnnnnnnnnnnnnnnnnnnnnnnnnnnnnnnnnnnnnnnctttttttttttttttttttcactctgattttaaactcttattgaaaagcttgaaaagttacagaatacaagaaaccagagacaacaaatgagacagagttccgtttcttattgaaacaacaagacaatcgacccgaaaacgaactccctcaaagaacacaaagctcacacaaaccccccaagtcaacatctccttgtttaaacaggtagtgagtacttagcggaaacctccttccacgcagcacggctactaatcttatcccaccaagcgctaacatgcttcctatctttgatcaaatgagccttcccaataggaccaacaagatactcggtgaaaggaaggtgagccaaatcagctagactcacaaaatcaccattgttctgcttcctatcctgtatgacaagattggaccgtattttttggcccatccagcgaaga

SEQ ID NO: 117276 - DNA, 519 bp, Arabidopsis thaliana columbia
  unsure (1)..(519): unsure at all n locations
nnnnnnnnnnnnnnnnnnnnnnnnnnnnnnnnnnnnnnnnnnnnnnnnnnnnnnnnnnnnnnnnnnnnnnnnnnnnnnnnnnnnccacgcgtccgaaaaaaaaagagagaagaaaaatggtgttgacaatctatgctcctttattcgcttcttcaaagagagctgttgtgacattggtggagaagggagtatcattcgaaactgtcaatgtcgatctcatgaaaggagaacagagacagcctgagtatctcgcgattcagcctttcggtaaaatcccagtcctcgtcgacggagactacaaaatcttcgagtcgcgtgcgatcatgaggtatatagcagagaagtatagatcacaaggacctgatcttttggggaagactattgaagagagaggacangtagagcaatggttagacgttgaggctacaagttaccatcaccacttccggtgatcggaaacctccttcagcttcagaagcttaacccacaacgcttcttcgctggatgggccaaaaaata

SEQ ID NO: 117277 - DNA, 390 bp, Arabidopsis thaliana columbia
  unsure (1)..(390): unsure at all n locations
ctaaagaaaaatttttttttgggaaccacaaaacaaaagcaaggannagaagagnggttgacaaaaaggagaaaaacccgaagagagaaaaaaagaacgcacaaaggggcaaaagaaaaaacccgacaccaccaggaacgaaaaacgcagaaaacaggcggaaaccacgaacagaagacatggagcggaccgcagacaacgaagaacaccggagcccggcaggcagaagacccgacttttttctatccacgcgggcggcgcgagaagaacggccgggaggcgaagaagaagaaccaaccacccagagaacgcgagccaccggccaagggccacccgcgccagaccgcaccgagaaaaagagcggaaagaacggcgagagagagaagagga

SEQ ID NO: 117278 - DNA, 435 bp, Arabidopsis thaliana columbia
cgagcccgcgcaaaacccgccgaggagacggggagaatagaaaacgcccagcagaaagaagaggggaaaatctattttttaggtgggccacacacccccaacgcaacacgaaaaagggaaacccccgagagttacacccaacggacggccaagaaacccaccacgcgcgaaagaacaagaaaaaagacaaggggaggggcggggggggaaacgaaaaaagagaaaaagaacaagagcgagacacccacgcaggcgggggggcggagggggccgcgcagacaacaacaacgaaaccccaagaaggcccaaccagcagaggatgaaggaacgtgcaccccccgagcgcaaagccatattttttaaacgacgggggatcgcagaaacccacagaaggcggcaaaagacaggatccggacaaaagaccgaacgaaaaag

SEQ ID NO: 117279 - DNA, 537 bp, Arabidopsis thaliana columbia
  unsure (1)..(537): unsure at all n locations
aattttttttttgtgggtgcccccacccacccccaaccaaagganacagggggagaggtttgggaggggggagaaaccccacaagaggaaagggggaaacccgaggcgggaccgaggagcgccacgcccagggcgaaggcgcgagaagaccaaacgagcagcgcgaagcaagggggaccctcccggtaacccgagcggccgggagaggccgcgggaatctttttttccggcgggggggaacaaagggccggcggcgggaggggaaacagagccggggacgccgcaagcgcggggcggcagcagcgccacgaaccccccgaaacgagagggggagaggcgcgggcgagcgcggtgcggggcccgcgcccaagcgagcgccgccgccgccacccccccggaagggaaaaagccggcagagagcgcagggggcacgagagggacggagccggacggacgggggagggcggagggcgccggaggcgagccgcgaagggacgggcgccgcgccgcgacggaaaggcgaaagacaggcgcggc

SEQ ID NO: 117280 - DNA, 474 bp, Arabidopsis thaliana columbia
acgcctgcgggccggccggaatcccgggtgacccacgcgtcaaaccctttgtgaaatagatatataacgaaacgggagattacaattaaaccactcccgaaccagggtcctaatggatgggccgagtgaaacacttgctcgcaccgaggagcgggtttgggttacgcgcgcgaccaatcttttatttcagggggacagaaagcccaagcgcgattggggaaagcaccccccccagaccgctgggtgggcttccgccccagagtcggacgggcgggcagaatggaaggggcgggcagggggggttggagaggacaaggcgaattacaccagccaaccccacaccgatatcaggcaccccgcctaccgcagtgttccggtccagatacgcaatccacctgcggtccgcacggggcgtggagaaggcggcccgaggactaaaggggaatagaagaaacgggccggaagcggacgcat

SEQ ID NO: 117281 - DNA, 360 bp, Arabidopsis thaliana columbia
  unsure (1)..(360): unsure at all n locations
gccgcaggaccggccggacgcccggttcgacacgcgtcaaccctttganaaagaaaaggagcagacgggaaggttaattctttgagcccaaacacaggtgtgcgctaacagccaattgacatcccatacactcggcagttgacttatgaacgagaccgacattctctttagggggcgaaaaccccaccacaagaaccccagcacacgcccccccgaggcaacggccaacccgcccggactcatcctgtccgattacgagaggacgcccccgcgcgaagtccccctccctcgctaaaaacgacggcccgacctctttgggacgacacgccaccccaatgacctaccccagcgggtccccgt

SEQ ID NO: 117282 - DNA, 398 bp, Arabidopsis thaliana columbia
  unsure (1)..(398): unsure at all n locations
aaaaagagaaggggggggggggggaaaaaaaaagaaaaagagaaacaaangaagggaccggagacgctaaccaaacgacaaccccaaacccccaggaggggagaaaagcaccccaaccattttttttcgggggggggaccaaaacccagaccccatttccacaacaccccccacaaaagggtgacgcggcaaccccccaccatcacataaccacccccgaaggaacaacaagcaccaaaggctaagaacaaacaaccccccaatacggaccccgcacggccaagccgatatcatcccccccaccaccccaataccgggcgcggcgacgcacaccccgacccagccccgacaggcgaaagagagaccgatccaacgaataaagccgccgatcggagtaa

SEQ ID NO: 117283 - DNA, 631 bp, Arabidopsis thaliana columbia
  unsure (1)..(631): unsure at all n locations
ttttttttgggggggacccacagccaaaagcaaggaaaaggnagagngggttggaggggggngagaaacccccaanaaagaaaagagggggagcgggagggggggagggaaggggcacgagggcgggggcgggcgaaggagagaagagagggagggagggggcgagaaagacgcaggcgcggggaggagggggggaggacgaaacgggggaaggggccggggggggggaagggaaggagagggattttttttttaggagggggggggcgggcagagcgcggggagcggcggcggaggggggaaagggaggggccgcaacggaggggaaggagagggggcgggggcgagcgcgccacagagacccaagcggagacagagagcggcgaagcgaggcggagaaaggcggaacggtgagagggggacaccgacgggcagcgggagggnaggccaggagagggagaggcgcgcgacgccgagagggagagaggagacctggcgaacggggcgaggaggggcagcgaggggagggggaagcaagacgaggacggaggagagaggagatgagacgcgaagaggaatgagaaagcgcggagggcccgagagagagagcgagacccggcggcgagcgaga

SEQ ID NO: 117284 - DNA, 604 bp, Arabidopsis thaliana columbia
aggaagaggttttttttttttggaaccaccccaccccaaaaccaggagaacgagaggagagtttaaaaaggaggagaaaaacccggaaacaacaagacgaacggaacaaacagacaagggcggagaaaacggaggacaagacagccggcaggaagaaggggcgaagacaaagcggagagacggacgcaaaagcacacacccaagaggcaagggcgcagacgcacgagcacagaagtaccccggaacgcccggaaggaagccggctttttttttcagcgggggagagaaagaggaccgccaggagcgaagggggaacagagggccacaaagcgcgaggaggaaccgagcaccccgcggagaaacgcgcgcaaaaaagaggcaggaaggagcaagagagcgacgcggaagccgggaccgaacgaaagacggcccacagccgacgaagaagaaggagaacaaaccaaccagcaggcggaggggggcgcggcgaggacgggaccggaggggcgaaggcaagggcggggcaaacagagacgcgaacccggagcgagacaacgcaacgggacagaaaaggggagaaacgagagacggagctagacgcgag

SEQ ID NO: 117285 - DNA, 295 bp, Arabidopsis thaliana columbia
gggggaagaagcccttggggagaggagagcgcgagggccagggggggggcacatcggcgggcgggggattgccgagacgagccaggtgtcgttgccacacaggggcgcgttgcagtggaggggccccgtacacggttgtccccggtttcgggcggaggataccagcgtgggcgattttttttttcgcggggggcggcgccggcggcggtggtgggaccttgcgcggggtgcgcgccttcaggtaggggggagggctggccagtcccgcccattatttgggcggaaagggcggcat

SEQ ID NO: 117286 - DNA, 151 bp, Arabidopsis thaliana columbia
gcacgcgtacgtaggctaggatcctctaaagctttcgcccttgagggtatgctttttaatgcaagaaaattagatttaagctgaagttatttttaggcgggccagattataccagtatgaagatatgccagccaaagaggatcacacgcct

SEQ ID NO: 117287 - DNA, 517 bp, Arabidopsis thaliana columbia
tatagaagactgatgaggtcgaacgcacgcgtacgtaagcttggatcctctagagctgttcgccctttgtttttttctttttggaccataacaaaaacataaatattcaattttctggaataaacaataaatggactgtatcaatgaaacccaactattaatactgaatagaaacatagcggaccttgttttatatacacgaaatccaacaggtgaattttttttgtatctagttatggaatacacaacaacattaaaaagccttggataaaatgcgtttggaaagatctgtactctcaagaactaaagggcttttcgttgaatgcagtggttaggacaaatagtctattagacttgagaaccaaattggcctttgctgggtttcctgcttttaagcgttaacatagtaatttgtttctggtcctaccgcattagacccgtccgactgaaaaaatattcaaaaacccattatccaaagatagtattaagtttagttgcttcagcactacatcccctt

SEQ ID NO: 117288 - DNA, 552 bp, Arabidopsis thaliana columbia
ttctgagtaaccttaggggaagacacgcacgcctgcaggtgccgggcacggaatacccgggtcgacccacgcgtccggccgatgttaccaaataaaagcaatacttgtcatacgcaatcagacaacaacaaacgttacaccaatagtgacacctactactcgatgcactgagaagcacatagcgacgctgtccagttgaacatgacccagatcagctaagctttttgtaagagggccactacaatcagccactctcctgcgatgacatctaatgtatgccgctgctgacaaagtacccacgcattaatactcttgtcgttagcctctcttacgtaccagaccacccacccaccctctattaagtagctaacgggacccaaaattattattctacgctggcaccaattcgagagagacacagcaacttacaaaccctgagacgtcgcgccttgactgaagccgaccaccactttcatcactgagttaaaatcaaagaagacctagtatgtggaaacagatctctcaacggtaacttcaaatggaacgagacca

SEQ ID NO: 117289 - DNA, 518 bp, Arabidopsis thaliana columbia
  unsure (1)..(518): unsure at all n locations
nnnnnnnnnnnnnnnnnnnnnnnnnnnnnnnnnnnnnnnnnnnnnnnnnnnnnnnnnnnnnnnnnnnnnnnnctttgggttttttttttttttttctatatggtactgctgaatgtattaccagcattagctgatgaagcccctgatgagtaagcatttgagtgatctctagatgagccattagacgaagaagaagggtttgtgtagttttgtctgttcacttgctctgtcttcgtcgccacaggtcctctcactttcaaatccatgaaatcagaaatcaaacccggtctgcttattttcttgtagtctatatccttctcccctgttaacaacctcactacggtggacatacttggtcttagcttgggactgtcttgtgtgcacaaaagaccaatttttaggtaccgacaagcttcctctgcgcaaacactccatttaaccctgaatcaacaagatccacgagctcattcccgtcataaagtccccaagctctttccagaagatattgatactcaggg

SEQ ID NO: 117290 - DNA, 500 bp, Arabidopsis thaliana columbia
  unsure (1)..(500): unsure at all n locations
nnnnnnnnnnnnnnnnnnnnnnnnnnnnnnnnnnnnnnnnnnnnnnnnnnnnnnnnnnnnnnnnctttttttttttttttttttttttttttttttttttttttttttttttttttttttttttttttttttttttttttttttaaaccaaaaaaaagggggtttttttttgtcaacaacattggtgggaaaaaaacaacaaagggggtcccaagtttttaacataaattgaacaaagggcccctggtgaaaattgaaaaaaaaccttcttaaaaacgattttttactggttttggtaaaaaattggccggtaaaaactttaatggttagcctttaaaacctttttcacgggctttaggacgtttgacaacgacccgggggttgactttgccttgggaatttttacccaaacccgagcctttgaaaaaacccatttttggcattattcttgacccaaaacctggtgggggctggtaaaagggccccaattttttggccct

SEQ ID NO: 117291 - DNA, 508 bp, Arabidopsis thaliana columbia
  unsure (1)..(508): unsure at all n locations
nnnnnnnnnnnnnnnnnnnnnnnnnnnnnnnnnnnnnnnnnnnnnnnnnnnnnnnnnnnnnnnnnnnnnnnnnnctttttttttttttttttttatagaagaaaaatattctgaaattattggtatcatatgtacaaaacttattagctattatgactgactagtttgcaaagtagcgttacacgttttttatgctcaaactgtacaaagatacattaggctttaggcctttgaggggaaaaaaagaaagatacattggctttatactggaaatatgctttgatcacacactttgtatgtttgtgtgaccttcctcaacaggtagatgaagatctcctacagcacttgtgtggctagtattcaacttcttttcgtcgaggtagtgctgatagacgaatgaaaggaagccgcagatagctaaaataatggagaagatttttgatgcgtccattctatcatggaaaactatcactgccgcaactggaactataggcaatcccacagctgt

SEQ ID NO: 117292 - DNA, 262 bp, Arabidopsis thaliana columbia
actcctgcaggtaccggtcctgaatttccttttcgacgccgggggaaaccctttctgtgagatagacattttcgcctatacggatgtatatttctctctcccttgttatcatactgtcagagaatgggatgaggttggaggtttacacctatcatgtattataacccttacagtagaatggctttctcctatcaattgtcttttttttttgaggggattgggaaggaggctctagacgtgagtgtttttttgtgtaagcacc

SEQ ID NO: 117293 - DNA, 524 bp, Arabidopsis thaliana columbia
  unsure (1)..(524): unsure at all n locations
cgattctannnnnnnnnnnnnnnnnnnnnnnnnnnnnnnnnnnnnnnnnnnnnnnnnnnnnnnnnnnnnnnnnnnnnnnnnncttttgttttttttttttttttaatgaaatggacttttaacatttattactagaatcttatccgatttttctttacaacaaaaaaatgaaaaaatataggtgtgaatatgatccacatcaaattcggatccgaaacgaaagaaattcccgggtcattggagctccgtgttacaaaaaatctccagatttctccatgactccaaggaaaatctcacagttcgctctaaaaaaatattatgtttgggaattcaaaaatcccaaagaatcaaagattcatctaataaactctctcctccgtaatcttcgatgggtaaaatctctgtaaatcgatcaccaccggagaagccagagaagtcgtcggagaaggaatcaaacccgaaattcatcggaagcaaatccaaaaacgaaaaatcataatccaccgtcgatgtagcaacagatg

SEQ ID NO: 117294 - DNA, 202 bp, Arabidopsis thaliana columbia
gggcttggttcccgtccctgcgcacacgttgcgtttcacaaactcaagaagggcggggaataaactttttaaggagcgaggtgttagatgaagattgcttatatggggtcagcgttataaaggggacgggattgaatatatttaaggagatgattatatatttcttttttaatgcaatattgagtgcggggagagatggaga

SEQ ID NO: 117295 - DNA, 353 bp, Arabidopsis thaliana columbia
ggaaaactttttttgagtagagagaaaagagggattacgatgagtgaaggggattacgtataaaagatgggtgttttagtaaagaggaattagaggttggggtaatgaaggaaaacaagagatttttcttttgggggttgcccgcaaagtgcgcgttctttttttttcagttccccgatttttggccgaagagtcccagaagtagctgggattgccttgtgtaaagtggtctaaccgataggggacggaagattaggtgttacagtgtcccacgaagacataaaagtcgattaacgagctgataggcagaggagagcagatagagtaagctagaaagaagaacataagacacc

SEQ ID NO: 117296 - DNA, 279 bp, Arabidopsis thaliana columbia
tggggggaaacccttttttgttgtttaattggggggggggtgttctgtgggggttgatagctgcttccgggactccgcacggtgtggcctctttttgctctagcgccgtcgtgatgcgtggttttttttgggggggctcgggcgtgggacgtttttttttatagtccctcggtgtcgtgggggtacgtggtattgctgctgggtggtgtcgggtgcgcccgcgtgtgtggcgctgacgcgtgcggggtgcgcctggcttttagctgttctttgccgccc

SEQ ID NO: 117297 - DNA, 532 bp, Arabidopsis thaliana columbia
  unsure (1)..(532): unsure at all n locations
cgattctannnnnnnnnnnnnnnnnnnnnnnnnnnnnnnnnnnnnnnnnnnnnnnnnnnnnnnnnnnnnnnnnnnnnnnnnntttttgtttttttttttttttttttttttttggaaattaaccacttatcatgcaaaattcaaccgcaatgtacatattcaaaattcctacacgaataattggggcagcagtgaaaaaagaaatgcaacaaccttaagagttaaaccactaattgttgccttaaccggaaccagacaacaacgggctaattaagtaattaactccactaccgagacgtcggtgacaagaaaattagaaagacaaatttgcccctcaatgaccaaacccaatcgccggaaagtctaattacttaaaagatccggtggacttcctgaatccggcgacgattcattaatcgccggagctttctcagtcacgtctgattccgccgcttgctgcttcgaaagaggaatttttgggatctcagtgagaatctgaacgacttcacgcatggtcggcctctccaccgtt

SEQ ID NO: 117298 - DNA, 531 bp, Arabidopsis thaliana columbia
  unsure (1)..(531): unsure at all n locations
atgatcctgnnnnnnnnnnnnnnnnnnnnnnnnnnnnnnnnnnnnnnnnnnnnnnnnnnnnnnnnnnnnnnnnnnnnnnnnnnccacgcgtccgcccacgcgtccggcgcattgaattacacatcgccgcaaattcgaagtgtctcgagacgtaattacacttgcgatccgagtaaatcgtactcggtcgctgatttgaactacccgtcgttcgccgttaacgttgatggagtcggtgcgtataagtacacgcgcacggtgacgagcgtgggaggagctgggacttactcggttaaagtaacttcggagacgacaggagtcaagatttcggttgaaccggcggttttgaatttcaaggaagctaacgagaaaaaatcgtatacggtgacgtttactgtagactcgtcgaagccgtctggatctaacagctttgggagtattgaatggtcggatgggaaacacgtggtgggaagtcccgtggcgattagctggacatagtcgtaaattatgagaaatgaaaggggttttatg

SEQ ID NO: 117299 - DNA, 518 bp, Arabidopsis thaliana columbia
  unsure (1)..(518): unsure at all n locations
cgattctannnnnnnnnnnnnnnnnnnnnnnnnnnnnnnnnnnnnnnnnnnnnnnnnnnnnnnnnnnnnnnnnnnnnnnnncttttttttttttttttttttttttttttttttttttttttttttttttttttggattaaaacgtgtcgcaaaattaaaacaaaattcaagttgagacagacgtgaaaaacaaaaaacaatcattaattcgttggaggacaacgattgggaaatcgaacaaatcccataaataaccggaaataaaagtttggttttttccggtctagtaaaattaggttttggaaacctcttactccgtggaagctttttgaaagcaatcattttaccacactttggcgattttgggagtttaaattttcttcaccagacgagggaatcgaatcgttgcaactttttttcctggacagattgagtttcggcgacttaggacccgtcagaggaaactttttaagctctggtttcacgggaggtcgttggtattaaaagctaggaacag

SEQ ID NO: 117300 - DNA, 508 bp, Arabidopsis thaliana columbia
  unsure (1)..(508): unsure at all n locations
nnnnnnnnnnnnnnnnnnnnnnnnnnnnnnnnnnnnnnnnnnnnnnnnnnnnnnnnnnnnnnnnnnnnnnnnnncttttttttttttttttttttttttttttttttttttttttttttttttttttttttttttttttttttttaaagggaaaaaaattgggttttaattaatgggtttcccgagaacacaaactttgggtttggcccatttaaaagttttcccccccattgaaaacagaaaaacaagaaaaaattttgggcttttttttacaagcaaaggggccaatttttggacatacataaaaacccaacccttttggaatggggggtattaagaaagggttttttttggggggaaaaaactcaaacgttgggtgcccttttgaaggaaccaagggacttggaacctgaaccccttaggaaaaattggggaaaaaatgcagtttttggagctccaaagaaggggcccccccaaaaaatccagggggcatcccatgggttgcttt

SEQ ID NO: 117301 - DNA, 491 bp, Arabidopsis thaliana columbia
ctatagaagcattatgacgtcgactgcacgcgtacgtaagcttggatcctctagagcggccgccctttttttttttttttagttgaatctttgtctcattaacaaatttttacatatacaaaagcaaaactcatttaaaaagctgtaatagtaaccctaaatagtgtacaaactccctaagaagaattttccttgagaagcttcttctatattggattcatgacaacgtctccttctaacatccgcaacacctgagacattcgtggccttgagttagggtcacggcgaatgcagaggtaagcacatagtgccatacaataaacttcttgctcacagtagcaattcattagacgcggatcaagaagttcgttaatggcttgtttctgcaacaatggtcttgcccattcggtgagacattgttgacctttaggacgttttatgtccatagcttttcttcctgtgataagctcaactaagactaccccaaatga

SEQ ID NO: 117302 - DNA, 523 bp, Arabidopsis thaliana columbia
  unsure (1)..(523): unsure at all n locations
cagctcnnnnnnnnnnnnnnnnnnnnnnnnnnnnnnnnnnnnnnnnnnnnnnnnnnnnnnnnnnnnnnnnnnnccacgcgtccgcccacgcgtccgcaaaggttcaggacctttcagatcagtcaaaagggtcaaaatcaacaaacgatcatcgtgaacagggaagaccattccagactaataatcctcatccgaaggatgctcaaacgaaaaccaactcaagtaggagttgcacaaaggttcacaagcagggaattgcacttggccgttcagtggatctttcaaagttccaaaactatgaggagttagtcgctgagctggacaggctgtttgagttcaatggagagttgatggctcctaagaaagattggttgatagtttacacagatgaagagaatgatatgatgcttgttggtgacgatccttggcaggagttttgttgcatggttcgcaaaatcttcatatacacgaaagaggaagtgaggaagatgaacccggggactttaagctgtaggagcgagga

SEQ ID NO: 117303 - DNA, 531 bp, Arabidopsis thaliana columbia
  unsure (1)..(531): unsure at all n locations
nnnnnnnnnnnnnnnnnnnnnnnnnnnnnnnnnnnnnnnnnnnnnnnnnnnnnnnnnnnnnnnnnnnnnnnnncttgtgtttttttttttagaagagaaagcatttgtattagcattaaaacccacacagttcacaacgtaaaagttatataatatcacagagatcaacctctatgaaaagttcccaagactatggcttaagcaacagccactccatcatcttctcgatgttgctgctgtggataaactgtccgagaatcggtttaaacgctatttagcaggccatggacgttgctcgaggagttaccagagcaggagtctttcctgttatcgggttgatacttgctggatggtctagccttgcccatacttatttcctctgttccggagcataacattgctttgctatatcctccttaaagcgggcgtggctagacatgaacagagcctcgtactctcggctgacatttctatgacgtttaagttaattttagcacggatcggttgcaggggttctgagcattcttttat

SEQ ID NO: 117304 - DNA, 531 bp, Arabidopsis thaliana columbia
  unsure (1)..(531): unsure at all n locations
nnnnnnnnnnnnnnnnnnnnnnnnnnnnnnnnnnnnnnnnnnnnnnnnnnnnnnnnnnnnnnnnnnnnnnnnnnctttgttttttttttttttttttttttttttttttttttttttttttttttttggccccggaaagttattattaaaaatttggaaggaacatagttttgtacaactttaatcaaaatttttcgacgacatttttatcaacacaaacctggaaaattttttatctaaaaatgacttcatagaaaacctgagaaaactttgttacaaacaaataaaaaaagcgggatcctcaagagggggaaatagcctaacccttttgtttttttttcaggcagggtttgaatcgacattgaagtcttgaaagaaagatttaactccttcataaggggaccaacaaattgctgctgcaggagcatggaaaaacattcttgggagccatccccttaaaagtcctctggatccatcttttttcactatcggtctaaggacaggggtaatagaactactagggaagcggtc

SEQ ID NO: 117305 - DNA, 523 bp, Arabidopsis thaliana columbia
  unsure (1)..(523): unsure at all n locations
nnnnnnnnnnnnnnnnnnnnnnnnnnnnnnnnnnnnnnnnnnnnnnnnnnnnnnnnnnnnnnnnnnnnnnnnncttttttttttttttttttaaataaacaaacttcattcctcacaacacaaaaatgtacaaaaccaacaataagcagaaattaaaaagagaaaaatggtcacaatctcagatttaaaagaaaagaagactaaaaagcttaggctatatctatgactaactgaatcaaatccaaatacaaaacaattagctttgtacaaagaatccagctttgaatctcaatcattcattatttatcatcagagattgataaggaaccttcttgatctccacaaatgttgagtactcagtgctcattggttgcttccatggctcaccatccatttgcaagaatgcgtctctccagtcacctcctcttagctcaaatcttaccgcagcagcctgagctatgtgcttggcagagatgagctcagccatgacaaatgacgcgtgccatccttgcttaaaaccgaa

SEQ ID NO: 117306 - DNA, 373 bp, Arabidopsis thaliana columbia
  unsure (1)..(373): unsure at all n locations
cgattctannnnnnnnnnnnnnnnnnnnnnnnnnnnnnnnnnnnnnnnnnnnnnnnnnnnnnnnnnnnnnnnnnnnnnnnnctttttttttttttttttttttttttatccaaacttcactactgaattactgtgaaaatatgttacatctaaatgttaagaatctctgggtcataaatttttctaccaaaaaaataagaaagaaaagacttttaaatagaagaaagggaatcagagaggtaggtggctctcggatcagatcatctctgaggctgatcagatgcagaggctccaacggaaggtgcagttggtgcaccggtagccgacccgttctcaggcggtggagcgacttcccatttaccttcagactcga

SEQ ID NO: 117307 - DNA, 515 bp, Arabidopsis thaliana columbia
  unsure (1)..(515): unsure at all n locations
nnnnnnnnnnnnnnnnnnnnnnnnnnnnnnnnnnnnnnnnnnnnnnnnnnnnnnnnnnnnnnnnnnnnnnnnnnnctttgtttttttttttttttacaagagaatgttgtactaattttctcatctaacccacattttaaattctttcacaaaaaccaaataaacgggagattaacaacaaaccagcagtagaaagtagtaacacaaagctggtttgataataaggtttttcaaagaaagaatatatatgcaaataacgaaactcagctgtagcttcaacttaaacgcaatagacgccttgcctgaggaggatttggtggtggccctgaatttggatgacttgctccagcgggacccccaccaccacgcagcggggggcgacggcaatgagtgctggtccacagttttaaaacatctagaaccagctgagttaatgaagaggaagagaatattattggcatgcttgtccattgtgagcgggtcttaagagaaacgcaatgggcatgaagggggtc

SEQ ID NO: 117308 - DNA, 491 bp, Arabidopsis thaliana columbia
atgacgtcgcctgcacgcgtacgtaagcttggatcctctagagcggccgccctttggttttttttttttttttttttttttttttttttttttttttttttttttttttttttgggggaaaaacctctactaaaaatattgaaaattcagtttttaaaatagagaaacccaaacttggttttatgaaaaacaaaaaccccgaattttccgtttttaagggggatgggaaaaaattggggaaaaaggaaaaaaatccttttggttatctaaggtgcctacttttaaacctattttcccttttaaaaacacaaaaatttaccaaaactttttttattatatatccttaaaaaaaggtcgcggggactttttttttttttgggaagcttataaaaagaatttggttgccccccctcctttcggggggtccccccaatgggaactttttttttttttggctttgggtttgggaactttttaacctttgaaccttg

SEQ ID NO: 117309 - DNA, 520 bp, Arabidopsis thaliana columbia
  unsure (1)..(520): unsure at all n locations
nnnnnnnnnnnnnnnnnnnnnnnnnnnnnnnnnnnnnnnnnnnnnnnnnnnnnnnnnnnnnnnnnnnnnnnnncttttgttttttttttttttctttttttttttttttttttttttttttttttttttttttttttttttttttttttttttttggaaaaacaaaaaaaaaactgggtttttttgcccaaaaaaaaaaggaagcaagtttgttgctaattttaagccttctgaaaccgggggccgttaaatgctccatgctgacccgttttaccctccagtttcctttttttaatgactccctcccaggggaaggcttcaagtgggggggccccattggggaaaacaacaatgatcccgaggggggcttttttcccctgctttttgggactcaatttgcctacccctttaaaaacgttccccccccctaggataattttcggggcccccaccggggcgggggaaatggtcccaaaaaacctttgctggggcttgggtttggcctaaaaaactcgaaacc

SEQ ID NO: 117310 - DNA, 523 bp, Arabidopsis thaliana columbia
  unsure (1)..(523): unsure at all n locations
nnnnnnnnnnnnnnnnnnnnnnnnnnnnnnnnnnnnnnnnnnnnnnnnnnnnnnnnnnnnnnnnnnnnnnnnnctttgggtttttttttttttttttttttttttttttttttttttttttttttttttttttaaacaaaaaaaacacaaaccttttatacattaaactttagttttacaagcttttgtgcatgggaaatacataatttgaaattaccccctggccacggaaatgatcctgggatttccagagagaatactgatttaatcataacaaatcgaaataggaatttttggggatgggggggataaacaaaagcgaaaacgggttaggggttttatgccctgaatccacgggtaagcgagctccaaggaccagttgggaggggggtacaagcctgggaagccgcctcctccatttgctccatttgaatccctgcattgcaaaagtttgaaaaaaaccttatgggcttgattccgtactgagacagggatccacagggcctcttgaaagctttcacct

SEQ ID NO: 117311 - DNA, 515 bp, Arabidopsis thaliana columbia
  unsure (1)..(515): unsure at all n locations
atttgatttttaagggttttttggggggaaaactttatatgtaattgggataattaaaaaataaaagaattaagagaatttggaagaaggaaaaaaatatattataaaaagaatggataggagtataagattataatttgagaggataatattgtagttattattttttttttgaagaggtggagtataataatatatataatgttttttataggttgaagtgtatagatatgtgattaattatttattaagataaaattattaagggtggatgggaagatagttaagttatntaaagtgagagaagtaaaattatttttaaataattggattgttttaatatgttgatgtttatgtgtntgtatatggtaattatatgtttatataggtattaaagtgattatgtggataaattttttatgtattgtagttaaaaggggggtgatatggatgtttattgatttgttagtaatagttagatatgtggttaggtaatatagaaagaatttgatagt

SEQ ID NO: 117312 - DNA, 508 bp, Arabidopsis thaliana columbia
  unsure (1)..(508): unsure at all n locations
nnnnnnnnnnnnnnnnnnnnnnnnnnnnnnnnnnnnnnnnnnnnnnnnnnnnnnnnnnnnnnnnnnnnnnnnnnctttttttttttttttaagtagtgcttgtcatgtgttcatataacgtcaagacatacatcttgaatctcatttgtttactcaagaccaaaatgtacaactaggaccctagttttcctctagtttctactaaacattacaactaggattaacaaaactcaagtcataatgaattagtcatatgtaatataacactcacgcatacctttaaagatcccaaaaagttctaaggaatttactcaatggatctatctttctttagccattcgaatttactgcaatttccctaatggagactcgagagcatgatcatcgactagccatagaccataatcttggaaccgtctcattttcctatcgtaaccgataatgtagttattgtggactatgacatgtttcccctttgtctctttaacccatgccgcatcattgaaat

SEQ ID NO: 117313 - DNA, 504 bp, Arabidopsis thaliana columbia
  unsure (1)..(504): unsure at all n locations
nnnnnnnnnnnnnnnnnnnnnnnnnnnnnnnnnnnnnnnnnnnnnnnnnnnnnnnnnnnnnnnnnnnnnnnnnctttttttttttttttttttatcaacttgtcattaataacaataggtgatagaatgtggcagagagtttctatggttgttaagaatcagttgcaaagatgagatgatctccatctcttataacatctacatcatcaatctctgcattgttgtctttgttcataactttggtagcaacaataccaaacttgttggaacccaattctagcaactccttgaaactcccaggaagcagtaccagcttcccggctatgtcatctttctctgcacaactaatcgtcactctcaccgggtttccagttctgccttcatctaccgtagctagcccgttcttgggtacgctttgatttgctaatataccaaacaacgagttatcgaagttgttagttttacgtcttgctcttgtttctcgaatcctgaaagacacttctc

SEQ ID NO: 117314 - DNA, 506 bp, Arabidopsis thaliana columbia
atgacgtcgcatgcacgcgtacgtaagcttggatcctctagagcagccgccctttggtttttttttttttttttttttttttttttttttttttttttttttttttttttttttttttggggccggggaacaaaaatttaagttccattgggggatttcaaaggggtcaaaattttatcgttttacaaaaaaaagaggagggttcatgactgtaaaatccccctttttttttcaatttaaatttaacgggtccgggtttggatccgggtccactactggggctttgcaatccaccttatattgaaaagtttttttaaaaaaagtttaatatgaattatcccaaacaagtttgtattttccaaccattagcgtaaaaaagttcgcctggtcaacttcttaccgacgggaagggaatttcaaagttttttcccctaaaacatttattgaccccaacctaaaaccggattccaagcttattttggcttgaaacaaagaaaaatcccaaa

SEQ ID NO: 117315 - DNA, 532 bp, Arabidopsis thaliana columbia
  unsure (1)..(532): unsure at all n locations
atgatcctnnnnnnnnnnnnnnnnnnnnnnnnnnnnnnnnnnnnnnnnnnnnnnnnnnnnnnnnnnnnnnnnnnnnnnnnnnccacgcgtccgcataaggaagctctctgttcagatgaaaaagagagatcgttcgcaaacgtctccgatttggctcgctcgtttggagcaaacagcactgttgtgctggctgatcatcttcttcgaatgtgcattcgcgttttccactgttaaagagtatgcttccaagttctgatcagatcttgtgatagatcttggtaccacttactctggtgtcggggttgacaagaatggtcatgttgaaattattggcaatggccgatgataccagtttacaccttcatgggttggttctactgactctgtaaggctcattggcgatgctgctaagaatcaggctgctgactatcctgagaggactgtcttcgtccttaagagattgttcgggcgatgctttgaggacattgttgttctgaaagacaggtagcttgtaccttaccatattgtgatc

SEQ ID NO: 117316 - DNA, 463 bp, Arabidopsis thaliana columbia
tttttaggtagtgtttggaaacagagaagcccttaatttggtgatagaagataagaaaggaagatatcaagagtggagggattcgttcactgtgcaaacaatacaataagctcctactctattaaatgcgagagaggacgaaatttttttttagaggggggtgcagaaacagacaaagactattttctttttaaaacccacccatggcttgtgaagagagggaaacacccagaagtaaaaaaacgcccgagggcagaaggaacgaattggagagagagcgacgaggacggggatagggaacgaaacgaaaagaaggttgagcatacgagagtattcaagcgatggagctagaagagggcgtggagaaaagaggaaatcggaaaggaggcagacgaagcgaggtgatagagaggtataagacgatgaccagagaaatagtcaaggaagagcgatgggagtaggt

SEQ ID NO: 117317 - DNA, 490 bp, Arabidopsis thaliana columbia
ctatgacgtcgcatgcacgcgtacgctagcttggatcctctagagcggccgccctttgtttttttttttttttttttttttttttttttttttttttttttttttttttttttttttttttttgaaaaggaaatagtttaatttattattgggaaaaacaccccttaataaaccggtttaggggttcaacaatttagccaagggaataaaaaaaaaattttggggggaaaaaaaaagggaggaacaaaaggttggctggaaaaaaggttaaacaatcccaaaataccaaaaaattgggggggctttaggggtttgaacaaaaggatttttaaggtttttaagggaaaaggggggggggtgggcttaaggggagctttttggttggactctgggtccaaaggggggggggccaaaaaatggagctttgggggagccaagggcctggccctttgggtcctgcctttgagaaacggggggaatggggggccac

SEQ ID NO: 117318 - DNA, 341 bp, Arabidopsis thaliana columbia
agaacaagcggtacgtaggaaaaaagcggacagggttacaggacgtagcgagacaacggccgggcgcccggacggaacactctttttaaggggaaaaaacagcagactatttttcaaaggcccccccgaggatcgggacaacagacgggcaagaagcaaggaccagacaagggaaaaaagcaaaaaggaccacacccacgaagaacgaccgagccaagaaaagcacccgacctgcgcgcgacagtgagaacaagcacgcgcgcaagaggaaaaaagagcgccccgcgagaacgaacagcgccaaccccgagagcgcgtaccacgacgccgggtggagtgat

SEQ ID NO: 117319 - DNA, 600 bp, Arabidopsis thaliana columbia
  unsure (1)..(600): unsure at all n locations
gggggggggtggggggtggggngtggtagggtggtttggagagggagaggaaaaaaccttggtgtgagtagaatggaggagtgatttaaagagagagtagtgagtatgtttgtggagagtatgaaggtagagagtgatgagtatgtattatgggagagttttatggtgtttatagtgtttgagagttaagtgtgatgatgatagtgtaaatagattaggtgaggaatattattttttattaagtagggggtggaggatataggttttttatgatgtgttgttttgatgaggtagtgggtagagttgtatgtagttatatgataggaaggggatgaaaggaaatatgtaagtgagaggagttaggttgtttttatttatgttaggttggatgtgatgatgttatagttattagtggttgtgattaagttataatgggtgtggttagagagatggagattatnttggtgaatttggagttggggttagtagagagataatttttgttagagtttatttagaatgtattatgtttatgttgtgggtttaaagttagagtgttaggtttgtatagtagtgtggaggtaatgatgtagaattgga

SEQ ID NO: 117320 - DNA, 414 bp, Arabidopsis thaliana columbia
  unsure (1)..(414): unsure at all n locations
ggtgcgtaagcttggatcctctagagcgcttcngcctgggggggtaaaaccccggaagctatggttctttacatatataaacattttacattgtatttcgcatgtaatcgtctgttcaaaggttgtatttttattggcctcaaagcccctaaaccacagagtcaaaggaaagatctttattacatctgatattttttttttctgaggctaggcgttcgtacatcgccttgtcttttgcccaaaacatctctcggacccgtacgcattgtgagaccaacatataaatacggcaacgctaccactcactttcgcaagctactccataccgtcacaaacatcccaagtttatcattagctctactcctcccgcacgccccctcttctctcccgctactctcttttgtcctcattcct

SEQ ID NO: 117321 - DNA, 569 bp, Arabidopsis thaliana columbia
  unsure (1)..(569): unsure at all n locations
cttacgttatgctttaagagggagggggggtatattccttggactaccggccggggtctgnggggggataccncgcctgtaggtaccggtccggaatttctggttttatccacggggggaggacccttatagagaaaaacataacaatgggaggtttgagaagactagagaagaacatctgtacaggatcgatgagttctaggcatcattctacagaaggcatgggaaagcgctggccactgtcattcattcggaagatgaagaccatcttgaataaaattggggcgattttttttttagggtggtgtgaatatctggtgtttaccactctaacgcacgcgtttctttaatatagagctacgtttaactcgattgcgattatgctggccatcatcttactgctggtgcactctaattcatgtgatacctttcctagatttgtttcttcttacctactcctcactgttgactccacccaatatccgttatctatttgtgctggtatgggtcgtgcttctgaggggttgggtcgttcattgtcttcaactctctgtttatttgtagacgtt

SEQ ID NO: 117322 - DNA, 464 bp, Arabidopsis thaliana columbia
gggggaaaactttgtgggggtggagggggggatggtagaggggttagggatgttgtggttataaggagttttgttgtgttaaagttatgttggtgagtatgagtaatagttaagatgataaatttttttttttagggggtgaagagagaaagaggaatgatgtttttttttgtagggtgtggaggggtttgtttgtagaggtgtggaaataggtttgttgtttattgttatgtgtgtttgtttgtttggtgtggtgttggttgttatgttaagtgattgttagaatagtgagtaattatgttgagtataaaaaatttaatttgtatgttgttgtatgtggtatgtggtggttttatttttttttgttttggttttttgtttgtggtgtaagtttagtgagattaggattaaggattaatagtagtggattgggtagagtttgagatgttttatgttttattttt

SEQ ID NO: 117323 - DNA, 503 bp, Arabidopsis thaliana columbia
  unsure (1)..(503): unsure at all n locations
gggggggggttaaaccttttttgtgtggtggtctggngatgttttgtgtgtctgtgtggtgttgtttggggttgggtgtgcctcttattcggtgttgtcgctgtggggtgtggggtcttgtgggtggtttgtggttgtggagtttcgccggttgcgcggtgctaccgcgcgtgagctgcgcgggtttttttttttttctgcgtgttttgtgngacgcgcgcccgcctgtgtgttctcgcggtggatgagctcccctgagcgcttgggggcgggggcgcgtccgcgggccggggggtcggctgcgcggcggtcttgtctctgcgggggtgatggggccgggcgcgtacgtgggggcgcgcctccggcggggagtgcggcgccgcgcgcgtggctcgcgcggcgcgtgctccggggtgtggggggggggggtcggcgtcggggggggggcgtcggtgtggtgtggcactgttcttctgtcccgttcgtgttggtcggggcggggc

SEQ ID NO: 117324 - DNA, 549 bp, Arabidopsis thaliana columbia
  unsure (1)..(549): unsure at all n locations
acgactcactattgggaaagctggcacgcctgcaggtaccggtccggaattcccgggtcgacccacgcgtgcgcgaaatggaacttctcgccggcgactgtcggaaacgagtcggcgacgactttgaggaagatattaacccattcgatggttcggacggtggttgcgggtggatgtacggtacccgncaaatgggtttctacgggaacgacgacgctttgttttttctggagggggtggctccacctccccagaaattggaacccaatatggtgtctcctctatgtttgctgtggtgtcctcgcattagggtggtgggtgcgtgtgggcggtgttggtgggcgtggtggttcgttttgcttctggttcgtccttctacctacccaggccgctcgtggtgtcggcgggcgtcgaggcgtgtgcccttgtgtgtaaagttcttctgtttccttttcgtctgtttggtgtgttttatggtcctccgtgtcttctggcatgctcctttcgcctatcagtcctgttatcgcctgcggcggcgcgtcgggtgcg

SEQ ID NO: 117325 - DNA, 459 bp, Arabidopsis thaliana columbia
ctacgactcactattagggaagctggcacgcctgcaggtaccggtccggaattcccgggtcgacccacgcgtgcgcacaaacacacacacacacagcctttttccttcgttgatcgattgttaagctcgatccaatggcggataacaccgataatcggagatccttatggggagttccggagaagcttcagcttcacatagcgatgctgacgttgcaattcgttttttttcgggagggggcgtggggctgtttctcctctttacgctttaataacctacgctgacctatcgctgcgatatacttcacccagtaatatactctaatgtattgtccttcctcccgacggactgctcgctcgattaccttggcgtcccctccttactcgcttgttcctgcctttcttttcctttttttgctatgtcctttcactctgattcccgtcgctcatctctttctat

SEQ ID NO: 117326 - DNA, 555 bp, Arabidopsis thaliana columbia
  unsure (1)..(555): unsure at all n locations
gccagctctctacgactcactattagggaagctggcacgcctgcaggtaccggtccgngatcccgggtcgacccacgcgtccgctgtcgcgtgtacttgtcacttactgaacccataaagccatcaatcccaaacacaccattacaatggcttcttctatcttcttcttcttccttatcttcctctccgtcgtctccgccgtcaaactacctctctctcccttctgccactccgtccaatcaccagaggacccttacctgtctctgcggcgggtgggtgaatgctgaatcggtggaggtgatgggcggaaacacctggcctgagtggtaccggtcttgtgtgtggttatttttccccgtcgatggcttttctctcgtactttcgttgttgccatttatgctactattcttctgccaatacgtatcgcgtttatccttgaggtgcttcacaccgctcatccgccggtgccactgctcttgaatatccgccctctaccccttaatcgactctccccatctcgcctctgaccccaaggtggtcccattgtctcttcga

SEQ ID NO: 117327 - DNA, 544 bp, Arabidopsis thaliana columbia
gctctctacgactcactattggggaagctggcacgcctgcaggtaccggtccggaattcccgggtcgacccacgcgtccgaccgtccccttgttatacacatttaatggagtttacactagggacagtgaaatgagttcttcattgactttgacttgcactgacggtgctcctgccttaaaacaaagaaccatcggtctcgctaacacccacttgtcgattccctcgcagctcatctccatgtaccagcttcctcataagatagctctttgtttgccttccaccgaacgaagtcagtctcataatggtgacctttggatcggtaaaggggaatattattatctgccctaccatagaagatgcgtgtgaaatctttcgctgcacacctctgatgtgataatacagtcccctccaaaacgtaaaccatgcagaataaatctctgcgtagacccgaactctatcctcggcatatatcctgatccctcctttacctaatctgcttccatctcaacatcctccgttacattactcgcataactaatgag

SEQ ID NO: 117328 - DNA, 512 bp, Arabidopsis thaliana columbia
  unsure (1)..(512): unsure at all n locations
gctctctacgactcactatagggaaagctggcacgcctgcaggtaccggtccggaattcccgggtcgacccacgcgtgcggtgattcattaaccacttcatgataattataatcttccttctcttctgacgattgaattacatcttcttctgatagctgttctgatttttttctgtatacaaagtaaattcaaagtggacaaacatcggtattntaatctcctctcgatattgaagtgttgcttgttctctgggggggataagagaggggaacagaatgaccccgttggcgaagcataatggcgtgtctgttatgcacgaatagtacttcacttcggatgctcgaacgcttcgcctagctgcagttaacgttgtttccctcagaagacatgctatgattagtcccttcaattgccttctccctgagtgcgcatagtactcggtgctgtaccccatcagttcgaattcttcacgcggtagcggtagagatctgtgtgtcctcgtcatgcagat

SEQ ID NO: 117329 - DNA, 540 bp, Arabidopsis thaliana columbia
  unsure (1)..(540): unsure at all n locations
gctctctacgactcactattagggaagctggtacgcctgcaggtaccggtccggaattcccgggtcgacccacgcgtgcgcacacactgctcccaagtcctctcacttcttcttcttcctccgacaccgttgcttaacggttttccatttttgtcccttcaagatgatctcatggcacgacctctacacggtcctcaccgccgtgattcctctctacgtggccatgatccttgcttacggctctgtccggtggnggnaaatcttctcacccgaccaatgctcccgnaatcaaccgtttgtgggggccatcttggggcggcctgtgggtgtgctgtggctgggaggggccgcacgacgggtgacgcggtgtatcctactgtctcatagggctgctacgcgataatacacacgcccatatctttcctatcctttcggcctgcgaggtttgttccctaatcctccgctccactcgccgtatatcctcaccttcctcgatactatttaacatgaagggtattaccgtccatccgcgttatattc

SEQ ID NO: 117330 - DNA, 535 bp, Arabidopsis thaliana columbia
atgatactccaggtctctacgactcactattgggaaagctggcacgcctgcaggtaccggtccggaattcccgggtcgacccacgcgtccgctacaactgatttctacacatcccatgagtgtttgcttctgccttatgaacagtcccttacaaggttggattcaacttctggtctctactatgattgttctgcacacatggtctggtgcggagagcgtaccagacaattggatggcgctcatgtcgagtttctcagggggattgctaatcctctgggcattaaggtgagcaacaaaatggatccctttgagctggttaagctagtagaaatcctgaatcctaataacaagcctggaagaatcactgtaattgtgagaatgggtgccgagaacatgagagttaagcttccccacctgatcagagcagtccgcagatcaggccagattgtgacatgggtctgcgatccaatgcatggaaacaccatcaaagcaccttgcggtcttaaaacacgtgcctttgactcaatactggctg

SEQ ID NO: 117331 - DNA, 529 bp, Arabidopsis thaliana columbia
  unsure (1)..(529): unsure at all n locations
agctctcnnnnnnnnnnnnnnnnnnnnnnnnnnnnnnnnnnnnnnnnnnnnnnnnnnnnnnnnnnnnnnnccacgcggggcgcgagaaccgaaaaaaacactaattgtgctttccctttagattcatttgtattttcttttggagcttttgaacaatggagtcatcacaagcaacgacgaacccaacgagaggagcaggaggaaggaaaggtggagataggaagaagagtgttcgtaaatctgggaatgctgtgcccaattcatcgatatgtccatggctccctactaggataacgaccggctccatatcggatacgatgctgaggcttcggtaatcttcgaggcatggatggacaaccatggcaaagtagaccgttccgtagctgagaatgcaccgagtgttgataggctaacggcagaatcttgtgattctatgtgggcagtgacggacgtcgaggatgtcggttggtgtgtaggtgtgagtgcttagtgttgtgacgggtatttgtctgttgctgcccccgttagc

SEQ ID NO: 117332 - DNA, 507 bp, Arabidopsis thaliana columbia
  unsure (1)..(507): unsure at all n locations
nnnnnnnnnnnnnnnnnnnnnnnnnnnnnnnnnnnnnnnnnnnnnnnnnnnnnnnnnnnnnnnnnnnnnnccacgcgtgcgctttgtctctgtcgcaatctcaaccatatggagaaagacatggcaatgatgggagacaaactgatactgagaggcttgaaattttatggtttccatggagctattcctgaagagaagacgcttggccagatgtttatgcttgacatctatgcttggatgtgtctcaaaaaggctggtctatcagacaacttagctgattctgtcagctatgtcgacatttacaagttagttttaattactaatatgagaggatgtgctagagatagataactaaattatcccgtttactctgggccaatgcgtgtttattggggcctgctgcagcaatgacatcgctttgctctgctggaatcggcctggcttcatgcgcccattccgacccccccccaccctcgaatataccgccttccgcttccctctcctcat

SEQ ID NO: 117333 - DNA, 547 bp, Arabidopsis thaliana columbia
  unsure (1)..(547): unsure at all n locations
cagctctcnnnnnnnnnnnnnnnnnnnnnnnnnnnnnnnnnnnnnnnnnnnnnnnnnnnnnnnnnnnnnnnccacgcgtgcgcataacgcgaaaatacactaatatgtgcatttccatatagattcatttgtattttcttttggagcttatgaacaatggagttattacaagcaacgactataccaacgagaggagctatgaggaaggaaaggcggtaataggacgaattcaaaccccaacaaaactgcgattactcctccttcagagaatctccaatgttccgtaacgccgaacaatgcagatcttccggcgaagattccggcgtctgtaaccctatatctggtcacgtagccataactctagacatggataccttgggggcttattggaacgcgtgaattgttacctgcaagatctggtttgccctagggtttgttgttgtcactatgctgaccgtcgcggaagtggaaaaccttcttttcgtgttgtgcttttcgtttggacaggtgtggagtccgaggaatgcttgtgtttttctgttaccta

SEQ ID NO: 117334 - DNA, 190 bp, Arabidopsis thaliana columbia
  unsure (1)..(190): unsure at all n locations
cctgcaggtaccggtccgnattccncggtctacccacgcgtgcggcgctcgctgttggttgtcctaatctggttaaattgaaggtgaagaaatgtaaaggtgtgactggtggatattgtattgtatttgttggtgtttagaatatgatatgttagataggatattgtaatttatttgatgagatagataa

SEQ ID NO: 117335 - DNA, 479 bp, Arabidopsis thaliana columbia
  unsure (1)..(479): unsure at all n locations
tgatactccagcgtctnnnnnnnnnnnnnnnnnnnnnnnnnnnnnnnnnnnnnnnnnnnnnnnnnnnnnnnnnnnnnnnnccacgcgtgcgttctggtcatcgatcaagcctgctcattttggtgtaaagataacgtccaaatctctctttgggatattccgatatgttacacttnggagtgtcacttggnttaacttttccaaagtcttccttttggaaaaaaaagggttttttttttaaaaaaaaaaaccccccccccccctttttttttttttcacccnnnnttttttttttggttttttaaaaaaaagccccaaaaaaaaaaaaaacccccccccccccaaaaaggtttttgggggggggcccccccaaaaaattttttttttttaaaaaaaaaaaaaaccctctttaaaaaaaaaaaaaaaaggggcgggggtggggtggttccccccccccccccccccctgcgggggggggg

SEQ ID NO: 117336 - DNA, 504 bp, Arabidopsis thaliana columbia
ctgacccgcctgcaggtaccggtccggaattcccgggtcttcccacgcgtccgccgctccttaaggctatcgccgataaataacgcctgctgtggttgctaccaccgacgcaaccttaacggcatttttaatggcgttttctgatgacgatttctctttacttggagactatcttacaaaccctaatcaacatcaccaccatcatctatttgttgataacacgccctacgctccttatccattcaatccgaaaccaccgaattatatccttttaccgtatcaccagattaacggtgtcgatgactacctgaccccatgggttggtgacacccgttatgttttacacggtcacggtgttaatactttgactggggacgaaaacgggaatccgagtgatcagatggggcatctgttctcgaatgcgaatactaccatgttcctggtcatgtgatctatgatgtggagtggtgggcggaatataccgcacaatgatgaggaagcacg

SEQ ID NO: 117337 - DNA, 483 bp, Arabidopsis thaliana columbia
  unsure (1)..(483): unsure at all n locations
gctctctacgactcactataggggaagctggcacgcctgcaggtaccggtccgngattcccgggtcgacccacgcgtgcggtttttttttgctctctctgccttcttgactttcaaaagactctttctttcttttggattgattttggattctagggctctctttcttttagtgggtttttgatgggggtgttggtggtaggatagatttagaggggaggatagttttttttttaaagggggggataagtataaatattgagtatttgtagattgtctgagatgcatatcatttccttcttgttacacccccgcccgatccagaacagcgcaacccaccgcccctgtcgcttggtggcactccgccttactcgcttcatccccagcgcgactggaaccttcagcccactagacatgtgactatcatgttactttacggacgcgaccctcaggtcatgcctgacgtacattccacacccccatc

SEQ ID NO: 117338 - DNA, 536 bp, Arabidopsis thaliana columbia
ttgatactgctagcgtctactacgactcactattagggaagctggtacgcctgcaggtaccggtccggaattcccgggtcgacccacgcgtgcgaagaggtcaaggatatattcaataaaccgttagagagcctaaatgggatcttttgagcgttgagactacatgaggtagatgagatggaaatctaagattttacaaaactatatgagtcgaataatatgtcagatggaagaaagaagaggtttttttttttagggggtgtgaggcgaacactttgcaaataataggtttattttagtctctatcctttagtgtttaattggtctataatatatgtgttctgattttgattgttttatcttattatttctttgtattgtacactacatctaagacattatctttctcttgttatacacgatcgcaattattgtattttatgtctgcgttaaatgattcttatttatattttggcttttttcattttatggttttttgtttttattctgtttttcgtttttttttttatacgtcg

SEQ ID NO: 117339 - DNA, 551 bp, Arabidopsis thaliana columbia
  unsure (1)..(551): unsure at all n locations
gcctgcaggtacaggtccggantcccgggtcgacccacgcgtgcgatttcttcttcttcttcagaattcagatcagatctccggcgataatctttgagatctgaaatttcttacaatcaggagagaaagatgtgcggattaaaggtagatacagtatataagaaaagtaggattataaagtgcgtatacccagatttttttttaaaggggggggggggacgaccaccacgagtgggatttcctgtgttagttatgttattattcctaactatttctagttgaacataaattctcttatccaagtaatatacaataagaacaatcattggagattgacttagcataagagataaatgttataattgacgtatcaaagtctgttgtaggtatgtaatgtatctgttattatgaccatatagttatatgcttatataatttaatgtatcagttatgcttatgaattttattatagattcgtattcccgactaaattaatattattaaataaatataagaaatcatattcatgcgcgttgaacccgaatggtcgt

SEQ ID NO: 117340 - DNA, 505 bp, Arabidopsis thaliana columbia
  unsure (1)..(505): unsure at all n locations
cgactcactataggggagctggcacgcctgcaggtaccggtccgngatcccgggtcgacccacgcgtcgcggatctctctctgtctctgtcccgcggagtccccgagagattgatcaccatcacttttgtaccttccttgtactacctatggcgtctgctagcttcgttaagcctaacaccctctcttctccatggatcggccaacgctcctttgctcatactttctgctggggggtggccncctcctcgagtgtccttcgcgatccgcgccgccgcttactataacggcgcccgagatcgccggcgcgccgttgaatggtctcggaaactcggcccccccccgcgaacgagccaagcagagactctccgggtcccctcccccacatgacccgccccatccggagcaagcgcgtaccttatccatcatgcgtctacctttctctctaggcacagtttgatcgttaccgcgcggtggtcgtcgactctgttgggaattcagggctg

SEQ ID NO: 117341 - DNA, 492 bp, Arabidopsis thaliana columbia
  unsure (1)..(492): unsure at all n locations
gcctgcaggtaccggtccggnantcccgggtcgacccacgcgtcgcgatttcgtgagtgaagagatttagagtaatcatgggtttaactcgaaatttcattttatggattcttttgtcatctctcttcacggcgattcaactaacgtggcgtgaacggcacactggaccaccacgctgtgaagacggccgagctcttgctcttttaagggcggtgaccgccgcgccgaccccaagatcccgcatctcacgtctggcccgccacgcttaccatcccccacctgtccgcaaccccctcatgtgcgccccggcgctacatccctcccccgccgcccttactcgccctgacctatctgtcgtttctcctctgcgcctcctctgcgctgctccaattccctccctatccttcgcccatccccgacgatacccctcctgttcctctccccaccacctgctgcgccaatgaccctctctccactactctacccactccc

SEQ ID NO: 117342 - DNA, 171 bp, Arabidopsis thaliana columbia
  unsure (1)..(171): unsure at all n locations
cgactcactataggggaagctggcacgcctgcaggtaccggtccggtattcccgggtcgaccccacgcgtccccggggaggcttnnccgattaataccgcagttaggttggtgttttgctgaattttcagaagcctttgtnttcttcaactctttcgatatgcttagaaag

SEQ ID NO: 117343 - DNA, 528 bp, Arabidopsis thaliana columbia
  unsure (1)..(528): unsure at all n locations
cagctctctacgactcactatagggaaagctggcacgcctgcaggtaccggtccggaattcccgggtcgacccacgcgtccgcttccctttggttctcaaggcatgcaccagagcctcgagtcgcaagcttgggattgatcttcattcccttgtggtcaaatgtgggtttaatcacgatgtggccgctatgacgagcctgctctctatctactctggatccgggcgtttgaatgatgcccacaaactgttcgacgaaattcctgacagaagcgttgttacttggacggctttgtttagtgggtatactacttcaggaagacacagggaagccattgatttgtttaagaagatggtggagatgggtgngaaancnnntngnntttntattgtttagggttatgttgttggggttatgtaggaggattgaatattatatattttttgaattaatagaggttgtgggttgtttgtgttggtggtgattgttgaagtttgtgtttatttaagagtttgttttattagggaag

SEQ ID NO: 117344 - DNA, 551 bp, Arabidopsis thaliana columbia
  unsure (1)..(551): unsure at all n locations
nnnnnnnnnnnnnnnnnnnnnnnnnnnnnnnnnnnnnnnnnnnnnnnnnnnnnnnnnnnnnnnnnnnnnnnccacgcgtgcgatgtagactgggcgccactcggaagtttcactaatgctaatgacggggaccagctcgggacactatggcatgaggtcagctatacatgaaacaggtatgggaaggactagtaagggagaccagaatgaataattctgtgagtttgagatgctgatagttgtgagaggcgaggacatattgactgtgaggacaggagttgaatcttgtacattggtagagaggatggagctatgattacagctaatgccgctcactaagagcatatccataatgatctatgggaactcagtgaagtactcataacaactctcgtagctctgagcataagatgcagttcctggcatgacatgtccagagactcctgccagagctgtctcaactgcaagatagagagctgtgtgtcaccaagcctgtggagacttttggcaagcagatagagagatactcacatgtaggatcacgctgagca

SEQ ID NO: 117345 - DNA, 464 bp, Arabidopsis thaliana columbia
  unsure (1)..(464): unsure at all n locations
tagcgctacacgactcactatttggaaagctggtcacgcctgcaggtaccggtccggaattcccgggtcgacccacgcgtgcggagaacagaaatctcgtgtggaacaaaagggtaaaagctcgtttgattctgattttcagtacgaatacgaaccgtgaaagcgtggcctatcgatcctttagaccttcggaatttgaagctagaggtgtcaganaagttaccacagggatatctgtcttgtggcagccaagcgttcatagcgacgttgctttttgatccttcgatgccnnctcttcctatcattgggaaagcaaattcaccaagtggttggattgatcacccaccaatagggaccgggagctggggtaggtggtgtggagacacgaggagtgtgccgtgttgggtggtttatcgggtggtgattgtgaatggttgattatgtttcgtgtgagtggctgattc

SEQ ID NO: 117346 - DNA, 560 bp, Arabidopsis thaliana columbia
  unsure (1)..(560): unsure at all n locations
gctctctacgactcactattagggaagctggtacgcctgcaggtaccggtccgngattcccgggtcgacccacgcgtgcgctttcacgttgatgcgtgctttcgatctagtgatactctatatgacgaacgcgggtgttttatagtgaaagatgcgagacgattacagactctccaatcatcagctggagatgagggatatgctccttcttgaagacattaatgatcttcttgtttttgggaagggtgtacnacntctgttgacaggttagttgtataaataccttcatcgtaatggttatgttatgggagtttcctacgtttgtgtttattgtttggtttttatgtatattttttgtctcattcaaatttctgtgtttttaatttcatatttggaatgacttattgcaattttttcattttatttatattttgttagtttgtatttatatacagatacataacgaattccgtttactctgcctctatttacgtatccttgattttatttatattttcatttttttatcgcttcatttagttagtttattttattagtgt

SEQ ID NO: 117347 - DNA, 537 bp, Arabidopsis thaliana columbia
  unsure (1)..(537): unsure at all n locations
gctctctacgactcactatagggaaagctggcacgcctgcaggtaccggtccggaattcccgggtcgacccacgcgtccgctttcagcgtgatgtgcgctctcgtcctcgtgatactctctctgacgaaccgggtgtctttgtcaacgatccgccacccacgcagcctacccaagcaccacctccgatgggtcataaactccttcttgaagacattaatgatcttcttgagatagggaagcgcatacgacgtcgcttgacaggtaagttgttttcttgcttcatgtggtgctttgcttattgtgttcttgccttgngttttctggaattttgatggtgagggtactgcgagtccgggctccctggcaggaggttgtaggtgatatcgcgacagtatttcttctcagtgactttggttaaactacagtgtagtaatcgtgccctatatggtgctccgtcatttgagtgtctaaaagcccgaacttgcatgctgttctaatcccctcatgtggttctatgacaccctttctgaactgtt

SEQ ID NO: 117348 - DNA, 507 bp, Arabidopsis thaliana columbia
  unsure (1)..(507): unsure at all n locations
ggaagctggcacgcctgcaggtaccggtccgngatcccgggtcgacccacgcgtgcgcccacgcgtccgtttgaagctctctctttaaattctgttcgtctctcgcgatctctctctctctctcagatagctccgaaactttcacgcagagttaagtgaagcaggatgggattgncattcgccaagcttttgagcacgcaattttttttatggggggggtggggccccacggaagggcaagagcgtgacagacgagccccccgaccgatccgcccgccgttcccccccgacctgtgtaccggaggcttatccagtggtccgcgggatcatgccaagggcaacacacgattgatcgcagcagcgggaaaatggccctctcaaaccccgatactcagcgtacgcccccaagccgagagaacccccgagaacgcgcccccccgccgcaacagtgccgctcactctctcggcagcctgacccccgaggacccacgggcgaaaggcacccgc

SEQ ID NO: 117349 - DNA, 511 bp, Arabidopsis thaliana columbia
  unsure (1)..(511): unsure at all n locations
agctctcnnnnnnnnnnnnnnnnnnnnnnnnnnnnnnnnnnnnnnnnnnnnnnnnnnnnnnnnnnnnnnnccacgcgtccgctttccgcaagattcatcttcgtctggtcagagagcttgagaagaagttcagtggaaaagatgtgatctttgttgctaccagaagaatcatgcgcccaccaaagaaaggctcagctgttcagagaccacgcaacagaactcttacttctgtccatgaagccatgctcgaggatgtcgcttaccctgctgagattgtaggaaagagaaccagataccgtcttgatggcaccaagatcatgaaggtatttttggatagtaagctaaagaacgacactgagtacaagctggagacaatggtgggtgtgtacaggaaacttacagggaaagatgtagttttngagtactcagtcatagaagcttgaagagatgattgtgaggttattgttttgtttattattatagtgttgtggtgattatttagttttattat

SEQ ID NO: 117350 - DNA, 517 bp, Arabidopsis thaliana columbia
  unsure (1)..(517): unsure at all n locations
ggtgactnnnnnnnnnnnnnnnnnnnnnnnnnnnnnnnnnnnnnnnnnnnnnnnnnnnnnnnnnnnnnnncttttttttttttttttagtttgagagatttgatatagacagacgaagtgtattttctatactccacaccaacacagaatcacgagtgtggtgggggaatactctgaagaagtgcgagattctaaggatgaaacagaccgtgatagttgggatgatccgtcacattataaggatgcggactaaccaaaatcatgattcgaagacaagatacaaaggcgcttgctcctacttctattaggcctgataggcatgtgttggattcgacaatccggggactgttctgttctggtaatcttacagtcttaggactgtgtctcatggctgcgcaacagccatatggagcatcctcctgcccaccagagaagtcacactggcctagattatacagaagggaagagcttctggggtccttgcgagtaccagttggcggatacaatggagcagtga

SEQ ID NO: 117351 - DNA, 527 bp, Arabidopsis thaliana columbia
  unsure (1)..(527): unsure at all n locations
ggattgannnnnnnnnnnnnnnnnnnnnnnnnnnnnnnnnnnnnnnnnnnnnnnnnnnnnnnnnnnnnnnnnnnnnnnnnctttttttttttttttttttttttttttaacgcaaagcatatcattccattgtttataagggaaaggaaaaccccaccccacatgtaatgtaaaatgacactgctctatcatccaaatcttatattttgtatagaatcgatccaatgctgacacccaacattgtttatcactatagtatcaataatgatcctaatcaacaaagcagtgatatccaccacaccattttctttcttcaaaaacaaaacctaggtaatgaaaaaaatgttacagtaaaaaaagaagagaagacactaccctaaaaagcagacccaaaactcatgtcatacaacggcacgccattgcttcgttttaattggataagggcatgggctatgattatctgaagaggaaattgaccaaagcaaacaaacattgcacggtgcctgaactaatcgagcagtcgagat

SEQ ID NO: 117352 - DNA, 524 bp, Arabidopsis thaliana columbia
  unsure (1)..(524): unsure at all n locations
nnnnnnnnnnnnnnnnnnnnnnnnnnnnnnnnnnnnnnnnnnnnnnnnnnnnnnnnnnnnnnnnnnnnnnnnctttttttttttttttttagagtatgaatgaatcaaagcaacttgaataatgtgaaatgattactattacaacttgtgtttaaacgatacaacaacaggtttaacatttggtttgaaagttggtaatgtacggagaggcttgacttgtctcgtgttgtgttcatcttttagcaagaaagctctactgctccatggtgacttttcccggaacaaaagagctgtttattcccctaagttcaaaattaataatgtcccttaatacttgtagtcgctaggcatcaggcatgtatctctgtaccaatctgtatctgtaagagcttcaaactatctgaaaactcaagacgaatattgttgagtcgagctgcatgttacagattacaacatatctaatctagctctctctagcatagatttaaatagtaaagtcaagtcctactaattatctaaatatg

SEQ ID NO: 117353 - DNA, 350 bp, Arabidopsis thaliana columbia
agaagagagagagccggggggaagcggcggaggacccaggcccgaacggcgaccagagaggggggccgagccacccggcgagggatttttctatgggggggggggaactttggtcttggttatgcgtggacgcccactccttagcttggatggtaaggtagggcaattgctcctagagctcggttttgtaggggcggtgctaattttatcgccgcggagatcattccgtgctttgaatattctattggatctctgtggagaatggtttgctatctgttgcgcttgggagaattgcaacatctattcactgttatttactcttaatgcttacatggcgctggttgggattg

SEQ ID NO: 117354 - DNA, 536 bp, Arabidopsis thaliana columbia
  unsure (1)..(536): unsure at all n locations
gnnnnnnnnnnnnnnnnnnnnnnnnnnnnnnnnnnnnnnnnnnnnnnnnnnnnnnnnnnnnnnnnnnnnnnnnnnnnnnnnnctttttttgttttttttttttttttttttttttttttttttttttttttttttttttttttttttttttttttttttttttttttggggaaaagggggggggggcccattttttgcccggggaccaaaaaaaaccccggggggaatttacgggctgaaacacaaaaacccgcgggtaaaactcattttcaagaaaaagtttctacaaagttcgaatggtttcaacatcgggggaaggaaaccaaatttcactgaaaaccttttggggtttctttttacttaaagagtttttttaatacaaattttgggccctgctcaaatggggggggggcccattcgggcgggattttgttaaaaccctccttttttgcccccaaattttttggggcatgaaatccaaacccccccttttgcatcaaacggggggggtcataaagggcgttttcatttccgag

SEQ ID NO: 117355 - DNA, 513 bp, Arabidopsis thaliana columbia
  unsure (1)..(513): unsure at all n locations
atagnagagctttgacgtcgcatgcacgcgtacgtaagcttggatcctctagagcggccgccctttttttttttttttttttttgagaaggaaaataaacttctttatcacgaaagctagactttgatttttcattactccgtccttttacattgatgattagaacaaaccaggtttaaaaatttaagaaacagtaaagtggaacaatattgaattagtttatttgccgatgggtgggagttccttagtgcgattagagttgggacaacagaggattcttcatatcttttttacagatggttgcgtttaaacaatattttatatgaattcttcctccggatttcggaacatggactctctgatcttgatacccatgacatcttttgctttacccaaaagcacagggtaaggtcctaaattcacgcccaattcctcggataaaacttcacaggacaatttttcatggaaagaacaccctcccccacatggggacattgtctgtgcatagagggt

SEQ ID NO: 117356 - DNA, 506 bp, Arabidopsis thaliana columbia
gacgtggcaacacgcgtacgtaagcttggatcctctagagcggccgcccttttttggtgttttttttttgagaaacaagatgtagattaaaacttgaagaaaacagattcttttacataataatactactccataatcatggtaattatacatatacactctatccaactctactatgtcaaagtagaggaggttacaacaagtcaactgttgtatgaatagtggaggggataaaaaaaactccggaaacttttcctatgacatgagtatgaatcactgcgtcagtagctttgcataaacccttatacctctctcatgggtgaactcgaagatacaaggacaatatctaaagctcaatttatccttgctagaactgtggactttaaggaaactccggaactcctgggttagcactaaggactgcttcgaaccttttcaggagccaaaaagtctagtggccaggttcatgcaagaatgacatttcctcactaggggaggacaaccct

SEQ ID NO: 117357 - DNA, 494 bp, Arabidopsis thaliana columbia
ggggggtaccacgcctgcgtgagctgggctcctatagagcggtcgacctttgtgtgggtttttggttaaaaacactgaatggacaccgcatgtacctgtatgaataatataaacactaatcgtacacactgcttataaaaagcacccccaaatccaaacaaaattgggatcccttttgtaagataggtgtgttacggatgattattttttcataagactgttttaaaggcatttagtctcgccaggacaagctataaccggaacttaccaacacattcagagtcttttatgctaaacaaaatagctttaaagatctttcactcacccgcctgatgcttatgatccacgggtctgacctgaaccggaaacgaaacagcgggtacattaatgaaccctggaggcccaagctgatgttgttgagtattaccgcatacacaccagattctttgatgttattcgctggagatacaatcgctatggctgtcgctggatct

SEQ ID NO: 117358 - DNA, 523 bp, Arabidopsis thaliana columbia
  unsure (1)..(523): unsure at all n locations
aggtgacctatagnnagactatgacgtcgcatgcacgcgtacgtaagcttggatcctctagagcggccgccctttttttttttttttttttttatttttttatcccttcattgaaatatataatgatcacaaatgacatcattgtgcattggctaacttcatatcataatgggaggagacagatacgagagcccattgccacattagagagaaaccaaacattgaagcgttattcaaatgggggggcggtggctatttaatctgttatggtaaaaggatgggggtgcttttcggcctaaaacatgcgtacgtaaaaaagaaaaaacctgtatttgctagggattgggcattactctgagcgggaaagaggttcataccgaagtcaactgacctcctttccacaagaaataaaaacttgaggggtgagaaaaggtttaagataaggaatcaagagcattttagacccagacaacacccccagagcttataggtggggctaacaaggaacagagtagcgcagggc

SEQ ID NO: 117359 - DNA, 517 bp, Arabidopsis thaliana columbia
  unsure (1)..(517): unsure at all n locations
gcctgcngaaccgggccccatagaggggttgacctacgcgtgcggaacctttaaaatttggactaacctcttctcacctgaagttgaattctcctcgtatctctgaacaacttgctgcgcaatctgcactagcggcttatagacagggcgattcttttcagtaacctttaaaataaaaaagcgctagcagctgtttttttttcgaaaaaagangggaaagtggcgcaccaaagaataggggatgaacagggggcgacggaatcaaactctacgctctgcgaggcggtggagactattatcaccactgaatgctttgattgaaacgaaatgctacattgaagcagcccaaagtaacacaagaagacaataacaatactacccagaccataaatatcccgaccgggatgtaggatggaacttgaaaccatgggtcaatgagggacacagacagagatatagaaagtgggcctagggaagtgaattgagagagactgagcaatagttgatagatcacaaa

SEQ ID NO: 117360 - DNA, 514 bp, Arabidopsis thaliana columbia
  unsure (1)..(514): unsure at all n locations
atagtnagactttgacgtcgcatgcacgcgtacgtaagcttggatcctctagagcggccgccctttttttgtttttttttttgtttgttttatttttttgttctttctcactaaatagaattcaaagctgtgttgggtttttctctggccgaggggagaaaaacggaaccctaacttggtcatgcccccaccaactcgtggacaaaacgaatgcaatccggcccttttatatcgagtcggaagacccacgcgttcttttgcgtctccttgaaaccagagaaaaatcactaggtgctttgtctgcttcagccgccacaactacaattggagtgttttcgaggcccgttaaacccactcgaaggtgaataacaattgattacactggatgcggctgtttgtagggggctacacgagaaatcggaggattgatctcgagcttgtgaatcaatctgggcgagaaacaagggggggctttaccctccgagcccgtaagtcgaaaaaggtagatgtgctg

SEQ ID NO: 117361 - DNA, 455 bp, Arabidopsis thaliana columbia
  unsure (1)..(455): unsure at all n locations
acaccacaaagccccaccacgccccnccgccccagaacacagcgggacggggaangaggagcacgccaagccgaaagacaccgaagagggcgaggcagaccaaaagagccgaacagacgaggaagaggggtcagcaaaaggggggggggggacgggaaacaaaaagaagaagaggaaaaggaggccaggaccccgagaacaacggggggaggacggggggagaggaaaaaacaaacgcacacgcaacacgaagagcggagggggagggcgagaggaaaggaaccgaggagaaaaagagaagccagcaagaagaacgacagaggagaggaacggaggagaaagagacagagggggaagagaaaaggaaaacaaggaaggcgacgcccgggcgggaaagagacgagacgccgcaaaaaaaaagaaaacacgagaagagggagacaacaagagggaag

SEQ ID NO: 117362 - DNA, 490 bp, Arabidopsis thaliana columbia
  unsure (1)..(490): unsure at all n locations
cccttttgggggnaacacgcctgcagtaccgggccggcattcccgggttgacccacgcgtgggaaactttgtttgttcatttgatctttcttaaaaatatgaaaattaacatcagagattccaccatggtccggcctgccaccgagacaccaatcactaatctttggaactgcaacgtcgaccttgtgatccccagattccataccccttgtttctacttctagggaggcaccggcgcttccaatttctttgaccctgaggtcatgaaggaagcttctttccaaagccgttgtcccttgttaccctatggctggtggtttgaagagagacaatgatggtcgtatagagatcgattgtaacggtcgctggtgttctcttcagtggggctgatactccgtgaggtatcgatgaatttggggagtatgctactacccttaatctccgataggttattccctaagggagacactcgggtggcattaactcttta

SEQ ID NO: 117363 - DNA, 499 bp, Arabidopsis thaliana columbia
  unsure (1)..(499): unsure at all n locations
atagaagacttagacgtcgcatgcacgcgtacgtaagcttggatcctctagagcggccgcccttnnntttttttttttttttttttttttttttttttttttttttttnggggggtacaaggtttaatatcatcagccatatttgatcacatttacaacttctaagagcataagtctttgtatatgaaactctcgcaaagtagtctgtactctgtagtataagccaatgagcttctgtttatcgncaaacttctactttgcttctttacagctcataatcctcaagtcacttgaggtcggagtttccttaacaaccacttcttgcgtagtttcacatctagagccaagaaagttttcgccttgagtttatcttcaagcagatcacaaccatccaatatagttcatcgtccatgtctggaaccgcttaaatagcctcaaccgtgtcctttattgacagggttggggttcataaactcgaggctttttcgggttatagggc

SEQ ID NO: 117364 - DNA, 462 bp, Arabidopsis thaliana columbia
  unsure (1)..(462): unsure at all n locations
atagnagagctttgacgtcgcatgcacgcgtacgtaagcttggatcctctagagcggccgccctttnttttttttttttttttttttttttttttttttttttttttttttttttttttttttttttttttttttttttttttttnccctttaccaaattttttttcttgtcgcctaaaggaaaaagtgtttgatacctcttcaaaccttttgtttttccaaattaaaaaaaaccaaggggaagagtccttgaaattgctttattttctaccgggccccttcccaagggggagcccttttccctttttttttggaggagtccctgaaaaatacctcccttttggggggtgggaagggaggcctcccccgtcccattttttttttttcccaatcccaatcccttgaaactgggattcttcaaacctctttggtttttggacctgggaaaattttggggggcca

SEQ ID NO: 117365 - DNA, 524 bp, Arabidopsis thaliana columbia
  unsure (1)..(524): unsure at all n locations
nnnnnnnnnnnnnnnnnnnnnnnnnnnnnnnnnnnnnnnnnnnnnnnnnnnnnnnnnnnnnnnnnnnnnnncttttttttttttttttttttttttaagcaaaaacaccatattatatcaaattaaattttgctcaaaaagctctctatcactctgacaaaaaaatgagagagtaaacatctaatcgcacactttactcataagccaaaataacatagagagagagagagagaattagttctttacgagaaaaggttagcacctcctttacgccaaaccccacgaaccggtaaaccaccggtctgattttggttactgttggaattactatccttagattcttgttcagactcgcgagtagaattgttaagatccagcaaggcagccattgatccatctccaagccgtactctgtgaaacttagaagttttcttacgttgctgtttgcttcctgtggaagaagaatccgttcctactacttgtgatttgcctttgtctgatctataggtattcttatcctttga

SEQ ID NO: 117366 - DNA, 518 bp, Arabidopsis thaliana columbia
  unsure (1)..(518): unsure at all n locations
ggattgnnnnnnnnnnnnnnnnnnnnnnnnnnnnnnnnnnnnnnnnnnnnnnnnnnnnnnnnnnnnnnnnnnnnnnnnnnctttttttttttttttgcttacagatttttggaattcccgagggacataggaagtctaaaccttaccatgaccatgtgtttgttttctccattgttgatgaccatatatggttccgtaattaccaggtaagttgaaattttagcatctctcatgctctcatttcatttcagtttggaaacgtttcgtttaactagccaaggcttccattgcagatatcggtacctcataacgagtcagacaagattgcacgaggcgatctggataaaatgactcttattgaggtcaggccatgactatatatatactaacactaacttacataatttctgaagaattagttgttgattgaagtaaaaacctgatgacaggttggtccaaggttttgtttaaatccaattaagatatttggaggcagctttggaggtacaacgctttac

SEQ ID NO: 117367 - DNA, 464 bp, Arabidopsis thaliana columbia
  unsure (1)..(464): unsure at all n locations
ttgacccacgcgggggggcccnnnnnngcacccncngcccccaccacaancaaaagacncanacncnnccccggagggaaaggggagacaagggcccgacgccccgcagagggcaacaggcggacggagcagagggcacgccgacgaacacggaacgagagatttttaaaggtgagggggagctagagcttggtctagggctgaacctaggcggtggaacggtgtgccaagatgggtaaatcaggcggacggcgccacacgcggagagcgtggaagggtatagaacggctaaggatgtctcctgatcgaggggatctaaaacgtcgctggctgataagtggaataggaatgcaagggaccacgtgccccctgcgggataagacagaaaggcggggaaggagcctcctctgcgggtcaacacacgatgaaccaggtgtggctgaaagacgcagcccccgaggtgc

SEQ ID NO: 117368 - DNA, 502 bp, Arabidopsis thaliana columbia
cgtcgcatgccacgcgtacgtagcttggatcctctagagcggccgcccttttttttttttttttttttttttttttttttttttttttttttttttttttttttttttttttttttattttttggttttttggtggggaacgaagggggaaaaggaaaaaattaaaaaaaaaacgggaacccggggggagaaaggcccagaaaggttttaaaagaaggagggggaaccgaaaaagatcacttgaggggtcaaaaaaagctggcataaaaaaaggacaaaaaaaaaaaagtcgtaaggaagcggctaaaaaaggggggtgaaaaaaaactttgggggaaaaaaggggtgaggaaacacagatgggggcataaccaaaaacaatgtcttggaaaaacacctgattgaaccagcgaaaacgttgggaaaaaccagaaggggcgagaccactcccggagggggggggggggggtttagggcacacttagggggaggaaaagaaaag

SEQ ID NO: 117369 - DNA, 518 bp, Arabidopsis thaliana columbia
  unsure (1)..(518): unsure at all n locations
accccnaaagcgggntctccanacagggggacaccccacaaaaannacccccacccacccgcgcaaagagccacaaaaaaagaaaccacacggacaacaaccgccggggcaaaaggcggcgaaaaaaaaggagaaaggcacaaccaccacgagaacgaaagaagaggacagcaaaaaaaagcgggctttttccaacaggggggggggggccacacccccaaccaagtggggagggagaaggggccccccgaaaaaaacagagacagggaagagagggagcaaaaacacccccaccgcaacggcgcgaacagggaggcccaggcaagaacagaaaaaagaaaacccaaacacaacaaaacacacaacagcaagcaaaagaccaaccgcagacggagacaaaacccccctagaacaagaaaggagaacggaaaaaagagagacaaagcgaccaaagaccacagaacggacaggaacaccggggacgaagatagagacagacaaacacgcgggaccccccc

SEQ ID NO: 117370 - DNA, 524 bp, Arabidopsis thaliana columbia
  unsure (1)..(524): unsure at all n locations
nnnnnnnnnnnnnnnnnnnnnnnnnnnnnnnnnnnnnnnnnnnnnnnnnnnnnnnnnnnnnnnnnnnnnncttttttttgtttttttttttttttttttttttttttggggcaaacactaacacatcatcaaatatctagttagacaaagctagctaggatagtagcataatcaatgaacacagctagctacaaatggtacattccataacgaatacaaacactggtcactcattttcttaatagcccaatccctgtttctgatcaaacaagtaatggagaatgcagatccagtttggtttcagtctcatggctttttgtttctctctcagtctcaacattacattcttggtatctgaaacaagctgtgagatgatcattaacaatgccagaggcctgcaagaaggaatacataacagtgggaccaacgcagcgaaaccctctctgaataatatctttgctaatgcactctgcctttggggacttaaccggtacttgacaaccatatcgatagccatttcttaa

SEQ ID NO: 117371 - DNA, 527 bp, Arabidopsis thaliana columbia
  unsure (1)..(527): unsure at all n locations
nnnnnnnnnnnnnnnnnnnnnnnnnnnnnnnnnnnnnnnnnnnnnnnnnnnnnnnnnnnnnnnnnnnnnnncttttttttttttttttgtatgaaattgaaatctcattgtatttataatttatattttacataaatgtatcaaaataatgttataaaaaaaggattggtaacattttcacaaggtgacaaaaaaaagatcctcagttttgatgatcaagtggctgaagaagacggctcaaccatgaaattagctatcctgttcaacaggtttaaaccaaaaaccgtttcttcgcaattgatcttgactgttaaattcagaacttcggtgcatttgccttcgactgtgatggtaatcaaaagagggatctcactgctcaagattttgctgctgaatcttaatcgcagaccagttgcatcttcgagtgagtttgcaactggtaaatccacagatacaaggtgtagatttgagttgctaagcacctttagtgttatactctcgcagatgctaagaaatttgtctttccc

SEQ ID NO: 117372 - DNA, 525 bp, Arabidopsis thaliana columbia
  unsure (1)..(525): unsure at all n locations
nnnnnnnnnnnnnnnnnnnnnnnnnnnnnnnnnnnnnnnnnnnnnnnnnnnnnnnnnnnnnnnnnnnnnnnnnctttttttttttttttttttttttttttttttttttttttttttttttttttttttttttaaaaaggggatgggtttagtcttttaaacaacaggcgccaagtcccaaacttgataaatcacacatttcacacaaaaaaacccccaaaagaactttcactctcgcatgtttggttagacatggtataggtcgtaggttgggtttagtttcaaacttgggtcaaagaatttagtctagttttatatcaaaagagcagcctcctacccagcgagtcggacctgttaaaaaaagccaactggcgtatggtctcgccgatgagatctttgaatatgaggcgttcgacgtcaaaaactgcttttgacatctccacctgaaaatctcgccatcggtcctccgacaaatctcttccgaggaccccgcacacgtatcccacaagggcatcttcctccggg

SEQ ID NO: 117373 - DNA, 392 bp, Arabidopsis thaliana columbia
  unsure (1)..(392): unsure at all n locations
cgattgannnnnnnnnnnnnnnnnnnnnnnnnnnnnnnnnnnnnnnnnnnnnnnnnnnnnnnnnnnnnnnnnnnnnnnnnctttttttgtttttttttttttttttttttttttttttttttttttttttttttttttttttttaaaaaaaaagctttggtgaattttcttggaaattaggggccttttttaatattaaggaaatctaaaaagaaagtaatccctctttaataaaagataaaacaatccatagggggaaattctacttttttttcctgcttgcatctcctttcacctggacaaaaaaagaccaatcttggggagagtcaaaaaacaaccattgaacccggtctcttctctttactcaattgggggagggaaaaaaacagccc

SEQ ID NO: 117374 - DNA, 526 bp, Arabidopsis thaliana columbia
  unsure (1)..(526): unsure at all n locations
nnnnnnnnnnnnnnnnnnnnnnnnnnnnnnnnnnnnnnnnnnnnnnnnnnnnnnnnnnnnnnnnnnnnnnnctttttttttttttttttttttttttttttttttttttttttttttttttttttttttgaaagagaagggggtttttttcacatccaggatcttaactcgacccgtttttttcaaacttttaaaatctacgggggcgattttttttttgaacttcaacctgaagtgaaaaaagtttttgcaaacccgttgcccaattctttttcacagaatttccaactggggagggaaggggattctaaaaacccccagcaccctttttaaatctcccccatttttttttccactgatcctttgttttccctctgaaaatattcaccaaaaactttttttttacggtttaaaaggcttgcccaaacccggagaaccccgaataatcaaaagttttttcaaagggaaccccaatctgaccactgattttaaccggaccacaagggttcacatgggcttcaaaaag

SEQ ID NO: 117375 - DNA, 526 bp, Arabidopsis thaliana columbia
  unsure (1)..(526): unsure at all n locations
atagcagagctttgacgtcgcatgcacgcgtacgtaagcttggatcctctagagcggccgcccttnntgggggttttttttattttttttttntttnnntttnnnnttntntnnntttnnnttttntttnnnnnngggggaccatgaaccaattctaaaactgataacaagttctcacattcaccactttaaacatttaatcataaaaggaaatcgaaaatttgtttttttttaatgggaaaaaaatgggggccctgaaccagttaagggaaccactggggtatccaaataagggcctgggtttttttttgtggaaggggcctccccttttattacgggcgaaggttttgggtttttcaccactcttaaccaagaattggatattatggaaaaagttttggggtgttacaggcaacccggtggttgattaaaagcgtttttttctttttttatccttttaagaggggaggggcccgggaaaaaagctttcttttgggcttgggggggggtttaaaggggggcaaaa

SEQ ID NO: 117376 - DNA, 451 bp, Arabidopsis thaliana columbia
  unsure (1)..(451): unsure at all n locations
ccaaaaacaccctncccctcccccccccctcttttcgctctttttctcccgcgccgccttctcgcgcgccggcggttgtggttgcggccgcgccccggccggcgcgcgcgcggccggtggtgtcgcggcccccctcccgcccggatttttttttcggntttgtatgggccctaacntcttgggggctnaaggcaaaaaaaaaatgtggccgccgggcgcctccgtgggtgcgcggttggctgcgctcgcgcgctcgtctcccgcggccctcgctccctgcggcacggcgcgtcttgttgccgcgctctccccgcccctcgcgcgctcgccgcggcttcgtctccgtcggcgcctgcggcccgcgcgggcccgcgcccctggcccccccgctctcttcgcccgcgcgcgtccgtctcggtggccgtgtcccgttctccttctgccgccgctc

SEQ ID NO: 117377 - DNA, 495 bp, Arabidopsis thaliana columbia
  unsure (1)..(495): unsure at all n locations
aaaaatggacaaaaaccaaaacaccctctcacaaaaacccaaagtaaagaggtttaacttaaatatggttccctttctttaaaaatccttgttttttcctttnctcttactaaaaattaattttaaccccaaagnccggnaaaccttttacaaaagtttttttgtttaaattcccccaatcctttattgtggcaaaccaaaaaaaaaattnttcccatttccttccccttccctttaccccccccttttttttccccctcccccattttttccaataagcttaattgcctttttcctttaaattgccaccaacaaaaaccaaaacttaaattcttaaaacccattatttttttattcctcacccccaaaccgcaaatttcccatcccaaccccaacttcacccttttaaaaaacaaccccccataattcctctaaaaacaaacacccccaaatcctcttccatttcccccttcaaacattaccatttaaaaaaaa

SEQ ID NO: 117378 - DNA, 353 bp, Arabidopsis thaliana columbia
ccttttttacccaaataaaattgaaggtgtttgaggattaccttttatccacatgagggagagaaaggatgattacgcaggaaacgatggagtcatatccacagcaccggacttagattatcagaaattcaaacccaccgggcgaggaggagagaaaagattggggtttaaaaaaatatatcgggggggggggtggggccaacccctataaaagtgggggagcccggaaaacaaagaaacccgccaccaacgtttttcgttaaaggggggggcggaattaagaggcgcgggccgaaatgatgggggcaaagggttggggggcctgggggcgagagggcgcggagggggcgcgc

SEQ ID NO: 117379 - DNA, 493 bp, Arabidopsis thaliana columbia
  unsure (1)..(493): unsure at all n locations
tccatcacgctacctagcttggacctctagagcggctccctttttggggtaaggcgcnccaaaaaaaacnncnnccccccccccccattatgcgaaaacctcgcgcccacaccggccaccacaaagcaaagcatcccaccgcgccgccgccccaacgccatcagcgcacccaaccgccggggaaagagttttattttgggttgtggtgacacacaaagggggccaagaaaaaaaaaacgcccccaggggaggcaagggacagcacagacccacgttacaccagcgctaaaccacccccacggcgtccaggccgatccgccaccaaaacgacagataaagaaaaccactcacccccaccaccccacagacaaccgacagcagatccagctacacactgccgcaccgacacaaatccaaagacctacaatcaaacgcacgcaccggaaaggccggcgcatccaggggcacacaacccagacccaaccaaacactc

SEQ ID NO: 117380 - DNA, 164 bp, Arabidopsis thaliana columbia
cgcacaaacaaaaccccccctttacgcagtgcgtgaccgcaccctacgcactgattaggcacctgcgaacccgggaccgccagtgtgcatacgtacgcgcccgttgcggtcacgggccacagggggagtgtactgcgccgcccccccaaccgcgaagagttttt

SEQ ID NO: 117381 - DNA, 332 bp, Arabidopsis thaliana columbia
  unsure (1)..(332): unsure at all n locations
gtcgcatgcacgcgtacgtaagcttggatcctctagagcggccttgctttttgtgttttggtgtcatccaagagaataatatatgggaaaaatgtaacacttatacattatatatttctttccggccccagcgaggcacacagaaggagaccacacccgacaacattaccctcgcccgacgagcccgggccagcacgccccacccccgccccacgattttttcttaggggatgatgggaaatcttcaaggggggagtctaaaaaaaaaaaaangccccgcgccgctagaccccggccgaggcgacacgcatgcggacggagcgacaacggag

SEQ ID NO: 117382 - DNA, 548 bp, Arabidopsis thaliana columbia
  unsure (1)..(548): unsure at all n locations
agactttgacgtcgcatgcaccgcgtacgtagcttggatcctctagagcggccgccctttttttgttttttgcataaaagagtactctattatacaaaaaaagaatcaaaaatctggaaaaaagtaaacataagtaacaaaacaatttctctaaataggatatattgtaataaaaatgataagtactatgctttaaggatgggaaaaatgtggaggtttttttaaagggaagtggggctttttcagggggggaaanaaaaaaaaaaaatccccccgcccatggtggcggcggcgggcgcgcggtcggccgcgcgccggcggatctgtgacgccacgcgtttaagggtggtctcccagtggcctgtcgccggttgtgcgccgggagcggtgctccccgcagccggcgggccggcgtcgggggggcgggggcgccgggtggggggcgtgccgtacgaggtcgggatgcgagggtcggctgtgagtagttgaccagcggtttgtaccgcgcgcgctccccgcttatgcccgcgcgtgagcgcgcggcaccg

SEQ ID NO: 117383 - DNA, 564 bp, Arabidopsis thaliana columbia
  unsure (1)..(564): unsure at all n locations
gtcgcatacccgcgtacgtaagcttggatcctctagagcgggcttccttttttgggtagggcccacaaaaaaaaacncccaccaccccgtcgcaccatcttcattcgccacgtacgcgcactccccacttaaacgactataagtatttttttatagcatgtgcagcctagttccgaattagtattataggaggcaccgccagcaaccgattttttttcgcgggggggggtggttggagaaaaattagttatattaaaaaaaaaaattgggtcgaacacacaaacgaatatgtgtgataaccctgaatgcaaacaaatagataagaccacaagcccgcgaccaatagatatatactttatgtcatctgcagcgatatgaaataagatctgatattctccacaatccaatactacaactttgcttacataaattcacagtagatctcccgtacgttacaactcgactcaacgataatatacgctactcagaatagctgaaagacgaaaatgcattaacagtcacaaacacaccgatacgcaggtacgggacgaacggtgctctcga

SEQ ID NO: 117384 - DNA, 359 bp, Arabidopsis thaliana columbia
  unsure (1)..(359): unsure at all n locations
gtcgcatgacccgcgtacgtagcttggatcctctagagcggccgtgcttcttttttgttaggggccccnnaaaaaaaaaacaacacaanccaaccggggcaggggcgttatacatataatgttcacgcacgcggtctcggaacgtcaggtatgatatatatcgctgtgctcgtcccacgacctacgcgagtggacggtgtgttactgcacgcccgacgctggacgaaagaagtttttttttttgggggctagttgggaaagagaaaaggaatggggtaaaaaataaaaaaaaaaacggcccccccgcctacatatgtgttgtatagctnctagcccggacgatataaacgagcgagcgt

SEQ ID NO: 117385 - DNA, 496 bp, Arabidopsis thaliana columbia
  unsure (1)..(496): unsure at all n locations
gttttaaaaaaaatatatatanggggggttttttttttttttaggatgangaagaaaaangaggaggagaagagaggagagaaggaaggagggggggaaggagccaagaagaggcagcaggaacgcgggcggcaaaaaaacggacgagtttatttagagggaaagtttggggccctccaaagggggcgggnaaaaaaaaaaaaaacgccccccggccggccggtccacggtccaggccccgcggggacacgggaggacaaaagcgcgcgccgcaccgggggggcggagcccgggaggcaaaggaggggaaggccgggggcgcgcggagggaggggccggggaagaggcggggaagggagcaggggagtgcagggggagagcaaggacggaacatgcgcaggagggagagcgaggcgcgcgcgcggagagaccgcggcgcacggggcgggggacggaggcgcaacgcccccaccccgcaggagcagcagcgggcggc

SEQ ID NO: 117386 - DNA, 507 bp, Arabidopsis thaliana columbia
  unsure (1)..(507): unsure at all n locations
nnnnnnnnnnnnnnnnnnnnnnnnnnnnnnnnnnnnnnnnnnnnnnnnnnnnnnnnnnnnnnnnnnntccctttttttgtttttttttgtataatgtcttaaaattaagttgagaaagaaatatcctagcaaaatccgagaaaattaagattgtgcttttggcatccaaaaaaaagagcgaaatccaacaccagatagtatagaagaaattaaaaacaaccgatgcccccaaaggagtgttgggggtgacttgatagttctgggcaatcagctgggtcctctgcacaaacctaggagtcgcaccaccacctcctctcagaggaatcattccagtcaccttcaagccactgtaggtacttgtcgctgcaaactgaacagagatggggaagaacaccgatgaatccactggaggcacaacaaactccattgagccactggggttggagttgtcaataagtagtatagaccattccagaacagaatttcttgggtcggacctcccctccc

SEQ ID NO: 117387 - DNA, 559 bp, Arabidopsis thaliana columbia
cgtcgcatgcacgcgtacgtaagcttggatcctctagagcggcctcgctttttttgtttaggccccaaaaacaaaacaccaaacccgtgcgggttaactaattagctgagatgacacaccgcggaacgcatggaaagtgattttaaagtctcaacgtactagctatttaagtaatagattgctagaacgctcgcggcgaagccagacagggtttttttataagggggggtggtaaattatctgaagaaagataagagcaaaaaaaggccccctccaatactagactaatagacaatatatcacaagacctgaaacgagaagtgacctccccctattattgtcgatcgcaaccagcatctcaaggtaatgttctaacaaattaaacctaaccatgttggataacagcgaaataaagaatcgcaaatggtcggtgacagcctatatggaacaaccgtctccaactgtaatagactctctgcgtacacattatgtggcgagtgaccgcatcttagtcccttatgtatcacgctagttctctataatttatacgagcgtgtca

SEQ ID NO: 117388 - DNA, 538 bp, Arabidopsis thaliana columbia
  unsure (1)..(538): unsure at all n locations
gtcgcatcacgcgtacgtaagcttggatcctctagagcggtctcccttttttgttttaggccttaaacacaaaaacanatttggatgaatgaaatgaagttttcacagacgaagatcgggcgacagcgcgaggggacacggtagtagtgttttatgtatcatggtcgagacgaacgaggcggaactcatgcaatagacgatgacccggcaagaagatttttttttaaagggggggggtaggaaagtaaatgtgtgatatggtggaaaaaaaagggtgcgcgggccacaacgtacagatggaatgtgagaggtgaatatgtaggacaaaatgcatcaatgtgctagaaggtacttgatgaccctatccagacggaccgcgagatcacaacgaacaatgagattagaatgacgggacgcagcccaattaacagcactcacgcataagcaccatggcgcaaaataaacagttgctcaacgataaataaacgtcgcaccgccacagtcacccgccgaggcataggagcgaacacataaatga

SEQ ID NO: 117389 - DNA, 510 bp, Arabidopsis thaliana columbia
gcgtacgtagcttggatcctctagagcgggttccttcggcgagggggcgcgcaaaaaaaaaaaacaaaggagaccggacaacgccgcaccgccatacacaacaaggccactcgcgcaacccagaaatgacacaggcacgcacaggccggcgaaaagacgatgatcgctagacccccccgacaagttttttttttaggggggggggaaagatagttaagaaattaaaggaagaaaaaagaagagcgcgcagacacaacgtggtaaaacacaccacgacaccgacacgaaacgaccaccccccagcaacaccacccgacaagcagacgagtgcaccgaacaacacacccaaaataacgtcataattaacatagacgagcgaccaccgactaaaaacggcgccaactcaaaagaacacacaaaacgagtaacgcgagggccgaaggacacacctacgcccgaagcacgaacgagcgccaggcgaacctataccttagaaaaagagcgccgaga

SEQ ID NO: 117390 - DNA, 378 bp, Arabidopsis thaliana columbia
  unsure (1)..(378): unsure at all n locations
gtcgctagccgcgtacgtaagcttggatcctctagagcggcctcccttttttgggtggggcccnaaaaaaaaacacaccaaaacgaagctcaagatctcctgcagaaatagtacatcgcaccatacccggctctgcgcaagagtgatgtagaattccaccaatggcggaaaaccgaatacgagggactacaaccggacccgaacaaaaaaaaatttttttttaagaggagtggtggtagaacaaaataaagaaattaacaaaaaaaaagacgcgccccgcccagacacaagtcgagatcaaaaggagacaccaacacccaccccaacatatgcctaaaactgactcaaaacacaaaatgtgccatatgcgcctatgag

SEQ ID NO: 117391 - DNA, 463 bp, Arabidopsis thaliana columbia
  unsure (1)..(463): unsure at all n locations
agactttgacgtcgcatgcacgcgtacgtaagcttggatcctctagagcggcctgcctttttttgttttttttttttttataaaagacacttcctaagcaaggaaatgacacatcaatatataagaagcttacacaaacagatagttatccgatcaccagagtcaacatctctaaagacaacaaataagtaatcaaacaaatacaaatatatctctttcataactggaggcgggttaatgaacaaaggggganataataaaaaaaaacccggacggttgggatgggtttttaattcctcgctgatgtgatgagagcatagcctggggaacagagggagcggggacccctggagggctggtgggggagtggggtggtgggtgggcgggtgggtcggcggtgggcggggcgcggtgcgggcgcggaagtacgtcgaagtggcacgagagcggtacggggcacccc

SEQ ID NO: 117392 - DNA, 431 bp, Arabidopsis thaliana columbia
cgcgtacgtaagcttggatcctatagagcggccttccttttgggggggaggcccccacacaagaaacgacagccggtttggtagtagtctccgtctctagctatttcaacaacgggcgcgggagatcgagatcaatgtagtttgcgatacgcgaaagacgaagcggatagaagtaagggcaggcgggagagatacccgcgaacagaatttttttaagagagggggggggccacgaaaatattatatggattattaaaagaagtttagggcgcaatcaacccatgatccgagagtcgggtagtctgctccagaatgggatagatgagtatgagccatacgagtatatgcgtagaattcctactacactgatagagcctcatatgttggtaatcttaatagttagcatgaggagaactccaggtcatagctca

SEQ ID NO: 117393 - DNA, 537 bp, Arabidopsis thaliana columbia
  unsure (1)..(537): unsure at all n locations
atagaagagctttgacgtcgcatgcacgcgtacgtaagcttggatcctctagagcggccttcctttttttgtttttttcaaagataaactataagtttataactttagttggcattaaaagtctgaagttacttatccttctacagagtgttattttcaagtgtttgcttttttttttttaaacagtaaactactacacagtctctgcagaaagagatgaagcatataaaatgtgggggaacatttggaatctaccttaaaaacaccaatgcacccatgttcgatgatcggttttcgaagagaacccacttcttggttgcttcttacactgcatcaaggttgaaactttactttgcggtgatgactagctcggagaaaagatcttacatgatcaaaattgtttctgaatgctgcaccttgtgattgttgttgggcttgaacttgnggttgatgtgttgaaatcaaactgttttttaggaaaagacctgggttaaagtataagccagctcccccacagggggatcaacaaactgaggg

SEQ ID NO: 117394 - DNA, 558 bp, Arabidopsis thaliana columbia
  unsure (1)..(558): unsure at all n locations
gtccagccgcgtacgtagcttggatcctctagagcgcctgcctttttggtttagagccgaaaaaaaaaaaaacaccaaaccgagggggtggcgtggcgggcccaggttggggtgcgcgccgcagcgcacgctcagtaaactagagcacagtggacgagaggaacggaggtcgttcaatcaatatgcaggagcggcgcgcagattttgtgaaagagggggtggctctatcaatgtggggtagaaataaaaaaaaaantgccgcggacacacgcggtcgagcgagtgttgctcggacgcgggagggggcgccgccgatgtcgagcctaacacccccctcccgcagaaatctgaggcaaccctcaaccccagtcgtggatgttgtagcggcgagaggcggcattcgagcccgtgtagcaggggtcggtctccgacggctagggccgtgagtatgggagttcgagaggagatagggaggtgctggaagcgctggtcatactgaggcgcgagcggcacgcgcgctgcgacatggcgaggggcgcgcggagccaccacggaagg

SEQ ID NO: 117395 - DNA, 580 bp, Arabidopsis thaliana columbia
  unsure (1)..(580): unsure at all n locations
aaaggagaggggggggtttaaaggggagggggggaagagacccggagaggaaggagagngcggggagaggaagagagggagagagtgggcagggtggaaggtggtagggattgagtgggcattgtgagtgagtagaggtatgtggtttagtacgggtaggagaaagtgaaaataggaaaagatattaaagtggctgacgagaaaagaggaacttttttttaaaaaggggtgttgaaagagaaatagatagagaaaatgagtgagaaggaaggaaaggcgagaggcgtagtggtattgatgtttgaagcgtaagattaagaagaaagatgaagaagtgaataatggagagttttgggagtagatagtngggtatgggtggggatgggttgaggtatgtatagtagttgtatggttaggatggatgggggaggtgagtgatggataaggtggagtgagaattgttgattacaaggtgcgtgttaagagtattagaaaataagaaaagaggagagagggttaacagggagaggtgattagagaacaatgagatttgcatgagtgatatatatgtatggagagg

SEQ ID NO: 117396 - DNA, 311 bp, Arabidopsis thaliana columbia
atggggggggtttggggggggagcccggaaaacacgtcggcggccaaaaccatcccgatataccgccgcattatatgtcgggcaaaaccaacgaaacttctcccaaaaaaaactttgaggggtagaaaaaaatagagaactcgtggccctatcagaagaacgcacaacgccccatcatgctaccgcaatatagaacaggccttaagattttcgataggaataacctgaaacgagcgtagcacctcacaacaacgaaccacgcgacctagtaaacagtcggtattcgcccgagtaggctgatcccgacccac

SEQ ID NO: 117397 - DNA, 528 bp, Arabidopsis thaliana columbia
  unsure (1)..(528): unsure at all n locations
gtcgcatcacgcgtacgtaagcttggatcctctagagcggactcccctttttgttttttgcaatntatatcacctttaagttttacgagcggggcgcccttatgatatgaaagcgcagggcggccccaggccccggccaggatgggcgaacaagaagcggaactcaccggggagcatatgttacggtgccggcccggacgaggcagcacgacattttttaaaaagtggggggtgtgatactaatttgttagaggggtgtggaaagaagcgagccgcgcggtacaggatgaaacgcaacagccaactgcgacctcagcccaaggagccggcacagatttcagacttgctgcgtcgcggtgagccgtgcggtacgtgctgttcaactaccgatgcgggtgtaggttctaccctcgcacggtcactcggcgccgagcggtaggcgcgtgtgtacggtcggttctcgagcgcgtgcgccgcaggggcaggttagttgtggacgagtgtaggtgcggaggcggcaccggggcg

SEQ ID NO: 117398 - DNA, 524 bp, Arabidopsis thaliana columbia
cgtcgcatgcacgcgtacgtaagcttggatcctctagagcggccttcctttttttgtgttgggcaaagagacataatagttcttctctcttaattgaatctttctttacaaaattatcaacaaagttataaaagaaagtcccaataaccgaagaaatcgagacttacaaggcaaagtaccaaacacaaactctggtggaatcgacggtcatttttttggggtgtgggggggaaaattatggggtgaaaagaaaaaaaaaagccccctggcgatcgggctagagaaaggtgtcgcgagcggtgtcacggctggtcgcgcgtcggcggcagtcggcggcgcgtgggacagggcgacgcgtctgatatagtgtgtttatggagtgtacccctgttgtgtgcacgctccgacggtcgtctggagagcctggtgctatagtgtaactgtcaaacggatagaggagactggcatgcgacgcggaggtaggcgcgcgcctcggcggcagggggcccgccgtgctggggggg

SEQ ID NO: 117399 - DNA, 404 bp, Arabidopsis thaliana columbia
cagactttgacgtcgcatgcacgcgtacgtaagcttggatcctctagagcgggctcccttttttgggtttttctttctattgaataatgaatactattaattataaaaatttacaagtacaacaatttttgtataactggccgaacttaacttttagcaatcggagtctaatgatatgaaggaaattaaaaacaatagaaatggggaatcgagggttttttttttttgggggggggtggtgtaaaagtgggggggggtgtgggaaaaaaggggccccgagaggttagtgatgagtgcacggacgggtgagtggttatgcagcgcgctccttagcacgcgtgggattggtggtgagcgctacgctgcagtgtagccctgagttggtggccgtgggcgggactctg

SEQ ID NO: 117400 - DNA, 463 bp, Arabidopsis thaliana columbia
  unsure (1)..(463): unsure at all n locations
ttgacgtcgcatgcacgcgtacgtaagcttggatcctctagagcggcctcccttttttgtttttggtttttttttttgtgattaacacaaacnaacgacttacatttacagagtatacaaacaaacgccgggtaatggcagagtactcattacactgactgaacaccaaaagaatcgagaataaacatccaggaaatgggatctccttggtattcgaaattgggggggggtcatctttccagggtttggataaaaaaaaatagcggatacaccccaactgggagagggtttttaaccaaaaaatttctgaaagagtaatttcagggtttgccaaacttaaacttttgatgacctttgaatttttcagccttccctttttaatgaagaatcgcttcaccaaccacgtggttgtagccatcctttcaacatcacttttatctgggaacctcaccggtttggaaaa

SEQ ID NO: 117401 - DNA, 526 bp, Arabidopsis thaliana columbia
  unsure (1)..(526): unsure at all n locations
tttaggtgagcttatcccaagactttgacgtcgcatgcacgcgtacgtaagcttggatcctctagagcggcctccctttttgggtttgggcgggntaaataaatttttttttttttttttttttttntttttgggggtattactgggagttataataagaaaaataaaagcttacagtaacccttttttcatcattggaagattcataacaatgctcttaatatgaatatacaaattttattttgagaggtatatcgnaaagcgaaaacatattgtttaaagaactacacttcaactgggaacaatgggggaacatctactaccctttcaatttcttccaaccgggcatatggagcaatttgggtaaacccggggggccggtttttgagacaagggattttccattgggccgatggccttagggttcatattttcccttacattcccatattaaactttttggttttccagcccatttattccaacttgtgggcaaattattatttttttttgccgggggaggggg

SEQ ID NO: 117402 - DNA, 477 bp, Arabidopsis thaliana columbia
  unsure (1)..(477): unsure at all n locations
ctttttttgttttttctatctcaaaaccaaaaanacacaattcctttncttctccacctaattatatatttggtccttaacaaataccaccaaaactctttcccttgttaaattttttccattttttccctcaaaccttccacctcctgaaaaaaccttcctttattatataatgtaaataacacatttcctttccttaagattnaggagatgcaaatcaaaaaattttgggggaaaatccataaaaaaaattcttcttaattaaacccccttacacaccaccccaagtatttttttccttaaaacccccctttgtcccttttttttataaaacccctttcctttattttaaacaaccaaaaaaaaacacacaatctaaatcctcattattttcccaaattttttaaaaacccttcttcttatgggccccaaaaaaattctcaccctctaccctttctagaccccaaaaaaaaaact

SEQ ID NO: 117403 - DNA, 544 bp, Arabidopsis thaliana columbia
ccccagagctttgacgtcgcatgcacgcgtacgtaagcttggatcctctagagcgggcttccttttttggggtggggttgacaaactttatgataaattacttagaatactataatgacatgactctaaaacaaatccaaaatttttgacacaagcatacatgcatgcagcaatttattacaaaagaataaacacaggttggtgcaaaagcccccaaacatccattttgggggggggggttttggctccatggggaagtacttaaagagggggcccaatcattttctcgggaacaacaagagtatcaaacttgttcggaaggaagaacacctaactttataggtggggggcttaaggggccatccttttttggggagctttttgggctacggctgggagaatggccatacccatttttagggtcacatgggggcccaggcataagaggctgggccaatagtttgagatcccttttttggggggcctcatggccttaacaacagtttttttaaagggaggtggggcgtttggtttttagctaggg

SEQ ID NO: 117404 - DNA, 487 bp, Arabidopsis thaliana columbia
  unsure (1)..(487): unsure at all n locations
nnnnnnnnnnnnnnnnnnnnnnnnnnnnnnnnnnnnnnnnnnnnnnnnnnnnnnnnnnnnnnnnnnnnnnnnctttttttgttttggtgagccaaacacgcttttaataatatgataaaaacaaacatcatctatttttatgtaagtgtctaagagagactatttacacaacaatgacacgtttttgtatcaatctgttgaaggtccatgcctcctccatggctcactttgaaataaataagtgggggggctctcatacaatagaggggtgttgagctattttgggtcctcttgtcctcctcgggttagcgctgagcatgcaagagaatgcgtttctcaaatccgaatcctcttcactagtgaggaactttgctgcagctggatttgctaagaggagcttggccactaggtaacctgcgatggaccaagtctggtatagccgggcctgtttaccgatgaatcttgctctttgggtatcggagtactc

SEQ ID NO: 117405 - DNA, 508 bp, Arabidopsis thaliana columbia
  unsure (1)..(508): unsure at all n locations
atgcacgcgtacgtaagcttggatcctctagagcggcctccctttttggggtttgttgaaataaactgtgtaaatggtacataaattttgcagaaattttttaagaatcaaatctaaaaacagagaggttaatcgcaatggaacattcagaaatcgaaccaacagttaaacccaaaccgaaccgggttatcccaagcgtgactttgtcatggggggggccaanaaccaagcagggttaccaagaacaatcttagcccttagtggaccaaatcttttatacaaaccctttaactcctttagatttcagaattttcccgaaaaggctccatcgaccccgggtttctcgggtttttggatccgcgacttgaaaaacactttcaaaacgtgtggggggattacctttccccaaagggaagcgccggggctcgcccgcgctggatgaatgaccttgtggctagggtgggaggtgggggggccggggggggaaggcgcgtggaggggtgggggg

SEQ ID NO: 117406 - DNA, 552 bp, Arabidopsis thaliana columbia
ttgacgtcgcatgcacgcgtacgtaagcttggatcctctagagcggcctccctttttgtggttgggttttcggactctataataaaggcatactatgaatattacaggaacttggtatttttggaaaatagagagctttgggtccatactcaatttcccagaatttgacacaaaatttcaaaatttaaataaaagtgcggggggggggggtcaaaacttcgggggtgggttaaggggggtggggggggtttaaaagaaaatatttctctcgcttcttggacaggagggggggggccttccggcttcctaaaactctggggtcttcctttttaacttgtcttgtgggggctctttccttggagctttctttgggttcatggaccccaattcttttttaactttttttgtttcttgaattgcctttttaaattttgtgggggggtcttgctgcctcgccttgcggtttgtttcggtagaaaaataaacctgtattttgcgggtcttttatgtgtggggaagggcattcctaaagcccccgtttttgggtggggg

SEQ ID NO: 117407 - DNA, 436 bp, Arabidopsis thaliana columbia
  unsure (1)..(436): unsure at all n locations
ggggggcnccccccccggggggggggagggggaccactcccggtgtgtttttttcaccaagccctttccaggggggagaacccccccttgggtttttggtacccaaaaccgttcgggaccgcaaagggggtgtctctattttttaaggggggggggggtctaaanaaaaagagtgggggggtttttaaaaaacaaaaaaaccccccccccttctttttttgggtttgttttgccccgcccccccccctttagcgctgggtgtggcccctcccccgcggggtttggtctacgaaaacaacctctgtttttttttatttgttataaggggggggaaacccggcccgcggggggcccgttggggggncttgagaacgccctacctctatacggggcgggtttcgccgaggggagaaatataaccccgcttctcgcgggc

SEQ ID NO: 117408 - DNA, 453 bp, Arabidopsis thaliana columbia
taactcttttatttccatatataatagctacatggtattggatgaaactatactcaaccatgtttaaatgttgcagtggctgttgggttttacatacctacatctttcggtccattataagaggctcaggggatttggatggggatgagggtatcttatggggggggtggttaaaaaaaaataaaccaaggggaaggggtttgtttttcccgcccctcttcgcaaggtaagacctgcaagggatcccttatgttacaaagcatcccgggattttcgcttatggaaattcttttttccaggaacgggggaccttcattgaaaagcaatcccacaaaattccgcattcccaagggggatcaagtgtctggggaggctgggcccgtgaacacatccggttttcgtgaccgaaggggaaaaacccctaaggtccgcccttttaagatgggggttttt

SEQ ID NO: 117409 - DNA, 438 bp, Arabidopsis thaliana columbia
catgagacttattaggggaaagaatttataacccacacctaggggggatggaatccaatcccttatattgccctcctgtttggggggtattgtttcccctgggtgttggctttccccccttttggtgttttaaacaccaagaaatagggggccgtaaccctttaaactaacccttcaccaccaccccaatcctcgatgagagggggccctttcaaactctctccccatgggggggtttccaaccctcaacacccctacctaagctttcctcccttattgcgttcctccggacctaaacccaacaaagtggggtttttcccccggaaccccccccctttttccacttttctccccctccctccaaagggggaccccccccccccatatcccgggtcactgaccgtccttgagaggccccccctcccgcggggtgccccc

SEQ ID NO: 117410 - DNA, 401 bp, Arabidopsis thaliana columbia
  unsure (1)..(401): unsure at all n locations
taagctttaatcctctagagcggcctccctttttttgttttggagggtaaaagttataacttttcaccaaaggggtaattaagcattttaactaccctaaaatcaaaacccaggtagtataactaaaaggaaatttagacaaagggagagagaccgggttttaattttcagaagggtttaggggggatttggtcgaaaggtttttttttggggagttggggcacaaaaatggggggggnaaaaaaaaaaaaaaacccccaccctggcggtcgggtccggcgcgcccctggcgggacgacccgcctgcgacgcgcgccgcgcagagcggcgcgccgcccacgctgggccgccccgaggaaaccgccgggcgccgcgcggccgcggcgcagcccgtgatgatc

SEQ ID NO: 117411 - DNA, 494 bp, Arabidopsis thaliana columbia
cgttttcctttttttgtttaggccggcaaaaaaaaaaccccaaccgcgcccgtactcctcttctcctcttctctcgctccccactcattttcctaccctttttttttctttctcccgctacgctcctcgctccatctccttttttactgaccccccccccttcaccaaaacgttttttaaaaggttgttttcaacccccacacataatcacctcataaaaaattctccccgccccccttcgcccactttttttttttattctccttctctccattctccatttcttctcccacctaccttgcctcctattcttctctctctctcttctcggttatctttctcttacccatactctcctgcgcagtctccttttctttcctttacctccttcgctccctccttccatcttctcgccactgctttataccaatccccatcacctttctcacgttttcctctcttctttcccttccttcctcgtagccctccttctc

SEQ ID NO: 117412 - DNA, 533 bp, Arabidopsis thaliana columbia
  unsure (1)..(533): unsure at all n locations
ccccccccccccccccctctcctcctactacatctttcgcctccgacacttctcaactcttcctccgantccttattaatctcgctcccccccaccttctctccctcccccattacctctcatccacgtccccccaccttcccacacccgtctttttttttagcgcgattgttttttnacacacataaatggcggggtatttaaaaaaaaaaaaaagccccccccgccccccccactcctgttgtatcttcacccttgcacccaccgcccctccccaccatcacccccccccccgcctcccccactctcccccaccccccccccctctccccctcctctcctcctcgtccgcctctctctcctctctccctccnccgccttacctctcctctactctcacctcccccctcctatctcctcccttctccctctccgctacaccactcccccctcaccttccctcccctcactcccccccttctctctcacctgcctccctctcctcctccccccccttccccctccccccccct

SEQ ID NO: 117413 - DNA, 326 bp, Arabidopsis thaliana columbia
  unsure (1)..(326): unsure at all n locations
nnnnnnnnnnnnnnnnnnnnnnnnnnnnnnnnnnnnnnnnnnnnnnnnnnnnnnnnnnnnnnnnnnnncttttttttttttttttaatttatttttttttctttttttacaaaatactaagggtcctgacttcgtttataacataattgttcacaaatgccccataacatttaatgcattttttcttactatgggggggggggatatttaacaggagttaaaaaaattgaggggctacattttttaaaagaaattacaaatgtgaaaataagggggttcctttctttttgcgatcacaaactttatgaacttcctaagggtgggca

SEQ ID NO: 117414 - DNA, 512 bp, Arabidopsis thaliana columbia
  unsure (1)..(512): unsure at all n locations
actcacnatagggaaagctgacacgcctgcaggtaccggtccggaattcccgggtctacccacgcgtgcgcacgtcacatgtgcactggtttatgagaaaatgccaactggcaggattcataagggagtgtgttccacttggatgaagaatgctgtgccttacgagaagagtgaaaactgttcctcggcgccgatatttgttaggcaatccaactttaagcttacttctgagtgtaaggtaccgatcatcatgatcggtccagggactggattagctccattcagaggattccttcacgaaagactagcgttggtagaatctggtgttgaacttgggccatcagttttgttctttggatgcagaaaccgtataatggatctcatctacgaggaagagctccagcgatttgttgagagtggtgctctcgcagagctaagtgtcgccttcttttgggaaggacccaccaaataatacgtacagcacaggatgatggacaaggcttcttatatct

SEQ ID NO: 117415 - DNA, 417 bp, Arabidopsis thaliana columbia
actatagttgagctatgacgtacgcatgcacgcgtacgtaagcttggatcctctagagcggccgccctttttttttttttttacaacacaactccacccttattagaaaaaaactattggtcaaaaggtgtctacagtttattgacacaggaacaagcatatattataggagggttaatcactataaaaagacaacccaccattttttctttgttaggcgaaggaacgccagactacttatgtacagagccatcacgggcgccaaataaacctttccaatatacacagaccatagcaacaaatcagtgcgcgatagagagcccacctaactaaaaccaatggttccaaaccgcacgatccacgggtcaactagttgtgcatccaagtagttattagaggtccacgaatgcaagataa

SEQ ID NO: 117416 - DNA, 300 bp, Arabidopsis thaliana columbia
  unsure (1)..(300): unsure at all n locations
cacgcgtacgtaagctaggatctctagagcgccgcccctttttttttttttgtttttttttnttnnnnagaggcaggacaaacaatgtggatgttataaaacgatacgtcacataattggttgaagggcagaaaacacgtgaggttgggaaaacggaggggggatgtgaaaaagaccttttctttttaggggggggagacaaagaaaacaaaagagaagagacaagaagagaggcaccaaaatgaggacgttaaacgaatgaaaaccaggattaaaaaaagaaagggaggtaacctctca

SEQ ID NO: 117417 - DNA, 543 bp, Arabidopsis thaliana columbia
acgactcactatttggaaagctggaccgcctgcaggtaccggtccggaattcccgggtcgtcccacgcgtgcggtgacacatgcggcgatagagtcgctggataaaatgcgggaaggaagtaagaaagcaacactgcagctggttgacatggagtgcagttacctcactgttgatttcttcaggaaacttccccaggatgttgagaagggtggtaaccccacacactccattttcgaccgctacaacgattcctatctcagacgaatcggatccaatgttttgtcttacgtgaacatggtctgtgctggcctgcggaattcaatccccaagtccatcgtatactgccaagtccgagaagcgaagcgcagtctcctcgaccatttctttgcggagctcggtaccatggatatgaagaggctctcgtcgctattgaacgaagatccagcaatcatggagagacgcagtgccatctcaaagcggctagaattgtatcgagcagcccaatccgagatcgatgctgttgcttgttccaagtgataccg

SEQ ID NO: 117418 - DNA, 1009 bp, Arabidopsis thaliana columbia
  unsure (1)..(1009): unsure at all n locations
actatagatttagctatgacgtaccatgcacgcgtacgtaagcttggatcctctatagcggccgccctttttttttttttttttttttttttttttttttttttttttttttttttttttttttttttttccnaaaacaaacacacttaattttacattgcatttaagaaacaaacactcaaaccgacctctttgggcctacaattttttttatttaaagggcaaacccaaaccccaacccaaatccaaatttataatatttctccccaagagaaatttatttcctccacttttaaaaaacacgtaagaaacaaccaaatttggggggattatttttgggtttacaccatatattcaaaaggcatattatatccccaccctttcctgttttcccaggtttaaccccacacaaaaacacgaaatgttaacccgggtgcgcccccaccccattaaaaaaaccaaccccccttaaaacccgacccgggctttgggagaaaaaggtgggcggtttgtttttaaaaaaaaaaacaaaccccttaagtttctttttaaaggggccctggggggggcgcttttaaatattaggctttatggcggggggggggttaaaagggttcctttgtctgggcgggggggttctccctcccctggaggattgtggttggggaaaaaatccccccccccccctccggtgttctttaaacgatacacctttttacggggggggaaacattggttgggtttaaaaaaaaagttttttgtttcctttcgggggggggggtgttaccctctctcggggggggtttggtctcaccatccttaaaggcggtttttttgaaaataaacttggggtggaggagcttcccaagaagtggaacctaaaaattttggaaaatatttgggtgttaacaactttctttaaaaagataaaattgtttgtcgaggggtctttttaaagagaggcatatggttgtcttttgtataggaaattttttttaaaagggcgggg

SEQ ID NO: 117419 - DNA, 1050 bp, Arabidopsis thaliana columbia
cacgcgtacgtaagctaggatcctctagagcggccaggcttaaatctttttttttaatgagaaaagacaacaacaacggggaagagcaacgaaaccgaaggatgccccaagaaaagaacagacagggaaaaaagaggaagaaaaaagaagaaagaagaggaggaagcaggagagtttaaaagagactgcctccttacaaagaggggggggacaccaacgacaaggaaaacaataagacacagagaaaaaagaaacacggagcgagagaagccgaaagataaggaagagaaagacgaggaggacgagaagagagacacgagagagagaaagagacagtacaaagagaagcaaaaaaataagaagaaaaaacgcacagacgaagaacaagaaaagaaaaggagacaaaagaaaaaaggcaaggcgggaggagacgcgggcaagcaggggaagcgaggaggcaagcaaggcaggagggccacagagagcgaaccggaggaaagagggaaccgaaaggagaacgacgacgacaacaaaaaaaaaacgacaagacagaaaaataaaaaagcggcgagccgagagagacaaaaggaagaagcgagaaggcacgaaccgaaaagccacaggaccgagcgagcagaggagggaagaagggggcaacggcggggaggacgaagcagaagccaaggagagccgccccgacgaccccggcgcccaaccaccaaaaggaagcgcccgaacaaagaccaaaaaaaacagaaaggacagagccgccacaacggaaacggcgacgccacaaaaagaagagataaagaagaacgacagagcggacaaaagaaagagacgagagggaagcataaacaaaagaacaaagaacacacacacagagaggaccacgcgatcaaacgaagacgaaaacgaaggcgagggaaacacgacacaacggaaaagcgataagaccaaacaccagaacagccacaggacgaagaaggaaggaaaggcacccaaacgcatacacacccggaccgcgacaaggaaagaaaacaaaagaaa

SEQ ID NO: 117420 - DNA, 514 bp, Arabidopsis thaliana columbia
  unsure (1)..(514): unsure at all n locations
cctgcaggtaccggtccggaattcccgggtcgtcccacgcgtcggagctctcgtatctaacaatcatgaggcgtactcaagttgtctacctaaatgcaggaaaatgtgagaacgccttgctaggagctagggtggaggtaaaagaaagtgaaaaaagagagccaaaaggagccagagacaacgccagaagagattcnctccttatgggggtgtggaaccaccagcgcgctaacgcacaaaaaaagtacccgtcgtaacaaggaaacacaagggagacgaagaagatccgccgcgctacaatcgagtcatagaagtcagggccgccgccgatcggcagagctccgcccaaagaacgaaagcaatcaggacaacaccacccaaactcaataggagaactacagataagacataaaggcaccacaaaccgctcggaggcagaaaggagagtaggataaaagagaaacagaggaagggaggaagaaggagagatgacagagcgccacgtccccccccc

SEQ ID NO: 117421 - DNA, 531 bp, Arabidopsis thaliana columbia
  unsure (1)..(531): unsure at all n locations
cgactcactatttggaaagctggaccgcctgcaggtaccggtccggaattcccgggtcgtcccacgcgtgcgagaaaagtctgtttttttattgagatttttttgtttctatagattctatcgaaatgccgatgtttcagccgttaaagagagatgggttaataggatttgaaggtggtggtgatgggcaagtcttagatctggatactgcagtgaaagatttttttctcggtggtgttaatggnggnggnatatcatatttaaagaaatttctcccttaccttctgaggtgttagcgccccgtgtttctggatccccctgtttcgaagaaataattcccgattccttcataattactgtctccctttatgtttgtagttttctacctgagttcttctcttcagcccgtgccaaggtgctttataacaagagtctgcttaccttccttggtatggttgttttattattttattaccattcccagccctttcaatataaggtgtgaaaacaggtctacccccccccccccca

SEQ ID NO: 117422 - DNA, 951 bp, Arabidopsis thaliana columbia
  unsure (1)..(951): unsure at all n locations
tgcacgcgtacgtaagctaggatcctctagagcggccggcctaatcttttttttttttaaaaaaagacaaantcggaatagataaataaaacccaaacaaaagaccacgaaaaacatacattcatgtgctcgacgaaacggaaactacagaacgaaccagacaaatctaagaaaatcctctttatacgagggggggcccaccaaacagacaggagaaggtcgacagcacccccaccacacgccggagcagcggtagaaaatcacgaacagaggaggaggaaagagaggcgcacaagcaacccccaaacaaaacataacacaaaccccacaaaccacaacgtaaatccgacacacctacagagaaaaacgcgcgccgcaggcccagcaggaagtagaccagcacgcccagcaagacacaaccgaacaatatataaaatcggcaaaatgatcggccaccagaccaaagaataaacccaccaataaaaacgagaacacccccagcgataacacaccaccaagccgacaacgacgagagaaagaggacggcgtcgagcacgcggagcgcgcgatacaaagcaaacagaagacccagaatgaaaccccgccaaggcagagcaaaaagaccaacacaagcctgcagacaacctcgatcacgcaccggaaacccaccgaaccgagtacgccccatgcgacacaaacgccgggcgcaaacagccgcgagcagcacaccccgtaacgaccagccgtccacgggaacagggcccaggtcgaagaaaagagcgccgacagaccgcggggacgtggcggcagctgaaagccgcggctaatataccccgtggcggggccgataacgccgtcagtacaccgtacccgcacccccgcacacgcagagacagaaggcacacgtaaagacaatgggcgcggggggacaccgagcgaacccgcagaaaa

SEQ ID NO: 117423 - DNA, 486 bp, Arabidopsis thaliana columbia
  unsure (1)..(486): unsure at all n locations
cctgcaggtaccggtccggaattcccgggtcgtcccacgcgtggggggagtccnnnanaanaaannaaaaaaaaaataataaaggaaatttaatgntattaagagaangggtgacccggaagtggggaggggtgttatgattaatagtgtaggagagagaggggggatagatggaaggaacggcagagtttgagagttcccctcaatattggggggttagaaaaaacaacacaattatttatatagtgtataatatgcacatgagtgatggtagttatttcagatactaccagtgaatgatagtggagaatgaatttggaaatataaatgtatgagtgtaaagttatactaatatagttgatggggggaatagtgaggaagagtcaaggatagtataattattgaggtctcgacgatataacgtttgtttaagattgcaagttagttagccgcgagtgcgcggggaagcattatataaattaaatt

SEQ ID NO: 117424 - DNA, 682 bp, Arabidopsis thaliana columbia
  unsure (1)..(682): unsure at all n locations
catagcacgcgtacgtaagctaggatcctctagagcggccagcctaacccttttttatataanacaaaccaaaaaacgccagctgtcaataacaaaagcaggaaacaccacaagaacggagacacaacacgaccaaaggcacgcagcgaagcggggaccaaagggcacgcgggggggaccctcccagaaacggggggggacagaagaagaaaaaaacccaaggaaacgaacccacaaagagggagaaacgcggaggcacgaacaggagggcaagggaagagaaacacacacaagacgaccaacaccgcaacgaaagcaaacccgcagacccaccagaagagagcaggagcacaaaaggaacccgcagaagcacgcaaacagaaaaagagaagcagccgggccacaacacacgaacgagcagaaaagaaaccagaagacacgaccccgccgcgagaaaaaaacccccacgacagagaaagagcacaccccccgcgaagagcagccgagccgggacaacccagagcagaaccccaaaccaacccacgacgaaggaaagaacgaacgccgacacgcgacagccagacaaaccgcaagcagaagacacaaacaaaagagaaaagcggaggagagggcgagacgaagaaaagaaaaacacgagnaacgaaacacaaagggaagagag

SEQ ID NO: 117425 - DNA, 359 bp, Arabidopsis thaliana columbia
  unsure (1)..(359): unsure at all n locations
tatgacgtaccatgcacgcgtacgtaagcttggatcctctagagcagccgccccttttttttttttttacaaaagtttatacatttatttgaaaatgtttattagggtaaaagtntgccacattctaaagacaccaaaccgagcatctactaaagggcggattaaagcaggagagagactaaagcccgaatttttttttggcgggggggggcccaagcaccgcatccacccaaaagtaaagccccgccacagaagggggcagggccgtacccacccgcaggggaaaccaggaagaacagaagagacgaaccacccataggacccgcccactgacaagagagaacgggggaggatcagca

SEQ ID NO: 117426 - DNA, 555 bp, Arabidopsis thaliana columbia
  unsure (1)..(555): unsure at all n locations
ggcacgcctgcaggtaccggtccgngattcccgggtctacccacgcgtgcgcttttaagtgaaatcggtttatagagagaataaatcgtaattactttacatgagagccgcttacccaaaataatcatgtgttttgttattgtatttataaattatataaaagtatgaagtaaagcccgcagaccccaccctgcacctccccttacccaatttttttaaaaaggtgtgtgaacaacagccacacactccatagtcagcaacaatctacccaaaaatctacacaccattgatcttaatgatgccttatccgagctagaaactcccagatctatataacatatttacgacccagtggtagtgcacatcggaaatggtaagagatgcagattaaccaacaacacgttctttatccagtcgtccttaaggcgcatttatgtgttataatagacattatgcncgcgcgtgatgttgatattaaatttttatatatatataactggtctataatccaggtaggagtgatataaacatgagcaaaaccccaccctccccccc

SEQ ID NO: 117427 - DNA, 514 bp, Arabidopsis thaliana columbia
tctctacgactcactatttggaaagctggcacgcctgcaggtaccggtccggaattcccgggtcgacccacgcgtgcgaatctctgccgctctgtcagaactttgcaattactagataaaacactaacctaatactgcctactcgactgcaaaatgaaagcctctgaaaccgaacactccatgaaaacaacagaccaggatcactagagtcgaccgctctccaaacatatcatcagtttggagaggcgttgctcagaggactgtctatgattgttatactactactcgcgattgtcagcagagatctgatacaacagacaacagagggatagacggtgaactgctagacacactgccatggcgtgaatgccttagagaataagactgatcatataatgagcatgagcgcgcccagcgcctcataagaataccactactgctgtgaagaagagaagttgactatactccaccaccgtaaagagactgccctgggtgcaaagatcaacacatgctg

SEQ ID NO: 117428 - DNA, 548 bp, Arabidopsis thaliana columbia
cgactcactattgggaaagctggtccgcctgcaggtaccggtccggaattcccgggtcgtcccacgcgtccggaagattcttgcggaacgagcgacctacagttccagagagaactccatcaatggcttcaagggaactgcttcagctaagagaaagacaaactgtctctggcttaagggaagggttccataacgggagggaaaatattgtccatgaaaattcttttaacactggtaatgataatagcaatacttccacaaatgctcttgcaattgccatcactgctgggaattctgatcctcgtacccaggacgcgtgcccctcatcgaccgcattgcctccctctctccccttcccctctcgtaccccccacaaccttatcaatgtggcgcacccccgcctcccccccccacacccccccccgcccccgccctctatttcacacaccccaccccccacccgaggcccgccgagacttaaacttttgtcgttacgcctctcctccctaatgtggtactgtggcgccgaccccgccccgccccccccc

SEQ ID NO: 117429 - DNA, 885 bp, Arabidopsis thaliana columbia
  unsure (1)..(885): unsure at all n locations
actatagacttactatgacgtaccatgcacgcgtacgtaagcttggatcctctatagcggccgcccttttttctttttttttttttttataccagaatctaacatccatttatttatttgtcggaatagaaaaaaacaaacaaatgatggatcacaattaataaaaaaatattttttgctcatatggggtttgaggcataaacattctttttttatgacatgaagatgggaacataccatgttttagtgtgatgaaaagcccaactaagtgggaaactaatacatttttgacatacccgacccgacagctccaactttccggggagcagaaccacccagaagcactgctggcagttgccggtggcaattccaattcggcaggtgcctggaacaaatttgtggcgattatgaaccggccactgaaggtttcaggtttgtccaatcccggtccaggcaagaaaaaacgggtggggggctaaggaggaggcctcaattggggggatatttattatactggagaatttggcttggctagttctcaagccccaaaaggggcccctctctcttgctggtttgcccaagggaaaggtggaaaaagaatggtggtgacaagggaaaataaagctcccgataaaaaaactcggggcaaaagactttctggtgggtctcgcccatggcacgaggagcacccgcgcccacaaatggctctcggttcgccgccaaaaggttttttgggngcctggtatgggtgcagacaaaaaggacagccgtgagagtttaaaggttcaaggcgtggtggatttataaagtagggagcgcccccccgcgcccccggagcgcgcacaccgtgaccgaaaaaaagaagtactcttaagggggccagag

SEQ ID NO: 117430 - DNA, 456 bp, Arabidopsis thaliana columbia
  unsure (1)..(456): unsure at all n locations
ctatgacgtaccatgcacgcgtacgtaagcttggatcctctatagcagccgccctttttttttttttttttaacaagaaaaagatgagagatttgcagaggcaaaggagggggaaatacatatctgttaaagttcgttgttcagatcatacggtcttttcaaaactatacccagattgaattcttcagcggttttttttttttagcgttgttaaacaaaagacacagtatatatttaagagatgaataacaactaaacctggaataattatgtagttattatactttttctaacatttacccttttatttcccaaaanatattaaggtcattcccttcaattattctcctcattaccctttatatcccgttccgcttatccccattcaatttgtaccctcatcttagtttatatttcttctcttcacaatttctcccctttctctttcatcattat

SEQ ID NO: 117431 - DNA, 498 bp, Arabidopsis thaliana columbia
gcctgcggtccggtccggattcccgggtcgtccagcgtgcggaaggcgatacaaaaacagaagtctattctatccgatgtaaatgacaaaaaggattgttggtaatgggtgctggcggggggggtttttgttgtaactagtaatttaaattggcgcggcgcttcggcgcggcacgcgaggtccctttctttggggttgtcaaagaacgacggggtgtttcaattagtggggttcctttagatggattcaggtagttgtctttaatgtgtgtccaactaggactcagagtggtgtttagtatgtgttattggctggggtgtctccgtatataattgtagagtcagggatggggccgtgcgcttttggtttaatgtgggtgggggcggtgattgttagtttgtgagtagttgcccgggcggcgaggtgtttgatatattttagggtgggcggtgcgtttgtgagtggatgtgatgtggggcggactcccggcggcccccg

SEQ ID NO: 117432 - DNA, 654 bp, Arabidopsis thaliana columbia
actatagaatagctatgacgtcagcatgcacgcgtacgtaagcttggatcctctagagcagccgccctttttttttttttttgtactaaaaacgtggtttactttccctctaactaaaagggtaagcttaaatatataaaccaaaagtatacaaacacaaacagacagagggagagagatagacatacatgttaattaactttttttacacttagaaggtctctcataattaggaggtaaagaaggacaattcttggtcatgtttggatatgggaaaatggagaaaaaaaaaaaaataaaattattgataaaatatagatataagtaaaataataagagtatttacaattatacattaaccataatttatacacgtataaataaaattaatttagatcttattttattatcatatattttaataagaattcctttatccaactataaataataatataataaaaaaagaggttatgtataacaagaatttaatttatctttacacccacgttaatacctatatttctttataattaggccacccatcttacttctaccgctagtataaaatatacagaaaataaccactataagaatagctttgttgattaaaaaaacacaaaagtgtaatataataaaatatgcatatacaaa

SEQ ID NO: 117433 - DNA, 521 bp, Arabidopsis thaliana columbia
catgcacgcgtacgtaagcttggatcctctagagcggccgccctttcttttttttttttgaaaattaaaacattcttcctcatccaatgtttctcttcttttaccactacaaagcattaaaacagatctcatggtgtttaaacgcaacaatcccatgcaaatgcataaagagacaattttttgcaaaaggaggcaaaccctacaaaaaccccagaaaaaaattagtgcaccactcaggaggcgtgcatcagtaccttacagattagagagggattcccaatgccgagagaaatggcgagaacatatgcaccatcacacctcgcaccaagagaacagctacgatacaaggtagaagtgcgatacacagccgggcgatgctgccccgcacaaagcatagcatcgggaggctgtgcgatggcggtctccccctacaaacacatttcccccaagatcgacttcacccccccccaatttaataatgtattaccactgtgacacagcagcgcagtcatcgagccgac

SEQ ID NO: 117434 - DNA, 544 bp, Arabidopsis thaliana columbia
  unsure (1)..(544): unsure at all n locations
acgactcactatagggaaagctggcacgcctgcaggtaccggtccggaattcccgggtctgacccacgcgtccgccgtccccaaaaacaaaggaaacaaaaaatcagtcggcgaaacgggaagagatctatcggaaatcttacggcggcggaagtcatggcgaacatagaatcagaagcagtcgatttcgagccagaggaggatgaccttatggacgaagaagtgtacagctattgacggagctgatgtttctccacgcgcgggacatccgaggcttaagtcggctattgccggagctaatggcgaatcagcaaagaagaccaaaggccgngggtttcgcgaggagaaagatcccgaacgtgatatgcccgttttagtctacgccattcaggcgttactctcgttgcagtatttacctgctttccctataatccaaatcnctgccccgctccaaaggggatctttattttttttgttatctggttcacttctactctagtgggttaatattcacgcctgtccgcccctctctccctccccccca

SEQ ID NO: 117435 - DNA, 633 bp, Arabidopsis thaliana columbia
tttataacaacaccacctcattatgtctctccataggagatcgcggactccttgtaaaaccgaacgggaaggcacatattgtctcaccctaaaacaatattagcaacatacccagattttttttaaaaaggggggaacgaagcaaaagcaggtttttatcagaattacccaccgctacggtgagacatatggggtctctccgcatgtcgcgcgacgtgtcattagtagatgcgataatagagggagaatgtgttcggggccagcgagtcgcgccgctatatcctgtctcctatatagtgacgctattatataaaggtgtcttggagggacttggggcacggcttggttgtctgtctccgtccagctgggtcgattcccacacacaagattagagagatagagtgaacgtaccaccgtaatatatatcccccccaccattctacaacctaccccccgccagatattgcgcgtggcgtggatctagtggcacggcgttcaagcgcgagcggtgcgctcgaatgtttaacgaatcaatctgtagtgcgtttatccgaaacgtggtatccgggaggtgtgtcgcctttagccacagaggagggacgggtaacaataataactatatacacattacga

SEQ ID NO: 117436 - DNA, 546 bp, Arabidopsis thaliana columbia
  unsure (1)..(546): unsure at all n locations
actatagnatagctatgacgtcgcatagcacgcgtacgtagcttggatcctctagagcggccgcccctttttttttttttttttttttaaaggnagcaactnnantatganaagaacacaacaccattcagataactcttttaaatcccaaatttggtttatgatgatggatcatctgagctttacttatttattaaacagtttttttatgagtctggctgacactgaaactttgctcaggtttttaatgcttccgctaatgcatcagaacaaaaaacatgctgggttctcctttatcggcgttttttgattctaagaaacgcgattaacccaaaagtgagattgggggttcacttagttctcaaacccctcttaaggaaatttgtgttgcaagaagcctttctagagcatagagaaaataaaaacccaacgaatatataatatcagacaatcacctatatttataaacctactttatgttatttatgcgtgatctcgccccctcgcccagttgctttttcctccccctcttttctgtgagcttac

SEQ ID NO: 117437 - DNA, 550 bp, Arabidopsis thaliana columbia
  unsure (1)..(550): unsure at all n locations
agctctcnnnnnnnnnnnnnnnnnnnnnnnnnnnnnnnnnnnnnnnnnnnnnnnnnnnnnnnnnnnnnnnccacgcgtgcgcaaaaccgaaataaacactaattgcgctttccctttagattcatgtgcattttctttcggagcttctgaacagtggagtcatcacatgcaacgacgaatccaacgagaggagcatgaggatggaatggtggagataggaagaatagtgctagctaatcttgtctatctggggttcaattacccgttggcacgctcaatcgatacttgaagaaaggtcgatactctatccaatacaggctcggtgctacggtttacctagccgacgatctcgagtacctagccgcctaagtacttgagctagctggtatcgcaggctagagatattaagaagaacaggatagactgtaggcacatatgtttagcgatactgaacgatgaggtattggcgagattgcttcatggagacactatagctagaggtggtgttcttccaaacagtaatacagttgttcttgctaagaaatcaacc

SEQ ID NO: 117438 - DNA, 930 bp, Arabidopsis thaliana columbia
  unsure (1)..(930): unsure at all n locations
atgacgtacgcatgcacgcgtacgtagcttggatcctctagagcggccgccctttttttttttttttttttttttttttttnnnnnnnnnnnnnnannnnnnnaaagaaannaaacatactcataataataatatcactccgctcatcacaatgatatctttaaaataactggccaaaaaagggagacttttttaagaaacgcgcaaaaaccagcccaaaaaataaccaggagaacaaccgcccactggaccagaccctgtcccctctttacacaactgggcctaacccctccgttctgtcccgaaggtctaaaccaaaacgaagaggggctttcccaggggatggttcactccaacccgcagaaaaagcaaagcactacgttgccttagcgaggtggaacccaaacgaagacagcgaccgcgccgcgtacgggaggaaaagagccggcatgaagaagaggagaggggtaaagaggcgtgtacccccctatatgtatagcgtcgccgccccaatttgtcacgaagaggtcgttaggcgcgcgcacggcgactaccgcgcggcggtgagagagaaaggatcaccccccccagagtgataccaagcgtaaggcggagaagatgcctagcggaagggcggcagaggggaagatagacgcagcagcaatgccatgctgataccaccattgcacaaaacgggaatgcggggaaggcgatttagaaccagcaacatacgggcgccggcatttgtggatgtgaatcagagccagaaatatcccctaatggtgcacacgtcgtgttcccccgcttaatagccgctgtagttgcgagctgtttcgcgttaaggagctgccgagaaggccggcgactaaccgcgcgcccaaagccattgttactgcggcctggcggtacacgccacatgctccctgaggt

SEQ ID NO: 117439 - DNA, 524 bp, Arabidopsis thaliana columbia
  unsure (1)..(524): unsure at all n locations
tgtccgcctgcaggtaccggtccgggatcccgggtcgacccacgcgtccgcccacgcgtccgctctcttcgtcttccctcccgagaaagctcaacggagccctagactggttttatcactctcgccaacaccaaccacgctttttctctctttacctccatttttgcattccccaccccagtagatccataccacagatttttttttctcggggtccccacgcgcccccctcccattcgcttctctttttttttctctcttagtgtttttgttgttatgtttccctgctttcctttattcatacgattcttaattctccagtcctgtccccgtttgttccctctttgtntatattaaacttggttacactccccaccatcttctttctcctcccccctctctatgtctgctattattctcaccctcccgcccccccggggtgtccttttgtttctttgtttatcttcttacatccctcttatattacgagtatgtacatacgtctaccccttctcacccccccc

SEQ ID NO: 117440 - DNA, 716 bp, Arabidopsis thaliana columbia
  unsure (1)..(716): unsure at all n locations
agaagagctatgacgacgcatgcacgcgtacgtaagcntaggatcctctagagcagccgcccttttttttttttttttttttttttttaggnnnnnnnnanannaaacaaaaaaaaaaaacacccccacaaaaacanaaacccaaacagcacccacacaaaacaaccacaccaagccacaaaacacaccaaaacctttttttagcgcaagggggaacacacgaacgcagccngcgcgcaaacgaggagagcgccccgccgccgcgccaggaggcaaaagacacaaacgaaccagacacacaaacagcaaacaaacacacgcaaagagagcacaaacaacaaggacaaagacacaaagaagaaccaaaaagcgaccgaccccgcacaagaaccggcaacagaacaaggggcaacgcccccaaccgccaccacagaaaagaagaagaacaaaccacagcaaaaaaaagaacatagagaaagggaaggcagaagagacgcgccccgcggaagagaagacccccgaacgaagacaacccaacccccccaccaaaggcgaagcagagacacggcgcagacgcacagcgcaggggcgccagcggcacgaaaaaaacagcagaacgacacacaccgaaaataaggaagacggcaaaagagaacaccgcacaaacaaaaaagacacaaccaaaagaaaaaacccagaacagaaaaaagacgcac

SEQ ID NO: 117441 - DNA, 569 bp, Arabidopsis thaliana columbia
  unsure (1)..(569): unsure at all n locations
ctagcgtctactacgactcactattgggaaagctggaccgcctgcaggtaccggtccggaattcccgggtcgatccacgcgtccgcgattaccggatgagtttcttgacgagttaaagaacggtcttaagtctatccttgaagggaatgtagcgcagagtgttgatgagttcatgttcttgcagaaggttgttcagagtagaactgatttgagctctgtaacacttgttagagctcatttggtgcagcttgagatacttgtagcgataaataccgggattcaggcgtttttgcatccgaatattagtactggctcagccgtctcttatccagatttttcgttaccgtcttttttttattctttatttccctctggtgccttcttcctttgcttttttccattgtcgttctctccccccctccgctcctcccctcccctcctgcgttatcacctactatctctcccctcctccgncgtttctgggagagagtttatatttttttttatgattgctcttgcatatgattacaaagttttacccactcggccctcccccttccctccccctc

SEQ ID NO: 117442 - DNA, 747 bp, Arabidopsis thaliana columbia
gggggggagagagagaggaggggagttagagaggggagaaaccagcagaacacgacgcaacgaaagacggcacgaaacaaacgcgaaaggaggacaacaggcggagaaaagcccggacgggggcccgcgcaagcgacgccgcgcgcggcgccggaacgcacaaacccctacaaaccggggggcaaacacaacacagacggagcgagcgagaacgccgaccccgcagcacggcgaacgccccacgcgcggcaaaacaagagggggcgagcaaggagggacggggaacgcagggaggagagagaagagggaaaggacacgcccagccacacgcgcaccaaagaacccatcacacaaaaggacggacgacaccaacggagacgacacaagaaagacggacaacagcaagaaaaagaacacaacaccagcgaacgaccgcggacaccgcgccgggccccgccgaagccgccccccagaaaaagaaggaacgccagccgaaagacaagccacaggacgcaaaccgaccgcgcccaccagacacgcacccccgcgcggcgcgcaggagcagacgcgggccgacacgccagagagtaggccggcccgcgggacacacaaccagaggcgaaagggcgggccgacgagacacgaagagcacgaacaaaaacaaaaggaagagagagacgagcgccgccacagcacgagacaacacccgcaagacgaggaaccacgaaacaaacgcgcacaaaacga

SEQ ID NO: 117443 - DNA, 714 bp, Arabidopsis thaliana columbia
  unsure (1)..(714): unsure at all n locations
ctatagctgagctgagacgcagcatgcacgcgtacgtaagctaggatcctctagagcagccgccctttttttttttttttattcatatgcatttcctttatcagtttcatttcctttcttgtctacgttcgatacacagacacaagtctcttcagatataatatatagcaacggaacaaaataaacacatctaggaactcctacaaagcaacgggacaacnacacgggcatgccaagaacaaaggactccacagaagaagaaaaaccaaagacaaaacgaggaaacagacaaaagaagcaaaaacccgtaccatatgaatcaaaaaggtaaatgcactagcagcccaagccccatacagccccaaaaaacgaatgccgcgccccaacaacagccatgaggccgagcataaaggaaggccgcgagttgcacacataaacggggccgcgacaacaacccccccggacacaagagacccccgcacgagataatctacacacacccgccgctaatactcgacgccatcacaagagaaggacgcgatacgcagcaacacccgccacgcagaaaaaaaatataagaaacgcacaagacacacaaacaaaccccaccctcacgcccacaaccgccagaaccggaagagggcgcgcccagcggtagccacgccgccacacacaacagccgagagaacccgcagacccaccgcctctacatac

SEQ ID NO: 117444 - DNA, 944 bp, Arabidopsis thaliana columbia
  unsure (1)..(944): unsure at all n locations
actatagctgagctatgacgtcgcatgcacgcgtacagtagcttggatcctctagagcggccgccctttttttttttttttttttacaataatacaatattattatataaaatatcatgtactttacacatacatttatttattcattaattatacatccatcacacaacaattcgtaacaatttcattttggaatatatattttatttanggtaagcaggcatatgttctttttcttcttgaccgagtcggtgatcttgagaaccataaggactaaaagcttgaaggaggaagtgtagggtagccgccgggtggaagggggcgcagcagcggccacggtcacggcgggccaactacacacgacacccagggggaagaggggcggcgcgggggacaaagagagggtagcgcgggagggtgtggggcgggagcggagcataacaggaaaatacacacccaccgactatcatcctccccttctatatattattttccccccccattatagcctcttgctccccccatcaaatccgcgcaaccaagttaatatgtagctataacttaaaaacaaaaacaatctatcaacagacaccccaccacaagaacctcaacccatataacaatgtagcaccacaactagagatcgtaacctataaacaaatgaacgtaacaactgcatgagggcgaaggaggacagcgaccagcaggcgtaggaggacaccgatatcacacacgccggtcaacgtggagccgccggggcatgtgatttagtgcgacgcgacaacacacgacaccgatcacacagccgctcgtccgcccacaccctgcacagatacaccacagtaaaccacccacatagggatcccagcgncaccccgcaggggaacgatgtgggacctcgttttcttatccaagtctattcactatcattcccacccattctt

SEQ ID NO: 117445 - DNA, 385 bp, Arabidopsis thaliana columbia
gcctgcaggtaccgggtccggattcccgggtcgacccacgcgtccgcaaaaccattcctctcctcaaaaccattaatctctcttctctctagcataacctctctcagatggcttctaactatgatgagcttacttgttggagagtaggcatcatagagtgatgggggggagggccgtacgcacgacccctcaaacgagtttttctttttaaggcggtttggggagctatacacacatagacacaatctaactagatctttctgttggagccactcctaatagtctgtttgtgtcagcaccctccgtattcttatgtgtgtgtatatagtgtgccatatgcatagccttctactctttcccaatcttttgactttctattaattta

SEQ ID NO: 117446 - DNA, 616 bp, Arabidopsis thaliana columbia
actatagatgagctatgacgccgcatgcacgcgtacgtaagcttggatcctctagagcggccgccctttttttttttttttttttttttttttttttttttttttttttttttttttttttttttttttttttttttttttttttttaaaaaaaaaaaaacgggggccaaaatcccctgggggggaaaaaaacccatgaatttttaaaacagagaaggcaaaaaaacctttttaggaaaaactagggttcgataagcaaaaccccacagggggggggggggcccttttttagttttacaaaggaaaggctaggggggattttcaaaaacctgaaaaaatggggccctaccccctgaaaatgggggcccaaagttttttttaggaatttcataaagaggggtggggaaaaacaaggggagaaaacccaaacccccttaaaaggttttttatgagttgggccttaggggggcccaaagagtaacctttcataaagacttcttttagcatcacgccccttttaaactggaaaaaaaccccccgccccattttaaaaccctgttttttgatttggggggggggggatacctgatccttttagggcccctggagggggccc

SEQ ID NO: 117447 - DNA, 556 bp, Arabidopsis thaliana columbia
tgatacttcagcgctctacgactcactattgggaaagctggcacgcctgcaggtaccggtccggaattcccgggtcgacccacgcgtccgatcagctttttggagaagaaaccaaagaaaacattcgaaaccctaaaatctccattagaattcgaaaatgacaaagaagagaaagctcgaaggagaagaatctaacgaagctgaagaaccgtcgcagaagctgaagcagacgccggaggaggagcagcagcttgtaattaaaaatcaggataatcaaggagacgttgaagaagttgaatacgaggaagtagaggaagagcaagaagaagaagtagaagatgatgacgatgaagatgatggtgatgagaatgaggatcagacggatgggaatcgtatagaggcggcggcgacgtctggatctggcaatcaagaagatgatgacgatgaaccaattcaggatctgttggaaccattttcaaaggagcaagttttgagtcttcttaaggaagcagcggagaagcatgttgatgtagccaatcgaattagggaagtagct

SEQ ID NO: 117448 - DNA, 651 bp, Arabidopsis thaliana columbia
cacgaagcgaaccgccacccgcgagaacagaccgacttttacacggcgggaggggagagacagagccgagcgaacgcaagggagagccacacagcacgaagagagaaaagaaggaacagacaacggcgcgacgaagggagacggaaagagacggcggccgaggcaccaccagacaagaaagagcggacgacgagaggggaccgcgagccaccagcgacaccacgaaaaacagagcaggaaaaaagagcaccaggacgcaaccagcaacacaccaggagaggacaggaggaacgcgaacgaaaagagaacccagcgaccggagaggagacggagcgacagacgcgaccgcggccgccaagcaccaccaggcaaaccacggccgaaccccccccggaagaaaacacagacggaagacgagaaagaaacaccgccggccgccgcgcgcgcagggaacacgagggaagaaagaacggcccaccacgaaaacacaaccgcgaaacccaaaagaacaacatacagaagcaacgcagccagaggcagcgacaggccggaagaaagaagcggaggggacacgacgacccgcaacgcacaacgaagggcgcccggaggcagagcccaagacgacgcacccgagaggcaagaccacccaca

SEQ ID NO: 117449 - DNA, 522 bp, Arabidopsis thaliana columbia
  unsure (1)..(522): unsure at all n locations
cctgcaggtaccggtccgngattcccgggtctacccacgcgggcgctctctctctctcacaccgtacatggattcctcctatggcagccacaaagttccttctcctgctgttcctcaccacctgcattgtgaccggattacccgataacaaaccagaggccggggcagatagactgagactaaagaggaagaagatcttttttatatggggggtgagagggccagcaaatctcaggctgaaaagatcactccctccaggaagtaagggagtgacactttgcgatgccgagggccgggctcctagtgagataagcgccggagcgggagtccacatgaaggcccgggtattaggcagtaacagaaagcaccagcagcacccaagtaattctcagcgtgtccccgcggaaagtgcagggtgttagtacgacgacccctccgagagggggttggcgccttatattatttataaggtgtgcaccggccggagtgagaagaagaggagagcgcgggcgcggccgcgct

SEQ ID NO: 117450 - DNA, 682 bp, Arabidopsis thaliana columbia
cgcggggggggggggaggaaggggagagagatctagagagagggaggaagaaccccacgaaaagaagagaggggaccgagaagagggcaggcggaaggcggggcgcgagaggaaccccccggcaaacgagaagcaagaggggaagacagaggggaggaggagagaaagcgcggcacagcggcgcgacaagaacccttacacgagggggggggaggcacggcgagagaagggcgcgagaaaaagagcccacaaggggaggggggcggaggggaggacgaaaaggggggacgaagaacgacagacgacgcagaaggccgaagggcacaggcgcaagagggagcgaagcaagcgaaggaccgacagaccaacaccaccccaaaacgccgggacgggcggcgcagggccgccgcgcacgcggcagcaagggcaggagagcggggggagcgaggaaggagaggcagaggggaggcacaaaaacagaacgcagcgcggaagagaagcacgccgcgcagagagagcccaaccccacccgaggacaaccgacggtcggcaccacaaggcggagagcgcagggcggcggcggagacagaacaaaagaagaagggacgaacagcccgaagacgacacaaaacccgagaaaacgagaaggcaaagagacacgcacaaccagaagggagagaga

SEQ ID NO: 117451 - DNA, 518 bp, Arabidopsis thaliana columbia
  unsure (1)..(518): unsure at all n locations
tggggagctggcccgcctgcaggtaccggtccgngattcccgggtcgtcccacgcgtgcgcttatgcattcctagcaatgcattggattacgagattctctgctttgttgtgagagcaatgagcgatacacgcgcgacacgcacaagagtgtagatatttatagaaactacagcaaagagcgcacacacccacggccaccccccatgaaaacaggtgtctgattaaagagggggtcgaccgcacaacccaacaaccttcatcacgtaagacctatcctcgctaaagagcgagacaaggagagagctctcaaagtaccccgccccacacccgcggcgaacagtagttattttgatgccgacgacaagccctaggagatcgacccccacttgattataagagaaagatctaagccgccctccccctgccgccgggacgccccgacgcgcaccaagaaagagagaagaatgatggtcgggtgccgcggaggtgggagggggaagattatacttatatcaaa

SEQ ID NO: 117452 - DNA, 900 bp, Arabidopsis thaliana columbia
agagaagaggacgacgccaccggagaggaacccccaaagagaggacgcacaagcagaggacccccccacaaaacgagacaggaaacagagaaggcgaagggagcaggcgcgagaaacaggaaaggaaccacccagaagagacaccccctcccccgggggggggggcgggaaaaaaaaaacgcgggaggacaaggcccacaacagggcgggaggagaaaagacaaaaagccagcagcaagaacagagaggccaacgaaacccagacgaaagagagcgacgacacggggagaacacggcgacgacagggcacacagcccgcgcggcgacgaggggagccggcagcagggggggaggagcaagcgagaaccgacgcagaggagagaagcgagagccggaccacaagccccacaaaagaagggccgagaagcgagcgcccgccccaggcgaaaccgcccgccacacacggccacccccccccaaaaaagacagacagaagccgaagcagccgaacccgccggccggcgcccacacgggcgaaaagcgaagaaacgccagcacggggaggcgagccccaggcgagcaaacacaagccgggcaccgggagcgccgcgggaggaaccaaagccaccaccacaagaagcggaaacgggaaagagcagacagagaagcacacaaagacaacgcgacaaagaacagaaagccgaaccgccagaaaacacgaaggcccacggaagagcaagcacgcacgcgcgggccgcgcccccgagcacccccacgactgacccccgaagacaacgcgcgggcgccccacaggcgccacgaggcacagacgcaaccgcggcccccaccgcgagcaagaaaaagagccggagccggagagcccaccccgcgccgccagga

SEQ ID NO: 117453 - DNA, 799 bp, Arabidopsis thaliana columbia
  unsure (1)..(799): unsure at all n locations
cactatagactactatgacgtaccatgcacgcgtacgtaagcttggatcctctagagcggccgcccttttttttttttttttaggaagaattaatcgaattgataatagaaaacgaagcaccaatctttttcttctgaatcttatatttacanttgttgaatgaacaaaccaaaaaataatatatatatatttctgaatcaatgttttactgaagacgaagaatccctgttacttctggttcttttgaagtatcttctcattactgaatttgacctatcccaaaccctaagattctactttaatggtcaaattcagattattagaagaaggtgatatcgcaactgatgaagaaaaaaaacttaccgttggacctaatcttcttaattacgaacccattgtccgaatcattcttctaaatcttacaccggatgctctacctactccctttctcgtatttgccaatcatcatgcccatggtacacctccaacgtaattacatttccacctatttttttttttatcacccccccctatatattcccggaacttcctagcctcatcttactcatctactccgcccgaatttataattatttaattgaaaccacgccaaataaagatacacagccgtatttcccaagttgctacataccaaattgcttagcagaatataaatttataagcgattatataaaatataatttttttgtattgaactgaatatggagcagcgccgaagctctcgactctgctactctattcagacccctttctcatttatattatctgttctgctct

SEQ ID NO: 117454 - DNA, 455 bp, Arabidopsis thaliana columbia
  unsure (1)..(455): unsure at all n locations
cctgcaggtaccggtccgngattcccgggtcgtcccacgcgtgcggccaaatcgaagcgtcggctactggaattggtagatctggaaaccctccggcgtctaaatcggcgattgagtctttacctagagtcgaaatgttggattgtgaaaaaagttaaaaagtggggggcgcgacgacgaaagaagaaaaaaagttccgtacatttaaggggttgggagcacaccaacgaaagagggtcgtcaattagtgtgttcgatcatggtaataagatagaagtaggatttttaatcctcttttctatctcgtaattacatatattttgttttcatgactaacgtttagagttaaccacgaattttaagaatttagtgtagttaagattacatgctcttagtataatattactcagcgaatcaagtattatttatttaatgtatcatagggcgcaccggga

SEQ ID NO: 117455 - DNA, 880 bp, Arabidopsis thaliana columbia
  unsure (1)..(880): unsure at all n locations
gtacgtaagctaagatctctagagcagccagcgcttttttttttttttaggttttcagttacttataacaaaactgacacgcgcttcttctagtagtgttagaagntaggatctgagagaaccagntaaaacaataactagaacaaacataaaacacaaaaaaaaaaatactataaatgtgagggggcgaccaccaacacaaacgaacagacaaaaaaaacacccacacaaaacaaacaaaaaaaacacaacaaaaaaaaaaaaaaaaacaaggaacaaaccaaaccacacaacaaaaaaaacagaaaaaaaaaccacaaaaaacaccacacaaaaaaaaaaacaaacccaaaacaaacaacacaaacaaaaaacaaaaaacaaaaaaaataacacacaaatcagaaaaccaacaacaacaaagccacaaaaaaacaaacaccccaaaaccaaaccaccacacaacaaaacaacaccccacccaaaataccccaccacccgacaaaaaacccccccccacccatccacaccgcacaccaaccaaaacaaaaaacaaccaaaaacaacccaccaccatactacaaaacattatctaccaaaaatagaacacctaacaaaacacatgccaaccaacaaaaaaaaaaaatcaaaaacacaccaatacaaaaccaaaacaaaccacaaaaacaccacaaaaccaccaaaacacaaaaaaacaaccacaccctcacaaacaaggaaaactacacaaccaccaaacatgatacccgcaccacaaaacacacacaaaaaacaaaagaaccagaacaaaaacataccagaagacgaccacaccaacaccacaccacaaacaacaaataaccccaaaacaaaacaaaca

SEQ ID NO: 117456 - DNA, 565 bp, Arabidopsis thaliana columbia
  unsure (1)..(565): unsure at all n locations
gcctgcaggtaccggtccggattcccgggtcgtcccacgcgtgcgcaaaatctcccattaaatcgcaaagttaattttgcgattttttttctctganngtggatggcttgcctccttaagagcagccgaggcggagtatcatgaaggtaaagtacgtattatccaggaagagcgacccttcagctacccgcaccacaccaccttccctcacttcggggggtgggccccgccgcgcgaagacgcctcacccatcaacagtaacttctcttccccacccacgcagccgcttatcttatctatattaggcgccccccgccggaaataacaccgccttccggagacactggcacagcccgcgttcttttcgccgccctttcattattgtaactatatcgctcacccccacaacctacttatctccacccttcccgctagccctgatgcctaatatttctccccaccggccctcctccagagtaagttcctgccttttctgtttggttatcgtgctcattctaccagtacttactttaggttgaagactccctcatgccctctccccccc

SEQ ID NO: 117457 - DNA, 551 bp, Arabidopsis thaliana columbia
  unsure (1)..(551): unsure at all n locations
actatagnactagctatgacgtaaccatgcacgcgtacgtaagcttggatcctctagagcggccgccctttttttttttttttttttttttttttttttttttttttttncggacctgactggggacctagccctaatacataagaccactttattagaggactctaaaccatagcacagaatgtggaaaaatccaagacagctttcttttcatagaaacgtaataccgcaattcatctaaaagagcaacaaggatgagtaaccctcggagtccatagtcctccaaagaaacagaaatggccatcgaatggcccacactcccctgatcttagggatcgaccccaatttctaaaaccccaaatgtcgggggacgcatcttaagattggaatgggaagccctacctaacccagagggcccaaggtcaagaaccaacaaaccaacttccttgggaggaggggaaaaccttttgtttttggccaaaaaatccggaaaattcccaaacgggagcccatacatgggattcggaaaccttttggtttaaggcggggca

SEQ ID NO: 117458 - DNA, 529 bp, Arabidopsis thaliana columbia
ctggaccgcctgcaggtaccggtccggaattcccgggtcgatccacgcgtgcgcgcacacctaacaaaaatcctccagccatggcggcagttactgaatttgtgctccaaccttgatcaatacggggaacgataaaggaacggcgtttttaataagataagaaaggaaagatacgggagcggcgcccccacgcggacctacggttcccttctttgggtggtgggaggcacgaaaagcgactccccatcagtacaaacgccacaacacgctcgtagtgaaggtggcgtatctgaacgccggtgcgcggatagcggacattaaaattaggcgaggggccgcggtccctgttcccaccgccgtggatatgaaataggatgcgaggcgcccactcaaccgtagcgggaccgcgactttttagagagtgtcttcaggtctgcccgccgggggggatcaagtatacgaaaataataaagtgagtagcagacatagagaaatatgatattgagaggaaaggctcttcccccccccc

SEQ ID NO: 117459 - DNA, 514 bp, Arabidopsis thaliana columbia
  unsure (1)..(514): unsure at all n locations
cctgcaggtccggtccggattcccgggtcgtccacgcgggggctcgctcctatgctttatggagaggaaaaggagtgagtggtatttataggctagtatatatatgaaagaccagacagacaagtttgcgaagatggtgaatagttaaagtatgtataggaggggggcgactgccacggccgcagcagggttttctatttagggggtgacacccacagaaaccgttatcgtctaaaatagttcagtctgagaacaaataataactattgaatataatcgcatttaggtagctatttaaaaaatgttgtctacaagtgcgcacagaagtcgcttataaataaataagaaaaatagaggagatgctgcgattactatataccattttatgagcaataaataatttaaaaatctaagacggccgggggggagagnggtgtatatatattttataatgaattatagcgtgagaacaatgaagaatgagggcggacggggatccttttatctccccccc

SEQ ID NO: 117460 - DNA, 818 bp, Arabidopsis thaliana columbia
catagcacgcgtacagtagctaggatcctctagagcggccgccctttcctttttttttttttttttttacaatccaaaccatatggggaaaaacctaaagcagacacacaagagacccaaaatacacagacaaagagaagaaggaaaaggaaaaagcaaaaggagaggaggaaggaaaatctcctcgacaggggggggagacaacgcaaggggggcttaaataaccgagcccggcaagaacagggggcaaacccgagacaggggcggagaaaaaccgcagaagacgagagcaacccatagagcaggcggaaaagccaagggggcaagggggaggaaaagcttagcggggaaacctagaagggtgaggcaggctgccttaaagaagaggggaaaaaacgaggggggagaacggaacgggggggacaaggcgccaaaaaaggaaacggggcgaacaaaaggccaaagcctgcggggaagaacagacccaacggggggggggcccgcagcgaagacgggggccaagcgggggcgggggggggggaaagaggggggggagaaaaaacacgggaaaggcaacgaaaagtgcgccgagggcaagggagccggggccgggggcgccgggaggaagggggggacccacaactgggacgggaaagcggggggaaaccatgcaaaagagggagccccggggaacaaggcgggcgaaggcaaccacggacggggaaaacggtcggagccggaacgggtgggggagcccgagccaacagccggcgccggagaccacccggcagtggggagggaaaaggaggggccgagga

SEQ ID NO: 117461 - DNA, 857 bp, Arabidopsis thaliana columbia
  unsure (1)..(857): unsure at all n locations
gnnnnnnnnnnnnnnnnnnnnnnnnnnnnnnnnnnnnnnnnnnnnnnnnnnnnnnnnnnnnnnnnnncttttttttttttttttttgtcatgaaacaaatacaattgtaacacaagaataaaagtgaggcaggtttattattccccctgaaaatcagagcacttaacagaattacacaaatcaccaaccaagaatcaaagacataacaggaaatttttgagggctgagacttatgtttgtctgtctctactacttctgcctcttgtagatcttagccaagaaggattttagcactgcttggattgctttactttggtgtccctcaatcgctccagtcagcttctcgtagcttttgctctcatactccatgaaaactccctcaagatccagctctttgtagagatccttcactttagcaacgttcgatgggtcgggtttaccatagttctcatataatatcttagtttgttcttcgctgcagcgctctaatgccttaaccaccaaccacgagcatttgaaatcttctatatctgttcctatcttgccaagcgtctcgggatcagcaaaacaatccagataatcatcctgcacttggaagtagattcccatgtcaacaagaacattcttcacatcaatatggttttccaaattttcgccggccataagcaacgcacaagcaacagggagataaaatgagtaataagccgttttgtactggacatacgacggtggattgcaatgagtacttggccaatcctttctccttanaggtggtgatcaatctatatctggcccaagctggttgcactcacctcattaacaatcacaggtcacatagtaagctatcacgaatgctt

SEQ ID NO: 117462 - DNA, 554 bp, Arabidopsis thaliana columbia
  unsure (1)..(554): unsure at all n locations
agcgctctacgactcactattgggaaagctggtcacgcctgcaggtaccggtccggaattcccgggtcgacccacgcgtccggtgggagtctctatcgtcgtcgtatccaaagctcttcaatggagaccgatctcaagtcaacctttctcaacgtttattctgttctcaagtctgaccttcttcatgacccttccttcgaattcaccaatgaatctcgtctctgggttgatcgtatgctggactacaatgtacgtggagggaaactcaatcggggtctctctgttgttgacagtttcaaacttttgaagcaaggcaatgatttgactgagcaagaggttttcctctcttgggctctcggttggngcattgaaaggctccaagcttatttgcttgtgctggaagatcttatggatgaaccctggcactcatctggtaaaaccttgattgactgacgtgcgcccgccgncggcggggtgcgatatattttaattattgattatgaccttaatttgcgttgctttagacttgggcgtctcccccgccacccccccca

SEQ ID NO: 117463 - DNA, 935 bp, Arabidopsis thaliana columbia
  unsure (1)..(935): unsure at all n locations
agctaggatcctctagagcagccagcctttctttttttttttttttttttttttttttagaaanccaaaaaaanncnnnncaaaccccaaaacccaaccaaagttttcttccaaaagggtaaaaactcagaaacaaaccaaagaacccctagcctcggggatactttttttacttcaaagggggagggagaacccaaaacatgatcagaagaaacccaaccgcgcaaaagatggaagccgcacaaggcggggacgaaccaagagaaaggcacactaaaccgaccgggcgggagacaaaacccccgccggagagccgaaaaccaaggagcagaaaggaaccgggcgggaaccacaccgcgacggaagaagccaagccgcagaagagaacctaagcggaggagaagcaggacgacgagacaaaggaaggcacggaagaaacagcgagaccgacgagataaaacccaacaacagagaaaaaagacagcccgcacgaaaaacggacagacgagggggagaagaaggaggaaggagaaggcgggggagacgagaagaggggagggaagggagaagaccccaccataatagccccacggaagggacaaaaaagcacgaaggggagcgggccgccaccgaaaacaaacgcgccacacacaaagcaccgaacaacacaaatccgccacacgacgccaaaccccgacccggcaagaacgcggagaataacagaacgacgcacgagaagacgagagcccccgacccgagaaggaaaaggaaagcacaccacaaacggaacgcgcccacagaacagagaccataaacaaaaaaagtaggacacgagagccacaagggagacggaccgcacgagagacggaacagagggcagagaaaagaccgagaagagaagagaaaattggggacaaaaaaaaaaaaaaaaaaaa

SEQ ID NO: 117464 - DNA, 544 bp, Arabidopsis thaliana columbia
  unsure (1)..(544): unsure at all n locations
cgactcactatagggaagctggcacgcctgcaggtaccggtccgngattcccgggtcgacccacgcgtccgctctacggcacttcccttggaggcttcttagcacaactctttgctcatcaccgtccaaggcgggttaaatcattagttctatcaaatacatatttggatactcgtacttttgctactgcaatgccatgggctccttttgtcagaaggtttttttttttgggggttcaccaaaccccaacaactctacttctctttcactttctccatcacactttctacatcctctcccctcctatacccacccttccctcattttttctcctccttctcacctctacgaattcccactccatctccttttatactctcttccccccccccccgccaccctctccatccacacaccttctactatntatctttatttctccacctcacccccctacccccgcttgagcagttgatatcctattacctcgtactacactattacctctttattacaatagtggctcccaacacccccaccccac

SEQ ID NO: 117465 - DNA, 758 bp, Arabidopsis thaliana columbia
  unsure (1)..(758): unsure at all n locations
gctaggatcctctagagcagccgccctttcttttttttttttttttttnnnnaaatggccaagagaatgaatgatcatcagaattaagacggaaaacaacgggctagatccaatgggaacgccacacacactagcgggaagcaacaaccgccaagagcacccctcttttctcggggggggggggaagaagaaagagggagaggaggaaacggaccacgcgaacggaggagagagggagaccgggggggagaaagaggagaggagaaacgacaggagcgaaaggagggacagaacgggagagggacacgagaagaaggggaagagagagagaaagaaaaaaagagaagggcggagcgcagcagagaacaagggtcaacagcagaatacgcaacgaagacacgaagtcagagaagcggtcacgggcagacaaaaaggccgccagtcggccgcgagggagcgccgccgaacagcggcggcgacggcaaaggagaggcaaagaagaacctccgcgggaggcaggggacagcgacacaagagtcacgccaggagggagcggcggaaaacacaaaacgagagctacggagagagggccacagggaggccaaggagggggcgcgagctaccggggacgcacaacacacgccaagaccagaacaccgcaacacacgataaaaacagaccgagagcaggccaagaagaatgaagaacacacggggacaggttagaacgacacacacacaacatacacgacgaagaca

SEQ ID NO: 117466 - DNA, 536 bp, Arabidopsis thaliana columbia
ggtgagagggatttttagggggaaccttcttatggtaaagggtggttttcggtttcttagccccaaaacgcgaggggagcgttgaagcggatgaggagaacgagtacagttttttttgggtggaggcccattttttggattgtgagccccgttatggtctccatgtttttcctcaggaggggaatggaaaaaattatagaagagcaaatggaggttcatcacagatgtacaggtattagagtgtaagcgtgtaaacaaataaaaactacattacacacgattgtatcagtatattacaccccggacatagccggttatatatcccaccatttgcccagatgtctttacgcgttccgttctttgcggcagctggttatgtgtccgattcatttttcgggccggtgcttctttgctcggggtccgctgatattaattgtgtggagaagcaagggggagcatccttgcatcgggtggtgtgtggggggtggtagtggctttttggaggccccaggtttttgaggtgtttgtgcttccgt

SEQ ID NO: 117467 - DNA, 480 bp, Arabidopsis thaliana columbia
  unsure (1)..(480): unsure at all n locations
cgcctgcaggtaccggtccgngattcccgggttgacccacgcgtgcgccctcctataaaacaccataccttccttcattcttcttcatccaattccaatttcaaaatcagatccaacaaatcttattattattattcttattagatcataatggacagcaacaaggaacacggaaaaacacaagaaaaaaaaaattttttttttataagggggggggaaccccacaaataccaaaataaaattataaaacacaaacaaacgatatagaataaaaaatatcactaacactacaaatactcacaagtattataagtaactacataatcaaacatactactacacaaaagaaaaataagaatcgcaccctaacaacaaccatacacaacagcatgggaacaacatacataagaaaagtatgatatcccgaagcgccccacgggaggaaagataatataaattgagtaataaattcaggatata

SEQ ID NO: 117468 - DNA, 412 bp, Arabidopsis thaliana columbia
  unsure (1)..(412): unsure at all n locations
tatagnagtactatgacgacgcatgcacgcgtacgtaagcttggatcctctagagcggccgccctttttttttttttttactcagcaaaaccatgtgtagattagaacaccaaaatgtttaacattcggcttcattggcaaacattattatttcccagaaatgaaaaattctcaaacaacagatctcttacaagtaaaaagtttttcaacagcttagggccacagagcgcacgacactgggtgatagcactatcatagtctcttcaagctatccttccgagcaacacccttgtcggtaagtgtctgacccatgttcaaacctccctgacattatttccgacgcagttgcacccctagtcccattcgccaccccaatcccagcgcccgtagctaacgatcctcacacgcccac

SEQ ID NO: 117469 - DNA, 196 bp, Arabidopsis thaliana columbia
  unsure (1)..(196): unsure at all n locations
cctgcaggtacaggtccgngattcccgggtcgtcccacgcgtgggacacacccgtncgcttcttcttctacgattagnagtgtgagtgactgtaggggaagatgtttgctttgtccgttcgatgaatgtcctggaagttattatatatgattatgaatataggatcggagcaagaccaaggccgacgaagaacagg

SEQ ID NO: 117470 - DNA, 809 bp, Arabidopsis thaliana columbia
cgcgtacgtaagctaggatcctctagagcggccgccctgaacccataatataataaacagaccaacaccgagaagaagcaccgcaggagaacagcaccccgccacgagaggcagacccccgacggcggcgcgaacaaaacaacaccacccacagcgcgggcaacaaaaacccctcctgccgcggggggaggccgagccacaccacccccacaggagacaccaccgccaaaaccacccacagaccgccaaccaaggaaggacgcaggcacacgcaaacacaccacaccagacaagcccagaagcacgaaaaccgccaaaacaagaaccacacacacacgggacaaacaagaaccacaacacgacaaagacgaaccgaaccacgcgcaacccgcagcagaagacccccgcggggccaaagacaacaaaaacaaaaccaaaagagcgccgcaccccaccacagccaacccaccccagacagcaaccagccgcccaccaacacccccacggcaacacacgcagcaacaacaaccgaacacgaagccgcggagccacggagcgagacccccccaacccccaacggacaagagccggcggcgaccccggcgcgcccacccagaagagcccgcggtagagaacaacagcgacaaacgaagacacacacagcccacccacaccaccaggcgacaccgcggccgccacgaggcccccacaaacaaaccccgcgcaacagaagagccccgcgagacaaggcccccgcacgcgcgccacccccccggcgccgccgccgcaaccccacccacaaaccacaa

SEQ ID NO: 117471 - DNA, 532 bp, Arabidopsis thaliana columbia
catgcacgcgtacagtagcttggatcctctagagcggccgcccttcttttttttttttaataaaagaaacatataaaaagagggctttttgatcggcacgcgggaagggtggcagccagaggaaaaacacagatgtcttaaaatagaagaacacgccccagacgacagaagagcaacagacgaggacaggcgcttagaggaaaacccctcccttttttttgggggggagagcaacaagaaagagaatatagtagaataactaagaaaccataatgagggagggagggagaggtccactaatggtaagaaggacagcggggcacaaaaacaactaggaggacaagagaacggaagaatccgcgcgagaccaccatcacatatatttcccgacccccacgtatggaagggtcaccgcacacagcgcggccgacgaacgtaataataagagaaacaccgtaaacagtagcaaccagaaagcacaatccggcgcgtcgatagccagaccgaccccgcaactatatacccgccgcat

SEQ ID NO: 117472 - DNA, 181 bp, Arabidopsis thaliana columbia
  unsure (1)..(181): unsure at all n locations
cctgcaggtaccggtcncggattcccgggtcgtcccacgcgtgcgtcaatcccttcttcagccggcgattaagcttaccaataagacaatctaggaccggcggagcatgagcacccgatnaaaaatcggggggagagttttgtatgagtgagagataaccaagaccagctgggcgcgagtg

SEQ ID NO: 117473 - DNA, 229 bp, Arabidopsis thaliana columbia
actatagttgagctatgacgtacgcatgcacgcgtacgtaagcttggatcctctagagcggccgccctttttttttttttttttgggcgtgtgcacatgattaatgtctacactcagatatagtctcgccaccacatctaaatcaacccctacccatcaccctattattatctcgcacttatcgaaacatatgtgataccaaaaaaaaaaatttttttatatttagaag

SEQ ID NO: 117474 - DNA, 512 bp, Arabidopsis thaliana columbia
  unsure (1)..(512): unsure at all n locations
cctgcaggtaccggnccggaattaccgggactttcaacgggggggaaaaatccaaagacggaagagagagacagaggagaaaagaggtttaagagaaggactgggcagtcgcccggtagagggcgggggggggagtagggagaatgaagagagaaagtatgaggggggagagggcagaggagacagagcacaaaatttcctcggtttaagggaggtaaaaggacagcaggaacggagaagaagaaagggcaaagacgggaaaggagaaagagagaatagggactagccacaacaagaaggaagagcagaaggagatacaaaagcaaagtagcaacgagataacttaatgaaaatccgaatataagacaaggccgagaccacacggacggatgaagagcgcgccgacgccagaaagaaaagaggagaaagcagggcgcgcaggaaaaaaggggggggtaagtataaaattagagtaaagaccagggttggggactgagaagaggaagaaggaa

SEQ ID NO: 117475 - DNA, 552 bp, Arabidopsis thaliana columbia
  unsure (1)..(552): unsure at all n locations
cgactcactatttgggaagctggaccgcctgcaggtaccggtccgngattcccgggtcgtcccacgcgtccgctctatctccggtcatgcctccattaccgtcctccacggcgccttcgtcttcgagacatcttcgatcgccggaaagtatcgcgaaatttgcagggagagcaatatttcctgctttacaggggaaatcgtgtccgatatgcctcgaaaatcttttctagcgaagatccgccgccgggancacggaggacaagcacgggaactgcctaggaggagaggcgagggaacacaaacacgccccgcagaccccgcggcaggcgcacagaaagaaagccgcaccaggcacgaaaaccccgcacaaagagaagaaagcacacaaacccaccccccgccgcccacccaaccacccacccaccgccacgaaacacacaccaccccgccgccgcccccacggcgcgggagggcgggagacgaataagttgtaatcgtcgtctcgtctgtaatgaaaaggatagggggagcggttccccctctccccccccc

SEQ ID NO: 117476 - DNA, 779 bp, Arabidopsis thaliana columbia
cactatagctgagctatgacgtcagcatgcacgcgtacgtaagcttggatcctctagagcggccgcccttttttttttttttttttttttagagaagattgatatattccaatgacaacataataagataaaccaaactaaaccgagtcaaaagcaagattacatcccattcctgcattgcccataccgaaaccaaatgatggttatatagttccaaaagattattacctctccatgttttcttttcttcctttacttctataatatggctaccaaaaataaagtttcttcttaaaagtgtaaaaagaggagggtggttcaggttcttaacctgcccttgtgcaaatgctgtaagccacagcacctgtagcaacagctaaatctcctgtctggtcccaatagatcttctcgcccgtacatcaatataaacctgcttgactccatacgtggggctactaacaactgaatatgcgcgcaacgtattgtcaacttgccccccccctattttgtctgtgctcagaacctagtgacccgcaccgtgtgaataatcacgcccgggtttgattgtattatctgacgcttgagaccgagagataagacccacgagggttgtacctacgacatagacacaagcggggcgccacggttaagaggaggcagcgttccctggatctgtgttctgtggagaacgggcgaggggcgagcagagaagcccgcagatgtcctgcccgtgttcagacccgcgcgctatcgtagtacgcgcccgcgcgttccgtcac

SEQ ID NO: 117477 - DNA, 689 bp, Arabidopsis thaliana columbia
ggggagaaaacacaaaaaaaggggagagagagcgaaagagagcgcgttgagaccacaccacaagggacacgcccaccgaagggagacaacggggccgccggggaggcacacaaaaaccgcacgacccgccagagaggagcgacggggagacctcctcttaaacgggagcggggagcaccgaacgcaaaagccagcaacaaaaaaaaagacagccggagggagcgcggaaagagcgagacacacgccaggcaagaacacaaacgaaaaacaaaaaaacaacaggggagacgaggggggggagagaagaggcggagggaggacagaagggggagacgacgacaacaggacacggagagaaacccgcacaacgaagaaagagaagacggagcagacgcaacaggaaaggcgcagcgagggcgagggcgggagaagagaccccaccagaaagcgggacccgagacgcacagcgacggccccgcggacgcaaaagaccgcacccaggaccacacgcagccccaccccagaaagagcgcagacaaggcggcgagacaacacacgaggcgcagccccacgcgcgcaggagcgagaaaccaagccacaacaccccgcgacgagaacgaccagcacaagggacggaacacaaggaagcaagggagggcgaccagcagacccgaaagggcggcgaggca

SEQ ID NO: 117478 - DNA, 534 bp, Arabidopsis thaliana columbia
cctgcaggtaccgggtccggaattcccgggtcgtcccacgcgtgcggtatgcctggacctgaatacttcagtaacattcattacggggcaggtgatgatcgatagaatgaaacaagtaggttaggtaggggggagtatttatttgttattgttgattgtgtacgatagacgcgttttttctcggtcccgacacaactttttcttaaatagggtgtacacacaaacgaatctaaatttgttgagttatgagttcttatttcaatgctatcaatgtagtatattttataatcactcttctccagtatcaatctccatattttaatttatataattacatcactatgtttttgtcccagtatttaatttttcaagtttgtagattacattctatagatgtgtttcgcatccaccccaaccgcttcaaattatctataatcgatcctccgcggagattgtgataatattttttttttatttttcttgattaactgtatagagtggagtaggcctgattatcggctttccttccccccc

SEQ ID NO: 117479 - DNA, 535 bp, Arabidopsis thaliana columbia
  unsure (1)..(535): unsure at all n locations
aggtctctacgactcactattgggaaagctggtcacgcctgcaggtaccggtccggaattcccgggtcgacccacgcgtccgaacggagtcaacaaactcgttagccgtacatctgattcgaacggctcagatggtccgtacagcatggtgctggacaaaaaaggtttaaccatgtacgttaacaaaaccggtacgccgttagtttacggcggatggccggatcacgatttccgcggcaccgtcactttcgccgttacaagagaattcgataatttaacggagccgtcagcttacgagcttctcttagaacccgcaccacaacccgctacgaacccgggtaataaccgccggttactccaagtcagaccaatcggaagcggaggaggaactttaaatctgaacaaaatcaattacaacggaacgatttcgtatctaagactcggatctgacgggagtctcaaggcttactcgtatttcccagcagttacgtatctcaaatgggaagagaggtttttattcttgtncacttacttg

SEQ ID NO: 117480 - DNA, 844 bp, Arabidopsis thaliana columbia
tttccccttttttttttatttctcgttttgggaaaagaaaaaagaaaaagcagaagaaaggcaggacaaaggaaacaggaacaacagaaaagaacaaagaaaaacagaaccccaacgaagagaacgaaagacccctcgaaacaaaaggagaagcagacagcgcggcccgcaacagagaaacgcgcgcagagaaaacacaagaaagcgcccagacaagacacaggacacaacaacaacaagcagcagaaagcgaagggcgcaaagaaaacaaggaacaagaccaccaccagccgcacccgagaaaaaaggacaaacaaacggaaccacgcacaagcgcccaaccggaaggcccgacgcacaaggagaaaaagaccaaagaggaagcacgagcggacgccgcccagcgaccggaagcgccgggggcagaaaccacccccgcggaggaggcggatcggaggccagccggaccgccggccccccggcgccgcggggggcgagcgcggccgcccggcagcgacaaaccaggggccacacccccagcacggaaaggggcagcgcgaccacgaccgaagacgagagggggaggcgaccccgacgacagcgagagggaacgggcgcgggagaggggggcgcacaacggaacacaagagacgacgagaaagaccgacacaacagcgagaaccggaaggaggcaaagaagcgggaggcgcgcggacgcaaacccaccaaaagaaaaaggaaagaccgcacaggaacaagagaaacacaacacgaagcaagcccacaaggcacagacgcgacacgagacaagagacccgcgggagcgcggcaggcccacaaagag

SEQ ID NO: 117481 - DNA, 536 bp, Arabidopsis thaliana columbia
tctactacgactcactatttgggaagctggtccgcctgcaggtaccggtccggaattcccgggtcgatccacgcgtccgattcacttcacaaaccgctcggcgacaaagacgaagaagccgaggaagcaccgatacgacgattgagacttagttttgctcagattcatttaaccaccggcgccaagtgacgacgacgacggagggagcagctgccgatgggggaaagtttgtatttttagagggggtggcgcgccagggccaacctccattatagtatactgcctccatctatttactgccaatctatattataacgattcaccccccgcttgcgcctttctcacggtgtttttattctcccatttcacatcatcatctctcactctttgactttcttgacgtctactggagtgtccatctagtctttacttatctctcttggctgtacacttgttatggtgtgatgccctggtctccccgggcgatggggtgggtgaatttattgtactatgactgtccgtctgtgtgagttgaa

SEQ ID NO: 117482 - DNA, 750 bp, Arabidopsis thaliana columbia
  unsure (1)..(750): unsure at all n locations
actatagnatagctatgacgtcgcatgcacgcgtacgtaagctaggatcctctagagcagccgcccttttttttttttttttttttaaagtggacgattttaatgagaaacatcaccacaagtcaatcttacaattttaaaccccctagggggtgacaaagatagagtctaaaaaaatatgtggcacctaaaacacgaatctttcttgtaatagaggcaaacccccaaaaaaaggccaaagcaaaaaggacccaaccacatgagataacaagagaaggcgcctacagacgaaaccagcatagaaccgaagcgaggaacgcagcaagagaagaaggcacgcacaagagaggcaaaagggcggaggcccgagaagaaccggcccacacgcagaaccagcaccgcaccagccgccacaccaggactcgatcctcccagaacgaaggagaagccgacgacgaagctgtccgcaagagagaaaaagcaccggagcgagctcatccgcgcgccagaagcgaagagcctaccgcgcccgcgggaacacagcgaggagaagggagaagaagaaggggcaacccagcgacggcggggcggggcgcagaggaggagggcgacgagccccgctcataaacggaaccggcagcacaaggctacacacaactagagcggggcggaggccaccgagagagaaagacggcacgagccgagccaccaacagaaagaagcacaaggacacaacaggcagcgacacga

SEQ ID NO: 117483 - DNA, 479 bp, Arabidopsis thaliana columbia
  unsure (1)..(479): unsure at all n locations
actcactatagtgaaagctggtacgcctgcaggtaccggtccggaattcccgggtcgaccctcgcgtccgcggacgcgtggggtttccctgccttgatanagttatcaagtccgcaactgaagctagtgatggattcattatctgggcatttagacatactgagagaaatattgctgaaaccggccttaatcttttcgttggagatgctgaaaaactttcagcatttttaattttgggaacaaacccaacgggccttacctttttgcaaatcgggccagaaatttttcgccgttttgcccgaacccttcccaataagccggggtttaaagtaaaatggtgggggggctcggcaacacctttttttcccccccccaaaaaaacgggttctttacaaaaaaccctttgggggggggccctaacaccccttctttcccccgttttggggaaaaatgtttttttttttttccaaaaaccccca

SEQ ID NO: 117484 - DNA, 463 bp, Arabidopsis thaliana columbia
  unsure (1)..(463): unsure at all n locations
cctgcaggtaccggtccgngattcccgggtcgatccacgcgtgcgcccacgcgtacatccacgcgttcgaacaaatttgaaactgtagcgttattggggaccattgcgagtctgcattggtgggggttcgcgtgcaagatgattaataatatttaaaagtatgatagataacagcgcccgagcgctgctcgcccgcgcggcagcacctgngtccattatagggggggagagagacgaccagaggagaagctaatttgtaaatattttatctgtatttattcaggatatgtctatatattttattgtcttgtgggatgcactccaacggatactcatcatcgttttgatttggtgtgttagtcgctaacgctgtagtgtgtgccactgcgtatgtatttatatactactatttagagtgcgacggacttcaatttaattacacatacttacgtgggctgtcgtt

SEQ ID NO: 117485 - DNA, 829 bp, Arabidopsis thaliana columbia
cacgcgtacgtaagcttggatcctctatagcagccgcccttttttttttttttttttttaagattataagcgccaaaatttcattaaagattgatagatccccataataaaaacaccaaactcttaaaaacaacccacaaatatcaataacccatacaaaaaaatataaaacaaaaaaattctcactttttcgggtggtacaaacacaaactaacccttattaactatcattacactaaatataaagtaaacaaaaacatcatatatccgtgtcaacacaacgataatataatattaaacaaacgatatataaagcaacgagaaaaccaaacccacctacaacacagcgcgcaaatagaccgccccgacaaaccataaagaccacaacgaaatcaccaccgagaaaacaaaccccaaccaccagaaccaataccacaccctatcaataacgaaaaaacatacaccacatcttatacttttcagcccatatatacttcactatatcacccccaacatataatccacaactctcatccgattccagcaaccaacacacatatccaacccataaaatataaagaaaaaaataatcgataatcacgaaaagacggacccaaccaataacgaccacctaccaacacagaaggatggacacccagcagccaaaacacacacacccaccaaacacgcaacacacaatagtgccccgaaatcgagaaacgagcacgcaaacaaaaacagcgaaaaagaaaacacaaataataagaacaccgaacacacacaaagagaagggccccatcattcacaccacctaactcaccccgcagca

SEQ ID NO: 117486 - DNA, 553 bp, Arabidopsis thaliana columbia
  unsure (1)..(553): unsure at all n locations
atgaactctagcgctactacgactcactatttggaaagctggaccgcctgcaggtaccggtccggaattcccgggtcgtcccacgcgtccgtgatgccattgttaacagtggtccacgtgaagatgctaccaggattggatctgctggtgtggttaggaggcaggctgttgatatctctcctctaagacgtgtgaaccaagcgatcttcttgcttacaactggtgcacgtgaagctgcctttttttacatcaagacaatcgctgagtgccttgctgatgaactcatcaatgctgcanagggatcttccaacagctatgccatcaagaagaaagatgagattgagagagttgctaaggccaatcgttaggggatctccctttcctctaaagttgcattatatcaaagagtttttgtgttgtttccattagctttggatatggttcagatgatctctctatctttaatgaaattttgacgcttataatcgaaaaaaaaaaaaaaaaaaaaggggcggccgctctaaaaggatccaagcttacgtacgcgggcatg

SEQ ID NO: 117487 - DNA, 544 bp, Arabidopsis thaliana columbia
  unsure (1)..(544): unsure at all n locations
cgactcactattgggaaagctggtccgcctgcaggtaccggtccggaattcccgggtcgacccacgcgtccgcttttctctccagatttcgattcccgaggctcgagagaaaaccgtaaatctcttctccgttcactcaatcaaccaaagatgcgtgagattcttcacatccagggtggtcaatgcggtaaccagatcggagccaagttctgggaagtggtttttttttagcacgggatnganccaaccggaagggacaccgggagactgaaatcctcccgtggaagccatgattttttgctaccctgcgacgcgttcgtgtgttagttgttgttttgtctacccctcctctgctccgcccccccttaataattttttatatgtttactccgatctctcctgcatggggccgattcgcgcgttcaattatgataaaattagttcctctcccccaggagggatgggcggtgtgtttatatatcatgcggcctgcactcacgtgctttatgttgccggggcccgcacaccgccccccccccccccc

SEQ ID NO: 117488 - DNA, 906 bp, Arabidopsis thaliana columbia
  unsure (1)..(906): unsure at all n locations
actatagctgagctatgacgacgcatgcacgcgtacagtagctaggatcctctagagcagccgccctttttttttttttttttaaatcaactcttttttattcatgaaataataaaagtacggaattttctctgttttctgactgaattaaaaatgctgtgagccacactaagctcataggcggcgagccacacaccagctctctcacacaactgccaaacccagggcaaaggctgggcctgcaaatcacatcacaccttacgtgcgaccgccccacaacgaccagggcggagcacgacgcccgcaggagaaccggacagcaaggggcccaccgagccggccccccctagacgccacccccctaaatccgcaacccgcgcagacccgcacccacccctatcgccccgccacccgcgaccccccgcggaatgcgccccacccacacgacacacccatataccaccccactatcgcaccctccccccccccatccgccctactctgcttcgtaacgctctccatccccccacccccgaaccaccgcaccgccaacgtcgccctgtggtaccccaccacggcttcccacccaactcaccgaggaccacaccaacaacaaacacaacatgccccacatggcagtacctccaacccccccgagccgaccccccaaccccccccagcccgcaccattgccctcctccctgggtcgagcgcgaccgcacagacattaacacacatccaacgccacgcctacgatccgccgcccctctccggtccccgtatctcctgtatacccccnccggtcacacgcaggtgtcccagcacgcccccacgcgccccacacgagccactcgtacccccgataataaatttcctccaacctgctcgcccatgcccgcgcagaag

SEQ ID NO: 117489 - DNA, 545 bp, Arabidopsis thaliana columbia
  unsure (1)..(545): unsure at all n locations
gcctgcnaggtaccggtccggattcccgggtcgttccacgcgggggacaaaacctagcagagaaaggaaaagccaaaaggatgacgaaagtttagaggaggagagacagttggccccccgaaatagggggcgaggaggataaaaaaaaaaaaaaaagatcgagaggggagccgcaacgcagaacaggcaccagcacgaggcatccatacctagaaacggggaacaaagacacgaggcctggaagcgaacgactcgaaccgcgcgaggagttcatgtaagggatcgagaacgacacgcgcgacgcgagacaaaataaataatataggaacaccaaggcccccggagcgacgacgaatgcgtagacagggaggagagagcccagcacacggacgtcgaacgaggaggtaagcggggggtgagagaaaatagcacgctcacccgtccacgaggaggatggaggacgatgattggagatgagggtggggcggcgggacgagagaggatgagaaaggagagatgacaaaacgcaacatcaccgcaccccc

SEQ ID NO: 117490 - DNA, 374 bp, Arabidopsis thaliana columbia
  unsure (1)..(374): unsure at all n locations
aagctggtccgcctgcaggtaccggtccgngatcccgggtctacccacgcgtccggtttgacggtgccacgaagaagaagaagacgaagatggattatcataacaagcttgttcttgctcccacggttcgtgtgaaaacgattattttttttattaatatattattgagacatctttacacctgccaaccacaaaatatttaaactttcctctttttaaaggttttcagaacccccccacatctcctgctattaatacctacatccaaacctttttaatatcatactcaccccctacaccaccttctttaaattttttttttcttctttccatctgcccatatattcaccgcttaatactttaaaaagatttat

SEQ ID NO: 117491 - DNA, 705 bp, Arabidopsis thaliana columbia
  unsure (1)..(705): unsure at all n locations
ctatgacgtcgcatgcacgcgtacgtaagcttggatcctctagagcggccgccctttttttttttttttgtgagaagcacacaaagagttttaaccatcgataaccaaatcatgcagctacaattactactacaaatccatgtttaaggaaactacagcccatgtttaaggaaactacaaggtttttttctttttaaaaacacagaaccaagccatatattttttttgtctgcaaatcattccatggatctgattttatcactgcaaaggtggtgatacgatttaatctatatgcgttttgtcttctgcatctaggggttgaatataagtaattgatatccgtataccatgagcttctgtttttattctctgtatttttgattttttttttttttctttcatcgacgagaaatagtgcgccagcgcgtttttttttaccttctacttatgaacaattgattaacnacacctccgcagaactattaagccaccataatagcaacatccgccccccggtttagtccggtcagggcgctatgtgataggaggacgctgtgtgccccagatggaaatgcgaaacaagtatgtgtaacacattcgcaatgtataatttagactcttttctccgcactcacccgccgcacactttctgctgtcttgtttggtcgattatatcgacgctttttacgagatacatatattatt

SEQ ID NO: 117492 - DNA, 600 bp, Arabidopsis thaliana columbia
acactatagaatagctatgacgacccatgcacgcgtacgtaagcttggatcctctagagcggccgcccttttttttttttttttttttttttttttttttaagagctgacgatgttcttaaatagaaggttgcaaaacaaagggaacaagtcaaggataacgatgtcgaagggtatcaaaagctaatagaaagcaaacaaaaaacttttgtaaaagccaaaggttaggacaaaggtagcaacaaatcaatattcagaattggagatgacatcgtcgatctttaaaatcatcttagcgacttgcggagctaggcaaatttggttgttgttccccgatcaatgttaaaaacctttgtgttccttaaattggttggcccccacggaattggaatttattccaatagaggggaatatttctccttaatttggtgaaaattaaaccgcaaagaaggggctaatggggctgaaatccattgttttctgacagaccctagggaacgaagcccaaagtttttgcaaccgccatattggttactgctccacgccggggttttattaacagctgcatcaaccgaagggaccaagcattttcacctcccca

SEQ ID NO: 117493 - DNA, 560 bp, Arabidopsis thaliana columbia
tgatacttcagctctctacgactcactattgggaaagctggtcacgcctgcaggtaccggtccggaattcccgggtcgacccacgcgtgcgagatgttgaagtcgatgattcgttttatatgagaaagtgtgtggagctagcaaaaagagcaattgggtgtacaagtcctaatcctatggtaggttgtgtcattgtcaaagatggtgacattgttggccaagggtttcatcccaaagctggtcagcctcatgctgaggtgtttgctcttagagatgctggagagttagctgagaatgctactgcttatgttagtttggaaccatgtaatcattacggaagaacaccgccgtgtacagaagcattgattaaggctaaggtgagaagagttgttattgggatggttgatccgaatccaattgttttttcttcgggtattagtcggttgaaagatgctggaatcgatgttactgtgagtgttgaagaagagttatgcaagaagatgaatgagggattcatccatcgaatgttaacagggaagccttttctcgccctcaggtat

SEQ ID NO: 117494 - DNA, 641 bp, Arabidopsis thaliana columbia
  unsure (1)..(641): unsure at all n locations
nnnnnnnnnnnnnnnnnnnnnnnnnnnnnnnnnnnnnnnnnnnnnnnnnnnnnnnnnnnnnnnnnctttttttttttttttatgctcgcaactaatccatattagatttaaatgtcacattacctctggaaactaagaaccatgccaataaaagtccatctaagccatataatcatatatccaagggaacattcattggctgcttaagaatgtggtcggcagaagattttatttttgctcaacataagatttaacagtctccatccatctaatatactcagctttatctttgttcttcatgtactgatgcaagaactcagcaagatcatcacttattacctcttccctccaaaaaatcgataaccgagtcttgaagttcatcttccatttcctggatttagggcccatattggcatttgggtgagttctggttgttttaacaaacaaaaacctgggggatccggttgggatcagggccaaccaaacacaatgtctttaaggtctaccatacccctaaagaaggtgacatggaaggatttgagcctgacctcttaaggccgctggagaaaattttgtgaggaacggacccataaacaggtggttcaatcttaaatctcccttcccccaaatttttttaaagc

SEQ ID NO: 117495 - DNA, 539 bp, Arabidopsis thaliana columbia
  unsure (1)..(539): unsure at all n locations
ctacgactcactattgggaaagctggaccgcctgcaggtaccggtccggaattcccgggtcgacccacgcgtgcgcccacgcgtccgaaaaggctcatctttgcgactgctcccgtgttcttcgtctctctgtcaatggctcgcctcctcagatgtctgagaagaagtttcatatttagttcatcgacttcgattgcgtacagaaaccctagaatatgtgntcagttctatttaaggggggtgttgcacaagcagcccggagtttgctcaggataggggaccgccctggacccacccccgcacccgccccccctttctttgtcgatccggaccgccccgcggccctccccgcggtgtttggtgtgaacggctgcctccgcgcacgcccctccgtggtatggccttccttcgtccaccgccacgtatgtctcctcttatgccgtcccccccgccccgccagagcccgttatgatctatgctatcgtcacacgtaatatacgtgcttgtcgaatggcgggccgcccccgcctccctctccc

SEQ ID NO: 117496 - DNA, 997 bp, Arabidopsis thaliana columbia
cgcaagcacgcgtacgtaagctaggatcctctagagcggccgcccttatctttttttaaaaaaaaaaaaacaacaacagagggaggacaagacaaaacaaagacggaggcagacaaagagaagacgcggacagaagggacggagacaaacgagggcacaccaagagcgcaaaggaccagaaaaccacaactccctcccttcttgaggggggggagccacgcaagaaagaggagagcggggccgagagcaggcccgacccaaagagacaccaacaaccacgaagcgcaaccacgcacacgcaaacaagaaggcgaaagcgacacaccacaacagagagagacgcaagagcaaacaagagaaccgagaacaagcagcacccccaacgaaaacgccccagaggcaggaaacagacgaaagagagaacgcgagaaaagaagagagaaacagagccgcgggcgcgcgacccaacgacaacaacaaaacaaaacgagaacacccaccagacacgacccacgcccaaacaaagaccacacccgcacacgaaaaaggcgcgaagaacaacgagagagaaaacggcggaggcggacggccagcgcgaaacacaagcaagaacgaacacacgacccggaaacagaagaccaacagagaggcgaaacacatgaaaagaggcgagggccacacgaaaaacagagaccaaccacaaaagcgaaacaccgcgcccaccgaagaccaccaaacgacacaccaccaacacacacgaaaaaaggacacccgaaacaagcggcgcccaagaccggacggggcacagaggggacaagaggcgaagagggagagccagccagcaagagcaccgaagcagagaccccaccaaaagacgcaagcaccgccccccacggaccagcaagagacgggccacgccacgaccgcccgcccgaacagcagagaaaccccggacaaaaagaaagacacgcgacaaccacaacaaccccacgaaaag

SEQ ID NO: 117497 - DNA, 476 bp, Arabidopsis thaliana columbia
  unsure (1)..(476): unsure at all n locations
gaaacccggccggcaaagaggaggcgggcaagggcggggaagagaagcggaaggggggacgggcgcgggagggacgggcgcggggggggagagaggaggaaaggagacagganggcccggccccgccgcccgacgagaaattttttttttaaggtggtgccaagcgggggcgcgccgcgccgcgcgaagtcggatacccaagatgggtgaagtcatggcgctccggatgcacgcagaaacaggggaacgggggtaaagtctgacgcactgcaaacgtcggggcgcccccccaatgtgagtcgatagatcatcatattctcgcccccctgcccctctgaccgccccccaccgggcaaggagattactgaccaacccccatggcccgagcgcaccgagagtggggaatagaggtgtagtgcagcgagcgcacaagaggtggggagtaatcgggcggactgcgcccgtccccccccccc

SEQ ID NO: 117498 - DNA, 432 bp, Arabidopsis thaliana columbia
  unsure (1)..(432): unsure at all n locations
tttttataaccccccacctctttttttttttctcttttttaaaaaaaaattttgcccccaagagagggtgtgccccccccccggaaaaaccccccccacatttttctaaaaaaaaaaaagaacccccctcccttttttggggggggggggggttcccccccctctttggggagggcgcccctctccctatttctatccgcggcgcgcgaccccccttccaaaaataaaaaaaggtcgggtagaaaccccctcttttttttttatcctctcaaaagacatacattcatttttttataaggaaaaattcattattaagcatgccactatatattccacattaataatacatcccgctntaataagattaacatgagaaattaatgagcctatgaaatagaatagtaacaactattcgctccattgttcacttaa

SEQ ID NO: 117499 - DNA, 976 bp, Arabidopsis thaliana columbia
  unsure (1)..(976): unsure at all n locations
ctatgacgtaccatgcacgcgtacagtagcttagatcctctagagcagccaggccttttttttttttttttgtttgaaaagagctacgacaaatgagcacacacacacatacatcaaatacacagatcacgagagatatcaaacacactgacacaccacgaaacagataccagcccagctggctaatctacacagcgcccttgacaaaaaacggggacgcacccacctcctatacctacactaataactcccacagctaaataacaaacacacactcacaatcacaaagaacaacgacacaatcacgggaccaggaacccaaagagaacgacctaggagacaaaggcaaccacgaccgcacaccgcgcccgtcccaccagacggacacacagaaaaccgcccggaacgcgcgatgcgtgccgcgccgcgccgcccacccgcaccacaaccgcgccatgacccagccgcgacagacagaccacccacaaaggcagcgaccgaagggccgcgcgccgccggcgagtcgggcaccacccanattgctccactcgacccgcccccggcatacgcccgccccccccgcgccgagacagccacaacacccagcacacaccgggcgctctttgccgaagccggcccactccccaagcggatgccgccgcgccgccggccatgcaccacccacgccggtagcgccacgccagaaagaaaagcaacaacacccacccacacagacaaaccgctccaaccacaccacaaccagacaacccaagccacacacacagcgcaccagagacccaccaccccacccttacagacgaaacccccacaactacgctacaactaggaaccaacacaccaccaccaaagcagcacaccacagacacaccactacaacacgacgaggacgacacctaaaagacgaaacggagcccacacaccaccgaccaccaccccctaagaacgatagatcggc

SEQ ID NO: 117500 - DNA, 476 bp, Arabidopsis thaliana columbia
gctgaccgcctgcaggtaccggtccggaattcccgggtcgtcccacgcgtgggcaaacctaactctttctctatacaagagcgcaagctcgaaggcgctcttgatctttcttcatttactccttaacaatgacgctgatgagggacttgaaaagtgtgtgaaagaagggataggatggcggagtgtccatggggctgcaagaggtttctctttttgagggggtacaagacgcgaacaccgattagttctgggaataagctttgcttagagtaatcgaaaatagagtgggtgagcgtggactacgcaacactgtgcgttttaaatagagtcttagcctactcctctccgctagtcctgctctattatattacgtggcgctatatattccgcacggctctctcttctgcttcgcgcgtcacagtgtctgaactgtaattacaatcgactgtggattactcggggtgtccggaaggtcg

SEQ ID NO: 117501 - DNA, 951 bp, Arabidopsis thaliana columbia
tgagccgacactatagtagactatgacagccgcatgcacgcgtacgtaagcttggatcctctagagcggccgcccttttttttttttttttttttttttttcagaataaggcactaaacttgatccattttcttaacatgtcactcattacaaagacttaactttaacagcttcactatcaccaccatcaccatcaataccatcatcattttcatattaaatactcttccaattgccagcttaaccaaacaatgactcttttccaaaatatgctaaattctaacttttaactttcttaaaacacataagaaacaaaatgatgaagtaaacaagagaatgaaaaaaaaaaaaaaaaagagagagagaaagacagattgagagaattgattgaacagagaagaagaaacaattcttgcttgaagtgtgaacaagattctcaaaacaaaaaaaaccctagaaaattatgaaaaaatggcaaatgcaaaaagacaatcacccaatgaaggatgtgatgcgcgctgatatacgcggtaaccgaaaggtaccggacgcctgtaaactatttgtcaggcccaaaagtgggtttatgcccacctccatgcccggtatgagtagtttgtgcggtgtctgcccgctgggcagatggaagggatgcagataattttttttgctttcgcaagtgcacgcggagatggtaagtcgcttgtatgtctttgatgcaccaccgatttccgccctctcgattacgtactgcgtgaaacgccatgttaagcgcgcaccacatatccacgcgcgaattgtttcgttcagttctatgacgcctatgtagtttactattctcccgattttctcctcttcttgtcccggcgcctgctgccgctccccgcgctttcgcattttatctccggttgttttttgctcgccgtcgttcgcgttacaccagttgatata

SEQ ID NO: 117502 - DNA, 556 bp, Arabidopsis thaliana columbia
  unsure (1)..(556): unsure at all n locations
cctgcaggtaccggtccgngattcccgggtcgtcccacgcgtgcgaagagaccaaaatttcaaaccaaaaaaaaaaaaaaatgagaactttagaagaatcgaagatgggtgagccccggaaacgtgtagaggcgggtgttgtagaggtatttactgtagttagaaaagttaggaccgccccgagtcccggcggaagaaggattcctgnttgtgagggggggcacggcgcgcgcggaaacgcatacagataaataaaaggctctcaagaaaatcgatcgagagacgcgatatttgttagatccgaccagtgcacgcacaggaaaaatcggtggattaaagatgcgactgtgatccggaactagcgtccggtgtagggatactaaggttgtagctactccgacaccaagcgagcgacaggggcagcgggaggggtgctactaatgaagaggaaccagcgcggcagggtggttagaagaatgaagagggaaaatgaagagaagagagggtctgggagtaaaaaaaaagcacaacccgcgagcgtccagcaccccacccc

SEQ ID NO: 117503 - DNA, 493 bp, Arabidopsis thaliana columbia
actatagaattagctatgacgtacgcatgcacgcgtacgtaagcttagatcctctagagcagccgcccttttttttttttttttatatcaaatttatcatttatctttagtttcagcattttacaagggctccttgtatttcttatagatgggagccacaaggtacaataccttcggtccaaaaaaaaattaaaggaaaaaagactttctcaagaagcagggctcaaggaggcactaaacaaattaatactatctcccccaataatcccataagaaaaccaaccaatcctcactataaccctaaaaaaaaggaaagacaacacagaggaaaaagataagagcaaattaatataacacaaatacagaaacaagtatataatcaatacaacaaaaagaattagaaaacaccgtaacaccattgacatatctctagcacagatgttgtaccccaatataaaacacaaacataaacaagacagcgcgaatcaaatag

SEQ ID NO: 117504 - DNA, 524 bp, Arabidopsis thaliana columbia
  unsure (1)..(524): unsure at all n locations
ctggaccgcctgcaggtaccggtccgngattcccgggtcgtcccacgcgtccgcaagcagtgacttcgatggctggcttacgtggagcctctcaggctgtccttgaaggaagtttacagatcaacggctcaaaccgtttgaacatctcaagagtctcggttgggtctnagagaaccggacttgngatcagggctcagcagattttttttttcgggggtggtgagccccccncagtgatcgcactcatagaatcttcctccgccggggtgttgtgtgcttcccccttacgcgctccctcctggtacgttcttttattgatggtctcgctcctacccctccgtcttcctcctcccttatgtaactgttgtcatcccctctcccccctccttttcccttctcccttctcttccattatcattattctcccctcgctccccccgcgcccagaagactttttatttttttatattttgtcttacgcatacgttgtgaaagatggcgcgacttccccccccccccccccc

SEQ ID NO: 117505 - DNA, 530 bp, Arabidopsis thaliana columbia
catgcacgcgtacgtaagcttggatcctctagagcagccgccctttctttttttttttctttttttcatgcatcacatttgaatttctgatttataaatagtagtccgagttaacatgaaaactgaaatgacagagaggaatgtacaacaaagaatcaatcagatccctccggagtttcctctatttttggggggggcgccgacacggagacaacattttgctaactcccccatacgacgatcacaacacacatcccaacaagaataaatatattgactgatacgatccaccaaccgaatcacttcccactcataccaccacccaacccaaccccccaatattacctccactcatcgtctcattaacaccactcacacaccaccaatcatacaaatataatcaactacacctttccgatccttaacagtagctttacttctatataaaacaccaccccacccagagctgatcacccccgaaagatgcgaataccgctcacccccgcaccctttttaaccacacacccgct

SEQ ID NO: 117506 - DNA, 840 bp, Arabidopsis thaliana columbia
  unsure (1)..(840): unsure at all n locations
catgcacgcgtacagtagcttggatcctctagagcagccgccctttttttttttttttagtcttaatttatttgctttactaatgaaaaacgagaaaatacgtaataaagattgtagcagtgagtattattctcttattacagactccattattccttcctttgagcaacatctattttttggagnccggggtggcaaccacgaaacggtcctgatgttcttcatccccccattgtaagagcaacttactttccgtcccgtacgttcagactacgcggaaaattagttgttaactccttcccctgccccataccccccctttgcactcctttttttatttaagatctagccccacctttgcttcttttaccgccgttaaaattcccacttttctaattcttttttttcccccgtccttatttttcttccgcttttttctcttcccccccccatttctccgtctatcgcacctttcccctctcctctctccacccctttacagttatttcgcgagcctgtcccatttttcgccctctttttatctcttcctgttgcgatggtggccgcgtcgctatgttccacttacctttttgtcttcttccacttccgactctacaaatcccctcgctcgctttatcctcctctttacatctttcctttctcacccccacctcacccatttcttctcaccactaccatccgccttgtcaccgcttctttcccctctttttctctctttctcccatagttcccttttgtttgtatttctattccctatcccatgatttagtatatgtccctttctcttccccctcccccccccctatttctccccttttt

SEQ ID NO: 117507 - DNA, 894 bp, Arabidopsis thaliana columbia
  unsure (1)..(894): unsure at all n locations
gcactatagctgagctatgacgtcgcatgcacgcgtacagtagcttggatcctctagagcggccgccctttttttttttttttttttttttttttttttttttttttttttttttttttttttttttttttttttttttgttttctttttatattggtcaaaatattttttgtttttgtcaagggggaaaaaacaaccaatctttggggtgtgtaaggaaaaaccccaaaaaaaaaacgcatgggaaaatttttttccagggccgggttttgggggaaaagaggcaaggggtaaaattttgaaaaaaaaacaaaggttttttattaccccagggggggccggggggggggtctcaatggggggggggggggcaaaaaaacttgtggttaatacgctcataaggggaaaaaaggggggggggcaaaaaaccccctttttgttggggcttttaaaaattctaaaaaaataaaaaaaaacgtttttacggcgttttaaaaaagacccggtacccggggttgtctgcagaaatgagaagaaaaatataggtngcggtggaggtcccgtcaaaaccccggaaaaagtattaaagtttcttggagaggggggaaatgcggatttttattagcaacgggccccttatgtgggggagttggaaaatgtgggggaaaaaaagggggggggggtggggaaaaaaaaaaaaaggaggggcacagaggtcgtgttgagaaaacaagaggaggaaaacttggccccggggggaaaggaaggggtaaaaggaaaggggggcgccccagaccaagaaaaagggccggcccccaaggggagaaaaaaaggggcccagcgcggccgtattaaaaggggcgggggggcaaaaaaaccgctaaagacccgggg

SEQ ID NO: 117508 - DNA, 788 bp, Arabidopsis thaliana columbia
acagtagcttggatcctctagagcagccgccctttttttttttttttttttttttttaaacaggaaaaatgaaacctctctttctctcatatcacaacagcctgagtacagaacacaaaggacaaaacagaagaagtgaagaacaaaatacaaaacacaagcaatttttgttttgaggatgtggctatatacgaggaatgggcacggacactcgtccctaaaatgagaatgcaagaatgacttgacggaccacctacaagtaacaaaccgaccgctaataccccaaacacctgagctgcagccaccaatccaaccacataaacgagactaacgtaagacatgtgccttctgcccgccctatgcaacatcgtttgcgcctctaatctgaaatagcgaaagataacacaaaatgataacccccccatactttcttatccccaccatttacttatccttccccccgccattattatatatagacttcgctgatcaccagtggtagccatgcccctcccgcttggagcaagaagagactacgtgccgatccggttatcgctcgcgcacatgtttccatgacgacgacaggcgcgtagagttagccggtacttgattatggtcggaacaataaatagaaaacaaagaccacatcatcaaattctaacaccccctacccccttttgcttatacaccaatatcaccccactatttacatcaacacccgcactcgcacgaggtaggcatcggtcctaccacccctcttctgttctcaccatatattctcccccaat

SEQ ID NO: 117509 - DNA, 536 bp, Arabidopsis thaliana columbia
atgatactccaggtctctacgactcactatagggaaagctggcacgcctgcaggtaccggtccggaattcccgggtcgacccacgcgtgcgctggtggtgaattgtttgatagaatcattgctaagggacattacactgagagagctgctgcttctgtttgtagacagattgtgaatgttgtcaagatttgtcatttcatgggtgtgttgcatagagacttgaagcctgagaatttcttgctctctagcagagatgagaaggctttgatcaaggctactgatttcggattgtctgtctttattgaagagggaaaagtatatagagatattgttgggagtgcatactatgttgctccagaagtcttacgtcgcagatatgggaaagaagttgatatctggagtgctggaatcatcttatacattctactcagcggtgtgcccccgttttgggctgagactgagaaaggaatatttgatgctatattggaaggccatatcgactttgagagccaaccatggccgtcaatctccagcag

SEQ ID NO: 117510 - DNA, 379 bp, Arabidopsis thaliana columbia
  unsure (1)..(379): unsure at all n locations
agtaattattataatttttttttttctgggttgttttctcnaacacgctnttcttgtttttatttaaaaaataatatccctccctcctttcttttctctctcttcttgtctcctctatcctttttatcttatttataattatttattctatttcatctcactcttgcttcttgtattttttttttatacttttgtttttgtctagntttctctctaatttcagcatatttctctcttccttttttttttatttttttttctgtctagtatatcagctctactttgttgtttctatataaaattgtattctcctccctaataatgatgtaagatttttccatcctcccgcacgaattattcttatagattattttttatt

SEQ ID NO: 117511 - DNA, 277 bp, Arabidopsis thaliana columbia
  unsure (1)..(277): unsure at all n locations
aaatcttccactttgatttntgccgaacccaaaaataatgggccaaaacgtaaatgggctaatacaaagcccaagatcagacgcgacagggtggttggaagcatattttgtacataccccgggggtggcacaaanacagggtaaaccaaatgaatattatcatcaccactaatctatttgttctctaaaaggctccatggggattatcaggattcctggttccactacctttaaacgcaaaataacccgggggtggttttgggggataaataacagg

SEQ ID NO: 117512 - DNA, 452 bp, Arabidopsis thaliana columbia
  unsure (1)..(452): unsure at all n locations
gtacgtaagcttggatcctctagagcgggctccctttttttgttttgggttacagctaaatctcttttaacttcaataaccaaaagtgactgtgaaagtgtgaaacaagaaaagaggaaaataaaggcggagtagagccatcctaaacgtaattaaaccaaaccagactttgccacatatttagtcggggactaatataaggggggggggggtncatgacaaggggcgnaatctaaaataatgttaagagatgttcatagcttcagcatgatacctttcgagatctttggcaagatccggaacaaacttctccactgggttctttccacctgcgcccacgggttttattcccttgtgcccccaccattaccccgggcctttaccacgggaacccgggctngaccaggtgatcacaccacctttgggggttttgggtggggggggaggggggc

SEQ ID NO: 117513 - DNA, 328 bp, Arabidopsis thaliana columbia
  unsure (1)..(328): unsure at all n locations
tgcaagatagataaagagtgtgaagatgaagttcgatgagcgcgcgtacagcgtatgaggaatagataacgataggcagccaagacaaaagagaagaaaacaaaattttttttttaagggggggtggcagnaanacaagtaagaggatgggggaagaaaaaaaaagtggtgagaggagggggagaaagagggctgggcgaggcacttagggtgagagagcgagcacgatgcagggaactagatatatagaataagatagaatctagagcaagccgactggtgtagaaaatattcacgttgggacgacaagacggggtatgtataggag

SEQ ID NO: 117514 - DNA, 508 bp, Arabidopsis thaliana columbia
  unsure (1)..(508): unsure at all n locations
cctcggattcggctcgagattctctttcagctgtacggactcttggtatcctcttcgccaatcttgtcaactatgggaccgcccaagattaaggaggttggcgatggaggttctccntaggctccccccccccccccccccctcctnctccccctcccccccccnnnnnnnnntntnccccnctctcttttttncgnntgtgggcccncccccccggggggcttaataaaaaaaatatcccccnntggtgggcccccgccccccccccctctcccccgcccccccctcttccccgcgcccctttccctcccggcccctcctcccgccctccgccgcgctcctccccctcccgcgccccccctctcctcgcgccccgccctcctgttcgcttttgtgccggggcccctcgtcgcccccccccccccctcccctcccccccccccccctccccctcggctcccggtgtttccctccgcgccccccccgcgccgccccgcttcctccccct

SEQ ID NO: 117515 - DNA, 446 bp, Arabidopsis thaliana columbia
tagaacccgaccaatagaaagcacaacaacaacaccccgcacgcacctccccgccacaagaccatatacaccgcacaacaacggcaagggggcacaaaaaagaaaattttttttttaggcttgttaggaccccccaccgcggggaacccctataaaaaaaaaaaagccccgccgggggagagaagcgggaaccccgacccacgtaacccccacacgcaccgtcacacgcaccacatcccaaaagaccccagccacgcaacgcacaaccaatcaactgacaagaaccccgcaccaccaaccacaacaagacaagcaaaaacagaaggaagcaaaggaaaaaaaaacaaaagaaaaaacccccccccctctccctcgaatacgaaacgtcccacacacacaaaaataaaagaataacttcagccatccccccccccaacacaacaaca

SEQ ID NO: 117516 - DNA, 499 bp, Arabidopsis thaliana columbia
  unsure (1)..(499): unsure at all n locations
ggaagctggtacgcctgcaggtaccggtccggattattcccgggtcgacgagctcactagtcggcggccgcccttttttttttttttttttttttttttttttttttttttttttttttttttttttttttnnnnnttttnnnnnnnnnnaaaaaaaaaaaaccattttttaaaatattttgaaagtttttttatttttatagggaatgaaaaaaaggggtataacctattaaattaaaccatattagaaaggggtaaaaagagagacatgggctcaatagatgagcccaaaaaaacttttattaatattaaattttaaaaaaaaaagtttaattatttggggcaaaaagggaattttacgcactttaaaaaggagccaaaattgcctttgaaattggggttattttcctgggaaacaaagccaatgatcatggccttcttggagctctactgagtctaaaaaatgaaaaaaggggaactttttccattttttacaaat

SEQ ID NO: 117517 - DNA, 492 bp, Arabidopsis thaliana columbia
aaatatcacaaaaatcaaaccacagtttaaacctccgcaacacaatcaacaaacactcagttcattcccccacacacgcatctctccccgaccgaacatacctagcccaaaacaggggaaaaaaaaaaagaattttttatttttaagggggggcagaacccacccaattaatcgtgcaaagaaagaggaggagcagaaaacaacgggccccacgccgccaacgtccatatatataatcgctcccggcccacctatgtggccacacacgcagctggactgcattcggccgtaccagagcaatatcttacaataagaacaactgaagtagatgatcgtggcttaaaacaccccccaagcgaactagagataataaataaagagacattagtggggccccacgccacacagcaccaacattaaacacccgatcgtcacgttaattaaaaaattcacaggtatccccgccttgcgttctctactcatatacatata

SEQ ID NO: 117518 - DNA, 533 bp, Arabidopsis thaliana columbia
  unsure (1)..(533): unsure at all n locations
tctcnnnnnnnnnnnnnnnnnnnnnnnnnnnnnnnnnnnnnnnnnnnnnnnnnnnnnnnnnnnnnnnnnnnnnnnnnnnnnnnnnnnnnnnnnccttttttttttttttttttttttttttttttttttttttttttttttttttttttttttttttttttttttttttttttgggacctttatccaaaagttcattggtgcaacattgaaacgaatccccagagggggtattttttccagggggggtgtaagaaagatatataggtcttaggttcttttgacagggtcaaagttggaaaccccccccaccaccccaatgatgacggggggggcgaggcccccaaaagcaatgctgagcaagaaatttttgggggaaggagagattccaaaaccagcagtttcagttttttccggaatcaccatcgaaccantaagagccgccggggagataccggtcaaagccttgtccattttgagggccttaacttgaagcctttgggctctgcctccagttgcaaccaaagccttggat

SEQ ID NO: 117519 - DNA, 567 bp, Arabidopsis thaliana columbia
  unsure (1)..(567): unsure at all n locations
cgactcctattggggaggctggtccgcctgcaggtaccggtccgnngattattcccgggtcgacgagctcactagtcggcggccgccctttttttttttttttttttttttttnnaanannnnnnnnnccaaaaaaagaaaccattatttattactcattacgcaaaaggggataaaaatctcaaaagttaaaaaaacaattacataggggaagattcccgttttttattcgggggggggggggcaccccaagaaagaacacacgctaaatctctcccctgccaggtacttgagaaaatgctcgcacttagcctaaaatgtagggaaatcggggatcgtgtccaccttcccgacgagccaactgcagatgttggtggctaggcgccctacctcccgctggccaccgtcttcctcccgcaatatgtgttgctagatttttctgtcttgcacacgcttcatcgttgcaatgcgcggaccacgcctgctgctggcggtcagtctatccgctacggaggtatgttatatttatggtttatttagcgcgctctcccctcccgcgccccccca

SEQ ID NO: 117520 - DNA, 438 bp, Arabidopsis thaliana columbia
  unsure (1)..(438): unsure at all n locations
atagaagagctttgacgtcgcatgcacgcgtacgtaagctcggaattcggctcgagtctatatcaagattccggtattggatcgtcgtcgtcacctagcaagagatttaacggcggcggcgttggagattgttcgacttctatggcggcgacgccgttaatgcagaaccaaggtgggatttaccaattgcctggtttgaattggtattcttgaaaacaatttacttatgaagaatttttaaaatttgtgtatatatatacggtttgagtgattagggggcattgggggattttatttacggttgattattattgtagtgntatagaactaangagattaaattaaatagattggaggagaggtataagggtaaatatagaaattgtaaaaaaatagggtaaaaattgtgtggtttggtttgtgatggtatttattgag

SEQ ID NO: 117521 - DNA, 340 bp, Arabidopsis thaliana columbia
  unsure (1)..(340): unsure at all n locations
gtcgctagcangcgtacgtaagctcggaattcggctcgagaaaataaacccttgagaacatgtccttattctttcttcttcatctacaacaantggctggagttngcctttggttcctnttgaatgatccattcaaantttgtncttccgtctttatttcacgctcggcgcgggcgtatgataccacaaaaaccaagagggaaaaaagaacattaaaaaaatatcncgtttantttgggagttgggggaacacccacaaggggtnacaatactaaaaaaaaaatnccccccacatanccgggggggcacagagaaacccgctaatgtagagaaccaaccc

SEQ ID NO: 117522 - DNA, 374 bp, Arabidopsis thaliana columbia
agatgaagagggagaagggattgtgggggaagtgagggaggtagaaagtgttggggattaaatagaaagtttatattagagggaggggaggttgtatgaaaagtttttttttaagggggggggaaaaaaggataatgtgaaatgttatattaaaaaaaggtaagaaagtggtagttatttgttgttttatttgtggtggaggaagattgggataaaagtaggaaaagtttttgttgatgtgggagaaggatttgggggttaaatatgtattatagataaaggagtaggagttttatggtgggatagggtatagatgagagtattggagcagggaaatagtaaatataataattttagttagccgcccccccccc

SEQ ID NO: 117523 - DNA, 444 bp, Arabidopsis thaliana columbia
  unsure (1)..(444): unsure at all n locations
cgtacgnaagctaggaatacggagggaggattttacgagggagagcagagagagcccacaaacaacaacaatnagtagagagcctataaagagagaccattctgaccgctgattgggttaaattgtaggaaagagcaaaggtcggggcgcgcgcgaatgaaagagagattaagacgcagaccgacgcggggaagaaaaacaaaaaaaaagttggtattttagggggggggaacaaccaacacaaaaagagtgcgaaagaaggaattgcggcgaaggtgagagggagggagccgcgagtaagacgcgcgacgctaggccaggtagtagagagaacacgccagacatgagcgccgagatctccacgcacagtgatatcggagcaataggcagtcgctcacaacgaccacaacaacgatagaggacgtcaatagatagtgatagagg

SEQ ID NO: 117524 - DNA, 462 bp, Arabidopsis thaliana columbia
  unsure (1)..(462): unsure at all n locations
cctgcaggtaccggtccggaattaattcccggttcgacgagctcactagtcggcggccgccctttttttttttttaagggcggacnnntatatgagagaagagagggggggagcacagagaaatgagcaagctaagattttagtgattgaacttttgagtgagtatacatttaccgtcaagagggaccattacggcacttttgtcattttcgggggtttgggcgcgccgccagcgcacgggtggaagagattgtaagccacaggaggcctcacaagatcttgcactctcgttccaggcggctaataaaagttagtatcagcgcacagcttcgcggccggcttcctggaccgactgcgcgttttttatgcgacgcgaagctggttcttgcagtttgcgaaacggcggcccccccatcatcaatattatatgtgatactcgttattatgtacatgcacgaagca

SEQ ID NO: 117525 - DNA, 540 bp, Arabidopsis thaliana columbia
gtcgcataccccgcgtacgtagctcggaattcggctcgaggtagtgtatgaagttgtgacgcactttgagagagtttcaaaaagaaactcaaaactgttgatatggagggttgttgtcagattcacgtttaaaaacgagttgatttttatgtctgtaagttatagataaaacgaattttgtttggacagaaaacccatgtaaaccttttttttttcctggggtgggcccaaccccatccccgtccctctcacaaataaagtcccctgagagcgcaccccccccccccgctcctcttcctcctgcctcccaccatcccttcttctctccccactccttcccttctccccctcccccccctcttcccccccctcccccctcccacacgctacgtttttcttcatcttgtatttccctctttctttatattttttttcctctatattcccccccccccctcccctcccccttcctctcaccctccctccacaccccacttcctctttacacccacctactctctctccctccccacttcatcc

SEQ ID NO: 117526 - DNA, 534 bp, Arabidopsis thaliana columbia
  unsure (1)..(534): unsure at all n locations
cctgnggtaccggtccggaattattcccggttcgacgagggactagtccgcggacagaattttttttatagtagggtagcgcagttttaatcagcacagacaaccgcccccgaggatcggccatcaaaacgatgtcgtactacagatatagttcatcagtaatattcacgcagcgcggaactaacaaacgtgcttananttaggggggggcgagacacagacaacgagcttcagagaaaaaaatgaacccgcgtgttgaatacatacagacaggtgcgcaagtaagatgaagccataataatatataaacagcggagagaaggggactataatgacaaatgatattagagtcaatactagcaacagccggtgagtaatcactagtcctcagtttatagattttgttatatggtgagaagacacacgttccagcggttcgatcgaaattgcgctacagatagattgaggtacgtcgagcgtggcaatgattattatgtagtatattttgtccccacgcccgccccaccccccccc

SEQ ID NO: 117527 - DNA, 490 bp, Arabidopsis thaliana columbia
  unsure (1)..(490): unsure at all n locations
cctgcggtaccgtccggattattcccggtcgagagctactagtcggcggcgccttttttttttntggncgagggctttgggagggggggagaaagcgccccgaaagagaaaagagaaagtgtaggaccagggatgattattaaaagtgagaagacgcacgaaccgacgagttccctccttggggggggaagaaccaaacccaaacgattcgaaggaaaagaaccggaagggaagagaatagccaaggaagacatgaagggagataagagagcgaagtggagggagtgagtagaggaggcgagggggaagagaaaaaaaaggattccaagccaagtggagcgacggagaacgcgcactataagaagatacgtaaggaaggaaggagtaaaaaacgcacggaaagaaagccgccgagtggttcggcagggagtgaggggccggggagattgagagtgttaaaatatagagagcgggccgcgctccccccccc

SEQ ID NO: 117528 - DNA, 564 bp, Arabidopsis thaliana columbia
cgtacgtaagctcggaattcggctcgagatttttcaaagcaggggagaagcgtcaacctcgtacttcatatgcacacgaggctctccttatccgaccagggaggggaattaccggtgcgaggaggatgtgccgcgcgtcgcgcgcctgtcgaagaataaaataatacctgtaacgcgccaagaaagaagcaaagaaaagatttctccattaggggtgggtggagaacaccgaccggcagcaatcgaaatagaaagaaaggaaccgaagaaaagagagtaccgccaccaccgccatggccttaaacgagtatctcactctaatgatcgaagcccagagaaaggcaaaataccacaccgcgcactattctcgcctgtaacatcccgcggcggcagtcgacttgaagaaggaatagattctgaacaacagtgataattatgtgtatgacaaatatatgaaccgccgcaccctcccacccaaacatccggaaaaccacaatccaggcggagcgaaatgtatagaacgtgagacattccacgcacatgaccagatctgttatatctatc

SEQ ID NO: 117529 - DNA, 560 bp, Arabidopsis thaliana columbia
  unsure (1)..(560): unsure at all n locations
tcgcatgccccgcgtacgtagctcggnanttcggctcgaggctatgagagccttgggatgatgttgtgnctgnacctcancctgaccgtggccttgnccgtctccgtaagatcaccacccaacccattaatantccgagatatacggagaagggagcagcagtaaggtgtgttattcatctgccccccgcccggagaggatgaagaaattttttttttttggggggggggcaccccctccccgggggaccttctatgaaaaaatttgggccttcacgcggccgagtgaccatctactcctcaccagtccgttcaatatccgccacattccgctcccctctcttacgcttcctctcctctcctaccccatctgtctcgtgatattttctaatctacctctcctcttactttttcttacttgcctcgtttctactttttctcgatgttttaattactctgttgtgccccccccgccctctctcttcgtcttttcttccagcggttccactccctgaaagtatctgtttgcctcccgcaccccgccctcgctacatttctcat

SEQ ID NO: 117530 - DNA, 541 bp, Arabidopsis thaliana columbia
  unsure (1)..(541): unsure at all n locations
nnnnnnnnnnnnnnnnnnnnnnnnnnnnnnnnnnnnnnnnnnnnnnnnnnnnnnnnnnnnnnnnnnnnnnnnnnnnnnnnnnnnnnnnnnnnnnncctttttttttttttttttttttttttttttttttttttttttttttttttttttttttttttttttttttttttttttttttttttttttttttttttaggaaaagggggcttttttttttaacattaagggaaaggttttacccctggtgaaaatccaacagggtgggggaggatccaaccgccctttggaactaccctacacaattttgaaaaacaaaaacttggaaaacccagcccaaaaaagaaactaacccacattgtttaggggggaaaacagttttttgtacaaaaaaaaaacattccccgccattttatcccctttggtaagggcccccaaaccctttaaaaaaaacaggggtgggggggggaagaacaggtcaccatttttacatcacccggttggacactccatgggcccatccctaaggggggtgacttcttgg

SEQ ID NO: 117531 - DNA, 578 bp, Arabidopsis thaliana columbia
ctcccccccaatttaaagggaaaaacccgccccggggtaggaagggagagaaggaaagatttttgggagaggggggagggggtaaaaaaaaataaataaagaggtaaggggagagtagagaggagggatggggctctctggtatgggcgcgtgtttttggaagtgacgttgtcaaagacgggaatagtttcgcacagtggactccggggtgtcaataaaatatgagtgaataaaagagtttttttttaacggcttgttgggccaccacaccgagtcgtatatttaatggaaaaaagtccccgtgaaagaagatcgccggctcgggtgagatagaaacaacttaatttcataatctcttggggaaagggtaggtcactaaaatgtaataatataggtgtaactataggacagaagagagtctattataagcaatcccgagcggtatgaattgatagatatttattgagagctattacaggtggaagaatcagtatctacctccagtgttcctgatgagaaagtatttagtgacgacgacggtcggaggtgggtgtgtattattttttgttatttattgc

SEQ ID NO: 117532 - DNA, 552 bp, Arabidopsis thaliana columbia
  unsure (1)..(552): unsure at all n locations
cctgcaggtaccggtccggaattattcccggttcgacgaggggactagtcggcggacgaccttttttttttttacgacgggcgaaattttggggagggggggggcggggggccccaaaaaaaagggggaggggagtttgacaacgagaggtggcgttgatagcagagacgccgcacgcaagacgcgtgcggaggttcccgtccaatgaggggggggggaacacccacacaaaagactccaagaaaaaagagcacccggcagcggggggggggcagggcagccccacccttatcccgaggaacggggcaccgcacaagaacagagccggggaacccccgccataccaccatctagtagtaggtaaaagagcgaggagatcaccacagaccgatgccaccacgcggttgaaagataagaataatgaaaacagatcggccgtgaaagcacaatcgtaaaccagaagacacaccgcggcagagaccggacacgcgttggcgaggntaagagaaacaatgagaataaacgcgacgccgcccgccccgcccccccccc

SEQ ID NO: 117533 - DNA, 503 bp, Arabidopsis thaliana columbia
  unsure (1)..(503): unsure at all n locations
attccngggtcgacgagcggactagacggcggccgccctttttttttttttttnnnaaggacnncttttnnttnnnnnnnnnntncctcccccctcaaatacactcaactcccacccacacaagcccccacccacccaccactagacaaaccacccaccccacacacaccagcagcctacctcaatcaggggggggggcacaccaccacccaccccacgacagagaaagaagggccccggccagggccggggccagcacgcaccaggaacaggcgggggaggaacagagcgccgcccgcgcgcgcccccccccccccccccacggcggaggagaaccagggccacgcgcgcgccggccgccccccacccccagacagcacagcaccagcgccacccgggacaggaacgaggagagccgcgaccaagacggggcgggaggggagacgccgccgccgcgaaagaagaagaaaaagagtggcccgcccccccccccgccccccccc

SEQ ID NO: 117534 - DNA, 505 bp, Arabidopsis thaliana columbia
  unsure (1)..(505): unsure at all n locations
cggattcggctcgagccttnttctaggccagagacacacaaacggcgattacgcagacaccgaacagggccgccggcacaccggcggcagaggacggccccagcccaaaccggacgaacccgcaccgacaggacgcgaagagggccgcccgcgccgcgaggagggaaaaagaaagagaaagtnnttcctacacggggggggaggccacaagcgcgangaggaaaaggaaacagggaaaggagganaggggggcgcgcgccagagcccacggcagcgacgagcccggaaccgcggaccggacgaacgcccacaccagcgaccgcccgcccccacgcgccggaaccacgcgcccccgccaccgcgctgcgaggcacagggcggagagggaaggaacggcggagggagggggaagaggggcgcgccccgccccgcaccgcaccgccacgcccgggacggccgcaacgaggaagagcgagcacggcgccggacacccgacgccccccca

SEQ ID NO: 117535 - DNA, 465 bp, Arabidopsis thaliana columbia
gaaaggaagaagagaggagagggttttagggagggggggggggtttttttatatattatgtgtggaagaagagatagatgtaaaggagaggagaggggagagagaaaagggaaattaaggggggaggtgataagaataggatatatagtaatagtagaaggggtgaaggagaaaagaaaggaaaatttgtttttttttgaggtggggggaaaagagaggggagtggaatatgtatgtaagataatgtataagttgtagaatagtggggtggggaattggggagattaggaggagaggagaggtgaggagagtggggtggtgtggtatgtggtttaaggtagagtagaaggaaatggagaagggggggagtgggaggtgagattggtgatggagtttagaaggggtgatggtgtgaggaagatgtgtgggttgttgagagggagttgagttggtgggggggggagg

SEQ ID NO: 117536 - DNA, 470 bp, Arabidopsis thaliana columbia
  unsure (1)..(470): unsure at all n locations
aagctcggaancggacgaggtgtccnacggggagaagacacccccacaanaccaccgccaggagggcaagccgcaagaagggcgacgagacccccggaaaggggggagcccggcacacgacccacaccgaaaaggcacacgccgcccaagagaagagaacaaaaaaaatcttcaagggggggggnacccccccgaaagagggagggaagaaggggcccaagngngggggggggcggcgaacacagcgaaggaggaggacgccaccgacgcacaagcaagggacgccaccgcgcccgaacaagaaaaccaaaaagcgaaacccccaggcagcgcacaccgcgagcccgcacaccaccgacgacggaagaaggagaaagagaggaagggccaccccccgcgcagaccccacgacgcgcccccagccacgagaggggggcagcgaccaccgcggccgccccgaccacagacag

SEQ ID NO: 117537 - DNA, 526 bp, Arabidopsis thaliana columbia
  unsure (1)..(526): unsure at all n locations
cgcacgtaagctcggaattcggctcgagcanctacaaaaggggggcgagtcctaatctaacaacanatgtgggtntaaggaaggcacaactctagaggagaagagagaagaaggagcgccaaaaaagagggaggcgacgaagctttcggagcaccggcgcacgcgaaaaaagacacggccaacacacggaccaaggaaattaaaaagatcnccttcnatttagggggggtggccaccacccacgaagcagaaagaacaaaaaaagaagacccacgcggcgggggagaagagagagccggccagagaggcaacgacacaaaaaaccgaaacaaagagcagaccaaaaaaacgaaaacaaaccaaccccacagaccacaaagaaaccaccacacacacgcgcaacaaagaagaaggccccgcaccacgcgagagcaaaagaaaagaaggaaagacgaacggaccagcccgccaccccacccgacaaccaacagaccaggaccaacgcgcgaggacgagaggaagcaaa

SEQ ID NO: 117538 - DNA, 388 bp, Arabidopsis thaliana columbia
caaaaccaacagagggaaagaaaaaaagaagggaggagcacgagcggcgaaacggagacaaaacccccacacaaaaaaggcaaaacgcgcgcacacagcagaccggaggcaaaagagaggcgcacgaaacccaaccagaggacacaaaaaagaaaagaatttctttttttagggggggggcacgaacaaacaaaaacaggaaaaggagaaaaaagaaaaaagggaggcgagagacgcacacagagccccccgcaacgacacgaagcgaagaaccagacaaccacgagacagccgcgaaaccacgcacacacagaatacacgcagaaccaaaccgcacggacgagcacaccgcaaaaaagcacgggaccaggcgagcaaaagaaaagaa

SEQ ID NO: 117539 - DNA, 540 bp, Arabidopsis thaliana columbia
  unsure (1)..(540): unsure at all n locations
atagaagagctttgacgtcgcatgcacgcgtacgtaagctcggaattcggctcgagactggtaccgggatggtagtggagcatgaccatcccgaggaagagaagaaaggattagttgagaagatcaaggagaagcttcctggtcaccacgacgagaaagcagaggattcaccagctgtcacgtccacgccgttggttgtaacggagcatccggtggagcctacgacggagcttccagtggaacatccggaggagaagaaggggattttggaaaagatcaaagagaagcttccaggttatcatgccaagaccactgaagaggaagtgaagaaagaaaaagagtctgatgattaagcanaatggttaaagaatgaataatgatgtgggagtgggacattcgctgngttntgtgatcattatctntctcttttaagttgntattgtggctttcgttgattgcatttgatcctttattttggaatttcattctatcttttatataaagtttgcatatgggttataaaaaaaaaaaaaaagggcg

SEQ ID NO: 117540 - DNA, 555 bp, Arabidopsis thaliana columbia
gagggggaggggggttttagggaggggggtggtggccgaggggaggcagacgaagagagatgatcgggggagtggggggaggggtcgaagaggatgtgtagtggagaagatggatagtggggtggaataggcaagcggggactaagagaagagtgtgggcggggagggataggagaagaaaaaagaaagaggtttttttagagaggggtgggagaaaggagaccaagaggaagggagaggtggggaggggggaggagagggagcggagaggggggcggggagaggcaggcggggggcgaggtagttaggggaagagctgatgtagttagagggaggggtggttgagatggagatgtgatggaagtgcggagtgataccgttccggagactagagagagaaggtggagaggggaagggcaggtgtgtaagggatataaagtgagaacgcggtggaggcacggcccggcgaggctagagtgggaggagatatgagagagaggaaaggaggtgattagggggcaccaagggagaggcactgtcacgtgaggaggggaa

SEQ ID NO: 117541 - DNA, 570 bp, Arabidopsis thaliana columbia
actagggcgttagagtgccaatagcacgacaacgtacgtttatggtataacttattgattataatacagcatacaaaggtacccttttcagggaccctttcgtatgttgtagctgataatattttctaactttaactctatgactcgcacaaaaatagccatatagacacgccacataactactcaacaccttaataaaacatatacataccaactgaagaaaagcctcaacaatttttctctgtgggggaacacatttatacgggatggcaacaactagaaaccgaacccaatcttccattggtgctatcgcacagaagaataaggcttcctggactgggacacctgctgctggtgatgacctgaacaaacggtgaagagctggtaccacaagcgcgtaacgagacgcctccgctgggccgcccccgggacaagcaacggcgggtagtcgcgatcgcggagggcgccccgcggacgcacgccggcccccccgccaatcgcagactaagcgacaccgcgcccgacgaacgtttattcaccttataacagccacccccccccccccccccc

SEQ ID NO: 117542 - DNA, 484 bp, Arabidopsis thaliana columbia
  unsure (1)..(484): unsure at all n locations
cctgcaggtaccggtccggaattaattcccggttcgacgaggggactagtcggnggccgcccttttccccacacaaaaaggggaaagttagagcgacgagaagagagagagcccagataataacatgcacgctacatagatcacggacatactaacgaggaaccaacactccgccgcaccgacccagacagagaagtggagcacgactttcttggnttttggggggggggggtcagcaacacaaaaaaaatgaacgaacacgcggcaaaaaacaaagccacgcccgcgaccaataaaagagcgatgacagattataccgaaagcacaaacaacacacaagaaaagaagagaatagagaatcagacagaaaagagaatgaaaagacaagaagcaacagatcgtcaaaccgcccgtgtgcagacattaggggccggtaatcatataaataattaagtatgaatccccccccccccccccccccccc

SEQ ID NO: 117543 - DNA, 562 bp, Arabidopsis thaliana columbia
  unsure (1)..(562): unsure at all n locations
gcgtacgtaagctcggaatncggatcgagtaaatggctagggggggagaggccccaagaacaccaagagccgggggagaagngaagaaccttacgcgcagcacggcgagaaagcacacgagcaaaaaggggaagaacgttcaaagacccggcggaggaaggagaacgacaaccaaaagcaccgaaaaaaaaaaaaaaaaagtttttatttagggttgttgggagaacgccccaaaaaggagaagagaggagagaagagaaacagggaagaggagagagggggccggacgaaggcgcagcggcgaacggaaagcaacggcccccgggtgcagaaccgagaagacacgcggggaagaacgggaaaaagagaagatacggcgcgagcaggcgagacccgagcaccgcacgagagcgagagggaaggcagaagaaaggggcgagaaggagagggagcgagaagaggagagaaccagccaccccccaccggcagcacgagaggcgaccagcgccgcgcgacaagaataaagagtgacacagcaagcagccgagagccgcccgccaaa

SEQ ID NO: 117544 - DNA, 590 bp, Arabidopsis thaliana columbia
  unsure (1)..(590): unsure at all n locations
cctgcaggtaccggtccggaattaattcccgggtcgacgagcggactagtcgccggncgaccttttttttttaaaaannagggaaaatttttaaaacacaggaggagacccgcccgagaatgataggcttcgtaaagttttaatgaacgatccgcgtattggggtgagagattgatactaaccagaagcaagctaaagaagagtcccttcnntttagggggggtggggcaacacaaaacccgagagcaatgagagtgagaatagtggtacttctgaggggtggagggcgaggcggagctacccaacttgagagcttagagatatgatcatgaatagtaccctatcgctgaagctccacatactgaacaattggagtaatattataatatatgttactcgttacttctagatacagtgaaagacgctccacgtgctaagattgtaggtccagagtgggaggtgggcaggacggagtgcgaggagcgcggagcccatcagcagtcgggaggtgattatactatgaagagccgggcggtgatacaagataataatataaatctggcactattgggtgcgtcccctcctccccc

SEQ ID NO: 117545 - DNA, 541 bp, Arabidopsis thaliana columbia
  unsure (1)..(541): unsure at all n locations
cctgcaggtaccggtccggattcccgggtcgatccacgcggggggtattccgttgacgaatattaagcaagaagaagcctgtcagttttgatagagggagagggcggccccgccgcaaaacacatacacaggaggagcttgaacaagcaacgagacgacgtgagcaaaaacgccacacgacacgaaaaaatcatcagagaatcncctttccntttggggggggggacaacacccccacccaccagcaaaaaaaaaaaaaaaaccccccacaaatacgcggcacccaagagccacagaaaggcaaagaaatcaaaagaaaccgaccgcgaagaacccagccccaggcgaaagaaaagaaagagaaagaagcaagcacaaacagacggccaacagcgaacacaccagcagactaacaatggaggagagaagaacaacaagcgacaagcacagacaacaccgcacgcaggaacgggaagagagaacacgcaacagcaggaaaaaaacaaagataaaaagcgcagcggcccccccccccccgccc

SEQ ID NO: 117546 - DNA, 530 bp, Arabidopsis thaliana columbia
  unsure (1)..(530): unsure at all n locations
cgtcgcatgcangcgtacgtaagctcggaattcggctcgaggcgaaaatggctggaagattgagcggtgttgcgtcacgaatcatgggtggaaacggcgtcgttgcccgatccgtcggttcttctctccgtcaacgcgccggaatgggtctccccgtcggcggacacatggtccggcgataagcgcggtataggaaaaactacgagctgttgttgttttagggggtggtgcaacccccaaagcagcttgattagatgaaaatagatttccccgaggggggggggcgccgcgtaccaagatctctttgcgtcctatatgcttccatgccttcagcataataacactacaatctactccgcctcgtctcatatttagcccgcactccttcccactactttttatgtattcaatattcactaactttattttatttttctttttctatactatctgttcccgcgtctccacgtcttttctctatatccctgcttcctcgcttttgtaaattacggttctattcggctacatcg

SEQ ID NO: 117547 - DNA, 536 bp, Arabidopsis thaliana columbia
  unsure (1)..(536): unsure at all n locations
tctcnnnnnnnnnnnnnnnnnnnnnnnnnnnnnnnnnnnnnnnnnnnnnnnnnnnnnnnnnnnnnnnnnnnnnnnnnnnnnnnnnnnnnnnngccttttttttttttttttttttttttttaataaaaacaaagtcttctttttattcttttgtcttcaagttctaagcaggaaacaacaaacattttaaagaacaaagcagtgaagaaaacacgcttcctgttttgatgagcagatcacttagatgggtctctatggctctcctccaagctcaactctcaggttgtcatatggatacactctcggtgtaaatggaaccttagaagctttgtcgttcaaaacagcgagcagaccgagaccaacaaagaaccctaatccgccactcaaccatgccaatgcttcatactttccgacggtatcagcaatccgatctatgcaaggctctggaaacgcagtcccgttgtcccacatcagctcgtcgtttaccgatagcggcttatcggngacgatgtgtttgccgacggngagacccattc

SEQ ID NO: 117548 - DNA, 454 bp, Arabidopsis thaliana columbia
acgggctagccgcgtacgtaagcttggatcctctagagcggccttcctttgggggggaagagcccaaacacaccacgaggtagagggtaaaggtcgagcatcgagcgcaccggcgcgcagggtaggcggtgacaagcaaaatcaactcccacgaaacagagaaaacccattaaataagggccactgcccccacacggaaaaacacaaaagaattttttttttaagggggggaggagcgaacggaagagagagactacgataaaagagacacaatgtagagatgagtggggcctgccagaagccgagaccggtatagagcagctagaatcaggaactcctcatattaccatacatgcctggtgcgccaatgcaacagcgacacagaggcatagcgaacgctacgccgagatctagatcagtgagaaggagaagcagaagcacaacgagagagcat

SEQ ID NO: 117549 - DNA, 523 bp, Arabidopsis thaliana columbia
  unsure (1)..(523): unsure at all n locations
cctgcaggtaccggtccggaattcccgggtcgtcccacgcgtgcggctgcttacattgnctcacaagatcagccacacatcgtcccaatataagacaaatactgaggctactaagagatgaaaacgaagccgggaaatggattatggaagaagaaggaaatgaagattgcttcgatgacgaggtttacccgaatcctagttttagagggggactgcaaccttgcgatgctcggggctagacagtgtgctgcgctaaggcgcgcgggtcctcggcgctcacagcctgtttttatatttttctgctcgctatcccagtcctcccgctcgcgccctagggtaaatattagttccgggcaggtgccgcatctcagctcgtccgcccttcctttttgagtcatagcgtgactacgtgccggggcgtgagcagtgcctccgccgctcccttctttgttcgtttggagcccggtccctgggggaaataattttatgaattttgttctaggggcctcccccccctcccccc

SEQ ID NO: 117550 - DNA, 521 bp, Arabidopsis thaliana columbia
cgcgtacgtagcttggatcctctagagcggccgtccttttttggggaaaagcaacaaaaaaaaacttaaaaacctaaagaagcgagctctttgccgcacaggccggcaggggccaggaaagaggaagcaaggcggcacgagccgccccaacgaacgaataaagggacacaacagacgaagaagaaaaagagagatttctcaattaggggggggggcacaaccccaccaacaaaaaaaacaagaaaaagtactcagaggaaagaggaaagaggggccaacgcaccacccaggcacgcaaccaaccgcgggcgaaccgacaaccaaacaagcacacacacaaacccctccaacccaacatgcaagacagacacacagccgccaccaccgcggaaaaagaggacggaaagacgaaaaacgcgaaaaaagaatagaaaaaagacagtaggaagccaaaacagcgaacaactccagatgggaccacagcacagccaaaaaagaaaaacccacacacacaaacacag

SEQ ID NO: 117551 - DNA, 526 bp, Arabidopsis thaliana columbia
agcgagagacctctagagcgggcgtcctcgggggggtgaaaagccccacgcaccaaccaacagagagaccaacgaagggcgcaactaccacccaacgcccgccgcaacacacgcacagcgaggacagagcacacgccggggggccgaccgccgaaaaggggaaaaccaacgcgccgcaacgggaaaacaaaaaagttttttttaaagaggggggccgaaggccgcccaaaagagggcgaagggagagaggggacgagagaaaggcagggaagagcccagcgagcgagccctgaagccacgaaacccacacgggcgcgaacgacaaaggtacgcagcaaggcagcgcgcacacacaccggccaacgagacaccgcacccaaacgagaaaagagagaccgcgacgcacgaactaaagaggagaaaaaaaaagaagcagagacacctggcgcgccacaccacccacaggcgcgacccacgggagccggagaaacaacaggccagacaaccaccaacacacccacagcac

SEQ ID NO: 117552 - DNA, 402 bp, Arabidopsis thaliana columbia
  unsure (1)..(402): unsure at all n locations
agcnngganccnccagagcggacgtcaaggggagaggaaggcnccaaacaaaaaaaaccacaaagagggggaaccccccagaacagcgcggagagaaccccaaaagagagcgaaaagcggatggaagcaggacaggaagcaaaagaggggagggaacggagaagaagaagagaagtattgttttttgggtgttgggaaacagcaccaaaaaaaaaagaagagaaaaggggccaagaagagggggggaggaaaaaaaacgaggagcgagaagacagagacgagagagacacggcacagccaggggagcaagagacgcacaggcaccaggaaagacaggagcgggaaagcgcgcagggccagacaggaagaacagccgaacagacacggggggagagaaggagc

SEQ ID NO: 117553 - DNA, 545 bp, Arabidopsis thaliana columbia
  unsure (1)..(545): unsure at all n locations
gggggggggggggcggggagtctttgnggaggcgagtagaaggggcgtttcaagaaaaaaacgcggcgggccaccccccagaacggagccgtccacttatctaaaatatgagacaaacctaaagaccacgagaccgcacagcacctgacatgtataaaaagagctcacccgcagaggaaggcacaagaagcgaagagcaagaaatatatatatggaaaagggtttaancgccacaacgagggcgcggggcaaatagaaaggggccccccccgccactacctcgcgggcgtcccccccaccgctccgtcaggccccccccccctacgacagccgcccccccctctccgccccctcctcatcgcctcacagacccgattccggccgcgagacgttcccccctttccgtccagtccagaataatcagtagaaatcactacccacccccccccccccccccccccccgcccccaagcgccctctcacgctgagaataataagaagtcgtctccattcccgcgcgtctccccaatcattctcactcacct

SEQ ID NO: 117554 - DNA, 515 bp, Arabidopsis thaliana columbia
  unsure (1)..(515): unsure at all n locations
cctgcaggtaccggtccgngattcccgggtctacccacgcgtgcgcccacgcgtncgaacctggatcagatctagtcaggggtcagattggagagcccgcaatataatggcagcggcgagacaactacggacggtacgatatacaggcgtattagaagtctgtgtacccacggacagaacctcgttaagaaatttgctcctttggggggggggcccccaccccgcgtgtatctttattaaaagtgcccccccgtctgggcgtgcccgcgctcactctgttcttatactttaattttgcataatcagaactccgtactccctccacgctggatggttattaatcatatgttacacacacttgctttctttatgctcctccccacttatattgttttgctttagagattaaacatttactgaacgggatgatcctaccttactcccgttgatcagcagccaagccgcgctgttgtttttattttttatttttttctccccccccccccccccccccc

SEQ ID NO: 117555 - DNA, 318 bp, Arabidopsis thaliana columbia
  unsure (1)..(318): unsure at all n locations
cctacgtaagcttggatcctntagagcggctttcctttctgagagaggggccccccaaccaaaaaaaaaattaccataactgcaacgccctttaagcgagccgagcagttaaatattatcagtaatatactgttcaaccactgaactacccgcaccaaacgccatgttccatacccctatcaccaacaagaaaaacacagaacaaattactatttacagggggggtggcaacacaaaacttatactcaaacaaaaaataaaaataacccccagtaagggtgagtcccggcgaccgaacgcccctataacgtccaacca

SEQ ID NO: 117556 - DNA, 478 bp, Arabidopsis thaliana columbia
  unsure (1)..(478): unsure at all n locations
cctgcagtaccggtccggattcccggtcgacccagcgtcgcgtgaagctgtttagccatgctatgggggttatatccaatntttccgctctcttcatagcacaacgcatagccatggttcatagttaggatcgctttgtttttctatatcacccccgcctctccataggaggatttttttttagggggggcacgccacacgacatcctatcttgtatattagtccaccgactctcctgtgtttatgccggctcgctcctttatgacatatttttatgctgtcgttctctctcgccccctctctttcttttttttttattttccttatgcttcggtaccgtcccccctccattatttatttctttctttaacttttggtattcacgccactccccgcctttccttcttctcgtgaatatgaggtcctgcgtccacgcgtatcatattatttaatggatacgccccttcccccccccccc

SEQ ID NO: 117557 - DNA, 482 bp, Arabidopsis thaliana columbia
  unsure (1)..(482): unsure at all n locations
cctgcaggtaccggtccggnattcccgggtcgtcccacgcgtgcgcccacgcgtccggtcttcctcactcttaacgaaaatggactctttaacactcttcttcaccggtgcactcgtcgccgtcgggatctactgcttcctgtgatttccctggaatgtttattagaaaaacaccgtcgacccatttacgaatttttcnatttgggggggggaaaaccaccgacccatctcaatggtaatatatctctaattgcggtatcacccactctcccttcttccactatattggttgttttactgtaatgcagttctctacttcgccatatttgtttgattctatatcttctccatctagcagtttcctctccccaattttttattatatattacaaaggtctgtgaaagccgctctaacagcatattcgttttaattatcagcctccccggagattttataatttttttgtgggggccgccccccc

SEQ ID NO: 117558 - DNA, 508 bp, Arabidopsis thaliana columbia
  unsure (1)..(508): unsure at all n locations
cgtcgcatactgcgtnacgtagcttggatcctctagagcggccgtcctttttggggtttttttttttttttttttttttttttctctttctttnaaaagggcaaggcagcttcttcttctttttttataacaatttggggttttacatttgattcttcgatctacaaatagaattcaaaagacgtgtctggttgataaattggaaaatttcgataaccgggggcggggcccacccgagggggaatactagcgtaaaatgggcactggctcaacccgctttagaaggccccactacctttggcgtctcccccacccaagcccaccgcggacggcttcgagccaccaccacgcctgcgttagccccaaaccctgcgccttcccttactccctcacccccctgctccacctattgtgtctcaggtctctgttgccccccgccgcggtccccggcacgtctcttcgccccgggtgaggtcgcctccgcgcccccccccgccccccgcccgac

SEQ ID NO: 117559 - DNA, 495 bp, Arabidopsis thaliana columbia
  unsure (1)..(495): unsure at all n locations
gcctgcaggaccggtccggaatcccgggttgtccacgcgggggagtcctnnaaaaaataataaatatgaggggccccgatttgaggagagagggcacggcgccccagaagcggagggccgagaggcccagaacacacgaacggcgcgcgaggccgcccccccaccccccaaacgactttcttttttgggggggggccacgcccacgcagcaggggcgcaagagaactaaccaacgcggcgcgagcagcagacgggcgccggctagccggagggaaagcgaggacacaggccacggaggcaaccccccggccccacaagaagtgtgaagcgtagcgcgcccgacggaaccgagaagcacgccacagagagaggaggacggagacggggagagcggggcggggcaccacccccgcccggcccgaggcgcaaggaacggattgaggcggccccgggaagaggtgggtttgtggagccgcgcgccgccccccccccccc

SEQ ID NO: 117560 - DNA, 471 bp, Arabidopsis thaliana columbia
  unsure (1)..(471): unsure at all n locations
gtagcttggatcctctagagcggccgtcctttttttgttttgggtcgcnnnnnnnagcacactgaagatcatcagttattggtccttttttattacagaagacaaatcaaagaagataaaaagatcttccctttagaaaaaaacagaactgtagtaatgaatataaaggaagggngangatcatncctttggttgtaagggtgtgggggacgcncccaacagggccctggagaaaaaaaaaaagcctccagcaaaggggggtggcaggaacccccacaatttcacccaaacacgtcgggcgcgaagagatgcgatcgcaggcctttagctctcgggcggctggatgtagctaagctcggagacactatgggtcgcactagttggatagcgcgcggtgggttgggcatggtagggaggagaattggaggtgggagggcccgcgcccgacccacgctccagcgggcggcgaga

SEQ ID NO: 117561 - DNA, 534 bp, Arabidopsis thaliana columbia
  unsure (1)..(534): unsure at all n locations
ctggaccgcctgcaggtaccggtccggaattcccgggtcgtcccacgcgtgcggagtgccaccaccaccactaccacaatcccaatggcttcaccaactcttactctcctcctcctcctcaccaccgtctccttcttcatctcctcctccgcagatcctgacatgcttcaagatctctgcgtcgctgatcttccctctggaatcaatancatatgggggtgcttgcaaagacgcagctacagtcacatcagccgattccttctcacaaggattagctaaaccaggccttaccaacaacacattgggtgccttaggcacaggagctaacgtcgtgacaacgccaggactcaacacacttggtgtgctcgcttcctagcaacgaccgcccgcccccccgcctcgacctgttgtccctgccccggtccgtccactaccccccctgctacccgcacccccgtccccgcgatacgggtggacggcccccctgtttatcttatttttctttctcttttggggcgcccgcccccccccccc

SEQ ID NO: 117562 - DNA, 564 bp, Arabidopsis thaliana columbia
  unsure (1)..(564): unsure at all n locations
cgtacgtaagcttggatcctctagagcggccgtcctttgttaggaaggggcgaaacaaacaaaaannanannancnannnaggaaaatattttaaaacaacacaagaagaaaggccccggaaaaacggggagaggaggcgaggagacgacgcgccgcccaccatataaagctgaaggcccaacaggggagagaattaaaaaaaatttttttatttggggttgttggggaccaccccccctaggggatacgaggcaagaaaaaaaaaaagccccaagggcgtgggggggggagggcggaccccagctagcgaagcggtcgagatgacgaccacggacagagcgagaaacgagaaaactctggcaccagagaacgaaaaagagagacgcatccgcacgccgcggacaaacgagcgangagaaaacaacagccaacaacagaaagaaaacaaaatgaaagaaagaaaaagagaaaagaggaagagaaacggcaaaacacccagaaaccgttaaagcaagtacgaacacagtcactgtaatagtgaaaaatagcgaagagcaacgcga

SEQ ID NO: 117563 - DNA, 515 bp, Arabidopsis thaliana columbia
  unsure (1)..(515): unsure at all n locations
cctgcaggtaccggtccggaattcccgggtcgtcccacgcgtgcgccaagccaaaaatctcatagatcagagtcgtcgtcgtcaacttcatcatcacaaaaatctcagctttgtctctcttattcctcccttttctgctccttccgattcttcatcgcgccacttgncttcttcttcttcttccgatatggctggggctgattccggggggtgtctccccgctactcttgacaccatcaacccncaggccctcaaatgggagtttgctggcccgcccagaaattgtccacatttgtccagaattggccagaagattcgacggcctacacggacgcttatcccctttctgagattgcctaccgctagccgcgcatcccccaccctgtttgttttttttttgacacgcttctatctgttgtcccccctgtcctcttgcccccgccgccctgttgcccgcagtctccccccggggaagtattttgtgtctttctcccgactccccccctccccccccc

SEQ ID NO: 117564 - DNA, 441 bp, Arabidopsis thaliana columbia
  unsure (1)..(441): unsure at all n locations
ccccnaagagaaaaaggaaaaaatttacggagaggaggcccnaaaaaaaaccaaaaaaaaaaaggaagttcacaggacaagaccaggcccggacaaaaaagcgaggagcgaagcagcggggacgaaaacgaccggcagaagaaagagaaaaaaaattttattggggggtgggacacccaggaaaaagaaagaagaaaaaagccccgggggggggagggggacggggcagagggggaggccgcaaacaacaaaacgagaggccaagggccgggagggccggggcacgcaggagagagagcgagacgaaggggacgcaagaggaggccacggggaacaagaggaaaagagaaagagaaagaaagagacgggcgccccggaacgcccgcggcaagcagaggggggcgggagacagaaggaaaaggagaaaggcacgacggcgcg

SEQ ID NO: 117565 - DNA, 563 bp, Arabidopsis thaliana columbia
  unsure (1)..(563): unsure at all n locations
cctgcaggtaccggtccggaattcccgggtctttcacgcggggggaggaccnnanaaaaaattattataaaagggagggggggcgttttgagaagagggaggaaggcgccccgcagcgaacagcgcgcaagcgagaccgcaccagaagaggaaagaggagatgcaagtcccgacccccaccaaagactcgcagccttcccctccattggggggggggcacaccaccccgcagaacgggcctagctaaaaaaaagtacccccgcgaacgagcgccaggaaggagacacgagagtaacaacaacagcaaagattgagtgcagccgcgcccagcgccaaccccacccgcccccaacaaccaaacaaagtaaataggatcacgaaagatacacagcccacccccacaccaccccccacctcaagagacagcaacacactcacaaatcagcaagagacagcccatcaccactaccgccctgcgaccgaaggcgcgcagactgccggcagcgagggagaagtgaaaagattatatataaatgcccaccccgccgccccgcccccccccc

SEQ ID NO: 117566 - DNA, 553 bp, Arabidopsis thaliana columbia
  unsure (1)..(553): unsure at all n locations
gcctgcaggtaccggtccggaattcccgggtcgatccacgcgtgcggagcttcgcaaaattcttctgaatgaataatcggcgattatgtctttgaaaaacgatgcgagtagtagccacgacaggnggaagcaacagataatgcctactccctcataatgaatcttatttaatcgcccggccacagatttaacagccctcctacacttgggggggggggccacccccccaaaaaacaactcttaaacaaaatntccccccactacaattcctaacttacactcccccaatttacttaaaattaattttcttctacaattcaccctcacttacaccctttactctcaaatatttttaatatatttcaatctatcaataccatccttccttaccccccacacccacctctattcattttaaattcattttatctaccatataccaatctcctccccctccctctccatcccacccacacatatattattctttctcaactcctntatatatatttttaatttttcattttttccccaccccccccccctccccccc

SEQ ID NO: 117567 - DNA, 530 bp, Arabidopsis thaliana columbia
  unsure (1)..(530): unsure at all n locations
gactttgacgtcgcatgcaccgcgtacgtagcttggatcctctangagcgccgccctttttttgtttttttttttttttttaatacaaattaactgcatctatagtgcagcacagcaatacaagttggggcttatattcatagaaataatattgtctttgctaaatctaaactcatacagatataaagggaaaaataaaagactcgagatactttagtttatattgaggggagangggnnctacaaccacaagaggttacacttacattaagccaaagtactaaaactcttctgtgcctgaaaatggattccgcaaggtctcgcgcctagcctaataatcctagggaaacccttgcaatgcccaatggcgggccccgggagcgtgggcttcgagtggcatagtgcgtggagccgggcagtgggttggcggggcttggtgtcgcccccccgcgcacgtctgggcgcctcggggcccgtgaggtcgattggaggtgtacagttcgtctcccccgcctcgccgccccgctcta

SEQ ID NO: 117568 - DNA, 552 bp, Arabidopsis thaliana columbia
  unsure (1)..(552): unsure at all n locations
tcccaaattcccctttcacccccccgggggaacccgccctccaatataatctctctttcacttaaccaaaaaaaacctccattggcttctacttcttcctttaccccttctcaacaaacttctccctttacaaccaacccattttnttaaaaaattggctcctaaaaaacctcccctnctttataaccccacttttttttttcttctcaaaaggggggtggtcccccccacccacgggcgcccctttttataaacaaaaaaaacccaaaccccccttccccnnttccattctcctccctcccccccttttggttccaccccccccgccccaaaaacaccaaaccccacacaatttccctcatccccgccccataaattaaaaaacccccaccaaaccccacactccggctttctcaacaaatacaaccccgcacaaaaaaaccaaaaatcccaccccccccccccctctcccccttccgacctccgctccccaaaagacacacctttttgcgacacaaaaaacccacaaaccccccacaccccaacactccc

SEQ ID NO: 117569 - DNA, 459 bp, Arabidopsis thaliana columbia
  unsure (1)..(459): unsure at all n locations
ccccaaaaaattaaattcttacaactccccccatttttcttgataaaagggttttggatttattttttaacaccccaaaacaaaaaacccaaaaccgtaaaaaaaagaaaggggggggcatccaaggatctcaacattttttcacagggggtgtgggggnccccctccccaacggcccccactaaaaacaataaaaacccccctcttttttcnccccccttttctttctcccccccccgccaaaagggagaaactcttttggaaacggtattctcaaagnttcccacccgccccgacactctcccacctacacgcgcagcccaaccccgaccactgactacggacagcgctacaccgcccaaccggcgaaggacagctcgagcccgccacgtgcgccccgcgcgacaccgccatcctcgccgcacagagccaaacaacggacgacactcggcgggcgcg

SEQ ID NO: 117570 - DNA, 503 bp, Arabidopsis thaliana columbia
  unsure (1)..(503): unsure at all n locations
ggggggcgaaaaaattccaaataacacaaccccccccctctgaggcaaaaagttccccccccccctcacgctcccgcccacccgaaatttcccgggcttctcaccccacccggtgccgggaggggggtttctataaacaaaaacaacacccaccgnctaagagcgcgtgctcctttttcgcacccaccccccttcccctctcccctggtaaagacacgaggtatttctaccaacccacagcgcggcgtccccgctcgtccaacctctacaccacaaacaatccttcgtctcctccccgcacacaacacgccctcaattcctcccttctcaattgcgcccgcccttcaccgccggggggggggctacattctctctcccctcctctctttccgtctcggcacaaaataaaaaacacgcggccggccccaccttctcttcctcttcccgtctcgatcttccccccctgcgccgagccggccccccccgctctcccaccccccccc

SEQ ID NO: 117571 - DNA, 160 bp, Arabidopsis thaliana columbia
  unsure (1)..(160): unsure at all n locations
tcccctccaaatacccttcccaaattcccgggttaccccccggggcnaagtataaaaacataatncttaataaatttctaaaataaaaaccctttaaacctttcatttcacatcatcccaaccgccccaaatggggttcaaatcctcgaaccccctaccc

SEQ ID NO: 117572 - DNA, 336 bp, Arabidopsis thaliana columbia
  unsure (1)..(336): unsure at all n locations
cctcagtaccgtccggattccgggttgaccagcggggggagggcgcgtaaaataacactctttctctccatacatcatttnttttcttctgagtcgaccatgggtgtttaatctccccaccaagggctgcatttacaaaaaacgctttaatgccgtaaggggccccgcaccggagccttcgtggtatgggggatgttggggacccaccccaggggggggccccccaaaaaaaaaaacccccaccacggtggtctgctccggggccgggccccccggccgccgacgccccacgctagggagggggggcgggagcgggggaccgcccgacgcgccgac

SEQ ID NO: 117573 - DNA, 246 bp, Arabidopsis thaliana columbia
  unsure (1)..(246): unsure at all n locations
cttcttttctttntttctgtggagggtcttcttcttcttcttctctgggctctggctctggctctctggaatcttctgggctctccacaaatttggctctcctctctctcttctactacagggggggggggcttcttttggggggggtcttgaaaaacaaggaaacaccttaatatccccaagactcttgccttctttcttaaatgggctaaaggggtattggcccttatttccaccccggaatat

SEQ ID NO: 117574 - DNA, 468 bp, Arabidopsis thaliana columbia
  unsure (1)..(468): unsure at all n locations
ctccaggtaccggtcccgaattcccgggttttcccccccgggggagtggtntcaataaacaatcctaaccaactctctncncttttnnttcatcaaaaaacatctacttnaccaggctactcctgaggcttcagatccatggtgaaccaccattcttatcaccaacacaatctacctctgactcttggtctttttttttcggggagtggggctttcctttcggcgcgttggataactatgaaatcccatcccaaccctgaaatcattcctccccccactcccagatctatagaatttctatccatcccatttgaattcgacccaaaggttctgtcttctaatgtcaattttaacctgttaatcaaaaataaaatgggtgggaccccgagcctaaatttcaaatccccaccccccccttggaaatttcgcgttccaactgaaagaggagggggtttcattggccagctg

SEQ ID NO: 117575 - DNA, 461 bp, Arabidopsis thaliana columbia
ttctcccgccggcccccccccgccccccgcggggatagaaaattccatgtgtaccaatctctcccagtaggggaaaggttacacccccctcccttaacccaaccaaaattacgcgtttttttcccacccgtgcgagaggccttgtttcaaaaaaaaacaacttccctttccggcgttttggggtttaaagaaaaaaacccttcatctggcggccgcgtcattttgcattacattttccatactttccgtggcgcgccgccgtcgatgcacatcgcactctcaacctccgtacggccgcgcgcgcaccgcaccccacactttttttttttctcgcggtttgttgtgggaccgcgccaccccgcgctccccgctactaaaaaaaaatctctcccccctttgggatgcgctgtctctgcgcccccacccccgacctccaatcttcactctggtcttctcggttg

SEQ ID NO: 117576 - DNA, 519 bp, Arabidopsis thaliana columbia
  unsure (1)..(519): unsure at all n locations
cccccccggggggggcgccacaaaaccgcgggagaaaaaaaaaaaacactcaaggggagacgccccccccaaattnagaaaaaaaaaccagaccccccggaacaaggagaaaagggggagggggttccccaccaaaggagagaaccccgccgccaaaaaacacaaacccgaaggacagaaggagagaagaaaaaacaccccaaacccggccccaggaagaagaagaagaaaaaacagcaccgcgcgcagcgcagaggagcagcaaaaacgaacacacaaacaccacccggccggacaccaggaaaaagaacccattttttaaaaaggaggtgttgggccgaccccaaagccccccccacacagaaacaaaaaagaaaccacaacacagggggcgagagcgagacccacgcacgcccacgaagcgaaaccaggcgaaacgcggggagcagcacggagcagagacgacgagaaagaaagcaggaaccgccaccgcaagcacccgcgaagcacacgagcgcg

SEQ ID NO: 117577 - DNA, 450 bp, Arabidopsis thaliana columbia
gggccccgcgaggaacaccaacccgccgcggaagaaaaaggaaactgcaggggagaacaagcccccggggttttggaggagaaaacccgggcggggcggagaagaaaacaagaacgccgccaggttcgcgccacccaggggaaagccgcgcgcacggagcagcaaccgaacccgcggcgaggggggcgcgggagaacgacaaacgcccccccacgccccgcgcccgcgagggcaagcgagcaagacaaaccacacgcaccgcgagcgccaggaacggacaacggccaaacaccaagagggcgcgccgcgggaggggggcccgcacgacgacacgaacgaaaagccaaacgaggggggggagcgacggaccggcccgcgccccgcgcgccaccaggaaacaaaaacaaaaaccgcaggaggaagaggaaggagaagagcgcgcaagcgaga

SEQ ID NO: 117578 - DNA, 167 bp, Arabidopsis thaliana columbia
  unsure (1)..(167): unsure at all n locations
tggcacgcctgcaggtaccggtccgngatcccgggtctgaccacgcgtgcgcggacgcgtgtgcggacacttttccaacgcatatttaacaatgtctaacaagtgagaaacatcacactgatgattttgagttcaacataaccatgccagggatcaattagaaattc

SEQ ID NO: 117579 - DNA, 518 bp, Arabidopsis thaliana columbia
caggtctctacgactcactatagggaaagctggcacgcctgcaggtaccggtccggaattcccgggtctacccacgcgtgcgcacgtggtaaatctattgattttagattttgatatgtgtaaaacaaaattttcatttttatatagaaaaaaataattgtaagtaattataaatatcaaaaagttagttactaactttcaaaaccgtactttatataataagatatgaattttcactaaaggggggatacaactttaggcatatagagcttatatatactaaaacccctaaaatatcctaaaacaaacctaaaccagcaagactcatgttgcatgtgtgggattgccctgggacgcagggcgggggggggccgggggatgtgggggcgcgggcgaggaagacgggggggcctcgtggtgagcgtgcgggggtggcggggccgcgagctcgcgcgcgcgccccgcccctcgaatggggcgtgtcgggtgtgtgagggggccacgaggggggcccccgc

SEQ ID NO: 117580 - DNA, 526 bp, Arabidopsis thaliana columbia
tctacgactcactattagggaagctggcacgcctgcaggtaccggtccgggattcccgggtctacccacgcgtgcgcccacgcgtccggagcttcccagctctacactttcgctgatcttgatatcggtctgccgaaaacagtagaaaacatggagaagaaggttgaagcactgattgagccaccaccaccaccagaagctatggatatatctgctattcacaatctgtttccggcgggggtggcagccccttcaggacggaaaccaaaaaagcccgccccattgcctagagattgacgctgccccccgggtaaaggataatcttataaggtggtgattaaatgggctagctggagacacggggccgcactcgatatttacaggatgggtctggagggatcggtactaaaggtgcgaggtgtaggacggggagggggagtcgtctcactcacaaacacacatgctcagtcatttcttgcagacgtggtcctatcaacgtcggctcactaactgcaatcaattcccc

SEQ ID NO: 117581 - DNA, 473 bp, Arabidopsis thaliana columbia
  unsure (1)..(473): unsure at all n locations
aagctgacacgcctgcaggtaccggtccggaattcccgggttgacccacgcgtgcgggagctcctcttgaggatattgttagaggtgttgaggaaannttannanntnananantnttgngggtttagaatttaaaatatatattgaacagggacattgtgttatattaatttaagttttttgcaacccgccccccacattctctttaacagggggggggaccccccagcccactcacccataaatataaactctataaatttttgagtaacctcaaaccccccccctcttaattccatctctctaaatctctcgcgctttacaacctcctccacccccccctccctctctcgtgtttattcgatatttttcgttaacacctttcccatttcaagatataaaattctaattaacaacacttccaccctattaacacatttacccgactaccaatcatcctctttaagtcgccc

SEQ ID NO: 117582 - DNA, 400 bp, Arabidopsis thaliana columbia
tgatactccagctctcatacgactcactttggggagagctggtacgcctgcaggtaccggtccggaattcccgggtcgacccacgcgggcgggggggggtcatgagtaaaccactaatgtcttgactggagctggggattatgatcacattgccagccttaggatcagtatatccccaacgggatttgttgagggtactacctgcaccggtagagaagttatactcaattgctctagactggcctaacgtggggggggaccctttctctggggtgtatggtaaaaaactgaaacaattggtcttacactcttacatgagattaacatgggtaactggcatagaagttaatgcttaggctgtaacatatgccaaagggaatgaaacaatcgatgggataag

SEQ ID NO: 117583 - DNA, 521 bp, Arabidopsis thaliana columbia
  unsure (1)..(521): unsure at all n locations
cagctctcnnnnnnnnnnnnnnnnnnnnnnnnnnnnnnnnnnnnnnnnnnnnnnnnnnnnnnnnnnnnnnnccacgcgtgcgtggaagtgcagcaactgccgatagtggagatgctgctggtgccgatagtggaggtgctgctggtgccgatagtggaggtgctgctagtgccgatagtggaggtgctgctgctggtgaaaccgctagtggtggagctgctgccgctgacacttctggtgggggggctgaaaccggtggtgaaagtgctagtggtggagctgcttctggtgctggagctgcttccggtgcctcagctaaaaccggtggtgaaagtggtgaagctgcttctggtggttcagctgaaactggtggtgaaagtgctagtgctggagctgcttccggtggttcggctgaaactggtggtgaaagcggtagtggtggagctgcatccggtggtgaaagcgctagtggtggagctacatccggtggctcacctgaaaccggtggctcagctgaaacc

SEQ ID NO: 117584 - DNA, 534 bp, Arabidopsis thaliana columbia
  unsure (1)..(534): unsure at all n locations
ctacgactcacaattagggaagctggcacgcctgcaggtaccggtccggaattcccgggtctacccacgcgtgcgcgcagcaccgtcgttgattgaagaacattccgatcatcagccatcatctgaggggatgaagaacgaagaatgttttctgattgatcacctccaattaggattgactgctcttcagaacttgcttacaaagtatccagatccggctttaggttttttgggggggggggggnncaaccccccccttccccgccacaaaattcccccccaattaggtgagccgtcggcgcacccccgcccttctacgacctttatttcttcctctctgacgcgggcggtgtctctctcacttaactgccacccttgctcgcgctgtggtttttggtgttcagttcggtcggcctacattaatgcgttaagcatgtacccccgactctcgccccgccgctccccgcatgcctgtatgttgtacccccttcatagctgtgctgatctctttccccgctcctggctgctactccc

SEQ ID NO: 117585 - DNA, 481 bp, Arabidopsis thaliana columbia
tctacgactcactatagggaaagctggcacgcctgcaggtaccggtccggaattcccgggtctgacccacgcgtgcgcccacgcgtccgttttttttttgagaaggaaccaatgattttcttattaatttagaaaccacattacacttaatagtatcctgctgcatgtaagttcaagtaatcgccgaggaagtaaaagctcaaacaagctaaacaaaagacaagttgttgtagtagactagtggtacatgaacgaacaagacaagaggagaaaacaggtgatgagcttttttgggtgtttctaaaagcgtggtttgattggcgtgtgggatggggggagggagcggcggggggagggggtggacgcgcgggccggcgctcccttcggccggtggtagggtgaggatggtatgtatagattgatggtgagggttggagtagtggagggggtctgaccgccctccgccgggtgcgtgcggaag

SEQ ID NO: 117586 - DNA, 536 bp, Arabidopsis thaliana columbia
  unsure (1)..(536): unsure at all n locations
tccagctccctacgactcactatagggaaagctggcacgcctgcaggtaccggtccggaattcccgggtcgacccacgcgtccgctggttattctcagaatcttggatctggctatcctggaagttcagtgagtggtggcgcagaaggaggctctcagatttctttgagttctcgccatccatcaattacaggtgctcctcaagagactgacattggtggtggatacagatctcatttatctacaggtgctagncattacggaacacaatatggctctgtgtatggatcaacttctcttagcagctctcacgctttaagcaccaatggtttaggttcatcaggtttggataaccgctcgggatatcgccctactttacctgattgaccaaagttggcgtgtggcaaggtatgtgtgggcccctcgtcccatgggtatcgggccagacactcgccgactgcatatcgccagtgccctgtgctaggggcctttccggttctagccgctgatgcggctcagaccggcccggcgttcccg

SEQ ID NO: 117587 - DNA, 523 bp, Arabidopsis thaliana columbia
  unsure (1)..(523): unsure at all n locations
ctctctacgactcactatagggaagctggtacgcctgcaggtaccggtccggaattcccgggtcgacccacgcgtgcgacggaatcgctcttatggccgccatggctaggaacgtagctcaagctgatgcgtctgttaaggctggagagtggaagaggaacaagtatgtaggtgtttcacttgtgggaaagacccttgcagtgttgggattcgggaaagtttttatttttgtagagggggggggttaagntcttggggagcctttcaaaaataatttccctatggcccaggatgctgttcaccgccttttgtttacgtttaaggggtttttgtggaggtgttgtctggcgatggtgtggctttgttgtatgtgttttttgtggtggggggacgggtgtggtgtgcgtggggtgtggttttcgtctcacggggtgngtcgcgcgtgtagcgaggtttgtgcgtagctcgttgtttggttgtttgttgtgttgattggggtgtgtttagtgtgggttcttccgct

SEQ ID NO: 117588 - DNA, 538 bp, Arabidopsis thaliana columbia
  unsure (1)..(538): unsure at all n locations
tccagctctctacgactcactatagggaaagctggcacgcctgcaggtaccggtccggaattcccgggctctctttcatcttcgtggtttgccatagctcttcttgaatcaaggtcgtcttcttgaaatcagatctcttcgtgacttctcctgtaaccaacaaagaaccatggagctcctctctagagctcttttcttctttcttctactctcagntctttcttctttctcttcttcaagttgcatgtgagatggggtcttcgaatctcagagtttggatcttggcagaaacttgcttcagaccaagaaaacatgccctgtgaactttgagtttatgaactacaggaggataacgcagcaatgcaaaggccccaacaccccacgaaatgaatgttcccgggccgcgactgactcgcgcgtgtgttagcgctcggccccatgagtgcgctgcgccccccttgcgcggtacgtgccactatgtcaagatgcggcgacggctaacggagagtgttttcacgtgtgcggtagaatgcgccga

SEQ ID NO: 117589 - DNA, 402 bp, Arabidopsis thaliana columbia
  unsure (1)..(402): unsure at all n locations
acgactcanatagggaaagctggcacgcctgcaggtaccggtccgggattcccgggtcgacccacgcgtgcgctntgatcataccagagagccgtcagggagagcataacatagattcggagaagaatgaagacgattctttcttccgaaacgatggacatcctcgacagtggtgcccatggggggtgacgctaaagtgtattcgaggggggcggcccgaggcggttttttctttaaggggggggatggggcgaagcacctgcccccacggaatatagtggagactacataaggaggtggtgctctggtcgagcgcgccgcacgtcccatagaacgtgaagagtgtgtgtgtgcgcgtgggtgtgtgggatgtcgccggcagcgcggcggcacgttcgctca

SEQ ID NO: 117590 - DNA, 357 bp, Arabidopsis thaliana columbia
cacaagaaatttttttttttaaaggattgtttggaaagggaaggaggagaagagaaaaaaaaaaagaagaacacctactcagaggagctaagagaccacgcgcgaccaaacaaaaaaaaatgataagccggctacatacaccagatatatggcccagaaataaccaccgccgccctacaacccatctcactcttagtggtagttcgcttagtacttattagatagaatgatcagtatcctgccgccaccctttcaccgaccaccccaccacacccgaacatcaataagatactctcataaagagtattgttcaatagaataagagatctcgcgcgactgccgataaaaagccaccaa

SEQ ID NO: 117591 - DNA, 411 bp, Arabidopsis thaliana columbia
  unsure (1)..(411): unsure at all n locations
tacgactcacatanggggagctgacacgcctgcaggtaccggtccggaattcccgggtctgacccacgcgtggcgggagttgatcgatgctgctttccctcttcttaaaggtgttgttgctacaactgatgccgttgagggatgtactggagtcaatgttgctgttatggttgggggntnncngagganagaaggtattgaaaagatgggtgggggggggttttttttttagggggggggganaannattatataaatttattaaaaaaaaatatactttatatttgtattataagtaaataaaagaatgaataaaataatataaatatattttttttgtgagaaatggtgagaaaaggagctattataaagagtttagggggatagggtggggaggttgttgtgagatga

SEQ ID NO: 117592 - DNA, 572 bp, Arabidopsis thaliana columbia
  unsure (1)..(572): unsure at all n locations
ttgagtgggcaaacaagcggggggggaaaaaaatttgtcttgtaaatgcccccccaataggaaaaaaaacacncccgcgagaaccagaaaaaaagagagttttcccacacgaggaaggcggccaaaaaaaccaaccaccacagggggagggagggaagcaaccaccaccaccagcggacgggaggaaaaaaaatctaaagacaccgcgcgcgagggagaacataagatattttattgggggggcacgccggggcatttttttttttaggatgttgggaggaacaactacggacaccaattaaatattatttccttatttataatgtggcgagagctacatgactcttcaagatttctttgtttgtttgatataatgtgtgttcacatatgtcataataacttgtacgtaaacgtaagtcttcgtagtgtgtgtgtttaatgattttgttaagagtatgaaggaggctatctctataatatgattacacaacacaccatactatcgtatagtttcgacaggatgtattattttatatatataattgagttctatatttattatattttttcct

SEQ ID NO: 117593 - DNA, 500 bp, Arabidopsis thaliana columbia
  unsure (1)..(500): unsure at all n locations
cgcctgcaggtaccggtccgngantcccgggtctgacccacgcgtccgcccacgcgtccgaaagttctaccaagtactccttctgattggcaaaacgaggatgcaaattccatgggaaggagttctatgaatgatgagaattcaacgcagcaagatggcacaaccatgagagaaacccagagcatgctattggattttttttctagggagggggggccncccaagnccgataccgataataaacaaacccccgccttcatttagaacatcgccaccccccttccaaacatttatattgtaatgtgtctactcacccattagccgccacccccacccccacccccccaactctctcactctctttggtagttaactaagcaacaagtcctatgatctacattctcctacacccaacataccggccccccgccctccccaccacacacaattctagcagaccatacacacgacacccattttttcccccatcccacctatcc

SEQ ID NO: 117594 - DNA, 542 bp, Arabidopsis thaliana columbia
  unsure (1)..(542): unsure at all n locations
cgcctgcagtaccngtccgngaatcccggttgacccacgcgtgcgcggacgcgtgggtttttagaccaagctcaggctatcatctctccgttaattagggtttcntaacgtatactaaataaacaatatatataattttcacacgcccaacagatgtttatatataattaataattttatccaccaagaaccacacaaacttccctactatttaagggggggggaaggaanannnannnnanancacaaaaaaaaataaaacacctaaatattactataaataacacccccccctgcctatacataattaaattattagttcatataataatcgcgattttaaattgatcaagcaaatagtcactaaattttcaaactaaaattatataacatttttaaaagatatataatatgaaatatgtgtatatctttaaaaagaaacaattatcacaatcacaaataaacatatatattattgttagtaaaataaaaatagtaatattataatagaaataacactttatacacatcttaacaacccc

SEQ ID NO: 117595 - DNA, 533 bp, Arabidopsis thaliana columbia
  unsure (1)..(533): unsure at all n locations
actacgactcacnataggggaggctgatccgcctgcaggtaccggtccgngattcccgggtctacccacgcgtccgctcatcgggatcaaactggggagaaagcggatactttaagctcgaacgtaacatcaaagagtcatcagggaaatgcggtgtggcgatgatttcttcttaccctaccaaatcatcatgctcaaactcaccaaaaccggcagcgccgttttcgtgattttggggggggggccgccccccccccccccccccgccataaaaaccccccccccggagggtgggtgtggccgcgccccgtctctcctttttttttgttgcttttctccttcgcctctgctttgattcgacgacgatctttctctcttcctgttttggcttttggtttttttcggtcgctctcttcattctctttcgtgtttcttgttcttcctgcttctctctctccgccgccttccccttctttgtcactgtttttgtttcttcgttttttatgtctgtgtctcttttctgttctcgttcc

SEQ ID NO: 117596 - DNA, 510 bp, Arabidopsis thaliana columbia
ccagctctctacgactcactatagggaaagctggcacgcctgcaggtaccggtccggaattcccgggtcgacccacgcgtgcgctcccgcactatctacttcttgctcctccgtcatggctttctcaacatcaaacgcgcttcgttaccatcatcctcaaatttctctcaggaactctcttcgcgctcccaaatcgccttcttttgtcaggcttcccctcggaaaggtgttacagagcaggatggtgatacgtgctgcttcgtctgcggctggtaatccacagtctgatgctgactttaatccgtatgaggctcttggtgttaaccctatagagggatttgacaggatcaagccaacttatggaaggaaacttaaagatgctcagaggagcggcgatgaaggcactggtgcgctagggagcggcgaggccgacgttctcctgcgcgcaccggcgggccgctgtcgggggctcggggggcggtgggggtgcctggtgggcgcgggggggcg

SEQ ID NO: 117597 - DNA, 340 bp, Arabidopsis thaliana columbia
accggacaaaaaaaaccccaaggggggggctagaacaaaaccccgcccgggaggaggagagaaaacaccacgggccgaaggagccccaaacagaacgggcggggcgcgcggatttttttagggagttggccggcagcgccgcgaaaaaaaaagcccccgtgggaggagacggcccgccgcgccagaatacagaggggggcgcgcagagcgagcgccaccacacaccgaaaaaaagggggtgaggatcagggggaaagaggaagcgagagaggcacccgcagcccccggccaacagacgccaaagggaggagcgagcagacgttgagagacgccggggcca

SEQ ID NO: 117598 - DNA, 497 bp, Arabidopsis thaliana columbia
  unsure (1)..(497): unsure at all n locations
tacgactccaataggggagctggccgcctgcggtaccggtccgngnatcccggtctgccccgcgtgcgcggacgcgtgggcggacgcgtgggcggacgcgtgggcggacgcgtgggtggaaacacaccagtttcggaaaatgggcgaagctcgtttgggaaaaagagcactagttattcttactcggacactgcaagcatatccattgatgatctatctgtttgagagggggggggagcacgncacctcctcctaataaaaataaaaacccattttttgtgggattcatctcccccaccctccacatatgatagtagtgttcttattcctgctttatatgtgcatatccccctcctgcgccccccttctttcttgtgacttcgtctttgaaatgtatagttttttttcacatttttatatcctctcctcattcttagttccctacttcacactcagtgcttattttagtttatgtattgatctctcattctttaatt

SEQ ID NO: 117599 - DNA, 463 bp, Arabidopsis thaliana columbia
  unsure (1)..(463): unsure at all n locations
tccagctctctacgactcactatagggaaagctggcacgcctgcaggtaccggtccgngattcccgggtcgacccacgcgtggcgcttcttcacccaaaaacccctaaaagccttatcccttcttcttcccatggctgcttcagcttcgtctctcgctctctcttccttcaaccctaaatctcttcctttcggggtctccagacctgcctccgtttccctcttatctccttccctctcctttaaacggagttccgactccgtttccttctccatcgccgacaaatggaactctcccgcttctcgcttcgcccgtaacgttgcgattacctcagagttcgaggtggaagaagaggggatggagggtgccctcccgccgacctcgcgccataaggtcagtaagtagagtgcgcgccacagagcacaggagcatgtgggagcgcggcatccgcaccgcccccaccg

SEQ ID NO: 117600 - DNA, 500 bp, Arabidopsis thaliana columbia
  unsure (1)..(500): unsure at all n locations
atgatactccagctctctacgactcactatagggaaagctggcacgcctgcaggtaccggtccggaattcccgggtcgacccacgcgtgcgtgattatcaaaaactgttggttagtaacagaaattgttgcaaatgtaacatattatataagctttctttcactttggtgcattctctctaaataatggcctctattgatgcagtatctgattcttagttttgaaatggtttttgcataaattattgttctaaggcatttttgntttatctccagcatttccaagatcattgatcgttatgaaatacaacatgctgatgaacttagagccttagtaagtaattagctaagaacgtcattctaatattcttctggatgcggcttttggtgttatgaaagatagaacgcgctgtgacgcccgagaaccgctgatgcggccggcccgtgcagcccaaccgcggagctgcacgtcatgggttgtggggccggggtaaagggcgc

SEQ ID NO: 117601 - DNA, 484 bp, Arabidopsis thaliana columbia
  unsure (1)..(484): unsure at all n locations
ggaaaaacaacacaacacaccgacgagcggcgagagagagagagagaaagaaagaaacacccccacaaagccagcgcgcgcggcgaggggagagaacaaaggaaaaaaccacgccaggcccgaccgcaggcagaggagaagagaacgcaacaccccggacaagagaggccacacgcgccgaccgcggggaacgaacacaaaagacaactttaaatangcaacagggggggggcgggacgacacaccgacccgccaacgacaacacacacaacacaaagaccgaaacgggcaccgccngaggcgacagacagggcgcgcgccacgaccccggagagcaaggacagaagcggcagcagcagggagcagaaaccgcaaggancgggagcacgcagagcgcagcgacgcaccaccacaccacacgacaacacacacgaggagggcgacgacgagacaggagcggggaaggagcgcagagaagagaaag

SEQ ID NO: 117602 - DNA, 487 bp, Arabidopsis thaliana columbia
  unsure (1)..(487): unsure at all n locations
ttccattctttaaagattaaggacatnattcatcctcttccccacccctttcccgcagatgagcgagctttttgcgaaaagagaacaacaccccccccaatttcccccagcgatatcccccacaactgtctcaaaccctctttttttttttggggctgaggggacnccccccctctgggggtcactatcattaaaaaaaaaaggccccccttattccctaaccccccacaactcccgcctccccttttatccctttattgcctccccccttagatacttccaccaccaccacccgccccccctccgtctcagcgcgctactgcgtcaaacggccttctccccagccgctctccgcgcccactgccgcccccccctcccaccgacgcacaccacccacccccccccccccgaccactctgcgtcaccgtgtgcgactccatgtcccggcctagtccgtccgttccgccctccccggacgcggcccccc

SEQ ID NO: 117603 - DNA, 446 bp, Arabidopsis thaliana columbia
  unsure (1)..(446): unsure at all n locations
gcggagaggacgagaagcaagccaccagcccgcccccgcagacggcgaaaggaaaacacaccaaggggcgggccggcccagcacggtttttttttaaaaaggttgtttgacncagcccaaccgctcgcccccgccaccaacaaagaaccccccacagttaatcgggggggagaacgagcgcgggcggtgaaacagaaatataaggtggtagagagaaaggactaagggaggcgaggagatacgcggctgtacgcgcagaccacattgttgagtacaaggcaacgagagagggaagtaagatatagatgaagtgagcgaataagtgtgcgaggtcggagaggtaggccgcgtcacgcactcaataagtaagaaaatagagaatgagaacgttggcaagactggaaagtcgacagtgggaccgcagaacgcaaccgcccgccgcctcc

SEQ ID NO: 117604 - DNA, 398 bp, Arabidopsis thaliana columbia
cgcggggggggggggggagaagacataccgcccgacccggccggcggaaggcgtatgagatgacaccaaacacgcaagcggccgcggcgggagaggaaagccaaaagataaggagcaccgaaggcgcccgacgcacccagaatttttttacacacgggggggggcgaggcgccagatccgccagcaccatgcaaaaacaaacaaagaagacggggggaggttggcgcgggcgcggggtgcccaccagacacagacgggagatggagcaaacaacaccaaatagacgcagcgacggagcgacccgcgactcgacccacacgattacgcatgagaggaaggagacaagagcaaatggcgcgcgagggaagtatggatcgggcaggccaagagacgcgcac

SEQ ID NO: 117605 - DNA, 426 bp, Arabidopsis thaliana columbia
  unsure (1)..(426): unsure at all n locations
ctaaaattaccatatgctttagggagctaaagacgacctttaatctaaagattccccgaggggggcaaccttattactttaacattacaatggaaatgggatcccaaataatgtttataacttggggggggtggacattttaccggggggaggaaaaacgacnaaaaaccccattttcttttttagggggcgagctcacccggaatcagccctaaacctttagtgggggtgtgggggtttattttaagtctcctggaaagaagtgcagcactcttctgaaaacaaaatacagaggggtgttttaaatcccgtctttgtctatacaaaagaatttttccttttcccccgccacccaacacccccgggaactttcgtttgaattcatgcgcgaccttcgtctcaggttaaccccccccacaccaccgc

SEQ ID NO: 117606 - DNA, 395 bp, Arabidopsis thaliana columbia
  unsure (1)..(395): unsure at all n locations
ctaatgaaatattggacgggaggttgttcaagggatcgccaaaggggaggaccccccaacacaccattattaaaattttgcctgggtggcaagaaggcgggcgtctttttttctttggggggttgtattggggcccccaaaccccgcggggggcgcgcccaacaaaaaaaaaacacccccccctatcgggggcggcggtgttcggcccccgccccccggagtccgcaacgtgaaccgttcatagttcgcagtcggacggcgggggcgagttagtaaaaacaccgggccggtccgcggcggagcggagggtagagncgaaggcgggggcggagggccgggaggggggggcgggagtggacgagtgaggaagggcgggggcgccgcgcgagagaacg

SEQ ID NO: 117607 - DNA, 376 bp, Arabidopsis thaliana columbia
  unsure (1)..(376): unsure at all n locations
ccccaaccaaccggccggggagagacaaagacagagagagagcaacgcgcncccgccgcggagcggagagagcccagaagaaagaacaccccaaaccggccgcgcggcgagggcccgccaccgaacaccacactttctatcaaacaagaggggggtggcgagagagacgaaccacacacgcacccgacgacaacaaacaaacaggagaaggagaaagagaagggcaggcaccgcgcccagcgcgcccgcccccacacagcaaagcaacgaacggcagcgagagagagccgcggagagaggagcaggacgcggagcgagcgcccggcccacacacagccngcgaagcacaaggaggggagaggggagcgaagcgaga

SEQ ID NO: 117608 - DNA, 490 bp, Arabidopsis thaliana columbia
  unsure (1)..(490): unsure at all n locations
aaaaaaaaaaaacaacnttcgtccctttaacaaaaaaaaaaattaccaccttctcaaaaaaggggggtataggtttctcacaaaccaaaaaaccnacccccccngccctgctttccaataacacaacccccccccctcccccctagtaagaatttatctcataaaacaccccacccccaacccccgacatcacacaccaacaaaaaaacacacacccacaaccctccccccccacttctcacccaactatttttcttcaaagaggttgttttgtgccnccccccccccgcccncccccccaaaaaaaaaaaacaacccacaccacacccacaacaccccccttctgtccccaccccacatctctattccgcacattggctccgctgagcccacgacgcgcgcatacacaaacagtaccccgctcacaacacatcaaatatcttacaggaatatttatacgaaatatcctaaccacagcaagaacacaaac

SEQ ID NO: 117609 - DNA, 560 bp, Arabidopsis thaliana columbia
ccgcgtacgtaagctaggatcctctagagccttcgccctggggggtaaacctttatttattggtttttgggagaagattgggagatatagaggttaatagtgtaattgtagaggagaggttggggaaaaaaattgtgtgattagaaaggatggtggatatagtagatttagaggaggtgtggtgggatagattagatgtgggatatttttttttttgttgggtgttgtgagaggggagtggagtttaagtaagtatgtggtgattttatgttagagagagagagaaaggagaggagaagatagtattttatgagtaggaaaatgagtttgtaagtaatatatatgaggtagtagattatgtatgtgtgtgataataggtcgtagtaagttatggtaagaatatgttaattcatagacaacgtatgagttaaagggctatgtaccagtagtaatagtggaatgtgaactgaatcggaggagagacaggcggacgcgcggaccagtgcgcgaaatgtgagatgtgcagtgaacggctgaggaatgaagtataatgatattat

SEQ ID NO: 117610 - DNA, 537 bp, Arabidopsis thaliana columbia
  unsure (1)..(537): unsure at all n locations
tgaggtcgactgcacgcgtacgtaagcttggatcctctagagcctccgccctttggtttattcctttttttttttttttttttttttttttttttttttttggcaaacccatgcttgaaaggggctcctcttaagggttaaaggagaaaaaaaaaaaccccgggtttttaaaaggtcttttattttaagataatataataaaaattttttgtaccgggggggganattctttattggggggaaaaaaatattcaggggaccttgggggagaacccttataatcccaaacggggttttgaacttttcttaaaatttggccaataccccaagttttgggggatttttgaggaggtttttttcaatctggaaaaaaaaagtgaggggggggaaaatgatgggcaaccctccaatttcatgctgtttccccccccggatggtagggccacatgaatggtgtgtttttatttatggaatatagaggaaatcatctttattttttttgagtgtgnaacatcttttttaatttgatagatcgtt

SEQ ID NO: 117611 - DNA, 560 bp, Arabidopsis thaliana columbia
  unsure (1)..(560): unsure at all n locations
atacgactcactanagaagaaagcacgtacgcctgcaggtaccggtccggaattccccgttcgacggacagcgtgaggcgccggcgcctctcccgggcgctgaaagagttccgggtgcgcggcgtgacgaccaacatccccttcatcctcaacgtcctcaacgacgaggcgttccgcaacggcgtcgtcggcaccgcgttcatcgacaagaaccccgttttttttgggcgtgggcggaanagccacaagcgaaggcaagttgctcttggcccctgggggaacatgggccctaaacagggccggagaacccccgttggccacaaaacctggcagtggtcccccacggggggcccccaaaacccggagggccgggccccccgcgccccgggtataaaagcgggtgataagaccgcaaggaggccaagagcccttaccacagaggaaggcgaccacccaagaaggaggccaggggagtagacaccacttctcggagggaagtaccaagcgggagtgggagccacgagagagcgcgggggggagaacgagggggggagggcgaa

SEQ ID NO: 117612 - DNA, 519 bp, Arabidopsis thaliana columbia
gcggggggagaggaggggggaaggtgagagcttaagaaggggtagtaaaaccctatgaggtgggagggggagaagagaactagatatttgtcttgacgagagttggtctgtgactataagaaaagcgtgatgtatctgttgtggttgtatgtggtgttttgtgcggcatgtgtaactgcgtgaaccgcgtaattgagttttttttttcatgagggtagaaggaattattgtggagttagttctcgggtgattggtgaatgggtgacttgaaggtggtcatgggcgtgaatgacgtgtgagtagatgtcgaataaggagcatgagagacgactgctgtggtataagagaggctgtggagaaatgtgccacgagattataagtcagctgtagaactcgatagtaggggagtggcggcaggaggtgtgtaggtagtgtagagttagtggagtggtggaggagattcagtttgtggcttttgatgttggttagtgtgtatgagtcgaacgtgtattgtagtta

SEQ ID NO: 117613 - DNA, 485 bp, Arabidopsis thaliana columbia
tgcagtgaaagacgttatgtacattttctcggatacgtaacagcgcatatgaggaagaaagactagtgacacaagagtgatgggtagtgtgcgtacttctccagagtgggcggccgggattaagaccttgagtggggcggggcggatcgatgcgttttttttttgagagaggtgggcgacgagtccgcgacgggttaacatttcatgcagtacgcttcgcgcttcttcggaagatagttggtggtagtgggttataagaggggtcgagtgtagggtttcgagtgtgggaataggaggtcgccttgcgtgggagttatttttcgggggggagcgcttgttatttagcgtgaagtaaggagagtgagataggttgagatgattagagtcttggagcatttgatagaaaattatatggatcgagattgtggaattattttggacgggtcgactgttgagtgattatgggcacgtctggatcggacaga

SEQ ID NO: 117614 - DNA, 514 bp, Arabidopsis thaliana columbia
  unsure (1)..(514): unsure at all n locations
nnnnnnnnnnnnnnnnnnnnnnnnnnnnnnnnnnnnnnnnnnnnnnnnnnnnnnnnnnnnnnnnnnnnnnnnncttttgtttttttttttttttttttttttttttttttttttttttttttttttttttttaaagaaaagttgtttcgctttggtttattcctggtattggatacaggaactgttctcgaactgacattccttttatccttatatatcttgaaatgaaaagatcttcaaagtttgttgatgcaaaatgtttcttttgcttgtaaaacaaacatttttatagctttggggaattggtccttattggttggggtaatggttgatgtgttgggggtggtaatatatctcacccctttaaatactaccggtgaaaagaagggggatgaggaccttgtgctaggttgcgttacttctcatggtttatgactcaactttctgctcttgcgtctttcgtaaccctcctgagccctgtgatcactgacctacggtcaatctgagaccacgg

SEQ ID NO: 117615 - DNA, 465 bp, Arabidopsis thaliana columbia
  unsure (1)..(465): unsure at all n locations
nnnnnnnnnnnnnnnnnnnnnnnnnnnnnnnnnnnnnnnnnnnnnnnnnnnnnnnnnnnnnnnnnnccaccgctccggttttatgcaggaaacaatctgtactagggttttgattcctataccgggaggactagtggagctctttgcgaccagacatgtcgctgaagatcagaacgtggtggattttgtaatgggacattgcaacatgttgatggacgattctgtaacgatgaacatgatggtagcagacgaggtccaatcgaagccgtccgggatgttatccggtgacatccaacaaagggttccaaagagaagatttgatgaatcttcctttggcttaccaaatctttggctgatcaaaaacccgacttaaattctttggccgaaaatggagggtttcccgagacccacccctttttgagaaattaaaaaggggttttttttttttttcagccctcggggggg

SEQ ID NO: 117616 - DNA, 501 bp, Arabidopsis thaliana columbia
taggtgcaactatagaagactatgacgtcgcacgcacgcgtacgtaagcttggatcctctagagcggtcgccctttttttttttttttccatattaaaaattcacttaccaaaagcttctggactctgtcgtctgtccaacgcaacaatttgagttgaaatcccccgttttcttcacgtcaatagcctagaggacgttcacacagtggactttaagcttaacctgcttgtgctataaaagcaccaatgaaaccaaatacacaacaagaataacataaagaaatcatgactttgcataacacacatgccttatctgtgacttctggaaagattctgacctagctctgtcttccgacttctccatcccgctcaccaaagagtttgactaagacaagacaagattacgagcaacaacataagttagttttattccttacaaaacttaatcaaagagagaaaagtctaattcaataagtttcaagcggagttgctttgcagtgca

SEQ ID NO: 117617 - DNA, 390 bp, Arabidopsis thaliana columbia
acgcctgcaggtacgggtgacggaattgacgtgtgtgacggatgggggaagcctatatttggataaatgttttgaaatgaagaaaagtgtagttttaggaagaagtggtaataataaagagaagaatatgtaaaaattataaaagaggtaggaattagaaatatagataagggtatagcgaataatataaatgaattttttttttatgagagagataatataaggagaaaataaaaagtaagtaaaaaagtgggggtaattatatagagagtgaaagtaagtaagtaataagtggaagtagtgagagaagaataatgagtgagaggtgaaaagaggtaagagataagagaagaaagagaggtaatatgaataaaagaaagataaaaataa

SEQ ID NO: 117618 - DNA, 529 bp, Arabidopsis thaliana columbia
ccagctccaatacgactcacattagggaaagctgctacgcctgcaggtaccggtccggaattcccgggtcgacccacgcgtccgcccacgcgtccgtaagagcgaggctgctgctgcttttgggaatgatggatgttatctggagaagttcgtacaaaaccctagacatattgagttccaggtgctggcagataaatttggaaatgttgttcactttggtgagcgtgactgcagcatccagaggcgtaaccaaaagcttctggaagaagcaccttctccagcattgaccgctgaattgcgaaaagccatgggtgatgcagcagtcgcagcagcagcatccattgggtacattggtgttggtactgtggagtttcttttagatgagagaggtttcttctacttcatggaaatgaacactaggatccaggtggagcatcctgtgacagagatgatttactctgttgatttgatagaagagcagattcgtgttgcaatgggagagaaacttcgttacaaacaggaagatatt

SEQ ID NO: 117619 - DNA, 479 bp, Arabidopsis thaliana columbia
agcttggatcctttagagcggtcgccctttggtttttttttttaattgaatattcctattacgagagaggagactctgacttacatgcgtgaaagctgaacgagatggcatttggtgatgtatctatcattagcacttctatgcagctcaacaaagactggaaagatacacaaacacgttctttaatcataggggagagggcgcctgcgcttcttaagaggaaaaggacccttactaaggtggacttcctaaacgtgcctaaagccagtgtcgcactctcatgaaccgttctctcttggcgggctactctcactctgccacagacaccgtgatagttttctggtcactcgaattgtaagatccttacgaggccctttttccagaccaaacggctgaacaaaccaaggggttccctgtactcttacattgatctaaacgcaggcttgagcgcaaaccttctgcattgagaagccttgaaa

SEQ ID NO: 117620 - DNA, 498 bp, Arabidopsis thaliana columbia
agggaaagtacgcacgcctagcggtaccggtccggaattcccgggtcgacccacgcgtccggcggatcaccgtataacagatgcacatcacacgggcctgttcaataactcgctctctaagctgtcagactggcattcatggatactgatatcctctccacgacaccatttgtgcatttgggccagactagttattctctggtggattacttgtcacgccggaaaaatgcaatcactggtggataagaatcatactcctccttgaaagccctcgactcttcagcagaagccaaaacctctagagggagctctacttcacgtggacgtgttccggtgtatgaaactactagctatgtttggtccaatcacgataatgattggtactcacaagtctaattcgaagcaccgaagggatctcttaagccagcgtcaacaaaggattgtgaaaagtgacgactatagacctgacgacaaaatattttagatagtgaaacaaat

SEQ ID NO: 117621 - DNA, 337 bp, Arabidopsis thaliana columbia
gcgtgcgggaccgagtaggtattggtcctctggggggggggggaaacctggtttaaggataggaggggaaatatggaggtaagaagaatgataagttggaggtgaggtaggagtgggacgatggatgtaatttgtatgtgcgtcgcttgtgtgaagctagtaaaaggagataggtagggataaaggaagttttttttttttggaagaggggagaaaaaacaaacggtagacgagggagggtgggtttggaccggagagagtaggcgggagacgaagaacggaagacgagaggtagtagcgaggtaggtaggttagatagtgtagatggagggaggcg

SEQ ID NO: 117622 - DNA, 516 bp, Arabidopsis thaliana columbia
  unsure (1)..(516): unsure at all n locations
ctatagnagagctatgacgtcgcacgcacgcgtacgtaagcttggatcctctagagcggtcgcccttgtgttttttccttttttttttttttttttttttttttttttttttttttacgtttttttttttttttttttttttttttttttttttttttaggaaaagccgaaaaaagggtccccaattataaaaaacaaaaaaaaaggacctccttcaaaatttttttaatttgggaaaggggaaaccccccaagggtttttctttttttttttttggaggctgggaaaattgggcaaaaaaaaaccccaaccaatctttccccataatcctacgcaatattaccgcaacaatgggggggggggttttcattcgcgtggaccccccccccacaatgtcttttttagggtaatccaactatttgccttttctcccgggaaaaacccctttgggtgcgccctctgattcacacgtggtatgttgtaacaaaacgccaacagctttccaccggctcttcg

SEQ ID NO: 117623 - DNA, 211 bp, Arabidopsis thaliana columbia
cacgcgtgcgtaagctaggatcctgtagagcctccgccgggggggaaaaacccctgatcgaactaagtaggcggataccagggggtgaagaaatcacacagtcgtctgggggctataaggtcgcgaaacgagcgcggcgtagcgtgttacgggctcggcgcgcggccgcacgtggaccgcgccgcgcgccgcgcgcggaccgggtcggggg

SEQ ID NO: 117624 - DNA, 450 bp, Arabidopsis thaliana columbia
ttggggacgaaaggggagtggggggtggtcctgccagctgcaattcgactgacctgaggagaagcacgtacgcctgcaggtaccgggccggcattcacggtccgacccacgcgtaaagcttatttaagttaccgtgagcggctactccggcgatgcttgtgtagttggcttggtatctatagcacacagacccctgaagtattggcaccacagaaacggacaaaccttgaaggcgtagaggatgcctcggatctcgatggggagatattttttttgatggagggggacggatgttaggacctgaaagtccggaaggaacgcacgtgaatcagtgtggagggaagtgaactacgggaggggcggggaaagtgcgggcgagagcggaagctgttgagcagtactaaacagaatagagagcagaacgggactgaggtacatatcaccgttgag

SEQ ID NO: 117625 - DNA, 499 bp, Arabidopsis thaliana columbia
  unsure (1)..(499): unsure at all n locations
ctatagnagagttatgacgtcgcctgcacgcgtacgtaagctaggatcctctagagcggccgccctttgtttttttttttttttttttttttttttttttttttttttttttttttttttttttttttattttttttttgggggaaaaattgtgatttttccaaagggtttaaaaaaaccgccaaattctaaacaagggggaaaaactggaaaaggcttttttaacaaaccccaagcccggaaaaaggggaaaaaaccaaaaaattttaaaaaaccctttttttttttttgggggaaggtattaaaaataaacaaggggccctcaccgggggttgggggttaccaaacccctttccaagggaaggccctttataaagggacaaattgggtttgttttttaaaaaaaaatatccccaaaaacacactgaaaaaaaaaaccttgactttggggacaaaacccaaaaaagggggggtgcccaagttcaaaggggagcccggg

SEQ ID NO: 117626 - DNA, 473 bp, Arabidopsis thaliana columbia
  unsure (1)..(473): unsure at all n locations
ctatagaagattatgaggnccactgccgcgtacgtaagcttggatcctctagagcgttacgcccttgaggttttatcctttttttttttttttttttttttttttttttttttttttttttaggattttttttttttttttttttaggggcggaaatagtttatcacaccaacaaagtgtctgaaaagccttggaaatttaagcaaaggaggttctttttttttggtggagggaaaacaagaagggacttaaatcaaaaattttgacaaattcccttttcaaaaaaaggacacaaaaaaattgaggtggaactcgggctggtgtccttaaggggggaaaaaccaaatttaccccctcttccgtcacgaataaaactcaattgtccggtttgtgtcgcaagaaatattttttatgtgttggtattcagtttccatggagaagaggcttttcgactccagcccgggatagtttca

SEQ ID NO: 117627 - DNA, 495 bp, Arabidopsis thaliana columbia
gcacgcgtacgtaagcttggatcctctagagcttccagccttggggaaacccttttttattttatagacagaagggtggtttggaaaaatattatgtggaaaaacgagagaaaaagatctaaaaaagagacataagcgtgggtgaccttcttcttagtggagtgggcgggggggtatggatatgctgccagggccgattctttttttggtgaggaggggaggggcgggaggaggagagggcggaggcgtgacgggggttagagagagatggcgggaagagaggaggggataatagatatacgatgggttgatgtgattacaagcacaaggttgatatgtaattaacggaagtagcgagaggatagatagcaattgaaagtaggtatagttgaagagtcgtgtggtgtgacgggatagagagaggagtgtgtgtgaagaattaaggagtatagatggatatgtaggaatataaagctcataatacactgaggagga

SEQ ID NO: 117628 - DNA, 487 bp, Arabidopsis thaliana columbia
gtacgcctgcaggtgccgggacggtatagcagtttcgacctacgggttagccctatgatttgattgaaagactagtaagttggagatatggatttatgtgaggagtggagaactggagaagataagaaagggcgtactttgggtggggaagaggagtataggggtagatgcttgtaggggaaagaggaaaaggtttttgttgtgggaggggcgagaaagggtgtggaagggttagtggatgtaaggagagctggaagagatagagatgggagggatggagaggtaggattggtggtaaaatgggtcgtaggggatggtgaaaggggtgatgggaagggggtagagaagatgttaggtggaggagagaggagagaaaggtgttttaggatagagaatgcattagggtatataagaaagatatggggggcgagtgagatttaagggtatgtagggtacgagatggtgagtgaagtgttaatgggagaag

SEQ ID NO: 117629 - DNA, 560 bp, Arabidopsis thaliana columbia
tagtgcactatagaaactatgacgtcgaacgcacgcgtacgtaagcttggatcctctagagcggtcgcccttaagttttttccttttttttttttttttttttttttttttggaaaacaaaattcctgcgaattaattaatcaaaaaaaaaaaaaaaaaaggggggggcgccctttttttgtttgttttttcttttttttttttttaaaaaaataaaaaaaattttttttttttgggggggttaaaccctttgcaggtgtgttatgaaaatggaaaaaaatcttcgttttggttaataacaagaaaacgatatgctaattcttcaggaggtgtgatcgttgtgaggggtcctttttttttaaacaccatttgtctgcgaaaatgtcgaaggtccctcttcatgttagaataggctcgggcttgaagaccaaaaccgatatacaggttgggatgtcgtttcttgttgaatcaagcttggagacaaacacccctctgtttagtttgctagcacccagatgttcggtccattcgtttgtttctaaattaaattttttttattg

SEQ ID NO: 117630 - DNA, 498 bp, Arabidopsis thaliana columbia
acgcctgcaggtgccggtccgcaatacaccgtttcgacccacgcggttcagcaccaggatctccttcaaacgctcggaagtttgcgctttggattcctgtcaccggcgatttcgtgggatgataacgacgccgagctatatttcgtgactgaagcaaagtgatgattcttcgattgaaagaccaaacgctcatctttttcaatggagcgtggttcgacttatcttccttagttttccgactagattctcactcgcaggctcggacaaaacccgatcacgaccgccggagaagaggatacgatagggttgtgagaattcgggacactaaggaacacgatggattgtttgtgtgcaagagcaagggcctacacctttttaccaacactagagtcctggtcttcattgtgttaagctgcaatgttatgccgaattatgccattcttgaaaatcgggacctgtaactgaaaatgggacgtatatacatgttggatcctgtct

SEQ ID NO: 117631 - DNA, 520 bp, Arabidopsis thaliana columbia
agaagactatgaggtcgaacgcacgcgtacgtaagcttggatcctctagagcgttcgcccttgggggtttttcctgatgaaaagatttgattgatacaaaaatcaaagacaaacaacaaagccgaatattaaaatagggaagaaataaatactccatatgacttaaacttaaaaatggtcaataagagagagatctgctcgtagctgggagagatatgatagaacatcaactaaaaaaattgaagaaatgtaaatcggtgatagacgacgggtgaaaatcagatgaaagagggccttgcaaaaacaagataacctttcttgtgcggggatactagaacgggagagcatacgcagcaagagaaccgatttttcttctaccttaacaagagaacgagcaagttagaaaggaagtatttaaaatagactttggagaattcgtgaatatgaaacaggattcttttttatgaacgtgtcactatattgatgggaactctgtttttttcgaacctttctaattttt

SEQ ID NO: 117632 - DNA, 516 bp, Arabidopsis thaliana columbia
ttctactcaccttatggagaagctaccacgcctgcaggtaccggtccggaattcccgggtctgacccacgcgtgcggacccttctaaagggtatttatgcttatggttctgagaagccttctgctattcagcatagaggaatcgtccccttctgtacgggtcttgatgtgattcaacaggctcagtctggtactgagaaaacagcaactttttgctctgttgtcttagagcagctggacttctcccttatccagtggtaggctttggttctagctccaactagagagcttgctcagcgaattgagaaggccatgaaggctcttggtgactaccttggtgtcaaggttcacgcctgcgttggtggaaccagcgtccgtgatgatcaccgaatcctacaagctggagtccattgaattggtggaccccagggcgtgacattcacctgtagaagacgcaacctcttcgtgctgacgacatcaaaaaggttagacccaatgaaggtaggcaaacgcctcc

SEQ ID NO: 117633 - DNA, 527 bp, Arabidopsis thaliana columbia
cagcgtcaatacgactcactttagggaaagctcgtacgcctgcaggtaccggtccggaattcccgggtcgacccacgcgtccgcccacgcgtccgcttctttatatgagcgaagaagatgcattctggttattagttgcattactcaaaggagctgtccactccccaatagaaggattgtatcaggcagggcttcctcttgtacagcaatatctgttacagtttgatcagttggtaagagagctaatgcccaaactaggagaacatttcactcaagaaatgatcaatccgagtatgtatgcaagtcaatggttcataaccgtcttttcgtattcacttcctttccattcagcgctacgaatttgggatgtgtttctagctgagggtgttaaaatcgtgttcaaagtcggtttagcattattgaagcattgccatgatgatttgttgaaattgccatttgaggaactcatgcatgctctgaggaatttccctgaagatgccatggatcctgatactttgcttacattg

SEQ ID NO: 117634 - DNA, 511 bp, Arabidopsis thaliana columbia
  unsure (1)..(511): unsure at all n locations
nnnnnnnnnnnnnnnnnnnnnnnnnnnnnnnnnnnnnnnnnnnnnnnnnnnnnnnnnnnnnnnnnnnnnnnnnnccacgcgtccgcccacgcgtccgcgggtgctgacttacaaaacctgatgaatgaagcggcgattcttgcggctaggcgtgagcttaaggaaataagcaaggatgaaatctctgatgctcttgagaggatcattgctggacctgagaagaagaatgcagttgtctctgaagagaagaagagacttgttgcataccatgaggctggtcatgctctagtgggtgctcttatgccagaatatgatccggttgcaaagatttctatcattcctcgtggccaagctggtgggctcactttttttgctccaagcgaagaaagacttgagtctggattgtacagtaggagctaccttgagaatcaaatggctgttgcacttggcggaagggttgcagaggaggtgatctttggggatgagaatgtgacgactggagcatcaaatg

SEQ ID NO: 117635 - DNA, 398 bp, Arabidopsis thaliana columbia
actatagaactcatgaggtcaactgcacgcgtacgtaagcttggatcctctagagctgccgcgctttgggtaaaccttttttaatcaaaagcattgaacatcttattttccaggccggaaatcaattagtaatgtagtagtggttaaatatgaagtccttgggatactagaggacgatgagagtgctgtcaccgaaatatcgaacacatcgctttttttttaaagaagggatctaatcatttgctgtacgaaatagggaatagacgcagaacattgctggataatggtgatgttgtcatgtgatgaggaacggcggtggagcagacgaatgtaataatgggcatgtcacagtattgtgttggggagagccaaggctagttgttgaagagagtgtggag

SEQ ID NO: 117636 - DNA, 327 bp, Arabidopsis thaliana columbia
ggtgtggatgggcgaaaggtgaaaaaatgaatagtactgccagctacattacgactcactagagggaaagcacgtacgcctgcaggtaccgggcacggaataccccgtgtcgacccacgggtacgccgacgcttgggcacaaaagctatcatacgagagttagagcaataggcaatctgaagaactagccatattctggccacgctattaacggagatcttcgtagcctgacgaggtcctccgttttgtacgcgatcttgcttttcagaatacggtgacgaaaacgacatttttttgtagatagagaaatcggagtctgcctattcg

SEQ ID NO: 117637 - DNA, 553 bp, Arabidopsis thaliana columbia
ccgcgtacgtaagcttggatcctgtagagccttcagaggggaggggatatccgattgaaaattaaatgatagatgtatggagatgtggagggaggagttgattgagaagttagaagggagaatagaggaggaatattgaagaaaagtgattgagatgagtaaatgagagtagtgaaggatgagatgagaatggtaggtaggagagagatggataattttttttttaaaagggagtgaagaaaaatatagttaaataagtataagggataggaagtatgtattgtaaggattagaataagttagagagatgtatgaaaaatgtataaatatgaggtggatgtgaataagaagaaatagatggagagaaattattggataaggtggaataataatagtagaagaggaatataatgatgtgagaaaagtagaatattagaggacagagagggaacagagggtaaggagagagtttagaacagatgaagtagagaagattaaatagatagtgcgacaagagtaataaaagaaaggtcaggataggttgaggattgat

SEQ ID NO: 117638 - DNA, 529 bp, Arabidopsis thaliana columbia
cagctactatacgactcaccttagggaaagctagcgtacgcctgcaggtaccggtccggaattcccgggtcgacccacgcgtccgctcggtttcaagaagaggatcttacaagcctcaggcataggcgacgagacatacgtcccaagatccatctcttcatcagaaaacataacatcgatgaaagaaggtcgtgaagaagcctctacagagatctttggagcactagacgaactcttcgagaagacacgtgtaaaacctaaagacgttggtgtccttgtggttaactgtagcattttcaacccgacaccgtcgttgtccgcaatggtgataaaccattacaagatgagagggaacatacttagttacaaccttggagggatgggatgttcggctggaatcatagctattgatcttgctcgtgacatgcttcagtctaaccctaatagttatgctgttgttgtgagtactgagatggttgggtataattggtacgtgggaagtgacatgtcaatggttatacctaattgt

SEQ ID NO: 117639 - DNA, 498 bp, Arabidopsis thaliana columbia
  unsure (1)..(498): unsure at all n locations
actatagaagcttatgacgtcgactgcacgcgtacgtaagcttggatcctctagagtggccagccttggttaatcccttttttttttttttttnttttnttttaagaaaagaagacataatttcttaaagtacaacaagagaactacttgtacaaagtgcaaatttacaaagataaaagaaccaaaaaaacaaaacataaaaacaactggcttcttatatgaagcgagcatgttatttatcttagttaaaataataatcataaaaaagtgggaaaacggtcaagggaattccgaaacaaatttgcaaaaccaaaattttttttttatttgaaagaaaaaaaagaaaaaccttcccgaaggggaaaactttcctgaagaaaaactggagcacttttgggggcggggggaacaagatatggttttgactttttctttctatttggaccaaaaagttttttttttttcttaaattttgggcttcgaaaaacaaaaaaaaaa

SEQ ID NO: 117640 - DNA, 530 bp, Arabidopsis thaliana columbia
cacgcgtagcgtaaggcttgggatcctctagaagcgtcgcgggcgttggggttaatccctttgttatgttttgtttttttgtttgttgagagaaagaaaaaggacggaatgtttttgaaggggtagagaaagagaaaaatagagtatgggacagagggggaaggctgagcgaaaggataggggggaagaaagggggagggagacgagtggaagagaggtggggtttttatttcttatgaaggaggggtgggacgggcaagaagaggaagggaaatgatacttagaaaaggtgagggaaagaggttcagaggtaagttctgaagacagagacttgggtggatcgagagaatgggggatggtaggggtggaagggaacggtggagtagtgtcgtgggtgtaggaaggggaaaaggggcgtgggagtgaatgagggggtaggggatggtgggggagggggaggtgcgaagggaacggaggtgggaggggtggtgagggtgatgtgatgggggggaggaggaatggtaggggtg

SEQ ID NO: 117641 - DNA, 528 bp, Arabidopsis thaliana columbia
cttcgactcacctgatggggagcacgcacgcctgcaggtaaccgggcacggaataccccgtccgacccacgcgtacggcccagactgagctttatattaggtgttgagaagaacaagcgcctcaatcttctcagtgcggtggcgagaaacgggcggtctgcagtatctagaagagactccgcaagttcagcaccgtttagccgccatctgactactcatagcactaaatgtttttttagattgcggagggagctagaggggagcagggatgacgttttcatagcttcgcttgtcccaaggcaagatgacagagggttctcacgtacatgtttgaggaggaattgagattctcggataaaagaaacaggaactatgcgtctgatcaatccctcactatcgaacgatcttacggggggtccgacgacgtataggttgtgacgaggcagactaccaatttgtgtgcgaggcgagcggctatttttcaaacacatgacgagtgacactcggtcctgatggagtggcctgcat

SEQ ID NO: 117642 - DNA, 518 bp, Arabidopsis thaliana columbia
ccagctccatacgactcacattagggaaagctcgtacgcctgcaggtaccggtccggaattcccgggtcgacccacgcgtccgcccacacgtacagatgacgctggtgtgttctacaccatataatctctctttctctctcgctgtactctatctcctgatcatatattatctcattcaagtgaaaaaagggccatggtgaagatatccacacactcgtctgagacaatgtaactggaatggagaaggctgactatcttgggaatgatgccgccagagcagacggcccaaatttaggaccatgtgctaggcacactgttggtacagggaaaccagatactatagatgatcacgttaaggatgaagctcaatctaagaaatgagtcctcactcagaaatatccaattcaccatgaaaacgttattcactgcgaagacaagcttaagatacggcattacaatgtctaaacgagctatgtgttgcccctgatgaacactctaatctactctcagaggcacc

SEQ ID NO: 117643 - DNA, 511 bp, Arabidopsis thaliana columbia
  unsure (1)..(511): unsure at all n locations
nnnnnnnnnnnnnnnnnnnnnnnnnnnnnnnnnnnnnnnnnnnnnnnnnnnnnnnnnnnnnnnnnnnnnnnnnnnctttttttttttttttttttttttttttttttttttttttttttttacagcaaaaagagagattaattaacacattgcaagattcatgatttacaattacaacatggtctttacttttacactagggtcatggctaattggttagccactgaggatttcaatggaggaaaaactggagaatccccaaagaacacatcaaacagagcagatgtaacattacctgactcgatcgttgcatccacattcgttggtaatcctcccgacgaaacaaaaacaagcatattagaagtgttgatccaagtcaagagtatgacacttcctttgttgaaaggtctgttttggaaaatcccacggaatgtaaagagagcagttgtttcctcaaaagatggagatttgattctcggggaaatggcttcatccaatgcatcccaaaagg

SEQ ID NO: 117644 - DNA, 491 bp, Arabidopsis thaliana columbia
tcccactcacttagggagagcacgcacgcctgcaggtaccgggccgcaatacccgggtcgacccacgcggccgccctaccaatgaagaactgggtagtgaggggtttcgtgagttcatatctcttgttgatcttaagaaaaatggtttccttatccggagattgttgcatgttaggtgtcaagttccatgggattctacctgctaaaccccgaacatttttttgttggaggttaatagagaagcctgtcaatcacagagacactttggatgatgaccatgttctcggccttcaaccctggaaacggtcatcactctaatgaatttgtccttggaacccggcaatggagaatctaaagttcatccaacagggtctatgggtgaaaaagacaacatcattttctgtggatctatcggccctcgggctcagcgcatcctgctccgaccactaaagctggacgcaggctcacactcgcgtggattggatcaagtt

SEQ ID NO: 117645 - DNA, 473 bp, Arabidopsis thaliana columbia
  unsure (1)..(473): unsure at all n locations
cagaaccgggaccgaagagaggttcaccgagggggacggccgaacgaaacaaaagnccaacacaaccccaacacaaaccaggagagcagaaacgcccagaaaagcgaagacgacagacaaccccagaaaaacaccacaccacagacaaatcggaaagaaagcccccaaaacgcgaagaattttttataaggggggaccacaagggggaacaagaaaaagagaagagaaagaaccgggggcaaaaaaacagagaaacaaaaggacaaaaaacaaagcaagggagaacgaagagagacacgacacagaaaagacgacgaagaccgaccagaacagacacaaaacaaagaaagagaagacagagaaacaaaaagcaaaaaaagaaaagaacagacagaaagaacacaagagggaaaaaaggaaggaggaagagcgtagacgaagcaaacaagaaagaaaacataccaagagaaaaa

SEQ ID NO: 117646 - DNA, 509 bp, Arabidopsis thaliana columbia
  unsure (1)..(509): unsure at all n locations
cgnnnnnnnnnnnnnnnnnnnnnnnnnnnnnnnnnnnnnnnnnnnnnnnnnnnnnnnnnnnnnnnnnnnnnnnnnnnnnnnnncttttgtttttttttttttttttttttggcaaaaacaacaactaacttggatggctcgtgaagccacgagggtgagaaagcaagaaagaaacctgtggcacccaatcagtgggtgatgatgactggagtttttcactttccattaaactttcaatgagcatgcagggcttattgaaaggttgaaagtataaatcgccggcactccaggaagtcaaacagtggcggacgtcaagtgtcacaccttgcaggacttcatgatgcaagcctcccaagaggaagctcgcgaaaaacgcaggttctggcagtgctggtggaagaggatagaggcaaatttggagtgcatggtcacatgaaggagggagtggtcttcatggtgacctgcttgacctcagtgtagttgtgcaaagcatattcacccagctcacg

SEQ ID NO: 117647 - DNA, 489 bp, Arabidopsis thaliana columbia
  unsure (1)..(489): unsure at all n locations
nnnnnnnnnnnnnnnnnnnnnnnnnnnnnnnnnnnnnnnnnnnnnnnnnnnnnnnnnnnnnnnnccacgggtccggccagttcttcaatcagggacaagtgtgctgtgctggttcaaggacgcttgtgcatgaggacatctacgagacattccttgagaagttggcagtggcggcaaaggacaggcaaaaagttggcaaccccctctgcccaggaacaactcaagggccccaagtggatgagcggcaattcaacattgtgatgaagtacatcgaggttgggaaggaggagggtgccaagtgcctctttggtggcaacagggaaggctccaaaggctatttcatccagccaactgcctttgtggacgtcgggcaagacatgcggatttggaaggaggagatcttcggccctgtgatggccatcacgaagttccgcaccgtcgatgaggccatcaagatggcgaacaacaccgtttacggcttggcggcgg

SEQ ID NO: 117648 - DNA, 390 bp, Arabidopsis thaliana columbia
  unsure (1)..(390): unsure at all n locations
agctnggatcctctagagcgttcgncgggtggtgtatactttttttttttttggcaaaaacaacaactagcgtggatgggctcgtgaagccacgaggggtgagaaagcaagaaagaaacctgggggccccaatccatgggtgatgatgactggagtttttaactttccattaaactttcaattggtcttccgggggttgtagaaagggttgaagttttttttttcgaactcccccaggacaatcagggggggcatcaagggttacacctgggggggattcttgtagaagccccccccaaaggaagcgtgggaaaaacgcgggtttttggcgagtgtttttgaaaaaagattaaaggcatttttggaggtcgggggccttgtggagagggg

SEQ ID NO: 117649 - DNA, 335 bp, Arabidopsis thaliana columbia
  unsure (1)..(335): unsure at all n locations
cgcgtacgtaagcttggatcctctagagcggtcgccgtggggtatattctttttttttttttttttttttttttttttgggtttggagagaaaaacgagttttttgattaatgaaaaaaatacaaaaggcttgcaaattttacatntaaacaagctctttttctccttttacactcacaaaagaaaagactttttttaaaacggggtaaaactgggttcattttccgggaaaaaattggggggcaaggcccttggcttggtgttaacggggtgggcaaaaggggcacaaagggttttttttggggcccttttacaagaaaaaggggttggacaaa

SEQ ID NO: 117650 - DNA, 354 bp, Arabidopsis thaliana columbia
accaaaccaggaaaagggcgagggccggaagaccgaagcgcttttctagaccccacgggcggcacacagtgaaagaggaagaggacgcaccaaaatactatttgggggggacgggacaccacccagcttttttaaaaaacccccccctttttggggggcccaacaccccggaaaaaaacggccgcccggggagagcggaaaagcaggccgaagcgggacgcgccagcgggcggagctgacacaacgcggagcggggggcgacggagcagaggcacacggggcagaggcagaagacggccaggggcaagacgccgggggcgcccggccgggaggaagggagaaaagagagaaaaa

SEQ ID NO: 117651 - DNA, 278 bp, Arabidopsis thaliana columbia
cttacaaaaaaaaacacccccacggggccggagagacgacagagggaaggcgacccgaccaaccgaaacgaaaaaagcttccaggggcacacgacgcgccaagacgcaagagagaacacacggccgcaacttcttctttcggggttaaaacaaacaaccccacaactttaagaagaagcccccaagggttaggggcagcggccccgccggcgaaacgagacccctcacgccagcgaccccgaaacgcaaagcagcctacccacccacctccgggtgcc

SEQ ID NO: 117652 - DNA, 368 bp, Arabidopsis thaliana columbia
aaaactcccccccaggcaagacgagacaaggagaggaaaccccaccaaagcccatacaccggagaacgccggcgcgagccccacaaagaacaaccaagaacggacacaccgagccgtttttttaaggggtaaacgacgccgaaggggaactttttgtagaaaacacccggggggggagcaccgagggcgcacaccggcggcagaccccgaccagcacaacgccccactacatacttcagtaaggcgactccccagaaaaaccaacccacagcgggcccgagacactgcacacaccaaggacaaaggagagagcagctgagggacgagataagagagagcccacaacggaggcaagaaaccaaaatata

SEQ ID NO: 117653 - DNA, 467 bp, Arabidopsis thaliana columbia
  unsure (1)..(467): unsure at all n locations
cgcgnacgnaagctgggatcctctagagcggtcgccctttggggtattcctttttttttttaaaagatcgaacgatcataaaccccttgatgattcgaacttacacaaacggaaatcaaaaagacattaaaattcaaattcaaagccgaataaaattccacacagacagaaaatgagagattaatgccgttttttggttgtgggggaggtgcaccggagtggcggtcgtaaagaaaactcccgccacgagtgccaggggattgcaccgtccacgggaggtgctgcccttggcgaccaaatggcgggaccatggccagatgaccatctatggtcgtgaggcgtcgatcggattggttgggtcccacataagatcgtgcttcaactaggaggtaagatccacacaagaaatatgacgattaggagacgttagggtaacaagcgcgaacggacagagagagagagacaga

SEQ ID NO: 117654 - DNA, 399 bp, Arabidopsis thaliana columbia
  unsure (1)..(399): unsure at all n locations
ttttttttttttatggnnaacccccnnctgggtggntggntcgtgangccccgagggtgagaaggcgggaaagaaacctgtggcttccaatcagtgggtgatgatgactggagtttttcactttccattaaacttncattgcgtcntcggggtgggtagaaaggncgaaaggataaattttaaaaactccccccagtcaagctgtggcgggcgacccgtgtaaaaaattgcaggacttgatgatggaagcctcccaaggggaaggtcagtgaaagacgaggttctggggaagctggagagagagaatggagagaatgtaggggagaatgggagcatggaaaaggaagggaggtgagtaaggaagagataaagggcagacggggagaaggaaaaaggaaa

SEQ ID NO: 117655 - DNA, 285 bp, Arabidopsis thaliana columbia
  unsure (1)..(285): unsure at all n locations
gaggcccgggtcgagcgaagggcgaagccttcaaacgaaaaaaaacgcccccaccggggcnaacagagagcagaaggaggcggaagcgcgcgccagaagggagaaccgcggcgagagaccggggcaggcagcaacgaggaagcgacaagaaaggagacgagagccgcaggggctcccctctccagagggggggcaaaacgacgcacgaacagacccccccacaaaggaaacaccccccggagagcaggnggcgggacgacgaccgacacgcagagtcaaggggac

SEQ ID NO: 117656 - DNA, 450 bp, Arabidopsis thaliana columbia
cgcgtacgtaagcttggatcctctagagcggtcgccctgttttttaattcttttgttttttttatatatacgcccgtttttggttgatctttttttccgacaatacgtcacctggcagagatatcgttgctggtttctatgggacagcaaccacggcgagcgtgtcaagaggagaaacagaccccatgggggccacatttggtgctttgcgggggtgccaccccacaagagccagcttccttttacaggagggggccccccaaaagagggggataaagcggaacaccgctctcgtacacagacaaaaaagagaacgcagataacaaattgagaagacagggcagagaatgacgagagacctcgtatcttgaggcggagacggaactacgaaaaaggaaagcaatactaatgaagacgaggggcatgctcaggtgacccgaagacgaagaa

SEQ ID NO: 117657 - DNA, 480 bp, Arabidopsis thaliana columbia
acgactcacgtgaggagaagcacgtacgcctgcaggtaccggtccggaattcccgggtcgacccacgcgtccgtctcattcttggaactggtaccgctcaatctattgttaagatttgggatgtaaaaagtcaggcaaatgtggcaaagtttggtggacacaatggagaaatcacctctatatcattctctgaaaacggttatttccttgcgactgtttttctggatggtgttaggttgtgggacttgcgcaagttaaagaccttccgaacctttgactttgcagatgcaaactcaggtggagtttgaccataccggatcttatcttgacattgctgcctcagatataagagtatcccaagcagctagtgtcaaagcagaatgggacccaatcaagactctggcccatcctgcgcggaccaggaaaggaccaagtgatactgtgcactccgcctccaatacatggcacgggagaaaaagt

SEQ ID NO: 117658 - DNA, 459 bp, Arabidopsis thaliana columbia
accctcaggcccggcccggatccccgttccacccgcggtaaaactttttttgaaatgaaactctccacagacgtgagacttattgatgcagaagagaaggcccaacttgactgtatggacgttttcgatggcgagcactgccgcacaatggagtgtgtgggatggagcttggtgtagcacttttttttttggggggtgaaagtggagcggggcgggagagttattaggaaagaaaccgcagcggggggggggaaggcaactgggtgagggaggaaagcctccccgcaagggggaggcggagggggaggacggcagggggggctggctgcggagatgaaagcgacagaagtggtaagtcgaggcccgcggatgtgcgggggcgacctgacgacaggggaccgggggaccggggtgggaagtgcggggcgcgctccggacagctagaaaggcaattaaaaa

SEQ ID NO: 117659 - DNA, 402 bp, Arabidopsis thaliana columbia
  unsure (1)..(402): unsure at all n locations
aaacctttaaanaacaaancccaaaccccaaggggagaacataacacacgagcaatgccccacatacccgcaaccagaaggagcggagtacatgccagccccagcacatatctcagcttccgaaactaaaacccgaagaactctcttcaaggtttaccacacacgcccgaacattttccgcaccccccccaaaagataacccgcgtcaccaaaccagaaaccatatccttgctataacatgaccccccaaagggccaccgcacagacatcggctgcactaaaccacatccctccaaggcgaaaacaggcaaccccgccgcaatacccacacaaagctcgccatggtaaccatccaaacgccccacacccctagctgacgacaccaaacccgcgaatccaccc

SEQ ID NO: 117660 - DNA, 458 bp, Arabidopsis thaliana columbia
  unsure (1)..(458): unsure at all n locations
ccggnccggaattcccggttcgacccacacgtgaaaactttttgtttatctaatacacaacccaaatcggcatactatctcgtgcgagacccatttcttaacactattttgtctgagtgcgctacttacagccgtgattctcacggaatgaactactcctgtcatcatcgcgccaaaatttttttttctgtgttttgatctcgcacacaatagtcattttgggacaggatcccccatttgttgtcgtcaggtacgtctcgagggacatttggatattagccataacaagctatgtgggcgcattccaacgggttttactttttgatcaccttgaagccacgtcgcttagtgacaaccaatgtatttgcggcggccctttgacgacgtaatgttaataacaaggatatgggtttctggtctactgaaccgggttattatttatgctgctgatcttgttt

SEQ ID NO: 117661 - DNA, 484 bp, Arabidopsis thaliana columbia
atgacgtcgcatgcacgccgtacgtagcttggatcctctagagcggccgcccttttggtttttttttttttttttttttttttttttttttttttttgtttttgtttttttttggtgaaaaaaaaaaaagattgtaagagtcggggcttggggatttagaataatttaggcttttgcgaaagaacgaaaaaggaaggacgccacccctttttggcacggggggaggaggaaggggggacgtaaaacaaacaacgaagccaaccccgagccccggggaaggaaaaaaaaggggggggggaaggggagaacagagacggggggaccataacagcataacccccaaggaaacccgaagacaggggggggggtaccgggcaccccgaacgcgggggaaaacaggcggacaggggaaatagggcgaggtggggcgccggactgtgcggggcaatacaaaagccctcccccagagagccagcacaaggac

SEQ ID NO: 117662 - DNA, 490 bp, Arabidopsis thaliana columbia
  unsure (1)..(490): unsure at all n locations
tgacgtcgcacgcacgcgtacgtaagcttggatcctctagagcggccgccctttttttttttttttttttttttttttttttttttttttttttacaaaggaataataaaaattttttgtttttaaactctaacaaacacacgacttccacagacttaacgtatataaacaacaacactcgagcgaatgcctcgtacaacaaaaaattttcttcaaaatacataccactcccacagcttattcacacacacccactttgttacaaaactaaatcgaacccgggatcatattcttatccctgttaaaacctaactagacctcatcatgtatgcatctcctttgtttttgcaatcattccttgaatcatcggnagaatgacagcaagagcctttctacatgcatacttgattttaatcccgacaactcgatagccctcccagttcctgcaacaacaaagattctcacccctgaacttatagatacaacctat

SEQ ID NO: 117663 - DNA, 515 bp, Arabidopsis thaliana columbia
  unsure (1)..(515): unsure at all n locations
aagctactnnnnnnnnnnnnnnnnnnnnnnnnnnnnnnnnnnnnnnnnnnnnnnnnnnnnnnnnnnnnnnnnccacgcgtccgcccaatctctctgctcctcagaattgagcagatatacgaaaaactgtgagacctacgtatcgttaacggtgagcgccagactataccgttaaatatgaacaaaggagcagtatcgaggcctctccagatgatacagacactgatgcgacatgaagagtatgataaagcgaacgagagcttgggttctgagaaaaaagagttcaacatagagaaactgcacctagttgaggagaagaatagtaagatgaggaaacattatcacaagaacgagaagcacgctgatatttggaagaagatcgataactactatgcagttatatgcatcagggatctaagatcgttaacagcaccaccaggttgacaaagccatgaacgatccagcatctaaggatctactgaacgtgagcatctgattagttgcctacatacaga

SEQ ID NO: 117664 - DNA, 499 bp, Arabidopsis thaliana columbia
  unsure (1)..(499): unsure at all n locations
aaaaaaagaccccccaacggggcaaaaaagaagaacaagaaaaacggagagcctgagcggaaaaaatcggaatacccatgtttagagaggagaatgttactggcacacagggcgaatttcttttgaggggagccccccccgatttcctaattttngggtgggggaaacagacacccgagagagtgttttttttaaaaaagagccccccccaggttcttttttgggaggaaggcaacccccgcggaccaaaaaaagacgcccccccaagaaggaggaaggaaacaacacgcacaggacgacacaacacaaacaccgcacaaacggcaaccgncgatttacccccccaacccaagagccggggaccagggaggaacccaaaggacaacaacggggataccaagggctaaggagacctgacaaacgggacgagatacaaaaaggatagaaggaacacaaacgagaagagaatacggggaaaggattggaagtaaaagatagt

SEQ ID NO: 117665 - DNA, 456 bp, Arabidopsis thaliana columbia
  unsure (1)..(456): unsure at all n locations
cgtaagnttggatcctttagagcgttcgccggtttttttattctttaggtaaacgaaagctgaagattctatggatgaatggagtatcattgataaaacaatcatatcattgatatgctcgaaaagaatagaggtaaaagaatgtttatatccacaaagcatatcatcttaactgnctaactatggtctttagggggtggaaccacgcatcgattggccctggaaaacacccccgcaccctatcattataaccttacatccatttattagcccagtgaccattgggatgcccataatgcctcatctgcataacccttgacacatccaataccgcgaacttgtttgctttgggtacgtaatatgatataccttcaagcttttcaatctgaaattgactgacgttcatcttattggtctaaaggccaattttgctttctccaaaaggactcgtcctgc

SEQ ID NO: 117666 - DNA, 463 bp, Arabidopsis thaliana columbia
cacgcctgcaggtaccggtccggattcccggttcgaccgacgcgtcaggcttaacagttactttgttgatcacaatactgggaaatccatcgctgatcaaaatgttctttctttccaacctcagatcgatcctgagtgtgatttgttcaagggacattgcgttccagacaaaataggatctttatacactttttctagctgtgctacgacccccgactcgaagaactgcctaaaacacggcacacccgacatagatttcttgccctggagatggaaacccgctggttgcgatcttccaacgtttaatccataggcgtttctcaatatggtccgaaggaagaagatgaattctataggagattctggggctaggaaccatatggaatctattatttacttgctgtcaatgcaagagactactaaggacatctacgaggatggagaagatagggaacggaatgag

SEQ ID NO: 117667 - DNA, 507 bp, Arabidopsis thaliana columbia
  unsure (1)..(507): unsure at all n locations
cgnnnnnnnnnnnnnnnnnnnnnnnnnnnnnnnnnnnnnnnnnnnnnnnnnnnnnnnnnnnnnnnnnnnnnnnnnnnnnnnnctttttttttttttttttaatcaaaatttattagttcaacattaagtaaactatataatttaggatacaattgtgagaattaattcaaaaaacaacaatcttctaacaataacttagcccctgattaaatcaggaaacattttagttttaattatccttaatctgctattaaccgatatactactaccatgtttctttcaccggaaaatatcagaaactcggaacaacaccgaatccgccataaactccgacgtctccaccatcattctctctcgaatctgttctcttagcaaaacgtcctttgattctcggcctcatctcagcgtaagctttacgcgacgcatacctaatcgtcttctcaaatttccgattcttcctcttctctctatacctcaaaacccttgcttccctctccgccggtgata

SEQ ID NO: 117668 - DNA, 499 bp, Arabidopsis thaliana columbia
  unsure (1)..(499): unsure at all n locations
nnnnnnnnnnnnnnnnnnnnnnnnnnnnnnnnnnnnnnnnnnnnnnnnnnnnnnnnnnnnnnnnnnnnnnnccacgcgtccgcggacgcgtgggaggtccagcaaaatccgcttcctcctccgtcaatttcgtagatgaagatggcggtgacgtcactgcttcgtggcttttagctaaagaaggaatcgaaatcactaatttgttctccgatcttgattatccgaagattgaggtaacgtcggaggagaatagctccggtaacgacggagttgttcctgtgcagaataagttgtttcttaacgaagattacttcaatttcgatctctctgcttccaaaatttctcaacaaggattcaatttcatcaaccaaactgtttcgacgagaacgatagatgtaccgttggtgcctgaaagtggaggagtgacggcggagatgacgaacacggagacgccagctgtgcagttatcaccggcggagagggaagcaagggttttgag

SEQ ID NO: 117669 - DNA, 503 bp, Arabidopsis thaliana columbia
  unsure (1)..(503): unsure at all n locations
cgnnnnnnnnnnnnnnnnnnnnnnnnnnnnnnnnnnnnnnnnnnnnnnnnnnnnnnnnnnnnnnnnnnnnnnnnnnnnnnnnctttggttttttttttttttttttttttttttttttttttttttttttttttttttttttttttttttttttaaaaaaaaattggggttcaaaccgggaatggtttattctcaaaattaaaaaagctttttattataccagggggatctaaatttttaagcaaaactcctaaaactttttttttggaaagccgaagttaaaaaaaaaaacctaagacggggatatttcccattattttttatttccccggtttccttgaacattttggaattgactcggagcttaactaagcttttttcccccaatccccaggggggagggtccaaacccaaggaaaaaagggggcttccccgaaagcgtttcataaacaattttttttaggagatggaaggggggggcaacactttgaatttgggctgcc

SEQ ID NO: 117670 - DNA, 510 bp, Arabidopsis thaliana columbia
  unsure (1)..(510): unsure at all n locations
cgaattgcnnnnnnnnnnnnnnnnnnnnnnnnnnnnnnnnnnnnnnnnnnnnnnnnnnnnnnnnnnnnnnnnnnnnnnnnnnntttttttttttttttgaggtaaacgaaagttttgtattctattgatgaattgtgtatcattgataaaagaatcatatcagtaatatgcttgaaaagaagaaaggtaaaagaatgtttatatccacaaatcatatcatcttaactgtctaattatcgccattaaaaagtcgttccacgcatcgattggcccgggcaaacaccaatgcacgcaatcattataacctttcatccatttatttccccagtaaccattgggatgcccatcaggtctcatctgcataacccttgtcacatccaataccgcaaacttctttgctttgttgcctcgttttgttataccttcaagctgttcaatctgagatttcctgatcttcatctcattgctctgcaggtcaattttgttttctccgaaaggactcgtcctgct

SEQ ID NO: 117671 - DNA, 504 bp, Arabidopsis thaliana columbia
  unsure (1)..(504): unsure at all n locations
cgnnnnnnnnnnnnnnnnnnnnnnnnnnnnnnnnnnnnnnnnnnnnnnnnnnnnnnnnnnnnnnnnnnnnnnnnnnnnnnnnctttttgttttttttttttttttttttttttttttttttttttttagggaaaacaaacccattatgatgaacaattaacaataatgtttactttaagattaataggtttggtaataacagtgttacatgtttgccacaaagctagatggatgggcaattgtggaagtctctaatcatttttttctgtgcgataagtcttggagatggaggtgattctctacagcttcaaagccaatttgctgaaggcagaattcactttttcctctgggattggtctgtagttctcatagaagtccagtatctccatggcaatattctttaccaagttcatgtcctcatgaagatcttcaaaccatgcagtgatatctttctctctgtggacacttgctatgtctatgcatgatagcgctatgcggtaggga

SEQ ID NO: 117672 - DNA, 504 bp, Arabidopsis thaliana columbia
  unsure (1)..(504): unsure at all n locations
cgaattcnnnnnnnnnnnnnnnnnnnnnnnnnnnnnnnnnnnnnnnnnnnnnnnnnnnnnnnnnnnnnnnnnnnnnnnnnnnnnctttttttttttttttgaacatttttgtttatgtatttcttcaactctaagcaaatcaatatatgtgtagagttgatagtgtaactttaatagtagtgtatactcttatgatttaagtctttttggacacaacacaagagcatacaacgttaggaatttataagaaagataacgatcattagatactctctatctgtgtcctgagtttagactctaccaacgggagatagcggcggagccataggagaagaagattttccggtggtctttgccttggaagcacatgttagtaccgtcacacacacaaaaaacgcttgtaacggtgaaacaaacgaaccaaactccaccctatagatccctgtcttcagctctgtcatcgccaaagctggactcgagtcttgttcactcacttcctgatcg

SEQ ID NO: 117673 - DNA, 510 bp, Arabidopsis thaliana columbia
  unsure (1)..(510): unsure at all n locations
cgattcnnnnnnnnnnnnnnnnnnnnnnnnnnnnnnnnnnnnnnnnnnnnnnnnnnnnnnnnnnnnnnnnnnnnnnnnnnnncttttttttttttttttttttcacacaaaaatcatcagcttttgatttatgtatttgggtaaaaacagttacaaatatgatgagattgttacacttgctactcctttaaagtattactgaggtacaagaacaagaccctctcaatcaatgtttatcaagaaacaagaaaccactcttttcaacaaatcagcacttataatatatgacatctcccattgatgctactttaaagctattctacacccaaaacgttgaaaccgctgtacttgtgtgttaaggaaacgctcagtcctcttcacggctgccactgctactccaaccactggacaaacacggtatattgcgaccagggaaaaaagtaatctccttgccacttgagaccaacaagaaaaacaaaaagagatacaaaatctacatttgaactcatc

SEQ ID NO: 117674 - DNA, 482 bp, Arabidopsis thaliana columbia
atagaagagttatgacgtcgcacgcacgcgtacgtaagcttggatcctctagagcggccgcccttttttttttttttttttttttttttttttttttttttttttttttttttttttttttttttttttttttaaagaagagattggtccctaattcacattttttaggcgaaattgcaagggccccttttgaaaccaacggacaagggttcatttaaaaaatcgaacgatcataaaccccttggtgattcgaaattccccaaacggaaattaaaaagaccttaaaattcaaattcaaaggcgaataaaattcccccagaaaaaaaaagagagatttattcaattgtctgggggtgggagctgctcggggggggggttgaaaaaaaaaacttcgtaaatgagtccagcgattccccccccgacaaaagggccggcccaaaaaacccagggggtgggccatgtccagctcaccaccggtgggc

SEQ ID NO: 117675 - DNA, 505 bp, Arabidopsis thaliana columbia
  unsure (1)..(505): unsure at all n locations
nnnnnnnnnnnnnnnnnnnnnnnnnnnnnnnnnnnnnnnnnnnnnnnnnnnnnnnnnnnnnnnnnnnnnnnnnctttgtgtttttttttttttttttttttttgtttttttttatttttttttttatgactatatacactatgagtttatgttgacaattaaacattagaagaagaagttgtctgtgaagaacccgaacaaacaaaacttgagctcataggtaagtgtcctaaggcaagacaggttgtggatggcaaggaaacatgttataggacatcatttgtgtaatgaactcaactatcaaattctcatctacatcgagatcgataggaactttgacaggagggttggaatgagagccatataaacgcgccatgtgtggatgctggtacgcttcaaagacactaatcctgtttggcggatgaaaagcaagcaataactgcataaggttgatggacaaaaaatgagcgcccgggtaaagactggagaaagacataccaggaga

SEQ ID NO: 117676 - DNA, 502 bp, Arabidopsis thaliana columbia
  unsure (1)..(502): unsure at all n locations
nnnnnnnnnnnnnnnnnnnnnnnnnnnnnnnnnnnnnnnnnnnnnnnnnnnnnnnnnnnnnnnnnnnnnnncttttggtttttttttttttttttttttttttttttttttttttttttttttttttttttttttttttaaaaaaagaaaaaaaacggcccccttaaaaaaaaccctaaggaaaagaatcccaacccccaaaattaaagggctaggttatttatcggatccccatttggaaaagggggcttaacattacgcaaacccccatgtttaccaacgcctagccgacgaggggttggtttttacacttgggggacttttttcccctttggggagccaaaaaacgctttttgatatattgccccccacaaaggttccccttgggaggaaaggctcctttaggggccatgacttttttaactatagggggggggtaaaaagggcccccaatttaaaaaacccggtaaggggctcgggggtttgccaagcccttaaacgg

SEQ ID NO: 117677 - DNA, 514 bp, Arabidopsis thaliana columbia
  unsure (1)..(514): unsure at all n locations
cgnnnnnnnnnnnnnnnnnnnnnnnnnnnnnnnnnnnnnnnnnnnnnnnnnnnnnnnnnnnnnnnnnnnnnnnnnnnnnnnnctttttttttttttttttttttttttaagagagagactcattcaatatatatgagagcaaacagtttctacaacactttgaaaccaaaaacaaagaaatggaaagctagcaaaattatgcaaatgattacagaactgttttattacttcttagcaggtttccagcaagaaacagcataaaggactcttcctttccagccctgaaacatccagtggttatcattgtcgatcacaaaatctttgtggtaacgttctttcactatctctttcccgtcctttactatctgtttgcttagtttcgctggtctaaatcctgctcttagaatcctaacctgccattgcttgtaggtctctggccttgcaaaccgctcagacccttcacaggctatcacactcattgcatctcttatgattagttccctctccaccagtg

SEQ ID NO: 117678 - DNA, 399 bp, Arabidopsis thaliana columbia
  unsure (1)..(399): unsure at all n locations
cagctannnnnnnnnnnnnnnnnnnnnnnnnnnnnnnnnnnnnnnnnnnnnnnnnnnnnnnnnnnnnnnnnnnccacgcgtccgctctcacgatcaaaagagatgtcatcaatagcttctggcacagtttcaacaaccaggatcgacacttttgtttcaggaaaaatccgcaaagtctagcaacgtgttttgatctatgcgtccatgcgatcattccttgcttcttactccagcgaatagttacttattgtatgtcgttctgtcatcgacctacactgctgtcaaaacatactagacactactacacacatnggctctgcttgagatttcactctgtctgcctcaaacacttagcagaccccgtctatggcaataggcaacgagcgtcacgcgtagaag

SEQ ID NO: 117679 - DNA, 374 bp, Arabidopsis thaliana columbia
  unsure (1)..(374): unsure at all n locations
cggattcgnnnnnnnnnnnnnnnnnnnnnnnnnnnnnnnnnnnnnnnnnnnnnnnnnnnnnnnnnnnnnnnnnnnnnnnnnnnnctttttttttttttttttttttttttttttttttttttttttttttttttttttttttttttttttttaaaaggaaaatgacttcaacccacaaggggaacaaacccctgataatcccaaccaaaagggggttgatgtttctttttaaattatgaaaaaaaactttttgaaaattgaaatagtcgtaagtcaaaaccaaactgaccggtttttaacagggattccactgccttccttttttttacctttggttggtggataaaccactggccattttttgaacgtccaat

SEQ ID NO: 117680 - DNA, 513 bp, Arabidopsis thaliana columbia
  unsure (1)..(513): unsure at all n locations
atgatactgccnnnnnnnnnnnnnnnnnnnnnnnnnnnnnnnnnnnnnnnnnnnnnnnnnnnnnnnnnnnnnnnnnnnnnnnccacgcgtccgcttcttgttttttcagatgaacactcttcagatgccttgtgccttattgatccagattcgaagtacccaactttactctctagacctttttcatggcagccactcccacacacttctctgtctcccatgatcctttttcttccacgtctctccttaatctccaaactcaagcgatctttggtcccaatcacagtttaaagacaacccagttgagaattccagcttctttcagaagaaaagctacaaacttgcaagtgatggcttcaggaaagacacctggactgactcaggaagctaatggggttgcaattgatagacaaaacaacactgatgtatttgacgacatgaaacagcggttcctggccttcaagaagcttaagtacatggatgactttgaacactacaaaaatctggcagatg

SEQ ID NO: 117681 - DNA, 509 bp, Arabidopsis thaliana columbia
  unsure (1)..(509): unsure at all n locations
cgattcaannnnnnnnnnnnnnnnnnnnnnnnnnnnnnnnnnnnnnnnnnnnnnnnnnnnnnnnnnnnnnnnnnnnnnnnnncttttggtttttttttttgattgcagaaaatgattcatattagctctgactgtatgaaacacaaacctcgtgatacaagactgattaagagaatcagcaacgcagaaatacttgataaatcccacaaaacacaaatggtgaacacacacgaagtaaatacgaaacccgaggaactatatcgacacacacaaagagaaacggttgttaatagagaagaagagttaccattttctttacaaattgtacgtcgaactttccctttttgccaacattgttgttgaatatcagcttcaccagtgtgtataatgagaatcaagagcggcatgatgggtttttacgttcgcaatgattctttatcatagaaggcaagaagctgtttgacatggttttgccaagctgcaacactttgaccatctacagtgaccca

SEQ ID NO: 117682 - DNA, 439 bp, Arabidopsis thaliana columbia
cgcgtacgtaagcttggatcctctagagcggtcgccctttttttttttctttttttttttttttttttttttttttaagagaacaaagagaaaatttcttttagtaaaacccagagaccttccttttcttagcacgattttacagaattcaaagatcctttgaagcagactttattactgctggttttttttttttagcgcagggttttaacacaaaaaatagacttatcattaaaggtttgaagcataccaggtttttcggtacaaactactttaaccggaatatttatatatttggaggaaataaataaaaaactttcggactgccatatttcctcaaggaacccttaaagaaatctttgtgagatgtaaatttacaggggctaatgttaccactatttttgccctaaaggagaacgtgttttccccttttcctcgt

SEQ ID NO: 117683 - DNA, 483 bp, Arabidopsis thaliana columbia
cgactcacagttagggaatagctcgcacgcctgcaggtaccggtccggaattcccgggtcgacccacgcgtccgcccagatttgagtaagctgttcagtttacagatggccaataccctattatcttgcgtgtaatcaggaacatggggtttgaacatttttacaccagcgcaggtaaacagcttacagagaaaactggtattgttcattaaatcatttttgttgcaaaggaattacggtttgaataggtttcttaccttgttgttccaatcataagagaagggtccaacttcaaatgtgaaggagggaaagatggttctatgtactgaaccatagttgatgaatttgtcagagttgactctgtagagatcactcctacaataggcttttattaggggagcgataacgtatgacggtagactaaaaagttgacagaaatgactgctacccatctaccataagggtttacagttgtacacacgg

SEQ ID NO: 117684 - DNA, 505 bp, Arabidopsis thaliana columbia
  unsure (1)..(505): unsure at all n locations
ccagctctatacgactcactataggagaagctggtacgcctgcaggtaccggtccggtatcccgggtcgacccacgcgtccgcggacgcgtgggcgacccactcnatcagccacgcaattcgtctatgaagactgcgccttttacctaagcagaaacaggtgtgtgcttaaagcttctatggctgcatttcctaaactaaaatctgccgctcgcattgaacaaagacgtctagtttatgctgactccatactacattactggataccgcgccactgaggatgatatgaccatatttgtagatctggtaaacaccgcaactttacagtatgataacgctactagatactacagtcacatcgatggcgtatagaggatgtatgttgtttatactataacgaactgggacatggtttgatggatcaccataataaacctgacgtggctgtggatcctacagctgcctcagacttattgatgctgcgtcataataccacgatgatgatt

SEQ ID NO: 117685 - DNA, 525 bp, Arabidopsis thaliana columbia
  unsure (1)..(525): unsure at all n locations
cgnnnnnnnnnnnnnnnnnnnnnnnnnnnnnnnnnnnnnnnnnnnnnnnnnnnnnnnnnnnnnnnnnnnnnnnnnnnnnnnnctttttttttttttttttacatgaaccatgttaagctaaaggcctaactagagcagctttatctcctgcttacctaaggaacattgtagagagataatcagagatgtatagaaacattacgcactactatgtgacacaaccatatggttctaaaggggatcaggaagatgaaatccacgtagcatcggagtggacagtttactcttgatctatgataaatcaaatgcttgctacagactcgccagctcgactccaattagacctgaggcaattttgggcattatgtgcgctcagtcctaggtcctgactcatggaactcactcttatgagaccacatctgttggaatgtgctgaggctatgcattgatagatcctccgatccagacactgaagagcatctttggcggggcaaccaccttgatctcatgctgctaggagcagga

SEQ ID NO: 117686 - DNA, 527 bp, Arabidopsis thaliana columbia
  unsure (1)..(527): unsure at all n locations
atgatactgccagctcnnnnnnnnnnnnnnnnnnnnnnnnnnnnnnnnnnnnnnnnnnnnnnnnnnnnnnnnnnnnnnnnnnnccacgcgtccgaccacacagacaggatgacgatgtagcgtctccaaagagggtgatgtcttacgtatataatgactgcatgattttccgtagactgtgcttgtgcttctgacgctactcggtggatggagatgatatccagctcttcgtgatggcacactggacctgtcatgaagaatgctgcgattgatggtgataagacccaatacgcaaagggcacaatggatgcaagccaagctaaggacactgcatctaggggctgtatatagaaccaagatgattacgatggtgataaaactcaatacaagatagggatccacactctgaaatatacaaataagcatgccatagagagttactgtgaagagatggactacaatcataatcatactctgtacacccagattgatgtcggatatgaccagcactattgatactcacagag

SEQ ID NO: 117687 - DNA, 431 bp, Arabidopsis thaliana columbia
  unsure (1)..(431): unsure at all n locations
aagnttggacctntagagcggtcgnccgtttttttattcttgaattatnnaaaaatttttttaagatggggttttatttttacagccagagatgaagattaccaacctaattacatatattgcccggggcggttaatgtagtgacccaatcgaaaaatgcagagccctttttgatctttaagtcggggggggggggaaaacgccggcagctttattttcaaagactcgccgtggttttcttgtgctggccaggcatcaagagattgtgacctttggtgaactggacggtggttcaagtgttttaaaagaagaggggggttgttggtttatactgatggatgggggaggtgggggcaagtgtgggggacaccggggaggcagcgggggctacccgcttggggatggagggggggaggccatggggacgggat

SEQ ID NO: 117688 - DNA, 398 bp, Arabidopsis thaliana columbia
ccggggggaccggccggatatttggggacgcaaaccttgttgggttttagaaaacagatggggactgtttttgttaagagagaaatggggcttgacaggaaagaggaggttttctagtgcaagggaggattgaagaggtagagccgcggcgggggttttttgggggggagcgccggcgggggggatgttaggggaaaaacagggggggggggggtgggagggggaaagagaagggagggagagggatgagtgagggaggcggagggacgggggcgcggttgggttgggggcaggggaggagggggggggagggagagaagaggggggtgggggagagggggggggggggagggggacggggggggggggggcgaggcaggggggggggggaggggggg

SEQ ID NO: 117689 - DNA, 488 bp, Arabidopsis thaliana columbia
agcttggatcctctagagcgtttcgcctgtagttgaaacccttttaatttaaatataaacccacattaggggagcggcgagggggcccccgcgccaaaaacccacattgggaaaagggtcgcgggcggacaaccaaaagtgaactcgctctgtcccaaaaccaagcccccttcccccccaaaaatttttattttcgggggtgcgaaaaaacaacaaccccccccccaaagaccaaaccacaccccagcggtagaggagttttagggcagcccttaacaacaagacccccgcgacgaaaaaaaaacggccgaatgacgggggggcaagataccatggcccacgtggggacctgttttcccgcgaggggagggaggtctccccgaggcccccgcgaccggaagccgctcggcaattggcgagaatgagtgacggacaatgtgggcggtgtggcatgagactcccacccccggaggccgccagaagcgtgc

SEQ ID NO: 117690 - DNA, 197 bp, Arabidopsis thaliana columbia
  unsure (1)..(197): unsure at all n locations
caggaaccgggccggaatncccgggtcgacccacgcgtacaacctcagcaactggaatgatnacaataacctgggtctgcacaaaatcttcaacaagatgcggaaaccacccttcgcggtgcgatggctttatacattatgcgatctccgccgaagcatcgagcgagacgagatgtacatttgagggactcacattt

SEQ ID NO: 117691 - DNA, 493 bp, Arabidopsis thaliana columbia
gactcacgttagggaagcacgtacgcctgcaggtaccggtccggaattcccgggtcgacccacgcgtccggccccggcgcctctcccgggcgctgaaggagttccgggtgcgcggcgtgacgaccaacatccccttcatcctcaacgtcctcaacgactaggcgttccgcaacggcgtcgtcggcaccgcgttcatcgacaggaaccccgccctcttcttccttgaccgcagcgccaacaacgcaggcgagttgctctcgtaccttgggacagtggccgtgaacgggcgcgagaccccggtgcccaccgacctgcagtgctgccacggggagcccgcgagagcgggggccggcccccgcgccgggggggggatgggagtggctggccggggaggtggcgaggcgctgaggaagggcgtgctgaggcacgagggggtggctggtggttgaacaccgcgctggggggggggtcaccgggggggtgctgacccccc

SEQ ID NO: 117692 - DNA, 496 bp, Arabidopsis thaliana columbia
  unsure (1)..(496): unsure at all n locations
nnnnnnnnnnnnnnnnnnnnnnnnnnnnnnnnnnnnnnnnnnnnnnnnnnnnnnnnnnnnnnnnnnnnnnnnctttttttttttttttttttttttttttttttttgcaaagctcacaacaattcaagaattcaacgcaaaagatgataacttcgacagcgaaccccagctggggtgtgaagaatgccgttgggcacaatgtcacataagcagagaaagcacaccacacccactaggtacatgtgctggcaacactcagcacacacacttttgcaagtgacgagtgtgaaacctcacactaacatggtcgctgggaggggaaatggtggaaagaaagtggaccagccacctccgttgcaccagggcacactgtctgtgtcatgccagtggttgacacagcgacggcgactgggccgcaagccttacggacggccacggacgcgaggtggtccttgttgtggggcaggaccatcagccggacgggggatgtcgtcgt

SEQ ID NO: 117693 - DNA, 492 bp, Arabidopsis thaliana columbia
aatacgactcacgttagggaaagctcgtacgcctgcaggtaccggtccggaattcccgggtcgacccacgcgtccgcccacgcgtccgtttttttcggagcaaaatgattcgtgctgctgctctggtggtcttggtaggtctccactccacagctgaagcaagaggtcctgaaactcgaccatccccagaaactcgaccgaacccgaaggtttcggatattccaccacgtggagaagtatccgtggagccccgaccatttccacatcgagaagtatccgtggagccccgaccattgcctccacgcttttccaaggtgcccgactttgggcggagtcgtggtctgcacgatggtcaccggccgacagacttccctaggaaggatggccccggtgcaccaccctcagacctggttcattctgacaaacctccactgcccccgtctgggttcccccaaggacctgcaggcgaactgctcccactgccctcagacc

SEQ ID NO: 117694 - DNA, 453 bp, Arabidopsis thaliana columbia
cacgcgtacgtaagcttggatcctctagagcggtcgccctttttttttatcctttttttttgagccaaaaatggacacactgtggggcagggtgcttgcttgcttgcgcgatgcatatggtttgggccgggggtggccagagggggacgctgcgttgccgccacacaaggtgtgtgcgtacagcgacccgttttttttgtcgtgagtgagagcgaagcgatgcgcacgcccacgaccggtattgcgacgggtcaacccacacaccctcccaacggccgggggcggagggctgcatggatgggacggaggcggcgggctggggggccggctagggcggcggtcaggcgcaactgctcgtgcatgcgccaccgtggcgctgagcttcatgggcttgacggggagacggactgctgtgacaactggtactccgagaacaggtcccgctgcttgtag

SEQ ID NO: 117695 - DNA, 490 bp, Arabidopsis thaliana columbia
  unsure (1)..(490): unsure at all n locations
acgacgcacttaggggaagcacgacgcctgcaggtaccggtccggaattcccgggtcgacccacgcgtccagaacaaggaggaccaccacttggccgggggcgaggccgcggcccccccgcccgccagcccgactgcctacccggccaaagccaaagccgacgcccgcgaatccccggtcaaagccaaagctgatgcccccgtgtacccacccaattttttttgcggtggggacgcncggaggaggtgacggccgcacagctggaggtacgagggggaggggcgagacggcaggacaggggatggcggggcgcagtgaggagtgacgtggcaagagcgaagaacggagggaggcggatgggagagcgcgcggtcggagggaaggcggacggaggagggcgcgggggggggaaaggggaggggtaagaggagagggagggaagagtatgagagaggaagcgaaagaggaggcgcacccgaagcggagcgcc

SEQ ID NO: 117696 - DNA, 478 bp, Arabidopsis thaliana columbia
acgtcgaaccaacgcgtacgtaagcttggatcctctagagcggtcgccctttggtttttttcttttttttttttttttttgaacttttgtttggagcggcacatatgtgaccccgtccacagtcgtccagagacaaaaaaagagtgcggagccactctttggggacaccactcatagggacctttagttgctgaactcacagtttttacagtggggcgcgcaagacggtccttaacacattttttgagaacacgtgctaagtggaccatacctgcccaacccttggctgtgaaccaatggactgcttgggttgcgggagcataacccttcccgggggaagacagcactggtggtgataattgcactgcctgtgtgcaccagggggattggataaaaaggtcaaatggtgccctagggctagaggccctaaaagatattcggatgaaaacagaaccgcctgggcaaccccaatcggtga

SEQ ID NO: 117697 - DNA, 493 bp, Arabidopsis thaliana columbia
accactcaactagggagagctaccacgcctgcaggtaccggtccggaattcccgggttcgacccacgcgtgtcgctctcgcgtccgtccacgcgtacgattttttttagcgaaggcacatcatgcaacgaagtggatagcggatggcgagcagactaagcgctcccatatggaaagttggcgatgttgttctgcaccgtgcagcggcagacgacaatgttttatctcgggttgtgggctccaaggataccaatgacttctttgttagactgaaccggcaatttgcataccaagtctttgagctggcaaagcaccgaaagggccttcacgaaaacattcgtcggactttgcccttaggacaggaggaacttcctaccctggctggtgcaatcgataccaactggaaagtcgccccatccgtgatgtgttgataaatagaccggtggaaataactgggtccgggaacgatgccaaaatgccatcaacatgttgac

SEQ ID NO: 117698 - DNA, 480 bp, Arabidopsis thaliana columbia
gggaagcacccacgcctgcaggtaccggtccggaattcccgggtcgacccacgcgtgcgatccgatgtgacctttgacattgatgccaacggactgctgaatgtcagcgctgaggacaagaccactggaaagaagaaccagattaccatcaccaatgacaagagtcgtttgaccaaggaggaaattgatcggatggtgaactatgtctataaatatgaggaggacgataagaagcagcgtgaccgcatcgacgccaagaatggcttggagaactatgcatattccatcaagaatgccttgagcgacgagaaggtggcgggtaagatcgacggtggtgacaagcaaaaagccctcgacgctgtgaactaagctgtgcaggggtgggagcacatccatggaggcaccaaggactattacgagagccgccagaaggacttgggagggttgtgaatgcccatgatggccaagctgggccatggc

SEQ ID NO: 117699 - DNA, 462 bp, Arabidopsis thaliana columbia
cacgcgtacgtaagcttggatcctctagagcgttcgcccttttgtgttttctttttttttttttttttttttttttttttttttttttttttttttgcccagcaattgtcactggcaacaaaatgtcagtcagggattcattttgatgacaatgttgagtaatattgaaaaataggtctgcaagctcggggttatgtaccgggggggggcccctgagctgcaacaagaaactggggccatgctctttaagaggagcaccctccccattgtttttggggtgggggaaaacgttggggctaaccttgaactaatggggcgtgagggaccaaggcccaaggatgtgaggcccccggcctggccccaatttagactgggcgcggagtcatgcgctgcagcttgatttagcggggaaatacctatcaggggtcaagggggaggataccgggcaactgggatcccttc

SEQ ID NO: 117700 - DNA, 488 bp, Arabidopsis thaliana columbia
ttacgactcacttagggagaagcacgcacgcctgcaggtaccggtccggaattcccggttcgacccacgcgtccgatctttttttcggtggaagaacaaaatggacgttctccaaggtgttcgcgccgaatttaatggacgttgcagtggtgttgaaccattgaagctggttgcgggttccgttgtcactgcgttcttgttgcatcgcttcttgaagtttttcttcagtgggacggctcttgaggactccagggcgacattcttccgattggtcaccaagctcccgatggtgcataaaaagctccgggaggagcaacaagccttcagtgagcaaaccctggcaatgtttgccccagcgagcaaggttggcaacacatacgctgccctgcctcccacatctgtgtctgttgaggatatctgcaacgaggtcgatgcacttgtcgcactgaaccagccctacgaccaagggcaacagtcaggcgcagtgt

SEQ ID NO: 117701 - DNA, 503 bp, Arabidopsis thaliana columbia
  unsure (1)..(503): unsure at all n locations
nnnnnnnnnnnnnnnnnnnnnnnnnnnnnnnnnnnnnnnnnnnnnnnnnnnnnnnnnnnnnnnnnnnnnnnnnnctttttttttttttttggctgcaatcagtcagaagactcgagaacgggacacaattgaccccaagttctggatgcggcttcttttcttactgaatccccgcttctacttcgccaagacggccacctccttggccagggcgaggtgggagttcgggtacaaggcaggatgcaccctggggaggggcttctcggggtggtccggggcgagctcgttgtgcacgtccacgtccaggacggtgcggttcagcttgggcaggatggaggcctcgggaaggtcgtcttcgggagaataagtgctgcggtaataccctgtttgccaagccaacacgatgaatgggttccgcaacgacatcaaccaagagatctccttgtaccgggcctccatatcacctcgagtcaactcttcatcacaacgaatcaccgctcgat

SEQ ID NO: 117702 - DNA, 503 bp, Arabidopsis thaliana columbia
  unsure (1)..(503): unsure at all n locations
cagctannnnnnnnnnnnnnnnnnnnnnnnnnnnnnnnnnnnnnnnnnnnnnnnnnnnnnnnnnnnnnnnnnnccacgcgtccggtttccaaaaagctggagtggtattcttcttatggtgatgacttgcggcagcaagtgggacccatgttacaacaccgattgaaaaggcatttgaggggcactctgaacaatgaacacaggctcatgcttgacgaagtcactgaatcgtacaaggagatcttttacagccattacactggccaacttcgggacgttcggaagtgtgcacacctgaggctgtacgatgggacaagcactgtgcttcttcttacaaacaaagagccagtggaattgacttctgagctgctgcagaagtggaatgcaatcaaggccgcaaagctttctccggaagaagagaagaaggctcgcaatgaagctctcattgaagcatacaaagagcaagagttgcatggcggaccgcacgtcaagcacatgcaggg

SEQ ID NO: 117703 - DNA, 505 bp, Arabidopsis thaliana columbia
  unsure (1)..(505): unsure at all n locations
nnnnnnnnnnnnnnnnnnnnnnnnnnnnnnnnnnnnnnnnnnnnnnnnnnnnnnnnnnnnnnnnnnnnnnnnnngtgcggaagtgccgcttggacttgtcgtaggcgctgcgcaggaagcgctccacgccctcgatcaggtcgtcgatctgggtgatctgggcagtgaacagcttggaccgcatggacttcagcaggaaccgcagggcgcgcagcccggccaacagggaggcgttgttctccgtggacaccagagagccgatgtcgacgtgggtggagccgtagtacgtgttgcgggggcagaaatagaccccgccggaggttcctgccaccatcgccgggagcgaccccacgaagtccagcgccagcagcagctcgggggcgtccggctcaatgtccggcgcacggcccttcacgtcctgccacagcacgtgggccgcccccgtcagcagcgcccacgcgttgtcccccagcacaggcttccagtcgatccatgtccagtaccg

SEQ ID NO: 117704 - DNA, 504 bp, Arabidopsis thaliana columbia
  unsure (1)..(504): unsure at all n locations
cagctacnnnnnnnnnnnnnnnnnnnnnnnnnnnnnnnnnnnnnnnnnnnnnnnnnnnnnnnnnnnnnnnnccacgcgtccgctagttctagatcgcgagcggccgctcgcgatctagaactagcccacgcgtccgcccgtgcactcaaacaatggatctggaggaaaaccgggcgctgcttcgccccgatgagatagtggaggcggcgcactccttctaccagcggcaccgccagcaggtcatcttcgcggtgtcctccctgctgggcctcctggccctcggctgggtgttctcccatcaccgggtggctcagactggcagcggcgtcctcgacggctccttgaagaacgacccacggcttgcttttctgcggctgaacgtttcccccaattacctgccgctgtcctacatgctggagcccctggactacttcgagaaggtgcccagtgaccagaagccagtcaaccacttcacccccagctttggccccccggagtgtcctg

SEQ ID NO: 117705 - DNA, 464 bp, Arabidopsis thaliana columbia
cacgcgtacgtaagcttggatcctctagagcgttcgcccgtttgtttattctttttttttttttttccataagatatgtatagtttcatatacgaagccgaactttagttacacatacacacactggagtgactgagacatatatcaatcacttccaccaaaaattgttccctttacgaccaaaaggatctattcttattctgtgtgagctgaaactattatgaattggagagtttgtagggaaattcgaagcgactctaatctaaaacaacagaggaaaacaaaaaaaaacgtaagatttggggaagagaagaacatatgcgcacaaaaggaaagctagggatcttgaattgcatgatcgggcagggaaaggaccaatgtgtgcggtggtgacagacgcaacggggcggtggagagaatcgccgggggggagaagaccggcccggtcgggggaggcgggtcgg

SEQ ID NO: 117706 - DNA, 499 bp, Arabidopsis thaliana columbia
cttctccctacgactcactatagggaaagctgcgtacgcctgcaggtaccggtccggaattcccgggtcgacccacgcgtccgctctgcctcctttcggattcaaatctcagatctagctcaaccatggcgttgctcgtcgagaagacctcaagtggccgtgaatacaaggtcaaagacatgtctcaagccgatttcggtcgtctcgaactcgagctcgccgaagttgagatgcctggactcatggcttgtcgtaccgaattcggaccttctcagccattcaaaggcgctagaatcaccggatctcttcacatgaccatccaaaccgccgtactcatcgaaaccctaactgctctcggtgctgaagtcagatggtgttcctgcaacatcttttccactcaagaccacgccgccgcagccatcgctcgtgactccgccgctgttttcgcctggaaaggtgagactcttcaggagtactggtggtgtaccgagcgtgctct

SEQ ID NO: 117707 - DNA, 504 bp, Arabidopsis thaliana columbia
  unsure (1)..(504): unsure at all n locations
nnnnnnnnnnnnnnnnnnnnnnnnnnnnnnnnnnnnnnnnnnnnnnnnnnnnnnnnnnnnnnnnnnnnnnnnnctttgggttttttttttttttttagaactacaatctaaagctttattatacacagtttgtgtcttcactctaacttttcatcatcataaaacggaaaagaagctaaagaagaaaatgatatgaaaaaaaagaagaagtaaatgttctctgtgaacacacagattctgcagaaataaagaaaaatctaagagaatgttcagaaacaaaatattgaagtagaaaatagtagctgtgatttaagggagattcaaagaggaaagactctgatcatcaaaagcttactgagtttttttcatcaatcactggctttcaggatcgctgagatgtttcttgcaccaagaacttgccttacgttctccacctcttgtccttttgttcctaggaacaagcatttcagaggctaagcatgatctaagaaccgaatcttcacg

SEQ ID NO: 117708 - DNA, 495 bp, Arabidopsis thaliana columbia
atacgactcactttagggaaagctgctacgcctgcaggtaccggtccggaattcccgggtcgacccacgcgtgcgttgacatagtcgggaggagaaaaccatgggtatctagtgtttccaagactgataagttacctcctcttggagaggcaagggagatactgacgtttgccaaggcacagacactcaagcgtgcccccaatatgaaacaccctttaatgtgccttgacgctattgaagtaggtattgtttctggtccaagggctggtttagaaaaggaagctgaagtcgcctcacaagtggtaaaactggataccaccaaaggcttgatccacgtcttcttttctcagcgaggaactgctaaggttcctggagttactgatcgtgggttggtgccaaggaagattaagaaggtagccataattggaggcgggttgatgggatctggaatagctactgcgttgatcctaagtaactatccagtgattctcaagg

SEQ ID NO: 117709 - DNA, 493 bp, Arabidopsis thaliana columbia
tacgactcactttagggaaagctcgtacgcctgcaggtaccggtccggaattcccgggtcgacccacgcgtgcgattcaaactaactctgcaaaaaaaaaaaaaactcagagcagaggagatcgagagagacaaagagagagagagagagagagagagatcttaacaaaaaaatgtctatatccatggcgttattctctccgccgatctcttcctcacttcagaaccctaatctcatccccaagatctcaacctctcttctctccaccaagcgtttctctctaatctccgtccctagagcttcctccgacaatggtacgacttcccccgtcgtggagattccgaagcctgcttctgtggctgtagaggaagttccagttaaatctccagccgaaagctcctccgcttctgaaaacggcgccgttggaggtgaagcgactgattcgagtactgagacggtaatcaaatatcagaatgcgaagtgggttaatgga

SEQ ID NO: 117710 - DNA, 495 bp, Arabidopsis thaliana columbia
ctatagaagagttatgacgtcgaacgcacgcgtacgtaagcttggatcctctagagcggtcgccctttttttttttttttacgctaatttgttcgttttatcattaaacccacataccatacaaattacatatctgatcaaatttcctacgaactttgtgtgtctccttccttccactgcttgtttgatccaatctcaacctcgggattcggtaccgttttttcggggttacccttaggcttactcttggaatctctccacctgaaaccactgaaaagctcatccatatcctcaagcatcctcccttgcgtctccggcaagaaagtgtaaaagaaaacccaagccacagtcgcaatccctccaaacaagtaaaacgctccaccagtagtcatcgctttcgacattggaagaaacgatatcgagatcacaccactagtcactctgttcaccaccacacccatactcgagccctgtgatctcaacctcaacgggaat

SEQ ID NO: 117711 - DNA, 493 bp, Arabidopsis thaliana columbia
atacgactcacgttagggaaagctcgtacgcctgcaggtaccggtccggaattcccgggtcgacccacgcgtccgctgaaagtcaacgaatgccgaatcttgatcctcttgcttacactgttcctatgattgggattagatttggtttgaagaagcttaacatttccggttcggttttcagacccgatgcaggcgggtcgggtcaaacaatggttgatttgggatccgagtttactcatttagtagacgcagcttacgataaagtaagagcagagataatgacacgtgtaggacgaagattaaagaagggttacgtctacggtggaacagctgacatgtgtttcgatggaaacgtggcgatgatcccacggttgataggagatcttgtgtttgtgttcactagaggagttgagatacttgttccgaaagagagggttttggttaacgtaggaggtgggattcattgcgttggaatcggacggtcgagtatgct

SEQ ID NO: 117712 - DNA, 508 bp, Arabidopsis thaliana columbia
  unsure (1)..(508): unsure at all n locations
nnnnnnnnnnnnnnnnnnnnnnnnnnnnnnnnnnnnnnnnnnnnnnnnnnnnnnnnnnnnnnnnnnnnnnnnnnctttttttttttttttttttttttttttttttttttttttttttttttttttttaaacgaaataagtaattaatgatcttcattttcctcacatacaatttaattaatctacacaaacgggcttctcctgatcacatgatcgatcattcaacaatagaaatgcctaaagcttaattgatacccgttgaaactaaacaacaagttgtgagaaagtgaagataaaaccccaaaaagaaagaacaaatttttttcttccctttgattcaaattcagttcaatattctgcgactgataataagtatccatgtcgcgtatttcaagctctactttgtatctccattagactgcaaggacccatcttgcatgagcttaagactaagacacttaaacaggtccctcgagtactgcctcgaagcttttctccaatccgttcc

SEQ ID NO: 117713 - DNA, 508 bp, Arabidopsis thaliana columbia
taggtagcactatagaagagttatgacgtcgcacgcacgcgtacgtaagcttggatcctctagagcggtcgcccttttttttttttttttatcaaaatttccttcgcatttttgaaagatacatggtcaagaagacagagcaatatagatacaacgaaccttcttcatcacaattacagaaaaaatgattatgtagatatcatgtttagagcctaaacggctaaacagttccatcattaatgtcttaaacaagcttttatgaacagacaatggaaccttcactgcgcaactggagcgtataaaagccagataacgtgcacgaatcacctcttggatagcttctgtatcttctagattctttcaaagcatcaaggatgaatgaagcaagcaatgtgtgttgtcactttccctcttcgtttgtcagtccagaacacaacaagttatttcactaagtagccttgatcttatcatctccaacaacagaaagtatgggcaaactattcaagat

SEQ ID NO: 117714 - DNA, 479 bp, Arabidopsis thaliana columbia
acgtcgcacgcacgcgtacgtaagcttggatcctctagagcggtcgcccttttgtttttttcttttttttttttttttttttttttttttttttttttttttttttttaaatttttttaaggggtttattggaaaaaaaaaaaaaagaagaagaaaaaatttagaaaaaaaaaaataaaaaaaataaaaaattgaaagttaaaattttttacggggggggacaacaggagaaaccagggaaatagacaattgagccgcccggtttggaaatagcgtcgtcggaaatacaatgagaggtcatgggttgaaaaaaaaaaagttagataccagtgacaaacgtacaggaaaaaaaacctagagacacggagttaaaagatgagcgaaagatgcagaggaaccaaaattaggactgatgaaaatggcgaaatgacaacttcaaaaaacccggctggggggacaaaataaaagaacaaagcttg

SEQ ID NO: 117715 - DNA, 506 bp, Arabidopsis thaliana columbia
  unsure (1)..(506): unsure at all n locations
nnnnnnnnnnnnnnnnnnnnnnnnnnnnnnnnnnnnnnnnnnnnnnnnnnnnnnnnnnnnnnnnnnnnnnnnnncttttgtttttttttttttttttttacttcaaattttattgtacgattcacaaagcctaataagaaatctaacagggagtcttaattagcatcagaaacagagctttatattctaaaaccgcacatcatccggttgatatctttcatataaagttttatctaacgacgtcgttctggtgaccaatgcggcaacgaagggctgaaatgagcagacacaactctagagtcaagcagctccatgataggtgtgaagctcacgcacctcggtaccttatactgattaatcgatgcgcctctcgagatggcatagtccatgagctcctcaaacgtaccgttccgtaccacacgtatctccaacgggccgatcgatttatcagcgacccggctttgtctataaaccgagtttaaagattcctccatctccaaacagca

SEQ ID NO: 117716 - DNA, 476 bp, Arabidopsis thaliana columbia
tgacgtcgcactgcacgcgtacgtagcttggatcctctagagcggccgcccttttgttttttttttttttttttttttttttttttttttttttttttttttttttttgataacaaaaacaaactttttggttttaataaaaaaaacaaagttttcgggtaaattcgctggccaaggaagcacaaaaaaaaaggcaaaccacggttttttttaggggggggaaaacaacaaacccacccaaaacatcaaagacagcccctacaccctgaaccgcgaggcctggaaaattccccctggccgggacggtttacacatcagggaacacacgacctaacgacccaccagggaactttttttttttaaagatacaaaatcaagcaacctccctgaaaatacgcactcagggacgggaagaccctctatatgctaaagaaccaccggccggacaataccctctgtgggcgccaacccaatca

SEQ ID NO: 117717 - DNA, 483 bp, Arabidopsis thaliana columbia
gtcgaacgcacgcgtacgtaagcttggatcctctagagcggtcgccctttgggttttttctttttttttttttttttttttttttttttttggaatcaagtttaacatatattgagaaacactttcaggttcaaagatcactgtagtacaagaacaaaaggtaaacaggataaacgtcaaaaacgtgtgtagtagaaacatgctaatgggcattcattgcaaagcgcttcaacggaagtaaccgtagagctccaagtagcaaatgcaaaagttccacggagttgatgtatctgcagttggaccggtcagaaccagcctgaaaaacctaaaggggagtaatgcatttgctgcggtgattggccatgatgcaaactgaccggccttgcacattgtttgggcatcctcatggactctcaagtctgtccatgttttcccatccatcgatccctgaaacttccagaatcttgggaatgctcttgatcc

SEQ ID NO: 117718 - DNA, 501 bp, Arabidopsis thaliana columbia
  unsure (1)..(501): unsure at all n locations
atnnnnnnnnnnnnnnnnnnnnnnnnnnnnnnnnnnnnnnnnnnnnnnnnnnnnnnnnnnnnnnnnnnnnnncttttggttttttttttttttttttacagttaaagcggcataacagtagttattaggtgagaatcctgtaaacaagcattgacttgccagatagatgtagtttggagactataatttacctaaatgtgttttcataaattccaaagccaaaagaagagtttggtcctaagaactgaaaagcctatcatggtaaagaaaaaaagtatcccttacgcaggcttctcaacatgtgatgtcaatgccagctgtcatcttcatttccgttagcgccaacttgacgagcttctacggtttgggagctgctgggcgagaatgtgggcggtatggaatgatcaaatctacaagctggaccaaatttgcagatgccatatcggctgtagtgtgtgcacatgctctgatcaggtcttaggggcaagcccttgtcattga

SEQ ID NO: 117719 - DNA, 488 bp, Arabidopsis thaliana columbia
  unsure (1)..(488): unsure at all n locations
nnnnnnnnnnnnnnnnnnnnnnnnnnnnnnnnnnnnnnnnnnnnnnnnnnnnnnnnnnnnnnnnnnnnnnnnctttgtttttttttttttttttttttttttttttttttttttttttttttttttttttttttttttttttttttttttttttttttgaaaaacccaccctttaaaaaaccaatttgggggaaaaacctttggaaaaaattgaaaataaaactgtttttttttttgggaaaagggtttttgggaaaaaaaccggtttttttttgaaaaaaataaccaactggaaagggggtaaaagcccgggaaaaaaaaaaaaaaagggggtcccccggggccaacaccattttaccttttattaaaggggggaaccaccccctttggggagggattttcctcaaaaattttcctggaaccccttggggggcccttttgtgacacccctttggccttcccaaaagttggggggaaacttgttagag

SEQ ID NO: 117720 - DNA, 490 bp, Arabidopsis thaliana columbia
atagaagagctatgacgtcgcacgcacgcgtacgtaagcttggatcctctagagcggtcgccctttggtttttttttttttttttttttttttttttttttttttttttttttttcggaaaaccccgacctttcactgcaaactttttagtacaacggattagtaaataagcaaaaaccaatctctcgtacttttactcaagtctcgaacaaactgatttttttttgaccagggactagtcttaaccataactaaaacgggggaggggaatcatcaatctatactggaatctttccaggtgggtcttgagaattggagacacagggatcagcgtcgtcaagctttctcacgacctctttcatactcggtctgagattcgggagcttcgtagggcaaaaaaaacccatcttcaaaactctaatcatgctttcttctatataaggggacaaaacttgcttggccaaaacattttgaaggttcctcggatctt

SEQ ID NO: 117721 - DNA, 493 bp, Arabidopsis thaliana columbia
tacgactcactttagggaaagcacgtacgcctgcaggtaccggtccggaattcccgggtcgacccacgcgtccgagattggactttcaacagaactgagtcagctcattttacagaacaacagattttccggcaagattcctcgtgagctcggaagattgactaatatagagaggatttatctgagcaacaacaatctttccggcgaaattccgatggatagttggagatttgaaagagttatcatctctgcatcttgaaaacaattcattaacaggatttatccctaaggaattgaagaattgtgtcaaacttgttgatctgaatctcgctaagaacttcttgaccggagaaatccctaacagtttatctcagattgcttctttaaactcgttggatttctcagggaataggctaacaggtgaaatcccggcgagtcttgtgaagttgaagctgagtttcattgacttgtctggaaatcaactttcaggaag

SEQ ID NO: 117722 - DNA, 498 bp, Arabidopsis thaliana columbia
taggtacaactatagaagagttatgacgtcgcacgcacgcgtacgtaagcttggatcctctagagcggccgccctttttttttttttttataataaagttaactcgtataactaaacccatatttatgccaactcaaagattgtgttactaagggtaatgagacatataatcatatagaaatgttagaagcggcaaaatgtttttcttttttgggggagaggtttcaatttaatcaccagagacaaaatttcgactattcaacattgatcctggactgacttgattattaggctgatgggtttcctttgttattcgtaccccactcttcctcaccctcacttccattaacaagtacagcaccgtccgtagagtctgcatccacaactccctcttcttcattcacttcttcttcctgttgttcctcttcatctccttcattctctacatgaccgttttcttctgctacctcgtgatcgatgtttccattttcaagtgat

SEQ ID NO: 117723 - DNA, 509 bp, Arabidopsis thaliana columbia
  unsure (1)..(509): unsure at all n locations
cgattgtannnnnnnnnnnnnnnnnnnnnnnnnnnnnnnnnnnnnnnnnnnnnnnnnnnnnnnnnnnnnnnnnnnnnnnnnnctttttttttttttttttttcaaaacgattaaacgtgaataattagcaaatttattactaacatcgtatattttcatctcaatcacgaagaaaaagactatagtttacatgtcactcttataagaattccaaaaatcttcatcatcgtcgcattcatctccaccgtccgatctcacgccattctcaacatccccaccgtccgattccttaactccagctgctactccatcactggctcgctccgtctcctcagacttctcaggctcctcattctcgggaacatcagttgtctctgcttctgctccagcttcttcttcttcttcgccttcttttgcagccgcggcttcttgttgaagcttcttaatcacgttcttgaaatgagtaaaatgttttgagcgacttgataatgcatcattaagcttcaatg

SEQ ID NO: 117724 - DNA, 502 bp, Arabidopsis thaliana columbia
  unsure (1)..(502): unsure at all n locations
nnnnnnnnnnnnnnnnnnnnnnnnnnnnnnnnnnnnnnnnnnnnnnnnnnnnnnnnnnnnnnnnnnnnnnnnnctttttttttttttttttttttttttttttttttttttttttttttttttttttttttttttttttttttttttttttttttgggggggaataataaaccttttttttaaaccccttttgaagggaaaaaaccacccccttgtttgggttaacacattttattgaattaaaaaaaccttccctcaaacaaaaaaatccaacccttacaaaaaaattgggagttttaaaaaaaaaaaaaaacattttttaaaaaacaaagtccagttgattaaaaaaaccttccaaattttacattgaaaaaaaccgggttaactccctcccctaaaccaaaatggccccaaaaaatgcctaattccccagggttttggttttatccaaaaaccataggggttacagaaacctttttttaagttactgttttaaaacgga

SEQ ID NO: 117725 - DNA, 483 bp, Arabidopsis thaliana columbia
atgacgtcgcacgcacgcgtacgtaagcttggatcctctagagcggtcgccctttggtgtttttcttttttttttttttttttttttttttttttttttttttttttttttttttttttttttttttttttttttttttgttgaaaggaaaagggaagccccaaattaagttaaacgggcccccccaagggctttttgttcccaaaattacccaaactggggggggggggaaaaaacatttaaaggggctttttaacccccccaacaattgaagaaaaaacaaaagaggggtggggtttttttaaaattacccgggggaaaaaccccaaaaaaaaaggggggttaaaggggccgttgaaaaaccggtttactttaaatcttcctggaaaaaaaaggtgggtttttttttcggccccccccgggacccaaattttccaggggggacttaaaaataaaactcggtttaaagcttaagaccctaaa

SEQ ID NO: 117726 - DNA, 503 bp, Arabidopsis thaliana columbia
agctccaatacgactcacttagggaaagctgcgtacgcctgcaggtaccggtccggaattcccgggtcgacccacgcgtccgccaacagcttgaagaagaagagatcacgtgcgctctacaatcagatctcgttaagcatgtgttcaccttcaacaatctcaagggaggagataagagcagattctccaccgtattcaccgagaacgatgcggatcagtactctctcgtcttcgctaattgtctccaacaggtcaaaatcagtatggatgttagatccgctatgtataaccttgaaggtaaaaagggaggtcgtgattatctctctgctggaagaactgttcttcctaaggtctatttcttattctctgttatctatttctctctcgccgccacgtggatctacgttctctataagaaacgtctcactgttttcgcaatccatttcttcatgttgggagttgttgtcttgaaagctttgaaccttctttgtgaggctgaggat

SEQ ID NO: 117727 - DNA, 492 bp, Arabidopsis thaliana columbia
actacgactcacgttagggaaagctcgtacgcctgcaggtaccggtccggaattcccgggtcgacccacgcgtccgaccgaatatgcgaatttcactttccacgaatatggacacaaagtgaaacattggatcacatttaacgagccatgggtgtttagtcgtgccggttacgacaacggaaagaaagctccgggacgttgttcgccgtacatccccggttatggacagcattgtcaggatgggcggtctggatacgaagcttatcaagtcagtcacaacttactcttgtcgcatgcttacgctgttgacgcattcagaaactgcaaacagtgtgctggaggtaaaattggaattgcacacagtccagcttggttcgaaccacaagaccttgagcatgttggaggttccattgaacgtgtgcttgatttcatcctaggatggcatttggctccaacaacttatggagattatccacaatcgatgaaggatcg

SEQ ID NO: 117728 - DNA, 493 bp, Arabidopsis thaliana columbia
atagaagagttatgacgtcgaacgcacgcgtacgtaagcttggatcctctagagcggtcgcccgcgagctagaactagtgcccttttttttttttttttaaatagaaagattaaataaatataataaatctccatcgaataaaaaaagaagaagaaccaaaaaaagaaatatacaaagggttggtggccgaaacttttgtgaggaggaggacatgatttggtggtggtggtggtggtggttgcaagcaagcaaggtggtagtagcagatatagttacaaggggattcaaatgagccattgttgttgtgttttctttttcttacggtgcagttccccaagttgttgttggtgttttactactccactctgttgttgctctcaccacttccgctgcatcctggagtccgagcaaatgctgacattccacatgccccggtgttgccaggttaccgatatcgcaaccccgaacttgaatgagggactgaagcacact

SEQ ID NO: 117729 - DNA, 493 bp, Arabidopsis thaliana columbia
acgactcactttagggaaagcacgtacgcctgcaggtaccggtccggaattcccggttcgacccacgcgtccgccgacgcgtggggttgaagtagacacctgggtcagtcagtctggaaagaatggtatgcgtcgtgattggctagttcgggactgtaatactggagaaaccttaacacgagcatcaagtgtgtgggtgatgatgaataaactgacttttgagattgtcaaagattcctgaagaggttcctggggaaatagagccttattttgtgaattctgatcctgtccttgccgaggacagcagaaagttaacaaaaattgatgacaagactgctgactatgttcgatctggtctcactcctcgatggagtgacctagatgttaaccagcatgtgaataatgtaaagtacattgggtggatcctggagagtgctccagtgggaataatggagaggcagaagctgaaaagcatgactctggagtatcggag

SEQ ID NO: 117730 - DNA, 495 bp, Arabidopsis thaliana columbia
atagaagactatgacgtcgcacgcacgcgtacgtaagcttggatcctctagagcggtcgccctttttgttttttcttgaaagttaatgaggtctccgtgaaataacaactccaagaccacaaatcatatctctctctctctctctctctctgtcacatgaaaatgatgcattttttctctgttcgtgtgttttcatatatccgagataacacttgaatttctggcccaaaagacggggaaaagaaaaaagctagcacgctaccggaggtaactcgaagcgacccaaagcaaaacatagcttaggagcgaagacatgacttcaaaacctcttggtcctttgatgaacggtgggatcacagataccatcaagaaagtcccaaccagccacgagaagatgaaagctcccgctccgtaaaggaaagtccagagcttcttctggagcctttggtggatgaagtaaaaggtagctattagtgatagcaaaacctgcaaggt

SEQ ID NO: 117731 - DNA, 502 bp, Arabidopsis thaliana columbia
  unsure (1)..(502): unsure at all n locations
nnnnnnnnnnnnnnnnnnnnnnnnnnnnnnnnnnnnnnnnnnnnnnnnnnnnnnnnnnnnnnnnnnnnnnnnctttggggtttttttttttttttttttttttttttttttttttttttgttatttttttttttttttttttttttttttctgggaaaccaaaaaagtttgtatttaaaaaaaccaaaccccagaaaaaaaagggggtttaaaaaaaccaaaccttggttttaaaaaaggcatccatttttaaaaaagcctaaaaaaaaaaaaacattttttcttgagagaggcctctgtcttaaaaaaaaaaaaacaagacggaagaaccgggcccagaaaacggaaacttccgggggggcaaaaaccccaaaaaggaaaaggcttcctgggcctttaaatcccgggggggcggaggctaccacaccttgaaaagttttgggaacccgagaaaaaaatccctgggacgggcaaaagaaggcggggagtggagccgtaaaag

SEQ ID NO: 117732 - DNA, 496 bp, Arabidopsis thaliana columbia
  unsure (1)..(496): unsure at all n locations
ctatagaagagctatgacgtcgaacgcacgcgtacgtaagcttggatcctctagagcggtcgcccttttgtttttttttttttttttttttttttttttttttttttttttttttttttttgagcccccaaaatgattcattccaatacaagaaatcaaacaagacattttaagcaaacgtggtttttccaaatttaacaattaacataccaatttacaattttcaaaaggcggagaatcatatcagcactggttactaattttctccttcaagaccttggaaccgatcctggagttgaatacaaagttctgaaactcgagagagaagttgctgattttgcccacgcgtccggggacgcgtggnnnnnnnnnnnnnnnnnnnnnnnnnnnnnnnnnnnnnnnnnnnnnnnnnnnnnnnnnnnnnnnnnnnnnnnnnnnnnnnnnnnnnnnnnnnnnnnnnnnnnnnnnnnnnnnnnnnnnnnnnnnnnnnnnnnnn

SEQ ID NO: 117733 - DNA, 505 bp, Arabidopsis thaliana columbia
  unsure (1)..(505): unsure at all n locations
nnnnnnnnnnnnnnnnnnnnnnnnnnnnnnnnnnnnnnnnnnnnnnnnnnnnnnnnnnnnnnnnnnnnnnnnctttttttttttttttttggtgctaagcttaatatattcctcaatatataaagaatatatatggaggggtgttgttcactatttccttatcaacaagtatctcgctataacacaagctgagattcgagtcaaatctccaaagcgtcactggctccttcattcccatcggtttcctacatgcttccttagccctgcttgttcactgatgatattcccagctctcacttgtccactgatattgttcccagctgcagctctcacttgcccactgatgatgttcccagcagaagctctcacttgtccactgatgttgttcccagctgcaagtctcacttgcccagctccaactcttgtagggaataaaactttgtgtagctgtagtacgattttcaacaagtccatagtagttgaaatctccttcttcatcgattcg

SEQ ID NO: 117734 - DNA, 517 bp, Arabidopsis thaliana columbia
  unsure (1)..(517): unsure at all n locations
nnnnnnnnnnnnnnnnnnnnnnnnnnnnnnnnnnnnnnnnnnnnnnnnnnnnnnnnnnnnnnnnnnnnnnnnnnnnnnnnnnnccacgcgtccgcccacgcgtccgcagccaacacatctgagtcagcagtactgcaacaactcctttgacaactcttttggtgatatgagtttcatggaagagaagcctcagatgtacaacaatcagtttgggttaacaaactcgttcgatgctggaggtaacaatggataccagtatttcagttccgatcagggcagtaactccttcgactgttctgagttcgggtggagtgatcacggccctaaaacacccgagatctcttcaatgcttgtcaataacaacgaagcatcatttgttgaagaaaccaatgcagccaagaagctcaaaccaaactctgatgagtcagacgatctgatggcataccttgacaacgccttgtgggacaccccactagaagtggaagccatgcttggcgcagatgctggtgctgtgact

SEQ ID NO: 117735 - DNA, 495 bp, Arabidopsis thaliana columbia
ttaggtgcactatagaagactatgacgtcgcacgcacgcgtacgtaagcttggatcctctagagcggtcgcccttttgtttttttttttaggacaacggtttttatcacattttatgtaacaaataacaaagaatgcaacaaacaagtaaagagagagaacaagagtgaaagatataagtagtcttagatcttgtcgtgaagattgacgactaagtcatgagcatcgtctagaagtttccaaacatcaagatgaccagccatgctgttacattccttcattatctcatccatcccactgtatttctctattatcgtcttcctcctctgcagcacgcttgcagctatcgcgtaaagcaacaaatcttctgtcggtggtgctcgtaaccggattctcccccatgtcgccttcgcaatcccagttcgtattgcagcttgatccgcccacattacttcccagagacacaacgtctgctcaaaggttagttctcgtctga

SEQ ID NO: 117736 - DNA, 491 bp, Arabidopsis thaliana columbia
  unsure (1)..(491): unsure at all n locations
atagaaagtatgacgtcgaacgcacgcgtacgtaagcttggatcctctagagcggtcgcccttttgtttttttcttttttttttttttttttttttttttttttttttttttttttttttttttttggaaaacaaaatttgttcaaactacaattcaatacaactcccgtttcatgtctcctgaatcaattatgtcccatgagtgggcccaatgtttttaattggggagttatttcaacattgatttttttcatgaagggggggggacccaaaacaggaaatgaatcccatccaagaagatctggaatttgttcaaactacaatttaatacaactacagtttcatgtttcctgaatcaattatgttccatgagttggcccaaggttaaaaattgatgactcantctcctccacttttaaaccccctttagcgatcagattccccgggacggagaacaaaagaatttgcgaatttgtaaaaagagaacaacg

SEQ ID NO: 117737 - DNA, 512 bp, Arabidopsis thaliana columbia
atgattctgccagctaccatacgactcactttagggaaagctcgtacgcctgcaggtaccggtccggaattcccgggtcgacccacgcgtccggaaaaaggagatctctttatgtaaaagtctctgagaattttggtttaaagagaggattttccggagatgggtttgttggaatcggtgaaatcaatcaactgggaacatgaatcatctccggtttatcaggattttcgagttcttcctctcttcgctgtgttcttcccttcgattcgatttctcctcgatagattcgtcttcgagaaattggcaaaatatttgatctatggaaaacatagacaggatatgggagatgacacaaccgagagaaagaagaagatcaggaaattcaaagaatcggcctggaagtgtgtttactatctatcagctgagattcttgctttatctgtgacttacaatgagccttggtttatgaacactaaatacttttgggtagggcctggagatcagacttggcc

SEQ ID NO: 117738 - DNA, 506 bp, Arabidopsis thaliana columbia
  unsure (1)..(506): unsure at all n locations
nnnnnnnnnnnnnnnnnnnnnnnnnnnnnnnnnnnnnnnnnnnnnnnnnnnnnnnnnnnnnnnnnnnnnnnncttttttttttttttttttttttttttttttttttttttttttttttttttttttttttttttttttttttttttttttttaaaaaaaaaaagcaattttttttcccctttataacaggggaagaaaccaaatcaactaacgggagggtggaaaacccccaaaaattcccaaacttacaaaggggttttttttttcccaaaaaaaagcaaaaaacttctttgtttaaggggggggagccaaagttttttttttttcccctaaaatcaagggttatatatacaggaaacaccccccccttaaaacaagggccatgggggggggaggcatatccatgggccttgaaccagttgaccaaaggcctacgggggtttgaacaatgttctgactttgctgaggaacaggaggggaccttgcggctgggtaaacgcgggtg

SEQ ID NO: 117739 - DNA, 516 bp, Arabidopsis thaliana columbia
  unsure (1)..(516): unsure at all n locations
atgannnnnnnnnnnnnnnnnnnnnnnnnnnnnnnnnnnnnnnnnnnnnnnnnnnnnnnnnnnnnnnnnnnnnnnnnnnnnnnccacgcgtccgcggacgcgtgggttgaggaggaggaggatttcatcatttcaccaattccatctctccttttgggtcaaacccaaacccaaatccaaaccctggaggtgtctctactggattcgtgtctcctcctttacccgttgactcttctccggctgattcgtcagcggcggcggcgggagctttggttgctcctccttcaggtgacacgtctgtgaagcggaagagaggacggcctagaaaatatggacaagatggtggttctgtttcgttggcattgtctccttctatctccaacgtttccccgaactctaacaaacgtggccgtggaagacctcctggctccggcaagaagcaacggctatcttccattggtgaaatgatgccttcatcaactgggatgagcttcacaccgcatgtaatcgtagttt

SEQ ID NO: 117740 - DNA, 497 bp, Arabidopsis thaliana columbia
  unsure (1)..(497): unsure at all n locations
ttaggtacactatagaagactatgacgtcgcacgcacgcgtacgtaagcttggatcctctagagcgtccgccctttttttttttctttttttttttaatatgtatgcgatacgaacgttatttattaaacatgttgcaacttttacatagttacatatagacaaataacgcacggcatttcccttccttcgtattttggcgaaaacaaacacattatattaataaagatgaactcatggcttccttcctctgttgngaaaaaatggataaaattatgcttctgtcgaagcaaaatgtttaacatgtgccctgttcagtgacctgaatccatcatctccggcgactttcatctttcccgcggcatcgtattgagctttacctncaaatccaacattgaagaaatttttaaataaaggagcttgagcatatagttcccttcgaattccttttcttccgtgagctntggcgtccaaagaagcatgaatagcaattttttt

SEQ ID NO: 117741 - DNA, 527 bp, Arabidopsis thaliana columbia
  unsure (1)..(527): unsure at all n locations
cgnnnnnnnnnnnnnnnnnnnnnnnnnnnnnnnnnnnnnnnnnnnnnnnnnnnnnnnnnnnnnnnnnnnnnnnnnnnnnnnncttttgttttttttttttggactctgattgatagagcgactcggatgggtgccaacaggggcccagggcctccctcggcccattggcggcgcggcacatcgcgcgtatcggtggagaacaggacgagctggcggccggccaactggtggggttgggggaccggaggttccccacaccgcacacaggcacgtggcaagtgaggaagcagtctcgcgctggcccgccgtgcacaatgcaggcaatgtggcgggctaggactgcctctcacttgacagcgtctgtgtgcggngtgtgtgtgtgtgtgtgntgtgtgtgtgtgtgtnnnncctgggtacatnatagctnattggatgagttatgatggagtataacacatatcactggggatcagtttcaggtcaaagaaagctggtcacacggtatgacagcattaggagggagatga

SEQ ID NO: 117742 - DNA, 524 bp, Arabidopsis thaliana columbia
  unsure (1)..(524): unsure at all n locations
nnnnnnnnnnnnnnnnnnnnnnnnnnnnnnnnnnnnnnnnnnnnnnnnnnnnnnnnnnnnnnnnnnnnnnnnnnnnnnnnnnnccacgcgtccgaacagtgcggaggtgcgggacatggaggcggcgtgccagcgccacgacatccgcatcgtggcctactcccccatcggccaggggctcctgacagacagcctcacggaggagaagttccgcagcaaccggctgacgcgcatcatggggctgcggtgggacggctcgggggagttcttcgccctgcgtgacattatcggccgcatcgccgaggcccgggggaagacgatggcgcaggtctgcctcaactggaccatctgccacggggccatcccgctggtcggcacgcgctccctggcccaggcccgggactccctcggctgccttggctggcgcctcacggcggaggaggtggcgganctggaccgccacgcactatcccgaagcacactttcgaagccccgatggaagcgtatcgcgttcgttggcctca

SEQ ID NO: 117743 - DNA, 522 bp, Arabidopsis thaliana columbia
gatcctcgagagaggtttccctggggggttaaatccccaggattatgaacggacgagagaaaaaagaagggaaacaaaagaggggccaagagcacatttgagcccataaataagcgcggcacgacatgaacctcaaaaaggcgcagaaaaaaaaaggaagaaagcccgaaaaaccgccaaaaaactttttttatgggggggggtcccacaacgcaaaacggggtggccaataaaagaacggaagaccggggggtggatgcgacgggagatggaaaaagacgatgaataagaacgaggttgaggagacgagagagacgaaacacgcagcggaagaatgcgcgatagagtagagcagatctagagaagacagtgataaaggacgcgcgaagaagtacaggaggaaacaagcgagcaaggagggtgggaggctgaggggtagacgaggagtagaggaagcgagcaggaggagggtgggaaggaaggaatgagaaggtagagaaatggagagagaggagagagaga

SEQ ID NO: 117744 - DNA, 327 bp, Arabidopsis thaliana columbia
cacaagaaaaaggacaaggagagagggaggcagagcaaactggagccgaaaaacgccagaaagcgcaccgacaaaaaagcccgcgagcagagagacccgaatttttttcggggggggcccccacaaaaaaggcgtgggggaataagccgggcttggcgaacgagaggccaataaacgccgggagccgcagaaacgaaaccaagagccgagccagggggaccgcacgacccccagaaaggaggaggcggaccgcgccgagcagtaggcagggcggggcggaggaggggcgagggtggaagggggggaggcgacagggggggagggggg

SEQ ID NO: 117745 - DNA, 516 bp, Arabidopsis thaliana columbia
  unsure (1)..(516): unsure at all n locations
agggggaacaccccgaannaaagggggaggccagggagacggtggccggggggggaaaaccccnaaaaccgaaggaangcagaagggcggggaggaaaaccgccaaaggcaagaggagccacaaagagcacgcgagcgcgcgaaaagcgcaaaagagcgccgaggaaagaagaaacaaaccggagcagcaggcgagagcgggcagggtctttttaagcggggagacaaaaagaaccggaaaaggcgtacaagagaagaggggacgagcccgcaagaaggcgggggcagcgagagaagagaagcggaggggaggaagaagaaaagcggaggggggcgggcgcaaacaggcgagccgaagaggcaagcagagaagggaggagaagaaaggagggaggcggggaggccgcgaagcaagcgagacggaaagcgggggcgaggacggccgaagaggggcgagaaagggtgaagacagaaaacaaaaaacgcgacaggggatcgcaggacaacgcgggggcc

SEQ ID NO: 117746 - DNA, 427 bp, Arabidopsis thaliana columbia
  unsure (1)..(427): unsure at all n locations
gcccaagaccggcacacagaaagggaaggaaggccaggtgtaaacgacgacttttggggggggagcacgccagcggaaccggnacggagaaaccgggtcgaccggggcgggaaaaacccgaaaaaacagcgcaaanaaagacaaagagaaaaaagggcggcganggccggaggcaaggcgcgaagcagacaagaccgcccggcaaacaaagagaaacccgaagggccgacaaaacgggagaaggacgggccgggagaggggacgcgacacggaaacgaattttgtcggggggggggggggggggacaagaaaagaagggcgaagacgcgcgagcgaggacgccgagagcgaggaggagnagcaaagaggaggcgaacaagaggagagcccgcaggaggacgacaccaggaggcaaaagggcggcaga

SEQ ID NO: 117747 - DNA, 504 bp, Arabidopsis thaliana columbia
  unsure (1)..(504): unsure at all n locations
nnnnnnnnnnnnnnnnnnnnnnnnnnnnnnnnnnnnnnnnnnnnnnnnnnnnnnnnnnnnnnnnnnnnnnnnnnnntttgggagggccacgtggtggcgcttgaggtgcgccacaaccagatcattgtggtttctgacaaggacggaatggtacttctgaaacgttggggtctggaaccgagggggctgcagcggcttgaggtatgctggccacagctcccgcacggggtttgggcaccagcggagccgcagcacgaggtgccctgcctgctttagagtggaggcgatgctgcgccggttctccttccgcacatagaggggctggggcgtcgtgtaccactcgttgggcgggaggacggaaacgcggacacggaccaccccgagggaggcgttggtgttggtgtcgaacatggcgaccgtcaggatggacgccggttccgtgacatcgaagacgatggggtcgcggtgcaggttgtagctgtggctgtccatggcgggcagttt

SEQ ID NO: 117748 - DNA, 511 bp, Arabidopsis thaliana columbia
  unsure (1)..(511): unsure at all n locations
nnnnnnnnnnnnnnnnnnnnnnnnnnnnnnnnnnnnnnnnnnnnnnnnnnnnnnnnnnnnnnnnnnnnnnnnnnnnnnnnnnccacgcgtccgcgcggccatggcccgccccggcccgccatgacccacgcgcggacggtctccggcgcgtcgtcggtggacagcttcgacgcgccgccgtccacctcctccgcctcgtcctcgcaggagaccggcggcacaaagcggaagggattctctcagcggctgcggaggttcctccaaggcacccctggcccggaggacggcttgtcctccctcccgaagccggcagccgatgggaaagctgagtcgccgaggctgggtagccctgttcggtccacagcaatggcagcggccatcgcggcggtggcggcggacgggccggaggcgttcgcggactacacggagcccgcgccgcggtaccttcactgccgcctgcacgaggcctccctccccgccggcctgcgcgacgcgtcggagggcgtgtttg

SEQ ID NO: 117749 - DNA, 440 bp, Arabidopsis thaliana columbia
cgggcaccccccccccaagaggaccaccgacagttgccggcggcgaaacccccaggacccacaagaacgaggaccgaaacgagacaccaaaaagaaaaaagccagaaagaaccagcgcggaaaacggaaggccgcccaaaaaacacggaaagaccgcgaagacaaaacacggccacttttaaggcgggggccaacaaacacgccaaggcagcaaaaaaccgccaagagagcaggaaagggcacagcacggaacaccggagagacgcgagtaaaacgaacaaagcggacacgaggagcgaaggaaagcatggcgaaaacgcatgaaaaggacggacggaaaaggcgagacacacgcggaaaggaacgaacggcgacgaagcgcgagcgagggcacgagacagagaaagagggggagaaaagaaaagagggggagaggggaa

SEQ ID NO: 117750 - DNA, 337 bp, Arabidopsis thaliana columbia
ttttcttgttcctctataaactcacgagggtctgcagagctatttaacttttgaaattctagcctgttttgtggggaacggggttttaacctacagctctctggccccctctttttttttaccgcccacactctgtgctacatttctttcctgaaggaaaaacccttcaaacccaaaggaattttttttttttttggggggggggataaaaacctcctgccccattagtaattttcatccccccctttttctctttataaattaagatttttgtaacgcccaacaaaaatagggctgacccaagatacaagaatatctcctcggaaactggaattct

SEQ ID NO: 117751 - DNA, 489 bp, Arabidopsis thaliana columbia
  unsure (1)..(489): unsure at all n locations
aggtcgaaacaaaaattgggcgtcggacaaagcagaaaaaaaaaaaaaagtttcttggtgagacaacaacagactttaggggaaaaacagcacgcctgcgagaacaagncacggaatacccctgtcgacccaggggtaaacccacgcaaacaaacacaacaaacacggataggggccagcagcaaaggggcacaaagagacacggaaagccaaacaaaaagagaacccagaagccgggaagggaaaaaacaagacaaggcgggggaaccgaagaagaaaaaaaggaggagtttttttttcgaagaaggttattggttgagtagatgatttatgaaactggagaaaggaaaaggaggtagacgcgatgaaattttggataattagcaaggaatgagaggaagaagaacaagcgaagagagaaagtatgtttggatgcaggacactagagaaggaaaatagataagtgaagagagggaaggaatagaggga

SEQ ID NO: 117752 - DNA, 525 bp, Arabidopsis thaliana columbia
  unsure (1)..(525): unsure at all n locations
cgnnnnnnnnnnnnnnnnnnnnnnnnnnnnnnnnnnnnnnnnnnnnnnnnnnnnnnnnnnnnnnnnnnnnnnnnnnnnnnnnnctttttttttttttttgcgcaagacaacagctttcgggacatggggcaacagggccattgcgtgtggggacgcccaaaggtgccatcggcaccatttggggtgggcggcgggcgatttcaagcagtggcgatacgcacggtgagtgaggtgggggcgtggcctcccgaaccggaaggggtgtccgggatccacgctacatatacaccagaggagaagagcgtcgctggacatttacaggtattatggtgccgccttccgatcctgtttgcggctcacatcgggcgcagctccgtgtcccccgcactgaggggcggtgccagggactccagggagcgcccctccgcgtccaccccgaggaacgccttcaccaccccgnccgcaatcatcagcccggccccgacggcgtancccaccatgacgttgctggccttctctgtggct

SEQ ID NO: 117753 - DNA, 521 bp, Arabidopsis thaliana columbia
  unsure (1)..(521): unsure at all n locations
atgannnnnnnnnnnnnnnnnnnnnnnnnnnnnnnnnnnnnnnnnnnnnnnnnnnnnnnnnnnnnnnnnnnnnnnnnnnnnnccacgcgtccgggggtcgctggccctcccgatgtcgttcgccaacctgcaccaggacgacccggacgactgtgcgagcggcatcgttggcgacagcgacacagccttttacaccgacatcccccagcgtctggaccgcctcccctggagctcctggcacctgtttgtgtccgtcaccctggggttcacttgtgtcctgaacggcttggaggtgaccatcgtgggctccctcggcagtgttctccagagtcctgaaaccctaggcctcagcgacaccatgatcggcctctccggatcgatgtacatagcaggctccatcttcggcgccatcttgttcgggtacctgaccgacgagtacggccgcaagaggctgttcatcatcaccatgctcctgtacatctttggagcggtgctgtgcggcctggcgtgggacgcggtca

SEQ ID NO: 117754 - DNA, 639 bp, Arabidopsis thaliana columbia
  unsure (1)..(639): unsure at all n locations
agaagccacaaaagccaaaaaaagcaaaaaaaaaacttttttttcacccacaaaccttatgggaagcaacacacccggcaaggacagcggcgaaaatacaaggttcaaaccaaggggggaaagaccacaaagacacgaaaaaaaacgaccaaaaaaaaaacaacgaaagacgcccaggagaaaggaagaacgaagaaccagagaacacacaaagccaccaccccagaaaagaaccgaaacacaccgaaaccgcacaaaagacaggaaaacgacgcacgcccacgcggcacgaaagcaccaaggaaaaacatatataatttttatgcggaaagggcgggagaagaagaaaaaagaaagagggagagagcgagagtagatgaagggagggggcaaagaaagaaaacgaagagaggaacagangagagagccaagaaaaggaaaaaacgggagagagaaaggagtagagagatggcaggagacagaaagaagaagccaaagcccgaacaggccgcccccagaaagagagggggaaaaacaggatacgaggagcacgaaacaaataaaacaacacacccacaccgaaccaaaaaaggcgcggcgcgagggagagagaagaataacacgaggaagagatcagag

SEQ ID NO: 117755 - DNA, 660 bp, Arabidopsis thaliana columbia
  unsure (1)..(660): unsure at all n locations
gggggaacccaccgcgaccnggcaagnnaagggaggcaacgaggaggaggattggcgctaaggggggaaaaaaccccgcaagcagagaagaagcggaacgggagagagaggggagggggcgggggaagaggaggggcggacgcgggaagagggaaaaggaagtggcggagagagaaaggaggaggaggggcgaggatgcaggagagagacgcggggagaggaggaatgagagggagagagcgcgaccagacagagcgaaaaagagatttctttttaagaagcggagtggcggacgaaggcgatcggggagggcaagagaaagccagagagagtgtagcaggacggggaagagggagaacagggtaggggagaaaagaggggggaaagtagagggcgagaggcaaggggggaaggagtgagaggagcgacggagagaggggggagcgagagaataggagagaaggaagagcggagaagagaggaggaaagaagagaaaagaagaagtagaaagagagaggaaggagagaggggaggaaggggtggagggacaggacggaggagaggggaggaaaaagggacaagggcgaggaagaaggggaagagaggggagggataaggggaagaacagggagggagaggggagtaggggagagaggaag

SEQ ID NO: 117756 - DNA, 522 bp, Arabidopsis thaliana columbia
  unsure (1)..(522): unsure at all n locations
cgnnnnnnnnnnnnnnnnnnnnnnnnnnnnnnnnnnnnnnnnnnnnnnnnnnnnnnnnnnnnnnnnnnnnnnnnnnnnnnnnnctttggtttttttttttttttttttttttttagactcacatgaatcacgtgaaagtgtcccattgggctccaaaggtgccgcaatctgcactgggttggtacctcctctgcagcagtcaaaggcggcaactcgcagtgaaaacattcaaaaaaaactaaaacagcgtctaatccacctcctccatcttggactcctccgcaccctcatcctccgcaacgtcctcttcggcgatgggagtgtcatcggtgtcatcgatgctcaggcccaacttgatcatccggtggatgcgctccgcatcccccgcggggtcgtccaggctgaacccagaggtcagcagggaggtgtngaacagcaaccacaccaaatccttcactgtcttgtcggacttgtcctcgtcaagccttttcttcaactccttgatgatggagtgttgggggt

SEQ ID NO: 117757 - DNA, 524 bp, Arabidopsis thaliana columbia
  unsure (1)..(524): unsure at all n locations
nnnnnnnnnnnnnnnnnnnnnnnnnnnnnnnnnnnnnnnnnnnnnnnnnnnnnnnnnnnnnnnnnnnnnnnnnnnnnnnnnnnccacgcgtccggttttcatcatggacaactgtgaggacatcatccctgagtggctgacgtttgtcaagggcattgtggattctgaggaccttcccctcaacatctctcgccagcagctgcagcagaacaagattttgaaggtgatcaagaagaacgttgtgaagaagtgcctggaaatgtttgaggagttggcagagaatgcagatgactacaagaagttctatgaacaattctcaaagaacctcaagcttggaatccatgaggacagccaaaaccgtaagaaactggcagatttgatgcgatacccgtcaaccaagtctggcgaagagaccaccagcctgaaggattatgtcacacgcatgaaggaggggcagaaggacatctattacatcactggagagagcaagaagcagcntggaggcatcaccattcattgaatct

SEQ ID NO: 117758 - DNA, 305 bp, Arabidopsis thaliana columbia
  unsure (1)..(305): unsure at all n locations
gaccccgaaaagcggggcgagagataaacaccctaaaaacaaccaagttttttatcccacgcaacctttttttgggggggaccaacccgcagggannngggncgggagaaccggggttggaccaggggggaaaaaccgcaaaannacggaaaacagaaccaaaagagaacgcaaaaggacgccgggcgagaacggggcacgcacagacgagcaacgcagcaacaactacaggaaccgccgcccccgaaacgcgaaccacgcgccccagagccacgcaaccaaaaacttttttttttggggggggg

SEQ ID NO: 117759 - DNA, 542 bp, Arabidopsis thaliana columbia
cggcggcgcaaaggggggcccagaaacaaacagaaagaccaagtttttacgaccgacaatggttggggggaacaacccacaggagaagggggggggaccaagattacagagggggcaaaccaacaaagagcgacaaaaaagcaaaaaacagaaaaaacccacgaaccgcgggcgagacaagacaaagaaccacccacaaaagacaaaaaccggaaccggcagacgggaaagaccacgccgagcgggggagcgaagagggagattttcttgggaggggggaaaaaagaaagaagagaagggcgagagaaggggcggatgggaagaaacagaggaggggagccagggcaagaggacgaggcagcgagagcaggaaaaagggaccgggaaagaccagaccaaggcaacgcaagaaaagagaaacggaagagacccccgaagaaaaacgaagccacgcccgcaagaaaggcgggagggggagaaaagacaggagaaaacgggcggaagaccgaggaaagcacgccccggcgccgcaacaggaagaa

SEQ ID NO: 117760 - DNA, 504 bp, Arabidopsis thaliana columbia
  unsure (1)..(504): unsure at all n locations
nnnnnnnnnnnnnnnnnnnnnnnnnnnnnnnnnnnnnnnnnnnnnnnnnnnnnnnnnnnnnnnnnnnnnnnnnnctttntttttttttttttttttttttttttggagggaaattcttgagtgtccttcaggtgaagagtgctcttccatcacacttcgaaagtctcgctcaagagctttgccatggggttagcacgaatgctggcatggcagttggcccacatgtcttcaacctcaccaggcttaacccccttggcaatgtactgggaatagacttcttgatacttttccggttcttcacgaatcagcattttctgatattcggcaacgtgcccggcaaaaattctctctcgcagagtctcggagtccatctctcccttgtccctgttgtaccctgggaaacgcttcatgctgtgagggacgttgactccaccatccacaactcccttcagcacagcaaaaatcctggcgccagtggtcacacgagcaagaccagtgtccatg

SEQ ID NO: 117761 - DNA, 517 bp, Arabidopsis thaliana columbia
  unsure (1)..(517): unsure at all n locations
nnnnnnnnnnnnnnnnnnnnnnnnnnnnnnnnnnnnnnnnnnnnnnnnnnnnnnnnnnnnnnnnnnnnnnnnnnnnnnnnnnnccacgcgtccgtttttttcgggtgttttggaagatgtttgtgaaaattgtgaagaatcggtcctacttcagccgtcttcaaatcaagtaccgacggcgccgtgaaggaaagacaaactaccggaaaagacgtctcttagtggctcaggataagaacaagtacaacaccccaaagcaccgcctttgcgtgagaatgagcaacaaggacattacggctcagatcatcatcgctaaaattcaaggagacgttgttctggcggctgcctatgcacatgaactcccaatccatggtgctgtggtgggactcaccaactttgcaggtgcatatgccactggactgctgctggcacgaaggattttgaccaagttgggtttggcagataagtatgttggggtggcagaagccaatggagaggagtatcacgtggaggcaca

SEQ ID NO: 117762 - DNA, 474 bp, Arabidopsis thaliana columbia
  unsure (1)..(474): unsure at all n locations
cgccagtaagtctcggatcctagtagagcgtttcgnccctttcgtcaaatcccgtatatatgaggcaaaataataattgtaccgcgtaacaatgtgcgagcgggatggataagataggcataaataggagacgaccgccggatcgatcgaattatttccggcgaaacataaccttggtgaataggcggcgatcatccgattatcacggcccggagcatttttttcccggagggcgaacatttagcgcataggagaacatagatacgagaggaagatgccgcgggaagagagatctgcgattaagtacgccgattgcgccgggagggtggtgggtataacaggatctcaacacacgatgtaacgatgcgagaggggagtgggcgatggaggagagcggagcggagaggacgatcggacggcaatatgagggggcgcaatcacgggagttggcgtgaaatcgtaggggtcgacgga

SEQ ID NO: 117763 - DNA, 503 bp, Arabidopsis thaliana columbia
  unsure (1)..(503): unsure at all n locations
nnnnnnnnnnnnnnnnnnnnnnnnnnnnnnnnnnnnnnnnnnnnnnnnnnnnnnnnnnnnnnnnnnnnnnnnnnctttttttttttttttgataaacaagatagatagatccactaagttttaacttaggacaccacgaacacagattatcagagtaaacaagtaaatccagaagtcaagaattgccaaaacttaaattaaaatacgtaacaaaacttcctgttcgcctcattcgacattgaggtcttacccgggtttccttccccgaggtttcccagcaggcctttttcctttctggcctgctttaccagtgcccttctgcccgttcctaccgggctttcctcccccacgtttcctatcatcactcttcatcctcctatccactctcttctgtcccttaccaactttaaccccaactcctttcttagacacaaccagttctttccttggctttcttggctctgctgctttcttgtatagcttgtctatcatcttgtcctttg

SEQ ID NO: 117764 - DNA, 508 bp, Arabidopsis thaliana columbia
  unsure (1)..(508): unsure at all n locations
nnnnnnnnnnnnnnnnnnnnnnnnnnnnnnnnnnnnnnnnnnnnnnnnnnnnnnnnnnnnnnnnnnnnnnnnnnnnnnnnnnnccacgcgtccgcccacaccaaccaggtcacgatggcgcatattccgaccatccagaggaatatacgttcttctaacgaacgggaggagcaaataaacctagggatcatatgaacatgatcatgatagcaggacacatcacacacgagagcgctagatcaatatactaaaggagctcacacccatcacctccacactgctgcctccgacacctactagtataccaggcgaagcgaagctagcattctactaacttaacacacagactcttccttgcatcgtaacgagaacatcgataataaagcactccagatcacaccgctgttttattacataactgaacctagagatactacactatgatatgataaaacaatctatggaatgactggaataaggctctagtaactcaattggaacacactat

SEQ ID NO: 117765 - DNA, 527 bp, Arabidopsis thaliana columbia
  unsure (1)..(527): unsure at all n locations
nnnnnnnnnnnnnnnnnnnnnnnnnnnnnnnnnnnnnnnnnnnnnnnnnnnnnnnnnnnnnnnnnnnnnnnnnnnnnnnnnnccacgcgtccgcccacgcgtccggcaaaagctgaatcttcttccttagatgttgatgactctcttcaagtcaaatctgtttctttctcggaatgtagcagtgactaccaagattacactccttgcactgatccaaggaaatggaagaagtatggtactcacaggcttactttcatggagcgacattgtcctcctgtgtttgatagaaagcagtgtctggttcctcctcctgatggctataagccaccgataagatggccaaagagcaaagacgaatgttggtacaggaatgtgccatatgattggattaacaagcagaaatctaaccagaattggctaaggaaagagggtgaaaagttcatttttcctggtgggggtacaatgtttccacatggagtcagtgcctatgtcgatctgatgcaagatttgatccctgaaatgaaaga

SEQ ID NO: 117766 - DNA, 513 bp, Arabidopsis thaliana columbia
  unsure (1)..(513): unsure at all n locations
tgacactatagnnagactttgacgtcgcatgcacgcgtacgtaagcttggatcctctagagcggccgccctttnggttttttttttttttttttttttttttttttttttttttttttttttttttttttttaagccccaaaatttttttggtcctaatttttggggcggaaggaaaaaaatctcgaggggcccaatttttgggccccctggggggaaaaccccaaatttttcaagtgttgcccccccctggggccaagaaaaaaaaattcaggtgggccgtttggggcaaaatccctttaaaaaaagccttggggggggggctttaaatttcccttaaaaaagagacctatttgggggggttaattatccccgccaaaaaaaacgaggtgtggggggggggaaaataaaaagggggccccaaaaagggggtgtgccaattataaaaattttgggcccaaaaaccagcgtttgccaaccttttggaaatttggtgtccaagccccaagattac

SEQ ID NO: 117767 - DNA, 547 bp, Arabidopsis thaliana columbia
  unsure (1)..(547): unsure at all n locations
gcgagcggaagcgacggcacgaaaggctgaaacaccaggttttttccacgcacccttgtggggggggacaaaccacgcggaaaaggnacggaaganaaaggtttgacggggggcgaaaacccgaaaagagcgaaaaaaaccaaaaaaaaagaaacgagggcgaggcaacggagcgacaaccccggcgaaacacaaacggaggcgcaacgaaacacacacgcgcgggccccgaagcggttttcgagggggggggggggccgaaagaaggcgaacgcggaatgaaagcgtcgcatagggagaaggagaagagacaaggccaagcccggggaggggggcggggcaggaaagaacgggcacgcgccgccgcatagaagagcgcgggcgcacccccgcgcaaaagcccagaaaagcgggaagggcaccgggcagcaaagaaggcggccgcaccggcgcgaaaacaagcggagagaggaggaggagagggccaagaggcagccngcggccgcggggcgacgagagggaaacgcagacgccgaagcgcggaagg

SEQ ID NO: 117768 - DNA, 494 bp, Arabidopsis thaliana columbia
  unsure (1)..(494): unsure at all n locations
tnnnnnnnnnnnnnnnnnnnnnnnnnnnnnnnnnnnnnnnnnnnnnnnnnnnnnnnnnnnnnnnnnnnnnnnnnnnctttgttttttttttttttttttttttttttttttttttcacccacgaagatagaatgtacattgccccttaaaaacatacattggggaaatccacaaagaaacaaattagcaacaagattgctttcccataaaatcacataaaagattttctcaaatttatctggctccaggagcaaagtcagaagtggaagagagactatagtcaacagaacccattgagtacatctcttcactaccttgccgccttgcattttctaaggccacacagtcgtttagctccatcacaacgtgtgccattgttggtctccggttcgaagatgggttcacacaggccagagctagctccacaatcttccatgcaccgtttgtatcatagtcccccataagtttcggggtcaacgacgctcttgatgtct

SEQ ID NO: 117769 - DNA, 512 bp, Arabidopsis thaliana columbia
  unsure (1)..(512): unsure at all n locations
atgatacttcnnnnnnnnnnnnnnnnnnnnnnnnnnnnnnnnnnnnnnnnnnnnnnnnnnnnnnnnnnnnnnnnnnnnnnnccacgcgtccggctcgctcttgggaatgcagctagcagaaagagatatcattgtagcatgccttgactacaggaactttcctcagggaacaattagtgatatggtgactgatgcttctcaaggaatctcatttgtctgcaataacatctctgcatttggaggtgaccccaacaggatctacctgatggggcaatcagctggtgcccatatagccgcttgtgctctattggaacaagctactaaagaattaaaaggagagagcatctcctggacagtgtcccagataaaagcttattttggattatctggagggtacaatctatacaagttggttgatcacttccataatcggggtctgtatcgctcgattttcctaagcataatggaaggagaagagtcctttgagaaattctctccggaagtaagactga

SEQ ID NO: 117770 - DNA, 486 bp, Arabidopsis thaliana columbia
gcgcacgcaagctaggaagctctagagcggttcgccttggggttataaccatcgattatagcgcgcgaagatagaatggggcggaaaacgtagccgggcgaatatgaagtagtggccgagaaaaaacagacgcgccgtaaagggtaaaatcctggagtaaaagaaaaagagacgccaaaaagagagagagcaccttgttttttaaagggcggcgacgcgccacgtccgccatgatcaccgcaaaatgaccgcccaggacgagccgagaggcccgcggagcgatggtaaagggacaattcgagggcggagtatgggggttaccgcggagggtaggggggaaaggggagggagcgcgggagcggccgaacaagacgaaggggggaggggggaaatgaggggggggggggggggcaaggggcgggggcccaatggagaagagggagataggcgaggcggcgggccgtagcggacgagaggagacgagag

SEQ ID NO: 117771 - DNA, 587 bp, Arabidopsis thaliana columbia
  unsure (1)..(587): unsure at all n locations
aggggcggaaacggggacgcgaaaaaggatagaagcgctttttgttttcgactcacatatattgagagcaggcacgccngcaggnaccggnccggaataccagggttgacccaggcgtccgatcccttaatgaaagaaacagatcctttttttttgggctgacttgggtcaaccaaatcgtaaactctcagaagcattccgatttataaaaaaaagagaaatggcaaattcagaaaacaagtcagctgggaggacgcaccgaaacattttttttttggggggtggacaagggggagcccggcgtatgggaggaaaattgagagtgcatggaccacacgaaaggccacgtcagccggataagggggggcccactatggcaatgaaatagggcccgccgggtgacaagttgaggtgaagggagaagcccgtaaaaatctccaaagcggaatgcggacggcggaagatgtaccttctggcaacgcccgttaaagagagcaagaaaggaaagtagagagccgttgacgtgcagagtcacgtgggggctgtatcgtggcggaggacgggagcgcgcacacacggcgattatg

SEQ ID NO: 117772 - DNA, 565 bp, Arabidopsis thaliana columbia
  unsure (1)..(565): unsure at all n locations
aaacaaatttttttggggggagacagcaccccgccaagaagggggcgccgggggaggagcttggagaagggggggcgaaaaaccccagagaaaaagccggacagggaaagaaaggaggccagaaaagaggacacgcccaaaaacgaaaaaaaaaccggaaaaaaagccggagccaggagacaaagcagaagacgccggcgagagaagaaagaagagaacccggcacagacgaccgagaaaacgcacgggcttgttatcagcggggggcgggggaacnaggagggggagcgaaaaggcggcggagaaaaaggacacgaagaacaggaggggganacccgcaccaggagaggaaggaagggaaaaagaagcgcgggaaagacgagagtaggagcaggagcataggagaaaagggagaggataggacggaagcagcgaggaaagagaaggggagaaggaagaggggagaccaaacgacaagaacaaggagaggggaaggagcgaagagcgggggagagaggaagggggaaggaacagggagaggggcgcgaggaaaagaaaaaaaggg

SEQ ID NO: 117773 - DNA, 493 bp, Arabidopsis thaliana columbia
  unsure (1)..(493): unsure at all n locations
nnnnnnnnnnnnnnnnnnnnnnnnnnnnnnnnnnnnnnnnnnnnnnnnnnnnnnnnnnnnnnnnnnnnnnnnnncttttttttttttttttttttttttttttttttttttttttttttttttttttttttttttttttttttttcttcaaaacccaaggttggggggaaaaaaaatctagacaaaggggtcccaaacccttttgataaaaaatttacaacccacggtgaaactttttttttataaaaaaggaaaaagcctatgttatccccctaaaaaaaaaaaaattttaaaccgccctgggggctcttgaaacgaaaatatgtccacccttcctttgcgcgcaagaggagatcattttggggggaattggtttcaaaaacgggattgtcatttccgggagaaacggggagggcaattggggtaaaaactttgggacaaatgggagagggcattttggaacaaagggggggccacaaagggaacattgttt

SEQ ID NO: 117774 - DNA, 521 bp, Arabidopsis thaliana columbia
  unsure (1)..(521): unsure at all n locations
cgattcnnnnnnnnnnnnnnnnnnnnnnnnnnnnnnnnnnnnnnnnnnnnnnnnnnnnnnnnnnnnnnnnnnnnnnnnnnnncttttgtttttttttttttttttattcacaaacgcagttcaaacttaaagtaacgaaatttagtacactgtatagaattgaaaactgtatttcccttctctactttggtgtgtttaccacctcttgttcactctcttctgcttctactttggttagggactcttaaaccactttaaagccgtgttgaaggatcaaagccattagatttaccattactcttctcaccattcacgaactcgtgatcattatgatcatccatgaacctagcccagaaccaatgcttcttccaaactctctcagtcatctcctcgataggaatattcttagtctccggaagtaggaacatcacaaagacagacataatcaaaacccatgcagaaaagaagatgaatatcccaaacttgaaatggcaaagcatagagaggaaagcttgagcgat

SEQ ID NO: 117775 - DNA, 527 bp, Arabidopsis thaliana columbia
  unsure (1)..(527): unsure at all n locations
cgattaaannnnnnnnnnnnnnnnnnnnnnnnnnnnnnnnnnnnnnnnnnnnnnnnnnnnnnnnnnnnnnnnnnnnnnnnnnctttttttttttttttttttttttcttttttctttttcatatcgaacacgtgggagtgattccacttttaagaaactcaaaacctaggagtacctaggcaaaacccactgtaaaagtgaaaaccaaacaaaagaggcctctgcctatatggttttacacttttttttagtgtgttccgacctgacacctaaaagacatcaacccgtacaagagacgagttaagcggacttaatctgccttcttgacttctccatcaatgggtgaaagcctttcaacaagaggaggatgtgagtagtgataagctgagtacaatggatcagtgttcattgctgataagctctcttcctgcagtttcactagagcaggacgaagatctttggcatacccaagcttcacagaaaaagcatcagcctgaaactcaaacgctcgactaacgaggttcagg

SEQ ID NO: 117776 - DNA, 513 bp, Arabidopsis thaliana columbia
  unsure (1)..(513): unsure at all n locations
atgannnnnnnnnnnnnnnnnnnnnnnnnnnnnnnnnnnnnnnnnnnnnnnnnnnnnnnnnnnnnnnnnnnnnnnnnnnnnnccacgcgtccgcccacgcgtccgcccacgcgtccgcccacgcgtccgcccacgcgtccgcccacgcgtccgcccacgcgtccgcccacgcgtccgcccacgcgtccgaagcatcgaggacgcaacattcgctcgttcctcttgcgaccctgattggtagggagctgaggagcgagaaagtagagaagccttttgtcaagtatggtcaagcagctctcgctaagaaaggagaggactactttttgatcaaaactgactgtgaaagggtacctggtgatccatcatcggctttttcagttttcgggatatttgacggacacaatggtaattcagctgccatatatactaaggaacatcttctggaaaacgtggtgagtgcaattcctcaaggcgcaagcagggatgagtggcttcaagctcttcctagggctt

SEQ ID NO: 117777 - DNA, 515 bp, Arabidopsis thaliana columbia
  unsure (1)..(515): unsure at all n locations
nnnnnnnnnnnnnnnnnnnnnnnnnnnnnnnnnnnnnnnnnnnnnnnnnnnnnnnnnnnnnnnnnnnnnnnnnnnncttttttttttttttttttttttttttttttttttttttttttttttttttttttttttttttttttttttcccaaacataagagtttttttttggcctggcaaaaaaaaaaaggggggatttttaaaacctaaccggggactaaaatcaaaactcaaaaacccggggctcgaccatgcctttttttttttttgggaaatccccacccccgattttgcccaactcaaaaagccccaacggggaattcaaactggttttcacattttccatgggggcagctcctacctgaaactgggagttttctttgaaaacaatcggccccccaacctgggggtggaatatcaggggggggctgggaaaccccaagggggcgcctgagttggtactacttgcagggaaaagttttttagcaggggcaaaagctgggggggggcccccc

SEQ ID NO: 117778 - DNA, 529 bp, Arabidopsis thaliana columbia
ccgccgcaagcaaggagcctctagagcggttggccggggcgtgaaaaacccgacgaaaagcccgcggagagagggagagccgcaaacggaacccgccagaaagcggacataaaccgagggaaaagacgcgaggccgcgaaacagcgaaaagaaccggccagacggaacagaaaagggaacgcgacggcccgccggagaacccgcccttttcaccggggggcgacgaccccgtaacagaggacggcaaagagcggagcgaaggaacacccacgggaaaccacgccgcgagagcggacgccgggcgaaggaagaagcgcgccagcaacgacccagcagcgacgagaagccggccgacaggaacgcagcgggaagagcaagcacgggcgcaaaacacgggagagagaacggcgccggagcgggagccctggcgcaacaaagcgacaagaacggagcgagggagcgacaggggagggccgggaaaaggagccagcgagaagcaaagaggggcggcgggacacaagggcgaaaa

SEQ ID NO: 117779 - DNA, 587 bp, Arabidopsis thaliana columbia
  unsure (1)..(587): unsure at all n locations
cgggcgcggaaacggccacgcaaaagaatagaagacccagcttaatccacacacactgggggagcagcacgccagcaggaaccgggccggaaanaccgggtttacccaggcgggcaaaaacgacagaaaacggaaaaaaacaccaaaaaaaaaacaaaccgacagagaagaaaagcgggcgaaggcgaacaggccgaacggcgacaaaccaaaacgcacgaccccgcaaacgagaaacacgacagcggcagcgagaaaccagaaaggttttttctaaggggcggggcgagaaaggaaaagacggcggaagacggacaaacggggccgcaggggaaggaaagcggaggcggggagcacagcaggaaagaccgcagagaaacgggacaaaagaaacgccgcaagcgaagaagagcagacaagcgcagcagaagagaagacccgaacacccgagacagaccagccgcgtaaaacgaggacccaacggcccgaagacgcccgagggagggggaagagaagcacaggagagaccgaagcgcggcggaccgagggagagcgcgccgagggagaacagcaaagaccaagaaaag

SEQ ID NO: 117780 - DNA, 513 bp, Arabidopsis thaliana columbia
  unsure (1)..(513): unsure at all n locations
cgattcnnnnnnnnnnnnnnnnnnnnnnnnnnnnnnnnnnnnnnnnnnnnnnnnnnnnnnnnnnnnnnnnnnnnnnnnnnnncttttttttttttttttttttttttttttttttttttttttttttttttttttttttttttttttttttaaaaaacaaaaattgggactttgtataacttattcaacgagaattggtaaaatagctgggccagatcgtaaaacaaagagagggcctcccttgggaaaagccaactaagttttggggggggggcaaaatggttcccccccccttatacaaacaggttctttgggaactggttttaccacaaacggtctttggattccctgcccccattttttaaaaaacagctttttccatagatcaggcacataaggccgctcccaaaaagatttcgttttccccatcaaagcccctttagatgcttatccccggaaaacgatttgagaaacacggaacagcttattcacagaacgagatcgccccgggaa

SEQ ID NO: 117781 - DNA, 518 bp, Arabidopsis thaliana columbia
  unsure (1)..(518): unsure at all n locations
cgattnnnnnnnnnnnnnnnnnnnnnnnnnnnnnnnnnnnnnnnnnnnnnnnnnnnnnnnnnnnnnnnnnnnnnnnnnnnnncttttgtttttttttttttttttttttttttgggcgggcataaattgcgtctctagaagctttttagatgtgaggacaaacaactaagtagcaaaatgtacaagttctaaacggtaatgttcatcaaacaaatcttagctgatgaagaacattcactcaagactctgtaaatatcagaacgaaactcaaacgagtttggttctgatggtactgactcaacccactccttttcaacattctgaacatgtgaattcatcttcatgacagcttcaaactcgatttttccctttaatctcttcagaaacttcattgagaatgtcatttccaagttcttgagttcagattcttcggtcacttggatcccaatctctgctcctcttgcgctcacgaaaccaacaagcatgggattgatgtaatgttgtgacggttgtggttt

SEQ ID NO: 117782 - DNA, 522 bp, Arabidopsis thaliana columbia
  unsure (1)..(522): unsure at all n locations
nnnnnnnnnnnnnnnnnnnnnnnnnnnnnnnnnnnnnnnnnnnnnnnnnnnnnnnnnnnnnnnnnnnnnnnnnnnnnnnnnnnccacgcgtccgcggacgcgtggggtaaaccaaaaccaaatctagatctgtgcctctccggtcacggtgcttctcaccggtggccggagagggcttctccctcttctcctttcctctctcttatctcctctgcctctcctttgaagctccggtggtgttcaaatctggcttgctcttcgtctcttgttggtggtatgcggcgagtggtcacgcacggagcaaaggacgtgcggcgtgtctctctccgtttaaggcagtggctttgatgagacgactgtagcggttgtgcggctcctatcgacgggaccatcttccagatctgataaattggtggtgcatcgccatgtttcttcagacatcgtcgttcttctttgatttgggcacaacggtgagttttcggtgtggcagatcttctcttctcgggtctctctacctgtttt

SEQ ID NO: 117783 - DNA, 518 bp, Arabidopsis thaliana columbia
  unsure (1)..(518): unsure at all n locations
nnnnnnnnnnnnnnnnnnnnnnnnnnnnnnnnnnnnnnnnnnnnnnnnnnnnnnnnnnnnnnnnnnnnnnnnnnnnnnnnnnnccacgcgtccgcccacgcgtccggtgtcatgggagaaggagaatgtgtcaagtgaagcacttgaagctgcccgtattgcttgcaacaagtacatggtgaagtctgctggaaaagatgcttttcatttgaggattagggttcatcctttccatgttctcaggattaacaagatgctttcgtgtgctggagctgataggcttcagactggtatgagaggtgcttttggtaaagctttgggtacttgtgctcgtgttgctattggacaggttcttttgtctgttcgttgcaaggatgcccatggtcaccatgctcaagaggctcttcgtcgtgctaagttcaagttccctggtcgtcaaaagattattgtcagcaggaaatggggcttcacgaagtttaacagagctgacttcaccaagttgaggcaagagaagcgtg

SEQ ID NO: 117784 - DNA, 961 bp, Arabidopsis thaliana columbia
  unsure (1)..(961): unsure at all n locations
nnnnnnnnnnnnnnnnnnnnnnnnnnnnnnnnnnnnnnnnnnnnnnnnnnnnnnnnnnnnnnnnnnnnnnnnnctttttttttttttttatcagttctttagtttcatctcataatagttttaaagttgcaaactttatattgattcattcttctttgcttagtgtttacaatataaacaaaaacaaactcatttcttgggtgcgtatctcagtttgatcttcttaacctgtttgtgtgtgagctggaatgacttggccagaatgtcatcgggaagagctccaaagagagaggcgacaagtgattgtgttccgggcaattggctatcgaaggctgcgagtacagatgctggactgttggcaatgttcttctggaaatggatgagtcccttggggaaggtgaaaacgtctcccttgttaaggttcttggcgatgagttttccaagcggtgttacaaaggcaacatagagctgaccttcaaggacgaaaatgatctcggaggcacgtgggtggacatggggtgggtttagggccgtttggggcctattccattccgggacatggaagaggccaagagtgtagaatcccggtagcttttctacattggcttccggtcacgactggacccggtaaaggtgtttgtggccgcaatgttggctaacccttagaagagaacgctttggtggtatttgcgatgagtccttgcaagtgtatccgtgaccttgacccgattaaacaatcatcacacaaacttttgagcctttccgggagggctgtgctcaacaacactgacaacaacacagatggttgcaaaacgcctttcggggggtggatttcttcagaacgaccgtggtcacccgaattcgacccgtcctcgcgacgacttcctagggatccataggcgggggatagaggcaaccttcctggaaatgatgcgtccatttccaatcggccgagctaacg

SEQ ID NO: 117785 - DNA, 933 bp, Arabidopsis thaliana columbia
ctatagaagatttatgacgtcgcctgcacgcgtacgtaagcttggatcctctagagcggccgccctttttttttttttttatcagttctttagtttcatctcataatagttttaaagttgcaaactttatattgattcattcttctttgcttagtgtttacaatataaacaaaaacaaactcatttcttgggtgcgtatctcagtttgatcttcttaacctgtttgtgtttgagctggaatgacttggccagaatgtcatcgggaagagctccaaagagagaggcgacaagtgattgtgttccgggcaattggctatcgaaggctgcgagtacagatgctggactgttggcaatgttcttctggaaatggatgagtcccttggggaaggtgaaaacgtctcccttgttaaggttcttggcgatgagttttccagcggttgttacaaagccaacatagagctgaccttcaaggacgaaaatgatctcggaggcacgtgggtggacatggggtggggttaggccgtttggggcgtagtccatgcgggacatggagagggccaaagtgttgagtcccggtagcttttctacgttggctcccggcacgactgacccgtagaagtgtttgtggcagcatagtggctaagccttgaagagaagcttctggtgtatttgtgttgagtcttgaagtgatccgtgaccttacccttagacaaatatcaccaaacatttgaagcttccgggaagccttggtacaacaactatgaacacccaacacaagggttcgaagacgcctattgtaggggggtattttttatgaacggacctggtcaaccggaattccgaccgccctgaagcgcccactttcttatgggtgcataaacctgccgatactgcatacagctccgcggaaatgttcctcacaatccacactac

SEQ ID NO: 117786 - DNA, 416 bp, Arabidopsis thaliana columbia
  unsure (1)..(416): unsure at all n locations
tacgactcaccttagggaaagctactacgcctgcaggtaccggtccggaattcccgggtcgacccacgcgtccgctcacctattaagccacccactttacaagaccaaccaaccagacatttgttcgatggacattctacattctgaggatgtcattgctactcgatgagttgatgcaactgctgctctctttgatcgaccttctggacaaatntttttttcttctgactggtcactcgaatagagtacaagcgtaaaatttgcaggcgactatgatcttggttagactgcatctgtctgacaagacaatccgcatctggacgaatcctgcggataggaattatgcttgtgggtttacatgcaatgatcattctgcagaggtgcgagctgaactgggcttccacaaatatatactt

SEQ ID NO: 117787 - DNA, 169 bp, Arabidopsis thaliana columbia
  unsure (1)..(169): unsure at all n locations
gggggagaacccccgcccgaggaagaggagggagccacgagagggcttcgagcgcggggggggaaaaccccggggacacaaaaagcgaccccaaggcggcnacacgacagacgagnaagagacggagagagcagacggcgccaggagggaggcagcgccacggagcgag

SEQ ID NO: 117788 - DNA, 709 bp, Arabidopsis thaliana columbia
  unsure (1)..(709): unsure at all n locations
gcctgcaggaacccgggccggaatacccgggtcgacccaggcggtccagagcagaagagagggcagaaagagccaaggcgagaggaggaaagaacggccggaagacccagcgagagagcgagaaagaagaggagagacagcgagacagcgcgcagaccagagaaagcgagaggaggaaaaaggcagaggacggacccccttccagaggggggggcaaccgcaggaagaagaggagaacgagagaagagcgcccccagacgagaaagaaaggagccagaacccgcaggagcgaagacgaaagaggcgagaggacgaagacaagagcagcgggcgcggaggacggacaaagcagagagcagggcgggacgccaggaagcagagacaccacagagagagacgagggagaccagggaggcacganacaggacgaaggtaggggaagcgcgaggagaggaggaggaaaacaaggaggagaaggcagggggcccagaagaggaggcgaagaggacggacgggagcagggaggaaagcgccggcagagggagaggagggggggacagaaggagagaggaagcgggggccggggaggaaagagcgaggggcgggagagcgggggcgcggaggagaacggaggaggagagaggggacgggaggaggaggaggggaggagagcggaggagggaggcgaggagaaggaggagagaggaga

SEQ ID NO: 117789 - DNA, 429 bp, Arabidopsis thaliana columbia
  unsure (1)..(429): unsure at all n locations
nnnnnnnnnnnnnnnnnnnnnnnnnnnnnnnnnnnnnnnnnnnnnnnnnnnnnnnnnnnnnnnnnnnnnnnnnnnctttgtttttttttttatatgattttttcctgcttttgattttttttcatccaaacttagagtgaaacgtactacttagctacaaaagcatgacagagtgcttactaccttaaaaacagaattacatacgcggaacatgagaatgtacagtctcttctaaacacattcttttatgcagagcagggccatacaatttcaagctcaaaatcctggggaattctttgctgatatacgagtcaatggctggaccgaatatctctatatacggggatcggttcatgcgacgggacctggcaatttcgatttgaatatgcatctatacaatctttaggctcaatatgtctcatcttcttg

SEQ ID NO: 117790 - DNA, 545 bp, Arabidopsis thaliana columbia
  unsure (1)..(545): unsure at all n locations
atgatatgccagctactaatacgactcatttagggaaagctggtacgcctgcaggtaccggtccggaattcccgggtcgacccacgcgtccgacgaatcacattgttgtcgtcactggtgacataatagtcaaaatctctttaacacacatatcttgatagccaacatcacacaaacatacgagtttccaataattaaatattactagagcatacatctctttgaggaaaaattccaatgttatgacagagaggaggataatcttcaccggctatgatgtcagcagaaggattctggaacatgaagaagataactaagagcacccacaacaggaacatctagagaaggtttatcgacgagcggaccaagtcantggagaggataggtcgagtacgatacaaggttgagagccagggataacgctcagctagctaggatacataagctagccgtctagggacgcggctatactgaaactgaaacaagaagagcttgttagacatccaggcggctctagactgactacaccattctgagacacaggt

SEQ ID NO: 117791 - DNA, 445 bp, Arabidopsis thaliana columbia
  unsure (1)..(445): unsure at all n locations
ttaggtcnnnnnnnnnnnnnnnnnnnnnnnnnnnnnnnnnnnnnnnnnnnnnnnnnnnnnnnnnnnnnnnnnnctttttttttttttttatccagaataaagtcaaatatatcttattttgttctatatgaagaatgaaccatatattaccacattagacctagcctattataaacaaaccacccgcatgatcttcagaatgacttgggtggaataacccctgccataatcttcacatatgtgttaaaagtcccgaagaagctggggaaaaatactctctagatgagtagcttcaatcttttacattccctcagctacagcgattatagcaacgcgctggacagactctgagacaaaactcttgagaagatcacagccgagttttaaagcatttgcgtttgcagaaacaagcctgttctttttggatgtcccataacaacgctag

SEQ ID NO: 117792 - DNA, 602 bp, Arabidopsis thaliana columbia
  unsure (1)..(602): unsure at all n locations
nnnnnnnnnnnnnnnnnnnnnnnnnnnnnnnnnnnnnnnnnnnnnnnnnnnnnnnnnnnnnnnnnnnnnnnnnnnnnnnnnnnccacgcgtccgtgcactccttgatcggagctgtgttgtgaatcgcctcactgtatattctctgccgctgtcgtattaacttctcaaggacacttaaatagaggctcaagatcgtgatggtactaatcaatacctcagatttatgatctgaactgacgcacatgtctaaccgcgttgaagacgagccattgcatgaacagtagagaaacgatgccatggatactacggagactgaggttgctctagctatcgaccacgaagatcaaactggcttatgatacacgcagatgctgtaatacagaacgggaaacttgtaaacatgactgtctgagacagatgggctcagccctgctataatcgatgaagatcaggcactggaagagactcgagctactgattctgagaggattgttgccctcatcctcctggactgtgatgactatgtaaacatgataacacgcatgattacacacactgtataccagagatcatactacaggtgtgggtataatcagataag

SEQ ID NO: 117793 - DNA, 484 bp, Arabidopsis thaliana columbia
  unsure (1)..(484): unsure at all n locations
nnnnnnnnnnnnnnnnnnnnnnnnnnnnnnnnnnnnnnnnnnnnnnnnnnnnnnnnnnnnnnnnnnnnnnnnnnnnctttgtttttttttttttttttgcttttacatttggttttttatttatacgcgcgaaattttgatattacttctttcaaattccattgggctaatcaaatataagggaaattaaatttttggcccacgcgtccccccactcatactgaaactctttggtctaccgannnnnnnnnnnnnnnnnnnnnnnnnnnnnnnnnnnnnnnnnnnnnnnnnnnnnnnnnnnnnnnnnnnnnnnnnnnnnnnnnnnnnnnnnnnnnnnnnnnnnnnnnnnnnnnnnnnnnnnnnnnnnnnnnnnnnnnnnnnnnnnnnnnnnnnnnnnnnnnnnnnnnnnnnnnnnnnnnnnnnnnnnnnnnnnnnnnnnnnnnnnnnnnnnnnnnnnnnnnnnnnnnnnnnnnnatctcgccat

SEQ ID NO: 117794 - DNA, 618 bp, Arabidopsis thaliana columbia
  unsure (1)..(618): unsure at all n locations
atgatctgccnnnnnnnnnnnnnnnnnnnnnnnnnnnnnnnnnnnnnnnnnnnnnnnnnnnnnnnnnnnnnnnnnnnnnnnnccacgcgtccgcggacgcagtgggcggacgcgtgggcaaaaagttaaatgtacattattctgtgtacgtaaatggaatctacaataatgaatatcaaactctgcgcggagataagggtgaagatgctaataaaaggcaagcaggagaaaaatcagagggctggccgtctaaagagatccaaacttacatacgcacgcatgaaaggatataattgttctatcggagcacctaaatacaatgcactggccgttgttttacaacatgatgacgtggaaaaccatggtgtccccatctaaatcgccttgtagaaatccccctatcgccatctggagattaacaagatggccggacaataccccttccatcagatgcgcagactgaatgaggaatggaacactccctgtagcgagacattaagcacggcgggagtgggaggtacactcatggtgaccgtacacattgcatgtgcctagagcacggctttggactttctgcccttactatctcaccacataacgcggggtttccgcgataag

SEQ ID NO: 117795 - DNA, 875 bp, Arabidopsis thaliana columbia
  unsure (1)..(875): unsure at all n locations
nnnnnnnnnnnnnnnnnnnnnnnnnnnnnnnnnnnnnnnnnnnnnnnnnnnnnnnnnnnnnnnnnnnnnnnnnnnnnnnnnnnccacgcgtccgggaagcagtctcgtcttggtgttgtgcagacagcttacgcgaatggtgcgtctactgattacctaaagcatttgggtttagatgttgtttttgctaaaactggagttaagcatttacacgagaaagcagcagagtttgatattggaatctactttgaagctaatggccacgggactattctcttctcggaatctttcctatcttggttagtttccaaacaaaaggatcttacggctaaaggtcagggtggttctgaagagcacaaagctgtttctagactaatggcggtgagtaatctgattaaccaagcggtaggtgatgctctaagtggagtgctcttggttgaagtgattctacaacacctgngatggtcgatagagaagtggaatgagctatacaaggaccttcctagcaggcagatcatggtcgaagttccagatagaacagcggttgtgaccacaagcgaagaaaccgaggctctgagacctatggggattcaagatgctattaattctgaaatcaagatgtactcgcgtggcagagcttttataaggccatcgggtacagaagatgtggtgagagttatgcagaggcttncactcaagaagatgctgattctttggctaattctgggctcagctcgtcaaagcttccttgttcaagctaaagaacctctgatntctgaagagtatgtaatgggagatttttaatttcttgtcactctaagcttactctttgtgaaccgatgacagtttttctcactttttgttaaaaaaaaaaa

SEQ ID NO: 117796 - DNA, 281 bp, Arabidopsis thaliana columbia
  unsure (1)..(281): unsure at all n locations
acttagaagagtctatgacgtcgcctgcacgcgtacgtaagcttggatcctctagagcggccgcccttttttttttttttttttattctaaaaatcatatttgcttctttttgttcgttttcgcccaccaaatccatcataaatcatatcacactgtatggtgtaatgtacgcagacaaaacttaacaacccatatncaatcgccgggaaatatgaacactttatcttcattgacgtgaatgtatcatacatattcgtagaaagggaggatagtgtctgct

SEQ ID NO: 117797 - DNA, 472 bp, Arabidopsis thaliana columbia
  unsure (1)..(472): unsure at all n locations
cnnnnnnnnnnnnnnnnnnnnnnnnnnnnnnnnnnnnnnnnnnnnnnnnnnnnnnnnnnnnnnnnnnnnnnccatcgcgtccgctgtatctgtactgggaactaggtgactcatggaatctttacggactctcttgtactgatgaatggatccttatctactttgatgctctccgggcgctgttctacgatgctggatatccgattacttatcttttctgtcttggctcgtgatccgagccaagcttgtaagatgacgactttgattcacgatttggatttgattgctgtgatctcagatggcatagagtgagggaatgttgacggatggacagtggcaaatgcttgatatagcaactcataagttctggatgttagacatgatcgcctaaatgtcatcctcttctttgctgatctgaacatatagtctgccactggtggcctaggaccaattgctgggattgctaataggc

SEQ ID NO: 117798 - DNA, 336 bp, Arabidopsis thaliana columbia
  unsure (1)..(336): unsure at all n locations
atacgactcactttagggaaagcacgtacgcctgcaggtaccggtccggaatcccgggtcgacccacgcgtcggctgatgtacgggattagtgactaggctgagtagaaatacatcgatcgatcaaggaacgtggaacttcgatgctggacggcgatagagctggtgctcagaaagcaatggattgtctagtcggagctgactctgttatcattcctgactgcgagaaagacaaatctgtcaaaagaaatgcacatcatgactacaagcacatgactgcagagatgcacgcatttnagctggttgtcacgaggttagtcctggagctagcatggat

SEQ ID NO: 117799 - DNA, 139 bp, Arabidopsis thaliana columbia
  unsure (1)..(139): unsure at all n locations
ctatagnaagatttatgacgtgaaactgcacgcgtgcatgagcgtgggatcctctagaacttgccgcctcgtttgtcttctgtgctgtcggccgacgaaaaaaaagctctcgggtacttatcgaaatgaataccgtcgc

SEQ ID NO: 117800 - DNA, 130 bp, Arabidopsis thaliana columbia
ctgcaggtccggtccggaatcccgtttcgaccacgcgtcagcccaccatatgttatgtcgatctcatgacaatgtgtattttactgtctacacagcacagatataggaaaagcaaagcgtcctagatcaa

SEQ ID NO: 117801 - DNA, 832 bp, Arabidopsis thaliana columbia
  unsure (1)..(832): unsure at all n locations
attaggtacaactatagnagagttatgacgtcgcctgcacgcgtacgtaagcttggatcctctagagcggccgccctttgttttttttttttttttttttttttttttttttttttttttttttttttttttaaaaaggggggcaaattccattttaaaacaaaggattttggcaaacagacccccccaaactttttgggggggaaaagagagaaaaacaaaccccatttttcttttttgggggcaggttttaaactaaaaaaccctcaaacaaaaaagggggtttttgttcctaaaaagctaaggggttaaccttgaaccggaaaataagctttttttggggcgaaggggggttttaaacagttagaaaaatcctgccaacttctccaacttggaaggttggaaacaccaccagtttttttttggaaagaattttccccggttttggaaggatcactggatacccttttttgttttcgggaaaaaactcggttccataaaaaacctcccatcccattatttttttttcccaacaagtggaaatttctgggaaaaaaaattcgaagggtgggtttagagtggggtaaacagaaattcggggggggattttttgggggggaaaaccggatcaccctggaatttccccctttggccccctttttgaacgggaactggtggggggattgtcttgggagggtgttggcaatttggagggccgggaaaactatgtgggtttggacttggggaaaagagggctataatcttttgaacggcgggccccccgggaattggtaattttttgtaagacaacaagggattgcttaaaaaaaaa

SEQ ID NO: 117802 - DNA, 683 bp, Arabidopsis thaliana columbia
  unsure (1)..(683): unsure at all n locations
acnnnnnnnnnnnnnnnnnnnnnnnnnnnnnnnnnnnnnnnnnnnnnnnnnnnnnnnnnnnnnnnnncttttttttttttttttgaattgaatcttcttttttagtttatattcactattcaaaaatttcattttagttttacaattgttcttacctctttcccaagaaacaaatcctaaaaacgaaccctagtaagtagtaaaagaattgatttaaaacggcatgatatgtgtcgttttggtgtcgtaagccgaaaggcaagatcttgaattcaccttgaagaccttaagaagatccgttaacatacgtctaacggcgggagagcaattgctctgtaacagtaacagaattttcgtaactccgttaacacttgtaacagcttccaaagctttatcttctttgaatagataagaaacactccacagcaccgtcacggcgtgctccgtcgccgccgttgacactttcatcagcttcttaaccaccgtcttcaaacactcgccatctccgccgcatatttccgatctcccttcctttgtagatgctaaaatctccagaagcttcaagcatttctccgtcaccgaaacgctcaacgacgacgttgaatctgataacagtttcgtaacatctccgatgagtttctctcggaggagattgagtttcacacgttcggggagctaatcgc

SEQ ID NO: 117803 - DNA, 175 bp, Arabidopsis thaliana columbia
gcacgcgtgacgtgaagctgggatcctctagatcttgcggccttttttgttttcttttggctcagtaacgggtgtattttaacaattgtactagggaggaggggatcggaacaagtgtgaatctgaggctgaagggggatgcgcaccaatgggaagtaagcgcaagcttactcct

SEQ ID NO: 117804 - DNA, 550 bp, Arabidopsis thaliana columbia
cacgcctgcaggtaccggtccggaattccacgtgtcgacccacgcgtacgcccacgcgtgcggttaaactgagtgctgaattgcttgtgagacggtgctagatctatcttacgtaagatgagagcaaaagagaaataggacagaggcatttatactactttctctggggtgggggtactatgaggcgacgttccttctttacaaggtgaaggcagcaaagatgaggctcttagagacaatgatctggcagaggggcagaagaaaaagaccgagtcggctgctggggggaagctaggaatgggggctcagagaatggatcacagcctggagaacatatctcggtgtgatgatggagtggagatgtcagctgtgctgcaaccgacaatgcatcggagaactagaatgaatctgggatgtactgcctgaaggcagaagcaaacggaaatagagatatacatcagaaaaaagaacaggatgagttgggcgacctctccaccctgacaagaattgcaacccggtggctcagcttaatggtaattggagaggcaag

SEQ ID NO: 117805 - DNA, 765 bp, Arabidopsis thaliana columbia
  unsure (1)..(765): unsure at all n locations
ttaggacacnnnnnnnnnnnnnnnnnnnnnnnnnnnnnnnnnnnnnnnnnnnnnnnnnnnnnnnnnnnnnnnncttttttttttttttttttttttttttttttttttttttttttttttttttttttttttttttttttttttttttttggaggggatttttttttgggtaaaaaaaccggaaacaaacctttcaaaatgatttcaaaaatgggaatccccaaaaaacccttttggggatcccaatttaaagtttcatgacccccgcaaaagggcccataaaaattcccatgtaaaaatggcccgtaaacccgttgacttcactaaacaaagttttcccaaactcttttttgaggaaaatgggctggaacacttttccattaacgtctaatttgacccccctaggggcgggaggcataacaaccttgttcaccaaaaaggggacccaaaaatttccgggaaaacctaccctcctgatgttggcggggttcaaaacaaaacttgaaaagtcttcaatagttccaactttgggccctttaatccaatatttcttgaggggaccctttataaacccgctaaccaacacaaatgaaccctttgagcttactggacaaccagaaggccccttttaaccttcccttaacccaaacacgggtttgggccctggggcgatttgaacacttccccctccgtttttatcccactgaaaaaccttcccggggccaacttggacgaagaaggaaataacaaccccgggggggaaca

SEQ ID NO: 117806 - DNA, 940 bp, Arabidopsis thaliana columbia
actatagaagatctatgacgtcgcctgcacgcgtacgtaagcttggatcctctagagcggccgcccttttttttttttttttctgagataaagaatcatcactggtacctcatgagccgaagtagcctcatgggtatcaacacttcgtcatctcgtcaactatcagatgaacaaacaaataaacgcttatacatatatcactcgatcagtaagaagaactgtcttttttagctgacttatcatcacatacgatgtcgcatcttttatatttactatcctcatatccgggaatggcagaagagaacactaacgcttgcgtggcgtacttccccgggatagagagcaccactcttccaaccgaaggctttagccacttgctgtaaatggcccatacttgaccgtgaatcccttatgaaaacatgtcctccggggcctaacatacggtccatctacagcataatgaaagctgagtttgaccatcttttctcacaggaaatagaaatgcctcatgtttcagaccatatggttttaggttgggcgtacttggttgacaccagccgggcatagtgccttggagaccatcgcgcgtgataaccttggaggggcttattgccttcactgaacaagggtatgaccagcagggagcccaagatttttgatgctgtgggaacctccaaaacagttctcttgtgcgaacaatataagtctgactctttcaaagtaaactctacaaacattttcctatacaagctaaactaacccggcctcgtaaaaccttacggagtggtccctcctttaaagagctgtaacatggtgggacatgagcacgccagcaatagggatacttccccaatcgatatggggggtgggacccggaaatcagccggacgggggaaaattttcttgcgcgctatagattgtgatagaaaaaacctcctgg

SEQ ID NO: 117807 - DNA, 233 bp, Arabidopsis thaliana columbia
  unsure (1)..(233): unsure at all n locations
tgatatagccagcannnnnnnnnnnnnnnnnnnnnnnnnnnnnnnnnnnnnnnnnnnnnnnnnnnnnnnnnnnnnnnnnnnnccacgcgtccggatgctggttatggggctaatgtcttcctactgggctgcacgtattcatgagtcctgcctagaggcttccaagaattcatgatggatgcgggacatatgaccgaaagagatattattaacggcagagtctatcattttag

SEQ ID NO: 117808 - DNA, 782 bp, Arabidopsis thaliana columbia
  unsure (1)..(782): unsure at all n locations
ttctnnnnnnnnnnnnnnnnnnnnnnnnnnnnnnnnnnnnnnnnnnnnnnnnnnnnnnnnnnnnnnnnnnnnnnnnnncttttttttttttttttttttttttttttgctttttttggttttgtttcatatggcttgtaggtgttgttgaaaagctttgttctctcatcaccagaaatgaccgtcttcatccatcacccacctcacataaccttcaggaatcccggaaatggcttcttcttcttctttatttccctttctactggtggaaccaactgtttcaacaacacaaatttctgactctatttttctactttcagggatggtttcaaaggatctaaccactgtggctcttccgcaactctcatcttcacaagagtttcctgaagagatacccaatccatatcanaagctgcacatgtacattgctcaccattcccatcacagcagaagcaatcgttttcaagaatatcatctaaacctaattcctctaatatcggtggggggagcactcaaactagcagcaatcttggcagtttcagacgttgagatctccggtgctgaatctgaaagacctttaacttcttcatctttttcagctaaaccatgtctacctactgggtccaatgcggctggactgctctcgcttatgatgctactttctgatagagatcgtttatcggcgatcttgaaggctctggtacgaattgggcaaaaatcttgctgcngttgaatgctgatcagaacccattcccatagcgctggcttatctgattggggctg

SEQ ID NO: 117809 - DNA, 480 bp, Arabidopsis thaliana columbia
  unsure (1)..(480): unsure at all n locations
nnnnnnnnnnnnnnnnnnnnnnnnnnnnnnnnnnnnnnnnnnnnnnnnnnnnnnnnnnnnnnnnncttttttttttttttttttttttttttttttttttttttttctttttttttttttttaaagagagaggcaaaatccattttaaaccaaaagattttggcaaccagacccccccaaccttttaggtggggaaaagagaaaaaaacaaaacccattctacatttttggggccaggttttaaactaaaaaaccctcaaacgaaagagggggtttttgttactcaaaagctaagggtttaaccttgacccggggaataagcttttttttgggcaaaggggggttttaaacagttagcaaaaccctgccaacttccccaactttgaagctttgacacaccaccagtttattttcggaaggcttcttcctcggtttcgaagagaaacgtgaaccccttttttgtgttccggaaaaactgcg

SEQ ID NO: 117810 - DNA, 851 bp, Arabidopsis thaliana columbia
  unsure (1)..(851): unsure at all n locations
nnnnnnnnnnnnnnnnnnnnnnnnnnnnnnnnnnnnnnnnnnnnnnnnnnnnnnnnnnnnnnnnnnnnnnnnnnnccacgcgtccgggtcactgaaagtctctgaaaccaccaccaaagagaaaaacagttctttagagagcatcaaagctccgaggaagagagagagagacgctatggaagcattgaactaacacaactctaaatttctaatttacggtttgttttagttctatacattatggggaagtctacaaaatggttgaagaatgtattgcttgggaaaaaaacttctaaatctagtggttccaaagacaaagagagagttgtgagtggaaaagaggtactggttacttcaaaggtggaagaatcagatgtggtatcagatcttccatcttttgaagttgcagagaccaataccgttgatagaagtggtggtatgttagagactcanaatgtaggacctgaagagatctcagatgatgaaattgagcttcctgaaggaaaatcaacagattctcagaatgttgcacctgttcaagatcattcattatctgatgcagagagaatccaacgagagattgcagctacttcaggggaacaagcttgcaatcctacagatgcttaccttggaatcaagaaactaacagccaatgcttttgctcagaagcttctcgcttcatcaccaaaagtgctacctgtacacgcatatgatacatccaatccaaactcanacttgatctggntagagaactggtcagcctcatgcttctgggaaccagntnctcatccgaagataacgatangcagaanacctcagaacagggctttagtcgaggctgagtctgctaa

SEQ ID NO: 117811 - DNA, 421 bp, Arabidopsis thaliana columbia
  unsure (1)..(421): unsure at all n locations
agggaaagacggcacgcctgcaggtaccggtccggaattcccttgtcgacccacgcgtaccccgatcttttttgggatgaggattgcactaagagtaaaactgcctagttagggattgtacttttagaagatgctgttagtttgttactaagagatgcttccctccccctatgtctgttatgacatgggcagcggagaactgttctcattactacgactangggtgaagaccacgagctgttagtattggctaaccatgccaaggagctagtggtgaatgagaagagcagtgtggggagaggacgcggcgggtcggctgtgaatcgtatcgaaaagtaaactgagagggacatgacatagaccatcaactaacctatattttaagactcagatttttagcgaataactttactaaactacc

SEQ ID NO: 117812 - DNA, 690 bp, Arabidopsis thaliana columbia
  unsure (1)..(690): unsure at all n locations
nnnnnnnnnnnnnnnnnnnnnnnnnnnnnnnnnnnnnnnnnnnnnnnnnnnnnnnnnnnnnnnnnnnnnnnnnnncttttttttttttttttttttttttttttttttttttttttttttttttttttttgagcgaattgccaattttttttatggggaaaatggcccaattttaatcaggagaaaacgtttacacaacggtaataacaacaaatgcccaaaaaggttttcaccaaaaaggcaaacgctggtcctaaccttccttgccttaaaaaaaccttgcctttcttattttaaaaaaaaatttcctacaaaaatgacccggcctttgaaaaaaaatcaccgcccgcttggtaaaaacaataactcgccgaccggtgcctcccggataccaccttcccgtatcgggaggcgaaccaaatttccctataagaatgggcataaaagcttcccgaaagaaagggatatccggtcccctgtgcaaaaatgtttccgcccggaaacttaaaacgtaatgcctggggggcctaaagagggaactccccgcgttacttaggtggggcccactgcccttttttcggggggaaacctgcccgcctccagataaaaacccggcccccccccgaatatggatttgcaactgcgggcaaggggtttttttttgccgcaagagggttttttttctccctt

SEQ ID NO: 117813 - DNA, 342 bp, Arabidopsis thaliana columbia
  unsure (1)..(342): unsure at all n locations
actcgactcctanaggggaagacggcacgcctgcaggtaccggtccggaattcccgggtcgacccacgcgtacgcgcgacacaccaacaccaatgtctgcgtcttctgtatttaatctcccattgattcagctcagatctctcgctctttcgtgttctttttgttctttccgattggcccatcgggctctgtcatcgatgtcaccgaggaaagttaccttattttggggctgtctgtggcgccggtatgacagatgctaaagatgctcgcatggatgctggggacaggctgctgatgctggggggatgaatgcgtgggtgtggatgaagcgtgtagggaggg

SEQ ID NO: 117814 - DNA, 369 bp, Arabidopsis thaliana columbia
  unsure (1)..(369): unsure at all n locations
ttaggtacaactatangagagtctatgacgtcgcatgcacgcgtacgtaagcttggatcctctagagcggccgccctttttttttttttttttgtatgcttctaaaacatggtgggtgtatgatatgcagaaaccttataatacaatggagatcagctaagatgcttacagagatatgtcacatatgttatctgaaacacgtgacatgagacatgtattttttctggaagtggaaatatcagagagctcctctagggaggatggtatcgcactgaagagaaagtggtccccggaagtttgggatgaaagcttctggccaattggtcgacataatgaatcttaagcttgctctctaaatgacgactacca

SEQ ID NO: 117815 - DNA, 466 bp, Arabidopsis thaliana columbia
actatagaagagtctatgacgtcgcctgcacgcgtacgtaagcttggatcctctagagcggccgccctttgtttttttttttttttttttttttttttttttttttttttttccccaaattaattaattatccctcagttaaaattcggaaatctgaatctacaattggaaaatacccaagaaaaatttaaataaaaatctctcgcccagaatcaaatatttttaaattaaaaagtgagggctcctctctccaaaaaaactatctccttcatcaaaacttcatcattctgggacgacgacactggcaacaaccaaaaacaatatcaaaccctaattttgccatctccttcccaaaacaaggtcaaaatcattaaaaatttagccccgaatttaaataaaaccttcaaaattaaacctctacccaagttcaatcccttccgttggcaaattattaccaacatttttt

SEQ ID NO: 117816 - DNA, 578 bp, Arabidopsis thaliana columbia
  unsure (1)..(578): unsure at all n locations
ccgggggcttgtggggggaaccgggggcgggcagaggaagggaggatggaagtttgcggggcggtgtgaggcccacaaactcaaagtcacagtaggccctgtgtagaatgtacctatcatgcacgagaaaaatgaacagcgctagaggcacataaagaagaagaatgatcgacaagtaactagtgtgataactggtgacatgcaaactgtgttattttttttttatagcggcagcgtggttggacgtaagagagatgtagacggaagagatacatgagtctggagaggtgggtgaatcgtcgtggtaggtcgaataagtggagggatagtaggatgtattcgtcgcgtatagtggttgaggaacgtcagcttatgtctaccttaatattgtatagcagatgtgagtagggatgatgtgccgaggtaggtcgtcaatatactacaccgctgcctcaatccacatcagtgacattgtattcatgattactcatcttagtgttatgatcgcgtgntgcgattgtgaatggacttgtagtgcatttaacagacaggttcacgtgatgatagcgctcggcggg

SEQ ID NO: 117817 - DNA, 537 bp, Arabidopsis thaliana columbia
cacgcctgcaggtaccggtccggaattcccttgtcgacccacgcgtacgcccactcattcgtacacacttacggaaatatatagatacaataaagacccgagacgagctatgcatagaacatatatttctgtgtatgtggaagagatggcagcagctcttgatctgcctcgaggaacagagggagcgcctttttttttgagagtgcctaaaaaagggagcagagaggcggctaggatcaccccacacaggagtgaagggggaaaagacacgattagaaggggcgagcaccgtgcagacgggcgcgagcagagggaagagaagcgtgacgcagatagtacacatggctgatatgccacgagaggaaaccgctcgggagaggacgagcgagaaagacgcagttaaacgtagacggaagatagaaacaagagagtgtagacggagacgcggcgagagcacttcgcaacggagagatacatcggtaaactgagctcgacccccaccatatgaacaaccagtactacactagaaacgatcaa

SEQ ID NO: 117818 - DNA, 493 bp, Arabidopsis thaliana columbia
  unsure (1)..(493): unsure at all n locations
nnnnnnnnnnnnnnnnnnnnnnnnnnnnnnnnnnnnnnnnnnnnnnnnnnnnnnnnnnnnnnnnnnnnnnnnnctttttttttttttttttttcttcatgacactcgtaaagactattagtgatgatttcgtttacacagtagatatggataagactatatgctttctttcttgttctcaaccagaaaatttgctgttacggagagaatcgtacatacaggtcccatagggtttagtgtcgtgggtccttcaaaaagaatatgagtgcttacaacccaccgatggctatgcctctacgtatacggctgcctttatgcatccatcccctgtgttacgcaggaatgtcttttgtgaacactggctcttcactttgaccacctactgaagggcgccactgctttgcgtgatatttaacctgaatggacactctatacccatcagttgctacactcaccgaatgatatacacattttacatacgtttctaccatggg

SEQ ID NO: 117819 - DNA, 617 bp, Arabidopsis thaliana columbia
  unsure (1)..(617): unsure at all n locations
nnnnnnnnnnnnnnnnnnnnnnnnnnnnnnnnnnnnnnnnnnnnnnnnnnnnnnnnnnnnnnnnnnnnnnnnnnnnnnnnnnnnccacgcgtccgggcacgcgtgggctagactcctgagtggagagttgctgccttacttccatagctataatgacgtgtgatgctggtgtcaagcaggtccaatatgaacctatcttagcttagataaagattaagggcagactgacaatatccatcaactctctgtcctccgagaaaaacactgatgctcttcgaagagaagggataagcgatggagattacaaaagtcatgtgccgagacgagacccatattgttgatccgaagatacgagagagcaagctgcttcatgtagctctggcttgtgatgagattcgtgggaatacagagtgtgttcgaacaacatatgctcactcaactgctgatatggataaatgagcgccatcatgtggaacaggggactacgccagatgcaaacgagctgatatgcatgattgctcctncgccgttgtgagagcacatacctcattcactgagttctatgactattgcatgctactggaacgagtataacgactgatacctggtacaggaga

SEQ ID NO: 117820 - DNA, 284 bp, Arabidopsis thaliana columbia
  unsure (1)..(284): unsure at all n locations
nnnnnnnnnnnnnnnnnnnnnnnnnnnnnnnnnnnnnnnnnnnnnnnnnnnnnnnnnnnnnnnnnnnnnnnnnnctttgggtttttttttttgctttttacctcgagattgttcataggagcaaaccacaccaattccgtacgagtggtcgaacatatgtcctattcaaggaaactgcatctattttagaaacactaagaaaaaaacgacatgggaatgatggaacactaacagtcggtaacctagaacgaatccgtaaaagactttagttccgcatgaacttg

SEQ ID NO: 117821 - DNA, 398 bp, Arabidopsis thaliana columbia
  unsure (1)..(398): unsure at all n locations
nnnnnnnnnnnnnnnnnnnnnnnnnnnnnnnnnnnnnnnnnnnnnnnnnnnnnnnnnnnnnnnnnnnnnnnnnnnnnnnnnnccacgcgtccggtttatagtcacatcccttatcactggggatgagttgccctagcctgcgaggtgatacatacgcgttcttattggaagacctgagactgctcgattgacccgatccattgatagtcggaacgtattctgtggagactatgctgaggcaaatagtgtcacacgagcactggcttgacctggaactatcgacacactagcctggtctgacagccttgatatgtactgacgatcctttacaggctcatgatgatgtacactatgacgaagcttatgacgactacaagactgactaagcgtcttactag

SEQ ID NO: 117822 - DNA, 879 bp, Arabidopsis thaliana columbia
gctggggccgcacggagagctttgcgcgggggggaaatccctttgggggatggagcggaggggcggtaggtaaaacagtggcgccgagtgagagtaccgcagaggaaatgataccgcccttactaatgaaggaaatacgccatgatactaacaccatgttttcgacgtcgcgaacgcgaggggttttttggtgcgctctcacgaccgcgactcgagcaaattgcctctgacgcagcagctctccatgtaatgttggcacaaaagtataactgtccgcgtccaattacacgcatccacggtgcaatgatctggaatcgccacccgaccagcgctcacgcgcaccggagacacccctatccctaccgtgccatcaccgagctccgtaccgttaattcagacctccgacgcagccgtctctaggacagctcagcgccgcaaagaggcggaatcggtttgcacttaggtagcagccaactctatctactacgcccagctcacgaccagcgtctacactagtacagcccctctcccatggctcgaacccgctggtatctgaacggtacgaacactatcagacgtactaggcacaaaagtaacgtccgagacgtttaggcaataccctccactagctctccacccacattgcgccgtgatgtttggatcacatcccccccctatccgctcgaacgctcaagaacgcgagatccgctcacgttgcccgcctggtcccccgcctccaagagcgccgcttccgacggtggctactggacctaggagcccgacgcacataacgcaacgatgcgacggccgtgcgatgcgcctagacccaccagacccccaagccgaatagacacgtcgacgagtgtcatcgcgcggctc

SEQ ID NO: 117823 - DNA, 443 bp, Arabidopsis thaliana columbia
  unsure (1)..(443): unsure at all n locations
nnnnnnnnnnnnnnnnnnnnnnnnnnnnnnnnnnnnnnnnnnnnnnnnnnnnnnnnnnnnnnnnnnnnnnnnnnnnnnnnnnnccacgcgtccggctcctctcaccatttcttcttcttcttctctctaaaagaaaagagacttcaccgattcttttttattattccttcccagattttctcgggaaattaattcttttcctcctctttcttctcacttgttgttgttccttaacactctcttcctagatctactattaactgatttcatttcacgactaaaccatcgaagtcttcggcaggatatggatcttgttctgttctattaaacttgcttcaatcgagaagtaaagaagaatcccgattccacagatggaactatgggcctgtggatcagacccgtttaaccagatcgtgtcatcaaaatcttcgttgcccatttct

SEQ ID NO: 117824 - DNA, 388 bp, Arabidopsis thaliana columbia
  unsure (1)..(388): unsure at all n locations
tttatannnnnnnnnnnnnnnnnnnnnnnnnnnnnnnnnnnnnnnnnnnnnnnnnnnnnnnnnnnnnnnnnnnnnnnnncttttttttttttttttttttttttttttttttttttttttttttttttttgaaacttaccgcctgaccgagtaaagaccgaacgtatttaaacatcaccgtccttaagcattccccagaaaagaaaaaacccggcacctgggtaaccgcggatcctgtttgctgggggaccaaattatttgttaaagaaacaaggggaaaacaagaggggggttttttacaagaggtttttaaaacaaaatatctcagagggcttttcccctggggggtatgcacctgacgacttatccctaaaggcaccgttttttg

SEQ ID NO: 117825 - DNA, 842 bp, Arabidopsis thaliana columbia
  unsure (1)..(842): unsure at all n locations
atgatcctgccagcaannnnnnnnnnnnnnnnnnnnnnnnnnnnnnnnnnnnnnnnnnnnnnnnnnnnnnnnnnnnnnnnnnnnccacgcgtccgaagagacaaaaacaacttgaagataaagggatgaggaaggcttactacatgatggacaacattgcttccacacaaattctcataatagaaatcttataatacacatacttacgtgataatcattcaatctagtcccgatgttttaaggctctgtttcttgactgatacaaattaagactcttaaacagcatcctaacgagaggaaactgatgaacacaacaatggagtgttcgtggagatgccaagcagaggattgctaggattctagctcatgtcactcctcagatggacgccaagaactctgtagtcgcacgggaaaactgcagagctaaagataggtaatccaggattcaaatgtagcatttcttggagctgcaggtggaattggacaatctgtatctctgctgatgatgatgaacccttctgtctcttactccatctatacgatgtngtcaatgactctggcgtactgctgcatcagtatatggcactgagctgtagccgcggttcttggagcaagcagcttaggatccctacggtatggtcttgtgactaccagcggttaccgcgaaacaggacgacccgatgatcggcaagcaatgtgggagggtaacacttgtgaggcgcgcgatgtgactatgtactgcactgtcccaccgtggacttctgtccatgcgtgagtttcagaagtgactatacctaaagtctggttatcctcatgtgtcggcaccatgtgaaagtgtgcct

SEQ ID NO: 117826 - DNA, 368 bp, Arabidopsis thaliana columbia
  unsure (1)..(368): unsure at all n locations
acgcctgcaggtaccggtccggaatacccggttcgacccacgcgtacaaccactcttagagnccgagcgaaaccgaaatagaagatacagataacgcggcaagaccccaccaccaagcggaggcgaggacggacagcaagggcggacggagactagaggggagacaggagcagggcgcgacaggcgaagggaggagggactcttttcctttcaggagggctcaagaagcagagcgagcgaggagcaccccagcggagagaaggcgaccacgcagagcggggcgaaagaggaagcaacccacccagaagcccagcacgaagcacggcaggagacacgacaagaaacaagagcacagcacgcgcgcgacc

SEQ ID NO: 117827 - DNA, 590 bp, Arabidopsis thaliana columbia
  unsure (1)..(590): unsure at all n locations
ggtgnnnnnnnnnnnnnnnnnnnnnnnnnnnnnnnnnnnnnnnnnnnnnnnnnnnnnnnnnnnnnnnnnnncttttttttttttttttttttttttttttttttttttttttttgttccttttttttattgttaataaaaaaaaaaataaaacattcccacctgttgggggaataaaatttttttgagtcaacgtcccaattccttaaaggggaaaaaccccaataaaccccttccccgtgctgcgaaggttgtctttgaccaaacccataacccttatatggggggggacaaaagccttaacgaacttccccctttgaccgggtccttatataattgcgatgagttcttagaaaaaaaaccaagctaaagggtgagacaccaaaaagggggatataggccctgggcttttaattagaaaaacttcaaaggatctcccctcgagatccttacactttaagtgggggcccctaaaacgaagaaacctcggttgaacctgaaaaaggaactgatcttcccgggtttggtgccaacctcataaaaacccagaccggggtatccgggggtgcttggtttgggggggcggggaaa

SEQ ID NO: 117828 - DNA, 857 bp, Arabidopsis thaliana columbia
  unsure (1)..(857): unsure at all n locations
nnnnnnnnnnnnnnnnnnnnnnnnnnnnnnnnnnnnnnnnnnnnnnnnnnnnnnnnnnnnnnnnnnnnnnnnnnnncttttttttttttttttggtttcaagattgttttggaaagtgtaatttaggattttagtttcattgttgtaatgatttattgttttctcaaatctcaatcaaagaaggcaattttagctttgacaataataaacaaacacaagaaagtgcgtctctctatgccttatggttcttagccatctcgtccacgtccaattccacggccaggattggagaatcttgtcccattgcagtttggctgtttcgaacaggtccgtgatcgacggctgttctcagacagtatatagctcttccaacaatgtctgctgttgaaactggaccaaatgttctactatcatatgcttacttagctttgagctcctggttttcagctgttacccaacactgattcttctcaagaacaaaaagctcctctttttcatcacccgatacatctcgaatccttctacagctgctaatcttcttaccagatacttatctgaatcgtttggatcctctaagacgacagcatcttccatgaatacaaacctgttattagcaattggtatcttacgaataaaaagggggtttcatttgctgtcattggtggtgacatttctgggcctttatccgagtgtagtaggttttttcccataaaaaattctcgaaatatttgatagttcccgcactcagttattactcatgactctgaactgaagtgaggataccacctggagcctgttcgaccaatcgaattatcctaccaacctaaaaattcctttaaaaaatctaaggttaaatg

SEQ ID NO: 117829 - DNA, 925 bp, Arabidopsis thaliana columbia
  unsure (1)..(925): unsure at all n locations
cgccagcagggaccgggccggaatcgccggttcgacccacgcggaacgcggacggcggggggaggaggcggcacgcgacaggggggcgcacaagggggcaggggcggagcgacaggaagagagaagggggcggggagaggggcgggggggaaggcgggccgccaggaggaggcgaggggggagagggagggaggagagnccccctccagaagacggacggggaaacagaggacgagcggagaggaagagaagaaagcgcggccggaggagaaacaaaggaaggaggaaggcagacaacgagcaacaagaggcacacaggcgacaggaggcacacacgacgagagcaacaaccacccaacaacaacaacaagcaggagacaccagacagcggaaaacacgcacaccacacaccgcagaacggcggaaaggagcgagaaaacgcaggacaaggcacgcccgagagacacaacgaggcgcagcagggaaagcaccaggacacagcaccagaacgaaggaagcgcggcaagacgaaagcgaacagaaagcgccccacgaaacagcaccgggcaaggaatcaacgaacgaagaaccaagaagaaaaccgcagcaaaccaaaaagacacacacagagagacaacgcacacaaagagcagagcaaagaccacgccgggaggaaacagaagacgaagacgacgacggcggcggggaacagaccaacgcacccgaaacacgcaccgcgcgagggcaagcgacgacgacaagaacacaaaaagcagcgaaaaacaagcccaaccaggcgaagcaaaagagaacaacagaagagaacaagaaaacgcaaccgaaagcgccagcaacacggaggacaacgaccaacaccacgcaagccaagaagccagaatagcccagaacgagcagcgacgagggc

SEQ ID NO: 117830 - DNA, 599 bp, Arabidopsis thaliana columbia
  unsure (1)..(599): unsure at all n locations
taggtcccactatagnagatctatgacgtcgcatgcacgcgctacgtagcttggatcctctagagcggccgccctttgtttttcttttttttttttttttttttttttttctttttttttttttttttttttttttacccggcgcgcgggggaacaccccggggcaaaacacggaatctttaaacacatttttaaaagaggtaccaagataacaacacccaaaaaattttttttacgggggggggaggcgccccctttacaccccaaaaccccagaataaaagaaccttgtctgggagaagggaagaaaaaagacggggggaaaaaaggaaaaaaaacccccccggcccccggaacggggggggaaaaaaattttttttttttttttgagacccgccccccgtggatgatagggggtgggggagggagggtgtcccctggggcccgctctgtggggacccccctttttacaaccactttagtgggggggagggtgtggcccccttcgggggaccccttttatatgaaccccccgtgataaaacaacggagtgggcacacacgagaagcaagaaaaccccccacagaggggcggggcaaa

SEQ ID NO: 117831 - DNA, 749 bp, Arabidopsis thaliana columbia
  unsure (1)..(749): unsure at all n locations
tagnnnnnnnnnnnnnnnnnnnnnnnnnnnnnnnnnnnnnnnnnnnnnnnnnnnnnnnnnnnnnnnnnnnnnncttttttttttttttttggtttcaaaccccaaatgcataaagtctttacgtggtttgtgaaaatagccttagtttgcattgaaaaatcgactaatttcctagaaagaggaccaacatagaacaacgaaacggccccaaaatcagaaacaatcgtatgaagacaaaagtagtgtgcgtatacataagtcgaaagaccatgtcagaatcgggcacatccggttcttattccgcttcatcagtgagatttctggataccaatgaggcgggcataatccacccataataaggaacccaagaatgtgttgcctgttctaactgcaaagcacaacgcactgagtgcaagtttgtgttggtgtagcattggctccaggagacgttgttcaatcacaccagccactatttggtaccttaggttgctagaaactgccatgtagacaccatatgcaacacttgtggagactatcggaacagtttcgacttcaccttcagaattctggtccacagcttttcgtgcttttatgaatgcatttgtaatagcagtaccaaccagcgatgatgtggtgccaacggaaacagcttagctcattgcgcgtatagcacctagcctttgcagagagtatatgaggtttcggagagagcaacctggaaggcattggctgggcaagtgtggaaaact

SEQ ID NO: 117832 - DNA, 644 bp, Arabidopsis thaliana columbia
ctatagaagatttatgagcgaacatgcacgcgtacgtaagcttggatcctctagagctggcgcccttgggaaccctttttttacattattttgcgccttaaacagtacccattgtggttccggggccggaaaacagttcatactcgggccgaaatcttccacacatgaactcgtcaaaaaaaggaaggagacctaaatcacaacaatatctttctcctagaaaaggggaggcgcctcttccttggccttcaccagaggaaaccccaccagaaccacacgcgggagggccacaaaaaggcctccgatacttccaaaaaaaccggaggaaaccagaaaccgttggacgcaagccaccacaggttccctccaagggcacaaagaaaaaaagacccggccacctgacaaagagaccgggcacatgccccggcccatagcacggggaagggagagtacccccccccagggggtctcggggtgcgccgccctgcttctaaaacagagacaccccgggaaaggcgcgaggaaaaaccccccatgccctcaagagttacaggaccgaaaagcaccctcccacccttttgggtctgaacgcaagccccgggcaaaactcaacgacgcgagagaaagagaaactaccaaccctg

SEQ ID NO: 117833 - DNA, 299 bp, Arabidopsis thaliana columbia
  unsure (1)..(299): unsure at all n locations
acgcgtacgtaagcttggatcctctagagcggtcgccctttggggtaatccctttttctctctcttccttttctttgacttctattcttttccctcgggcccgagaaaaatgccatattcaacctgcaaaatccacaataataaatccaccaaaaaaaagaagagaatccaaatcccaaccaaacctttctctctcataaggaggggggccnctccctcgcccttaccactcgaaaccctatccacaaaaaaaccctgagggtacaaaaaaaccgctttaactttcttaaaaaaaccag

SEQ ID NO: 117834 - DNA, 777 bp, Arabidopsis thaliana columbia
ccgcctgcaggaccgggcacggatacccgggtcgacccacgcggacagcacgcagagagcacagcagccaaggagagaggcaaggcacagagcaagggcagaacgacggccgcaccgggaagacaaaaagaagcgagcacacggcgcgccaggacacagccgcacgaagacaaacggcgcttctctggagagggcggagcaacaacacaccagacgtgcgacgaacgaccccccaacaagaggggggagaaccccacacagaccgagacggagaagcgcgaggaagaagaacgggagaagagacgagaccgcacgacacgcagcgaggaccaccaggacggacgccacgccgggaggacgacacagccacggcgcgaggcagggaagacacaagcggaaaagggagacaggccgagagcgcgcgggggaggggggaaggcgagaagagagcgggggggcggggccggggaagcaagagagggagcgggggcggggggagcggaaggggcgggggggggcagggaagggagggcaggaggccagcggagaggaggcgccccgacaggagagagcgagcgaaaagcgaggagggaaaagaaaaacacacgccaggaggcacagcagggcggcagaccgaaagcggagagagccgaccggagcggcgaccgagacgaacagagagagacgaacaccggcggccaaggacgcagaggcgaccgaagaacagcgcaggcgccaaagggaaggaagcgccacgcagcacggccggaggcaccg

SEQ ID NO: 117835 - DNA, 604 bp, Arabidopsis thaliana columbia
  unsure (1)..(604): unsure at all n locations
atgatcttnnnnnnnnnnnnnnnnnnnnnnnnnnnnnnnnnnnnnnnnnnnnnnnnnnnnnnnnnnnnnnnnnnnnnnnnnnnnccacgcgtccggttatggtgtaaatcatcttgtgctgcgatgttatcgaacagagatgagaactgtgcaacgagagttctgttccggggattcccatatgattagcctgacttgggcagtcaaggtttcacctgattgcaaaacagaggtgtacaacactgcgaaggtcagtgcaccaagcgcacacaagattatgggtcctactggcactaaattctgtaggagatcaatcaacgaagcgactcctacatcgtatgaaactggtgcgtttgcaagactcaggctggtggatcaaataatcatgactcgcgacaaatctgactatattctggatataacagacattacaatctgcctccgtgagacattgctgaagactgaggacccacctattctcacagtgatgctagctggacatgctcttcatgtgttcctgattggtcaacattcaagaactgcttatggaggacttgacaccccaaaactatcctttggccggatgatcaaactacaggcgggt

SEQ ID NO: 117836 - DNA, 740 bp, Arabidopsis thaliana columbia
  unsure (1)..(740): unsure at all n locations
tttaggacnnnnnnnnnnnnnnnnnnnnnnnnnnnnnnnnnnnnnnnnnnnnnnnnnnnnnnnnnnnnnnnnnnnnncttgtttttttttttttttaagttttagcaataaagcattctcattggatttagacaccagatagtttaacagaaagaccaaactactacatatatttttgactctcttgaggatctcaaactcactcatgcatagtccggaagggcttgtatgttttgacactacttataagtcctgcgatggatccggctgcagctaagagcgagacgatcaagcaaacatagcacatcgttttcagcgcaatccatctagcagagtacttcttaatcttggtttgtgcaatgtgcatctccacagggaaataaaccgttaaaggccagaaggaagctgctccgataagacctaagatcgcgttgaagaaagggaatatcatagctacaaacagtggtataaccacataagctgtcctccacaccaatctgaagaggctaatgtggaattntncaaggaaaggtacgtttactggatattcagaagtgatgaacttgttgcctggatagtttctgttgcattttttctcacaaactgggatatcggctgcgcgacacctgatangaccaatagggggacaggatgcaagctttgcaagtaatgacgcaaagggctcaaaacccgaatctggaggaatcttcaggcattgttccaatgcagatacccgtgct

SEQ ID NO: 117837 - DNA, 482 bp, Arabidopsis thaliana columbia
  unsure (1)..(482): unsure at all n locations
nnnnnnnnnnnnnnnnnnnnnnnnnnnnnnnnnnnnnnnnnnnnnnnnnnnnnnnnnnnnnnnnnnnnnnnnnnctttttttttttttttgacacatggctttagcttatactagaacagtgaacgcgggttatacagaaaacgagatggcctaagagcataacacttctgaacatccatagcttcaccctaacaaaaaccgttactctatttgatacagacaactctatctggtgatatgagatccatgactttttatcgcactatataatacaccgctagcggtccaggcactgcttgcagtggtgaacgaggcctgactcaaagaagatccatcacaacctgaagaaggatcacgctcgtgatatccagctgtgtcaggtccgactgttgcatctngagtagcaagacctgcagcgttacttgcatcaccttaccattcactcccatatatagagcgagcgtgaagctagcctgcagcg

SEQ ID NO: 117838 - DNA, 501 bp, Arabidopsis thaliana columbia
  unsure (1)..(501): unsure at all n locations
nnnnnnnnnnnnnnnnnnnnnnnnnnnnnnnnnnnnnnnnnnnnnnnnnnnnnnnnnnnnnnnnnnnnnnnnnnnnnnnnnnnccacgcgtccgggtacatcaaatatcactaatgcttctacatcttcctgccaaatgcctactggacactcctgctatcgctacttgcggagtgcctgtcgatacaagtactggtcctagtcttgcaccaagagaacctgatgctggacctgacactatcggagtacgagctacaaatacttcttcagggaacgacgtatcatctttgattgcaatctcgttcacatcctgcctcagggcgccactagtcgttagaagcttctctaggacccataagaaagcccaagtcttctttaaccagatgaaccgggctgggacaattgattcatgggaatattagggctaacgtatgattggcttggagggttgtgggaatagacatatcgacgggtctattactaccgaggacatatattagt

SEQ ID NO: 117839 - DNA, 669 bp, Arabidopsis thaliana columbia
tatgacgtcgcctgcacgcgtacgtaagcttggatcctctagagcggccgccctttttttttttttttctgtactgacaacaatttggtgttgaattccgcggcgtgtaaatgtcaagctaccaaatctcgttttctcattggtgtgcgttattttttaatctaaggtttcttaaaaaaaaaaaaaaaagggcggccgcccttttttttttttttggtttttttttttttttttttttttttttttaaaccatgaagtttgttgacattaacgtttgaaaaattaaaagaattggaattccaatccaaatgaatcttttttgggacaaatgtctttttaaagattaagaaaaaaaaaacttaagaacgaacttcatttttttttttgggacaaatgtcttcccaaagatttattcaaaatcattctctaacggggtcagattcaaatccaaactcaaaatccttttactactaccgcatggtttaaaaaccggcgtggatggaatcatcggaaaaatgaacgaaggctcaaccgttatgcttgacctttgccctcttatgtgaccacctaaagcctgtccgggcccaaaactttgactggtaatgggaacactgggaaaatgatttcctttataatcggcgctaaaatgttcccatctttttgctaacg

SEQ ID NO: 117840 - DNA, 554 bp, Arabidopsis thaliana columbia
  unsure (1)..(554): unsure at all n locations
cgnnnnnnnnnnnnnnnnnnnnnnnnnnnnnnnnnnnnnnnnnnnnnnnnnnnnnnnnnnnnnnnnnnnnnnnnnnnnnnnnctttttttgtttttttttttttttttttttttaccattttttttttttttttttttggtaacattcttttttagaaaccaaattttattttgcttgtacgggaacaaccaaattgtagggaagttgtgcaatacaaaaccttttcgccccaaaaaaacttaacgtacttcccgaaagaactatacccaccccttaaagacataccaaacgttttggaagaaatctaacgagggttgaagacaaaccccaggaagaacaaaatctccgatgaggggggactgaacatgaaccaatgaacattatgttggcccggggagtatgttcttgacccatctccctaaagggttaccaatggataaaacaattaaacccaacccccttagcttgtgcaaaaatagaatggatattccattgaacacaaaagctggttgacgcatgctactaaataacttctggaaattaaggtttttga

SEQ ID NO: 117841 - DNA, 485 bp, Arabidopsis thaliana columbia
  unsure (1)..(485): unsure at all n locations
nnnnnnnnnnnnnnnnnnnnnnnnnnnnnnnnnnnnnnnnnnnnnnnnnnnnnnnnnnnnnnnnnnnnnnnnnnnnnnnnccacgcgtccgggcgaggttcggactttactacatcgatttccagaacaacttgacccgtcaccaaaaagtttcgggcaaatggtattccgaattcctcaaaccacagtttccaacctccaagctgaggggaagaactctagatgatcaagaatccctatcgggacaaaatatttgagtacaaagagtctttgaagaatgttgnntgagggataatatcagtttgtggtgttctatggggatcgttttcatctacccggtcctttcctaatgtaaaaaggaacttggtgaggtngttccgaagtttaaataatattcaataaatgtcttcctttttaaatataaggtgaggtaattattnaaatcctggttatatgaaaaaaaaaaaaaaaaaaaggcccggccg

SEQ ID NO: 117842 - DNA, 143 bp, Arabidopsis thaliana columbia
  unsure (1)..(143): unsure at all n locations
agggactgtccctcaggtccgtccagaatccagtcgccacgcgtcgccaagaccatttccatgtaggatcagaaagttccatgggctacttcgantacaccctatgatctctgatcgctatagcactgatcacacatcatctg

SEQ ID NO: 117843 - DNA, 548 bp, Arabidopsis thaliana columbia
  unsure (1)..(548): unsure at all n locations
aatacgactctcttagggaaagctggtacgcctgcaggtaccggtccggaatttccgggtcgacccacgcgtccggagtctcttgaagccaaagcacagagagctctagattgttcttgtatagcatatctgcgtaatggctcttgcgggtctcagttatacgaggcattgctttgctttgtcaaaagcactgctgaacaaatgggatcagattgcgtgaatccatttgtagcatagccaagctgatcaatgccatcccgatgcatctctaaatcagtacagggggacgaaaagaacccgtgaaaaagaagaccgccctctgtgcagaccatataatcatccttctttctgggcaaagacctgctgcgatagcgattccagctttgattntaaccacctggattcacataaaagctagctttcctctttgaatctttctctagacagcttttaaaaggtagaaagatgntagaccctgtcggggtggcgaagcaacatggtcttcattttaaccaaaaacctaatatttgtaaaaaaaaaaaaagggg

SEQ ID NO: 117844 - DNA, 542 bp, Arabidopsis thaliana columbia
agaagagctttgacgtcgcatgcacgcgtacgtaagcttggatcctctagagcggccgccctttttttgtttttttttttttttttttttttttttttttttttttttccaaaaaaaaataaaactccccattaaaaggccaaatttttggatcttctgggctttcttttaaaaaaaaagctatttttgaaattgttcatatcgccaaaaaaaatttttaaaaaaagtgccgcgggatggtgcaaaaaaaaatacaattttcaacaaaaaatttgccaggttgagggacctcttttctgggttgctccaatttcatgaatcaaccccctttgtgtctttttttttccaaaaccaaggggaccttgatttaaaaaatttccatggaccaacaattgttttttttaaaacctacaattttaacctaggttcaatcaatggactttccgataaaagcaccgcccacggatagttctttaatacaacaaagccccccttatatgcaagggtggtctttgaaagacctcatgactccccctgccttt

SEQ ID NO: 117845 - DNA, 709 bp, Arabidopsis thaliana columbia
taatacgactctactatagggaagctggtacgcctgcaggtaccggtccggaatttccgggtcgacccacgcgtccgcttcataacgcattttcgtgagatgcactctccagctctatctcgaactctctctctgccgtctcgatcgatctcccaaatctcatacactgaatccgattattttctgtgataaacaaagcaaacaaaatccataacttttggctcggacctcttcgattgtcaccgacacaaacccacattttgacttttctctttatttctaatcatctttatctacaacagcgcatcagtcaaaaaacttcagcttgaatttgctcatgctgtcttccatcattccctttgtaacaacccttttatcggctgttacagatgattccaatttcttttattgcgcccaagttttaacagtacctttggcctttggcttcctgtcagaccgactggcaatatactttttaaaaatgggccaagcctctctccaacaatagcccgacctcggggttttattaaaaaaagctacttttttaaacaaatgctccttaaaacaagctctccggagggtacagagaacttagaactggaagaactttttttggtcaaaaacggaaacccctcgagggtcctgcttctgactttaggaaaatctaccttggaccgacacttttaatggaaaaaaggtgtgcaaactg

SEQ ID NO: 117846 - DNA, 804 bp, Arabidopsis thaliana columbia
  unsure (1)..(804): unsure at all n locations
gannnnnnnnnnnnnnnnnnnnnnnnnnnnnnnnnnnnnnnnnnnnnnnnnnnnnnnnnnnnnnnnnnnnnnnnnnnnnnccacgcgtccgcccacgcgtccgcccacgcgtccgaaatctagaaagagaaaaagtcttaaatttgtctcatttatgcgataagaaccacaattcctctatcaaaatctctctctctgacatacccagttggaaaaattcaatcttttatccctaagattcgatctttcttcttgggaagttgataaatgttcaaggaaacataaaaaagagaagatttttgaataaaggttgaagaaaaatgcaggatccagcagcatattaccagacgatgatggcgaagcaacaacaacaacaacaaccacagtttgcagagcaagaacagttaaagtgtcctcgttgtgactcaccaaacactaaattctgttactacaacaactacaatctctcacagcctcgtcacttttgcaaaagctgtcgtcgttactggactaaaggcggcgctctccgtaccgttcccgtcggtggtggttctcgtaagaacgcaaccaaacgatccacttcttcttcttcttctgcttcctctccttccaacagtagccaaaacaagaagaccgaaaacccggatcccgatcctgatccacgtattctcaaaaaccgatttggatccaccggatgcttacgggtttccatcggtgacaagacgtgaaggtatggaaattgtggaagctttactcgttgtggcaatatatgcacttggtcttggagaggagggacatgctgac

SEQ ID NO: 117847 - DNA, 556 bp, Arabidopsis thaliana columbia
  unsure (1)..(556): unsure at all n locations
cgnnnnnnnnnnnnnnnnnnnnnnnnnnnnnnnnnnnnnnnnnnnnnnnnnnnnnnnnnnnnnnnnnnnnnnnnnnnnnnncttttttttttttttttttttcctacaaaagtctagacatattacgaagaacaaactctttcccgattctcagcacaactcagcaacgtcatcaaacactaacattaaacaattattgaaaaagaagtagaaaaaaaaaaagaaaacacaaaagaaaaggaaaaaagagaaaaatagcagatcctcaacagagaaaatgaaaagactaaggtggataacatgagcctgcttctcacattaccttaatacctctctccaaatcggaagaacagagcaccggttccattgttgtgatctacagcatactcagctcggaccaaaccgagtttcacacctgcaccataggatgaaccctgacccgttctcctgtacactgccccacgcgtccgcccacgcgtccgcggacgcgtggnnnnnnnnnnnnnnnnnnnnnnnnnnnnnnnnnnnnnnnnnnnnnnnnnnnnnnnnnnnnnnn

SEQ ID NO: 117848 - DNA, 553 bp, Arabidopsis thaliana columbia
  unsure (1)..(553): unsure at all n locations
cgattactgnnnnnnnnnnnnnnnnnnnnnnnnnnnnnnnnnnnnnnnnnnnnnnnnnnnnnnnnnnnnnnnnnnnnnnnnnctttttttggttttttttttttttttttttttttttttttttttggatctcatatatattttttatttctcacagattaaagatagaaaaccaacaaaaagatgagttttgcatcttattttttgggaaaccactccaagttaaaaagagttcaaaaaaaaaaaaaagatagagaatcttgaacattcacatctgaaaatgtagcaacaatttttcatcactagcaagaagaaaaagattgaaaagcagagtccccaccatcttcacagttccagagaatcccggaatctggaatcggcaaattggagaaggaatcgaatcctaagcattagcagttttagggataagaggaacagcagcgtttccttgtagtttattctgtttagccaaagcttcttcttcacggatcttcttcatcgcaagcattctctccataacaagctcgtattcacacttctcataaacgtgacc

SEQ ID NO: 117849 - DNA, 733 bp, Arabidopsis thaliana columbia
  unsure (1)..(733): unsure at all n locations
atgatnnnnnnnnnnnnnnnnnnnnnnnnnnnnnnnnnnnnnnnnnnnnnnnnnnnnnnnnnnnnnnnnnnnnnnnnnnnccacgcgtccgcccacgcgtccgcggacgcgtggggcgaaaatggaggttccaggttcatcgaagaagatgatcgcaacgcaagaagagatgtctgcagctaaaatagcacttggatctagagatatgtgcgctcatctcttgattccgctcaacaaatgtcgtcaggctgagttttaccttccatggaaatgtgaagacgagcgtcacgtttatgagaagggggaatacgagcttggtatggagagaatgcttgcgatgaaaaagatccgtgaagaaagaagcttgggctaaccagaataaactacaaggaaccgctgctgttcctcttatccctaaaactgctaatgcttaggattcgattccttctccatttggccgattccagattcccggattctctggacctgtgagagatggtggggactctgcttttcaatctttttcttcttgctagtgatgaaaaaattgtgctacattttcagatgtgaatggtcaagattctctatcttttttttttttttgactctttttaacttggagtggtttccaaaaataagatgcaaacctatccttttgggggtttctatcttaatctggagaaataaaattttttggagtcccaaaaaacaaaaaaaaaaaaaaaaataaaaa

SEQ ID NO: 117850 - DNA, 502 bp, Arabidopsis thaliana columbia
gcgtacgtaagcttggatcctctagagcggccgttcttttgttgttgtagggccttttaattcattttttcctcaattacacgttgaacccttcttcatttcttccccgaaacagccggaattggtttcccggtcaaattttatgccggataagataaaaagaaaaggaaataccctttcggacaaaacaacacttattgctaaattgagggggggggacacgcccccgacacaaatggtgtaaacctgcctctcggccattttttctcaggacaagcccacccgcaaacgacccctaatcgcagaaagccgagccacccatgggcgaacccccctagcgggtacaatcgccctccatgcggcggcggcacagagccggcgaggttataatcggtggggggcctcttgagcgcgcgtctgtcataatacgcgggagagcggagacgcgggggccatccgcgcccgcctgttcggtccggccgccgcacgtcccccgcattag

SEQ ID NO: 117851 - DNA, 750 bp, Arabidopsis thaliana columbia
ggcacgcctgcagggaccgggccggactctcccggggggacccacaccccccgggaagcagaaaacggacaaacaagggccgaaggatcgacccagcggcgggacaccgcagaacaactgcgagcagcgaaacgcaagcgcgagcaccaacaggaagaaaaaaggaagccccaacggtcctctcagcggggggagcgcgcgcgacaagagcggggggcccggagacagccaaccccgagaccggaaaacaagaggcagaccagcaaggcggggaaaccagcgcagccgaacaaagagcacaaggagagaagcccacgaagcgggcaggagagggggggacaggagaagcaggcaacggggagggaaaacacaggcgcgaaggcgcgggaccaaacaacagggaagacgcgacagagggaagagccggggcaggcgaaggcggggcggggccggcgggcgggacacggaggaccaggcgcgaaccggggcgccgggccgagcgagagcggcaacacagggggaggccacgcgggggggcaggcgacgccagggacgggcaaaccgggacggggagccgcccgagccaaaaaaccgccaacgggagcgacgggcgggcacaagaccagacagagccggaggccccgcgagacggaccgacacataccgcagcggcgggaaacgagaacacaccggaaagagggagaagcgccgagagccgggggggggacacggggcgaccggcggggcccg

SEQ ID NO: 117852 - DNA, 432 bp, Arabidopsis thaliana columbia
  unsure (1)..(432): unsure at all n locations
gannnnnnnnnnnnnnnnnnnnnnnnnnnnnnnnnnnnnnnnnnnnnnnnnnnnnnnnnnnnnnnnnnnnnnnnnnnnnnccacgcgtccggcaagggaactgttgagggattttcgcatgttatgtttgcaactggtcgcaagcccaacacaaagaacttagggttggagaatgttggcgttaaaatggcgaaaaatggagcaatagaggttgacgaatattcacagacatctgttccatccattcggtcagtaacatnnnnnanagnnnanatggatggaacaaatgtatgtgaatattngtntgggntgttgtggattttactgaanttataaaaaagatttttgttgataaaaaagagggagttgtttagaataaaaatttgttttttattgggggagataaaggtgataatataattgttttttgaa

SEQ ID NO: 117853 - DNA, 543 bp, Arabidopsis thaliana columbia
  unsure (1)..(543): unsure at all n locations
nnnnnnnnnnnnnnnnnnnnnnnnnnnnnnnnnnnnnnnnnnnnnnnnnnnnnnnnnnnnnnnnnnnnnncttttttttgttttttttttttttttgtttccaatacttgtaatatgcttataaaacataacaatattggatcgttgaaatatatatacaaataatatcatcacaaattgaagaagatttgaactaaacaaataaaagaaaactttcatcaccctctctctttcttgattatttgttttaacaaattcatatatcgatctacttgtaatagataacaggcgcattagctctggcatcccacataccaccttcctttaaatactcaagatacctagaaaactcaggcttcgtcgtcgtcgacttcttcttctttccgtagaaaagactaaagattgggtgactaaatttgcctgttggtttgactttctttgatttctgacgaggaagctcctcaagaatggtcggaacaccaccagctccaagctttatagatggtgcgtagtaaggaacactcgtcgatctccttagctttg

SEQ ID NO: 117854 - DNA, 196 bp, Arabidopsis thaliana columbia
  unsure (1)..(196): unsure at all n locations
ggaagaatattaggaggaaagaacggtctgacgtatagcgatggggatgagttatcaaggaggagggccgtttcttttatttattttgtttgtttagagcgggagcggcgcgaaggagagacagtttattcaaggacagtggctggttatanttgcgaagcagaacatattggcggtcctatgaggcggaggtggg

SEQ ID NO: 117855 - DNA, 493 bp, Arabidopsis thaliana columbia
gacggcgcaaccacgcgtacgtaagcttggatcctctagagcggcctgccctttttttgttttggttgaatctgacaataattacttttaatgaaattcttggataattattaacatcataacctaaaacttaaccaaagaacaaggagaatagtctattgaccctattttatgaagagtccaagcacaagttgatgttattccgattttttttcaaggtggggagggttatgaacataaaaagcaaacgcgaataaacttgcgttttcgttggcttgaggacaaacgttgattatcaccatccaaaccatataagtgagctcgcataattgagatagatatgcacctggtcgggggcagacgttaatttttggatactaccaaggtgtgggggaagctaagcgataacgcgtggcctagacgctatttgggtttcaccattgcgtaagcgctgacggatggggcaggcacgatacgggacgcgcattgactg

SEQ ID NO: 117856 - DNA, 648 bp, Arabidopsis thaliana columbia
  unsure (1)..(648): unsure at all n locations
ggcgcgcctgcaggtaccgggccggacttcccgggggcggcccagcgtccgcccacgcttacgtggactcgagagcgcgactaaggatggcacaggcacatcaagaagctgaacacaacgggagacgaagagccgacacggaaacagaagttggagcaagagaaccgaaccctcctttctcgacggcggggagcgagcgaccagaggtcgattgttaacaacccccgccaggaaggagaggaacccccgactgcgaagagacagaccgacccggtgaagaagaaaaagcgccaggaagaaagagcaggagaaaacaggcccggctaaacacaaaaacgaacagaaggaacgctnggggcggcattagcaccggaaaaagggaaggcaaagaaaacagaagccacccccacagggccagatgcagaaacaccgagcgggacaaaaccagcacaacaaaggggacccagcaccaacacactaggagagccaggacggaaaaacccgccgaggcactaaccaggagggaagaggaagacccaccagcgccaaagcagatatgagaccgccagcaaacaagagagacgcacgcaaagaaaaggaaggaaaacaaagaggggaggagcgggcaccacgaagcgggccgaccac

SEQ ID NO: 117857 - DNA, 509 bp, Arabidopsis thaliana columbia
  unsure (1)..(509): unsure at all n locations
gattcnnnnnnnnnnnnnnnnnnnnnnnnnnnnnnnnnnnnnnnnnnnnnnnnnnnnnnnnnnnnnnnnnnnnnnnnnnnctttttttgtttttttttttttttttttttttttttttttttaaccaaaaccgtgtttttctttttttggctcacagtttttaacaattttaacattggaaacacaaccgggataacaaccacatggccccggcaatataaacacatcttatcgggggatattactacttgaaccaccccattcctagggctatttttacatatttctagaaaaaagaaacccactttctaaagggaccgccaaacgttttttttttttatacgggggaaaagaaaacacctttaaagaaccacccaaggacagttccttttcttataagcgttctagggaaggggggtgaaagaacccacggggggttgtttcctcctctctagaacacatgggagaaaccatccggaatttgaaagtgcaaattcctcccaaactct

SEQ ID NO: 117858 - DNA, 623 bp, Arabidopsis thaliana columbia
  unsure (1)..(623): unsure at all n locations
agacctaatacgacttacttagggaaagctggtacgcctgcaggtaccggtccggaattcccgggtcgacccacgcgtccggagaatttgattttgcaaacaggtggtttgaaatcgttaatcgggtgtttacatggagttgcttcaatggagaaagataacaaaaccaagaatggtttacatgtaggagaagaatcagatagagagaaaggaatgaatttgcacattcatattcctgatggtttaccaaaatctgaaccagagttggaggaagaagaagaaatcgaaatgccggattcagctttcactagattgctttagaagtaaaggaactatcnctggttgggttctctcacgcttctgaccacgaaaccgactgaaaagcggattacggattacggaccctttagaaaggttgttattttatcaaagttatatgtaattatagttcttggttttgctttagttactgaagtctatcttttgttaaaatgtgatactattgccatagaaatgtggttgtattaacttgatgtcggccaatgtgagattggtaatgctgggcgcttttatatactacgcggtttgggtaaaaaaaaaaannaaannnaaaaaaanaaaaa

SEQ ID NO: 117859 - DNA, 486 bp, Arabidopsis thaliana columbia
  unsure (1)..(486): unsure at all n locations
agcttgnatcctctagagcggccttccttgattgtattgagtctttttatcccaaaaaancccccccccccaagggggggatcaagtccaacccgcacacaagactgacgcctgaccatgcaccctccaccgtttttggaggagggagtaaaatggagaaagtagtgcacgcgcccgacctatgacagggaggagaatgggtgaatatggggggggtgcgaaaacaaccccgggcggaggttttttttaaaaaaaacaccccccacaaatttttttgtgtggagggaacaacccccaccttgaataaaaaggcccccccgctagaggagaggcggagcgaccaagagggaagaggtagctgcgagtaaggagagaggcgcggccaagaggcaccggaagcggagcgcaacagcagcggaaggaaggggaaagagaagggaaaggaagggcacgaagcccgccccggagaaagagacgagagagacg

SEQ ID NO: 117860 - DNA, 557 bp, Arabidopsis thaliana columbia
  unsure (1)..(557): unsure at all n locations
nnnnnnnnnnnnnnnnnnnnnnnnnnnnnnnnnnnnnnnnnnnnnnnnnnnnnnnnnnnnnnnnnnnnnnnctttttttgtttttttatatcatagttattttagtaaaccaaaactcatattctttttatacaaacaataacggtaacaaaaaataaaaatcttttagacgtttactcatctaaattgtgattcgatctctgagatttgcaggtaagattttcttcacgcagggacttcgttggtctccaaaggggttttacttaaagtggaggtgtgttctttgaaacccaacattttgttcaaagctccaacataagctttaacgctcgacacaacaatgtccattcctgctccggttccactaaaagttctttcaacagattcacccgttaccgcgtttgttgatgagtagttgttgtctccgaggattagaacccgtgtggttgcaatagcatcaatgccttctgttactgcattcatcgagtactcaagcagagtctgcatgttccttatcgataagatcaactgccttgtaagctgcatctacaggtccg

SEQ ID NO: 117861 - DNA, 563 bp, Arabidopsis thaliana columbia
  unsure (1)..(563): unsure at all n locations
cgattcnnnnnnnnnnnnnnnnnnnnnnnnnnnnnnnnnnnnnnnnnnnnnnnnnnnnnnnnnnnnnnnnnnnnnnnnnnnctttttttttttttttcccttcttgttggcctttccttctagcggtaaagctgttgttgcttttgcctctggaaactcttccacaggaataccaagttctaccagtgaactttcgatatctagtttcttttgaagttttgctatttgctgaccatcaagaagttgtcctctcgattgttttgcttcaagtatctcaatttgttgcaactttttcctcaaagctcggacttctttggaattgtgttgagtcagctcatcttctggttgcaagaatgaatccattcgagtaccaccaatactggaaaagtgtttcacatggctgtcacgagttcttagaatgtcgctctcactttcctcctcttcactgtcaataacaacaggaaatgtggctgttggggttggaagtggtcgggagctccatgtttcagatgatctgtcatccagtaatttctcaagattggcaagaacatcaggtgatgtat

SEQ ID NO: 117862 - DNA, 670 bp, Arabidopsis thaliana columbia
tggcacgcctgcaggtaccgggccggatacccgggtcgacccacaccgtccggaaacgaataataataatattgtaataatgagttctgatccagttcttcatctcatagatctctcctctctacactgccttctacaaaagtgagcacataaacttgcctctacagctgctgcgtgtatttttcagatactgtaaagaaattctattagctcaaaagaatcattcttcgggtacactgaaccataaaagcttctctcgactttcaaaaaactctctactttttacttttatccatttcaagcagagagacagatcgaagaacataaaaacctcgtgtttcttaaatctcagtgattctcaaattacccatcgcttacttcttttgaaccattagatttcacttgaaaaagccaagaaatctgcatcaaagtaactccttgtttcaacccataaattgggactcctcattgtttggggcgcgggaccaactcggactgcttgcagccattctagactcccgactggagattaaaaccccctggttcgacattggcctaaggaccaagactttgagtctccgccatctttaaaacaaaaacccagtaacccacggacttccaaaaccctcccattgggttctcgaagcgcccttcaaacgccctgaaacag

SEQ ID NO: 117863 - DNA, 560 bp, Arabidopsis thaliana columbia
  unsure (1)..(560): unsure at all n locations
nnnnnnnnnnnnnnnnnnnnnnnnnnnnnnnnnnnnnnnnnnnnnnnnnnnnnnnnnnnnnnnnnnnnnnnnctttttttgtttttttacatgctcagaaagaaagactttagattagaaacttggaaaaaaaccgactcacgataactaggatcgctgacctaagtgacaagacagactcgaatatctgaaaatagcgttagacagggaaaataccgaacaggctgatgacgggaaacaccaaacacatattcgttacttcctccatagctactatatgatgcactactactgttctgcatcctatttgctactagcagtgcttactattatctacggccattactgccattcccttataaaactaacattgctactgaacagagcgcggggttaaaagtgttctgcaccaaagcgttgaataagcatcataagcgctgctcgctggtgtaacatacagttccttcttaaactctgacatagtgatctacattgctaaaggtcatcttccgagatgctacgaggctgattgaagggattgacagattgtcgacctgaaa

SEQ ID NO: 117864 - DNA, 297 bp, Arabidopsis thaliana columbia
  unsure (1)..(297): unsure at all n locations
atgannnnnnnnnnnnnnnnnnnnnnnnnnnnnnnnnnnnnnnnnnnnnnnnnnnnnnnnnnnnnnnnnnnnnnnnnnnnnnnccacgcgtccggtaaccctcatatgccctgaaaaacagcaccttaagctaacatagggagtattgggtcctacacagaatgacatggcgacatctgtcagcgtatataaagactatcccaaggagccttaccgttctttagcgacgatgacgacataagcaattgatgacaatctgataatattgatacttgctcagatgatgacctcatactg

SEQ ID NO: 117865 - DNA, 267 bp, Arabidopsis thaliana columbia
  unsure (1)..(267): unsure at all n locations
ataagctnggatcctctagagcggctttccttttggtgtgaaaacctttagaacgagtcgaccgcatactcggcgcatagcagacagcctcgaggcacagattagtgtccggcgaaccgaggagcgcatgagaggagatgtggggggtatgtttatatatattgattgtgttcgacggtttctaagttagtaatggatgtttttttttttcagggaggagcgggcgcgacggacggcaagccgcgttgctactgcggtgcgcttcga

SEQ ID NO: 117866 - DNA, 525 bp, Arabidopsis thaliana columbia
  unsure (1)..(525): unsure at all n locations
aggtgaactnnnnnnnnnnnnnnnnnnnnnnnnnnnnnnnnnnnnnnnnnnnnnnnnnnnnnnnnnnnnnnnctttttttgtttttttttttttaagttaaactttttattaatcaggattattttagggccggccaggatacattttattttccgctgcaaaccttgccttattaaattgctatgaaaattgaaggtgttcaaaaatacaaactctttttttgcttggggaagacaatctaatgtgattttgcctttaccatcttaactcttattcaatttatatcataatggtcccaaaaaaaggctgagtctcttataaaagaacgtgaataactctcactattatttttgcaagccacaacgagtttattccatgtctacacttaaaaaaagactagcacacttgacctagatatggagaaaatgctgggcgaaaatacttgcgaagggagaatctcactgccccattgattcttcggatgcggcactttttttattatcatagaaaccatctgctaagaa

SEQ ID NO: 117867 - DNA, 781 bp, Arabidopsis thaliana columbia
  unsure (1)..(781): unsure at all n locations
nnnnnnnnnnnnnnnnnnnnnnnnnnnnnnnnnnnnnnnnnnnnnnnnnnnnnnnnnnnnnnnnnnnnnnnnnnccacgcgtccgctctctttcagtagacaatgggaatctcgtctaaggaagatactgcgagagactgatatacgagtgagcgngtggcgcctcaccgtccaacgactgttgactcttctaggagggcaagcgtgttctctctcaccatggtcctcgtgtctacagagccaacgttcagaatgtcgagcttcggataaaggagtgtacatactttgtgcactatctctggctggatcataattagtgattacgggatgagtgcgcataaattgttaaacctacccgaggagattcttgtcaaccagatcgctctcagcagaaagcacggcgttgaaaatggtcccaagtctagcctttccgttcatacaaaatttaaaatttctggagacacaatggttgataaagatgacaccaaaaccaatgcttgaaaagggaagaatcgaaagcacttgtcagagcctgagaaggatactgctacggcgtataagctaatgataatccaaattgcangatcatcttaaaagcatctcactgactactgggattatttgcgcaaaacgacaaggttgtgagacttcctcggccacctaacgccgatgagatatttgccaagtacctggaattcaataccaaaatgatggactggaactgattagtcgctgaatatcaaagcataagagtatttcacaaggcattgcaggatcttct

SEQ ID NO: 117868 - DNA, 517 bp, Arabidopsis thaliana columbia
  unsure (1)..(517): unsure at all n locations
aggtgcctnnnnnnnnnnnnnnnnnnnnnnnnnnnnnnnnnnnnnnnnnnnnnnnnnnnnnnnnnnnnnnnctttttttgtttttttttttttttattttgtgttttgttttttctttttttttatttttttttttttttgtgaaaggaactaggttttacttaaaaccaaaggagccgggtagggatgctaaatatttacgctgagtaaaacaaaaaaaaaaatttatttttttggtcacattccgaggaaacggaaaaaataaatttcactgaggagaagtaggtggggaaagccccccccaagcctgttacggggattctcaaaaggtggctcaggtatcttatgggatcctatctgggacaatgggctaagaatgacttccctgctggggaaaaaagaccacctgtccggagctgctgctgcaactttgcattctggctagcccttggagtcctggggggggcccaaggggcttaaactgctacctggggaaagcaaaagctccggtgcttcc

SEQ ID NO: 117869 - DNA, 276 bp, Arabidopsis thaliana columbia
  unsure (1)..(276): unsure at all n locations
nnnnnnnnnnnnnnnnnnnnnnnnnnnnnnnnnnnnnnnnnnnnnnnnnnnnnnnnnnnnnnnnnnnnnnnnnnnccacgcgtccggtcatgtgagactacattggcacggatgcataatggatgattcaacccaggctaagctcatagccttgactttgcgataagattagccaatgctgcacgcatgatctatggctgtggaaacaagacgtgatgaccgtctacgtaagactgttgatcagtgatctaagtggaagctatgcattggatacgt

SEQ ID NO: 117870 - DNA, 291 bp, Arabidopsis thaliana columbia
  unsure (1)..(291): unsure at all n locations
cggggcntacctgcgtacgtaagcttggatcctctagagcggccgtccttttgttggtggatttccatgaaaaacactatcaccagagaagtgcatgtctcttaacaaggcatcgcgtatctccctgaggggaaacgcgagatacatcctcgtattgtcgaacttggagggtatgtttgaataattgtaaaaaatagccgatatctatgaataaatttaatcgatttacgggggtggagggcgccaaaacgaacctctatcctgtaagaataggcactgctagggcgctct

SEQ ID NO: 117871 - DNA, 510 bp, Arabidopsis thaliana columbia
ggcacgcctgcaggtaccgggccggactcccggggcgacccacgccctccggagcgattgggggaccaccgagaccccaagccaaacgccacgaagagctcgacagccagacgcggccaggaacaccacacgcacacggcgaaagcaacgaaggacacacccgcgccctcgtgacgcggggggaaagcgcagccggaaggagcccatgccaaaacaccacccgcacaaggcgacaccacgcacctaaacagccgcaagccacaccgagaacgcaaaaacacgcccgaccaccagaagacgcccaggaagcaaaggcgcgcgcgcaccccagggaccagcaaagaaaaagagcgcaagaaacgagttgccagggagccgaagcacgagagacacacacgagcagaaagcgaacccaccaggcggacccaagacccgaaaaccgccgcacccaccgcaagcaccgccaccagaaaaaaagagagggcaaacagaaaggggaagaacaaggcc

SEQ ID NO: 117872 - DNA, 437 bp, Arabidopsis thaliana columbia
gcacgcctgcaggtaccgggccggacctcccgggtgcgcccacgcccccggtgaagagatggtgagaacaaagacgacaaatgggcgaaagagcgaagaagaaacccgcgttctctctcggaaaggacgaagaggaagaaggaagccacagatgtcgatagctccgagagaaaaattctgtgaaggagggggcctcccgctatggagaaggaagacgaaagtcccccgctgccaaatcggcaaaaccaccaaaccaactcctacggctcccggcaacgaggggtcggccacgatcaaaacagaagccgccgaaaaggccgaacccggtcggggacccgcgacgagcagcgccgaagcgcagaaaacgcgaaccctgaccctagaggcccgggccgaaccccacaaagggggaaggaaaatgcgaccgcacaaacccc

SEQ ID NO: 117873 - DNA, 558 bp, Arabidopsis thaliana columbia
  unsure (1)..(558): unsure at all n locations
cgattcnnnnnnnnnnnnnnnnnnnnnnnnnnnnnnnnnnnnnnnnnnnnnnnnnnnnnnnnnnnnnnnnnnnnnnnnnnncttttttttttttttttttttttgacggtacacaaaaagaaaacattgactaaaaacattgacatatcgcatacacgaattcttgtaatagactgatgataggttaataaattcacatgttctctgatataaagaaaagtttatgaaaagtgtcgtcatggcaacgaaactcgcgcgcgatattctgcgagtgcccacaacggatgaatgtttctatatgcagcgtagtgtaatgtgcaattcttcaaaaacactccggttgcttgctgttgaggaaaatctccactctccagttgtgaattgatgataagtttcgcagcacggtgaagaggaatcggatctctctctgcctgtccagagtgaatgagacccattaaagcccaagcagtttgcaccacgtttgatatctcccctacttgngctatgtatatctttttggagcaagagaggtagctttctccccagcctccgttgtct

SEQ ID NO: 117874 - DNA, 733 bp, Arabidopsis thaliana columbia
  unsure (1)..(733): unsure at all n locations
gggaggggggggggggctgcgctcgcganagccggggtatcctntcggcacgggaagagggggcccggggagggaggaagggnaaaggaccacagagcagcagcgcgggaagagacgcagcaacctccacaagaggggggcagccggcaagcacgagaggctgcgccacagagggaggaggnggacctcctcctaacttagggggggtggggaaanaagagagaggagttttctttttcaaaaaaacacccccccgggttgggggggcggcccccccccgagagaaaaaaaagcagccccccgcagagcaagaggaaggccgacgagcgagcacagggaagtcgcacgcgattcccggacgcagagacaaacaggcagggaggacgagcgggcgaggagcaaggcggcgaggcggagagggggaaggaggggacacagccgagagcgagcagaaagcgaccgacacgccaagactatgaggagacggaggaccacagcgtgaagaaggaagtgtgatgacgcagcagacaccacagacccggcaagacacgaggagacagagaacggacagacgccggggcgaaagccgagagggcagccaggagagaaaagaaaggcagcccgaagagacggcagcagaagagagtaccgaggagaggcaagagaagaagcggacgcccagggacgcgcggcgggccgagctgcagctagggcagcagggggcgaggacgag

SEQ ID NO: 117875 - DNA, 588 bp, Arabidopsis thaliana columbia
cgcgtacgtaagcttggatcctctagagcggcttcccttggttgggtaaatctgtccactgaaaaagttaggcatcccaggtagtgagggattatggatgtggaataccctttcttcgtgatggtggtgtgggacagaggggatgaggagtggacttgttctatagaaacggcgtaggagaggaaagagggtttggtatgaaagtggtttatttctttggaggggggttagagacgggggcgacagtgggcgatagtgagtggacagtgggtccctcacaggcgatctttgtgggtttagggcccagaggggcttggttggcgactgggcgatagaacgagactgatttgggagcactggtaaacagttgttggtacccgatgggggaaagcagaggcagcggagtgtaccgggcgcgagtgcgggaggggagatcccggtaagcagctaggggtgtggggagaatagtttcatagaatagaagacttgtgggtgttggctgtagcttggtagtacgctataggcgcctaatcgagggagcgtatggcgatgttggtagtatcgactggggttgttaggagtgtcttt

SEQ ID NO: 117876 - DNA, 843 bp, Arabidopsis thaliana columbia
ccaataaaaaacgaccagacccctccagcagtctatattaaaaaaccaaacccactcgtgacgcaaaaactctatcaaccaatcaaaagggacccaagagaacaaacaggacacacgggcaacgacacctctctccgcaaaagagaggaagaacaaatccacaaacaaatacaaccaaaaaaccccccccaaagtgtccggagaggaagaccaacaaacaacaaaaccaagacacgaacccagagagaccgagaacaacagagcaaaagggagagaaggaaacagcaaaacacacagacagcaaacacagaaaggcagccacagccaccaacccacgaacaaacagacacacaacagaagaacacacaaacaacaccacagcaaaacagaacgaaactaacagaaaacaagcacaaaaaagaaacacgaccgagaaaagaaccacaaaaacagcccagaacaaaaaaataaaaaaacacagacagaacaaaaagaaaagcccacaaagaacaacaaccacaacaaaataccaaacaagaaaacagaaaaaccgccaacacaaaaagaaacaagaaccaaagaaccaaaagaaagaagaaaggagacacaaacaaaaaaaacagcaaacaaaaacaacaacaaaaaaaacaaccaccaaaacccaaaccgcaacaaaaaacaaacaaaaaaagaaaccacaaaacaccaaaaaaaaccaaaagagaaagaagaacacaaaaccacagaaaacacaaaagaaaccaaagaagaaaaaaaacgaaccacggagggaaagaacaaaagaaaaacaaataaaaaaaaaacgcagaaacaaaccaccac

SEQ ID NO: 117877 - DNA, 549 bp, Arabidopsis thaliana columbia
  unsure (1)..(549): unsure at all n locations
cgattnnnnnnnnnnnnnnnnnnnnnnnnnnnnnnnnnnnnnnnnnnnnnnnnnnnnnnnnnnnnnnnnnnnnnnnnnnnncttttttgtgttttttttttttttgataacaataacaacaacatgatgataatcagagtcataacttctctacatttacacatcccacaaggcagtaacaataacaacaacaacaacatcaaaacctaaaatccagcttatcatagcaaatatcataggaacatttgtgtgttcaattgtcagctacttacattgccgttattcttgccattgcgatcatcatcatcatcaacgatcctcctttctcctcgctgcctgctcctctcttcctcttcttgattgttctgtgttatctccaattgagttttcaagaactgcattctctgcaactccatctctttagcaaatttcatcctctccttttccagttccgccattaacttaagcttagcagtttccgccttctcataagcttccgtaaatccaagtatcgccctcgccacatctccaactccactccctccacct

SEQ ID NO: 117878 - DNA, 563 bp, Arabidopsis thaliana columbia
  unsure (1)..(563): unsure at all n locations
cgattgannnnnnnnnnnnnnnnnnnnnnnnnnnnnnnnnnnnnnnnnnnnnnnnnnnnnnnnnnnnnnnnnnnnnnnnnctttttttggttttttttactgagggcggtgtgtatcaaatcatatgagccgtggaggcaaaacgtcatcacaactaaaatgggcattgacattgaacgctgtaatcgctatcacaaacttgaaaagcatacaagtgtttcagaacacctatagattaaacctgtgctcaaggtgaggcgctcaattttagcagagacctcgactccacacctgacgggagtcacagatcgatctgtgcacccatcgagcttggaacatagaaatagctgctatggggacgaatgaatggttggactatctgcgagatgaggaccattacaggccagcagcgaaaccttaatggaggtaataaccgccgcttgcgataaaacacctgacggatccagcgtgcacatctgaagaatctagcactgtccaaagcaagaacggaatgtgcagtgaatcgggccacactctagaggcacagcatgactctaaattgg

SEQ ID NO: 117879 - DNA, 577 bp, Arabidopsis thaliana columbia
  unsure (1)..(577): unsure at all n locations
nnnnnnnnnnnnnnnnnnnnnnnnnnnnnnnnnnnnnnnnnnnnnnnnnnnnnnnnnnnnnnnnnnnnnnnnnnnccacgcgtccggatactatcacggtctcacgctaacagacctccacgtgtcttcctcgcgaaagaaatggcatcgccattgattgtgtgcgtgcacaattccacttatcattcatgccccagttcaatacttaagacgcaagctagagtgatgatcattcattaatcacacattgagatctgatgcgacggaggagatagatatacatcctgttccacctcacgaacgcggacaataacccgactcagtcacgctatggcaaggatgctacagcgaccgccaaaaggaaaggcttttcttgctgctgatactgaagagacagctcttagcatcctaacggcgatagatcatgagcacgagaatcttgcgcacaattgtgacgctgcccatgcctatggtatagctgtgcttacatatgcgcttacaaacgggaagacttgtgctctgagatctctcaagacacatgatctaacgaatatgctgctggctgtgagagagctct

SEQ ID NO: 117880 - DNA, 559 bp, Arabidopsis thaliana columbia
  unsure (1)..(559): unsure at all n locations
cgattcannnnnnnnnnnnnnnnnnnnnnnnnnnnnnnnnnnnnnnnnnnnnnnnnnnnnnnnnnnnnnnnnnnnnnnnctttttttggttttttttttttttttaaatcaaaaagatattcagacgaaaacatacaaaagaaagtctcaaattttccagcttttcttcttgattatgccattgaaaatggtcatcaagaaaacatacttgagttgcttatacatatggaaacaacaactacagattgatacacatcagccaaaaaagaaagacagaaagatcattattgagtttacgtggaggaagagcctccacctttggaagaggaagtgatacctctgcaaccagcaccttcatgccattcaagcatgatctcaatctcgccacattcgacattgttaagtctaaggatcaagtcttgtgagatcttaccattgttccaaacaatgctactctcatcagataaacaattgtgccttgatggatgaacccttttgatagcacacccattaggtagcctcaaaagctccatccccattttcaaagcctgtaagtatg

SEQ ID NO: 117881 - DNA, 561 bp, Arabidopsis thaliana columbia
  unsure (1)..(561): unsure at all n locations
cgnnnnnnnnnnnnnnnnnnnnnnnnnnnnnnnnnnnnnnnnnnnnnnnnnnnnnnnnnnnnnnnnnnnnnnnnnnnnnnnncttttttgttttttttttttttttttttttttttttttttttttttttttttttttttttttttttcaaaacctcaaattcaggaaaccttaaagagataacaagattttgttttagggaccccaaatttcactacaagataaattttttacaatccgggggttccaaaccaaaaggggccagacttttgattactggaaaaggcttaacgaccaccagggccacgtccacaaccttttccacaaccacgtccccgacctgggggaattttacctgcagtgggtttttggggttggattctgggagggtcttcaaccagcaaagtctccaaattcaaactggccggaaaaatataatagcgaaggttgttccccctgacacttaaggggtctaagggaacgggattcttccctttcaaagggagtttcacagctttaaaaggagggttcatgctaacatctacaccagtaagggttcca

SEQ ID NO: 117882 - DNA, 521 bp, Arabidopsis thaliana columbia
atagaagactttgacgtcgcatgcacgcgtacgtaagcttggatcctctagagcggccgccctttttttttttttttggcaaaaaaaagtaaaaaaattaactgttaaatgaaacataaagagaaaataaacactagctaattgttacaagaaagataaacaaattatggcaaaaagaagaagaagacgagaagatacaaaagttaggtttggttgggtcaaactctaagcaaagcctaaagcttttgtacctaatgaaaaacataccaaacataaaaaagctaatccaaaacactatccatttccttctttttgtgattatgactttctatcgtacaaaggatgataaagatcatcatgactactctcatacaagggttttatgattgagaagaggttgtttctcaaagagaccaagtctataatcaccaagcttagacttgtaagcagaagatttgtattgagaccaagtgaattctttgtaaagccaatcatcttgctcagggacaaggcatggcaat

SEQ ID NO: 117883 - DNA, 547 bp, Arabidopsis thaliana columbia
  unsure (1)..(547): unsure at all n locations
nnnnnnnnnnnnnnnnnnnnnnnnnnnnnnnnnnnnnnnnnnnnnnnnnnnnnnnnnnnnnnnnnnnnnnnnctttttttgtttttttttttttttttttttttttttttttttttttttttttttttttttttttttcaaaactaaagaccgacccaaatttaaaaacaaggtccataaacttcgtccagataagtcaaatccaagcttaaaaataaacctgcaacggggagttgaggttttaatttttttttttaaaaaaaaaaggggcaaacgactaatttgtttttttaagggggtttttataactaaattactttaagaactttttttccgggggggattaacctttttcctaatcctggaagccacctttttaataagccggggaatttgggtatggggggaactttgacaaaaaaacgttaatgtgggtttttggtttggagaactccatttgggccattccctaacctgggaaccaatgcaagaaagccttcctcctgaacataggtgagaacggctaactcactggacggaaaatttt

SEQ ID NO: 117884 - DNA, 554 bp, Arabidopsis thaliana columbia
  unsure (1)..(554): unsure at all n locations
nnnnnnnnnnnnnnnnnnnnnnnnnnnnnnnnnnnnnnnnnnnnnnnnnnnnnnnnnnnnnnnnnnnnnnnnctttttttgttttttttttagcaattgctttgggagaacatttatgaaggaaaaaagacatttgatgcctgaggtttatagattatacggttgatcacttagaaacaagttgcttcgaagcgtgagaacaaaaaacaagaacacagattacataataatatgggtcaagatgtgaacttggggtactggttccgcggagaagcagcatagcttctttcactaagaagatcatcattttcggcttcgtttccgtctaagcacagaatgttgatgttgtcaacactcgggtcagatgagctcacagtgctgctcgtggccaccggagagcttgagacactacccggccgacttctcacactgtacattgatgatgccggaacttttgtcacaagcggccggaggtttccagtcatgcctcgtcttatatccatatgtcttatggccatatcgattgagcttttggagaggtttctaccatatcc

SEQ ID NO: 117885 - DNA, 547 bp, Arabidopsis thaliana columbia
aggtgacttatagaagagcttgacgtcgcatgcacgcgtacgtaagcttggatcctctagagcggccgcccttttttggtgttttttttttttttttttttttttttttttttaaaaaaatattttttttaaactacttaaataatctaagaagaaaatatctgatttcttcaaacagagccttatttttttcctacatatttattttagttctcactaagatgtgaatactcattccaacccaaaaaccggtgtgtgcaaaacagagagatttgattttgcagtttggtaagaacttgaaatgttgttattaatccagtttatgtttccaccatacccttcgttaccgttactcattgtagttgtcgaggacagcggaattgctgagaccgggttcgatgcagcggaatgattgttatacccatcagacccaacaaaactaccaccaaagttgttttcaccttcctggattaccggcattatagcatacccaggagaagggttatgaagatccgacccaaagtttgctaatggtcgcatttttgct

SEQ ID NO: 117886 - DNA, 655 bp, Arabidopsis thaliana columbia
gccggccctaatacgactctcttagggaaacctggtacgcctgcaggtaccggtccggaattcccgggtcgacccacgcgtccgcccacgcgtccgccagagatctttctctctctctcatccaaagacttcacgagtccccaaagaaaaaaaaaaacctattcccaaagatgaagaacaataacaacaaatcttcttcttcttctagctatgattcttctttgtctccttcttcttcatcctcctcccaccagaactggctctctttctttctctccacaatacaacaacttcaattcttcctcaaaccctaatctcacttcctccacatcagatcattatcatcctcacccttcttacctctctctctgtcaagctgtctccccttctccagtcgaccgggcaagatggggtcaccgggaggttacccaaccgtggcaccgggggttctttccgattcccccggcggtcctaacctggaaaccttcctcggcgggggagcctcaacgacgacaccaggaccatggcaccaggtgcaatctctgggcggcgttgttttcttttccgacctacagccaccggttattcttcgtccggcgccgaaatctacaactctgagctcaagtaatagccgctagcttcctaggaaactact

SEQ ID NO: 117887 - DNA, 559 bp, Arabidopsis thaliana columbia
  unsure (1)..(559): unsure at all n locations
cgattgannnnnnnnnnnnnnnnnnnnnnnnnnnnnnnnnnnnnnnnnnnnnnnnnnnnnnnnnnnnnnnnnnnnnnnnncttttttgggtttttttttttttttttttttttttttttttttgttcctttttttttttttttgtaaaaaaaaaaataaaacattcccccctttggcggaaaatatatttgttcctcaacggttcaattctttctaggcgaaagaaccctctaaaccccttctccgatctccgaaggttgtatttgaccggaccctttaaccttatggggggggggtaaaacccttaactaacttccccctataaccggttcctacatgattgccataaatcttcagaaaaaaaacctagctcaagggtggaagccgccaaaggggggataatgcaccttggcttttaaatggagaacctcccggggagctcccctggaaatcttaaccctataatgggggacccctaaacccaaaaaaccttgcgtgaacctggaaaaggaactgaacttccgggcattggggtcaaccttcaaaaaaacccggaacg

SEQ ID NO: 117888 - DNA, 870 bp, Arabidopsis thaliana columbia
ggggacgggaaggggagagggagagggaaaacgaaaaacgagcgagacgacaaacaaagacagaaacaaagccaaacaaaacagcaacccgagacaacgaaccggaccaaaaaacgaagaaagaaggaggaccctctcctaaaagggggggcgccaagcaccaaaccccagaaagagcgcgcggcagccccgcaaaaaggggaaaaagaaagagagaagaaaagaagaagaaaaagaagaacacaaagacacagacaagcaggcacgaaaaaacgaaaaggcggcaagagaaaaacaccacaccagaacacacacacgaaaaggcaacaacagagcaaaaccaccgagcgacccgggaccacgcgagaggaaagcggggccacaggcagagcagagaaccggagaccgagagacagaagagaaagagcaggccacaaaagcagagagacaccgacccaagaaaggaaaaaggcaaagaggagggggcggagcacgaacggcgcacggaaaagggacgcccgccccagaacaagcagaaaaagcccacaccgaaacgacgacgcaaagacagcgcacgagaagccgcccacagagaagccgagaaaacaaacaccaacaggacaaacacgagggaagcagccaaagcacaggaaagaggacgaacagaaagaagccaagacgggaccccacagcgcgcagacaacgaggaccaacgagagaaggaccacacgccaacccacaaacaccgaaagagcacacgcagacccaaccgaacccgcaaagccgccaggagaaagaacacaaaccacccgccgagcgccgcacagcacgggaccgagaagaggcggaggaagaaaggggagaacgcag

SEQ ID NO: 117889 - DNA, 488 bp, Arabidopsis thaliana columbia
gcgtacgtaagcttggatcctctagagcggcctcccttttttgttttatttcttttctgtcaacttttttttttcttttttcttttttttttttttgttcacccaccttttttctttatatcctaaaggaaagagtgtttttaacctcatgaaaacctttgatatctcaaaagaaaaagacccccaggggagatttttttttaatggggggttaaccacccagacccatccccaaggggaaccccctcccccctttttttgcaggaatcacctctaaataccttccttgtggcgtgtcggtatggaggactacccctatcccatcatcttttttacccatccccatccctgtaaacctgactcttggggggacccttggttccaccccggaattcccgacccggtcctgtaggggttcccattttccctatgaggtggcccccttggcccttgcccaaccctggtcataaccgtttcccaagggaaat

SEQ ID NO: 117890 - DNA, 496 bp, Arabidopsis thaliana columbia
tatacagagcttgacgtcgcaactacgcgtacgtaagcttggatcctctagagcggccgcccttttgtgttttttttttttttttttttttttttttttttttttttttttttttttttttttttgcaaaactaaagaccgaaccaaatttaaaaacaaagtacataaacattttccagataagggaaatccaagcttaaaaataaacctgcaacgggtttttgtggtggggggttttttttaaaaaaaaaaggtgccaaacaactaaattgtttttttcaagggggttttataactaaattactctaaggactttttttctgggggggattaacctttttactaatcttggaagaaacctttttaataagcgggggcatctgggaattggctgggactttaaaaaaaaatggtaaaagtggctttctgtttggggaaactaaatgtggggaattccctcaactgtgcacacaatgaagaaagcctcgcttgctgg

SEQ ID NO: 117891 - DNA, 402 bp, Arabidopsis thaliana columbia
catacgacttatatggggagcgctggcacgcctgcaggtaccggtccggaattcccgggtcgacccacacctccgctcatcccattccctcgtcttcacttcttcatggttggttttgctcccctcacctcaagaagtccacagtactaccgctccctcacagtgcctgagctcacccagcaaatgtgggactccacgatttttatgtgagctgcgcacccaaaggcacagcgcttccttcacagcctctgccatgttgccggggcaagaagaccacatagggaagttaacgtatcatattgttgaatgtttagcacaagaacctcggtcctcctgttgtggaagtggatcccccaacagcggggagattaatcaagtcatgtgaatatacccaccttacct

SEQ ID NO: 117892 - DNA, 522 bp, Arabidopsis thaliana columbia
  unsure (1)..(522): unsure at all n locations
gcgtacgtaagcttggatcctctagagcggccttcctttttttgttttttttttagtggaacaggatgatattgatatcttattacaggtaaaacaagcagcaacaagtggtaggtagataatacatgatcgttagagcagngagaaacactaactgttcatgatttgttcaaattcttgaagtacacttaaaaatttctttttttgtgtgatggggcggaagctgagctgatttaggccgactctttgactgcgacaggctgttttgattggaacagcctacttggcctcggagggttcggtgctttttgtcgttgggagggtgctgttttgaaggttgctccttggcggacacgtgggtccacccctgaattccggactcggtccctggggggagaccaggtttgcttatagtggggcgcgattagaggttttggaagtgatgggctgggtggatgctgggggaaaacggtctcggcttcgaatggctaacaaccgtcccacgctgattgtttaattgta

SEQ ID NO: 117893 - DNA, 615 bp, Arabidopsis thaliana columbia
taatacgacttatatagggaaagctggtacgcctgcaggtaccggtccggaattcccgggtcgacccacgcgtccgcccacgcgtccgcccacgcgtccgcccacgcgtccgcccacgcgtccgcccacgcgtccgcggacgcgtgggctcagccgcacccaaatccaggagctattccggtgccgttgtactgctgaatcaccaaaaccgatgcttttgtcgaagattccggcgaaatcaacaagcttcctacaggtccaagctccggacattcactattctccctaatcgccaatgcaatttctccacctggcattctaccaaccaaaaacaaattggctccgccgcactttcctaatcgccgatctaacatccacggcggaggttttcatctgtttctccacgaacttaaccgattcgtcaaccgaaatatctttcctaatctagacattatctcctcattcgatttaaaattcttacactctgattctcgttgtaatggtaactaacttcaacattaccaatctctccgactctctccgggaataccacaattgggaaaacagtcaaaacatttccgggatgctccgccttacgtaatccataagccaacg

SEQ ID NO: 117894 - DNA, 807 bp, Arabidopsis thaliana columbia
  unsure (1)..(807): unsure at all n locations
tgcnnnnnnnnnnnnnnnnnnnnnnnnnnnnnnnnnnnnnnnnnnnnnnnnnnnnnnnnnnnnnnnnnnnnnnnnnnnnnccacgcgtccgcccacgcgtccgcccacgcgtccgcgcctacctttaacttcgaattagggtttatcaggattcagtcgcctgctcacttgaatttcttcgcaagctcaaaaagttccgaaatttttgaaggaagatggtgaggccgtatgggattaaagtgaacaagagaaaggagagagaagagaggtatgataaggaagaagatgaagtagaggagcaaccaaagtttgagcaaaaacaaaaggcaagagaaagttcgaagaaagctaaaaaagaaagcacttcaagagcagaggaagataatgacgaggaggaagtaactgtggaagcaactgcagcagcagaggatattggtgggagggatacctattgtccttaatgctcctaacaaggaaaagtctggcattgtattcgtgcttgagaaggcctctcttgaagttgccaaagttggaaagacttaccagctactgaactcggatgatcatgctaatttcttgaaaaagaataacagaaatccggctgattaccgaccagacattactcatcaggcgcttctttatgatttggatagtccggtaataaagctgggagggttgaaagctgttatgttagaacaganaaaggtgtcctttttgagttaaccacatgttcgtatccaagaacttcaacgatttgcggatcatgtngcactgctacaaagctgagcttactgcagtaacagccgg

SEQ ID NO: 117895 - DNA, 626 bp, Arabidopsis thaliana columbia
  unsure (1)..(626): unsure at all n locations
tgctacannnnnnnnnnnnnnnnnnnnnnnnnnnnnnnnnnnnnnnnnnnnnnnnnnnnnnnnnnnnnnnnnnnnnnnnnnccacgcgtccggcaagagctatgaatgatctgatacagaacttgtttctcaggatatatagagagatgactcactctctccgcagcggataatgggaagagctcctgctgatcactagaccactccttgtatttcttctactgactcatcaggatccttggaccatacggtgcctaagaccaaaatacctgcaccaaataatacttatgcatacccagagacacatatctcgcatgcacgcttctggggtgctgggctgtacagagaccttctctgtgctacatgcttcaacaactgagtcataagatatggcgtgaccggtctactcgctggccgcgacatctggacgggataaaatgacactgtgcctatactgaaaggtgacaggtcggaggacgagatcagtgactatagagagagatacaggaactgcgaaattatcagaccatgagaccttgactcgaatgagcactaagatactggcgtttctggtgaacacttaacttacacccgatagatgcttgatgcttgggagatgatctctg

SEQ ID NO: 117896 - DNA, 535 bp, Arabidopsis thaliana columbia
  unsure (1)..(535): unsure at all n locations
nnnnnnnnnnnnnnnnnnnnnnnnnnnnnnnnnnnnnnnnnnnnnnnnnnnnnnnnnnnnnnnnnnnnnnnnnnctttttttttttttttctgtactgacaacaatttggtgttgaattccgcggcgtgtaaatgtcaagctaccaaatctcgttttctcattggtgtgcgttattttttaatctaaggtttcttaaaaaaaaaaaaaaaagggcggccgccctttttttttttttatttttttttggtgattcttcttttttttttttcaccagaaagcttggttactttaacgtttgaacaattgaaagaattggattttcaattcaagccgatccttttttgggaccaaggtcttcttacagatgcacataattacttcttctgagcgccctttttttttttttttgggacaaattttttcccaaaaatatattgctgatctttctttaccggggtcagactctaattcaagcttaaaatccttttactcctcaccgtattgtttccaaaccgggttggagggaatcatggc

SEQ ID NO: 117897 - DNA, 569 bp, Arabidopsis thaliana columbia
cgcgtacgtaagcttggatcctctagagcggcctccctttgtttgtttaaggcctttaaaaaaaaatattactttcctcatcaagaacacacttaaattcattcaacgaacgagggcgtacagactggaagggaaggggggatatagagggttgggaataattatgagtgaacaaactggataaaaagacgggttgggggaatttgtaattttgggggggggtggcccaccccaaagacgaggggcttagcagaagaaatagccgccgacatgagggggtgtttgtgtaggacgccgtcatagagagtgtacgagacaaatgagtggagagagagtgcagggaagcgagttgagtgcggagaaggctgagagggggtgggatcggtggggtgtgggaaaggtgaaaagtggaggaggggagagggggcagaaggggtgctgggggacgtggcgggagagaggggaaaggtgtgctgggaggggtagggggaggaggtgagggggggttgggggaggaggggaaggagggtgagcggcaagagtgggggggaggagatggagagcggggg

SEQ ID NO: 117898 - DNA, 508 bp, Arabidopsis thaliana columbia
  unsure (1)..(508): unsure at all n locations
ctaagcttggatnctntagagcggncttccttgttttgtttagccttgaaatnaaatanaaatnantnnaaaaggggaaaaaaaagttaagtntggaattaaaatgaagaaagaagaaaaaaggataaaaagaagggataaaataaaatatggtggataaagttttgagggtaaaaaaaaagttttttttttgngggggggggaaaaanngaggggtgggaggttataaaaaagatgccctgaattttttggttgtatgataattaaatgatagtaatgaagggattggggtattggtttttgagatatgggagttggttgaaaaaatggaggggagatggtggaaataaataagggaaggtatgaaattaggggagtaaagaggataatagtattagtgtagaattattgtgattattgtaaaatatatgggagttgaaggtgaatagaggagaaaggaagaagtggtgggagattaatgggagatattgttttagaaattgggaga

SEQ ID NO: 117899 - DNA, 589 bp, Arabidopsis thaliana columbia
  unsure (1)..(589): unsure at all n locations
atcgtaatcttggatcctctagagcggccgtccttgggttgtatgagtctttaaaanccaaaaacccccccccacggccaaaaaacaaaccataaagccacaaaagaaacacccaacaacgaggaagaggggattaaaagaggaggagaagagtgagttgttgatagtgaacaccagggaagcaaccacaaggtttgngtanttagagagggtggggcaccaccgaacagtaggacgttttattttataaaaaaacccccccccaaattgttttagttaggaggaaaatcgcgcgaaagttgaacgagggacgccccccgaagagtgatgaggacaggcgtcagggaaggaagagaaagaggaacagagaacaacctcaacccaaccgagaatacgaagcccncgggacccgactgcaggcggagcgcagagatgaagagtagagcagtggaatagcaaggccagagagaataatgaaggaggagaggggggggagaggggacggggcaaaaaatccgacactatcgcgaccagacaggaccaccgaataaactagcacgagaaaacgatcgcaacatattcgaacaca

SEQ ID NO: 117900 - DNA, 559 bp, Arabidopsis thaliana columbia
  unsure (1)..(559): unsure at all n locations
nnnnnnnnnnnnnnnnnnnnnnnnnnnnnnnnnnnnnnnnnnnnnnnnnnnnnnnnnnnnnnnnnnnnnnnnnnctttttttggttttttttttttttttttttttttttttttttttttttttttttttttttttttttgggaaagggaaaaccctttttttttaactaaaagtggaaaaattttttttcatcaatggaaattcataaaaccaatggggaaagggctaaacaaaggttccaaaacaacaacaacaacttgccataatgacttgacggtcctgatatcaaaaccgttttgaaggcagggggacaaaaaaaatgaagggaaaaaataatgggaaaaattgccccggacccaaggccggaacctggggaccggttcctttcaccgggaaaaaatttagcccaccggcataagtttaaacccatccagttacttgacttttggggaaccatgacctccccggggactcgaccttaagccccattttttttatgcttaaccgggtaaatgttcccggaactctcccatccgtatttccactttaaaaccaaat

SEQ ID NO: 117901 - DNA, 506 bp, Arabidopsis thaliana columbia
ctatacgactcactatagggccagctggtacgcctgcaggtaccggtccggatacccgggtcgaccccgcgtccggggacttaaggtcgagtcaccgtggagtgcaacctgcacatttttttcggttaatatgaaaaaggaggaataactttcagtgcatggatcgtacacaaacgttaacttgtcccacaaatcgtaaattttttaggagaggaggggcacaccagagtgcatagatcaagcagatttgatgacgataccaactggaggagcgaaaattgtacaccgttttaaaaggggggggacaaaaaaacgatggtgggaaaatatggggaaaaaacgccccggacagaaggcccaaactttgggaacgttttcttttaccgggaaaaaatttaatgccccgggatatgtgtaaacccaccaaattattttactttggaggaaaaaataaccctcagggggacttaatctttaaaccccatttttgtactgcataaaaggga

SEQ ID NO: 117902 - DNA, 470 bp, Arabidopsis thaliana columbia
  unsure (1)..(470): unsure at all n locations
atagnnagactttgacgtcgcatgcacgcgtacgtaagcttggatcctctagagcggccgcccttttttggtggttttttttttttgtttttagtttcaaaagtataggatatagatcatttctagaaaggaaataaacagtgaatgaaattttttcggattacagtgttttagaattcagcagagagagaatggggnaaatctcccaagacaagacatgactccccgatgattaactctgttcccaaatcattccctccgcttagctgcttgcagggatcgattacaaacactgtttccatcttttcattggaacgaacttgagcacgatcattaaccaatcagcttgcttctccgaaacaccagataaaaaccggtggcattttcgaaaacagcatcacaacatgactcccgtcaatatcttcgggattgctcacatgaacccgaacgttaaaccccggtgattcgca

SEQ ID NO: 117903 - DNA, 533 bp, Arabidopsis thaliana columbia
  unsure (1)..(533): unsure at all n locations
nnnnnnnnnnnnnnnnnnnnnnnnnnnnnnnnnnnnnnnnnnnnnnnnnnnnnnnnnnnnnnnnnnnnnnnnnnccacgcgtccgatgatcgtgagacttcattcttgctatgaagcacacataatgaagatgaccaaggtatcagcttgcggctgacctcggctacattcatcatgataacttcgcacacgtgtgttcaactgaaacctgtgtactttcatgtgagagatcgcaggagctgtacgtgttcgcggatcataggatcactccgaaacgttgtttgtaagaacacactagcttgtctctaggaaactgcaatacacggactacggctgctactcaatgagacaagttatttagctgggtgaccctgctacgtcagctcataggccttctcccgtgctttgacctgtagcttaacctatatgcacggtccttttccctgcatgacccagtgccgagagactatgaccacctttcttccgtcctgtgcctagtacagatatgagcagtactagtcctgatacctcta

SEQ ID NO: 117904 - DNA, 559 bp, Arabidopsis thaliana columbia
  unsure (1)..(559): unsure at all n locations
gggaacgacgcgtacgtaagcttggaacctctagagcggccgtccctggggagtatgaggcgttaaaaccanacaaaaccacaccaataagggggcacgaaccaaccgaacaaacacacccacaaggaccgagccccagggaacaggctgagaaggacagaagagaaaaagggggaaaaaaggggcacgcgacaaaacgcagnaacaacccccctggtaagagggggggggcggacacacccgaccgacggaggaccgcctgcaagaagagaacacgcccccccagcacagggggccggggggccaacgaaagcaccaccgcacaacacaaaatcccgccgccgcgcgacgcacagagggccgcgcgcaacaggagagagaccgccgggaagggagcggagacgagcggcacagcgcgcagaagaggaggacacgaagacggaggcgggggggatggaggggggcgcgacggacacgcgcccgcaccgcgggggagaagggaggaagcgcaggggggagggaccagaacagggacgggaagcgcggggcgagcggacga

SEQ ID NO: 117905 - DNA, 882 bp, Arabidopsis thaliana columbia
  unsure (1)..(882): unsure at all n locations
gggcgcgggggccgggctggcctccgagcagccgatcttcgggcgggagggggccangggccgacgtcaagcagcgaggcccacacagaccaagaactagtttcaaagcaacaaaaaagacagagcccgagagcggaaacaagagatcctctaaaaaaggggggggcaaaaaagacaattttttttaaaaaagcccccgggacgagagaggaccagcacagagggaaaaagagcgccggaggggagggaaaaaggcgaaccgaggaagaacaccaaataggagggccgcacgggcggcacagcaggaaccaggaggagaaggcgcggaaaagaggagcgaccgaagaggaagacgcgagaaggaacggaaaggaagcgacagaaaaaaagagagcgggaacgaaagaggaaaggaagaagaggagaaaaaaaggagagagcagaacagggaagaaaaaggcaaggaaagaccgagaggcggagagacggagagaaggagaaaaagacagggagcggggggagagaagagagacaggaagggaggagcgcgccgaaaagagaccccaaagaaaacaaacgagagagaaagaaaacgacagagagagaagagaagaggcgagacagcaggagagaagaaagaaagaggacgagaaaaaaggcgaggaagagcaccggggaagggaagtcgggccggatggaaataaagagaaaggaagagaaaaggcgaagagaaagaagcaaaaccaaaggaaagagaaggacgagagacaaagccgcggagaaagagcaaaagggaaaaaaagaaaggagagaaaagaagaggggaaggcggagcggtccggaaggggcggagaggaaggagaggaaacagaggagagagag

SEQ ID NO: 117906 - DNA, 549 bp, Arabidopsis thaliana columbia
  unsure (1)..(549): unsure at all n locations
cgnnnnnnnnnnnnnnnnnnnnnnnnnnnnnnnnnnnnnnnnnnnnnnnnnnnnnnnnnnnnnnnnnnnnnnnnnnnnnnnnctttttttggttttttaacgatagctttttgatatccttaaaacttggcgtaatgaaagatcataacataagacgccctttgggcgtgccctcaaggacttaatgatcagacatttgacataatgggactactggttatatacacaatcttcatcaccacaccagtgataatggcgaactacataccagctagaatagctaacaaagatggagactacacacactgggcagtgtaacgagagaacacactcacacagctttgaatactcacatgttagcacggacacttgaagcatatctctcatgataaacctgctagaagcatcaagaggtatcgacaattgagagngggtctgctgatacgctctccacttacggtatctatcacagagatcatcaactattctaatggatgataaggttcggaaaaacggaatgccgtcgtagaacacattaggattaaactc

SEQ ID NO: 117907 - DNA, 745 bp, Arabidopsis thaliana columbia
  unsure (1)..(745): unsure at all n locations
atgannnnnnnnnnnnnnnnnnnnnnnnnnnnnnnnnnnnnnnnnnnnnnnnnnnnnnnnnnnnnnnnnnnnnnnnnnnnnccacgcgtccgtgcacacgaccagccacacgtgcagctacacgtccttccacagggtccaccgacactgccggtgacgcgtaggctcaatcggatccaaatactgagctattgcggtgccgttggactgatcaatctccataaccgatgcttcagtctaagattacggcgaattctacatgctacatacatgtacatgctacgtacatttactatatttcataattgctacagcaatgttgtccagctgtctttataccatgcacttacagactgatgtcggaacatggctcattcacccttataacatgcacggcgactgttgtaatctagggatcgacgaactctaccgatggattcaccgaagatatcgttgtaatctcagactttatcggctcattcaagctgagatacttgacactctgatgctcggaagcattgataatcacttcaacattaacattgtatcctactatctgcggagataccatagatgtgagcacacttgagacagtcccgggatgctacggcgtacatttttcattagacaacgctttacgatcatcagggccaccgaagagcagaacagcttcggagggtgaaaatcttgtgctgaaactatgcttgaacctcctagggcacggtcactgatatacaaccgagca

SEQ ID NO: 117908 - DNA, 489 bp, Arabidopsis thaliana columbia
acgtggcatgaccgcgtacgtaagcttggatcctctagagcggccgtcctttttttgtttttttaacgataactttttgaaatccttaacaagttgcaaaaggaaagaacataacataaaattttctttgggccgtgcctctgggacttaatgatcaaacattgaacataatgaaaataatggtaatatacaaaaccttgatcaccccttctttgttttatggggggtgacatacctaccaataatactgcacaaagaaggagaactccaacactgggcagtgtaacaagagaactcactcacacaagcttcgaattctcacatgtatgccacacacgcgggattcattccttcaattgacgaacctgcctttaagcatcaaaatgttttcaacaatggaaaagggggtatgaaaattactgttttctcacttagcagaatctatcagcagagatcatcaactttttccaagggaggctggaagtttag

SEQ ID NO: 117909 - DNA, 847 bp, Arabidopsis thaliana columbia
taatacgacctactataggggacgctggtacgcctgcaggtaccgggccggactacccggggcgacccacacgtccgcccacacgtacagccgcgcgatcggctccgctatcgtccacgggtgcggataggcttgcatatacgctggggataaaagaaaaccggaacatggtctgttgcgatcccaccgaactggggaatgtttttaaacgctggtggaggacaagataacggctaattcgaaattccacacccaggatcaggtgtcggcactggactataagcccgaaatccctccggctgataatccaactggcattctaccctccaaatacaaactgttgcaccaacactggctcttcccccatataacctgcacggggaccgtcgcgaccaagggaatcacaaacgtaacgagtgattcaccgaaaaccatctccttaccaaagacataaacgctaataccatcgcagaaactaaatactccgaagcctcgagaactcgaccttactcaacatcaacatggctccaatcttccgggcaccctaggactgaaaaccggaaaacaaaccaggttgtatcggcaacagaactccaaggaaaccttggcgaccatggggaccccgaagaacagaatagccccaaggatagaatctattggcctgaaaatgactagagcctcccttcgccggtgaacagttaccccccgaccaggaccccacagaaacacccgtgcctacccacccaaaagtatggttaaacgcgtgccagcacccggcttggtatgtctgtaaacccagaagaaatggaggcctcgcgacacgaaagcgccaggaacagcctgatac

SEQ ID NO: 117910 - DNA, 524 bp, Arabidopsis thaliana columbia
ttgacgtcgcatgcacgcgtacgtaagcttggatcctctagagcggccgccctttttttttttttttttttttttttttttttttttttttttttttttttttttttttctggcgatggaaatttttaatgccaggggtgaaaataaaaaaagggtttgaaaaggctcaaaaaaaaaaaaaggggtcaaaacccaaatcgcgaaacaaaccccaaaaagctgagctgtttaaataaacctccaaagattttttttttccacaaaaaatttacaatttttttgcccccccaaaaaattttggattctcttgccacctttgtttttttaggcggaaattgcggacccgccgttttttccggaccctttcgcctagaccgaaatttttaccagttgtcagtaagatgagaattttgtgttattgtgggaaaatgggtaccctgtgaaaattggggaaaaattcgaacccggagaaaaaatgctaaccgctggcattgctaaaaaagtttggagcccctaatgagtgc

SEQ ID NO: 117911 - DNA, 505 bp, Arabidopsis thaliana columbia
gacgtcgcatgcacgcgtacgtaagcttggatcctctagagcggccgccctttttttttttttttttgtactgacaacattttggtgttttttttacggcgggaggagatgtcaatgtaccaattcgccagattcatgatgtagagctggaacatggattttactgttacgctaagagcaatggctaaggggttaggccctgaggatttttttttttgataaacgggacaacccccaaagaacactttaaacaaagcatatgtaacattacctgtcatcaatagctcatacagatttgagggtaatcctcccaacaaagcagaaacaattatgtttataagtggtgaaccaagtcaagattttgacacttcctttgttgaaaggtcgagcagggaaaattcaacaaaattgtagatagacaattgtgtatacttagaagatggagattttaatttgagagaaatggcttcatccactgcatgccaaaaggttttaccataaacat

SEQ ID NO: 117912 - DNA, 702 bp, Arabidopsis thaliana columbia
  unsure (1)..(702): unsure at all n locations
nnnnnnnnnnnnnnnnnnnnnnnnnnnnnnnnnnnnnnnnnnnnnnnnnnnnnnnnnnnnnnnnnnnccacccgttcgcagacgcatgccgcggacgctctgggtggactcgcgggaacaggtttctcttctaacagtgcaaacaacgccaacctttactttatcgaggttatggatcgcagccatggcagatctgaattatccactatgatcgaagagtgaaagacctgatttcgaagaatccgtgatgatgacgacattgctaggctgtcatgatgatgctagcacaaacctccatggccaaacatgtcaggctcgaaccaacatacctgagagacatacaagcacccaattctaatgcaacacatgtaacaggagatttctctagcttaggccctagagaccacgacaatcctgaaaagccaagtcaccgttgagcagaaagaggtgaaacatctcatgtagcaactataataggccattcattttacacatagttgctcacatatagcgattcacgagcttgttgggtacctgagacaggcgtttgatgtgctgcatactgatgacaggaaatatgtgcaatgcttgacggtgagggcgcatgatcatgttccgtgagacatcttccgatagaaccacgggttggacaataagagataagttaggatcggaatatgactaacgggaagaaagcatctg

SEQ ID NO: 117913 - DNA, 530 bp, Arabidopsis thaliana columbia
aggtagacctatagaagagctttgacgtcgcatgcacgcgtacgtaagcttggatcctctagagcggcctccctttttttgtttgggcggctaaaccaaaattctctttcaaaaacttctgatccatcattttcaagtttgtaagaatttatcatgcgaaacaataagttaactaagtttaaaggataaactagaggaaaacatgaagtatttaggcaacaacaacacctttatgaataaggggggtattacatatagaattgacagacaaggtcacgactatacgaggggactacagaattatttcctattttcgtatctttgattctctttgaaggggaaatttcccctaagagcattttaaagttacaagagagccgataaaccctattaaatgagattggatgcatgttaagaaagaaagaaaagagtgatggatcataaggagaatggacttaatagagactcgtcaagctctttagaacctgcttatacaccatccctcttgatcggtggcagagctagtctcc

SEQ ID NO: 117914 - DNA, 530 bp, Arabidopsis thaliana columbia
  unsure (1)..(530): unsure at all n locations
agctctcnnnnnnnnnnnnnnnnnnnnnnnnnnnnnnnnnnnnnnnnnnnnnnnnnnnnnnnnnnnnnnnccacgcgtcgggtgggggtcaagaattaacatatacgtgctattatttcaggggacagttctacccttgaacgaaggccagacgacctaagtcaaccacttttacacgccaatattgttagtaacagcaatgatttagtaagtactcctcaaggggtctctgacaggggattgggggatctgcttgaacgagaactcacattcctacagttccaaattaagatcagggacaaactagaatctctagcttacaatcttgattcctagggtgccatgcatgactctgaccctaacgggctagttctgaatagtgattctactgatgataccaacttagctaatgtcataaatgaaagggacatgactgtgtcctcggatcttaacactgtaacacagatgaataatgagtattctgatccattctaactcttggagatcttgctggaaaaactttactttgc

SEQ ID NO: 117915 - DNA, 464 bp, Arabidopsis thaliana columbia
  unsure (1)..(464): unsure at all n locations
cnnnnnnnnnnnnnnnnnnnnnnnnnnnnnnnnnnnnnnnnnnnnnnnnnnnnnnnnnnnnnnnnnnnnnnnccacgcgtcgggtgtgcgtaaagcttgcatatagacgtgctattccttgatgggacggtcctacccttgaacgaatgcgagacgacctaggtcaaccacatttacacgacgatattgcgagtgatatcaatgagtgattaagtgctgctcatgggaccactgacaaggtattgtttgatctacttgaaagagaactgacaagccttcagttccaaatgaagatcagggacaaacttgatactctaggtacgagtcttgattgctgggatgacatgcctgactctgacacaaacgcgcatgttctaaaacgtgattctagtgaagataccaacttagctaatgccatatatgaaagggccagagctgtctcctctgatcttaacagtgtaaca

SEQ ID NO: 117916 - DNA, 547 bp, Arabidopsis thaliana columbia
  unsure (1)..(547): unsure at all n locations
nnnnnnnnnnnnnnnnnnnnnnnnnnnnnnnnnnnnnnnnnnnnnnnnnnnnnnnnnnnnnnnnnnnnntcccttnntgggttttttcttttttattttggctttgaaagtaaagacccttttattagcagcaccttgatatatgaaacaagaagacataaaagatagataaaacgcanacaacttcttcaagccgaagccggagaagaatcatcttgtacaaacttctcaaactcttccctacttctcccattcggattcttcttccactccatgaatttcgtcgccgcctctataaatttctccatatgaagcctcttcctttcctcgaaatcccattctccatacatattaggatcatccttgtttgcccatacaattgtttcaacttgcttcttctccaaagtatcagtcaaaacaacttcaacagtcttcctcacatattcagttccttcaatcatatctaacctctctaactgagaatctgttaatccagttaggatcttgccattgattaatccattgccggaaggagaaatcatggatg

SEQ ID NO: 117917 - DNA, 514 bp, Arabidopsis thaliana columbia
  unsure (1)..(514): unsure at all n locations
aggtgacctatagnaagactttgacgtcgcatgcacgcgtacgtaagcttggatcctctagagcggccgccctttnttgtttttttcttttttttttttttttatttggcaactccgaaacaagagggaattaagaaatgcctcataaaatctacaagcaaaactcaaaatcaaattcaaacatatcaacatagacatgcataatgttcatcatcatgatcatgatcatgaattcatgatcaatgacccataggnatactcggctcatcatccaactcaatccccaccttagctagtcttttttccttgtaaacttaccacttggagaaaactaggaaaatgaggaagttcaaggcaacaagtacggccacagccattacaaattgaaacaccgcccttgttaagaccatcggaaatcctggatgagctttcccgggaatttctaacaattggcacaaaaccgactgaaaaaaagctaatgccatggtgttaacataaaccctcctatccttta

SEQ ID NO: 117918 - DNA, 312 bp, Arabidopsis thaliana columbia
  unsure (1)..(312): unsure at all n locations
tccnnnnnnnnnnnnnnnnnnnnnnnnnnnnnnnnnnnnnnnnnnnnnnnnnnnnnnnnnnnnnnnnnnnnnnnccacgcctggcgcctacgcgtgctaatacacatgaggggccacttgagctcaaatatgtgtcaatataccgcaactgtgccaccaagatgcatttcactaacgttgtactactgcaaacacgctcgtggactacaaatgacgggactatactcatgtcttatatctaacgggtgtaggaactggaggcgtgtaactgttattgtcgggactaatatacggaccaatgaatgtgacacc

SEQ ID NO: 117919 - DNA, 446 bp, Arabidopsis thaliana columbia
  unsure (1)..(446): unsure at all n locations
cctgcaggaccgggccggaataccacgggtcgtcccacgcggtgcgngaaagcccgactaaaccagaaagacnaataaaaaaacctgggtgaangagaagaacagaggggagagccaaagaaaggagaggaacggggcgcggccccccgcaacgcaagaaagacccagcaagagggagaaacagagaaggacaaagcagaaggagggcctttcttttttcaacagggggggggagaaggaaccaggcaggagacacgcagaggagagaacgcgcacacggaaaggagagcaacagagcgcgggacgagcccgcagagcagccagcacaaagaaagggcgggaagcccaagagacaaacgaacaaacagcgaggaggcgaccgcccagagccggacgcagacgagccgcaaagaagaagagagaacacacaggagggccccaagaac

SEQ ID NO: 117920 - DNA, 503 bp, Arabidopsis thaliana columbia
acgtcgcatgcacgcgtacgtaagcttggatcctctagagcggctgcccttttttggttttttcttttttttttttttttttttttttttttttttttttttttgaaccaacattttttttttgattcttatactaaaaaaaaacaaaattcctaaaaacaatggcaagaaatatcacaaacccctagatctaaacataggaattacttttaagagtaaacacaacttataaagctaaaaccaagatcacatacccccaaacggaaaattgatttataataaaccccccctaaaactttcttgaaaaccgaaacccttctcattccagaaaggaggcggggtttttttttccttgtaacaacaaggtttgtttataagcaccccgggacttgaaaagaagagaaaaaaaagccttagtgtcaaccaaaaaaatgtttttttccgaacccgggggccaacccgtggattttcgaaccggcccctgtatgccaaccaattttccc

SEQ ID NO: 117921 - DNA, 531 bp, Arabidopsis thaliana columbia
  unsure (1)..(531): unsure at all n locations
aggtgaccctatagnnagagcttgacgtcgcatgcacgcgtacgtaagcttggatcctctagagcggccgcccttnnttggtttttctttttttttttttgttttttttttnaaaaaattgagaagaaagtctttgtttagcatttgttcaagtaatcaagttataactaaaaaatgaaaccgaaaagtcttctgttgttaataaaagtcttctgttgttgttctttgtctaatagctgctccacttaagtaaatctatcatcaagtcacaagtattgctgttgtatacgcgctctgttttgttcccaccataacctcgcatgtgtttccccaaacttgtctcggctgaatcgaactcgcctaagctcgcgatttccatctggtaaagctctgatagtaatatagataccaggctcatcttgttctacccattcactttccatgtcacttgcgttactcactgagacctcctcggatcgatctaccgagctacttctagcagaaccatcgatagatgatgtttcagtcttg

SEQ ID NO: 117922 - DNA, 530 bp, Arabidopsis thaliana columbia
  unsure (1)..(530): unsure at all n locations
atagnaagagcttgacgtcgcatgaccgcgtacgtaagcttggatcctctagagcggccgtcctttttgggggttaaatcttttttttttatttttttttttttttttttttaaacaaaagattcggacatgtttacttatcattacatcgggcatacatgatacccaacaccatccatcatatcatacatcctttccattatcattatatcacccccaccacaattttttaaatcaggggggagccaacatttagattaaataactaaaagccactaacatattatttaaagcattagggctgaacacacaaaaaaaggaggggggcactaccatgatgtattcataatccccctttttttgattaaactaaaaagatttttttattaatttgggttcggcccaagcagagaactcaacacaccgaaccccttgtgtttctaattttttccaacttaaatgggttttgggtggaaaattacattgtttcctgactccccttaaaagccagcaaggggggtgttttcgga

SEQ ID NO: 117923 - DNA, 527 bp, Arabidopsis thaliana columbia
  unsure (1)..(527): unsure at all n locations
cgattcnnnnnnnnnnnnnnnnnnnnnnnnnnnnnnnnnnnnnnnnnnnnnnnnnnnnnnnnnnnnnnnnnnnnnnnnnnncttnnttgggtttttccttttttttttttttttttccggaatacaatttcatcccggttttatttatttcagaaacatacaaattggttttagtatctcattctggtttagcttagacacaaacatgatcttatagacagtaatttataagacatcttgtatagattggaagtaacaaagaaagcttaccaattcataacttgcttctgcctttctttgataagcttaccaaagccttagccttggtcctcagaacaaacttctggacttttccagtcgatgttttaggaagatcctcaaacacaatactcctcggagccatataatgtggaagccggtccctgcaatagctaataagctcctccgcactggccttagacccgtctttaagtttcacaaatgcacaagcagtctcaccccaatactcataaggcctcgcaactaca

SEQ ID NO: 117924 - DNA, 396 bp, Arabidopsis thaliana columbia
  unsure (1)..(396): unsure at all n locations
atagaagagctttgacgtcgcatgcacgcgtacgtaagcttggatcctctagagcggcctcccttttttggtttttttcttgaaagagctaaggcatcatatttattagactcaatgcatcattacttctacttattcaagctctctgcgaggctctaacgactatccccgttagccacacgcagcgacggacaagtgatcaacagagtctcccctctcataatcttttgcggctgccattccagtgcctatgcacattgagagtactacaaagcgggagactttacctatccgctgcatctagtgcaacaatgtcgcaacacatcgagctcctgtagcacccaggggatggcaatagcaatggtnctacattacattgaccttaacctgtccagc

SEQ ID NO: 117925 - DNA, 298 bp, Arabidopsis thaliana columbia
acgactcacttttgggaaagctggcacgcctgcaggtaccggtccggaattcccgggtcgacccacgcggccgagatgatcttcttgcttctgctgttaacgctgtagtggaaagaccatctttggatccatgtgaagagggtgatatccgcgttcgtaccgagatcgcgcctggttctcagagagcactggagtgtatagatgcagcttatcttgctgattttactgagtgcgtgctattcagcactgacaatagacaatgctcattatgactaccatcagtagctgatgtagctgc

SEQ ID NO: 117926 - DNA, 399 bp, Arabidopsis thaliana columbia
aggtgacttatagaagagcttgacgtcgcatccacgcgtacgtaagcttggatcctctagagcggctgcccttttgtggtggtggcggactttaaaccaaaatttttctttcaaaaactttctgatacatcatattccaacgttggtgagaatttatcatgcgagatacacataagttccctaaaccttaaaggaaaaactaacatgaatacacgtattgatttaggccaacacacaacccctttttctcaataagggggcgagtaatccatcatatgaatttggcaatacacaggaacacgcacttataagaaggtgagtctacaggaattgatgggttttactctttcacgaaattaatggaatgtgtgtgttacaaaaggggagaatttatcccaa

SEQ ID NO: 117927 - DNA, 460 bp, Arabidopsis thaliana columbia
  unsure (1)..(460): unsure at all n locations
acgactcactatangggaagctggcacgcctgcaggtaccggtccggaattcccgggtcgacccacgcgggcggggtggctaaagatcaaaacataaacttcttattacatatatgggacggccactaccctgagaataacgggagacgacctaaattaaaaatttatccgggtcgacactgccagtctcagcgacgggctagggggacacactgagggaggatctttctgtgggggggggggtcatcttttgaggatctgggagaccttcacttaaaaactaagaccaggggcaaactggtacctatgtggttccaattttaatccctcgggttagctggggggcgaatctgcccataacgggccggggctgggcaggggagcttaacaaaaagtaccaactgggcattgcagaaaataaaggggccttggttggggtgcctgaccttaaaatggaaaa

SEQ ID NO: 117928 - DNA, 532 bp, Arabidopsis thaliana columbia
  unsure (1)..(532): unsure at all n locations
nnnnnnnnnnnnnnnnnnnnnnnnnnnnnnnnnnnnnnnnnnnnnnnnnnnnnnnnnnnnnnnnnnnnnnnnncttttgtgtttttttttttaagcaaaatcacagcataatttctcagggaaacaacattatcttccagtgtcttattcttctgatatgatttaaagctatcgtactaacttagttctcctcactaccaccaaaaagcttcattttagacaatggagtcctcaagtacccttctacttcaaatttctttggagagagctctctgtacttagcaaactgttccttagcttcaacgttcttgtcaagcaagctatagatcatacctcgacagaaatacggtctgaaatccttaggatcctctttcgtcagctgctcgtagctcttcaatgcttcatccacattcttctgcaagaaatgtatctgcgcaatgatcagtctcacatctctcgcttccttcaccaaatactcagcctcagctacagctaaagcatcttctagcctctgcagcactgcatttccttc

SEQ ID NO: 117929 - DNA, 550 bp, Arabidopsis thaliana columbia
  unsure (1)..(550): unsure at all n locations
cgattaattttaggtgacctatagnaagactttgacgtcgcatgcacgcgtacgtaagcttggatcctctagagcggcctgccttnntgggtttttctttttttttttttttttttttttttttttttttttaattagagaaactgatttaagcctaaattgataaaaatgttggaaggccatacaattgggaatagaaacccaatcaaatgggaatagttgaaacattaatcatcctaaaattcttaaataatgcttgaaacaagcgctgaccgccttttttcaaaattttcttttgggagggaataaaaagagcctaataaagaggacttggctggcgaattttctaaggaaggatgctccataccttttttttttgaaaataatttttctggctcaaactccagcattttttataagaaataaagcccaccctaaacaaagtttggcacattttaaaaaagactcatcggctcccattacaggtattcatgccattgcttgagttagcttactacaagccaaatttttttattttaaatccccaaca

SEQ ID NO: 117930 - DNA, 532 bp, Arabidopsis thaliana columbia
gctccctacgactcactatagggaaagctggcacgcctgcaggtaccggtccggaattcccgggtcgacccacgcgggcgacaacatgtgagattctagagtgacgaacacgagatgttttgagagatggatggacatggcaacaatggtggtatcccgctgattctgccttggtagacttggacaagcttgagaagtgggcgaagggacttatggaaaagcttacaaagcaagagagaaggctactgggatgatcagagatttgaataatactcctcttcctgaggatgaacaaggtgttgctccactactcttatgaagatttctatcttgcgtctgctcgctcgtgatactcgcatacataggtagttggatgcttatcaaggagtaagctgagagtgaataactgctctttaccatgtgttcgagtttgttgatactgatctcatgaatctattagatgcttgagttatgctggtcagaacattccacaaaatactgtcaagtgcttgatgtaccagttatgcaaagg

SEQ ID NO: 117931 - DNA, 510 bp, Arabidopsis thaliana columbia
  unsure (1)..(510): unsure at all n locations
ttgacgtcgcatgcacgcgtacgtaagcttggatcctctagagcggccgccctttnttgggtttttttttttttaagccattgttttcggttgaaaagtgacaagacagactttgtttatcttttggtcaagtaatcatgttatacctaaaggccggacccggaaagtcttttgttgttaataaaagccttctggggacgggctttgtcttatatctgctgcccttacgtaaatctttcttaaagccacaaggattgctgctagttaccccccctgttggggtcccaccataacctcgaatgagtctccccatgcttggttggggtgaatccaactcttctaagctggagatttcatcttggcaaatctttgattgtcttatacataccaggctcatccctggttaccaataaacgtttccatgcgactcgacgttactcactgagacttcctggaagggatccaccgagctacttgtagcagaaccctctatttaggatgtttccggtt

SEQ ID NO: 117932 - DNA, 484 bp, Arabidopsis thaliana columbia
  unsure (1)..(484): unsure at all n locations
atagnaagactttgacgtcgcatacacgcgtacgtaagcttggatcctctagagcggcctccctttttttgtttttttctttctgaaacataatttaatgaaaggaatttgggggcacaagtttacaattttgtacaatgggatcgtgcgcctccatcaaaactcccaaagggcgcggaatactactaggattgcangcaacatcatactcacaacacaaccttttgtacacctggcaacactctctctaaattggcagacgaggtcacagactattcgtaccatataacatagctacggcttattttcgtgcacgcgctttgactatagatgacccttttcgcagatatagctcctccataactaaagactgccttctgaacctctatcctctggggatggatccggagacacacacactacaatcactggtcagattgttacatcatattccgttaaggggccactctttacagtctttata

SEQ ID NO: 117933 - DNA, 210 bp, Arabidopsis thaliana columbia
acgactcactatttggaaagctggtccgcctgcaggtaccggtccggaattcccgggtcgacccacgcgtcggatgacgcttaagcgcacacatagagcttctatattgtgttgttcacagtcctacccttcatatcaattgagatgatacctgttaacagcatttacacgaggatattctaagtgatctttacggagtgagtaaagtga

SEQ ID NO: 117934 - DNA, 531 bp, Arabidopsis thaliana columbia
  unsure (1)..(531): unsure at all n locations
gactttgacgtcgcatgcacgcgtacgtaagcttggatcctctagagcggccgccctnnnttggggnnnncnntttttttttttttttttttttttttttttttttttttttttttttttttttttttttttttttnaaaaggaaggcccatttttccttgcgtttttcgaaaatttgaagttttaaataaaactttttttttaaaatttaaaaaattttgggtggggtggcaaaatgtaaaaggggggtttttttttaacaacaaagggatttttccttttggggggggggaacgggggaacctttttttttttcctttggccgggtggaataacttgtttttttggcccaaagttttttcccaacagttttattgtaggggcgttttttttttgtgggggccgccttttgaatttgtggggaagaaaatttgcccccttgaaataattttggacccgggggtgcccccgggatttccggaccggttcttgggggggtaccattttttcttataggggggttttttaaag

SEQ ID NO: 117935 - DNA, 550 bp, Arabidopsis thaliana columbia
  unsure (1)..(550): unsure at all n locations
cgactcactatgggaagctggccgcctgcggtaccggtccggattccgggtcgaccacgcgtgcgttatttgttctgtcaaagacttatagacgccctttatgtctaattttcccttaatgaaatacgtagaagagtaaactatancacgcaagcactgtaacttcattaggcattaaaaacataagcaagatctgtcagacgcacaataatagtgtggatactagatagagaggactcttacagaggggagtatatataaccaactcctactagagaggtaaacaagacattcgctttaagaactttgggatttccaagaccctggcgtcgggaacaagtgggaatctggatgtggctgaacttgggaatccgaattcccaagatcgtgatgccggtgagctggggttttaacggaggtgggggcatatttttcaagggaggacgaaatagcattaaatggtgagaggagagacacccgtctttatccgtgccctgaatgagattggaacagccttttgtgttattatcaaagaaaagattgccttgtt

SEQ ID NO: 117936 - DNA, 551 bp, Arabidopsis thaliana columbia
  unsure (1)..(551): unsure at all n locations
gatcttcaggtctctacgactcactattnggaaagctggcacgcctgcaggtaccggtccggaattcccgggtcgacccacgcgtgcgcccacgcgtncgcacacatcgataccatcaccagtttacagattcggatagggacccacatagtcctaacgaaggattttggttcagtcacctcctatggctatttgataccggttatcttgtagaaaagtgtggaagaaggacaaatgtggaggacttaaagaggcagtggtactataaattcctccaaagaacagtcctttaccacattctaacatttggtttcctcctctattactttggtggtttgtcttttcttacttggggaatggtaatattttatattctttcccttttatttttaaaaaatttcttacaaaaacataaaaatagttacaaataataaatgaaaaaatgaaagaattctaatttttctatgagtgtagggtattggggtagcaatggagcatcatgtgacttgcctcataaactctctttgccatgtttggggaagccgaacttg

SEQ ID NO: 117937 - DNA, 530 bp, Arabidopsis thaliana columbia
  unsure (1)..(530): unsure at all n locations
aggtgnacctatagnnagactttgacgtcgcatgcacgcgtacgtaagcttggatcctctagagcggccgccctttttttttttttttttgttttaaccatgattttctttcagaatcttcagaaccatcatgtttcaagtttgtacgaatttatgatgcatttacactaaggcaactaaaagccaacgctaaactataggaaaacatgaagaaagtagccgacaacaaccccttgatgaataacgggcgtcatacagatataatagacagacagggccccgactatatgacggatctacaaaattattttctcttctggggggggggattctccctgaaggggaaaattgccctggtagctctgaacgttacaagaacgcccctaaaccctattaagtgaaattggatgcatctcccgacacaaagaaaggcgtcatggatctgaaccgagatgtactaacagagactcctcaagcacttgagaacctgctatacaccatcactcttgttttgtggcagagcagtctgt

SEQ ID NO: 117938 - DNA, 383 bp, Arabidopsis thaliana columbia
  unsure (1)..(383): unsure at all n locations
acggggcaaacgcgcgtacgtaagcttggatcctctagagcggccttccttnggttgtttaagtccacgcgagtgagatttatgatcatcgaggacgcttgttcaccagacacagatagacttggggtcaagagagtctcagaactgaccaggagactccacagacgttgttgatcttgacaaacattaattttcaaagcagcatcagtgttaatctctctacgagtcctatcgtctaagattcaagctatatgactctcaagaagaaacaacgaacgaggctaggatatgtctcttgagagggagcccatgaggtgtgactggacttatggactgcccaggcgcccgtacaggtctttccaaagatctgattacctagactg

SEQ ID NO: 117939 - DNA, 542 bp, Arabidopsis thaliana columbia
acgactcactatttggaaagctggtccgcctgcaggtaccggtccggaattcccgggtcgacccacgcgtcgtcactctgctctcaagatcacagcttacttgataagcacaaacgccaatgacgagatctcaaatctgattaggatgtgcgttactcactctgctactggttacatccggatctcactatgtgggtgtgttcactgaccatcctttcgaattcgtacttcgtcaagaatctccagctctcatcgacatgcactctctctggctccgtcactgcatgagacttgctccatattctgaatacctacgggcattctccaagactgctaaggctgtggcgattgctactgccgattgcgatgaccataatagtgtctgtgctcaatatgatgctcttggatactcaaccattcaatgatctgctaaagcatctcttgatcctcaagagtcttagggtacactcgatgctatacctttgacttactaccttaacaatgaaggacgctccatctcagattatgtcacactccacaaa

SEQ ID NO: 117940 - DNA, 357 bp, Arabidopsis thaliana columbia
  unsure (1)..(357): unsure at all n locations
nnnnnnnnnnnnnnnnnnnnnnnnnnnnnnnnnnnnnnnnnnnnnnnnnnnnnnnnnnnnnnnnnnnnnnnnnncttttttttgtttttctttcacatgccaattgtattttctgctcattttcaccccatgcttagtgaaagctaacgagagagcgaagttcaataacgaggatccaaaacggccccaaagaaacgcaagaccgttcagaaaaataacccggcttccggaagtctagtgatacattcgttccctgcccaaatatagtgatcaacaactaaagctgtttttggagccggttcttatagcaaaaacaccgaaatcttctttcttcggggagggtctgagcatttcatc

SEQ ID NO: 117941 - DNA, 468 bp, Arabidopsis thaliana columbia
  unsure (1)..(468): unsure at all n locations
atagnagagctttgacgtcgcatgcacgcgtacgtaagcttggatcctctagagcggccgcccttttttgtttttttttttttttttttttttttttttttttttttttttttttttttttttttnnaaaaactaaggaccggcccaattttaaaaacaaggtccttaaactttttccagataggtaaaatccaggcttaaaaataaacctgcaacggggagttgggggtctcattttttttttaaagaaaaaaggtggcaaacgattaattgggttttttcaggggggttttataactaaataactttaaggactttttttcggggggggtttaacttttttcctaatcctgggggaaccttttttataaagcgggggttttggggttggggggaccttagaccaaaaacgggtaaggggggtttctggtttggggaactcaatttggggattttcctaaccggggg

SEQ ID NO: 117942 - DNA, 496 bp, Arabidopsis thaliana columbia
  unsure (1)..(496): unsure at all n locations
cgattaannnnnnnnnnnnnnnnnnnnnnnnnnnnnnnnnnnnnnnnnnnnnnnnnnnnnnnnnnnnnnnnnnnnnnnnnctttntgtgttttttttttttgttccttttttacaatattttgagagaaaaagaggttcaatttctatacaaagataccacaaaggaaagttcacaaatttacatagaatagaccacaaacaaactctctttgtatgatctcattcacataacaagcagccgctcactttccggggacgaacttggtggccaaggcccaagcgttgttgttgactgggtcggccaaatggtcggagaggttctccaaaggtccctttccggtgacgatggcttgaacgaacaatccaaacctagagaacatagccaaccttccgttcttgagctccttcaccttcaactttgcgaaagcctaggggttagtaccgaggcccaatgggtccaatctgccacctgggtaaagcaagtcctctgcttct

SEQ ID NO: 117943 - DNA, 509 bp, Arabidopsis thaliana columbia
  unsure (1)..(509): unsure at all n locations
atagnnagactttgacgtcgcatgcacgcgtacgtaagcttggatcctctagagcggcctccctttttttgtttttttcctttttactttttgtttgtgagataacatgtgagagttttttgagaacctttgggaaaaaaagggaaggatgatttttaacaattaatatgccaccactgttgggagtacgaaacaaaatagtaaataaccggactgaggacaatatcttgaatgggtgaaagcacgtctttttttaaggctaataaagagacggttttgaaggcctaggataaaaaaccctttttggtgggagaagcttaattttaatccttgtcgatggggggctaaaaccgaccactaaatccaacctcctggatatcaacaaacagcatcgcctttttacttccgttaatgcgaaagaggccacctggctttaaactgaccgttgaaaagagcaagaactgcaacacccacttctttggtttgagaacatgcaacataaactttcc

SEQ ID NO: 117944 - DNA, 520 bp, Arabidopsis thaliana columbia
  unsure (1)..(520): unsure at all n locations
atagnnagactttgacgtcgcatgcacgcgtacgtaagcttggatcctctagagcggccgccctttttttttttttttcacttttaaccacgattctctttcagtatcttcagatgctttctcattcaagctcagtcacgaagtgagncgtgctgatccactacagtcgactaacaagccaacgcacagcttgaggaaaacatgaaggatttagccgacaacatcctctagatgaataggtgactcttacatatataatggacagacaaggtcccctatatatgaccgaactacaaaattattttctattttgggggcgggattctctccgaaggtgaacttagcccttgagctttcaaagttacaagaatgccgctaaatggtattaaatgaacttggatgcatctctgtaactaagaaaggagtgatggatctgaacgagaatggtttaaagagagactcgtccagaactattgaacctgcgtatacaccatgcgacttgtatggtggcagagcgagt

SEQ ID NO: 117945 - DNA, 419 bp, Arabidopsis thaliana columbia
  unsure (1)..(419): unsure at all n locations
aggtgccnnnnnnnnnnnnnnnnnnnnnnnnnnnnnnnnnnnnnnnnnnnnnnnnnnnnnnnnnnnnnnnnctttttttgtgtttttctacacaaagcaatactcattttttcattatcttgagagccctcaagttactttaaccactattgcatgcagacatcgccaagttagaagaaaagagcgcgggaaaacaattggcacagatgaaagaactaagggctacctaacatttattgaggggggggcttaatatacccataaagggggtacctggaactacggtcgggctccaaggacctatatatggccatctttccggggggggagccatcttgcatgagcacataaatcgactgagagattattcctttccggtaaagggcctaaacctacatggccacaactagggcccttgc

SEQ ID NO: 117946 - DNA, 347 bp, Arabidopsis thaliana columbia
  unsure (1)..(347): unsure at all n locations
gattaannnnnnnnnnnnnnnnnnnnnnnnnnnnnnnnnnnnnnnnnnnnnnnnnnnnnnnnnnnnnnnnnnnnnnnnnctttttttgttttttttttagttattaaaccgtacaatacaatttgcacaaaagccttccatagatgttacaactacgacaccaaactcaaaagacacataatttgatcaactttgttgacaattgatgccatctatttatgtattctaacagaccttactcccatatactatttcacattaagggaggcaaatcacgaaaaaattcatcagatnaaacaactttgtattttgccctcttttgtaatcggaggaaagcaatcgctccc

SEQ ID NO: 117947 - DNA, 362 bp, Arabidopsis thaliana columbia
cagctctctacgactcactattgggaaagctggtcacgcctgcaggtaccggtccggaattcccgggtcgacccacgcggtggcaggacgcttagtctgtactcttaagttgctgtctttctaagaagaagattctgtcttttggagatgcctgctgatgcatctgattgacatgagcacacaatgaggatattatctccaccacactcaggggggaacatggtgagccaatacagacaattatctacatggtcggacagatcaggcgttacaagctctttcagcatcatcattcacgctggatgttcggatactggagaactcgtggccattgacatagctcaggctgacagactatctgg

SEQ ID NO: 117948 - DNA, 497 bp, Arabidopsis thaliana columbia
  unsure (1)..(497): unsure at all n locations
gcgtacgtaagcttggatcctctagagcggccttccttgnttgtagaaagctcttttaaaaaaaaatccactccacattcgcaagttttttatctttaatcctgcgaaagggatttccaattccacaaaaagataggtttttaggaatggaaaaggttccttaccacgaaaaaaaaaaaaaggccttcttttgtcttggcaacagggaaaacaaattgttaagcttttcccattggtcgggaaaaaaactcgcacttttataaccgatatgtgggaaaaccaaaggtattggtgtgttatacccgaaaaacaaaacacttttgttggagaggaggcgaaaactttggcaacccttccttttttaaaccgtttaaattccccacagagtgttccatgcacatcctagtttgttgacgtgctgggagaaccagacgcgattttgaaaagggcggaaagtagtcgtttaaaggagtttttacccagagtttgacttaacg

SEQ ID NO: 117949 - DNA, 435 bp, Arabidopsis thaliana columbia
  unsure (1)..(435): unsure at all n locations
nnnnnnnnnnnnnnnnnnnnnnnnnnnnnnnnnnnnnnnnnnnnnnnnnnnnnnnnnnnnnnnnnnnnnnnctttttgggttttttttttagtggaacaggatgatattgaaaacgtatcacatgtaaaacaagcactaacaaggggtatgcgatatgctgatagcagagcaactgagcactatctctccatgatttcttcaaattcttgaagagcacttaacaattcgggtctctttgatctgctgaagctgaattgattagggcatctatcagactgcgacagactcctggatagcaacaacctccttggcctcagaggattccttgctcttctccttggcgggccactctttgacaggttccttcttgcggacgcgtgagtcgaccctttaattccaaacacggacctgcaggcgtaccagctttccctata

SEQ ID NO: 117950 - DNA, 497 bp, Arabidopsis thaliana columbia
  unsure (1)..(497): unsure at all n locations
gctctctacgactcactatanggaaagctggcacgcctgcaggtaccggtccggaattcccgggtcgacccacgcgtgcgaagagacgaacctgccttagagatacctggctaggagaagatcactacatcacccacagcctttgtttgctcacacattctcagaggctagctcttataatgcggctgcctactcagttctcattcaatctataaacccatagccctaaggtttctgtgtactgcatgattcagaacaaatctttgagacagattgctaatcactggtctctctatcacgcatcatcgacctaccactggagagtcgctccatatcattgctatgaatataactatcatcactgctcacttggaggccaagaactctgtggtcggccgtctaaactatacagctttacgtgctcatgcatgatacatagtagctattctataagctgccctaggaacaggacactgtccatctttgcacatcaagat

SEQ ID NO: 117951 - DNA, 528 bp, Arabidopsis thaliana columbia
  unsure (1)..(528): unsure at all n locations
ggtgnnnnnnnnnnnnnnnnnnnnnnnnnnnnnnnnnnnnnnnnnnnnnnnnnnnnnnnnnnnnnnnnnnctttttttgtttttttctttttttttcttatttttannnggggatttttagaaccttctgaatggtgtttagccgaaaatgagaatgctgattcttacaaacaaatacaccaccaacgttgtggggggggataacaaatangaaagaccggttcatggccacccaagatcgttgactgggtgccagatttccttctttacaggcatatacaaaaatgtgtttaggccccacactactaatctccgttttttgggaagaagctttttcctaatcctgatcaatggcgttcaagaccccaccactaaaaccaacctctttaaagcccccaaacagcacctgtttttaactcccgaaaaacccaaagagttcacctcccttaacctgaccgttgaaacgagaaattcattcagcacttccttttcttgtttaaaaccatgccacacaatcttccccttccc

SEQ ID NO: 117952 - DNA, 514 bp, Arabidopsis thaliana columbia
  unsure (1)..(514): unsure at all n locations
agcgctacacgactcactatttggaaagctggcacgcctgcaggtaccggtccggaattcccgggtcgacccacgcgtgcggaagaatcagagaacagaaaatggcgaattcactatgcttcttctgttctcctcctacctttagcttccaatctccaagcaaaaaccctaaaccttctcacttcttctcaactaatgataacacctcttccttggtacacaagagagaactgcttcagacttcaagatccaacagttctgaaggtaaggacgcaaacaataatgctcagggcactaaaccaaacagtttancttgtgcagattgtgaatgggaaggttgtctggcatgctctcaacgcanaggaggtggtgcgaatatgagtgatcatttcaatggtcagtgtaaagctggcgcactctgtaggctatgcagatgtaaaaaggaggcgtagcgtggggactgcaatgcagctggcttcattgtagggttctcgagccccttcgatgagtagta

SEQ ID NO: 117953 - DNA, 478 bp, Arabidopsis thaliana columbia
  unsure (1)..(478): unsure at all n locations
nnnnnnnnnnnnnnnnnnnnnnnnnnnnnnnnnnnnnnnnnnnnnnnnnnnnnnnnnnnnnnnnnnnnnnnncttttttggtttttttcactcttaaccaaaattttctttcaataacgttctgatcctatattactcaagtttgtacgaatttatcatgcagtttcactaaggcaactaaaagccaacgaataactttgtgaaacatgaaagatttagcgcgacacaacacccttgatgattaggggcgtcatacagatataattgacagacagggccctaatatatgaccgatctacacaattattttctttttttggaggtgggattctctttgaaagggaactttcccctggagcactttacgtttacagaaagcccataaccttattaggcgatttgggtccattttaccaacaaaagaaggagttatgtatcttacggcgatgttctagtagagactcctctgggctttaaa

SEQ ID NO: 117954 - DNA, 539 bp, Arabidopsis thaliana columbia
tatagaaagacatggacgtcgcatgcacgcgtacgtaagcttggatcctctagagcggccgcccttttttgttttttttttaactttgaaatctactattgataacgcgttcaacagttcagtctcctcgataaacaagattatagaagaaaaagtattacaaataaaacaaaatcgtctagtactgtaaaaagacagccggttgaggaagaatccatcggtaccataccggaaaatataccggcttaggaagaataataacaaattactctttacatatcctttaaacgactcttctctccatgtagtaaacagaatcaaccaacgaaaaattgctcaagagagaaacgtagcctaaaccttttaccttttaccttgcacgctatcattccaagcctcagctaccacccttttgtttgagggtgattttgtctccaagacttagagcaatcccttgcgtcttgctccttatccttatgtaaccactcaatgttccatccgtttgcttctcaatactcaaattcacaagagcatcctca

SEQ ID NO: 117955 - DNA, 543 bp, Arabidopsis thaliana columbia
  unsure (1)..(543): unsure at all n locations
cgnnnnnnnnnnnnnnnnnnnnnnnnnnnnnnnnnnnnnnnnnnnnnnnnnnnnnnnnnnnnnnnnnnnnnnnnnnnnnnnncttttttgttttttttttttttttatttttttttttttcttttttttttttcttttttttttttttttttttaaaagaaaaaaaaataccttttttcaaattgaaaaagtttaggattctccccggggtccctgtttttttcacaaacaactaaatttttttttttcctaggagggccaaaattaaactgccttggtccttactgggctttgggggctgaaaggtttcctttcccaaattcttggaccacttttttgtttcctgggaacgattttggggaaacatccccaggtgcttttaaattggaggggtttttcctagattactcagagaggccttttcgggctactggggtgtcttcctttattaacccagggataaactccccgtaattaacaccggtcttacaaaaaccggagttaattcccccaatccaaaaaccttttattctactttttttg

SEQ ID NO: 117956 - DNA, 530 bp, Arabidopsis thaliana columbia
  unsure (1)..(530): unsure at all n locations
acgtcgcatacacgcgtacgtaagcttggatcctctagagcggccgtccttnnggggggaaacccnnnnnnnnnnnnnnnnnnnnnnnnnnngggagagaatatcaaaacttgtgaaaaagaagtttcctgtaagattccaggacaaaagtattgggttttttggtttgtttatcaatggaaaatctcatttctgtttcactcttcctctttttccgactgttgagaactcgactctttcttctgtttcacactccctttggccttcttcgaccctcttttttaatccatattttttttgttatcctcattttcattggactcattttcgaaatcatcatcggaaatccttcctcctaatgctaattttcctcctccatcccttttttttgaattggcccctttttttgaaacccaccccggtgtccttgccttggtctttttcaggacttttacctttaggggttgggttttggcacccccccatcccttttttccacaggcaaaaccaggtcaggttgtttgttcctt

SEQ ID NO: 117957 - DNA, 413 bp, Arabidopsis thaliana columbia
  unsure (1)..(413): unsure at all n locations
nnnnnnnnnnnnnnnnnnnnnnnnnnnnnnnnnnnnnnnnnnnnnnnnnnnnnnnnnnnnnnnnctttnttggtttttttctttttttttttttcaacaaaaacataaggtttgattgcatggaaaaaaaccgctttagcgagacagaatttgttttttgagtcaaaagaaaatttcaaattttcttttaacagaaatcaagacatgttggtgtggcttaaacatttggaaccaacatgaccaaaagatgtccggatgaattgcttattaaacatcgcttctcgggctcttcgggacttcaattgtggggggtcttcccccaaatggttcttgtttagagccttgggacgaggagaaaaaataggaaggggctccgaaacgttttgtttcctaacccaccctttatttccaaa

SEQ ID NO: 117958 - DNA, 453 bp, Arabidopsis thaliana columbia
  unsure (1)..(453): unsure at all n locations
cgattcannnnnnnnnnnnnnnnnnnnnnnnnnnnnnnnnnnnnnnnnnnnnnnnnnnnnnnnnnnnnnnnnnnnnnntcctttttttggttttttcctttttttttttagttccaagcgctgaaatataggactttctaaaagagtctgaacactgatggagacttttttgattacaaggttttacaattcagccacagacagaatgtctgaatttttctccgacccatacatgactccgcagatgactcactcgtgtcctgacatcattccatattctcatatagtgagccggatcagatctcgacactgtttgcatcatatcagttggacgagcatgaacgcgatcatatccaatcagctgcttcttcggaaccgcagatataaccggtggcatctgcgaagactaatgacgacctgactaccgttaattgctncgggcttgctgacatg

SEQ ID NO: 117959 - DNA, 440 bp, Arabidopsis thaliana columbia
  unsure (1)..(440): unsure at all n locations
acgactcactatatggaaagctggtccgcctgcaggtaccggtccggaattcccgggtcgacccacgcgtgcgatatagattgagaatacatgcttgcgactcttcacacaaagcgctaatgagcaagagaacgtgcgcgattatcaatcttaccgagccttgctaattctctatgctgntcaacttcgtcttggactttttgatggtgatccgcgaccagtctgtacggccaggttgaccacacgacacttgcaactcagaccacataatataggcgctgctagcaacaagacagggtctggcgctcctcgacaatgagcacaggaagacgcctttgaacaccaactatgtcgcttcattagcacatccccgtttcaatggctagtaatataaccaatatggcccgaccttatcccctacccaccagtcacccaaacac

SEQ ID NO: 117960 - DNA, 478 bp, Arabidopsis thaliana columbia
tttgacgtcgcatgcacgcgtacgtaagcttggatcctctagagcggccgcccttttttgttttttttttttttttttttagtttcaaacggtatctttagaaccttctaaaaggaaataaacagaattgaaagtgcttttgcttacaggcgtctaaaattcaacgaaaacataatggagaaaatgttccaagacccggacatgactcccttgaggaataactcgcttaccgaaatcattctttacagtcatgggctagaatgtgataaggaccaacacagttatcctcattttagtgggacgagcgtgactccgatcgtgaccaatccgctgctagccccgaacagcagatataaccgcggtaattttctaaaacagcatatgaacataactaccgacagattgcaacgagttaggtgacatgaccacgaacggttaaaccagagactccccaagagtgacaatcctgttatacacc

SEQ ID NO: 117961 - DNA, 446 bp, Arabidopsis thaliana columbia
caggtctctacgactcactatagggaagctggcacgcctgcaggtaccggtccggaattcccgggtcgacccacgcgtgcgatctacatcgaggatctacatgcggctctattacgatggtgcaaggaacaccatacagagatcgataaacgatctggctgagcccatttcatctaggatgatgtcaatgactgcaaggactttttcattgatacacatgagaccactattacgcgtactgtatggatcaacttttcatgaggtgtgaaccatacagtatagactgatggagattctcgacccggtactctggtactgagactgactgcacggaatagctttgctgcaaataacacaaatgccaataatcgatcaagtgcccattgtcaaaagatcaatgcagctagtgccgtacttggacggtgtggaactgtttcctatgctct

SEQ ID NO: 117962 - DNA, 529 bp, Arabidopsis thaliana columbia
  unsure (1)..(529): unsure at all n locations
aggtgacctatagnagagctttgacgtcgcatgcaccgcgtacgtagcttggatcctctagagcggccgccctttttttgtttttttacctcttaaccacgatttccttccagtatcttcagatccttctgaaacaagttcgcacgaattgaggatgcagtttcttacaatcaactaaacgccaacgataacatggtggaatacatgagggattgacccgacaccatcacctagatgactaactggctccatacagatttactggacagacattgccccgactatattacggacctacacaataattctctcttttgggggggggcatctccctgaaggggaactatgccctggagcaccgaacagttacaagaacgccgctaaaccttattaactgaatttggatgctactaccgaaaaaaagaaagaggttaggtatctgaagccgattgttctaacgagagactcctcaaggacttggaaccctgctatacaccagccgacttgtactttggttagctagtctgct

SEQ ID NO: 117963 - DNA, 519 bp, Arabidopsis thaliana columbia
  unsure (1)..(519): unsure at all n locations
cnnnnnnnnnnnnnnnnnnnnnnnnnnnnnnnnnnnnnnnnnnnnnnnnnnnnnnnnnnnnnnnnnnnnnnnccacgcgtgcgatcaacgtcgagggcgtatataggcgttctattacgcttgatctgagtcacaccattcaaagcatcgacagacgatacacggtgaacacctttcccacgaggatatcttcagtgactgtaaagactgattcattgatccacatgagaccactcacacgctactgtatgaagctacatttcatgaggtgagaagcatacagtagagactgatggacattttccagccggatactcttggtccgagtctgactgcacggaatagctttgctgcatcttacacaaatgccactaatggaataaggcagctattaaaaagatcagtgtagctaatgacataatatggaggctctggaactgtttcctcggctcctagcagtgcgacacacgacacaaatgcttctatcatagcgttctcgaaccctataaatcttccaag

SEQ ID NO: 117964 - DNA, 535 bp, Arabidopsis thaliana columbia
  unsure (1)..(535): unsure at all n locations
aggtgccnnnnnnnnnnnnnnnnnnnnnnnnnnnnnnnnnnnnnnnnnnnnnnnnnnnnnnnnnnnnnnnncttttttgttttttttaagatataaacatgatctcattccagattcttcagatgtttttcaatttagcacatacaaattgaaaatgctgttcctataaattgagtaaatgccatcgaacacattaagggataaacgtgggatcatcgccacaccatcctctagagagactaaggggctcatccagatacatcggacatataactgtctatattaggtacctcatctacacagataattccctatctggggggcggagatatttcctaagggtgatctgtagcttgtgtagctatgcaacgttaaaataatgtcgatatattgtcaataatgaactctgtcgcattctctgtaaatcagaaaggcgtgatggttctgtactagaaagtttgatagataaactcttccagaacagggtagcatggtttacaccagccgacatgtactgagcatgcgtaagttggtt

SEQ ID NO: 117965 - DNA, 489 bp, Arabidopsis thaliana columbia
  unsure (1)..(489): unsure at all n locations
nnnnnnnnnnnnnnnnnnnnnnnnnnnnnnnnnnnnnnnnnnnnnnnnnnnnnnnnnnnnnnnnnnnnnnccacgcgtgcgatcatcgtagagggtggctctagggcttctattacggctcgtctgctgcaaaccattcatagcatcgtgagacgttacatggtaaacaacattccctcgaggatatcgtgtgtgtctgtaaggagctgttcattgatccacatgagaccactcataagctactgtattgagatacatctcatgaggtgagatgcatacagtatagagtgaaggacattctctagccagatactcatggtaggagactgactgcaagggaatactttgctgtcactgacacagatgccaatgatggaataagagcagctattcaaatgcactagtgtagctaatcgcataataggaggctctggaactgcttctggagtcctactatgctggatacgactcagaagcttcttacatatc

SEQ ID NO: 117966 - DNA, 529 bp, Arabidopsis thaliana columbia
  unsure (1)..(529): unsure at all n locations
taggtgaacctatagagagctttgacgtcgcatgcacgcgtacgtaagcttggatcctctagagcggcctgccctttttttttttttttaggagatatatatatacttattcatgtttatctatttcttattcaaattaggaaaaacatattctaaattgcatatatatacattgtatcaatgctattgagatcaacaagacataagaaagagttttcccccaaactcttctctagtttctacatcttatgagtcaagaatatctgagaattaactttgtaggttaactccttctggtcaggtcgaaatcctctaatacgtagctgttggtctccatcgggttctttggaaatctgctgatttgtaactttaatatcatcttcatctgaaaagatttttgaaccaattccacttctccgtgattccttgatgagttaagttnttggaataagttgatttgtagcttaaattcttcgggttgggctggtatgcttcttgaaaggcacatatgtatttggtatgcttaggt

SEQ ID NO: 117967 - DNA, 859 bp, Arabidopsis thaliana columbia
  unsure (1)..(859): unsure at all n locations
atgatactccnnnnnnnnnnnnnnnnnnnnnnnnnnnnnnnnnnnnnnnnnnnnnnnnnnnnnnnnnnnnnnnnnnnnnccacgcgtccgctaaagcgaaccaacaaaaagtcttcatctttaatcattcaatggcttcttcgtcttctatgcagatggttcacacttcccgctccattgcccagattgggttcggtgttaagtcgcaattagtttctgcaaatcgaacaactcaatcagtttgctttggagctcgttcctctggaattgcattatcttcgagattgcactatgcatcacccattaagcaattntctggggtttatgcgaccaccaagcatcagagaaccgcttgtgttaaatccatgggctgctgagggaagatgaagtaatcgaacctcaagctanagtgacaaacaaggtttactttgatgtggaaattggaggtgaagttgctggcagaattgtgatgggtctctttggagaagttgtgccttaaaaccgtgaaaacttccgtgccttgtgtactggtgagaagaaatacgggtacaagggttcctctntccatcgtattattaaggatttcatgatccaaggaggtgatttcaccgagggaaatggtactggaggtattagtatttaccggtgccaagttcgaagatgaaaacttcaccctgaagcatactgggacctggatcttgagcantggcaacgctggtcctantactaatggaagccagttnttcatttgaccgtcagacttatggttagataacagctgtcgtgttgacagtattgaggatgaactgtagatctgagctaaagaccggcttcatgtccagaaaggtgaaatcatcct

SEQ ID NO: 117968 - DNA, 638 bp, Arabidopsis thaliana columbia
  unsure (1)..(638): unsure at all n locations
nnnnnnnnnnnnnnnnnnnnnnnnnnnnnnnnnnnnnnnnnnnnnnnnnnnnnnnnnnnnnnnnnnnnnnnnnnncttttttttttttttttttttttttttttttttttttttttttttttttttttttttttttttttttttttttttttttttttccccaaccaaacaagcaagtatggttttaaggggccggaaggatttagctaaggggggaaacccccctgttttttgggatcaaaaaagcaaaatgtccataaccttttaaaccaggggcccggggttttggattaaaacccttttttaaataaacccaggtttccgacttaggaacttttggaaacccaactaaagatccttttggaaacaataaaaaaaaaccggcaaaaaaaaatcctaaaaaccacttttcccaagtttttaaagaaggatttttcacctaaatacaaatattctaataaactaggggacccagccatttcctaagccatttaacgcggggccttaaagaaaaaaagcttgggggctaaaaaattacacaaaaaaaaccctttatagggaggattcttggaaaaaggttcccaaaagttataaaacgggtcttgggcctgggttttttttttaagaggggggtataa

SEQ ID NO: 117969 - DNA, 676 bp, Arabidopsis thaliana columbia
gtcgactgcacgcgtacgtaagcttggatcctctagagcggccgccctttgttttttttttttttttttttgagatcaaaattgttgtttttttccatataattagaaggttacaattactatggtttccgcaaaacaacaaagcaggaatagatcaaggccctgacagagcccatcaaggaggaaccccacccttttttttggggagggacaaccaagagtaacccacccattaaaaccggggggacaggacttgggccacaaaccacaattaaatataaccgagacttcccaccaacaacctttatgaaacccatccaaagaaccctgtagcggaacataaaaaaatccgtcaaaaaaaaataccgaaaaaaatatttacactgttgaaaaagagactttaccgcgcagataaaaagtaccgatgaaacttgggacgaactttgtctcaagatcctcgaaaccgcgtgtttatagaaaaagtctaggggggaaggatacaccaagacaaactcctcttaaagggaaattttaagaaaaagtttaaaaagaaaaaaaaatggattcacgctaggactcttaggcaaaaggggttgttaagccggcgaaaaaccagggaaaaaacggggccgccctaacagctgtagaaaacggtaaacccaccctttgcgccaaa

SEQ ID NO: 117970 - DNA, 631 bp, Arabidopsis thaliana columbia
tacgactcacttagggaagacggtacgcctgcaggtaccggtccggaattcccgggtcgacccacgcgtccgcagggtttttacttttctagggtttatctatctcattccgcaatcatggagtctctggggaagctacagctacatcaccagccattccacctttccttcactcacacctcttcttcaacattccccaaaaacctcttcaaatcctcaattcagcgaattacatctctcaaatccgcttcaattaaagctgccccctccaaatttcaaaactctatcacccctctcacaaagtccacacctttccgtctcttcaaatccacatgcataactctaacaaccggcgaggctctgcttttggcgaatctccatctcatatcgccggcgattgcagctgccatcgcgcctccatcctcagttgaaagcaaacaaacggtacctcggaaaaagaaagagatccctggatcagctttgatgactccccttcttgtttcgacctcttgggtgatcgttgaacttgaacactcaatctgcatacctgacggaacatgggaatggccccatgccccgttagatgtggaacctgcaaaaaagaatccccaccgtcgaagccaacaacctt

SEQ ID NO: 117971 - DNA, 620 bp, Arabidopsis thaliana columbia
tatgacgtcgcatgcacgccgtacgtagcttggatcctctagagcggccgcccttttttttttttttttttttttttttttttttttttttttttttttttttttttttttttttttttttttttttgttaaagaagccccccaacaaaaaaaaagtttcaccaaaaaaaaaaactttggggcacccgggaggggacccccaccgaagccccacttgttttaatttattggagggaaaacacaagcgggggccggcggtttaaatttttatgttaacaagggggtattcccgggggggtccccctaaacggacaaacaaacccttatacctgccaatattaaaacagctcttaaaaaaaacggaataaaaggggtgggggccgaagaaggcccaaaacccttataaaccgccgttttttccaccctgggcgcccttgaaaaaacaaccctttcgaaaacacaacggggggaaaaccccacccctacagtggcatgagggcgcctgaggggcgcctttaagacagtccttattgttgccttttttttaaaagatttaagggggggccaaaaagagggtgaaaatgatggggagtgttaaatcggccttttttgccccgccc

SEQ ID NO: 117972 - DNA, 639 bp, Arabidopsis thaliana columbia
  unsure (1)..(639): unsure at all n locations
nnnnnnnnnnnnnnnnnnnnnnnnnnnnnnnnnnnnnnnnnnnnnnnnnnnnnnnnnnnnnnnnnnnnnnnnnnncttttttttttttttttttttttttttttttttttttttttttttttttttttttttttttttttttttttttttttttttttaaaaaaaaaaaaagagtaatatcccttaacaatcctgggtttaaaaattcttgatcaaaacaaagagtaaaaaacattggtgcaagaaaggtgaaagcccccccgatttttttggatctacatttacttgacaaagaaggggagggcaaaaacgtaaaaaaggaagtaagcccaagtccccccaaagatccctccaaagaaaaatcctccagggaacttagcccatccatcacccgtttgaaactggtcaggctgttttttccgcccaaaaaaagtcaaactcggggggaacgagggctttccttccttgaaagaaaaaataccggaaatggggaggcccatgctgaggatgactaccaccccagccggggttaaagacccggctgacccggggtaagcagtggttcttaatgggccacctttgacgaatgggcccctaaaaaaaaaccttgggccaggcccacttccacaccngggagga

SEQ ID NO: 117973 - DNA, 711 bp, Arabidopsis thaliana columbia
  unsure (1)..(711): unsure at all n locations
nnnnnnnnnnnnnnnnnnnnnnnnnnnnnnnnnnnnnnnnnnnnnnnnnnnnnnnnnnnnnnnnnnnnnnnnnnnctttggttttttttttttttttttttttttttttttttttttttttttttttttttttttttttttttttttttttttntttttttgggaagagtagggggggccacataattgacagatgacgaaaagaaacccggggcgggattttccgagtttgaaaccaaaaacttatttgttaaacctcattctaaagaaaaagttctacaaaggtcgaaagtttctcacctcgggtggaaagatacccaattttcctggaaacctttttggggttttcttttttttacgagagtttttttaaaaaaaatctgcgccccttctaaaatggaggggggccccttcggcgtggtttttttataaacttcctttttttgacccaaatcttttgttgtttaaatcccaccccccttttgttttaccgtggggggaaaaagggcttttttttcccgaaaagaaaagagaaccctttattccaaattttaaaaagtcccgaaaccttttttctttttatatcgcggggcaaaagaaccctttttaaaatttttcacccttgagaagggaaaggtttttttgtccccaaccacaaagagaaatctccccccacaaggggggtggggaaaattaaaaaatttttttttt

SEQ ID NO: 117974 - DNA, 686 bp, Arabidopsis thaliana columbia
  unsure (1)..(686): unsure at all n locations
ccnnnnnnnnnnnnnnnnnnnnnnnnnnnnnnnnnnnnnnnnnnnnnnnnnnnnnnnnnnnnnnnnnnnnnncacgcgtcggccttgagagagagnncgcgcgcgcaccgcaccggagtcttgacaattccgaagctccctactattgggcccattcttttttttttccccccccccccccacaaccctttcactccccccggttttgtggttttttccgccctgaaaatttttttaacgcccattcggaggggtaaacccccttctaaggggggccccttttatcccccccaactttttgtgggggggggccccccgttggaaaaggttttcccccctcttaaagaaaaaaaccttttttctaatataaaacaccnncaaaaaatatgtgggggggcggcgtgtcacacccgggggggggggcccccacaaaaaaatatttcaacantntncccacccggcggggggtgggagaaaaaaannnnnngggcgaacatgtttttttaaaaaaaatttttttttttttgggggggggggcggggaataaaaaccccccccccccaaaaaaaaaaaaaacctgtgaaaaaaaaaaaaaggaggcccccccccccttttttttggggggggggcgagccctatattttataaaaacaaaaaagggggggggcccccccccaaaaaaaaaa

SEQ ID NO: 117975 - DNA, 681 bp, Arabidopsis thaliana columbia
ggcgccgaggggccgggcgaatccgttggcccgcggcaacccggggaaacacaggccacgagagcgagggcgacgggaggcccaacaaacaggcagggggagagccggggcgagaagcaaaggaagcgacaaagagaagcagcgaaagcaaacaggtttctctcttcagggcggcagagggaggagaggcggcggcaccaggcgaccgcaaggaccagccgagcaagaacaagccacacacaaccagagaagcagaacggagaccagcaccggcaagaagagagcaccccacccaagcaaggaacaaagcagcagcaccacgacaccacgcacgccgcgacaccagcaagaagacaccaagaccaggcgaggcacacagcggaggcccgaagagggggccgagccgagagaaaagaggggaggcagcgacaggccgccgaaggcaagcaagaacgggaacgagagggcagagcagaacgccaccagcaacagcagagggaccagcagccgaccactagggcgaagagggagcgccgcgagcggcgcaaaaacaggacaagacgacagaggaggacccaacgacgaaacagcgacagcaaaaagcagatcgcataagaaggcgggggaaggaaaagagagcgaaggggaaacgggcggcggaaaaccagccggaaagagggg

SEQ ID NO: 117976 - DNA, 605 bp, Arabidopsis thaliana columbia
  unsure (1)..(605): unsure at all n locations
nnnnnnnnnnnnnnnnnnnnnnnnnnnnnnnnnnnnnnnnnnnnnnnnnnnnnnnnnnnnnnnnnnnnnnnnnnnctttttttttttttttttttttttttttttttttttttttttttttttttttttttttttttttttttttttttttttttaaaggaaaaaccggctttattcggagggttattaaaccaaaaaacaaagtttataacttggaaaacaaggaaacccggggatttaaaacaacccgggacctttacccaattttgaagcgaaaggggtttcaaaaaaaaaccctttttggaattcccccgccggggacccccccttcactggtcggaaacaaaaaagggggggggattttaaccaaaccaaacctgtttttgaaagtcccggcggcgctcccccaaaaaagggttttctaaaacccctttactttctctccaaactttttgaacgcccccaacgcttttttttaagccccccattttttaaaaactttctgtcccaaaaagacccccccccttaaatgagtaaagaaaatctccatcagagattcccctaaaagggtccgaacccgagccgggaggggcctaaaaaccctt

SEQ ID NO: 117977 - DNA, 861 bp, Arabidopsis thaliana columbia
  unsure (1)..(861): unsure at all n locations
gctctaatacgactcatatatggaagctggtcgcctgcagtaccggtccgggattccgggtcgacccagcgttcgaaccagggaagctgttaagttttaaaaaaaaaactttgggttttgaaaggaaccccgcgaaagggaactttagggatggggccaagttttttgccttttcctctccccaaagtttttaggggccccccacaaaaaaaccccccccctttcttttgtgggggccccaaattttttttctcccccaaaaaaagaaaaaagccgggggaaccccttattaaaattttttttccccgggggggggggcccccacaaagggggaaaattttttttttccccaaaaaaaaaaaaaagccgcccccaaagaggggattttctttttttttttcaaaaaaaaaggggggttttccccccccccccggggggggggggggggccccccacaaaaaagggtttttttttttttttttttctctcaaaaaaaaaggagggccccccccccccccccggtggtgtttggggaaataaacccccccccgggggggggatgtgaaaaaaaagggagaacttttttttttttcttctcccccccnngggagaaaaaatagtggggagaaaaaaaagttttataatattggggggggaacccctttttttttttttttgtttcccccctaaaaatggggggttttatttttccaccaaaacacctatttttataaaaacaanatttttcttcttttttttgtgtagagagggggttttttttttcccaaaaaatctttttttctggggggccctcccccaccaaaataaaanatttttttttttatatttttttccccccgg

SEQ ID NO: 117978 - DNA, 830 bp, Arabidopsis thaliana columbia
  unsure (1)..(830): unsure at all n locations
tatttaggtcacactatagagatctatgacgcgctgcaccgtcgtagctggatctctagagcgccgcccttttttttttttttaaaaataatccaggccttggccttgaagtccggcccatggaaaacctccctaaaaggaccttggccccccaaaaattgcggcaaaccccctttttttttaattgggggggggggggagccaattggagaacaaaaaaaccccggcccccttttttttgtttttggggggaagaaaaaaacaaaagaggggtttttttttttctttctttgtttgtggccncctctttttcgcgcccccccaaagaatacacaccccctttttttttttcgccgcgctttttattttatataaaaaaaaggggggttctcccccccaaaaaaaaaataaatctttttaaaaaaaaaaaaaccccccccccccgccccaaaaaaaaagggggggttgttttctaaaaagagggggggggggaggccccccccccttttttttttttgaggggggggaggacacaccccccccgagaagttttttttttaaaaaaaaaaatattttttttctttccnacgggggggagaaaaaagagaaaaaagaaactttttttttttttttttctccgcgggggggggggggggagagaggcccccccccgggggtggggtctgttttttcccccccaccccaagggggggagagntntttttttttttggggggggggggntaataaaaaaaaaacacaaaaaaaaaaccctttttttttttttgttgcccccccccccccccccggcgaaaaaaaaataatttttg

SEQ ID NO: 117979 - DNA, 560 bp, Arabidopsis thaliana columbia
ctacgtaagcttggatcctctagactgccgccctttgtaaagctttttttttttaaacatgacagacaaatttacattacataacaagccgtgaaagttctctaaaccaaaaactgaaattgtatacaactcacatgaagaaaccatcttcataattctttttagaaaacactcaaaaagatttttattcaagagtgtgacctcaaatcatattcatacaacatctaaacacaaccgaaatgagggtgtccactggactcatatctccatggtgtatacaaatcatcctcgtgatgacataaacataccaaaatatgtaggaacaccaacatcgacttatgacctcttgctcctctctacagtagcccacatctacacattcacccctactcccaaacacaagtaaaccttaatacttagctgacctattctgctaaaaaggttctcaaacccactcccatatccacacaccccgtaccctaccagcaactcattcacgcttaacattaccaaatttttttcttaccccttagaattgaaatatatcacgtatcctcatc

SEQ ID NO: 117980 - DNA, 777 bp, Arabidopsis thaliana columbia
  unsure (1)..(777): unsure at all n locations
gcacgcgtacgtaagcttggatcctctagagtggccgcccttggtgtttcttttttttttttttttttattttttttttcttgtttttttttaatgtttggttttttttatcggggaaaaaggttggttggggtaagatataaaatattttggtggtgtaaggggaaaataatgagaccctgagggagtttaatgacttnggggggggggagagaaaaaacttgtttataacaggaaaatattatgggggttacttggggggcgtgcccaaagcgttgttttggccgtagcaataaaaggaaaaatattcttcttgcgctgagggggttggaacaaccataaaaagtggggttcttattttttggactcgtaaatagagaggggtgggtttgagattttcttaagagaaattgtccaagtattgtacaagaagagagggggtgttggtggaaaagaacgaaagagggggtggagagtcttggataaataggtttttgtgggtgcccgtgttgtgggagagaagtgtacgattcgagagaaggatgatgagtggatgggtggtgttgggaccgaaggtgttggaaagaagtgggtgttggggcggtggggtagaaaattagagtttgtggttaggggagaggggtggtggtgggggggggggggtgagggagattattggggggaggataggggtgggtgggtgggttgggtggggaaagggagggtggtgattggggggtggaggttgtggtagagaaaaaggagggtgggtagtga

SEQ ID NO: 117981 - DNA, 458 bp, Arabidopsis thaliana columbia
  unsure (1)..(458): unsure at all n locations
ctatcggagagctatgacgtgccatgcacgcgtacgtaagccttggatccctctnaagcggctcgcccctttggttttttttctttagtataaataatatcattcatcataaaacatgcggatacacacctgatatcattcctctacaagttaatcgttccttacaaagtctgtccaaatccccaattgtttggcatcacattatgaataccttttgtaaccccttcactcgtggggaccatgattgaataccctgaccatggaattaacaccagtggtgcagttgtgagctcaggggtttagcttggggttgcacccgggttaggttgttttaatttggctcaacctggtgggctcgaggggcctcgttcctgtggtggggaggatcttggaggaagggggcggagttttgttgggagattggcgcctgcagtggtgggccagaaatgcgggggggg

SEQ ID NO: 117982 - DNA, 463 bp, Arabidopsis thaliana columbia
  unsure (1)..(463): unsure at all n locations
nnnnnnnnnnnnnnnnnnnnnnnnnnnnnnnnnnnnnnnnnnnnnnnnnnnnnnnnnnnnnnnnnnnnnnnnnncttgggggttttttttttttttttttttttttgaacacccaaagcactcaaaattgagcttaacttaacattcagacaaaaatttaaggttctgacagaaacttaactagaacaaaaaagaacgaaacataaaaggatgcgaagtatcataagttaacacataagaagagacttttcttctacagacgcttctactcgtcaccgaaggtagtcttcttaccttggggagtaaaactaggtcttccacgaccacaatcacttcccctgccaccaccactaccggacgcgtgggcnnnnnnnnnnnnnnnnnnnnnnnnnnnnnnnnnnnnnnnnnnnnnnnnnnnnnnnnnnnnnnnnnnnnnnnnnnnnnnnnnnnnnnnnnnnnncct

SEQ ID NO: 117983 - DNA, 983 bp, Arabidopsis thaliana columbia
  unsure (1)..(983): unsure at all n locations
ctatagaagagttatgacgtcgactgcacgcgtacgtaagcttggatcctctagagcggtcgcccttttttttttttttttcagattcagataattaggaaaagagtaagacacacnatgctcataaccgaaagaaaaacatattatacacctcataactaataattctattacctccccaaaacaaaacaccatacgagtttaagataatagacatagatagattgtcggttnaatgtggaaacgtngaaaaccatagattttcgatagccgagaaaggaggttccacactctccatctgattgggcaggtctggtctgatccggtccaactcggtttggttcagtttatgtttggtctagctgacatagggagggtccatgataacccactgaaaaacttggctatactgaacaggagcggtttcccaagagtagttgcgggtcattcctcttctcatcattccttcccatgaactgtttatactctctgtacgttgctgcagccaacctcagggccataccttgctatcnttcgcaaggaagtgaagacccatcctgtaccagtaccagctccaccttttgataaaggtggaattctaaccgattcttgaagccncaggccatgacaactgaatggtccggtctattgctgtaggtatttaacaaagggttaatgtcacggcaagaaagaaggcaaagccggttgatcgttagaaatgcgcattgaaccaaccaccccggattgggcctggatgagactctaactgcaatcagctggatatgtggggccccaccagcgtactgaaatgaattggccccttagacggaccagggtggaaaacaagcctcgtggtaaggttctaaacatatggaattggctaggggaccattctttggggcattgttgttttgagaactagagagaggagagggttcggggggcatgtatttcatgtggcataccttgcgagaaagtgaaca

SEQ ID NO: 117984 - DNA, 887 bp, Arabidopsis thaliana columbia
  unsure (1)..(887): unsure at all n locations
ctatagnagctctatgacgtacacatgcacgcgtacgtaagcttggatcctctagagcggncgcccttttttttttttttttaagaaacgtgaatctattctaccatactgtcacaaggacaaaggttttgctttcgactatccttgtttgatgaaaaatcttttgctgagagttgaccgggcatttccatgtcccaagggtctaaaatggtggaaacattcatatgcttgactataggactgattccccctcggcgaatggtgcaacattgatagctggtggtgtccaccgccgggcggtgtgacgggtccttggcatgggtctgtccggtctgtttagtgtcgtggtgttacaataacaagcaagggtgtactctgtttgtacaatcatatgcaggttcattatgtatgttttcgttaaattctttctctcaccaacgatagtgtatactatttgatttgttgtgagtgaagatatagcagtaatatgttatttgagatcatctatactatgtccatgtatcttgagttattttactcctagaatattattaggttttactctctagtctgtccaagccttacgcaactctgacggcttctcttcctctgtcttttcgtaatatcttagcaattctgacgtgatactgcccctttacgaatgcagtggcctctgcatatagatgatagagtctgcgcatttaccactgaattctctcgatgacaaagatacctctataaacgtgacgcctcgcattccatggtcanagctttttcttatgatttcgctctctacattcgtgcgtgttacacatagtacaagcgtcccatatgtataagaagagttagtaatatatctctcatctctaacatttcagttctgatat

SEQ ID NO: 117985 - DNA, 915 bp, Arabidopsis thaliana columbia
tatacgactcctatagggatagctggtacgcctgcaggtaccggtccggaattcccgggtcgacccacgcgtccggaagactagtaccggcagatcttacggagaaacctcgtcaacgaagcggagttatggagggcatgtctgaggtggcaggattgcgaccagaggaacgcttgtatcaaagctctatctctgatatctctatcattggactttctctacagcgattaccgacctgaacatatccgagcggatgatcgagatggggcaggttgactctgggagaacgactgaggatgatgggatgcaaaagagttggccagtctgcggctgcgatgtgggaggtggtaaggccaatgggagagcgcgctgaggggcgcggtgatctggtgactggtggcataaagggagcagggagaaaggtagatagagaaggagagagaagatgaagagagtgaggtacaaagagagactacgaaaagataagttagataaatagagatagacaggtagggtagtaaaaaccggacataaagtacaaattgtgctatgtcatagaacatagagtaaactagaaaaaagattaaatgtagagagaataaacttatacatcggaaaatacgacatcagaaacccagagggtacaacagaagagcgagaatggggagcagaatgatgctcgatatacaggagataatataatggcgaaagtgtatacgataatatgaacacaagaagaagatgtaaacagacagcgcacaatgaaagaatgatatataactacgctaggcgaggacacacagagataaatcacatggagtataaaccacgatgttgtacgtcaaaataacatatggagcgtagaatacgatattatatgcgtgactacaagtaaggaggacgaggaagagaggc

SEQ ID NO: 117986 - DNA, 792 bp, Arabidopsis thaliana columbia
  unsure (1)..(792): unsure at all n locations
attaggaacnnnnnnnnnnnnnnnnnnnnnnnnnnnnnnnnnnnnnnnnnnnnnnnnnnnnnnnnnnnnnnnnnnnctttttttttttttttttttttaacaaaaggagattttgattatatattctgacttccttaaaatgttaaaacacaacagtctcgaaactaagaacatcattgaacaacataacaacattttaaaatctgacaaagaaaaacagagaaattagctaagcgagagagagatttgtggtttcttcttggtgtaacattggcaagcagagacagggacaagttgtttgctttggcaacacatgacaagggaagactgccttttgtcaacgggaaaccctgtgaccgaatttgtgtgggacaaacactgggggtgagcttgcggcatgtgactgaaactgggcggagataaccgacatggggtgaacaagatggtggcagggggagatgtttggatgcagcggggggggggggtgaacaggtgggtgttgggtgggggaaccgggacctgtggagctgggaatggggtggggtggaggggtgaagagactgagcggagagtggtgggttgagggaatggatgactggtggggaaactgagcgagggggcggagcatggtgtgttggcgggacgtcgtgggggggatgggggggangaatgaggggttggtagatggtgccaggcgggcgaggggctggtaatggcgtgagtgtgggcttggggatgacaagtgaaagtggggcgagatgtggagaaaaatggttcgtgggggtggtgggg

SEQ ID NO: 117987 - DNA, 356 bp, Arabidopsis thaliana columbia
  unsure (1)..(356): unsure at all n locations
tttaggtgacactataaagatctatgacgcgctgcacgcgtacgtaagctggatcctctagagcggcgcctttgtttttttttgaagtaatttttttggcccggtcagaaaaggaaaattggaaactccaaaccttaatttgggttataaaaccaggggttttttccctttaaaaccccaccccgtataagggcccntccccggtgggaaccccttgggagaaacaaaaaaccggtgtgtttcccgggaacccctggggggtttttttaaaaaagaggggaaaaaatctttgggtggggtgtgtgggaggagaacccctctatattggcccggtggaaaaaaaaagtttttttttt

SEQ ID NO: 117988 - DNA, 653 bp, Arabidopsis thaliana columbia
  unsure (1)..(653): unsure at all n locations
ccnnnnnnnnnnnnnnnnnnnnnnnnnnnnnnnnnnnnnnnnnnnnnnnnnnnnnnnnnnnnnnnnnnnnnnccacgcgtccgctagttctagatcgcgagcggccgccctttttttttttttttttttttaaacaacaacttggtgttattgaattgacaatgtgaaatcgggtaaggcttcaaagagtttcctacagcttccaatgtagtatggtagccacatctttaacagagctagtttcggagaggccaaattcaagtccccaaagctcaaaagcacccttgacgaagtcatagtagcctcccttcaaagcaagtgttcccttcacaagtccttctctcacaaatggatatgtcaataggtttgctagtgaaacattcaccgcctccctttcacatcggccacattgatcttcaaaggctgaatctccaagttctgatataacctttgacttggctggaaacagatttnacccagtcctctatgaagcagtggagttgttccatctaaggggaaaacataagccctttatcccaccacatgcactgtgtcctatcaccaccatgttctccaccttaaggtgtaagaccgcgtattacatggctctccaacgccaccgtatttgaccttgtcgagggaggaccatgttg

SEQ ID NO: 117989 - DNA, 435 bp, Arabidopsis thaliana columbia
cacgcggcagaagcttggacctctaagcggtcgccggggggaaagccccccaaagacgagcacaacccgcgagaggcaaccagcaccgggagcaagacgaacaaagagcaagaggcgagagcgccccaagacccaggcaaggaagccagaacgagagaaacgaacgacaagaaaggaccccctccaaaagggcggcggaggaggaaagcacagcaaggacgagcaaggggccccccgagaagacggggggccacgaaggccacggaggggcgcgaggaccgggaggacggaaccagcgagcgaagcgaagcgcaagacagaggcaggcgcagggcaaagaaagacgccacaagctcaagagcgcgaaaccggaggcgaggagcaacgagacggcggtaggagcaagaggaagacgagagaacagggaaggaagca

SEQ ID NO: 117990 - DNA, 1016 bp, Arabidopsis thaliana columbia
  unsure (1)..(1016): unsure at all n locations
cactatagaagccttatggtntcgactgcacgcgtacgtaagcttggatcctctagagcggccgcccttttttttttttttttaaagaaaaggttaattaaacaccattcatgaaatgacagattaaatgaagcccactatgtatgtgtatgatgatatatagtgataggcagggactgacatggcaactacaagaaacaactggggtgggatgtgcattatctttttgacgaagtgaacgtacacaaatgtgtgaaccgggtatggagcacaggagggcggggagactgcagacaaagggcgaatgtggatgggggggaagctggatatataggaactgagaataaaggtgaagggtgaacgagaggaatcatgttgggtatgtatcacgtgtacgaatgggtgggaagtggacgtgtaaaggagtggggaggagaaatggagatggttagtattcttgtgtaagaggagatggtgtgaggggatggagaggaaaattaggagcaggattatagagaaagttgaaagaataacgtatgtattaagaacgctaagagagactgtggaagaatggagaaacgatgaggataagaaagaaaaatggggaaagagctgagaagataagtcatgttgtttactcgagatatcaagtatatttctaagaaagccgggaataaatctatgaggagggaggtgaacgtgatgacaggttagtgtgaacagaaccaatgtgcagcgtttgagtagtaatagtcgacgaggtgccagtaaaatccaaagaggagggatagtgagtcagagtaggattatgatgagtgagatccatataacgcgattgaaaatagaattagagtgtgtctacaatcatttcacttattaagagaacgatgagagtactatacgcggaacagggtctagaagactaagtaataaattagtaacgagtagtgatcaagaacgagaatcaagtgcgtaaataaggggtgaatcggtgtacgaacagaagtagtggacgc

SEQ ID NO: 117991 - DNA, 221 bp, Arabidopsis thaliana columbia
acacgactcactaaggggaagacgggacgcctgcaggtaccggtccggaattcccgtttcgacccacgcgtgcgcccacgcgtacagagcgtacagatctctctgcaacataatcatagcagtagaccttctgcttcgtcgtatggaaatcagcgcatctgcaggaggtatgtaagggaggcttcacatatttcaatacaaatgcagagctacaccagggg

SEQ ID NO: 117992 - DNA, 561 bp, Arabidopsis thaliana columbia
  unsure (1)..(561): unsure at all n locations
gaatctaannnnnnnnnnnnnnnnnnnnnnnnnnnnnnnnnnnnnnnnnnnnnnnnnnnnnnnnnnnnnnnnnnnnnnnnnnncttttttttttttttttttttttttttttttttttttatcaaaacattattccattaaattttatcattgttcttttgttcataaaaacaaacacctgcaaaaagtaacatggatcttttagttaacagatcccacaagcacaactttgttggcttttttacttaacagaaatgagactaaaattctttgcaaggcatctaatgtaagtaccaggggcttatctttctgccaaatgaattctatggtaaaaaccacaccttggattgaagagattgaacctcaccggaaaaaaaccctcttgaagacggaaaagttgaacctgaccgttaggaaacaccttggaaaaaaggtaaacaatgctgttcttggacttaatccttaacaccaagacctaacactgtgatcgccgctcctgctgaaaaaaatcaaacctttgttatttgagggagtccacgtgatagcataaaaaaatccgct

SEQ ID NO: 117993 - DNA, 836 bp, Arabidopsis thaliana columbia
  unsure (1)..(836): unsure at all n locations
nnnnnnnnnnnnnnnnnnnnnnnnnnnnnnnnnnnnnnnnnnnnnnnnnnnnnnnnnnnnnnnnnnnnnnnnncttttttttttttttttttttttttttttttttttttttttttttttttttttttttttttttttttttttttttttttttttttttttttttttttttttaaaaaaacctttttgggggggttccccacatgggggcaaaaacaccccccaattttattcgaagggggaaaattcccccgggccaaaaccccccaataccccaaactaacccctttttggctttttaaaaaaaaacccaacaaaagggggtgaaaaattaaaaaatgggggccccccttttttttttaaaacaacacttaacgggggggcaccctaaaaagaagcttttttaaacccccaccgggggacccttggggcccccccctttaaggcccttccaaaaaaaaacgcccggtaaattaaaaccccttgttctgagaaaatgaaaaacttggcggcctcttttttccctttggaggaggaggggcgcggagaaacagctttttttttcgcggggttagggcaaatatggccaatcgtggcgctggcttgcgggccccggggacttaaaaaagagatccgcaaaacccccccggtttagcccctggccagggaggaacaaggtcctacccggggaaaaaaggctctcaaaaatgatgttaggaaaaagaggggccgcggtgacacgaaatcccacgtccggagggaactttcctttaaggaagcatatcctggaaaacagacagccttccggggagagagatccgaaaaacccaaaacat

SEQ ID NO: 117994 - DNA, 549 bp, Arabidopsis thaliana columbia
  unsure (1)..(549): unsure at all n locations
nnnnnnnnnnnnnnnnnnnnnnnnnnnnnnnnnnnnnnnnnnnnnnnnnnnnnnnnnnnnnnnnnctttttttttttttttttttttttttttttttttttttttttttttttttttgcgaaagagatttatttaactcaacttaatttataacaaaaaatcattttaatgaaacagaaaactttgtaaagtttacacctaaaagggaatggccctaaatgtttcagtttttggagtaaaccgaccaaacagtatcacaaaaaaggccatatggcatcttcctctggctttacactcgttttttaaaacagagaaccggcttcttctggaatcatcatggttatggaaagttatcttggcggagaatcaagtatctccttccacttcttcccaatacccatcaaaacagttttattagacttcgccctagtccacagggagagcttggtttgcttccactgtggacggacactagcaaccacaccacaaatctcatttggttaataaaattgctcggacgcgtgggtcagcccgggatattcggaccgg

SEQ ID NO: 117995 - DNA, 831 bp, Arabidopsis thaliana columbia
actatagaagcttaatggcgtcaactgcacgcgtacgtaagcttggatcctctagagcggccgccctttttttttttttttttttttagttaattaatggattatcatcaagttgagaagacatattcttattacattcatatacaattgatatgagggatataacacaattgcacacaaaaataaagatattaaataaaagtgaatgaatgattctttttttacccaaagaccttgggttggtgtgggtgggttgaccacaaaagtgatatgatggccaggccgtgcaattattcgtgggcctgaggagtgtgactgtgacctgatgcagggggggtgggggcttgggctggggacttgacattgggggagagcaggaccttggagtggtgagggaggtgtggcgggggaacaggggtggtgccatgaggactggggggcagaggggagctggtaggtggaccagggtgggaggttggggagggtgggtgggggatgatgggggtagggggacgggaagtgtggggcaggctagaatggggaggctggggtgtgggggggggcatggaagaaggtgggggggaacggggagggaagaagggtgaggtgggttgttgggtgggagggttgcggggtaggggagacgggcgtgagcgtgatgaggggagatgggtgccgcggttgggttgaggagagaggtgggggatcgagggggacgggatgaggtagagaagggaggggaggagtgaagtgaggtgcgaggagtggggtcagagtagcgggtagtgagcaggaggagggggaggggatgaggaggtaagtataggtgag

SEQ ID NO: 117996 - DNA, 150 bp, Arabidopsis thaliana columbia
ggcgcctgcaggtgccggggctgaattgccgtttgcggcccacgcgatacgcctacacgatcatgggaagtcgtgagttggcagggcaggtgctgtttggtatgagtgtagtaggtggagtggtggaatgtattagcacgacacagttgt

SEQ ID NO: 117997 - DNA, 420 bp, Arabidopsis thaliana columbia
gagagctatgacgtcgcatgcacgcgtacgtaagcttggatcctctagagcggccgccctttggttttttttttttttttttttttttttttttttgagaataaaaatgaagttaactacttaagggtgatctattacataaatcatacatggagactccgctacaaacaccatcaagaggtttggccaaataactcgagtgtcagaatcatattccagacgagaggtgttgaaacataggtttcacataaccagtgacaccaaacaaaagcaactttaatggttaaggatacttaagggggttacttaaaggaattaatagactgttcaagacccgatcttattgcgtttaccaccgattcttgcgatgctgaatgaggataaggaggatgatcaagatgcgctttctcttggaagcta

SEQ ID NO: 117998 - DNA, 605 bp, Arabidopsis thaliana columbia
  unsure (1)..(605): unsure at all n locations
nnnnnnnnnnnnnnnnnnnnnnnnnnnnnnnnnnnnnnnnnnnnnnnnnnnnnnnnnnnnnnnnnnnnnnnnnctttttttttttttttttttttttttttttttttttttttttttttttttttttcttttttttttttttttatttttttttttgcgggaaaccagccctgggggttttttatcgggagggaaaaaaaagaggccccttaaaggcccaaaggagggtgctttaaaaaaaagcggaataagaaaaccaaaccgagggggtatagtttttccaactgagggaaacacaaacctccccaggggaaaaaaatccccccccaggggcgagagacaacaacccccctcttttttttagaacaagaaaaggtaaaaagtttcccccactgaaacaaaaaccccagggaaggggcccccctctgggggggtggaactcggaggggggcgacccttctaaaggtgttctcccagaaaaaagagactctggggggggggggggaacccctctttggcctgaattttagccctgacattatcgatggggtggggacttaaacccccagaatatggtttttccggagaggggcttaaaaagaatt

SEQ ID NO: 117999 - DNA, 753 bp, Arabidopsis thaliana columbia
  unsure (1)..(753): unsure at all n locations
atgattctccaagctctacatacgactactatagggaagctgtaccctgcaggtaccgtccgatttccggtcgcccacgcgccgagacttttgtactcacatttaaaggaggcacccttttttggggcttgcttaaaggggttcaaattttgtaaaaccccctgggaaaaatccctctgggtggaggtttaaacacttttcaatttaaattataaaccaaaaaaaaggggtttttcccgagaaaaaaagagtttttttttttggggggaagacccataaaagaacgcccctccctttttataaacaaaaaaaagaaggggggcccttttctttgtttgttttctcttgggggggggggggcttctctttgtgaatacanacccgaaagaacaaatttttttttggggggagggacacccaccaccctttattgggtgggtatattaaagaagagagagggggccgcgcgcccccaaaaaaaatattttttttttaaaaataagagagggggggggtgctttatataaaaaaaaaaaaagaggaggggctctttcttttttctttttttgtgtggggaggagatttttattttttataatataagaagaggggngcttttctcctagaggagagataaataaattaatatgtggttgcttgagaaaaaaaaaaaaacaacaccccctttttttttttttttttttttctncgcggggcggggggcgggcttttttttttttatactgggggggg

SEQ ID NO: 118000 - DNA, 768 bp, Arabidopsis thaliana columbia
  unsure (1)..(768): unsure at all n locations
acttagaagagttatgacgtcgcatgcacgcgtacgtaagcttggatcctctagagcggccgcccttttttttttttttttctgataactccgacctttcactgcaaactttttagtacaacggattagtaaataagcaaaaaccaatctctcgtacttttactcaagtctcgaacaaactgatacttctttgaccagtgactagtcttaaccataactaatacgtggtaggtgaatcatcaatctatactgtaatctttccagttgtgtcttgagaattggagacacagggatcagcgtcgtcaagctttctcacgacctctctcatactcggtctgagattcgggagcttcgtagtgcagagaagacccatcttcagaactctaaatcatgcttcttctatataagtggacaaaacttgcttgtccaaacattttgaaggttcctcggatcttggttagatctgagagtagacatagtcaacaatgtctttcccctctccatactcgtcttccataggccgaagaccggtaactagctctagaagaaccacaccgaagctgtacacatcactcttttccgttgccttgaaggagtaagncagctcaggagcatattgccatgagttccagcaacgcagctccattcatatccttttgtctgcaacttgtgcaactccaaaatctgcgattntcaacntataaatctcgtcaagtaaattgttgcttgactttatatctctgtgaatgatggggtggcaacaatcat

SEQ ID NO: 118001 - DNA, 693 bp, Arabidopsis thaliana columbia
  unsure (1)..(693): unsure at all n locations
atacgactcactttaggggaagatcgtacgcctgcaggtaccggtccggaattcccggttcgacccacgcgtaagccggctcgtgggaaaagaatatccgactgtatcttctatgttctctagtactatcttgctatggtggtggggtataaataggntagggctcatccttggagctgggttggatgcttaatcatgagaatgatgcgacacttcttttcagactgtgcgcaaaatacttactgacactctgattcgaggtgtattcgcgcgttacacggggtgtttccaagagctgaagatagctgctattcatttttgagactagatcataaccacacaggatttggggtgttcactgtcagtaagaatcataatataaagaaagggtttaaaaactaatcaataaaatattactatcgaaagctgacagtgtactgaaagtaaagggcnattcccagatcctaaggcttcaaaaggatctgctaaaaagggttcctacaagaagtcttcaattagtctgaagaagagcgaatctaaagtggttaatctggtatacatctagaatagaaggggaatccatggagaaagcgaaaaatacttgaattttagacgtaaggagactcccggcaatcgccaggaatatgggctacgaaataatagaaaaaggctttactgctggggggatgcttt

SEQ ID NO: 118002 - DNA, 566 bp, Arabidopsis thaliana columbia
  unsure (1)..(566): unsure at all n locations
tttaggtcgcactatagnaatagtctatgacgtcgcatgcacgcgtacgtaagcttggatcctctagagcggccgcccttttttttttttttttttttttttttttttttttttttttttttttttttttttttttttttttggggggaaaaactttaaaaatttttttactatagggagaaaaggccttttaaaggcccatacctttttgtttttgcgcatacgtgggaaacactaaaacaaataatctctgggcaaaaaaaccccccctttccacaaaaagcaagcgaaaaaaaaaccactgggattgctcgggataccccctgatacgtaaatggggaaccactgtttttgtccaaagcacctttgtaaaccatttgggaagacattgtactgccggaacttggacttggcgncgncattgtctctgggctgggttcctcaactgattttaggctggggttgggagaaggacaaaaagggatgaccttnttgggaaatttcgcgcccgtaaatgtactaaacttatcggcatacccgtagcttttggcgcgtggaccccccct

SEQ ID NO: 118003 - DNA, 515 bp, Arabidopsis thaliana columbia
  unsure (1)..(515): unsure at all n locations
ctatagnagattatgacgtcgcatgcacgcgtacgtaagcttggatcctctagagcggccgccctttttttttttttttaatttctgaaatcttaatatgttagagatggccatctctagcacaatacacaggcgaactccaaactgcgcgcgatctgatacgtaggctaatctctttttagaagagttacaaaacggtctaaatataaggaatatcttgtgcgcatagaaaagaccaatatcgataagcaaccatctgtgagagagactttggtagacctgcatgacccctttgaacacttaaatggctgaaatctgaagatgttaacacctgatatatgatgatacttgtttaataaagattgtaagcccctgtcttaaagcgctcaggaagatcttctatatgcgacctgaccgtgatgttgatcctgatcaaggacctgggagtctcaagcagacgcaacaaatgtgatggcctgacccgtgtgttcaaatctaccagatctcccatccct

SEQ ID NO: 118004 - DNA, 595 bp, Arabidopsis thaliana columbia
  unsure (1)..(595): unsure at all n locations
atacgactcactannagggaaagccggtacgcctgcaggtaccggtccggaattcccgggtcgacccacgcgtccggagatgcgtacgcaacgatcaatttcctgatccacctaattctggtcctgatctcatgctgatgggtatgcgatgtatgggagacagctagagacatcgaagactacaaagaggagctcttgtgctatgacaaagaatactacgatgatccagtattccggaaacatatcttacatgccaaactgcgagaatagggtctgctggagtgcacaactctgaattcagacactcacttttgtaaccggagctgcttatagctattaacaattcactattccgacatccatctaaaatgctccacgaatatatacctctggctataccagatatggatgtgatccggcaatcagatgtttgcttgtgcaacactgatgggattgtccttcctacgctacaacagattgtaccatctactggccattcttgtggactggtactgtgccataatgcagagctagcctaccagatgtgaactgatagtagtgctatacatcccgtatctggctgatacaaaagcga

SEQ ID NO: 118005 - DNA, 488 bp, Arabidopsis thaliana columbia
tgggtcgacgccttattcgttcgcgcgttcgcgcgcgccgctagtatcgccggctcctatacgactcatatagggaaagctggtacgcctgcaggtaccggtccggaattcccgggtcgacccacgcgtccgcttattcccgacggcaaattcttacgtttctccggtggtatagaaaaatgacaccacggatcaaaactcatctcttcgtcgaaccaagagccttctaacttctgagaactcatggatcataaacctccggcatcgttctcaacgcgtcaacgaatatagtcggcacctgaatgatgtcatatgccggccgaggttaaagatctctgccataagtaccagcgtagttgattatcacgagcataccttggcttaccaaattaccggtggatttgtagactacatcaagcgatcgcccggagaactcatctactgacccttgtagttttgaaagagtccttctgagcaaaccaggatac

SEQ ID NO: 118006 - DNA, 510 bp, Arabidopsis thaliana columbia
acacctatagagatgctatgacgtcgcatgcacgcgtacgtaagcttggatcctctagagctggccgccctttgttttttttttttttttttttttttttttttttttttagaagacaaaatgcttagatcgaacttaacaagcgaagagtctgaaagcgactaaatgtacattataaagaaacagattttgattttgaaagatctagtaacaaaaacaaattttcgttatccccatgttcttatgcagccatgggcacagcttctgatggtgctgcagcagctgcgtttgggacgtaccaaccatggggaatttcaacggtttttttcctcctagccaatcgagacttcctacgggcaccagtgttcttgggtagggctttaaccttcactggtttggcaattgcagaataagcctttcctatcagtttttccaccgtcacaatctcatcagcttgcccataagttttctttttgagcccctcaagggcttccaagacctttttcattc

SEQ ID NO: 118007 - DNA, 525 bp, Arabidopsis thaliana columbia
  unsure (1)..(525): unsure at all n locations
nnnnnnnnnnnnnnnnnnnnnnnnnnnnnnnnnnnnnnnnnnnnnnnnnnnnnnnnnnnnnnnnnnnnnnnnnctttttttttttttttaaatacaacctgttttgatacacaagataataaagacacgttgtccataataaaaccacngaatgatctatataatcttgcttttccgttacagaggcatatctatgaagaaagttggtaaagagggagagataactcatcatagtgaaaggcacattacagcttacatatggggtagatatatattttttacgatgataatggggatgatgatgatggatggtcatgatgatgatcgatgatgatggatcggttaatacagagctagttcctgagaggccacattcttgtcctaaaagctgaaatgcacccttgacgaagtcatagtggcctaccttgaaagcaggtgttacctgtacaaggccttctctcacacatggatatgtcactgggttcgctagtgaaacattcagcgggtccttttgacataggtcac

SEQ ID NO: 118008 - DNA, 483 bp, Arabidopsis thaliana columbia
  unsure (1)..(483): unsure at all n locations
nnnnnnnnnnnnnnnnnnnnnnnnnnnnnnnnnnnnnnnnnnnnnnnnnnnnnnnnnnnnnnnnnnnnnnnnnnnccacgcgtccggtaattctagttttctattataaaatgcaccttaaatcatctaaacacgaatactgacatatatatgcagggcgtttgagtttgttctcattatggtgagagttctctgtcattgtctttaatgtgcttagcgagtctgtctttgatctaatgtttaaatatctgcatgtatccacggatctatatttgttgacgaatgatatgtacattcttcttactcatcttcctcctcctcgtcttcccgtgccgttccatcgcttatacgcaacgagccagttgttgccgttcctgctcctatcattgccctttattgcagtgaagagatgggatccgaagcatacgacgaggctattgaagctctcaagatggttgtcatcgagatggaagagctaaagac

SEQ ID NO: 118009 - DNA, 487 bp, Arabidopsis thaliana columbia
tgacgtcgcatgcacgcgtacgtaagcttggatcctctagagtggccgccctttttttttctttttttttttttttttttttttttttttttttttttttttttttttttttttttttaaaacaaaaaagatttttctggtttagcttcaataagactttgtttccaatccccaaatttgaaaatttaagtttttacccccgtttttccatatgtttatatttgtggggagaaaaaacgaaaccccgcgcggagaccctttttttttaaaacaacttttttgaacagagggggttttttaccccccgcccaccctgtatttaggatttttgaccccacccaaggggaatgggtaaagcaagttatttttgaaccctttccaaaggggagtatttgtgcggaaactcgcaaaacccgctcttcccggacaaacggtgaggagtccccccctttgtggtggaggtttccttgtcagtcctcgaacgaaa

SEQ ID NO: 118010 - DNA, 506 bp, Arabidopsis thaliana columbia
  unsure (1)..(506): unsure at all n locations
ctatagnagagttatgacgtcgcatgcacgcgtacgtaagcttggatcctctagagcagtccgccctttnttttttttttttttttttttttttttttttttttttttttttttttttttttttaaaaaaaaaaaagggccacaaaccttggccttttaaattaataccctcaaaaggggaacctaaagatgatctttgcaatccaaaacgcttgaaatattctaaaagagaaactaaattcgaaacacacctcttttaacattaaccccacccaaaaaacttaataaaaattgggggaacccaataggggaggaaaggatctttttttggcccacctttgggggctttaaagggacgggcggtttggggggtgatatcataaacagcaaagcaccggcccataaattaaatggagttgggtttgaaaccagggcaaaaccttgccacaacacaaaaaggatctttttttgaagggaaaatccaaagatctccattgccctggggg

SEQ ID NO: 118011 - DNA, 496 bp, Arabidopsis thaliana columbia
cctatagaaatatctatgacgtaacatgcacgcgtacgtaagcttggatcctctagagcggccgccctttttttttttttttaggggaagaaaaaacgtttcaaatgtaacagataaacagaatatacataaaattacttacaagggttcgcagtattgagaaacgttgacgagttttagaaggtagaatagaaaggtcacattaatataaatcaaagattgtcgtaaggaccgagcttaggcggctcatgaggaccttttttgatgggaagaactttcccgttgaaagtagcgcttacataatgttgcaaagagcctaccttcaaggataaagaacttgaggagcaattctctttttgagaaatggggaaggaatggttgaaagagattgttataacaaggaatctaaggagaaggctgttcatagcccccacacgccccatgcacccttttcccgttacctaaatttttaagtctcatgaaccctcttgtttcc

SEQ ID NO: 118012 - DNA, 474 bp, Arabidopsis thaliana columbia
  unsure (1)..(474): unsure at all n locations
gccatgccgcacacgcgttccccgacttccgccgactagattcgccggctcctnnnnnnnnnnnnnnnnnnnnnnnnnnnnnnnnnnnnnnnnnnnnnnnnnnnnnnnnnnnnnnnnccacgcgttcgcccacgcgtccgcaaaattgctacttaccacacacaacataggaatagtgatcgaagctccatggcgtcttttgaaaccggctgccgttgtgaaaccatccggcgccataaaaggactcggcgtcagctcacttcgctggagcttagttttccatgagggcgttccgcctgagctttaaaaccaaatccatcctgcctaatggtgttgttgctaagtatggagatctaggggtatactttgactttgacaaatcgcgtaagacagcaggtccacgggaacggacacggctccggtgcgtccttatacttacaattcctctacagagcaagttcgtttgacacatta

SEQ ID NO: 118013 - DNA, 530 bp, Arabidopsis thaliana columbia
  unsure (1)..(530): unsure at all n locations
atcaaacatnccctcaaaccccacagcggaatttaataggtcacctatagaagattttgacgtcacatgcacgcgtacgtaagcttggatcctctagagcggccgcccttttttttttttttttggaaaccacaaatttaagataatgcttaaagaagacagagacaatgaggctttttcataatccaatcacaaaacaaagaaggggaaaaaaaaaaaaaacctcatcacattaggcggttttcagtttcctgttgttatgtttcttggcttccaaggaagttccatcttttagggttccacaggcgtctttatccattcaaaggctgaaaagagcaacggcctgaaaaaagaaagcctgtggccattcatgagacactactttggccctgctttgaatcaccaaaagcctttttgggcatattgcttattaaaaaaaacaaacaccttcttcgcaaaacttgtggccaaaaccattgggcccttttttcaaaaacctgggtgtaaaattcaaacacctagacaaaaat

SEQ ID NO: 118014 - DNA, 519 bp, Arabidopsis thaliana columbia
  unsure (1)..(519): unsure at all n locations
tttaggtcgcactantagagagtctatgacgtcgcatgcacgcgtacgtaagcttggatcctctagagcggccgcccttgntttattcttttttttttttttttttntaagcataaaccataataatctacagataaaaaattacaatgtcacatttgaagcaaagaacaatgaaggaagaagattgcattcatctacttctgcgaaagcattgtctcaagaaaaaaatttgagatgagccaacaacaatgcaaagataaagcaaatttcatatgtttgatgcactcaaagccataactttgcattgttcattcaaagctagaagctgagcctctttcttgtcgagaagtgctgtcaatttcacattctcctccatcagtttctgtacttcaacctccttttgtgccttctccccttctaattgggtcgtcttagtgaccaaccgttcaaagagctcctcaatggttttgaattgtctctcggacgaaagaagtgtttctcgaacattggtaaaagtac

SEQ ID NO: 118015 - DNA, 514 bp, Arabidopsis thaliana columbia
  unsure (1)..(514): unsure at all n locations
nnnnnnnnnnnnnnnnnnnnnnnnnnnnnnnnnnnnnnnnnnnnnnnnnnnnnnnnnnnnnnnnnnnnnnnnnctttnttttttttttttttttttttttttttttttttttttttttttttttnnttttttttttttttttttttttnnnaaaaccggattttatgaaccaaaaattaaagtggggttggtttcaaacatttttttttccccgcacaaattttgtttttaaaaaaatttttcacacccatttgatcttgttttttttttaaaaaaaaaacaaaaaaattttttcccgggaaaaaacatttttattaaaacaaaaatttttttcgaacccttggttccccccggaatttccggaccggtccttggggggttaccattttttttttttgggggtggttttaaagtttggggaaataatggcaataactgtttcctggggaaaattgttttccgttaaaaattccacaaaaattacgagcccggaaatttaaagtgtaaaccttgg

SEQ ID NO: 118016 - DNA, 519 bp, Arabidopsis thaliana columbia
  unsure (1)..(519): unsure at all n locations
ttaggacaactatagaagagttatgacgtcgcatgcacgcgtacgtaagcttggatcctctagagcggtcgcccttnntttttttttttttttttttttttttaacacagaagctaaggctttatagagtaatgataacttttattgtcaaacactagacccacaaggaggcaaaaaaagaagaagaaattaatcctgaaaaatactgttgttctataaataaaatcagatgggtctcttcttcttcaagtagcaaaatcacggcgcttcacgaagatcgggtaccgtttctgcgttcttgtagttggaaagaaaaccagcttgtcttgctctgcaggaacccaactgaagcctgtcactaggcggtgaaggaaaacagagagtgcaaccctagccagctcgtaaccgggacatagccttggccctccaccaaacggtgtgaacacattagaagggcctgtccggacgcgtgggtcgacccgggaattccggaccggtacctgcaggcgtaccagcttt

SEQ ID NO: 118017 - DNA, 501 bp, Arabidopsis thaliana columbia
  unsure (1)..(501): unsure at all n locations
nnnnnnnnnnnnnnnnnnnnnnnnnnnnnnnnnnnnnnnnnnnnnnnnnnnnnnnnnnnnnnnnnnnnnnnnnnnncttttttttttttttttttttttttttttgaatagagaaaaattcactgtgaagagcaattactggtttgttattagagagttgtccgaagttttgtgagcgaatcaaaaattaactgtgttccattgctgcactacaaaaaccatgtcttttttttatctagaacgtgcgaaattctaggaattttattagatccaaatctcattcgaagaaggttttggcttattttcaggcccccccgttggaggagatgcatattccggtggattggacagcgtcctcttgaaccagcgccgggaaacagaaacggcctcttcaccaggccaaccgttctatcgaactctttcgcttttccagcactaacgacaatggccttattgccctcctttactcgtagaatccggagggctatgctgtgatggccc

SEQ ID NO: 118018 - DNA, 565 bp, Arabidopsis thaliana columbia
  unsure (1)..(565): unsure at all n locations
gacggagctaccacacaccacaccaacccgctctctcctctccgtagtattcgccagactcctnnnnnnnnnnnnnnnnnnnnnnnnnnnnnnnnnnnnnnnnnnnnnnnnnnnnnnnnnnnnnnnnnnccacgcgtccgcccacgcatacgatataaaaaagcacaaaatggtttcaatggacaggatcacacaggttctttaattcccttcttaatcccgagagggagagtaaacataccctctcacctatcaaatggcctctgccatcgcactgtacatcttgaagaccactgggggcgctccaaacggaacattacgcttgcgctgaaagggatcactcctggcatagaacgaggatacattgtctgggtagtcacacaggtacgttaccgggaaagttactgtgatactacggttggtacacacttggtaactctgctgacccagaaacattctcaagcgggcctgtgctagcacttttccacatcatgagctccatgctagaagcgcaaggattccgcaagactctgctttctgtcaaggacccgctcaaatctagata

SEQ ID NO: 118019 - DNA, 508 bp, Arabidopsis thaliana columbia
  unsure (1)..(508): unsure at all n locations
nnnnnnnnnnnnnnnnnnnnnnnnnnnnnnnnnnnnnnnnnnnnnnnnnnnnnnnnnnnnnnnnnncttggttttttctttttttttttttttttttttttttttttttttttttaaggaaagaaagatttttagtttatccttttttgttttttcggcaaaaaacaaaatgacaagtttgtttttttgggacacatattttccccatgggacatttatttttggaatagaagcaaaaagggatcccaaatgtttaagggagcttttttttaatccaaaggcgggcctattttttgggggggggcctgattaaggcccacacccctttgaaaaaaaaggacttaatcttttattactacgcccggaccaaaaacaattcttcaaggttgaatccttgggttttacccccacttggtgctgtcggaaccggaaaacccctttcattaaagacttatacggggggcctttggtattcgaactttgatacatcttcagaccttttcctttt

SEQ ID NO: 118020 - DNA, 476 bp, Arabidopsis thaliana columbia
  unsure (1)..(476): unsure at all n locations
ggggggggaaaaccccgngnnggggnggagggacaagggccgaagccgcagngcaagaagcagcagcagagccacgcgcgagaggccaagggaaaaacaatgcggacgggagcggggggggcaggacagacagacacaggcaagggcattttttttaagggggggactcgagcgttggcagaaggtctaaagtttggtgccccccaacaccgtggttggtgtgtgtggggagccgggacggacgccgtgggcgggacgcgtgggtgggaccacgggaatatcggagacgggggccgtggggaggtgcctaggttgggcgtgatgatgtgatgggagtgtaaaggctggggtagaatggttggggaagaggtcgaggactggaggggaagagggggtggggtcagggaggggcaatatagtggagggggaggagtggtagaaggggggagggcgggggggcatagagaggggagaga

SEQ ID NO: 118021 - DNA, 468 bp, Arabidopsis thaliana columbia
  unsure (1)..(468): unsure at all n locations
taggtgcaactatagaagagttatgacgtcgcctgcacgcgtacgtaagcttggatcctctagagcggtcgcccttnntttttttttttttttttttttttggaacattttaacaaggaaaggagcaaaccttgctgacttatttcaaaaatgcaaacatgtgaggattgcagagatagcaccatcgccagacactgctaagagaaccgataatgactgcggccttcattttttagatgagggatggaatcaaccaccgttcatggtgagagagcattcttgggagagctttgcctttcctcctggaggctgacacaaaattgtctggggagtttccgcacaccacaacagtctgtgagggactgagaacagttgtgatgttgaatcacccttgcccttctacatcatgaaaaaggaatgggaagactggacaagacgctcgaactggagctttcttttttaagctaa

SEQ ID NO: 118022 - DNA, 531 bp, Arabidopsis thaliana columbia
  unsure (1)..(531): unsure at all n locations
annnnnnnnnnnnnnnnnnnnnnnnnnnnnnnnnnnnnnnnnnnnnnnnnnnnnnnnnnnnnnnnnnnnnnnnntctttttttttttttttatgataacattttgatgggataattggcgactaattgagaacttcaaacatacgtaacacagactctgcaatacttgcagttcagatctcttcatagagaaagcacattcttgaaaatttgagatgtcttacaaaacacccacatacatagattgattgattgatagatggatctccaaggaatcctttagacttcggacaaaagcatttcgcgcattgattcgggtagctaggaaaacaactagagcagctgctccggaggagccacctcctggccaatcctgtcatattgtaagtgacacttaaccacacttcccggtcctcttatctttggggttgcctggatagagaccaagaagctttggaactctttcgacagatgtccccctgatgagtcttctggcatacgtacggacgcgtgggtcgacccgggaattccg

SEQ ID NO: 118023 - DNA, 518 bp, Arabidopsis thaliana columbia
  unsure (1)..(518): unsure at all n locations
nnnnnnnnnnnnnnnnnnnnnnnnnnnnnnnnnnnnnnnnnnnnnnnnnnnnnnnnnnnnnnnnnnnnnnnccacgcgtccgtactgttgctagaagaccagaagggggagatctgacgaaagagttcaagagcttcttggtcactatccaggcaaccccaaagctaagaggaccgggaagtgtggctaagtgtcacttaaaatatgagaggattgacgagaaggtggctcctacggagaagctgctcgagttgtttgccaagctaaccgattcaatggacgatatgcttgtgtccgaagtctagaggattccttgcatatccatctatctatctatctatctatgactgcgggtgtttaggaagatatctcagatttgcaataatgtgctgactctttgaagagatctgaactgcacgtattgcagatgttgtgtaacgtatgtatgaagtcttgaatgagttgcangttgtcactaacctttgtgccattcatgccaagcgtgtggcggccgctct

SEQ ID NO: 118024 - DNA, 550 bp, Arabidopsis thaliana columbia
  unsure (1)..(550): unsure at all n locations
gctttcactcatctatacattcgcgcctctcctcgttagtattcgccnnnnnnnnnnnnnnnnnnnnnnnnnnnnnnnnnnnnnnnnnnnnnnnnnnnnnnnnnnnnnnnnnnnnnnnccaggcgtccgtaagaagacgacagaaggggaaggctgaacaagtgtggagttatcagtcctcgtttcgatgtcggtgttaaggagattgaaggatggactgctcgtctacttccttccagacagtttggtttcattgttctgactacctcagcgggaatcatggatcatgaccaagctaggagaaagaacgttggcggcacagttcttgggctcttttactgaagcacggtctcgagatctatcttatcgggttataggtttggttctttgtaagtctattgacctttctgttatagtagcaccactatattgtgtggacccttcggttcttaaaaacttttgatatgacgtaactatttatttcggtttttagatctcttcaacttgcgatttatgaaatcaaagtcatagttcttgactcttaacataa

SEQ ID NO: 118025 - DNA, 503 bp, Arabidopsis thaliana columbia
cactatagaagatctatgacgtcacatgcacgcgtacgtaagcttggatcctctagagctgccgcttttttttctttctttttttttttttttttaacaataatattatcaatttggctctccaaaattgtatatttacatttacgaccctaaagtttacacaatagttcaatctcacccctactaattatcacaatttacatttgagaagactatatgctataacaatacccattattaaagagtgatctacttgtggctccaccatcattgttaatacatctttcccaagatctaaacttttgatatttgattgtttctttttaacttctgccaataatcttcctgatccatcctcgattgtgaaaaccgatttgcgttttacagtcttataacaagattgatgatcaccatcaactatacgcgatcccattacaactttgtatgatgaagatgaaccctttggcaatatcttgaagttttttcttagttgaaatcttgcc

SEQ ID NO: 118026 - DNA, 504 bp, Arabidopsis thaliana columbia
  unsure (1)..(504): unsure at all n locations
taatacgactcctatagggaaagccggtacgcctgcaggtaccggtccggaattcccgtgtcgacccacgcgtccggaagacgacagaaggggtggagacgcagcgaagtacgggcatgagattgtgccgttgaaaacgtcgaattcgcagctgacgctggaggatatcgccgacgcggctcagccaagtggagcatttaagtgggactctgaaacctgtttgaaggtcgacggttagttatattttatatgatcgatcgtctaatcacaaagaaagtaagggaaagaatcaaggaagtaagaataagaagataataaataaagagaataagaagaggcatttgcaactttaagaggttaaaatttcttaaatgagtctgagtttcgttgtgtgttttgggtgtaccataagaaataaaacgtacggngttgctatgtattttgtgaagtgtgtatttctggttgaatattagtctgcgtaataaaaaaaagtatgtgtagtaa

SEQ ID NO: 118027 - DNA, 520 bp, Arabidopsis thaliana columbia
taggacgacactatagagagttatgacgtcgcatgcacgcgtacgtaagcttggatcctctagagcggccgcttttttttttttttttttttttttttttttttttttttttttttttttttttttttttttttaaaagaaaggttttttattttattgaaaatacatttattcaaatttcgttcttttcgaaatctttttctatttccaattttgttggaaaccttctgccccgagagaagtaaagtccaaaccgattccaggtccaaaaagggtttcattctgtctgaataactgaaaaacaaacataagtgtttcttttttcaaacatcaaaatatttagcccctggctgaacatttttatctccttttccggtgaagttcaagaccactcttgccccgtgtgataatgggggacataccttctcgaggtaagcttgggcgtgggaggtccccagggctggaatgattccctttaaccggaacacttttttgaacgcttccaaccctttttgggggg

SEQ ID NO: 118028 - DNA, 514 bp, Arabidopsis thaliana columbia
  unsure (1)..(514): unsure at all n locations
nnnnnnnnnnnnnnnnnnnnnnnnnnnnnnnnnnnnnnnnnnnnnnnnnnnnnnnnnnnnnnnnnnccacgcgtccgtacggctgcgagaagacgacagaagggtacggctgcgagaagacgacagaagggagatgttggtgtcctccatggagctatgagttacttgctgcaagatgatgatggacaaatcattgaaccacactccatcagtgcaggattggactaccctggagtcggacccgagcacagtttctttaaagacatgggacgggctgaatactatagcataaccgacgaagaagcgttggaagcgttcaagagagtgtcgcggttagagggaatcattccagcactggagacctcacacgcactagcttacctcgagaagctatgtcccacattatcagacgggacgagagtggtcttgaacttcagcggaagaggagataaagatgttcagacagtggctaaatatcttgatgtttgaagagagaacacttatgtttgttttt

SEQ ID NO: 118029 - DNA, 507 bp, Arabidopsis thaliana columbia
ttaggtcacctatagaagatcttgacgtcgcatgcacgcgtacgtaagcttggatcctctagagcggccgcttttttttttttttttttttttttttttttagtacaacaaacaacttccgatttgatgtgtgaccctattatccaaaacatgacccaataacaaaagaattacagaccgtcctaacctcctacgttaactgttctccgggtttctctttttacctttatttgactggtactgtccttcttcttgatcactagctccatcttttctttttctcttcttttttatttcccggcaacaccgtaacgaccttaccatttttatactaattccgtactctattattagcaggaattttttttgaatttttaacacttcacacttcattcttaatttgtctttaggcttgttcctcttcatttagaggggagaagattgttgaattatctaacgaaatccctaggagttcgtccagattattttggtctttgtatttaaaag

SEQ ID NO: 118030 - DNA, 467 bp, Arabidopsis thaliana columbia
  unsure (1)..(467): unsure at all n locations
gtatcgccgnnnnnnnnnnnnnnnnnnnnnnnnnnnnnnnnnnnnnnnnnnnnnnnnnnnnnnnnnnnnnnnnnnnnnccacgcgtccgcccacgcgttccgcggacgcgtgggcggacccgtggtaagactacagacgggggaagaagcagagattccagcattcctttgcagattagtgaaagcacattggaagaagcagcgaatcagctttagatgggagattcaacatttcttgatagaaggcttctcagctttgctccacttgcaagtattacagaggttcccctagggatctcgggccatcaagggtttcttccattttagcttcttaaggagagtttggtcgacttctttacagggggctatccttgtggtatggtaggtattaccctaagggtatagttgcactctacatctttgcctcgttgcttcggtgaaagctgctgctgggtctcttttccatc

SEQ ID NO: 118031 - DNA, 500 bp, Arabidopsis thaliana columbia
  unsure (1)..(500): unsure at all n locations
acnnnnnnnnnnnnnnnnnnnnnnnnnnnnnnnnnnnnnnnnnnnnnnnnnnnnnnnnnnnnnnnnnnntttttttttttttttttttttttttttttggcncacacaaaagagagatcccaaatggggggtaaaactaggttcacaaaatgttccctatttttgggtgtctgaacaagaaaacagaacaaagctgtgaagagttctcatgaaaacaccaattttatagcttcccttttggtgacttctcgcagccgaacccttttgtcaacttaacgcaaccttacccttttgtcggcttatagcagccgatcccttctagcacttacttacatctcgacccttctgacgaactctcggacaaggtcccttcttgtcgtttgtaccagccttacggacgcgtggttaaaaccggcaattccggaccggaatctgaaggctatccaggtttccgcattgtgagcagtatttgagcttggctgactatgggaaatacttgc

SEQ ID NO: 118032 - DNA, 498 bp, Arabidopsis thaliana columbia
  unsure (1)..(498): unsure at all n locations
gccagacttatacgactcanatagggaaagctggtacgcctgcaggtaccggtccggaattcccgggtcgacccaggcgtccgtacggctgcgagaagacgacagaagggtacgactgcgaaaagactacagtggggtacggctgcgacaagaccacagaagggtacggttgttagaagactatggacggtttcggctgcgagaatacgacagaaggttactgctgttagaagacgactgacgggtatatacagctttgttgttttcatgaagacacttcacagatctttttcttttttcttgttcagatactcaaaacgaggaaacattttgtgaacctagtttaaccgcacattgagggatcaatctctacttaaacaaatattgaaagacaaggttatgcacataaggcggccgctctaaaggacccaagcttacttacctgtgcatgcgagatcataactcttatatactgtggcataaatttaatatactgcc

SEQ ID NO: 118033 - DNA, 520 bp, Arabidopsis thaliana columbia
  unsure (1)..(520): unsure at all n locations
nnnnnnnnnnnnnnnnnnnnnnnnnnnnnnnnnnnnnnnnnnnnnnnnnnnnnnnnnnnnnnnnnnnnnnnnnttttttttttttttttttttttttttttttgaaaaacagatttctaatattttttattataaattcacaaacatagacattagacacatcacacatgaaacttaataatagacacatgagcaaacatagtccaatttaattcccaaaaaccggaaagaaaacacacatgaagacggtctaaaatataattttcttcccattgtacatactattatttaaagatgattctttcggtagcaactgaatcttaaacatttcaagatccactataccaccaaaatcaaatcaatagaactcgaaaaacacgagcctgatgccgatatatgacttgccgttttgtctcctccttgcttctcatggccaagctaaacaaactggttggggagattttccaaactgaggttcctctgtctcttccttaaagggctttgtctgcattttttctgc

SEQ ID NO: 118034 - DNA, 495 bp, Arabidopsis thaliana columbia
  unsure (1)..(495): unsure at all n locations
tttaggacgnnnnnnnnnnnnnnnnnnnnnnnnnnnnnnnnnnnnnnnnnnnnnnnnnnnnnnnnnnnnnnnnntttttttttttttttttttttttttttttcatnnaagcccaagggacacataagacaccaatatagtccatccccgactttacaaagaagagagattatgaagcaaattcataacattataaatgacgggggacacagttagtcatgtatgaccagtggttgctagccgcaggatcagcctaaagatcaaatgagccctaaatgggacctttaccacaaaaagaggcttggacaaagaattcaagcatagagaacctggccagacgaccgatcttaagctccttcacttttacatgaaacaaagcctttggatcctcatccaagttgaatggggagagcgcacctccggggtaaagcggttcaagcccttctacgagaggacaacctacgattttggattcttgacggaaccctatgagca

SEQ ID NO: 118035 - DNA, 498 bp, Arabidopsis thaliana columbia
  unsure (1)..(498): unsure at all n locations
gcannnnnnnnnnnnnnnnnnnnnnnnnnnnnnnnnnnnnnnnnnnnnnnnnnnnnnnnnnnnnnnnnnccacgcgtccgtacaggtgtgagcgacagaagagttcgagctgatgagaagacgacatcatgttgcggcatgaatgatgacgacataaggggacgctatgcttaaagacaacagaaagctaccggtgctcgaagacgacagaacgggaactaacactttatcttatctccttagatctcattgctgcttcagaatagattaccgagtgatggcaacgacgagctatacagcaatgctctttcgactgacaagcagctctgactcgctgcacgaactcctccgctaggttggagtatccagggatacccgtgtgaccatgcctcgtaccggcatgtctactactcagagcgtttgatacctatcaaaccgtacaacgtacttacgaccattgtcgacgaatacaccgtactacctaaccgatgagtaccc

SEQ ID NO: 118036 - DNA, 472 bp, Arabidopsis thaliana columbia
tatgacgtcgcatgcacgcgtacgtaagcttggatcctctagagcggccgccctttggtttttttttttttttttttttttttttttttttttgttttttttttttttttttttgtttttttgtgggcccgggggtaaaaaaaaaagaaaaacaccaagaacatttttgtccccaaagcttaaaatttaaaaaaaaaaactgcaacattgagatttggccaaaaaaaaaaatgggggggtggacacaaaaaaagcaatagaaagtgaaacttctaaaacggactaccagggaaaggcaggggaggctatgggttattgaaacggcaccgcacccccttacaatggggcaccggaacagaggggagggggacatgcgcggagagccggggaaccatataaaacaagggctcaaacgatggataccgatgaaagaaaaatgggaaagaagactgagccctacctccgggggaaa

SEQ ID NO: 118037 - DNA, 480 bp, Arabidopsis thaliana columbia
ggaaagctggtacgcctgcaggtaccggtccggaattcccgggtcgacccacgcgtccgtacggctgcagacgacagaagggtacggctgcgagaagacgacagaagggggaagtttgatgaatcgaaaacgctcttaccggtgagaaaacctgtaaatggcaaccgcaaaaccgctggttacaagctttgggttctaatcgctgttctactcttggcctttggttctatgttaaccggttccgtctctctcaaaggaatcggtttgttccattctgctgacggcgttaacgcattctctttcggcgatgatctcgacgttctggaaattgaagggagagagaaagtggtgagacagatgtgggatgtgtacggacgctccggtggcgttaaggttcctcggttctggcgagaagcttttgaagcggcgtatgagtttctcatcagtgattccgccgccgttcgaaatgctgtcgtttct

SEQ ID NO: 118038 - DNA, 519 bp, Arabidopsis thaliana columbia
  unsure (1)..(519): unsure at all n locations
nnnnnnnnnnnnnnnnnnnnnnnnnnnnnnnnnnnnnnnnnnnnnnnnnnnnnnnnnnnnnnnnnnnnnnnnnnnnnnnnnnccacgcgtccgtacggctgcgagaagacgacagaagggcagaatcatcaaagctcttggcgaagctcaagatgatattctccagtttgatgccccagttctcattaacagggatagattttcatggttacgagacgacgagtttgctcgccagacacttgccggccttaatccttatagcattcagctagttgaagagtggccgttaataagcaaactagacccggccgtttatggtgatcccacctcactcattacttgggaaattgtggaaagagaagttaaaggaaacatgacagttgatgaggctctaaagaataagagattgttcgtgttggattatcatgatttgcttctaccatatgtgaacaaagtgagagagttaaacaataccacattatatgcttctagaacactattcttcctcagcgatgatag

SEQ ID NO: 118039 - DNA, 499 bp, Arabidopsis thaliana columbia
tatagaagattctatgacgtcgcctgcacgcgtacgtaagcttggatcctctagagctgccgctttttttttttttttttttttttttttttgagttttagacacaagtagagattttgaaacagagtttgatgtacagttgaataaacaagcctaataccattactggtgaaatctagtagattttggttctgtatctggaaatacttcaaccatgatccaaaatctctcatttctttactgtttcaatccctttgttgctcacattgacgcagtcttcttctgcaaactcgttgtcatcagacatttgttcatcgtcattgtctttggaaatcgtcagtccattttgaagcaatcgccggttctcttccgattcttgccttattagccgttgctgaatcccatctctgatggctggtcccattttatgacaaccttccttaaacatttcaagaaatccagcccccaacgatcaggattttaagccactcattatggg

SEQ ID NO: 118040 - DNA, 522 bp, Arabidopsis thaliana columbia
  unsure (1)..(522): unsure at all n locations
tttaggtacacannnnnnnnnnnnnnnnnnnnnnnnnnnnnnnnnnnnnnnnnnnnnnnnnnnnnnnnnnnnnnnntttnttttttttcctttttttttttttttttttaaacacaaaacaaggaatgcttactaattacatctgaatcacaagtgtttttagatcgtgaaacactaactaacatatatcatactaagagcatataaacagagaacatacgcatttgcaacttacaagggaatgttaaaaggatgttgttttttcttgcctaacgcttacccttacggtttcagttagctttgcggacttctctggtcagtttctggatgttcaggttgaggaaccgaaacacctccattcattcttgcacgtgcttctgcaaacatacgttgttgctcagctgctgcttcctcctcagtcatttgagctccagggttccatttcacgctcctctgtgtgccctgcattgtttcatacttatgttgctcatacgcagcatagacttcttcaatgtattctcc

SEQ ID NO: 118041 - DNA, 506 bp, Arabidopsis thaliana columbia
  unsure (1)..(506): unsure at all n locations
actaatacgactcacttagggaaagctggtacgcctgcaggtaccggtccggaattcccgtgtcgacccacgcgtccgcccacgcgtncgtacgggcgagaagacgacagaaggggtatctcggcaagggtagtttcacggttcacggtaaaccaaagtttgctgataaattggcaatgttggcaggtggaaccggaataactccggtttaccaaattattcaagccattctcaaggatccagaggatgagactgaaatgtacgtcatttatgctaaccggaccgaggaagatattctcctaagggaggaactggatggttgggcagagcaatacccggaccggttaaaggtttggtacgtagtggaatcagctaaggaaggttgggcatacagtaccgggtttatttccgaggcgattatgcgagaacatatccctgatggattagatggctcagcccttgccatggcttgcggaccaccaccgatgattcagtttgcggttcag

SEQ ID NO: 118042 - DNA, 511 bp, Arabidopsis thaliana columbia
ttaggacgcactatagaagatctatgacgtcgcctgcacgcgtacgtaagcttggatcctctagagctgccgctttttttttttttttttttttttttttttggagaaaagggcaaaatatgtattatatgttttccactctacatggcctaattaatgattaaaactcatggtcttagtcctatagtagtggtaaactcaagatagattcgaacatgaactgaagatttagaagtgctcattttcgctaaactcgaaatcgccgccacctccaaacaccatgagatcctgagagcccaaaacatcgatagatgtactcgttttcccattgacgtaactggcctgatgatgataatcttcttcgaaaaccatttctggccacaccaatgacaagttattctccgtggacgaaccatgatgacgatgagggatgccttcttccttcattgagggagataaactagggactttgatgatcttcggaatccatgaagatctcattctgatgggc

SEQ ID NO: 118043 - DNA, 500 bp, Arabidopsis thaliana columbia
  unsure (1)..(500): unsure at all n locations
ctatagnagatcnatgacgtcgactgcacgcgtacgtaagcttggatcctctagagctgccgctgtttttaattcttttttttttttttttggacccttctgtcgtcttctcgcagccgtacccttctgtcgtcttctcgcagccgaatccttctgtcgtcttctcgcagccgtacccttctgtcgtcttctcgcagccgtacccttctgtcgttttttcgcagccgtacccttctgtcgtcttctcgcagccgtacccttctgtcgtcttctcgcagccgtacccttctgtcgtcttctcgcagccgtatccttctgtcgtcttctcgcagccgtacccttctgtcgtcttctcgcagccgtacccttctgtcgtcttctcgcagccgtacccttctgtcgtcttctcgcagccgtacccttctgtcgtcttctcgcagccgtacccttctatcgttttctcgaagccgtacccttctgtcgttttctgtacggacgcg

SEQ ID NO: 118044 - DNA, 510 bp, Arabidopsis thaliana columbia
  unsure (1)..(510): unsure at all n locations
nnnnnnnnnnnnnnnnnnnnnnnnnnnnnnnnnnnnnnnnnnnnnnnnnnnnnnnnnnnnnnnnnnnnnnnccacgcgtccgtacggctgcgagaagacgacagaagggacagtgcggcttgtttcacggatgttccatccaaacatttatgctgatgggagtatatgcttggacattctccaaaaccaatggagtccaatatacgatgtcgctgccatactaacctccattcagtcattgctatgtgatcctaatacgaattctcctgcaaattcggaagctgcacgaatgttcagtgaaagcaagcgcgagtacaacagaagagtccgcgaggttgtcgaacaaagctggactgccgactagtaattatatcattgtagcatttgtcttcaaataacattaaacctcctctcttgtatctgatttcgaccatcacatctctgagagaagtttactctccctaccactctcttttatgtctctctgagcttgtcaaactctgtgattag

SEQ ID NO: 118045 - DNA, 511 bp, Arabidopsis thaliana columbia
  unsure (1)..(511): unsure at all n locations
cctgcggtaccgtccgngatcccggtctacccacgcgtgcgcggacgcgtgggcggatcttcttntacaaaacccatttcctcacaaaatccatctgagaaaaagagcaacaagtttcattttcatggaggttgtcaacgaagtagaatttgtatgcttaaactggtactaattcacgccgacaccccaattccctaatttntgggggggggggacacacacaccatatcattttttaaaaaaaattctccctaattgaatacatctcccatctccctcttctttttcttagactccataatctctttcatatatttatgtttatataattcttctcttatcgcttcttcttcttcttctacatctatactaatcctaatcatcttctctttatttatatgtgtcctccctcttcttctgactgtgtgttgtgcatcttgtttgaatatcttgagacattcgttcgcgacgctcaaccattactctcttaactactacaacttcttcactt

SEQ ID NO: 118046 - DNA, 184 bp, Arabidopsis thaliana columbia
  unsure (1)..(184): unsure at all n locations
cctgcaggtaccggtccggaattcccgggtcttacccacgcgtggcgcnggagntggggagganacnnaagcacactnagacggaagctccttcgccggtgaaaaacagtgtttgtcggccgtccggccgcgcccatattaggggaagaacggttgggtgtaggggctgtcattgtttcaccct

SEQ ID NO: 118047 - DNA, 502 bp, Arabidopsis thaliana columbia
  unsure (1)..(502): unsure at all n locations
gcctgcaggtacaggtccggattcccgggttacccacgcgtgcgagcgtttaagacgtttgnncnntnnnncnnnccccgccctatcacataaagctttcatagttgtcagcccacccctaccccctcgttggaaaggagtagatacacttgagttcggctttccggctcccccccaccccccccccgttccctcttttagggggggggggacacaacccacgagttttcgcgagaaaaacccgctcgtccgcggtgcaaccacattaaacggtatgagtgttgtgtcccttcttactgtgtatatggaattcgacgatatcagccgagataattcattccctcctctactaatatagcgtgctcccactcaccactatccattttactatttcttgtaacagacggcagtcgtgaagtttccaaggttatagtagtgatacggtcgcccgggcccgatcgagtgggcagtcgtacgtcgtcccgcgcgccagcgacatctg

SEQ ID NO: 118048 - DNA, 186 bp, Arabidopsis thaliana columbia
agactgggggagggagaagaaaagaaagttttacaagcgggggagggggggtaaaaaatataattgtgccgcgcgcctcccataatttgattattatgagtggggcctgtatcgtgaaggatgtagaatgttaggtatggtgattgactgatagaagtagattaaaacgaaaagttttttttttat

SEQ ID NO: 118049 - DNA, 528 bp, Arabidopsis thaliana columbia
  unsure (1)..(528): unsure at all n locations
tggcacgcctgcaggtaccggtccgngattcccgggtctgacccacgcgtgcggtcacagtgaccaaaatcacacacttcacaagaaacaacctatggatccaaatgaatctgcaccaaaccaatttcgccacgtggtggtcatgtttttgtgcaggtttgggtactcctggggtgctagttctcggtagcgtccgagaccgtttgatctttttggggggggggccaccccaccgagattcttgttgtaaatagtttctcgctggatgccttgttgcttgctttttgttttagtttttgcgtggcgtggtagtgagctaagcggcccgtgacgcttgccctattatagtatactctcaccgcgtcttcctctcgacgtttacttctcgtcacgtttattccttctaatttttttttgtttctcacgtctttactgttttctctagatggggtttttcttaatttatttagcgatcttccttgagcgacctactcgcgtgacactatcactttaactattttactccgc

SEQ ID NO: 118050 - DNA, 545 bp, Arabidopsis thaliana columbia
  unsure (1)..(545): unsure at all n locations
aggtctctacgactcanatagggaaagctggcacgcctgcaggtaccggtccggaattcccgggtcgacccacgcgtgcggcaaaacaaaactaaacaagaaacagaggagaaaaaaggaaacgacgaggaaaaacaaaaacaaaataaaaacaagcctcgttcttcccttttctctcttcaaatcttttcttttacatattttcttttcttttttttgtctttaatacttatttactaactggtgagaataaaaatgggttcgagtaagtttaaacgagccatacgagccgtaaaggaccaaaccagcctttgctctagccaaagccattggtggaagcgcttgttttatcattactgcacctgtcggatccactgcttcccgcttaccgacattctattgcctttctttaccagctgccccgttattttttattctctacgctgcgccttttcatcggttatgggtgtctgcctgtttttgtatcgtatccctgtatcgtgtatattcttctctccaaacaccctctctctaatcctctcgcc

SEQ ID NO: 118051 - DNA, 450 bp, Arabidopsis thaliana columbia
  unsure (1)..(450): unsure at all n locations
tttttcaaacccccacaaaacacaaagggggtgtttttttaccaaactcttgaaccgaaaaccctcaaccctctaaacagaataattccatttaaggggaagaggaaaaaacccccccaagcccaaaaaaacccccccctttttttttcaagggaggggtggggcctctccctggggcgcttcaaaattgaggaaacctccccacacatggggtggttcgtcccccccctncaattttttccccaaaacaaaaccccattttttaaatgccccttaccggctcccaaagcttttaacaacttgtcccaaaagcaacggtggtttaccttttaaaccgccccttttttatgccacccagaaaaaacatctaaatcccctccagctcttacgcccagaatttcccctttagaaacaaccccccctcgcctcctccgtcttaataaaccccct

SEQ ID NO: 118052 - DNA, 549 bp, Arabidopsis thaliana columbia
  unsure (1)..(549): unsure at all n locations
gggggagctgacacgcctgcaggtaccggtccgngattcccgggtcgacccacgcgggcgagggagttntataatacaaatctggcaaaagatggccaacccgccagcacgatatcttgtgcattgtggggagctggggcgagtaagtatagagtaatgaagtagtagttatttgtgctgtcaggacgaagtgctacacagggcgaaccaggtttctccatattagggggggggaaaaaaaaaataaatgagagagggcggaagattagaactgaacgaaggagggagtgcgggacagccgaagagttaagaggtaggncgaaggggtgtaagtgagggatgggagggaatgagaagtacgacaaactaatgggtaacaacgcagtgagacaggagtatagcgcaccaaacggtactagtgtgcggtggaatgtagagcgctcaactagacgacacgggacatgcgcgcgcgagaaaaatgaagagatctggagagcgatagtataggagtagcgaagagcgtattaaagcatcgaaacgcactcgctc

SEQ ID NO: 118053 - DNA, 513 bp, Arabidopsis thaliana columbia
  unsure (1)..(513): unsure at all n locations
tcctagcttggatccttaagcggttgccttttttgttttggcgcttcaccaaatttataccatanattcctaaatcactgaattcagatattttctttcatacagaattaaagaaaaaagggttcaatcacactatcacacctccgtttaccttaactaacggggggngggaagctccccttcctcatctgagggagtgggngnttccccattggtggcatttngcaaaaaaaacccaacaccctccattttggcctaatgaaagtgccccataccgggccccatcccgccaaccccaaaccgcagaaccttggaccccaacccccctttgaaagcggtttatccacgtaaacctccaccccagggtagggaataaaaaacggggggtttttccccccatcttccagggggcaaagcgcggcccagacccaaagcatggctctccaccgggccccttcgcttccccgcgggcccgttaccgcctgccctccccccccccctcatccgacgcct

SEQ ID NO: 118054 - DNA, 523 bp, Arabidopsis thaliana columbia
  unsure (1)..(523): unsure at all n locations
cctgcaggtaccggtccggaattcccgggttttaaaggggggggaaagcccgcaaaaaaaaaaagagaagaggagggagcgcccacacgctttgagccgatgagcgagattaggctcgtgcgacaccgcgacaggactcaatgataagagagaaggaattgggacgatgcgagataaacataggtacgaacccanaaagagttccctctttttgggggggggggaaaaaacaaaggaatagtatgtgagaacaaaaaagagacgcactcagaaattaattcttcgagagcacagtcacacatctataatataagagcgaatccagtatgtaataagtgacgaatatatcatcgagaaagccattgtaaatttgatgattgcactaatataagacaatgaaaacttcggacaatagaaggcaagttatgtgaatcgagaaacaacaaacaaccaccagcagatcgaagcgtagtaaagataaagttaagctgatgaacagaaataataaaaaacgtctataaac

SEQ ID NO: 118055 - DNA, 504 bp, Arabidopsis thaliana columbia
ttgacgtcgcatgcacgcgtacgtaagcttggatcctctagagcggcctccctttttgggggtggggtttttaactaaaaaaatttttccttcacattcaatgattccaggttttgtagaaaaccattttatttttagccctaatccggaagttgggaactatcaataactaaacttatttgagaggatatcttattactttagttaccatttttctttgggagatggagaaccacccgaggggctcgcaaaaagataccaaaccgaggttttcttttaataatttgaccaaaaacaggttttttgagaacatctaatataaccataggcccggttcaagggtggtacatatggaagctccctgttctacactcacctcttttgtttttaaataacactgcctttgcccctgcacagagtaagggaaacttccttctatttcttggggttgggagggcccctttttaacctccattaagatcccaaacctttgaaaccaaacca

SEQ ID NO: 118056 - DNA, 505 bp, Arabidopsis thaliana columbia
  unsure (1)..(505): unsure at all n locations
atgcacgcgtacgtaagcttggatcctctagagcgggcgcccttttttggtttttgtttatcaaataaatttctttgtaatttatgtgggacttttatgctctgcattttttagttctcagttcttacaattagatcttaaaagtatcatatcacaactccatctttaattactgagttcttcaagattacagnaatgccatatcttatgggaagtcggtcnnatnacctatgtggctttttaaaaaaaactccgaggttgcgaggattacattctttccaactctaggattcttgggtattatggattcttgaatttttgggggccttcctatcccaagggggaccgttccttaaggaggggcggggggggccgttgtcgttcacggtagggaggattttgccccaagcctcacagggggccttgcaaggaagcattgctggcgacgtgttggggcgaagtgcgaacggggtttgggccaacgcgggggggtgggagagaggcc

SEQ ID NO: 118057 - DNA, 448 bp, Arabidopsis thaliana columbia
  unsure (1)..(448): unsure at all n locations
gcctgcagntaccnngtccggnattcccgggtctacccacgcgtgcgatcttcccctctattcaaacccttcaagagacaatctttcctgcgaaaatggtgggatatgctgtctaccttacccccccccaaccacttcctttatttagcaattatgttattaaccaatgtgttgttatctaccaccacccaacactctctccattttgggggggggggacaaccgctgttttttttttattctaataaaattccccctcgtagtaactcctccacaacgcctccttaacccccacctgcgccagcgtgagcaattaataatttctatcccttatcaatacacttttcaccctcacccacttatctactgttgtctcttcgtcctcttacctcttacactattcaattactccactcaccacagcctttcattcttatataaatataaa

SEQ ID NO: 118058 - DNA, 481 bp, Arabidopsis thaliana columbia
  unsure (1)..(481): unsure at all n locations
acgtcgcatgcacgcgtacgtaagcttggatcctctagagcggccgccctttntggggggggggcttttaaaaaaaaaaaaannannaanaannnnaaaannnaaaaaaaanngggaacccagaggcaaactttaatttgttataaccacctgctggtaacctattcctctccaaatgggggagagcccaatcaaattctggaatctttatttttgaggatgaagggtttctttctctgccgggggaaaaaaaaaaaaaaaaaatttttctttggggaaaaaattttaatcccgcccaagccaaaaaaaaacatttttgccccatgcacctctttaaaagccacactaatcttcaaaaaacttttcaggttgaactttaaagaccaccggttttaacaaacttgaagggcccttggcccacaaaaaaaatacctcccggcctttaaggaacctgaaaccttctttactgtttcacccaccc

SEQ ID NO: 118059 - DNA, 452 bp, Arabidopsis thaliana columbia
  unsure (1)..(452): unsure at all n locations
tctctacgactccnatagggaaagctgcacgcctgcaggtaccggtccggattcccgggtcgacccacgcgtgcgcttatcttccatagtataaaacagtcagaagatgtcactgatgcaacaaagtcaaagaactcacatgcgatctgtgagcttgggctgtcaataatcaatcacttaactcagaaagagcctgatctacaaggggaaatcacacctgtatttttttctccgagggggtgcaaaccttgtgaaaaagttgtagaaacaaatgtccctaggacccgctactccttcgcaaagcttggcttctatctacttcgtggtggagtacgttcacgacaactccgtccttttcttcaccccggcgccctcctttttcgatgtctaaccgacccttctttttgttttcttttcttccatcccgtgttgtatcttttcgccgagcagtt

SEQ ID NO: 118060 - DNA, 514 bp, Arabidopsis thaliana columbia
cagctctctacgactcatatagggaaagctggcacgcctgcaggtaccggtccggaattcccgggtcgacccacgcgtccggttcctctgagacgtgttaaccaggcctatgtcattggtacttccacaaaggttgacatttctggagttaccctcgacaaattcgatgataagtacttcggcaaggttgctgagaagaaaaagaagaagactgaaggagagttcttcgaggctgagaaagaggagaagaaagagattccacagggaaagaaagatgaccagaaagccgtggacgcagctttgatcaaagctattgaagcagttccagagttgaagacttacctcggagcaaggttttcattgaaacaaggaatgaagccccatgagcttgttttctagatttcattactttttttctgaggtttctagtgtatctgtctcctgaagttttacactccaactggttggttctgttctcgtccactgaccagagacataaaatcttggctgctgc

SEQ ID NO: 118061 - DNA, 318 bp, Arabidopsis thaliana columbia
  unsure (1)..(318): unsure at all n locations
cacgcgtacttaacttgaaccttagagcgttttcctttttgggtgaagggccgcccacaaaaaaaaaattatnttctatctaataactcttttcacactaccaacaactcaacgccagcaagacacgatcgtgagataaagaggtgtcacctactttaaatcactatcattcccacgactgcatggcgggaccgacccgcacccgacacagaaagagagcaacgcccacaccgaaacatttttttatttctcggggggtgtggggggaacaacataccaaagggcgcgcggctccataaagaaaaaaaaacacaagac

SEQ ID NO: 118062 - DNA, 489 bp, Arabidopsis thaliana columbia
  unsure (1)..(489): unsure at all n locations
acgactccnatagggaaagctggcacgcctgcaggtaccggtccggaattcccgggtcgacccacgcgtgcgaatacacctacgcgagcttctgttactcagcaacggcgacccattgagacacactctttcaccgattgctctcatgctctcaccacgcatgtcgctctctccctctacctcgatttcaacacctccataatccatggctccgctctcctcactctctcctccggcttctccggcgaactctctcttgatactcgctgcatttccattgctatggtcctcgatcctctcactctcgagcctatcccttactccgtctccaccacaccggatcgaattcggggcaccgaagttgtcntagncctttccggtcaatcttcactgctaactgtctactccacttcgccctctggcgccgtgtgcaaggggttgcgccggttcacacatcgccaaaagggtcgctcgggggtcgctgcggcg

SEQ ID NO: 118063 - DNA, 473 bp, Arabidopsis thaliana columbia
  unsure (1)..(473): unsure at all n locations
cgcctgcnagtacccgtccggattcccgggtcgacccacgcgtccggatctgacctcaaaatcaaacgagtttctttgataatcttcttgctaagtgttcttgttgagttttnntatagcgagcggccttcttattttttttttaggttttgtttgttttacctgttttgtaattttgatattactcatcgcccttttttttttgangagggggggtatccgatcaccgccttttactcttcatattttgttagtaatattcttatttcttcgaatactccgcacttatcattcttatagtgagcgagtatcaagtgttcgatttacaacatcgacatcttaatcttttaaattatatctctttataaatcacgctaaagatctttcttctcccctcaccgatattctactttcttatttatttttataacttagattcattttggtttggtatgctggtttttttaccttat

SEQ ID NO: 118064 - DNA, 552 bp, Arabidopsis thaliana columbia
ggcgcaaacacgcgtacgtaagcttggatcctctagagcggttgtcctttgggggggaaagccacacacaacaaaaacagaggagacgttgtggtccgcttactataacccgacgcacgagacgtctgcgggagaggcgcgggagtaggtatcgaacatagcatacgaaaagaacggagaaggatccgacgcaagctcgacgaccgcagcagattttcatactatgagggggggtgggaacaaagagaatcacacacatgcttgtcacaaaacgctagcgcgtgcacgcactgagcggcgaggcgcgcagccacccgacgagacaaaccgccaagtcacattatcaaacgtgagcggatatggcagacgaacctatgctcgcagcccccacccgcccagaagcacgaagagtgagaaagtgagacccgctcgcgagcgacgaatcagaccggaggcgaaacgaaagaggcagaatataaataggtgagatttaagttgtagaaggagaagtgagcagcgaaagcgcagaggtagtagaattaacgcagtacc

SEQ ID NO: 118065 - DNA, 563 bp, Arabidopsis thaliana columbia
acgtcgcatgcacgcgtacgtaagcttggatcctctagagcggcctcccttttttgttttttttttttgagatttaacaataattcaaatttatgaaacaaaaacttagggttcaattgcaatactttaatcagttcattctccaatattagggacaaagtgaaacaaataatattcccaggggagcacaacaagagttcggattttcccaacaccattttttttttcaccatggtgcgggtttccatctcccccggcggggattccaaaaaaaaatcccccccatttttacccggaatttttaacattactccaaccaaactctttgaaaaatgaaacctttgatgaaccctttttttttcagaaggactttttcttttttgggcatacttttaccaaaaaaccctttaacaaaagattttggcttgtccattatcgccttttttctttttccatcctctcgatacaccccccatgagcggggcatccttacccgagtcttcccgcgtggtgcgtactgttttccacgagtccttttttccacacaggacggcaaatatccg

SEQ ID NO: 118066 - DNA, 578 bp, Arabidopsis thaliana columbia
gtcgcagcacgcgtacgtaagcttggatcctctagagcggttttcctttttggggaagccccaaaacaaaaacgaaagtttagagaagtccttctcttataaatatccagcaagtcagagatttccgtaagcagacaagacaagttatctaatatatattatactacccacagcaacggggcgacaggtccggagcggaccggaaaacctttttttttttaaaaggggagtgggggccccacacaatcactagtatatccgtcaccagaacggaggcaacgacagtcgcgagcgaggtaacactactactctccataaatagacaccgtgcagagaggtaataaagcatatgaatcttagacaccggaagcatcgtcaaacgcatgcataggatatagagagataatttatatttaagttgtgtaagtgacactacgggagacggcggaaagtagaagagagacttgagactacgagcccaggtatgagtagaattgtttcttacctattgatagcagtgattcatttctacagcaccctgttcacgagtccatgagaatctcagtgaaagtacagtc

SEQ ID NO: 118067 - DNA, 541 bp, Arabidopsis thaliana columbia
tgatactccagctctctacgactcactatagggaaagctggcacgcctgcaggtaccggtccggaattcccgggtcgacccacgcgtccgcggacgcgtgggcgatgatgagctctgcatccgccatgaaagctgttggatttttgcttctgcttaccattctaacattagcttatgcgaagaagtcaggtgatgtgacagagttgcagattggtgttaagtacaagcctcacaaatgtgatctccaggcgcagagaggggataagatcaaggttcactatcggggaaagttaactgatggaactgtctttgattcaagttttgagagaggtgaccctattgagtttgagcttggaactggacaagtcatcccaggatgggaccagggttcattgcgagcttgtgtagggcagaggagaacttcgatactcccttccgtccccggtcttggtggcttcgggtcgcttcaaatatcttcggtggggccacacttcttgtttcacccccggcgcctgtcgttccccatccgcatcacctttcc

SEQ ID NO: 118068 - DNA, 436 bp, Arabidopsis thaliana columbia
  unsure (1)..(436): unsure at all n locations
aaaaaaaggacaaacccccccattaaaaaaaaaagaagaaagcaacttaaanaaaagggagagagggccggcccaaaaaaaaaaaaaanctcccccacacaccaccaccactttctaacccaaccacacaccaacctaccccccgaaagcacgaaggcaaggcaaaatccgaacaacaaaaagccacaagcgagccacacagcacgaagaggcgagacccacgaccagacaacacgcacttttttttcttaaccggggggggtgggccacaaaacccaagaccgccaccccgccaaaacaaaaaagaccccccacagcgcggacgcgaagacggcacgggccccggaccccagggacagagaccgccacgccacggacaacaagcgcgacgacgctcgcacggaacacaacagaagcgcgcggcgagagcagagag

SEQ ID NO: 118069 - DNA, 436 bp, Arabidopsis thaliana columbia
  unsure (1)..(436): unsure at all n locations
cgcctgcggtaccgtccggattcccgggtcgacccacgcgtgggcggtttaaaanatatataaaanacatgccaccctaaaattattaaattactagcccgccgcgaaaaactaacttaacggtgttgatatagaataattacaatgacacccaaagcacacacatttttttatagggggggggaaagccacactttatcctaacaaaaaaagatacgagacacatacacacaatatactaattaggagacaatcggaaaatttaatgaaacttaataactcaatagatatgtacacgcaaaaccaatatactatatgagaccaagcactcacatccggattggtttgacatctaacacgcacacaaattgagataatggtattgaagaattattaaagtacgtatatatgaagacagcaaaacccacagcagata

SEQ ID NO: 118070 - DNA, 406 bp, Arabidopsis thaliana columbia
  unsure (1)..(406): unsure at all n locations
cgcctgcaggtaccggtccgagattcccgggttgacccacgcgggggaacacgcatncaaaataatttttataaggagccccaccgagaacatgaaaaagtaagtgtctttttagtgtcgccgacagaaccacactacgaaatagtcatagtctgatgaggagtggatcgtgtagcagtgttgataaggcagcaaccacaaaaaacttcttcattttataggggggtggttaacaaacagacttaaaaatataaagtaagaataatacacactcaaagattattatagattacgtacatcaatttataattttttttaatcatgctagtattatttatgttaaatctaagagatcgctacaaagttcgatattagctatttgtgttattatgtgtttatggtaagt

SEQ ID NO: 118071 - DNA, 529 bp, Arabidopsis thaliana columbia
  unsure (1)..(529): unsure at all n locations
gacgtcgcatgcacgcgtacgtaagcttggatcctctagagcggctcgcctttttttgtttttgctacaccaaaagtaaaatcttcaaatttggaagtgaatggtaaaataagaatgttaatatctcttaatatgtaataatctcttatatatttcggtttacccgtacaatgtaaaatatttttcattcaaaactgatgattaggttttttttttctgtggagttgganaaacngngggggggacgcgacaaaaaaaaagaccccactttaaggtgcaggcgcctgagggccaagatataggcactttgaggtgccttcgttagagacaaccccagttgggcctgggcgccggcgcccgacgtcggtaggcagttgcggcggggtccggcggcgggcggaccagccgcgcgctggccggtcgcccagcgcgtgggagccgggcggggtgcgggcgcaacttgtctgggcggccggacgatcctaccgcgggccccagtgcggtcgttcccgccgggcgcagccgacga

SEQ ID NO: 118072 - DNA, 454 bp, Arabidopsis thaliana columbia
  unsure (1)..(454): unsure at all n locations
cgcctgcaggtaccggtccggaattcccgggttgacccacgcgtgcgcggacgcgtggtaaagntctattaacacataaagcgactaatgtgactaatataaatatacgtatggtttaccgcccccctacaacaataaaatataactagaatagcagaaatgaggcggattattaagataatacatcaccacaagaaatttctccttttaaagggggggtaagtaaagaagagagctatatgtttctatacaaatatacaagtacaactgacaatgcgtaacaacaaaataaatatttatctatataacgcaagttatacgatagtaatagtatacgctcattctgcagcctttaatgtcagaatataaagacgatcatatattacctccaacgactataagcatattataattatataaatacagtatcgctagcatgtcgagtgtagatata

SEQ ID NO: 118073 - DNA, 528 bp, Arabidopsis thaliana columbia
atagaagagctttgacgtcgcatgcacgcgtacgtaagcttggatcctctagagcggctgccctttttttgttttgtttgaagataaaacatttagttacaatgtggtaatacaagcttcacaggacagaacatcacactttcattgtctaatgataaatgattgaggtacaataatgtgagtagaaattgttagtgtctttgatccacttcggatcaccattgtctctgggggtgtgcgaggctcattatcaggttaatttatcctagactcgctgtcttaaatcatcttagaacccaacagagctagccacaaacccgagaacaaggacagcaccgaagctcaaaccggtgttagaagcagaggaaggtggttcaagcttatcagggtggtgccattttttttcttggcagaattaatgtggaggtgggggctggagaaatcacttgtgtgattggggcaaaaggcaggtggcggtgtgtgtgagccgaacccaagaaagaaggtggtggatgagtgcgcctggtg

SEQ ID NO: 118074 - DNA, 529 bp, Arabidopsis thaliana columbia
  unsure (1)..(529): unsure at all n locations
cctgcaggtaccggtccggaattcccgggttttacccacgcggggcgaagcccaatgtaaattaatatgaataatgactgcgggcgcacattagataaatatgaattaatgtgttattgtagagcgacagaactaatttgagttttttagaatccggtaggagttagagtcgtttagatttcaataacaccaaccccaattcactanattttagggggggggacaaaaaaacaatactgtgatatgtgtaaaataagagtgtcgaatgaagtggtaaatctatggtcgtatcatagagtaatattacaggtgactgttgttgagatgttatgtatagtactaatctgttaaaaaaagatataatataaaataatatttcgagtcttgttttaaacgatcacgatttactggatataggagtcacgcgctgtctgattgtgacaagtgtgttgttaatatattgttagtgtatcaaagtgattatagatatactctttcctttttatttatgtattacttgctttaagcg

SEQ ID NO: 118075 - DNA, 530 bp, Arabidopsis thaliana columbia
agctctctacgactcactattgggaaagctggcacgcctgcaggtaccggtccggaattcccgggtcgacccacgcgtccgcccacgcgtccggagcgaaggagatgtgagcgaaggagctgtgagcgaaagagctgagttcccggagccatcggaagaagccaagcttttcgtcggaaatttggcttatgatgttaatagccaagctttggctatgctctttgagcaagccggtactgttgaaatcgccgaggttatatacaatagggaaactgaccagagtcgtgggtttggatttgtgacaatgagttctgtggacgaagctgagacagctgtggagaagttcaaccgttatgatcttaacggacgtctactaactgtaaacaaggcagctccaagaggatcacgtccagaacgtgcgcctcgggtatatgaacctgcattcagagtatatgtagggaatctaccatgggatgtggacaatggccgtctagaacagcttttcagtgagcatggtaaagttgtggaag

SEQ ID NO: 118076 - DNA, 514 bp, Arabidopsis thaliana columbia
taggtgaacttatcagaagactttgacgtcgcatgcacgcgtacgtaagcttggatcctctagagcggccgcttttttttttgttttttttttttttttttacccaaaattaaggtttcaaagggtggattaccgggataataaaaaggcacctttggatttggtcccaggttggttaaagggcaaaacttggtccaaaaaaaggttggaaacccctggaggggccaagagactttagaatcctgggcggggggggggcctttttttttggcccaaccaatggtccggagaaggaaaggttatcaacccttcctttttcaacctcttcaatccgggccaacccaatattttcaattttggtggagaaccttaccgtaaggcggggggaattttgggcgaggcttttggaggcaccggggggttctttacaagaacaccttccaagggagtcgattggtttctaccttcccaattaagaagaagccgaacgtttccaaaagggctggccctttcc

SEQ ID NO: 118077 - DNA, 510 bp, Arabidopsis thaliana columbia
  unsure (1)..(510): unsure at all n locations
gtcgcatggcacgcgtacgtagcttggatcctctagagcggccgcttttttttgttttttttttttnnnnnnnaccaccagaaaatatttgcgttatgacaaatggatccatagccccctcacgcacttagttacttagttgagtattagatttatttacaaaatgggggggatcaaatctcaaatacgtaaaacaaagcaaagatttttttcacggggagtgtggtaacctttaagggggccaaaagataaataattaggcgaagggggggcgatttacacattatacctaatgacagcaaggaggggctcactggcctactcagggccgtgtgtgacataaccatctctgatagcgtttcagggttaaggctctcaggtgaacccgccatctccgcgcgcgcgcagggccggggggggcgtcagggaaggggtggtgtgggagggtcaggggatgcggggcagctgtgaacggcgatcgcgtgtgcgaagtgggcggcggggcggggg

SEQ ID NO: 118078 - DNA, 425 bp, Arabidopsis thaliana columbia
aaaaaaaaaatactcaaaattcagacttgagacagtcgactcagaggcagcgagtcgtgaagaggattgcggtgtcaataacttcatctctgcgtccttatgaacggacatcgagcgtgacccgggaaacataagtaacgaccgcgaggaaatttttttttttaggggggatgtttgggcaccacacaaagagcgggcgggcccgctcaaaaaaaaatgaatccacaagagcggtgaggggagtgggaacgaagtattgaactactgccaccaggatagacaagcaagtagaggaggtccctcgaagatcaggacgcctcgtgcgccgcacatcgctccttatcgctgagcaggcttgtcagatgacgcggcgtgcgtgagctcgcgtgacgggtggcgtgcgacaggcagacggcagagcaagt

SEQ ID NO: 118079 - DNA, 521 bp, Arabidopsis thaliana columbia
  unsure (1)..(521): unsure at all n locations
gcctgcaggtaccggtccgngattcccgggttgacccacgcgtgggagcacgcgtacgtactctgttagaagaccacacaccgacacatatatgtagttcatgtaagaggttccattcttaataatagatacattataataggtggtaatattctgtttcttgagcatgaaccagtcactagcattcccaaaggcatttttatctaatggggggggggaacgcaaacgaatgttacgatcataaacaatacatcaccttatggaatggatcctaaacgattgtttatatcaggtcatagttatatgttaattgtcgatagtaagatcgtatatattatctatttgtgtataattgttgttctttatacatcatatctatgttcatctctctcacacaactttttttctgttagaggcttggcctacagttaaaccgtgttttggcatttattacgatttgatactagatgtcatgtttgaatatatgagatacagtcttctagcatttcactacgggaccc

SEQ ID NO: 118080 - DNA, 556 bp, Arabidopsis thaliana columbia
  unsure (1)..(556): unsure at all n locations
aaaaaaaaacaanccccggaaaaganaaaaagaaaaagaaattataacaaaaggagggaaacccgcgccccccaaaaaaaaaacaaccacacacccaaccgccgccgacaacaccacaacacacacgcacacccagaggacacgacgacgccgacccgacacccccccacaaaaacaacaaacgacagcacgccacgccacacccccaccgcgcccccgcgggcgcgccacaaaccccgcgaaaactctttttttcgcacgggatgttggccacccccacgccgggcgtccccgcccacaccagacaaaacccacccccccgaccgcgcggccaagagcccccaaccacaaaggaccgagactcgcgctaacccccaacacccaccaccacccagacaggactacgaagacacaccgcgccccacgcccgcgcccacccacaccaacgacccaacacaagacacagctgcccgcgcgcccgccgcgggcaaacgcccgtccctcgctcactcagccacacgagaaaaacaaacggtaagagtcaccaacgacgacg

SEQ ID NO: 118081 - DNA, 563 bp, Arabidopsis thaliana columbia
  unsure (1)..(563): unsure at all n locations
gggagctactacgcctgcaggtaccggtccggaattcccgggttgacccacgcgtgggtaccgctgtnagaagacaacagaaggcccaggccaaaaatctattaatattatattgtaatagggattggccctcgcacccgaaagagataatatagattatttgtggttcctagaactttaatagtagatcatcacgctcacacccgcaacaaaagttcnctcntttatgggggggggggggaacccccccataagtatatcagaatataaataacaacccctcttctaatctaacatcttcctattctaactcgtattgttattggttgcacaaatatacagtgaacatatgccctatactgagcaaaataattctagtattatctccaaaattcatatcatactattaacttaacaagtggtatatatcatttgatcctaatttccacattgaatgagtctagtagactttatttatagctcacttattgctatctatatctaaatctaaataattacttatcaaagacattccatcatctaatacttctgcatcaaacaca

SEQ ID NO: 118082 - DNA, 532 bp, Arabidopsis thaliana columbia
tgatactccagctctctacgactcactatagggaaagctggcacgcctgcaggtaccggtccggaattcccgggtcgacccacgcgtgcgtacggctgcgagaagacgacagaagggtacggctgcgagaagacgacagaagggcattgttggtgttatcacagcgtttaattttccctgtgcagttcttggttggaatgcttgtattgctcttgtctgtggaaactgtgtagtctggaaaggtgctccaactacaccgttaataactatcgcaatgaccaagctagtagctgaagttttagagaaaaacaacttacccggtgccatttttacggccatgtgtggtggtgctgaaattggtgaagcaatagccaaagacacacgcattcccttagtatcctttactggaagctccagggtgggctcaatggtacaacaaacagtgaatgcgagatctgggaaaactttgcttgagttgagtggaaacaatgcaatcatagtcatggacgatgctgatatacagttagcggct

SEQ ID NO: 118083 - DNA, 525 bp, Arabidopsis thaliana columbia
  unsure (1)..(525): unsure at all n locations
tccatcacgcgtacctaagcttggatcctctagagcggccgcttttttttggttattggtgttnaaaaaaaacttccctaaaactgaaaacttttcattatcacaatcaaactattccagattacatacacattatgttcaaagcatcaatgatccaaacacaacaaaaaaaaactcatacctaaaaacccaattcatatttttctatcagtggtagaaagggcatatcaatcccgcgtggaaaaaaagnaaccaccttcatttttttaattctcccaccatttccacccattttcaggcctccctttaacctccataataaccttttttttctaacacctacaaccacgttaacttcgttcccaatttttttatattttaaacctacctctaatcccccttatttaacaaccaaggtttgattaataatctcaccataagggtctaacactttagaaacacaccctttagaaaaaaaccttagagaagggcaaatcctttcaactcttctaaacaagggggccc

SEQ ID NO: 118084 - DNA, 450 bp, Arabidopsis thaliana columbia
  unsure (1)..(450): unsure at all n locations
gtcgcatgcacgcgtnacgtagcttggatcctctagagcggctgctttttttttgttttggcttttnaaaaaaaagggccacattcctacctccattagatccttacgcaaacacatcttaattcttagatatatgaataggcatacacgtgtattgtcaaaccggtgcaaaaccaaccacaacacaggggccaagacgggattttaatatttttggagttgtggggaaccaacccggggggttttgtataaaaaaaaacccccccatgcggcggtgcggacacgcgccccccgtcgcgacaggcggtcgcggccggcgcaggcggcgccgcggtggcggcgccgtacgggggcgacgccgggggggggagacggcactggactcgggcgccgggaggggcgcaggcttcgtggcgggatcgccgtggatcggactgtgttcgtcggtga

SEQ ID NO: 118085 - DNA, 400 bp, Arabidopsis thaliana columbia
  unsure (1)..(400): unsure at all n locations
gcctgcaggtacaggtccgngattcccgggtctacccacgcgggcgtacgcctgcgagaagacgacagatggggacgacacacaaaaacatcagnaggagcgactcacaagaaggaccaacagaccaccaaaacatttttaacgaagaanaaccaaaacaatcacgtcaataaaagtaacaaaaaaccaaacaaaataccctcaaactttggggggggggaaaaaccacacacaaacacaaaaaacaaaaaaaaccaccccaaacaanngggggcgccaagggcaccacaatatatataattacacccaatatgtacgaaataaatacacagccaagcagaatcacacacagaacaagtacaacatataaacatagatgcaacatatcctaatcttacac

SEQ ID NO: 118086 - DNA, 507 bp, Arabidopsis thaliana columbia
  unsure (1)..(507): unsure at all n locations
cccaaaaggagcagaagccccacgaaaacaccaacccgcgccgcacgccgcccacagagcacccggcgtcgcgaaacagagaaccaaagagcccgacaacacgacagcgcgacggacgcacaagaagaaaaaaagtttcctaattttaggggggtggggcaccaaacacacacgcaccagaccccaaaaaaaacgccccacacacgcctgccagactagagaacaccccgacgcgcaacaaataaaacaagaaatccatacacacaaaccacgccgaatgccanggcgcaacaaacacccaccgcgcaccaaccgcacacagacgaaaaacacgaacatacagccacagcccgcccgacgcgacccacacaaccacctcgcagacagcaagagacaacagaagaaaggctacaacgagccgtattcaaccaagagaacgcaaacagaaatcaaaaccacgcacgaactcgacagagcaccaccacgaacaagaacgacagccacaag

SEQ ID NO: 118087 - DNA, 513 bp, Arabidopsis thaliana columbia
  unsure (1)..(513): unsure at all n locations
ccacgtaagcttgcaaccacaagagcggntgtccacagagggggaaggcggcacaaacaaacaaacaaaacaacaccacacaacacaccccaaccnacaccccaccacccacaccaaaacaacaaaacaccaccacaaacccaccccaaacaacccacaccaccacaccaccccaccccaccccaacaacnctnctccacccaaggggggtggggaacccacaacccgcgcggcggcgcaaaaaaaacccccccacaacacggaacacacaccgcagcccgcgcacccaacgacccacgcgcacagacagccacacgccaaaagcgacggccgcgcaccaagcaagcgagagccgcgaccgcgcgcagcgcaacagaacagcgaccccacgacccgcgcacgagagagcggaagagcgcgggcgggcgggacgcacaaaagaagaaagacaaaggaacaagcccacgcgaacggaaaccagagagcgagagaacaagccaacgccgccgagac

SEQ ID NO: 118088 - DNA, 363 bp, Arabidopsis thaliana columbia
aggtctctacgactcactatagggaaagctggcacgcctgcaggtaccggtccggaattcccgggtcgacccacgcgtccgtacggctgcgagaagacgacagaaggggaacacagagaagttcataacgcatatggatattacttccacatggcgacttccgatggacttgttatgcgtgaagaaggaaaggataggccttttgtattgtcaagagcaatctttcccggtactcaaagatacggagcaatttggactggagataacacagccgaatgggaacaccttagagtctccattccaatgatattgacacttggtcttactggaattacattctctggagctgatattggtgggttt

SEQ ID NO: 118089 - DNA, 502 bp, Arabidopsis thaliana columbia
  unsure (1)..(502): unsure at all n locations
ctgacacgcctgcaggtaccggtccggaattcccgggtcgacccacgcgtgcgcccacgcgtncgtacggctgcgagaagacgacagaaggggaatgttgatgattctgcttttagtgagattagcactgatgaattgagggcttatgagcgggatatgatgcagaaagacgcgggaaaacggcgcggcccacccgcgcttttctatttttagggggggtggcacccccccgaaatctacggagggaaaagaatgccggcgcggccggcgccatcactccggaccgagggaaggcggaatcgtaatgagcaggcgaatcggtcatactaacccagatatgacccgcgaacgccgctcgtggtcggtgctcaccatctcttactacgacgccgacgcgtccccgcgcccgctgcaggacgggggaatgctagcctccgaccgacagcccggcggcgcgccgacccgcgcgcgcctccgccggccttgccgtccccgacaccgg

SEQ ID NO: 118090 - DNA, 480 bp, Arabidopsis thaliana columbia
  unsure (1)..(480): unsure at all n locations
tttgacgtcgcatgccgcgtacgtaagcttggatcctctangagcgccgcgttttttttgtttttttttttttnnnnnnaaanacctaaaaaccccaaaatcaactgtaaagggctcacctcgaacaaagggttgggaattacacatcacattttaccagagatgactagacaacctaaaacgcagttttaccgaataaaaaggagagcattttttttctcggggggggggacccccccccgcggggggcacgcaaaaaaaaaaacgcttcaggtgcagccaggcggcgggcgccgacctgatggactctaacaagtctgcgcgtcatccacaccttcccacaacgacctcaacggtgccggagcgtctcgccatggcgaaatcgaccacggacgggcgcccagcgctagcgcgagccctacatagcacaaagcccgcggatagaaaactggtggcgataccaccgccccgagctgggaa

SEQ ID NO: 118091 - DNA, 509 bp, Arabidopsis thaliana columbia
  unsure (1)..(509): unsure at all n locations
acgactcactatagggaaagctggcacgcctgcaggtaccggtccggaattcccgggtcgacccacgcgtccgtacgggtgtgagaagacgacagaaaggtcagatggagaacatgattactaaagacatggctgaggaagatctcattattcttcgagatgaagtctacaagtacatgattgagggcgatctgaggaggttcaatgctcttgcaatcaataggttgaaggagaggcggagtcaccggggggtaaggcacatccaagggctgccatgtctgngacagagaaccaagaacatctgcccgactcttaaaggcaagaaacttgctattgctgggaagaagaaagtttccaagtaatcatcttgatgatctccttcttcttatcgtatactctgtgtagattgtctagccatctctgattaaatgtgatttgcacacccaaacctttgttcgaactgagccctttccagtttatcttcggctgtttagctattaaaaataaaa

SEQ ID NO: 118092 - DNA, 450 bp, Arabidopsis thaliana columbia
  unsure (1)..(450): unsure at all n locations
aaaaaaaacaaccccccccttataaaacacaaggagggaggcgtttgtaacacgaggggggaggcgggggccaaataaaaaaatcaanctctcccaagagtcgcgaaactttaccagaaacgagaccgcaccgggagccctcgaggacgcgaaccgccgagaggcagcagcgggagaaaaacaggcgcggacaagacaaccggaggaggagggggcacggcaaccgcgccgctttttttttctcagggggggtggtgcccacccaccccacacgcgcgccagcgaaaaaaaagagcccacgcaacgagggcacgagggagcgcgaccaccaccccagacagacccacccccacagagaagcggcaaacagaagacgacagacccaccagccaccgcgcggccccacgagaccgaacgagcgacacagagacagcgcgccccaacggcgcg

SEQ ID NO: 118093 - DNA, 477 bp, Arabidopsis thaliana columbia
  unsure (1)..(477): unsure at all n locations
cgactcanataggggagctggcacgcctgcaggtccggtccggattcccgggtcgaccacgcgtgcgtacgctgcgagaagacgacagaagggtacggctgtgagaagacgacagaagggtacggctgcgagaagacgacagaagggtacggctgtgagaagacgacagaagggtacggctgttagaagacgacagaagggtacggctgcgatttttctattgaggggggggctgcaacaacacgacagtatgctaaaaaaaattactcgccgatagacggtctcatgcttgtcacccgttatttttttcctaattgcagtgttgtttgattgaaaatcagttgtttggtcttttttattttcatttttgtggagtctcctacactcggatcttttttctacgtgctgaccctagtttgtttttgtttagtgtaacagcctgtgcatgcgaacctgcgaggaaagaatctatagtgt

SEQ ID NO: 118094 - DNA, 383 bp, Arabidopsis thaliana columbia
aggagtaaagaattgttttattacaaacaaacataataaaattgacaaatcttgataatccatctctctctcacaccttaaaataaaaaactcataactactactaggcgggtgggagttaaaactccacctctttttcaggggtgatggactactatgggggggcttccaaataaaaaacaaagcctagggtgggagtttaaagcccccccccccaaaaaaaattaaacctcttcaacggcttccacaaaacgcaagcgcttaagcacttaattttctaaagaaccggggtttctttaagggaaccatttaccccccccggtagtttccttttagtcaagggaagaagggctaaccttcttcgctttttaaagcgactcgcc

SEQ ID NO: 118095 - DNA, 472 bp, Arabidopsis thaliana columbia
  unsure (1)..(472): unsure at all n locations
cgtcgcatgcacgcgtacgtaagcttggatcctctagagcggctgcttttttttggggtttgggggtnnnaaanaaagccaaaaagataggttagaaattctcattctttcagtcacaaaatcataatcataacataggcctgtataaagaaaggttacaaatcacaagattaatagtccgctacacagactggaatgagacacttatttttcaactggggggtggggaccgggntcggggtgcactgaaaaaaaaagaacccccgtctttttgttttgggatctctatcctcctaaggcacaaaggataggggtctatcttcacccttaatggggaaactaagaccccaaggtggggctaagaaagagcggatgcgagggtaaggcacgaacggcggcggggagtctccgcggcgaatacagcggagagacgggatggtggggagagcagaaccgcgcgtgcgacgtgaga

SEQ ID NO: 118096 - DNA, 507 bp, Arabidopsis thaliana columbia
  unsure (1)..(507): unsure at all n locations
acgactcacnatagggaaagctggcacgcctgcaggtaccggtccggaattcccgggtcgacccacgcgtccgtacacggctgtgagaaaaaagacgacagaaggacacttctaaagcgcctttctgatttctccgagcagcgaactccatgattgattggttgattaancagttctgctttatatgaacatgggggtgaggaaacggaactcaaagggcgcgttttttattttaggggggggggaaaccaaagccagtgtcgtggggacaaaaaacgccctggtgttgggtggaggcagcatatcccaaatattgagagagataaaatctaggagagtagagacgcgtgacgctccagaacggggaacacgatagatgagaaaacttcgacgggttcctctcggcctctcatgttaacctataacgaacggtagcagaaggggaggtagcgataatactctctgtggtagccgggggagaatagcttcctcagacatctgagcggg

SEQ ID NO: 118097 - DNA, 294 bp, Arabidopsis thaliana columbia
  unsure (1)..(294): unsure at all n locations
aaaaaaaccaacccccgaaagaaaaaaacaagagaaagatgtaganggaggagacaaacccacgcaaaacaaagagagggggcagaggaggggacgcagaccaacacacgaacacacgaggcagcgaagacggcgggcccgacggccgcaaccaaacaaccgcgcgacgcccgacaccgacgtcggccgacgccaccgcgagaacccccgctttttttttttcaaggatgtttggacaacacaacacgagcacgcggaccgcaaaaaaaaacgccacccccaagagaaaaccgc

SEQ ID NO: 118098 - DNA, 524 bp, Arabidopsis thaliana columbia
  unsure (1)..(524): unsure at all n locations
acgactcactattgggaaagctggcacgcctgcaggtaccggtccggaattcccgggtcgacccacgcgtgcgcccacgcgtccgcccacgcgtccgcccacgcgtccgtacggctgcgagaagacgacagaagggtacggctgcgagaagacgacagaaggggaaaaagaacaaaaaaaaaaggtcaaaccaaaacgatggcgtttcatcacaatcatctctcacaagacctctgcttcaatcatttcaccgaccaacaccaacctccacctccgcaaccgcctcctcctcctccgcaacagcaacaacatttccaagaagcaccgcctcctaattggttaaacacagcgcttcttcgttcctcagataacaacaataacttcctcaacctccacacagccaccgctaacaccacaaccgcaagcagttccgattttccttcctccgccgccgccgncgncgttgctaaccagtggctatctcgcccctcctctttcctccaacgaaacaacaacaacaacgc

SEQ ID NO: 118099 - DNA, 524 bp, Arabidopsis thaliana columbia
  unsure (1)..(524): unsure at all n locations
gtcgcatgcaccgcgtacgtagcttgnatcctctagagcggccgctttttttttgttttttcttttnnnaaaaagaatggattttgaattcncatttgtaataattgtattcacattattcatattctncagctacaaggggtctttgtgtgtacatgtcacacaaagacctcctctgcacctcgcctcttcctcgaagagaccgttttttttttaggggatgtggagcccacaccccgggggggccgacaaaaaaaaaaggcccccggggggggtgcgcgccgaccccgcacaactgactatgtgcgccgcgctgcgtcgacccatgccctcgcccacgtcggcacggatctgcgatagcaggcgaccttagacaaaaccggttaagaaagtgtcgcccgcaggcgcgcaaagggcggggtctagctcgctcgtgccagaaaatttgagtgttgtgatcggtacgtgaatgacgggataacagccacattgacagattacgcacgcacgggcgccctcccccc

SEQ ID NO: 118100 - DNA, 297 bp, Arabidopsis thaliana columbia
  unsure (1)..(297): unsure at all n locations
cgtcgcatgcacgcgtacgtaagcttggatcctctagagcggccgcttttttttttttttgtctttnnaaaaaaaaaaanaacaagacctttccattcatcatttaatcccaaaacatcaatcgcggaaccaccatgggattggttttttgtctgataagaaagcaaggagcttctcgcgccgacggacacgggcggagcccgcggccgcgcgagggggcgaccgcgccttctttttttttcggggtattgattggggcccacctcatngcgggtggctcgccaaaaaaaaaaaaaa

SEQ ID NO: 118101 - DNA, 246 bp, Arabidopsis thaliana columbia
  unsure (1)..(246): unsure at all n locations
ctctacgactcanatagggaaaagctgcacgcctgcaggtaccggtccgggattcccgggtctgacccacgcgtccgcgagaagacgacagaaggggacaaaaaaactcaaagtgaccaaaataaccaaaaggagaaatctttagaaaacctttaaaagttcttaaaaatggggaaaggaggaaactatgtgacggnnnnntggttttnnaatntgtaagagaagtttttttttttttgggggggg

SEQ ID NO: 118102 - DNA, 468 bp, Arabidopsis thaliana columbia
gacgtcgcatgcacgcgtacgtaagcttggatcctctagagcggccgctttttttggggtttgcggttttttttttaaaagagaacccacggggagaggaagactaaaatatatacaaacacttacactcttataaatacaaagtataagcggaattttacaactttagagggagctggacaacccaaacacatttatggaaacatgatttttcatccgcgagggaggttaaaatttactgggccccaccaataaaaaaacccaccagaaagagcccctcccggaagaattcccggcaaagttaccttccaaattgccattccgagaattcctcccttataccacggcaccaatccactcacacctcgttctccgttgaaaaagggaatcggtttcatcgagccccggcgtccatagctagggcgaagaccttttcgataccacccatccctcgacctttccgccccc

SEQ ID NO: 118103 - DNA, 420 bp, Arabidopsis thaliana columbia
  unsure (1)..(420): unsure at all n locations
cgtacgtaagcttggatcctctagagcggtcgctttttttgtgtgaaggcggcccaaaaaaaaaaaccaccnaaccgtaaccgacgaacctgttcatcccgccagtcacaagagcggcgtctggtgcaaaatatattcacataatatcttcaacaacaacactacatcgacctcgttagagcgtacagcgccgggcgaaagaacacaccagaacttttttttttttaggggtagtggggccacaccaccccggggggcgcggacgaaaaaaaaaaaaagcccccgcagaacgacgaaaaaaccgagtaaacttatatactaacagatacaaaaacacctaatgcagcatcgcatactacctcagtttcccgcacgacacccgcaacactcaaactgacaacttagacagatcgaccccac

SEQ ID NO: 118104 - DNA, 531 bp, Arabidopsis thaliana columbia
cgactcacttttaggggaggctgcacgcctgcaggtaccggtccgggatcccgggtcgacccacgcgtccgtacggctgcgagaagacgacagaaggggattcagccggcgatcagagttaaacgaacgattaccagttaaagataaagaaaagcaaaagcgtagcaaacgtggatcgtgctgggttaagttgctccttttctcaactatccagaatattttttttttttgggggggggggcccatattaattgttggggacaaaaaaaagagtgttctttactagtgttattccctttttattctttgttttgtgagtttttactttttgtgtatgacgttgttcggtttgtcgtcttttatgtctgttgtttaaggtttttcgtttttctctttcggctatatgtttgttttgtgtgtcgctttgcatgtcctgctttgtcggttttgctgtattgcgttgtcgttagtacaggttactggctgtgattttctcatgtttggtcctcgttcatgcgtcgttgtttccct

SEQ ID NO: 118105 - DNA, 531 bp, Arabidopsis thaliana columbia
  unsure (1)..(531): unsure at all n locations
ctatcgaagagtttgacggcgcatccacgcgtacgtaagcttggatcctctagagcgtttgctttttttggggaaggcgggccaaaaaaaggagaaacacttttctttccatattgatggtcgacatacagaagtctaaaccaaaaaagctcaactaccatataatatatccatcaggaggacattccaaattctgctacataacctgagagggggtttctacttcaagggagtggggncccccttcagaagagcccttttaaaaaataatgtcccccccgcccaatgcaaaagaggaatctccgccttaagccaccaagatccaagagtttcggatgtcctgcttgagtcataccctctaagttttgcgagagagaactcccgtttattggctttaactaaaaacacgccccggtgttaatggcggcctcccgcgaataaaaacataggggagcgtgctctctatttttttcttcgcaaaaaacaacatacacaacggccttggaaaggcttgcctgcgattatgccaca

SEQ ID NO: 118106 - DNA, 408 bp, Arabidopsis thaliana columbia
  unsure (1)..(408): unsure at all n locations
ttttttttatatttaataaccaaataatcccaaatttctttccaaaatttcaccttcttaaaattctttctccctctccccacaaaaaccacaaccctaatttgttttctcccccctgccttctcccccccaaatcaaaaatttttgtaaaaagagggggggtgttccccaaccattgtgnggtttttttattaataaaaaanaaaaacaaaatgttttgnccaaaaccccccacccttttttttttcccttttatccccccaaattccccaacaagtttttttttttcgcccccttaaccaggaccatgttttttaacccaaaaatccccaccttaggaaaccttccccctttttcccttttttaacctttttcccttaaacaaaaaaaagccttttgtcccaaccc

SEQ ID NO: 118107 - DNA, 398 bp, Arabidopsis thaliana columbia
  unsure (1)..(398): unsure at all n locations
ataaccgggccatgtgagcttaaatttatttttctctctaagatttaatctggtttttctttctaaaaactgggaataaatttaaactgggagaaatttttttcaagggggggggaaaacccattctgggcgggttaaaaaaaaaaaaaacccctgccctttaaatttaaaccacccccgttaaaaggcttccggcctttttcccgatggggggggaggcaaattaaaagacctacaatctaagccgggcggggatctcctttttcccctcccccgccttngaaaaccacccgagccgggtggcccaattaaaaggtccggttttgggcccccaccaaggcccttttttcgtcgggaaccttccccccccgcggggcaatcctcaacccccgcctgcc

SEQ ID NO: 118108 - DNA, 487 bp, Arabidopsis thaliana columbia
  unsure (1)..(487): unsure at all n locations
acgcctgcagtaccggtccggattcccgggtcgacccacgcgtgcgtacggctgcgagaagacgacagaaggtccctaccggtttcgcgcgtagccctagccagagcagcacgctcgactgtgcttctcctccgacgtgagatggttgttgtagagggtgaggggaggtagagcgcgaccaaagaaaggtttctgnttttatggggggggggcaaaaccaacgcctctcttatactaaaaagtctttacgctttctatatttactttaaatatatgctttgctttggaggtattggattggttagggtttgtgactcctggacttatccatcacatattcttaaactaggtgtatggttgatgtggagcgtccgaatatttggtttgtacttctcagcgcacaatcttagcgtgcggggtttattcttgctgttgatagcgggattatgggatgggcggaataagtttttatagttgatttatcgca

SEQ ID NO: 118109 - DNA, 520 bp, Arabidopsis thaliana columbia
acgactcactattagggaaagctggcacgcctgcaggtaccggtccggaattcccgggtcgacccacgcgtgcgtacggctgagaagacgacagaaggggatgcaatgaaacaatgtaaggcggatgtatctactgtttgcttagggttagctgcatctatgggtgcgtttcttcttgcttctggttcaaaagggaaacggtattgtatgcctaactctaaagttatgatccatcagccacttggtactgctggaggcaaagcaacggaaatgagcatacgtataagagaaatgatgtaccacaagattaaacttaacaaaatcttctctagaatcactgggaagcctgaatcagagatcgaaagtgacacagaccgtgataacttcttgaatccatgggaggcgaaagaatatggtttgatcgacgctgtaatcgatgatgggaaaccgggactaatcgctccaattggagatggtactcctcctcctaaaaccaaagtctgggatctttggaaagtcg

SEQ ID NO: 118110 - DNA, 380 bp, Arabidopsis thaliana columbia
  unsure (1)..(380): unsure at all n locations
gtacgtaagcttggatcctctagagcggtttctnnnttggggggaaggcgcgttttttttagatatcatggcccatgaatggtgaaaagtttaagggttcttaattcttacacatccaatacaacctaagacagaaggcccacaatggtttatctttctaacacaagaagggttttttggcacacaataacacgccccttcttatttaaaagggggggttgggnccaacanaccacgaaaacaanttaaaaaaaaaaaagtccctcgcgattcttttcacacaaacggggagtttcccccttttttttgcaacaacggtcactcaccgggggaataaggacaagcggttcccttggcggtgcggccctgtgtttccccca

SEQ ID NO: 118111 - DNA, 392 bp, Arabidopsis thaliana columbia
  unsure (1)..(392): unsure at all n locations
cgtcgcntagcacgcgtacgtagcttggatcctctagagcggcctctttttttttgtttttgctttnaaaaaaaaaaaannggaggaaaagagaagatgaatttatnaaatttggtatctacaggacacccttaaaacgcaccggcaggattttcgttcactaggaacgaccactgtgcgccacggtgacgggccgccgcacgggaacgggagttttcctcnttttgaggaatgtttgagacccaccanatgggggagccttcaaaaaaaaaaaatccccccaggggcggggtgggagcggaggcgcgcgccgactcacaaacaccacacacatgctaccgcgatgggtaacaaataacgagtcgcgtcccgaggaccgtcgcgggagcgac

SEQ ID NO: 118112 - DNA, 501 bp, Arabidopsis thaliana columbia
  unsure (1)..(501): unsure at all n locations
gcgtacgtaagcttggatcctctagagcgggtgctttttttgggtttaagcgggnnnnnnnncacgaaaattatatagatgtatttattgtggtacatacaattaccatgtcaataatctattacaagaagaaactgagctcatgtgtgggggtgaacataagcatgctctcaccaaaatcccttttggcgtcttttatgcgtggcggggggggcnnnnntccacccggggaatttccagaaaaagaaccctgaaggggtaccaggttttcccttatggggagtcgtatttaaaagttgccgtaatcatggggcataggtgtttcctggggaaaattgttatcccttcacaattccacacaaattagaagcgggaacaataagtgtaaaggcgggggtgcctaatgggggggctcctgaaatgaggtgggttgggttattgacgggtatccgaggtgggaactgggtgcgctggggggtaaaggggcggacagccgcgggc

SEQ ID NO: 118113 - DNA, 524 bp, Arabidopsis thaliana columbia
agctctctacgactcatattgggaaagctggcacgcctgcaggtaccggtccggaattcccgggtcgacccacgcgtgcgtccacgcgtccgtacagctgagaagacgaccgaagggcagagctagaagacgagtgctgaggagaaggacgaccgctacatcaatatgcctcacgactctggaagctcgacttcagatcattcacctacatttctagatagctccggatgctccaacgatgcggctttacccacagacgccattcagttactgagttcatcattgaacaacctcatatatagctcaactcgctagtgaatcttatcaggcttgtgtgagcttcacattgggtgactgtgcatgggatatgtgccacggtgagagttctatctgcacacaagcggttaaggagccttcattcatatattacactttttgtcgtctaaatcttgatacttcaggatttccttgatctgaatacggattctctcgactttttggattatattgctcagaatggctgg

SEQ ID NO: 118114 - DNA, 515 bp, Arabidopsis thaliana columbia
  unsure (1)..(515): unsure at all n locations
gtacgtaaagcttggatccctctagagcggcctgctttttttgggtaggcgggnnnnaaaaaaagatggttcaaatacattttgaaaaatatgttacatttgttttcacactcctttcctatgcaacaaatttctgacaacaagtatccttgtgaatattttgacaacaaatagaacaaaacctcatcccacataattttaaatgggaggcggggaatnnacccacaggcccgaccaaaaaaaaaaacccacaaaaccaactccgaaggtccaacctcctctttttaagtaacggcccgtacattccacacccaaaaacctcccaattttccctttttcccaataacccaaaggggaggaattcacggcgtcttcccgaccctcccaacatcctttcgcctagccacaccgttcacgcccacgagcctctccatatgcgtttcattttcgtattcgaccagcgcacgcccctctgtccgccgacagcgcgcgatctgtcgagcgcgcgcgcgact

SEQ ID NO: 118115 - DNA, 442 bp, Arabidopsis thaliana columbia
  unsure (1)..(442): unsure at all n locations
cagctctcacnnnnnnnnnnnnnnnnnnnnnnnnnnnnnnnnnnnnnnnnnnnnnnnnnnnnnnnnnnnnnnnnccacgcgtccgcccacgcgtccgtacggctgcaagacgacagaaggggacccatttcttggcttacaacaacaaatcttaaacgttttactttgtgctgcactactcaacctcaatggccgcctcaacaatggctctctcctcccctgccttcgccggtaaggccgtcaagctttcccccgcggcatctgaagtccttggaagcggccgtgtgacaatgaggaagactgttgccaagccaaagggcccatcaggcagcccatggtccggatctgaccgtgtcaagtatttgggtccattctctggcgaatcaccgagctaccttaccggagaggtccccggagactaccggatggacaaccgccggac

SEQ ID NO: 118116 - DNA, 519 bp, Arabidopsis thaliana columbia
acgactcactatagggaaagctggcacgcctgcaggtaccggtccggaattcccgggtcgacccacgcgtgcgtacggctgcgagaagacgacagaagggtacggctgcgagaagacgacagaagggtacggctgcgagaagacgacagaagggtacggctgctagaagacgacagaagggggtgtccggtgcgcccccggcggcccttgaaaatccggaggaccgagtgccgctggcgcccggtcgtactcataaccgcatcaggtctccaaggtgaacagcctctggtcgatggaacaatgtaggcaagggaagtcggcaaaatggatccgtaacttcgggaaaaggattggctctgagggctgggctcggaggtcccagttccgaacccgtcggctgtcagcggactgctcgagctgcttccgcggtgagagcgggtcgccgcgtgccggccgggggacggactgagaacggctctctcgggagctttccccgggcgtgaaacattcagctcagat

SEQ ID NO: 118117 - DNA, 524 bp, Arabidopsis thaliana columbia
  unsure (1)..(524): unsure at all n locations
ttttttttgattattcttttttatttaaaaataatntncccccccncaaccccaaaacccacaaccccccccccaccccctttcttttttcttctctcctccctattcctctaacaaccacatctttatattccaccaaccacacaatatctcccccccaccctcccccccaaaacacacccaccttccttccttttggggggggtgttgcaacacacccttgggggggcgccccacaaaacacaaaacacccccaacaccgccccccctctcccccgcccccccccctcgtctccccccttctcacagtaccctaccaacactactctacccataaccgctctccattctccctcgtctcctcatctatttcgtcacgctccctgcctcgtcacaccctctcccctattcgcagtacatacccctacacacatcatcccccaaccatagacttccttctttctcccccttaccagtccaaccacacctaccccacatacctatacccaccactagccacccac

SEQ ID NO: 118118 - DNA, 346 bp, Arabidopsis thaliana columbia
  unsure (1)..(346): unsure at all n locations
gcctgcagtaccggtccgngatcccgggttgacccacgcgtgcgtacggctgcgagaagacgacagaagggtctgttctatattcactcaccctctatctctttctatcgttctccgctggcgccgcaactatactgtatgttttcagtcttgattgtacatgaagcctggtggtttatatagacgcccacccacccacaccctttttttttttncgggggggggttagggccgacgccgcgcgtcgattcccacaaacattaatgtccacgtattattgcagactagctcccttgtcatcgttctacttaatgtcttatcgacgcatgttgttatgtcttgtctt

SEQ ID NO: 118119 - DNA, 518 bp, Arabidopsis thaliana columbia
  unsure (1)..(518): unsure at all n locations
cgcctgcaggtaccggtccgngatcccgggtctgacccacgcgtccgtacggctngcgagagacgacagaagggtgatagtgatggctccatcagatgaagcagatctctttaacatggttgcaactgctgttgcgattgatgatcgtccttcttgtttccgttaccctagaggtaaccggattgtagnnntttttttcccttgggggggggggncccccacccnacgnccacccaacaaaaaaaaacccccccccancccccgcccacaaacaacccccccaccaacacacacacaccaccaacaacaaaaacacacccaccaccaccccccacacccacccgccaccaccaccaccaccccagccgcgggggccccgcgccgccaggccacggcgcggggggcgccgccgcccgccccccgcccgccacccgcgcggcggcgggaccgacaacgcgcgcgcgccccgccggcacgcgcgccccccccgcgcgcagccgccccccccccgcccccgc

SEQ ID NO: 118120 - DNA, 441 bp, Arabidopsis thaliana columbia
ctgcacgcctgcaggtccggtccggattcccggtttgaccacgcgggggacacgcgtccaaaaaaacaaaaaagttcacggatgtggcaccaccaaacaatagacatattagataaagtaatggcgaaaatggatttttaaagaagagataattaacctttagacggataggaatggacggaggcgcgaaatttgctcattttgggggggggggaacaacaacataccccacaaaaaaaaaaaaaagcccacaataatttattacgaataataccctaactatgatcaacaaatagtggaaataaaattatagagtgacgtcaccacgaccttgaatcgctgagtatattaaagacagaagcggctcagcagagtgtggaatatttagttatttacaatttgtaacagtagagaccctagttgattataaacatactgata

SEQ ID NO: 118121 - DNA, 424 bp, Arabidopsis thaliana columbia
  unsure (1)..(424): unsure at all n locations
atgattcttccnnnnnnnnnnnnnnnnnnnnnnnnnnnnnnnnnnnnnnnnnnnnnnnnnnnnnnnnnnnnnnnnnnnnnnnccacgcgtgcgtacgaacgacagaagggatttgtaatatgtatgggaagttttgtaaccaagtgggtgaaggaattgcgagcgctttgtttgcttgcattggaatggttttgatctcttgcatttcggctttcggtgtctttcgtttgtacggcggaagcaaatctaggcgggggtcacggtagtgaaggcctgtantggtcttggaccaaccttgtttgtggaacctctattaaatgttgtggtgtgtgtcctcttatctctcagtgtgtataccgctattacttactgtcatgatctcagctgatctataaacataatcatggcnnanaaaaaaaaaaaa

SEQ ID NO: 118122 - DNA, 428 bp, Arabidopsis thaliana columbia
tcgcaaaaaaaaacccacattgcaaagaccaagaaattttcggagggggaaagttccccaaaaaaaaagcgtttctgccatcgttcttatttctccacatccaagcacacatcgtccgtttcccttaaagcgatatctacaacaacaaccccgccgacgtgaacgcaaggaaaacctttttttccgggggttgaaaacaccttcatcggcgcaaaaaaaaatacaccacgatccgacacatcctccggcgggtatccactactcgacaatgtccaaaatctactctacacaattgcagtaggtggcttccgatcatacgtcaggcatgtacttttcccgccctcgttccgcatctgtctatacaaagtaataaacatatgtatttattaatcggtcttaatcctaactcattgtgtactttattaatc

SEQ ID NO: 118123 - DNA, 454 bp, Arabidopsis thaliana columbia
  unsure (1)..(454): unsure at all n locations
gcaggtacaggtccggaattcccgggttgacccacgcatgcaagcgcgggtgaaaaaaaaaannnnnnncnccccccccccccctttataattttttttaataattaaattcaacaaaatcctaacttcttatattatagtaatataatacataataagtgataacaaataacaaaaaaccacacaaaaacaaaatttctcttnttaggagttgatggggacccccaaacggggggggtcaaaaaaaaaaaaaaacccctctactgtgaaaaaataagtagaatacaaagtacgtggaagacgtaggtgaatggaaaagatatgattgataaaaagaatgaagaatgcaacaagcgtaatgataccgaaagacttccaaaaacgataaaataatattttttattgttacacaatacgttgcgtgaacaagttttgaatagtactggttagagtt

SEQ ID NO: 118124 - DNA, 387 bp, Arabidopsis thaliana columbia
  unsure (1)..(387): unsure at all n locations
gcacgcgnacgtaagctgggatcctctagagttgccgggggggggaaagcctgacaagagaggagcgaggggggcccagagctaagcatccccatccccggcgacaatcgagggctagggagtgcgagccgggcgcttcggcgccgaagctaaaacgagagagaaggggtaccacctgaaaacaacccaacacaatcttttttttgccggggggggaagcatcgcagggcgaggagaacaacagcgcaaaccctcggcaatgcggccagagatccgcgacgagaaaaaaaagaatactcaaacatccgagataattcggcccaagaaccacgactcgcggaggcgaaaacgagggagaaggagccgaagagacgcgcaccagggaaa

SEQ ID NO: 118125 - DNA, 509 bp, Arabidopsis thaliana columbia
actatagaagatctatgacgtcacatgcacgcgtacgtaagcttggatcctctagagcggccgcttttgggtttttcttttttttttttttttttgtcgagccacctcctaggcattcccattctagtgaatatagaaggttttggacttttgatgaacaaattatccgaaaacgttagtccaagcatgtattttctctaaataataaaaaaaagcattttttttccaaacatatctatttaagcatcgttttctaagtgtcgaatttgtcaattttcaaaggagtgatgtcatcagcaactttgaaccctccaaccactcgggcaaagaacaccatctgttgctcaagtgtgtatttgatgttttccgccttgcgaaaaccgggttgttctccttcgtactcaacaagagcaacaggcagaccttttttttttaatgcttcatagattttacgtgattgatctggagttacaaccttgctttctagtccttggaaaaggatgatggga

SEQ ID NO: 118126 - DNA, 491 bp, Arabidopsis thaliana columbia
  unsure (1)..(491): unsure at all n locations
gacgtaacatgcacgcgtacgtaagcttggatcctctagagctgccgcttttttttttttctttttttttttttttntgggatcacacaaaaaaaggagaccagttcattattgatctgtttgaggaaatgatatccgcaagaaagtgtaaattgggcgtcaaccacaaaacaattaacaaaccggcttttggtatatataattagattagggagctaaagctttaaccgctttctcagctgcatcatccaaatcatcagctgttatgagtttcattccactttccttgaggattttctttccctgctcaacattcgttccttctagacgaaccaccactggcactttcaatgcgacctcttttgcagcgtttacgatttcactagcaattccatcacatttcattatcccaccaaatatgtccaccaagattgctttcacttattcgtccgatgtcagtattttaaacgcttcccccacctgttgctaaa

SEQ ID NO: 118127 - DNA, 473 bp, Arabidopsis thaliana columbia
cactatagaagatctatgacgtcacatgcacgcgtacgtaagcttggatcctctagagctgccgcccttgggtttcctttttttttttttttttctctctctttaaaattttttacaattacagtctatcctttctgttcttttaaaaggatggggaaaacccctcctcacactttaaaaaagtttttttttaccactaaaaaagaaattttttaatttttttatacaaataacaaaaaccggtcgatttctcacgattttaaaaagggagggcgttttggcggtatttgtgggaaaaaaataagcaatacactacaactcaggcattagtacttagttcttatgaaagaaaatgcgaaaattaatattagtagtaaaaaaatgccaactatttacaaaaatagatgaattgcctactttataaagagaaagacactctagtgtgttcatgggaaagatgaggagaccgcgct

SEQ ID NO: 118128 - DNA, 533 bp, Arabidopsis thaliana columbia
tcggaccatagtatcgccggctctatacgactcattatagggaaagctggtacgcctgcaggtaccggtccggaattccctggtcgacccaggcgtccgccaaactccaattttttttgtttctctcaataatattctgcgttcatactagtttcgctcgttccaatacatactaatggataacacaaaccgtcttcgccgttcttcactgtcataaacaacccatgtacactcatagctctcatgatatgagtgggactgaaatggagagtttatcaatatgaccgaacaggaagaagatctcatctttccaatgaacagacttactgtcaacaggtgggcatatcatataaaggaaaagtggttgggactttatgcgcaaaggagcatccatagattactggcttatgaccacattgcaaatttatatcccaccaatgacggcagaagtcactctctttcaaaaattttatggaagcagcctggtttcgcattactcaaccttaataaactcttccgtgtgcttgtcgccc

SEQ ID NO: 118129 - DNA, 347 bp, Arabidopsis thaliana columbia
cggcgacgcaaggagcaaggagagacgagccgagaggcggcgtatttatttgggcgacgggggcggagagagccagcggcgcagcgaggcgagaggcggcgggcaacgaccgcccagcgaccgcgcccgcgcgaaagcggaggagggcgaggggagccgcggagcccgagacagcggagggccctcgggcgcggagagcggcaggcaagcgcggcggcggaagagacaggagagacgcagcacccggcagggcgcgcgcgggcgggcgacgcgcgggccgtggtagcccgggggcgctgtagaagaagagggaggcaccgagaagactagcgcgaacgggaacagag

SEQ ID NO: 118130 - DNA, 353 bp, Arabidopsis thaliana columbia
gcgccaacgcacaagccacttcaagggcgaggggggaaaggataaggggaacaggggggggagatttcgggggaaaaaacggacgacagaacggggagcaaaagcgacagttttcaggggcaggcgaaaacccgccagacagacgcgacaaacgatgaagcaaaggccaaggcaagcggcgacaggagagagagcgggagagacaggaagataagacggacagacggggagagaagctggaagtgaggatcgtaacaaaccaatcacagagagaacaagcaaatgaagagataggaagcaagacatcacccatagtataggacgagcacgggcgaggcaacgagcaacgagag

SEQ ID NO: 118131 - DNA, 549 bp, Arabidopsis thaliana columbia
ctgcctgcacacccctaacgcacctcccgtgttcacccgcttttatatgggtcgcacctatagaagatcttgacgtcgcatgcacgcgtacgtaagcttggatcctatagagcggccgccctttttgtttttttctttttttttttttttttcttttttccgagagaaaaacgagttttttgcttcttgaaaaaattcaatgtttcgctattttccaattaaacaagctttttttctgttttcacccttcccaagctaattcgtgaatctatatcacatgaaaccgggctccctttcctgcaacagactttggggctgaaggcccatgcgactcttttccctgggtcggccaatgtgtccccagggttttttttttgtcctttcccattgtccatggtttgtacttacattccctcattttagaacttggtccttttttcttgcctcgccgtcttcccttgccactttgcgaaggcctcagtggggttaccctaacctcatgccccccgtctcgccttccgtttagttgggggtttaagttttctctat

SEQ ID NO: 118132 - DNA, 545 bp, Arabidopsis thaliana columbia
tgaaaaaaaatatattaaaaattgtatcgaaaacacaactgtattctccagctccaagacgactcactaatagggaaagctggtacgcctgccggtaccggtacggaattactgggtcgacccacgcgtccgcaacaaatcttaaacgttttactttgtgctgcactactcaaccttaatggccgcctcaacaaaggctatatcctcccctgccttttacggtaaggccgtcaagctttcccccgagagatctgaagtcctttgtaagcggtcctgtgacagtgaggaacactgtttccaagccaaagggcccatcaagcagcccatgttacgaatctgaccgagaaaagtacttcgggcccttctctggacaatgaccagcctacctaaccgaagagttctctgcacactcggaacggaacacctacttacttgtaattgatcccctagacattctcaaagaccgtgacctaaaagatagtcagagtagaaggagcatgcaccgaatctctaaacagtagaacattcagatctaatcattaaac

SEQ ID NO: 118133 - DNA, 265 bp, Arabidopsis thaliana columbia
gcggggggcccgacggccagagtcaatgagtagtgtcgacggtctgccgggtctagagagagcgcaagcaagaaagaggacacaagacaatagtccagagcgtgatctacgctgccacaacgattgccggagtgcgcgtcgggatgcagccaggaccgagaggctggccgggtgagagttgagactcggtagacgttatataaaaacggacgataaggccgtctgaagatcgctgcggttttttactctactcgcatgggaccgc

SEQ ID NO: 118134 - DNA, 491 bp, Arabidopsis thaliana columbia
gaaactgcacgcgaacgtaagcttggatcctctagagttgccgccctggggaggacccgctcttatctgtagaagccgtacaaccccagtcaaaatggacaaaccatccgggagctgcgcgtggggcgcggagcgagcaagaaaggcgctgcgccttcatataccgacccgcctgacccaaccggaataagacccacacgggggctttttttttgcggggggcgccccatacacacaccccgagaacgcaaagcgggcgtccgcgggaggccgcgggcgtcaccgcacgtggtaggggcgccgcacgaccgtaggaggcgaaatcggggagtccccccgccggacggtggggtagctacaaccgagcgggacaacgagcacggagaacgcgccgccccccccctgcacccgcccacgcgcagagtgagagcagataggctagacagaggaggcgcaccgcgcccggccgactcgtgtagtgcctccaccca

SEQ ID NO: 118135 - DNA, 518 bp, Arabidopsis thaliana columbia
  unsure (1)..(518): unsure at all n locations
ctgcacgcgtacgtaagcttggatcctctagagttgncgcccttgggtaatcctctttctatacttgttgtggggtggtttggattgacgggcccccatcgcctggtggcgaaactatccttaaggaaaaacaaacatttgagcggacctttaaataattcgggccgcgtcaaagtcgacctcacccatagaggggaggtttttttttttcgagggggggcgaggaactttaaaacagacacctttctgtgtggggggcccacatattctgccctaaacaaaccgtcagggaaaagaggttggggttgcatggatcaggggtgggaggggattaggtgctcgactgggttgactcggggcaggcaggggggggcaaggggttcggggggttcaaacacctctcgaccataactcattacagggggagggtgcctgtttactcatctccgcacttccctctttccctaaatacgagtaataagaaacttcctttccagccaccacggtgtggctcgatt

SEQ ID NO: 118136 - DNA, 576 bp, Arabidopsis thaliana columbia
  unsure (1)..(576): unsure at all n locations
cgggggaggggagaggcggattttgaagggggcggggngaagaacccgaggagaggggaggaagcgagaacaagcagcaaggaggccggagcgaggaggcaggagggacaaggggagaaggagcgaagagaggaagagcgaaaaagaacgaggaagagaaacggctgaatgagcagacgccggagggcgggaagcaggaggagaatagaacagcgagcaaacaaaccgagaggggtatattttaaagaggaggagggcgggaacgggggcgggggtaaaagcgcagacaagacaagagccgtgaaaggggaggaagaggagaggagaggaaagcagcgcaaaccgaggccacgaaagcaagcaggaaagagcggggggagatggtgaagggcagggagaggagagaagagaaaagagccgacaggacaaccgcgcaagaagagaaagatggcgaaaccgaggcagacattaaggtcggccagggcacgggagggccgagaggagatgaaagcgggatagcaggcgatgctacacacagaaaggaggagaggagaggcggggcacagacgaagagcg

SEQ ID NO: 118137 - DNA, 528 bp, Arabidopsis thaliana columbia
  unsure (1)..(528): unsure at all n locations
annnnnnnnnnnnnnnnnnnnnnnnnnnnnnnnnnnnnnnnnnnnnnnnnnnnnnnnnnnnnnnnnnnnnnnnnnctttgtttttttttttttttttttttttttttttttttttttttttttttttttttttttttttttttttttttttttgggaaaacaatggcataaactaattttttttttttattgccaacggtccatgaacttttaaacaacataggtcctaaaaacccgggggccaaattttacatttccaaaccaaacccctttcttatttttccaaatacccccccccccctttttttcacccccgggcccttttttcccttttttaaaaggccttagggtttttttccttaataaaattaattggttaattacccaaaattggggggtgggttaattttttaataacccttaaattaaaaaaaccttaaaacaaccccttggccttttccttgggcatagcctttccctttcccttgggcagggcctttcccatgggggggcttttttcataatttt

SEQ ID NO: 118138 - DNA, 526 bp, Arabidopsis thaliana columbia
  unsure (1)..(526): unsure at all n locations
annnnnnnnnnnnnnnnnnnnnnnnnnnnnnnnnnnnnnnnnnnnnnnnnnnnnnnnnnnnnnnnnnnnnnnnnnctttgttttttttttttttttttttttttttttttttttttttttttttttttttttttttttttttttttttttttcccacaaaaacgttttttttttttgatgggaacgagccgttggaaataaacttgaacccctggtttcacccttttgagttggttaaatacaaaaagatttggaaaattttgattgaaatcttttgggggggccacccaaaaaagggggccccgtttttttttgttctgttggaggaaatgatttccgaaaaaaagggtaaatggggggtcacccacaaaacatttaacaaaccggttttgggtttttatggagagattggggggctaaggctttaaccgttttttaaggggttaatcaaaataataagggtggttgagttccatcccattttcttgggggattttttttcctggaaaaaattggttctttaaaa

SEQ ID NO: 118139 - DNA, 338 bp, Arabidopsis thaliana columbia
tttcacacgggcgccaaccggcgagcccaaacttcagtgtcgcaaacactcaaaaagttgtgcaggcgtacggaacatcctcttgtaacaataagttgcgcttacacccctgggccgttatcaaatcgctcaaacccagagcggagtggacaaaacccgacgacgctccataccaaagcggtgcagtggatgaagagagtaaggatgtgtaattaagaggtaaaatagaggccccaggccccggcgagccttgttttccagaggagcgtgtgatcgcggagttaaatgaagaaatagataggcaggccgtacgaaacgacacggagaagcataagaca

SEQ ID NO: 118140 - DNA, 553 bp, Arabidopsis thaliana columbia
ggttgacggaagtacgggggcggggcggggcgggcgcgataatatttgggactacctatagaagatgcttgacgtcgcatgcacgcgtacgtaagcttggatcctctagagcggccgcccttggggtttttttttttttttttttttttttttttttttttttttgttttttttttttttttaaaaaaaaaaatttgctttttttgggctaataaactagtgattaaaaactaaacaaaaaaggttgggggaatatattttcccctggaaaggttttttttaaggggccaaaaaaaaacccaatttttgctgggggggggcctgaccgagcccaaaaactgttttttttaccaaaaacaagtttggtttcgaatcccaggcggttccaacccaagtagctttttttcccggtgtcggggccccggtgtccgagggggggtgtcttgtcccgtccccgggagacccccatgcggttttttttccctttccggggatacccagggggcgtccccctgcttaacgcccccttctaggggggggagggaccccaccc

SEQ ID NO: 118141 - DNA, 503 bp, Arabidopsis thaliana columbia
tatacgactcatttatagggaaagctggtacgcctgcaggtaccggtccggaattcccgtgtcgacccaggcgtccgctccagatgcttctcaattgagccaaatactgcaaaaccccgctatgtcgcagatgatgcaaagcgtactttccaatccacagtacatgaatcagcttatgagtcttaacccacaactccgaagcatgctagatatgaatcctcagttgagggaaatgatgcagaaccctgatttccttcgccagtttagctctcccgagatgatgcagcacatgatgtctctacaacaatcacttttctctcagaataggaacacggctggccaggatcctacgcaaactggtgctgcgacagggacagccaataacggaggactagatttattgatgaatatgtttggcagccttggtgctggcggcctaagtggcacaaaccaacccaatgttcctcctgaagagcgatttgcgactcatttgcaacagttgc

SEQ ID NO: 118142 - DNA, 482 bp, Arabidopsis thaliana columbia
  unsure (1)..(482): unsure at all n locations
atgacgtcgcatgcacgcgtacgtaagcttggatcctctagagtggccgcccttgggttttttttttttttttttttttttttttttttttttttttttttttttttttttttnaggcaaaacagaaacaatttttttcgggcaaaaaaagtttaaaacaggaaattgattcccgcaaaattttgttaatcagagagagagattttttggaagagggtcaaagtaaaaaaaaaaacttgaacaaaagttttttataaatgatcattgggggaaagggaagccaagagatcacttggacttccacttttggtgccttcacttccctgggaagaggggtgatttacgtttttcaacacatttaaggcctttgaaactttggcatttaaagcctttggggactcgagcagatgcaaaacctgggtttggtctctttccagagacttcccactccttttggcagggggctttttttttttttggtc

SEQ ID NO: 118143 - DNA, 490 bp, Arabidopsis thaliana columbia
gtacgtaagcttggatcctctagagctgtcgccctttttttttttttttgaggaaaaaaaaataaaattatccattgttaataaaatggaacaagattcatggccataccattggctctacatcagggaaatattcattataaaaccattacgccgaatgaaaagtattcaagttttggagatacttttttttttagaatcagccacccctagcttttcttctagctgggtggggaagcaaatcaacatcgacttcatctttaggaaactgcacggaccttaccacagatcctcttgatgaaaaaactttttcacttaaaagcatgttgaggggactttgttcctgggcaaaaaaccctaaggggtcttcaagccttgattattcatcatactggttcaacctgagaggagaaagtctctctttatgggctaaaacaatttcttcaggttaaacccggcactcttttgttccaacccaaactcttataag

SEQ ID NO: 118144 - DNA, 421 bp, Arabidopsis thaliana columbia
cggacgccttggggaaaacctttttcagccttcttttggtagaaattgcgagcaggaggtagaaaatcagccaggaaaacaaaaaattgtggggttctcttatcttaacttccaagggatttggggtgggacaagcaagatgacggggtgagctttttttatgatttaggccataagaggaaactcttcacttcaagtggatcagaagtctggaaaaatcaaggcttggagaacactaagggttgggttgaccagggacaaggtaccctcgacatggcttttgaggagagaaaaactgttttcatcaaaagagatcttggtgggtaagggtaacgccgcgagttaacctaaaagaaaggaaggccgaaggctggaattggctttcaccggacgccagcttagaaaaaggaagcaaaggggg

SEQ ID NO: 118145 - DNA, 544 bp, Arabidopsis thaliana columbia
  unsure (1)..(544): unsure at all n locations
gacgacgcccttgccttaccccgccagcccgtagtatcgccgnnnnnnnnnnnnnnnnnnnnnnnnnnnnnnnnnnnnnnnnnnnnnnnnnnnnnnnnnnnnnnnnnnnnccaggcgtccgcccacgcgtccgagaaaacttcgtctctcttctctgcttcgccctctcatttcctgtgagataaaggcggagtctctctccaggtatcttgctcatccatcgatccttagagttcaaaatggctgatcaagttgagcaccccactattgcgcagaaagctgccgggcagttcatgcgttcaagcgtttccaaggacgttcaagcgggcgaccagaggccttctatgtatcaaagcacatgcaacctacggaaactactccactgctggatcgcaatcccctacgacatcccgcactggcgccatcaactgcttcgccccgcgtctctccacgtccccacgcgcgaccgcctctcactaactcccgccatggactctctgacagcccggagttactgcatgccgtctcccagactgctggcagc

SEQ ID NO: 118146 - DNA, 479 bp, Arabidopsis thaliana columbia
  unsure (1)..(479): unsure at all n locations
tgacggtcacatgcacgcgtacgtaagctgggatcctctagagctgccgncctttgttttttttttttttagtagcagaaatttaattaatattgatacggaaaagtgtaccagcgctcatcgttcatataaagacatgcgaatcgaacgtaatacgattgaggataacgatcccggatccaaaggggaggagagggtcgatttttttttctacaacgcttatggtaagtggtccaacaggctacatccacgcgcgaggtatcgagcttgggaggggctgataaccaacgaggacataggcaacgacttgaacttggattccggaagcgatgctactggaagacatgtatgataacaatgtaaggttctgtcacgaacggccaacgagtgtctaggaatagtacacgcttcaagctagtaccaacagaacggtttaacttgtctgaacctggtagcgatctacgcactgaggggctgtg

SEQ ID NO: 118147 - DNA, 502 bp, Arabidopsis thaliana columbia
cgactcatatagggaaagctggtacgcctgcaggtaccggtccggaattccctggtcgacccacgcgtccgcccacgcgtgcggcaacgcggatattccagactaaccctatgaataattcgatctttttgtcgagcgatcggaatccttgtgatttacgctggagacgcggtacatgggcacactacttacattgatgcaccattttcccttcaatgccggacttggtgccactagggatcctcagacttgacaaaaagagtggggctatggccgggcaggatgcaagggcaacaggagtcgctcatgctcttgcaccttgtgtggcggactgcacagatcttagatggcgaaggggtgacgagagctatctagaggaccctgcagttgagaatatgcatgaccccaagattcatcgatggattacaaggaattgctcgttacctcgatgatccgaatattaaagtggttggttgcgccaacattatgcagaggccggagg

SEQ ID NO: 118148 - DNA, 438 bp, Arabidopsis thaliana columbia
aagtttatggggtaacctgccgcgtacgtaagcttggatcctctagagtttccgccctttcgtaatcccacaaggtaataatgtgttcttcgaagaagaagcgagtggcatgaataagtcacacacgccactgtatgggaatgaccgccgcgaatgtgtccgacgacgagagaggaaagatcccagcctctaaaaggcaactgggggatgaaaagcgttttctttttaccgggggttctcgtatggggggatcacctggatcagagtagagctgtgacaacaaaaagaaacatctgcgtttttcggtagaaacctgcgggtgattgggagcgggccagcgacacagccactcccttcagtaacggagcaaagcacccctggaccactcatttatatgttcatgccgctaccctacacaagaccggcgagagagatgtg

SEQ ID NO: 118149 - DNA, 342 bp, Arabidopsis thaliana columbia
atacgactcatatagggaaagacggtacgcctgcaggtaccggtccggaattcccgtttacgacccacgcgtacgccctaatctactctctcttctctatatctgtacactttgagaaatggctacttagaactgtgctcggcgtcgacgatcactaccataaccgattcttgactccggttaattccgagcggttaagagacagagcaaaaccgcacgctagtcttttttttaccgcggggcgcgcccgcccgcgcgcaccataacaggaactcggggtggaattgacgtcgaaatcgatcttgattcgcagaagccgccaggtcggataacgaaaagctc

SEQ ID NO: 118150 - DNA, 505 bp, Arabidopsis thaliana columbia
  unsure (1)..(505): unsure at all n locations
ctatagnagagttatgacgtcgcatgcaccgcgtacgtagcttggatcctctagagcgggccgcccttgttttttttttttttttttttttttttttttttttaaacggaaacatacgggtctataatttatttatgtgacaaaaacgggacaaggctggactttgattatatcccgggaacaaaatttagcaaggtttaatgggttatgaaccccattttccaaatttgacccactttgggggtgtggggcaataaaattttttttttatcgcccttctattccttgggaaggaagaacttttcttgatttggcgcccaaggcgagtttatttgaaaaaaaagatattgttttgggggagggatgtctttggcttaggatgaaaaaggggaggggctggggggggggttcttttccgaccggggtggaccaaaataagggggttttggtggattcctcccccagggggcgaaaaatgttagggtgggacaatccccctctccga

SEQ ID NO: 118151 - DNA, 519 bp, Arabidopsis thaliana columbia
  unsure (1)..(519): unsure at all n locations
ttaggtccactatagaagagtcttgacgtcgcatgcacgcgtacgtaagcttggatcctctagagcggccgccctntgttttttttttttttttttttttttttttttttttttaaaccaaattgttctttaacgatttaaaccaaaatgtgtttaaacgatcaacccctaagtggtataaaaagaaaacacataactgtgacactttgaaaaagaaaataattgttgctttgaccataaacttttaggtttattacgcccatcttttttggctgagattcttacctctgttcaaacagaagtgatcgctcaggctacgtatgaaggcgggtttagcctttgacttaaaggggggttatgccaattgcaccacatgcgattttcctgggtgtgttgccagggtttaaaataacctcttggcccccctttccgaggtattctttagcttcaggaaccaaaagggcttttacaagaacatagttggcccctttcgggggtttctggctggccctcttttgt

SEQ ID NO: 118152 - DNA, 565 bp, Arabidopsis thaliana columbia
ctatagaagagttatgacgtcaactgcacgcgtacgtaagcttggatcctctagagcggtcgccctttttttttttcctttttttttttttttttttttgagttcccaacgacattactggaaaaatcaagatcaaggatgtaggaagacaattgcctttttgttctaagatgatcagaaaccgattcacaattatcttgttcaacgaaataaacggtttttttggagggaaacaaacccaactttttttctaccggacaacattcttctcttaggaggacaattcttgggatttctccgaagttttaaagcggcagtgcttttctttaccggatggtaaagagttgtgagttattctccaaggtcgcactttattatctattcttcaataaagcttaggttttgtgcaaaaataatgagtcccctgaaacaaaactttgcctaaaaatatggtgggcattttcttgaggcaatcaaagtggagtgtagcgggggctgccactgtgggagatctatagggttgacaagcctttttccctttggctgtgtgtcgaccttttggcaa

SEQ ID NO: 118153 - DNA, 548 bp, Arabidopsis thaliana columbia
aaggagaggagaggggtggcctgccaggtccatacgactcacttagggaagaacggtacgcctgcaggtaccggtccggaattcccggttcgcccacgcgtgcggacttgatcttcttgccgttaccaaaaccaaaatccctaaatttgccctcatttccctctgattagatcccttaccccgacaaagacaccaaaattcttgagggcgaaagagctgattgaatgtttttggtatctcggagcctatttttttgggggcggggacgaccacaacagcaacaagaacaacaaggttggtgattagtgagaacctctgactccacaacaagacccactgacgatgctcttagtcgacaaaagatcgaattttctctttttggctagcggggagggaaaagacgacgattccatattgctattggaccctggtgcacttattaaagaaactactgtgataggccaggttgatagaaatgtgtaagaaaagggagggacgagtttttgaaattggtgtaggttaccaccaccgaggaaatttcttacccc

SEQ ID NO: 118154 - DNA, 483 bp, Arabidopsis thaliana columbia
gccccgacgcagggggtgcgctgggcgacctccggcaaatggggggggacgagcccgaggggtttaacggggaaacccgggagggaaagaactgggtggacgaaagaaaggtgcccatacacgacccggacgccgagcagagagacgtgccgcacacaaggccagagggggcaaacccgcggagcggcgaccgaggcggctaccggcgcaagagacgcacgcccgcgctggtaggttgcgaagaaacaggacgggagcacaaaaagggagaagggaggagagagggtgtagcggaaagcagcgtagccccaagggaaggcgtagagccgctggcacgggaaacatcgatccacacaaaccgggggaaagtgcggggccggcgcggcccagccggcggatgggagagaaccgaggaggaggcgaccattcaaggggggagaggaaaccaagaggcactccaccatacacgcacgagcggcagaa

SEQ ID NO: 118155 - DNA, 485 bp, Arabidopsis thaliana columbia
ggggaaaacctggtcgccagtgggaagcgcgcgaggaatactttttgtcgaaccagggtgaaacccccacgatattcacggcagacgctggttaagaatacggcccctcctcgcgacgcagcagggactacggtacgtttaaatataactaccgatttggcggggggcgcgtaccacggctaaaaccggttgtgtatacaatagcggagctgatagaagcgtatttttttgtgatgaggaggaagcaccggataatgacaaaaacggaggagactctctcaaccctgagaccacaaaaacagagacaaggagagaaagagggacgtaagataagacgacagacgtccggcggcagtgaaagtgctggcgcgagtcatagatacggcagcgtagaagatctacagaacagagcacaaacggggctggggagactcgggagatccacaagctggccagacccatccgcgagtagactatatcaggtg

SEQ ID NO: 118156 - DNA, 325 bp, Arabidopsis thaliana columbia
gcctgcaggtaccgggccggaattcccgttttcgcccacgcgtacagcttgttttccgaaattttctcaccaagcttcgaacacaaagaatcggccatgggctacgcctcttcaaccggcgctcagagcttgttcactccctctaatgtgtcctccataaatgcaagcacggaccttgtgctgcttctatgctgcctattttttaactggtgtctcctcgcgctctcaggctgatcggccccaagccccctgacggatgtcgtaaaattccgagctgtctgtggcccgtgggagtacctgaattagcgaatcgcggacctatcat

SEQ ID NO: 118157 - DNA, 482 bp, Arabidopsis thaliana columbia
  unsure (1)..(482): unsure at all n locations
actatagnagatctatgacgtcacatgcacgcgtacgtaagcttggatcctctagagctgccgccctttgttttcctttttttttttttttttttttttttttttttttttttttttttgaaaacngggactctggggctaaaacttccacccttgcacaaaataaaaaatttaaaggtccaccggcccaccgaccgaaaaaatcaaagttcaaactttttcacaggtacgcttttaaggctggaagggtgtttttttaaaaggcaaaagagcacatggccactggggctttggggcttcccatcttattattttgttgttgggttggggccttagatcccaaccttcttttgatttttggaaatttggtttagggggatccaaggatccatgacgtgaggggcaatggggccaccctaacccgggaaaccgggaaacccgtgcaaaggtccaaattctttaaaggttttaagggcacaatc

SEQ ID NO: 118158 - DNA, 503 bp, Arabidopsis thaliana columbia
  unsure (1)..(503): unsure at all n locations
gacnnnnnnnnnnnnnnnnnnnnnnnnnnnnnnnnnnnnnnnnnnnnnnnnnnnnnnnnnnnnnnnnnnncttttttttttttttttgtctttgaaaatatcacanttgttgttctataactgcaggactatttagggtcttacatgaagcttgtacacaatacatgcttaattaagacaattgaggcatgtcataaccttggcaacggttacgttcagagagaatgctctgcacatcactaataccagattctctagttgatacttatagtcactaaattgagaggtattatcttagaatattggctatgtgacagacacataaccgagcattaaggaccgatacagtaagtagtctcactgaccataattcatggtctcagctgattactctacgaagagatagtgtcaatatgacttctcctcaggcaataaccggtagctctaggaagaggattagttggcgaatcgatcctgagcttatacactaccatgagactagt

SEQ ID NO: 118159 - DNA, 499 bp, Arabidopsis thaliana columbia
tatacgactcactttagggaaagctcgtacgcctgcaggtaccggtccggaattcccggtgtcgacccacgcgtccgcccgagcgtaccgaagtggctcatgccgtggatttccgtttactggtctaccgattatgcatccattcctatacacgcttatcaatttctctacaactagccgacaactgacttactgatttagaatctctcatagacatgtttactgctgattatgcctaagctcctcacgactgttacttactttgacttgcattcagacctatcgctctagctaccaattatcctacccaccacaagaccaatcgcgatgagtacactccagtagcggtctgacaagctatctgcgactcatacactctacctgtttgtaagtgtattacaggattccagacctggaatacatcagtatgcagatggagatacagatcgcgtgtattgagagaggaatacgctcctgagctgagattacgaatattgat

SEQ ID NO: 118160 - DNA, 268 bp, Arabidopsis thaliana columbia
ctctcgcgagaatttttcccataaccaccggtcggttagtcgcaccggaatccgccaacgttacacaataactatcgccgactccggctggggagaccacctccctcacgacacttaccgtgcgcaggggagaagcactatttgaaccactcggatacatgaaattcgaaaaccgttggtgacccattcccaataccgatacatccaaaaactacgacggccacggaacatgctgtagacaggaacattgatattgccccggccaacc

SEQ ID NO: 118161 - DNA, 478 bp, Arabidopsis thaliana columbia
  unsure (1)..(478): unsure at all n locations
ctcactatagnagatctatgacgtcacatgcacgcgtacgtaagcttggatcctctagagctgccgcccttgggttttttttttttttttttttttttttttttttttttttttttttttttttttttttttttttttttttttttttttttatttttttttttttaagggaaaaaaccggaaattcatttggatttttggagaaaaagaacttaagggtttttttaaagggggggcccctatcccgttagctaaaaaagggttttaaaaattacaggaccctggacttaaatttttttgtttaaaaagagagaaggattatttgaaccccaacggttcaaaaaacaagctttttttttttgggggaggggggggctctctaaaggtgaggggcccccttcttaattttaaaaaccccctcgaggagaagggctaacactcttttatgtggcaccggtggggtataccccccgttttt

SEQ ID NO: 118162 - DNA, 477 bp, Arabidopsis thaliana columbia
  unsure (1)..(477): unsure at all n locations
nnnnnnnnnnnnnnnnnnnnnnnnnnnnnnnnnnnnnnnnnnnnnnnnnnnnnnnnnnnnnnnnnnccacgcgtccgcccacgcgtccgcggacgcgtgggcggacgcgtgggccacaaccacacgcttctgaaacatcaaaccgggcctatctttcacttcctcatggaatattccgacgacggcagattcgacgtgattgtcgttggagcaggagttatgtgaaggtggcgccggtatcagctgccgaaatgaggccagaagacttttttgttagagcaacttcgattgcctacatcacggtggctcatctgacggggagtacgcacgatacgtgccaattacgcggcggattacttctactggatggtttcctagcacgctcggtctatgggcatgcggctccaaacgagattgaacccaacgtttaattatatcaaataaacaattcagttctgggtccgggagataagcaga

SEQ ID NO: 118163 - DNA, 321 bp, Arabidopsis thaliana columbia
tgcacgcgtacgtaagcttggatcctctagagcttccagcctgggggaagcccggggtgccgttgtatgcacggtagaacagagaatgtatagaccaagaattgtatgtgttcagtgaacaagaccaaaacaatctttttggaagggaataacactttcaggcagacagaaagctttagaagacctaaaaaaaagatttttttgtagtcggggaaaacacgctcatggggggttaattcctttgtttcaatgaaaaactttggcggccaagggaaaggctttaaccgtttgggaactgggttgaatggcttttggaccaaa

SEQ ID NO: 118164 - DNA, 485 bp, Arabidopsis thaliana columbia
tacgactcattttgggaaagacggtacgcctgcaggtaccggtccggaattcccgtttcgacccacgcgtacgccccggtggagaagccaccgaagttctatccagctgaagatgttaagaaacctctcctcaacaggcgcacggaaaaaccaaccaagctcagagctagcattactcccaggtacagggtctgattatcccttggctggtaggttttattttttaagaaggagttgttctcccctaaagccaggcttggcctctcgcgttcggattcttctgtgactcggacccacttcatagatcaactggacgagtccttcggagacgctggtaacccagggcctaatcgtgatttggccacgtgcactaaacggttggacatttgactgggaggccacgcagtggctgaaatgatcgtggactagagtactttatgaccaaggtttcgctggagcagtaactgcgtatccacgacccgacc

SEQ ID NO: 118165 - DNA, 505 bp, Arabidopsis thaliana columbia
  unsure (1)..(505): unsure at all n locations
nnnnnnnnnnnnnnnnnnnnnnnnnnnnnnnnnnnnnnnnnnnnnnnnnnnnnnnnnnnnnnnnnnctttgttttttttttttttagaacttcaattgagcgttcttaagcagaccaaacgacgagattatgcagtgtttaaggagagcatacacacaatttaagacaatacacacactaatccaaaaccttttaaaaacaataacagggatcgagtattttaccaactcgaagaaaacggctgcgacggttgtaaaaagatgatttgagtatggacaaaacgaagcgtatcaatatcaggagctgaggttaatgttgtgaacacactttgttaaagtctcgaaagagattttgaaacgttctcagggaaactctgtgctattgaaaactgggaagttgtgataaacaaacgggtcttgtccatatactttcaatatggagacccggagcagtcacctccactagtgctattgaacacaagctgtcacttataggatattgaaaa

SEQ ID NO: 118166 - DNA, 539 bp, Arabidopsis thaliana columbia
  unsure (1)..(539): unsure at all n locations
ccggcactaatacgactcatatagggaaagccggtacgcctgcaggtaccggtccggaattcccgtgtcgacccacgcgtccgcgagaacgagagagagagcaagtgaatgagcgagacaaagagtttagcacacagcttataaccaaactatgaacaactacagcaggngactggaagcgtttacagattccgaacgagtgagaaaggcttgggttccagaagccactatgtttttagtgactagctactggtgcaccatattggagagtatatcggagaagagacatgttgtgtctcatcaggctactcagttgtcaagtaaaacacgagtttcggcttgacgaaagtctagaagatttagtttctgagagtcgaaaacgagcttgagacagacacagattaaagaacagctgccgaaatcagaaacggcattcgtattggtcaccgactcaacatacggcttttttactgcgcggcgggagacttgtattatccaacttttatcacttaccgcgaacgtcgggtaattgatcttta

SEQ ID NO: 118167 - DNA, 507 bp, Arabidopsis thaliana columbia
  unsure (1)..(507): unsure at all n locations
acnnnnnnnnnnnnnnnnnnnnnnnnnnnnnnnnnnnnnnnnnnnnnnnnnnnnnnnnnnnnnnnncttggtgtttttttttttttttttccattaacaaggatacatctatgaagcgtgagcccaaggtttttgtgcgcatagcgaacagtagctaaacatgctttgtgtgagtcacatacctagagtaaccattcctgtgtagaacttatacaaaggtttttggaaatgttagaatggctagctggcgttcccttccttgttttgagggagaccacgcacctggttcagcctacgccttttggtccgctcacactggcttgaatcaaacgttgatccactgcttcttggttccagcccaaggggtggactgaccaatggtgttgctgtcactcagctctgagaactgttgttgtgtcagaggtgatttatgggcacggagcttcgtaaaccgcttatcatttaacttaacattggggaaaccgcaacgttatctctgcgcggaat

SEQ ID NO: 118168 - DNA, 510 bp, Arabidopsis thaliana columbia
tatacgactcatttagggaaagctggtacgcctgcaggtaccggtccggaattcccgtgtcgacccaggcgtccgctccaccgtggacacaacagtatgaactatgcaattcactatgttatgtactgtgtgtacatcaggaacacgtgtcagccccccaacctcaaagtttggatatgtgagtggcagtagaacgtgattgcactctggtatgcatgtgtgcaggggagtggtgctacttaaacggatcgcctttctgaaacggtgagtgagaggaccatctaataacgatgactgcgcccattaacgcgcctatgaggctactgtgataggcagtactaggagggtctacatccttggaatctccttcacttaaggctgggagaaagactcagtgaggtctatggaaattaataggagtaggactggacaagaatgcttttgggtgtgagaaatagtgttaacacagacatgacactgcagaagatcgtgggctcttaatgctagagg

SEQ ID NO: 118169 - DNA, 505 bp, Arabidopsis thaliana columbia
  unsure (1)..(505): unsure at all n locations
nnnnnnnnnnnnnnnnnnnnnnnnnnnnnnnnnnnnnnnnnnnnnnnnnnnnnnnnnnnnnnnnnncttggtttttcctttttttttttttttttttttttttttttttttttttttttaaccaaaaacattcgcttaggttggttttaacaacacaacaaaaaaagggttttggggcggaaataaaccaaacctttccaagaagcggggtccaaaaatttttttattttttcccccccaaaaattaacttaaaattaagtttttttcttccttaaaattttgggcggaaactccattttttcttcctaagaaggcggggtaaaaacctaagttgcccctccttgggggggggttcaacggcacggaccgttttcctggtaaaaacaattcgacgcgaacgaacctttttcttgaagtgttttaggccaataacccgaggcgccccccttaatttgtacacatttataccctctttccccgggggttttggcccccccccctccc

SEQ ID NO: 118170 - DNA, 533 bp, Arabidopsis thaliana columbia
ctgcccgcgtacgtaagcttggatcctctagaagcgtgccgcccttggttcaaacccttcttttactttctatgcgagtgttcctcacggcgctgttctttgggtgcgccctgtgcggggggacccccccacaaccgaaacaagccccctaagcagccggggcgtacccacgcgtcccgagcccagaggccaccccccttttttttttcccgcggtgccggcgctcgttcacacccccccgccggcccgctccccccgccgcaggggccccgccctaaccgacgctctcctatccccaagacacacagccgccccggccccgccgctccccgccttggaagggctgcgcccactggtcaacgcccggcgccagggcaacccgacagacgccacccccctcctccacaaatgccccaccccgaccccacgagtcggcccccggaaggcgcgggggcgagagtccgcgggccgcccgcgcgcccccggtcggcgagggtcggtctcagtgcgacccccccgcccttagcccccgg

SEQ ID NO: 118171 - DNA, 467 bp, Arabidopsis thaliana columbia
atacgactcatttagggaaagccggtacgcctgcaggtaccggtccggaattcccgtttcgacccacgcgtacgcccacaccgtgacgaacaaacactgatgatcgtgtgtgtgcttcacagatgatccacaacaagggaggaggagggggtcttcatcacactcacccatctttcgtgcgactctcccgcttctagcagggagcagtgattaaaagcagggctctatctttttttttaacaacggggcgggaccggacggagtaacatcgcactcggcgtctcaatggcacgtcgacacttcgtactatgttcaacggaatccacatcgaggaccaaatcattcctctcggaactccgttggttgttcaaaccccgacacgccggcaatagctcatagccgaagcgcgaaaattacaccttagcactttaatgtttctcttcttcggcggaaaggcagcgtgtcgt

SEQ ID NO: 118172 - DNA, 507 bp, Arabidopsis thaliana columbia
  unsure (1)..(507): unsure at all n locations
ctatagnagagtctatgacgtcgcatgcacgcgtacgtaagcttggatcctctagagcggccgcccttgggtttttcttttttttttttttttttttttttttttttttttttttttttttttttggnnnnnnngnngggggcggcttggccaaagaaaattacatccccaatttctcggccttattttctttcccttattaaaaaccaccccccccattttttttccccgggtcttggtctttggaacaagacccgtattctattaccctaggtgagaggacttattttacaggacattttttgggtgaagactcatgagctggggctacaaagcttgcaatgaaccgagcatcttttcctttatcatggccaaggtccgttgaaacggaatcccccctttggaaaaccccccgtccgacggttctggggcctaaaaacctgcgtaattccctccgggggcggggatacccttgagggggcttttctcccccccctggttaattcc

SEQ ID NO: 118173 - DNA, 532 bp, Arabidopsis thaliana columbia
  unsure (1)..(532): unsure at all n locations
ggacnnnnnnnnnnnnnnnnnnnnnnnnnnnnnnnnnnnnnnnnnnnnnnnnnnnnnnnnnnnnnnnnnnncttggttttttttttttttttttttttttttttttttttttttttttagctacaaaaaagtcgatccttccttgatcagccttagtcacgacaaaaacaaaccgaaccatgagggtccaaaacaaaagaaagtctagagactaaagaaagacttacctcatggctttcaactagagtttagagttgagacatagatagagataatgagagttttactatacaagtcaattcaggatttcccttttaccatccggtttttttgtcaccggttccccacgctgccgagccacttggggaaggcgctactgcatttgttttgccgccccatgcattatcagcttctccactggttccaacataattggttgggctttttgttccaactgtcattgttggttatcggtattcacctgaccgttacttggttcccaaagctgatttggtttccgctccccggttgg

SEQ ID NO: 118174 - DNA, 601 bp, Arabidopsis thaliana columbia
ggggcgggcgcggatacttttttgcgcccccccgattccggcccccgccccccccccccgccttcggcgggcgcgcaaccacgacatttcacccgggggttggggtgccccaaaaaaaaccccacgggcgggacccggccgccgcgtcgcgggcttgttgcggcgggggggcaccccgccgcccgcaccggcgggtcgcgtcccaccggcctggcctgcagtcgtgcgccgtgcggcgcccccgcggtgggtcgcggtgtgggtgccgccggcccttttttttcggggttgtgttggcacacccgcccccccgcccccccgccccaaacaaacgcgggccggcgcgccggagagcaggggcgccgcgcgcgcgggcccggacacgcagcctgcggtgagaggcgcgccgccggcggccggggggcccccgcccccgggcgccccgacgggcgcccggggtgggccccccgggccccacgcgccgagtgtctgcgccggtgcccgctgccccgcttcgccacttgccgcccgcgcgcggccgcggcgtgccgtcctgccgcgctgtgtggttctgtcgcggatgccccggtcggagcgcgcg

SEQ ID NO: 118175 - DNA, 356 bp, Arabidopsis thaliana columbia
cagcagagaccgccagaagagcagaccgaggcgacaaaacgaccgacgagaagaacgagccccgcggagagcgagcgggcgtctttttttagagaggggggtcaagcgccgacgaagagcggcaggggaagacgggaacacaacacacgacagagaagaagacgcgggacagagaacgcgcccaacgagcgggcagaaagacgggacgagaacaaagaaaacagcgaaagaccgcaccgaaaaacagacggagcaagcagagagaaacgcagaagcggagagacgaagaagccaccatacacggaaaacaaacagaaacagaagaacaaacgcccacacaaagagacaacaaccga

SEQ ID NO: 118176 - DNA, 500 bp, Arabidopsis thaliana columbia
ttctcccaaaaaaaaccccttctcttttcttcatcttccccccctttctttccctcctcttttcccctcctttttctttcccttcattctcctttcaattacttccctttcccctccattcttccccccgccttatcctccacccccgcccttttttttttggagttgttgtgccccccaccccctcctccctcttaaaaaaaaatactcaccctctccgcctcctttcccgcccccctcctccatctatcttccatttctctccccttctcattcatctcccgtctcgttacttctcccacttttgcgttatatccctatcctcgcccctctattgcctcccctgtccctttgcacttttctccaatattctcttccacgcgccttttttaatatcttcgccatcgccccccccgttatccccttctaaattccccgttcccccattatgtattcgcctcctcccctcctttctctcgccctttcttattttatttctt

SEQ ID NO: 118177 - DNA, 450 bp, Arabidopsis thaliana columbia
cgcgaccgactcgaccgccccagagcccgccgccacaacgcccgcgccgcccgagtccacagcgcccgccgagcgaattttttctctggggtttgttttggcaagccccgcgagcgtcgccggccgcccgaaaaaaaaaaccgcccgtcccgcggcacgacgcgccgccgccggcccgacgaggcaccgcgagccggggcccgcggagcgacagcccccgccgtcccgtcccctcgagcccagcgggccgtcgggcgcccgggcggcccccgcgggctatggccgccgccgagccgggcggcggggacttggtctcacggcggcgccccgccccgtagagtgcggccaccgccggcgccgccccgaagccgcccgcagtcgatcgccctcgccgacatagaaggaccccgcgcccccgccgaggccccgcgcgcgcgaatgagagagaca

SEQ ID NO: 118178 - DNA, 465 bp, Arabidopsis thaliana columbia
  unsure (1)..(465): unsure at all n locations
ccccccccanagaaagggagccagaagacgcactctcccccggggggggggccggaaaacaaaaacccgccccggggcccgcgccccccccgacccgcaaggcccccccgccgcgccggggacggcgaacagggccggccggcgcccacgcccccaaacagggaccggaggaggccgccgcccgccgtttttttacggatgtgggacacagcacccggcccgcccgaaaaaaaaagcgcgcgcgagagggcacaagcgggacggccagggaagggcacgacggcccccccgccggaggcgaggaggcgcgccgacgagggccccgccgggagacggaccggcccccaggccgcgggcggccggacagcccgggacacgcccccggccccgaagggaccagcccccacccccccagccggcgccccccccgcagcggagcggcgggcccagccgcgggacccgggc

SEQ ID NO: 118179 - DNA, 636 bp, Arabidopsis thaliana columbia
ccccccccaagcagcgacgcccgccggggcgagagaattttagcgcccgagggggggagggccccaaaacaaccaacaccgggcgggcccccgggccccccgaccacgcgcgcgggcgagcgggcgcacggccgccgaccagcccggcgggcgcagccgcacgcagacgcgcgcagcgacgcacacacgcgcccgcgcgggagccgcggggagcgggccggacggcggccttttttttaagggaatgctggggcgccagcggcggccccgagggcgcggccgcaaaaaaacagggccgaggcgcgcgcgggggacgccgagggggtccggcgggacgctagcgccaggagagaacgcgacgagggggaggcggcgacaaccacgcgggcccgcggccggggcacacccgaccagcgacgccccccacgcggagccccaggcacgccgaccccagaagccagccgggggcgccgccggcagccccgccgccagcgcggcgccgcgccccgcgagcggcccagcgaggaaaccgcaccgcgccacccgccgcaaccaggcaccggcgcgccccccggcatggcggagcacgaggcgcagcggacccggacacgaggcagccccaagcggcgccccggg

SEQ ID NO: 118180 - DNA, 515 bp, Arabidopsis thaliana columbia
  unsure (1)..(515): unsure at all n locations
accgagcgcacaaagaagcaacggaagcgcgcgaaacacgaccgacccggccgccaaaaccaaattttactgcgaatgaacccgccggccgacccggacgcccccgaaagagaaagccgaatttcccccgggggggggcgaagaagcccanaaccacaaaaaagagcgggaggcgcgcggaggaagcccagagaacaccacagccaaagcgnagcacaacagggaaagaccgcacgcgagggcgggagacccagacagagcccgcaacccacagcagaaccgcgaaagaccccgcggaagacaccgccgcgcggaagcggaaaggacgccgcttttttttcacgcggggtgggaaccaacccaaacgaccgacaaagagacgacgagacagaagagcgcccacagcagaaggcggggtacaaggcgcgagccccgtagccaccgagacaaaccgcaccaggagcgccacgaacaggaaagacacccgacagagaaaagactacccagagaaccaa

SEQ ID NO: 118181 - DNA, 488 bp, Arabidopsis thaliana columbia
  unsure (1)..(488): unsure at all n locations
ccccccccangacaggacgcgcaaacaaaaaattaccccaggggggggggggggcagaaccaaacaggcgccccgcgccccccagaccgcggcgagcgcccgaggaccgccggcaaccaaggcagcgggggcccgcccgatccggcgaggacgccggcccgcaccaccacggggcgggagaggagccagggcgcccttctttttaagggggtggcgaaaggccggacgccgcggcagagaaaaaaagagagcgcggagggggggcgggccggaggaggagcccggcggcgccgcgagccagcggccagcgcgcggagagcgggaagcgccaaccgggcggcccgcggcgagcagggggggcagcacaggccccccagaagacgggggcccagcgggggccgaccgccccagcagacgcggcaggaccggcgcgcggaagccgcggaaggacggccgaaagccgcaacgcgggggagggacgagcgccg

SEQ ID NO: 118182 - DNA, 439 bp, Arabidopsis thaliana columbia
  unsure (1)..(439): unsure at all n locations
gggggggcgaaaaatacttcacttgggtctcttttctctctcttctcttgggaccattccggtcgatccatatataaaagggttgatttaggtggtgttcaatgggggcacagccagtactcccttttttctcaccaccttcacccctttttggggggggtgggcaaaaaaccttgccctaccacataaaaaaaacaccccccaccctttcttctnaattaaaaccccccaaagggggcttcccttcgccactaaaaaaaaccctctttttattttgggtggagagagcgtcctaacaaaaaaaacaaacctttccaccccccaaattggaaactttgccaccggggggggggcgccctaattctccggctttttgccccaaaacgaggagcacgcccctccccaaatctttcgctccgtaaagggaccccccccccct

SEQ ID NO: 118183 - DNA, 510 bp, Arabidopsis thaliana columbia
  unsure (1)..(510): unsure at all n locations
ttttctcttccccccccccccgcccacgggggggggaggattttttttttttcttcccattttccgcncgcccgcgcccactttggcgccacactacgcaattttctaacggggggtaggagtcccccacaaaaacctatccttctcacacaaattctgctgttatctttcgcgttcttcgcccccgtttcgttgtccgtcttcgccctatgtgatcgctctcttttcggggctatttctgccgccctattgcgcgcgggggcagcgaaatattttttttttgggttgttttgtgcaccccaaacgtggccgtagctcgtaataaaaaaatcccccggggtctttttggaccgcggttcccgcctcttatgctgatgatgcgcgttgttagggatacgccgtattattttgcttcgccgtatgtcctatgtttcatatgttccgcgggtgtatgatctcccggttcgcgggacgcttgttaggaccgtgaatttccgggcgccatgtttt

SEQ ID NO: 118184 - DNA, 312 bp, Arabidopsis thaliana columbia
acgcaacgcaaagaccaccaaaaacgggcgcggagggaaggacttttttaccggggtgggggacacacagagcggagggacgaacaacgacgcgcgggagaaagacggggcgaacaaaggagggaaccaacaacaacgaccaggcgcaacaaacaacaccaacaaacaaaacagaaaggcgcaaacccgaccccgaacgaaggcgccaaacaaagcaaaaaaggaagagacagcccagcagaaaaacacccgcgcggcgccaagcccgacgagacccgagccaaaggaaaccaacacgcggaaacccccaga

SEQ ID NO: 118185 - DNA, 619 bp, Arabidopsis thaliana columbia
gaaaatttttttcttgcggcaaaagaccgcgtcggttgcggacttcgcggataacgtatgagtattttcccccggggggtggtggtacccttgatttacacacagagggagacggagcggcattggcgggccagcattttcgccggggttcgtacggcgtcttgcatgtccgacgcatagtctgttttcccatgattgacccggttccgtattagtttctgcgttttgcgcgcgaaattctcaggcgcggcggtatacgaacggggagtgtttttttggaggggtgtttaggagccaagcgttgtgacgagtcttatcgtggatagtacaaagccttgtagtaggagcggcgatcttttcccgcgcgccaaggtgaacgagatgatggtaggtataggaaagataaaagtatacccagagtacataatcattccgttatatcgataatgacgaaggctgcgcccgcttgttgtgtcgtcccatgtagtgtagaaatagagtagacatattatttatcccccccccacgatgttattcatcgccatacctcccggcattgctccctattagatacggcggagcgctatagtgattggccgtgttcgtcgggtggtgcgac

SEQ ID NO: 118186 - DNA, 532 bp, Arabidopsis thaliana columbia
  unsure (1)..(532): unsure at all n locations
ccccccccccccccaccccgcccgggggatttttttgaatcgtgaaaaaattttccgggcgcagcccgcccggccttcgcccccaccaatcgcgggttttacgtntgggttaaggtctccaaaaaaaacccgngcccccncctcccacaaaacgcctataactcaagcaaaggaccgcggggctcggtgtccctactcccccgttcgatttgtcgctatccccacacgtcgcccagcgaaagcgaacggccgccactttttttggggttgtgggccagggcgcggggggggcgggaaaaaaaaattgcagtatgggcttgcgggggccgggggtacgggtgtatggctacatatccgacaggtgccccgctcaggtgagaaccgaatgcgaaaggccatgtccagcgaaggttggccccgtgcgtgggcttatcggggggtaaccccgccggtggtgccaccgcatccccgcggtgcccggtcctcgcgtgcggagtgaggccgttcggcagggcccgcgtcgaggtagggg

SEQ ID NO: 118187 - DNA, 652 bp, Arabidopsis thaliana columbia
acccagccggacgacagtggcgacaacgaaccggccgacggggacggaccgacccccacaaatttttctcgaaaaccacccccggcagccaccccgagccgagccaactctcgcgggcgggggaagagccccgcaccaaaaaggccaggcggcgggcgagccagcgaaagcccggagaagcgacggactaacaaccccaccccagagcgagcgccggcaaccgccaaaccgaccaacacgcgcaaaccacaaccaacaccacgagcgcccgcgggagcggacggcaccggcgttctttttttcgaagggggggtgagcccgccacgacgcggggaggagcgggccggcgggagaagaagcgcgccagaggaagaccccgagacgatcgccccagccggaacagcgaacgagcgacgcaagcggcggaacagacagacgcacacagaaagaccagccccacgaacggacacgcccgccacgacggcggcaagaggaaggcccccgaatcgaaagaaacgaacggcagacagacaacgccgcgcgccccagagtagaatccgccgccacccacccgcggaaccccagagcagacgcgagccgagagaagagaagcaagccccaacggaagcccgccataggaaaaatcaaacaa

SEQ ID NO: 118188 - DNA, 332 bp, Arabidopsis thaliana columbia
  unsure (1)..(332): unsure at all n locations
cccccccanangacacccaaaaaacgattaacccggggggaaggccgaaaaacaaaacaggcgccgccgggcgcgaagacgggaaagcacggggggggcgccgcgagaacagggcgcgcggcgggagggcagcaggcggaaggacggaggcaaagcgagaaaagggaaggggggagcacatttttttagagtgggacaaggggcgcagggcggcggcaaaaagcgcggccgggggaggaggaaccgggaggcgcccaagcggagcgaaggggggacagccacgagcgccgaaggccacccggacagccgcaggagcgccgggcgagcaagag

SEQ ID NO: 118189 - DNA, 511 bp, Arabidopsis thaliana columbia
  unsure (1)..(511): unsure at all n locations
ccccccccccttcgcggcgcgggggggcgacgggagagagaaccaacaaatcccttaacaatttttctcctcggcgggcgcccccccgccgttgaagggccccgcgaacgcaancgcgactgtngccggggggggggaggagggctcnnccacaaaaaaaaaccccgncggcccggcggcaggcccagcagagcgcccaggggcccgcgcgcggcgccgcgaagcggccgccagagcggggtgacccaaccgacgcgccaatacgaaacacctgccgcagaccgccggcggctcaccgccggcgccgagaacccacggcgccgcgtttttttttggggtatgtttggccgacagcgaagaggggtgaggacccgcgagaaagaaaggcacgccagaacagccgcggacacggggcggcgccgcgacacccgacgagacgagcgagccgcggccccctaagccggcagggcgcccacacaaagatcatggcccgcaggagccggaagaccgc

SEQ ID NO: 118190 - DNA, 387 bp, Arabidopsis thaliana columbia
acggggagggggcgggggaaaaaaaaccctcttccccctcctgtgggcagacttcccggttaaccccccactatggcgcgttttttaaaaaaaatataaagccttcctttgcctctcttcagaacagcggggagggggtacgaacccatcttcactacaccccaacatttttttttgggggttgatgggccctccctcaccccgttctcccccaaaactcaataaacacccaccatactttcctaaacctcttctccttcccctcccctccgcgcctaaaacaacctccccccctgggggaggaaaagaagctccaccacactttccaacccccagtggcgcggggttcgagctacaggaacaccagtgcagcaaaaccagcccgtg

SEQ ID NO: 118191 - DNA, 517 bp, Arabidopsis thaliana columbia
ccccccatttaggggaagctcctacccctccagtacccggcccaaattccccgtttcacccaccggtccgggcataaaaaaagaaaacccccaacaaacacacttttacaaatcagcttcttcccccaaaaatcagctttccccaaagacttttaaccccgtttagccccgggaaaccatgtcctaacccaacctatcacgtacctaaccttttccccccctcattttttagttgaagacggggcaccatccccaaagcttaaagaaaaaaaaaccaccctctcccccaataacctaattggcaacctccatttctccctcccgcgaaacccccttcaaccctaatcttatcccagaacccctctatttcccggtttaaataacccccctcctccccttcttcccaaaacctcacagggcctcctcccctcaacctttcgcccccccccccccccccccacttccttcttcttccctctcccaaaaaaataaagcgcggccccccctacccatcccc

SEQ ID NO: 118192 - DNA, 570 bp, Arabidopsis thaliana columbia
  unsure (1)..(570): unsure at all n locations
cccccccccattacgcgcccggcccacgacagctactgtccccggggggggtggggcgggaacaaccaacaccgggggnagcgccggccgcccgggccgccggaccgcgccgccggggcggctcacgcgcggcaacgccggcgtgcgcgcgcgcgtcggcggacgccgggctgcgcccggcctcggcggacgacgccgggggagcgggggcgcggccgccgcgcggcgcttttttttcggggtgttgggaccgcgcgccccaccacacccgggcgggccaaaaacgtggcgggggggggggcggcgcgcggcgcccggcggccccgccgcctgcgccggagacgtgagagggcgcgcggcccccggagtgcccacaggttccgcccccggatgccgcccagccgcctcggtgggcgggccacggcgccccgatgcggcggtagcccagccgtacgcccgcgaccccgcacgcgcgtcggcgcacccgggcgggcccccgggaggaccgccagcccccgacaggcgctgcgcgctgcgcggcccgggcggcgagcccggcgtgggccgcgg

SEQ ID NO: 118193 - DNA, 596 bp, Arabidopsis thaliana columbia
  unsure (1)..(596): unsure at all n locations
ccccccaatttcgcgggggaaccacaccgcccggtangaaagccaccagaacgagaccaattccccagggggggaaaagcccccnacaaacacaaaacaccgaccacggcgcgaaccacgaagaccaaagaaaacaagacgacgggagagcgcagccagaagcgagacaggagcagcacccagaagggaaccgggcgcgaacagcaagcagaagacaacgacgccaaaacggccgacggggtttttttttacgggcttgttgggacccacgcgcagcacgcgggaaggagcaagaaaaaacggcccccccagaagcaaccaacaccggaggcccccgccgagaacgcnacaagggagacgaacaaaccgccaaaaacaaaaaggcgcgcaacagaaaaaaaagcacggaaaacgcaaaaaaccacaacagccccgccagacaagaacccccaaggccaagggaagagaaagggagaacaaggaaaacaccggccagagagaaaaagaacgcccaccaccccaccaaacaccgagaacaagcccccagacagaagaaaagagacaagcacaccgcgaaagccacccgagagaaaaca

SEQ ID NO: 118194 - DNA, 557 bp, Arabidopsis thaliana columbia
cacaacaacaggcaacagaaccccccacttttttgagcgaacaaaaaatttctcgccggaacaaacccgccccgcgaagaccccaaagcaaaaatttccccccggggggaaaaaacccaaaaaccaaaaacaggcgccccccccaggacaaccgaagaagaccacaaagaacagcgcaaccggcaaaccgacgccatgaacggaacccccgcaagcccacacaccagaacacacccagaacccgcagcacaaacacaccgcccccaaaacaaagacaccttttttttcagggggggggcgggcacgacacaaaacacgccgcacgcgacaaaaaaacgaccccccgaccaacaaaccgcaagaaccgaaccgacccaacaaagaggacagaagagcacgccaaaacccgaaaacagacgaccccacacacagaacagcaccccccgacagcgagaaagagcccaacaaaccccccttaagacaaacacccagtcccatcgagcccgaagagcaacaagacaaaggccccccaacaaaagggaaccaaccccaaccgc

SEQ ID NO: 118195 - DNA, 605 bp, Arabidopsis thaliana columbia
  unsure (1)..(605): unsure at all n locations
caggcggcggccgccgacggcgcggggggcgcggcggggcgcgcggcgggttgggggttcgggacaaattttgtgcggggggaaccgacgcggcggggggcgagcgggcgggccgaaacaattcgccaggggggggggagacccccaaaaaaaaaaacacgagnngcanccgggccgaggagggccgagacggcgggccggcagggaggggaggggggcggggggggcggcggagggaggggagagcgcgaaacgcggggggggagaggggctttttttaagggtggtgggaagcgcgggcgaaagacggggcggagggaaaaaaaggggcccccggagggaacagcagggggggcgcgccgcgagagcggcgcggggagcggggaggggcgagaagacgagccgccgaccaaacaagagcggaaaaggcgcgagggggggggcggggcgggaaggggggcgctcgcagggggcggggggcgagcgaggacgagcgcggcgcacagagcgagcaccgccgagccggccgagagagccaacagaaagacggcgaggcgagaagggagccgccgggcggaggggcggcccgaaggagagcggtggaa

SEQ ID NO: 118196 - DNA, 646 bp, Arabidopsis thaliana columbia
cgccgccccgccgcgaaaacccacccccaggcaggaccgcaactactcttttgaaacccccccccccccatttcgaccacgaagaacccccccccccccgccacaaaccggaacccgcaaacggaaaaatttccaacccggggggccgggggggcccgcaaaaacaaacccccgcaggcgaaccccccggcgcgccccgagcggaccgcaccgacgcccacgagggcacgcgcccgccccacgacgcagccggggacagcagcacaacgcggggacccggaccgcagcgacccagcgcgaccacgagcccaacgaacccgacgccggggcgcgcgcgacccctttcttcaagagggtgcggaacgacacaaaccgcacggaccggccgcaccccacaacgaacgagccacccaccaggcgacccaggcggccggccacgagccccaccgccaccgagggccgaccccacccaccggccgccacacaccccgcagaacgcggaaggaagcgcaaccccgcgcgccccgcacccgccgacgcacaccggcgagcgagccacacagccgcacgcagaggcacccggcgaccacgcgcccgaacaccgagcggcccacgcggacgaggcgcgcccagacacgccccaccc

SEQ ID NO: 118197 - DNA, 407 bp, Arabidopsis thaliana columbia
caagaaattttgtgaggcggtatgaaacgccgccgcagagggaggaccacgaaggaaaaccattcgccgagggggggtgagatccccgccacacacacacgagccggggacgcagagcagccagagggaaagcccgggagacggccgcaacggcaaaaccggcagcaatgccgggtcgcccgcatccgcgagacgcatgacccatcgcgatgcgcgggcggagaagggcggggggcgaaggagtgggcgggggtttttttacaaggggggtttgacccaagcacgaggaccgagggtcggcggcaaaaaaccgacgcccaagagcaaagccgcaagacggagacgccaccgcatagagcacgaacagagacgaggaagagccaaagaacggtacatcgccacaacca

SEQ ID NO: 118198 - DNA, 194 bp, Arabidopsis thaliana columbia
cgttttatatcccgatcgcttcagatcctcccgaacacaatacatttcccccgggggttgagagccatacacaaaaagagtccggtcgcgctactcaaccaactatcacgcgagaacgggccgactagcagacaccaccaaatgcaatagcacatcatgtcccgaaagctagacacatgccctatgcacaccat

SEQ ID NO: 118199 - DNA, 444 bp, Arabidopsis thaliana columbia
  unsure (1)..(444): unsure at all n locations
ttaacaaccccccccgaattcgaacacggaggacgcgcccccgcccccagcgcggggacagcaacggccgaatttttcaccccgggggccgaggggcggccaaacaaaaaaacccggacgggcccccgcgcgccccgatgcctcgcatgcaagcccacggcgagaaccgaacccgcacactgcctgcgtggtgaggaaaaaccacagccccccgtgcgatggcaccccgcgcccgcacaccagtgcagcaggcggaggggacctaggcgccccttttttttttgggattgtatgggcccngagccccgtctccggcgcaccccgaaaaaaaaaagaccagcgccatggtcgcggcggacgccggccgcccgcccgaagccccgcgggataggaccgcgagggaagggcgcagcccccggcgcggtgccagagaccgccctccgc

SEQ ID NO: 118200 - DNA, 242 bp, Arabidopsis thaliana columbia
  unsure (1)..(242): unsure at all n locations
ccccgcccgcccccttcgtcgccgatctcgtttccccattgtcctngcgggggggtaggttcgcgcaacaaaacccntctccntctctctcccattactaccccgacgtacctttccctcttatctttcccaccctattccgtgtctccgtctatccccctcttcattccctcatctcgtatccacctcatctttctcgcccccgcagttacgctcgccactcccacacacattcttttttt

SEQ ID NO: 118201 - DNA, 572 bp, Arabidopsis thaliana columbia
  unsure (1)..(572): unsure at all n locations
gcggaaagccgccgcccccccctaacaccccccaccccaaagcccggattttccaaccnggggggaggggccccccccaaaaaaacccacgcccgcgcgcgcccccgggtcccccgcgcccgaacccccaccgccggccgccccgcatccgggccccgcgcacccccaagccggacccccgcccaagccccgagcggcgccccccgcgcccgccaccggcgccgcgcgcccgtctttttttctgggggtgtgtgtcccaccagcccgcggaggagggacgggccaaaagaaacggacacccactgccggggaggaggacccccacgccagaccacgcgaaccgacgcgccggacgcccaggcaccgcagagaccccgccgcggaccccgacccggagacccgaacgaccccaacaccccgcgagaaggaccncccgagacgcaggagccccaggcggccgccgcgcccccccgcccgaaaaacaggcgtgccccgcggccgccggcggcccgcacacaccgggcccccgccccgcacaagccgggccccgcccccccaccagccccccccga

SEQ ID NO: 118202 - DNA, 537 bp, Arabidopsis thaliana columbia
  unsure (1)..(537): unsure at all n locations
tttcgtgtagggaacgccgcgcggccgcagcccgcccgcgaacgggggcgcaaattcacccgaggggggggaaaaaccccgcacaacaacaaaacgcgaacccccagcagagcaagagaaagcccagcagcggggcgcagagcagaaccggacaagacgcggacccacgagccccaaagcagaccgacacgaagccgggcggagcgacgcggcgcggacggggggggagcttttttttacggggtggacaccgaaggggccgaaggagcgggagaaggggggcccaggagcgggaaggaaacgggcggcaagaaggccggggggcgagggcagggcgcgaagagaaagcgcggggacgcagaaagcccgcaacgcagaaacgcaagcagcgcgcgaagaggagccnccctgccggggccacccagcggcgggagagacggcccgccagaaagggagaaccggacaggccgacagaggccaaaaagaagggcgacgggggaaaaaagcccgccccgcggagggcgccgccagcaacag

SEQ ID NO: 118203 - DNA, 622 bp, Arabidopsis thaliana columbia
gcccaccccccgacgcccaacaacagcgaaccccacccacgaacgaaccgacccccgaaaacactctcctgtttttcaacccaccccccccgacgcccccagaacaaaaccgtatttccccgcgcggggtgcaaaaccccgcccacacaaaaacccagggcgcgcggcgagaccaacaacacccccacaacaaccccgacgggcgacccccacctatgcgaagccccacgcacccccagcccaaaccgcccccaaacgcccagcgacgccgcacccacgccggaagcgcccgcgcccccgcctttttttctcagggggtgtgcgcccgaccacacccaaacgcccccatcgaaaaaaaaacccccgcaacggccaaccaaaaccgcgagccggacccgcaagaatacccgccgagacccggcacatacgacccccgcagcgaacaactcccacagcgcgagaagccgacacccccccatgaaatccccccaccccgaacacgcgcgacacgacgaccccccccccacaacacaacaccccctccccccacaagcccccacaacaacccgcacaccagaggaagacacagacccccacatgcccccacacgcgaggcacaaca

SEQ ID NO: 118204 - DNA, 480 bp, Arabidopsis thaliana columbia
ggcccgcggtcccacccccgcgcgggccccaactattttaaaacgcgcccatgcgggaaaacaaccccccatacggacgcaaagaaaaatttcccagggggaggcgagacaaaaaacaggctccccggccccagcacggaaggaccgggagcgcgccccgacacgcggggagcgaaaaggacaagaaagcgagctgaggcaagcggagaacagacgggagcagagcacacatttttttgggtgttggaaccgcactccggcgcgcgcaaaaaaaaacccgccgcgggaacccccgcagcaccgcccaaaaaccacaaacgaccgcagccccgatagcgcagaccaaccccggaacaccgccagggccagggcaggccccagccccagcgggcgaccggaccggcacgcggcccaccacgagaagaacacggaccccggcacaacggagaaacgcaaagatcggagaagagcacaagagga

SEQ ID NO: 118205 - DNA, 357 bp, Arabidopsis thaliana columbia
  unsure (1)..(357): unsure at all n locations
gaacccccaaccgcccccgcgcggagaggcgcgggcccggaatcttttttccccccccccccatttccccccgggaccccccccccgaaggagagcgccaacacgaaccaaaattcaaagaggggggaaaggccccccaaaaacaacgannngcccccgcagaagaaaaaccccccaggacacagagcacgggaaggcccccccaggacagagacccgccggaccgaaacgaggcacagcccgaaccccggagagagcgccaccgcagagcacacgccacaggacattttcttaggaatgttggcacgcggagcccgacgagaaagcccgaccaaaaaaagggccccccaaggggag

SEQ ID NO: 118206 - DNA, 211 bp, Arabidopsis thaliana columbia
gcccgaggggtgttggtacccacgtccccacacgccgtgcgcgggcgcggcgcgggccgaagtaacgccagagaacgaagccaacagacgggcccaacccttttccagtacccgtggtaacacgcgtttcatttacgatgacgaggcgcgcagcgcatgcacccgccgccgccgagaacaagcggaggcacttttttttatacgagggttt

SEQ ID NO: 118207 - DNA, 669 bp, Arabidopsis thaliana columbia
  unsure (1)..(669): unsure at all n locations
cccgccgggcgacgaagaagccacagacccgccgcgcgcgtccgacggggcgccgaaacgacacttgccccgcggcgaacccccccccacccccaaggcgcccagacccaaaacccgatatctccccggacgggggggggaaagaacccccccaccagaaaaaacgggagcagcgccgcgagcccgaggaagcgccccgggcgccagcccgcacggccggccccccccagagcggggccccggcatccgcccacgccagacgcacgcccaaaggcccgccgaagagcacggcggggcggacacgagagcagcggccgcattttttttttcggggggtggcgacccgaacgccgcgcggngcaagacgaggcgaacaaaagaggcagcaaagcgcgcaaaagagaggcccagcgacaggccacgacgagggaccccagcgaaggacccggcgaaccgcgaaacgccgcacgcgagggcagaggccccgaagtagacgagcagccgaagaacccgcccaggcagggaccaccccntcaccaggaggcggggtaagggcgcgcaggacgaacagccccccgagcaaaaaaagccatcccgctcccccccggcagaccgccagggagcaaccggcacgcggaggggggggacccgacgccccccggaaggccc

SEQ ID NO: 118208 - DNA, 483 bp, Arabidopsis thaliana columbia
  unsure (1)..(483): unsure at all n locations
ctttcttccctcgtgcccctgttttcgcattgttcttgggttctccccgggtcgtcggctggggggtctttgtggcccgctttgtccccgccgcccgctccggcgcgtctttgggcggcgcccactttttttttcgggctgttgtggnccccccccccnccccccccgccccataacaacaaactttccgcttctctgtttctctccctatccccttcttccggtgtgcctcccgcgtgtgctgtgtagtctgcgtgcgcgtccgtcttggttccttgtgttttctctcctggctttgttcctctcgtgtttctgtttttggctaccctctctcgcccgccgtgttcgcgtcctccacgcctttctgtccatcgcccccggtcggcggtcctggtttccccgtgctttcccccctcgttgcctgtcctcaccccgtcttttttgcttcttcgttcctcgttgttctctgccctcgttccccgc

SEQ ID NO: 118209 - DNA, 617 bp, Arabidopsis thaliana columbia
  unsure (1)..(617): unsure at all n locations
cgaaaccaaacaagcgcccagccgggcgggcgagaacagcgaacgaaaccgcgccgcgacnccgagccggacggggacgaaaattacgcgaaaagagacccggccgacccgaagcccccggaccgaccgcgaatttccagcggggggaaaacccccccaaaaaagaacgggacccngaggaaccgagcagacacggggcaccagcgcgcgaagcgggcgcccccgaaagcgggggcgcgggacgccgccagcagacccgcgccgaaccccgccaaacacgggcgcgcgcggggcgaaggagcgggagctttttttttggggggggtggacccgaaagggagggaacgggcgggcgcgaaaaaagcccggcggaaggcgggggacgaaccggcagccaggccgacaggagggcgcggaagagcgcgggaggagaagaccgggggactgcgaccccccgaagcgcacaaagacgagagcccgcgcaggaaagccccacgcgcccgagcgccgggagggccaggcgacgcccccgccgacaggacagcggccccggcccccgcgagccgcgaacgagagaccgcgtccgcgaagccagagcgcggccgccagggaggccc

SEQ ID NO: 118210 - DNA, 402 bp, Arabidopsis thaliana columbia
  unsure (1)..(402): unsure at all n locations
caagacccgccgagaggaagagggccggggaccgcccagaacgaacaacaggacggagcaccggcacgaacgcagcggcgcgaaagcgaagcgacgacctttttttaaaggggggggaaccgaccagaaacgggaagaaggcacagaaaaagaaagacgaagaggagggcaaagggacgggggcgcgcacacacagggaacggacgaacccgcaaacagagagccacaagcgagaaacgaagcccgcagaggcgaagagagcgaacaaacgccgaaggagagaaacaagcnggagcgacgataagagagaagcgccaaacgagacggcgccggaggaagaaaaccggccccatcaaccgcagaaacgcgcaagagaggaagcggaacaaaaggaaaggaagc

SEQ ID NO: 118211 - DNA, 502 bp, Arabidopsis thaliana columbia
  unsure (1)..(502): unsure at all n locations
aaacttttttttttttaaatttaaaccaataaccctaaccaaaaataataacatcttgcctttttttctccaaaaaaaaaaaaaaaaaccttaaattttcccaaacaataattcaccgatcancccaaataccattttttccgggatagttgaaaccctccacctaaaatccttcttccaaaaaagccacctaattttcttctttttcttttaaatcccccaacaattaatcccacaccccccttttcaaaacaaagcaacacgccgcctcttttctcattacaaacataatatttcaaacacgccccccgccttccctttctttttcctttaaaaaaacaaattgaccatgcctcctttcttcatcaaaagaaaccaaaaacctttctccttcttccaaaaacacgccaaagtctctactaaatcctcgccacccgccctctctttcttttttcccaacaacccctcctcccttaggttactacacataccccccccatac

SEQ ID NO: 118212 - DNA, 580 bp, Arabidopsis thaliana columbia
  unsure (1)..(580): unsure at all n locations
aaaacaacaattcgacaccatcccccaatacaatttttctcccctctcttattccccgcccattttcataatcccccgaaacaaaaccccatttttctccctcggggtttcaattccctctcacaaaaatcccatccccttctcctccctcattctcccgatccttccactttcatcccccccttttctttacccctcgttccccattacatccccttcacttttccccccattaactccccacccctattccaccgcccccgcccttttttttttcggagtttttnccaccccccataattaccctcaccaaaaaaactatctctcactccttaactttccccccccctctcccacataatccatgttttacccgttaaatccactcccatacatttatcttcccctatccttaattctctatcatccccaatttattttccccccctccacatttctttacatataatattttcccccccctattttatcctccccctcccccctccattccccttctccatccccattcatataacaattcccctcccaccttatccccccctagcttgtctctatc

SEQ ID NO: 118213 - DNA, 629 bp, Arabidopsis thaliana columbia
ctccctcccggggggcgggaatagaattcttccttccccaacccaccttcccgcttttcacccctccgtcagttttccccattccataacaccaagctttttacggagggggttaaagtcccccctacatacactaacccttgccaccatgtatttcccctcttaacgttccctacgttctatccactcctatatcgtgttcccggtcttctccccattccactcctctttcccattatccccactatataaccctcgccactgttttcgcacgcgccggcccgaacaaacccttcctttttaaggcgttgttgtgcaccacaaaaattcagctatcgtgcgtaaagaaaaaataatcccgccattctatacaccacacacgagtatacgacatgtatttcattacttctccgccatagcatgtatccccctcagtgtcaacattcactattacctttaaattcccaagcccgccctatgttatgcccgccatatcgaggtttcttctcgattcttatttactccccctcctattaatgttcctctccgtcccacctctctacccccatattacttccccttcgcacttattaatgcgccttcccgccgttatcccccccctcatcttc

SEQ ID NO: 118214 - DNA, 494 bp, Arabidopsis thaliana columbia
aaaaaatcccccccccccccaaaaaaacattaaaatcggaactaaccctcccccccacctatttggcgtttttccctttcactattttaaaaaacttcttcaaaccacactttcttattaaatcccattattaaccaccccaccctttttttttttcggctgtttgtgaaacccccccctctcctctcccctttaacccatcaaatttcctccctaacaaccccatttattttttctctcccaaaaaaaatttctctatacactccacccccctcaaattcccctttttaccccctactattttcttctactccataatttctttcacctacacaaaatcaccctcctaatcactcctaccctacccttttacccacctctccctccctccttccaatcaccacccaactacctcccccacctaaaccccactcatcacccacatttccttcacacaccactcaaccattttctccttattcttaatacccaac

SEQ ID NO: 118215 - DNA, 640 bp, Arabidopsis thaliana columbia
ggaaaacaaaaaatgtacaaaccatccccgccaacattttcgcaccccggcgagcaacccccggcgcctcgccgaaaagcgccccgaaccggaacacttttcccccggggggaaagacacccaaaacaacaaaacgacgagccggggaccggcggcagccccagcagcacccccccggcgccaaaccacgccgcagaccccgccccgaaaccaggaagcccggccacacccccacaaaacaaaccgcaaggcgcggcatcaccggaccgaaattcccccgagcccgagaaacaaacggcgccttttttttaaacgggggggttcacaaccccccgacaccgcgcgagacgcaccaaaagcgcacacccgggcaaggcaaaccgcgcggacaaaacccgcggccacgcccgcgcagatagccagagaacaccccgcaagagcaaacaccccgcgcgaacacacatacccgggaagccacgagcggccgcgacggccgccgcaaacagaaaggacgccgacgcccgacgacgagagggagacagaaacaaagcgcccccccagagaagcgacacaccgcgacgccgcccccgatacccccagcaacgaaccccggaccgaacaaaagagcccaaccgcccga

SEQ ID NO: 118216 - DNA, 482 bp, Arabidopsis thaliana columbia
tcccgctatacccgcccgtcgtcctttcccccccgtttttcctttccccttcttcccccctttccttatattacccctttcccccgcctcttttccccccccctttacatttccccccgccttttttttttttggggttgtttttgccaccccacacagccccgaggcgccgccgaaccaccacgccccccacaaaaaataacggagacattccgccgacccccatcccctcgaaagaatcctactctttcccgtttctctccttttccgccatcgttttcctactgtccttttctccatttttccctgctatcctcccattttttattctcccttgtcattcttccctttctattccttgtttttttccccccccctatatattttctttccgcttccctctcctcctttctcccattttccatcccccgtccgcttctatcattcccttctcctcttttgcctcccctttcatcactttt

SEQ ID NO: 118217 - DNA, 496 bp, Arabidopsis thaliana columbia
  unsure (1)..(496): unsure at all n locations
cgcccccccccnaccagaacgcgtttctccgatgggggtgggggcccncccacacaaaaacccgnncccccttctaccctcttacccccgttccttccctctgctttccccccttttctttttcctttcttccccctttcctctcccctcctctttccccgccttttcccgcccgcctttccnacccacgcccttttttttggggtgttgtggacccacccacccgcttccccccataaaaattccccctgtcttttgctgtctttccccgtctcttttcggctgcttccttctctttcccttttcgttttatcccttacttcgcgagcccccttctccttctccctctcccccgtttttttttgtccctttcgcctacggtttttttcgcgttctccgcgctctgttttattcatcccacgcccctcctttcccctttcctccccagcgcacttcgatccgtcccctccgttgtcgcctcgtcttcttgtttttt

SEQ ID NO: 118218 - DNA, 569 bp, Arabidopsis thaliana columbia
  unsure (1)..(569): unsure at all n locations
ccccccccctcgggaggggaacgcccccccccataccccgccccaattacccgtttacccccgggggggggggcgcggaaaaacacaaaataaattcctcaaaccctttcctcccccccacggtttagatttccttcccccattttctccgccctcccccaaccaaagcgaaaaaggtccccccccctcttaaccgaaagccttttcttcaccaccctcccctttttttttgcggacgttgggcaanttctcttttccaacccctccaaatacacatcccccttcttaacgcncgccacccatccaccccccccccccccatttcaaccttccaaccgcggcgccccccccccttttctccccacgtcaccccacccactatttcaccaaaaccaaaaaaaccacacggccggccccctctctgcgatggatcccaacttccctccccgcggccccccccccgccaccatccttctttttccccccacgcccccccccctcctattcctcctccccgcccccttcctctcaagccattcactccacttccaatccgccgctttcctccc

SEQ ID NO: 118219 - DNA, 499 bp, Arabidopsis thaliana columbia
  unsure (1)..(499): unsure at all n locations
attccgtccctccccccccnccttttccccccggggggggtggagtttttttttttttttcccccctttttccccncacccccgccccttaccnccccaatttacgcggtttttccttttgggggttgggggtccccccaaaacaaannaccccccccccctccccagccaccgcttttccccgctctccgttcgtcgtgccttgcgcgcctgttcggtgtccgggtcttcccgcgtctccggttgcgctgcccggtccgccgcggtttttccccgccgccttttcgacccgcgcgcgtcttttttttgggggtgggttggcacccaccccacccgtcttccccccaaacaaaacaaacctctttgtttttcccctttcttttttcctccgctcttttcctccttttattctttccttcttccccctttctatctttctcgcctcttcttccatctttccctctctcccctcttttcccttccttccccgctttctttt

SEQ ID NO: 118220 - DNA, 460 bp, Arabidopsis thaliana columbia
  unsure (1)..(460): unsure at all n locations
cctcctcccccccccaaacccggggaagaaaaagttaattttccaaaattttttctncccccccccttcccgccccccnccaccctttcccgggggtaaatccaaaaaaaaccccncccnccccccccccccccccccccccccccaaccccccccncccttcccctctcccctccgtcccctcgcgttccgccttcccgccccttacccccccctttttttaggaggtttgccccaaaaaggggccaaaaaaaaaaacccctcncccccccccccccccccccattctctcaatcactcatcccaaaaacataccccaatcaaaactccctatccattaacctcttgccctataataccccacccatatcaattaattacaattccacataaaaaacaccccacatccaaattacacaaaaacctcccatatcaaaccaaccagaattccccagtaatt

SEQ ID NO: 118221 - DNA, 604 bp, Arabidopsis thaliana columbia
  unsure (1)..(604): unsure at all n locations
tttccttccccccccccccccctcctccgggcgggggggtggagggggtttttttttttccntccctttcttcccccncncnccgcccccttccnnnccccnnacccacaccattctccggggggggaagagtctccctaacaaacatcccctccccctccccttccacctatcccccctatcgtcccgccgtcagccccccctttccctttaccctcatccccccttcctcacccacctctttcccgcgatctcgcagccccctattcgccccccgccctttttttttcggttgtttggcacacccacccgcggcctccgctcaaaaaaaaacccccccccgaccccccacccctaccgcggcccctttcccacgtctttcgctcgctctccccctctctcgtcccccgcttctatcgtccccccctttcctcttccacccatccacccgccatgtgtttcctccccattccgaccacaatgggcctccgcccaccaccccccccctatttcttctctccccctcccgccgccgatcccactcgccatccccgtgcgctgtttgtaaaccagcccccgcttttcccccccgcgattcctcttt

SEQ ID NO: 118222 - DNA, 468 bp, Arabidopsis thaliana columbia
ccccgccaaaaaaaaaacaccacggcacacagcccacagaacccccaccaaacagagcccacccaactgtcgccccaccgatcctcgaacgcagcacacccggccaagccacacccacaaccccggacccaccgcacaatacaccccgcgccgcgcgaacacagaccagagcccgcgacaaaaaacctctttttttaaggggggtggggaaccgcggccaaggggagcaggacgggtcgacggaaaaaaaaacgcccccgcacgcgaagaacgcgcgaccaggcaccgcaagcaaagccacccacagcccctgacacacaacacaccccaacacaaaccaccaaacccctatccccaacgacgccaacaaaccccgcaaagaaagacgcgccggggcgaggcgacagacaagaacgaagaggaacacggcgccgccaaaagaagaacacacccccatccacccccaca

SEQ ID NO: 118223 - DNA, 509 bp, Arabidopsis thaliana columbia
  unsure (1)..(509): unsure at all n locations
ggtatgcacgcgtgcgtgagctgggatcctatagagcggtcgacctatctgttcgtttaaccactcaaaaaaatatactctggtctgctccaatgggcgtcgntactcaattccgccaccgggacccgggtgttttttctgccgatggggggttcggtctagtgctccttaagctgctcccggagaaaaaagaaaagacgtttttttttggggggggggggccaacaccatgccctcccctntaaaaaaactgggccgagggggggtgccgggggcaggatcggcaagacttggacggatgcggggcttccgcacgggggtcgatgcggtgagagacgtgccccgggcccccccgggacgtcattggggaggcggtacgattaagtgtgagatgagggcgggacagggcctggtggggggacgaaggggtggggggcggggcagctcgaggtagtgcccaagggggggaacggggcgaggtaagtcggtcggtgcggggctccaatggg

SEQ ID NO: 118224 - DNA, 372 bp, Arabidopsis thaliana columbia
  unsure (1)..(372): unsure at all n locations
gtcgacctattctgttcgtccacgcgtncggatttncgatcattgctatgtcgnncggatttattnnaaaaggccgnccggatataaatagtagttaccacatttaatttagtccgtcctgatctactttcccgtccgaagaacagacgtaggagagcgtttttttcaggggggggacgaagcaaaaggcggcggccattgcaaaccgtgactcgaagcgttaggaaggaggaaagacgcggctgtatgtctcgattctatcgtactccgatagagtcgatagacaacgctagcaatagagactatccgggagaataccggcgggtggtggtccataagtggataggtggtgcaaagcaaatgaggggcatg

SEQ ID NO: 118225 - DNA, 458 bp, Arabidopsis thaliana columbia
gcacgcctgcgtgagctgggatgctatagagcggtcgaccttttttttttttcactgtcgttcgattaattaacacagatatgtctgtcgaccctgaatccaagatgatcaagccagaggaaggaaggatcgagaaatgggttctaaggagagcctttgactacaaagaacgctcttatgtaccaaaacacattctctattttacagggggaacagtttaccagagggtgtcccccttcaggaaggatctaaggcatgttagatcccgctgttccataggtgttatgctagatgccgcccgggctggggggtttatgttaggctgagggcccccgcgggagttcactagagcggtggtcgcgtaggggcgctcgtggaggtgccggctaccgttgcggaccttgcgggcggatgcgttgtctgtagttccgctacggcggtggcggtgcctgccgtaa

SEQ ID NO: 118226 - DNA, 515 bp, Arabidopsis thaliana columbia
ggatgctcttagctgtaactctacacaatctatggcgaaggctggcacgcctgcagtgagccgggaccctatagaggggtcgacctatctgctgttcgttctctgccgaccggactctcattctgccttaagactggatgatcggaattaggaaatcttatcgctgtcaaaagaaaccgactattctataatataacacgcaacccttcaccaatggcccacgacgctgcacgccccgatgactcatgctacgagggggggcccgcttgaacctacttctttagagaaaagaaacgactagaccccgtacaccaccgccacggggagataaccctttatagagactcccctctcaatgatgttggaaaactgctaaatcgcacacaggaacgctttgtttatatagtcggacaatcattctgcgggtcatgaaacacaaagtcgatagggtacaccttttttaccttcggcggtacacgagggtcagtcgctatatgagacgcgagaaacccggt

SEQ ID NO: 118227 - DNA, 534 bp, Arabidopsis thaliana columbia
  unsure (1)..(534): unsure at all n locations
gggggggggcgcgccctttnattaagnnnnaagaaatttacggtttgaagccgggggggcggggcgcaccacaaaaaaaacctcncccccctttccccggcccgccttcngcccctcttcaggttctccgcccccggggccggcgatgctcgcctttttctccatcggtttgggggggccggccgcccggtgcgggtcgcccttcgggggccccgcccctttttttttgggattgtttgggcctccccgtctcggcgctctccaaaaaaatacatgcccgggtgcgcggggctgctggtcgggcgcccccccgcctgcggcttgtgccgcggcgcggcatccgccgcggtgtggtcgtcgggcccgccgggcccctcgggggtccgcgcgcgcccggcgcggcggttcccctcggccgggtctcggccgtcgcgggcgccgaggcgcccgccgccggtgccggcgggggccggccgcgccgagcttgcccctgccgggctccttgaggccccggttcgctcgcgcgatcggggc

SEQ ID NO: 118228 - DNA, 506 bp, Arabidopsis thaliana columbia
  unsure (1)..(506): unsure at all n locations
tttttttgggttttctttgggcccacaggggaacccccccttggggttttttttcaaaaccagggtgaaccctctgncctttttttttttgcgcaaagggaacaagaggaaaccgggccgcggaaatacccttttgtagaggttccttccccccaaccctttttttttgggggggggggggaaacaacacccccgccctccgcttctataaaaaaaccttcccccccagaggttgaggtccggtgccttcgcctcaccccccctccctgccacacgtgaacgggagagcaatgatccgcgcggccggcgtccacacgtccaccggcaccacggggcctcccctggtgggacccacacgcggggcgtgccgagacacacatgaggtcgtgcatccgcgggaggtctggggtctagggcacgcggcgcactctgcgggttgcggtgcgcggccctatagattgaccagctacgcgcggaggctgtgggcggtcaggtcttcctgctcg

SEQ ID NO: 118229 - DNA, 502 bp, Arabidopsis thaliana columbia
ggatgctttaggtgtactctactcacatctatgacgaagctatgcacgcctgcgtgagctgggatcctatagagcggtcgacctttctttttttttttttttaaaggaaacctatactatttcttttacacaactgccgagcccaaaaccacttatctgattctggcattcaaacactgcctatattaatgacatctagatccatgacgacaaagcaactctatactaggattctttttgctcttatcgggcggcgacgctgctgccatgtcaccttaacaaactgagagctttcgtgttaatggccccctccatcaaacaaaaaggctgattacaaccacacaaaggagaatcatttgtttagctcaaacaggccaagaaaatgctttaggaactttggaacatccgttccgggtttattagaggcaaagccagcctttttttttccatttttgagcccgagtttttttactacaagaaatcctttcgcaactgtgggggc

SEQ ID NO: 118230 - DNA, 516 bp, Arabidopsis thaliana columbia
  unsure (1)..(516): unsure at all n locations
ggacaaagctacgcacgcctgangtataccttggaccctataccagcggtcgacctatgtctgttcgagcagctcaagtttacttcattctctgtgaaactatactgcatataagcttactgggtttttcttggataagatttcaattcccaataaatgcaccctttagcaatcaagaaaattccataggagttttgtgggctagaacccggcttttttttttgggggtgggggacccacacacaaccccccctcaaaaaaaaccccctcccccgatcggttgtctgctctctgctccccgcacgcccaacataccgcctctcggtcaccccgcccgtgccaccttctcccgtgacactgctcccggcccctacctgcgctcaccactagcgtcgctcccctccgcctcgcaatttccgtcccgcgatcgcaccgcgcccgcgtgtcacccggactgttattgtttgacttctaggctgtgctggagcatgctttatggccgcgatgctcactcgg

SEQ ID NO: 118231 - DNA, 492 bp, Arabidopsis thaliana columbia
aagctggcacgcctgcgtgaagctgggcacccactagcagcgtcgacccactgtctgttcgatttttttctaccagacccaggtatcgagaagcttctctcgaatatgttctctgacgccggcggaggcgcaaatcagccagcgctagaacttagctcttgcaaccaaccggaatttggttacaacacaaaccttgcagtagacaaagtttttttcgcaggggggcacgttcttaacctacccccaaaaaaaaaaaccctcttccctggtgaaaaagacacgaagcaaacccccctagcacacgaaagaaaacttgaaaccgcgaacgggaccggggccaggagccctttgccgtggcccccaaagcgtgaagaccagagcggcgccccctactcactaggagcaacgaccggtagggcgtccggtgctgaaaacaggggaccgaggctcgtccagagtggtacggacactaggggtgaggggcgacggaaa

SEQ ID NO: 118232 - DNA, 386 bp, Arabidopsis thaliana columbia
gctgcgccgcctgcgtgagcctggtgcaccctataccgcggtcgaccctctgtctgttcggctactcaaaggatgttcataccgagctgattcaacataaacgagcttggatgataaaacgtggtattgtcaaagggaagctctctgtagactcagccgagcaacgcctcgcggggttatgtcctcttatgcccgaagaagctttttttctggggggggggccaacccactcctctcctcgttcacaaaattgcgccccgtgctgcggccaccttctagccccggccctccgttccaggccttccgcctccggccctgtgcctggcctcttcccactgccccggtcccatcccggggtccacttgtggcgcgcctctttccgggcg

SEQ ID NO: 118233 - DNA, 475 bp, Arabidopsis thaliana columbia
ccgcctgcagtgagcctgggcacccaatagagcggtcgaccctactgtctgttcgcacaaaccatctcacaaactcatcaaacctctttctcatctcatcttcaagccatctccgatcatcatcagacaatggcagcagctatggcaacagcaaccaagtgcatgtctctaaacccatctcctcctaaactccaaaaccaatccaaatgcgggggattcatctccctaccaaccccaccaaaaccaaacgtctctctcgccgtcacaagcaccgccctagccggagccgcgttttcttggctcacgtcgtgggagccaggttttacccctgcaacagatctgtcacgtggctcgacaagcgcgcggggggcggcccggggggtggggtgggggaccggttggtggacacagagggcggggccgggcacagggttgcggccccagggtcgcggggggcggcacacgggcggccggg

SEQ ID NO: 118234 - DNA, 176 bp, Arabidopsis thaliana columbia
  unsure (1)..(176): unsure at all n locations
gatgcattaggtgcactctacaaaatctatgacgtgcttcgccgcctgcgtaagcttggatccatanagcggtcgccttgcgttcggcccgcgttcgaaagtctaacagagggaataacacataccatgggtaaaacttaccgacgcttcacttatgggacctcccacaattccct

SEQ ID NO: 118235 - DNA, 489 bp, Arabidopsis thaliana columbia
  unsure (1)..(489): unsure at all n locations
gcctgcaggtactggtccggtttaccagggtcgacccacgcgttcgaccaaacgtacaaaaaaaaagtgtttactttttgggtgnntattnggaggagnaaaggtatacttaaggttttaagttgttnggatgttttaagtaagtagttggtgtttagaataactgcgtatgtttagacaaagaaggagcttttttttagggggggggtccaaatacctagccgccccaataagaaaacccgtggccccgttaacggacacccggacatttccagtatcactggtactgcctagcgggttatacccttatgtgacataggctcagggtaatcaactagacaatcgcgtgagctcccagaagtatttagctcttatcggttcgaacaaggtgcttaggtcatgacgctcgaatacgggctacgacacgagctctggaggtcggctaaatgttgtgtggagcaattgttaatgagggggtgtggtcaccgg

SEQ ID NO: 118236 - DNA, 458 bp, Arabidopsis thaliana columbia
agagctagggcaagctgcgccgcctgcagtgagcctggtgcacgctctagaggggtcgacctatgtctgttcgagcgaaagaagatccaaagatgagtgaagaagcttttgaagaatctcaggaatcaagtcaatctcctcgtccggttccaaaactgaacgagaggattctctcaacactatccagggaaatcggtgcgtggcattcattggccttttttttggggggggggggcaacaccatggcctcctccttaaaaaaaagttgccgtgggtggttggtcggttctttcccgcggaacctgatcggccaatgtacgtctcagtccggtcggatggtctccggttagtgcagccgtcgaccacccgggcggccccgcgggggtgggcgtgggctcggctggtcttcgggggggtcgcgcatgggggaggcacccgggggcggtgttgtctccggc

SEQ ID NO: 118237 - DNA, 472 bp, Arabidopsis thaliana columbia
  unsure (1)..(472): unsure at all n locations
gcaggtaccggtccggaattcccgggtcgacccacggcgtccgaaccaaagaaatacaaagatgattnacaaacctttttacttactcactaattcagggaattccctggggggggttcaaaatggggaaaagaggtttcgttttaccactcccgacaagaaaatgtgtggtgtcgaggtgggggcgcgatttttttggggttagttgggcaccccccgcgggccgcgcacaaaaaaaaatgtccggggcctggcgggggggtggttcccctcgtgagttggactgtaggtgatgaaagatcgcctcgtgatcgggctggaacccgcgcacgaatagagcgtgggagaggcctgggagttgcttcttgccggaggctatcggtgcacgttcgggggtctctggtggcactgctttgtacggtggggcggtgctgccgcgtgggactgcggggggggggttcgtgcgtgaggt

SEQ ID NO: 118238 - DNA, 481 bp, Arabidopsis thaliana columbia
  unsure (1)..(481): unsure at all n locations
ggggagctgctacgcctgcaggtaccggtccggaattcccgggtcgacccacgcgtccggccacgcttncaaacaaagacaaaaaccaaacctgtttcactattacacttttcctcaaaaaaaagaaaaatgtttttgggtgggggttatacctgtggtcattggggccggcagcggcgacgccgcggcacgcggggcggcaaccatttttttttcgggtgtaggggcgccagtaggggggggcgccctcaaaaaaaatcgggggtgcgggcgtgtggggtgcgcacctcggcgagggctgtgggccgcggcgctggggtggcccacgggaggcggggcggcaagcagggattgtcttgatgcggcggtgaggctaaggcggcggggggacgggggattggggggccggggcagggcggggaagggggagggggggggcggctcgggacgtccttggggcgtcgatgcggcggtggtgggg

SEQ ID NO: 118239 - DNA, 370 bp, Arabidopsis thaliana columbia
  unsure (1)..(370): unsure at all n locations
ctgcaggtaccggtccggaattcccgtgtccagccggtggtgagacagcccgggttcttagacctggaggagtattgtcccccccccaaatttatattatgacggggccttcagtggtaggccgctcgtagaagatcacgcgcgaaaggcccagctccgggcgccgccggcggcacaggccgaggaaacggcctttttttttttcgggatgatgggccnccgcccaagcaagactccaaacacaaaaaaaccgcgcggacaggcgcgacggacgcggcgtacacccccacactagcaaccgctgcatacgagaaactgctcggccattcgcgccacgacccgcccgacctacccgcgccgcgtcccctcg

SEQ ID NO: 118240 - DNA, 389 bp, Arabidopsis thaliana columbia
  unsure (1)..(389): unsure at all n locations
ctggcacgcctgcaggtaccggtccgctattagccgggtcgacccacgcgttcgtccacgcgtncggtgacatcaagggctctaatctgctgcttgaccataacaacaatctcaaaattggagatttcggccttgccaatttttaccaaggtcccaaaaaaccgaactttcactgactagttctgcacctcgcagattttttttctggggggggggccaccgcggcggcttctccctcatgcccccctcagtctaatggcgtttccctctctcgtaccttcccgccttattctattatgtgtttctatctcttggtcctgaagcttttaccctttgctcctgtcccttcaccggctattcatcgtcgcgcggcgccgtccctttgtctg

SEQ ID NO: 118241 - DNA, 495 bp, Arabidopsis thaliana columbia
gctggcacgcctgcaggtaccggtacggtctagaggggtcgacctattgtctgttcgtccacgcgtccgaacagaaagaaagtccacgcgaggacataagcgcgtgtgatttaaaatcgtcgtcgtcgtgttccacaccgactttaatctgattgttagaatcgccgtttgcgtattagtcggggaggagatggacccggtgttttttcgggggggggggccccgtgttcgcctcgctttgttacaccctttttggggtggggttgaagcggcttggtcgggctcacgttggctctgagtgggtggttcggtctgcagaattggtccgggtaacctgtcgcggctacctcccgggtgtgtacttatattcggtgtcgttttttcgtgatcatggaggaatgtcgcctagctggggatcactggtcgccgttggtgttgttactggagactcgcatggggggggagggggaagggattctgactgtgctgttgctt

SEQ ID NO: 118242 - DNA, 419 bp, Arabidopsis thaliana columbia
tgcatcttaggctgtcactactacaagaatcatatgagcgagctgtgcacgcctgcgtgagctgggatcctatagagcggtcgacccacgcgttcgggcgtaggaaactgagtctctgctaaaaaaggtggagcacgatcaaccatcatcactgcttagtgcgctaattacatgcaggaatgctctgggatgaactgaccttttaagccaacctgaccctgatgttagggtttcaaatgtctttcgcttggggggagattgaaggaggactgccccataaaccacttacagcgttgatctaatgaaggagatcttcatgctgacaatacaacctttcgtgaaaatagataatgccttctctggaagttataagaaagcctattccgctcttgatattgttgcaaaggcaaaagggtgtt

SEQ ID NO: 118243 - DNA, 489 bp, Arabidopsis thaliana columbia
ctgcgccgcctgcaggtaccggtccggtattcacgggtcgacccacgcgtccgatcttaattggttcaaaatcatcctaaatcgagtagattgttttgaatcgattctcgaagatagctacattcatatatttcaccattttcatttttattaaatttattgattattatcctgatactgtttattaaacaagcattttttttttaagggggtggaaacacaaaaaaccatcttaatgttaacacccttacgctattctatctattttatagtatgacacaccactaaacattatgtaattaggtataatcattctaatgtctgttacttaatttctatttctttcttatcttacacggatcttcttcataagctttattctcttttatgcttgtattatcatataataggacaccttcgacaataacgtgtactaatgatgtttaaatttgaccgtcaaaacgagtagcacgcaatacaatcaacatg

SEQ ID NO: 118244 - DNA, 509 bp, Arabidopsis thaliana columbia
  unsure (1)..(509): unsure at all n locations
agagctaggacgaagtacgcacgcctgcagtgatacctggtacgctctagaggggtcgacctattgtctgttcgaccagcgagagtgagtgagagagtatagagtgtgtggngtgataccataagtagatactttgagctggaatacgactccaacgttctatattatttggagtatgtatcatctataacagtatccttttaacatccaagacacctttttttaaagggggggcccacatagcagaacgcatgctggaaccacatatttgctgtaagatagggagagcactagaatatggtcgccttgtttaataggtgatttacactgggaggatgtgacattataaactgacgccggttacacaggggtgatcaatagtggcacgtggacactatctggggtctccgggtatttggttcgctattcatttaagtggactgtctcgcgtccttatgaatcgtaaatgagaggagttggcattcttattatcggctgttgaacaatgt

SEQ ID NO: 118245 - DNA, 424 bp, Arabidopsis thaliana columbia
  unsure (1)..(424): unsure at all n locations
tctatgacgaagcttgcacgcctgcagtgaagccgggaccctctagagcggtcgacctatgtctttcggtttcgattcccacatttgaatcaaattcaatcgggatggagaattctgatattgacatggtaatcatacctgatactccagatagatcggtacaccatagagaggttaagagaaggccacattctccagtagcaccattaagattttaaagagaggagtaccgtactcatcatcttcacggaaaagccagaccagtcnctgtaactgaggacaacccgcaccgttggtctgtttgccgccactaccctcactcttttgtccctccaccaggccgagcggcaaagaatgggtccaacggggaagtagccgcattagtgagcataatgtggaaatggctcgtttcggaacaaggaga

SEQ ID NO: 118246 - DNA, 263 bp, Arabidopsis thaliana columbia
gaccccaaaaaaaaaaaacggcgcgtcgggccggacgtggcaacgaccgccgcctcctaccaccggcaagcgacccacaggaccccccgacctcgcccgacacggcaggcggctcacgccggcgcccccgccgcagccccgtgacaaccaccaggtcggcgtcggcagatcactaccgagacgcggccgacaataccgccacagccaggcccgcccagccccagccccggatgcgcccccgcgggcaccggcaggcgccagag

SEQ ID NO: 118247 - DNA, 480 bp, Arabidopsis thaliana columbia
gtagctgtgccgcctgcgtgagctgggatcctctagagcggtcgacctttgtgttcgttcactgcgtacagatcacttggcaccgttgcaaagagagaaccaaacatggtaaacaaagacgaccggattagaccggttcatgaggccgacggtgatccgctttctgagactaggagaagaaccggtggagtgattgctttccgttgtttggggggggggggttatacagaggccagttaatgaaaataattcttcttgtttaacaaattggatccccccctgttagtggaggtgggggggtggcggcagggggcgtggctttggtataagcctaggggccctgtcgtgcgaacttgggcggtagactggagccggtaggcagtgggcggactgggttgggttggggacggcggggggggcggttgtctttgggctgccccgtggtggtgtgggtatgctttgtgcgtgcgctgcccaggg

SEQ ID NO: 118248 - DNA, 428 bp, Arabidopsis thaliana columbia
taaaattctcgataccccaaatttcgaaaacttgttcttagggcgattcttctctttgggcattgggcgaatttgattcatatccctcggggatcggatttttttcagcccttccccgccgccggcgcgccggccccagccgccctctttttttgggggggggcgcccaacaaccggcacccctaccacaaacaccgcccccgcgcgcccccgccgccggccgccccgcccgcccagaccgcgccgcgcccggccgccggccgccgccccggccccagccgccgggcccccccccccgcccccaccgcgccggcggcccccggcccgctcccgggcggccgcgctgccggccgccccccgcggctcgcccggccccggcgccgcgcccgcgggcgtcgcccccggcccacgccgcgcgggcccccgcg

SEQ ID NO: 118249 - DNA, 431 bp, Arabidopsis thaliana columbia
gcacgcctgacagtgaaccttggatcctatagagcggtcgacctttctttttttttttacaaatgtgaaatcgcatcatcttatcgagaaaaggaaattaagcagtaaatagcaaaacgcaattcatgagtggaaggataagattaatcagatgagagagactaagcttgtgtgactgaaacagcttctttgaccttagtggatccagggagcttcaccgttgcaggcttctcaacttaaggaacaacgaaagcagacactggggaatgcgctgcacagaccagttggaagccctgaaattaaacttccgtgaacttggcggctgctccaagaaaagcctatggagagtgccccaagtaagaagctcctgggccttaacacgcggaagcttttgggtctttccgaccctcacctgggcaatgacccggggg

SEQ ID NO: 118250 - DNA, 465 bp, Arabidopsis thaliana columbia
  unsure (1)..(465): unsure at all n locations
tccagctccatacgactcacttagggaagctggtcgcctgcaggtaccggtccggattcccgggtcgacccacgcgtccggggacgcgtgggttttaacacaaaacatagccgcaccatanaaacagtggtgggtttgtttcagatgaagtgagagctagggcagatatatactcaggagatgatatatgccgggagaagaaaaggagtttctaaaggattttctatgcgtgagggtttatcgccatggaagactattaacaaagtgaaaaccacagagggcgtggttttgctccctaaaccataaaaggcatcccttaaggttggggtctctgggaaacctttttattacgctccgggggcattcccctggggggggggggaaaaataaaaattttacccgtggatgggcgcacggtccttttttttggtcccccccaaggggtttgttttcgggcgcaccccc

SEQ ID NO: 118251 - DNA, 461 bp, Arabidopsis thaliana columbia
gaagctatgcacgcctgcgtgagctgggacccactagagcggtcgacctttctgttcggagagatcggagctaaaaagccatctctcgccggaaaatttctcagttttcttattaccttagccacagacaacaagacgacagaggaatctaatcttagccccctttcctctctggctctctctatatctctggctttaggctttgagatatggggggcacgaagctttttgcttcttttttttaacactttaaaaaattccagccaatggttcgaaccccactaggagcttgaaagggcatgggatttagcctgggggggtcgtgcgcacacacaccggccgcgcagtgtctcactcgcggccctccggcggatggcgggtgcgccttggggccgcccgccgcccgcgatgtcgctccactgccggacacggggcggcaggcggcgcgcgcctcggacgac

SEQ ID NO: 118252 - DNA, 370 bp, Arabidopsis thaliana columbia
  unsure (1)..(370): unsure at all n locations
acgactcactttaggggaggctgctacgcctgcaggtaccggtccggaattcccgggtcgacccacgcgtgcggagagatcggagctaaaaagccatctctcgccggaaaatttctcagttttcttattaccttagccacagacaacaagacgacaggaggattctaatcttagcccccctttcctcctctggctctctatatatctctgggttttagggttttttttatagggggggggacaaanctttcttcgtttctttttttaaaaaaaaattaaaaaaattcccccggcatggggtggcgaacccccatccggtctctgtgaaagggggcggggggtgtgaggccgcggggtgagggcggggtag

SEQ ID NO: 118253 - DNA, 358 bp, Arabidopsis thaliana columbia
tagggcgaagctgcgcacgcctgcagtgagcctgggcacgcactagaggggtcgacctatgctgttcggcgggatttattcaaccgatgagtttcgtatgttctcggtcaagatccgcccatgttctcgagcatattcccatgactggactgaatgtccatttgcacacccaggtgagaatgcaaggggaagagacccgaggaaggctcacttttttttgggggggggggccacctctatagcaacggtgcactgaaaaaaaagggcgccggggggggtgtgccaggatggcggcgccggcgcccacatagaatggatcgagggtgtactccgctgcgggttgtggaccactgcgact

SEQ ID NO: 118254 - DNA, 330 bp, Arabidopsis thaliana columbia
ccgcgccgggaagtatcgcggcggtcacgccctttttttatggggtgttgggcacaacactcacagggtccgatcgaaaaaaaaaatatccgtagtcttcggcacatgtatcgcagtccctcaccgccaactgtctacatggcaaccacagatccgtccgcaaacggcgcaacggaagccgcgatatcaagaaggaacctgcagtacgtccgcggagaactctcactggcagagtagacaacaaatagagatcacgacgcgtcaaggcacctaaatctcacatggaaagaaagcgccgacagaccccagagtacgcccctagcacgctgc

SEQ ID NO: 118255 - DNA, 505 bp, Arabidopsis thaliana columbia
  unsure (1)..(505): unsure at all n locations
agctgccacgcctgcaggtaccggtacggcatacacgggtcgacccacgcgtgcggtccatcgatgaaccagatctcgaagaagacgaagagagcgaggatgaagatttcggcgcagcagaatacaaatacgagcacaaggagacgaagaccacccaccgacgggcccaccgatcccgaatcgcggcgggaggacaaggaacttttttttaaggggggggggcccacgccgccgcccggctgccgttagcacaactcagtgcgcgtaggcacgcgctggcgaccaggccgggcgatgcctngaacgatcgagtggtacgaggctggaggtcaggggccccttgccacgcgcggcggcgcccggctgggcgagtatcgggtgcggagggctccaatggatggcacaaggagcgatagagaaaggtgggaggtaccaggggcgcggggcgcggtacgggtgccgagaatcggtgatggagggcgacagtaagcggaccggccagggc

SEQ ID NO: 118256 - DNA, 419 bp, Arabidopsis thaliana columbia
ccctgcaggtaccggtcccggattcccggtcaaaccacgggtgcggtctattaataaaacaaattttaaaaaaaacgaagagagtcctcgttcaacattgacgcctacgaaaaaggcgtacttggtgtgcggtttattttgcttcggcgcacgggcccctaagcccgcaatcacggattggggaacgggggcaggcatttttttttttgggctgttggggcagccacaagggggggcgggatgaaaaaaaaaatcgtccgccgggcttcgacgcgacctgtcagcgcttcgtcggtcggagttgcatggatggacggcaggatagtctgtcgcgctgcgccgcaaaggtagtttcgacaacaaagggaaccagggcgtgcgacgggcgaggcgaggatatgaggtggggggtacggata

SEQ ID NO: 118257 - DNA, 505 bp, Arabidopsis thaliana columbia
  unsure (1)..(505): unsure at all n locations
ggaagctagcccgcctgcaggataccgggcacggaattcaggggtcgacccacgcgtgcgagccaacctcancnacgnanncgnaacgcatttgttattttagaaatggataacatgattgtcatggttctcttagaagaaaaatacaccattgcttcagcagactctagttagtcctatttggttgcaaccaaaacaagacgtttttctttgggctagttgggctgccctgagggctagctcttgttggaaaattgttcgctttgtacgaaggattgcgtctttgccggtcacggcgggcccgacacgagtgccgaacgctgggtgtcggtgtgcccggacactgacatggcgcccaactggggagcactggcggggctgtacccgagctggcagaacaggcggcggaagagcaaggtaggggaacgaagggagaaaaaactgacattgtggagcgccccgggtgtgtcaaggttctgcacgctgcacgagagcttgacaacgg

SEQ ID NO: 118258 - DNA, 408 bp, Arabidopsis thaliana columbia
aggtgtcactactacaaacatctatgagcgaagctgtgcacgcctgcgtaagccttggatcctatacagcggtcgacctatgcgttcgtttaagtgaatgataaccggcattaagaacataccatactgatatttcgctagggagatggtctcctatggtcactcacattacattagcgtatggggctgtgactttatatcaaatgaggttgattgatgagctacactgcacgcatgatatctaggggtggtgacaagatcatgagctatgtgctcagagggatcctgagcacaagaatctatatcttgcttctctggatttatcttcgaaccaggagaagggtgtgttcggatctcaaatggctctggcagaggagtgacatgggttggtgtagcactagcttctac

SEQ ID NO: 118259 - DNA, 319 bp, Arabidopsis thaliana columbia
aacaaaaattttttttacgaaatgaagaaaccccgccgaacctgacgagagagaaaaaccgcgaaacagggagtaaataatggatcatcacgacatacgaggattcacagcgagaaaaccaccaccgttttttttagggggtggcgcccccccccgcgccacacacaaaaaaaataccacgcgagagcgaaacgagagcgcaccaccagccccaattcaacgccacgacgcaacaacccctacccactaatccctctggaaatcaccgcctcccgccagctctcaggaaagctaccaccgaggaatccacagcaggaaa

SEQ ID NO: 118260 - DNA, 425 bp, Arabidopsis thaliana columbia
tccggctcaaattaccgagcgaactcgttcttttctgattatgaagaaccttcattcccttttttctttcgtggatgatatgggggcgaatcggtcgtccggccggagcggcgcgcctttttttttgggatgttggaaccagaaggcgttatttgtgtgaaaaaaaaagcggggctgttgcgccgcctagcgcgcgcccgggcgggcacgtcgtgagggcggctatgccggccgtcgcgactctcgcgacggacgttgccagcgagcgctgcacaacgcgggcggacgcgggaagggcgggcgcactctgcacgggagcgcgcgcgaagtacgctccgccggggcgcgcgcgtgcgggcctacgcgagccggctcgagggccctggagaactccccagcggccggcgaccgccgccggttgctgg

SEQ ID NO: 118261 - DNA, 207 bp, Arabidopsis thaliana columbia
tgacactctgacaagatctatggcgaagctgtgcacgcctgcgtgagctgggatgctatagagcggtcgacctttctgttcgttccacgcgtacgagagtgtcttatcccgcgtctcgagattgccttatcgatctctctccttagtctgaaagcgctcccacttgattcttacttaaggagagattcatcggagtcggactcttaa

SEQ ID NO: 118262 - DNA, 248 bp, Arabidopsis thaliana columbia
  unsure (1)..(248): unsure at all n locations
tacgcctgcggtactggtccggaatcccgggtcgaccacgcgtncggggaccttaaaaaaaaaatttaaatctcttatactacatcaaaggcctttttttctacaaaaaggtagaaaggtggctgggagcaagttggtagaccgtgcgtgaggggggcaacaagacgcggcaggacggggggagagaggggaggggtttttttcggggggggggatccagctccgatggggggttgtgtccaaaaaaa

SEQ ID NO: 118263 - DNA, 556 bp, Arabidopsis thaliana columbia
  unsure (1)..(556): unsure at all n locations
gggaaagcacgtacgcctgcaggtacccggnccggaaattccccggttcgaccccacgcgggaaggcccaaaacaaaaaaaannccaccccccccccgacggcacgcccagcagagcgcaaagacacacgaaacccgcgcgaccagaagaccgcggaaaggcagaaccaacggagaagcgcggcccccacccccacggaacccgccggagaaacacgacgaaacaaaaacttttttttagagggagccggcgcacacccccccaganccgagccccacacaaaaaacaagccggcacccacgcgccgcacggccccgcccggccccgcaccgacaccaggcacgagcccgcgcccaaccacccgccgcacacccgaccggaacccccgagacccagagaggcagcacgcagacacgccgcgcgggagcccccaaccgagagacgggcgcatggacaccaagccggcccggccgcccagcacagaccccccacaacgcagcgcaacaagccagggccggcgccgccaacgcccccgcgcggcgcgcgccgccgcacc

SEQ ID NO: 118264 - DNA, 470 bp, Arabidopsis thaliana columbia
  unsure (1)..(470): unsure at all n locations
gcctgcaggtacctgngccgcattcccgggtcgaccacgcgttcgagcatcttcttcatcanattttgctagttcgtcacacacacggatcatgtaatctgcttcttcttcgtttttacgatttgatcccaaagtttttcaattctataaatttgtgaaagccaaccccgttggcgcgctttaagctttccttctgggggtgttggggccccccccgggggcctcctaaaaaaaaacccccccccagtgggcgggtgccccccccccctttcggccaggacgcctgcggcggaatcgcgcacggccccgcgccctccgccctcgcccgggggccccgccgccgggctcgcgcgcggtccgcggcccgcgcgcgggccggccgggacgcgctccggcgcgctacgccgcggggggcgcctcgcgcgcccccctgcggcgcggccgacgggccacgctcgccaggggcccag

SEQ ID NO: 118265 - DNA, 347 bp, Arabidopsis thaliana columbia
tttatagattttgtagtacaaaaaacgcgtattaaatcggcctccctcctactaacactagaggccattaagtgaccaagaggggtatgccgcgacgcagcggcaaaaccgcgcttctctttgggtgtgggcgcaccacacccgcgcacaaaaaaaagcccccggccaccagacgccagccccccgccatagggagacggggggggggaccgccccgggctggcccccgcaaggcgacaagacgactcgcaagacgcggagacaccgcagggacgccccccgtaaggagaggacacaggcgaaggaaccacgtggaaagggagtggatgcgcgcgacaacccacaag

SEQ ID NO: 118266 - DNA, 310 bp, Arabidopsis thaliana columbia
  unsure (1)..(310): unsure at all n locations
tagggaaagcaaccacgcctgcaggnaccggnccggaatacagttttgancgagggggtagacccataaatataaaaaaaccaacccaaataaaacataaattcgagccgcacccgaacatacgtcctagccctacttgagacgcaaacgcaccactgaaccaattatttcattacatcatatttttccacctactgacggcacgcaacttctatttacgggggggggaaacaaatcacccacatacaattccaacaactatctttacccccgctggtcgtgcttgttataccatgattaattgattagt

SEQ ID NO: 118267 - DNA, 599 bp, Arabidopsis thaliana columbia
  unsure (1)..(599): unsure at all n locations
cccccccccctaaggggggagggctcctccccccttccaattacccccttccccaaatttatcctttttcaccccgggggtagaggctttttaaaaaaaaaaaaaacaacactcccnccattattaaacccacaccattactttccccccgaaatttggcgggaaccctaaaactcctttttcccctcccctccctcaaggggttttgagagtaaaaaaattttctttacacccccctttctttttttcacaaaaggaaaacattattttttcgggttatgttgggcccccccccccttgccctttcttaaaccntatttcaaccnccccccntccctccctcctctcctcccccccccctttccttcttctctccctctccctcctccatccctccccccattccccccccttatttccccacccccccttcaccaaccccccccctcctctccccccctcccccacccccctcccgcccccctccccccccctccccccctcccccccccccccccctcccctctcccacctaccgccccttagcactcctccttaccccctctcgccccccattccaccgccccatctctctccaa

SEQ ID NO: 118268 - DNA, 528 bp, Arabidopsis thaliana columbia
  unsure (1)..(528): unsure at all n locations
ggaaagctaccacgcctgcaggtaccgggcacggaatagaggggtcgacccacgcgtacggccctggaaggagagaagcaattggaagaaactattgaagcggcgtataatataatgtcaaagccggataaatgaagataaagaggccaatatgcaaagtagatacaaacataattgcaaaaatcacgagaaaataggtgaccaagaacattcngtcataaacgggtgtgaacacacaccagcagaaaagacgccacaagcaaaaacacacgcaaggacacgatgaagagaaaagcacagacaagctcggtaatcacaaagtgatttgatctgcgggaatattataatcggagctagtagattcatttttaaatcccacggaacctcaaacaaagactaaaaatagaagagagagccggataaacgcatgaagaccacggaggaaatgaacaaagttgtttagataatatggaaattagatgatttcaatctgcaaacagcacaaagtagtatgactggaggaatgca

SEQ ID NO: 118269 - DNA, 337 bp, Arabidopsis thaliana columbia
  unsure (1)..(337): unsure at all n locations
ccgcctgcaggatagccggtccggtatagcaggggtcgacccacgcgttcgaccacgcgtncgnacgagagtcacgagagatcgagagaagtctttgattctcttctctcatcaaatcaaaatatcatctcagagactccgattgtgtgtgggggtgctggacttgcgacgggagcggggggcgggcgcggggctttctcgttttggggggggggccgcccgacccatgccccctccctttaaaacccccttcgatgtggtgtcggtggcgcggcgccggcccggcgccctcgtgcccggtgtggtgagctcgtctgtgcggggtcgaggggccccg

SEQ ID NO: 118270 - DNA, 477 bp, Arabidopsis thaliana columbia
ggcgaagctggcacgcctgcgtgagccgggcacgctctagaggggtcgaccctttgtctgttcgattcggatttgcactccatactcatggaagcttcgatttcgtttctggggtcaacaaaacccaatatttccttgtttaacccttcttcaaacgtccttcctcgtagagatttccctcttcctgctttgaaattgaagaaagtttttttgctgggggggggggttgcaccaaaaaccactcatcagagactactgctctcgtgggttcaacccgggggcacgcccctgcgtttgggactggaaggcgcgggtgcgtgggggtcggggtcggggctggccccgggcgccccgcgggccgccgcgcggggggcggcgcgcgcgtagcgggggtgtgccccggggggcgctcggggcgtgcgcgcggcgttgcctgcgcccgcgggggcgggcgggcggcatcgggcgggggggggc

SEQ ID NO: 118271 - DNA, 428 bp, Arabidopsis thaliana columbia
ggaattttacagaatcatttttaattcgaattacatccggatcaacaccttagggttttcggatggaccgccgagatttgcatctcaaaacggtgtagcgggccatcctggtgggcggacggcgtcccgggcgggctttttttttggggaggtggggccgccgcccccgcccccccccaaaaaaatctccgtgggcgcccccgccacccgcgcaggtgaatttcggggttgctatggccgccgagatccccctgatagcgcgggccgcgatgggacgcacagacagccgctaagaggccctcggaccctcccgcgcaccttcgacagtgcgcgccagacgggctcggttaggaggctcatggccaacgggcgagtgcgcccggagatagagcacgaccgcgcgttggagggggcggttgcgggcaaac

SEQ ID NO: 118272 - DNA, 463 bp, Arabidopsis thaliana columbia
  unsure (1)..(463): unsure at all n locations
ccctgcaggtaccggtccggaattcccgggtcgacccacgcgtccgggcaccctttaaaaaaaatctttnnnaaacaatttcaaaattcccctagaccccccactctccccgacgcctcgacgagtcgcactctaccggagtagttttttcctcggtttgtcagacgcccactcgcacaggcatgaccgcgcctcggccctccagacacttttttttcgggggaagttggggtcccctctcactaccgctctatccaaaaaaaaaacacccccacggtctgcctcgatcacggtcaccccccctcgcgccatgcccgcagtgcagcagccgaatcccccgccatcagacgtacgcgagctctccaatcccgccaacgatcgtcgatccgcgcgccgctgtccactacgcgctccttccgcctacaagggaggacgctgggccgtcgcgttatcaccccctagg

SEQ ID NO: 118273 - DNA, 190 bp, Arabidopsis thaliana columbia
cttaggaagtggctatgtcacccctacaagatactattgcttcctatatagcgaggttcccacctcttattttttgttgtatcgagagaacccttaaaaatcgcatccatctaaagccggtaaaacggaaaatcgatgcttccatatactccgcgagggtgcattacctatggagttcgcctagcgatac

SEQ ID NO: 118274 - DNA, 468 bp, Arabidopsis thaliana columbia
  unsure (1)..(468): unsure at all n locations
gatactccagctccatacgactcanataggggagctggtacgcctgcaggtaccggtccggaatcccgggtcgaccacgcgtccgggtgcgtgtggttattactaacaactttacaacacttcatcttgctgcttttgctttatcattaatgctaaaatcagctagcgaggatacagcaacatggagacgtgttgattagagtcctcttgaagaattactgactgtaccttatcgcggaggtagtttcctctttctttgtaaaaaggaaaagagtaattgcgcacccaaacattattttgccccccaccatgaaaatgcgactatgttcccttttaaaaactatttcggatgcttaatactagggggaccttaccatgggccctccccctaaagaagnggagttgaatccttgcaaccgggcgccccacttggcgctcaccacggaacagggctaccccggggaccct

SEQ ID NO: 118275 - DNA, 351 bp, Arabidopsis thaliana columbia
  unsure (1)..(351): unsure at all n locations
ccgcacacccccccccccccncccccccccccgggggggaaggttagggggtggctttcnnnaaccaccccccccccccactcnnnngngnggggaacgcnccncccncnaagaagnaggaagagagaaaaaaaaactttttaaaagagggggagaagggcccagacaaaaaacaagcgcaagcgagcacgcaccgcgcgacaacaaccagagccacggaaccgacggaagccccaaacagagggaacgcaagaaaaaagagaaaacaaaaaggaagggaacgaacgaggggcaacacacaacccgagaagcagacgcgcaaacgagagagcgaaacgcaccacttttttt

SEQ ID NO: 118276 - DNA, 400 bp, Arabidopsis thaliana columbia
aacacaatgattgattaatcacttataaggcctaaactcacttttcctagttttgccctttttttacctcatcaacagagaaagagatacatccatggggggtcttaaaagatcaacaatctctttccctcctaagggatgctggcggtataaggtttaaaccatccaaaaaaaaacaaaactaaaaaaatgggggaaacaacgaccccaaaggacaaagtcaacccaaaaaacaacctaaagctttttggtgagaaaaggttttaacaaaggccaaaccaatttgggtggaaaaagacaacccttaaaccctataaaaaccggggggggggggacccccccacaggaaattaagagggggtcgttattctaaggcggggggaggcacgctaaccgcaca

SEQ ID NO: 118277 - DNA, 592 bp, Arabidopsis thaliana columbia
atgccactgagaagttcttatctgcgcaatcttagccaaaaccttcaagcaaggcatgaactctagttgacaaacacaatacctctcttttaatccgtacaaccacaatatatatgctattcctatattaatacattacttactctccacgtctaacactcatagtatatatacagagaatcaaatacaacctacatgaaatcgcctgaatagatactccataactagaactgttttccaatcattacaccgcagttcacctctctaatcatctataggcactactcatgccatccccactctactggctcggttactcgccacccgagtatgacatcgcttgcagtcttcaaccaaataatagctatgatataatagtaaattcagctatcaaaacggtctactcccaatcaccttccatgacgcaacatatactcaagagttggagagaatctggtctctgtcccattcactccgctcaccgagcacgacatataccgaggacgtcaatctcctaagttgagacccatgcagcgcttaggtactgctgcacgaaaacacagaggactgagcagcaaaaactgccgagacg

SEQ ID NO: 118278 - DNA, 381 bp, Arabidopsis thaliana columbia
ctgcaggtaccggtccggaattcccgggtcgacccacgcgggacgaggcccccccaaaaacaaaaccctatgatcacgaccgcgtgggtgcggacacgacgaaggatagtgaggatccgactcctcgtgaagcaaaataactgagaatcatatgtatgggatattggaggcccgatcaaagccataaaaggaggatgtaacagcgtgccggaccaaatttttcaaacgggtgtgggaacgctacattagtccgatagacattttataaaacaatattactgtgttaccgggtagactagtctcactcagcaacacaccgctaaactataaaaacaagatagataccgccccataccgccgcagagcaactcccgtaacaga

SEQ ID NO: 118279 - DNA, 583 bp, Arabidopsis thaliana columbia
ggaaagccgcctcccccctccaggtacccctccccgaattccccggttcaacccaggcgggccggtctttttttggtatattaaaagggatttttccatccaaaatttccacactcgcccccggggcacccccccccccccccccagccgcccccccccgttgcctgggtctccgccccccgcacggccgacccgcccgacccgagccggcacccccacttttctcccgggacgataggacccccccccccctccgcccccccccaaaaaaaaaccgcgccgcggcgtcgggcctgctcatgtcgccagccccgccccccgctccacccgccgacgccgccccagccacccccgtcctccgccccgccgaccgacgcccgccacatgcgccggcgccgacgcgccaagcggcgcgcggccgccccgcacgccatcgagagccgcgcccacgacccccactccgcccggccgccgcgtaccagaggccccacgcgccgcggcgcccgcggcgccgcgcgcggcccccgcgggaaggccgcccccgccacgcgacgccgcacgcacgcgggaagaaccggcgcga

SEQ ID NO: 118280 - DNA, 122 bp, Arabidopsis thaliana columbia
cctctccggtctaagcatggataaacgatgatattacacctcattttcataatccccaaacttcttatgattaccatgggcggagagtgaagcccactcgcgtactgcgcgtcactgagata

SEQ ID NO: 118281 - DNA, 278 bp, Arabidopsis thaliana columbia
ctgcaggtaccggtccggattcccggttcgaccaagcggacggccacacaaccaaaaaaaaagaagccgcacagggggggaaaccagacccagacacgggacgacaccaagaagacgcaaacaaggcaagagaaggacaacagagcacccagaacaaaaccgacggccgacaagccccagcggaccccccactatttttttttaagggtggtgggccaacacaacaaccggtgttcagctaacaaaaaaaaattgactcagcctgcagccaacataaa

SEQ ID NO: 118282 - DNA, 596 bp, Arabidopsis thaliana columbia
  unsure (1)..(596): unsure at all n locations
cccccccccccgcccccccccccccccaaagtgaggggtaggtttgggggcccccccccccccccttgggngggggggaacccgggcgccgnnaagaagaaaaaacnnaaaaacacaattttaaggaaggggggggaaggccccccaaaaaaaaaaggcgcgcagcggcgggcgggaagaaacggcaaagcagaaaaaacacaaaccagaaccccagaaagaagaagaaagaaacgcaaggcggccaaaaaggaaaagcacagcaaacaagaaaaattttttcagggtgtggacgcacccgaggggagcaagaaaaaaaccggccagcagaacgcccgaacaaagccccgcccgcccccgacgaacaggagcgagggaaacaacggaaaacaggccccaaacgagcgaaacgacagagaccggaaataaagaaggaagggagcaaagaacgacgcggaaagagagccgcacgggagagaccagcgacccaaaagagacagaccgagcaggcccagcgagcaaaacaaagcgaccgaagagagaggaaagcacgagagcgggagccgggggaaacgagacaccagggcgcagggaca

SEQ ID NO: 118283 - DNA, 506 bp, Arabidopsis thaliana columbia
  unsure (1)..(506): unsure at all n locations
aaaaaaaacgccgccgggcgggcgctgcggtagttatagtttggtgcgcataacgggctgaagcatcgaagagcgggcgttttatatggtttgtttttttatccgttatttgagcactaaatccaggcgcagcgcaggggaagatagagaaagacagcgctttttttttagcggggggtgggcgcgacgtattttatgtagatagtccgcagaaaaaaattattggtggtagtattaagcacattctagagatgaatgatacttcgccactcactgttgacggcaagggaaatctcgcgataggatttctctnaggaaagagcggacataaaatgcatatgtgatatcagggcggggggatattttataggatagtgcacgataagtagtgagaacggaacggtcggtaggcagcatctctcaaagtaaaggaagcggctgaggtagccaagcaatgagctctatcggaggcctcccgatcgaggcgaagatccggggatcgttta

SEQ ID NO: 118284 - DNA, 295 bp, Arabidopsis thaliana columbia
gaatctgccgaactcaagttatcgtatatcctgctaggatatctatcttcaccccctacgccctagacggagggcagcttccaattaatattcatgcctatataccagcagcaggttaattccctcgggatcggggagcgaccttacgtttacgcccgtaactgtgttgactctgctgtagagtcacccgtgccgagtctcgaccgctccggcattgaccatccagtacaagtttcgatagccacgatgattacatcgccggacagtgattccccgcaaagacctatggcacccc

SEQ ID NO: 118285 - DNA, 406 bp, Arabidopsis thaliana columbia
ggaaagaaaaaaaacagtttgaaaaggggggggccccccacgaaaacgcgccgcccccggggacagcggggagggtaggggagggtcgggaggggggggcggaaaaaaggacgcgcgagcccgccgcaggaggcgggagcccggggcaggaattttttacggggggggcgcgcccgcgcaggagcgtcgaaaaacgctcggggcagagcgacgcgcaggcacccgcgtcgaccccgcgggcgacatgccgcccgccgggaggacgggaaagcgaaggggggcgacgggcgggcgggaccaaaggcgggggcgagagacaaagacagggggccgggggacacgcgacacgctggcgcgccaccccgggagccgcccaaggggtagtcgacacagaaccccgacacac

SEQ ID NO: 118286 - DNA, 547 bp, Arabidopsis thaliana columbia
  unsure (1)..(547): unsure at all n locations
agagggggaagagaaggcaggaaggagaggggggagcgagacaaagaaaaacagggccaggagagaagggaagggcgnagggagacagaagaggaaagaaagaagaaaaaaaagaaaagggaagcaggaggagggaggggaaagggggaggagagcaggagacgaagagacgagagagcgacctttttttacgaaggggggggggaaaacgaagaagactaagaaggaaacgacggcgagagaaagaagatgcgaacgagggtggaggaaggaggcggagcaggaaggaggagaggagaccgaagcaggaggaagagagagagggagaagggagagaccgggcaggaagacggcgggagatggcgaaggacgaagaagagaagaggaggaacgagcggaaagagagcgacgcggagagacgcgagtagggaggagaagacagaaaaggaaaaagaaacggacgagaaggacgaaagaagacacgccgggggagaaggaaggagggggggaagaagacgaagagagacgaaccagacgaggaagaacg

SEQ ID NO: 118287 - DNA, 514 bp, Arabidopsis thaliana columbia
  unsure (1)..(514): unsure at all n locations
ccgccccccnccgccccgggggggaaaatttgttgggaccccccccccccctcgggggggaaccncccccnannaggggnnnnaaagaacttttaggggggggggggccccgaaaaaaaaacagagggggggggacggggaggagcggcgggggcccggagcagggaggacggcggcaccggggacaaaggaggggaaaggggcaaagaacggagagagggcgacgcaaggagggggtttttaaggaggtgcgcaggggccacagggacgcgaaaaaaaaagggggggggggcggcgcgaggggaggagcacaacagacaggcgcgggcagggccaacccccggccagcggggggcagcgggcagacaaggacggcggacgcggcccggggcgcgcgagggagggcgcgacagagccgcaggaggggccgcgcaaaaagcgcccagagggagcgcgcgagcgggacccgagcgcgcccgacggggcggcgcggacgcgacgacgcggccaacaa

SEQ ID NO: 118288 - DNA, 489 bp, Arabidopsis thaliana columbia
  unsure (1)..(489): unsure at all n locations
gggggagggacgggcccccccaaggaaaaggaaaaaagaaaaanaggtttaaaaaaagggggaaaggccccgcaaaaaaaaaaagaggagaaggacaggcaagagggcacgaggacgagagccagaaggagagaggagcgaaagggaggagagaagagaaaggagagggacggaggaaacaagcggcacggagacagggaagagacgcggaaaaagcagggcaggacgtttttaaaagggagtggggaagaggaaaccacagaggagggaccaaacaaacgagagcggggcgaggcgaggagagaaaagaggcgggcgaagaaagagaagaggggagaaggaaaacggcgaaaaaggaaaaggcgggcacggcccaagggagggcggaccaagacgccgcgggagaacgcgaggcgcgaaaggagccaggagggaggcgacagggggagagcagaaggcaaaagaggggcgccgcgaggacaggagaga

SEQ ID NO: 118289 - DNA, 444 bp, Arabidopsis thaliana columbia
  unsure (1)..(444): unsure at all n locations
ggggagctcctccctccaggtaccgtcccaatttccggttaacaaggtccgggcagnaacaaattcctttcttccgaaaattactttagaggcattttcccgtcttggtgggcgcgtagtggggttcaagtacggaccgcccgccttttccaccgcataggccatcaccccaggctttttttcggggggggggcgccccttttccggccgcgaaaaaacccccgcccccccgcccctccagctcttcacggcaatgcggtagcacacgcacgattctcctcgatttcttcataccacgctcaaataaccgccgtgagagacacgagtgcaatcgacacccccttcgcgccaacggcacggcggggcgctggccctacttcccagcggggatggcgagtaactcccgaaatccccagccagtcatcgaccaaacaggcgactaac

SEQ ID NO: 118290 - DNA, 676 bp, Arabidopsis thaliana columbia
  unsure (1)..(676): unsure at all n locations
ccccccccccccccccccccccnnccaacccccnnngaagaaatattgcccagctaacaaaccccactcaactgagggggaaggttcctccccccttcaatttacccttccaaaaatttcccnttttaaaacccaacgggtccaggtccttttccttcccaaaaaaaaaaaaaacccacccccttnaaaacccttcttttaaacccttttttttttttttcacaaaattccccacctaaaaaaaatccttttcaaccgctctttccctttttcttccccgcaacctccccacaaaacagcaccctccactcctcttctttcctcgggcagaatgcgcacaccccccaccgcccgcctcctacatcaaatcactcaaacccccccccacctctccccccgcctcctttctctcccccccctctccttaccttctcctcaccccgacgcccctaacccccccccgcctaccctcatcccaccaccccacccatccaccaaccacaccttcaaacacactctccctccacctaccccacccccctaccacctccacttccaaccccaataccgaccgccctatagcaacacaaccaccacacgctcacccctcccccgcccctcattaccccatatactaccatctaagtgtctctccctctcatccccactactctcg

SEQ ID NO: 118291 - DNA, 130 bp, Arabidopsis thaliana columbia
tttatactcccaatcataaaaacaaccctcagcaggaagcgccagatacgcgcggtcctaggtagcttcgagatcgttatataaacaggacgctgagaactaatattaagtatgtcgatacggcggacgg

SEQ ID NO: 118292 - DNA, 568 bp, Arabidopsis thaliana columbia
  unsure (1)..(568): unsure at all n locations
cccccccncccccccnccccccgccnccaaaaaaattctctttttcacccccccccatggggggagggccccccccttcaaaaaaagnaaaaaaatttcnggtttaaaccagggggaaggccncncaaaaaaaaccaccaaaaaacacccgggcaacggccaggccccccccccaccacccccccaacgcccgcccacacccgcggcacaaaccggacacagacgccccccccgcccccaaccaaccgaaaggccacaaattttttttcggttgtttggaacaccccattcgaccccctctaaaaaaaaacttctccccttccctctcccttttgtcctattcccttcctcttcctcttctcttatcaccacactccccccctgcccttccgtatctcccgctccccccttctcgaccttctttttctccccctctcgttagccactaccctcttacttccaatagtttgattgttgatctctttctatcttgcattctttctgtgatagtccctcctctaatctctctcccattttctcccccctcctcccttacttcgtctccaac

SEQ ID NO: 118293 - DNA, 446 bp, Arabidopsis thaliana columbia
  unsure (1)..(446): unsure at all n locations
cccccgcccccccccccccccccnccccnccccccccccgcggaatgttaggggtacgtctggggagacanccccccccccccnggtttgcgcggggggcgaacccccccccccccccanngaaananagaagaaaacaaagcaggatttaaccaacaaggggggagagaggccccaccacaaaaaaaacgcgcccgccagcgccagaccccggcaccgcgcgcaacgcccccgcccgcccagaccccccccccgcccccgcccccccaccgcccccggccgcgaagacgaagggaacgcgacaccaggcgaagccacagcccccacccccagacccgcaacaccaacgacgagacaccacaagcgacttttttcaccacgggctgtctgaccccccgacccgacccaccccccaccgcccccaaaaaacaccggagcgcagaacc

SEQ ID NO: 118294 - DNA, 453 bp, Arabidopsis thaliana columbia
ctcccatccagctgtacacccaatggctagagaccgaataccggctatgatatctcgtggcccagtcacatgtactcacacctcactctgtgcggcgtcgccaccacgcgtgccaggccccgctgaggaggaacccgccttaggcagaggtaatgtagtgccgaccgacctggacaatggggcagtcactggattgacagtgttgggtttatgtctagcgtcgggcttgggagcaacaccgtgccattggcactgggagtgaccactgccgtggtagacgactcacacgggaaggagcgtgcaagtgaggatcgccgtcggtgtctcgtgcgcagaactggcactcgggctttgccggtatcgcggctgggtacgatgatcgtagatactgttagggtccggtcgctggggttgtcacgtggcgacaaggaataaatgagaggcgatgtcgtg

SEQ ID NO: 118295 - DNA, 503 bp, Arabidopsis thaliana columbia
  unsure (1)..(503): unsure at all n locations
ccccccccccatttaccgcgcttcccaaaattcccctgtttaccccccggggggcgggctcctttcccccaaataaatttttttttttctctccaaccctcttttttttttctacacgaccacaaaaaacccccccccacagcctccaccccccccacaaaactcttattttttttttttcgttttttcaaaacaccccggcgcgggggttatcttaacagcgcccccacaaccccttctttttctcgggaaagttggggccccccccccccacccaaccacaaaacaacaaacccccccgcccccccctctccccangcccccccccccacccctcccgctgccggcgcccagacaacggcccgcgcgcgcccacgcaccgcgcgcagaaccgggccatgccgcgagccggccccccgctgcgcgccaccgggcgacccgacgcggcgccggccgccgccccccgctaacgcccccgcgcggcaggggccggccgggggccc

SEQ ID NO: 118296 - DNA, 450 bp, Arabidopsis thaliana columbia
  unsure (1)..(450): unsure at all n locations
atcccacccccccccccccccccnnnngggatggaattcccaggttataccacnnattggggggagggcctcccctcaagaaccttccnaaatacatttttaacaggggggaggcccacaaaaaaacacaaaagaaagagacgcggataaacagctaacatacaccaggacgaaaagaatggaaacaagaaaaaaattacggtaaaagcaaaaatcacaaaccggagcacgaataagacagacaaattttttaaaggtgagggcgataaaagcctatgagacgaaaaaaaaaaaagaaccgacccatctgcacaccccccccactcgatcccaagcgagacagacgctcgccataggaaagcagataggaaaaaagaccctagcaaaacccgcaagaagacaagggagagaacaaagtaggagagaggaacgagaacaaaaatacaagga

SEQ ID NO: 118297 - DNA, 375 bp, Arabidopsis thaliana columbia
  unsure (1)..(375): unsure at all n locations
ggggaggctgctacgcctgcaggtaccggtccggaattcccgggtcgacccacgcgtgcgggataaaatcgtcactaatccaaannattctnctctatttttgtctcctcacaaaagctctagcgggaaagggagcagtagtaggtagggccgagtatagggggtgaagggcgcgagggtagcggtacgcgctaggcaaagcggctttttttttcggggggggggggtcaagcaatccgcggccactgtggaaaacaagggcgcgcgcgtggtgacaatataagtgcatacgcttggaagggatacagctacgtattattgtgatatgttttggaggagagggacccgcggagcgccatctgcggtggtgctatt

SEQ ID NO: 118298 - DNA, 303 bp, Arabidopsis thaliana columbia
  unsure (1)..(303): unsure at all n locations
gctctatacgactcaatgagagagctgtacgctgcagtaccggtcgggattaccgggtcgacccacgcgtgcggaaagacggaaccaggatcgtgaccgtcagggcnatagctcgtgggaggccaggatcgtttgacgatggngacccacaaactacgaatgtgtatggtgaggcagcgtggaatcgtgatggtgcggatgtggcggccgagatatgctattttttttcgggggggggggccaatatttttcttcattttcttttaaaaaaaaaactccacatacccgtattatttaaaaatt

SEQ ID NO: 118299 - DNA, 504 bp, Arabidopsis thaliana columbia
acgactcacttttagggaagctggtacgcctgcaggtaccggtccggaatcccgggtcgacccacgcgtccggagcaaaagtacttcattcagacttcagtttaagctatggcggcgaacgattcttcaaatgctattgacatcgacgggaatctcgactccgattcgaatcttaacactgacggtgacgaagcgaccgataatgattcctcgaatgtattggggggggggcctgctccaggcggatggcttaaaaaaaaccccggggtggcggggggcggcgagggggggcgggttggggagggtgcgcgaggggggctggagggtagggagggaggggaggggggcagcgcggtggctcggcgggcagcgggacgcggccgggtgaggtgggggagggggcccagggtggttggtggcgggggcggagggcggcgcgtgttgtgcggcgggggggcggcgtgcggtggtgcggcggcccgggggcaggggcgggcggcgggt

SEQ ID NO: 118300 - DNA, 548 bp, Arabidopsis thaliana columbia
  unsure (1)..(548): unsure at all n locations
cccccccctccctccgcccccatccgccgccgcgggggcgtgatcttttaccccccccccccccttttcccccccccaccaccccgcccccccgccaccccgcagcacgaggaccgaagcttacgagggggcgggggaaatggtagaaaaaaaaaaagagcccgccggcgcgccgcccggcgacccacacacaagaaccagacccccccccagccacccgccgcactcccacgcaccggcgncgccgcgcaacaagcacgagcatactcactctcacccatgccttctctccatattgtcccatccgtcttccctacctttttttttcaccggttgttggtttcactcccatcacctggcctccatccttctgacgaaaaaaatactctcttttttggctccttctctcacatttcttcgtcccctttctcttccagccgtgcctatcttctccattctgtttctccatgtgtccttgctctgtactcttgatttcgcacctccagccctgacacatgcttgtctgtatactctccttccccccctat

SEQ ID NO: 118301 - DNA, 468 bp, Arabidopsis thaliana columbia
tacgcctgcaggtaccggtccggaatcccgggtcgacccacgcgtccgaagaagaaaaatggcgggattcaccatgagcttgaacttgctttactagtagaaatggtagctacaaacagagtgtgactgtaccaactctggtgaaccccaagtttttcccagcgtacgggcgaagcacaacaccgggtttttttttctgggggggggggcaactaccgcggcgcttccaaagaaaaaaccggagcgatcggctgagaggaaaagaaccaggtctgcgaggagcgttttaatgtgtgtctttttgtagatcggcgtggacgcaagccgagactgtcctcccgtgtatagtatgctgagtcctgaaagcgggggacacggtggcgtgttttatacacgagcatacataggagaagcctggcggcgacttccgtctaccagaaactcaaaggatgtgaggaatatgtggcg

SEQ ID NO: 118302 - DNA, 572 bp, Arabidopsis thaliana columbia
  unsure (1)..(572): unsure at all n locations
ccctccgcccccgccccggggcgggggggaatcatttttcccccccccccatctcggggcccgcccccccccccttacggggggggcggganaactttggggggggggtaaggtgtttatatataaaaccccccgcccgcgcggcgttttcgtggaccttcgtctctctctcctccccccccgcggcgttcccccccccgtgtgggcttgcggtccgctggtcgtcctcgtgccgtcggtcgctgttgggcgcccggccgcgcctcttttttttgggttgttcgggcaccccccccccgggccgccctcctaaacaacatctatccgcattgtgtcggtgtgcggcgttgtcgcgctctcgtttgctcgtgctggtcgtgtgttcgcgccgtctcgtttctgtctgcgtgcgcccgtcggtccctccatccctgtgccttcttttcgttgtccctgctgtgcttcggtgcggttccccgtttggcgttctttgcctcggtctcctcgtgcttgtctggcgtgggtcccccgggcctggctcctcgtcgcggccccggtcccgctcgcccggc

SEQ ID NO: 118303 - DNA, 506 bp, Arabidopsis thaliana columbia
acgactcactttagggaaagctgcgtacgcctgcaggtaccggtccggaattcccgggtcgacccacgcgtccgtatttgcactctttcaagttcacaaggtgaatctgatcttactttctggtccacctctaagcacttttaaatggagaagaaaggccagcatggtacatatgaatcaatgatgactcatcatccgatcctctggataattgggtttttttgtgggggtgagggggaacccaccccgtgtgcataaaaaaaaaaaaagggggggaggggaaagcccgaagaagcggcgacgaaggggggagagggtaggcatcaatgaggtggatgggggggagtgggggagggcctggcgtccgcacgtgacgcaccaggcggggcgtgacggggggacgctgctcgctcggagtgtcttgtggggggtacgcttgaagatgcggcggggggggtgtggcacgagtcaaaaggcaggccagtagagatcgccgtcagtggggg

SEQ ID NO: 118304 - DNA, 503 bp, Arabidopsis thaliana columbia
acgactcactttagggaaagctgcgtacgcctgcaggtaccggtccggaattcccgggtcgacccacgcgtccggtaaaattgaaagcattggagacaatggagagaataaacacgaaatgggtagcagcagcagcgagtatatggattcaaagctttagcggagctacatacacattcggtatctactcttgaatccttaaatcatctgaatcttatttttttgggggggtggggtaccacccgtggcccgtcaaaaaaaaaaacacgcgccggggtcggcggcccgggtaagcgcgcgcgggcgaatgcgggggaagggtgcgtagacaggcgaggggcgtgcgggtccgcgcccgcccgcatcagacttggttcggggcgcgccccgtgcgtcgacgcgccccgcaattgtccgctcgctggcggtcatccgacctcgcccgcgcccactccccctcctccccccctctcacgtcgggccgccccgtcgacggtattccg

SEQ ID NO: 118305 - DNA, 201 bp, Arabidopsis thaliana columbia
aggggagcacgtacgcctgcaggtaccggtccggaattccggtttacccacgggtcaggcccactcaaaaaatagcagagcgggaggcgtgaacttagaggtcgacacgcacacaccaccgataaacccacccatagacgtcttgtcactacccctctcccccgattatgtcaaatgtgaactggccctggcccgcaagag

SEQ ID NO: 118306 - DNA, 572 bp, Arabidopsis thaliana columbia
  unsure (1)..(572): unsure at all n locations
ctcctcctgcccctccgccccncccccgcccgcgcgggcgggggctgattatcttttacccgcccccccccttcncccgccgccccccccccccgtttnaccggcggnggggggggatttttgcgctcnggggttgtgctttgtcaaaaattaaagagcgcgcgggccgctcacgccctccctcccggtcctggcgcgtcctcgctgtctgtcgcctccttctttcgcttcctcgcttctgtgctctccgccgtctcttgtggtccgtccgctcccgtctcgcccgtctgtcccgcgtctctcgcccctcttttttcccctgggttgttgggccgcgtgccctccctcccctccccgcctctataaacacactggcgtctgcgctgcttgtgctcgtccctctggtgtgtcccccgaccccctctgcgcgcgtcgcgggcctcgcttctgcgccttgtccctgtgtgccacgccgttgctctcgtgcgtcctcctcctccgcgcccgtccctttgcactgccgctcttcgtctgtcgctgtctcccccctcgtttctcgcgcctgcgtgttg

SEQ ID NO: 118307 - DNA, 568 bp, Arabidopsis thaliana columbia
  unsure (1)..(568): unsure at all n locations
cgtcagcttattacgactcatttaggggagctgctacgcctgcaggtaccggtccggaatcccgggtcgacccacgcgtccgatcaaagtggcccaaaggatncttcacgtgcctgggaacaaacaaattaatgggatcccatttggaggggaatatgggtttagaattttgggaacgtttaacagtcagggtggtataggttgggtgcgttgaacgggcgggggacgcagttttttttaggggaagtgggacatctatcaacaacattttatgtaaaaaaaaaaagctgccttagtaagaaatgggatcggatgatgtaaggaatgatgtggtgtgttataaagaaatgagtgatgaggatattgtgatgggggtttgggaanggtgtcaagggaataggaccgatgagtgagagagagggggagagtatgctgggagagaagggtggcagcgattatagagtggtaagtcgagggagaaatgagagagcgaggtgtcaggtgagcgcggagttaatgtccatcggcattgaatgggtggagtacgagggtggacacggaaagatcg

SEQ ID NO: 118308 - DNA, 425 bp, Arabidopsis thaliana columbia
aattctctcacttctctggaacactccaattacacacccaaccatcacatcattgtcccgcgggagtgtatgattactttgttctactatgtgccacgacattatcaacccaaaatcaatgtagatatcaaggcaaaaagaatatttttttaaacggggggtggggactaccttacatcacccttttcacatctataaaaacacaccctacatacacgctcggacacaaaaaatgtagagagcagtgaaatagatagagaagtagtaaaataatgatttgtgtatataataattatattgtattgattaggacataccaatacgtcgacaatgtccatactaatcccagaagcttcgaaagtcacgagcatatacgaatatagcaacttaaactggtcgcgctaatcattctaattttcaaattc

SEQ ID NO: 118309 - DNA, 457 bp, Arabidopsis thaliana columbia
  unsure (1)..(457): unsure at all n locations
acgactcacttaagggaagctggtacgcctgcaggtaccggtccggaattcccgggtcgacccacgcgtccggacattttgcgactcttcttctccttatcctctaaatctctcaccggtcaccgacgacgggaacttggtagttacaggaacaagaaatgtcctcgaagttccctctcggngtcngcttcatcactcattctcttccttggactttttttggtggggggggttctngcccccttatttattcattaaaaaccttgcctttcttttgcaccattttttttatctcaacaattgttattgtttctctattttttttttagtggcgttgataggcgcgccgggttgggtgtgtggtagtttcgcggcgtcctacggcgtcccgtcgtcgtctatctgcgctcgtcgtctatgtgtgtatataattggtggcgggtttgtgttcgttttt

SEQ ID NO: 118310 - DNA, 491 bp, Arabidopsis thaliana columbia
  unsure (1)..(491): unsure at all n locations
acgcctgcaggtaccggtccggaattnccaggttctaccaagggggaaggccagactaaagaaaagtgtaaccctgaagagagaaagggttgttgtgaaggacaaagggcgggccaatacagtattgactaaaagagtgggaacgcggtcactaggtggttatgtgaataggaataagtaattgtgagtacaggggggttttttataggaggggggaaaaaatgagtcgactactattaagatgaaaatatcagtgcaaagagtaggacgaaagatgagatagagtgaggggagagtatggtgagggaaattagaaaaaggatgaggtgataggacagcagaacagaggcacattaattatgtagcgggaattggaaagaacggaggagaggaggtgttattggtgtttgcctcgtggatgatgatatggggagatattgtaagacatgataataaaacgaataggggataattcacgaacgcgtgtaatc

SEQ ID NO: 118311 - DNA, 447 bp, Arabidopsis thaliana columbia
  unsure (1)..(447): unsure at all n locations
tgtacgcctgcaggtactggtctggattccccggtcgacccacgcgtccgttgtgcttcctctcgtcctcgtcgccgncnnnagagagaaaacgattaaagctggnggtataggcgaagaaaaagaggaatagatttgtaagtggtgttgggggtggttttgaggttgtgatggtgagggtgagggaaggaggtttttttttgggggggggggacctacagcacagtgtttgattaaaaaaaactgttgtggagtggggaggaatgtaggatagtgagattggagagggtatgtaatggttttaaggtgttattttggtatgattgagagagtccgaggtgtctgggtaatgttctatagggggagggaatggtggaggtgtagtttgtgtaagtgtggtgatgagtgggaggaatgtgagatggcgtgggattgtggtgaagcgca

SEQ ID NO: 118312 - DNA, 500 bp, Arabidopsis thaliana columbia
  unsure (1)..(500): unsure at all n locations
ctccctacgactcattttaggggagctagtacgcctgcggtaccgtccgnattcccgggtcgacccacgcgtccgctttctttaacacagagaaagagcctgagagacaagtgagaaacgcaacaacaccaccgaaagagagagtccaaattctaaagagaaaaagaaataaattccttcttcttgctttattgtattgcagtgcgaaggaaagggctttttttttaggggggggggtaataaaacagcagtttatttctgtaatctgttcttctctcagccgggaatgttttttagctgtaatttgtaattgtttattttgtatatttgttatttatttattatagggattgttttgcgtatcctattgctttttttttttttttgaatgtgtttattggtggcctactgttcatcgttgtattgttttcttggctggtgttgttatgatattggcgggtcgaactctgttacatgtttcttgcgttgtataattttta

SEQ ID NO: 118313 - DNA, 501 bp, Arabidopsis thaliana columbia
acgactcattaagggaagctgtacgcctgcaggtactgtccggaatcccgggtcgacccacgcgtccgattctatgagcggtgatgataaggcgatattgtatatgaagaggcaagatacaaaaactgaactaagaacatgcataaacatactcgcaatgacagaggctgagcatgcagaagttatatgggtatagctagtatatagaacttttttttaagggggggggttatctaaaggagtataataataaaaaaaaaggtagcgagagcagaaagttgttgcattcgctgtatttgaatctttgagttgattgttaaataatcgatatggttcaagagcaactcaccagatgataaaattaatatgatgtcaaacagccggatgtacatgattcataagatagaaaagaatgctacataaacatcttgtgtacattacacaccaatttcagttaggggtgagaattggagagaagtgaagttacaatttaataaaact

SEQ ID NO: 118314 - DNA, 478 bp, Arabidopsis thaliana columbia
acgcctgcaggtaccggtccggaatcccgggtcgacccacgcgtccggttgctctttccataatactatacatcttcttctagtctctctctataaatacaagtttactcttcctgttcctgaaatgtgtgactgttctgtggattatgtgttgggagtgcgcggggtgcagaggcggggtggaagagggtttttttaggggggggggcaagctaaagccaccctttcacaaaaaatagccgctgcagtgcagagtggagaaaagaagagaaagggaaggaaggatgaggggagaatggagataatataaggggaagagtgggaggcggagaggcgtggcaggagttatcgcaaagggataaagtatagggactctggtggtcttatatattagggattatgagtggtgaatggagagtttgtcagttagctgcggatgcattaatacgacgtgggcgggacggtcggcttttatacc

SEQ ID NO: 118315 - DNA, 463 bp, Arabidopsis thaliana columbia
  unsure (1)..(463): unsure at all n locations
acgactcacttttaggggagctgcgtacgcctgcaggtacaggtcncggattcccgggtcgacccacgcgtgcggccacgcgtacgtataaactttaaacgacgaagcggaggcaaatgaggagccgaagatagccatgtgattttaactacgtatttattagtgagtcatagttctcatcatgcattaccatcagtgaaacagtgcatcgacacacaccctttcctattagggggggggggcgagcacctctcccacatttactgttaaaaacacagagtgccagacacaatttcgccgtgaatgatcggagatgtgaaatgaaagggataaaagattatatataactggtggcttgtatggcaagagagtgctagggctgcagcatagaaagatacagaaagcaaaatgctgaagatatcaacgctttaatcttctgttcccatgttccattttaaaaatc

SEQ ID NO: 118316 - DNA, 482 bp, Arabidopsis thaliana columbia
  unsure (1)..(482): unsure at all n locations
agctacnnnnnnnnnnnnnnnnnnnnnnnnnnnnnnnnnnnnnnnnnnnnnnnnnnnnnnnnnnnnnnnnccacgcgtccgcgtcattcgatttcaagaagtgaatcagacaggctcaaagcaaaacgtatgtttggctacttgttcaaaacctgaagttagggatcaggtcaaggcgaatgcaaggtcaggtggctttgtgatcagtttagatgtatcacacattttttttgggggggggggcaaacataaactcctatctcaaaaaaaaaacctctacaatacctctgcaattaataaacacaaactatataaattataatattaatttattattttaaaaaaacaataagatcttcacccgtacntctatgggttttatgaacacgaggaggtgtgggaagtagttggcaaaagaatcgcccggacagtgaagtagcacggcggaggcctggcagcatcatgttttgaataatagtagg

SEQ ID NO: 118317 - DNA, 473 bp, Arabidopsis thaliana columbia
  unsure (1)..(473): unsure at all n locations
tcgcctgcagtacccgtccgnnatcccgggtcgacccacgcgtccgaataaatatcccaaaatttagtggcggcgagagggaaaccaaaattcgcgagagagaagtatgtcgaagacgctggtgcaaccggttgggctgaagaggtttgctatttttttcttctcgttcgttctgcttttcgcgcctttttttttttttggggggggggggtttcttccgcccgtgtttactaaaaattcttcttgtgtcgttggctgaggtggtttctcgttctgtttttgtggtgtggatttttattattttttttgtctgcttcccggcgagccgccgggctgctttgttttttctatgtctcgtaggtcgctcttatgccaacctcatttctctgatgaactgcttcgttcattgccgtctgtctctttcctcttttttttgcttctttttttttgtgttcttttgtccttttttttgg

SEQ ID NO: 118318 - DNA, 493 bp, Arabidopsis thaliana columbia
  unsure (1)..(493): unsure at all n locations
ccagctccctacgactcacttttagggaagctcgtacgcctgcaggtaccggtccgngattcccgggtcgacccacgcgtccgctgagatccagagcttgactcctgctatttcaaaccccttcagggtttatagaatttttaggaatccgagagagaaaaattcagggaagctcattggccttgctgaatggctacacttgagggacccggcccgccagggatacttttttacgggggggggcccccccccccactccccctctcaaaaaatacccctccccgtcccaacttaatctactaccactcaaaatccactataaccttaatctcttattttttaaataagattacacccaccccctcacccccctcttttacctcctcgcccaccgcccgcacactgcacgctcttgtagttcgtctccggtgccccatccacccttcccggtccccttccctcgcccacgccggcccccgcataatgacgtcac

SEQ ID NO: 118319 - DNA, 461 bp, Arabidopsis thaliana columbia
acgcctgcagtaccggtccggatcccggtcgaccacgcgtccgggacgcgtggatttattgagaatttcgtctattctttcatcgggcataaaaaccagtgaatattgagatggagagagattttggcgacgggaatacatatctaggagctacgagatatgcgcgagcgatgacataaggtttttttaaggggggggggccaatatcactcattcaccaacataaaaaccaacaaaccctcatcacaaataaatacccacataaaatattatttaataaatataattttatatatatcaataaaccaaaccccaccaaaacttcacaataatatttctcccgactgtaacagcacacacaagggttgaagacggcctgcctagtatattataattgaacgagcgagtgcgaacgccaagttaggcagggagcagggtgacgtgttgggagagagatacgg

SEQ ID NO: 118320 - DNA, 521 bp, Arabidopsis thaliana columbia
  unsure (1)..(521): unsure at all n locations
cgtcagctccctacgactcactttagggaaagctgctacgcctgcaggtactggtccgggattcccgggtcgacccacgcgtccggtttcttcgaatccagacacaacaaatccgaacctgaccaaaactgaaaactatgtcagcctacgagtacccgaggctctctcgttccgacattatcacggcgctcaaggatgctcaaatcgctagcgttacagagaccgatctttttctccggggggggancttggctccgggctggacacaaaaaaacgggtcgttcgggttccgcgggggtggtgccgctcgggaggtggtagggtaggtgggtttgattgggtgggcccagatcgtacggccgccggcgcggcctgcgcttgtttccagcccgcggccaacgcccgcagctctgcgttacgttagggggggcggatagcggtgtcagtaccagggggccgtcctcgtcctgaggtttatgcgagtaatgagggggcccgagccacgcggcgccgtctcccgg

SEQ ID NO: 118321 - DNA, 491 bp, Arabidopsis thaliana columbia
  unsure (1)..(491): unsure at all n locations
ggaaagctgctacgcctgcaggtaccggtccggaattcccgggtcgacccacgcgtccgtgtcggcgagacatcatcaatggaggaagtagcgagagaagaagtanagatcgacaaggatctgcggaggaaaataaagaagacggtgaagaagatcttggaaagttcgaacttgtacaagataacagagattaaggcgcgagaagaagcttcaggtggaattggatcttgatctgtctcaagatccttacaaggtgaatcgtgaaagaagaagttgaaaatttcctcgaagaagcagtaaagttgatcggcaataaacttgcgatgcttcccaagaaatagaggccaccagtatttagatattattaatttaaaaaggctgtgcatccaaaatggggataggtttaaatggtgatcccctccaggggtgggctttggttgtcttgtttgaaagcggggcgccggggcgcggggaggggggtgggtgtgggc

SEQ ID NO: 118322 - DNA, 468 bp, Arabidopsis thaliana columbia
tccagctccatacgactcacttttagggaagctggtacgcctgcaggtaccggtccgggattcccgggtcgacccacgcgtccgtaaatgctcaaatgttgagacattgcatatagtgaaaactccagaatgttcaaactttggtctgatttatgtagctgagagatgtaagctgctgaaggaagcttcatattgatggttggaggactaataggataggtgatgaaggttttctttggggggggcgaacactgtttaaacttggaagaactagagctgcttgatgggcgttggacacgtgtggtggggggagggggggggggggaggcggagggaggggaggggggggagggaggagggtgagtacggggggttgtgacagatttgagagtgtgtggggagctaagtcagggagatcggttggggggggtgatggattgggtattgtgggtgtgtcggcgcctgttt

SEQ ID NO: 118323 - DNA, 504 bp, Arabidopsis thaliana columbia
  unsure (1)..(504): unsure at all n locations
acgactcactttagggaaagctactacgcctgcaggtacccngtccgaantcccgggtcgacccacgcgtccgtgagagttaagctataagagagtagaaagttggtgttaattaaagtttggatgcagaagtgtgaattttatatggatttagtattatttgtaaaggaggattatatgagaaatatgtgtaattggatatattagatagtaaagaaaaaaatttttttttttgggggggggggaaaaggaaagattgtaaaatataaaaatatatgtagagtaatgagtaagaattataataggagttatgtaatgtgtaggagtggttatatatttttaggtatgatggttttataataaggcttctgtcttgacaatagataaatgggtgctcgctaagtccgtgttcacctcgtaactattatattctgatttgaattataatatgtgcatcgctcattaaataactatgtagtgagacggtggcttcgccactctgaa

SEQ ID NO: 118324 - DNA, 505 bp, Arabidopsis thaliana columbia
gactcacttaaggggagctactacgcctgcaggtaccggtccgcgatcccgggtcgacccacgcgtccgcgagtgagagccttttctttcggagttttcaacgcaattcttcagagaagcagaagagatgttccccattatagggttaggtctagtgcctcacctccccccgccccccatgcgcccccggcggccgcccgctgtccccccccccgtttttttttggggggggggcggcctcccccccccacatcgcttctacaaaccccccccccctcgcgcttgcccgcccccccgggtcctcggctggccggtgcatgtgtcggtctcgtcttgcgtagctctcgtgatgtgtgtgctggcggccccgcctcctccctccccctttcccccgcctgctctctccgccccccctgccccgcccctccttcatcccgtctctcctccctcgcctgttctcggccgcccggtcgcggccgcccctgctctcatccccctcctccgt

SEQ ID NO: 118325 - DNA, 515 bp, Arabidopsis thaliana columbia
  unsure (1)..(515): unsure at all n locations
ctagctccctacgactcanatagggaaagctactacgcctgcaggtaccggtccggaattcccgggtcgacccacgcgtgcgaccacgcgtacgttattnttccaccagagacaattgtataattattatgaaatacaccaggggaacaataccaatcgaaataaacgatatgagcgggaatgtcctatgtataagtgcccgaaaaaacaatcaagtcgaggaacaaaattcctccttgggggggggggacaaacaaacacgtttaacttataaaaagacggctcaaaggctagccgaaatatgatataggcattttaaatattgggaggtaatgatatatgaaaaacgtgagaatagaaaatagtaggagagagagggttcagatatgaaggctttgtaaggagtacgctatactgaattatgtactagtgaaatgtgagatataaaattggcgggcgtggggaaatatgggaaataaccccaacaagatagtagacctggtcgtcatatagac

SEQ ID NO: 118326 - DNA, 504 bp, Arabidopsis thaliana columbia
  unsure (1)..(504): unsure at all n locations
gcctgcaggtaccggtccggnattcccgggtcgacccacgcgtncaggccaaaaaaacaaaaaactcttacatcaataacaagtaaatgaatagatttgaggaactgagaggatgcgcccacgtatcttcacatttatatcatcaagaacgccacctcactccattgttttttctcctccttctcttctttcgacccacaccaactttttttttacagggggggcgccctcttctctccttaatgtaatcgttaattatcccattacacgttacggttacaagttcttttacgccccgggataagggtgaagtggtttattttattagtaaatcgtgtatgatatgcataagagacagggtacctcggcggcgtgtaacacccaacctctaaacttcccgcgccataatgattataatttattgtgtgttctttgaatatttaatgccgttatgcttactacacattaaactcaacttaatattgcaactacactccctccaag

SEQ ID NO: 118327 - DNA, 518 bp, Arabidopsis thaliana columbia
  unsure (1)..(518): unsure at all n locations
acgactcactttgggggaggctcgtacgcctgcaggtacaggtccgggatcccgggtcgacccacgcgtccgcccacgcgtacggcctggaaaaaagaaagataacgggactcgagagattgagattacggagccacccactttcatggaggctgcactgtgaggtgtgtgaacccgcgaggtagacgaaaaggaggatgagcgtgaaagggggcggtttttttttngggggggggcccccaacaactcaaactataccaaaaaaatctccctgtgctggacacgtgaacacagaagtggctgggggagggattgtagagggggaggaggtatagaggtagtaggtgatgggtcgggaggcgccacggcgtgcgagcataggatagcggcgcgcggctcttggcgtccgtcgccttgcgtgatgtagtacgtcgggtcagagattgaggaaagtggaaaagtgagggttcgaggtaaatggacggaataggagaccgcgtcgctggtgacgtatttcg

SEQ ID NO: 118328 - DNA, 415 bp, Arabidopsis thaliana columbia
  unsure (1)..(415): unsure at all n locations
acgactcactttagggaaagctcgtacgcctgcaggtacacgtccganatcccgggtcgacccacgcgtccgcctgcaaccatgattggtacagaagacagaatcttgaacccctggtcaatgttcgttaaaaaatatggtttgctgccgctcataggtaccccgcgcacccatcatccatttttctcgctctgttgccgccgagaccccgtcgctttttttcacggggggggcctatcgtgtatctatcattttcttttaccctccctgcctgacatgggggcccgtaaatttgcagcgtcagataaagaacgaaggctcatattattatatatctgttaatggtgatgcttacgacgtcctcccctcccatcgctcctgtattatctctctgccactcgccctcaacccatgc

SEQ ID NO: 118329 - DNA, 438 bp, Arabidopsis thaliana columbia
  unsure (1)..(438): unsure at all n locations
acgactcactaagggggagctcgtacgcctgcaggtacctgtcccggantccccgttcgacccacgcgtccgnggacgcgtgggtttaaagatagggatgagctgaagaagtgtgagagtttgatagttattaatagataatgaaagtgagaattaatatggtttcaatatgtctgcttgcttttgggaatagtttcgatagctggagggagagctttttttaacggggggtgccgccaactttatacgctattactaaaataatgcgccccgtagctcaaacatgcaaattattaagtagggtggtggagtggggatgagtataagtgattttatattaggtgttaatgtatggtggaggccgataataacatattttatgttaattgatgtttaaaaatatacagtctggattgagtgtttgattcgtgagcgtgt

SEQ ID NO: 118330 - DNA, 518 bp, Arabidopsis thaliana columbia
  unsure (1)..(518): unsure at all n locations
acgactcactttagggaaagctgctacgcctgcaggtaccggtccgngantcccgggtcgacccacgcgtccggtcataccttcctttgagaaggcatgcaaggccatgtttgaccaaatagactcagccttccagaaaggtattgctgagcatacaaatgcagcccagcaacgggttgactctggacactcccagcttgctcatactctaaaggaattttttcctgggggggggaaccgcggtcacgctttgctgaaaaaaatgcgccgacctcgccagacgtcggggcccgctagggagccatgagggagaggctgcgggagacggtatggggcagtggcgaggagacgagagggccgccgcgcgcgccgcggccgcggatggcggtgctcgtgaggcgccctcgagttggtgcaggatactgactccggtcccgccctaccatgccccgctgttgcgcccaccgaaggacctgcccgtcgcgctgagtcgccgggcgggctgcccggtctcagcc

SEQ ID NO: 118331 - DNA, 617 bp, Arabidopsis thaliana columbia
ctgatgccccccccccccccaccaccccggggaaagaataatatttataacgcccccccacctcgtgccgcccgacccccccccacctcccaaacaagaaaaagagaggaatttttacattgggggttatagtttaggcaaaaaaaatgaggggggcgcggggccgccgcgcgtgccggcactatgtatcgtatcttagtcctccaccctcatagatcccctctgcgattacctgagtcgcgtcattccatcctcacgtgctgtctatccgtgcaacttctcacccccgaacataccttttttaacaaggggggtgaccccgccaccacaccgcccctcgccctaaaaaaaacacccctccttcattacctctcgcaactctcgcctcattcacccacgtgcatcaccgtcccctcctcccccactgctcgctccgaactactacaccaccgcgccccgcaccgcctactaattctcctgcggcacgaacgtctcagtccacgacccttttagtgcaccccccttgaccccatcgctcgttcatattattaagtcattcttttgctgattactgctcccactactgtgcgtctcccgtccttgtacctccttctccc

SEQ ID NO: 118332 - DNA, 503 bp, Arabidopsis thaliana columbia
  unsure (1)..(503): unsure at all n locations
acgactcactttaggggaggctggtacgcctgcaggtacgggtccggagtcccgggtcgaccacgcgtccgccacgcgtncgcccacgcgtncgnttgcaactctcaaaccctagatcaccaccaatccaagtctccctcttcgttttccatctccgccggagctaaacccaccgtaagataccgggagtgtctaaagaatcatgcggggagcgttttttggggggggggcccctcctcccaccccctccccccaaaaacaccctccgatcctccgcacccccaaaaatataagatgtttcgtgcgtgggggggggctcacaggtggggtcgtggtggggggaagggggagcgccggggcgggcgcgggtcggtctgccggggtcggcggccgccgacccccgtgccgcttcgctcgcgggcggggcggggtggggtggcggggggcggggctgcgcgctgagaaccgccggggcgacggtgcgcgccggcgggggcggtgca

SEQ ID NO: 118333 - DNA, 412 bp, Arabidopsis thaliana columbia
  unsure (1)..(412): unsure at all n locations
tgtacgcctngcagtaccctgtccgaattcccgggtcgacccacgcgtccgccacgcgtccggacttctgggggagatatatgctagaggagctggtgttgaaagaaattataccaaggcacttgaatggtttacacttgcctgcaaaagaaggtctgtattagactatgtgtttgtagtcggtaagagaaaaactttttttttgggggggggggtatcatacaccactctctttctttaaaaaaactgcttttctattacaaaccacaaaaaaaactttaacttactattatattaaaaaatttacactctctaattttaaatttattactatttatttttatcccatcatgtcgcatgtcgttgtttttttcgttgttccatatatcacccgacaatttttgtcatgtat

SEQ ID NO: 118334 - DNA, 485 bp, Arabidopsis thaliana columbia
  unsure (1)..(485): unsure at all n locations
tccctgcagtactgtcccgnnatcccggtcgacccacgcgtccgcccacgcgtccggcgttcgattacagctccacagaggattctgaaatggttgagtcaaaggttctagttacagaacttttttttttttttccggttccttctcctgggtgtcttctcttttctcatgccctctccccccccagtttttttttagggggggggggaaccacaaccgcatccattcttctaaaaaatactgttctccttgtcttgcgtgtgtagctccccctgaagctgagtcgtcgtgaaaggatattattttgcatgaggtatatatggaaccacacccttctcattacctctgttattctactctgccctctccttcccccacctcctctttccctccccaccgctttggatattaaaatcgcggcgtcccgcgctccctttgtacttaacccccgtcttgctttcctcaccccgtcgctctttctccgc

SEQ ID NO: 118335 - DNA, 307 bp, Arabidopsis thaliana columbia
gtacgcctgcaggtaccggtccggaattcccgggtcgacccacgcgtacgggcttgttaaaaaaaaaacacacatcatagtaaagtcgttgttttgttgtgcatggtccggtcatcgtattgactactaggtggcgttagagtgagcctcgttttgagatggtatggctatgtgttaccgtacggagacactagaactgaaggttttttcttttgggggggggagctttggtgctaatatatatttaatagaaaaaagttgtggtgtcatggtggggaacgtgttgtaggattagtatgggagatag

SEQ ID NO: 118336 - DNA, 550 bp, Arabidopsis thaliana columbia
  unsure (1)..(550): unsure at all n locations
acgactcacttttagggaagctgctacgcctgcaggtaccggtccgngattcccgggtcgacccacgcgtgcgaagcttttttacttgcaagaaagagagctgacataagtacatatatcagccgtgagataagctagtgccaggatacacacaaccaagaagaattggtgcgacacagaaagccggacgaagagaaatagacggagatcggagagcacaaaaaattttttttaagggggggcgcacccccatccgcacagccgccgtgagcaaaaatgccgccacgtgcacgcaacggcaagaaagagaggagcgcgtgggtgacgaaaggaaacgtaggaggcttgttaataaagatgggggacggagtgactacgggacgcatgccgcccgcggcacaatagtatcagaaacggaggcgacacacgcataacatactccgaacctgaacgactcagtgcaacccaaagcgaaatgacgcgctctcatactccacctagcacccgcgcagcagtagagagacagagagaaataagaagggtgttggcc

SEQ ID NO: 118337 - DNA, 512 bp, Arabidopsis thaliana columbia
  unsure (1)..(512): unsure at all n locations
caggtacaatacgactcactttagggaaagctgctacgcctgcaggtaccggtccggaattcccgggctctactgattttggtgtagcccttgtttatttgcttatgtttatcttttgatctgatctataaatatatatacaggttatcaaaaggcctccaccaaaaccaactcaacatctccgcctccatctccgcctccatctccgccgcgagttccagacgctcattaattggagggcgttaaatccgactcttttcccgaacacgatgcgtagagttgtcattcggacggaggtgtgcgtnncnatnnaatgagnttgcgggggggtggtggttgtgcgtgggggagggcgggggggcggggcgtcgccggcgggggtcgcgttggcggcgcggggccggggtggtggccatgggtgggcccgtcgtggcgcgggggcggagggaaatgaggggggggggcgtcccatctgatacgaccggaggagtgtgaggaggcggggccgcgtt

SEQ ID NO: 118338 - DNA, 228 bp, Arabidopsis thaliana columbia
ctccctacgactcactttagggaaagcagctacgcctgcaggtaccggtccggaattcccgggttttctcactaacaccaaaaacaagtctttgaagaagaataaaaagattcggtaataataaaatgtaattctgccactaaacccctacgtaaacgatcgatctttttgaagcaacataacatacagttattttactcattatataaattggcaaatcgagacaca

SEQ ID NO: 118339 - DNA, 204 bp, Arabidopsis thaliana columbia
tacgcctgcaggtaccggtccggaattcccggttcgacccacgcgtgcgagccatactataaaaaacaaggcgcacgtgccggcgcacgattgggtcgcgaacacccaagcaagaaacgatacaaaagcacgcgatcaatctccggagcccgttgataacgagtaatttagtgcctgttacagcgtataacgtcggagccccag

SEQ ID NO: 118340 - DNA, 424 bp, Arabidopsis thaliana columbia
gatacgtcagctctatacgactcactaaggggaagctcgtacgcctgcaggtaccggtccggaattcccgtttcgacccacgcgtgcggaaaaaaagtctagctctcttctctttctaacattgttcagaggaggaggatttagagctggctagtccgttatgatgggcggggatgtaactgatgtgcgcgggggggagtgtgcaggattttgtgagcgggtgtgagtgtcacggtaagatttttttttaaggggggggatgcaacggggggtgatactcgcgctccgcgtaaatttgttggagcctcggcggcatatcagcgggcagtgggaatatatcgtggtgtgggatgattgggggcagatgttcgtagtggagtagggggggaggggaaggtgatgtagtaggtagtctgagtggggg

SEQ ID NO: 118341 - DNA, 569 bp, Arabidopsis thaliana columbia
  unsure (1)..(569): unsure at all n locations
ccccccccnccccccccncggggggggtatttattgtgaccacccccccccttttnnnnnnnacccccccccccccgggaagggggagagggggacttttcaccaggggtgtgaggcgaaaaaaaaaaaccgcgcgcccggcgggcggcgcgcgccccgggaccggccgcgacacacccggagggacgacgggcccgcccgggacccccgggcgcggccgccagccggcccgccccggcgcggcgccgaccgcgcggcgcgcgccgccgcttttctcctcggtgttgggtcccgctgcctctcctctcgtgtttgtctaaacatttggttttgtttctgcgtgttgttcgtctcttcgcttgttccctccgcttccctccgggtcgcggcttcttgccgctccgcgtgttatcgtgttactacgcctccctcgcctcctcgccccccctgtccgggccttcccggcgttgcgtgccccccacacgtcagcgcccctttcgctcccccccttgctctattctgttgtcggctttccttcctgtctcgccgttcgcgtcccccttgtcatg

SEQ ID NO: 118342 - DNA, 230 bp, Arabidopsis thaliana columbia
cgactcatttaggggagctgctcgcctgcagtaccggtccggatcccgggtcgacccacgcgtccgctctaaaaccctagaaactcacttcctcagtttctccaactctgtacttggtatcatcaagcgaaaccctaaaagaaggaatgtttagtgtgttgtgttgtttgttgggggtgggaccgataacaagcgagtcccagcgccacattttttacgggggggggagt

SEQ ID NO: 118343 - DNA, 560 bp, Arabidopsis thaliana columbia
  unsure (1)..(560): unsure at all n locations
ccccccacaccaccccccccnnccccncccccccccccgcggggggggagaagtaagaagaaaaacaccccccccccccttgncnnnnncnnnaacccnnncccccccnccccnagacgagcagaagagaagagaagatttttgaganggggggcggaaggagccgnaaaaaaaacaaaaannggcgggcggccggcgcggcccgcagccaccacgcagcaagacacgaacacacacagcccgacccacaacncccaggccgccaagngcccgcgcaacgcgcacccagccgacaaccgagccaacaccgacccccccccggcccccagccaccgacacgacggccgacgcgccttttcccaaaggacgttggggccaacggcaacgcgccagccgccgcgacgagaaaaaaacggggcgggacgcggagagcaccgaccggccggcccccccacacaaccacgacgacacaacggacaccaccaccgcccacgcaccgcgcgcgcaccacaggaccaacaaggcccaacgcacgcaagcacgcacacccaccgcgcgcc

SEQ ID NO: 118344 - DNA, 508 bp, Arabidopsis thaliana columbia
  unsure (1)..(508): unsure at all n locations
gctcctacgactcattttaggggagctgctacgcctgcaggtaccggtccgngatcccgggtcgaccacgcgtccgggaatcgcaatgggtgcgtacaaatacgtgtcggagctatggaggaagaagcagtccnntgtnatntggnnnnnnnnnagngagnggaaagcgatgggggcctgctgtcttcctctttatctcctcctttcccctacctctttttttttttngggggggggttctcccttcctcgcttttttgtttaactcccctggcccgcgcctgggcgtgtagggtatcgtgttgggtgttcggttctgcttttctctcttttgtttgctttccgttctcttcgcgccccgctctctccctttatgtttggcttagtggtgttttttcttttcttcatctgttgtgtgtggctcccttttttttttggtgctcccctcgtgtttctttcgcatctttttttccctctttctgttgtctccgccggctttccccttttct

SEQ ID NO: 118345 - DNA, 517 bp, Arabidopsis thaliana columbia
  unsure (1)..(517): unsure at all n locations
gctctcatacgactcactttaggngaagctgtacgcctgcagtactcgtctgngatcccngntcgacccacgcgtccgcccacgcgtccggcaatctgcatgtcaatctctgcaatgtcgttcatggtgtcagnnggattcaacncanctgccagggtgagagtttgcgtccactttcctacctgatgttctccattttccttgccgctgggcccccgaggcttttttttggggggggggaatatcacacttaaccttcattttaaaaaaaccgttattcttatttttccaaagtttgtcgcctattgagaagagagtaggtgttatgttatctgtatttgtcggtcttattgttgtggcgctgggcgggcggttgtcagacatcggttgggacgctactgggacttatggaggtgagtgggttcggcccttttcctccgtattcagccggggtgcatctcgccctatgtctatttccggcaactcgggtcgtccctagtgttcacgggttattacg

SEQ ID NO: 118346 - DNA, 439 bp, Arabidopsis thaliana columbia
  unsure (1)..(439): unsure at all n locations
tgctacgcctgcaggtactggtccggaattcccgggtcgacccacgcgtgcgtgttnctntttaatttcatttccagcctgacggtaagatattaaaaacaagagctgataacttaatcttattaacaaatggggagtattttacttgagcgatctagtagcacgctaatcacaaaagctaaagagttcgcgagggaagaacagcgtttttttttaagggggggggggacgatatgacgccacagctcccatatgaaacacaaacgtatacgcaaaattggagaagagaatatgtataggggggtcgtaagagagcgggtaaagagaaatatcagattggtaaatgatatgaaaagggtggatagaggagcagcggaggtcgtgtattaatacttagtgtgaaggagagtggtagacagcctcgctaactgtgtaatgc

SEQ ID NO: 118347 - DNA, 482 bp, Arabidopsis thaliana columbia
  unsure (1)..(482): unsure at all n locations
tacgcctgcaggtaccggtccgngattcccgggtcgacccacgcgggaaggccanctaacaaatataataaacgatacattagacagaattctaatgtcgactctacatcaccactcaaatgcaaactttcataattttgtacacccaaccccaacaccagcaatatcaacacaaattccattgaccggatcacgcaccacagatttctctattaggggggggggccaccaaaaccagatttatataacagaacaacaccctcacaaccccaggcaccaaattaatattccacctattttaaaaattgaagtgatggcaagaatagagaaaagagagatgagaaggaaacgtagacgcaaagcacaataggaattaatcccactccattgtagcgatggattagaactgggctctacagattgtgatacatcaacataacaaaaaagcgggagctccatagcttccatacaaacaagccaag

SEQ ID NO: 118348 - DNA, 523 bp, Arabidopsis thaliana columbia
atgattctgccagctactcatacgactcactttagggaaagctcgtacgcctgcaggtaccggtccggaattcccgggtcgacccacgcgtccgctcacttttaagcggggcaggatatcttcagcgacttgatctatcacactgttcttctgtgatatcattggattttgcgagtagcttaaagaaggtttcagcattacagtcgatcaggttggatggttgttctgttacgcctgtttttttgggggcgaggggcacattgtgcaattccctgaaagaggatagcctaagcaaatgcgtgagcgtaactgatgaaggtctttcttgtctagtaatgaaactgaaagacctggagaaacttggcgtggcatgtgtgccggaaacttagtaggggtgcaatcgcccagattcggtcatataaggtgctttcttcgctctcgtgtgaacatgcgcggcgggcgctgctcccatggccgagcgcccgcgtgcgggcgtcctcgcgcccggtcccgcttcctcccc

SEQ ID NO: 118349 - DNA, 410 bp, Arabidopsis thaliana columbia
  unsure (1)..(410): unsure at all n locations
gggagctgctacgcctgcaggtaccggtccggaattcccgggtcgacccacgcgtgcgagattcttcaaagtgatnccccaaatatgcggtatggaataatgaaagagttcgacccagtagccccttaattcatatgccggatatatagatgagtgggggcagatgtccaatgatattcccctaacgaacaagaaagaaagcgtaaaataacaattcctcttttaggggggggggcaagatacagcccagtctaattgaaaaagaaaatcagtgtaatggatttgaagaaagttatgtgtaccaatttgagaaataagtaatgcattatattttatattatggtaagcaggatcaacgaaggagctcgatcgcctggccaaatatagaatgaggaaaagtaaaagatgtg

SEQ ID NO: 118350 - DNA, 489 bp, Arabidopsis thaliana columbia
  unsure (1)..(489): unsure at all n locations
ctccctacgactcactttagggaaagcagctacgcctgcaggtacaggtccggaattcccggttcgacccacgcgtgcgggcaaagctaacatagccatttctcgaagtcaagaaaagataaacgatagtggcccatacacaccacatactggcaccaaagaatagataaaagatagcgatcatagcaccaaataataatcaatcttcgaatgaccaagtcagcaaaaacaagttcctcattaggggtgtgggacgaanaaacaacaatacagtattaatgaaaacccctcgcatcagaatcggcgaaagatgttgtactaacggtgacattagagaaaacataaataaatttaaaaaagttagtacgtaaagaatagcgcccatacgccgcagatcaacaatataacagagcaaatatacaacacccacataacactaaaaaaacgacaccgtttccaaatcaaaacaacgcgcgcaatatacaccta

SEQ ID NO: 118351 - DNA, 309 bp, Arabidopsis thaliana columbia
  unsure (1)..(309): unsure at all n locations
acgcctgcaggtaccggnccnnaaaaaagttttcaaccccgcggtaagcgctaaactaacataagagaaaacaacccacaacatacaataactatactctatcatcaccacacggaataatcgccgatatgttaatagccacgggatcacatgagtgatacgggaaattggaagcgacaccccatacacgcacgggtttttttaaagggggggaaccacaatcaccagattatcacacaaacacgccaccaacacacgcaaaagaaacgaaaaaacgatccactaatggttaatcaggtacgaacagaa

SEQ ID NO: 118352 - DNA, 455 bp, Arabidopsis thaliana columbia
  unsure (1)..(455): unsure at all n locations
gactcacttgnagggaagctcgtacgcctgcaggtaccggtccggaattcccgggtcgacccacgcgtgcggaactaattcacatgtatcatttatttacaccaagaattttagaacatgtggtggatcacgattcatatagtacacttaattatatattaacggcggctaccgcccattacgtctccctctctctgttgtcccacgaccccaaaaccttttatatcacggggggggagactttacccgcattcgagaaacttcaacagacgacatttgtctaccccgcgcccaccggaatatgcgaatcgagggaaaagtggggctgtcttctatatatggttttatgtttattatgcatctaatccgcccccaagtcatgatctcctctagttttcttgcacatctggccactcgctcggcgtactatacacgcctactatgaatccgtcacc

SEQ ID NO: 118353 - DNA, 514 bp, Arabidopsis thaliana columbia
  unsure (1)..(514): unsure at all n locations
cctccacaccccccccccccccccccccccccacggggggggggaggattgngtttttacacccnnnccccccccattttcccncncnccaaccccccccccccttttcccacgnngaggagggaggaaaaatttttacgacgggcgttgtgggggtgttaataatacataacncccccaccgcncggcggcgcggccatctcgcagcaccaccgacccccccgcccgcccaccctcccccccccacccccgcccccctcctcactccgacacaccacacactgctacccattggttgcccgtcacccacccccacgcactcttttttttcgggttgttgggccccgcccacccccgcccgccccccaaaaaaaatcacccgtcgcgggccgcgtgagagcgcccgctctcaacatcccagcggcaccgcgggcacggtccacccacctcgcccgtccccgcccagggcccccgtgccctcgccatccgccttccccgttccgtgctcccagca

SEQ ID NO: 118354 - DNA, 525 bp, Arabidopsis thaliana columbia
  unsure (1)..(525): unsure at all n locations
acgcctgcaggtaccggtccggaattcccgggtcgacccacgcgtgcagaggcttttataaaaaaaanncacaatacaacacggggaaaagtaagtataggcgacccagcatcggctgtaagaaaaaagaagaaaaatttagtcacgccgatagtaagcaaacaaactccgtgcatagttcatttgtcgacaaacgaaggggagttttttcttttgggttgttggcacgcacaactcgctacatttatctacttataacagctcttcaattaatagaagagnagataggaatgacaagagagaatgtgggagataaacgagtataattaaaaatatagtcacgggaagaaataggacccacgaacgtcccgacacgttgattaaatgcagactatcaacgagtcaacgaccatgcgacgaaacaattccgattatcttgtgtgaaaaaataatgagccgcctacgtctctatacctaaataattccatctctcttattatactcctaccgagtctatagtgttaa

SEQ ID NO: 118355 - DNA, 493 bp, Arabidopsis thaliana columbia
acgactcactttagggaaagctgctacgcctgcaggtaccggtccggaatcccgggtcgacccacgcgtccgataaacagtgctttggataagtataacaacgctcctgtcagtaaaccttctgttggtgaacgttggccacaaaatgctgtagaggattcatccaatgtctttgctgctgatagtattaccgatgataatcccgatggagttgttttttatgtggggggggcaccccacacgggaattggttaaaaaaaaaagagggcaagggaggggggagggggggggttgggggaaagggtgatggagggggggtgtgttgttggagatgggggggggtgggggagcgcgcggcgggggtagttgctaggtggtttggggatgggggccgggtggttgttaatcagtagggagcgggacgggcatggacgggcgagggctgcacgatgagtacggcgggggaggatggtgagggggggggggtgtcggg

SEQ ID NO: 118356 - DNA, 321 bp, Arabidopsis thaliana columbia
acgcctgcaggtaccggtccggaattcccgggttgacccacggggggaggccgaaaaaggcgaaaaagacggcagacgggggggggggggaggggcgcgggggacggccgaggcggtgcgcgccgcggaaagaggcgggccgcgcgcgagacgagacatatcggcgcatgggcgaggagaaggacgcggcacacggaagactttttttcgggggggggggggagaagcccggggagagctcgcggcagcagggcgcgccaaagggcagaaagaaagggagccggcgggcaacaggagtcgaggagggagagagatgagaag

SEQ ID NO: 118357 - DNA, 312 bp, Arabidopsis thaliana columbia
  unsure (1)..(312): unsure at all n locations
tacgcctgcaggtactcgtccggnattcccgggtcgacccacgcgtgcaggggannnaaaaaaaacacaacaaccttaagaatttatttgtatatgaatagtgacagggagcggataaaaatttattaaaaagtatgtatcgcgccgaactacaactatctccaagcccattacattcacgcacaaaacaaatcacaatttttttcaaaggggggacggagcaaatatatgcacttcacatggaaaaagcgagtccgctactctgtcaacacaaatgtatatcgcgttatctaaaagagagctagtaagaat

SEQ ID NO: 118358 - DNA, 512 bp, Arabidopsis thaliana columbia
gcctgcaggtaccggtccgggattcccgggtccacccacgcgtgcgggtgggagaaacaaaaaaccacgaacgatgaagagacgcaatggtaattggcgctacgaccgcactccgataatcaaagcggaacaatcgccgtcctaccctaactcatccactttatcagaaataggatatgtgagcagcacaagcagaaatttttttaacgggggggcgataaacacatgccccatacttgtattctcgcggacccagcgtcgggacgacatgtaagagacaaatgtatcacggcctcagtaacagtaaaaaagaaaaataagtagtaaagattaactaaaaaataagtaaacggaaccgatcaatttcaattattaatctataaagggataatcagtaataagataatatagcttttttaatgcgtttgccatcaaacagaaacaatagagggacttaccgataatcctaatgaataatgcgcacgaaaatgtgaaaaaggaccgattagcat

SEQ ID NO: 118359 - DNA, 427 bp, Arabidopsis thaliana columbia
  unsure (1)..(427): unsure at all n locations
acgactcactttaggggagctagtacgcctgcaggtaccggtccgngattcccgggtcgacccacgcgtgcgcgattcattagaaaccaaattacaaaaaaaaacgtctatacacaaaaaaacaaatcgggagagaaagaggaagtcagactatatttttatttgcatcggttcagtgggatgaataggggtaagggttcatctcggccgtggagggcggggagttctactttcgggggggggcgggccacgccggatcaccgttgttcaaaaatcaccccgttctggcaggccggtcacatttgaggctagagaggngggtggtggatggagaggtgttttttgggtgtagtgtgggggtgtgattaggtgtggcgctaaggtcggtcaatgtttattatatatgtagaaatgtgaaatatgatgc

SEQ ID NO: 118360 - DNA, 467 bp, Arabidopsis thaliana columbia
tacgcctgcaggtacaggtccggaattcccgggtcgacccacgcgtccgctgaattgattgctaagatcatatgtcatggtgctcaggactatactagagctacacttaggacttgcttggtagattaatggagacaaagcagggaatgaataggtaaacgaagcgattcaaagacaaaggaggagaagagggagtcctccttaagggggggggacagaaaaaaaaacttattatatgatgaaacacattgagctatgagacggagagggagtaaaaggaataagtgaggaggtaaaggaaatgtaaattttattaatgaatagagcgaaagcagtgggcaggagacaatggtaggcagagcagtgtagaattattgagatatataactaaagagaagaaatatgaacgatgaaaaaagatgagggggcaatggacaagaaaaaaataagaggataaggaggtgaag

SEQ ID NO: 118361 - DNA, 470 bp, Arabidopsis thaliana columbia
  unsure (1)..(470): unsure at all n locations
acgcctgcaggtaccggtccggaaatcccgggtcgacccacgcgtccgtgcagatagagctganatacacancacagcggcagcggagtaaaggatgtgccacctgcgtcatcatggattgctcgaaatctattatattataactgaccgtcctatatgcaagcgaacacacttttgcctgggcgacagcgcccaacactttatatctaaaggggggggaacacccaatccaaaaggcaaatgaaaaaatagtgcgcacgagttcgcaacacgcgttacagaagatggtattgcgggtctgagagagcaggagagaagaagtgaaaatgagagtgaacagtggggatgagaccggaccaacagcgcgggagggatgtaagtacgctgaggtgctgagagatgcacgcaagaggcagatgagggatgcatcacattagagcaggagacatcaaaaaaaaaggagggagtga

SEQ ID NO: 118362 - DNA, 488 bp, Arabidopsis thaliana columbia
  unsure (1)..(488): unsure at all n locations
tcgcctgcagtaccgtccggaatcccgggtcgaccacgcgtaaggggcgcntanncaaatacactcaggagcagggaaatttttttagtctaactaagcatgttaaataataaaaggaacatatgggtaaatacacctgaacttttgcttgttatttataatgggttaaataaaagagaaaagaaaagttcttcttaagggggtggaaggcaacaagtacacacggaagcttttctagacacgcacgcaacgggcagtagagttgacgaaaaaaggagaagagaagagaaatattataaatattaaaaaaataatatatacgaaagcgcttaaagagaactgatgtaaaaactacggacacggatgacaggattaaccatactatcctttacagaaaccatggataaaatataaaaacgcggtacactaacgacggcacgtaacaaccacacattctcgttataacacaccataaacgctataaacgg

SEQ ID NO: 118363 - DNA, 383 bp, Arabidopsis thaliana columbia
cgactcacttttaggggagctggtacgcctgcaggtaccggtccggaatcccgggtcgacccacgcgtacgtgcacgcgttcgagtgaaggagccattagatttagtctggttttgagaggacgagactgcacgaattggcctaaagtttagatagaaagggtagagtgattgacagatatctgaataataagctccgaatatatacctaggaaaaacttctcatataaggggggggtgatcatcaaatttacacacatgggatcactgagttgatacaggtgtagaatatattattagtctcgtgagacagaaggagaagtagtaatggtatgtttacaagatgggatttgtggagagaggagccgacaaacgtctttgagt

SEQ ID NO: 118364 - DNA, 477 bp, Arabidopsis thaliana columbia
  unsure (1)..(477): unsure at all n locations
acgactcattanagggaagctcgtacgcctgcaggtactgggtccgaaaatccncggtcgacccacgcgtccgcgttgatctctccttcaacaatttaaaccggtccaatcccttgattctcgcggntgtgcttaaaccagaaaatggaatcatgtttcgaatagtataggctcggctgttgcacttataactccgattgtttatgttcagctggtaacagcacgagtaaatttttttcaaatggggggggatacaacaacacgctttatctctgctactcacaagttacttgcacggttatgacaaaggtagttaacgaaacaatcgagtaagatacttgtatacatttatttaatattatcagagttgaatggaaacgccgcctttaatccgacaggatatatctttcggcgttttttatcgccgctagatatcattaatgattaggatccactcatctatcactttcctacaat

SEQ ID NO: 118365 - DNA, 501 bp, Arabidopsis thaliana columbia
cgcctgcggtactcggtcggatcccgggttgaccacacgcgttcggcactttcttctccatatacaaaaaaaacagagaactcacaatgtgcgattcagattttgtgtgtgggtgagggaggctataagataggtctgcgttgtatactaaggtatagagttgggggatagaagggcggggagggagagtttttttttaggggggggggggaacgtggccgggtcggggtaaaaaaaaaggggattgggacgtgaggcaaggaggttatatgtgggaaaaaagggggggtgataggaagtgtaggtgagggggaaggtggggaaagggtggagaggcagggatagtgatcgtgtcggagtggtggggaaggcgtgagagaaggttgagtgtagggagagtggaggagatgatgtatttaagaaatagtggacaggctggcgttggtcgtgttagtgggtggggtgttctgggagcttgtgaggtgtagagggctgatgctg

SEQ ID NO: 118366 - DNA, 492 bp, Arabidopsis thaliana columbia
tacgcctgcaggtactggtccggattcccgggtcgacccacgcgtccgtaatttttgccgaactcgtcttctgctgaaaaccctagatctacagatctcccgaatctcccagggagataatttgaagatggtgtctccccctctccggacaagctctgcccatgctttcggttctcctgcgcctgcacaggggttttttttctggggggggggcgccccagcccacaccctcttatgaatacacctcgtgcttccctcgcccgccccggtttatgaggtgttcgctcgaggcggttatcttattttttggtattgttttatgtttgtggtgggaccaggccgcgtctgttcttttaattggcgtggcgcgggttggcttctttgttttgtgtacgggtgcttaggtgtggggtgtataggaatgggtgtgtgtcgccctgcccgtgaatagtctgggcgagccgttgacccgcgcgcggtagattttttaca

SEQ ID NO: 118367 - DNA, 520 bp, Arabidopsis thaliana columbia
  unsure (1)..(520): unsure at all n locations
tacgcctgcaggtaccggtccggaatcccgggtcgacccacgcgtccgctgtntttttcttanatcctcgatttcatccacaatatacaatagccaaatttccgatttgtgtactgaagagaatatggtaaaatggtaatatagagaggtgataggggtgatataaattgtgtgttagattgaacgtagagtgagagagttttttattattgggggggggggagaataatacaaggtgtatagagaaataaaaaaatgagggtattgaacagggaaaaagaaaaatggttaggtatgaggaaaaagaaaaaagaaggagtttaagtgaaaggagatataagaagatagcacctggtcctacgtcggtgaaagtatataatgaaaaaggtgtattactgtagtgtaaatagaagtagtaaaacaatagagttataaatataagtattaaaataaacgtaagagatatggtcggctgttattagcatataagtaagtgctagaaattatgattaaaaggtta

SEQ ID NO: 118368 - DNA, 393 bp, Arabidopsis thaliana columbia
  unsure (1)..(393): unsure at all n locations
acgactcactttagggaaagctgctacgcctgcaggtaccggtccgggatacccgggtcgacccacgcgtccgaaagaatggcttctgtaccatgttccttcaagctctctgctcatcgtagatcttcttgcaaggggatcatgttgtgtgtatgtgcttgaatctcggcggcgtaggtgacgctttgggggcggagtgcgatcggggcgcgtagccttttttttataggggggggnaccactcgccccccccacacttttaaaaaagtcgtcgtttgngggcgcgggcggaaatgaggaagcgcccctgatagaatattgtggtgaatagagagtttgatgttgtggtcacgtaggactctaggagcggctccgcgggtgagttgttatgcc

SEQ ID NO: 118369 - DNA, 476 bp, Arabidopsis thaliana columbia
  unsure (1)..(476): unsure at all n locations
cctgcagtacccgtccggatcccgggtcgacccacgcgtccgattgtgatgatgttagatatcagattggatgagtgagcatagagttcatgagatcactgaaggagataaaagagtaataaatagagattgcgaagagtagttgtataaaaaatgaagaagtgacttacacgaaaaagagagatttttctttatggggggggcacacccccacatgttgattcttcaaacactgtctcgccacgcgcggagaatacgaaataatgtttgattataaaatagaaaatataatataataagaattgttgagttagattggcaaaggaatagtgcgcgactaaaataattaatgttaaaagaataagaataatagcagtgtaatgaaggtcacattaaactattaataatcacgtggacggngtactcctatgaatatgcacaacatacttgtaacatcgagcggttgatattattct

SEQ ID NO: 118370 - DNA, 513 bp, Arabidopsis thaliana columbia
  unsure (1)..(513): unsure at all n locations
tcacttttagggaagctgctacgcctgcaggtaccggtccgngattcccgggtcgacccacgcgtgcggttggacaaaatccacaagattggaatgaagtgtagttgacataattgatgtgtagcaaagtcagacagtgggaatcacaaggttgtagttgagacgatagagtgcacgggtgagtaccacgtttagcgggcaagtacgcgcgagattttttttacggggggggggaaaagaccaaacgaatgataaaaaaaaaaggggacatatgaagaccacgtagaaagcaaggaccgagcggtgaaataggtgcgcgcaaagcgagaagtagtaggagagagcgggaaggttaaactagcgagtatggggatggtgagaagtacgagaggagtagcgtaccgactgtgggcgttagtaaatatgatagcacaccaattgcaagatgaacgaacggtcgcgccgaatccttgtacacatatcagcgagacgcccgagtaccgcagaaagacg

SEQ ID NO: 118371 - DNA, 514 bp, Arabidopsis thaliana columbia
caggtacaatacgactcatttagggaaagctggtacgcctgcaggtaccggtccggaattcccgggtcgacccacgcgtccgtgtcaatttctctcatgacgagtagtagtggaagcctcaaactagagatccacactgatgacaagacgccgggaaagtggagcgtaccgctcggcgatgatgttttccgaaggttcttgagcgggggaggaggctcggagaaggctgtgttcggggaggggtctctttttagcccgtttttgttaaggaagtactttgatccgtcagacgcctttccgttgggggaaattttagggtgaggttttgctggggagccttaggagcttaggaccagggtaagtccgttgggctcaaacggatcaagcttgtgtggcttaaatgcgatttgcgccgtggggggcgaagagggagcgtgtagcgatggcgggggggttggctcggcgggttagagggagctctgcggggagggggagcgtggggcggggtcagcgc

SEQ ID NO: 118372 - DNA, 508 bp, Arabidopsis thaliana columbia
  unsure (1)..(508): unsure at all n locations
atgattctgccagcgtcnnnnnnnnnnnnnnnnnnnnnnnnnnnnnnnnnnnnnnnnnnnnnnnnnnnnnnnnnnnnnnnnnccacgcgtccgcccacgcgtccgatcatggagtatttacctgggggtgacatcatgacactactcatgagagaagacattctttctgaagatgttgcccgtttttatattgctgagagcattcttgccatccattcaattcatcaacacaactatgttcacagggacgtcaaacctgataatttgatactagacaaaagtgggcatttgaagctttcagattttggtttatgtaagccacttgatgacaagtattcttcattgctattagaagacgatgaaatggtggctcaggattcagagaaccaggcaggagaatcagacgctgaccaacaccctggcaaatgcctaaagagcagttgctggagtgggaaccgcatgggcgggccttgggtttttgcgcccgggggactgttggtttcctggg

SEQ ID NO: 118373 - DNA, 497 bp, Arabidopsis thaliana columbia
ccgcgtacgtaagcttggatcctatagagggtttcgccttgggggaaaaacaaaaaaaaagacaggggggaccggaagagagagaagaacgagaacaacagagaaaggaggacggaaccgcacgatgcacaacgaaggtccgaaagagtgataaacgaaaaacctgaccggacgcccgctgacagcgaaccaacaagaatttttaaaaagttgttgggaacaaaacacaagaggagtgacgaggacaaaacagatgggaaagaaagcggagacgacgggagccagacaccccagcgtagaacacggcacacgccgcgacccgcaacagaccacacccgaggacgaccactaaagcgaaagaggcacgacgatacaaccagcaccacaacgaacacggcaaaccaactgcaaagcaaacaagctgaaaaggaggagggtaattgaggggagcaccacccacacgccgaccgcatgcatgaaccgcacaaatacccgga

SEQ ID NO: 118374 - DNA, 544 bp, Arabidopsis thaliana columbia
  unsure (1)..(544): unsure at all n locations
cgactcactttagggaaagctgctacgcctgcaggtaccggtccggaantcccgggtcgacccacgcgtccgtagaaatccacaatatctttcttcacactttctttcactttgaccgggaaaacaggcgggaaaatagagagaaacgatcgtggtacttttatgtgcgtagataatgttctaaataattgcatgtacatgaattccctacgcctcacaacatgatttttttttccgggggggggacgacaacacgtaccgaactttatattagaaataacccgccgcagggcgggggagggacaagattataaagtattcggaaaacgaaagtgatgacgacagaatagatgtgaagggcgccggacagaaaggcaggagtgacattattgcgtgtagtatatataagagagtatccatgtggggcgctaaacttggaaggaagttaaaggcgtgccatatgataaacaaaaaagtgagaagtgcggcggacacaaataataaacgatgggaatcatgggtgagagaacaatattgatataaa

SEQ ID NO: 118375 - DNA, 500 bp, Arabidopsis thaliana columbia
  unsure (1)..(500): unsure at all n locations
acgactcactttagggaaagctgctacgcctgcaggtaccggtccggaantcccgggtcgacccacgcgtccggcaacaatggccaaaagctctttcttcaacaagcatttgcttctctctcttctcattcttctccaaagctgtctactctcttcttcttcaaggaccgattcagaaacgtctcttgaacttcaaactcaccggagattccaccggatatttaagcggagggggcacaacaacaaacccatgccaaagaaaaagantctcctgcaaccggaacagatgcacaccgagagggggcggagagacatggatcgggaccgggggtgaggggcggaatgaagctagcgccccgggcgtgggaggtggagtggggcgcggcggggacggccggcgggggcatcggcgagtcggtgagtcggtagcccggtaagaatcggcccgggggcggcgcgcccgaagcatgcggcggggccgctaccgccgggacccccgg

SEQ ID NO: 118376 - DNA, 488 bp, Arabidopsis thaliana columbia
  unsure (1)..(488): unsure at all n locations
cgactcactttagggaaggctggtacgcctgcaggtaccggtccgngatcccgggtcgacccacgcgtgcggacaaagtatgagccnaataactccatcaaatcaaatctcactcatcaaactttaacatttaactatcacaatatgttttctttcgctgtcggcgcgcgcggggatgtgaccctctgtgtatggccgtactccccggcgccctttttttttgggctgttggcccgcctcccggggccttcgctagaaaaaaggggggcggccgggcgccggtgttggttcaggtgatccgtggaggcggatgcgagtagtattggtgtggttatggagaggtggggcggttcggccgtggctcatgcgcctcgaaggtctggcgcgaagttatggcgagatgatgggggcgtgtgagtttgcagagcgcgggggcccgcgccgagtacttgatggtatgttggttgggaagcgcgtgagggataccg

SEQ ID NO: 118377 - DNA, 483 bp, Arabidopsis thaliana columbia
ctggtacgcctgcaggtaccggtccggaatcccgggtcgacccacgcgtgcgagcaaatattaaaataaaactctatcatttgaatatgagtatagaactctgacaatgggactgtgagaaagtatagggtgatttggaagcaggagaacagagaatagtgtttaagtagaattacacagatcacgtcaaactaattttttttatgggggggggttgctaaaaaagaagataccaagagaaaaaaaattgaaatccgacggcaaccatggagaaaggagtaggcaagaagtatatgaagattgatgtaataattgttggtgatgaagatgcaatacacatacttagcgtggatgtattaagtaatttattagactggtaaaataaatatatatcgtaagatccctggttataaaaaaatagtaggcgaaacaaaacgaacaactaacgcgcataattaaggaaggaacataccgaataaaagc

SEQ ID NO: 118378 - DNA, 534 bp, Arabidopsis thaliana columbia
  unsure (1)..(534): unsure at all n locations
acgactcactttagggaaagctcgtacgcctgcaggtaccggtccggaatcccgggtcgacccacgcgtccggggaaacntannacaacncntanngcaaaaatgacagaactcaaatggatatgtgtctgatccgtagctagaactagatagaaaagatagagatgtaggctacgacatggcaatatcaagagcgtatgactcaaaagaaaagaacaaggttcctcttttgggaagttgggacacaacttcacctccgattgaagaaaaaacaactctcctaccgtttgcaaaaataggaaaggtagtttgtgatggattttttagagtggttatgatttaaaatattcgtgaggttataatggcaccacagggattgctagtcagtgatgatgctgcgagtatatgagtaggttttatccattacttatttgtatttataatattgtatagtataaaaatatgcgtagtgctttagagatatgtaatactaaggcaatcatcgaaaaccctatacaagccggatataaaact

SEQ ID NO: 118379 - DNA, 479 bp, Arabidopsis thaliana columbia
  unsure (1)..(479): unsure at all n locations
ctggtacgcctgcaggtaccggtccggaattcccgggtcgacccacgcgtacggtcaagttattaaaggatagactattggagattagagagttaagtgagataggaaaagtaacagaaagaatataacatgatgatatgtgatgggaaaggattgcatgagattagacaatatgtataaatagataaactagcgacaagtaaattttttttaaaaagggggggggcataaaataaaaaacttatataagtgtataaaaaattggcgtagaactaagagagaaataagaagtagtgacgcgatagataagaaggagaaagtaaataaattgaaatgtgagagaatggaaatatangtggggaaaggacaagagagggaaataaattaaaggaagtgtattggtcgtaaaagtaaaaatgatagttagtgaagattacgttatttttattataataaagaggggggtagtaaggagtgga

SEQ ID NO: 118380 - DNA, 304 bp, Arabidopsis thaliana columbia
cgactcatttagggaaagctgctacgcctgcaggtaccggtccggaattcccgggcttctacagacatcaatttctctcgagataaactaaatccttcgctgaaaaaatgtcttctgcatagaataggtgtcccgcacgtcgagctggcttcaacttgagttgtacataagaagtcggcgcagatgtgcttatctgatgtagacctgatagccggtcgaccaaaaaaattttttaacagggggggcatgtacctgcgcatcatattttttactgttaagaatgtggggagaagcatgagaaggg

SEQ ID NO: 118381 - DNA, 469 bp, Arabidopsis thaliana columbia
ctactacgcctgcagtaccggtccggaattccgttttaacaagggtgaaagcccaaaaaagaaaaggaatagagaagtgagaagtgaagtttaattagtaaacgaggtgagtatagaaaggagaaagtattagaagtggtagattgaagtatatagttctaattacaatgaattagaagaaaagtttttttaaaggggggaacgctgttagaagcaatcataaataaataaagcatgggatataagagaaggaagaaattgagaagaaaggaagagaagaagagaaatatataatgattagatatggaataaagaagagggcagaatatgcagaggaagtgaaaatattgtggaaataagacgaaggaaatggtgaaacattagatagaagaaaaattaaaaaattgggtggaggagtcgtggagttagaatggtgaaataattatacagataggggatgatatataag

SEQ ID NO: 118382 - DNA, 506 bp, Arabidopsis thaliana columbia
cagctacaatacgactcacttagggaaagctactacgcctgcaggtaccggtccggaattcccgggtcgacccacgcgtccgttttttttttttttttttttttgtgaattaagatcttccttttcaccacaaaagtaacaaagagtggttggccatttttttatgtacactgacttctacaatctttgttgcattggttattcaagaaccctaactcctacacaggtaaactgtaggggggaggatagcttatcggttttgggggaaaaaaaggcacccctctccaaaaagaacgtttaaatcattggttggtgttaaaccgaaaccaactttttgggaatcacctgttgcctttggagaagaactaccggaaccttccaacccttttaacaagcccctcttcctcaagtactcaatgatgcccattttatgatcccttacggagcgcggggcgggcgcccccactgctggtccacttgttcaagcgcccggggcggcgccggcc

SEQ ID NO: 118383 - DNA, 517 bp, Arabidopsis thaliana columbia
  unsure (1)..(517): unsure at all n locations
acgactcactttagggngagctcgtacgcctgcaggtaccggtccggaatcccgggtcgacccacgcgtccgtgcagatttaagcgataatacgagatcccaaggggctcacaagcctttctacgcttaatctgtaactatgccgctcagactcgagatcaagagaaaattacgccaaaggtctagaagattaggatgctgtggggaaccaagagtatttttttctgggggggggagaagctcctccaacgtgttagttagaaaaaacagggggagacagaggggagagaagaagaaggggcggaggggcgagggagtaagtattatttatatgggttaggcgcggtgaacggtaggcggacaggaggcggccggacaattattgacgggtggagaaagacgaggcatgctttggtgagtgtggcccgcaacgctgttggggtgtaaaaaccgcgcggtgggggcacagcgtgcgtatggctgtgaatatgggaagacaggtggggggaacgataga

SEQ ID NO: 118384 - DNA, 561 bp, Arabidopsis thaliana columbia
  unsure (1)..(561): unsure at all n locations
cccccgcgctgccccccccccccccccnccccggttgattgtaggtgaacttaccagagcttgacgtcgcatccacgcgtacgtaagcttggatcctctagagcggtcgccctttttttgggttgggttttttatattttcctttttttttctttttttgcccaaaggtttattccattaaccgaacccccaacatgaaaaggtccccttagattttttgtattaaacaacgggatgatctttttttttggggtgggacaagacctttttttttatgggggaggcacaaaaaacattttttacacactatttttaggtttcatcaaagtgtggaaagagttttttgcaatacgccccagtttcagtagagggggggcacaagcttgcctttgtttgttggccctccttaattcttattgcacccaccgggtgggggtttccttttaaaaagaatttttgaacactgggtgtcttttcccccccccttcttaaaaaggctggtgggatcccacctcacatcacttatttcaccggggcctccaggtcttataaaggttcttt

SEQ ID NO: 118385 - DNA, 614 bp, Arabidopsis thaliana columbia
  unsure (1)..(614): unsure at all n locations
cccccccccccgccgccccgagggaggcggggggggggaaaatttgagggggaatgcccccccactttggggagggggaaacgcccctcccggtcccgggcccgaatccccggtttccccccccgggggtgggcgttggaaaaaaaaaaccttcttttccccccgggggtggcgcccaactcccccgcggggacatcttgggagttctgcccccgcccccttcttccttacgcaaaaccgagctcgcccccttttttcccgcgacacccccctccccctttttttttttggcttgtctggcaccacccccacaggcctcctcataaaaaaaaacccccccctccgggtnaaccacggacactccccccccctattgcccggggcgtgccccccccccctctctcccgttaccgctcttcttcccgagcgcgtcccgccttanaaacactccgtgtgcttcgcctctcaccccccctacgttgtgtgctgggtggtggttggcacagacccgtctggtggtgtggtgcctggcgccccccgaccccccctcccgntccccgcccgcgcctttcctcccncctctcatcgctcctgtccccgcctcgctccccccc

SEQ ID NO: 118386 - DNA, 206 bp, Arabidopsis thaliana columbia
actcactattgggaaagctggtccgcctgcaggtaccggtccggaattcccgggtctacccacgcgtgggatgtgatatcattagcacttgctcttttgatccttgatatccggaaagaatctaaacaacactctggtgtcttgcatggcatcaccacccacttagggatggggatcttaccaataaatgggcggaaggataaaaa

SEQ ID NO: 118387 - DNA, 453 bp, Arabidopsis thaliana columbia
  unsure (1)..(453): unsure at all n locations
cctgcaggtaccggtccggaaattccngntctaccacgcgggcgaagggctaacccaaacaagaaacccaagaatagaaaacggaagtgcccgacggcaggtcgcaccaagcacacgggaggggagagagaagcgaaccacgacgagcaggagcaagaagcagcaccgccgcgccacgagccggtagcgaggagttttttattcaagggatgtggaaaaggaacaaaaaaaaagacccaaagaaagagccaacccgcgagggacagcggagagaccgcgccgaagagaggaacgcgcagacggggcagacgaaggccccgaacacaaccagacgaccggcgcacggacaccgcgagcaggaggcagaggaaagagaagaaaggcgccgaccacggaaaagcaggaaaggaggaaagaggaagaagggaggagaggaggggggggcgggacgga

SEQ ID NO: 118388 - DNA, 563 bp, Arabidopsis thaliana columbia
  unsure (1)..(563): unsure at all n locations
aattgtagggatacacccctcactattgggaaagctgacccgcctgccaggtaccggtccgnaattcccgggtcttcccacgcggggcggggggagggtgctctatatgtgttctcgtttctgcgccgattcctaggctgttgggcgcttgcctcttctcttttggattaccatacctctcactcgcatcagattttcagggtgctttttctatccaaagggactgcaagaaagttcatttctatggtcgggaagtaggaaccaaaaatttcttgaaaaccaaaaaaaaaaactttcaatgggnaccataatcctaaaggccgccccccaattcccaacgcacacccaaaaaacttaaggtggagaagatcaagggcgccttaaaaaaacacaaagggggtcgcgtttagatcctaacttaagaaggggaatagctccctcttggggggagaaaaaaagtctaaaaaatctccacattagggccccgaaaaccctcccccccttcttcttaaaacacccgtggttggggggaaaaggaaaaaaactcccgcggcggcataaaa

SEQ ID NO: 118389 - DNA, 252 bp, Arabidopsis thaliana columbia
  unsure (1)..(252): unsure at all n locations
cgtacgtaagcttggatcctctagagcggccttcctttttgggggagagccccnnaccnaacaaaaacacccgccggttcccggagaatatcacctgccccctagccccacacccagtaccgactcaccacgctcacgacctagcggcaaacaacactaccaaagatctaaagctccgaccccacatttccaggaacttcttctttaagggggggggcaagagcccccggagagccgcatagggggcccctg

SEQ ID NO: 118390 - DNA, 555 bp, Arabidopsis thaliana columbia
  unsure (1)..(555): unsure at all n locations
aaaaaaaanaaggggggagagggagagggagggaagagagtttaattaagtatagaaagaaaagaaagagtaagaattgaaataagagagatgttaagagagagtttaggatagggggaagaagagcgatacgagatagggtaatcaagaggggggggcggaccgacatttttaaggaaggttanctacattttaagggttgttggaaaaaaagaatataagagaaatatataagagataaaaaagctaaagagaaataaaatggaagagaagaaaaaagaatctataaagagttaaggaggaagtaataagaaggatgagattatatgataattataaaagaagatatatgatgaataaagtaaaaatatagagaggatgagagggtataaaagaaataattaatatatagttcgagggtggaaaagggaagatagtaaaagaatagagatgtaagtgataaaagaggatggtgtggggggaggcgaganaaaagttagagtgatgagatagtgatgataggataatgtgaaaatatagaagtaaaggggtaga

SEQ ID NO: 118391 - DNA, 515 bp, Arabidopsis thaliana columbia
  unsure (1)..(515): unsure at all n locations
ttgacgtcgcatgcacgcgtacgtaagcttggatcctctagagcggccgcccttttttgttttttttaagcaacaaaagtaaactacgattatgaaaaaggtcgagactttacatgatctttatctgtctctctatgtaattgngcatctctacatgaaacccacaagataaatgcctaagcaaagaataaattgccttttctgggcgcttttttttcccaaaggggcggcagnaccacacgatccctacactctcgaatcgctgcgcccccacccgtcacagcccggcccgccccatgcccctgccctccccccccaccccccccggccccgccccccgtctaccgcaagccacgcccccacatatcctttacacccctttcccccccattccgctatccgaaggccgctttccccgctgttctcctcccgcgcgaccacgcgttagaacgccttcctcacgcatccccaaatcccccacactcgcctcgatcccgcctactcccccacgcccc

SEQ ID NO: 118392 - DNA, 559 bp, Arabidopsis thaliana columbia
  unsure (1)..(559): unsure at all n locations
gtcgcatgcacgcgctacgtagcttggatcctctagagcggccgcccttttttttttttttttttttttattagttatctacaaaaacccaaaaaggaacaagacaagaaaggggncccaggccggggcaacaccctagtttggcatccctcacgagagaaccaaatgggtggggcgctcaatgttaaaaaaaaaggttgttccctataaaagcntttggtttttttttaagggggggggcgcagcttactcacatttgatgcttttaaaaatgaaattttcaagtgggtgctttatcgaagaccccttcttttggaacgttatctttgttcttacaaattatacgtctaaaatcgtttgtcaatctgttccttgaaaaattttggttcgcctcgcccaaataaacgaggtctaacctgcaagaaggtgccggatatcgagaagtatggtgtgccaggcgattgcggtgccgcggcgagggtgaacgcgggcatgttataggtgcgggttgtatatgtgtgcgcacatattgttcccgctatgccgctacgattctcct

SEQ ID NO: 118393 - DNA, 477 bp, Arabidopsis thaliana columbia
gaaattttcaacggggggggaaaagacccaagaaaaaaaaaagggaggagcacggagacgaaaagagaaccgagagagcaaccaccgcgcccgcacgcaccacgagagaagaaaagaaacggaaaagacccggaacccacgagaccgagaacccgagacaggcacgccgaacgggagtacacacgaacatttcctcttttagaaggggggggaaggaccacaggaaacagcgcaagaacacacacgaacaaggaagcgaacaggcgaagaggagaagcgccgggaaggccgcatacgaacaaacaggccgcaccgcagggggcacgacagaccgggaacgaggcgcgcaaaacgggacacgccaaacgcggaagagcgacgaagacgagcaggggagaagaaaagagagggagcgagaaggagggggacaacaaggagaaagaaagagagaagaaaggcgagaggaagagaggcaca

SEQ ID NO: 118394 - DNA, 496 bp, Arabidopsis thaliana columbia
  unsure (1)..(496): unsure at all n locations
acgtcgcatgaccgcgtacgtaagcttggatcctctagagcgggcgtcctttttgtgggaaaaatccaaaaacagagacaaaacgcggcgagacgtcaaaggtttataccgtccacgtagactgagtgcgtagtacgcgcacccagggaccacgaaccacaaactaaggcagagcactacgagatttgacgagcacgaagccccgaaaggaagaaaaacgtttttttaaagagaggggggggaagggcccaaacaggaccgcaaaacagagcaaagggaaagggcngcaaagacaataaggcaaagataaaatctcaagcgcgcagagaaccgacgaagttagatagtaaagttcaaccagaaatcgtacgagacaataccgggcgcacacggcattgaaggagccggacgatagatctgcgtggtgaccgcaaagacgaaaactcagaagtcgcgggggcccgccaagacgcacaagcccgctacaccctgcagg

SEQ ID NO: 118395 - DNA, 507 bp, Arabidopsis thaliana columbia
  unsure (1)..(507): unsure at all n locations
actatgggaaagctgatccgcctgcaggtaccggtccggaattcccgggtcgtcccacgcgtgcgacctcttcgtgctcgtcccctgtcgttgctctttcttcctctacatcgccacattctcttggaagcgncgcatcttctcctctgtttcctcactcctccttcgggcttcagaaaaaacatcccatcaatgggacgagcccgaggatgattttaccaaaatgggggggttctgatgcanctcaattgataagcgctaaagaagatctcaaagttctttctccggactaagttctgccatcccatcttggttagattggggggggcaccatgctggacttaaaacaagaattttggggagcggcccactggagggtggcgctaatggagtcttagggttggggctgatcttaagaatgctgaaatggcggtctgttaatgcttaaagctcatccccccctaaaggcagggttccaaccttttttagcggcctatcccaggtagt

SEQ ID NO: 118396 - DNA, 547 bp, Arabidopsis thaliana columbia
  unsure (1)..(547): unsure at all n locations
acgactcaaataggggagctgaccgcctgcaggtaccggtccggattcccgggttgaccacgcgtgcgcattgttgctgagttttagggtgtgagggagnnaaananannnttgagccaaaggcgatggcgaaaacaaaaagaggaaatccaggtgaaacgcccccaagttacacaatggttcagacccgcccagacaagcgagatttttaacgggctttcctcattttgggatagatnggccccaaccccacgagaaactgagaaaaaaaacatagggggcgagggacatagtggctgaataccttctcttactctcttaggaagcagtccgtagacctcagattttcaactattaacggattcaacaattgaaaccagcctttgcgaggagagttgatagtttttagcaacaccttgagtttcgattaatatatttatctatatcttattttagtgangaggagggggagcaactaccgctccacctacacactctgagccgcatcaccgccgactcggttcgcccactaaacagacaggacaac

SEQ ID NO: 118397 - DNA, 495 bp, Arabidopsis thaliana columbia
  unsure (1)..(495): unsure at all n locations
ggcgagaccccccccccncnccggagttgtaattatgttntactnccccccnnaattttnngggggaaaacanggggggggagggaggggaggagatgagaaggagttttggggggggggggggaaggcccggggggagggggagtggtgagaagggtggaggagaggggaatngagtatatttggtatgtgggagaggaggtggttgaagaaaaagtctgaaatattgagatagaaggagttagtaaagagtagatggtgttgagatttgttgaaaagaataagtagaataagcgatgattttttttggtgggagggggggggggagatgaagggtcttataatgggagggatataatagatggtattatatagtaagttgatatgtaggtagagtagatgagaatatatttagattatattgtttaagaaggagatagggggttagaagtgagggtagataatagtagctggtggagagtggatatgagagga

SEQ ID NO: 118398 - DNA, 497 bp, Arabidopsis thaliana columbia
cctgcggtaccggtccggattcccgggtctaccagcgtgcggactctggtatggaaagatgggcttggcaccaaaacttccctcacctaaaggaaaaccaattgaaaagtctggacctgaggttttagttgaacaagcgaagctttgccctgctcaaaccaccctgtcccttttctgccgccgtttcctattttgcggggggtggcaccccccccccgcgcctgtctcaaaaaatccctaccccgcgcacgcctccacgtcccgcctcctcgcccctatccagccccttcctttcaccggctatccctcctctctccctcggcctcccctcacttctccatgcacaatattacttagatctaccgatctgatagtgcccagatgctttatgtcccgctgactttggtagcctggccccacccccccgctcccccccgcctctaccactcccaggatacccgcccacgcgctgccctccctcccacccctctccctcc

SEQ ID NO: 118399 - DNA, 395 bp, Arabidopsis thaliana columbia
gtcgcagcacgcgtacgtagcttggatcctctagagcggttgccctttttggggaaaaaccccaaccacccaaacgcaacaacccacgaagcgagacacggatcttcagaaaagaaggatagaagacaaagcctcagaaccacggaccaaaccggcagacacacgaaagaaaagcacagccatctggagacacagggcgccgaaacatattacaccgaaggttgctatttaataaaagggggggaagcgaccaagaaaaaacacactgccaaagactcgcccaatacctccaagcgatagaggctcacccatacggtcggaaatggatagccgaacccacagacaaggcgcggcagcgtaacactgagaaacagaaagcgacgacgaaacaacaa

SEQ ID NO: 118400 - DNA, 437 bp, Arabidopsis thaliana columbia
  unsure (1)..(437): unsure at all n locations
cctgcaggtaccggtccggaattnccnnatttacccacggggggggaaggcccaaaaaccacaacgcgccaggaaaaagagagagccagcaccgcgccacgcgcaccgaaccgacacagcacaaaatgaattcagacaaccacctgcccataacagacacctgaatagacagaacgcgccggccagcaccagatacccgaagaactcctcctataagaagggggggggacccaaacacgacgcagaccacaaaaaaaaaagcaacaatccaggggaggacgccaacggaacaacggcgcaacgagctccaccacgacaccgactatccaagaccaccccacaccaacaagtggatatcccacggcaacgctccgacagcgacgcgccgcgcgcacgagcagaagagacaaaaggcaatatcagcgaaagaaagagaa

SEQ ID NO: 118401 - DNA, 466 bp, Arabidopsis thaliana columbia
  unsure (1)..(466): unsure at all n locations
ttgacgtcgcatgcacgcgtacgtaagcttggatcctctagagcggccgcccttttttttttttttttttttttttttttttttttnnaaacgaggacaccaccgcgaaacaaagaacgggaggagaaaggcccataatcatacatctcctaatttagctatcttgcatttagaaaatcctttggcgcaagtattcattctattaaccaatatttcccgcatttttttttttttaaaggggggtggtgtaagcaccncacccatgttcttgttttggttataaaagaaacgccgcgatgcggtgtattaagactagatgggccgcgctgtggttccggatgtagacggcgtggtgcttgcttgtggtgagcggtggtgttggcccgcgttgtgtcccgagtgagctgaatcgagagaaatagcatgctgtgatgttgggtgctttggctctcagttcccgtgtctc

SEQ ID NO: 118402 - DNA, 548 bp, Arabidopsis thaliana columbia
  unsure (1)..(548): unsure at all n locations
ttaggtgaaactatagcaagactttgacgtcgcatgcacgcgtacgtaagcttggatcctctagagcggccgccctttttttgttttgtcttttttttttttttttttnccacaccataaaaaatgtattaagaaaatgaaccaagacgaatcctcaaaatccagaaactaaacgattggaaaattctaccaaacataaaaacccaaaagcctaaacatacacacaaattgggtatttaaaatggacgggggaagatagaatccaaagcacatttctcctaaaccctctccgtagcagaaatctcaatttgtgagggcttcaccgtcttcttttttgggagtgacttataggccatggaggcccactatcaactggaaaggcccaaaaaggttccaatcccatacttggggaggcggaataaatcggttctgaagatcggggaggaagtagtccaatccccggctttaccgaccccgccagggaccacaggaggggatggtctcacacctttttggttttaccgcttcgcaatgggcgccccgggcgg

SEQ ID NO: 118403 - DNA, 321 bp, Arabidopsis thaliana columbia
  unsure (1)..(321): unsure at all n locations
aggagagggagaggagaaaaaggaaagaagttttttgggggggggggggggaaagccagggaagggaaagagggagagggaggggggaaaggagaggggggaanttgagagancgagaggaatggaagaggaanacagaaagatgaacacgagagaggcacggaagaggcgagacagagaggagggtgattacgatggtgtaaggntatacgaagagcggcaaatgggggaggcggacgagggttttttttataaaggggggggggtgagaggaccgaccggagagcgcggggtcgactaggcgaagggacgcggggtcac

SEQ ID NO: 118404 - DNA, 509 bp, Arabidopsis thaliana columbia
  unsure (1)..(509): unsure at all n locations
cgtacgtaagcttggatnctctagagaggacgtccttggggggggtaaagccccncccacccaccaccccacaagcgaagccacggactttaaaccacccccaagagaaagggccagagacaaaaaacccaggacccccgcaacgaaagcaggacccgccccccgcagaaccccagagaaccctaccaacacgtttatatttcagaggggggggagcaaccccacccacgaccaacgcggaggataacaagagcgccagccgccaagcagggcaaaacgcacagaaagccccacgcaccgaacgacagcaaaccacaccggcaacagacagccggcgcacaaaagaccaacccccaacaaaacgacatccccccagatcaccaccacacaccagaacagagaaccagaagaacagggccaacaaagcgacagccccgcccgcaaaacccacacaagaagaggacataccaaagaatacgaataccccccaaagcaccccgaccaagccc

SEQ ID NO: 118405 - DNA, 543 bp, Arabidopsis thaliana columbia
  unsure (1)..(543): unsure at all n locations
actatggggagctgaccgcctgcaggtaccggtccggattcccgggtttcccacgcgtgcgagaacccntgaacaaactcctagtctaactactgtgaagcttttatgctaaaacctgcgagaagcgccctcacaagaaaggggaagaaactttcccaagccgggagcagcgcacgaagccatctgcccaccacgacgaacatttttgaaggggttccttcccttttggggtgttggggccccccacccccgacactactccccgttagaaagagctctgaccaggcgcgtacactactacccgcacttccctgctttagcagcttgcagccggcgaactatacgggaacgactactaaggacactgtatagaattctaactagatccgatgccgatcgaggaagaaatatattaagtagagagaatgagaaaggcacgtttgaatgaagagtagtaaaagcagtggttatgtgtgggcagggaagaaacagcaatgaacacaaacactcatgccatttgcacagatgagatcctctcgtctg

SEQ ID NO: 118406 - DNA, 558 bp, Arabidopsis thaliana columbia
acggggcaaagccgcgtacgtaaggttggatactctagagcggtctcccttgggggggggaagaccccacacacggagaaaaacgagaggcagacaaggagaatttaaccccccaggaggaggaaccgcccggcgaaacggggacgcaaacctcagcagcagaaggaacacaaccgcgaccagacacaacgaagcccgagggaccgaaactggcaaggggtttataattcaaccgggggggcccacccgacataagacggaggagaacaacgcgaggcagagccacatgaggcgaagagccgcaggaaagcaggagccgccgcaaccagcgagccgcaaaaaagcgacagaaggacgcgaaaagcgcacgtaacggaaaatacaagaaggggcgcaaccaagaagcgggaaagccaccgagaaaagagcggcaaagccccaacaccaccagagcaaaagccgtatcgcgggaagagcgggagacaacgacggcagcgcaaaggacgcgtagaagcaggcggcaaccctacaataaacgcacaaaccgaaacagccaga

SEQ ID NO: 118407 - DNA, 548 bp, Arabidopsis thaliana columbia
  unsure (1)..(548): unsure at all n locations
cgtacgtaagcttggatcctctagagcggccgtcctttgtttttttaaagaccgnntcgccacgtgaggaacaagcagacggaggaaagggtttggagagaaagaaacggggggaggacccgcggaaaaggtgacgggagcaaagaggggagcgtacacgcgcgacaggcgagagcacggaccggaagagcagggggtttttgggggagttcnatacttaaagaggggggggcacaagacacaagaaaagataagaaggagagaaacacaggccacagagggagccaaaacccaaaacggagcacggaacgagcaacaaaacacggcgcaccaccgcaaaaagcagaaggataagaaggaagaccacccgaaagataagggaccaacagggcgagataggcggcgctgtccccacagcgaggaaacgcggagcggccagagaccgagaaacagggtacggaagcaaagtcgaaagcgagatgacacgcgagagactccagcatacggagagaaaaagcgaaacaagacccgccggtacgcaccacggc

SEQ ID NO: 118408 - DNA, 516 bp, Arabidopsis thaliana columbia
  unsure (1)..(516): unsure at all n locations
actttgacgtcgcatgcacgcgtacgtaagcttggatcctctagagcggccgcccttttttttttttttttttttttttttttttcnggaggcaaatataaataaataaaaagaagaaacaatttattatcaccaaaagaattaaacaagaaaataatactctttggtgaatcttcaccttaatgactcagatcaggttttgactattaaagaacatcttatatatggggggataaactaaacattagtattaatcttctggagtattgccgttactctatattaacaaccatcacagaagttcatcaagaaccgccttccctttatacctctcggcgttaaatgccatgtgccgcatacggcgcccctatacctccaactcacagaaccgtcttctagagagccacgacccttcaccccaaggccctaacccccctgcgcctccgcgccgcgcggcccccgtcggacccacatcccagctgagtccaaatcaatcccgctcgtcccccctcccgt

SEQ ID NO: 118409 - DNA, 472 bp, Arabidopsis thaliana columbia
  unsure (1)..(472): unsure at all n locations
tgaccgcctgcaggtaccggtccggaatcccgggttgaccaggcggcgaaacctgnacactaaaaaagaaaaacgagaggggcaactctccgcaccacggggccgagccgaagaaaaaagcgaacggcacctaaagccaaacggcaacggacccccaggaagaacacacgacaaactttggcaaatccctacttttaggggggggcccccccgccaacaaagatacgccatgaggcaccccggtgagacaaccaagccggccgccagcagcgcctcacagaccgtaccaataacagccacgcaaatcaacagcaaacccacaacccccaagagtaagagaccgcacggagaaggccaatacatacagaaagggaaaaggaaaaaaagagaaaaaaggaggcaaccacgtccccataggcgagaggaccagagaaaaagacagacacgcaggaagacccaaaagccacgccaa

SEQ ID NO: 118410 - DNA, 504 bp, Arabidopsis thaliana columbia
cgatgtctagaagaggtgaaagagaggggaatgttttaagggaggggggggagggcgtcggtacaaacaaactcacacgggtcaaagcgggcacccctcgaagaagcacaaggatgcaaggtccacgaacaacggggagcatgagtgatggacgacttacggtaggagagcggacaactaccgagaaccaagggcgcgtattggaaaaggtgtttttttagcgaggcggggggccacacgcgtccgaagagacaggtccaacaacaggaggccaagcccggtggcaagagaagacgtcgagcagagaaacgaggacgcaccggagccgaaagagccgcacagcaagcatgaactcggataagagagacccaaaaggccaggcaagaggggatgagagctggcatatgaatctgaaggtagatctgaagcggacgccggcagcgccagccgcacgcgacggcgtaggcagcataggcacaaagcgccaataaaccgcatacgagg

SEQ ID NO: 118411 - DNA, 513 bp, Arabidopsis thaliana columbia
  unsure (1)..(513): unsure at all n locations
ccccccccccccgccgtaaaaacggggggggngggatagtattttaagtggacggccctcaaataggggatnaacacccccgcgggagcggnccaaagccactttccccaggggggaagcccacaaacaaaaggaancacaccaaacggcgagcaccccccaacagacaagaaaggaaaaacgagcgagcaaagagaagaagagagagacaccgggacgccgggggagaggagttgagatttttttttttttggggggtggacggccaccaagattttttttttaaaattatttctgcctagtgtattgtaaagatctaccagtattatgtgtatttagtgttaaatttgttttttttcctacgaatcgttagctgtctaccggaagttttataatttttttattgatgtgttggcttttgttttttgttgtttntgttttttttttgtgggaaggaagagccataatctatttatttttatttaattatacgtcgtaagagaagtgcgataa

SEQ ID NO: 118412 - DNA, 452 bp, Arabidopsis thaliana columbia
  unsure (1)..(452): unsure at all n locations
tgnnnnnnnnnnnnnnnnnnnnnnnnnnnnnnnnnnnnnnnnnnnnnnnnnnnnnnnnnnnnnnnnnnnnnnnnnnnctttttttttttttttcaagaagttgaagatgtgcaaaaacgtaaaccgtagtagttaacaaaagaaaaaacgtggaacacaaaccacaaacccacagctacatgataacattataacaagaacataagttagaagaaaagaaaaagatacaataaagacgttacataacagaggggaagaaaagaaagaactcttcgctcaagtaacggctccgaggaagatcttactggtagtacatgagctggtgcgcgttctggtaaccaccgtcatatattgccctggtttaaccagtggctcccattgcaggtttgttaaaaagcattgttgcccctgccgggtgatgcatcattcggatttatttcctgcccatctgg

SEQ ID NO: 118413 - DNA, 415 bp, Arabidopsis thaliana columbia
  unsure (1)..(415): unsure at all n locations
nnnnnnnnnnnnnnnnnnnnnnnnnnnnnnnnnnnnnnnnnnnnnnnnnnnnnnnnnnnnnnnnnnnnnnctttttttggttttgttttttttttttttttttncaccctaaagcatacattacataaagccggaacacagtttgggtctaactttacccaacaaacaatctagaaacatgtgctgagatctcctgatattgttggcccataaacccctcacgccaagagctgtttattgtaagggtgaggcattgcctggacaaacaaacaaaaaaatctaccgccttcatgtggcatgactctagccagggaagagaatcaacagactttctttttccaaatgttattttttgttttttttggaaccaactgtttaataatataagttcggggttgggactgatccctaaggg

SEQ ID NO: 118414 - DNA, 540 bp, Arabidopsis thaliana columbia
  unsure (1)..(540): unsure at all n locations
cgactcactatagggaagctggtccgcctgcaggtaccggtccggaattcccgggtctacccacgcgtgcggtagagttttcgaaaccagcgagattaatggcatcttccaccggtctcaccgtcgccggagctctgcttgccggagattttcgattaccagctgtatcgnctctaatacccagaaagacttgttgttcattggcatgccttagcaactttttttttcggggtgtggggacccctaanggcggatttcccgagaaaaaacgcgcccctgcggtgccgcctgagggcgcggcccgaggcgggtcgagtggctcggagcgtcacccatcaaccctcaatcagggccacccctacctctctcgccgccagcgccgtgaaggagtattgtggtacgggngaccctcgaagtgttaggattgggagggagggagtgcggtgggcgtggggnggggcggcgccgggcggtcgtccctctccgcctcccgcggtggtcccccgaacggcccccccgtcattctggaccacctcgctt

SEQ ID NO: 118415 - DNA, 432 bp, Arabidopsis thaliana columbia
  unsure (1)..(432): unsure at all n locations
gggaagtgaccgccgcgggacgancaaaaaaaatttttaaagggggaagccgaaaaccgcccacccgaaagagggaggaacccaaccccaacatcgcgagcggggagaggtacggctcaacaggaattatttcaatggtaggaacggacagccgagcatggcagttttttttaagggggtggaaaaaaacagagaagcacgaataagaaattagatggggggggatggagatagcgttagagttaagacctagggaacaggggagaaacacacggattttagtgaaggaaccgatggaaagacagagggtaggaagaatagacgccggttataggacataaatatgtagaagttaagagtaggaggggccagggctgacgtaaagctatcttaacgcggagtcttatagacacaaaagaaagactaaaggag

SEQ ID NO: 118416 - DNA, 535 bp, Arabidopsis thaliana columbia
  unsure (1)..(535): unsure at all n locations
atagcagagctagacgtcgcatccacgcgtacgtaagcttggatcctctagagccggttcgccttttttgttttccgccnacaacgacccgacacgcccgcgcgacgccccagtgctatggcttcgtgaccctgacgacacccacgcggcgcccatccaggaggtgcacgcacagagttagctgaagtacgagtccacacggccagaactgcctagaggtttttttacacgcgggggggtcccacgaggccaatgtgcaggttaccagagcgggacccactagcaatcgtagtagaatcccncctcatccactgctgtttaccgtcaactaaattaccaccactcgatcacggcggatgacataagcaaatacgcaataaaacactgcaacgcgccatatgcaagtaaaagcgaacaaccccacgctggagaagggcgtgctcgacaaccatatgacatagcgaagaaacctacatacaacgatgcgcccaataaagactcagcccagatgtatgatatatcaccatcaaaccac

SEQ ID NO: 118417 - DNA, 524 bp, Arabidopsis thaliana columbia
acgactcactttagggaaagctgctacgcctgcaggtaccggtccggaattcccgggtcgacccacgcgtgcgcccacgcgtccgcggacgcgtgggttcccaaggatccgcattgttgaagttccgggcaagagtcaactcagatcctcatgggactcttgcgaattggaatgtttctgggattaatgatctctgctattggtcaggggttacttgtgttttttggaagagggggggtcctgacactttcggttctttgtttagaaggaacgcccggtctgggggctaggcgtgggcccccctgatcgtccgttgtgcggggtgcgggggtagggcgccgggggcattgcgctgcatgggggggggggagacgacaggatgtgagcgccttgccttgggggcggtcggtcgggtgtgtagctcggggtgattggtagagatagccaccgcgacccctcctccggtggccggcgtcgcgcttgcgcgacgtgggcgcgcgggtgctgctgttccggtcgggctt

SEQ ID NO: 118418 - DNA, 569 bp, Arabidopsis thaliana columbia
  unsure (1)..(569): unsure at all n locations
ccacccaccaccccacccccccccacaggaacacaaggaaccccgccncccccccccgtatagaataaaagggggnnaacanacccccccccnaaattnttncggggggaaaaaaccccggcccccccgcccaaagcggagaccgacaaacaacacgcacaacaatttttttcaacacggggggggggggaaagaaaccccccacgccccagagaacgcaacccggggaagcagccgcacaccgaacgaacagaagagaccagaaacaaagaaagcagcgaaacgcaaaagccacaaggacaacgcacccgagccagtgaaggcacgcagacccgccgcacgaacaaagcgagcggacacgacaaacacaaacagaacacagagaaaaaccagagcacgagccagcaacaagacgaccaagacaaacgagcaccacggacacaggaacgccacgacaacgtctttttttttttacgcgccccaaagaagggccggcggaacaacgacaaccgaaagcacaaaacagcaagacacgccacaagcgagagaccaacacccgacagagcgcc

SEQ ID NO: 118419 - DNA, 531 bp, Arabidopsis thaliana columbia
cgtcgcatgaccgcgtacgtaagcttggatcctctagagcggccgtcctttgttgggggaaaacccccggaccccaacaggatgagcagaggaggacgggcgggcttcacacgggaaagcacgaaccgcggccccccgaccaacagccagggacgcaagaacaaacaagaaggcagaaacccggaccgagagagaggccatacggacccatagaagggaactttttttgtgccgagggggcgggcgaaagagccagcccgaccggctgaggccggacacgaaaggcgcgcacagcaacaacagaacgagagacccacctgaaacgcacaatgcgcgagccgcagaaagcacagacgcgacaccccgtagtccgccaaccggaaccggccacccacgcacaaaaaccgagacgacaaccgaccgagccgggagcaacaaggccagaaaccgcagaggggacgggcgacagacgcagtagcgcatggccgaaaaagccaaccacaagaggacatccccaaaagagaccacgta

SEQ ID NO: 118420 - DNA, 551 bp, Arabidopsis thaliana columbia
  unsure (1)..(551): unsure at all n locations
gtcgcatgacccgcgtacgtagcttggatcctctangagcgccgtccttttttttttttttttcggaactcttttgtttttatagatgtattcagtattttcttggattgcgtaggttacaaaggcaaagaacaaatgaaataaatagtaatgcaggttctgcgttgacacatttccagcattagtgtgcgatccaaacgaattttcgcagacctttttttttctggggggggtgggcgcccccaaggaacgtcgcgccggaaaaaaagcggcccccccgaaccctcaatctagtgccgcaccccaaccccaacccccacacaacctcaaacctcccagcactccacgcccctaccccaagccagaccgccaaccccaccccagaccaacccccccccacacaccctctccatccaacaagcccatctccacgtacccaccgagcagcctgtccacaccatcccctccaccgtcaaccccgagatgctagccgcgacattcccggacacctcccccgctcccctccatcattccaccagaaacccctcact

SEQ ID NO: 118421 - DNA, 507 bp, Arabidopsis thaliana columbia
  unsure (1)..(507): unsure at all n locations
agctggaccgcctgcaggtaccggtccgngattcccgggtcgttccacgcgtgcgcctatttcctattatataatctctccgaccatcataatttgaccgttggagaacattactacttttcgcaaaagaagggaaaaaaaaagagagagataaagctctcttcgattcttttgcaagcttctctcctacggattgttgaacctttcgtccatttcgggggggggcgagcccccccaaaccccctttcgaaaaaacgcccactgtcattgtcctgtctccatttcctctccttcgtcctattttctgctctactgtcttatatctcctctccttactgctccctccttatcttccattcaccactaagtaggatgttatgtaactacgcccaccttctctttatttatttttttttaatttttttttctaagccgaaccacccccccccttctcacaactccttatcgccgagccctgtcctcctcccctgtactacccccccccat

SEQ ID NO: 118422 - DNA, 507 bp, Arabidopsis thaliana columbia
gtcgcatgccccgcgtacgtagcttggatcctctagagcggccgtcctttttttttttttatccatctcaaagattcctaataaatttgtgcggcggcgcatatggacactcgctaacagggcgcgcccgtattggcccccgcacggtctttgcttgtgacgatgcaccggctccgcctggtcggatgctcccgccttctgcaccgttttttttaaagcgggggggggcgccccccgcgcacccatgctccccccgataacatcctcagcctatctgctttttctctcccgcggccccattatccgtgttatctcttcgcgctcaccgtccgctcgaccctttacccttgctccctttcacgccgcatccctctccctcccctgtccgccgctctttccgctagtcctttttccatacttacgcgctgtccctgatgttttactcacgcctccttcggcccctgctcctttcgtttcccctcggatgcaccaattcgcccccctttc

SEQ ID NO: 118423 - DNA, 553 bp, Arabidopsis thaliana columbia
  unsure (1)..(553): unsure at all n locations
cgactcactatttggaaagctggtccgcctgcaggtaccggtccggaattcccgggtcgacccacgcgtccgattcatcacaaccacaagaagacgattttttattcttgtttccaaactgaatctgagatgggcgagccactaggactgctccaggtgactgttattcaaggaaagaaactggtgatccgagattccaagccaagcgacccttatgcgatttttttctagggggggaggcacccaagaccaaagccgatcaacaatatgcctgaccccaggctcgcaccgcagtccctcagcccccccttgccaccacccccgcgcaccgtcccccccttcattaccctccgcccccgccccccgccgtgacctacgacccccgccgtggggnggagataattaaactcaccccccgccccgtctaacaccttgatatctatatattctcccccctcctctgctcccgcgtaagcgagacacccccgcccccactactcctcatctcctacctccccatctcccccccccttcagtcgcacccccatcgccg

SEQ ID NO: 118424 - DNA, 566 bp, Arabidopsis thaliana columbia
agtggcagcacgcgtacgtaagcttggatactatagagcggtttaactttttttggtaaaaccccgggcgggagccgggcgagtgacacacgagagtaatcctctccaccggcgcgaataggtccggattgtgtacctctgtgtagctaaccacgcgtactttatacacaagcagtcgctaatacggccgtccaacccccggacccagatagtaccggatcacttgttattaccacaaggggtggagactgtgcgtcatcagccactaacatagttgcgcattcgcgatactggcgtgtggcatccttagtatgcttcaccgtgcgatttatctagcaagcgcgtcaagcagcgactgactaaaatgactgccgcagccgccgcttctaacgtaacgacgggctacattgaccacccgatccatcctcacgtgagatcggaaattggtgatggtggcagatctctagggcccatgtctcgatatccacccgtcaacagaagaagtgccccacaagtctcaaacagccccggaaatcgaacgtaatacgcgcagatgcccccagctt

SEQ ID NO: 118425 - DNA, 542 bp, Arabidopsis thaliana columbia
ctactacgactcatatagggaagctggtccgcctgcaggtaccggtccggaatcccgggtcgacccacgcgtgcgtaattgacaactgtccgcaggtgtacagattgcaaataaataatgggatccctatcaaaagttggtacgatgatccaactgatgatgggttgattactatacttgggttgttagagactctagggtgtaggatgccattttggacgcttccttctttttggggggggggaaccccccccccacctcttgtgactatactatctagaggacttttgattttcctggttatgtgtcttttcttggtgtatgtagcctcatgctctgtcgtgtaagcgttctcgtctatatcttatcccttcgtctggcgcgttttacagatgtgtttggccctcaccagatctccctgcttattttgttgtatttcatgcagagttgtgtgtggagcggactcgcggacctgtcgctcttctactcctccgcagtttgttgccgttcttctctcccgttgagttcttgtctatctgttt

SEQ ID NO: 118426 - DNA, 475 bp, Arabidopsis thaliana columbia
  unsure (1)..(475): unsure at all n locations
cgtacgtaagcttggatcctctagagcgggctgctccttttttttgtaaagcccncnaacacgcagaagcacgagatcaggcagcagaaatgtcaacaaagcagcaacaccagaaaccgaccaacgcaactaccaaacgtaagaatagataaatagctgcagacaagcgcaaagaccagaaaccgcacgggaatttagaaacgcttctatttgacgggggggggagaaccaccaaagacagagacacaacggagaagaacagggccaacaacataggacgacacagataaagaacggagtggaaaccaagtgagtgaaagacagcaaaaaagacgatcgaagacagaaaagacaagagaaaggaggcagcaggaggacgaagcgaacgcaagaccagaaggaaaaataagagacgtccatacaagaagaacccatgtagaacgtgcgcgcaaaacacaaccaacgcaggggaacc

SEQ ID NO: 118427 - DNA, 470 bp, Arabidopsis thaliana columbia
ggggggggagggagaagaggggaaagttttaaaaggaggggggaagcccaagaacaaaaaaacacgccgataagagcaccccgcgagatgcggcgccggaccgccgaacaccacgcgctagaccccaactgcccccagagcgggggagcacagcagcacgggacacgtcccaatccacggctagggcgtcttttttttggggggggagaggcaccgttgtgttgttcaggcctcatcttccggtacctattttttgcgttctctgtcgctgtccctattataatttcaggtttctaatatactcttcttatgccctctcgagttatttgcatcttgcccggtccatcgttccttctgagttgtgcattttcctccgcccctattatttaccctgtttgttagtcttttatcgtttttttcttcttattctcttggagcgcgttcccttttttgtcacttttctcacttgt

SEQ ID NO: 118428 - DNA, 467 bp, Arabidopsis thaliana columbia
agagaggagagaacaggcggcgcagcgggacgcaacaagcagcgacgaaagaacgaccacccgcccgcgcaaaagctttagaggggggtctcctcatttttacggggggggggaaaaagcgagaagaagcgggcaagaaaacggacgaaaaaaaaaccgggaggcaaaggacggggaagcgggaccgcgaggcatggagagtgaggacggcaggggcgcgcgcccgaaccaagaaaacgaagacgccgagaaaccggagacagacaaaacgcaagcaaaagcacggcgagggcgagaggcagagggggaaacaagaaggcacggatagcacgacaggcacaggaagggagaaagagaaaaagagataagacggagaaccgacaggaggagggagggcgcggcgaccgcagggcacgcagaacacaccgtgacacagaggcaacgagcgtaagagaaagagaagcaac

SEQ ID NO: 118429 - DNA, 517 bp, Arabidopsis thaliana columbia
ggtgaacttatagcagagctttgacgtcgcatgcacgcgtacgtaagcttggatcctctagagcggccgccctttttttttttttttgttgcatcaatatatattagttctaaaacgaggataaaattttccaaatgagacataaaagcattatccatctctagcttaatacaacaagcaaggagataaaaacaaaacccagtaaataagtcttaatacacaggcactactgttcacagttcctggatgaggctggggtcttttgtttcttcggcatgccggcaccaccaacaacacaggcatgggcaccctcaaacgggtcgagagtcacctgcagctgctggcttaaacctgtgctgtggggcaggtgtgcacctagctctggaacactcctgtgcccccagagctgggacacggtcccacggccaccttcggaggctcgcacccgtccatcgccatatgccctagcccctctccgcaccccctccgccggcccccccatatgtcccgaaccccg

SEQ ID NO: 118430 - DNA, 520 bp, Arabidopsis thaliana columbia
  unsure (1)..(520): unsure at all n locations
ctgacacgcctgcaggtaccggtccgngattcccgggttgacccacgcgtgcggcctcacagacatgcgggagtgtttattgntaagggtaaagaagatgctgttgtcgctaagattgggctgggggtaggaagatttggcgttcggcctgcgaactgtgtccccgatgatctagcggggccggagggaggtttgcgcggggtcctccctttcgggggggggaacacgggcggaccacgttttccccctttgtaagtctcccccgatgatggatggtgcttggtgttcgtggttctggtccatgccagcgttgtcctgtggccgccgcgtcgtgagtatgtgtaacattctccctcgggtggtctcccgcaggcggcctccggggagagaatttgtaacgtctgtctgaatagtcagcgtggtggtggttggttggaagcgtggttgaggaatggttaggaggaaccgtcgggtcgtccctatcgcgcagtgttgtgtggaggcgccgcaccacccgccc

SEQ ID NO: 118431 - DNA, 544 bp, Arabidopsis thaliana columbia
  unsure (1)..(544): unsure at all n locations
ggggggggaggggagggaaggggagattttgggaggggggggtttaaaaccnnggggggaggggaaggggggagagggggaaggaggagagggggagttnagggagaagggagaagggtgtgtgattagtgggttagtgggtgagagatggttgtatgtgagggaagaggagggagtgattagggggggggtggggaaggaggggagggtgtgggggggggtttttttttttgagggggggttagggaggaggaggaagggtggggaagggaagggagaggggtggtggggtggatggaggaggtgtgtatggatgtagagtgagtgagatgaggggtgagagggagaaggagggataagagaaggtgatgtgtggtaggagatatggggggtattggagaagtagtgagaggattgagagaggagatgagagttgaagttgtggagtgagtaaagtggggtgtggaaggaggatgttagggggggaaaagtgattaagagagtgggagagtagggtgtgaaatgaggggtaggatagtttaag

SEQ ID NO: 118432 - DNA, 493 bp, Arabidopsis thaliana columbia
aggggggaacccgggggggggggggcggacggaggagagcgaggttttgacgggggcgggggccacggagagcaggggacgcgcgccggagaaggagggagaagagacaacaggcggagggacggcgaaaacaggaagagaaaagagcagcagacgccaacacgagcggggaggacggagggggcgcgaaaggaggagaggacggggttttttgggcggggaggggggaagcgagaaggaacgcggcagcatgaggaagagactgaggggaggacagaagagcgggaataaagagagagaccagggggctgcaacggagagagaggataaacggaacgcgcagagacggaagaccacaaggggggaggcgaggaagagaagggcgcggaggaagagaatagaatgcgacaaggaggacgggaggaaaagagagaaagggagagaagagagaagaagagagaggggaggcgcgaccgagaaggggggggacgaa

SEQ ID NO: 118433 - DNA, 555 bp, Arabidopsis thaliana columbia
agctctctacgactcactattagggaagctggtccgcctgcaggtaccggtccggaattcccgggtctacccacgcgtgcgcaactagatctctcttctcctctgctcgttcaatgttataacgatctcgagtatcacaaaagaacaagatgtctattcgaagaatctaccgatgtctgaattctttaatcaaaagatcttgtgctcaatctctatgatcatacgccctatttttcactttgggtgacctctcagcttttttttttcggggtttataatcctcctccgtggtgtcttccttctcgttctttctctctgtttgccgcctactgcttagtctgctcttgtacgtagcgctcatttctgtttactttgctctctattcgtgcggccggttatagtattgataagcccgacgcaaactaggcttttatcaattttttttctcttatttagtagattataaggagagtccgccgcattcccactccgtctacagccgttccgtgtaattatgactcttcctctccccttcttttacacttacccctacct

SEQ ID NO: 118434 - DNA, 463 bp, Arabidopsis thaliana columbia
  unsure (1)..(463): unsure at all n locations
cgcatgcacgcgtacgtaagcttggatcctctagagcgggccggcccttttgtgtttaaacccctncnncnnnnncagnagcaacncatgcataaagcgatgaaatgcgagaagagaatcttcgccgaagaaaagaatgcgaggaacatatgagagggaggggaagcgggcacagaaaggagccgggcccgcggagcctacggagagagtttttttaaagagggggtggggccccgcggccggaggcagccccagggacgcccccacagccgccgggcgacacgcaccgaagcccgcgccagaggaccaccgcaccgccgccccccgaccaccacgcaacaaccccacgcaccagaaaacacgaaccgccacaaagccccccgaaacgaccggcagaagccaacgtgcgacgagcccccagcacagagacgaacccggaaccccggccacagaagccaggcca

SEQ ID NO: 118435 - DNA, 536 bp, Arabidopsis thaliana columbia
  unsure (1)..(536): unsure at all n locations
gcctgcaggtaccggtccggattcccgggttgaccacgcgtgcgaaacccgtncgaggacgcgtgggaagaaaaaatataaaattctcatacaagaactgaagaacgagcaaataaaaataaaaatagagtttttaactcatacacatccataattatatcacccacccacaacagcacttttttaaagagttcctaaatttttggggggggtgaacccccaagaaaagcatctgtttataaaacaacaattccacaaaatgatatgattttctttgattaatttataaaccagaaaacgtataggtaataaaccggtccattataaaataacactccaaataacgctgtacgactgtaagacgagagaaaaggaatatatattaggccattacgaatcaatagtaataaatataaatagaaatttttagattgagaataagagggngcaccataaccatactaattacaaagatatgcgttacatattaaataacagaacttaactagacaatcaaaaaatgtagaataacccat

SEQ ID NO: 118436 - DNA, 519 bp, Arabidopsis thaliana columbia
  unsure (1)..(519): unsure at all n locations
acgactcactattgggaaagctgacacgcctgcaggtaccggtccggaattcccgggtctacccacgcgtgcgcccacgcgtccggtttttcttgttcttcacggagcttctggtttgtctgagaaccttatcaaggaatgcattgagaatggagtgaggaagttcaacgtgaacacagaagtaagaacggcttacatggaagctcttagctctgggaagattatccgacattgggatgtcatgtccgcaacaaaagcagccatgaaagctgtgatcgcagataagatccgtctctttggctctgccggaaaagcttgagttgttgataaaaaaatgtccgatcaattagttaagtacaattgtacatcacatccaaagaataaaaaaacaacaaatattacatcacatccaaagaagatgaatgcattgtatgcaatgcagatgcagnggttgttggaaaaaaagaaatcatttttagtactggttaactgttttttttctctttttctccgccaaat

SEQ ID NO: 118437 - DNA, 546 bp, Arabidopsis thaliana columbia
  unsure (1)..(546): unsure at all n locations
tatggggagctgacngcctgcaggtaccggtccggaatcccgggtttcccaggggggggaaaagcccaaataaacaaccaggaagggggaggggagggacttagccccaaccaaccagacggaccaaagagaaagtgcaagaaagaggcgagggaccagaaggacgacgaggaccgaggaggaacgcaggttacgggaattcctanattttaggggggggaaacaccaacacacgaacttatcagaagagaacggcgcggacaagacaagatctgccgcaaaatacactaagaggccggcaagagaaagcggaacggcagagcgcaaaacggagaggaacccgcagccgctccacacagactcgcgacggccgagggagggaaagataggaaatacgcagagccgaaggaacaaacgaaaaatgagaaaagaagaagccggaactgggagagagaaggcaacgaagagatacgctaaggcgatcgcgggcaagagagtaaagtaagataataaaggagacgcacgagaacggggaactgcgcagcc

SEQ ID NO: 118438 - DNA, 544 bp, Arabidopsis thaliana columbia
gtcgcatgcacgcgtacgtaagcttggatcctctagagcggccgtcctttttttttttttttaacgtgaactgtagtataacattgaaagtagctacaatggtaaccaaaggtttacaaataataaagactatttaaaactgttttgagactgtttttgtttaatgaatggcgggaatgactcttgatgagtaaattttggagcatttttttattccgggggggggaccacgcaacacgaaaccgaacaaaaagagaaactcccgtgaatgcatatcacccactaattaatctttcccatgatcgcctgacccaccacaacaccacctattcccttattatatccattattactctttagattttattattcaattaattctccactaatctcgtcatctgttcgtattactacttgagcacgtcattctatatatccgcatactaggagaatttccctttaaatctgtactcacccccctagtatctcccaatctctctcctcacttcgacacatagcactctcatatgaccacatcatttca

SEQ ID NO: 118439 - DNA, 473 bp, Arabidopsis thaliana columbia
cgactcactattgggaaagctggcacgcctgcaggtaccggtccggaattcccgggtcgacccacgcgtccgcggacgcgtggggcacgcgataacgggttattggggcggagttagacccggggaagaatacggatctgttatgaaatatcctaatatgtcaaagggtgtggtggaaaatgatccaacgctgaagactgatgtaatgacgctgccaggtttttttttgggggggggggagaaagcccacaaggacttcaatgagatacattgctccttaggctgatgcttggcgttgttcggtctcctattttttttatttccctttcttttccatatctctacacctctcttgactttttccttgctcttccttgcactcggcattctccccttatgatatatatctataacaagtctcggacttggtctactaagttttttactggttttgtttttatgttttattttgt

SEQ ID NO: 118440 - DNA, 308 bp, Arabidopsis thaliana columbia
  unsure (1)..(308): unsure at all n locations
acgtcgcatgcacgcgtacgtaagcttggatcctatagagcggtttgccttttttgtggaagccccccaagtccgcttttaccgttttctatgtaggttactcgtggacatcgcaaacgtagttttgtcctggccaccgcgggcgctctatcgtccagacacaggcccagcgtctatatcccacattcccccgcgtctgggcggcggaggttttttttatgagggggggggtccgatatataactccgatagtgcacctgtggagngcctcaactactgccgcttcatgcttttttccgaattgcacg

SEQ ID NO: 118441 - DNA, 502 bp, Arabidopsis thaliana columbia
  unsure (1)..(502): unsure at all n locations
cagaagggggggaagaaaagaagaatttaaaaggggggaaaagcagaggaagaaggcggcagagggacaccgaacaggntaaggagcagcgacagccagacgctgggcgaggcacgagaggaaaccacaagaaccggaggaggccgcagcgccgagagcccgaggccaacaaataaaagcgtttttttttaagagggggagaaaagacccagagggcccagcgaggaaacagaagcgaaccaaaaggccacaagcatggggagcaggaaggacgaggggaggacagggaagaggctgacggaaccccaacgacggcgcagatgacccaagacaccaaaaagaaggagagcgcagggaggggctaggacgtgcagcctagacgaactaagggcagagagcctcagagagaacgcggaggcaagagctcacacacaggaagagcgcccataaaatcccagagcgcgaaagaagcccgcagacgcccaccgctcgaccaaggcgc

SEQ ID NO: 118442 - DNA, 530 bp, Arabidopsis thaliana columbia
atagcaagagctttgacgtcgcatgcacgcgtacgtaagcttggatcctctagagcggccgcccttttttttttttttttttgggaaacatccatttcatttaaccagaaagcatggcaatcttttctttgaacaaatctccataaattacagacaaagataaagccggaaacaagaaaatgttgcagataaaatctaacaaaagaaagaacaatcgaaaaactcttcttctccttgtgatttgctcacaacaaaacctcttcttcagagcctcttaaagtggctttccacttgtcttgatatcatttctgattgctccttgaatcatcttaacgatcaaatactgagcgcctatgataagagggatgagtttctttcttttatatcagaggaagagccatctaccatggtgttggctacagaatcggttagctatgggcgcggctgcaccgccccagagctcacagagacccaggggacccgcctgccgctcctaccgcacgccagtccctccttctgccccggagccc

SEQ ID NO: 118443 - DNA, 207 bp, Arabidopsis thaliana columbia
gaaagctgagaccgcctgcaggtaccggtccggaattcccgggtctacccacgcgtgcggcttcctccaaaacctcaaacgctcctcacacaacgggtttaggagtgatggggtctcctcgtcgtgaatgggttggttcttagccagtcccacgacctccacacacacacaccctcaaccccccccccaacctgcacccaccaaacc

SEQ ID NO: 118444 - DNA, 506 bp, Arabidopsis thaliana columbia
  unsure (1)..(506): unsure at all n locations
gaaaaagagagaaaaaaaagagttttaggaggaggggggggggaaggcgcaaaaaggaanaaaaccaaggaaaacagagaggagaaagaaagagaaacgaaacaagaaagaggggagagataggaggaaagggaaaaaagagacacggagggggaggagcaacagaagaagaagaaatagggaagaaagaaagaaaagacagcagaaggacaccttatggaaaagagaatttttttttaaaagagggggggtgagaaaagaaccacaaaaaagttttataagagaatatatatgtattaatgtgttntttataggttagtagagagagtaagtttcatttaaagatcacgataagcatatgtatattaaatagcagcttgaataaggctattataatgtagttatgaggtgtcttatgaattatagaagataagaggaagttcataaataattggagcattaatcgataataattataaagtcataaaagagtatatattcaacat

SEQ ID NO: 118445 - DNA, 525 bp, Arabidopsis thaliana columbia
  unsure (1)..(525): unsure at all n locations
gctgcaggtaccggtccggaatcccgggtcgaccacgcgtgcggggaacttcggttgaaagntgctcttcgtgctgcaaagggactttgtttcacttaacagaaccctacgacacgaggcgaaacaccggagatcgcaagaccctgcaccaacgccgcgccaactcggccgggaggcggcgccttcaacaccgacgaaaaaggcttccctccatttgggcatgttngggaccccacacaaacgcgccccccacaaaaaaaaaaaacccacacaccaacggaggacagtggtgacgaagcgacatagatcagagccaaacggacgacgcacggcaccgcgacacaaaaccagcagacccggcgcagcgaacgccgcaggcgcagcggccgagccggacgaaagacgaaaagaagagacacanaaggccaaaggacaagatacagagagagagaaagaagggcgagcaaaagaagcgaggagaggaagggccacgcatcgcgctcagacacaacacaacacccacga

SEQ ID NO: 118446 - DNA, 479 bp, Arabidopsis thaliana columbia
  unsure (1)..(479): unsure at all n locations
gtagcttggatcctctagagcggctgtccttttttgggtaaaccccnaacaccacaccctccttcgcgctgtgcggggaggtttgcggcccctcacacacaggttccgcccaaagaccccagggctccctccagcaggacgggtgggcctggggcgaaccagacagcgagccacaaagattgggcgcccttcttatttgaggggggggggagcacccgccggcccgccccgacggacaaacgagccccacgcgcccgaggtaagatcccgctatatgcgaacggacgaaacacaagaaaaccggacaccccgcgacgaccacctgcagaccccgaaaccaaacgaaagaggaggcccccagggggcacacccaggtctcggcgccacaggcaaacgagcacgacgcaccgtaaccacatcccgacagcaaagtgtccaaaaacggaatgccgccccagcagtccctaacatagcgaagt

SEQ ID NO: 118447 - DNA, 417 bp, Arabidopsis thaliana columbia
  unsure (1)..(417): unsure at all n locations
gtcgcatgacccgcgtacgtagctgggatcctctagagcggcctcccctggttgtttttttccctgnnnaaaaaaannaanacaaggagaaaggcgggggagtttggggaaataatagagtgtaaactcgacgcaaaatcccgcgagaagcccagtaagtggaccctattcgcccgggttgagatagactcagaagcccccgttttcagagaattttataattacaggggggcgccaacacaccaccaagcggcgcgtcgaaggcacatgagaccacggtgcttgacccataggttatagccgcccgccaagacccatcctcgcccgcccctgacttctcacaaacaaaccggcagcatccctcgtatagaattccgaagcagttactcctaacctatgactcgtcacgcaacgacc

SEQ ID NO: 118448 - DNA, 434 bp, Arabidopsis thaliana columbia
  unsure (1)..(434): unsure at all n locations
cctgcaggtaccggtccgngattcccgggtctacccacgcgtggcgggtgacttaatccgacaatgtgcttaccgaattcatgccctgaattcatatcttaatgcggataatcaggtttcagatggtgtgcgaagttctgctgggcggaccgttcgggtattatatgatgcccccccggcagactgttttccggctttccctaattttggggggggggggccgcaccgccattttcgccgtccaagaaactccccgcgtgggttggttcggtgttagtgtttctatttctctactattggtcctttcttttttacgtgtaaatctaggttcattgtatttaatcgtccctacgcgcccgacgatgtgttgcacaaagtatgtattgtgagaatccgccaaagggtggtctataattttttttttacctgctttg

SEQ ID NO: 118449 - DNA, 520 bp, Arabidopsis thaliana columbia
  unsure (1)..(520): unsure at all n locations
gtcgcatgacccgcgtacgtagcttggatcctctagagcggccgtccttttgtggtttttatccttnaaacaacaaaaacacacaccacaagcaacaaagaagtttataacggaaacacctggaaaaaaccccaaaaacagtacgcacacggcgtgtaaaggcaggggagcaggaaccaaaggacgactataagaataccgaggacttttttcgaggaaattccctttcttctaggggtggggggcgcgagacgggacaaaggctgagaagaagacagcacgggcgagggaggaatagacaagagagataaggaggagtgaaaagacagagttagaacgaaaagcgccagaaagtcgtagcacggaaagagagagaacagatcccaatcaaatactctaaaatgacaacccaaaaaggaccgaatagaggaggacggataccgagaaatacaatcggcgatgagctaggagcatatcgcaaaataagcagatgaatgggggcgcgcccgagcgacccata

SEQ ID NO: 118450 - DNA, 432 bp, Arabidopsis thaliana columbia
  unsure (1)..(432): unsure at all n locations
cgactcactattgggaaagctgatccgcctgcaggtaccggtccggaattcccgggtcgtcccacgcgtgcgagttggcagactacattgttgcatctccgcatggactccgaaggaaaaatgcatacccttcagaaatcgtggaagcactagctactcatgtatctgattccctacatagcagagaagtcgcggctgtatatataccatgtatcgatgaggtttgttgttgnggggagacncccctcatttcatcaaaccggcattacttcggatagcattgcttgaaaggctcgggttgaaccgatgcgcaccatgtgggggtgttgcagcgtctgatggtctactctaggtcgcgcgtgctggcgcatccgttggccgtgcccgatgccgcgcagggagagaaatgtgtgttccccgacactgtggaga

SEQ ID NO: 118451 - DNA, 412 bp, Arabidopsis thaliana columbia
gccgcaggacggccgaaagaaagattaacgggggaaaaaccgaaagcccacagaaaaaacacagaaggctaaaccaccgccgaccaaacgcccgggaaagaggaaaaccgcgacagcagagcaagcagcagaggagagacgaacaaccgccaaacgaacgactgagaagaactttgtagttatagagggggggaaacaggacacaaaggaagacgaaaagaagaagacacaagacacaaaggggagacagaaagcacgccacaagacgggaggaagaaaggcaacgcgagcggaggacaacaaccgaagccaagccagacgccacaaaacaggagcggcgggaggagaaagtagaagcaccgacagggacgaggagaagaaagaagaaaaaagaaacggagaaaagagggag

SEQ ID NO: 118452 - DNA, 470 bp, Arabidopsis thaliana columbia
  unsure (1)..(470): unsure at all n locations
gtagcttggatcctctagagcggcctgccctttttttttttttttctattnaaacaaaaannnancaacnaaagagccgagnggnacattggagatataccgcgtagtgcagatcctcaaatacaagaagggaagtttttatagcaagcggatggttgcacatgcgctatactgagagagaaagggggatttatagggaaattgatgatttttgggggggggggcggccccgcggaaaaaagtgggaggacctggtgggtaatcacgcatattactatggtattaaaaagtgtgcatatgtacgttagtgactgcgacgctcgtccaccggaaaaggtacgtgaaattagcccccgcaccactaattcaaagggttcgagatatccgatcgtttacacccataccggtttatgaagttgagtgaatccgaatttttaaactcgtagccctatgagaccaaaaatcatagc

SEQ ID NO: 118453 - DNA, 144 bp, Arabidopsis thaliana columbia
  unsure (1)..(144): unsure at all n locations
cctgnggtaccggtccggaattccgggtttancacgcggggaaaactattgaacaaactctgggcactgagagtcgatagaaaccggtcgccggccgtacgaaactggaagaaatgatacgaaacaacgcaaaagtcgtatcat

SEQ ID NO: 118454 - DNA, 527 bp, Arabidopsis thaliana columbia
  unsure (1)..(527): unsure at all n locations
atagnagagctttgacgtcgcatgcacgcgtacgtaagcttggatcctctagagcggccgcccttttttttttttttttttttttagatccaaacacactacattaacattcttcaacctctcatagattttcaaataatagagaaaatctttcagaaactatgttcatctcttcatttacaaacactttgaaccacccaaaactcaaaactaatcaagaacacagacacactgcgggaagatcagagcanaaaaaaacaatatcaaatgttgtaatcagtcgattgatttacagagttgagagtttggtttttagttagttagcattgcatcattcaacactcggtttctttcctttcatcattctcatcacgagtcaagcgccagctcggccaagccaaagaagatgatctaagctccgctgaaatagacagactgattctgctctccaatgtctcgcatagctcttgcactgagggcttgttggattgttgttggtgtggnccgatccccctttcaggcttggg

SEQ ID NO: 118455 - DNA, 524 bp, Arabidopsis thaliana columbia
gctctctacgactcactatagggaaagctggcacgcctgcaggtaccggtccggattcccgggtcgacccacgcgtggcggtctcaagtcccttcatatggaacttgatcctccgtttacaatctctgagctgagctcaaacgcaatttatctcacagaagattttactcccaagctggttgatttcgaatgctggaagacaattcttgcaagatcagaaaagaatttgagaaatattaggagccagggttcgatatgtgtactcccaaacggaatggagagccgatatcttgatgtggcgggtaatatctatgcattcgggattcttttgctggaaattgcagcgggagacctgcttattgcaaagaccaaggattgttaattgaatgggcaaagggcgggcttggaggccagagctttggtctgttttggggagtagagtgtggagaggggggagccggaactcttcagcctggcctcctacgctcgtgctcatgcacctcgggccccgcccctgcctaccc

SEQ ID NO: 118456 - DNA, 482 bp, Arabidopsis thaliana columbia
  unsure (1)..(482): unsure at all n locations
gtagcttggatcctctnagagcggcgtcccttgttttttttttttttttttttttgggaaaataatttcaaggaaggaattaaggttccggtaaaggggtaaccttaaggtttgccctttgaaagaaacacattttaaggtttttttttcccaattttggatttctccccccggaagaattttttttggacattttttttttttgggggggggggggacccccacaaacggcgctgactacgcgttcacaagcgcactccccccgcattggcgcggtccgctcgtatgtatacgtatttgtccctctctcaatctctgatgagattccccactccactcctatgctactttcccccctcaatccgttcgagtccatcctgtcccgtctgccccagctatctagttcaccccatcttgctatccctagactcccattacgtctgccggtatcgctctcggtcacgccccagccgaacacatca

SEQ ID NO: 118457 - DNA, 191 bp, Arabidopsis thaliana columbia
gcctgcaggtaccggtccggaattcccgggtcttcccacgcgggggggaggcgggttactagaatcaccggctcttaagcatgggagacgcttacaccagtcagcgacacggccagtccccacgcagagattattagacgggtcggcagtcgcccgctgatgcgagcgatgtgtaacatgcatccggttct

SEQ ID NO: 118458 - DNA, 548 bp, Arabidopsis thaliana columbia
  unsure (1)..(548): unsure at all n locations
nnnnnnnnnnnnnnnnnnnnnnnnnnnnnnnnnnnnnnnnnnnnnnnnnnnnnnnnnnnnnnnnnnnnnncttttttttgtttttttttttttccactaaaatcttcataaaaattattttgcaccaccacaaatcagtaacaagcattctttacatgttactgaaaaaacttcaaaatattatagtaatgataatagaaaattaacattcctctatgtaattaaaactcgtgtataagataggggtaatcatactatttgataagtccataaccaccggtctaatcagcgatagcccagttcatgtcgttctcaaatatccagngacaaacttcgatccgacccggttttgacccgagagctaagaaagctccatgacttggaccccatgaatgccggggcattggaacagatggaagagccgcggcctatggtggcgcgggtcctgcgcgccgtgtgccaacgagccgtttggcacacgcgcactttatgagtccgggtaggcccgaatagactgaagctggcataatttttccaccttaacacac

SEQ ID NO: 118459 - DNA, 512 bp, Arabidopsis thaliana columbia
  unsure (1)..(512): unsure at all n locations
acgactcactattgggaaagctggcacgcctgcaggtaccggtccggaattcccgggtcgacccacgcgtgcgttcttctctgctcttctctctctgtagacactagaagaagaacaaaaatgctcaaacagtttcttcttctccaatccttctccttcttcctcttcaatgtagntatcggcggaggaagaacattcggcggcggtttctcagcggaggagttccatttacggggggagcatctctaggtcgttactggaacaaagagattcgtggccaatcctccagatcggagtttttcacctcaaaggctgtacccctcaacgccggagactcagcgactttgctcaaaactggtcgccgggaactgcgtggccgctggggtgagcggtgtgtgtccgcgcgccgatgccggctttgtgcgtgttcggtcgtggagcttaggggcgcgccgccggcccccctcacgcccgccgtcgccacccagcgcacatccccacttatcgcgcgc

SEQ ID NO: 118460 - DNA, 503 bp, Arabidopsis thaliana columbia
  unsure (1)..(503): unsure at all n locations
gactcactatggggagctgacagcctgcaggtaccggtccggattcccgggtttaccacgcgggcgctcttccttacactcctttttttattaattnccattgatctctnttccctgcctcgattcatgcgcgcctaaagagaacacagacgcaagatggaaaaggactaacgaaagcgtaaggtagagacagcccgacaacatggagatattgcaagaagttcctaattttaggggggggggagaaacaacaccaagacacccgcagaaaaaagaaaaataaagcacaaatacgccgctcgagtgagaatgagcgaaaatctccacagtcaactaccacctcacgtatcaacgacctacactacgtaaatacacttcacacacgccaatccaacgcacaccagcgaacaaggaagaatgaaaagagatatatgaatactcggcgatgtcagcacgcaattacgagtaatgtatgtgtaaatagtatacggttcacaggtgga

SEQ ID NO: 118461 - DNA, 417 bp, Arabidopsis thaliana columbia
ggagggggaggaagaggggtttaaaggggggagaggccccacaaaaaagggggggggagggaaggaagaattagggctgaaaagagcggacgaggaggaaaagaggacgcacccggacgacagagaaagcgaggcggaaggcgcaggccacgaggcagaagagttttttttgggggggtggggccccccgtgccctgggcggaccggcaacgcggccacccccgacggctgacgcgcacagagggcggcggcaggggataaacgcccccgcccgcagtaattggacagtagcgaggccaccataaagaggtccgccccgtgctacggcgtaataaagctgaaggttggatcgcacctccgaaatcaagaggcttagcggggtgcccgtgtagtgtctctacccgtcgtgccccaacc

SEQ ID NO: 118462 - DNA, 490 bp, Arabidopsis thaliana columbia
  unsure (1)..(490): unsure at all n locations
gcccgcaggaaccggnncgaaacacaccactttcgcggggagaaaaacccccaaacccaacccccggggaggaagggagaaagnttcggaacacgaccgacgcagacggagaaacaagaaacgagcgagcccaggacaacacagacgcgagagacaccagccccccccccaagacaactttcggaaggatttgctccttttgggaagttggagacaaacaaaagaaaagaaccagaagacaaacaagacgacagcggcggcaggaggaaaaccagacggaccacccaaaagcagcgcagcggaaaacactaaaaagcaaccactagcccccaagccgaacaactacgaccacgtacgccagagcgcgcagaacccgaaagagtatccgcgcacaagcagaaagacgaaaaagaagaggaagaaagatagaagacgaggccagcccgcaagcagaccggacaaggaaggcgaatgacagcgaaaacaccca

SEQ ID NO: 118463 - DNA, 373 bp, Arabidopsis thaliana columbia
gtaggcacccccatttgggaacagccaaaggagaaaaaaaaattaggggggaacgacacgaagggacacaggcgcgccctcaacgaagggggcccaacaaagccaaacgacacgcgaaggagccagggccgaccgaccccctcaaacgtttttaaggggggaagcgcaagaccagaaagacaccccccccaccgaggaggcccccaagaaggaggcaacggaaacccagcaacaggacgaaacagcacacacaaaaaagaacaccaaacaaaaaaccagaacgagggcacagcgaccccacgccgaacaagcccagacccagaaacaaaaacaaaaaagccaacccagaggacgagagaccgaagacccgaga

SEQ ID NO: 118464 - DNA, 561 bp, Arabidopsis thaliana columbia
  unsure (1)..(561): unsure at all n locations
gcgtacgtaagcttggatcctctagagcggtcggccttttttgttttattccncnnaacnaaaaacgcacacgcagacgcgggagatattcccggccccccatcggaggcgaccgagcaatgagacccgcgggccgtcgagcagaggggcagggaggcgcgggtaggcgggcagcgacgagaccgcttttaaagaaggtttttgatttaggagggggtgcgaaacgcagccacatgagccagaaggtagaacaagagccaccaacgcccacagccaacggatcaacacgcacaaaaaccagaagactcgaccatcccacgacgaaccggcgccaaatcaacacacaaaacgatggaccaaagacacgagaccagagagaggccagccgagaacacactaccgatatgcgaacaccgcgaatgcgcagccgggcgcgagcgccccgagcagaaaagcaccaacgcccgctataacctaaaatggacagcgcgcagcgcgcagcacagccccaagtacacccacgaaatacgagcactaagtcccacaaaaaccaaccaaaaa

SEQ ID NO: 118465 - DNA, 469 bp, Arabidopsis thaliana columbia
cctgcaggtacaggtccggaattcccgggtttacccacgcgggggaggcccataaaaaacacacccacgaaaaaagaagacgaacagcaaccggacgaacgagacgaaagaaaaagaacgccagcaacgggaagaaagaaaccaagacaccacagcccgcacaagaagttaagcagttttctctttttaggggggggaaaagaaaaaaaggttgaacgagttacgataatatttatgaagacataattactatatgtacatattaggtaaggatgtctgtacagtgattgttacatttgtagtatttttttaatcttaatctgtcaactatcgtaaaagaaactataaaccataggcaggagaagtgagtaaattattaatagaaaggaaggaaaacgggggaaggaagcaggaaaattgatcttatttgggcttgttgggtagatttatagagtgcgaaataaatgta

SEQ ID NO: 118466 - DNA, 535 bp, Arabidopsis thaliana columbia
  unsure (1)..(535): unsure at all n locations
gtcgcatgacccgcgtacgtagcttggatcctctangagcggccttccttttttttttttttttttttttttcaacaagtgaaaccatacataaactaataacattcaacaagacaagaatgttagcatttaccataacccaaaacaaatcgaaagctggtttagacaccaggaagaagaagatagcgcaccaaaggttaaaaccgtttttttttttgaggggggggacccccccgcacgtgtcgtcgagcggggagggagccgcgggcccctacgtggagcgtccacgcggtgctctagcccgagacgctcgcgctctcccgtcccgctacatccgctcccgagtgccctaccgtgaccgttgaggatgccggacttcaatcgctccactcgctcgcggtgccatcaggaaattatcgtgaccgctctttcctcactcgcatacctccagccatctctagatgtatctggaaacgataaatgccgataacccgccaatttccatattacccgctgattctcgcactcctctctt

SEQ ID NO: 118467 - DNA, 516 bp, Arabidopsis thaliana columbia
  unsure (1)..(516): unsure at all n locations
cctgcaggtaccggtccgngattcccgggtcgtacccacgcgtgcgcaaatccgtangngaaaaaagaagaattaagaaaaggagaaaggataaccgtccccaaccggaccccgtaccactccggatttatccaaatcttacctattccatcatcccgcaatctccactaacgccccacaggcaatcctttttcacgcacattcgcttattttagggggggggaccgcgacacacagaccccccatgcagagtaaaacatgcgtcacggctatcgtgttaagaattaaatatagtcacaagcggcgcaataggtaagttccgagttagcgaaactgattacatactaatagaatcaacgagtaactatagtacagactccaggcgggtataaaagaaaatgaaaaatcacagccgtctaccggtagtgataaagaaagattaccctggtcaaaatagaaggaggagacggagcgacgcgcgtgcctaatagctcgttacattcggcgccccgtata

SEQ ID NO: 118468 - DNA, 516 bp, Arabidopsis thaliana columbia
  unsure (1)..(516): unsure at all n locations
ggggggaggaagaagaaaaaggagaaagtttttaagggggggggggaaaaaaagccnagagggggagagaggggaagagagggaggaaggagagggggagaatttgagagttttattagagaggggggtgtaatgggtatgtggtgatcggggaggtacgatggaggtaaagaagaagggagggagcggggggagaggagaggaaggattgtgggtccaggggaaagaggagtaaagagagaaaaattttttttttggggggggggggaaaggggaggaaagggtgggggaggaaagggaaggagggatgaggaagttcatgatgagggatgtgtagaagaacgaaagatgtgggtgggtgagaagaaagagagggaagagggtatcgatggcgcgaaattgagtaacgtgtgattaggtggaagattttgagtagtaagagtgactgtaggtcgtcattggagtaagattgataacggtgaggtatgagatgggaggaggggtggggaggagttg

SEQ ID NO: 118469 - DNA, 158 bp, Arabidopsis thaliana columbia
cctgcaggtaccggtccggaatcccgggtcgacccacgcgtgcggtccgaataagaagtgtgtttgaaagatctccaaacactgttttataacctctttggtctctttgatgagtattgtaagtgaactgatgctaaaacacgagaaccgcgtaaata

SEQ ID NO: 118470 - DNA, 498 bp, Arabidopsis thaliana columbia
  unsure (1)..(498): unsure at all n locations
tctactacgactcactatttggggaagctgatccgcctgcaggtaccggtccggaattcccgggtctacccacgcgtgcgagaagaagaaaaaaaatcatggagatgaccgaagcttccaaacagacaacagcagaaggatcagcaaatccagaaccagaccaaatcttgagtccgagaagatcgttggagctaaaacaaaagaaatgggggatctctgttnctttttgatccttttagcgggggtcccccccccactagacatgcttgtttagaagtcgctccctcgtcaccgcgatcggcggtactacctcccgtctacctccagcgcgtcgatgttctatttccgcttcccttatcacctgcccccgcctggcgcccgtaatgttattgtacggtctcccccgttccctcttttgtttgttttttgtttttcttttactctcttggagggtgtctacctttcccctctccctaaccgcccccgcccaaactgtcc

SEQ ID NO: 118471 - DNA, 480 bp, Arabidopsis thaliana columbia
  unsure (1)..(480): unsure at all n locations
cgtacgtaagcttggatcctatagagcggnctccctgtgggggggaaaacccacacacacaacgacgagaaaccacgaagaacacacatttcaccacgagtggcgcaccaacaccggccaaagagaggccgcagacagcagcaggggcgcgcggagccaaacgacaagggcacgagccgcgacgcgtcgcacccgttttttttgaaaggggggggagagccgcggaacaggaccgggaggagacaaacggcgatgagagacgacggcaccaaaagcacgctcatgccaaacagaaagagaaagaagaccgaaatacgcaccaaaaccaatcccaaacccagcgcgagaactagccacactcagatcacaccctatgcgcaaagccgcaacggaaggagcgcaggcgccggaacccgaagacagccacgccgggggcggcaaaacgaaaagaaggacgaaaaacacggacgcgcccaaagc

SEQ ID NO: 118472 - DNA, 493 bp, Arabidopsis thaliana columbia
  unsure (1)..(493): unsure at all n locations
cgtcgtaagcttggacctctagagcggctgncctgggggggaaaccccncnagnggccgccggggggggggagggggggtttagggcggggggggggcaggccccggaaaggggggggggggggccgagcaaaaggggggtaggnnngggggggcggggggcgagggggtttggggggggtccgtcatttaagggggggggaagagcagcagaagggcagaggagggggcagggtgcgctacaaaaggggcgcccggggggcgggacgggcgaggccaggcgggggcgaggggcggaacggggccaagcaatgagcgagagacggagaagaggggcgggccggagaacgggcgggagcagcgcagagaagcggcgaggcgcgggcgggcgcggaggagcggcgaggaagggcgagaagagggagaaacggggaggcgggggggggaggcgacagcgaggggatcgcagccacgaggccacggaagatcgcagc

SEQ ID NO: 118473 - DNA, 433 bp, Arabidopsis thaliana columbia
  unsure (1)..(433): unsure at all n locations
cctgcaggaccggtccggaatncnngatttccaaggaaggcgagcgccaccccccaccatatccaaaaatccaaaaccccaccccccgtcacacagcgtttcaagaactattatatgcacatagatacaaaaaaaaccccccccatcgacatataaaatccagccgcaggatttttttaggaggggggccaaaccgccatgaacaccaaatagaaaattccttcaaccgttcaaccaagcctcgcatgcactaccgagacacacagctaaaatctcagaaaaacagaacgaacctccaatgtgaggatgtgagaacgtgaggctggatcagcgatgatgtcaataatttatatatgagagtttaagggcgcagtgcagacgcgccgcaaacagaaccaggagtgtgggtgaaaaaaaaagcctcaccaaggtc

SEQ ID NO: 118474 - DNA, 488 bp, Arabidopsis thaliana columbia
  unsure (1)..(488): unsure at all n locations
tcccaataccggccccccccaccccagtagatgagggaaccccccccattaagggnaaacaacagtgaatggaaaattttaaagaatttaaggagggggaaggcaaagaaaaaagggagccggattgaagaggtttaaagacacattaaaagtgtagagcagaacagagggcggatacaggtcggatgcgagaagatggcaagtaagaggaagaggaaaacgaggctttttcatgggggggggagagggcacggaggagtagaatagtttagagatccgcaatgaagagacgaatggcaacaagaccgatctagatgagggtaatgtaatgtaatgattcacggacatagattacgatccactacaagtatttgcgaccaattgcatactttgggcatgaaatgcaaaaatgaaagtccaatacaataacataaggaaatacgatgaagtaaggtactcatcgaatcctttagggccatttatcaata

SEQ ID NO: 118475 - DNA, 367 bp, Arabidopsis thaliana columbia
  unsure (1)..(367): unsure at all n locations
cactattgggaaagctggcccgcctgcaggtaccggtccggaattcccgggtcgtcccacgcgtggcggccgacgcgtccggacaatggcggaggagcaaaagacgagtaaggttgacgtanaatctccggctgttttagctccggcgaaggaaccgactcctgctccggtggaagggggggatgagacaattcataatccccccttccgtcgagtccaattttcttgggggtgtaggaaaaacccatcgagggagcctacacccaaagagaggcttcctcttggtttcggccgattagagatgccaccccttgccccgctttgggaaaaaggagaaaaaaaccgttttttccatcaaagggttggg

SEQ ID NO: 118476 - DNA, 497 bp, Arabidopsis thaliana columbia
atccccgagctttgacgtcgcatagccgcgtacgtaagcttggatcctctagagcggccgtcctttttttttttttttgatgcaatgggaggtgttatcaaagacaatgactctgcaagcgatatcaagaacctagtcctaactactgtaagtgggttttgtgagaaacatgtgaaaaatcaataatgaaacaatgagtttacttttaaagaaaaacaactttttttgatatattgggcggactcatcacctaagggggccgattagggattgagatgcggaaggttctctttcctcaccccctaccctctctccccgccagccccgcctaccccctaggcttgcaaacagagccccccccactcctcccgtttccccgcccctggccgtcctcctcgcgcccgtccctcctgcccccccccgccccctccatgtacaatgttcccagatgaccccataccgcgctatgcccctcgttcccctctaccagccctcgc

SEQ ID NO: 118477 - DNA, 488 bp, Arabidopsis thaliana columbia
  unsure (1)..(488): unsure at all n locations
ccctcatatggggagctgacagcctgcaggtaccggtccggattcccgggtttaccacgcgggggaagcctctattttaatcnatcagagagaactaaggcttggtgaggagaccgcggccctcacctgcaaaaaaaaataatccgtatacgaagagaaagacagctttgcacagtcaacccactaaagaataggaacaggtctacttaaggggggggggacacaagagcaacgactatccgtaaaaagactccggtacggctgggtacgtacgtgcgcgctcaggcatagcagaccacctgtagcagtagcgtgtgagtattagattatacgaaagcaagtcaactctaggtgccgcacggtatagatttaaaataaacacggcataaaaaaggaaggtaaagatatatactgaatgagtagagggaggggagaaggagagaatctcgtcgagctcaggcgtaggttaataagaacactcatctgaa

SEQ ID NO: 118478 - DNA, 501 bp, Arabidopsis thaliana columbia
  unsure (1)..(501): unsure at all n locations
cctgcggtaccggaccggaatncnnggcttcccagcgggggaaaaccctataaaaaantcacccctcatacactcgaatatcttcacatgccttgctctcttgtcttcacatgaagtagcaggaatagtcgatgcaatgaaacgcttaatgccagccgccccaacccgactctaccgagtttctatttatagggggtgtagaacacaaagcgtatgtttgacacagaatagaaagacctcgtcattaatgcttaaagtaccaaatatctagacttcaaaagtcgcatatttctacgtatataacatgtgaacgattgatattcgttctcaaatttgcatcaggaagctgtagaagataatattgatattatggagtacatagtggtttatgttattatacgctgattcacagctaggaggngtgggctctttacatcattactatcaattcgggtgctttctatcttcattgaaacgcgacataaactcttatgcccaccc

SEQ ID NO: 118479 - DNA, 492 bp, Arabidopsis thaliana columbia
ttgacgtcgcatgcacgcgtacgtaagcttggatcctctagagcggcctgccctttttttttttttttctttttttcccacccaccccccaacacagcctataataaaatcttattgaggggagttaaccgccaaatttgggcagcctactcttttataaaagaggggggttaataagaaacattactgtatttgaaaggaattgttggacgactttcatgtttttaggggggggggcagacacacaataaaaggcgtggttggagaaaaaggtgcctcttcgtgtgggcgggaagagatgcggaacaccatggctcgaggcaaggcggacgaaagatacagtgtgtaaatcggccgatccgcgccactcaagatgcgacgtcgcgatgcaggaagaagtggtagctcggtgttgcgccgcgctgtgacacatcgcttattgcgtgcggttcacggagatcgcagccatgagtagtcatacgttatatcgcg

SEQ ID NO: 118480 - DNA, 480 bp, Arabidopsis thaliana columbia
  unsure (1)..(480): unsure at all n locations
tttaaagggggggtgaaaaccccaaggagagaaaggggaaaaggggggagggggggaggtgaggagagaaagggagggaggagaggagaaagggaaagaaggaggaggaagaaagaaggggaaggaagaggataggagaggggagagaggaggaggttttgcggggattttttatttggaagggggggagaaagaaagaaaaaagaaggagaaaagaggaagagagtgggcgaangggttaggaagagaataagaagtaggggagagagtagaagggggatagaggagaagaagagaaaaaagaagagaaagagaaaaggagaagggaaaagagggaaagacgaggagggaagaggcgaacggaccgcccaaagatcggggggacagaggcgaaggggagcacacgaggggagcaacacggccgagaacgggcagcgaaggaaccggagaaggcggaacggagccacaggaggcgacaga

SEQ ID NO: 118481 - DNA, 522 bp, Arabidopsis thaliana columbia
  unsure (1)..(522): unsure at all n locations
gcgtacgtagcttggatcctctagagcggccgtcctttttttttttttttaccgagaaatatttcaaattagaaagttttgtagcataacatgagttgatagaagcgaaaacaagcaccctgaaaaggctccgtgtggttttggggagaaacggacgggtcctggcccggtacgagaagtggggacgcgcatttttcggggaggttcngtaattttagggggggtggcagaggcccgcacaacagggtacaaagaggggcgctgagactccgccacgtcacagaaactatccccaatatctgacacacatgtgcgcgtggggagtgacgcgcagtagcaccagctagcttcccgagaacagatcgcacctccagaacccttctccaccgcctctagagcgaacatcatgacctacactgcgaagtcctggcgccccaacttcggatatcgcagagaattcaacgagcggcccttgcgcggtatcgcccctcgctcattaccctccacgtgttaatagagtgt

SEQ ID NO: 118482 - DNA, 528 bp, Arabidopsis thaliana columbia
cgtcgcatgaccgcgtacgtaagcttggatcctctagagcggccgtccttttttttttttttttcaaagaatgtgatataagataagcaacaatgcagtatgaagagacttcaacatgtataatagatacaactcaaaatgcgtctttaatattacagcgaacgaaaacagagtataaggtctaacgtcaagagaaaaaaacagagcatttttaccaaagcaggcagaaggcaaatggttattttaaaaaccgaatgaggacgagtcgtggcaatttttatccccgcaaccattcattgaacacaaaggccgcggacgcgtggggcgaccccagggatggcgcatcccggacccgccgctcaaccaagctgccgctatgggggtgggacttgtcccgcgtcgcccccaccttatagctcccatccgccccaccgctaccccgtccgccaccttgccgccattaaatcatgcatcgtcactaaccccttttctccacagatacctcacacctcccctccaacccccctt

SEQ ID NO: 118483 - DNA, 365 bp, Arabidopsis thaliana columbia
  unsure (1)..(365): unsure at all n locations
gctggacngcctgcaggtaccggtccggaattcccgggtcgtacccacgcgtgcgcgcctttgtgttcaatgggatgttccggngatgacagatacgcatactccgccgaattcggtactcatttacaggtgtaaagttaaggaacaacggacacacacatctccgcaggtagattagcccccgaactatgacgttgttaaaaagcgttccttcttaaaggggggggcacccgcataactaaacaaccgcgttattgatcattgtatcaatatagttgtcagtgtatttcaattctttagactttgattaattagatgtgatacagactagtattcactgtgacgcatttagctcgcattatccg

SEQ ID NO: 118484 - DNA, 470 bp, Arabidopsis thaliana columbia
gtagcttggatcctctagagcggcctccctttttttttttttttacaagcttactcttattaccaaggagcaacacaacttggtcaaagactcaaaagtacatgaaatcatcatacaatccaacacttgagaacaagtggcacatacacagaaactaatatgggacgttattgggcatgttgcgcattttttatttttgacggggggcccccgcgcaattggtccgggtgttttttgattccctttaaagagatggtagtgatcagagatactagcgcacgtcaaaccgaattcccagcattaccgctttatgggactcaattccgaattttttttgaaattttgtggcgcgtattcctccacgccacgagttcgcttccccttattcgccgcctccacctccttccccctatacctatcacccccaataagataattccccagatctccgccaatccccccacataccc

SEQ ID NO: 118485 - DNA, 478 bp, Arabidopsis thaliana columbia
  unsure (1)..(478): unsure at all n locations
gactcatatggggagctgaacgcctgcacggtaccggtccggattcccgggtctacnacgcgtgcgtaaacacgatcgccgaccatttacgagtcgtcagtggtgggatttgaggccacaagttcctcggtcgctggaaatattgtacaattactcactcattaaagggaatttatgtgcagccaaaagattaccataccgaaagagttctcatatacaggggggggaccactaagcagcaaacaaggaaataaaagtgacattgatcggaacggaagatcgataaataggcaatgacgatagggtcaagtcgcctcgaccttggcgctgagccagacagaaataagtcgcgaacttgcaagtttggcggcgttagaagtggtattaaaaagtctcctacaaaaagaaaatataaaaataaaaaagttatgaaaggaggaagggagacaagcaaaccggtagacgttggagttaagaa

SEQ ID NO: 118486 - DNA, 390 bp, Arabidopsis thaliana columbia
  unsure (1)..(390): unsure at all n locations
gtcgcatgaccgcgtacgtaagcttggatcctctagagcggccggctttttttttttttttctttttnananaagaaananaaagaaagagagagggagatagaggagnangagtagagggagccccaaggaagagtgagggggttgggtgacgtgcaattgtaggggggatgtgagacggtaagacagcggaggaggttttccagggagtttctattttttggggggggggggcgccgcagacgagaacagtggcgaagatgcagggccacctggatgtggggaaattagagtgtatctgtttcaatgtgggcaagcggggggaataggactgggagccagctataacagcaagagatattagccccaaactgaaattgaaaaagagat

SEQ ID NO: 118487 - DNA, 437 bp, Arabidopsis thaliana columbia
  unsure (1)..(437): unsure at all n locations
gtcgcaagccccgcgtacgtagcttggatcctctagagcggccgtgcctttgtgttttttatcctnaaanaaacaaacaaannnaaaacagaaacaagaaactctctcgcctacacaaccagggaaaatggaccaataaaagtaagagaggaaagagtaaaaacgaaatataagggagaataggaggtctaaacgcacacaaagaagaactttcaaggcatttttttattttaaggggggggcgacaaacacacaagagacaccacacaatgaagatacacacagacacatgaagagtgaattcagatgccagaagagcacgagacaagaaaggactaacgcttaggtccaatatgagacgtggcaatcgctagaatacacaataagacaaaagcgaagccagtcaatatttgacaatggacaacgaaaggcaatgg

SEQ ID NO: 118488 - DNA, 534 bp, Arabidopsis thaliana columbia
  unsure (1)..(534): unsure at all n locations
tctactacgactcactatagggaagctgatccgcctgcaggtaccggtccgngattcccgggtcgacccacgcgtccgtacagaggtcattagcttccttctttcaactgaaattattcctctgtgcctccgtaccatggaaatggggagtgagctgtcaaaaacagtggcaacatttattgttcaaaagatactgttggatgatgtggggatgttttggaagctttttttttttgaggggggggaaacccaaaaaaaacttatattaaaaaaaatttccttcttttaattcgtattttgtcattcatctttctttgttatatttttttatatatattaatatatataatattaaaattacaaaacatttagtctaataattcatatatataataacataacatcatttttattatatataattactaatggtaatatattttgggcgtctgacctctactatatatttatattattcttttttattgttgacatatttttagtactatatatagtcttatttatattacataa

SEQ ID NO: 118489 - DNA, 384 bp, Arabidopsis thaliana columbia
  unsure (1)..(384): unsure at all n locations
ttgacgtcgcatgcacgcgctacgtagcttggatcctctagagcggccgcccttttttttttttttttttttttaaaaaaannnnnnnnaaaaaaaacgggatttgagcttaaattaagcatccgaagggttgagaatacccttttagtgttcttttagcaggctcacagagttatgttaaaaatctattttggaaaaaaaaatggggcattttttttaaaggaggggagaaaacaattgatatccgggaggaaacacgggtcatcaaatgcaagtttttggggagaaagaccccaaaggacaaagggtccacccgccctttcttttgagagaacataccacgcattgggttatcaaaccagggggaaaccgcggggctagggg

SEQ ID NO: 118490 - DNA, 493 bp, Arabidopsis thaliana columbia
acgtcgcatccacgcgctacgtagcttggatcctctagagcggtcgccctttttttttttttttttttagctttgagtttactttttttacttttggatttacttcctccaccaccagacatacctccttcacttgcagacataccttcttcactctcggaccctccggacataccttttttcttttcgaggttagctgtgagttttttttttccaggggggggggacaccccccttcaccctgcggacataacctacttgacttcccagacataaccttgatgccccagacgcaccataccgtgcgtgaccttgggggcttgacgagcctgtacctgggaaatcgtactgtcgggggccccggcgactcggagtgtgtggccgaggcgggtggagtgccgcggctgccgggggcgcggcgggcggggcgcccagcccagagcgcctgcgcctcgggtcgcggcaaccgcgcggacgcccccgacgcgccctg

SEQ ID NO: 118491 - DNA, 521 bp, Arabidopsis thaliana columbia
ggaaagctgctacgcctgcaggtaccggtccggaattcccgggtcgacccacgcgtgcggaacaatatgagcgaagaactaagtcaaaagccatcatcagctcagtctctgtcactgagagagggcagaaatagggtttccttttctcgtccctcgcacaagcagagaggcataatacccgcccacagaaggacggcgcagatctcgaccccttcctatttttgggttgttggccaccccacccaggaggaaaataaaaaaaaagagtgagctcatggttcgtgtgtcattcccacaagtactaggttaacgcccgcgacgctctacatcttgcccctcacataaccccttcgcgcacccagggagtgtcgcactagcccccctactcgctcaaagcggtaatcagaattaattttaacaacagccggttaggggcctcccacccacatcactcacgcatcccgcctcactcaccgtaccccccgccaccccaccacaccacgaccaccactccaccaccc

SEQ ID NO: 118492 - DNA, 460 bp, Arabidopsis thaliana columbia
  unsure (1)..(460): unsure at all n locations
atagcagagctttgacgtcgcatgaccgcgtacgtaagcttggatcctctagagcggcctcgctttgttggttttattctttttttttttttnnnnnnnnnnaaaagaagcctaataatactatttctagaaaataatcacaaattaagaacatggttcatctatatgtacatacatgattcttctcaaaattctatttgatatagaaatggaacccatattaataatttggggaaggacagagataattaaacacgttttgctttcattcactatgagaacagccaaaaatttaggacccagattccaattttgggttcctttttctaattcaaacagaacccggtttgtaaataaggggttttgatctttaagatttttaacattccctttattagcgggggggccaaggattgtgaattacaccctttggtgaattttggaacaacccagggatatt

SEQ ID NO: 118493 - DNA, 519 bp, Arabidopsis thaliana columbia
  unsure (1)..(519): unsure at all n locations
gccgcaggacggccgaaaacggaaatccagggggggaagcacanaaaaacaaagcgaaggggggaagttagaaaacgcggggacaccccggaagaagaaggagatttcaaaaccaacagccagagaaaaaaggcaccgaaagaggttttaagagactttgttcattttagggggtgggcccccgaaagaaaaagcgccgggaaagaaaaaaaccccccaacaggaaagagaagagacagaacacagaaagggtaggcaaaagcaaaaaacaaccaaaccgagaacaaaaaaacagaagcagaaaaaagaggcggaacaaaaagggacggacgagggagaaggaaagagaaaacaaacgggccgaagaaagggaagaggagacggaagaagaaatcgaaaacgaagagagcagaaagggaggaaggcacgaaaacaacaaaagacaagagagagagaacaaaaaagacacaagaccgaaaacgaagcaccgcaaaagaacgaagaaaacgacgacacaaa

SEQ ID NO: 118494 - DNA, 518 bp, Arabidopsis thaliana columbia
  unsure (1)..(518): unsure at all n locations
cgactcactatggggagctggccgcctgcggtaccggtccggaatcccgggtctgacccacgcgtgcggtggcgtttgcgtggacattggtggctctgtgttgcggntctcacacttcgcatattcttcattccttgcgaattcacattgctcatggagggattcgggatttgccccacaacccttaccccaaagggggagtattcctacagaccttctccttttcgcggtgtgggccccccacccccttccacaccttaccaaacaaccccccccccgtagtccccgtctcccacgccccccgctatcccccccggccgcccctcctgcgcagcccctccccccccctaccccccacgccagtcagtccgtcccccgcgtgtccaggttatatggttattcccttcacgccttacaccctagcacgtagtgtaaatcatgacgccgtaccgcagggtgaggattccgccccgctcgcctcccccttctcctccctgccacgtcggcgccctccaagc

SEQ ID NO: 118495 - DNA, 402 bp, Arabidopsis thaliana columbia
  unsure (1)..(402): unsure at all n locations
cgactcactatagggaaagctggcacgcctgcaggtaccggtccggaattcccgggtcgacccacgcgtgcgcggacgcgtgggattttacaaggttatgggttgactgagtcaacgggtataggagcttctacggatactgttgaggaaagtcggagatacggtaccgctgggaaattgtcggcaagtatggaagggaggatttgttgtccggnnattttttttattgggggggggggacaccccccttgcttcttcttaaaaaaatcccctccacaangttatttcacccatcccccctctcccatctccctttcacctcccaccccctctctcttctaccctctctccacccatctttatattccnnaccactcatatttaattttcccacccccttca

SEQ ID NO: 118496 - DNA, 413 bp, Arabidopsis thaliana columbia
  unsure (1)..(413): unsure at all n locations
cgcctgcaggtaccggtccggaattcccgggttgacccacgcgtgcggatcaatttacgaatcgccaatgattggtctttgttatggaaaaaaggaactgtcggtactccgcgtactgttcagaagaatactcatctacagaaacatatctttcataagaaagtcttcgcccgaagaataaaggaacattaaacgcacttcnctcnatttaaggggggggggacgcaggagaaacgcagcatttgtgatatatatgtatgttgtatgataagaagagccgaggcgttggtattcgtgcagggtcatattatacaacagtaaattttcatgaacatatactccctcgtgtctatatagaaatgtgcgagacacgcgggtaaagaagtgagtcgcacaagacgatatcagataaa

SEQ ID NO: 118497 - DNA, 430 bp, Arabidopsis thaliana columbia
acgactcactattgggaaagctggcacgcctgcaggtaccggtccggaattcccgggtctacccacgcgtgcgcccacgcgtccgattagcttcagtatccattggcggattagcctcagagtgctctgatcaaggttttggaggttgcatttgagtgaggagatgttttcggctcagcataagattcataaggagaagggtgtggaactttctgaattgtttgtttaagttggggagggtcctttgattcggagaacaccaatcaagaattgaaacgcgagctgaaggatttatacgtccactcggctgttcaagttgatatctctggaggacgcaaggcacttggtgccaatgttccttacagactgagaaaagcttacggggaaatagcattgtcagcgcttgttggtgcatcttttcgaagaattg

SEQ ID NO: 118498 - DNA, 501 bp, Arabidopsis thaliana columbia
gggagagaaggggaaggagaacaagcttttgcccgcgggggaaagcaaagagtaggtaggcccgaaacaaggcacagcatctacctcacaattcgcatatctccaaccggtatagcctagatatttagtgatatgtcgaatgttgcctcctagaactaaaaggcataacaactaaaaagacaaacaatttttttgaacggcggaggtaaaaggatttggataaaaacaatcaggaaaatgtaaggtaatagttaattccccctcagaagaataagtgcattggacaaagactcatatttcattggggccatggtgcgtgcatacagatattattaaggaaggtggtataattagaagaacgacaaattaaatataaattccacagattaatccacaaagaacgccgtcactgtgcggctctgcatacggattattactctacatgtatatatctaaataatatagcggccgctagcacgaccacagaaggggagaaggaat

SEQ ID NO: 118499 - DNA, 546 bp, Arabidopsis thaliana columbia
  unsure (1)..(546): unsure at all n locations
ctcccgccgtcggcgcccccccccccccgccggcaaattaattgtgaaccactatagnagaatttatgacgtcacctgcacgcgtacgtaagcttggatcctctagagcggccgccctttttttttttttttaattaaatcttctttttcttttcatttctcatcatctaatgaacacaatgaaggagtcttttagaggtaaaacaatatctttcttacctctctttgatccgtgggaattaaacctttttcaccaacccatccacctttttattgaatcacaagcagtctaaaccacagatctcgagaataggaccgcctttcgccacaaacggattaacccttacccaaagaagtgttatactcgaggccaggaggatggaccacacgacaataatggttggcattctatcttgcttcccaagcaaacctttaaggaacgggtaaagatgaatgatgacccaaagtgcatagaacactctttctaaaagcggttcccacaaatcgtatccattgctgagtgatcaaaaactccggctatgactc

SEQ ID NO: 118500 - DNA, 479 bp, Arabidopsis thaliana columbia
gccgcgtacgtaagcttggatcctctagagcgtgccgcccttttttttttttttttttttttttttttttttttttttttttttttttcacctattaaggggttgaaataaaatttttggactgaaagcttcatttgttaaaaaaacatttaaatgtggctaaagtaattaaccgcctttggagggatttgttttgtttttttaaccctgaggccgggtaaatatttaccacctcggggcccaattcaagtttttctttttcggaaatatatttatggggtggaagtgtattttttttgtttgtaaaaaatttgtgctcctggtttgtctttttgattctgtaagctttttgcgggtagttatggtttttacaccggggggtgggtgctggaaataatgtgtgaggagcgctgggttaaccccgtaatccccttgggaaaaaagtttgttatccaactatattgagataaaagtgttag

SEQ ID NO: 118501 - DNA, 560 bp, Arabidopsis thaliana columbia
ttatgctacattaaacgcgtacgcccccccccccgccggataataattgagggctcactatagaagatctatgacgtcgccatgcacgcgtacgtaagcttggatcctctagagcggccgcccttttttttttttttttaaatatcaaaggagtgtgtttcatccatcatcatcatattattgaaataagtaaacatacccatggataatggttctattcaaccaaaaagctctcagatgctaaaataacaaagattcttgagaattaatatcattttttttttctgcgtttggcacaaaaagaattgcaaaaaggggtaacatcagttttcttgggtgaggactgcctttccaatataagttgccccatcaagacttagccttcaataatggggggtggggcttcttgaccctataaccccaaccatgaaattcacccaaaaaacttactatcttcttttgaacccaaagcagcaccactaccacccatcttagcactcgggaccaactgttaaactcgttcgctgagaccccacccgggaattttcgcaccggtacct

SEQ ID NO: 118502 - DNA, 492 bp, Arabidopsis thaliana columbia
tatagaagatctatgacgtcgcctgcacgcgtacgtaagcttggatcctctagagcggccgccctttttttttttttttttaggctttggttttttttttttttttttgtttttttttctggttccttttttttccttttttttgtgcgaggccaaaaccgtttgaatcaccccttaaaaaaaagaactacggagtttttcataagtacagaggggttttttccttgggggggtcccaaatacatttttgccaaaaaaccttttttttccgggggggggggtgccccaaaaaaaaaaaaaagcctgcccccgggggagcaggacatagaccagggggggggggggggggtttttaggggtctgtgggggtaaaaaccctatgtcccctttgttttttttgggcgcggggggggggcgagcagcctttttttggcccccaagacttttccttttttggtagaggaaaaacccccccttgttaccccataaagc

SEQ ID NO: 118503 - DNA, 502 bp, Arabidopsis thaliana columbia
  unsure (1)..(502): unsure at all n locations
taggaacacactatangaagatcttgacgtcgcatgcacgcgtacgtaagcttggatcctctagagcggccgccctttttttttttttttgtagcctctggatttttctttcttctatgatttatgaactggtacccttttttacctattattgtacataattatataagtttgaatcacaccgagatcaattgtgcaaggagtgttcttattagaacatttatagaatctaagggacaaatagaaaatacaacagtgggataagctggtgaagcttaagcttatcaactggtgcttggtaaagctatggctgccaatggaggatcaagtacttggaaaagtcctgaagacagccttcttgtgaggtcctgtgcttcaactttcgcgacgtcagctctcattccgatatcagtagcggatctactcgcacaatacacaccaatcgctgtagcagccatctcatacacggttggaggcagaagccgcattggcgtggacaaac

SEQ ID NO: 118504 - DNA, 565 bp, Arabidopsis thaliana columbia
ctatagaagagttatgacgtcgcctgcacgcgtacgtaagcttggatcctctagagcggccgccctttttttttttttttgaaggcaacaggattattcttcttttctaagattaagacaacaggtaccgctctattacctattatgggacatatattatatccagtttcgaagatcacgcgaaataaatctggacaaggcagagttctgaaattagaacaaggatgttttttttagggggcgcttaacaatatactaccagcgtgaaaagctgaatgaaaccctaattctgataaactgggagcttgggaaaacaatttggatctccaaatcgggggaccatattccttttcaaaatgccctaaagaacatccctccataataaggtatgtatgatgaaacatttaccgcggaacgccctctcttgtatccgtttataagtgttggaacccactctagtcagatttagaaatagttaggttcttgtaggatcgtcccattacctgttaggatggaagccccccccatttcgactgagactgaatcctcacaaaattggtatcct

SEQ ID NO: 118505 - DNA, 577 bp, Arabidopsis thaliana columbia
  unsure (1)..(577): unsure at all n locations
gcacgcgtacgtaagcttggatcctctagagcggtcgccctttttttttttttttttttttaactcatatctctgatatttaacattacgctttcatgtatacttcctgtaggggaatttctaaactagaattctgtgtttatggaagaattatgggactaagacttcttgccatgaaggccggtctacaatcgcggaaagggantgtttttttttttgtgtgcgggggcgggcgtgtgaggccgtgcggcggataggatttcctttgggccccttctccagggctgatgccgtgtggttgcttccccccagccatataaccttctcctgagccgcggtggactccacgtgttctgtgcgggctaaagggaaatcgccccactcattgactttcagagggcgtggctcggctcccaacaacgtcactgcgttgtacggtatgcacctgggcgagaaccaactgcggcattggtatgaactggtccccctggccttcagggccacggttacccattgggtaggtacgtgccgcgcacctccttcagtgaggctgagggtcccggccgatttggggtcg

SEQ ID NO: 118506 - DNA, 523 bp, Arabidopsis thaliana columbia
  unsure (1)..(523): unsure at all n locations
nnnnnnnnnnnnnnnnnnnnnnnnnnnnnnnnnnnnnnnnnnnnnnnnnnnnnnnnnnnnnnnnnnnnnnnnctttntttttttttttttttttttttttttttttttttttttttttttttttttttttaaaaaaaatctgggatgtttttgattgatatatgtatatattacataacaaggacctagcttgcttggattacaaaaccctacaagctaaggaattttttttttttttttttttagcaataatgtcaaaccataaccacattttaaatattgggaggcttgctatttgcacacgtaacacaactacccacacacatcccatttaatctataggatatatttctataactttttatattataaagcttattttttttactatatttaggggcttaagaattccacctaaaaaataacttgggtgggtttggtgggttaaaaggaggttgaaaaaaattgggtgggggatttagggggggaaaaccacaaagttaaaacccttccaaattttttt

SEQ ID NO: 118507 - DNA, 487 bp, Arabidopsis thaliana columbia
actatagaagattttgacgtcgcatgcacgcgtacgtaagcttggatcctctagagcggccgccctttgtttttttttttttttttttttttttttgcatctgcaaaaaaattaatatttttacgtattcaatacaagactttatgtggctgacaaaaacgcatatcctaaagaaaatcatatatctggaccccccaaaaaaaaaactaacatagcaactgatcctttgaagacgttttaaccggaataattcgggtccgcctgtatacttaaaggggcgttatcaccccacagtttaaacataccccagcttcgggttgtggacaatctatgtggagccaggagaatttggcccaacggggggagatgtgattatttgcaacaaaatcacccgcatggtgaaaaacccacctccccggcttatcagaatgtagatgcgagatagtggattggtctcgggaggtagaatctgtaacgggaccggtcg

SEQ ID NO: 118508 - DNA, 502 bp, Arabidopsis thaliana columbia
  unsure (1)..(502): unsure at all n locations
acnnnnnnnnnnnnnnnnnnnnnnnnnnnnnnnnnnnnnnnnnnnnnnnnnnnnnnnnnnnnnnnncttttttttttttttttttttttttttttttttttttttttttttttttttttttttttttacaggggaaaaaaagcctttgttttaccctaaacaccgccactggatgaggtttataatcaaactttttttacttaacattttttgcccccattttatggggtttgcgtaggggcaccctatttatacatagggaatttttaacaacccccaaaccaaaaaaaatttgaaacaaaaattagggtttattgaacaaaaaattttcttcccggggatggtttttttagggggtaaaacaaaatttgaaattaactttttttgataccaaaattggagaaaaggaaaacctcgtttttttttttaccacgaaaagatgggaagcacctcgcttgaaaaactttttctttagaaaggcatgtaaagccccttcgaattt

SEQ ID NO: 118509 - DNA, 510 bp, Arabidopsis thaliana columbia
  unsure (1)..(510): unsure at all n locations
tttaggacgnnnnnnnnnnnnnnnnnnnnnnnnnnnnnnnnnnnnnnnnnnnnnnnnnnnnnnnnnnnnnnnnnnctttgttttttttttttttttttttttttttttttttttttttttttttttttttttttttttttttttttttttgggaaccctcctaaaactggtttaccatcataaaatggagaccttaaaacttttttgttaatttggaaaggaagggtttcaatgtttttggccctttttttaacagggttcaaacccaaaattaaacgaatcccttttttttttttaaacatttttttggtttaaactttttaccttaaacaaaactgtttgaagagggggggaaaaaattccaagaaacctatgttggcttttgggtgggttccccctttaaggcccctaaggttaggggtttggccctggaaaatttgggggaccaccttttttggactggaaaaacctcagtttcccctcttttggcccaaaaaaaaaacctcctca

SEQ ID NO: 118510 - DNA, 497 bp, Arabidopsis thaliana columbia
  unsure (1)..(497): unsure at all n locations
taggtacnnnnnnnnnnnnnnnnnnnnnnnnnnnnnnnnnnnnnnnnnnnnnnnnnnnnnnnnnnnnnnnnnnnctttttttttttttttttaggagtcaaaccaatccacattttaataactacaatcaaaagaaatagtgttatagccacacgaagacaagcaaataaaaaagcataataccatgatccgagtaacataattggccttctcagttccactccaccactatatgacataacccgagtaaaatttgtttccaaaaaaacaagatcaccctgagaatatctttaagaggactagccagtgaagcgaatgaagtctcctaagcaatcatagaaatgattgatacagattttttctgtgccagcatagatagcttctgcagatccaccgtattatccttgcgcaagcatggatattagcatgaaaatattctagatgggtatgtcattgagagcctatgcggttgaatcaacatcatcctttgagaggag

SEQ ID NO: 118511 - DNA, 509 bp, Arabidopsis thaliana columbia
  unsure (1)..(509): unsure at all n locations
nnnnnnnnnnnnnnnnnnnnnnnnnnnnnnnnnnnnnnnnnnnnnnnnnnnnnnnnnnnnnnnnnnnnnnnnncttttttttttttttttgttaactgataaagtaacttatttctattagttgtgaattcttgatacataacgttaaagatctcataacatataaaagaatgaaaaagaaaaacctaaacaaaagcaatcagtaaatattagatataaacaaaaatattaaaaagaagaatctgaaggaacatcatatccgaaaatcatagaataatcatcccattcattattatcatcatcgtcattagtcatatccttaggcattctccagctctttgcaatctcagcctcgttcccatttgtaagcaactccaatacctgagtcatggttggtcgtaatatcggagattgttgaacacaatgtgaagctgtaaggactagcttgttcatctgttggtcgtcgtacttatcttgcaatttcggatcaaccaactcacttgtgttac

SEQ ID NO: 118512 - DNA, 468 bp, Arabidopsis thaliana columbia
atgacgtcacatgccgcgtacgtaagcttggatcctctagagcggccgcccttttttttttttttttttttttttctacaaatccaaaaatcataggaaacagtaaagtccctctacaaattgctgaggcaaaaacgttgtccatctgttctttaaactgatacaacaatgggcctcaaactttggggtcatatataatattttctttttccatttgagcagaaactgtctactaaacgttaatctgatgaccaaacttcctttggcgtattgctatagttggcttacgcggattattctcgtgccacaatcttaagcggatgggctttttttttgaaaacccactggtataatgaaacaacagatgagtgctaaaagagagaatttagatacttaaatattcctatgttaagaagaacgctggtcattcttggtgagctttcaacgcctatgattgacatccctcta

SEQ ID NO: 118513 - DNA, 519 bp, Arabidopsis thaliana columbia
gacgtcgcacgcacgcgtacgtaagcttggatcctctagagcggccgcccttttttttttttttttttttttttttttttttttttttttttcctttttttttgttcaattagagacaataatttttttcagggaagtttctgaattgtacccaccttagaaaaaacacccctctttgtggaggaaacttcagccaccgggcctttttttatatccggcggcccccgcgaatagagacccccccccctggttttttttttcccccccccaagtttatcctccctccccccccctggcggggctcgcgcgccccccctcaacgaggggaaacacgccctgcccccttctttccctttacacccaccccccccccgtttttttttttgtgtggggccttttaaaccccccaccaccccaaatatttgggggcctcaaaagggcctgcccttgagtacccgaaaaacccgggggttaagtttgtataaaaaaaccttttaggcccccccgggggggttttcc

SEQ ID NO: 118514 - DNA, 503 bp, Arabidopsis thaliana columbia
  unsure (1)..(503): unsure at all n locations
cnnnnnnnnnnnnnnnnnnnnnnnnnnnnnnnnnnnnnnnnnnnnnnnnnnnnnnnnnnnnnnnnctttttttttttttttgagatcaacataaccatttagggaaagaacacaacaaaatacaaattccaaacaaagaattcttctaactagtcctcatcaatagcttctacaaactcttctctcacacaagtcaatttttacacaaccaacagtcaataaataaatcctcaacaatgtatttgtaataacccaaaactacaataacaagtaaaaagaatgttgttgacttacacaaactcttcagaaaaagcttgaatcttctgttaactcagacaaagaagagaacccgaacaaagactgatctttagctctttcaatcttatgctcatataaatcatacggttcccataaatgatccaacggacacggtctcttctcatcaagtctcacccatggcttacctttaccactccaatgcaacaaactcactggtcctttat

SEQ ID NO: 118515 - DNA, 513 bp, Arabidopsis thaliana columbia
  unsure (1)..(513): unsure at all n locations
taggacgaactatagnagnatctatgacgtcgcatgcacgcgtacgtaagcttggatcctctagagcggccgccctttgtttttttttttttattgatcaaaaagattgaaacagagcgggctacaaacctgttttgaatgttttacccaatttcaatattaaaaatgtgcattcggcaaacaaatgtcccaagggcagcgagctataaagtggactcgacaagtgatatattccctctagaaatagaagaggctattgtgtgatagcccgataataactaaaccgctagtcaggtccttgccgtcaaaaccatggtcgcggctgggtcacatacaaggaaacattctgtgagtcgggctgggtcgaaggctctatggggaaattttgttattagaacgctcattgatatttctggtggggaaggcccaagaaattcagcagaaaggttggtgtggtggtatttaggcattggggtttccttaataggtggggagagctgcactctagtctga

SEQ ID NO: 118516 - DNA, 484 bp, Arabidopsis thaliana columbia
cgtaagcttggatcctctagagcggtcgccctttgtttttttctctaacaagtaagtgagccgcgtcgctttgtaggatagagaggcccaaaaacactcgagaaagaaggtgtacaacgcaggcaactcgattcctccgctgacctggccgaaccgaaaaaagcgcgttcctccacgggaaaaaacgcaacaagggattttttttcttggagggggcagataggcccaacccgggggctttcggcaaaacaccccaccacgaggaattcagtcgctccgctccagcaccaaggatatgggcaaaacaccaaagggccgggcgggcgggcgctggcgcggagaagagggaaaccatacagagggccctgcggaagtattcagaggccgtgcgcccgccccgactggccccggggaagaaaacccgtgagattgggaagatctgcgtctgccggtgggggaggggggagctgcgcggaccggggtg

SEQ ID NO: 118517 - DNA, 528 bp, Arabidopsis thaliana columbia
  unsure (1)..(528): unsure at all n locations
nnnnnnnnnnnnnnnnnnnnnnnnnnnnnnnnnnnnnnnnnnnnnnnnnnnnnnnnnnnnnnnnnnnnnnnncttttttttttttttttttttttttttaattataaatgttaaaggaatattaattcacaattaatttaaaaagcagttaaaatctattcactcaaattctccctctactgttactggaagaggtatatctgttggaataaaccaccaaatactgaacccgcgtccaccactaaatacttaatcaatctattaccaacttgncttctttggtcttctatctttattgctatcatcgngtttttgcaatttatcaatagtagatgtattatttataatgcaagagatttgatcacaaaacatgatactaacgaacaaacaaaatagcaatgccaagaagaatcgcattgcagttaacccgattttaaagaaagattagaatatagcacagttttttgtcaagacaataaatgctattcttgcataaaagatacagtgcatgtccacttccattaaaca

SEQ ID NO: 118518 - DNA, 506 bp, Arabidopsis thaliana columbia
tatagaagactatgacgtcgcacgcacgcgtacgtaagcttggatcctctagagcggccgccctttttttttttttttttttttttttaatctaaagaaattttaacttctttcatcaaacaagtcatccaagttgaaaagtaggataagtttttgcagtcgatacactacattgcagcatcactgaagtttggcaaacattcattcaaccttgctttttggttccctaagcccataccatcactgatcacaacgattcttttttcttagcggatatatggtaaagctaaattgagatgcatcctaacaaaaaatttagaacttcatgacacagtttcgaccataacaaatcgatgcaatgtaaagattcttgccccatttttccttgacttgattactaggaaaagcagaggttccaaaagtctcctgtgtcttatcgggaagccttcctttttggcacactaaaaacaaaggcagcctggatcccaagttgcagcaacctgttg

SEQ ID NO: 118519 - DNA, 491 bp, Arabidopsis thaliana columbia
agatctatgacgtcgcatgcacgcgtacgtaagcttggatcctctagagcggccgcccttttttttttttttttttttaagagctcgcatgtttatttgaaagaaaaaaaatgactccacagtgataatgtttccaattgactagcacgaagcaagagacgaagaagaacaaaagcaaaagtttaaattaaaggcattctggtcctcctccttgcaaacattggtattgcaacaaaccttgggatatataactcaagtctctggtgttaccagatttattgtttgatcaagttcctgataacgtattgcaaaaaccctccgtgatcgaacataacccaactccacctttgtgtcaaattggagtgtccatcgcaaaagatatgccatttgtttagggaggactgctacatcttgtcctggtgtggatctccctaacattggtctgggagctccatggtgtacagctcctgacccgttaggccaagggtctc

SEQ ID NO: 118520 - DNA, 574 bp, Arabidopsis thaliana columbia
  unsure (1)..(574): unsure at all n locations
caggccgcgccccccctgcggaaataattaggagcnnnnnnnnnnnnnnnnnnnnnnnnnnnnnnnnnnnnnnnnnnnnnnnnnnnnnnnnnnnnnnnnnnnctttttttttttttttttttttttttttttttttttttttttttagttttatatttttttttttttttttattttttagtcttaaaagagatattttttgcttatttataaaaaagaagaaaaaaaacctcgggcaaaaaaccaggggacaatctaaatagggggggaaaccaataaaaaaacctcctgtccgcaaaagaagaatatttcataccccacacaggagataaagaagggtatgaaccaaaataaaaaaaaaacgccgcccacgtcaagttgttggtgaacaccctatagaaaaggagcttttaaggaggtagtaaggaacatacttggcgagggaccccctaaattgtaatttgttaaccaacaaagagaaagccttctcgcccagaatagatatgaagaaaaacacccgaatagcacgcggcacacccaaatggggaaacatgaaaaagaccatatttttaat

SEQ ID NO: 118521 - DNA, 508 bp, Arabidopsis thaliana columbia
  unsure (1)..(508): unsure at all n locations
ttaggacgcnnnnnnnnnnnnnnnnnnnnnnnnnnnnnnnnnnnnnnnnnnnnnnnnnnnnnnnnnnnnnnnncttttttttttttttttttttttttttttttttttttttttttttttttttttttttgggctgggcaaagtaaaaaaatacccgtgggaagattcattagaacaaccggagaacccattcctgagtaaaaaacccttatttttcccatttccaactaaaatcttcccgtttaacaacacacttgagagggtcctaaatctaaaacttttgttactggtaaggggggattctacatcatttgactcactatttagggcctccacttatatttgcaaaaggtaccttgctagggtagctcgatatatcaatgtcaatgagcgacatgtcatacattggggaaacagagtccgaggcatttaccagcagggaagatttcatgctttcagggggtgcaggatcataagttaccccagaggttttgggggggcttgtttt

SEQ ID NO: 118522 - DNA, 563 bp, Arabidopsis thaliana columbia
  unsure (1)..(563): unsure at all n locations
ctgcggcatcctccagagcggcgcccgcgccggcggccgcaaataattgggtaacnnnnnnnnnnnnnnnnnnnnnnnnnnnnnnnnnnnnnnnnnnnnnnnnnnnnnnnnnnnnnnnnnnctttgttttttttttttttttttttttttttttttttttttttttttttttttggaaaaaccaaatttggaaagtttttattttccggttaatggattaaggcaaaaaacctcgcaacaccctaatccttttgcaaaaattcctgggaattaattttgtttaaaggttcaatatcccccttcccccattttgttaaaaaatggttttggctccccttttgggccctccctttgtgataaacttaaaaacccttccgtccaatattgggagtttttataaggaacaaaattttttattgaaaaaagggaaccgggtttgggcctactggtttgaaaaggggccggttggccagggccccataaggccccccccccgtgggggctcttcctttgttttatagaggaggggtgccaaacaaaggtacttaacccccgggagaggg

SEQ ID NO: 118523 - DNA, 520 bp, Arabidopsis thaliana columbia
  unsure (1)..(520): unsure at all n locations
nnnnnnnnnnnnnnnnnnnnnnnnnnnnnnnnnnnnnnnnnnnnnnnnnnnnnnnnnnnnnnnnnnnnnnnncttttttttttttttttttttttaggcaagttcgattttattgagtagaaggttcgaacatagatcgaacaaagccaggaggaaaagaaatcaactacacaacaggtcattgtcaaacacaaggtatgcaaaagcacgacgacagccatgtttttgcttttagctataaagcgcctaatttagagacagcctattctttgactgaaggacgatgcactattgtgaagctggcaccattcatcgaattatgctctttaagctcctgttttttttcttcctggggactactgaaaccgagggcgatcaatagcatagtgttcacttctttggaattatcctttgggagagaaacttcaggtggtaaccttcatgccttttctttctgaagcttctttaaaaaactaatatactcttgaacaccatggggtcccctcatactgcaaaccgg

SEQ ID NO: 118524 - DNA, 513 bp, Arabidopsis thaliana columbia
ctatagaagagttatgacgtcgcacgcacgcgtacgtaagcttggatcctctagagcggccgccctttttttttttttttttttttttttaatctaaagaaataacaacttctttcatcaaacaagtcatccaagttgaaaagtaggataagtttttgcagtccatacactacatggcagcatcacagaagtttggcaaacattcattcaaccttgctttttatgtcactaagcccataccatctctgattcacacgatttttttttcttagcgggattatgggaaagcctattttgtatgcatcctaaacaaagagttagatacttatgacacgagccgaccataacaattcgttgcaaggaaagattcttggcccctttttccttgggggaaacaccagggaaaagaagagggtctaaaaaggtttccggagccttatcggaaagcttcctttttgggacacttaaaacaagagggggcctgatccaaagttggagcgcctgatgggattt

SEQ ID NO: 118525 - DNA, 510 bp, Arabidopsis thaliana columbia
tctatgacgtcgcatgcgcgcgtacgtaagcttggatcctctagagcggccgcccttttgttttttttttttgaaactaatgcaattaacttgtatcgtttcatcacattaactcgttgtgacaacaaaccatatcctactaataacaggaacaactaaagaaggtcacaaagattaaagattcaactttgcagaaatggcccaaaagctatataaatgggaaaccagtctttgtgtgggtttacaccacagggtgattcttatctctggccattggctgagcccacgacattatttcaaaccctctcattcattccaaagcttgatgtcagacaccacagttgctggcgttaatctaaagagttatgcccatgacaacatgtggctccgttcctgtaggaataataactgcagttattggctgtcgttttccatgcattacgaagaggaaacccttatatttagatttgaagccagctccttctgctgtgcgatcgcgcaattacgaga

SEQ ID NO: 118526 - DNA, 504 bp, Arabidopsis thaliana columbia
  unsure (1)..(504): unsure at all n locations
aatacgcttctctatgcagccccccccccnccccggaatttatttgggacanccttagaagatctatgacgtcgcatgcacgcgtacgtaagcttggatcctctagagcggccgccctttttttttttttttcacagtgaaggcagtgacatcctcaatatccgtaataagtttacacgtttctgacaaagatctacattacaaacatatatttggagtgacactctctctctcactaaattacacaaaacggaccatatttacatacttgaagaatgttactacctcttaggatcttcagattcagctatgttcttaagcctgcgacgtccctgagggctttcacatttatgggcttaggatcacgacgctttgttctatgcaggaaatggcggatgaggcgaacatgcttagcctctggacactgtcaagagaatcatgtgttttagtcctgcactaggcgtaataacttgtgggctaataataagagatgtccactttcct

SEQ ID NO: 118527 - DNA, 506 bp, Arabidopsis thaliana columbia
acacttagaagatctatgacgtcgcctgcacgcgtacgtaagcttggatcctctagagcggccgcccttttttttttttttttcttcaagtcaatctcagtctcatttcgaacttcttcccaacaagtaacgacagtttagaaacctccacacttagaaacctcggatcatcattggccgaaaccgtctttataagagagattctaggactcctcattttcttacttgtcctaacctcggacgttttcacgttctccacgttctcgaacccaacaaacgggactttcccgatgctccatttgattttcgacgcatcctgtgggttcaccacttctgagctcagtacaacggatttttccggacacatagcaccggaacttaacagggggtcaagtccgggttgctgctacagctccatccgtaaattggttccggcatcagaaaccgttcgccggaaatgttctaaagccggttgggtacaactaaaagcgtgatggggtggattt

SEQ ID NO: 118528 - DNA, 527 bp, Arabidopsis thaliana columbia
tatgacgaaacatgcacgcgtacgtaagcttggatcctctagagcggccgccctgtataattattattaagcctccacccctcaccccatcaccgtaaacacacctctaccgccgctcctccgctccccgccatgcgccgcgcgaataaccaatgtctgccatcgcacgcgcgaccaacgaataacaaaggcgaaggctgaaaagcacgacattttttttttttaggcgggaggggggggggggaagaagccgcgccgtactctctcacataaacccaaatatgtgcaccgcccaccgtgataagaatgattgctgggcgctcccggcgcgccgcaccatcccctcactccaatcaatcggaggacctgagcatggccggagacgtataaaactaaagcttacccgccgtcacgacgcacagaactctcgggcactagttccaccgacacccgcaccagaaatagacatgtgtaaggacagccgagcagaccattcccggccgccctaaaaacagcgcgccacccaa

SEQ ID NO: 118529 - DNA, 460 bp, Arabidopsis thaliana columbia
gcacgcgtacgtaagcttggatcctctagagcggccgccctttggtagttcttttatagcgtaccgtgcgtttgctgcttttctctcgacatggcaaaccataggtgtccctcggggctgtggggaatcgaatcgaagaaagggaaaagaacagcgtgttgataaacagggagaaccgccacccagcgatcgacgagggtgggctttttttttgggcgggtgggctccaaggttgctgaagcccgtgggcttcagagaaatcatgagagaggagagtcgccgcgacggtgagcggaggggtggaggaggtgtgcggcggtgtctccggcgtgaccttggtggcggagggcgagctcgagggtgtgcccacgccggggagttgcctttcgggcaccccctgccgtgatgcggaacgcaaggaggcacggccggagcggcggcagggtgcgcgggggtggtg

SEQ ID NO: 118530 - DNA, 494 bp, Arabidopsis thaliana columbia
ctatagaagagttatgacgtcgcacgcacgcgtacgtaagcttggatcctctagagcggccgccctttttttttttttttttttttaagaaacttgcttaattaatacgagtctctgaattagaaagacttatatattacaaaaaaaaacgtagagaggtgttacataagaagctttcactttcacagtacttatatggatattcgaaagaaactcatctattgatctcacttggaaggccacgaaccagttgtgttttcaggagaagataagccattcgatacggtttcatcatcaccaagttgggaggattcttgatcagggaatagctccagtcgcatagacggggcaatgtttttcacatgaagccatggtagctcccataagctatttccaccaagagcactttcttgcaataagcacgcccttcggcttcttcaccagcattatgtttttgaagagctctggactggttctgggagctggcgcttttt

SEQ ID NO: 118531 - DNA, 521 bp, Arabidopsis thaliana columbia
ttaggaaccactatagaagagtcttgacgtcgcatgcacgcgtacgtaagcttggatcctctagagcggccgcccttttttttttttttaaggagaagatagcatcatatagcttttcttagaactatataataaaaagtgaaatagataaagtgatgtataaacgagcattcgcaccatcttttaacaagatggaatattctccactatataaaataaaagtttcttctaaaaatcagaaactggacccgtttagggtcaaggatacaacttctgagagtagacaaaatgagactttttgtctcgagcttgcgcttgtttagtttagatggaccggagtgcacatagagcataaccggaagccaatgagcagaaggcgaatgcgacaaaggagacgtaagacagtgcgacagatgctctagctaagtctgggaacttgtctgctccccagtttgattgccaatcatctacgcggatcgaagctgaagttgaagctgatgcaagaagataagctagcattt

SEQ ID NO: 118532 - DNA, 582 bp, Arabidopsis thaliana columbia
tgcacgcgtgcgtaagcttggatcctctagagtggccgccctttggtttttttttttttttatggattggtggtttatttgtgtgttgtgtttaagtaagggaaggagaggtggatacacagatatgaaggataataacgcgaagaatggtggttaagagatgggagcagaagccgtgtgcggcagccgacagcgatgaggcatgggggcggcgtagtgtggatttttgtttagaagggggggcatgagggggcaaaggggggtaggaaccctaaaacttgtgggagtaaacatcgggacgtccaggggtgagtgggtggaggcctgcggtggagagggtataggaagtagctgggggggctgcggggagagatggtcgtatggtggatgggggcgacgggggtgggaggaggagtagagaagagatgtgggagacagggggaagtggtggggggtgagtcactgtactgagttggtggagggggttggagagagataggggtgggtgggtgaatgagatgaggggaaatacatgagcgccgtgagggtcaagcgagggctgaggggggttaattggggggt

SEQ ID NO: 118533 - DNA, 558 bp, Arabidopsis thaliana columbia
  unsure (1)..(558): unsure at all n locations
tctccttcctccgcgccgcgccaccgcccgccacccgcatattaattgggtacacacctganaagattctatgacgtcgcctgcacgcgtacgtaagcttggatcctctagagcggccgcccttttttttttttttttttttttttttttttttttttttttttttttttttttaaacaaaaaaaaaaaacttggcacttttactcattggggaaaattgggggggtaaattcacactggcgcaagatcgaaaatggttatgtacagaaacaaatattcggaaggggggtctaaaggtcaaaaaattaagtcccccataccaaaaattttcccatctctttggcttataaatggttaaaagaagggcacttcccttttattctattgaaccctagcacggcgtttaggcagaggggaggtcacccccccagggaggatctgagttagtcgggggcggcccagccacctcgcgttagagggcactaagatctaaacgtgggtcgctttttaggctacgcctccgcgactttgtcttgtgccccgcccaccccctttcgc

SEQ ID NO: 118534 - DNA, 506 bp, Arabidopsis thaliana columbia
ctatagaagagttatgacgtcgcctgcacgcgtacgtaagcttggatcctctagagcggccgccctttgtttttttttttttttttttttttttttttttttttaaacagcccataagtgaaacccataaatcgagcccatgaacagatacgaaatctgtaaatccttttattacaaatacagagtcctttgttctatataactaaactaaaacatgtttttaagatactttcagttatgagccatgatctgttcctttcaaatgtgacccgtaaagctataaggcaaacataaaaaaaaacgtgttcgtttttaagggaggactaattgcctcatagctttttcaaaattttttcgcaggctcgctcgtaataagtcattctctgtatacattttacagcatcatcaaacttttggctttcaaacccttcggcgaaagagtcagaccatggctttaagttctcttgtacctgggatcggatcttggttaacgatgttgaatcttt

SEQ ID NO: 118535 - DNA, 497 bp, Arabidopsis thaliana columbia
ctatagagatctatgacgtcactgccgcgtcgtaagcttggatcctctagagcggcgccttggttttttttttttttttggatgtgtgtgttatgggttggtgtgaggtgactgttatctattttgggggacttggggggaggttgcgaacaggaaaaaagggggggggggagaaaagcgggggggggctctttaatttttttgcccagggggggggccaaaatttgaaagggggggcaggaaaatgaaacagagacgagggggccctatgaggaaaaaaacccccggtcccaaggggcggccgggggaggaagggcgagggcgggtgcgaagggggactccgccccggggggggggaacaaaaaacccggagaataagaagagcgtagactgttcggcaaggaggggagggggagagtgatctcaaagagggggcaaggtgcgcgtgagaagaggggaattgttccgggtctcgtacggcagcccacaagggaggg

SEQ ID NO: 118536 - DNA, 460 bp, Arabidopsis thaliana columbia
tgacgtaactgcacgcgtacgtaagcttggatcctctagagcggccgccctttttttttttttttacacatagaaaagctaatcaggaatatgctttacatacaacattcacagctgaggtagatgcaattaggagagccaaactctcgaagaccctaactctatcataagaagaactacactctgtggatcacacaaaattttttttttacttgtgctggagtgaaaccagcagatgcttgatctagataacatgtatggttaccaataacgagggctcatatggtaatggttcaaagaggtcatattaaagtactaccatgaggacaaaccttctcaacctcccctaagaaaccccttttgatcttcttagtttctcttatctgcccaagtgcctcagcgatctcgagacgctgccgaacaaacgcggatccgtggtccttgaaaaggttccacgaag

SEQ ID NO: 118537 - DNA, 540 bp, Arabidopsis thaliana columbia
aagatttatgaggtcacctgcacgcgtacgtaagcttggatcctctagagcggccgcccttttttttttttttttaatgagcctcgatttgcattttatatgaaacacaggatgacacacgtggatacattgaacacactgggtgacgcacataaaaggattgtagggagcagcagttatcaactatcaaatcccgagagaacagcagtgagttttttttctttggcggtgggctggggcgaccgacgccaacgaccagactagataaatacccgaggcgttactgctcctcctatcggaaaattcttgcctgttggggattctgttggcgttctaccattattggttgaaccggtggattgattactgctgttgcgggtgacaggatccctagcctagcggtttggtccatttgaatttattaggagctttgatattcggattactgtggcgcgaaagaagcctccgctgctcgggccgtcgaaccatttgaaagctgacgacagaccgagaccgaggaccgtgcagctaatacgtgta

SEQ ID NO: 118538 - DNA, 521 bp, Arabidopsis thaliana columbia
  unsure (1)..(521): unsure at all n locations
nnnnnnnnnnnnnnnnnnnnnnnnnnnnnnnnnnnnnnnnnnnnnnnnnnnnnnnnnnnnnnnnnnnnnnnnnnncttttttttttttttttaattagcctagattagcattataataaagcacttgatgatacactttgttttcttaaactactggttcacgtacaaaacagaaagaagtcatcaacagattcaaaatatcaccttaagttcaaagctatctttttcttcttcttcttgttcttgctctctttgttcaacaacacagagatcttagcaaatccgaaactctttctctttcgagtcttcgtccttttctcattctctttcccttcacttctcttgcttacagttttatcactactgctattctttgcaagcatctgacccaacgacatttttcttctctcattagcaacattcatatctgaatcctctgcaagaagtagcttcttgctcagtatttgtcctattgacattgttggtttcaagactgggaccgttgaagaagatgatgaccc

SEQ ID NO: 118539 - DNA, 509 bp, Arabidopsis thaliana columbia
taattggtacacactatagaagattatgacgtcgcatgcacgcgtacgtaagcttggatcctctagagcggccgcccttttttttttttttttttttaaatggatggtaaaatatttatatatggatagtaaaatctaccgtaaggtggtggtggttatacataattttcgttacaaatccttattgtttcaagagaaaaggttaaaacgaatttggattacacaaaaatttattcaacgttgagcattaggaaactattaacaaaatacacccagattagcaatttagtaaaaaagaccgtgcaagagacatgctttgacttactaactttttaagacccaagctatcgcttagagcttgaactttctgaggcaaaacaatatttagggtttgtaatgatcatgccatttgtcccaattaggtcaattatactctgatttactattttgagtatttctggtagattaagttaagctatgagtatgtattgtccccggcgaactataga

SEQ ID NO: 118540 - DNA, 503 bp, Arabidopsis thaliana columbia
  unsure (1)..(503): unsure at all n locations
nnnnnnnnnnnnnnnnnnnnnnnnnnnnnnnnnnnnnnnnnnnnnnnnnnnnnnnnnnnnnnnnnctttgttttttttttttttttttttttttttttttttttttttttttttttttttttttttttttttttttttttttttttttttttttttttgggaacccccccccaaaaaaaatcccttttgatccttctcgggggggaaaaaaggtttttaaaccctccgggggggggcccccccccccctggagggggaattaattttttccccggggggctgggagtcccaaacctttggggagcccttcctttgggggtaaggcccccccccagaaaccttttgaaacctgggggggcccctttaaagggcggccccctccaaaccccaaaaaagggtgggcggttttaaaaaaggggaaactatgccccccaccgaagccaattttttctggcccccctctttttttcccttggaggggttccttttggaaaccccccgca

SEQ ID NO: 118541 - DNA, 527 bp, Arabidopsis thaliana columbia
  unsure (1)..(527): unsure at all n locations
nnnnnnnnnnnnnnnnnnnnnnnnnnnnnnnnnnnnnnnnnnnnnnnnnnnnnnnnnnnnnnnnnnnnnnnnnnnctttttttttttttttacacatatatagcttattttaaattttcttaagagattacaattacataggatttcttttttcttatgtgtgatttaaacacgtattccctcacactcacatcgtcgtaattaaacctcttagtcacattaaaagaaaatgttaaactagctggtttattattaaaagctggagagtctatataatctccatttttattcattactttatatcatattggaatggttaattaatcttatattaattagttaaccgcagaacaaaccctacgaatctccccatccaaacccgtcttgatctcgatttgactcatcttggtcatggacctcgcgaactccagtccgaaaataagaaacggaaaccgtagtcctagaacccttccacgatggggtcggtcttgagattagtccataggacctgatcagactcgaggaga

SEQ ID NO: 118542 - DNA, 472 bp, Arabidopsis thaliana columbia
  unsure (1)..(472): unsure at all n locations
nnnnnnnnnnnnnnnnnnnnnnnnnnnnnnnnnnnnnnnnnnnnnnnnnnnnnnnnnnnnnnnnnnnnnnnnnnctttttttttttttttacaaacagcagaaatttaataataaatattacgctctaaagtgataagacttgacgcgggtgagggcgttgtatccgtggcgagagagcgagatgcctttgcctgtgtccttgacgccggtccaggccaggtaagggtccaggtagtcgcagcggttcaaaaacaccgtgcctgtttcgatcttgggagccagtcggtgcgcgcgttgtgagtctgtggtccaaatggaggctgtgagcccgtaaggactgtcgttcatgtacttcagggcctnctcatccgagtccaccgcgcgaacagccaacacgggttcgaacgactcctccaccatgagggacatggggtgggcgcagtccatcaccaggggtgggctcaaagaaac

SEQ ID NO: 118543 - DNA, 515 bp, Arabidopsis thaliana columbia
ttaggtccactatagaagagtcttgacgtcgcatgcacgcgtacgtaagcttggatcctctagagcggccgccctttttttttttttttttaatacattttattttatatttttattcatattttggtacatttcccttcattctcttaacttgttaataatgacgatcataattggaagaaaatcttgcctcgagatatttaaccacgttcacatccagctgaaacgcttttgctaaaatctccggcataatcgaaggcttcgatccaaaaacggcgtctgcgattgtgattgtaccgggattttggctaccaagaccagcaaacgcaactgcgttcgtcctcccaacgttcacttgaaaatgtatcattcctatgggaaacacgaaaacgtctcccgggtaaagaacctttgagaacaatctgttgttgtcttggttcgatgttacaaaaccgactaagagtgttccttcgacaaccacgaggatctcagtggctcgtgggtgcgtgtgtggc

SEQ ID NO: 118544 - DNA, 206 bp, Arabidopsis thaliana columbia
tgacgtcgcacgcacgcgtacgtaagcttggatcctctagagcggccgccctttggtttttgttttttaacacaacccaacctttttctattaaaactggaaatcattggggttctttcctttcttcctataggaacagacctatatggactgaagtcatattcgtcttcagattcagacccaggagtttccattattatcctatt

SEQ ID NO: 118545 - DNA, 296 bp, Arabidopsis thaliana columbia
cccacgcgtacgtaagcttggatcctctagagcggctgccctttgtgttttgtttttcaattcaaccatacacttggccactcatcgggaaataatacaaaggcacaaatttctgcacacatgttttctccatctctcccctttctctttttgctatattttagagaactacagaacaaacaatgaacattttcttttttaaaaagggagatatatatggtccgaggccccccaaaaaaatttcacacacccttgcccaaaaaggggtccctaccaaccggacccaacggcgggaa

SEQ ID NO: 118546 - DNA, 325 bp, Arabidopsis thaliana columbia
  unsure (1)..(325): unsure at all n locations
gtacgtaagcttggatcctctagagcggctgcccttttgtttttggtttttttttttaaataaggntatctatcttatatagcctataacaattaaaaaagtaaattagaggtgccactcacaaggaaattaatgataaaaaaatgtgaaaaatacaaataaaaaacaactcttgctgatactgaaacaattttttacttggggggacacaacacaattattcacccacacataaatttgtttaaaaaccccaaatcaacantcactaattttattgagtttttcctaaaaggaaaggatatatctttttcatggccttcttttt

SEQ ID NO: 118547 - DNA, 486 bp, Arabidopsis thaliana columbia
  unsure (1)..(486): unsure at all n locations
gcacgcacgcgtacgtaagcttggatcctctagagcggtcgccctttgggtttgggcttttttataataacaancncaacattttaaaaaggaaacattgttgagaatattctgataataaaatcggccacaaagtagaaaccacctcgccttggggggtgtaacaaacttaattctatctataaaccctggggtaacctatttttaagggggagggcacaaaaagatactgcaccgaaaaaaaaaagacctttgttttaaaaaaaaaccaattccaagtttttttttcctttttcgttgaaaaaggccaaaaaggtttaactcacctttgatcacaggggttaaaggggaacccccccagctggaaaaaaaaaaccccccggggagacccctaagtcctcccttttttttcgcccggggggggaaaggctccacattttttccttaaattataaccaaggcctctagaaaaaaaccccccccccc

SEQ ID NO: 118548 - DNA, 470 bp, Arabidopsis thaliana columbia
  unsure (1)..(470): unsure at all n locations
cgcgcagcacgcgtacgtaagcttggatcctctagagcggtttcccttttggttttgtttttttttgaggaaaattaanattataatctgatatgaaatatatacaccaaacacaaacacaaacataacaaagtcaaagtgtttagtcatgtaaatgtgaatcaggctagagaattcaaggaccgggagatttgaattaattttttttgtgagtgtggcccaccattacccaatcatgtaaaaatcaactactactcancaaatctttttttattctacttaaacttaagatcaaggctttatattccactttgtaaggggaggagttcttgctttaacctgaccctcaagacttttctaatagctttgtaaaagctgttctttgaaactccgcacattctttttaacctttcttaaagggagtttttgaaagaccggccgggggttcaccccgaaatttcgaccggtcc

SEQ ID NO: 118549 - DNA, 468 bp, Arabidopsis thaliana columbia
gtcgcatgcacgcgtacgtaagcttggatcctctagagcggctgcccttttttttttttttttttttttttttaaacccaaacaccggggggagaaactcccgcgctctttcaaaggggtcataaccctaattggcgcacgggtaaaattaaattatcccaaccaccctccctcaaagaaacaaacacccctggccttaacaacctttttttttgggtcgtggggaacaaccctttgcgcctccccaacaaaaaaacccacgcgccgcccacattctttccttgcccccaaacaaagggcgtcaaacattccccgcccctcccaaacccgaaaggtgcccaacccccgactagagcgggtcggcgcccccccctttcgactgatcacacccgccgcccccccgatcgtcgcgccggggttggcggtcccccgtcgcggccgcgcgccccccagggcgctcccgcgagc

SEQ ID NO: 118550 - DNA, 526 bp, Arabidopsis thaliana columbia
gtttaggtgaactatagaagagccttgacgtcgcatgcacgcgtacgtaagcttggatccctctagagcggtcgccctttttttttttttttttttttttttttattgcaaacgagaccatcccattcgagggaaaggcaagaaaaaccccccccaataggtgggaaaacccgttctctttttcccccgccgccttatttttttaaagcggcccgcccaaatctccccctttttttttggggttgttgggaacccctcaaagcgaccccaacaaaaaaaaaaaacgccctcgcctctcctacctttcctccccccccaaaacatatactaacgcgccacaccactcttttccgctacacaataccaccgccacctctttctctttcccccccccccccgtttccacgtacattgccccctgcccgggtcttccccccgttctttccgtgccccctgcgttcgtcgggccccgttagcagaccgtttctcacccgcaatgccacccccctttcccttcccgcttcgc

SEQ ID NO: 118551 - DNA, 490 bp, Arabidopsis thaliana columbia
  unsure (1)..(490): unsure at all n locations
nnnnnnnnnnnnnnnnnnnnnnnnnnnnnnnnnnnnnnnnnnnnnnnnnnnnnnnnnnnnnnnnnnnnnnnnnnnnnnctttgtgttttgttttttttttttatttttttttttttttttttttttttttttttnnnnnnnnnnnnaagaaaaaaaaaaaggccccttggggtttaatgaaaagttccgccccaaaacctttaacttttttggggggggtgggttttttaaagaattcgccccgggagcctttaccctttttgaaggggctggaaaacccccccccccaaacctggggtcatatgggcgcccttatgctccaaggttggccccaattaaaaaccccccccctaaaccatgggtttcccctttattcccccaccccccctaagctgaaccatttctcaaggcctttctatctttacccctggaacagccttcttaactttttcccacctaaagggcccggccgtttcccaaattccctggc

SEQ ID NO: 118552 - DNA, 479 bp, Arabidopsis thaliana columbia
actttgacgtcgcatccacgcgtacgtaagcttggatcctctagagcggctcgccttggggttaggggctttttaataattttttttttttttttttttttattcaacttggaacaaggtcttttttttggcaatcacaacttggaacaagttcttttttttggcatcacaacttgggacaaggtctttacaaaaaaaatttggggggttttttggcgtgcgggccaatattaatccccattttaataaaaaaaaaaccctttaattttttcccccctttaactctcttaagcgggaccgggcccggaaaaaaaaaggttccggaaaaaaagactaagggcggcctttaaaaaacctgggggccgggaaaaaaaaacccccgcggcgggggggcccccggttttccttttaggaggaagacttaacccaaacccctgttttttttaagccggggaaattaaaatttcgccggttttttt

SEQ ID NO: 118553 - DNA, 357 bp, Arabidopsis thaliana columbia
  unsure (1)..(357): unsure at all n locations
gtgcactatagaagagcttgacgtcgcacgcacgcgtacgtaagcttggatcctctagagcggtcgcccttgggggtggggggtttttttttttttaaaaatctttatgaaaaaagagaaatgggtatattaactcacaggaggtaggcacgcgaatgcaaacaaaggaatccactttgttctataatcaatggacaagaggttcggatagagaatcccattttatgtgtcaggggggactangnggtcggtgatgattgatatacgatcaaccaactcatctaaagagcggggtgacgaacctccttggttaactggcctttttacttggggtgggaagagtttggttctacctgg

SEQ ID NO: 118554 - DNA, 418 bp, Arabidopsis thaliana columbia
  unsure (1)..(418): unsure at all n locations
accccaaagcgtttccccngggggggggcccaaaaaaaaaccccgncccaaggcgcaggagcacaccaacgcagggaggcggggccagggcggcggggacgccagcaagcaacccgcaccccagcgcgcaacaaccaccgcccaaaagcttttttttgggtgttggccactctttctttttctttcaaaaaatttgtcttctttttttcgcgtattttctttatgctccttcatccctcttttttctcttgtctccttctgtccactactttctccttcccctatctttttatatccccttcccacattccttggtcctttccgctgctgtttgttgtcttcctattttttatttccctgcattttttgttcgcgtttcatcccttttttcttccagtttatgatcgccttttctttc

SEQ ID NO: 118555 - DNA, 439 bp, Arabidopsis thaliana columbia
  unsure (1)..(439): unsure at all n locations
ttgaattatgtgttctatagaagagccttgacgtcgcatgcacgcgtacgtaagcttggatcctctagagcggctgccctttggggttgtttctttttttttttttttttttttttttttttttttttttttnnncacaatttaacaatcatattgcaacgggcccaaaaaaanaatcatttacattatttcttttttctgggcacatttttatcacatgtttacagaattataaattcttgagggggggggtttaatttgatctcattgccatggaaggaaattgtgaccccagcgttggacatgctacttccatcaatttccctcttttggggttaaggggcttttttgaaaaatggaaccccggttttttttttgaccgggggtttttttctccggggaaaaaaaaccggtaattcccttgaaccgaaacccggcc

SEQ ID NO: 118556 - DNA, 470 bp, Arabidopsis thaliana columbia
  unsure (1)..(470): unsure at all n locations
gacgtcgcctgcacgcgtacgtaagcttggatcctctagagcgggcgccctttgtgtttggtttttttttttttttttttttttnnannngggcagaggagaggacaaaacccagaacttaattattttccattacaaagtgggtaaacaaacataatcatcttcccatggtttttacgtttgacaaaccaaaacaaagagaatttaattgggagtgggtacacaacttctctaaaacaaaaaaaaagaggggccgggtggttcttctttttcatctacgatcccgatatacccaaaaggccacatcggtcctattctttatcaagcctttttaggagatttgggaggagaagctttttccggttgggaagaagaagctgtttatttttttagaagaagaacttggttaatgggttgaaaaaccaccacccattcgcgatataaccccccttgagccactcccccgaatt

SEQ ID NO: 118557 - DNA, 390 bp, Arabidopsis thaliana columbia
  unsure (1)..(390): unsure at all n locations
ttgacgtcgcatccacgcgtacgtaagcttggatcctctagagcggcctcccttgggtttttttttcttttttttttttttttnnccatactaaagggactgactttgtatataacataattgttcacaaataccccataacatcttatgcattttttcttactatggggggggggatatataacaagagttaaaaaaatagagtgtttttttctatggcagaagggaattaaaaagggggaaaaaaaaaggggagaacttttttctcttgggaaccacaaaccttatgggccccttataaggtgggcattttcctggggcgttatttcatataaatttaaagccccaccgggggagggccggtgcgttttatattggtttctttccccc

SEQ ID NO: 118558 - DNA, 316 bp, Arabidopsis thaliana columbia
  unsure (1)..(316): unsure at all n locations
gtcgcatcgcacgcgtacgtagcttggatcctctagagcgttcgccctttttttttttttttttttttttaaaannnnannnnaaaancccaaactttcatcttatataaacgtgggaacagaaaaattcttcaaaataaagggcttggtacaaaggcttttggaattgaaaaaaaaaaatttccatgtataaaacaaaattttttttcgggatgttgggtntccactagggcgactccacaaaaaaataaaaccccgcgccccgcgacgactggtatcccgcctccgcgtccgcggaggagctcgcccgcgcgcg

SEQ ID NO: 118559 - DNA, 516 bp, Arabidopsis thaliana columbia
  unsure (1)..(516): unsure at all n locations
aagactttgacgtcgcacgccgcgtacgtaagcttggatcctctagagcggctgncctttgtgtgttttgttttttcaatcagatcaaatgctgggaaagacaattcaaatcttgcagaagttgacattatgtatttggataaacacaccacacgactcgagacttatggaatcaaaataatgcatgcaaactacagacggaattatatgtcttgtttttacgggggagggacagcnctcccccagcaaaagtttaggttgattatatacccagggaggacttccagctcacagaatagtacaggacggatttggttttcttcgcgtgggtgggaaaaaatggttggaggcgcatgctcaaatctgaggctctcctccacctggggctggccaggtttctcaccacggggttaaaaccctttccaatggttttatcgaggggtaattctttggccccacacacactccgttgtgtgttttcaaaaggttaaccacgcttccgttggccctgaaatt

SEQ ID NO: 118560 - DNA, 521 bp, Arabidopsis thaliana columbia
  unsure (1)..(521): unsure at all n locations
atgaannnnnnnnnnnnnnnnnnnnnnnnnnnnnnnnnnnnnnnnnnnnnnnnnnnnnnnnnnnnnnnnnnnnnnnnnctttttgtttttttttttacagaaatataagtgttgttgactgaatattagacattacaaaagcttgagttttgttttatatgcgattaataataaacacaccagaggatataagctaagttactaagagagttaggctgagaaagagatattacagactaaaacgggggggggggaagacaatagacccagagagagagaacaccagagttgtagcagttgtcacagtatcaggggatttgttggttattaccaatcttcttccttggtttggggccacactggcttttaattaaaaagaaaggttcctgatgggggaatgggtggtgcnncccccccccccccctcctccccgcgctttgttcggggcgcggggcgtccgggtccgccgtaggtccgcgtgccgagcgcggcgggcgccccctgccgtatcgccagcgcgt

SEQ ID NO: 118561 - DNA, 481 bp, Arabidopsis thaliana columbia
  unsure (1)..(481): unsure at all n locations
aatgaannnnnnnnnnnnnnnnnnnnnnnnnnnnnnnnnnnnnnnnnnnnnnnnnnnnnnnnnnnnnnnnnnnnnnnncttgggttggggtttttatattaattttnnttnnnnnaaaaaaagaagaaacaatttattatcaccaaaagaattaaacaagaaaataatcctcctttggggaatcttcaccttaatgactcagatcaggttttgactattaaagaacatcttatttattaaacgtgaggtaaacattantattaatctttgtggagaatgggggttactctatattaacaaccatcacaggaatttattaagaaacgtcttccctttatatttctcagacctaaaacccattttctccatcccaaaccgttttttttaaagctaagggagctttgtttttatttccttgaccctaaaactcgggtgcggttatttctttttaagggcggccaaaaaaaggtttttaaatccc

SEQ ID NO: 118562 - DNA, 395 bp, Arabidopsis thaliana columbia
  unsure (1)..(395): unsure at all n locations
acgtcgcatccacgcgtacgtaagcttggatcctctagagcggtcgcccttttgtttttgtttttttaatagtattaaagcattacaaacaaaatcgtaaatacaatcattcagaaagaagaagtcagtcaacgaagatggagaaagaaaatctctcaaacgtgtcaacatcttcaatattacaacgtcttcacttgggaatggtgcactcgggggggtcttgncacccatctatgaaatataattacttacggaaaaaccagcgtgtttacaaagtgttatgaattcacacatatactactaactcacgccccttccggttttatcgatcaaaggccccacttgttctccgcacaaagcttttgggatgttcccagcttcccaaaaggtaaata

SEQ ID NO: 118563 - DNA, 519 bp, Arabidopsis thaliana columbia
  unsure (1)..(519): unsure at all n locations
ccgaggggggggggggccggncaaaaaaaaanaaacaccaccccacanaagggggccgataaccaagcgcgggcaccacacaacgcaccaccaagcggagggggncgcggcactcgtacaagcgaggcgcaagcgcgagggcgagagggacagaggggggcaaaccacgccccaccaacaactttcctcncttggaggggggggggaccacacancgccacgaaaacaaccaaaaaaaaaacaaacacccaccacggaggcgggccgcagggcggccaacacccgcgggaaacggcaacccgcggcggacggacacccccgacgcacggacgccccaccaccgatgccccgacccggcgacagcgatggcggcggcccccgcgcccccagcaccagacagccaagggccggagcggcgggcagcacgcgcgcacgaacaaaccatccgcagggccgaggcgagagagcgcggctgcaacaccgcgagaggagaacgaggcaaggaggagagggcgaaaa

SEQ ID NO: 118564 - DNA, 471 bp, Arabidopsis thaliana columbia
  unsure (1)..(471): unsure at all n locations
atgacgncgcacgcacgcgtacgtaagcttggatcctctagagcgtccgcccttttttttttttttttttttaatgtctaacgtttatcgacttttatttgtgtacatttcaaacatgtgacaaagtttggttccctatattgngtgatacttatctaatttgattttggttaaagagtgtctcgaaaaacagggtaatatgtgtcttatctcgagggggtctaaaatctgctgagttttccatagatatgaagagtgaccttccaccatatcggttacatccacgttttcgataccagggatacatattggttggattccggctaatccttgggaaattaaactagcacgaaatgcgataccaagggtccaatcatttgtggcataaacattgatgaatcttccagcgaccatcttccttacgtgtgggcagttttcactattgattgaaatgggtgctccaagaagaca

SEQ ID NO: 118565 - DNA, 473 bp, Arabidopsis thaliana columbia
  unsure (1)..(473): unsure at all n locations
gancctctagagcggctgccctttgggttttggttctttaagttaaaaacacgttacatagatagaaacttaacattaaattttcctaagaacaaagatttgcattacaaaaaagaaaaaaaaaaacaagaaaccggagaaaggaaaagtttgatattttcaagagtttacacactatcctggtttgccgganaggcaaccaaagcaaaccttatgggaaatattaagctccttagctctctcgggtgcacgctcttgaaggggtcaaatcctctgagctaacccacacacaaacttctgggcacggtggcccttaaccccgaaattctttttagttttttcaagtctcaaccggccaaacaaaaattccaaggatgttagggaaattattccggctgggaaaccctttaggccgttgggcccaggtgggaaaaatggttcagaaaagatttgggtcttgaccccttctgtat

SEQ ID NO: 118566 - DNA, 462 bp, Arabidopsis thaliana columbia
  unsure (1)..(462): unsure at all n locations
cgtcgcatgcacgcgtacgtaagcttggatcctctagagcggctcgccttttgtttttttccttcacactacttgtgcgctatcgggttctcgcccacgcgtcccgcggacgcgtgggtttaaaggtaaaatcaacccanaaccatctttacttcctgcacaatcaaacacgcgactcatcttttatcgaaaaataaaacccattgctctttgggatgtgggaccccaaccggggagccaaaaaaaaaaaccccaccccaacaccgcactataatcccccccatacacccatgtcacataccccgcccaacattcccacaacgacccggcccccccctctatcaacgccccgcgcgccctccctcaaacttcccccacccctattccacgcccctatagcgtccccctccaaacagtccccccctccatcccataaccaccccgacaccatcccaaacccat

SEQ ID NO: 118567 - DNA, 528 bp, Arabidopsis thaliana columbia
  unsure (1)..(528): unsure at all n locations
acgtcgcatgcacgcgtacgtaagcttggatcctctagagcggccgncctttgggntgggggcctttttttcatttntttaggtagaaacttttctttttcaaaccaaaaattatcggtttgggagaattaaatataggcaagggtggagtaaagccaccaaagtttattttcagctaaaaactaaggatcctaataaataaggccccttggaatttattttggttgctggcgccttttcgcttagcgggaagggaagaaaaaaagagnattaccnntaacccaccttcttccacccttccctacaaaactgtgaggcccttttttgtttattcaaatattacccggggggggcacacaacccacggcatatgcagctcatttttttaagagcttaggggggcccaattccaaaacacccttgccccaaaaagggggccttaaaatattcacaaagggggggcccaacattgaaacacccctttgcccggagccccccacgggtttacccgaggggggggtttgtccc

SEQ ID NO: 118568 - DNA, 470 bp, Arabidopsis thaliana columbia
gcacgcacgcgtacgtaagcttggatcctctagagcggtcgccctttttttttttttttaaacaagaagattagtagtattaagtatcaataatacaaccatgttttaagattacacgagattaaacgttacaagtgtgaacttacaaccaaaccatgtaaaatactttaatagctgcgggctggtacaaaatggtcttttgcgccgtgggaggtctcactttctctttctccctcatttacacctttatcactcacaattaaaaccccaacccaaaaaaaaaacattaaaaagggaaacccccacaaaagtcaaagatcctttcccctgattttcctctcctttccataataaacataagaaacaaaaaggggggaggatccgcgaatttgccggggggttttcttttggctcgacccattttaacgtttccgatcgcctcaaaactcgcgtttccccacacccccctc

SEQ ID NO: 118569 - DNA, 452 bp, Arabidopsis thaliana columbia
  unsure (1)..(452): unsure at all n locations
gcgtacgtaagcttggatcctctagagcggtcgnccttttgtttttgtctttttttttacaaacaaattggatagattcttattgagcagtttttgatacacgcagagcgacataaacagggaatgtgaacctttaggattgcccagccgattctttaataaaaatgggatattgaaaaaaaccacctctcctcattgggttgtttgggaaccccccaggggcatcctaaaaaaaaaaaccccctccctttggggggtcagggggggcccaccttttttttcgccctttgaagtatgcccatggctgcgcgtgtccgcttacgattactcttcccctgctctttattcgtgcgcgcctcacacccgttacatcgatccatcacctcatacacagtatcgatcgccgcgatgcatgactatcggactcctattcgaggggggcagttaaggag

SEQ ID NO: 118570 - DNA, 440 bp, Arabidopsis thaliana columbia
  unsure (1)..(440): unsure at all n locations
gcgtacgtagcttggacctctagagcgtcgcccttttttttttttctttttaaaaaannaaaaaaaaaaagggagagaagagaaaaaaaaaaatgtaaggggggggtagaagaaggggnaatttttattgtaaaggagggaagatacgtgggtagtagatagaaagaaaaaaaaaaatanttanattggnagtggggnnaaaccggggaggnnnnnaaaaaaaaaatagccccgancggaacgagctattaccccccaccacttcccgtaagacaactcccgacgcacgtaacggcaagacgaccccgtcccccgtcatattggatcccccgcggcccggagacaacttacgagtgcccgcaacgcgttgatctacgcaacattgatcgatagccgcatccttcacccacgccgcgtaacatggcctagtgtgagagggg

SEQ ID NO: 118571 - DNA, 466 bp, Arabidopsis thaliana columbia
  unsure (1)..(466): unsure at all n locations
acgtcgcatgcacgcgtacgtaagcttggatcctctagagcggccgccctttgggttttttttttcaagatcaaaacacaaagggattntgctgttcaatattntgatgtatacatactgattactaaaatctgagcatacgaaattcaagaatcacacggggcacaaaggccccactagtaggagaaggaatttctgcatcaaattttttttgggaagaggaagacaactgttttttttttggctaaagaggaaacgccttcactggaacttttaaatccccaaaaaacaggtaagcccaaaatgggggtccggattgactagaaagggcgattccttgttttccgggacttgttcctatcgcctctcaccaccgtcctccgtcttttgggccgctccgcagatgttccccccgatcttcgcttgcccgtcccttcgggaggccgccgtggacagcgcgctatcc

SEQ ID NO: 118572 - DNA, 445 bp, Arabidopsis thaliana columbia
  unsure (1)..(445): unsure at all n locations
acgtcgcatgcacgcgtacgtaagcttggatcctctagagcggctgccctttggttttttttctttttttttnttatatgtaaaaacaatcgtttattaatatggacaaagtttgaggcccaaatattacaagtttcgtaaattatcttgcaaacgaaaaacaggctttttttcttctggatttattcggaaaaaggctgctagattggggtgggccccctcccaaacaacaatgatagatgctccaaggctttacacacaaacggttcaatcttaaacgaacacgtttttttttacccccgacccacttttgggtggctatcattaccccgccggaggcaacgcttctcctgtgaacccaccggaagtttgtttcccccctgggcccataaacccctcgttttgggtttgcccgtcgtttcgaatgccgcctatattggcgtga

SEQ ID NO: 118573 - DNA, 468 bp, Arabidopsis thaliana columbia
  unsure (1)..(468): unsure at all n locations
gcgacgtagcttggatcctctagagcggtcccctttggtttgggcctcttttaaattttttaaaaaaaacggggganggggaaaaaaggagaggagcaacggaaaaaaggaccaacaacgccagaaaaagacgcgcacgaagcgtgtcttccgacattcatctcgtcataaccccttccctcctgggtgtttgggcaccccccggtgggctccagaaaaaaaaaacccccccgtctggggggagcagggtgtccccccttactatcgccctagggcaatcgactatccgcgttatcacacagtcgtgtccgtcgcctttaattttgattccgtccgctcccgattcggggaagctttcgcccggtccgtaatcccccacactgctcttgatccgcgggccggtcgggagggcccgttcaatcgcgctcccgtcgccctcgcttcgcccgtatcgtttcgccgacgcgt

SEQ ID NO: 118574 - DNA, 529 bp, Arabidopsis thaliana columbia
  unsure (1)..(529): unsure at all n locations
tgatttaggtgcacttagaagacctgacgtcgcatgcacgcgtacgtaagcttggatcctctagagcggccgccctcngggttgggggcccttttttatatatttnttttccttnnncgcgntnncccccccccccccccccctcccnnnccnttttgaaacccctaccgctctcctcattttttaaaagccccaaacccaggggcttccaaaaaaacatggtgtaaaaaactcttcttccgttgttgggggggcatttaacacccccccaaaaaaaaaaacacgcgcccccgccccaaaaaattttttctccaaacccacccatttcccccccatagggggggggaaaccagatctctttccccccccctttcttttgaaaatttcttttttttacttaacgcctttgaccggggggcccaccacatccccaccccccggggactgtgcccccccttttgtgcgccccccccccccccattttccaaaattttggctttaaagaccctccccccctggccgaaaaaaa

SEQ ID NO: 118575 - DNA, 494 bp, Arabidopsis thaliana columbia
  unsure (1)..(494): unsure at all n locations
aactatacaagactttgacgtcgcatgcacgcgtacgtaagcttggatcctctagagcggtcgcccttttgttttttttttttttttttttgttgaaactggaactttcttatagattctgattcagtttacaatatacaaaattccatgacaggggatgtaaatatgtaatgtaaggacttgtttgaattanatacaaagaatgcagaattttgtgctattttaaacaggagtggttgcctcatgggttgagtatcaattaggatctccacatctttggcatgaccttcctcggggcgggatcatttggaccttttgtctctttgtcctggagggaagtataacttgccatccaaataccaagcaggggtttgtttaaaggggatggggattttccaaataacataccattttaaggggtttaaaggtcaactcgaagaattcccccacagagaaacttcttttcgcgttcaaagaggctgttcctttccgcc

SEQ ID NO: 118576 - DNA, 453 bp, Arabidopsis thaliana columbia
aaaacacaaacacgcggcgaaacgccccgaccccccacgccacaccacccggaccccccgcaaagccgccctcgccaatctcattttcccaacccgcgggcgagcaacacacacgccctcccgtatccacccaaaatttttttcggggaagtgggcccaatcatcagcgcgccccccaaaaaaaaaaagcccccccccacccctgcaaacccgcgaacccgcgcccctccgcccacaccccccccccctcttcccaccccgaccgccacccccaatcaaatacccagcgcccccccccccccacaccacacaccctccccccgcctcggctcataccccacgccccatcaaacccctagcgcccaccgcagccacacgcccccccaaacagtccgcactagcccctccccacaacagccggccccccactgccgactcacaccccgcaacgtt

SEQ ID NO: 118577 - DNA, 458 bp, Arabidopsis thaliana columbia
  unsure (1)..(458): unsure at all n locations
gcgtacgtaagcttggatcctctagagcggtcgcccttttgtttttttcttaaatcatatacacagaataaaaatggccccaaagatttaccaaccaaatcctttacattgggtagaaaaaacccaacccttatttccaaattataaaactttacatttggaaagagaggaaaaaaaaaccaaggaggacccgggttccatancttgggagtggggggaaaccttacaaggtggggtcaataaaaaaaaaccccccagggcgctttttaagccaaaaaaccccccttctatatctcgagagggctctcgccgcggcgggcggttggcggcgccacgcgccgccggccgggggcttataaatgcggtcgccacccgcccgcgcgtcgacgtcgtgggataccgcccggacgcgaggcgccagcgcgccgaggaggacgggtgcggggtcaggcggaggg

SEQ ID NO: 118578 - DNA, 401 bp, Arabidopsis thaliana columbia
  unsure (1)..(401): unsure at all n locations
gtcgcatgcacgcgtacgtaagcttggatcctctagagcggctgccctctggggttttttcttttttttttaattttttanaaaatanaggggcggggaggggggccgagagngaaacaggcgcaagaaaaagaagagaaagcgccaaaaaacaaacaagcgagagccgccaagaaaaaattaccgtagttggcggaacatctaactaaaaaaattaccttcattggggatgtttggggccanccccccggtgggtcctttcataaaaaaaaaacccccctcttccatgggggggttgtttggttcctccccatttctgtatctccgttttgtttgtcgccgtttcttagcattttcggtgtaatcttttctattccggatcttctttttttaattgccgt

SEQ ID NO: 118579 - DNA, 470 bp, Arabidopsis thaliana columbia
  unsure (1)..(470): unsure at all n locations
acgtcgcatgcacgcgtacgtaagcttggatcctctagagcgggtgncctttggtttttggtttaaattcccgagcaaatcttgtttccaaaaaagacaatggaattttatcttcttcttttggctctcaacactacaaatatgtgaaaacggtctctggttttgctttttggctttttttgctctccccattgattgattgatttttcttgggcgctctctctggggtattatggagggaccacttaattgtttggtaggtaaaaggcgtgggaatttgccccggatttaaccaaatcaatcttggtcaggctgacacaaaacagggcttgggtttgggaagttcttctggggaattgggcctccattttgttatcccaaacaagaacccccgtttttggtccgaccctgaaaggagcgaggttcttttctcgagtggaaccgggatctgggtcatcccaactctctct

SEQ ID NO: 118580 - DNA, 491 bp, Arabidopsis thaliana columbia
cccctcaaaccaaaaaacataagaaccttttttgatttatttcaccaaattgggacccccgccctcatcccaaaaaaacccaaagaaacaaaatccttcttcccacaaaaaattaaattggttccaaaaaccttctaaattaaaaactttttttttggggaagtggccaacccctcaatttaaggggcttttaaaaaaaagaacccttggccactgcacctttcccatccccatagcgtctccaaaattaaagccacctgacccaaaaaccggcggggtttaaaaaaacaaaagcgatccccccccaacccccccccgaaaaaagcggtctacctccccctaaacaacccgcacacccaccccgcaacaaacgtttttctccttccaacaatcccttccagaggggcgggccgtttccgtccaaccccccttcccacaccctcgcccctctccccacccccaaccgcccctttcctcctcccccacaccgg

SEQ ID NO: 118581 - DNA, 361 bp, Arabidopsis thaliana columbia
  unsure (1)..(361): unsure at all n locations
gcgtacgtaagcttggatcctctagagcggtcgcccttttgttttttgtctttaaaaaaaaaaacanaacaaaccacaacccgaaaaaaccgaacgcacacaccaatcaacctagatcagacgcaaactaaccgcgcttaggcaattcgatactatagggatgacgggtttcgttgtcggagtgtgtctaaccgacacgcaagacaacggactttcnctcncttggggtagttggggacnacccccaaacgtgtatccccgcgttaaaaaaaaaaacatccacaccgtcagggtggaacatgcataattctagccaatacattcgcaccatgttgtaaatcgcgcgccgtccacacaatta

SEQ ID NO: 118582 - DNA, 505 bp, Arabidopsis thaliana columbia
gccctttttgttttgggcccaaaaaaacaaaaaatatcccatcccatcccaaaacgtgctccgcctcaaacgaacaccacccaaccaacaatacccaaactagcgctcagtttaaaatcccgcggggagtacacgacccgttgagacagcacgccccgtaaacaccggccagaaatctttttttttgggcggtggggccaaaatcatcgcggctcagatcaacaaaaaaaaaatcctccacatggccaacattagaccaccttaatctccccaccaattgtgtcatcgccctttcggcgcttattcacaataactgtttccatttgccgatctcatttattatctcctcccacgcaccgatataatcaataagtgccggccatccccgatatacggcaacgccaattctatcattggcccgtaacgttccctacaagcgccataatatcgcgctaaatgtatgcgcgcaaacgcattccgcatttaggatccacgatgagaggtg

SEQ ID NO: 118583 - DNA, 478 bp, Arabidopsis thaliana columbia
  unsure (1)..(478): unsure at all n locations
cgtacgtaagcttggatcctctagagcggttgncctttggtttttgttttcactataaaaaacacaacttttattctccaactataaatgtggtacaactcttatctactctgcgtatttctgataaatcttaaaaatacaaacaagtctcccaccaaaccctaacggggggaacttatacaaaagaaagtttttattttgtcgcaggcacaaccccttgggtgaaaaaagagaaaaatttcaccattctccagggagtccccgggccccattcaccggttcatctctcagggccctaaagaatccccctacacaaaaaccttttttgtataagaaattttgcgagccttttttaaaaggggccaaagtcaacccggattcacgggctcccctttttaagggggggaaaaaaccttacggcggattgctccaacacctccaaaaattgtttcacccaaaaaccccccttgattttccc

SEQ ID NO: 118584 - DNA, 155 bp, Arabidopsis thaliana columbia
tggaacctctagagcggtttcctttgggttggggcctattcccttaaaaagaaaacccttcaatacttaaacttgtttgaaagcgggcctcaagggacataaaggaagaaaccacccctcctttaagcttctaaccaacccttcctaccatttag

SEQ ID NO: 118585 - DNA, 376 bp, Arabidopsis thaliana columbia
  unsure (1)..(376): unsure at all n locations
agaacagcacaccccccccccccccnnccccnnccnnngggggaagggaataaggttgaactataaaaagaccttttacgtcgcaacccgcgtacctaaggttggatcctctagagcggtcgccctttggggttgggctttttttttttaaaaaaagggcaaaaaaacacttcatataagaaggaaaggaccctgctcccaaaaacaatgggggcccaaaaaaggaacgccaccctaaaaccaagtcctctggaaaaaagggccccctttaactaaaaaaccaattttttcccgggatgaagggagccccatctttcctatgtgtgggcccccgggcaaaaaaaaaaaaatcgggcacccccgcccgggggggggg

SEQ ID NO: 118586 - DNA, 447 bp, Arabidopsis thaliana columbia
  unsure (1)..(447): unsure at all n locations
gtcgcatgcacgcgtacgtaagcttggatcctctagagcgttcgccccngggtgngagttttttttttacattataagaatcatttactatattattttcaagggaaaacgaataaatacaaagtttttttttttcttgagatatacaagaaaccaaccgcgtttaccatgcaattaaccttcttggcaaaatgcccacacccctttttttttggggggggggtgaaccccacaaagagactggaaccaaaaaaactaaattctccaccctcctgcgtgcgaaatgtcggacgacaagggtcgccaatattaccacgccccgcncgcagcattgacgcacacaccgacccccgaccccccggctctttttcgtcacgcgcgcgcgctcccgtgtccatcgttgcggcgcgcaccacccgttgaccctcggcgccggtcgtggcgtgc

SEQ ID NO: 118587 - DNA, 455 bp, Arabidopsis thaliana columbia
  unsure (1)..(455): unsure at all n locations
acgtcccatcccacgcgtacgtaagcttggatcctctagagcggtcgcccttttggttggggccttttnanaaaaannnnnnaaggagaaataaaactggtactaaaactcatacaaaggggaagaacatatgaatcctatntaaacataagggaatgggggaatatagcagcccagggtttttatccctacaactgacctaatttacagggagtgggcaaatggggtcaaatttcccaaaacaaagcttaaataaaagtttttaaaagtttttggcctaaccccaagccgtttactttctaaaattcggggcaggccataccaacccctaattcttaaaccggggtttctcgcccttttggttacgggttaacaacttaaaattggtttgacaaacgcccctctttttttgggtcccccaaccagttccaggttcccttctcccatccctaaaa

SEQ ID NO: 118588 - DNA, 440 bp, Arabidopsis thaliana columbia
  unsure (1)..(440): unsure at all n locations
gtacgtaagcttggatcctctagagcggtccccttttgtttttgttttntgttnaaaagagcttcttttctttattagaaatcacttaaccaatcttacagatctgtttaatcagttttacacagggtaacacaacctgttactgaccaattcctaatctacccaattcacaccacagggacaggtttttttccctgggtggggcactcccccaagaacccctaatagcttatagcttaaatccttgggattcacaaaggtgtgggagataagacgggtacctaacctaaagggttaccttccctttttttggggacccacacaggccccattaacctttttcctaattctaagaactcttcaaattttctttccagggtggggctcttttctgggagggcttggtaccccgggctggaacccccaccacccaagggggt

SEQ ID NO: 118589 - DNA, 425 bp, Arabidopsis thaliana columbia
  unsure (1)..(425): unsure at all n locations
gaagagcgacgcgcgcggacgcggagcccggcgnggggggggggggactttttttttacaaccccccccttttgcgccgagaacaaaccccccagaaacagaangaaaggcgacancccaattcccccnggcgcggagagggcaccaaaaccaaaacagcacgcgagggcggcggcgcaccgaggcccaccgcgcgcgccaagccaacgccgaggggcgccgcgcggacggcagacacgcccggccaaacggacacgcgcccgcggccaacggggcgccgagcggccccgccgcngccgcggagaggcttttttcttccgcgggggtggggcaccacagcggcccggcaccggcggacccaaaaaaaaaacggcgcggggagagccgacacccaccgagcgacggacacaccccgccgcaccgcc

SEQ ID NO: 118590 - DNA, 425 bp, Arabidopsis thaliana columbia
  unsure (1)..(425): unsure at all n locations
gcgtacgtaagcttggatcctctagagcggtcgcccttttgttttggtctttttgaaaaccaactttnaagaagagattggcgaaatgctcaaataaacaaaatgttttgcaaagaggtttactcccaaaacagaatcaaaaaggtcttctatcccccaaaaaagagatggaaaccacacctttcatctcttttaaagttttttttttctgggtcgtcgggaaacctcccttgcgggcctttaaaaaaaaaaaaaacacccccccccctttgggttcgcggcgtggccccccacggtgtttttttttcccccctcccccccaaaaccccaccttcgttggggttccgcggcgccaaaaacgggaggcgcccacccgccgcctttcctcgcaaccattccctccgcgcgcccccggacctcgcccc

SEQ ID NO: 118591 - DNA, 469 bp, Arabidopsis thaliana columbia
  unsure (1)..(469): unsure at all n locations
acgactcacttgnagggaagctcgtacgcctgcaggtaccggtccgngattcccgggtcgacccacgcgtgcgctaacactgctcctaccctaaacatgtcatcaattgctcagaatcacgctatgttccacagcatgcccgaagcagcaaggcaaggttatcagatgatggctgctcaagcagctcaacaaaaaatgaactacggtgcttcactagaagatggagggggtgggtctattggtggngctgntactgaaaataatacccctgaggaacaaaggaagtcaggacgagggccaatacccacaatgagccgctggcactcgcccttcccattcgtcctccgcccccgcccgaccggttttattccgcaaagtactaacggtgttccccgcctccacctacgccggtagtcggcgctcgggagtccgccgggagtgcgcgcggttaccgggttacgtcgttccg

SEQ ID NO: 118592 - DNA, 486 bp, Arabidopsis thaliana columbia
actcaccttagggaaagctgcgtacgcctgcaggtaccggtccggaattcccgggtcgacccacgcgtccgagagatcttaaacctgaaaacatactcatggacgtagatggccatgtgatgttaactgattttggtttagcaaaagaatttgaagaaaacacaagatcaaactccatgtgtgggactacggagtatatggcccctgagattgttcttggaaaagggcatgataaggctgccgactggtggagtgtaagaatccttctgtatgagatgctcactggaaagccgccgtttctcgggagcaaaggaaagatacagcagaaaatcgttaaggacaagatcaagcttccacagtttctggctaatgaagctcatgccttgctgaaagggcttgctgcaaaagagccagaaaggagacttggaagtgcccccagccgagccccggtattaacaaacccatttggtttaaggcggtaaactg

SEQ ID NO: 118593 - DNA, 449 bp, Arabidopsis thaliana columbia
  unsure (1)..(449): unsure at all n locations
gggagctgccacgcctgcaggtaccggtccgngattcccgggtcgacccacgcgtccgcgctgttgtactctcaattcttgggtcgttctgagtcgtctccgcgttaaatcttttccctttttgatcctttcttcctttcttcttcttcttcgcattgatttggtcctccttcctcttctattctattcattaaagaacctttgttcttatgggggtgggccncnacatcgacggacctccacttcaataaattccgcgccggttcattattttcccccccccctgccccccttcccctcccccgctcccgccccgtttcccccgcctcctccttcccctttcccgttctctgccctcccccccccgcgcccctgctttcgccccggctgtatccgctattccccgcctacccttacaccgccggattccgccctccttttttcccgcc

SEQ ID NO: 118594 - DNA, 502 bp, Arabidopsis thaliana columbia
gactcactatagggaaagctgctacgcctgcaggtaccggtccggaattcccgggtcgacccacgcgtccgatctgtatgactctcactttcttgagagcggatcgaacattttccacgcgaaaagttttaccttattcaatcccgctctttacgttacacatcagaggactgatgaggtccgccttactattctatcttatccatgaagaaactagtgttcttatgaggagggggaggtcttcacggactccacttagatcatccaggaaacgctattaggagtacccaatccacgagatccttttgtctgaagcaacaagctttgcgatattagactgagagacactgtttgagctaaggaaatcaccgcgctatctttccaagcataactgagtcgacctcaaggcttacaagccatatcctatcaattcagatgatgaatctgacaacaaacatacccttaacccttctaagaggactacctcctgagccctctttgg

SEQ ID NO: 118595 - DNA, 488 bp, Arabidopsis thaliana columbia
  unsure (1)..(488): unsure at all n locations
ctgcacgcctgcaggtaccggtccggattcccgggtcgcccacgcgtgcgcttggactattgtatttacgagcattctacttatacgtggactttgggccggagtagcatacatgcaagagagccgcaacactaggatcaatgaactcgctgatgatcctcgtgcatggaacgggatgcaccccagtttcctttttctttggggggtggggcncaaccaatctgcggcccttcctaaaaaaaattcccccacccttttttcctccccctttcctccttccgttgccgcttccctctcgattcgcgccttcgtccctccggttccgcttgttctcgccctcgctccgctcgccttttttttccccctggcctctgccccttttcggcgcggacggtcgttcgcccctgtttccccctcctgttttccggctctgtatcccccgctttgcggcgtttctctgtccgtgtgcgttcacgttctccgccgcc

SEQ ID NO: 118596 - DNA, 460 bp, Arabidopsis thaliana columbia
tgctacgcctgcaggtaccgtccggattcccgggtcgacccacgcgtccgcatttctctctgactacttcatttcctcttcccaacagttaaaaaaagttctgattcgattcaagccaagatccacgtctaaagatatgttcatgcctagagcgcctttttccacccttttatcattctccccccctccccttttttctttggggggggggcaaccccatcaccccattccataaaatcattccctcccttcttttctcctccatttcctcttcctatcccttcccttccattctcccaactccccccctttcccttctctcccctccgttctcccccctttttttccccccttcttttccctgtttctcctctttcctcttccccctttttcccttccattgtccttccctttcctccccttctccttcccccttccctttcccgcccttttctcccct

SEQ ID NO: 118597 - DNA, 489 bp, Arabidopsis thaliana columbia
  unsure (1)..(489): unsure at all n locations
acgcctgcnagtaccggtccgnattcccgggtcgacccacgcgtgcgagcttctggctcagtgtggagagcatctggtgaaaggtgatatccaccagggtccagctgtgattggattagctatgtcttccaccccttacatacttatcctaccccctattttaattcgatctaatcttttttctcaacttttttctttggggtgttggggaccacttttcggtttctcccaaaaaaaatttttcctttccctccttatttatccatcacctttcatcatatctttgccacatccacaccttttcacccccatcccccccccctttcacattaaactaccctcaccttcctaccccactttttacctcctttttatttccactttttaccctctatacttaatcacaccttttttctatgacattattcattcaattattacccatgttatcatcctctcatcttttccatatccatccatttttccccc

SEQ ID NO: 118598 - DNA, 494 bp, Arabidopsis thaliana columbia
  unsure (1)..(494): unsure at all n locations
ctactacgcctgcaggtaccggtccgngattcccgggttgacccacgcgtccagttgttacaggttcaaagattcttagccttccggggagtttttcttagaaaaaacccatacccccaaaacattatacatccacccttctttttcttactcctactcccataaataaaacacaattaaaccaagtaacccaccatttccctcatttgggggggggacaaatcanccatttacaccccatacacaaattaccttctcactgcctttataacacgcaccatataacccttaaaaccaccatatcacaacaaatactacccatctacctccccctttcacctatattcccccccccccccccccccccactatccttacaccccaaactcattacccgtaatacaccactatccatactttcccacccttttcccacacctttatgtacgtaccatattcccccccctttccccccactccacctttccacaatc

SEQ ID NO: 118599 - DNA, 541 bp, Arabidopsis thaliana columbia
gcctgcaggtaccggtccgggattcccgggttgacccacgcgtgcgagttgttgtactctcaaattatcggagcgatgtgaggagtttccgacttaaatctccccccctccttgaaccctggaacaattactcccttctttttcgtcattcatttcgcatcatttaccgttcagttatttccagtggtccccgccagtttccctcacttgggttgttgggcacccacccaccctctatcccccccaaaaaaaataaatccacctcccacacggtgtttatcccacacgcatatcccatatgcgattcaccccgatcgcgcagatatattcgcaggaactgccaccacgcattaccgcttaatgctatcacgacccctctcctctcactataatatcccaatgatctcatctcccgtgttaatcgcaggtgtagacaaccattccccccacttataccgctacacctttttacattcctgttatccccgcacatatcatccgtgaacttcttatccacattcctacccgttattaccacact

SEQ ID NO: 118600 - DNA, 505 bp, Arabidopsis thaliana columbia
  unsure (1)..(505): unsure at all n locations
nnnnnnnnnnnnnnnnnnnnnnnnnnnnnnnnnnnnnnnnnnnnnnnnnnnnnnnnnnnnnnnnnnnnnccacgcgtccgtggaagctgtgcgggtctatctttcccggaaatgaatgttatgtcactccagtaccaccctgaagcctcccctggacctcacgactctgataacgcatttagagagttcatagagcttatgaagagatcgaaacaaagctcctgatcaatgagaaggacgtctttgtttttgtacgttgctgtttttaatcatggcacttaaattaaaaccaactgttttgttagtgataatggattggcattattgtttctttgctttgactgtattgagcaaccatccaacctataaaataagtaagattttngtaaagtaataaagagataaagagatgtgaaaaaaaaaaaaaaagnnnnnnnnnnnnnnnnnnnnnnnnnnnnnnnnnnnnnnnnnnnnnnnnnnnnnnnnnnnnnnnnnnnnnnnnnnn

SEQ ID NO: 118601 - DNA, 462 bp, Arabidopsis thaliana columbia
  unsure (1)..(462): unsure at all n locations
gccngaggaccggccggaanncgggttgaccagcggcgggcactggaaaaaaggcggctctcctttgctccgagtatggagaaaatgagagggaagcgaatcagacaagagactccgggagttagtccaagatgggagatctgaaagcgagcgtaagacgaggaacacagagaatttttttgtggccgtaggaagaatcccaagaggaagaggaagaggagaggctccccaaccatctatttacctagacatttcctatcccgagaaggatattaaccctgacggaagcagaaagggtctgagccctaccgcggcatcatcggaagaccctgaccagtgacagagagtctatcttctgttccaaggggaaccacgagcgccctttgtttgacctgcttaacgagaccgtcttccgcaacgacccctgagggcagttacagctgcctgcccattcccgacgat

SEQ ID NO: 118602 - DNA, 495 bp, Arabidopsis thaliana columbia
ggaaagctgctacgcctgcaggtaccggtccggaatcccgggtcgacccacgcgtccgagaacaccaaatttgtttccgtcttctgctaacatatcctctttttcatctgggaaccctaatttcttgactaacttagggttctattcatctcctttccgatcatttcgcaatcaaaagccccttactccccccactcccattttttgtttgggggggggggaaccccaacaccccttcgccataaaaaaaatccccccatctttatccccctcctttcccctattccatccgccctcacccccaattcctcccgtctccccctccctatcccaattctcccccccatctctctcgccgccttgtttgtcccccccatcatatccccgcttatcccctctttcccatcattcacccctttttccgccatcgatatattcatctctcatttcccccgctatcatcctgctccactttccgatgtcctcccgcctttc

SEQ ID NO: 118603 - DNA, 493 bp, Arabidopsis thaliana columbia
  unsure (1)..(493): unsure at all n locations
gggaaagcacgtacgcctgcaggtaccggtccggaattcccgggtcgacccacgcgtgcgcacaaccgaaaaaaacactaattgtgctttccctttagattcattagtattttctttagaagctcctcaacaaaggacgcatcccatgccacaacaaacccatctacccaacccaccaaaacagaaatcccgccctcaccactttatccttcggggggggtgggcncccnccacggcgcgttccccaaaaaaaaaaacccccccatcattcccccccccgatccccctttccatgccgccgaccccgcccgattgcccccgaccccccccgcatacccacatccccccccgcccccccccccccatatatccccccggcgacataaccacttaccgcgactacctcctccccgcccttgcccccaccttttctccctcccgccttcccccgcatcccccgcccctcgggccgcgccacccccctccccccccc

SEQ ID NO: 118604 - DNA, 455 bp, Arabidopsis thaliana columbia
ggggagccggtacgcctgcaggtaccggtccgggatcccgggtcgacccacgcgtccgcggacgcgtgggtttacacaacacaaaatccatttttcttctttcataactatcagaaacaaacacaaattaaatcaaagtttcattagttttaaccccccacaaaaaaacatgggtagtgcaaaatcagccatgctgatcctcttattagggggggggaacccaccatgggccacggccatagatatgaccgtttcccgtgaagggcggagacccccccccctctgcgcgtatgcccctgagtcacgcgcttgggcatcatgcgggccttgggcgcgccgtttgttgcgggcatgctttccccgctgcctcctgctgcgctctttccgccgattggcgcgttcgtggatcgcacgggttttcgcggcgttcggcggttacgtctttgcccttcttc

SEQ ID NO: 118605 - DNA, 486 bp, Arabidopsis thaliana columbia
  unsure (1)..(486): unsure at all n locations
ctgctacgcctgcaggtaccggtccgngantcccgggtctgacccacgcgtccggttttttattaccctgttttataaacagaggaagccctaaatttggattctctattctaaagttttctcatttcgctaattttggagaaaaacgattgttttttttaatcntttctatatttctgattcattcttcccccctttttttttcttgggggggggggacccacccatcgctcctctcccacaaaaaaattcccccccttcctccctcctttttccccccccttatacctatctttctcccatccccctcaatcacagccatctccccccccctttccgcttcatcctccccaccctgcccctcgcgtttttttctcccctcctctccccccgttttccaccccttcctagtttcctccgctgttcgcccgccggttcttcgccccgcattccgcgccatacctcttctctctttccggatccacc

SEQ ID NO: 118606 - DNA, 503 bp, Arabidopsis thaliana columbia
  unsure (1)..(503): unsure at all n locations
ctctcnnnnnnnnnnnnnnnnnnnnnnnnnnnnnnnnnnnnnnnnnnnnnnnnnnnnnnnnnnnnnnnccacgcgtccgcggacgcgtgggctctctaacttgaaagttgtttcctttttttgaatctgagctggttttggaattttggtgtcaagatttggaatttgaatctgtagtaagattcaggtttagtgggggagggaacaagttggaagcttttgctagttttgtcagaggtgtcactaaagtactaactatcagaaaacattttcagccagaagcttggtgatgtatcttcagattttcaacaacccatctcatggcttagctcatttatgctactctagtcgggtttcgtgtagggtaagactgagtcgtgtccttgccatgccaccgtcttcagtcctcttgcatatggacgaaagcaatgatcttnccaagcccaagaagggtttttgtctgagtgaagattcgagaaacagtttaaacagtcttcctgcag

SEQ ID NO: 118607 - DNA, 356 bp, Arabidopsis thaliana columbia
aaaaaaaaccccccaaggggcgttttttttttgagaacccacacaaaaatttcgttttatccccccgatacctcttttttcataatcggggccgaggtaaatacccgccggtttaccgctatccctaccccgcgaacgcgccagaaattttcctagtttttcgggggggggttgggaatccatccccccccaccctcccccccgcagctataataatcacccccaccgcaatataccctatttaccgcgcaattcccatagtacgccgcctttttcgcgcgtggttgtatgtcccacacgtcatgtccccgagctatcagactatatccatggttagaccctttcatcacgccgtt

SEQ ID NO: 118608 - DNA, 359 bp, Arabidopsis thaliana columbia
gcctgcaggtaccggtccggaattcccgggttgacccacgggtgcggaacccttcaaatctggaggaactcttctcaggtgaggttgcatctcctcgcttcaccgatcaacccgaatacagaatgagacccaactttttaaaacaacaacctaccgcaataatgaagaaaggaaaagaaggaaagatttccgccctcccctccaattggatgtgggcggggacaccacaccatagaccctccgaaaaaaacaaaaaccccacaacgcggggggggggggggggaccacaaaaaatccgcacacaaccacgggacgcaccacaagatacacggaataccccccccaccattctcacatca

SEQ ID NO: 118609 - DNA, 477 bp, Arabidopsis thaliana columbia
  unsure (1)..(477): unsure at all n locations
cgcctgcaggtaccggtccggaattcccgggtcgacccacgcgtgcgtgattactgatgatgattttagagatcttgtggacaaggttcctncaggttgcagaatgacaaccatttcagactcttgtcacagcgatttttcatcatactttccctttgttaaatacccaaaaacgcacatttcgcagattcctcccttggggggggggaccacacacaccccaaccccccaaaaaacaaataccccactcccccgtgttttttcctatctactatatttttatcataaccccataccctcctaattcctcctcatacacccccgcctttccaaatcatcaaacctatccctctaatcacctattatatcccgggttcttagagcccttttttcctaacattgcgtcattcacaccttctatcccgcaacgctttttaccatctagcttcaccccaattcgtgcttctctcgttacgc

SEQ ID NO: 118610 - DNA, 533 bp, Arabidopsis thaliana columbia
  unsure (1)..(533): unsure at all n locations
cgcctgcaggtaccggtccgnattcccgggtcgacccacgcgtccgggactctgaaatttctacgtatccccttggacacgtctacgagagaggggacttcagatggagctgcatctcaacgaatcacccatcttcaacgattatctattccccaccatgtcattctcttcttttccctccttaccacccacaccctttctcattttccggggtgaggacctcactccatttccctccccttccacaataaaccctttctccccctcttctttttctcctccctatttccccctttctcttccccccccttccccctccctatttccccccccccctccccccccttttcccatttcatccccctccctccatctctccccccttttctcttccccctttctcccctctccccttttccctctcctctccatcccctcctccccttcttcctctcttcctttcttcctttcctctctccccccccatacctccctcccctctatccctcttcctctcccttttccctccccct

SEQ ID NO: 118611 - DNA, 456 bp, Arabidopsis thaliana columbia
acgcctgcaggtaccggtccggaattcccgggtcgcccacgcgtccgctcatcatatatatacaaataaattacattaccaataacaccacatagattcccatccaactacacattaccatttcatacccacagcataactacttctctacacacggatcacacatcacatctccaaaccacccccacaattttttttcgaatgttgaccacaaaaccctctcaccccaaaaaaaaaaaccccatacccctccttaacccaaaacacacccataccatccccaacaccccaatacccccatcccacccacttcccttctcaccccctcccaccccccccaaacatacccccaaccaaacaaccaaattccccctctatcctcatcccacctacctcccatcctctcttcactccaacactcacccactacctacctcactacattccacctccatc

SEQ ID NO: 118612 - DNA, 480 bp, Arabidopsis thaliana columbia
  unsure (1)..(480): unsure at all n locations
gggagctactacgcctgcaggtaccggtccggattcccgggtcgacccacgcgtccggactttgtttgttcgtttgatctttcttaaaaatatgaaaattaacatcagagattccaccatggtccggcctgccaccgagacaccaatcactaatctttggaactccaacgtcgaccttgtcatccccagattccacactttcctgnttggggggggggacaccccaccccactcccaataaaaaaaaatctcccctccctccggaatttatatccacatatttctttcctataccacctcccctcaaattcaccccatcccctccctctttcactatcatccccccccaccccccccccccttcttttccccccatctttttcccttattcccactctttcaattcaatcccccaatacagccatcaatttatcccaaccatatacgcccggttcgtccgtttcctcgctccccgtcctc

SEQ ID NO: 118613 - DNA, 504 bp, Arabidopsis thaliana columbia
  unsure (1)..(504): unsure at all n locations
gggagctgcacgcctgcaggtaccggtccggattcccgggtcgacccacgcgtccgagaactgaaactgaaactgaaacacttctctctctctctctttctcgcttccacgaatcgagagttctacaaattcgcttcctagggtttctcaattcttctaatttcttcatttctatggcgagtcaatgagcgaaatggcttttttttccggggggggtcttctcnatatcaaactcccacaatacaagaattcccctaccctccccactttttcccccctcacttctctcttccttcccccccttcccccccctattcccccccctccccccctcacctttcccctttcctcccccctcctccctccccgcccccccttcttctccgcctatactcacatcccatctttcccccacctctccctcatttccgcccgttttcgcccctccttcattccggacccctcaacccccaccgttcctgccatcccacctttgccccatcc

SEQ ID NO: 118614 - DNA, 516 bp, Arabidopsis thaliana columbia
  unsure (1)..(516): unsure at all n locations
gggagctgccacgcctgcaggtaccggtccgngattcccgggtcgacccacgcgtgccgggagttcatgtcttgttccttcactgccaagttcaagtttctttatggcaaagatgttttgaaaaacaggcataagacattgaggaacttgtttaaatctgtgaataatcttttgatagaagatggttttagtttgccaccatttcctctttgggggggggccccccccccccccaacacccccccaaaaaaccacccccctaaaccccccccccatatccctccccccctctctctccatcactctcccccatcctccccactatccccccatcctcccccccctttccccatcctcccccccccctctccctcccccttccattcccccccctctccttcccccttcccccccctcttccctcattcccccctcttctcctctccctttttccctcccctttacccccccctttcgtcctttcctcgtttccccttcgcccccttctcccccccc

SEQ ID NO: 118615 - DNA, 479 bp, Arabidopsis thaliana columbia
  unsure (1)..(479): unsure at all n locations
cgcctgcnaggtaccggtccggattcccgggtttacccacgcgtccgggagcatttgcttcaccctcatcaggtgtgatgcctgattccaccaatcctactatgagtgtgaatgcccaaggncatgaaatccaaatttgttggtcggacacctcgcccttttttcttttccttttagagcctttttcaccctccctccatggggggtgggggccaccacacggataccccccaaaaaatatccctatccggggttcttttccccccctttttctcttctattcaccctacccatcaaattccccccttccttctccccgtttccccttctccccctcctccctcttccccccttgtcttcccgccgatctctgccccgtcttcccgtccttcctctttcccccgttatccacccctcgttttccgttccctttttgccccgttccccttacatcttacctttcctctctccttcccccc

SEQ ID NO: 118616 - DNA, 516 bp, Arabidopsis thaliana columbia
  unsure (1)..(516): unsure at all n locations
cgcctgcaggtaccggtcncggattcccgggttgacccacgcgtgcgaggacnnaaaanaaaaaanaccaactaanaaccgcccttcacctcaatgacccccacaaacaaaataccattataactaccccacatcttttacttactacatccccatatattaaataactatttaaagacaatgccccacaacatttcctcctttggggggggggcnaaaaaacccgaaaaccccacaataaaaaaaaaatacctcatccatccgtataatatacacacgctctaacacacttttagatacggacaatacggagcgatgttatagggatcttactccactatatccaggtcatcccacgatcgcatacgcgagccggttattttcacgacgagcgtcttggcgcgatatacgcggactatcggtacattcggcagttgtacgggatggtattattctgttgacttaataaacaacggtaggagcgtagcgtcattaagagaatcataggagttatta

SEQ ID NO: 118617 - DNA, 453 bp, Arabidopsis thaliana columbia
  unsure (1)..(453): unsure at all n locations
tgcacgcctgcaggntaccggtccggattcccgggttgacccacgcgtgcggagagtttaccaactaacaccatggctgctcgtctaagacgccaaacaaatcgaacttctactgcttccgctattgctagtccttcttaaggatggccagcgattacatcaggcccattccaatgcatctatcacaagcccaattccctccttgggggggggggcaaaacaaccaatatacccccaaaaaaaaaaatcccccttcaatcctgtgatttcacatcccttttttctctttcttttccccttaccctccatatttcgcccattctgcttccccgattcacctttcgtcgctcccactcctgcctcacccccctgttttatcgccacgtacctcctatgcactgattgccccgtcttaccctacgttcaccccgcttattgacgcgacgatgtatt

SEQ ID NO: 118618 - DNA, 493 bp, Arabidopsis thaliana columbia
  unsure (1)..(493): unsure at all n locations
gggagctgctacgcctgcaggtaccggtccgngattcccgggtcgacccacgcgtccgcttggaggaggcatatgaagcattaaagactttggagattcttggaattgataaaaagtctgatcttagctcaaagacttgtgagaatgtggttaaagttcttcagtcgtcttcttctactcttaaggatgcattttatgcgtttttttttgaggggggtctaacatgtacaaccggtcaacctgaaactaatcccccccgtttctcaccttcccgctcccctttcctacccccagctcccccctttccccccctctccccccccctttccccttcttccccccccccctccccctcccctgtttttctcccctactctcccccctttctccccctcctcccctcctcccccccccccccccctcctttaatccatccacttttcccccccttcccccctcccctcttccccctcctcccccttcccccctccct

SEQ ID NO: 118619 - DNA, 185 bp, Arabidopsis thaliana columbia
agtacgcctgcggtacggtccggattcccgggtcgcccacgcgtgcgatctagtgaaccggagagtcaaaggttgagccaagtggtgaaacagatggcgacttgaaaaccaaaacaagatatcatcacgccatcttattcttcatacatatcacattaagatcagtaacatcatgatcaaaaaaa

SEQ ID NO: 118620 - DNA, 460 bp, Arabidopsis thaliana columbia
  unsure (1)..(460): unsure at all n locations
cgcctgcaggnaccggnccggaatncccggtttgaacgacgggggaagaccccccaaaacaaaaancaccccnaaacacggggacacctagcaccacgaccgaaggccagcccacgcaagaaaccaacccccaccctcttcaagcaacaagccccaaaaaaacgaaaactgagagcccagaaaacacagcaaagaacatcacctaaatagggggggagggaaaaaccaaaacaacccaaacccaaaaaaaaaaaaccccccaggcgggagcccccacggataaccacaaacagatacgccagccaacccgaaaactccccgaaccgcacccccataccccctacaacgcgcggcacgacccccgagcacgaaaaagacacagccagcgcaaacccaaatttacacgacgaacccacaaaaacacccaacaaacacaacgacaacacaccaacccccaaac

SEQ ID NO: 118621 - DNA, 191 bp, Arabidopsis thaliana columbia
  unsure (1)..(191): unsure at all n locations
gcctgcaggtaccggnccggaattcccgggttgacccacgcgggcgaaccgatgagcgacaganacgacnctgcnagacgccggacccgggagccagagggagaagaagccaaaaaacaaagaggcaaccgaggcctttgtaacaggcagacaagcgagagcaagacggaagcagaaacagacggagaagc

SEQ ID NO: 118622 - DNA, 479 bp, Arabidopsis thaliana columbia
  unsure (1)..(479): unsure at all n locations
tgcacgcctgcaggtaccggtccggattcccgggttgacccacgcgtgcgatcctcttctctctctctcaatctcaatggctctggtttaaaaagggcaaattagagagatttcccctctaataacaaaaaaccctcttttctttctctttttccttaaaatatcttcctataaatcaacaaccacttccaacttccctcaattggggggggggcaaaccccncaaccccccatccccaaaataactctccctccctttgtatcccccacaatcccttttcatatcgccctcacctcatttctatctctctacctcccctttcccaattattcccaccccccctccacccccgcatttttccctacatctcattatcctaattaccaatctatccttatttcgcccttttttcaaacatctgtgtaaccgttcctaattttcatccactatcttcacttccactctttccccctttctc

SEQ ID NO: 118623 - DNA, 499 bp, Arabidopsis thaliana columbia
  unsure (1)..(499): unsure at all n locations
ctgctacgcctgcaggtaccggtccgngattcccgggtcgacccacgcgtccgggttacttcatcgccacgatattcccttcgcagcttcgtgcaggaaggacagtgaccaaatgcaaaacttacctttacaaatctccactcgctgattgcgattttccgaccgatgngaacaaaggtgttcgcggactgcccttttttttttcggggggggggtcaacccacacccccccttcccaaaaaaacatatccccccccccttttcccccccccatacctccccttctttcccccttccctacatttaccccccttctcctccccccttctcccttcttctcccccccccttcactccctccattttttcccccttcctattacactctctccccactcttcacaccttcccacctctttccccatccatactactctcttcatntttcccccctcttcctccctatcactttctccttctcatcccctatatccccccca

SEQ ID NO: 118624 - DNA, 190 bp, Arabidopsis thaliana columbia
cctcacttagggaaagctgctacgcctgcaggtaccggtccggaattcccgggtcgacccacgcgtccgcccactgtcagaactctcccttcttcacacagacaagacgaaaatctctaagcctatggataaagtgctctttacatatattcccaagctccacagaaccagtttgcatagacccgatgct

SEQ ID NO: 118625 - DNA, 365 bp, Arabidopsis thaliana columbia
  unsure (1)..(365): unsure at all n locations
ggaaagctaccacgcctgcaggtaccggtccggaattcccgggtcgacccacgcgtccgcatttttcttcttgaaacccatggctcgattttccttcttgaatgtgtgaaaggatgntgngngctattctaaatgactcccccaaactgcttctcacgaacaaaaagtttctgtcctaaaaacccaactcccctctaaaacctttttttttcgggtgtgtggaaaacccttttccccccatccacaaaaaacatcttcctcccctatttccccccactatacctccattccttcacccgctcccccacacattcaccccaaccctcacccacattccccttcataccccaccacccctcgccccc

SEQ ID NO: 118626 - DNA, 513 bp, Arabidopsis thaliana columbia
ggggagctacacgcctgcaggtaccggtccggattcccgggttgacccacgcgtgcgacactctcaaatctctgattcttcgatacgataaattctttctcgatatagaaaccactgattagatcctaattcgtgggctagctcaaaagatggtgcttcttcccaagctgtatgatgcattgtaaggatctttttgcccttccctcattgggtgatggggaacccccacacctcgttctcccaataaacagttccccctttcggtgcgtgttttcccccccggttcccctcttcgttcccccgccccccgctgtttcccccctcgttcgcccccgttcccctttcgttgtgcgcctcggtctcctcccgcctttcttaccgcccctgctctcgtccgtttgtccgccgcttttgctgcttccgcccgttgttcgctggtcagtttttcgctttcgtttttcctcccgtattgtccgttccgttgttccccgtccgtccgcgttttcgccgcgc

SEQ ID NO: 118627 - DNA, 530 bp, Arabidopsis thaliana columbia
gggaaagctgacacgcctgcaggtaccggtccggaattcccgggttgacccacgcgtcctgatccctgtaatcccttagatcttcttttaaaatttcaatgtgcgccggtgatgcccagttcccctcaaaaatattacattcccaccttttaatcctactctatcacacaatattaaaaaatccattaacacgagaattccacaacaattccttccttggggtgtttggccacaacacccaaaaaccccccataaaaaaaaattcccaaacgctcccttctaaatcacaccaacattttattattaaatcaaccaatacccacacaattaccccgcaatcctcgccccatttaccattaatcccacaccaccacacccaactcactataaattcaccaaaacgcataaacacgtaaaacaaatgtataagacattccacacccttattcacccatacataacttccaaccaaattttaccaacaattcaaacgatacaatatacacacattcataccatataaccacaat

SEQ ID NO: 118628 - DNA, 467 bp, Arabidopsis thaliana columbia
ctgcacgcctgcaggtaccggtccggattccgggtcgacacgcgtcgacaagttattttcgttaatttcattttcgtatctctctctctcgcgacaaaccctaggtgcataattctcccacattcttttcttctccttccgcatattttagactcgtttattcaaaaaacccgtcgataatttcctgattggggggggtggaaaaccaataccccccatctcccataatactttccctccaacgttttcgcctaccattcacctttctttcccccatagcgccctattccccgcgcactcacccgattaacgatcattaacgccccgctatacgccccgttttttacctcgttactatattacatatgtgccgcagattacatcattcccaacatattaccgaatccttaattccaatcaaaatttcatacgttacataccaacccttcatagccgtttccatcccc

SEQ ID NO: 118629 - DNA, 511 bp, Arabidopsis thaliana columbia
  unsure (1)..(511): unsure at all n locations
gggagctgcacgcctgcaggtaccggtccggattcccgggtcgacccacgcgtccgcgaccaacattttcgttcgctgcaaactcatggctgtaagtttttaatcttccttcgctaatccacgatttcgattccgctatttcttttcgtaacccatttccattattaatttccatttctctctataaccctccaaaatctttttccttggggggtggggaaacacccatttccccctttccaaaaaaatcttttcccccccaattttttccccctcccattcccccttttcctttcccaccttacaccctcattttcccacccatctccgccccccatttcccctatcatccccnccgaaccgcctcgccccgcgttattttcacgcgctacgtctaccccctttatccgggtctttggctgctatcccgcctcttccgccgggcggttatccggatcggtattcccccgagtactcgcgtacgtcattcccgcttacacccgcgtatccg

SEQ ID NO: 118630 - DNA, 505 bp, Arabidopsis thaliana columbia
cgactcactttagggaaagctgctacgcctgcaggtaccggtccggaattcccgggtcgacccacgcgtccgaaaatggcaacttacttagcctcactgaaccacgaggaaacaagactagcgatttcatgcgagagagcttttcttgaaacgctagatggctcatgccgtactcctattgctggatacgcatccaaggacgaagaaggcaactgctttttcagaggggggggtcgcttccccctgaccgccctaaagatacttcgcgccctcccgaaacgcgcccatcccgtgccttcacgccccgctggcacccccgctatcgcccccgtcgcccccccctaccccttcctccccccccccgcccccccccctttatttgccccctcctcttccccccttaccccccctccgcgcaccccccgcgcctcccctcccctgtatcccgtgccttctcccgccgttcgcccccgcctccgcccgcttccccccctaaccccccccc

SEQ ID NO: 118631 - DNA, 491 bp, Arabidopsis thaliana columbia
  unsure (1)..(491): unsure at all n locations
cctgcaggtaccggnccgggattcccgggttgacccacgcgtggcgagagcagagaaaaatagaaancnnaagaagnancaaacnttatgaagacaaacgacccaagcccgcccaaaaaagaggcagacgaccctacataacatcaatcgacccacgctaaaagagagccagagtgaaaagaagctcctcaaaaatttctatttgggaatgttagggaaccacacccagagacacccccaaaaacaaaaaaccaccaaacggcgggggaatcgcacgaccgagaacacatacagaacaggcgagcgcgacaaagagcgcgaaaagcgaccccgaaccgcataataccccgaccacgcacggggacggtaggaaaccgaggacgtcgcgccgataatgccgagggaacaaagaggcggggcatattcgcgggagggatatcagaaggtagaggggccggttcgcggagacgtcgtggcagaccagacaggac

SEQ ID NO: 118632 - DNA, 436 bp, Arabidopsis thaliana columbia
  unsure (1)..(436): unsure at all n locations
cgcctgcaggtaccggtccgngattcccgggtcgacccacgcgtgcgcacggacgtanntaaccattagcggcttcatcctccgtacgaatgctctctacgccgttcaaaaaaattaattataacctcccccacatcttatactttattcttaacagattaatacccaatcataataatcaaaagagacccataaaaaatttactccatttggggtgtgggggaaanaacccacatacacccccataaaaaaaaaaaacatcttccctttgtcggtttcgacaccgcctctatttcaattccttccgcacatccgcaccgatttactacggaatattccccacatttccctatattacccctctccgcctcaaccgagcatttataagaagcaatcttttacaccgaaaataccctacgatacttcattccccgct

SEQ ID NO: 118633 - DNA, 450 bp, Arabidopsis thaliana columbia
tgcacgcctgcaggtaccgtccggattcccgggttgacccacgcgtccgatcaagtaactctgaacactctatgataaaagaaaaatcattcacctcgataccagaaagaagaaaagtcatctgctttctgggaaatttgttcatacaacagtcccacattcttaaacttcgaattgttcctgtttccccccgattatttttttttagggggggtgggccaacaccaccctattcccccccttaccacaatattcctcttccctccctctcttttccccacccatttctgctttccatctcccctcaccaccccttatcgccccccctccccccccctttccccctcctcctcgccctcgcctacccccccgtttgtttcccccccctctcatttccctttttccccctcgtcccttcttcgcccctttaccccctccatctttccatcc

SEQ ID NO: 118634 - DNA, 526 bp, Arabidopsis thaliana columbia
  unsure (1)..(526): unsure at all n locations
gggagctactacgcctgcaggtaccggtccggaattcccgggtcgacccacgcgtgcgagcacgcgtccgaacctggatcagatctagtcaggggtcagatcggagagccggcaatataatggcagcggggagacgattacggacgctccaatctcagnctggagaacaaggccttgcgcaaataaaacaacactttacaaattttttctcttgggtgttggggacaaacccccctgtaccccccataaaaaaaaaataccccctacatcccttggtctccacgccaccatctcaccatttcgttccacctctaccccacaataaacccacatctcacacacctttccctctcattcccccccatccacccccgcccgccaattattagccggggtagtattctccccttttaaccggttttacctagattgcaggatattcgggcgtacttttttagcaagcccgtttgggaccggtatcgtacgctagcctattacccaattggcggcgcatacacggcgacgg

SEQ ID NO: 118635 - DNA, 532 bp, Arabidopsis thaliana columbia
  unsure (1)..(532): unsure at all n locations
gggagctactacgcctgcaggtaccggtccgggattcccgggttgacccacgcgtgcgaagccatnacacaaaaaaattcaacttaccaagtgcaangtcgccaacgaccatgacatatccacctcttacctatggtctaaaaccttttgtctgcatttaactttccgcctgtttcgtcgccacaatgtaccagtattcccggcatttcctcttttgggttgttgggcgccacaacaacccaattgcgccccaaaaaaattactcccttatagctcccgtcatatgccacgcccctttttttcgtttacgttcccccgatccccaccgtatttccacccctcctaacaccgtaacgcgaatattagagcgccctcagaaggacgccggattaattacccccgtgattccgtccctattatccccggctttcatacgttcgccccgtattcgcgctaacgtaattccgacactctaatcacacccaaatcgtcaataccacattacgctttccacacccgttacccccccggt

SEQ ID NO: 118636 - DNA, 481 bp, Arabidopsis thaliana columbia
  unsure (1)..(481): unsure at all n locations
ggaaagcagccacgcctgcaggtaccggtccggaattcccgggtcgacccacgcgtgcgcgcacgcgtccggcttcttcataaatctctctctcttctcctctcttctcaaagatcgaacctttcgatttcagtctcttcagagttctttcgttttcatcgaaacaatggcgaagaacgttgggattttggctatggatatctatttccctcgggggggtgttcaacaggaagctttggaagcacatgatggagcaagtaaagggaaatacactattggacttggccaagattgtttagctttttgcactgagcttgaagatgttatctctatgagtttcaatgcggtgacatcactttttgagaagtataagattgaccctaaccaaatcgggcgtcttgaagtaggaagtgagactgttattgacanaagcaagtccatcaagaccttcttgatgcagctctttgagaaatgtggaaac

SEQ ID NO: 118637 - DNA, 501 bp, Arabidopsis thaliana columbia
  unsure (1)..(501): unsure at all n locations
gcctgcaggtaccggtnccggattcccgggttgacccacgcgtgcggggccttannaaaaaaatctttcaccttaaagagcacctttttcagacagaaatttagcaatcgccatataaagtatattcgaccacactaacaatacatacaacattttaccataatatagaattcaagtataacacaatatccaccctttattccttgcgggtgttgggcgaaacaaaaaaaccgtattctccacaaaaaagatatctcattaacggtcccttgtattccccaccccgattttaacaatcaatccgcccgtcgacaaaaaataactcagcattaaccacccaattttacagtacttacgccacatcaataccgcccgcgtttatttcgcggcgtctaataaaccaaattaacggctgttaacttgattcacccgtttttaaagaagtaaatttttagaaaccatattacaaagagtaccgtagcttatcttatttacgatttc

SEQ ID NO: 118638 - DNA, 529 bp, Arabidopsis thaliana columbia
gcctgcaggtaccggtccggattcccgggtcgacccacgcgtgcggtcattagggttctatatgtttagaaaaaaaatgttggtgttagcattattttccatttacttcttatcaatagaagctcgccggcattgattcatttcctgcgctattagcctcttgcagattcaacgtacgggtctcgaaattttctcatttggtctgttaggcaacaccccggggcggcccgctacacaaaaatccctcccacccccgtgcttttcccctcgcccctcgccatttcgtgtccggcctccccccccagttatacccgccatcctcctccccgttctccggtcttccgcgcgccccccgcgcgccgccgttgtattgtcccgcctgcctcctctcgccgcatctcgcccgcgttcacctattttcgccgcggtcttcctcgatacgacgttgtcgctaccgtatcatacgccgccgctttcctcccgcaaccggccgttccggacttcgatcctgcgattaagcccaccgcat

SEQ ID NO: 118639 - DNA, 401 bp, Arabidopsis thaliana columbia
  unsure (1)..(401): unsure at all n locations
tagggaaagctggcacgcctgcaggtaccggtccggaattcccgggttgacccacgcgtgcgcgacaactgcatactgcgaggcaagagctaagtcacgctttgtatcagcatgatgctgcttgtcgtgtgattgctaggcttaaaaaagaaagagacgaatcacgacaattgcttgcagaggctgaaaggcagntgcctgccactttttttggggtagaggggaccctcctccgaggaccgcgaaaaaaaaaatccctgttggtgaagagttgcccccccccaaatatatgtgcggtcgggaaggcgccccatttcccgcacgcgtcgcgcccaaaccgccatcatgacgcctataggctctcgcgcagctgaatgtgcggggggactgcggccccgttg

SEQ ID NO: 118640 - DNA, 476 bp, Arabidopsis thaliana columbia
  unsure (1)..(476): unsure at all n locations
ctgccacgcctgcaggtaccggtccggaattcccgggttgacccacgcgtgcgactttcgcagaaaccatttggagttggagctttggacgacnacaatggccccgaagaaaggagtgaaggtcgcttttaatcacaacaccttttcatcagtcttacccctttttattttatcattagtcccaaacacatccgaacttttgtantttggggggttggccaacacccgggggccccccataaaaaaaatccctctccttcgtttttataccctatccttcccttttcctctcccgctcccctccatttgcttccatcttctccccctttcccttctttctcctatcccttcccatacctttttttccttctgtctatttcccattttccacgtgtacctcattcctcccttattccccttcttttttacattctattttcccgttttcttgttactacttccctctctccccatta

SEQ ID NO: 118641 - DNA, 481 bp, Arabidopsis thaliana columbia
  unsure (1)..(481): unsure at all n locations
tgcacgcctgcggtaccggccggattcccgggtcacccacgcgtcggtcttctatctagaaccccttatcttggagtaatagagagtttgaaaacaccagaaatcatggcgacaggaccagttgctcatcctcacccaggtagagcggattccttcctccttaatacctcaaacccaccgaanttctctcttttggattgtttgggaacaccccggggcgccccttacaaaaaaaatcccttccctccctcctttcccccgcccctccccccttttcgttccaccttcgttccctatttcgcctcatctccgcgccctatccccttcttcttccctcccctccctctcctttcatttccccgctcgtcattcccctttcttcaccgcttcccttgcttccccccgtttgccccgttcttatttcccttccctcgttcctcccctttcgtgctttccctcgattcctcttcacccccttttc

SEQ ID NO: 118642 - DNA, 489 bp, Arabidopsis thaliana columbia
  unsure (1)..(489): unsure at all n locations
cccctgcaggtaccgggccggaattccccgtttcnacccaggggtggggcgcgtcacatataacacttntttataanaaaatgccaactggcangattcataaggggagtgtgttccacttggatgaagaatgctctgccttacgagaagagtaaaaactgtccctcggcgccgatatttgctaggcaatttttttttgaggtgtggggtnatcctaagggggccgatcataaaagaaagcccccggactggtatttctccattacacccattcctttcagaaaacacctaccgttcccaaaaatctcggtgttaacacttgggccaatatttttctttcttttggattcccaacacccgcaaaatggtttctctcttacaaggaaaaacctcacactcgtttggtccgggggtggcccctctccgaagacttaggttgtgcttttcttttcggcgaggcgctccccaaatgaaacttttgcgccgccc

SEQ ID NO: 118643 - DNA, 529 bp, Arabidopsis thaliana columbia
  unsure (1)..(529): unsure at all n locations
tgatactccggcactaactcgactcatttagggaaagaacggtgcgcctgcaggtaccggtccggaattcccggttcgacccacgggtccgggagcatttgcttcaccctcatcaggtgtgatgcctgattccaccaatcctactatgagtgtgaatgcccaaggccatgaaatccaaacgtggnggtggaacaacaagccagttctcatcggctttgtgggccttaatggactttttacctgaaagtgcggnctctaggggggagggtccaaatacacgaacctttttacgtatgtctacctccccgcccatgagggtcaaagggaaaggctaatggcaccgccattaatttcttccctaacaaaagagggtgtttaaaaacagggggtttttttttataatcaatcggggggtgctttggggcccctactgcgggggggtggagccccccctgtcgtcgtctcaagtaacaatctttcttttcaaaaactggggggggctctcttaactcttaacccctggggacgc

SEQ ID NO: 118644 - DNA, 447 bp, Arabidopsis thaliana columbia
  unsure (1)..(447): unsure at all n locations
ccggcactaatacgactcacttagggaaagccggtacgcctgcaggtaccggtccggaattcccgggtcgacccacgcgtgcgcccacgcgtncgcggacgcgtgggtcgaatcgagctacttcctccgccggctttgctgtgtgtgtgatcgttcgtttactaaatctgaaacaagtatctaacgccttgccggagatgtcgagctcaggccaaactcagttccgttatacacagaggccgncnaaggtggttcatctgcggaatcttccatgggaatgcgtcgaagaggagctcatccacctttgcaaacgattcggcaagatcgtcaataccaagagcaatgtgggcgccaatcgcaatcaagctttcgtcgaatttgctgactagaatcaagctatatcaatggtttcgtattatgccttatcttcagagcccgcacagattc

SEQ ID NO: 118645 - DNA, 558 bp, Arabidopsis thaliana columbia
aaagacgtacgcctgcaggtaccggtccggaattcccgggtcgacccacgcgtccgcacacgcgtcccaaagatcctccagactacaatcttgcccgtgtcatcttcacattggcaacatctctcttgattggcacagacgcactggccaatccgcgcgctaccccttcgacccgctccccccccccccgacccccccccgccccttcttcttccgggggtggccaccccccccccccccccccacccacaaagaccgccgcgccccacacgccacccacccgccccccgccgacggagccacccccagcgcccagcccgcccccccacgcgccgccccgccacctacaccgcaccaggccccccaccctcccacccccacactcccccactacccccaacccacccccacccaccctctcaccccgcccgccacccaccccccgcccgaccacaccaactccccgcccccacctccccgccccccccccccgcaccccgccgcctcccccccattccaactacccccctccccctcccacccccccaccccccaccc

SEQ ID NO: 118646 - DNA, 448 bp, Arabidopsis thaliana columbia
  unsure (1)..(448): unsure at all n locations
tacgactcactaaggggagcacgtacgcctgcaggtaccggtccggaattcccgggtcgacccacgcgtccgaccctctcttctcactctatatactcccaaaatggcttataanctaccgttttgccattcttcctcggctactctgccccaccataaggcttcatcccgcgcctcaattgccaccaccttcgccacacccctccaacacccccacggcaatttctcatttggggggggggcccccgcccacccaccaaccatacatcgataaaaaacaccaccacttacaaggtttgatatcagttatattttgttcctactcccttatgattttcccccttatcccacccatcacaatctcgacagtacatttgattacatcactcccccgactactcacatatttagtcgagccgatctcgatacgtgattatctgtccctcta

SEQ ID NO: 118647 - DNA, 525 bp, Arabidopsis thaliana columbia
acgactcactttagggggagctcgtacgcctgcaggtaccggtccgggattcccgggtcgacccacgcgtccgcgactcgtttcatttggggacaagcttcttcgattttcctctcagaccaatcgggctttcgaatcccatcagtagaaatggctacatcaaggttccaagcattcttgaacagccccattggcccaaaaacaacccacttctggtttttttgggggggggggcccccacccgtcttccttttctttaaaactcctcctcccctttcatggcttctccatgcccccggtctcctcttgccacttacctccccagctcccctccctccgccaccgcgcccccggtgcgctctcctccgcctctcataatcctttccttccgtctccgctccggccgctgcccccctcctccaccgtcagtcctctccttcctccccgcctctctcaccctcttctgccccctctctctccccactttctgcattcatcgccccccccccattatctctcccctct

SEQ ID NO: 118648 - DNA, 517 bp, Arabidopsis thaliana columbia
  unsure (1)..(517): unsure at all n locations
ggggggagcggtacgcctgcaggtacgggtccggaattcccggttcgacccacgggtcgcagcaaaccgaaaaaaacactaanttgtgctttccctttagattcatttgcatacggctcgcgcggcctgctcaccccggccagcggtcgctttcccggagtacgctttgaagctgtctcggtgctcccccgcgccggcccgaccgaccagctttttctttggtgtggtgggncgcgcacccccggctgctctacgtaaaaaacgcctccccatcgtgaggggcggcgcgcggtgagagcccgcacggcgcgccgcgctcgcacggcggtcgctccgccggtcttccgtgcgtgcgccccgtcacagaaagccctgctcccctaccacccgaccctacccngcacgcccccacagacctttaagttctcccgaatccgcccagcatccacccaagtggacggtgcctccgcagcggcgccacaactcgccgtcccccctggatcagcccgcacccacg

SEQ ID NO: 118649 - DNA, 531 bp, Arabidopsis thaliana columbia
  unsure (1)..(531): unsure at all n locations
ggtacgcctgcaggtaccggtccgggattcccggttcgacccacgggtaaaccccntnaaaaaaaancataaatannaaannaataatttagataaaatgaatttttataacctccaagaaatttatattatttatttatacgctttatgtttgtacttaatttctctctttcacgaaacaacccgcaaaaactttcatanttggggggggggcncccaaccctctccctttccctataaaaaaaaaaaccccacatataattctatcctctataattatttccttagtagctatgactatatacctttatgactcagtcttaatgtttttaactgattatatatttttatatctcataacccgagcaatgtaaccttccagaacatctaagcaggtattaaacatccattccaaccaaaatctgaacagaatacttacatccccactcacatactcatcatctcataatgtagccgaaaaacgcataaatagatagaatatatatacaaaaccaactttaaaaccctagc

SEQ ID NO: 118650 - DNA, 490 bp, Arabidopsis thaliana columbia
  unsure (1)..(490): unsure at all n locations
gcctgcaggtacccngtccgcattcccgggtcttttnanggggggaggaaacccnnatcaaaaanaaannnacaaanacgagagaaggttttttcacactcatctcctttatctccctcctaaaaacccgacatacataccttcattttatcatttttattaaggctctgcccctcacacgttgcccccaccgacacaaccgacaagattgctcggttgggggtgtggcaccaaacccctcctcccattttataaaaaaaacctcctctctcaggcgtgtctactacattctccaccccttttatttccctcttccctagtcatatatctatcttaccactcagcaaatatattccctaactgcaaatgtacctatctatatgttttttccccccccccccgcgatatacacataaacaaaacgacgccccaccccattattctattacataaaacattttatatctacatttaatatttatatcataat

SEQ ID NO: 118651 - DNA, 534 bp, Arabidopsis thaliana columbia
  unsure (1)..(534): unsure at all n locations
tcactttagggggagcacgtacgcctgcaggtaccggtccggaattcccgggtcgacccacgcgtccgttcttttattctcatcggcaaaatatatctccccaaaattttatcatatttctcgatagagaaaaatcattaactaaatatccattcccactcaaaaccctaaaaaagagagcctcaaaatctttgagtgcnnngcagcccctgcctccctgagggggggccccccccccccccgcgccccctcgggaaaaaaaccccccccaccgcggggggcccgggcccaccccccccatgttcctcccgactttacctatatgcctccgactgccatcgccttcctccggaccaccccacatcgacgcactgtccccccccccattcgcgtgtccccacaccgcccctcccgttctctccggcccctgccgcccccatgcgctccccaactcctaacgtatgtctccctaccgccctcctcctcccgcttcgccaggatgcctccccggctctcgtcgatcttcttagtctc

SEQ ID NO: 118652 - DNA, 524 bp, Arabidopsis thaliana columbia
  unsure (1)..(524): unsure at all n locations
tacgactcactttaggggaagctcgtacgcctgcaggtaccggtccggaattcccgggtcgacccacgcgtccgccttcccgtcgtcggaattacttcgccggcgctcatcacccacaaaaatcacgccaatccaaagatacagagacataatcaatctacctccgagaccactgtttcatggacttctcgcatcaatctcctcacgcgcaatggtcgattagcggaggcgagcgaaggaattctccgatatgacactcgccggcgtagagcctaaccacatcactttcatagctctactctccgggtggtgggatttnccctcctggaagtgtacctctatcccccagcctgattgcacttccttccccccaggctccgcccctgccctccgcgcctcttaccttctccccgccccgctccctccccttgttcctttccctccactctcgccaagtcctgtccttctgctacccccccccccctctcttatcccttaccgctacccttcccttctttaagcgt

SEQ ID NO: 118653 - DNA, 501 bp, Arabidopsis thaliana columbia
  unsure (1)..(501): unsure at all n locations
tacgcctgcaggtaccggtccgngattcccggttcgacccacggttccgcaaaaccgaaaaaacactaattgtgctttccctttagattcatttgtattttcttttggagcttttgaacaatggagtcatcacaagcaacgacgaagccaacgagaggagcaggaggaaggaaaggcgacgaccgcctttcctctttggggggggggacnccacccacacattactataaaaaaaaaaaccccccacatcgctgtaatttcaccccccccctctcgctcctcccctactccattcaccatcctctattactcttttatttttctctccctcacccccctacccaactccaccacccccccatcatttacctacacctaacacccacccatccccatccacacactactccaccccccctacaaatatacaactcacacacacacactcccacccctctatacaacccaccccccacatccccggcccaccgtctgctcaca

SEQ ID NO: 118654 - DNA, 544 bp, Arabidopsis thaliana columbia
  unsure (1)..(544): unsure at all n locations
cgactcactttaggggaagcacgtacgcctgcaggtaccggtccggaattcccgggtcgacccacgcgtccggacgaactgaagaaaacctctcggaagaagatgagcaattggaaaactcttctccttcgcatcggcgaaaagggacctgagtacggcacttcctccgactacaaagaccacatcgagacttgtctcggngncacccncacttcctccttggggtggggacaccaccccccccccctctaccaaaaaactccccccatatcacccttcccgacccccccctcctctcccccttcttgctattctcaccaatatacctctcaccactctcccccccttcccatcccttctcccctcccgtcctcctcccccccccctcccctcgcctttttgccaccttcctcccccccgtccccccgtcctctccatcttcccgactcccttgcaccgctcccttccttcgtacgctcctcctcctctgcccccttcccccgatcacagtcccctcacgctctaaatacgcatacgcctcctt

SEQ ID NO: 118655 - DNA, 477 bp, Arabidopsis thaliana columbia
  unsure (1)..(477): unsure at all n locations
acgactcatttaggggagcacgtacgcctgcaggtaccggtccgngattcccgggtcgacccacgcgtccgaggacgcgtaaacaagaagatagagataaagacttgacctttataaagtataatctcgagaaccacactaagtaaaatgaagtaaaattataaaataaaacaaatagaatacaaaaaaaactaacaaccaaacacagaccacaccagatttttttctttgggggggggggcaaaacacagaaagaggatacactactaaataaaatatatcaaaaatactaattagaaaagagaagaaaaagatatacaaaacagaagagaagaaaaaaaccacaaaatcgaccagaccataaccataaacacaacaattaaaaattgttatgtaacgatcagaatcgaataccatatataatcaaaacgataaaggtaaaataccgacctctccaatcaaaacttataacatcct

SEQ ID NO: 118656 - DNA, 523 bp, Arabidopsis thaliana columbia
tacgactcacttttaggggagctcgtacgcctgcaggtaccggtccgcgattcccgggtcgacccacgcgtccgcgaatttttgctatttttattattttccgtgtttaatttctgattcagacaggaagattaatattaagcactagttgtgcaaattcacaatttctctttggggctcggcaacacattcgccgcgcccaccccgcacgcgcccatctttttttgggggggggcccccccccaccctccctcccccccaaaaaaatccccctccccctctcttcgcacccgtataccttttttccctcgtctcctcgtgccgcccgccccccctcccgtacccctcgttccccctccctctgttcacccctcctcccccctcgttcccctctctccttccccacgcctcctctccctcgtcccccctcatcccccccccccggttttttctcccctgtacctccctgcttccctacctgcttctcttccccctcctctacccttttccctcatctctccct

SEQ ID NO: 118657 - DNA, 460 bp, Arabidopsis thaliana columbia
  unsure (1)..(460): unsure at all n locations
cgcctgcagntacccgntcccgaaattcccnggtttcgacccacgcgtccgatcactcccaagattcgcattacctttcttataatcgccgagattgttcgagcctgaataatcaaaatggttgtgcttgctgctgccattgaggttttaccttttaatttattaacctatctttttcctcacccacaccccaattttttttttggggggggtgacacccacacaccttctctccatatataaatctccctccccatcacctctctctcttttgcgcccctctactatcaatctccctcctctggttttccacgcatccttccttccctttccacttctctactctactcctcacttttcactccctctacatctgttcccccctctcctacacctcatatttatactgttcaaaactaatccagtaaccttcttactactttctcccttcccttttacc

SEQ ID NO: 118658 - DNA, 521 bp, Arabidopsis thaliana columbia
aatacgactcactttagggaaagctcgtacgcctgcaggtaccggtccggaattcccgggtcgacccacgcgtccgcccacgcgtccgctttttgaagagggatctgcttaggggaatatatgagaagggttttgaaaaaccatctcctattcaggaagaaagcattcccattgctttgactggtagtgatattcttgctagagccaaaaatggtactgggtagactggtgccttctgcattcctacccttgagaaaatcgatccagagaacaatgtcattcaagccgtaattctagttccaacccgagagctcgcccttcagacatcccaggtttgcaaggagctttccaaatatttgaaaattgaggttatggtcaccactggcggtaccagtctgagggatgatatcatgcgattgtatcaacctgtccatttactggttggaactcctggaagaatattagatcttgccaaagagggtgtgtgtgttttgaaagattgtgccatgcttgtaatggat

SEQ ID NO: 118659 - DNA, 372 bp, Arabidopsis thaliana columbia
  unsure (1)..(372): unsure at all n locations
gcacgcctgcaggtaccggtccgagattcccggttcgacccaccgctacaggcttttttaaaaaaaccatacccttnttgactctaaagaatcaactgccaatggcaaaaccagccccaacacatgtcacgtcggctcgtttagcccccaccgcactcgcgtaagagcgcgcgcctggccggacggcgcagagggacgcttcctcatttggggggggggacacgcacccgcaggaagaatgtggcaaaaacatccccccgcacggcaaggtacgcggtgggacgcccgccccccgccccaagttcgatccctcagcgcacacatccagccgcccaggccccggcaccacggcacgagcagcgcacaaccccg

SEQ ID NO: 118660 - DNA, 512 bp, Arabidopsis thaliana columbia
  unsure (1)..(512): unsure at all n locations
ggggagcacgtacgcctgcaggtaccggtccggaattcccgggtcgacccacgcgtccggcctcatcatgcatctacctctagtgcagtatctagttgagaaagagagagatgagatggagctcaccatgggtaaagagaagntnnacttttacattgtgatctcgngaacaaggagatacctcgacggcgcgaacacacaacatccctcccttgggggggggccncaccccccccccccaccaaaaaaaaaaacccccccaccccccgggaagctggggccccccctccttccgcctctctttctcgatttcctgggctcttgctccgcttcctaacgctccccgggcccttcagctcctcgcccaccgcattcatctactccctctactatttttgccagctctcccctacccactctccctcttgtttttgttttctctcttcccttaactaccgaatcctgatagccctcaccgctctattgctggtccgcactcgcgctccaccccc

SEQ ID NO: 118661 - DNA, 527 bp, Arabidopsis thaliana columbia
  unsure (1)..(527): unsure at all n locations
cgactcactanagggaaagacggtacgcctgcaggtaccggtccggaattcccgggtcgacccacgcgtccgatttggaaagtagagaaatgagcaaaagcaagaagaagaagattctctctttgatccactttcctccattggtcgcgcagagagagtggagatattcggattcagtttatgaacgccaacctggagctacaggacgngacgtttttttcttggggggggggcccacccccgcgaaccactccccgagaaacatcccctcctcgccccgccgccgccgcgccaccctcctcacagccgccgacaatcgtccgccccgccccgcccccgttcccgcgaggccccactcgacccccgccaccccgcctgcgactgtaacccggcctccccgccagagtggccggaactgcagtgcctccagccggcagtccacccgcccccccccatccccgccccgaggccgcggcgccaggccggcccccccgcccanctagctggngtccgccccacgccccccc

SEQ ID NO: 118662 - DNA, 532 bp, Arabidopsis thaliana columbia
  unsure (1)..(532): unsure at all n locations
atacgactcactttaggggaagctcgtacgcctgcaggtaccggtccgagattcccgggtcgacccacgcgtccggacatgttctactcatcccacctcatcctagacaatgctggcctgtctgaaccagttttcgccacgccttttagcccgtcctcgtcgcatgaagagattacaagccagttttgcactgcagagaacagtcctcagttatactcattttcttntagaagcaaacgcagcgcttncacccgttgttctatagctcccagcgattgaacaaaaagctgctttctcgttcactgaaacccacttttgttcttccaccactctcacaatcatcgaccaacatcaacttgctctcgcctcttccctcgcttttacttcttctctcctcttcttatttctatttctcctttccacactctctcaccttcttcgcttctcccctctgttccgtcccccgcccctgtctccccccgtccctgccgtgctgagtcatcagcttgtcgcgttgctgatccgctactca

SEQ ID NO: 118663 - DNA, 410 bp, Arabidopsis thaliana columbia
  unsure (1)..(410): unsure at all n locations
gggggagcacgtacgcctgcaggtaccggtccgnattcccggtcgaccccgcgtccgtctgtcgaccctggtgatatggtccactgttgatatgcggtagcacaagcaatctggcattttgaggcatggatatttagccgctcccctttttaaagaccactgcgcccatcccccccccccccccaccaccccggcctttttttttttggggggtggcccccccccccccacctcccacaaacaaaaccccccccccctcttctcgccctcctttttctccctccctctcccccgtcatctccgccctctctccacttccaaaccctcatcccccttacccttctcctcctcctccctcctctcttcttcctcccatcatcttcccctctctctctttctccccctccctc

SEQ ID NO: 118664 - DNA, 515 bp, Arabidopsis thaliana columbia
  unsure (1)..(515): unsure at all n locations
tacgcctgcaggtaccggtccggaattcccggtgcgacccacgcgtccgataatcgggttttatgnncagcatctccgacttncggagttaagtaattaagatctgtgaagacagaaaaatctaatttaagaaaatatatacaggaaataatacgatatgtgataggagccaggaaaaagggaaaaaaaaacattttctcattttgggggggggacacacaaattgtgtgatttgataaaaataaacacttaaataatttggatcgcttagaaaaaaaaggaaaaaggctagatatacgtaagtttatcagataatttagagaaaagaagttagaattgaataacaaaaataatagataagacttgttattctttattatgtataatcctcgtcacaaaggcaactagaaaaatcgaatatgaaataaaagataagacgtattaaactaataaaaggaagtaatatatgatttataagtattgcgtatacaattttatttatatactatgcattg

SEQ ID NO: 118665 - DNA, 460 bp, Arabidopsis thaliana columbia
  unsure (1)..(460): unsure at all n locations
gggaaagacggtacgcctgcaggtaccggtccggaattcccgggtcgacccacgcgtccgcttcaccttgtctcgatccaaaatttcatcttttaccaaaactattacaatatccctcactctacttgtaaagcttcaatcttcttcacttctcaacaaacagataaacaaaaagcttcaatctttgatactttctcgatggatcntatccggagtcttcccgacgacgnngntcgcgagagaaaactccctcctcctggggaagggggctgccccatttttggtggcagagcctgaccctnaaagagattatttttcaaagtggctgtagggtggggcggcctccgtccgttcccgacaggtgcgggacggcgcgacccttatcccgtgcgtaatccggggtcgatcggtatgccttggattatggcttctcgggccgcggggcggcgggtggtcgccg

SEQ ID NO: 118666 - DNA, 568 bp, Arabidopsis thaliana columbia
  unsure (1)..(568): unsure at all n locations
agggggaactcgtacgcctgcaggtaccggtccggaattcccgggtcgacccacgcgtccgaccacgcgtncggnactgnaatttccggcatgggaagcttgtttngagggaactaaggagaaccctagagagggacgagggaagggatttttgaggggcgaaagcgacaaaaaaggaggcaaaacgcgaggagaacagcacgggaaataccttgcgggggggggtgggccccacccaccacccccaacacaaaccaaaaaacacccccccacccanagggggggagagggggccccacactttgtaaacccggcaggacagggaaggaaagagcccaccaggcacaccgcaccggacagcgcatcaaagagggtagacaacaaactccacgccctcacggacccgcccatccgaccaggccctcaaaacgaaggcgaatcgagcaacgtgggaaagacacgcaccaacaagacacaacccgcacaccgacagcacggagagccccccaccatagaaagagaagccacataaaccggccaacgccaaaaagtaagagcatagaggaga

SEQ ID NO: 118667 - DNA, 548 bp, Arabidopsis thaliana columbia
  unsure (1)..(548): unsure at all n locations
agggggngatcgtacgcctgcaggtaccggtccggaattcccgggtcgacccacagggaaggccgaattagnnanaagnannnnnaaaaaagggcacagcactaaaagagacgagcaaagcgacgcccaaaccaaagacccaacagaaaattttcgaacacccgcagagcgcaaacgtccgacaggcacggacccagagacaacgacaggaacaaaattaacctccngggggagttggggccacacgccacacgcacaggacgcggaacggaaaacaaacacacccaccacacccgggggcgggggccgggccgcccacacaaaagggaagaccacgacgacacaagaaagcgacagccgaagggccacagcgcgcnccccgcggcgccagccgacacaccagagacaggagcccacgcagcagcaagacaagagacggcaacggggcaacgcgacgcaggaagcaccacaagaccaagcagccaccaggacggcaccgatgaaaagcgacataccacaacaacaccacacacagaacagagaccgac

SEQ ID NO: 118668 - DNA, 528 bp, Arabidopsis thaliana columbia
  unsure (1)..(528): unsure at all n locations
tacgactcacttttaggggagctcgtacgcctgcaggtaccggtcccggattccncggtcgacccacgcgtccgttcatctcctttcgcgagcgtcagttctgggagtcgcagtcctccacgtcgtggaaaaagtcctcgctggacctgctaggcgaggtcgctctcctcctcctccaccatctaaaggagcattttcaccctccaagacagcccgccatttttttggggggggggcccccccccctcctaccaaccaagaaaattccccccccccttcttctttctttcgcccccctatttttcccccctctctgtattcaccttctccccccccctcccttctctcccccctattttccctgtccccgacctctactttaccccttctccccccccccctctcgccccgcccgccccccctcttccctcctacttctcgccccccccctccccgccccccatgtcgccccttcccccctccccgcaccactcctctcccttccgcttctcctcctctttctcttct

SEQ ID NO: 118669 - DNA, 510 bp, Arabidopsis thaliana columbia
  unsure (1)..(510): unsure at all n locations
ggggagcacgtacgcctgcaggtaccggtccgcgattcccgggtctgacccacgcgtccgacttcccctaatttcgcttcgaattcaaaagccctaattcgaaaattcccatttctcaaggtttttaaaagagtattgcaaagatgtcttctgattcgtcccgggaagagaatgtgtacttggccaagttagcccagcaagcttttttttaggggggggggcnccccccccccggcaaaccacaaaaaacccccccccccnccggcccctccgggcccccctctcctccttctcccttctctcccccccccccggccctccgcccccctctccctttctccccgctccctctctccgtctcccctcccccccccccgccttgcccctccctgcgccgccctccccgccctgtcctcgctgcatcgcccactgccttcgctcttcgccgccccctcccctccccccctcgcccactccgcgctctacctgcctattcccgcccccccggcg

SEQ ID NO: 118670 - DNA, 484 bp, Arabidopsis thaliana columbia
  unsure (1)..(484): unsure at all n locations
tatacgactcattanaggggaagctcgtacgcctgcaggtaccggtccgngattcccgggtcgacccacgcgtccggagaaatcttttgaactcgaggttaaagctgcagataatcgcatcattcagcaaacactcaatgaaaagacatgtgaatgtgaagtgttgcaagaagaagntgnaaatntaaagcagnanntntntgaggacctggaantattttttttggggggggggananaactcaaacaagagaagtaaaaactgtcctcccctacttttcggggctgataactagctctacccgatttctggccgctccgaacggactccatcagtcgggatcttcggcacttgcttgttttccgcggccgagactgctcgaccttctattccccggtagcgcccccctatgccgtcgcgtcaggcgtcgtaagtacttcagctgcgtgagcgggggttgtcccacccgagcgatcacccctt

SEQ ID NO: 118671 - DNA, 455 bp, Arabidopsis thaliana columbia
  unsure (1)..(455): unsure at all n locations
tacgactcacttttagggaagctcgtacgcctgcaggtaccggtcccggattcccgggtcgacccacgcgtccgctttactcagagaaccaaaagaaaaataaagagaaaagaacccaaaaaaaaaaagccattgtaaattcagaataaatggaagaacatctaaatccattagcagtgactcatcttcttcaacaacactaagaagcttatgcatttatggaggggggaacgcccccacccccgcccccaaaaaaaaaacccccccacnccaccgagcgcgcacctcccccgcccccccgccgcacggagcccgcggccccccccccggccccggcccccgccgcgccaaccgccccgccgccaagccaccttcgctgctccctccctccccctctcgtcgtcgcccctcgccccgccctacagggactccccccctggccccccctgccccgc

SEQ ID NO: 118672 - DNA, 412 bp, Arabidopsis thaliana columbia
acgactcactttaggggaagcacgtacgcctgcaggtaccggtccggaattcccgggttgacccacgcgtccgctcaaccgtaagataccatggcctcatgttccagaagaaatgagtgctgaagcccatgatataatagaccgatttttaacagaagatccacatcagagacttggagctagaggggcagctcaggccaagcagcacatccacttttatgatttggggggtggcacaccacgaagggacaagtgccaaaaaatccccccccacagaggggctggcggagcaccccatcttctcgcgacgacgagaggatgccgaaacctctgagataatcactgtgttctcatctcgtgttcgcccgcggcgtcgcccgtccactcttctgtcttctaggtcggtatcgcc

SEQ ID NO: 118673 - DNA, 580 bp, Arabidopsis thaliana columbia
  unsure (1)..(580): unsure at all n locations
gggggaggcacgtacgcctgcaggtaccggtccggaattcccagggtcgacccacgcgggcgagcncctgaacaagactcaaagcacaaggancgcgaagcgagcagaggaccagcaccccgcgcaccccgcgcgccgccgaggaccaccaggaccagcgggaagaggccgcccacgcagcggtcacggagacccgagaggcggcgcgcgcgccccgattcctccttcgagggggggcagccgccngcacgcgcacggggagcgaggcacgcgaacgaaacgcaaccgccggaggggggggaacagcgcaggcaggacggagacgaggggagggacgaggggccgcgagccgcggacgcgcccgcggcgaaaggacaacccgcggagcaacccgccccccccggccgccccgccgcccgacgcccgcgaagcgccccgccacgccgcccctgcgcggcgcgccgcgacggcccgcgcccccgcgccgcaagaacgggcgccgcgggcgccgcggcccagcacgcgggagaggagggagaggggaggggaggggcgcgcggccgcaacgcgcaggcgggcg

SEQ ID NO: 118674 - DNA, 539 bp, Arabidopsis thaliana columbia
  unsure (1)..(539): unsure at all n locations
tacgactcactanagggaaagatcgtacgcctgcaggtaccggtccgggattcccgggtcgacccacgcgtccgctccatcctatttttcttcttcgccaaagtgttattcctcaactttatatattacacaaatgtctttagccgtggataatgtgttgttggtgcgcctcagcgcgtcactttcttcgtgtggagcctcgggggtcgtaggggcttttctcttcggggggggggcgacccacccctcccttcctatttaaaaatctcccccttggttgctgaccccgcttccgcttttttcactcttgttattttattccccgtctcctcctctctcttcctcacttctctgctttagtactcggcatccgctccatgggcccgggtcgcacccggggtatccgtttcgcgcacgccggtgcgcacggtctgccctggaccgtcccccctgcctcactgcgatgtgtcttagtcctcccgccgtgatccctagtcctctctcggacgtagcgctcgtacacatgatatgcctgtttg

SEQ ID NO: 118675 - DNA, 590 bp, Arabidopsis thaliana columbia
  unsure (1)..(590): unsure at all n locations
tacgactcacttttagggaagcacgtacgcctgcaggtaccggtccgggattcccgggtcgacccacgcgtccgcggacgcgtnnnnanangcgtncgatatagatttttattgtagaaaatgccagtttcttcataccacagtcagcatgccggcataaatttttttcttgattcagcacccaatgcattatgctatttcccatcacgcaaccctagccaaccagacaatttctcctttgggggggggtgggcgcgccacacccaccccctccatggaggttacaaaatatcacctccccacccttggttttatcttagtaggccgttgtttttgtcaaaaggctcccctcaccagatcgatccgccactctcttatttctaaattttgtgagacacaaccatcattatagtctactgcgcgcttaatccttacatcacatcctctccgccgatccaccgtattcctacatctccaactcatcctctttttacccttctccctcaactacccgccccccgcccccctactcattcttactacccatcccttttgcttaccttgtccgcgcacgacttatcctgtcgcgc

SEQ ID NO: 118676 - DNA, 499 bp, Arabidopsis thaliana columbia
atctacgactcacttagggaaagacgtacgcctgcaggtaccggtccggaattcccggttcgacccacgcgtgcgagggttcagtacaaaattcggaatcgcaggtttaagacttttacagagtagagcgaacatgcccttaaaacccgtcattcatcctactttaccgccacaccgcacatcctttaaacactacaaaacccagaagcacacacaacttttctcttagggggggggacccacaccaccccaataccgtgatatatataacccccctccactaaatactatccgtaagaccaccatacatttctcgtcataactccacaattcaactactcctaactattcccacgtatccccacaacattaacgtccccccctcaccgtgcgccatctacccccgataatcggttatgctcctcattctccacgcaaacccatataacagtcttctctcatcctacatacactacctcactcccgcttcacgcccccc

SEQ ID NO: 118677 - DNA, 324 bp, Arabidopsis thaliana columbia
  unsure (1)..(324): unsure at all n locations
gactcacttttaggggagcacgtacgcctgcaggtaccggtccggaattcccggggtcgacccacgcgtnnaaatccctnnnaaaaatatattttttaaataatcactatcttccttttgctatacgtcatttcaacgacccctccccatgtatcttctatttccatgaggatttcggtcacccggcgtgagagagctgtgtatggtggtcgtgtgctgacgctcgcacgcacggcgcgtttccctcctttgggggggggtggacaccaaccacccgagcttatgcagattttcttaaaaaatccctctctgcacctgtttgtt

SEQ ID NO: 118678 - DNA, 529 bp, Arabidopsis thaliana columbia
atgatactccggcactaatccgactcacttagggaaagacggtacgcctgcaggtaccggtccggaattcccggttcgacccacgcgtccgaccggattaaacactaagaaagggtttgatgtaaagatcgctgctgcagtagctgaagaaacaaacttgccattcgtcaccgcagaaaacaagtttgaagctctggctgcacacgatgcttgtgttgaaacaagtggatctcttatcacaatgggcgcatcattgatgaagattgccaatgatatacgttttcttggaagtggtccaagatgtggtcttggtgaactttctctgcctgagaatgaaccaggaagcagtattatgcctggaaaggtaaatcctacacagtgtgaggccttgactatggtttgtgctcaagttatgggaaaccatgtagccgtgacaattggtgggtcgaatggccattttgaattgaatgtattcaagcccggttatcgcaagcgctctcttacattccattagactaatagcagatgc

SEQ ID NO: 118679 - DNA, 545 bp, Arabidopsis thaliana columbia
  unsure (1)..(545): unsure at all n locations
acccacgactcacttagggaaagcacgtacgcctgcaggtaccggtccgcgattcccgggttgacccacgggtacgagccaataataaaataacatcccacaaacatgcaggtccgttagacaggcagccccagagaaccccaaaggctcccgacctcccctgatcatacagaaagccacaactacgcgatgcaacagccgcggcgagagaacctagcacgcagacgtttcctctttcggggggggcacacncaaccctgggccgaacaaaatagaaaaaaacggccccgcagaacgggatgatcagaagccctccacggagcgtgtcaccacaaggctaagaggctaccaacacccgaccccccgcacagcacgttgggcactagcgatgatctcgactgcttccgcacatgaaagacagatacagcccgactagacaaaacaaaccacacggcacccctcgacgccctcctacgcaagcacttatccccacggataccgctccctagcagactacgtgcctaatgccagcccgctcacggtcc

SEQ ID NO: 118680 - DNA, 471 bp, Arabidopsis thaliana columbia
cccccacgtggctttctgtgtcctagctgccctccacttgtcctccgggtcgggtcggctacgggcgcgggtatgttggcttctcgaggcactgtcggtcaccgccgccgcgcgaccttttttttttggggtggggcgcgccacctccgccagtccgctctcatgtaaatgtggtccgcggctgccgttcgcgcatgcgcgtgcagcagcgtgtgggtctggagatcgcggcgtgatgggccgcgcctcttgctagagtactgctgcggtgtgcatgagactgctctgccgaagccgctcaacgagttgcacttagctcgcgcgtgtgtcgttgcatgccgcccgcccacgtccgccgcccgcatgaattgttctgccgggtctacgtgtagctctaggggtggcccgtcaccgctcgtggccgggcctgccgccgccgcgctcgcgccccccccgtgattactgccggcc

SEQ ID NO: 118681 - DNA, 470 bp, Arabidopsis thaliana columbia
  unsure (1)..(470): unsure at all n locations
tacgcctgcaggtaccggtccggaattcccggttcgacccacgcgtccgctctcagcgtgatgtgcgctctcgtcctcgtgatactctctctgacgaaccgggtgtntttgtcaacgatcccgcacccacgcagcctacccaagcaccacctncgatgggtcataaactccttcttgaagacattaatgatcttttttgtggagtgggggcacacacccacccccctctccaaaaaaaaaaacccccccctcccttccaccccccccttccccaacaccctcccacccacctaaccccctaaccatccaccaaccctcacacacccccccactctctttactcccccacttacccttcacccccctcacctcccatcactccccccccaccccaccccccaacaccccctctttcccccaccctcctcaaccaccccatatcccccccccttccacatccctcccccccc

SEQ ID NO: 118682 - DNA, 517 bp, Arabidopsis thaliana columbia
  unsure (1)..(517): unsure at all n locations
ggccccccaaaaaaaaataccccccgggtggggggaaaaaaaaaaaaacaaaggggcgccttttatttaataaaaaaaanannnnnnaaaaaaaaaaataaaggcggggcgggtttttctttttttcttcttctcancnnacagcaaaaaaaaaaaaaaaaaaaaattttctatttggggggggggggaaaaanaaaacccaggggcgacacncaacaaaaaaaaaaacttcccccnctgnggggaggaaaaagaaaaagaccccccaacaaaagtggggcgtcttcatcccctcctcccctccgcactaacgggacgaggagtgtagtacagcccctcccgcaccatcccaacccgcctcagttcgataataaggcaaagctggccaagtagagaaggaacacgagaaagaagcaaggacacaggaaaacagcctgtaaaaggaaaataaaggaccgacacaaaggaacacgcggaaccgcacacacccagaagaaacgccagataaagaaacact

SEQ ID NO: 118683 - DNA, 512 bp, Arabidopsis thaliana columbia
  unsure (1)..(512): unsure at all n locations
ttttttaagggggaaagagatttttacccccctcccacaaagggaaaaaggccgnncccccccaaattattataacaccccggggggttttttgaataaacacaaaaacaacttcgtttctcccttttaagtacnaaaacacctttttctactcttttttttttttttttttttttctcttcctaatataacaaacaaaaaaaaattttttttttttgattgtttgggacccccccacgccggacgttttttaaataaaatccttccctttcatattaattttccccaccataatctttttttgtagttgtattttctaattacatgtttacctcattacttgttattcttctactcgcctctccctatgtttgtatcaagtcacatttactatttttttatcttctccacacactttttctatattttctcttcattcgctatatttcttcttctatttgtatattattttcatttttttcttgtgttctttctttatttttttttatctc

SEQ ID NO: 118684 - DNA, 545 bp, Arabidopsis thaliana columbia
  unsure (1)..(545): unsure at all n locations
agggggaactcgtacgcctgcagggaccggtccggaattcccgggtcgacccacgcgtccgagcacgcgttacggaggtccagnnnattatgatccctatgagtgttnncccaaaccaaacacccctcaaaaaaaaagcttccgttaggcgtaagaggaggcgaacggattatatgagagcttgggaggaagcacgggagcggagctgcctccttgggggggtggggacccaaacccctacaccctttgaaaaaaaaagctccccctatacacgtgcgttctgacgacccacccggatgacgccaaggagaagggaaagtcaaagagaccatcttggttgtgagacgggggatctccggtctagataaccgcgccgcaagggcagaggcacaggaagccgcggggagcgcccgagaaagcaggcagaaggaggccagcgaaggaagtggaagagcagggccccgtcctaggcgaggatcggggagcgcccccccactccgacggaagattgatatagacttgccagggcggttgtgtctgcagcg

SEQ ID NO: 118685 - DNA, 535 bp, Arabidopsis thaliana columbia
  unsure (1)..(535): unsure at all n locations
ctcatttagggaaagacggtacgcctgcaggtaccggtccggaattcccgggtcgacccacgcgtccgtgcaaactcttctgtttattattattattataggtagctttttaatataaaacggatattagaattttgtaacaaagaaatcggcgggagtcgtgtgctttagcccaaaaacattggcctcgttgtccaacgngtgtatttggtgtgttacaggggtgggagggccacatatacatctttctaattacactttaccaatattaaacacatttaaggggcctcaatcctcggcgtaacattttgccattaaggccccatgttgcttgctttaaatgtcggcgcagtcccttcgcccttatctatagcgtgtcctccccgcccccccgggccgcgtgctccccttcgcctccgcccctccctcccgaaaccccgagcgaccgatgcgtcgctcgcttctctgcgcgtcgcccgcgcgccccgctccgtgtttccggccccttgccccttctcttcgcctccccctttcc

SEQ ID NO: 118686 - DNA, 469 bp, Arabidopsis thaliana columbia
  unsure (1)..(469): unsure at all n locations
cgatnatttagggaagacggncgcctgaggtacaggacggattaattttagaccaggggaaggcagaaataagagagaaggggagggagaatggtaggtatgaggcggaggaagagggggttgggtatttagtgtgaggtgttggaaggtggggttgggttttttgtatgttgaggagagagagggggagaggtttttttgacgggggagcaggaggacgagggtcttatggggtagaccgggcagaatgagggggaggagggaggagggaagggtggatggagggggaggaagggagggagaatgggggggggagggttgtttaggtgaatgtgtgtatgtggtattagaggagggtgtgagggatgaggtgggttgggggagaaagtctgatgaggggagtgtgagatggatggggaattgttaggggtgctggggggtttggggtggggggggggggagttggggt

SEQ ID NO: 118687 - DNA, 523 bp, Arabidopsis thaliana columbia
  unsure (1)..(523): unsure at all n locations
nnnnnnnnnnnnnnnnnnnnnnnnnnnnnnnnnnnnnnnnnnnnnnnnnnnnnnnnnnnnnnnnnnnnnnnnnnctttttttttgtttttttactcagaaatattatggattttatttaggacctttgatatgtagagagacgactttatacatcacaccaagagactaataagaagtttgatagcttcagcactaagttccatacccataagaagaatcaaccagaaaagaaaaagggggcaggagaaatgaaagtgaggaagtaataaagacatatcaagtgatttgttcttaaacaaattaagatcattagtgtcctggtcggaactcgaaggaaggacctccacgtgtgatctctcctttagaatgatgatctccattttccggtagcttgaacctcactgcatgtttgatattcggaggaggtggtcctcctacgcctccgccttcgcgggctctttcacctgtattgttatcaaacccgaattctatgtcctctcctccggctcttccagaaggttt

SEQ ID NO: 118688 - DNA, 488 bp, Arabidopsis thaliana columbia
cgtaggaaagggtgcagcaagaagtttttacacggggggtggggggggttaaaaaaaaaattcgttggttggatgagagtggggaaggggtggcgacagacagtacgcaagtggttgagggcgaggggctaagagaggatgttggaagagtgtgtgaagtgggatagttggggcggagttgttgcgcacaacaatttataagtatgtgagattttttgtcgggatgttggtaaaataagtaataagcgggtgtgttgagtaaaaaactatcttcctggattgttacctcgcccgctccgacgttcgcgtacgtttgtttgaagtatgagtgtagtagtatatgcggtgtacatggtttgagctgttagtaacgtttcttgtttgtgtgcattggcgaaggtgcattagttttgtgtttgagtgttgcggtggatttgggtttgtttataactgtactaatttaaggttggatatgggatatcgggacc

SEQ ID NO: 118689 - DNA, 306 bp, Arabidopsis thaliana columbia
gacgtcgaacgcacgcgtacgtaagcttggatcctctagagcggctcgccctttttttttttttttttttaaacacacaagcgggttttatctaattcatttatacacaaggcttgatccgttaaacagagcaagaaaacacatcgacaggggacacacctcgatcattccaacaaaaaacacggcattcttattccaaggggggtcggcaattggcttattccatgagtgggaggaggccctttttttggcccctttttttctagaaaacaaagagctggggaaaacagggagaaaacggaaccc

SEQ ID NO: 118690 - DNA, 511 bp, Arabidopsis thaliana columbia
ctatagaagagttatgacgtcgcctgcacgcgtacgtaagcttggatcctctagagcggccgcccttttttttttttttttttttttttttttttttttttttttttttttttttttttttttttttttttttttttttttttttttttttttcaaccaaaaattttggaaacggaattaaaacccagggtttttgaaaaaaaaaactttgatccataaaaaattctggggggggggaaactttttctaacttttttcccaaaaaggggcctgttaaaaaaaacgaaaccaggggaaaaatcaaccttgttcaaaaattagcgggaactttgggcaaatttttcccttacagaaaaccctcaatcacaggggggattaacccttaaaattggggctgggattatgggggggggaaacacgggtatcattatcccccaaaatgtcaagttaaacagctcggccctgtttaacataaggggggttggggagtccctgaaaagggttcatatgt

SEQ ID NO: 118691 - DNA, 520 bp, Arabidopsis thaliana columbia
  unsure (1)..(520): unsure at all n locations
cgattgtannnnnnnnnnnnnnnnnnnnnnnnnnnnnnnnnnnnnnnnnnnnnnnnnnnnnnnnnnnnnnnnnnnnnnnnnnctttttttttttttttagaggaaagattcatgtctaatgattgactttcttggttgagttacactgtgtccattaattgacacgattattcagttgcaaaaatggcgaaaaccacagaaagactattaactcaatacacttcaacatgccactgcttgttcttcctgagctgagtaagtttctgctcccagctttcgcctcgctcttcagcgactctcttaagcgtatcttgaatcccgggcatcattcctttaagtccgcaaaagtaaatatgagctccattgtccagaagtttgaagatttcatcgctgtattcttcaatcttgtcctgcacatacattttccctcctttcttgtttttctcttctctgctcagcgctttgtcgtacctgaaattttctggatagtccttgcggtacccggcaaattcttcatcat

SEQ ID NO: 118692 - DNA, 504 bp, Arabidopsis thaliana columbia
  unsure (1)..(504): unsure at all n locations
nnnnnnnnnnnnnnnnnnnnnnnnnnnnnnnnnnnnnnnnnnnnnnnnnnnnnnnnnnnnnnnncttttttttttttttttttttttttttttttttttttttttttttttttttttaatattttttttgagttttttttattttcggaaaacttttatggggtttaataaaattgacctaagcatctcatacgaagaatttttttccccttttaaacatatttaaaggggggggccccaagggtaacaagggtaccaatatattggcctggaaaaaaccttgtaaaccccaaacaaggggggaggggggggtcattttttcaaaaaaggggacataaatttttgaaaataaaaaaacctcattggggaaatggggggaaaagttggaaatcatggggaagaccaccctcccatagggcggggaaaccggggaccatcccagttttgcacgcaaaatgctccccccaacccttgagggggtgccccttcccccccattttcccg

SEQ ID NO: 118693 - DNA, 351 bp, Arabidopsis thaliana columbia
aaaaaagaaagatgattggtaggtaagacagaaagtgaagggaggaaaaagttggaaaggtagagttcaggagtatagggcagggtcggcgaaagagaataaggataggagaagttttttggggggggggtagagacaggggaaaagcgagcatgaaaatgatcataaaagcaagagggttagagtgatttgatgtgggagtcggatgtaaaggatgaatgggtgtaaaatatgagtggtaagggtgggagaggaagcgatgagggtagattggtgggtagttaatgatatgaaagataagtaaataggaatatgaggaatatagccctaagttgagtgtagagaaagaaa

SEQ ID NO: 118694 - DNA, 473 bp, Arabidopsis thaliana columbia
  unsure (1)..(473): unsure at all n locations
gatncttagagnttttgcctgggtgggccttttaaaaaaaaacctctcttcgcgcgaaaattagcgttgtgtggggtccggaaacgatgcagttcttcggggtggtgaggggggggttcttgggtataccgggggagagttgtagaagaacgtttttttttggggggggcgggggacgtaggggtcggtgcgagagaattaaaaaccctcgtgcggagggttggggggtgggggggggaagaggggggaggcgcggcctgagagcagggggggtgtggcggcggggcggggggccgcggggaggggggggtttcacccagtggtggggagtctttctggttgggagggttgggagacgaggtcggtggggtgtgcgggcagggtggggggtgcgggttagtggggcggagagggtgggggagacagcgtgtgcgggtgggtgggcgggtgtggcggggatggggccagggggg

SEQ ID NO: 118695 - DNA, 292 bp, Arabidopsis thaliana columbia
gcacgcgtacgtaagcttggatcctctagagcgtccgccctttgggttgggctttttttatttatttttttttctttccaaagggagggtttttttttcaaaccaaagggaacaacactttttgtttatctgtgtgagaccccgcgaacaacaataaacgaatgactttgcacgttttgagggtccccgggctcttttttttgggggagtggtgtcccaaggcatcacctgccatgccaattaattatagcgggcttttttaaaaaggtgcttccagcatttttttgaaggg

SEQ ID NO: 118696 - DNA, 536 bp, Arabidopsis thaliana columbia
  unsure (1)..(536): unsure at all n locations
nnnnnnnnnnnnnnnnnnnnnnnnnnnnnnnnnnnnnnnnnnnnnnnnnnnnnnnnnnnnnnnnnnnnnnnnnncttttttttttttttttttttttttttttttttttttttttttttttttttttttttttttttttttttttttttttttttccgggggtaacccaaatcaacccctttgaaaaaaacgttttcctggtttaaaaacaaaccggggccattccttttaaaaaaaaccaggggggttttaaaacagggttgggaaatttttaaaacccccttttttttcggacaaacccctgaagggctttaactgacccccccccttataaaaaaaaattttgctccaaaggggtttaaaaaaggcttgattcccccaagtcctttttttccttgagctcctttgaagaaaaaaccatttttttccttgaaacttaaaaaaggggagggcctgggacaatactccagtctcctttgcaacaagttacggggaaggagtaaataatccctgagggaccgctgtaaaacccatcg

SEQ ID NO: 118697 - DNA, 532 bp, Arabidopsis thaliana columbia
  unsure (1)..(532): unsure at all n locations
nnnnnnnnnnnnnnnnnnnnnnnnnnnnnnnnnnnnnnnnnnnnnnnnnnnnnnnnnnnnnnnnnnnnnnnnctttttttttttttttttttttttttttttttttttttttttttttttttttttttttttttttttttttttttttttttttttttttttggggaaaaaaacttcataattcaggggcaaaacaagagttttttttccccccttcttttgaaaaaaaaaaacatgaggggcccctttttttttcatgggccttggggggggaaacttcacaaagctcactaaaaaaaagggcttggtttgggcaaaggtaaaccctttttcaaaagctttttcgtggatcccccccctcgggccttaaatcgaaaatcctaaaaaaggtttttcgtttttttaatttggtttttcgggcttttcccatgattttccccaaactttttttaaaattctaaaaagcttcctttttccttcccaaagcttttttaacattaacaagcccaagctggccagggggaaaaacagg

SEQ ID NO: 118698 - DNA, 533 bp, Arabidopsis thaliana columbia
  unsure (1)..(533): unsure at all n locations
cnnnnnnnnnnnnnnnnnnnnnnnnnnnnnnnnnnnnnnnnnnnnnnnnnnnnnnnnnnnnnnnnnctttttttttttttttttttttgacggtgaaagcttaactaaactgatggatcaataatacaaacacagcttaatctctgttccaacaaatccatccattattcaagagatagagatagataagatagataacgagtcccacaactatgaaccatctctataaaactcgagcttatcattccatccgaaaaaagatacaagtgcagttgtagatgcaagcccattaatattccaacagtctcaccgaagctggctttaatcctttcgcagctggtagcttcctttctacatacacaactttgcatggccaaacctccttttttagcagcctcggtcatgtgaaattattcagtagtatgatcctggaccaccaccagagtaactactaccacccaagccacggctggagtaaattgaagaatacgagctacctcctccatctcttctgggtaagtcgccaccatagc

SEQ ID NO: 118699 - DNA, 530 bp, Arabidopsis thaliana columbia
actatagaagagttatgacgtcgcacgcacgcgtacgtaagcttggatcctctagagcggccgccctttttttttttttttgtaaaaaaaaaagagaacatcttttatgtattttgtctatgtccaagctaaaactagacttagacaaacatctccaaactctaaaattccaaaactttccaacattcttgtataagcaaaggttgatgtcagttagccagagagctccaattcagatttgatcgttggatcaaaactatgattcatcgacttcacacaggtggcatggcaaaggttccaactactgacctgtgaatagtctctgagtccagagttgttagcatatgtggaatcgacataccacccgagatgacgatttctatgccttcccggactgagagattaggtcttatgatgtcctttgagctaatgaggaaaatgtctccaaggtaaagatggttggtgggaacatagacacaacatagttcttctccaccagcacggcctcgaagaatcacagtcgatgtaat

SEQ ID NO: 118700 - DNA, 514 bp, Arabidopsis thaliana columbia
gcgggggtggggaaaaaccttttgttttcgttgtggaagaggggcacagggttcgggtgagttggtatgaggatcgtagagaggggtgtagtcatgagatggcggagacaggagtttagaggggtggggataggtgtgtagtagtgtgtaaaatctgtcttggggggattagtagataatgtgggggttttttttagggggtgggaatataaggttttattggttttgcattgtaatgtggggctcggagtatgtgctaggtttatatggaatttttatggttagtgggtgtaggagggagaaatgaggtttatatggttattgttaaattattatgtttgttgtggttgtttgtttgttttttgggttgtggtggaatgtgtaatgtttagagtcttgtggtatagttcgttgtatttagtgacttaattgtggatttcctatgtatagatgtgtatgttatagtttgggttagtggtggtggttatgggttttgttattgtgggtggggttt

SEQ ID NO: 118701 - DNA, 416 bp, Arabidopsis thaliana columbia
caccccgtaaaaaaacaacagtcaaggttcacccgggaggggctcgccctaacaaaaccagagaagccccaccgagaagcacgcaagctacaacgcaccacccacgcccacccacgccaaccagacagtgatccgcatgaatggcagggcggcaccagccaccgttacacgggggcgcaaagcaaaccacaccccgcccacagcactcgcgtaccccgcccccgggagagtaggagcagcacgatcaactagcgcggagcgcgggtcggaggaacagtctgcatgcagagaagacgaccacgcaaaaatacccccaacacgaacgacgacccggcgaaccgcggaacaagaacggccaacccacgtccagcgaagccacgaaaaccgccaccaaaccaccccaacaacccaagacg

SEQ ID NO: 118702 - DNA, 535 bp, Arabidopsis thaliana columbia
  unsure (1)..(535): unsure at all n locations
taggagcnnnnnnnnnnnnnnnnnnnnnnnnnnnnnnnnnnnnnnnnnnnnnnnnnnnnnnnnnnnnnnnnnnnctttttttttttttttactatatagaatttactggaaccaaaaatctccagtggtcatcgaaagagaaaagattacaaaaccaaaagaaatacaaagaaaaacatatcacgatctcctcttttctttgttttcttctacctctcgaaaccatttactctccgtttttctttgtttgtttgtttgtttgaaaagaaacagataacaatggagaaaagcgggcgaaatctccgccgcttcatctctccatttcgcttaaattcgactagtccgatcagtcccacggcgacaagctttagcggtgaattaaaaaaaaaaaaaaaaacgcattcttcaggattcgcttcttttatattatatacaaatacatattctagaagtcgatgattggttctccgattgtgagattgcgctccaccgtccatggtaagtcgaagagcttcgccgtcacaaacttaaagat

SEQ ID NO: 118703 - DNA, 533 bp, Arabidopsis thaliana columbia
  unsure (1)..(533): unsure at all n locations
nnnnnnnnnnnnnnnnnnnnnnnnnnnnnnnnnnnnnnnnnnnnnnnnnnnnnnnnnnnnnnnnnnnnnnnnnnctttttttttttttttatcatcagcaaattacattcttctctttgcaaacattctctttggtacaaaaatatgagaaagtgaggcagcaagacaaaactttggtcatatataagtgtttgttctatgatgagtggctagaatgaggaacatttagcttcatctgaatctcattatctggattctctcttagctccttgagtcctttcaccacgttttgagctagatcttgataagcttttgacactatagaacccggtgaagaaacaactacaggaacaccttcatcagaaccttctcttatcgacatttccagtggaatctcaccgataagtttcaaacccttctttgcagcagtgcggcgtgctccttctttcccaaatatgaaagaaggttcattacagtgaggacaaacgaagcaactcatgttctctacaagtcccaaaatctagtatataaat

SEQ ID NO: 118704 - DNA, 513 bp, Arabidopsis thaliana columbia
ctctcgaagactatgacgtcgaacgcacgcgtacgtaagcttggatcctctagagcggccgcccttttttttttttttttttttttttttttttttttttttttttttttttttttttttttttttttttttttttttcgggacgaaaaaaaccctttgggaggatccctaaatcccatttgtttgttttacaagaggaggagagggcccaaacttttttttttccccaggggaaccctttattttaattctcagtgctttattgtgagggtttctttcttttttttggggaaccttttgtggaaaagaatccagttggggttctaaaccaaaatcatttttttttggggggacccccctcgccatatttaccttttttttttaaaaccttttctttttccccggggtaaaaactttcgcccctttccataagcgtattgtgtcccaccccctttttgcctaaaagaagtttctttggggggggattgattttcctttttttttttgggaaaa

SEQ ID NO: 118705 - DNA, 534 bp, Arabidopsis thaliana columbia
  unsure (1)..(534): unsure at all n locations
gattgtannnnnnnnnnnnnnnnnnnnnnnnnnnnnnnnnnnnnnnnnnnnnnnnnnnnnnnnnnnnnnnnnnnnnnnnnctttttttttttttttttttttttttttttttttttttttttttttttttttttttttttttttttttaaaaaaaaaaaaggccttttgaattaaaaaagatttcccatccgttccctgttttgaacccttttttatgaagttccaattggcacaaaaacttggggcgattttgaaagcttgtaacccttttatggaccccccctcctgcaaaaaaaaaaattgaaaaccaaagtcccaatgtgatacaaaatcatgatttcgaggccttcattttttgtcaagcaagatgattaccttgggtaagctttggagcccaaaacaaaattttggctacaacaaaacaacccttcatatttccgtttttagatgcaatcatcaggctcctaaagaaggagggggattgaaacccaattctaaaaaaaaaaaaacgattccagaatttgcctcaaagg

SEQ ID NO: 118706 - DNA, 548 bp, Arabidopsis thaliana columbia
  unsure (1)..(548): unsure at all n locations
ggattctaattaggtagcannnnnnnnnnnnnnnnnnnnnnnnnnnnnnnnnnnnnnnnnnnnnnnnnnnnnnnnnnnnnnnnncttttttttttttttttttttttttttttttttttttttttttttttttgaagaaagaaagctctttttttatattccaaaccgtaccttcagacacaaacacccaaactctgattttgaccccgaaggagagacaccactcgtcccatactttgggggtttctttggggagcttaacttccaccctagaggaagaaaaaaggtttgcgatttcacagatttttataagatacaaattcatcctcttaataaaaaatcaggctttgactttaaggtgaaaactcaccctttgatgatggtggctaattgaacagcgggagattctccgttattttgatagccggagctacttcccggaaacattcccctgtcattatgtggagccagcatctttttctttcccatttggctagccagaacctggttctcttctgttagcaataaccccttttctttaagggaca

SEQ ID NO: 118707 - DNA, 298 bp, Arabidopsis thaliana columbia
aaaagaaaaccacccgctatagaaggacgtgtgatctcaaaaaatttcgcccttgggggggggggcgcaaatcaaaaagcgggactagtgctagctaagcgacgaatagcttattgtgcgtctcttcgtgccgtattatgatctacggaaaacgcaaagagacgtacggtggagataagcacgctataagtgaggggtggggagaggtggagggagattttttttcaggggggggggtcggtcctcccatagggtgcgcgcttctatatgaaagatctgataagcagcggtacggtag

SEQ ID NO: 118708 - DNA, 472 bp, Arabidopsis thaliana columbia
cctcaaagaatgaatcatcgagatttcggcggggggaagccttgagagaaagaggggagcaagaccacggaaggagggagagccccgagagcgaagcaccagaaccgcgcacggccgaaataatacgacgcaaatataaagcggatgaaagagttaagaaagagatttttttaggggggtgaaaagggagcacgagcggggatacgcaagaagaccccaatgtagccagcgggagcacagaagactcatcgtggacaaagcgccggaggaaacaaggcgcggcacgagacggtcgacacaagatggcgccccgaggccaggaagcgaggatagagcaaaaaatatgctatagaccgcgagagccaaaatacaagagtaacagtaaacatgaagcgcggtgctagacagggatgggttagctcacagcgagaccggcacggactaaaccccgcatcacgcgaacggatcggcg

SEQ ID NO: 118709 - DNA, 635 bp, Arabidopsis thaliana columbia
ggaggggagataatgagagcgattttccacccagtggagggggggggggcgtagagcgtgttttatttgactctgagatgtgaggtcccgaagatgagatgagggagtgataagccttcggtatctgtaggcgcgggagagaaaggaggtatgcaagcgatataagtgtgtgaccgctcatggtgcgccccagcatagtagacacgccgggatgtgagaggatgaaagaccgtattttccgagcggggggggaaaccacgtcaagatccaccattcacgagggtagcgatcattaatacctatgtctcaccgcggttcacggtcacggtgagtgtgcgagtaatgccatgttgtttaagcacagaaaaaaagagtgttccgcttttaccgtgagcacagtcgttcttagccactttcggttctcctggacctagttattcgggagttgaattgagcgcagcgcgtctggtcgtattgagctgtcgcataccgtatccacaaatagaggtgtcaaaccgcccatcatcgacatcttgtcaacgattatgttatcgcagtagtaagggtcgatgaagaagatcgttctgcacaagttgacacggaagatgacgaggaggaaggatgagtgaaagtgt

SEQ ID NO: 118710 - DNA, 436 bp, Arabidopsis thaliana columbia
agggggaacagggggggatgacgggggggaggaaattacccacgggagggcagcacaagacagcaaaaaaaagtcgatggacgatcttattgaatgaccccgcccccaccccctccactaccgaactgatcccgattgcctcccggaacgagcgcggccatttctcgggcttttatccgtggggcaaataaacacaagacaccgcagataagggaattacaaacacaccgatgcagatccttcgaagaaccttacctcgtctctaataacaagccacgcagaagaaaaaagggaaatcaacacccgtcggatcctcaccgcgagcacactgactgcgccacccgccgagtcaaggataagtgcgactcactcgataggcaaccgacaacgcggcatgtgacctactgccgggaccccaaacggagtcacgcacggg

SEQ ID NO: 118711 - DNA, 328 bp, Arabidopsis thaliana columbia
gcacgcgtacgtaagcttggatcctctagagcggccgccctttgggtttggtttttggggaactcaaagggagaatgtggcccgcttacttatcgtgcttctccttgagcaagctcttacggtagaactacacctccttgcccttcaaaacggaaccatggggctaggccatccctgtcctttccaggcagatgatatctgccgatagccggggacactggaccggccaagctgaaccaggatacccccctacaaacagaaaccctttatgtttgcggctaaatgtggttcgttgcgaaggtggttccttgccactacaggagactga

SEQ ID NO: 118712 - DNA, 166 bp, Arabidopsis thaliana columbia
cgatttttagcccttaatacttacctgcctctactgtcctaagcgcttttttttggataaggaggcgtcttgcttctgcattttgaatcatctgctcaagaccttgtgctctgctgcgtgtatcgcgagtttcctgacgcatggctgaactctaacgaccttgtcg

SEQ ID NO: 118713 - DNA, 540 bp, Arabidopsis thaliana columbia
  unsure (1)..(540): unsure at all n locations
taggtacnnnnnnnnnnnnnnnnnnnnnnnnnnnnnnnnnnnnnnnnnnnnnnnnnnnnnnnnnnnnnnnnnnnaaatcgttcaccaccccgaccgcaatgttgcacacctggtactcctgatagctcttcaacccaacgagcaaaaagtgggcaaagtgctgcatgtactttgcgaagtccttgcccatcacattggcgatggcgccgaccgccatcaggccctcctcgtgcaccgtggaggggcagcacgtgaacaccttcaagaacatctgcatcatctggtctgcgaacggaatcacctgtgggcccaacttgcgggccgccacctgcagcgcgccgcacagcagcccctggacggtggactgctcctgccgggcggcgccgctacccatgctcatggcgaaggtggcgtccaggcgctggaggaggtttggcaccagcaacttgatgcactccaggcagtctgctggcgcactggtcagcagggcgttcagcgcctcgtacgtcgccgcccgcaggttgtcctcggcggcgtctg

SEQ ID NO: 118714 - DNA, 405 bp, Arabidopsis thaliana columbia
ggcaaatagaggtttggccgggggggaggggcactgaacaatgaagagggaggaaacccggaggaaaacagccgaaaggggggagaggaagggtgggctggagggagaacagcaggaagtttgccggggagcgcagcgcaggagggaacccagcgggcccacatagagacttttttagggggggggggaaatgcagacaaaggcggcagccaggaaggttaacgaagtcagggggcggaggaagagaggggacggaggcaatgtggggggaaaagaggcgggttcggcaagactccggaaacgcgcagggagagagtaagtggggtggaggcgcacggggggaggaggggtatggagacagaagatgagggcgcggggagcggaggtaggaggccggagacgaga

SEQ ID NO: 118715 - DNA, 518 bp, Arabidopsis thaliana columbia
  unsure (1)..(518): unsure at all n locations
ttaggaacnnnnnnnnnnnnnnnnnnnnnnnnnnnnnnnnnnnnnnnnnnnnnnnnnnnnnnnnnnnnnnnnnnnctttgtttttgttttttttttttttttttttttttttcaaaatgaaacagaatccactgctttccatgagccaggcacccatttgcattgtccactcgatgcaggaaagatgtgaggaaaacttcttcacccttgaagccacaccgacaaaagtccaacaggctggggtgcacatggcgtcacccgccgccatgtgggctccatacaccaatatccaaaggtaattgtacaacaaactgcaaaatgcaatctgaatggtaaactggaggtgcaccagaaggaccagaattatatacaatttgcctcctggagggtgcaacccagagggggcgcatgaagggttaggcgcctgcgggtggggtgaatcattcaattgtttgccactgtgcgtcgttcgtgctgagcgtaatcagcagccataaatgccagggaacagggaacct

SEQ ID NO: 118716 - DNA, 305 bp, Arabidopsis thaliana columbia
agggaacgccctctactgtcttaactgcgctggttagttttttattttttccaagaaaacatgcttatgccacccattgttgcctttgagaaatgcgaacttttcctgaccaccacaattttggggggcaatggtcccgcccagatttcttccccattcaggatttccaatatgaaatacttacagaacttgggcccaagacaatctccctttccctggggcacagatggcatatggttgcctaggtgctatttttatcgtactttcttttttctatctttgatttttattctctttaaccttaa

SEQ ID NO: 118717 - DNA, 342 bp, Arabidopsis thaliana columbia
caattaaaaaaaacaaacccgtcgaaaggaggcaaacagatttaaccggggggggccaaaaaaaaatatcgggaggaacagtcggtaaagcaaaacgagagtggggacgaacacgaaaaacaaacccccaggtgaaacctcgagaaagcacgaagcgagagctggagacacggtatttaagggggggcagaggaaagacccgctaactccagattattgacgtagaagaccgcgggagtgaggcattgaggacgtggatagagacaatgcacaatcaccacctaaactattgtagccagcccggagcatagcaccctgataaaaacccgtacaagagagaaa

SEQ ID NO: 118718 - DNA, 352 bp, Arabidopsis thaliana columbia
attaaggtcagcgaggaacgcctatctacacctctaaatttatcaaacgaaacctactactctgcctagctacaatccccacctaagccatcataactttggggggggggaagaagtgtccgacctatggcccacctcctctctcccccctcaccccgctccgacctttccttcatgcttcagtgcaacttgaaacatagtgcatttttgcatgactttttctcgttctagaagagtctggggatgaagaaaacctacaacgccgttatcgggtctccaccattcccctcgcttacccaacctgatgacataggctcccacttactaccgctgacgtctcccattacgacct

SEQ ID NO: 118719 - DNA, 536 bp, Arabidopsis thaliana columbia
atgacgtaaactgcacgcgtacgtaagcttggatcctctagagcgttcgccctttggttttgtctttgaaatgtgtcaaactcttggaggtaactggtggtctcacacgggttggggtatccaatcaatgaattggaaaataaccgccattgaattgcgggtgaggggagtgttattggagggaggggaaacccccacgtaatttttagcgtggggggggcctcccgttgcgggaactttaaacacaaagattgcccccatttactttttgtgggggggggaaaatttgaaacatccaacaccgggtttgggccaacaaacctttcgaaggggatatgcgcacaacccccgtgtcgggcaaaaattttgggttgtgggggggaaattaaaggggctggagcaagcgaattccaccaattttcacccaaccgcggaggacttgtgttggccgccccatcggaaatctatcatactttcctccctcacttcacaaagggggaggagctgtctctctcccaaaagggaagcagggttat

SEQ ID NO: 118720 - DNA, 366 bp, Arabidopsis thaliana columbia
gattgaggcagcactatagattcactatgacgccgcatgcacgcgtacgtaagcttggatcctcttgagcggccggcgcttgttttttttttttttttttcaggtgtctaacacattattgactgatcatcacaagtatcttttacattctactattcctttctaagcaaaaaaaaaacacatgtgcacaaagaaataacaatacctatgtacaatccaaaacaagggagggtaataaaaaggacaaaaagcgaaactaattcaaatatcaaaagtcttaaagagaataaaaaacgcaccaaaagctgtataataaaacggggaaagtggttgagacgtaagagatcattccaaaggcgtacgcgt

SEQ ID NO: 118721 - DNA, 466 bp, Arabidopsis thaliana columbia
  unsure (1)..(466): unsure at all n locations
atgctacgcgagctctatacgacttacttagggaaagctggtacgcctgcaggtaccggtccggaattcccgggtcgacccacgcgtccgggcgaggttcggactttactacatcgatttccagaacaacttgacccgtcaccaaaaagtttcgggcaaatggtattccgaattcctcaaaccacagtttccaacctccaagctgagggaagaactctagatgatcaagaatccctatcgggacaaaatatttgagtccaagaatcttgaagatgttgttgaggataatatccagtttgtgtgttctatgggatcgttttcatctaccgggtccttcctatgttanaaaggactttgtgagtttgtccgagntttaaataataaccaataaaatgtctttctctttttaataaaatgtngaagtaaataaattaaattctgtttattggaaaaaaaaaaaaaaaaa

SEQ ID NO: 118722 - DNA, 327 bp, Arabidopsis thaliana columbia
  unsure (1)..(327): unsure at all n locations
nnnnnnnnnnnnnnnnnnnnnnnnnnnnnnnnnnnnnnnnnnnnnnnnnnnnnnnnnnnnnnnnnnnnnnnnnnnnnnccacgcgtccgcggacgcgtgggttttcgatctttgcgcatactctgttacgatggctgaatactttggacgtaaaacgttctgattctgctatgcgttatgtatatctgttacatataaggctgaaatctggtgttgatgaactgattcatatacaaatgcattaggcttcnctgcagaagaaaatgatattttacggctgaatcatcnaccggagaatgagagggagatgttcgcttacaggactct

SEQ ID NO: 118723 - DNA, 313 bp, Arabidopsis thaliana columbia
atttgggcgacactatagatagctatgacgtacgcatgcacgcgtacgtaagcttggatcctctatagcggccggcctttgttttttttttttaaaaattgaaagtgtgatatgtcatgggttagcgaaaaaaaaaaaagaccttgcttgaaagaaagaaagaatggagaattgaggagatctgctatacaatgtgaagatgccgctaatggaacttacctacttgaggtctttgctagaaggagcttggtacttgttgcataagctcggaactgataacaaaaagttccttactgagggtttagaactattt

SEQ ID NO: 118724 - DNA, 666 bp, Arabidopsis thaliana columbia
  unsure (1)..(666): unsure at all n locations
gannnnnnnnnnnnnnnnnnnnnnnnnnnnnnnnnnnnnnnnnnnnnnnnnnnnnnnnnnnnnnnnnnnnnnnnnnnnnnnccacgcgtccgctccttaacacattcgcgttgagacacttggcacctatatgacacactatctctgtgtcttcccaatcgaccaacctaatctaaaattctgattcgagttcttctgaaccttaactctgcatacaactcacatagtttgggaacggggcactgtaattttaccgataaaacccgtcttcatctctggcgtgtatgcgtatcaaaccgactgacaattgcccaacgtgaaataggctacagttagcacaatgtcaaactttattcatcatnattgggtaaaatccatttaccacattgtccggggaaaacattaactgctattcattccgaactattacgagcaacgtctaccttttgtctcctgacaggaaagatctgggaactacttattatgaatgggaccaaagtcgtctgtaccaacaatggcccactctcgtggggaatcttaaggagaagctggctttttccgaccggaatgcaccatcatattgaaactttctggggggtaaaacagcttccatataaactgcgagggatcttctctctggttccaatgggggaaacccggctgagg

SEQ ID NO: 118725 - DNA, 370 bp, Arabidopsis thaliana columbia
  unsure (1)..(370): unsure at all n locations
nnnnnnnnnnnnnnnnnnnnnnnnnnnnnnnnnnnnnnnnnnnnnnnnnnnnnnnnnnnnnnnnnnnnctttttttttttttttttttgattttttctgcttttgattttttttcaaccggaccaattcccgaccgaaccactaatttaaagttcatagacgtgcacttacttctctttaaaggcaggtcatgcataaactgaaaatgtacatgatcactagtcacatttgtgtttcagacgttaccatccaattttattgcagatggctgggtacttcacagcacgataattatttagtaatctggaccgaaggtctatgaaaacccaggtcagcttatgcgagggggacatcctgatacagaatagtg

SEQ ID NO: 118726 - DNA, 773 bp, Arabidopsis thaliana columbia
  unsure (1)..(773): unsure at all n locations
nnnnnnnnnnnnnnnnnnnnnnnnnnnnnnnnnnnnnnnnnnnnnnnnnnnnnnnnnnnnnnnnnnnnnnnnnnnnnccacgcgtccggttgctttcagagtccgttcgactgcaaactaaaagagagagatggcggaagacaagaatgctccaatcagtgtctggactaccgtgaagcccttcgtcaatggcggtgcctatggcatgctcgctacttgcattatccagccgatcgacatgattaaggtgaggattcaactcggtcatggatctgcagccagtataaccacccacatgcttaataatgaaggcgttggtgccttctaccagggattatctgctgggctgctgacgcatgcagcttacacgactgcccgtcgtggatcattcaaggtgctgactgcagaggcatgtgagtctaacgatgagacgcctctaccgctgtatgagagtgcactatggggtctgacagctgatgctattgttgcttgcatcggtagtccagactgtctaccacttatcaagatgcacgtccgatatactgtgccgctagctcagcgcatgaattataccaatgctgtccatgcgcttacccgtgttagcgctgatgaggcagctctaacacttacganggggtggagcccactgggtcagagtctggctgtgacacgggatgcttgctttatgatcaaggctaatcatgagaagtatttggtcggggaatgttacagcgaagacaatgctggtttggtctggctgggttcatctgctt

SEQ ID NO: 118727 - DNA, 352 bp, Arabidopsis thaliana columbia
  unsure (1)..(352): unsure at all n locations
cactatagctgagctgtgacgacccatgcacgcgtgcgtgagctgggatcctctagagcggccgacctatgctgttcgtttttatttcaaaggccacaaggaaaactatttnacagtgcatcaagatgtgtcgctagcctactacgtacatgttaaagtccaaagcaaaccttgcctgtcctgagcataacaatgtgcactttttgtagatgggggaggataagaaatcttccaaactagagggattgcagatcatcttctatcgagttagggccattgctggatattcatgcaccatgaacgccatgtacatcatgccgtaggttcagtgcgggcccgagtcttcctatgg

SEQ ID NO: 118728 - DNA, 241 bp, Arabidopsis thaliana columbia
  unsure (1)..(241): unsure at all n locations
atgcgcgcgagacggagcgaggatcccctaaagggggggagcaaaccttcagatatagatgatntntcggagggagcgcagnnnncccgagagcacccgccagcccagaacacgcaagcagaggaagaaggaaaggagaaggaaaagaagacgcacacacccccgacgtgacagggaaaaatcttcccaaccaggagggggggagggaagaaggggagaacccgagagagagggggccaag

SEQ ID NO: 118729 - DNA, 179 bp, Arabidopsis thaliana columbia
  unsure (1)..(179): unsure at all n locations
ggggcgcgccagggngtgcccggaccgactctcccgggggaggcaaccctgccttataagatataattttgcaatgagatattctttagaaaaacccgacacgtacataggcaggtttgatcagaagcatgagaattgttcacaagacccacgtcgtgagtgtgcgggccgggccagtg

SEQ ID NO: 118730 - DNA, 348 bp, Arabidopsis thaliana columbia
gtcgagaagatcagttccgagcactacatgaggcacgcaggcaaaaccgcgtgttttttttttatggaggggtgcggccgcagacgggacccgagatgggtactacaatgtccttcgccgctgccacagtatagttaggagcgccaggtgcttgtcctcttcaccggcctccctgctaataatccgtctcacaaggattattgatcgcgactagaagttctcagcacggcagggggcgcgcgctaggaagatcgaggatgggagaggtaataggaggcgtaggctgggtgcttagagttccttgatggtgtttatctccgtattgctccgctagtatgcgccagtcag

SEQ ID NO: 118731 - DNA, 386 bp, Arabidopsis thaliana columbia
  unsure (1)..(386): unsure at all n locations
cgatttattgaggcgannnnnnnnnnnnnnnnnnnnnnnnnnnnnnnnnnnnnnnnnnnnnnnnnnnnnnnnnnnnnnnngcttttttttttttttttgttgttttttgcccctaatatcatatagtacatgccaagaatagacatcatatacacactgctctttcactatagtaatatgtaatcaaactaaaaaactcgaagtcctaaaaactgagaagcaaattgacaaagcaaatgttgtgctgtggtgtgcgctgtcttcttcagcctattaccttgaagttgtgtcatcgggaaggccatataacggtctccatcaggcgttcacgcatcaacgccaagttttcatccaatatttcctggtatatcttccaagggccgaat

SEQ ID NO: 118732 - DNA, 203 bp, Arabidopsis thaliana columbia
atttaggacgacctatagaagtactatgacgtcgcatgcacgcgtacgtaagcttggatcctctatagcggccgccctcgatctatcggacgctgtgggcggacgcgtgggcggacgtcgtggggaacaatgcaccgatcatctccgccgaaacatagttggctgctacacttgatgctatcattcggtgacattgaaaccat

SEQ ID NO: 118733 - DNA, 569 bp, Arabidopsis thaliana columbia
  unsure (1)..(569): unsure at all n locations
tgctacgccgnnnnnnnnnnnnnnnnnnnnnnnnnnnnnnnnnnnnnnnnnnnnnnnnnnnnnnnnnnnnnnnnnnnnnccacgcgtccggccacgcgtgctaatgcgcatgtgcgttgcactctcacgcttaccaatgttgatgacagatgcccgtcacatgcatgaccgatcggtgatgtccgttgcagagctatggagtccgtcttttgatgctctatacgcttgctgataatgacatagcggctgcaaagagagcacctgctgtcgatcgagctggatccttgagcctgtctgtttcttcaatccatggtttcgactctactgaacgagcactgccgtgattattacaaagttttttcgttaacaactttctaagctggtgttgtattatcctccttggggggacatacgataagccttgactaggactaaaggaaagctcttatattcttgacggcaccgatgggatgataacggattcaagtttgaatgggagatacgctgtgatttcaaaatgactgcactgctcttttaatagcgggggtggatgggttcaagggcgttcg

SEQ ID NO: 118734 - DNA, 390 bp, Arabidopsis thaliana columbia
cgatctatttaggcgaactatagaatactatgacgtcccatgcacgcgtacgtaagcttggatcctctatagcggccgccctttttttttttttttaccttttactaatatttgaatacccgagagagagatatctaccaattctgtctgtcttgctaccatcttctttccaccattccaaaaatcaattatccgccacaagagaacccaaatccgctctagtacgagttgatgctggcgacgtattcattgcctctacggttaaaagaccttcctcctcctccaggacctcgacctccccttctgtaatcatagccatatccataacttcctcttcctctcattcccactcccacattcctatttccgtatcccacgtttccatttcct

SEQ ID NO: 118735 - DNA, 347 bp, Arabidopsis thaliana columbia
  unsure (1)..(347): unsure at all n locations
cactatagcctagctaggacgaaccatgcacgcgtacgtgagctgggatcctcctgagcgagccgacctatgatctactgaccaatacatagatgggctgctagctggtagatcatcattcatgcaaatttagtctctaaacttactacttatgtacaaagcatgacgagtacttactacttaaaaacagaatgacatacacgaactgagatttttcgtgtttctagacacataatccatacagacaataccatacaatgtcagctgaaaatactggaaaattctcgctcaaaaacgaagacgtntggcgggacccaaatatctctatatcccgaggcctcgggttc

SEQ ID NO: 118736 - DNA, 362 bp, Arabidopsis thaliana columbia
  unsure (1)..(362): unsure at all n locations
nnnnnnnnnnnnnnnnnnnnnnnnnnnnnnnnnnnnnnnnnnnnnnnnnnnnnnnnnnnnnnnnnnnnnnnnnnnnnctttttttttttttttgggaaagatacattcatatctatgctgacccaaatgggaactacaagcatagtgaatcgatttctagagactaaacaccggatgacttcaactacacaaactggggtcggcaccgggtgattctgatctgcactctgaatcccttgttcaccggtagcaatcctttggttactggctcagcccactccaactccattgcttacacacacttatatccgccacgcaacatcttgtgttacaaggcggccaaattgacgctcggaaaagcc

SEQ ID NO: 118737 - DNA, 690 bp, Arabidopsis thaliana columbia
  unsure (1)..(690): unsure at all n locations
nnnnnnnnnnnnnnnnnnnnnnnnnnnnnnnnnnnnnnnnnnnnnnnnnnnnnnnnnnnnnnnnnnnnnnnnnnnnccacgcgtccgaacatctcactagcctctcttttccgtaacaccgactagaacatgaagatcatgaagaactattatttcttttaatcatatgaatctccacagagtaggccttttagctccacatcctctgcttgaataatctacagctcgagggaaagcgatgctagctgtgaaacgccagacaaggatataaaagacgtatgctcgggtacactgatactcagtcagctgtcaggccatataccgtggagattcctagtcactatcaggcacgtggacagtggaacggtactagaaccggtttcggaagcccgtctgaagaattccatgtctaggactccacgatccgattggaggtagaggctgtaaaccgcgtttcatgtgcgatacctggtacttggtgacgaggagtcgacactgcatgcatcgaattcgntcattgtctcaccacggtgngcttgtttcaacatgctccttggagataatgactnatgacaggtccgtctacatatgaggcgcaacgccatgtacaacgagcgaggccgtccgacatacgcctggcagccaatgcttaagctatagctggtgctactgttgagacaccgcaccata

SEQ ID NO: 118738 - DNA, 359 bp, Arabidopsis thaliana columbia
  unsure (1)..(359): unsure at all n locations
ttgnnnnnnnnnnnnnnnnnnnnnnnnnnnnnnnnnnnnnnnnnnnnnnnnnnnnnnnnnnnnnnnnnnnnnnnnncttttttttttttttttttttttttttttttttttttttttttttttttttttttttttttttttttttttttttttggggtttaaaaattccctaattgggaaaacaaaaaaaaccggggggggtggcccaggcctttaagccaaatttaaaactttaaaagttaaaaaacccttgggaacaaaaagggctttaaacccccctttttttgatccccacttgggacccgaaacaaaacctttttgagtttttttccccgcaaggtggcccctttaaatacccc

SEQ ID NO: 118739 - DNA, 352 bp, Arabidopsis thaliana columbia
  unsure (1)..(352): unsure at all n locations
aactatagattactatgacgtcccatgcacgcgtacgtaagcttggatcctcttgagcggccggcctttttttttttttttttacagaatacgagaaaccctaataggcaaaccgnnnngaaaatcaacaaaaggaaaagcaaatggtttatcatcttctgctaattcccaattgaatttaagaactagatgatgaataaacactgccatttctaacttggctagctctgaaccagcacatagccttggccctcctccaaacggcatgtaattgtttccccacgtcgaaaaactaccacttcctgaggattacgctccgtagttttggtggtgccattctccaaggattaag

SEQ ID NO: 118740 - DNA, 355 bp, Arabidopsis thaliana columbia
cgactgattgaggcgaactatagaatagcttgacgtcgcatgcacgcgtacgtaagcttggatcctctagagcggccgccctttgttttttttttttttttttcttttttttttaatggaagattcgattgtgattaaaccatttcttacttgaaacaaagacaaactttaccaatacctaaaaaatgtctggtccaaagacctctgaattggctctttacaacatagacgtggaccaaacaaacattttcttggtcggagcaagtggtttccttctctacataagtcctttttacataaagacacgacgggaacttagaacctgaaaccaggatttaaaattaaatcctttcgc

SEQ ID NO: 118741 - DNA, 377 bp, Arabidopsis thaliana columbia
  unsure (1)..(377): unsure at all n locations
ggcnnnnnnnnnnnnnnnnnnnnnnnnnnnnnnnnnnnnnnnnnnnnnnnnnnnnnnnnnnnnnnnnnnnncttttttttttttttttttttttttttttttttttttttttttttttttagcaaaaatttcatgtctttttttagaaccaagattcttaagctcaacaaaacaaacaatttttctggaccaaaaaaaaacaatcatttttcccttaaataaaaaaaagattaaatctcgcctccctctctttaacactcttgggtggggctccgaggaaatttcctgaactagagccgaggaagaattcttgatttacttaaagctgagcatcgggagcggattttttctgaaaagaaccactaccgatgtcctct

SEQ ID NO: 118742 - DNA, 673 bp, Arabidopsis thaliana columbia
  unsure (1)..(673): unsure at all n locations
tgctacgccggctctatacgacttacttagggaaagctggtacgcctgcaggtaccggtccggaattcccgggtcgacccacgcgtccggttcgagcccattcacgatgatgaagagcttggtagctccaatttccccgtcgtcctcgtacaaatccccatgttcaacgaacgagaggtttataagctatcaataggagcggcgtgtggactttcctggccgtccgatcgtctcgtgattcaagtgttagatgactctacagatcctactgttaagcanatggtggaagtggagtgtcaaagatgggcaagtaaaggaatcaatattaggtatcaaataagagagaatagagttggttacaaagccggtgctttaaaggaaggactcaaacgtagttatggcaagcattgcgagtttgtggcatcttcgacgccgatttaagcccaacctgatttttttcgccgtagcattcctttcttatgcacattcccacattgccttggttaggctcgatggcggttcgaaattctgatgagggctattgacgagaatgcanganatgtcattggattaccatttcactgttgagcaagaagtgggttcatcaacacatgcttttttcggcttaacggaaccgccggatatggagatagcggcataaatgaactggggg

SEQ ID NO: 118743 - DNA, 569 bp, Arabidopsis thaliana columbia
ctatacgacttacttagggaacgctggtacgcctgcaggtaccggtccggaattcccgggtcgacccacgcgtccgcgagaggtttttggaactttgtgacggcgaggaagaaggagttggagaatctccggtcaaagattccggcggcgttggttgattgtgtagatccggcgatgttagtgcttgaagcgatatctgaggtttttccggtggatacaagaggagataaagttagcaatgattatggatgggcttgtgttgtgattcttgagagtttaacacctggtattgttgatccagtgattgggaaatcgagggtgcttgttactccgagtgttaaggagaaagctaaggaattgctgagacgtggaagaagatttggaagagagaagaaggatagagattggaagactcctgatgttattcgtttttgagcatcttgttacatttggatggtaaaagggaagatcttgtttgtataaaaggctggtggtggatctggcgtgggaaaacaaatgcttaacctggcggttcttgtgggttgggttgaccaatggctggcctgatg

SEQ ID NO: 118744 - DNA, 368 bp, Arabidopsis thaliana columbia
  unsure (1)..(368): unsure at all n locations
cgnnnnnnnnnnnnnnnnnnnnnnnnnnnnnnnnnnnnnnnnnnnnnnnnnnnnnnnnnnnnnnnnnnnnnnnnnnnnnnnctttttttttttttttttttttttttagaaccagaaggtattattgatggtgaggaaaaaaaaagtacatacccttagagactagtagtagtagtacacacagtttacaacgcccatgtaataagagagctagggggagggaagcatcacaagttacaaactaacaacaacaacaaaaagtacaatcccaaactagacagacgtactcttagtacaaacctcaacccaaaagagatcaccggacgcgtgggtcgacccgggaattccggaccggtacctgcaggcgt

SEQ ID NO: 118745 - DNA, 366 bp, Arabidopsis thaliana columbia
  unsure (1)..(366): unsure at all n locations
cgactgnnnnnnnnnnnnnnnnnnnnnnnnnnnnnnnnnnnnnnnnnnnnnnnnnnnnnnnnnnnnnnnnnnnnnnnnnnnnnctttttttttttttttttttttttttttttttttttttttttttttttttttttttttttttttttttttttttttggaaaaaaaaaaacccccaaataattttaacatgatttttacaagctttttttaaacatttccctttttacaaaaaaaattggggggaaaaataaagggttcaaacaaatgaagaaattttttgccacacaaagggttcagcttttcaacaataatggcccacttttttggaccattccggggtcctaaaatttggggacccagggg

SEQ ID NO: 118746 - DNA, 224 bp, Arabidopsis thaliana columbia
  unsure (1)..(224): unsure at all n locations
atgcacgcgagacggagccgggaccctctagagcgggcgagcccaaccgttcgttaataaaaaatttaacaagcagcgagaagnnnnnngcgaccacacccacagacctgtcaccagcggaggacacgagagaggagcgaaggctaatgacgagcgcgcaccggagcgaccggaccaaaccttttcacaaaaggggggagggacgctcgccaccacgaaagaga

SEQ ID NO: 118747 - DNA, 204 bp, Arabidopsis thaliana columbia
ggtgggccgcctgcaggtgccgggccggttttcccggggggggccaaccgtccgatttagatgtcctagtgcatggggataacccatagccgggcctctacgttccagtcggctaactgtgagaatcctgggctcggtcgccggtcacagttggtgcgggtgcgtcgggcgcgcgacgcgagcctcctccttttcggggggggg

SEQ ID NO: 118748 - DNA, 382 bp, Arabidopsis thaliana columbia
aattaggcgcactatagaatactatgacgtcgcatgcacgcgtacgtaagcttggatcctctagagcggccgccctttttttttttttttaaaacgaaaactttattattgcctgaggtgcttggaagttttgtaagtgtctcacatatcccaaattattatcatcgaaaagataaaaatgatgaagagaaagttgattgatttaaaaactttaaaaaaagatgttcagagtttgtggatggttttcatgtctatagcttcaaccaaagttcctttctcaacatgatcccaccacttcatcaagaaaattgtccaccaccaaatctgacccatggtgacagtttcaaaccttcctcacctgcatctgctttcttcaccagct

SEQ ID NO: 118749 - DNA, 350 bp, Arabidopsis thaliana columbia
ggcgaactatagattactatgacgtcgcatgcacgcgtacgtaagcttggatcctctagagcggccgccctttttttttttttttttattcatattcaattatcacattacaatcattaaccactccaaacgctcgggcataacaacgagggaccagaagaacaaaccttgttccctacctgaagtatcatactttggcctcaaaaacatattgttaattatcttaactacaactctcttgactctcaagattatcatagcaatactcttcacaaggatctgagtcaccagctctcttctagtccgtgatatgactcgccgccgaactctgctagtgcacctccgaccaa

SEQ ID NO: 118750 - DNA, 384 bp, Arabidopsis thaliana columbia
  unsure (1)..(384): unsure at all n locations
acgcgcaannnnnnnnnnnnnnnnnnnnnnnnnnnnnnnnnnnnnnnnnnnnnnnnnnnnnnnnnnnnnnnnnnnnnccacgcgtccgacgatgacatccgtatctgcaactcgactcaacgccgacactccaagaaaggacgattcaccttgtgctagagtattaatgcacgagcaggaactaacccggggaattctgcccgaacatacattggatgtgggtgggctcatcggaaggatagacatatataatgcggagatgagttccgctattctaacgatactgcgctgatgatccggcaagcggtgagtgtgacgctcatagcgactatgtggacgtcctgacctgctgttgagatttacgctctggacaagatgaaagct

SEQ ID NO: 118751 - DNA, 354 bp, Arabidopsis thaliana columbia
attgaggcgaactatagattactatgacgtcgcatgcacgcgtacgtaagcttggatcctctagagcggccgcccttttttttttttttttttaaattaagatttttatttaattaggaagtctattgagtacataaaaaacactaatgctacataacaaaagcaattgactttctagcatatttttttctccttttttacaaaaaaatgtaacaagaatattcattcacacacacgaacacatgactactacaagtctacaacataacttatacaactcagaaattccaaacgcaatccaattcttctgtaccggacgaatcacgaccgtcgaaaggtttgccggagaattga

SEQ ID NO: 118752 - DNA, 361 bp, Arabidopsis thaliana columbia
aattgaggcgcactatagattagcttgacgtcgcatgcacgcgtacgtaagcttggatcctctagagcggccgccctttttttttttttttttttttttttttttttttttttttggcaggttaataagttaattatattgaaaaagaaaaaaaaaatcttccgatcaattagactcggatccttatatacataaaatcttttctttctgtttttagataatgcacacacaaatctccccacttaatcgaaatcttccaaggctagcttcagcttaaagagccatctcagcttgtaaggcagcgagttcatcttcctcagcagtaggttgcttctgagctggagcacgagcaggcttgttt

SEQ ID NO: 118753 - DNA, 358 bp, Arabidopsis thaliana columbia
  unsure (1)..(358): unsure at all n locations
attgaggcannnnnnnnnnnnnnnnnnnnnnnnnnnnnnnnnnnnnnnnnnnnnnnnnnnnnnnnnnnnnnnnnnnnctttttttttttttttttttttttttttttttttttttttttttttttggcttttttttttttttttttttggacaaaaaagaagaaaaggtggttgagaaaaaaaaagaagaggggggtatttacaaacctggcttggtgagaatttctggaggcgcttttcaaaaaaacccgaactcctcttatagattttccgagaacccctaacaaaaagcatgagggtggtgaggatttaacccccgccgcgttttaaaaatttatagcgttagccgaccccctcc

SEQ ID NO: 118754 - DNA, 265 bp, Arabidopsis thaliana columbia
  unsure (1)..(265): unsure at all n locations
caccgcacctatagaaagcggctcccttttaacggcgggtaaaacccaaagcgaaggaaaagaattgtgaatccgagaaggacgccagnnnnnccccgcaccacacccctgtaccgagccgtctcacagctaggagggatgaagaccaaagcagcgccggggcgcaaacggattttttaagaggggggcgcagcaggaaacagggaggggaagagtagagggcctcggggtcgcgggtggacggggaggaatacaaaaccacgcc

SEQ ID NO: 118755 - DNA, 227 bp, Arabidopsis thaliana columbia
gggggcctgcaggcaggacccggcccgaactccccgggggggcgccggagcgcccgaaaaccggaaccgcgcagaacagactactaaggctcgcggcgccggagacgcgacgccggagccaccgccatggcgaccgggagaaaaacacacacggaacagcgaggagagagagggcggggaggcgacctctcttagggcggggggagcggaacagacccgatccggag

SEQ ID NO: 118756 - DNA, 381 bp, Arabidopsis thaliana columbia
  unsure (1)..(381): unsure at all n locations
gnnnnnnnnnnnnnnnnnnnnnnnnnnnnnnnnnnnnnnnnnnnnnnnnnnnnnnnnnnnnnnnnnnnnnnnnnnnctttttttttttttttttttttttttttttttttttttttttttttttttttntttttttntttgggggaacataaatgattttttttgggccccagccccgggcgaaaaaactggacacatcggcctaggttgtttcttttgtgtgccaaggacaaaaaaaaaaatccttgtagacccaacccaacatttttttaagtaaaacagaaaaattaactctttaaaagccaaaagaaaaataatttnacccgggttttttttgggaggtgtttggttccaacaaaatttggaaagtaacctagagga

SEQ ID NO: 118757 - DNA, 846 bp, Arabidopsis thaliana columbia
  unsure (1)..(846): unsure at all n locations
ggggggggggctttaagggcacccccccggcctcagggggggggacaagggccagccgcggggcccggggccgaagactcggcggggggcccgagcctccggancaacaccatgcaccagcagaagagagggaagcaacgcgagcgctgccccgagcgccgacccgagccggcccacgcggcacgcgaacgggagggcacaccagccgaccacgacgggcacacccagaagacaaacactttctctgccagaggggggccgacagccacaaccacggaaaccccgcgaaagaacgcccaaaccagaaaagagagaccgcgcaaaccagccccaccccacccccgggcaaagcacaaggcccgcacgagcagcggggaggaggcagccagggggaacgagcgggaagggcggcccggccgcgcgacaacgcgcaggaaggaggaggagaagacggggaggcgcgagcgccgcgggggcgcaacgaagcgaacagacccaaccaccggcagcggagaccagacacgcgaagaaaacagaccaagaccacaagaaaggcgaggaaaccgccgcgccgcggccaagcgccangcgagagggggagacagcccgcgcggcgccgagaagaagacagcagcagagccgcccgaccgacgcgacaacccccgcccaccgcgacccccccacccaaccccacagaaaaaaacggagaccacaggccggggaggcgaggcggacgcacaaggcgccacgcagcgcgccgcacccggcagcccggcgcgcgggcgccgcaaagacacaccgcacgcaccaccgcccccggccgcggggagggaacgcgacaacacc

SEQ ID NO: 118758 - DNA, 357 bp, Arabidopsis thaliana columbia
  unsure (1)..(357): unsure at all n locations
nnnnnnnnnnnnnnnnnnnnnnnnnnnnnnnnnnnnnnnnnnnnnnnnnnnnnnnnnnnnnnnnncttttttttttttttttttttttttttttttttttttttgtttgtaccttacttgatggggaacaattttcacaacaaatttttgattgaagtttctttacaccataacaaaatccaaacgggtccgagcgtttttaccttaattcctcgcgatacaacaactccaattgtgttttcttctccaaaggaaataacactatttgctgattgagcatacaaaccaccacaacataatcggacatcccacaaggcctttaatgtgggaagaaagtcatttgtacaacaattatac

SEQ ID NO: 118759 - DNA, 623 bp, Arabidopsis thaliana columbia
  unsure (1)..(623): unsure at all n locations
acgcggnnnnnnnnnnnnnnnnnnnnnnnnnnnnnnnnnnnnnnnnnnnnnnnnnnnnnnnnnnnnnnnnnnnnnnnccacgcgtccggagaaaaccttgcttatgtttctataaggaaccggacgcgaattccatttctaccgatctctgagcttcttncttacattccgctttttccttctcattgaatttgtacctctctcaatttcttctgcatgcttctcgattctatctgacgcctcttggctccagactctgtcacttataacgcttttcgaaatggtgattctggactctgatggggttactacggggacagggaaccgtggcggagagtgcgccaatcttgatactgctggatcacagaagtcgggatcggatccttataacggacttatggtatctggttgcgatatacttccaccttgcgaagatagcggatgtctcggcgacgctaggtagcggattgatagactcgttaacgatgacgctgagggatcaggcaatggggctcgacataatagcagaggaggcgatttttaccgtggcggaagaggcggctgcnaacgaccaggtacctcggttgctaccgaacggaatcaagcgagaaatcattgtatag

SEQ ID NO: 118760 - DNA, 366 bp, Arabidopsis thaliana columbia
  unsure (1)..(366): unsure at all n locations
nnnnnnnnnnnnnnnnnnnnnnnnnnnnnnnnnnnnnnnnnnnnnnnnnnnnnnnnnnnnnnnnnnnnnnnnnnnnnncttttttttttttttttggtttcaagaacgaaagcggaaagtgatattaaagatggataatgacattggcgaaatgatgaatatgtttcctcaaacctacatcaaatacggcaattgtaaactacgactgtattaaacacacgcaataaacagcgtctctttatgccttatggtccttagccacccccctcacatgctattactctgacagaattggataatgtcggcccaatgcaatgacactgatttgaacaggtacctgatcaactgctgtcttcagacaaaatt

SEQ ID NO: 118761 - DNA, 782 bp, Arabidopsis thaliana columbia
  unsure (1)..(782): unsure at all n locations
nnnnnnnnnnnnnnnnnnnnnnnnnnnnnnnnnnnnnnnnnnnnnnnnnnnnnnnnnnnnnnnnnnnnnnnnnnnnccacgcgtccgacctctcacactatacacctcttctaaacccattagggttgcggggcctctgtattgggcctattctacacgggggtgccgaggcgctgaaaaccaaccactcggaaactgcacgtgtgcaaccgtactacattgatcttgacctaccgtatcgcatgttacagggctctgctatggttgacttgtctattctgctgctatacatgggttacaagctccagaatgtcctatctctcagactgatcagttatccgagttctgacctgagtgacctgcttcttgttcaaatattctgcgctagtctggagtctgggaaaatgacctacttacgctccgatatgggaccagaaatcgctccgaccatgaccgcgtttgagatcacactctttattacgagagataccaagttgctcatatccatggttgaatggatcagtataagcatgagtgttatacgttccaaccgattcagattagtctctggtcagactattggcggcttgtagatcgattcgaagtggtctgtgaggataaacaagatgagccttgtgttcttgagacgaataagcgttgcttaacagatgactacccagatctggatgcttaggaagcgttaatagtcaatcatccgggcgagtgaacagcagacattgggagatgactatatactgtctgacagcatccgatgctcacag

SEQ ID NO: 118762 - DNA, 377 bp, Arabidopsis thaliana columbia
atttaggcaacactatagattactatgacgtcccatgcacgcgtacgtaagcttggatcctctttagcggccgagctttttttttttttttatataaatttggagacttggaattcagtctctgtaagatgtattacataccgtttctaaaggctaacgccacactaatgttaaaatgactacaaaatcacttttcaaaagtacacaataaacacagtacattaaatggggatcatatgaccaaaccaatagctaagttacgtaaaccttggacgtgttattcggtccccgtggcgtgtcttcaacgttattcaccgccgtgaagcaacaacaagccagacttcggctgcacagtctttgtaagtggattctaatgg

SEQ ID NO: 118763 - DNA, 394 bp, Arabidopsis thaliana columbia
  unsure (1)..(394): unsure at all n locations
cgatttatttaggcgaactatagaattactatgacgtcgcatgcacgcgtacgtaagcttggatcctctagagcggccggccttttttttttttttttttttttttttttttttttnttttttttttttttccaaactaaagaccgaaccaaatttaaaaacaaagtacataaccttcatccagataggtcaaattccagcttagaaataaccctgcacttggtagtgaagggtctcatttttttttttaaaaaaaaaaggtccaaacgacttattgtgttttttaaaacgggttttataactaaaatacctttaagacttttctttcctggggggattacaccctttttcctatcctcggaagcaccttttttataaaccggtggattttggg

SEQ ID NO: 118764 - DNA, 337 bp, Arabidopsis thaliana columbia
  unsure (1)..(337): unsure at all n locations
nnnnnnnnnnnnnnnnnnnnnnnnnnnnnnnnnnnnnnnnnnnnnnnnnnnnnnnnnnnnnnnnnnnnnnnnnnnnnnnctttttttttttttttggttaaatgacataaagtttccattccatgatagatttacaatagataattaaatatatacatgacagagtaacattatcctttaaaatgataaagaacactttttaattaatattatatctttgtttaatcgaattccctttataaaaaataaaatgggatatgtctaaagaaaagaatcaggcaagttatcaggaccatcttcacgttgtttaattcggtatcgggttcgggtcctgaac

SEQ ID NO: 118765 - DNA, 371 bp, Arabidopsis thaliana columbia
  unsure (1)..(371): unsure at all n locations
tnnnnnnnnnnnnnnnnnnnnnnnnnnnnnnnnnnnnnnnnnnnnnnnnnnnnnnnnnnnnnnnnnnnnnnnnnnncttttttttttttttttttaagttcaagatcttaagcactgtgctttttatgttggacagattaccgagggttgcctcgaaagatagtatcattatcatctaacccacccacctggatagtattatatcatgatcgctgaatttgaccgttccacacacctcaggatctttacattcgttaggtacctaagcgccctagtacggctacgacggctgacgactctctaacactcgacaacacccttcatgtatccggcttgctcttggacactatcagagtgatacctcccgctga

SEQ ID NO: 118766 - DNA, 638 bp, Arabidopsis thaliana columbia
  unsure (1)..(638): unsure at all n locations
acgcgcnnnnnnnnnnnnnnnnnnnnnnnnnnnnnnnnnnnnnnnnnnnnnnnnnnnnnnnnnnnnnnnnnnnnnnnccacgcgtccgctctcaccttgctcacaggtttggatcaccgaatgatcgtctcaagagagactttgtggccgtggccctctctgtcccgtccagccgtacattcctgcactacggagaagatcgccactcgtagcttctcttaggtagtcctcacgttcgatctactcaagacggcggattatctgttagtgctcgaaacttcctctgctcggctcacttgctgcttacatgccgactatgacgacttgaccggtaatagctacacacctgtcaagatcgacggatacgctcttgccacctgtgctctaggcgcctctgcagcaactgccgacggagctctgatgagattgacctatgatgagatacctatgctacttacatcggagtgaaaagacctgcagcggctaaccggggccctactattgacgtgcggtctaatactttgtagaccaaccgcggatgtctgccagaaagatgttctgattggatcctactgccttgaccaacaagggatatactgtaagcaaaaacgctccttgccatgttcgagaacacaaac

SEQ ID NO: 118767 - DNA, 239 bp, Arabidopsis thaliana columbia
  unsure (1)..(239): unsure at all n locations
gcccccacgaagcgggacccctagcggcgggcaaacccgggggcgaaagaaaggnnggggcgggggaagggnnnncggacccccggcaggaagaaaaccccccaaccaaggccgaagcgagggagggcaacccgagaaaaaggagccttctccgggggggggcccaaagcaggggccggggaggagaacaccaccgggaggaggaaaaaaaccgcctaccacgccggaaaggggaataa

SEQ ID NO: 118768 - DNA, 659 bp, Arabidopsis thaliana columbia
  unsure (1)..(659): unsure at all n locations
tggtacgcctgcaggtaccggtccggaatttccgggtcgagccacagcgtccgatcttttagggtgatagggtttctaatcctaaggaacaaacatccaatcaggtgagagtccgcagtgcccagatgtgtgcagcaattggaaatatcaatgacgcgtccatttgcaaaggctgaaacctcggaatttctcgtttttagggggggcgggccctggagattcgtggaactaggaggggaaaatgagccgcttccgggttgggaggagggcgtggacggcggggaatggttctgcggggacacctgtgtctggtcgtttggtgcacaaagggacactggagcgtgagcgtgttggtccgcttccggaggggattagtgtgtggtggaaagatgggggatgagagaggggaaatgtgaaaggcagagtttggcggatctgagcggtctggtctgtgagaagaaatattgggatccgctgtttcgccacaaagtaacgagatatcacgagggaggtgatcgcggagaggtggaaggcggaggcacgtccgctggtcgacagactgagaacaaagagagatgagatatcagggttgcgtggggcactgcggttaaggaggttacggagtccancaccctaaatgattaaacgcccctattatc

SEQ ID NO: 118769 - DNA, 379 bp, Arabidopsis thaliana columbia
  unsure (1)..(379): unsure at all n locations
nnnnnnnnnnnnnnnnnnnnnnnnnnnnnnnnnnnnnnnnnnnnnnnnnnnnnnnnnnnnnnnnnnnnnnnnnnnnnnnctttttttttttttttttttttttttttttttttttttttttttaaaaaccgggaccatttacccgaccgaaacaaaaatttaaagataaaaccggtccatttaaatcgcttcaaggcaggttttgtatatgattaaaaagcaaatgaccacaatgccaattgtgtttccaaccttaaaatcttatttttcagaagataaatttgttcctcaaataccaagcttatattgaaattgcggatattggttcaggaaagacctcgcccttaccgacgggaggggcattcttaacacagtaaac

SEQ ID NO: 118770 - DNA, 571 bp, Arabidopsis thaliana columbia
  unsure (1)..(571): unsure at all n locations
acgcggaannnnnnnnnnnnnnnnnnnnnnnnnnnnnnnnnnnnnnnnnnnnnnnnnnnnnnnnnnnnnnnnnnnnnccacgcgtccggctgcgcttgagtccgaacgattactatatataagatacagatggcggaagagaacacagctacaatcaagtgtctggactaccgtgaagccctccgtcactggcggtgcctctggtatgctagctactagcgttatccagccgatcgacatgattaatgcgaggatccaacttggtcatggatctgtatccagtataaccaccaccatgcttatgattgatggcgccggagccttctacactggattatctgctgggttgctgatgcaagtcacttacacgacagctcgtatgggatcatccatgttgctgactgcaaggcaatggagtctaaggagggaaacccctaccgtgtatgagaaggactatgtggcctgacagtggtgctatggtacttgcgtcggagtgagcctgactaccctataagaccgcggccgagatactctgccgtagctcaggcaggattatacctagcttacctgc

SEQ ID NO: 118771 - DNA, 325 bp, Arabidopsis thaliana columbia
  unsure (1)..(325): unsure at all n locations
cgactnnnnnnnnnnnnnnnnnnnnnnnnnnnnnnnnnnnnnnnnnnnnnnnnnnnnnnnnnnnnnnnnnnnnnnnnnnnnncttttttttttttttttttttttttttttttttttttttttttttttttttttttttttttttttttttttttttttncccaaaaccccatttaaatttaaaaactggggttttttcatcacaaaaagaaaccgctttttggggatttaacaggcccttaaaaaaaaatcccgaattccattttaaaattcagggccgggttttttttaaccgggaacaaaaaccctttcaccatctttgttt

SEQ ID NO: 118772 - DNA, 328 bp, Arabidopsis thaliana columbia
  unsure (1)..(328): unsure at all n locations
nnnnnnnnnnnnnnnnnnnnnnnnnnnnnnnnnnnnnnnnnnnnnnnnnnnnnnnnnnnnnnnnnnnnnnnnnnnnctttgttttttttttttttttttttttttttttttttttttatggtttggttttgttctttctctctaaaacggaggaccgacccaattttaaatccaagggccttaaccctcctccaaaatggggaactccaagcatataaataaccctgcaaacggaaggtgaggctcttatttttttttttaagaaaaaatgcgcgaaacgattaactggttttttgtaagggggtttaaaaacataattcctatcaag

SEQ ID NO: 118773 - DNA, 525 bp, Arabidopsis thaliana columbia
  unsure (1)..(525): unsure at all n locations
ggtggggggggggtcttttagtncaccgcgccgggctagtgggaggtccagggcccgcttgtgggcctgcgggggctcttttcccggggggggctgggccggccctagcatttcgtgtttggtctatgttaggatctttttcgagctctatcggtgtcattggtctggggaggctacttgtactggggcggtttcactgtcattggcgggtgtgtggagcgggagagttttctcttttttgggggggtccggaagagccggggtactggcttcttggcgggtcggctacgtgctaaggttgtgtccggttgatgtagccgggccttggtgggtgtttttgggttcttttgacattatgggcgcggcatggctcttggggggttccatgctgttttcgtcctttgtctgcaggtggtagcttaacggcgtcaggcgggtactgtgtgcggtctggcgagtgctcgatcttctccgcttttttgggttttgtctagggtactcgggtcctggtgggtcttcgtgacg

SEQ ID NO: 118774 - DNA, 347 bp, Arabidopsis thaliana columbia
  unsure (1)..(347): unsure at all n locations
nnnnnnnnnnnnnnnnnnnnnnnnnnnnnnnnnnnnnnnnnnnnnnnnnnnnnnnnnnnnnnnnnnnncttttttttttttttttttttttttttttttttttttttttttggagaaaattgaaacttttatgtataataagcgatacagattgaatcttctttaaatgggtttcaagaatctatctttactctaagggaaaacctcatagaacttctcgggaacgagaattcccgaatccatagactccaatggatcttttctgagtctgggtctcaaacaattcggtataacaataccaacatcttcagctgtaacttgatctcttccttggagtgctgcaagcg

SEQ ID NO: 118775 - DNA, 262 bp, Arabidopsis thaliana columbia
  unsure (1)..(262): unsure at all n locations
caggcacgcgagcaggagcggggaccccnagagggggcgaccaacccgttcggtttaaaaaanttaaaaggaagaaaaggngatccccgagaacacgccgaataacagaggtcgaccacaagacaaaaaagaaaggaccacacgaaagataggcggagaacaaagacggggcgtgactcacagaaatcctttacacaaaagggggggggacacaaacagccggaaaaacgctggaaagaaaaaagcccagatgcggagaaac

SEQ ID NO: 118776 - DNA, 723 bp, Arabidopsis thaliana columbia
atgagggggacaggtggcccgcctgcgggccccggccgggtctcagggggggaccaaccgcggcgtttgaatcattgagcagtaggaggaactcttgagtgacctgcttttagactgtcctaaataaaataacaagggaagtctcaggacatggagtgggcgctgcgcgggaatgatttgtgcggtttcttatataggggggcggcgtatccgcgagggatgcaggacagcggatagaggatccgggaccatcccggacacataggatcggatctgagtcgcaagagtttactcccggttctgaggaaaaatcagatcaccactttgatgtgtgggtagctagatccatggcagtgggtgttatgtgtctgcttgaataacagtagcatgtgacgcgtagtgtgagtcgctagtactatggctccggagccgccgcgagtagtggggcatcgctagatcggagacgctgtaatgggggggtggataagacgatgccggggacaagtcaacagtggctgagcgtgaatggtgcccgttggagcgatcattcttgataggacgtatttcgcgccgtcgtgcaaaggtgggagcgcgaggggttacactgtggcggcccgggaaatgaacaagagataaagaggtagcgtggtagtggggagggctaagaaatgaggaggtggagaggttgatactctttgcacatatggccgggcttgaagtgac

SEQ ID NO: 118777 - DNA, 350 bp, Arabidopsis thaliana columbia
  unsure (1)..(350): unsure at all n locations
nnnnnnnnnnnnnnnnnnnnnnnnnnnnnnnnnnnnnnnnnnnnnnnnnnnnnnnnnnnnnnnnnnnnnnnnnnnnnctttgtcttttttttttttttttggtttgtttttggtttttatgctctgctgttctgntactaaccattcataacatctgagatgttactctgtaataacaataaagacagaggatatctnatattttgttttaaaggacggtattttttaatacgacagagagaaactctcggcgggctgctggtgtctcacaaacatatttatagaagaagagaaggcccccttttctttatcccgctagaaaaatatatcntttttctttgggggggggg

SEQ ID NO: 118778 - DNA, 374 bp, Arabidopsis thaliana columbia
ggcgaactatagaatactatgacgtcgcatgcacgcgtacgtaagcttggatcctctagagcggccgcccttttttttttttttttttttttttttttttcccatatataaaacacattcaccacttaaacatacaacaacatgaacaaaattattcgtatagtgaataatcaagtttctaagacattatataaagactatatatatatatatatatatattgatgaaccagttacatatcattcacgcaggggccaatggtccaacattgttggccacagttgtctccatagctttcatggcttcaaaccttggttccttggcctgaaacttgacagcagagtagagtttcatgtaatcttcaaacacaaatc

SEQ ID NO: 118779 - DNA, 344 bp, Arabidopsis thaliana columbia
acactatagttagagcttgacgccgcatgcacgcgtacgtaagcttggatcctctagagcggccgcgcctttttttttttttttttttttttttttttttttttttttttttgttttttaaacacaaaactgactttttttcctgaaaaaaagttttttttcttaactgaccaaaattaagctcaagtttttgaggtttgatttttggaacccttggggcaaaaaccttaggaggcgttgccttttacaaacataccggggttgggtttaaaaaaccaaccttctgaagtgtttttccaaagccaatccagggatttggctttggctccggccaaaataatgtc

SEQ ID NO: 118780 - DNA, 265 bp, Arabidopsis thaliana columbia
ctatgacgtcccatgcacgcgtacgtaagcttggatcctctatagcggccgccctttttctttttttttttttttttttttttgtttcaagcgctgaaaaaaaagactcacaaaaagattcagaatactgattgggactcttttttttccgagcttaaacaaaagagccacaatcagaatgtctgaatctttttctggacccatggggtgagatcccgggaatgactggactcgtgttcctgaaggcgttccagtatttctccta

SEQ ID NO: 118781 - DNA, 305 bp, Arabidopsis thaliana columbia
  unsure (1)..(305): unsure at all n locations
nnnnnnnnnnnnnnnnnnnnnnnnnnnnnnnnnnnnnnnnnnnnnnnnnnnnnnnnnnnnnnnnnnnnnccacgcgtccgaaaaagattcagaatactgcttgcgactcttctcgcttaagctctgaaaaaaaagaggcacgatcaggattctgaatctttctgtgactcttttttttcagagcttgaacaacttcatcttggactttttgatggtgaggggcggccggtctagaggatccaggctgacctacgcgcgcatgcaacgtaataactcttctatagtggcagctagctacaatacac

SEQ ID NO: 118782 - DNA, 281 bp, Arabidopsis thaliana columbia
  unsure (1)..(281): unsure at all n locations
ctatagcctgacgaggacagacccaagcacgcgaacgtaagccaggatcccctagagcgggcggcccaaccttttttttttggaatttttaacaccgcacagcagagnnnnacaggacacacacggcacaggccaacacgccacgacaagagcgcagagcgaatcaaagaggaacagcaacaaccagcagcggcaaggggtttccctcgacaggagggcagaacaggagcgcgaggggtcaaaaaaaaaacaaacgcactattaaacactcctccctgaaa

SEQ ID NO: 118783 - DNA, 330 bp, Arabidopsis thaliana columbia
gctggtacgcctgcaggtaccgggccggaatacccggggcggcccacgcgtccgatcaaactttcagtccaagacgcgttctgttttttgcttgaacctagcttgagcgggggccactgtcatgccgagctagaagagaatacttgcgaggatgatgttccacccacatgtggggcaaactttctcttttcatcggaggggaagccccacacgcgagtatattttcgggtgtccgaaacttaggggtggccagtatccaagagcgacaatactgcatagggctatacggttggggaatgactgccgctgaggggatcccgcaagacagag

SEQ ID NO: 118784 - DNA, 361 bp, Arabidopsis thaliana columbia
  unsure (1)..(361): unsure at all n locations
cggttgnnnnnnnnnnnnnnnnnnnnnnnnnnnnnnnnnnnnnnnnnnnnnnnnnnnnnnnnnnnnnnnnnnnnnnnnnnctttttttttttttttttttttttttttttttttttttttttttttttttttctcatccaatggatatcaaacttttttgccaatggatataacaaataaaagggctgaaaatccaaatgaaaaattaaaatgtcctaaaataaaatctggagacaaaccccaaatcgctgagttctcaacaaaaaattttccagtttttttttttttacaagaaatatacaaacccataaccaacggtaaattttggggaaaaacataacacatttgtttatttatgcgg

SEQ ID NO: 118785 - DNA, 368 bp, Arabidopsis thaliana columbia
  unsure (1)..(368): unsure at all n locations
atgcacgcgtacctaagcgtgggatcctctagagggggcggcctaaccttttttttttttagttttnagtgacgcaggtgccccnnnnnccaaaaccgcccaccagaaaaatatacacaaaccgccaaagggggaccgcgcgaaggaacggaagcgtagagcacagaaaggagggaagcaataacagactctttctaaagaaagggagggagcggggccgcgcaacccccgggaggcaaaaagaaaaggccctggttggcgaagaatgggcgccccccccgccgcgaggaagtggnatgggaggagagcgacgagagaaggggccgcggcgccggcncgcgccggacgcgacggaccgcgacgcccgg

SEQ ID NO: 118786 - DNA, 415 bp, Arabidopsis thaliana columbia
  unsure (1)..(415): unsure at all n locations
gacgtcgcctgcacgcgctacgtagcttggatcctctagagcggtcgccctttggttttttttttttttttactagagcttgttaattaaagggggcnaaaagaaacacatagaaactaattcatgcgaacaaaaatgttacaacaacaaaatttaaatgtgttcgatcgaaataatattaaaaacacacatattttaagcagtttttgaggtgtggatacaatgactccacacgttatccctattattcaagtattgggtttcaggggcaattaaccttggtctgttagcaatatatttaatgggattatcgggaccacactttttcttcttggacaagaccttttgaagaggattgaatgaggggtgcgtttgggaaagacacgcgggggtatgcgggactcccccccggcgt

SEQ ID NO: 118787 - DNA, 381 bp, Arabidopsis thaliana columbia
  unsure (1)..(381): unsure at all n locations
aatacgactcactttagggaaagctcgtacgcctgcaggtaccggtccggaattcccgggtcgacccacgcgtccgcttttggtgttaaccttattgagttactcaagaagctctaaaaacaaacaatgttcctatgaagatgatttatatgtaaacattatctcatatctccttccacggttccaaaactatgctgtttaataatggtttttacangaaatctaagggagatggttatngaacactgggctcgtaaaaaaaactcctaaatgggcattgaatataatnnnnnnttgaaggtggagacgggcccctcaattcaagcttccccaacggatccttcccaagaaggaaaattttttttctcgataattctaaat

SEQ ID NO: 118788 - DNA, 364 bp, Arabidopsis thaliana columbia
  unsure (1)..(364): unsure at all n locations
aatacgactcatttagggaaagctcgtacgcctgcaggtaccggtccggaattcccgggtcgacccacgcgtccgtgttctttattcttattctgtaaaaatccgactggtttctgagggctaaaagatacatggctaaactactgtgacatgctactgttctatacatacctttangaaggacggaaacgtgtatccctactacatatcaatgacgagcttttgcgagaggattatagcatactaggattcttacaagcactacaacgtgatcattggatataaagcggtgtgtgtatggaaaaataaccctcctggtgaataggtgcagggatcttgaccaagaaggaacagtccaacacta

SEQ ID NO: 118789 - DNA, 408 bp, Arabidopsis thaliana columbia
  unsure (1)..(408): unsure at all n locations
tgacgtcgcacgcacgcgtacgtaagcttggatcctctagagcggtcgctcgcgagctagaactaggtcaatttgctacaacttagaaaatggcggcggctacttcatccatcgctccttctctttcatgcccatctccttcttcttcatccaaaaccctttggtcttccaaagccagaaccttggctctacccaatatcgggtttctctcgtggggggggcaagnctctgaggtcgcttactgccacacgcgctggaaatggcgccactggatcctcccttgccgctcgcatggtttcttcctctgggggcaaagcccctgtttctcttcgattttggaccacgccccccaaaaaggggaaaggcgggcgtggctggggacagccgccgggtggggacagggggccg

SEQ ID NO: 118790 - DNA, 497 bp, Arabidopsis thaliana columbia
  unsure (1)..(497): unsure at all n locations
gacgtcgacctgcacgcgtacgtagcttggatcctctagagcggtcgccctttggtttttttttttttttttaaaaaaaagggaggaaannggcaatataaaattgaatcgaaacgctattagtggataatgtcaacttcaaacttgttacatggattggcctgcgcaagctgacgacagctacagactcacgctctcgcccgccagcagttccctcaattggaatgtctgggccaccaccacnggggggccctcgcccaaaaaaaaaaaccccctccgggcgtggggccggtgcggcccgcccgcgattacacttttgtcgagacgagtatgtctcgtcccgaccctcccctcccctgtccgccgtgtttagcatgtcttcactgcgttccggcgtcctgagttttgaggcgtctcgccctacccccgccctctctctgcgcctgtcttcccgcagcttccacgctatccctttctgctctcctcccgcgggcgct

SEQ ID NO: 118791 - DNA, 523 bp, Arabidopsis thaliana columbia
aatacgactcactttagggaaagctcgtacgcctgcaggtaccggtccggaattcccgggtcgacccacgcgtccggagaacccaaggagtagaacttgggacccacttcttggtccgcaaggaaaccaagcgcctgctggctcaagcaagattgaaaactggagctcccgaatcagagaaaagtatggtttgaaccagagtccaccggtgaacccgaaaggttgatgagggcaaataatcatgtttctaaaactgcatgtgtccatatggtctctgtgaagctctctttctctatgttttgctctttgcaacttctcgagtgtgcataaacatttactcaaaacagtgctggattggtgttacacatccgggataagccttttccgttgtgggtgtgcttgggccaacctggtttggaccgcgcgggagttcgttgcgacctcttcagcgggcgccgttctttctctctgcgtatcgctgtccactcccggctccgcgcctctccccccccgccccccccca

SEQ ID NO: 118792 - DNA, 417 bp, Arabidopsis thaliana columbia
  unsure (1)..(417): unsure at all n locations
tacctttcttcttccttcttcatcattcatcattcatcattcatcattcatcattctcatatctctcttcttttactggngatcacaatatctatctagttctaaattgggaatgatagatcctaatccttgggtggggcaccccttnaccttaagggacttaaaaccaggctccacatagcgatagagagagagacctcgtattgggctattcatccaagtctctttttttcggctcaaaggggaaaaggggaccttttccaatcctgggtcctttccgtctcctataaaaaaacgggggtcctcccaccactctccgccatcccccagaacgggcgccccctcgcccccctccaccccgcccccccccaaccccggccccgccgcccccccccgccccccccgcccccccccccc

SEQ ID NO: 118793 - DNA, 511 bp, Arabidopsis thaliana columbia
  unsure (1)..(511): unsure at all n locations
tgacgtcgactgcacgcgtacgtaagcttggatcctctagagcggtcgccctttttttttttttttttagctataattgtggtggtggnttttactttttagtcattcaaaagatacatatgatttagggagcatgccattgagccttacattgtattgaaacaataaaacctctttgagccttaatttggattgggaanacgtttaatttgggtgtgggggnnaacaccaggaggaaccctttaaaaaaacaccccctcgactgggggtcacttaggggcccacgcgcttttttgtgattgtggttgggttgttgacgtgggttgggtgggtgacggcggggccctgcggtctctgtgggaggcggtggcgcgcgtgccgtcggggtggccggggcagggggccctccggtgtgttgcggcgctgcccggcgacgcggggcggcagccgtcggctggcgggcgtggagcacggggctcgcggtgtgtgtggctctgggtgttgcgtgtgc

SEQ ID NO: 118794 - DNA, 526 bp, Arabidopsis thaliana columbia
aatccgactcactttagggaaagctcgtacgcctgcaggtaccggtccggaattcccgggtcgacccacgcgtccgggcacagtgaccaaaatcacacacttcacaagaaacaacctatggatccaaatgaatctccaccaaaccaatttcgccacgtggtggccatgccttatccaggtcgaggacacatcaaccctatgatgaacctctgcaaacgccttgtccgtgggtaccctaaccttcacgtgaccttcgtcaggcacagaagaatggctcgggtttattggacccgaccccaacccgaccggatccatttctccactctccctaactcatcccttccgagcttggcagggccaaagacttcataggctttattgatgccggctacccaggatgggaagaaccattcgagaagttttttgacaggccttaatttcacccccctggcgaggggaaatattgcggcgaccactttcccgtaatttgtgggcgtgggccggaaggcgccaaaagaaaagggaa

SEQ ID NO: 118795 - DNA, 479 bp, Arabidopsis thaliana columbia
actatagaagagttatgacgtcgcacgcacgcgtacgtaagcttggatcctctagagcggccgccctttgggttttttttttttttttttttttttttttaacaacgaataagttatttgtatacttcaaaaataataataacaaaagatataaatgaattatatagtacgtataggaatgtattagaaaaaaaaaccataaaacaaaaaaaatgaaactcattatacaaggggtgggaggctccctcctgcaaggggaacacacactcttcatcttgggagggtattatacgttgcagtagtagccgtaagtttactaaagcttcttaggtagattatatgtcttcttgagaaacctcgtggcagattcgtcgttacgggaacacaaaacacgtaagagtgtgtttggctccatgccattccactggcctgatgttggaggcaacggaagcctcgacttagctgaagaaccatatgct

SEQ ID NO: 118796 - DNA, 309 bp, Arabidopsis thaliana columbia
  unsure (1)..(309): unsure at all n locations
gacgtcaacgcacgcgtacgtagcttggatccttgagcgttgcccttgggggaggcccaaaaanaaaacaacaacacacaaagacagatctgcaaagcgagcgaggaagcttgtgacagacatatgaaaatgcaatccgacgaccagcgaacgcgcgaatacagtacaagcagtagaaagcacgcaagtttgtttttggggggggggacacaaaaaaaaagcacctacaaaattgtccacgcagcccctcccccagctccccaacacgacgtaatttccccaccgcactatgtcgctcacacgcacgtg

SEQ ID NO: 118797 - DNA, 430 bp, Arabidopsis thaliana columbia
ccgcgtacgtaagcttggatcctctagagcgtttgccctttggtttttttctttttttaaatcaaatggtttatctactggtaatgacaatttttgagtgcaccattatcaaatactggtaagatcttggctttacttttttccttggggaacaaaccaacgagaagaacaagacaattgtccaaccaaacttgtattttatggtgagagttttttgccgccttagatatcgagagaagcgggcaggagagtttagtctatttccctctaagaattgctcaatcaataaattgcagattgacttttgcgaagctgctacttcgcgggcaggaaaagaatcctctagccttaagcttaaccatacgtacagatccaaaaccttgtgaatggattcaagttccttgagttctggaggtggttttggaaacct

SEQ ID NO: 118798 - DNA, 499 bp, Arabidopsis thaliana columbia
ctctcgaagagttatgacgtcgaacgcacgcgtacgtaagcttggatcctctagagcggtcgccctttgggtttttttttttttttttttttttttgggcaaaaaaattacttattcatatatataatagatgaaataagaaggattacaagttattacataacatgaagtttcttgacaagagattctctaccatgccataaatagagagaaatgcatttttggagggtgggggcaaccacattttgatttacataacgatgcttttttaggttttcattcaaggctacaaacatcaagttcacctatgttgtatggacattaaggtagagcaagaggagctcagcttaatctgaacaatgtatccatatttcctaaatcatattgccaaggctgcaaattgggcatcgggttcttgggaacaggtggttgatattttgttgccggcggaactgagaggtggtttacgcccaccacacctactcagtccacccacccc

SEQ ID NO: 118799 - DNA, 460 bp, Arabidopsis thaliana columbia
atacgactcacttttagggaagctcgtacgcctgcaggtaccggtccggaattcccgggtcgacccacgcgtccggtttttttttttttttgcattctaaggagaagaggtgatcgaaaccaaccacacgggaggagcttatgccattttcctccccggggaaggtgtaacattcacacatctcctaagctcagacagctagatagatattggagtcataattagttgcggaggcctcacagaagaagagttcctttgttgataaagctgctgcaactccacctgtcaagcaaggagccaacagaccattgtggtttgcttataggagagcctctctaactgggatgggagattaccttggtgaatatgggattaccccctttgggttgagtgaactctcaaagtgagcgtggtcggttccgagtcagcggccggtggtgactcgccttgtatctgcggt

SEQ ID NO: 118800 - DNA, 339 bp, Arabidopsis thaliana columbia
  unsure (1)..(339): unsure at all n locations
gacgtcgactgcacgcgtacgtaagcttggatcctctagagcggtcgcccttttttttttttttttttaanncaaacattnatcacttagcgaacatatatttcatgcttgatggaggttgatcctagctgtaagtccccctcatcttcttactttgcacccacaagagcgaatatttagaatcaagtgggagcgcggcgagaaaaactttttttttggggggggggaaaaacaacacaacgctcttcattaaacataacaaaacccctctacaactgaaaatgtagcatggaatgcacctctggtagcgccatcccgcgtctaactgtatctcgcccg

SEQ ID NO: 118801 - DNA, 528 bp, Arabidopsis thaliana columbia
  unsure (1)..(528): unsure at all n locations
nnnnnnnnnnnnnnnnnnnnnnnnnnnnnnnnnnnnnnnnnnnnnnnnnnnnnnnnnnnnnnnncttttttttttttttttttttgagtacaacaaacaatcttcgatttgatgtgtgaccctattatccaaaacatgacccaaaaacaaaagaattacagacagtcctaacctcctacgttaactgttctccgggtttctcttctaccattagttgacttgtcctgtccgggttcttgttcactagctccatcttcttcttcttctccttcttcttcatctccgtacaacaccataacgacattaccatcatcatctacttcgtactctatattatcagcatcttcttcatcttcaccctcaccttcatcttcatcttcttcaatctcttcctcttcatcatcggcataatattcatcacctgcgcggacagagtgaaactcaggaggtggaggacagtcttcggttatggcctcatcacgtttcatcacaagatgcctaatcaccctcttatcactatctaacaat

SEQ ID NO: 118802 - DNA, 428 bp, Arabidopsis thaliana columbia
atacgactcactttagggaaagctcgtacgcctgcaggtaccggtccggaattcccgggtcgacccacgcgtccgggagctaattctgagcgcagaactttgtctctggtgtgtctgagacccatatatcgacggtagagtatgtttgcatctatcacgtacgctagtgcctatatcctagtagtacaccgatgaggatgtaaacctgtaaacgatgatcgggtgacgtattgaggatgagaagtcagcaaagatgacaatcataagttattggctagacctgacgaaggcactggtacttcatctgaatccattcttctcacagagaagtacatggatgaagaatgtgatcttctttccgagatggctggagctgaagaaaaggagctatattagttgctggatcttcaccctcagaatgacttgaa

SEQ ID NO: 118803 - DNA, 490 bp, Arabidopsis thaliana columbia
  unsure (1)..(490): unsure at all n locations
gacgtcgcactgcacgcgtacgtagctnggatcctctagagcggccgccctttggtttttttttttttttttttttttttttttaaaaaaaaaaaaaaaanannaagaannnnggggggaaagaatttaaaaataaatttaccccggggaatatgaccaaccaccttagtttccaatcggggggaaaaaccggcattaaaaagcgccttttttttccgggggggggggccaaccctcctaaccctccttttccaaacatacccccctgccctttttcatctacacacccacactccctcagctgcctccgcaccgcggcgtccggggcccagcacggccctgtgggcggtgcgcgccggccgtcgccggccccccgcgccgccgccgcgcgcggcccgtaccccgacgcccccccgctcccgcacacgcccccgcctcccccgccgcggccggcgggccgccgcgcccgaacctccccatggaccgcctg

SEQ ID NO: 118804 - DNA, 505 bp, Arabidopsis thaliana columbia
gaagagttatgacgtcgcctgcacgcgtacgtaagcttggatcctctagagcggccgcccttttttttttttttttgataaggccaaaagatgcagtaaaaacatctcaccaacgacaaataaacgtgtcaacaacaacaatgaaaaacatcccgaataacttaaaatgctttccagctaaagattctgtgatctgcagttctacaagaaacataaactcagtgggatctaataatgaaaaggcttttggatttcttaaacactaagcagcagcttttgctgtgtggggaagaaaagctccacaaacctacaacatcttggaataaaaggaaaaacactaagccgctttggctcgggggagaagaaaagcccccagcccagatcttggaggaaagcacctggcactctacacttccatttgtctcgaacgccccggccatggtcgtgcaccctcggtgttccgcccgttgtcggctggcctgcccgccgccgggctgtccgccgg

SEQ ID NO: 118805 - DNA, 535 bp, Arabidopsis thaliana columbia
atgatctcgccggctactatccgactcactttagggaaagctcgtacgcctgcaggtaccggtccggaattcccgggtcgacccacgcgtccggctgtctacaactcttagtggtaactatggcttccctctgtgcatctctgggatcactcagcaattaagtctgtccaaagaaatggcagatcatgacaagagaaggaaggtgatacagaggagaaggagatcagaaggtaaacatgagtacaagagcgcatggtgaagaagatgtggagaggcttcaagagaatgaagatgttagagatctagttgctttactacaagatctaggcttgtggagcttttcttctcacacagccaaagctgcttagtgtttttacttttattacaagatgttgtaggtttgtggagcttttcttccccacacagcaaaagctgctgcttagtgtttaaggaatccaaaagccttttcattattagatctcactgagtttatgtttctctgagaactgccaaccaccagatctttaacttggaa

SEQ ID NO: 118806 - DNA, 352 bp, Arabidopsis thaliana columbia
aaatttaaaagggggagcccgccaacaaacaaccaccacggtctttccgcacaaacctaccaaagaccaagccgaagctttagcgaacccaaagacagcaagaagacagaacaacccgaaatttttttggggggcggagacaacggtgcggacaaaactccccatggtgggaacactataaatccggcgcgtgtggttctcttgtgccggcttgagctcggggggcgctcgtggaccattcatatcagctgcgcaatgctgtagcctagggcaagcgagggaggggtctccggagttattgatagattggctggtgagggggaccggcggagcgcagacggtcaggaccggg

SEQ ID NO: 118807 - DNA, 522 bp, Arabidopsis thaliana columbia
tgatagtccggcactacccgactcatatagggaaagccggtacgcctgcaggtaccggtccggaattcccgggtcgacccacgcgtccggcgggtaacccacatttttgggttaacgaggatggatcgtatcaagaagaaggacagaagaataccaagggatacatatggggcaaggctgggactaagttactttgtgctgtattgtcacttcctgtaccggcaaaatctaccgcgaatgcgtgtggggaacaactctatagcgcaaatagcagaagcattctggaccatcttgagcataggactttgcaaaaaattcttttggttggaaacaggggttctggaactagcacaatattcaagcaggcaaagatcctttataaggacgtaccattcttggaagatgagcgttaaaacataaaggtgattatccacaccaatgtgtatgggtatctccggactgttcttccaaggcccgcaagcgtcttcaaaaacatccttctccctttccgcccacgcgcgg

SEQ ID NO: 118808 - DNA, 513 bp, Arabidopsis thaliana columbia
atgacgtcgcctgcacgcgtacgtaagcttggatcctctagagcggccgccctttgtttttttttttttttttttattggtctcttaaaaaacataaatatatatattaaaatttctcaaattactaatgccttcggctggaaattttaatagtaataatgaaaatactaatattgatagatgagtttccgataatgccctcagacttttaagggggggggcatcaaagcctgaccaaacttacaaaaacgcgcaccaatgttccacgaccttcaagcttctaccgtcacctccttccgactgtcaaccaacgcccctgccccaccaacactcacgcatatttgcaccccacaccccctcccccccttttttactgccccccctccaccgtcttctctgtccgcttggccctccgccggttcggcccctctcgggttgccgctctacgtgtggtgcctacggatggcccctctcccgcgccctccccgcccgcgccccttcgatcctcctcgt

SEQ ID NO: 118809 - DNA, 497 bp, Arabidopsis thaliana columbia
  unsure (1)..(497): unsure at all n locations
taggtacannnnnnnnnnnnnnnnnnnnnnnnnnnnnnnnnnnnnnnnnnnnnnnnnnnnnnnnnnnnnnnnnctttttttttttttttttttttttttacgtcaagaaaatcttaaatagcggtacggtacacaacaagatcacacattggtttgtggaacttctttagttcttattttactatgtttcttcaaagctgtgccagccttgaaatatccatagggtaagcttctgaaggcggttgtgcattgtacgatctccttgcgatgatcacatttgcggcttcagtagggtgaaatgcgtcccanaacacgtacgcattgcggtttctacacgggctctgtcccggtaacatgtgatctggccagcattccttccaataccggaacatgccgggttcgggactttaaacccaaatttgggaggattctggaacatgtcctggaaaatggcctagcctttgggttgatgaacctgggcttcgggtgattggggg

SEQ ID NO: 118810 - DNA, 551 bp, Arabidopsis thaliana columbia
atgatatgccggctacaatacgactcactttagggaaagctcgtacgcctgcaggtaccggtccggaattcccgggtcgacccacgcgtccggtaaaccttctgatgtcctctaaaggcaatgttcttcggtgtgatgtgacggggaaggttttaatgaaatgtttcctttcgggaatgcctgatttgaagttggggttgaatgataaaattggtcttgagaaggaatcagaaatgaaatctcgccgagcgtaagagtggtaaaaccattgagcttgatgatgtcacatttcaccagtgtgtgaacctgaccagattcaactccgagaagactgttagttttgtaccaccggatggagagtttgaactgatgaagtatcgaataacagagggtgtaaatctgcctttccgtgtattaccaacaatcaaagaacttggtcgtacacgtatggaagtaaatgtcaaggtcaaaagtgtgtttggtgctaaaatgtttgcccttggggtcgtggttaaaattccagtgccaaaacaaacagccaagaccaattt

SEQ ID NO: 118811 - DNA, 371 bp, Arabidopsis thaliana columbia
  unsure (1)..(371): unsure at all n locations
atgatactgccnnnnnnnnnnnnnnnnnnnnnnnnnnnnnnnnnnnnnnnnnnnnnnnnnnnnnnnnnnnnnnnnnnnnnnnccacgcgtccggcaaacatggcaagaggattgaagaagcatctaaagaggctcaatgctcctaagcattggatgcttgacaaacttggtggtgccttcgctcccaaaccatcttcttgngnnacnctncacaagtcgagggggagtgtcttcccttcttgtcctnggatcatcagggaaggcggggggtgggaaaaaannnnnatattttnnnnnnnntcctctttttttttttnnnnnnnnnnnnnnnnnnnaaaaaaaaaatattattttttttttttttttttttt

SEQ ID NO: 118812 - DNA, 492 bp, Arabidopsis thaliana columbia
  unsure (1)..(492): unsure at all n locations
tcgacgcacgcgctacgtagcttgnatcctctagagcgntcgccctttttttttttttttttagaataaacaataattttacgaatgttgtttaggggatttaactcatatatgcattatatatatcccatatatataatctttctacaagcaataacaacaaagatcatcaacaaaccaatcatgcggntctaacattcctattaaggggggnggccccaaccaacccaaacaacaaaaaacaaacccccacanacaacangaccaaaagaccccaggccccaagacccgccccccgacaagacaccgcccgccggccgcggcacagaccccgagccgagacaccgccaccacagcacgcaacccagaaacaacaccaacagaacacgccgccacaccccgcgaacagcgacaggagcgacccccccgccccaaacaccccaaaacacaaaggcgggcaaccgccgccgcccgacgcccccgccaccccac

SEQ ID NO: 118813 - DNA, 533 bp, Arabidopsis thaliana columbia
  unsure (1)..(533): unsure at all n locations
cacgcgtacgtaagctnggatcctctagagcgtttgccggggggggaaagccccctaaaaaaaaaaaccccacgagaagggggagggaggcgaaaagacaggataccacggcacggaaaacggaacgagccaagaagccagaagagaagacacgcccaagcggcgccgacaaaacacgaaaaaccaagaagcaagacgatacctcctttggggtgggcaacaaacccgaggtgagacaccaggacaaaagggcgcccgcagcagaacggccaagcggaggaacacaccccacaacaaagcaagccaagccgcaagacaacgtaccacagagaacgggatagaacgcaacgaacgccgtgacgagacacaaagacagcgcagaagagaaaaaaaagaaaaagaagaccaaaaagaagaagcttgaacggcataacaaacaaaaaaggagaacggaagcgagaaggtagcgggaagatgagaaaagggcagggccatagacggcgaggtgaccggccacgagaaaaccgcagaca

SEQ ID NO: 118814 - DNA, 526 bp, Arabidopsis thaliana columbia
  unsure (1)..(526): unsure at all n locations
ctatagnagagttatgacgtcgcctgcacgcgtacgtaagcttggatcctctagagcggccgcccttttttttttttttttttttaatcttattctaaaacttatcattattcttgcaaacgcgttataagagcagcaaattcattcaaaggaggaacatagactccttagaatacctgaacacaataggtttactgatgaatatgaaacaattattctgaaagtctagagaacaagcttattccttcttcaaggtgtcttcaacttggggcgcgatggaagcaactgataacaagagataagtgagggggtacacccgtaagcctccgggcctcgaggccttcgtggatggcaccctccccggcgcgtccccctgactcgggtcccctccccctcgcgtcgcccccttctcagagggccgcccgcacccacctcatttttcaccccgcgctccacgttgtttctgttcccctttccgtcctgcccccgccgccctccgcccatcgtcccccgcttttcttcctcc

SEQ ID NO: 118815 - DNA, 541 bp, Arabidopsis thaliana columbia
  unsure (1)..(541): unsure at all n locations
atgatatgccagctannnnnnnnnnnnnnnnnnnnnnnnnnnnnnnnnnnnnnnnnnnnnnnnnnnnnnnnnnnnnnnnnnccacgcgtccgcccacgcgtccgtggccaacctggtactgctcaaactgtcgacaaaaacaccagcttggcgagaaaagttttccgtcttttcaagtttgtcaatgattttcacggtcttatcagccccgtgcctaaagggactccacttcctcttgtcttactcgggaagtcgaagaatgcgctcttgtctacctttttgtttcttgatcaaatcgtctggcttggtagatccggcatatacaagaacaaagaacgaactgaattgcttggacgtatatcacttttctgctggctgggatcatccgtttgtacaagtgcagtcgagattggtgagcttggaaggctctcttcatctatgaagaagatggaaaaggaactcaaagctgatgatgagctgtatcgtgctaagcttcagaaatcaaacgacagaactctagctttgattaaatcaagcatgg

SEQ ID NO: 118816 - DNA, 568 bp, Arabidopsis thaliana columbia
  unsure (1)..(568): unsure at all n locations
tgatctccggctannnnnnnnnnnnnnnnnnnnnnnnnnnnnnnnnnnnnnnnnnnnnnnnnnnnnnnnnnnnnnnnnnnccacgcgtgcgagcacgcgttcggccaatcggaccttcaggcattcgtctaagcacaatatgagcaacaaaagataggcgggaagctcaacccggccacgaatatcacgagttacattctctattgaaggggatctagatatgggcaaagatctccttgaatagaggagcgaagggtatcgcctcttacaacctcctaacagcaggtgggggaatacggcaaggacgggggggtatgattcaacagggagcgcttggcgaaccacaatttggtcccccgctcagaggaaaacccgtcggtatatctcggttcttcttccctggcgctgagcggtcggccaagtctctgagcgcgcccgagggccacggtggaccgatggccgggacgggacggacgcccccatgtgatgtatgcggtaggtgtcctgcgggctcaccctggctccgcgccgagcgcgtcgcgcgcgcgggcgccgccgcgtgacggcc

SEQ ID NO: 118817 - DNA, 503 bp, Arabidopsis thaliana columbia
  unsure (1)..(503): unsure at all n locations
nnnnnnnnnnnnnnnnnnnnnnnnnnnnnnnnnnnnnnnnnnnnnnnnnnnnnnnnnnnnnnnnnnccacgcgtccgaaatcgttttgtgcagatttgatcttgcgttaattttctaagcaaaatatggcgggagaagatagccgtgaagctcaacgaggcgacgaatatgaggaatcgagtcctctcttgaaggtgaacgagaatgacggcaagatctgctctaaaagggaggcaaggcggcgcctcttgtgcctcctcccgcggcggaggaatacggctggaccggcggatgcatttcctgtgacccatggtagcggtattccccagcgctccggcgacaccccggcgtgtgtggatatggccgccggcggcccggccggtgcagctgggcgcggcgccctcgtgccgcccgcggtccatcctgcctgtccgccagctcacgcggataggttcgcgtgttgtccgctgcggcgagcgctcggggctgtcgctcgccgtggt

SEQ ID NO: 118818 - DNA, 487 bp, Arabidopsis thaliana columbia
tgacgtcgcctgcacgcgtacgtaagcttggatcctctagagcggccgccctttgtgttttttttttttttttttttttttttttttttttttttttttttttttttttttttttttttaaacagggaatttcccattagggggttttttttttttaagaattctttttttatatcgctttacagttttttttttggggggcctttttaggaacggggggagttccatacccccccttttgattttaattttgttggaaaatccggaggccccaagaccgcccttaagattccgcaaggcccaaaaaagggcccggggggaaacttaccccagttaaggggttggggaaccccctggggtatatatttgggttttttaaacagacttatttccggggcaatcctgggccagggttttttaggagaggccccggggttaatagattcctaaaatggtttttttggctgggggggaggattcggggttt

SEQ ID NO: 118819 - DNA, 520 bp, Arabidopsis thaliana columbia
  unsure (1)..(520): unsure at all n locations
ccccnnntaaaaannaaaaaaaaaaatttcacagggagcgaaagtctncaaacaaaacaaccaccagaagcggggacagctgagagagaacagccccacacaagaaagcgaaaagaccagagaaatttggcagaaacaacacccaaaaaaaacaccgaaacccgccacaacccaggagtttccctccctggaagtttggaacgacacaaccaaagaaaccaggaaaaaaaaacaccccacaacacgggggccaagcgggacccacaacccaccacgaaaacgcaacacaacaaaacagccccacagaacagcaaccacaaaaacaacagaacaacaacgagaacgccaacgcgcggccgacgggaccccgacacccgcccaccaaaacagcagcgacacaacccccgacaaacaaaaccacagacacacaaaagcggccaacggaaaagaaaggaggccgcgcccgacagaaacaaacgaacagcgccccacagcgaaggaagaaaagaaaaacaacgaa

SEQ ID NO: 118820 - DNA, 480 bp, Arabidopsis thaliana columbia
gacgtcgcactgcacgcgtacgtagcttggatcctctagagcggccgccctttttttttttttttctttaaactttatatatataagaaatcataaagtaaaataatgttacacttctaaaacctaacgagttatttcatcattatctcagtgattaccacaaatgaccatcattaaccttcttgttcatctgctaaggagttttctcctggggggggggaccaacccccccaccccgccgtaaaaactcgccccccccgtctctcgcctctctatacccgatgcgaccctctatgccctccttctagcttcctcttccctcctctcttccctgtttcttcactgccttcccacactcacacgctgtttcgctcttttggataagtcatttttccttctctcatcctactttactcttatcgttctttagcgtttttttgtttattttttttatccacagctttttttctcagccctctc

SEQ ID NO: 118821 - DNA, 535 bp, Arabidopsis thaliana columbia
  unsure (1)..(535): unsure at all n locations
nnnnnnnnnnnnnnnnnnnnnnnnnnnnnnnnnnnnnnnnnnnnnnnnnnnnnnnnnnnnnnnnnnnnnnnnnctttttttttttttttttgaagtttaatttgtatctatcctgaattaatatagtaaagacaaacaaatgtaaaatgttacaaagaacaaaactgtttcacccacttgaggaaaagagaaataacttatgatctggagaattccccagagctatccattattagtacgttgccaaatacaaatcagaaaggaaaaccaaaaaaagaactcactcttcaaactccttcctcagcccatcatcttgaagatgtctccaaacattccttgcaaaggattcttacgctgcacaccataaaacctctctgcaatctcgtccagcaactcgttaagcagctgatctctatctatgcttgacttatattttactcttaacatattgaaaagaggtaatgcatccctctgcaacgtttccagaagatatgagataaattggataaggtccgattctgaaagctcaggattt

SEQ ID NO: 118822 - DNA, 468 bp, Arabidopsis thaliana columbia
  unsure (1)..(468): unsure at all n locations
cacgcgtacgtaagcttggatcctctagagcgtttgccctgggggggggagccccaaaaaaaaaaaaaaagcaaccaaacacagcgcgaactgggaggggacctatggcagaaagagtgaacggggagcgcccggccacggagacgctattcacgcggagcaccgcccgctctcccataccacaacgaagggccccgcgggacggttctcctcattgggaagtttggcgcaaacaaccacgaggccccccggcggaagaganaggcgccacacgcgagagggtgcgcaaggggggcattccatcagaaggatgcgcaacacccactaatacggacgccgcgcccacacccccgcacgacatacacagcgccacaacgcaccgaaacccctgccgccctgcgcgcatgccaagggtgagggcggagcaaagagagacaataaagtcgccccggcgcagccgccaccccg

SEQ ID NO: 118823 - DNA, 507 bp, Arabidopsis thaliana columbia
atgacgtcgcctgcacgcgtacgtaagcttggatcctctagagcggccgccctttttttttttttttttttttttttttttaaatggaaagcactgtaaagaaaactgattgagttatattaaaggcgggcaaaaacagatgtcaatcctaagctggaaaaacattactaaaactgcagagaaaaaaagctgctttcacggatactttttgtgacggagtaaaaaaaaactaccaagttgggtacagaaaattaaaccacttgatgtttatggctatcatactaggcgttgttggcggtgaaattccttgcgaccctcatgggagctaaaaactcagggtacattcctttgggggggggtaatattgatgttctggatacctagacccgagcattctatgctattcgctcattgtttgtctccccgcggattcaattggcttgacccggtcgggagaacttgggcttggcgcccaccacctcccctcactgaccgtttagggtggag

SEQ ID NO: 118824 - DNA, 381 bp, Arabidopsis thaliana columbia
aaggcaggaggagggaaagaaagagatgagagaagcaagagggagagagaaaggagaactttttttttggggggggagagactattgtatctgtatgtttggttgcttgtttgacttttacggttgttttttttttgtatatttttttatgttttgctatgttgattttgattattccagatatttcatattgatgttatgtttgtagttttatgagtttatcactcgtgctattaaatattactatctactaagagtgtggttgtcctagtttatatggtgtatattattttcgtgtgttaataatagtgaagtatagttgagtctattagtatattttttggtatttgtttaatatttaattcatgattttgtttttct

SEQ ID NO: 118825 - DNA, 510 bp, Arabidopsis thaliana columbia
  unsure (1)..(510): unsure at all n locations
tgacgtcgcacgcacgcgtacgtaagcttggatcctctagagcggtcgctttttggtttttttctttttttttnntttagaaaaagactcaaaaattctttcaataacatgtagtcaacagaaagtagtcacattctacagtataagggaaaaaaagagacaagtcagaagagaagaaagtgatgattcatcaatttgagaattgtatccttccagggggaatgngancgcggttaanccattaataaaatagttccgggcctggggatctggaagagacacatcccttggcgtccgcgaccagacggcgggggggcggtgcggagcggggtcggcggagccggccttcggcggggacgcgcagcccgtgcctggctccaggcccgcctcctcgcttggcgactcttcgcagagccggcgggcggcgccgccacaacgtggtgcgtgggcggccttgtgcggatgggcgggtgtcggccgcacggcgccgcgctacttcgaaccgcggcc

SEQ ID NO: 118826 - DNA, 465 bp, Arabidopsis thaliana columbia
  unsure (1)..(465): unsure at all n locations
tgacgtcgactgcacgcgtaccgtagcttggatcctctangagcgccgcttttttgttttttttttttttttttttttaaaaaactaacctcaactcttttatttatttatttattaatggttgggttggaaactaacaaacgccaagaattaccaatatatatagtaacatccaaagtccaaacaaagccacctcttattnnggtttttttagggggtgggcccacctacagcaaaacaaacaaaaaactacccccccccatgacctcgcggggattacacaacccggcacccgttcatccgcacccccactcccaacctcaagccgccgtccgagagccccgaaccacacaccatcaaccccccgtcccccccacctctatttatcccgcctcgaccccccccctcccggccgtccgggtcgcctctacgcccccactcctcccgcacaccatcccgatcttg

SEQ ID NO: 118827 - DNA, 500 bp, Arabidopsis thaliana columbia
aatacgactcactttagggaaagctcgtacgcctgcaggtaccggtccggaattcccgggtcgacccacgcgtccgtacggctgcggacgacagaagggggaggaagataaagaaagttggaaaatggcaaaccctagaagagtagtgatcgagaaccagagattgtcacctttaatcaacctactgaagaagcctcaagcgattcctctgcttctctcgtttttcctgggggggacatggatctccctcaggttacaacactcttcacaatcacacgtgtgttggtgctgttgacatgcggaatcataccgggaagattctttgtttatctgacacgcgtcgccttgcgcctccgtccggttgttgtgccctttctgtctattaccgcatgcctgaccccgcatattctgcctcttccttttctcttttccgtctccctcttgtttttccttctcttccttgctcactcgaccatcctctggggactttccgtcgctcc

SEQ ID NO: 118828 - DNA, 502 bp, Arabidopsis thaliana columbia
atcgactcactagggaaagctcgtccctgcaggtaccggtccggaattcccgggtcgacccacgcgtcgccacgcgtcagagacacagagggtacaaagcaatttgagaagtccatgtactgtaggcttacgggtctaggatcacgagacagtctcaagttagaagcagaactttgtctatatggaaacgacatggagcaacacatttctggtggtgaagctgatctcacatgggccatagataatcgtataagagccgatggtggacttcttgacgcggatgagattcttcagcacattatagatggacctacaatcagactggacgcattgttttgctcaggaccacccgcaaggtcacatagcgaggttcatgatgagagtgggaacaagactggagagatcacatgtggacgctttagcccgaacctgtataggacatagtcatggcattgtgaactcaggtcatgacatgactgatactaaagtcaagatcttggga

SEQ ID NO: 118829 - DNA, 418 bp, Arabidopsis thaliana columbia
ctatcgaagattatgacgtcgaacgcacgcgtacgtaagcttggatcctctagagcggccgcttttttgttttttttttttttttttttttggatcccaaatattttattattataaaagctacaagaatacagtttctaatacatgtattagcaaaaaagtaacagtaaaaccaagggctacacacttttcttaaacaggaactttggagtccactgatttgagaacctggtcacccatttccttgcatcccaccagtttatttccgggggagtagatgtctccggttctgaaacctttgttcagagcatccacgaccgcgtcttcaatcatctttgcagccttttcttctccaagtccatacttgagaagcatcgccgcactgagaatggtggccaatgggtttgccttgtcttgt

SEQ ID NO: 118830 - DNA, 528 bp, Arabidopsis thaliana columbia
  unsure (1)..(528): unsure at all n locations
nnnnnnnnnnnnnnnnnnnnnnnnnnnnnnnnnnnnnnnnnnnnnnnnnnnnnnnnnnnnnnnntttttggtttttttttttttttttttttttagaagctgactccaactggatcatcactttttatttttattgaaactaaatcaaaagcagatacaattttcatttattatcttagaaactagtgtacataacaaaaccatatatatatattttttttgatagaaaccagaccatatattcagtggtgaagaacttgaaagaaggctagaaaattttcttccccattgatgatctctttggcttcctcctgcttcgccaatccccaatcgaagaagtaaagcaaattcaacaatgccatctcaacaagtatggtacccattgtcatccctggacatattctcctaccagatccaaacggtataaactcgtagttttttcctttaaaatcaacggaactgtcgagaaacctgtcagggttaaactcatctgcgttttcccagaggtttggatcacgacccatcgat

SEQ ID NO: 118831 - DNA, 521 bp, Arabidopsis thaliana columbia
  unsure (1)..(521): unsure at all n locations
gacgtcgcctgcacgcgtacgctagcttgnatcctctagagccgccgcttttttttttttttttttttttttttttttttttttataagnagagngnggggggggaaaaagaattcagattaattatgaacaaaatttttaattaccttttgagagattgatgttttttaagggtataaaattatagttacctccttcacccttctttttcgggggggggccaaaactcctccccctcnatagcaaacccccccccccatacacgctctccgcccacaaacaccccttgcctccccgctccctacatcccgccgccgcctccgcgtcccgatattcgcctgtccctctttcctttctccttcctcctttcctccctcttgtgctcttcgctctcgcctctttacatgcctccctcgccataatccaccctcttcccacccgctctcgtttaccacctcctctttttgccttcacccccgtctcttcctcccctccccgccccgcgcctccctctccccttc

SEQ ID NO: 118832 - DNA, 529 bp, Arabidopsis thaliana columbia
ttaggacaactctagaagattatgacgtcgcctgcacgcgtacgtaagcttggatcctctagagcggccgcttttttgtttttttttttttttttttttttaaacctcaaattttataaatttttatgaatgggaaaatcccattaaacatcgataaacacatgcttgtataaaaacatacgattaaatcaaagcaacattctcacaatggctctagtcacattagagattttttggggtgatttagtcaaactagtcaacggagaactcccattaaaccctccttgacaaacagaagcttcgacaccggcgtcgatcacaccgtgttcgccgaatttggggactcctttagagatagcttcaatggcttcgggaacatcagcgtttaagatcggtttgtatcttccactacattcatccaaagcccgttttagttctgggctctttttatatagaccggtgatctcgttcaaagtttttggtgccagcccctttgttttatcaatgaggatgagagccaggcccaaag

SEQ ID NO: 118833 - DNA, 284 bp, Arabidopsis thaliana columbia
atgatatgccagcactaatacgactcatttagggaaagctcgtacgcctgcaggtaccggtccggaattcccgggtcgacccacgcgtccgtacggctgcgagaagacgacagaaggggactacacgcagagctagacacacacttatatcaactgatcttctcccaaagcctgagaataaagaaaaacctccatctttttacatatatagataatcatcaaagaagatgaagatgatgaaggtggtgatgttgatcgtgatgatgatgatggtgatggtgatg

SEQ ID NO: 118834 - DNA, 444 bp, Arabidopsis thaliana columbia
  unsure (1)..(444): unsure at all n locations
tgacgtcgcctgcacgcgtacgtaagcttggatcctctagagcggccgctttttttttttttttttttttttttttttcctataaaggtcaataatatatgcatgaccagggttgtatccacttttgaatgttgagtaaattactattttacatggattgcccatgcattgagaagatgctatgttttatgagagctctatgattttttttggggggtgggctanattcacacaaacaactcttatattttccttctcaatcactcttatggctggtctcaaagtctccgttttcagaggccaaaacagggcgaaggttgatggctggcaatggcagcatcgcactggttgcccggtgtggggaatgggcgggagatcaggtgggggggagtgggtttgctgtacgggtcgcgccgcggtgcgccgtcgtaccggggtctatcc

SEQ ID NO: 118835 - DNA, 303 bp, Arabidopsis thaliana columbia
  unsure (1)..(303): unsure at all n locations
cacgcgcacgtaagctaggatcctcaagagcggtcgccggggggggaagagccaccaaaaaaacaccgcgncagcaaacgaacgagcgangcgagcaagacccccgggcaagccaccggaaaagcaacggaaaagcgcccgaaggggcgccaagggaacccgaaggcagaacgcagagaggccgaacaaagcgaaaaggagccctttctccggggggggggaacaccgcacaaagaagcaaaagcagaagagagagccacgccgccgaaacaaagngcagcccgcgacacnccaccacaacaa

SEQ ID NO: 118836 - DNA, 401 bp, Arabidopsis thaliana columbia
  unsure (1)..(401): unsure at all n locations
aaaaaaaaaanaaccnaaaagggnaaaaananaagcggagacgcgggcaccgcccccagggcgcgcgaaaaggccccagaacagaccgcagcaacacaaccagccgcacgcacgccaacggaaaaacccctccaggggggggggccccaaaccacacacacaacccacaaaaaaaacccccccaccaacacggccacacaagcaaccccaaccccaaaacgacccccccaccacacaaaccaccccccacccaaaggaaagngagacccggaggccgacgagcggcagacgcgacacgcaggcgagcggcagcgcgcacagcgcgggggccgaggcaaggcgcgccaagagccagcacgaaacaagcaagcgacaccgcacccgccaccgaaacgaccaga

SEQ ID NO: 118837 - DNA, 481 bp, Arabidopsis thaliana columbia
aagagctttgacgtcgcatagcacgcgtacgtaagcttggatcctctagagcggccgctttttttgtgttggtgcctttttttttttggagttaaccatgcggatacgtagaatattattgaaattgaactatatcattatccaatatcccataaatttttattacattaaatcttctttttgaccaaaccaatctccatgaacaaaagatcgatgttttttcaagagactgaatttagaaattggaaactaaaaagaaagggaatcgatctcagctccacatttcccatgggggaaaaccggccattcgattaaacccggaaccagaccgggcaccacaaagataggcttgggacacattggctattaaccagaccctttttgggtccactttaccccagggaggggaacccaatttggctctttttattcgaaattttttttggctcccccaaaaagggaggtctctccacccccgggt

SEQ ID NO: 118838 - DNA, 523 bp, Arabidopsis thaliana columbia
actcactttagggaaagcacgtacgcctgcaggtaccggtccggaattcccgggtcgacccacgcgtccgacggctgcgagacgacagaaggggacataaaacaaaaggtatagtatataccataaatctccgagattcttttgatgtatctgtccatttcattattacacaaactaggaaactgatatctctctattcacattcctctgattctatttctctggggtatattcacccattaaccatctcaatcttataaccctcaaaatcacaatcttctcttacaaaaaactttgaaagatgaagattcttctagtatcattgtggtttgacaggctcggcggaaccgtggcgtttctgccatggcttgcccgcgctctgtcagaccaacgctgccgcgtggtcggtccccctgattgttgcacggtggtgttggcgttgtcacgtctatagttcccgctagggcgggtgcgacgccgcgcgggggttccgcgcagcgttggtttgtcagccgcatgagcg

SEQ ID NO: 118839 - DNA, 516 bp, Arabidopsis thaliana columbia
  unsure (1)..(516): unsure at all n locations
ctatangagagttatgacgtcgactgcacgcgtacgtaagcttggatcctctagagcgtccgctttttttttttttttttttttttttttttggccgaccaaatttaagtcgaaccctttggcagcaactctttagtatccatatccaagatacattaaacatcagataaattcaaaggaataggagaattacacattctgatttcagcggtgagaatttttcaaagaccgagaataagcataccgggatgttactaacgaaggcggaagctcaggttcagttacgcttgggtatctttgtgatgatcggtagtactcagccaatgaatccggtgttacataccgggaatacaggtcatcatcttgtctacctggagaaaccatgtatgtccttgggggtctttcaagagcatggcgctcacaaattgaatccggtcctctgctggggaatcccgagcacccgtggattccgttgcgccggccgagggcgcccctacatgggcccgggtggaggga

SEQ ID NO: 118840 - DNA, 512 bp, Arabidopsis thaliana columbia
  unsure (1)..(512): unsure at all n locations
annnnnnnnnnnnnnnnnnnnnnnnnnnnnnnnnnnnnnnnnnnnnnnnnnnnnnnnnnnnnnnnnnnnnnnttttttttttttttctttttttttttttttacagggaattcaggatttatttcacaaagtgtcttaaaaaagttcaagctaaactaaatcagtcactacttctgctcagaaaattgaaagcccacacacgcacttcatagaatatagatttagaaattctacctacccgaaaaggttaaatcaaagacttcatcacttactttatatatacttgaggaccaaatagagtgcgaataccgactgttgtggacagagtgagctgccccctgtaacttttgtctgaaccattaacagcttttgtcgtcctctggattttctgtgacatttttcggtatagtagcctctttgacatttggggtcatgttatgctggtgggaaacgatctgtgttggatcgcaaaagaggctggtttggtcattcccctccgtagaacctgcatt

SEQ ID NO: 118841 - DNA, 549 bp, Arabidopsis thaliana columbia
  unsure (1)..(549): unsure at all n locations
gannnnnnnnnnnnnnnnnnnnnnnnnnnnnnnnnnnnnnnnnnnnnnnnnnnnnnnnnnnnnnnnnnnnnnnnnnnnnnccacgcgtccgcccacgcgtccgtacggctgcgagaagacgacagaagggatatcacttgaaatgtctacatgctcacaatataaaaggtgttccgaaatctgaatggcattgctcaagatgtgtgcaattatacaatggcaagtcttttcctcctatatacgggcgtgtcatgagaagcgccactacagcaaaaatgtcttctagtacagccgaagttcaattacccccagagaagggggttggcgccactgatcagaccttgtaccgttgcgctcttctcctgtctctcgttctgccgcctcgtctcctgtgcgtcccttcacccctctttccctgttcttttgctatttgtttgcctctagctccagtttgttgtgcgcatcttggcttaacttcttttgttagttttcctcctgcattttcgctccccgccggttttttcgtttcctctattcattttcctataa

SEQ ID NO: 118842 - DNA, 440 bp, Arabidopsis thaliana columbia
  unsure (1)..(440): unsure at all n locations
gccgcgtacgtagcttggatcctctagagcgtcgccctttggttttttcctcttaaacatataatataagaaagagaaagtaaataaggggaactgcgaaaacctaacgagataagcgaaataagctcatcaagacgcacggagacagagcgtaaccaatacgcaagcggaagaaaaactccctcnctgggggggggacaaccccagccacctgcaacaaaaaactccccagaaagggggaaagtcagatcccagtcactcccgcacggcaaggcgtagttcaacagaccacaccgacggccagagggaaaaatataagaaaggaagagtaaaagtaacaaagagaaaacacaagatgccacatacccgcgatgagcgaataaccgcccacacgcagcaccaagaaaaaaaatgaaccgcagtgtgcttgcataacgaag

SEQ ID NO: 118843 - DNA, 537 bp, Arabidopsis thaliana columbia
tctaatacgactcactttagggaaagcacgtacgcctgcaggtaccggtccggaattcccgggtcgacccacgcgtccgccgggagtactatacatagaaggggttcgtactcttgatacttctgctaccaacagttcttcagtccagatcacgtcggccacatacagacaggagccgataactgcataaatatcccctccgccgcggcggagattactcttgtaaaccgagagcttccgccgcggagtctctccctcacatcctgcaaaaaattggaaggatgtggaagggtggtgcagctgcggtccacctgcgtctccggattctgccctcgcgccgcgcgatgcgttatgtagaccggcgctatatccacccgttcgaccaacggttgatgtccctcccgagctcttgcagcacgtccccatcttcctctttccctgctgccgtctttcatttcctcgccgtgttctgttcggagcggcggtataaacttatcaacgggtcgcacgaggatccgctccatctggtcaacacag

SEQ ID NO: 118844 - DNA, 515 bp, Arabidopsis thaliana columbia
  unsure (1)..(515): unsure at all n locations
acgtcgcacgcacgcgctacgtagcttggatcctctagagcgttcgctttttttttttttttttttttttnaaaannagcagaaaacacaagactnctcttcattgaattaataatttccacaaaccaagcatgatttcttagccttagagaatttaagacacccatatttctcaccacttacaggaattcccagagcaccattttcgtcattgggggggggacacacccccccagaaacactctaacaacacccccccaccccaggggggcgaagggaaaccacaccctggcgcggcgccgcgcggcaagagcccggccaaagattggctgaggtggagcttagggcaatccggctgcgcacctggcacggttctgatgatgttggaggcggctccgtagtggtatggtggcagcgaaagatccatcgtattcgggctcgcgcgggcgaccctggtgtacgctagtaccaggagccagtatgtcagtgctccctgctgccggcgtagatagcgt

SEQ ID NO: 118845 - DNA, 567 bp, Arabidopsis thaliana columbia
atgacgtcaatgcacgcgtacgtaagcttggatcctctagagcggtcgctttttttttttggcctccaaaaaaaacccacccaacacaccaccatagaagcgtttacagaaagaacaacggtatgtctgcgcgcttagtagaagaactacacgcgctccttataaaccgattggataggtcttagtctctatgtctgttcaaaccacccaggagcgaccagatttcctccttttggggggggggaaaaacatatgaactaacctgaattaagcagaactcctaatactcacatctcgtcttatataatgtgcctcaattaatccgctaaactgccatacttgaataagtattaattgtttattagttatatctccaacgatacatcgaataataagtgtggggaggtaaacttactgaccccgcccgcaacagatttccatcactccgtccatttcacaactttaatatgactgtgaagttctatattttactacatatacagcttagaacagcagtataataacactaacagtgcgcgccgcactttacagtagcgtgtttaagtt

SEQ ID NO: 118846 - DNA, 508 bp, Arabidopsis thaliana columbia
  unsure (1)..(508): unsure at all n locations
gggaaagacgngacgcctgcaggtaccggtccggattccctttttacccacggggggggcgggtgcaaaaagacaacaaaaggggtaatgccagaggggatatttcccgagtctggcgttcatagcggcatctttttgggtggaggacccaaacatgaggccaagcttcagtcaaattatcagacttggtcaatggaggcctttttttcggtaagttcggccccatcctcagggtttcncctaaaaaaaacaccaacagggaccaatggcccggccatcactggatttctcattcctacaaaaggggaaatttgccttcattccccaggttttctgttgccagaggaacataaacttttaggggccagaagggggttttctttggtctttcccactggcactggtttgggtggataaatgacacttgcggaggggaggaggggcaaaggttacgctcctctaaagtctctaccgtggttaaaccttcattcttctttttgaaaggaaa

SEQ ID NO: 118847 - DNA, 425 bp, Arabidopsis thaliana columbia
actatcgaagattatgacgtcgcacgcacgcgtacgtaagcttggatcctctagagcggccgcttttttggttttttttttttttttttttttttttttttttttttataaaaaaggaacctctaaattccttttaggaaacccacacgggttttgtatctttttaaagaccgctaggaaacctgggccctccaagaatttgttcattctaccctcaagaatttaaaggcgggggtcttaacaacaggaattatgaatagacttccccggctcttttaaaattgggaatcgacaaaaaaagggaagattggaatacctggtatacgctttggttcctaatgcaacggggctgaccagggaccccttcttggcccaccgctttttggaagtgtaaaaatggttcaagagggctgatgtatcctctt

SEQ ID NO: 118848 - DNA, 431 bp, Arabidopsis thaliana columbia
  unsure (1)..(431): unsure at all n locations
atgatctgccggcannnnnnnnnnnnnnnnnnnnnnnnnnnnnnnnnnnnnnnnnnnnnnnnnnnnnnnnnnnnnnnnnnnnccacgcgtccgtacggctagaagaaaacaagatacgggtacgactgcacgacgacgagcgaagagtacgagatggaaagaacaacggtatggttacagtttattaatacgataaatgggggtcttctagattgaactgatctgttttgtagctaattttctcttggggaaaacaaaaactgcttttggcaaggaagcacactatttattatacgctacagatagagctacgaacatcatgatctactagngaacactctccaggcttcaatgttacgaattctatgtgtctatatagcactttggctgtcttactaacaggagcattttgggagagctatgatgcacag

SEQ ID NO: 118849 - DNA, 565 bp, Arabidopsis thaliana columbia
  unsure (1)..(565): unsure at all n locations
acgtcgacgcacgcgtacgtagcttggatcctctagagcggtcgctttttgggtgagagccnnnaaaaaaaaaanaanacaagaggaggcgactttttcaacaagcgcgaacgaagacccatcaaagaagatcagcgcgacaaaatcacaacgagaaccgcgcgaacacaagaacacacacaggagcaccgaaagaagacgacttccctccntgggatgtgggcgcccaaacaaaccacaacacaccaccaaaaaagtacccccccgaccgaccgccacggacaccgacaccaccatgcgagagaaaagagcgcgaggaggatagaagggtgcccacgagagggtagtagaaagatgatcggcacgacataaccgccgtgagacctaggcgagagtatcaatacggagaagccagacaacgacaggaacacgcagagcaatgacagataacacggtgagaagacaccgcagcagcgaccaagcgtagaaaatgtggcgttagtccaccaggtttagagtccacacaccgaaggcggcggcacaaaaaccaaagaagagagcagcg

SEQ ID NO: 118850 - DNA, 538 bp, Arabidopsis thaliana columbia
  unsure (1)..(538): unsure at all n locations
nnnnnnnnnnnnnnnnnnnnnnnnnnnnnnnnnnnnnnnnnnnnnnnnnnnnnnnnnnnnnnnnnnnnnccacgcgtccgtgcggctgcgagaagacgcanaagggcactgtctccaaactcatcggttcacctcctggatatgtcggatacaccgaaggaggtcagttaacagaagcggttagacgtcgcccttacaccgtcgttctattcgatgagattgaaaaagcccatgcgggtgttttcaacatgatgcttcaaatccttgaagatggtagattaacagacagcaaaggaagaacagttgacttcaaaaacacacttctcatcatgacatcaaacgtcggaagcagcgtgattgagaaaggaggaagacgtatcggattcgacttanactacgacgagaaagacagcagttacaacagaatcaagagccttgtaacagaggagctgaaacaatacttcagacccgagttcctaaacaggctagacgagatgattgtgttcagacagctaacaaagctggaagtgaaagaaat

SEQ ID NO: 118851 - DNA, 537 bp, Arabidopsis thaliana columbia
  unsure (1)..(537): unsure at all n locations
gacgtcngactgcacgcgtacgtagcttgnatcctctangagcgtcgctttttttttttttttttttttttnnnnnnccgaaaaattatatagatgtatttatgtggggnacatacaattaccatgtcaataatctattacaagaagaaactgagctcatgtgtgggggtgaacataaactccctgtcaccaaaaaccccgccttttttttctggggggggggcaaaaccacacggccacccccaaaaaaaaaaaccccccccacacgacaccacccaacaccccccataacccacaaacacccgcaaaccccgacgcgaacgcgcgcaggggcgcgcgaggcagagaagcaggcggcaagaacaacacacagacacacccgccgcgaaaggggaaggcgagcccgcacgcccgccccacaaggccccgcgacgcgcccgcgccgcgccccgcccccccgacacaacgcacacgaaacccgccccacacaccacgatctcccctcccgccacgcccccccccaccccccccgagccg

SEQ ID NO: 118852 - DNA, 496 bp, Arabidopsis thaliana columbia
  unsure (1)..(496): unsure at all n locations
gacgtcgccctgcacgcgtacgtagcttggatcctctagagcggtcgcttttttttttttttcttttttttttttttggagnncattttacatttatagcaatggtttgatgatcttttcccaaatgtcacattgaagaagagaaacattaggtttttggaagagaaattggatctacagaatcaaaaacatcatggccgtttccctaaaggggggggacccaaaggccgcttcccctgcccgagataaaagccaaagatcagcatgggcaaccattgcccagcttttaggtgctcaatctctgcaaatttcagcctctccagtcttctcaaagccccgctgctaaacacccgttcggaataagctggagatcctcttgtgtctcatctgtttctctcggtatgtcttttcttttttattttgttctttgtccgattgattcaactgttgttttcttggacggcgtttgttcgtgctctctttggctcttgtgcat

SEQ ID NO: 118853 - DNA, 519 bp, Arabidopsis thaliana columbia
  unsure (1)..(519): unsure at all n locations
gacgtcgactgcacgcgctacgtagcttggatcctctagagcggccgctttttttttttttttttttttttttnnnaaaagagaagtttgtattctgaaacaattaagctgtctaatctataaactctacaaaatacagaaatttgcgaaactctaaaacacaagcaactgttgagtagcactacaatgttcgttgcggctgtttttttttgggggggggcgacacccgcggtgacaaaacctaaaaaaagatctccccccattcgcgcccccgtcaagcaaccctgtcttgcttgcgcctgggcccgtagctgcctgcgcgtgctgcggcgatggtgggccgggcgcggtcgccccccgccggcccgtctccgcccgcgttcccccgccccgcggtgctccgagggcgcgcggacaccgcgcggtcttcctttgcactcctccctgccgccggcggcgcgctgcgctgtcttccgattccccgcgcgccccgggcgcgcgcccgcctgcgacgctcgc

SEQ ID NO: 118854 - DNA, 508 bp, Arabidopsis thaliana columbia
  unsure (1)..(508): unsure at all n locations
tgacgtcgcacgcacgcgtacgtaagcttggatcctctagagcggccgctttttttttttgttttttttttttttttttagagaagcaaaggaatcattgatcttcaagtttatcatttcattacactcaatagtataaagattaaaagcagaaatgggaacttaggaggaggctgcagtagcagcagcagcttgcggtggcggttttgttggggggggagncaccccacccctcaacccaaaaacaaaaacccaccgccccccttcacaagccactattttcccgctccttgggagcctctcgagtgcccacccaaagctttcaagaatggcggcgcagtccctccgcgcgttgccctcccccacgcccgcacctcctttcatcgttgcgccgccgccgccgcgcggcttatgcggcggctgctgccgggcgacgctcacaccggcgcccgcgtgcggcagctacttatgcacatcacctagcgggtgccgcgcgcggcgtcccggc

SEQ ID NO: 118855 - DNA, 490 bp, Arabidopsis thaliana columbia
tgacgtcgactgcacgcgtacgtaagcttggatcctctagagcggttcgctttttgggttttttcttttttttttttttaaaaaaacaaaggcacaatcttttttaaaaatagatagatatataattatcttcatcacacgtaacgtaatggacctagtaacctatacagcttccatacattgggaaagtaagaagaaaaaacaaatatgggacagggagggacttgaaaagaatttatagttcattttctacacattcaaagatgataaataactccacagcttaaagggaagctttactttacttttagctttctttttttagttgtcggctgctactgccccggaagaattgaaacgggttgtcgtgatacgaacattggggcggcggcccttgccaaaactgcgcctcgacgcgagaccttcgcgcggggccctgttccgacatggaggccgcgttaggtgtcgcgggtgtttgtatgctcggtgt

SEQ ID NO: 118856 - DNA, 452 bp, Arabidopsis thaliana columbia
  unsure (1)..(452): unsure at all n locations
tgacgtcaaatgcacgcgtacgtaagcttggatcctctagagcggtcgcttttttgttttgggctttttaattaataaannnnnnnnnnnnnnnnnaaaccttaacaacaaaatacatattattttttaaacacacattttggattttttttaaaaacactaaaaattcggggccaacacacatattaaacattacatattcccttaataagaggggtgttggggccccaaaaacagagaattaaaataaaaaaaccccccccccttcggggtgcggggggcgcgaaataaaaaggtgggggctgggaagccgcttttcccccccatcgaaatttctttccctaggggggcctcgaggtcaaccgccggcgcgccggcgtctggcgcgggggggcgtgggggacgtgggagcggtgcgggcaggtggcggcggtggccccctgcggggtgcg

SEQ ID NO: 118857 - DNA, 501 bp, Arabidopsis thaliana columbia
  unsure (1)..(501): unsure at all n locations
gggaaagatcgtacgcctgcaggtaccggtccggaattcccggttcgacccacgcgtccgcccacgcgtccgtacggctgcgagaagacgacagaagggaggaaacgaagaagaagaagaacaacaacaacaaaagccttttgagatatggacagcttctggcaattaggtgatgagctacgaggtcagacgagagcatcagaggtcacaagtggtaactgttgcaaagaagcttttcgaataggaatctaatcatgctggctattacatgttaatgtcgaatgtgtatgggggtaaggganaanggntgagtggtggaagagtgggggttgtttttttttggatgttgattttatgtagagtttgaggatggtttattatgttgtttgggtgatgttttttgtgtattatattttttttttttttgtgttgggtggtaggaatggggggaggtgtgttattttgtaggagttggtttgtgttaagttatgttttttgtta

SEQ ID NO: 118858 - DNA, 502 bp, Arabidopsis thaliana columbia
ctgcacgcgtacgtaagcttggatcctctagagcgttcgctttggggttgagggcctttttttttttttttcaacaaccaaaattcaactaattgtaaatgataaaccgctttttgcggaataaataacttgagaatcttcctacgcagaaaaccagatgagagaaaagttcactggccggtaatcctaaaaggtgatcatttcggggtggaggacactctaaagaaacatcaacttaaagagtccctgcgaccggccacggggtcccaaccagagctttttttttaacacttgaccttcctcaaaccatgagcgaagtacaaaaatggctcgggtagatgaacccttcttggggtaaacaaaacaccaagagcgggcattaggccttataactgcgcttttacggggagctctctgcagacacaaaaatgctagggaagggaaccaatcgtctcaatcccttgggtaagagctcttggtatcatgcgttgtaaaataaaaa

SEQ ID NO: 118859 - DNA, 504 bp, Arabidopsis thaliana columbia
ctgcatgtaccggcccggaattcccgggtcgacccacgggtgcgtgcggttgagagaaaacacaaaaaggggccactcactcaattaggtttcttgtaatactctctacatctgtcttttctttcttcattccatctccagaaatgggagcttgttcaacactctggatctaaccaaagaaaggcgttttctataggtgtcgaggtttatccatcaccaagggttataaaaacaaagccctccaagaccgaagggggtctacacaaaaacttgctgcgcctcagcaaaaccaagctgtccctcaccgtaccgacgtcactacaatcacgtcccccctcctcggcgcccctttaccgcacctcttggtgtttctccttactcacccgatccatactccggtgtatagcttacgttctactttctagtcggtacattattagtgacgattccctgaagtctgttacaacacacgcccttgcgccacatacccacattggtgtccgt

SEQ ID NO: 118860 - DNA, 514 bp, Arabidopsis thaliana columbia
  unsure (1)..(514): unsure at all n locations
gcacgcgtacgtagcttggatcctctagagcggtcgctttttggttttaggcttttttttaattnngcacaaaattatatcatccatattacttaatcaaatgaaaatattcataccattaaaataccttgagatcttttgtttttaaaaaccatatgcaagagaaaataagaaatcgcgaccaacaaaaattcctacttggttgttggggacacaagcgggggtgntctataaaaaagacccccctgggggggggggcgggtggacctcttttctttttgaatgcctgggaacatataggtttgatggggggatgtgtcgtttggtgcgtcttccgcttttatctccgtggtgtgttttatagtttattgttgacgtgtcctattgcttgcctgagtgcctggtgacaggggctgttgtgttgcctcgagtgtggtgattgacgtggttagtttcgtaatactgagatgacgtcaggaggctccggctccattcgcggtgtaaactctcaaag

SEQ ID NO: 118861 - DNA, 529 bp, Arabidopsis thaliana columbia
  unsure (1)..(529): unsure at all n locations
actcatttagggaaagcacgtacgcctgcaggtaccggtccggaattcccgggtcgacccacgcgtccgtgcgggtgtgagaagacgacagaagggcaactactgaagttgcggtaaaggaggaagagaagaaagggtttatggagaatttgtaagagaagctccctggacacaagaaaccttaagacggttcacccgtctcttccgcacctgtttttgttgcgggtgctgntaaacacgcgcatccattgcgagaagaaaggccttcttgagaacattaacgagaagcttccaggatgccaccctaagaccactcgatcggacgtggagaacgataaaccattcgatgattatcattacagtttttaaggaatatgatgggctgtcccgcctatggatgtttaatattctcggcgggttgatgagtccagggatcaacgcaacttttgtttccccccgcctgtcccggtgcgggctacttatcttttaacctttgatcttgccttttggcagggttggcctctttcca

SEQ ID NO: 118862 - DNA, 466 bp, Arabidopsis thaliana columbia
  unsure (1)..(466): unsure at all n locations
atacgactcacttaggggagacggtacgcctgcaggtaccggtccggaattcccgggtcgacccacgcgtgcgcccacgcgtccgcccacgcgtccgtacggctgcgagagacgacagaagggtacggctgcgagaagacgacagaagggtacggctgcgagaagacgacagaagggtacggctgcgagaagacgacagaaggcgacggctgcttttttttgaggggggggcacccctncagaagaccatacaaagaaacaaacacaacatattcattaatgcaaaacacaactcccctgtgtagagaacgagttgcaggataggatccgctaccacaggtacgacgttttgtcgggattcagtcgatttgtgagtggcatatgctttgtgtatgtttcccaatgacaatgtttaggtggtgaacggcgggtggtttgtgtgtgtttaggttcgtatcaagttatt

SEQ ID NO: 118863 - DNA, 542 bp, Arabidopsis thaliana columbia
  unsure (1)..(542): unsure at all n locations
ctgcacgcgtacgtaagcttggatcctctagagcggtcgctttttgggtaagtcggttaaaaaaaaaanaaaaaacgnanacggggacatattttgggccatataaaacaaaccacccccatcagcgcagacaacagcacctgttataacctaaaatataaaccaagaaggaccgtcacgagagcacagagacgtaaaaaatttcctcccgtgggatgttgggccaccccaccacaggcaaccatactaaaaaaaacgctctcaccaaccaaccaaagaaacgaaatccgacgcgcaggtagcgaactctcctataatctccgaccgaaaaaatcatcatcaatatagacacacaacaacaaccaacgagcgaccgggggcatgcagaatagagagttcaggccgaccacacacaacaccgattatcaaccaccgagaacgtcacatagaacgtgaacgtagaaggcgatcagaaggcgagcgagatcactgagatcatcccattttccccagagacaacgcgtcgcacataatacctcagt

SEQ ID NO: 118864 - DNA, 534 bp, Arabidopsis thaliana columbia
  unsure (1)..(534): unsure at all n locations
gagagagacagagaaaaggaggaggaggtcttcagagcggcgagaggggaaaagcccgggaggggagagaagagcggcgagggaacaagcaagggggagaagaagaagagaaccgcgaagcgnaagcaggcgaagcgcgggcagggggaagcggnaggcgcacaggagagcccgcggcagccaccccgggccgggggaccgggcgggggacgagggagggcgagaggggaggagaggcatccttaacggacggagggggggggagaggccgacaccggcagcggagaggaagaacaacaagcagaacagagggagacgagagaaggagggagagcagcaagggaaagagaagaagggaaggggccgggggggaggaggggccgcgcgcgcgaagggggagaaggagaggagagaggacaggagagcacaagaaacgagaccacacgcgcaaagagagagccaccgaggacgagagggagaggtacgaggcgcggagacgcggaagagacagagaagagaaaagagaagaggggg

SEQ ID NO: 118865 - DNA, 434 bp, Arabidopsis thaliana columbia
ctatgacgcagcatgcacgcgtgcgtaagcttggatcctctttagcggccgcgcgggctcgtattctgttattccttttttactctcgttttcttctcatctttctttcgcgtgaaaaagcgggcttttttccacgatcgttcatgaaaagaaaaggctgaacccaagtgatcgtctcgcacccatcaaatttttttccaccggggggcaaaatattcacctctaggtcaacaatgagacacaaaacatgttttgaaaaaaataccctggcttggtttcctaccgtcgcccgggcgcccccttctttttttgccccccacaatatcgggcaatattgggcgtcctgccgataagttgaacaaaggcggccaccagatctctaaatgccacacgcgctgttttttgtatcttcttgggggccacgttcccccaac

SEQ ID NO: 118866 - DNA, 970 bp, Arabidopsis thaliana columbia
  unsure (1)..(970): unsure at all n locations
gcccccgnaggagnggagagaaaggagagccacttcnaggcgcgggggggaggcccccaccagaaaaaaacgcggagagcaaagaggcacacgcgcgggagagcgagagacgagagagaaagagaggacaaccgagacacccgagaacgagaaaacaagaagagcgcaaggacgccgagagagcaaccgacatttttctgtaaggggggagccaccccagcgcacgggaccgccgaaaagccccccaagggagcccacagcgaccagagcagagagccaccgcagaacaagaggcaccagcccgagccgccccaagagagagcacaccgcgccaaaccgagcagacccccggccgagcgagaagcggaggggacccgacgacccgaggacccagccgcgcggaccaccaagaagcgcgagagagacacgcaccacgcgcgcaagccagccaacggagcgagagaccgcaacgagcagggcgcgctnggaaggaagggagggaagaagcgaccaggaagaaagaacgaccgcacgccccgcgaccggacgcacgaggcgggagaccgcccaaaccccgcagaagccgccccggcgaaagaagggcagccagtgggcagcgcgacgagggagaaaggaggagacggcgcccgccgcgcggaccgaaagagggagacggccgcaggccgcgcgagccgcgaggaccgcgcggaacggcgcgacggacaggagccccgggagacaacgaaggcccgccccgcacgcgggcaacagaccccgcgccccggcagcccaaacaagggtatcgaagcaggcgcgagcgcccagaacaaagaggagcgcgcagcgcgcgcccagcccggcgagggcgaggagagccggtcgccggaagacgccgacaagacgacagaacagacgcgcacagcgcgcagagaaaaaaagcacacagggccgcgaagaagaagagagaaga

SEQ ID NO: 118867 - DNA, 739 bp, Arabidopsis thaliana columbia
  unsure (1)..(739): unsure at all n locations
ccatagacgagctaggacgacgcatgcacgcgtacgtaagcttggatcctctagagcggccgcgctgggacctttaaaaaaattttttcactataacggcgagtggttagccctccccagcggcgcgggcgacgcccccgagcgcggcgggcaacagggcgggggccgccgagaaacccgcccaaaaagagcccccaaaattcctctaaaaaaggggaggggggggccgccccaacaaccctaaaaaaaaaaacccaagaaaaccagcctctcgggggggcccccggatgccagagtgaaccgcccagaaagagaagagacagcccagccgcaggaaaaaaacagacaagaccgccaaaacaaggagggaactcccccccgcgggggaggaaaacaaatagggggcgcgccacaccagccatctgcncggcgccggcgccgccgcccaagaaaaaggagcggggagacacccatgggcggcgcggcacgcggccgcaaagaaaaacaacatgcgggcggcgcggggtttncccgggcggaggaagagagggaagaagagggggcggaccgcacaagaccacccaccccccggctccccgccccacataggagaaagaacacnccaaaccacacggaacgccccccccaaggagatcaggcgcgcggccggacgggaggacaccgggcgagcagagacacgaggggcgcaccacgggcgggcagggaggacagggggaga

SEQ ID NO: 118868 - DNA, 946 bp, Arabidopsis thaliana columbia
  unsure (1)..(946): unsure at all n locations
tatagatttactatgacgtcgcatgcacgcgtacgtaagcttggatcctctatagcggccggcctttttttttttttttatgaaaaataaaacagaaataaatcttcagttttttcgtttaaatagtttcggtaaaatatttattagataatacaacaaaaattcaaatgatcttgtccaccaaaaaaagaagccttggaagtgcttaagaactgcgggctaaatgctcccggaagaggagagacttaagacaccggcggggggtcttagcaaacaaatcaaaacatttttgtctgaattgtgcagcgaccaaaaccacccttatggttcncaacccggtgttttcccagaagggccggagtcttgtgagggatttcacttggacctccttttcgggaagggaaaagaaagatgatgaagcgcttgcaagaaagtgagccgggataaaaaccctaactggaaacgggatcttgggctctcatagtttctttggacacaactccggttgggtacctttgcccttttaaatgtaagaattggtacttaaccatggggggaaaatgggttggagcctagtgcgggttcaccacctttggggggcccccccccacataggaggcgggggtgacccgggatttaggaccggtcctgaggggtacccccttttcttttgtggggagggatagaactggggggtatatgggccaagctcttcctgtggaaaatggtacgccgcccctctcgccgtgatatatagcggagaataaatgtgtaggcgggggggccataaggagcctgtccaatttgtgcggggcgcatggccctttatgccggaaactgcggcccgcccgtgaggttgacacaccctgaggagaggggtgtttttgccccgcgcgccttttatttttaatggcagcacatattgcttctccgggcctctaagaga

SEQ ID NO: 118869 - DNA, 411 bp, Arabidopsis thaliana columbia
  unsure (1)..(411): unsure at all n locations
aggcgccaaaggggacaacgacaacaacacggcgaccgcacttaagagcgagagaaggagaggcaaaaggacagggccaccgcggggaccgcgagagagacaccagcgggccgcggagcggggaggggagaggggggagcgagcgcccggcgcgcgccacgcccaaaaaacaccgaacgcggcacgggccgaggcacgcgacgaaagagagcgcgaaaaccccgccgagagagagaagccagagcacgaggagatgtttttcccgcacccccancccccgccgaccgagacggacggcgccagcgagagagcggaacgcgagagaacagcgaaggaagagagggcgccgaagtgcgagagcgcacgcgcgaggaggagagcgggagaggcggaggccgggcggagagcgcg

SEQ ID NO: 118870 - DNA, 495 bp, Arabidopsis thaliana columbia
aattgaacagcactatagatgactatgacgtcgcatgcacgcgtacgtaagcttggatcctctagagcggccgccctttttttttttttttttgaaaaacaagaagatgattaaaaactgcacatagaaaaaagcatgagcaaaatatatataaggtggaaaaaacaatgtggtctctgcttagctccttccattagaagaagagttcttatagttgtggaagaggtggacgagtcgctccagcaccgcagcactttttgagaagtaacccgagaaaccaaccggagtggacgccggagggaaatcttccgccggcatagcaaatggacgaaccattttctccattgtctccaagcttaaacaagaacctacttcttgaagcctctctggtcccattatcggaaagtgtggggtcccttaacaatgtctctgcctcgtcgtcattattccttaaggggagacaaatcagctccacgggtaaatgtaagttcaatg

SEQ ID NO: 118871 - DNA, 791 bp, Arabidopsis thaliana columbia
cactatagctagagcttgacgccgcatgcacgcgtacgtaagcttggatcctctagagcggccgcccttggtttttttttttttttttttttttttttttttttttttttttttttttttttttttttttttttttttttttttgtttttttcaaacgaaaacaattttggtttttttagaaacaaagggaattatttgggttttggccccccggcggggggggaaaaatttttgttaattcccccatggtaccaaaggggggggggggggttttaaggaaaaaaccccccctgcccccaccggggggggtgggtttttcccccggttttcttgcgaaccgagttttttttttataaagggccccccccaaactttttggggcctttgggaattttttgggtggggaaaaacatccccgggccaatctcgccccttaaagggggggttttcactttaaattgggccccttttttcccaaaaaattcttttcggggcaaaatatttttaaccgggtctttttttctcccgcgggggggggggcgggggggaaccccggattttccggcccgggcccgggggggcgcccctctttccctcttgggggggggattaaaagcgtgggggagaacatgggccatatgtgttcccggggggaaattgggttccccccccattcccccaaaatacgaccgggaacatatagtgaaacccgggggggccctaagggggagctccccccataattgggggccccctcccgccccctccacacgggaaaaccggggggccc

SEQ ID NO: 118872 - DNA, 464 bp, Arabidopsis thaliana columbia
tatacgactttcttagggaaagctggtacgcctgcaggtaccggtccggaattcccgggtcgacccacgcgtccgcggacgcgtgggaaaagagtggctgtctgaaatgattttggccggaaagagattctgtggagaagaatggtcaaaattgaaagtgaaatatccaacatttaaggacgagaatttgcttcggtattgcttctcatcagcatatattatctcaatgcttcatgatagtcttggtgttgctcttgatgatgaaagaatcaagtatgcaagtaaagcaggagaagaagacataccactagattgggcattgggtgcttttatccttaatactgccacagccacttttgattacagtggtaaatctagaaaaattcttgacttgagtaatgtagccaaatacaaaatatgacatttgttactatataaaacaaaattgtttcagataaaaaaaa

SEQ ID NO: 118873 - DNA, 1005 bp, Arabidopsis thaliana columbia
  unsure (1)..(1005): unsure at all n locations
ccgcgtacgtaagcttggatcctctagagcgggcgggctgtcttttttttttttttttttttggaatataaaaacattggtctttcctaaaaatttctcctttgttcattacaccaaaggtttgcataaaaagtattttgtagatcttttcgaaaatatgtcatggaaagccaacttttttaaatgggggggggagaggcaaaaggggggcaacaaatataaaaaaatctgcccatagggaaagtggggtggggcgcatgcaggggcgccccgcnncccgccctgttttttatccaaaaccttagtttattgaggtctctgatccggtgtgggtaaagggaccatcccactttgcccttttaaagctggcgcaggggtgtttgggatggtgtcgatgcggtcagaaaaaaaagacaccgggtgtcttgttccggcggagcaaacggacagggtggggggtncccgantaggtgaaagtggggacaaatccgtcttaacacttgtatcggaggtgcgtcgtggagaagattcttaaagcgcgtgtttttttttnttgtcccccgattgggtgagggcgatttgtgaatacgcgctgcaaggtgagggggcgtcgcgtccggctcgcatccagcaacccacgttcggcggcgccgtagcgtatgtgggagcgtcgacggagacaggcgagacaggatcgtcgcaccacacccttcacgctccgtggttcattgtgggatgcccgcgtgtggggtgttgtggcccgcggcgcgactcctggggtatcgccgacgcagtagggcacggggtgcggagacgacagggagaccacgcccccccccgcagcggagatgtatcaagcgagcgcacgccccacgcacccatatatatgtattatgagctaattagatacgacgagcgcggagcgatgtggatataaagtacgtgagtagcagagcaggataatatgtagacgacatccgccacagaaagtataatgagagatgg

SEQ ID NO: 118874 - DNA, 459 bp, Arabidopsis thaliana columbia
ggggggcgccccagaaaaccggcgaagagtcaagacgagtagttggagatggacagtatccataccgcgccacagagctgtaggtagaaattcactaacagcgcgcacgtgtggaagggtaaagcgagcgccgaaagtattttttaagagagcgggagcgcacgaagaaaggatgcgcagataaaaatgcagaatgtagccggccgaaatgattacccctagtgttagactcgctagcgggtgcgcccgcactgccccgccatagattaatttaggaaaacgctcgaaaacagaggtaccacacgggaatgagcgaggatatgatagacgccgcgcgggcccccagagagcctggacaggtagaagaagtgtaaagtaagagggggactggcgtaagacaaaaaacaaaagcagagtaaagaccgattcccattgttccagctgacgagggtcgaatga

SEQ ID NO: 118875 - DNA, 798 bp, Arabidopsis thaliana columbia
cccggccttgcgggggaacaacggcgggggaggaggtaggaattttttaggggggggtacccagttgtctggaagagagtgagggagtaggagagagaattggagtgaagagaaagagtggagaaaaaggaaaagcagcctgcagaggtagagaagacagacgaatttttttttaagggtggagcaaggcagagtagatattaaaggccgagtaaaagaactaataagccaaagtctcgcagttgggagagcctgcggccccgaaattatgagaagatcgtagacagactaggagggatgtagcgtgttgtctaggagagagggagagcagggggtgcatgagagaaataaaggggagagaagagcgacgagaggaggtgaggggaggaggagtgacgagtgggaagagatgaagagagagtgatgttgattataatgcgatggatggaggaatcgttgagtgagaaaaagggaaggagaggcgatccgcgaatgaggggtggggagtgcaaagagttaggggggttctcgtgtttggttattggctttccggtgttgtgctgcagggcgctgggtccgtggtgtggtgaggcacctgcttggtttttaatatggtaggcgtgcgggggtgccccggcgcgtcgtcgttgtgccgcctccgctgctttgccttcttcatctgttcgcgcgccgtttagttgggggctgtgcgggccgcccgcggcttgttggttgtcctgttccccaaacccgcagtttctttttgtttgtttgggtgcgcgtggagacttcggctcc

SEQ ID NO: 118876 - DNA, 449 bp, Arabidopsis thaliana columbia
gcactatagattactatgacgtcgcatgcacgcgtacgtaagcttggatcctctatagcggccgcccttggttttttttttttttttttttttttttttttttggggagaagtttgatcaataagacttcacttcaatgatccagaaaggagaataacattgaggtaaagaggtcaaaacatgaacaatacaatggcaagttcttgtttttaccaaggaatttcaaaagcctgggctcaaggcagaagaagtgggaaaccaaacatctaattttcacagctgatgatttgggaaatctaatctcaagttttttaacacccccatttgggcaatgcactggcaaaacttgaaagcccaacccatattttccttttttaagaaattcaaccttggtggaaattcgttatctggtttaatcaatttttttggggaagaagaaccccggatta

SEQ ID NO: 118877 - DNA, 318 bp, Arabidopsis thaliana columbia
  unsure (1)..(318): unsure at all n locations
agggggagngggggggaggggggggggaagggaggtttagcgggcgcgaacggcgaccccgagccgcggacgcccgcgggaggaagggagggagacgagcacgagcgaccgcgcgaggagagccgaccacgagccgaccgacgcgccgcgacgaagacacagagcgaagcccgcgccggaggcaccacaaaaggcgcaatcgcgaccccagaccgcagcccccgcacccccacgatttttttcgaccccaccgccgcaccaacacaaacaagacggaccccgacccaccgcacacgacagaccaagagacccacgaag

SEQ ID NO: 118878 - DNA, 937 bp, Arabidopsis thaliana columbia
  unsure (1)..(937): unsure at all n locations
ctatagcatagctatgacgtcgcatgcacgcgtacgtaagcttggatcctctagagcggccgcccttgggtttttttttttttttttttttttttttttttnttttttgtgacttcggggaaactcctaaaccgggacaacaagggttgattgccgcaaagagagccaaaagtggtaaaaaaggtgggaaactttttatcgatcttttcaaacggtggggacaatattagaaatatctttcttaaagaccccccgggggaaccccgggaagaaccccccaggccccccagcgggcccaccaggcgcaactatagggcctttaaagagcccggggaaaaaaggggcctccagggggaacttgggagaaaggggggcccaccaaaaaacccgcacccataggcccaaaggtaaacccgggaacccccggggaggcccaaagggcgctaaacggttgaaccgcgcggccctctttcgggggggaaacagccgaaacccagcggggcaactatatttccaataccccccaaaaaccgggaagacgcgtggtcacaaggggccctttttgggccatgtgcccgcaataagggcgaggcttgtggtcctcgccctcggcctgaaaaaaggccccaggaggggccccccgcgggcacacaaagggaaaatcgggggaaggggggtaatacggggaaaacacgaccccctcgggggggaatgcgatttcggaacatcccgcccccgcttcccacggccccaaggtgcctattagcccacgctggccacgggtagccgcggaaagggggaaagcccccttgacagttcctgtaacgtaagaaaactagatccccaacgccccgcgttaaatggggcgcgggagagaaccagtccgacccaaccccgccaccaaataggccacgcgcagcggcgtcgggtactggcc

SEQ ID NO: 118879 - DNA, 306 bp, Arabidopsis thaliana columbia
aatacgactctaatagggaaagctggtacgcctgcaggtaccggtccggaatttccgggtcgacccacgcgtccggattgatgattattcaaataatgtttgtatggttcgttagagaggactaaagtttcttatcaatttaaactctttttgttgcaatttatgtattaaatcattgtttaatagattgatgattcttcaaaatttttttttccagagagaggaagaaaaaaataaaaaaaaaagaaaaaagaggtggcggatgtaaaggatcatacaataccatccccgtgtcgacgccttttt

SEQ ID NO: 118880 - DNA, 456 bp, Arabidopsis thaliana columbia
  unsure (1)..(456): unsure at all n locations
gacgaaaagcagagggggcnaccggcggcgaggattccgccgcagaacaggagaggaaacacgcgcaggcgccaggaagcaaagacagaagcgagcggggggggaggggagaggggggaaagggaagggagagaccgcagagcnaaacgacgcagccgaaacgagagaaggaaagagacgaggggagcgagcggggagaagagaaggacgganaacgcccgcacgagtcaagaggagggccggagagcagggcgcagggaagcttttttcttcaccagacacagggagaggcgaaggacgagagcggagagagcgggcgagaacagagagacagggacggagagaggagagagaagagcacgaaggaagggagcccccacccacacgcggagcaggaggcaaggcggaaaaagcgacggcagggcggcgagcgaccagacagcgcaggcgaggcag

SEQ ID NO: 118881 - DNA, 869 bp, Arabidopsis thaliana columbia
  unsure (1)..(869): unsure at all n locations
ggggggaaaacgccgcgggcgccgggaggggggggccgggcggggggaagcccggaaacgaacaggacagcgagcacgcgcccagccgcgccacacccgccgcagcggcgcccgccgccgcgccccccgcccagggcgagacgaccgcggagagacccgaacggcgccgaccaagagtcctcctcccagggggggaaaaaagcgaaccccacacaaagacgccgaacaccacaaaaagaggaaagagaaacacgcgaccaaaaacaccccccgcccgccacaacaaaaaaagggccagcacaagaaagcacccaaacacagccgaaaaaaacaaaacacaaaccacccgcaccaggaaaccgacccaaccaaacgaccaccaaaaagggagacaagggagaaacacgccaaacccacaaaaggagagaggggaggaagaagaaaacgaaagaacaagaaccacaaacacagagaagcgaagaccaaagaacaggcgagacgcccgaaaacccgcgaccacaagaaaaccaaggccaagacggccaaccccgcaccagcaacgacacacgcgcccagacaagaaaagaaaaacagagacacaaacgaaaagagaaaggcgcggcacggccgcgcaggaagcacagggacccccggaacaaaccaagaccgccacaaaacagacgaagagacaccccacaacacacaaagcaacacaccaacaaaacaaccaacaacaaaggagaacgcacagcggggaaccccgcccaaggangaggaaaaaccgcagcacacagcagcggcgcaaaaaaaaagaaagaccagaaaagaccgcgagaagaacagaaagaccgaaaaagaacaaagaaaaa

SEQ ID NO: 118882 - DNA, 545 bp, Arabidopsis thaliana columbia
  unsure (1)..(545): unsure at all n locations
cccccgccccccattctccaaaaaacaaaaaaaacnncggaacnngtgntgggggaacgccccccancctttanangggagaaacganagaacncaaaaagaaaacaaaagagaaaacctccaacaaacacgagcaaaacgcccaccaccagcaacaacccacgcccccacgacgccgacacaaaaagacaaagaaagagacagcgcggagcgcagaaggagcgcgagaggagggccgcaccgcaaacgacccgcgagacgagaaaacccgccgccagaagacgagcacgcaccggagagaacgaagggttcttgcgggncggggcgggggcggcgcgggcggaggcgccggcgacaggaacgaggaagagaaggagaagacgaagcccagagggcgaaaacgcagcgaacacgcggcaaaaagacccaccacacggcaccgagtacgacaaaagccccagaaagaaaccgaccgaccccacgacggcagaagccaggacagagcaaacgagaaacggcagacaagcagaaccagagcggaagac

SEQ ID NO: 118883 - DNA, 397 bp, Arabidopsis thaliana columbia
  unsure (1)..(397): unsure at all n locations
gcacacacgaggaaaaaggggggcgtttttggagacaggcccnncttaaagagagaaccaccgccaaccaggcgcgccgcgagggtttccggaagccgggaaaccgaccgaacccgcaacggccaaagaccgcgaaatagagaggcgccgaacgcaccgagccgagcggacgcgaggaagaaaggacgccgggcagagagcgagagccgccagggacaacacccaagcgaaaacgagtttttcgcgcagccgcggcggccgagggaagggacggcccgaccgcgccgagaaagagcgagaagaaggaacgggcgcgaagaggagagagcggagccgcgaagaagaagcaccggccagcagcccacaggcgcggcgcccccgcggcccacaagcagac

SEQ ID NO: 118884 - DNA, 394 bp, Arabidopsis thaliana columbia
agggggaacagcagccgcgtaggaagattgggtgctcttgagcggggggcaggcctgttttttttaggtaaagggaggcgctttgtattcgggagaaagaaagaggtcggggccccctcattgtctctttgataaagggatcgcgggttgagccacaattacccgaccacaggggcgcggggggccttcctctatccccaaggggagaggggcccaatccttggaggcggagaataaataaaaaaaatgccccgttttcgcgcttttttgcgccccgcacgtcgtggggttgccgtaccttgccgcaccggttgttgatgtgtcggagcgggcagtgtgttgaagggacgaaactcacggggggcgctgtgactgcgcggaggcagaaggatag

SEQ ID NO: 118885 - DNA, 569 bp, Arabidopsis thaliana columbia
aaaaaaacgagcaagcgccagcagtttcccgcggggaggggcggcgaagaccccgccgccccgaagcaagacaggggagcgccgacacggagcggacccacgcggcgccacgagaggaaccacgggccacgacgcgcgcaacgccagcacgccgggcgcccgagcggggagcgaggcgagaccgccccggggaacgggcccacccccaacggaccgttttttttcacaccgcgggggcggcgcagcggcgcccccgccacgacacgcgcgacaaacaaggcaggagacaaaaaagagggaagaagcccgcacgagcccgaagagaggacagaaggacgccacggagagagccacgcgacgcgcgacagcacgcggccggcggaggacggcaagggccgacgggagggcaggaccgcgcgaccgagaagagcgcccggggagggggagcacgagaagggcccggcggggacgagagcagggcgcgcgcccccgcgagaccaagggacacgccgccacgggagaagggagcagcagcgggcggcgaacaccgccgcgccagcgcgcgcacc

SEQ ID NO: 118886 - DNA, 776 bp, Arabidopsis thaliana columbia
  unsure (1)..(776): unsure at all n locations
acacacaggcaacaacacaagaagaccaccaaacaaaaacgaccacgggccacgagcaacaacggaccagcgaacaacaccgccaaccggacagaaaagagccccaaacaaggggaggttcttcccgagggggcaacccaaacacaaacccccagagaccccaaaaccatacccgccaagcgcgccgacgccaacaaccccaccaccccaaacaaaaagaaggagacacacgaaacaaaagagaaacaaaaagcgcaacagaaaacagaacaaagcaacacaacacgacacgaacgcaacagccaggcagaggcaccagccaaaacccagcaacccacggagcgagacgagaccaaaagcacgaagaacgagtaaaacaagaaaaagaaaggaaaacagaaggcagaaaacagccaaccgcccacaccaacccccacacaaatacaggggnagccccccaaaacccccgccgggaaacacaaacgccacaaagaagcacaccaagaccacaagcgacaaaccagaccgacccgagaaagagcaccgacagcagccacccacaacaccacacatccccaccccaccagcgcgaatcagagaagaggcgcaggagcagccccagacgcccagcacaacacaagaaancaaccccacgaagccaccagaaacagacaaaaacgcccccccgcgccccccacacaagaagagagaggaggcagaaagccccaggccacgcaggacagggaaagcgcgcagccgcgcgagggccgcgggag

SEQ ID NO: 118887 - DNA, 205 bp, Arabidopsis thaliana columbia
agaaaaagggaggagaagggcgcggacaggcttttcacacgagcgggcggagagaaaaccccggggccgccagcgggcgggcgagaggcgaacagacggcgacgcaacggaaagagaacagcgagcggagagacggaaagcgaagccgcgcgaggggggagggagggccgagaaacacagcgacggggcacaggaagaggaaggc

SEQ ID NO: 118888 - DNA, 640 bp, Arabidopsis thaliana columbia
gacactatagctgagctatgacgccgcatgcacgcgtacgtaagcttggatcctctagagcggccgcccttttttttttttttttttttttctcataactctattatgctaaaaagaagaaaagatagaactgtgacatactttaggtgagtaagagaagcaagacatggttagactagaaactgtcgagaagaagtagaacaaaaaagaggaacttagaccgatcctaaaccgattaacaaaaaccaacaagtgtcaaaggaaaatactactaacggagctatcatcatggacacgccaaatggtctcacccagaagattagccaccgataatatcgttaactgcgggaagtaattcttctccgctactggtaaagtattcgtcactatcacttcttgcagcaaaccgcttgataaccgctctatcgcaggaggactgaaaacagcgtgtgtacagcaagcgtaaacctcacgtgcaccctcctcgtgtaaaagagctgctcctttcacaatggttccagctgtatcaataatatcatccaccattactgccaccttccctttaacatcaccgattaggttcatgacctcagcgacattgtggccgtgacgcctttatcgacaatgggaagtggggcat

SEQ ID NO: 118889 - DNA, 658 bp, Arabidopsis thaliana columbia
  unsure (1)..(658): unsure at all n locations
ctatgacaccgcatgcacgcgtacgtaagcttggatcctctagagcggccgccctttttttttttttttttgaagaacatttttcattctttcaattccagtatctcgtaaatcacataagagactaacttgtttttttattggctccatataaatttcaagcactagtctcgagcttaaaaccatttgttagcccgaagctggcccaatacgctgattagaatcacatttagttcctgaagttacacagacatggacttctctatccacaggggctatataaagagagaatcaaatgaagggttggttcatgacaaaaccacactcaagtctcaacttctctaattcatctacaatcatagctaggtacgtcgcctggtgcactctttacttagttgtaccttcccactcaggccaattctggcgtggtttctttcactattgcatcttctttatcttatggggggggcttagcaataatgcttgtggaagaaatctttcatcgatcttcctggactgaggtctgaatgaactcgnnnagttaaagattggcttctggggaataaaaacctgggatctctcgggccaaaagggaatcaaccgactccagaccacccccagatagagggtggggaggaagttaaaaatttccaacaaa

SEQ ID NO: 118890 - DNA, 809 bp, Arabidopsis thaliana columbia
  unsure (1)..(809): unsure at all n locations
ggagacactgccgcgtcgtgagctggatcttttacggcgggctttgcttttttttgtatgtattaataagctattaaaggtcagaagaaattctcgaagtggtacattagccccgggcagcgagcgagccgttaaaaaaaagaaacaggggggttttcttaagggtggggggcaggacgtaaattagggagttaaactgtgtgatgagagaggttccttgagatctcagcaagtgttttgctgcggctacgcgaagtttttgtgggcctatgttgaagtgttggccagccttccgtaggtattgggggggggagcccaaatgagctgcgtggacaattgtgatagaagggctggagattgggatgctcggggccggagctaaggagtttaaggtaggggggggtgtcccaccatagcagtgtgtggtttgttagtttttttagggaggaccaaaacactttggcgagaaattgagtgcgattgttttccntttacccgttttgatttgggcgggtgtaggaccgtagaagggagaaggtggggccggcgggagcggtgggaggaggctgcgagagggtgtctttgtcgtggcgcctaatggtgattagcaagcgaccttgcgcagtgactcagtgtgtgtccgcgggggcgtggagggcccccggctgatcaccgttatatgtgtcagatttttagagatggcgtgggaggctgtgatcgtcgccgcgcgcggcggagctgtgggcagcaatattagaccgcgtcccgctttattttttttgcgcgattgctcgttctgctcgcattgc

SEQ ID NO: 118891 - DNA, 919 bp, Arabidopsis thaliana columbia
  unsure (1)..(919): unsure at all n locations
gacctatagaatagctatgacgtcgcatgcacgcgtacgtaagcttggatcctctagagcggccggccttggttttttttttttttttttttttttttttttttttttttttttttttttttttttttttttttaagaactttttttttttggcaccgagaaaaaacttttcttaaaagccacaaaaaaataattaatttttcaaaagtttgatcccgggcgtgtttccgggaaggaaaagatantccctgggagggagttcaggttcctaaaaatctcccattttcccatatcccttaaattggggtaatcaaaaaataagagaggacccccctatttttccaattcaacccccagaagcttttaaaaatcttttacaattaaaaagaagggcccccccccttcttccgggggaaatttttaacggggggggggccctccacaaaaaaaccccaattaggtttttttgggaaaaccttttttacaagggtgtttatggtcttggcaaattccccaaagtaaaattcccaaattgtgggttttcccaccaaattatgagattttgggatcagtgttctttctcccatntttctgaggaaggataagggcttttggttcccttccctttttaaaaggggaacctaagggggaggtttttggaaacattaaattttataaaaaaaaaaattccttttttagaacgggcaaacccaagctcccaaaaaagaaaaattggttttttttccccccccatgggtggggcggaaaaattccccccctttaaaaagtttttttttttaagcgaagaggaaaggggttttttgttttaaaaatagaaaaaacagcccgcgggaaacatttgttttttttgggtgggggcgaatagtgaagaaaaattttcgaaatgcccgcccggggg

SEQ ID NO: 118892 - DNA, 494 bp, Arabidopsis thaliana columbia
aatacgactctatatagggaaagctggtacgcctgcaggtaccggtccggaattcccggatcgacccacgcgtccgaacccactaagaatacagcaaatcgtctcttcgccattaaaacaccttcctttgcaaacaaagcttcaaactttctcttaaaacacccccaaatcagcaaagatagggttaatcgaagaacctcaccgtaagttcactgaggattcaagttcttgctttgggttaaggaagagaacagcaaaaacctcaaggagaagaagaagccaaagatgactcagagtccaaccacgacgggactggagctggactgttaccaacggaaaacttgtgccttctaagcccaaatttaagccttagccttaagccgaaaaagaaaaaaacaaaatggtgtttgattccgggaagcttgggttttaaggccaattttccaaaaaaaaaaaagaaaaaacacttttcttcttttggggggtaaaaaaaa

SEQ ID NO: 118893 - DNA, 252 bp, Arabidopsis thaliana columbia
aagcacgcgtacgtaagcgttggatcctctattagcggcgcggccgtgaacccttttttttaataaagaaagagacacagagaggtacattcacaaaatgagaggactctgctgaaagcccggacaaaagagacacaagctgaacacagaaaaaaagaaacaccaatgggcaaaccgaacaaatcctcgtatctggagcggggaaaaccaagcaccggaatcccaccataaaaagaaaacagaagggagggg

SEQ ID NO: 118894 - DNA, 478 bp, Arabidopsis thaliana columbia
  unsure (1)..(478): unsure at all n locations
gggggncgggaccggaactttaagggggaaggaaaaccgccggagggcaggcgcggcggagaggacgaggcggagaaaacggaaagaggcagacaggagcgcgaccgacaggagagagaggccgcgacaagggcgaaacagcaggggggccaaagagacagcggacaggccggaggccgaaggagggattttttttaggaaaaagggagcagaaaggagccccggagagcagcccagagaagacagggtcaccggacaggagcgaacacagaggggaacggccacccccggagagggaggccggcggcggtgggaagcagaagagcgacacgcggcacagagccagggcgcgagagggagaagcaacggcaggcaggagagcgcgggacgaagaggaaggggaagaaggccgaaaagagcgcaaggcaagaaggcaagagaggaggagaaggagagacacgcaggcagcgacgaacca

SEQ ID NO: 118895 - DNA, 943 bp, Arabidopsis thaliana columbia
  unsure (1)..(943): unsure at all n locations
gcatgcacgcgtacgtaagcttggatcctctagagcggccggcctccctttttcgcttctaatttgtgcgacggcgggataaccatagaccccttaaagaaggacagggccaccggacaaaatcgacacctacacacccaaccgccagaacaaaaacgcccgaacgaaagaagaagaaccttcttacacgaggggaaaaaaaggggacgggcacacacgaaaaaatccccctagataaaacgccggggaccccccggccccggcccctggcccgggccccacggaaaaaaccaaggccacaaaccagcggaatggccccataggacccccccaagaatcccaacagaaaaaacccgcgccccaaacaaaacttcgggccactcgccgccaagaaaccctcatgcggcacaatcaggaaccaccaggcgaggcaccaaaaaagcccaacccagggggntggagaaagtcctagtttcattattatcccccaataccacccctacacccggacacgtcccacggaacgcgcggccctgggcgggtccaatccacccgagtataaacgacccacgctatcctatacgcgcccaacaacaacacgccacaacccccccaagcgcacgaaggggaccacacggaatcccgcggaacccgtaaggcaagccacaacaaccggaaatacaccccgccgcggaggccgtgccataaaggcagcccgcgaaccgcgagcccccacgcccccccacccgccggagaaaaccacacgaccaccacctacaccgactcaaaccaacaccaccacccgccccaccgctcagtattgtgccactccgccccccacgaccacaactgttgaagtgccgccgaaagagaagcaagcgcggagcgccggcggacccatgcccggtacccccgccagaactccgcaaacgccccgcccccc

SEQ ID NO: 118896 - DNA, 430 bp, Arabidopsis thaliana columbia
  unsure (1)..(430): unsure at all n locations
agggggaaaccgcctgccgcgtacgtaagcttggatcctttagagcggccgcccggccctttttaattatattttttataacgaacttggtttttttcgggacccaaatggcgagtccattgggggggtgagggaggaattttgtgttcaagcccaacgggccatcacaaaaagcaaagcaaagcatgtatcttttataaaagagggggggccaaaagcatttcgattccctaaaaaaaaaccccccaaaacttggggcagattccgaacaatcataccattcccccgggcncgcgccccagtttttctacgtgttcgcacccccactgggaaaaaaaccccttaatcccggggcccgagggttttgagtccattccctacagggcggcgtcggtccacagaccgtagaggggaggaagccgacccccct

SEQ ID NO: 118897 - DNA, 622 bp, Arabidopsis thaliana columbia
  unsure (1)..(622): unsure at all n locations
cggcctgagggggaacagcccgccgcggaggaaggtggagacctagacgccggcccagccgtccgtttgctagggggccagccgacgacatgcagcggcgaaggggtgcccccggcggacgcgggggcgcagaacaagccggcgggagggggaaggtgagagcgcggagaaaaaggaaaccttttcgcagcgggggggaggaggcacagaagaagcaaggaaagagccggaaccacaagaagcagacggaggcgcggcccggcgaagggaccccggacgtccgcccttatgagggagaggggcgggcggcggcgaaggaaggagcgacagaggacggaaggggggaggaagcaccaagaccaagaagagcggcaggccggagggaaggaaaagaagagaagagagaggcacaagcaaccgacacgaagcaacgcaggcacaaaccagaaatcagaaaaggagagtgntgaaagggagagagaggcagaaaggtgggggggggggggagaccgggggccgggggcggcggcacagtgagcgggagacacgggcatgccccgcacaaaccgcggcccgggaagagagagcgggcgcaaggggaggcggcacacgggaagaagac

SEQ ID NO: 118898 - DNA, 447 bp, Arabidopsis thaliana columbia
caacgcccacaacaaaacaacgcaggaaacaaaaaagtcgggagcgaccccacttgaagggaaaccgggcgccagcagaccggaccggaattccgaaaagacacaaaccggccggggggcggaagaggacgggaaaagaggaagggagagcggagacggaggaaagggagggaaaaccggcgacaaggggagaaaggaacgccccagaagaacaccacaacaaaaaggtttttaacaaacggggacacggcagagcggaaaaaaggagagcgagagagaaaaaggaggaaccagccccgcgggaaggagacggaacgccggaagaaaagccgagggaaaagaagcaaaaatcgcccgagacgaaagagaggagagaacggaaaacacggagagcgagaagcgggcacacgaacagagaagaccgggcaccgaaaggagaggcaaaga

SEQ ID NO: 118899 - DNA, 903 bp, Arabidopsis thaliana columbia
  unsure (1)..(903): unsure at all n locations
cccccctgcagggagaaaccaccagcaacactgataccacattttctcctgcgcgggaccttaaattaaataacaacatcagcgcgtacatcaggctgggaaagcctccaccccccggtaagtagtgtgcaaaaatacgtagactagtcatgcgcgtagactctacccggtattttttttaacgtgacagatcacccgacatcgtcgaataatatcccccataataggacaaaagatataacacgaaattgacggctcagcgctatgacggcgctaaccgcccctattatttttttcgcacacgctaccgtgattgacccgacacctcaatcagcgacaaactttattaccaaggaccgaagttaacagagcgcccgggagatgtaataaaagaataagatgaaaanaacacgggtctgcgccagcagtaacgaacaccgcgagacagtagaaagagcgagagtctagctagtagaatagatttgtagaatattaccaaatataacgatgaaccgaacagccgtgtcggccgagcacgaggtagcgcgaggatcaggcgcggatacgcccggtaattaatgggtagctagttatcaaaccagtacatgataatcacatacccccgttcattattgatctttcgtgcctccccctcgcatgccattactactacgatagtcggtcaattgtgaatcatcggctccccgcccatttgttttgtttcgttatccccagttgtattagcggtgccccgccacgacccgtaaaaacacacgcacaagagccattagttcgttttttcgtactaatgccacaaccattacaaatagatatatactatgctgccccgccgctcccattttttataatggctgcttactaaatgaggtgggagaaaaccgt

SEQ ID NO: 118900 - DNA, 697 bp, Arabidopsis thaliana columbia
  unsure (1)..(697): unsure at all n locations
agcgaggggaaacaagcacaggcgccgagaggacggagacggctccagcccggggcaagcccccacagaaaaggagcgacacagcagccaccccagcaagaagcaccgagcaccaccccgacacgcgcccccagccagccggaggcacaagggagcggccggccagaacggacgcagcggacgacaccggcagctttttcaaaaaaggaggagggagcgcgggggagcagcaacagcacaaaggcgaccgccggagagacagaagaacacggaaccagagagacgcagccacgacaaagaaaccccacaacacgcgcgcccaaaagaagaggaagaaagaaagggacacagaaaggaggcgccgcaagaagcagggggaaaggagagacgccacccagcccacctcgaagcaacaaaggggaggagaggacacagcgaggaagaagaaagaaggaggcagagcaagaaagaagacgaagccccacaagacacgagagaggggnnnncagcgaggagagaggaaagggggagtaaggagagaggaaaagaagccacgcagccccacacgcgcacagacagacgccgaagaaaaagcagacccaggcacgccgggagagcagggcggcacacgaagaaagacaccagacccgacacgacaccgcgcacgacagccggcggggaagagccgcgaggagcc

SEQ ID NO: 118901 - DNA, 360 bp, Arabidopsis thaliana columbia
  unsure (1)..(360): unsure at all n locations
gacctatagaattactatgacgtcgcatgcacgcgtacgtaagcttggatcctctatagcggccgccctttttttttttttttttttatataatttaataagctcattcaaaaattcccaaaaacaagtatttcaaatatcgttacaatttacccccgggacaaatcaacgagccatttaaaaaaaaattataacaatggtgaacaaatataaaataattgatgggcaataactttaaatgtanggagttaaaaattgtgttatgagaagagcttncttgcaaagcctcaacaaggtttgtggtcctaccaagcaacgtcagcatcatttcccggaccgatcggttcaaaggggtttcac

SEQ ID NO: 118902 - DNA, 216 bp, Arabidopsis thaliana columbia
tatagactagctatgacgacgcatgcacgcgtacgtaagcttggatcctctatagcggccgccctttttttttttttttatgttttaaccaacaacactttctctgaaaactttttattgaggttatgaaactgtttttaaagcattcccttgcgcaagttttagcttgaattcttgctcaaggaacacaactatatgaagttttttaaacaaaga

SEQ ID NO: 118903 - DNA, 565 bp, Arabidopsis thaliana columbia
cactatagatagactatgacgtcgcatgcacgcgtacgtaagcttggatcctctagagcggccgccctttttttttttttttttttttttgacacaacacaaacaaatagtgatatcatgaatcattcatcaagagtcagtcccattaccaacaaatccaagataaattacgaaagccttgttaaatggtaaataattgatacacctgtgtgagaccgagagatcgatcacaggcttcaaattcccccaagaacaattgttgaagaaacacaagtgttataatgattcaaggcttcttcctaatgctccattaaagcggcttcggtttctgaaagaggagctaacaagtcttcataggcatctgataatagggatgagtccattagtaaaggtggggaaaatacttgatcatcaatatcgtaaaatgattggtgtgcatcagaagctacactgtttgatccagccaccgacagaaacccgttcccattatcgtaatctttgattgaatcaagatcatcatacgtgtcaagtatatcgctgtacttgcttggtgcaaactttcggg

SEQ ID NO: 118904 - DNA, 334 bp, Arabidopsis thaliana columbia
  unsure (1)..(334): unsure at all n locations
aaaaccgaagcagaagacgaggcggaagacacaaaccaagccccccacagaaagacagccagacaccgacgccgaagaagttttttttggcagccccgcagcggcgnaaggcgcgcgccccaccccgcgaagccggacgcacaacacaaagcagaccaagcgagggacacggcgcgcccaccgagcagacaacggaggaaaagcaggcaccacaacggagaccagcgcaccggcgaaagaccgcacgaccacgccgcgcagcgcgggaaaggaggcagagccgagagcgggcgaggaagcccgggaaccgaccacagagagacagaagagagaa

SEQ ID NO: 118905 - DNA, 831 bp, Arabidopsis thaliana columbia
  unsure (1)..(831): unsure at all n locations
nnnnnnnnnnnnnnnnnnnnnnnnnnnnnnnnnnnnnnnnnnnnnnnnnnnnnnnnnnnnnnnnnnctttttttttttttttttttttttttttttttttttttttttttttttttttttttttttttttttttttttttttttttttggggcccaaaaaaagcttcaacaaaaaaattcccttgggccctttttaaaaaaaatttttttcccggggggggtttcctaaaaaacaaacttttttacaacggaaaaaaaaatttccccccggtttagtaccaaaaaactttggttaaaaacccctccttttgtttttacaaggggcccagggtcaaaaggacttttacataaaaccaaacaacccctaacccttgggggttataaaaaaccttcccctttggattgggcggggtttggccccaaaaatattttttttcccgggagcctttattttttcgggggggatttccccttgatccaaggcccccacatttctttttttttttgagaaaagggtaaaaaccccgcctgttttttttgaaaaacaaaacttttnnnaaggggggtttgggcgcctattggagaacccataaaattctccccccaaggggccggctttttgaaaaaaaccccggggttcctcctgcccctggccggggggattgacccccccaccccctcgggcggaaccttgtgggaaaaagccttctttccacaattgaagggggcaaaggggccccccttccggttcctcccggaaacttgtggggttataaaaaaccccacaacccccggcgtggaaagaggcccactttttcccccccccggggt

SEQ ID NO: 118906 - DNA, 677 bp, Arabidopsis thaliana columbia
  unsure (1)..(677): unsure at all n locations
gacactatagctanagctgtgacacccgcatgcacgcgtacgtaagcttggatcctctagagcggccgccctttttttttttttttattaccaaaccctagcaaaactagaagtatgatggataataatttagcacatataagtgtactacgaagaacaagagacaaaaactgactccaggacaatgcgtaaaatcagaagccagatgagtcgaccaatgaagagtaagacgcattttcgtcagcagccgatttatttccggctatatccttaatcaccaatctgtttctggtcttgaacactacttcatggtctaaaccagccaactcgcacaattctaacctctgagtcttagtcgtttccatgtctgcttcccaacaagattctgaaattatctctatcactttctccatcttctcctctgtcactaagattccgttntgaagtagcgcaagatagacttgttccgctgccgcctttcggatcattgggtatcggtggccaaggaatgatagaagttgagagaatgctcttgtgctgatgaaanncnanactgaagcatatattcaatattggaaagcctgttttaactttgagaatccttagaagctcttagtcgatggctagagatccatgacacccgggaaaaactaaccgttccaatcttgattaaaaag

SEQ ID NO: 118907 - DNA, 937 bp, Arabidopsis thaliana columbia
  unsure (1)..(937): unsure at all n locations
aattgaacagnnnnnnnnnnnnnnnnnnnnnnnnnnnnnnnnnnnnnnnnnnnnnnnnnnnnnnnnnnnnnnnnnnctttttttttttttttttttttttttttttttttttttttttttttttttttttttttttttttaaaaccaaaatgtgcttaaacaatcaaacccaaggttgtttcaaaagtaaacccctccttggcccaaattcaaaaaaaaaaaaaggggggcagggaacataaacctcaaggttttttaagccaaacttttttggctaaaatttttaccttggttcaaacggacaagatcaccccggggaacttaaaagttcttgtttaccctttgacttaaaggggggtaaagccaatcacaccaattgccattttcccgcctgggtttccagggggaaaactaagcttatggcccccctttccgaggtgttccttaagctgggaaaccacaagggcttttccaacaccaaatttgggccccgccagaggaatcgttttgcccccttttgtgtgttttgcccccccctcgggtttgggtttttttgttccccnncncccccgatggaggggccttttttttggacccccgggggacttgtggtaggggtgaaaatggggcctgttaaaacaccccttttgtggtcccccaaccttgggattaaaacccttggggcccggggtgaggacccggttcccaccttccccgttgggggccctggttttttggggtaaaaaccacccctttcaccaagaatacctttaaaactgaaaagcttttttgcgggaaacaaggaaccttttgggggtttttagggaagaaaattggaacggggatttttgttttaaaacccccgaataagacgaattaggttggggggggttgaaacaaagttttttgaagttgtgggacccggtttttttttttt

SEQ ID NO: 118908 - DNA, 861 bp, Arabidopsis thaliana columbia
gcatgcacgcgtacgtaagcttggatcctctagagcgggcgcccttttttttttttttttttttttagagaataacacctatcctatcgagttatatgtcaacactttctggttaagatatgaatgtaaggggaaatcttaatctatataagcttgtgtgtatatttcgctaccaattgtttttggcgcggggggaaaggatcattgaacacctgcaaagggactaatcattatattggggttaatgggaccaattttgtgacatggcggtaacacaaccttgttttttatgagatgcggcaagaggtacaaggatcccttggcgagggggatatgttacagattgatggacggagggtcctcggcgccctggtcccggagatgcaagcgagaaagactggttgtcccttcccggcgggggtgaccataacccgtggggctgggaatcctagtgactatttggcgagtgaaaaaattgggaggggggtgttttgtaagagtgagattaataaaaaaacaatattcacgaatagcgggggagatgtgtagggaaacccccccaattaaacggggaagggagagtactctgcagtgaagtgactacaccccccctctttaaaaccccctcttgggtgtctcaatttaaaaaatcgctgtcagaccacccttattcttttatccgcccactaccatatcatatctttatctcacccacatattcaattccacccggccgccacacataaaacttgtcctcacactaatctcttgggaattggagcttagttttggaccacgctaacatggagtattattgtagtttttttccaatgtacacattatttattttatccgttttac

SEQ ID NO: 118909 - DNA, 439 bp, Arabidopsis thaliana columbia
aaacgactttctatagggaaacctggtacgcctgcaggtaccggtccggaatttccgggtcgacccacgcgcccgcttttaagtgttgcacaggtacaaacacacacactcactttgactcggcgcatataatttctacagtttgctgaaggacaaagacgtggacccttgttggaggagaatgaccacaaacacgaagggtctaaacttttcgaaggcagggggggcaaccggagacgaaggaggcttaaagcaaaaggaggcgctagttacaaccagggaagcttgaaaccttcggaacccggttgccttaaaaaacaacactacgaggattccaagaggttaacgggcgggacaaaccgaaagtggctgcagatagggaggtgctcaagggaaaaggataatacgcaagggacgcgcaacgcaatgacgagtgaga

SEQ ID NO: 118910 - DNA, 490 bp, Arabidopsis thaliana columbia
  unsure (1)..(490): unsure at all n locations
acttttatagggaaacctggcncgcctgcagggaccggnccggaatttttgggncgacccacacgcccgctctattgaagtgcaggacagcgatgtggacgatttgcaaccacctcctaaaatcagcacatacacagagtgggcctttcgaggacatcaaaaggcaagtagggcacagcgtgagagcgagagcaacgacggaatttttttttgatcggggggggtggaatcacccactctttttggaaaaggaacaacccgcgggctggggcggaaaagagcaccggggtgtaaagaggccacgagggacagtggaaccaccctcaggcgaaggatgggtacagaagcgtgggatagagaaagacaagctccaaggatgcccgacagcgaagtgagaggccgcaggcgcccgacacgagtccgcccagaggtatcgtcgacccaccagacagggaggcagaagactgtgaagaccagggaacgcggaggg

SEQ ID NO: 118911 - DNA, 518 bp, Arabidopsis thaliana columbia
  unsure (1)..(518): unsure at all n locations
gacctatagattagcttgacgacgcatgcacgcgtacgtaagcttggatcctctagagcggccgccctttttttttttttttttttttttaaaaacaagttcaatgtatagctaatccacgttacacacaacaatcattatagagacaaacaaaaataaagtaacaagaccttcaaactaaaatgaaaccacaaggaacagacaataaaaatttgcctgctaaaaatggcgaaaggaagaactaaatatagaatcggttggggggataatagcgaaactacaaaaagggggttcactaggggaattaaaacaaaatcgatacaacaacaccatctggctctcgtnattcatttagggactaccttccgcgggaattctcaagctccaatggcttcgggagaagctggtttgctctggcgtcaatcttgccctcaatccggctggctaaacttccttgggctgggggggcgctctgcttaagccggcgggcttgggttgggcatttaaaggcctgcaaa

SEQ ID NO: 118912 - DNA, 178 bp, Arabidopsis thaliana columbia
ggagggggcttttagacacgaaaaagggccaaccaaaacgcgccgccgagcaacagcacccaaggagagcagagagcgcaaaagaaacgagagagcacgaggccaaacgaaggcaccggagagccgaagaaagagacgaaagaacggaaagggaggcgccgagacggcacgaaagaca

SEQ ID NO: 118913 - DNA, 662 bp, Arabidopsis thaliana columbia
ggcgggggggaggctcacggcccgcccgcagaaaggggggaaaggacccggacggagaagcaggacaggacgaccgcgagccaacaaagaaagccgcccaagagggcggggacgaaacgcctccaagagggaggagccccagccgaggcagcaaagagagcccacccagaaagcggaaaaagagagagaagccacagaaggacgccccgagaacggacacgaaacgcgaccccggccgccgcacaagagacgacgcaggagcgacacagaaacgccgcggcgaggagggacaaacaccagcgcaaagaaagagaggagcgccccgcaccgcagccgggaagcaaggcggcgtcgccggcccggccgacgccgcgcgcggcgcgcacggcgccacacacaccgagccgagaaagcgcagaaaaagagagaacccgcgccgagagacggggcaaagaagagaagaagagagaaacacagagagacacacgcacaaccacagcgcccaggcgagaaggaggacggagagaagagaagggcgagacacccggcgaaaaagagcgcgaggcgagaagagccagcgcgaggacgagggagagagaagagagcgcacgcaccgaggagagaaaggacgggagccaggaggaggacaggagcgagcacag

SEQ ID NO: 118914 - DNA, 506 bp, Arabidopsis thaliana columbia
  unsure (1)..(506): unsure at all n locations
ggaaggagagggaaaaagcggtttcgcgcgagcacacagaccaggacgcggccccaggaaagcgaccgaggaagcggagacacaggaagagagccgaaggaagcggacgcagccagaaaggagaagcaaagcgcagcaacgagggaagaagccccacaaagacggacgcacccaaacaagggcgcgacaggttttttttaagaacccccgcgcggcggaaggagcgacggcggcgcgagcgaagacgacgggaggagagaggagagggagaagagaagaaggagccgggcaatggaaagagagtagagaaaggccggggaagaagaccagaagcagaagagaagaaagnagcaagggcgacggacggacaaggagcgaaggagaggaccgagaaggaagcccggagggaaaaagggcaggcgaacggagaaaagacgtagcaaagcggcgcaggagagagggggagaggcgaggaagaggagcggggagagagaagagggagagag

SEQ ID NO: 118915 - DNA, 330 bp, Arabidopsis thaliana columbia
  unsure (1)..(330): unsure at all n locations
nnnnnnnnnnnnnnnnnnnnnnnnnnnnnnnnnnnnnnnnnnnnnnnnnnnnnnnnnnnnnnnnnncttttttttttttttttttttttttcaaaacaactttactaagaaccaatgagcattatttctttctcgttcgtaaacaagtttgaagttattatttggagttttgtaccaagctcccagacacccttaagaacaaattgtttcagaagcggggcaactccgagaaaaatagcttgaaaacaaacatgcatccatccagaaaggataacaccatcttttttcattggttggttaagctggaaaatgagggaaaggaaaaagggg

SEQ ID NO: 118916 - DNA, 830 bp, Arabidopsis thaliana columbia
  unsure (1)..(830): unsure at all n locations
aagggcgaggcgacgaccgcaagagcaggggccgacagcgagagagcaacaacacacaccgcgccggaggcacaggcgggagaggcgaacccctcaaacgggagcggggggcggcgaggagagagagacgggcggcaaagagcgagcagaaaaacacgagacaacacaagcaacacgcccgaacccggaagacacaccccccggccgccgcagagaaaaagacacacaagacacgcagcaaaacaaaaaccccgcgcgaacggagtcgacagcagacgcggagagaccaccacgcccggacggcagaaacggagaagagccgccgcaccggcggcggcgccggcggcagccagacggcgaggcagagaccaaccaaagcagagagcacgagccccaacgagagggaggagacggagagtgggcaggnggaggcggcgacacgacgacgggaagaggcgcgaggagacgcgggagacgcggccaaacgccccagaaacgcggcggacggaaagagaacggcggaaagcgggacgaccgccccgcccggcggaaaggcagcgccccgcgccaaagcccggcaagcgaaggagcccgcgcagaggacacgcgcgagcgccccacccgaggaaaacgcaggcgacgcacgacagagagagacgaaaacccgggagcgagcaggaagggagagccggccgagccaacacggagaggcacgcgacccgccgcccagcccgcgcgccgggcacggaaggagcagccgagcgcgcccccccgccgcagcggaagagaagggcgccgagacggacgcggcggggcgaggcaggcgcaga

SEQ ID NO: 118917 - DNA, 581 bp, Arabidopsis thaliana columbia
  unsure (1)..(581): unsure at all n locations
cactatagatagactatgacgccgcatgcacgcgtacgtaagcttggatcctctagagcggccgcccttttttttttttttttaaattaaacacattacatgttttttttattgttgttaaaactcattacaatcttcacaccataaatattcactataacattgaagtaatagttttaaaaataaacagatccacaagcatgcaggagagctggattatatttaaataaggatttatggatgtttcttagaagttttagaagatctttgtttctcgagtttttcgaaaagagaaccatcgtaggcagctctcactgtgtctttgtgcaacaaaccattcttgtctttacacaaataatgcaataccttccactccgtataccctgcaagccatcctttacgatcattaggttctttgtttgcctttaggaggtggttggagtcctcggtggtcaaagcatcgcgatggtggtgtgcatgctncgtaaatatctcctcaaacttggaaacaacaaaccggccatctttggcgaaacgccctgannngttncgggggttggaaggggaatattttaacctct

SEQ ID NO: 118918 - DNA, 804 bp, Arabidopsis thaliana columbia
gacctatagaatagctatgacgtcgcatgcacgcgtacgtaagcttggatcctctatagcggccgccctttgtttttttttttttttttttttttttttttttttttttttaaagaaaaaagctttttataatatgtgtacctttaataccttttataaaaaaaaaaaaagctttttttataagccgccccctagaaccgggaaacaaaatttaagggcgggtggggaaaccaaaacatttgggggtgattttttttgaaagagcccgtgaaggataacaaacctttgcctttttttttttaaggggggcccctaagcctttttagccttcccccccttttccaagaagtagattttttattatatgggcccattctcccccccccccccttttcttaaaatttcagctctcccccccccataataattctttataaagttttttaataaaaggggctgggagtttaatataaaccctttgagagggggcctatccagggggccctcgcccctacaaaccccgctgtgtgtagaaactattttttttattttttatcccctccccggggtgtgagccgggaaaccgcgtttctcctttgagaagccccccctcgttccccccttgttgtagaaaccgggaagagttcgctttcctcagaaaaatattttgtcttttccctagtgttcacaaagttgttttccctaaacctctttttgatgtttttctcctcgaaggggctttccccctttttaaaacacaatatttcttagaaagcattctttttgcgacaaatctgttttttt

SEQ ID NO: 118919 - DNA, 840 bp, Arabidopsis thaliana columbia
  unsure (1)..(840): unsure at all n locations
cactctagnagtactatgacgtcgcatgcacgcgtacgtnagcttggatcctctagagcagccgccctcttttttttttttttttttttttttttttttttttttttttttttttttttttttttttttntgggccaaaaaaaacatatttggtttgaaaagaaaaaaaanacaattccgagggaatggggggggatacgaggaaattttggttagggcgcctccccccggggggaaggggaaacataaccccccctttctttctcttctgttgcgcccgaaaacaaaaaaaaaccccaccctttcccccagagagcctagagggggcaaataggagataaaacccccnccccccaacaactttcttcctctccctcacacggctcacccataaatcccacaaaaccccgcccgccccccccctacccctccgcagggggagaagggtcccccctctcccccttnccaggggggggggggaagagaagagcccccccccccctggcttcctataacacaaaccaaaaagggagagccttggtaaaaaaaactaaaccccgccggcccgcgcgtctcacaaaacaaaaccccccccccccccgccgcggggggcgcgtcctttgtcccaaaacaaaacacccccacccctccccccgncccacataacgcgggaccacccccccccccccccccagtgtgccccctggggcccccggaacccctcccccctcccttttaccgcttgaccgagaagaaccccctctttttgacggggggcccggccccctcgccccccaaaaagacctcctttcccccccctcgacaaaaaaatgtgccccc

SEQ ID NO: 118920 - DNA, 679 bp, Arabidopsis thaliana columbia
  unsure (1)..(679): unsure at all n locations
acacggagccccccccgctcnccaacaacgagagaagaaaaaacacaaagcttttntggggnaacgcccccgaaagtttaagagggggaaaacgggggggcgggggagggaggaggaggagaggggagggttgaggcggcgcgcgcgcgcccagaaaagaagaagcgaagagaagagggggacaccaaagcacccacaacgacaacaacacgacagncggaccaccgcccgcagccaggaggcgagccgcggggacggaaaccagcaccagcccgacagaagaaagagaggggaacgccgcaaggcaagaggagccgcgaagagaagagattttttacacagacccgccccaccggaaagaaaaggggagcgggggagagagaagacaggcggaggagaggggcgaggggagagggaaggagaagacgagagacagagccgaggaagagagaacagcagaagaagaccagacagaggaggagcgagaagcgaaggcgaggaagagaggaggccaagagagcgagagngccggcccacgaaaggcagaggcacgccagagaaagaaaaagccagagagaggacgaacagagaaggagagagatagaagaaggacgaaggccgaggagggggagagacagcgagagcgagcagcacagcgcgagccggaggaaggcagaag

SEQ ID NO: 118921 - DNA, 456 bp, Arabidopsis thaliana columbia
  unsure (1)..(456): unsure at all n locations
nnnnnnnnnnnnnnnnnnnnnnnnnnnnnnnnnnnnnnnnnnnnnnnnnnnnnnnnnnnnnnnnnnnnctttttttttttttttttgaaatcaagattgtgtattagaccttttcctttgtttcaaacaacaatgtaaagaatctaaacaaatactctatcgtttgacttggccaaaaaggttggattgagagaaatacatggggggataatcaacggctgaatccaacagttttttttctggctttatgtcgatcttcaaagatgaagttgaactcataactttgaagcaacataagtcttttgagagtgaaatagacttattaccttcaaggagctctatcaaaaggcttagtgtcattgaacaaagattccaaactgttccatcggtgctttagcaagtactttccgagcatacgggttgccacgaaggatttcacacttttctttttataca

SEQ ID NO: 118922 - DNA, 760 bp, Arabidopsis thaliana columbia
  unsure (1)..(760): unsure at all n locations
nnnnnnnnnnnnnnnnnnnnnnnnnnnnnnnnnnnnnnnnnnnnnnnnnnnnnnnnnnnnnnnnnnnnnnnnnnnnnctttttttttttttttttatcaaatatcaactgccacttccatttacacagaaaaaggatggtcacagttttattttatccgtggcctaaaaacaaaaaggacaaaaatttatgaactgcaaaaaaagcaagattttgaacagatgagagacctgtgaagtctaattaagctctgctctgcttttacttctcttcatctttgccttaactcttgactttgccatcagtgtctctactgtatttatgaagttcccaactgccatcactaccagaagaatcccacaaaccatcacctgccattcattaacaactccagttactgtttttcttagcaacagcagtccaacgtatgcttcaaacacctgtaaaatgaacagtataggacataacagccatagttgtccatcaactccagccgtttctccccaaacaacatccattctcttagcctttcctagtgcaatgcgagtgtataatctttggcgttgatatctgttttgtaaagcatggcgacaccttgcatcatagcccattgtaggaaaagatggactcctctcttgttctgacacagtttggttgacctttgatttccatgtgaggctgacagggccatagccatggccaataatgatgatatagccaccatggaccattatcgcttccggtagctctaatatattctc

SEQ ID NO: 118923 - DNA, 856 bp, Arabidopsis thaliana columbia
  unsure (1)..(856): unsure at all n locations
gcatgcacgcgtacgtaagcttggatcctttagagcggccggcctttctttttttttttttttaaaaaaaaaaaactcaatcctcaacttctgcaaaacaaaattacagaggctatttgtttttatgaaatctcactaaataaaaatttgacttttgaaaccaaatttcctcaatgtgtttctttaatgggggggggaataaattaatcaaagactggaggggaaaacctgtggcctgaagaagaaaccatcccaatttttggaggataccgggaatgttctggagctaagaaatggggaatggtttagagggaaacaagggatcagatctttgagcgatgggaaggatttgtggggaaagaagatccttgatgaaaagaaccctctctgggtggtttttttaacccggcctgaatactggtggggggtnggctggggggcggtagcggtttaagggagtggcacgggccgtgggtgtgttcctttaggggatgtgtggggcggatgcgatgcggctgttgttgtgagatctgggctggctgtgggtgtaggcttggcctctcacgaggtggggaaggctggtcgtggtagccattggtccccgacctccgggggaaggggagccgcgccttggagtgggggctgggagcgccggggatgtaggtgccgcggccgggggggttgtgtctccgctggcggggccctttgcgatgtccgcagaggcggcgcaccggcgggtgggggggtgcggggtagggcttccggctttattttttagcccgtcgcgcggagtggcgtggcgcttattgtgttggtgagggggaccggtgatggggcgcgccgcggcgggttgtct

SEQ ID NO: 118924 - DNA, 455 bp, Arabidopsis thaliana columbia
  unsure (1)..(455): unsure at all n locations
atagggaaacaggncgccngcagnaccgggccggaatttccgggcgacccacacgcccgcggacgcgagggcgagacacaaggagccaggaactaaaaagcggacaacgaaaagggcaaaacaaaaccgccacaacggccgggggcccataagcggggacacaccggcaaagccccgcccaagcaggacgggttttttttcaaaagggggagccagccccacaagagagaccggaaaaaaagatggaataaaaaataggccgacagagaatcctatccctcctccacccccaaaatctgctatgggggagagtaaaccgcgggcaatacccccaaaacactgcagcccaaccgggcggaaaaacctgagggaaggcgggccaaaagaggccagaactggaaagcaacataagaacactcccggccttgcagtcagccccggtgtgaatcaaccac

SEQ ID NO: 118925 - DNA, 533 bp, Arabidopsis thaliana columbia
  unsure (1)..(533): unsure at all n locations
ggggaacccgccgccggggggtgggagaaatgggttctttagacggggaggaagacctgttatattaaaaagtgccgcccggtggaatcggtgtggatagagggggaaccgcacacgggttgcgggctggtggagtgaggcgacggatggagagattgtagggtgaggtgagagtagggtaagcgaagtttttttcttccccagggggggagcagggataccgccgcctgtgtgcacgagaaatgtgagttgtgagtgatggccgtagctacataatatgcccacaancccagcagactaaaataatgggagtacatgtagagcgatcggaaagggggggggcagcgataggttaatattatgcagatgataccagcataaggagctcatgtcatgagtgaataattgggatgaaaagcccaaagacatcacctgtagccgcgtgagagactggtaagatagtggccggttgtggatcncccgaattaggatgtggaagttgtttgctataaaagcacgctcttcaccccgcc

SEQ ID NO: 118926 - DNA, 811 bp, Arabidopsis thaliana columbia
  unsure (1)..(811): unsure at all n locations
nnnnnnnnnnnnnnnnnnnnnnnnnnnnnnnnnnnnnnnnnnnnnnnnnnnnnnnnnnnnnnnctttgttttttttttttttttttttttttttttttttttttttttttttttttttaacaaaacctgaagcgggcttgttgaaaagttataatagtacccacatttacgtttatacatttttaatgggaggaatcccattaacttttttctgtggggcaactactggttttaaactttaaaaggacctttgttgcgcgctaaatttaaaataatacccggaccttgggggttgccaattttttttaaaaagacccaacctgggggacaagattgcaaaccgctctttttttttctctcctttactaagaaaattgggtgtgttgtgggtttaatacagggcggtgtcccggtttaattctttttgcttttttggtgggccaaccttaagaaacgggtttgttgtgtggcctcaaaactaacccttcttaaaaacgctttttttcctaaaaataagaacctttgtttggttaaaactgaaattttcttaccaattaactggtttttttcgaaccctcttttttttttatgcgggcttttttggggtttataatggggaaaattttcccccgcttggaggggggaacataattttttgttcgcccccccagatattttgggggggtccaccctttggggttggccccctagtatccaaattttgggggggggtctatctattttgtagcccaaataaattctgggggaaaatggaaaacccctttgggggaaaataaaaaaagggtttttt

SEQ ID NO: 118927 - DNA, 452 bp, Arabidopsis thaliana columbia
  unsure (1)..(452): unsure at all n locations
nnnnnnnnnnnnnnnnnnnnnnnnnnnnnnnnnnnnnnnnnnnnnnnnnnnnnnnnnnnnnnnnnnnnnnnnnnnctttttttttttttttaatcaaaaaaaataatatttactactgtaaatgtgtataaaaaggaatgtgaacagcactcggagatctatgcaaataatgtgagatcagaaccattaagagggatctctatcgacgatggatctgggagacatttgtttgtctaagagcgctccttatatcctggacatggaatagagatacttcttgttcttatgaacagaagagggattaaccacttgacccgctgcgatccaagcttaaatggcattctgtagactaaggagggatatgccactactgctgcaagaatagctgctactaacagatctttctctatgattctaggagaaataatccgacaaccgtatatatgaggatg

SEQ ID NO: 118928 - DNA, 398 bp, Arabidopsis thaliana columbia
taatacgactttattagggaaagctggtacgcctgcaggtaccggtccggaatttccgggtcgacccacgcgtccgccaccactgtctttcttataaacaccgtggagctatattcatattccgtttgctctggaaactaaatgtctactttgagtactgctatcgacagtatcggctggcactatgaagatgtgaagcttctaggatcttatcttaaaccgaggaacatatcataatgatggacactgtgtagaacgattttcaaaaaatgttaggcatcctggtgatgctgctgcaaaatctgcttgatctgtagcatatgagcatgatgggctcgtgaaaggaattggttaatttgactctggctctatagatgctatggaggctgggagatgaa

SEQ ID NO: 118929 - DNA, 888 bp, Arabidopsis thaliana columbia
  unsure (1)..(888): unsure at all n locations
gacactatagattagctatgacgccgcatgcacgcgtacgtaagcttggatcctctagagcggccgccctttttttttttttttttttttagcttacaagagtgaacatttttcatttcataagacacacaacacaagaacaccaatagggtttatgctacagacaagaggacttattcttcttcctatatcttacttttcaattgcttaataaacttaagaaaacacatttctacgcaatgtatttagtagcaccaaacagacacaatacatagatagatatagatattgataacatagctgcatctcgctcttctccgtcttcttctcatcccaaccattggttttctcgaaaccagattctctcaagtctgattcgaattagttcctccatgttctcaatctttgtatgtgcattagacttcatcgaaaatggctgatgacaagagcctttgaacaaactctgatttgggcctcctctcttcccgatcttttaacgagaccgggtgagatgacacttggctcttgggctctatctgttaatcctcggatacgtttttggtttnngcgggcccagaatacctctgtgatccgtgtggggaaataatggccacgggagaggatcaggtttcccttgcccacaaacccttcgagagaaatcctaacaacttgggaacccctcctttatttttccaaaaaggaagggcaatgggcccgttttgggatttttttcgtgacttaaaaacccctgggagggttggggcccttttaccccccttaaaaacaacgggtaccggtttggattaaggggcattttttggaaccacccgtttttttcattttcaaagggcacaccctcggaatattccttttttaaccttaattaaa

SEQ ID NO: 118930 - DNA, 316 bp, Arabidopsis thaliana columbia
ttacggatccggaggagtttacgcgcgaataggcgacccaaacattttttttacaacgggcggagacatcaccgattgtgccacgctttatagacacactgtcgtcccgacagatacaattgtgtccacgtcttgcggcgcatgcatcgtagcccacccattccctcttttttatattcttcggtctgtattttggattacatatgtgtcactaacgacaaggtcacggctgtctctgagggctagcgagaggccccgaactgagaatgtacgcgcggcaaaggctgagaaggagagacacgcgagacagcgggcc

SEQ ID NO: 118931 - DNA, 705 bp, Arabidopsis thaliana columbia
  unsure (1)..(705): unsure at all n locations
tggggttggattctttgggggggggggatctttattatttatttttgtcgggttgtagtttgttgacccttttattccgccccctatcataaattagttatatcgaactctattagatcgaaagagaccccaggatgagagaaaatttttttctgcggggtgaagccaaatgcacggggtttagattaaaaggatgagcctatttgtaggcataagatgtttccccctaccnccctctttttttttatagttgccgctccgcctaaaaacaatattactcacgctttgtctacactcatattttcgtattcccaccgctcgcagaatatcatttccttacattcgcatagcagaatcaggatgttaattatagtcatttcttctccacacaccggcccatcatcgccgattatgacgagttcaggagagatgaggtaacgtgtatatatagtagtagattgattgttcgattgttagaacaagacctatctcttccacagatctaattgggttgattgtttaaatgtccccggtatatctgtccctaattattatactcggcgtgacggcgagcaaagaaatgaattaaaggttaacatcatttttaatttttgagcttgtgacttgtttgatagtgtgatgcgaccgacatatagtagtattaatatatgtgtgcactatgtttgattggtcacgcctcctacc

SEQ ID NO: 118932 - DNA, 254 bp, Arabidopsis thaliana columbia
  unsure (1)..(254): unsure at all n locations
ccaccggcgccttgaaggggggaaggaccgaggcgagcggaccaaagagaaagcagagagcgcagagaccccgcgagcacaccagccagagaacgcccagaacgcgagagggcgacgagagaacgagcagcggcggagcgcaggagcgaggcgaggagcacagacaacgaggacacccccgacncgagaagcgagacacgaacgcaacacacacacgcgccgacagagaccgcaaagcgcccggacaggcagag

SEQ ID NO: 118933 - DNA, 665 bp, Arabidopsis thaliana columbia
attagctgcactatagaatgactatgacgtcgcatgcacgcgtacgtaagcttggatcctctagagcggccgcgctttttttttttttttatataatcataaaccattaaacctcatgagggatgtttgtaatgtatcaatgctattcctactctatgtatacgctctgttgcttgacctacttgcttacactgttgcaaagttataaggttttgtttgctgatgatcctattagtccttcactcacaatgcgcatagcagcttcattcgtgaacttccttggcaagagaaagcatgggacgggtttcgaatcccccttacaccattccgttcgagattcagactcgtaatagacatgggctattttcttaatttctttaatttcctcagggccggagttttccaatgtgaaagtgacgggatgccaagatttggcttcatattttgtacctgaaacgttccatacagtgtatgtcactgttcttcgttccatttcactctctagtccttgcatcgtaagcaatgtttgcacatagtgttcatcggggatgcagttgcgtcgcttctgttataaaacacgatgcctattgtaccaaaggggcatctttgagaatcctaaaactgggatccatccatatttaaatgaccttgatacttctgataaa

SEQ ID NO: 118934 - DNA, 557 bp, Arabidopsis thaliana columbia
  unsure (1)..(557): unsure at all n locations
ggggaggaggcgacgcggcgcgggggagagatcgacgacctttagaagccgcaaggacgctgtggggagagggcaccgcgagacaagggcaggcgccgggccgcgccggagtgccggcgtccccgtcgtatgccgcgggggagaacggcaccccagtaccgccccatgccacaaaaccaaagaaaacntttgccccttnnnnnntttaatttaacccccaaaccctttaaataaccgttttcccccttttttaagggcgaaaaacccgggggcccacccccggggaggaaaccccccggccccccgaaaaaaaccccccgttggggaaaccccacacaccgggtgtgaaaaaaaaaaaaaaacaaccccccctttataaaaaacccccccccaaaaaaaaaaaaaaaaaaaaggccctcttataaaaaaacttttatttttttttgcggggaaatatttctcccccccccaaaaataatatccgcgcgggaaaagaaaaaaaaaaatatttttttggtggggggggggggccccaaaaaaacataaaaaaaaggggg

SEQ ID NO: 118935 - DNA, 464 bp, Arabidopsis thaliana columbia
actatgacgacgcatgcacgcgtacgtaagcttggatcctctagagcggccgcgcttggtttttttttttttttttctgaatatcaagtttgctttctttctcatatgcatgcgttttaagacaataacaaccttgtcttcacaaatttgattagcttacatggctatatgagaccaaacaaaaccacaattttttttttatggggggagcaaaacaaaaatgtgggttaagcagaaaaaacctttgaacctctggatgaaaaagggggttcccgaactttggggaggggaacaacggtgaaaccttccccacgcggcattggtgtaaaaaaggccccacctttttggtcatccccttttaaggggacctcacgggcctgagaacatctcctgcgcgaggggaacccaaagagtgtcacccaccctttaggacccaccggggttgtgggtcccgaaagttttgt

SEQ ID NO: 118936 - DNA, 283 bp, Arabidopsis thaliana columbia
gggagaggggaggtttgcgggggaggggagcagaaacacccgaagccggaggagcggcggcggcgcgcggagacggaagcaggcagcgaaccaagcacggaggacgaggcaggcgggcagaggagcagccaggcaaaggaggagaggaacagcagagcggagcaagaagcggcacgcggcgacgaacgcggcggaggaggcccacgagagagagacggagacagacgcagcgagaggatttattttctcaacagcgcagcaggcgagaaggagggaggaagcg

SEQ ID NO: 118937 - DNA, 516 bp, Arabidopsis thaliana columbia
  unsure (1)..(516): unsure at all n locations
ggaaaagcgcgggggcccccccccggcaaggaattttcgggcccggaggaggaaaccgcggggtaacacaaacccacgccgcgccggttttttaaagggggttttctttttttcaaaatcccccaagaaagagggcagaccccccgggggttttttctccaaaggagggtttaaagaggggcccccaactgaggccggggtcgagaaaaaggggggttttttttttttttacacccgcggagaacccggggnggaaaaaaattttcgcggggctctttttatttccccgcggagaaaaaaaggaagtgggaaaaactcctgtgataaaccccttttttctttaataaaaggggagcgtgtttttccccccccgggggggagtctcccggtaaaaatttgtgtttcaggggggggggggggttttttaccgccaaaaaagaaaaaaggggggggggggaaataaataattctacggcgggcgcctctttcttttgggggggaagatttttttttgga

SEQ ID NO: 118938 - DNA, 414 bp, Arabidopsis thaliana columbia
gcatgcacgcgtacgtaagcttggatcctctagagcggccgccctttcttttttttttttttttttttttattccaaaaacaaactgcctttaccaaattactaccaccatggacttttttacatcttatcattggagacaccacaaaatgtggtgaagaaatatcatttggaatctgggttttttttttgaagaggggggtcggggcgcacttataaacaagtgggcagcggttaaacatatcgcaaactgggtggagagaaagtggaggccacccttggagggaaatgtttttggagaaagagcgcggcggagttttttggggggcaatgtcgcacgccctttgagaacatagagggggaaagtaaggttccttgatccgggaagggaaatgggaagttcgttaccccccgg

SEQ ID NO: 118939 - DNA, 669 bp, Arabidopsis thaliana columbia
  unsure (1)..(669): unsure at all n locations
ccgcccgcgtacgtaagcttggatcctttagagcgggcgggcaggcgtgtgttattaaatttgtttctcaagggggagtttattatacataatgatagtgtgccgcgctgcgcgtaaccttttttttttcgaccacccaatattcttggtgtttgcgcgaaaaaggcggtaagaaagtccctcttttttgggggggggaggcaaaaaaaaagtcccgcgagaaaacaaaccccaataataaagagaggacgccccaacatgggggtgcacccctataaagcgccatattgaagtgggaggggcgtctccccgcgaggtgaggacagacaaaagcgaggacatgggtgggcgcggggggggcctttatgaccagcgcgccgaatcacgggaagagagaagagaaggcgcgggcccccggagcgaggtcgttggaaggacaactgagaggcgagtaacgaggggagagcngggggnaggggaggggttgatttttgtaccgaggttgagaggaggaccagaagcgggcggccggcgagggaaggcggccagggcgaatcccaactccccccattatatggcgcgctctcaggagaagaagagggggagagggatgttacgatagagagtattagcgaagcaggggggctactgcggctggagggagggcga

SEQ ID NO: 118940 - DNA, 181 bp, Arabidopsis thaliana columbia
tgaaaggggaagaagcccgcgacaccgcccaagtgagtatccggggaaaggcgagcggcgtcaaggacgcggcaagggcggacgcaccaaacggaagaacaacgaaccacgaacgcggaggcacaagaccagcggacacggaggcaacagaccggcatcgtcatgacggcgaaacgggtcc

SEQ ID NO: 118941 - DNA, 803 bp, Arabidopsis thaliana columbia
  unsure (1)..(803): unsure at all n locations
ttgatgacgtgcctatgtagagcttgacgcgctgccgcgtcgtagctggatctctgagcggccgccttttttttttttttttttttggggaaaaaccaatttggcctttgggccaaaagggggggggggatgcgacaaaacccctgtttgtggggaaaaattttggggaaaaagaagaaaccccggggggttttttcccctctcggagagggaaaaaaaaaaaaaagagcgccccccctgttttttcttttctgggggggggggagagggagggggggcggatgaaatataaaaagaggggccgcggcgcccccccctcccctccctccacgcggaggggggggccccacccctcttatttgtttcccccccccccgccgccaccgcgccgggggggggggccccctttttttggggggggggagaaaacccccccccccctgggtgaaacaaaacaaaaaaaaaaaaggggggggccgcccccccattttcccccatttttttttggggcccccccacccccccggggtatattctcccccccttcccccgcggggggcgccccccccccccccccaccccgcggggggtgtacacaaaaaagggggggggggggggggggggcgctctccctccctttaaaaaaaaaaaacattactccccccacaannagtggggggggggggggggggggcccccctccttccctctaataatattctctccccccaccccacagcatcaaaaaaatatgggtgggtgttatatgggcgggcggccccaccccccccctccaaagagag

SEQ ID NO: 118942 - DNA, 469 bp, Arabidopsis thaliana columbia
acgactttatatgagggaacgctggtacgcctgcaggtaccgggccggaattcccgggtcgacccacgcgtccggcaaaactaacacaagtagataaatgtaaagaaaaatgcttgataagcctattatgtggggtttgcggagggatcaccaggagggattctcttgatcggacgatagggtttcccaaaggggcagagttttcttcctctagtggtgaaagcaccagtcgtttcgagaacaacagtataacgagttgcggaaactacgtgaaatggaatgtgacgtgcacgaaagcatccaaaacctccgccggccgatctagaggatcccaaggtaccctctgcggtgggcaaactgatagccctttggaggggcacctatacttatgtatcggcccggctttgacacggaagaaactggaaagaccctggcctatcccccactttaaggcattttgaaaaaatag

SEQ ID NO: 118943 - DNA, 556 bp, Arabidopsis thaliana columbia
  unsure (1)..(556): unsure at all n locations
tgnnnnnnnnnnnnnnnnnnnnnnnnnnnnnnnnnnnnnnnnnnnnnnnnnnnnnnnnnnnnnnnnnncttttttttttttttttatcacatacacttcccttatgacttggatacattagacacgaggctgtttcattacacccatgagtggaccaacaccctgtgaagacgtatacaaacatctgttgatctactctatcttgggcctacaaaaagagaaagctaatactatgagctaatcaagaatcttagctcgaagcttagaaaccacatctcacccattccattgggtgtgggagcgcttgcagtatgcgcccctacatgggcctacatttaaactgacaatccagccttacgtgatcatcgaggcctttgaagtcgcgaccagaccctatcagcctcactctcccgatacaccggtcactgttttctgggctactggtgtgggatgcctcatccacaaacgcgtgcacaccggtgggagtcacacaatctagggaaaacgatcaccgcgaagtgctggcactgtgccaaagatacagctatcttggaac

SEQ ID NO: 118944 - DNA, 545 bp, Arabidopsis thaliana columbia
  unsure (1)..(545): unsure at all n locations
nnnnnnnnnnnnnnnnnnnnnnnnnnnnnnnnnnnnnnnnnnnnnnnnnnnnnnnnnnnnnnnnnnnnnnnnnnnnnccacgcgtccggactcactgacgtgactggtggaagatctgatgtgcaggaggcattaacaggaatatgaaaaggattggttcaggacaccgtgtgttcagaaatgtatgagcccagagcttatgaaatcgcgatcctgctttctgaaggctatggcatccgttggtaaggattctctcagagacggtggtgaggctcatgaaaaggcaattctatctgacgatctctctgccacgagatagcagtgatccaatgactacttcaactatagcatgatgatcgcggatatgggcttctcacctgagaatttcccgggctgattaacaattcgtcccgtggctcattactggtcacgctgatacgatgggctgcttgatacctgaacgaacatcattacacgccgagcattgcactctggcttatggctgacgcgttacggatcactgagagagagcttagcagcggatg

SEQ ID NO: 118945 - DNA, 600 bp, Arabidopsis thaliana columbia
acggtgaacacgcatgcacgcgtacgtaagcttggatcctttagagcggccgcccttcctttttttttttttttttttttttttcgaatgaacaaaaaaatcttaaaattaggatgatccgaaattaaacacaaagtctgtgatctctcaaatccaaagttcctcaaaaccattatgtggggattttctatataaatactgggagatagacaatgtgcttagtacttacatgcaccacttgcttgggttgtgccctacaatcataccaggttcactgtagtttcaatctccatatgtgggggcggggctctgtaaatatggcttggtagcaaatgaatgctggctagctcaaactggcggggtaaaaacactgaccaccatcttggattctggataataagactaccttgtcccgcacccaattaacactgattccgatctttaattttcggcgccccagacctccgttgcacaccattttcgcgtgcgcatttgctagggccggtgcaattttctgggcgtggtccagcaatgtggtgccgatctgataaaacgcggcttggtaagccttggagaattctaccggtaaaatagccggat

SEQ ID NO: 118946 - DNA, 569 bp, Arabidopsis thaliana columbia
ctcatacgatacactgtagggacaagctggtacgcctgcaggtaccggtccggatttcccgggtcgacccacgcgtccgaaaacacaactcaaacgattcaagggtttcacttggaatcgtttggttttctcatttccgaaatataaaaagatggccaaagcgccaccgtcaatctctcttctcctcctactttgggccgcctttttcctgacgagtggcgccgtgatctccggcatcggtgttaactaccgaactctgggaaacctcccaccaccgactcaggtggctaactttatcaagacacaaacttcgattgatagcctcaagatcttcgatgggattcccgatttctacgtgccttcggtggaactggtatattcctaggttgtcaccttggctaacggtgatattccggggtgggctaacggaaaacaagatgtggggtgggatggatatgacatttttggcaggggttcctgagacaaagattgggtgttcgtgagcggaactaagatgcgctgagccggagtaatagcttggatgaattgatcgtttgccggggatgaag

SEQ ID NO: 118947 - DNA, 223 bp, Arabidopsis thaliana columbia
gggcctcattttttctcaggggggggcaccggccgtgtataccaactaacaactatagcgtatatgataatatatttacgcttctactccacgcgcgggcgccctgcttgagctggctcacgtcatgttcttgcgcacgctcggaactgagctgcttttctcgtgactgtgtttcggcttgtgtgtcgcgtaattttttttaaaaaaggggggggggaacaaa

SEQ ID NO: 118948 - DNA, 471 bp, Arabidopsis thaliana columbia
cgacgaaagatggctccgtgaagaacagccccagcggcatggacgaggaaccatccccccccttcaggaagccgcggaggtgccgaagcgagcacgtggccgatcacaggcagaagcgaactcatgggcgagcagagtgtgtacccccgcctccgacaccaagcgaggaggtgaagaggagctccggagagctcggaagccaggctgcggtgccggaggcccgtgcgcctcgagaccggccgcgatatagctcactccctgccatcaacatgccgcacaactgagaggctacagcatcggtccaacccagtactgcaactatgttgggagcagctagagtggctagcggaggagacgctcatagtacaccgccagagcgattctcggtaccgccgactctgctcaaccgctgctgacattggatccgcaagaaataaccctctacagcgcgaccccccgttgtggaggcac

SEQ ID NO: 118949 - DNA, 509 bp, Arabidopsis thaliana columbia
ctatgacgccgcatgcacgcgtacgtaagcttggatcctctagagcggccgccctttttttttttttttttttttttttttgacataaggcgccaacaaaagttttaacaagatgtttcaggaacatgtaattattttcttagttcaaaacttccagggcttaggactttaattaaactacaggggcaattcttggcacccggtgggacctggaattaccccatatttgtggcaccaacaaaactttatgaggatttcccaagatttattgcatagtggagacaagggctttgcccaacaatctgtcaatttcggaaggacccgcataaagcgcccattttgggtttggccaattccaccaagaatctctcacacgcgaattttcctaaaacgttagggtattttactgggggcaagagcctttaactatctgaagggatatgaagaggggggatcattcaatgcaaccctataagacacacccttgggccgggccttatgttaccctg

SEQ ID NO: 118950 - DNA, 893 bp, Arabidopsis thaliana columbia
  unsure (1)..(893): unsure at all n locations
cgcgcacatctatacgactcactatagggccagctggtacgcctgcaggtaccggtccggtattcccgggtcgacccacgcgtccgccttgtcaaccgatatactgtttggattagtcaaggacctttcatcggcntnacccagaatagcaacagatgatatttatcgcaacattggatgcatacaacttgcgcgattatacaggtgcagtttttagccttagggggggccggaacaaagcctccatgcggaaatcaactatacaactgcacctggatctccatacatggacgcagccttaggaactatccttacgaaccatgtgaaggagccacttggagaaatatagggccttcttaactggtcaagaaaataattgaactgcattaaaaaatcttgaagcacaggataagagggttggtaacaaaaccccggaattaaacctattcgccatttacccaattgtccaagagaacctcaagcaataatttttgaaccaatctcacaaggggcctcttatagtggacctaaagaacaatattcgcggaaaataactcacaaatgagtggctgaagatatgccgctattcggcctttaggcacatgaaaggatatagccgatggcagggagagaaattttagttattactccaattggaagggaaagcaccctaagatgctgttcgaccggaaaacagtccacgggtgaggcgcggttttctttggggtgagtgaaacaccactagtgggaacaacgttcctgatatcaagacgaactcccaaagtggtccgatctcaggaagtgaaagctgagtatactccgagttgacgccccaaccaaagagaacgtaaggtcggcagagcttatctttgggcttaaaaacagggactaga

SEQ ID NO: 118951 - DNA, 475 bp, Arabidopsis thaliana columbia
gagctgtgacctcgcatgcacgcgtacgtaagcttggatcctctagagcggccgccctttttttttttttttttttttcttttaaaccccgctcgcctagtggatggggggaacgggttccattaaaggggcattgggggggggactgcgacggagtatgatgacagactttgtggattgggggcaaagaagttttttttttgacacgggtgggtggacttgccaagagaaagaaggccgtgagtctactaggggtgtggaccagatagcctggtggttttcgtgacttagtatcaaagggctctattcttgagactgctctgaaactaaaagcgcgcatagcggacctttagcaccacacccctgggggcacggttttacacctgtgtcctgaagaaaactcatttgggtgtggcacccgcggaggctgtgggactctggggattagtgtatcttaaaaacgatcgcgaattct

SEQ ID NO: 118952 - DNA, 303 bp, Arabidopsis thaliana columbia
gctggcacgcctgcaggtaccggtccggatattcccgggtcgacccacgcgtccgaactctgaaagaaattaaaccctatcatacaaaccaaaaaatgggtacaactcccctcacaaatatgaacggtccatcgtcatcaagagccaattgacagatcgaagctccatacacacatcaaaaacatatatttcatattagacggggggcgaaagaaccaaaacaacgtcaccatctctctcacccgcgaaagtaacagcgacaaggagacgaaataagcctagccagagtcactacttctcacc

SEQ ID NO: 118953 - DNA, 583 bp, Arabidopsis thaliana columbia
  unsure (1)..(583): unsure at all n locations
aaaaaaaaaaaggcggccttgttggtaactgacactagagtanagcggatgaaaccgcatgcacgcgtacgtaagcttggatcctttagagcggccgcccttttttttttttttttgaggactattcaaacccataaatatggtatgcacaatgccaactgctgcgtgcgtataaggtgaacagtgtcatatgatacatcgacgcggtgtgcattacgaaacgaaaagaccttcaatttttgttcacagagcggggatgaaacatacgcacaggtagctatagtttgtagatgggaggatggaaggcccgccagccagcgatatagtggtttaacgttagattaggccgagctaggaccaccttcattccgccgattgattggacggaataagaggaagactggacccttcaatagggatagtgacttttattcagcaataatgttggcacccattgcaatcccaataccccgggggattatttgcggacctttgggaaattatacttggatgcacaaatttcaaaaggtttgggagttgcgtgggggccggggggaaccaccatgatttgttagcgcgattt

SEQ ID NO: 118954 - DNA, 905 bp, Arabidopsis thaliana columbia
tatattagagctatgacctcgcatgcacgcgtacgtaagcttggatcctctagagcggccgccctttttttttttttttttttttttttttttttttttttttttttttttttttttttttgcttttttagtttttttttttctttttggggaaaaaaatccatgataaaaaattccaaaaataaaaatttaaaacttagttttattcccgggggtcgaagcagccttggggtctgggatgggtgtccccccccacaagggaatatggccctttgtattccttgccaatcccaaaacccaacagtgggcttttaatgcttcaaaaacccatttttttttgaaaaaaaccccccagggactacctttttcacatccttttttttgccccgggggacaaaaaaaaacaaacaccgcacaatggaacaccccgtttgggggtggagggccactccccccccccacacaatagagtcaaaatagtttgtaaaacagggtccctccgcgagcccccctcatataccccgatgctggtgcatccctctctggcccgggggaaatagtcaaacccacccccttgcttggccgggggaacctcggcggggtgaaaaagcgcattaccccacccctcgccccgtgaaacgcttccccgttttcggttcccccgattaccattcttagtcaagccaccccctccggaggaccccatccccctctggcgcgcgggacacccccgttatgccgagacccccatcttttttgtgtgccattatgtcacgcgcggttcgtagtttcccggctagccgcggccccgttcatggtctccggtgaaacgttggtcgatcccatcgcgtttcttgggtgtgttccgccctgttcaagtgggttgtcatcgaacgtggtgttac

SEQ ID NO: 118955 - DNA, 902 bp, Arabidopsis thaliana columbia
  unsure (1)..(902): unsure at all n locations
nnnnnnnnnnnnnnnnnnnnnnnnnnnnnnnnnnnnnnnnnnnnnnnnnnnnnnnnnnnnnnnnnnnnccacgcgtccgcggacgcgtggggactagttctagatcgcgagcggccgccctttttttttttttttttttttttgaacaccaataaggcaagaactagcgaatctatcagatccaaccagagttcctggcctttttacattggggatgattacaaatacgagccaaaagaacagagagtttaatactcaaaaagactgaaaccaaccagggactctattacagacacatgaacctcttcatatttcatccattactatccaaattttttaggtcctgaaaacatagagatgattaccccaacaaactctagagaacctggccgagatttctacaattcccaatctataaatgattcccgacaaaagggaatcgaacaacaatcaattttgttcattaggcaatgtaattagccaaaggcaacaaaggagcaacctttatagaaatcaaacccttaaaagctggtcacgaggccttttttattaatttcttaacaaaatttctttgatttctccaaacccttatttttaggtacttcaattattagcaataaaattcttcccagcagttccctaaccttttcaagatttcggacatcaaattttttaacccctgaaacacaaccaatcttcgggaactttattaacctcaatttattatacctccccacaaatattctccaaaaaaagagctttaggaccccgcggttttcaatgggaaatccaaaagctttaacaccgtgttatactaaccttctcttatttcacgatttgccccataaccctgggtcttaggtgagcattaacaaggcaacatctgacggaaaatataaata

SEQ ID NO: 118956 - DNA, 437 bp, Arabidopsis thaliana columbia
gcgtacacaagatttgcattctttaaagggggcgggtcatcctaataaataataatatgtgggtaacctatcttattattaaaattaattcgaagcgctttcataatcaacgatgttctctatataagtttaattgagagagagattgggcgagaagaggagagggttttttttgtggtagttgaaagagagaagtgaagtgtatgcataggaggcaagccaacgaactatagccccgatggctatgtcgatgtggatgtcatggtgtcgacaaccacacccgcgtccacgttttgtagttgatggtaggagacgggtcatcggggagtaagatgagtgtagtgagaatgagtgggcgagcgtcggcagtgagagacaaaatgtaagagacaacttcacagacatgtgcaaaaaacattattatacttatctattga

SEQ ID NO: 118957 - DNA, 897 bp, Arabidopsis thaliana columbia
gctggtacgcctgcaggtaccggtccggttttcccgggtcgacccacagcgtccgcccacgcgttcgcttttggcattgcagatttcagagagctgattttggctatgcttaaaacggacaagttctatgttgtggcggatgatatgagggatgctatctgagcagaagaaactgctttttttctgtcgggggccgacggcagatcaggaggctcgttctgcctaagattctggtggccagcaaaaggatgttgctcttgttgatgaactgccggcagcgcctgtttggtgacttgtccctgggccgtgggtaaaagcacaaggttgttaggaggaccatatccatgtagggattgttcgtgtgtgtgtgtgccgcaaggggtgggggctttagcgggactttgtattagggacttggtaagatactcaaggggaagcagagtaatgggtggttgtggagtagagcttcgtgtgcctgggcgtagagaggcgagtggtggtggtaaagctagtggctcggggtgggtgtgatgaatgatgcgttgggtggcgtgtataccacgcgttggtttggtgacatgtgctcgagggaggtgttgcctgtagttcgagcacccggatatggcgcttggcgagtggccgtgttgttagacgccgtgcgtcggtattgtgtgggtgtagtagtgtgcgatggaacggcggttgatgggtagtgacgtgtttagatgactatgggtcaagatggtcgcgcagccgggagtgttgatgcttgtttggtattgcgtggttgttgcccttagtcagtttcgatgtgtaggacgtggtgtcggcatcgttgtggacttgcgcagaggtgtcgctgagctgcagctggagtcgtggtgtactttgtgtcag

SEQ ID NO: 118958 - DNA, 872 bp, Arabidopsis thaliana columbia
acgcctgcaggtccgcgccctttttcccggacgggcacgcgcccacaaaataaacacccactcaaaatgcgactacagccccaaaacaaagcgtcccactctgcgcagatggcggccggcggcacctcggacttccggacggcgacgatgaggtcacagcagaccttttttttcccgggggtgtgggaccacaaacaccaaccttgcagaaaaaaaaaaccccacccctggcggcgaccacgaagacccaagccgcgcacctatgctcctgttacacacccatgcaccaccgagagccagtcgaccaagcggaggccgagatccgtacagagttgacacacgagatgaaggcctatacgctgaccggagtcggcagagtaccccggggcgccgtgcggggagtccgcctcgaccatggcactccgcgctgcccgcatggctcagcacggcgtgctcagctacaaccacaaactaaacgcgccaagaaatgaacacgtagccaggcgacactatcagcacagatgcacgggtggagcgcggctaccggaggcgtggaacagagaactagattaaatgtgaatgtcatcaatcgagagtgaaggacccaacgaccacagtaccacctccattgactaccagcccgacagtgaggagagacgcgtaagagagcgaaagaccctggcaagaggataataacgccacttacaaccaccagagttagcggtatgcaacgcatccacagtcgtggacgaacacgagccacccacaaatcactgctagcgtctcagatcactcgacccgtatatgatttgcaggcatacgacagacgcacgcacggcacgtcgaaagcgcagcacacagccaacaacgaa

SEQ ID NO: 118959 - DNA, 743 bp, Arabidopsis thaliana columbia
  unsure (1)..(743): unsure at all n locations
ctatgaccccgcatgcacgcgtacgtaagcttggatcctctagagcggccgccctttttttttttttttaagcagaaaggcaaatttgtttattttctactcaaaagttcaaaacaaaaacataatgaggcggagatgtaagaaaaaaaacatattagggagaatataggtccaaggaaaaaataaaaacatgttaaatatgagtgggctctacaagtctaaggcctgacaaaataaataacaccacctggaatgtgctttagagaaaacagatatcaacggttgagattcggccggcgagggttcaatccgagttaacagaggaaaagagatgatggacgaacttaaagggtggtgaggaacccaatggtcccagggggaaccatgaatgctattgcccaaaagcaaagaggggccaatgtaaaacatagtctgaaacggggccaggcagacttgggagattaaaggcccaatgngtgattgaataaagcgaaacctgccatggaactgaaccaagttcttatgagcttgtaaccacaccttgcagtttgatcgcataaggccatgtgggaaagaccttgttatttgtggcccaacactaccaaaaaagccgaaccttgtgtgagacccaatccttgtgagattcccctaaccatagccgggaaaaaaaaatacggtgttttaaaacctcccaaagaagggttcctgtccaagcataaaacccttaaggatttccaaagggg

SEQ ID NO: 118960 - DNA, 779 bp, Arabidopsis thaliana columbia
gcacgcctgcaggaaccggaccggactacccgggtcgacccacgcctcccgacggctgcgagaagacgacagaaggcgacggctgcgagaagacgacagaagggggaaggagaaagggagactaacgagaaaccccaagagagaaaaccgtgatcgacaaaaccgcgaagaaactgttgtaactatgcggggggcccatagcaccggaatgggcaaaaaaagcccgcccaaaccgacgagagaaggaatacggagcgctgggggagggaccagccccccaagggaggggatggggcctccccaagaggccaggagggaggggcaagaagcggcggcgacggcagcggaggaacaacaggcgcgcacgaggagcggccgccagggagaagagaggagcggccagcgcgcggcgacgcgggcggcaggatcgccacggcgaccggcagcggggggatgggaggaagcagagcgagggggagggcagggccgcgccgggccccgggcgccggcgcgtacgacgccgcgcggacggcccgaaggcgagagagagcgagcaaggagggacggacgcccggagcggggcggcagagacgaggcgcagcagcagagaccgagccgccgaccccggcgaaaagacgacacacgcgcgcgggacgcagcccgggagagacgggcggaggggcgcgcgacggccgagggcggcgggaggcaggagcgagaacggcaggccgagcgaagacgggcgcggcgcggcgcgagaaggtagaccgagaggccgc

SEQ ID NO: 118961 - DNA, 588 bp, Arabidopsis thaliana columbia
  unsure (1)..(588): unsure at all n locations
gaatgnnnnnnnnnnnnnnnnnnnnnnnnnnnnnnnnnnnnnnnnnnnnnnnnnnnnnnnnnnnnnnnnnnnnnnnnnnttttttttttttttttttttttttttttttgaaccacaatccccatgtcctttattcagggggaaaggaatgcgtcccatagagacgagttaacttaaaacgaaagcaaagcgcttttcggataaagttgaaaacttaaccactttcatggcgcctctagattccaagaaacaaattcatccatcaaccttgaattatactcctttggaaccaaacaaaactccttggtggatttccacaaattagagctggtttagagtaccatctcatagtttctacaccttttctcagaggctgctttaattgcacccttctcctgcttgcatatcctggcccttgtctgaaactctccagaatggtggctacactcgatgtccacttccaaaaagcggagcccactgtgggctcctggaactgatacaaacttctcctgaaacccatccccttttctaaaattaagcctttgccccccaacattacccataccacccccatttcctccccttccg

SEQ ID NO: 118962 - DNA, 631 bp, Arabidopsis thaliana columbia
  unsure (1)..(631): unsure at all n locations
nnnnnnnnnnnnnnnnnnnnnnnnnnnnnnnnnnnnnnnnnnnnnnnnnnnnnnnnnnnnnnnnnnnnnnnnnnnnnccacgcgtccgtacacgcgtgagaagacgacagaaaggaagaaaaaggggtacggatgggaaataacgagaaacagagggagatactgctactcccagacgagccccagggagtgcttgtctacatggatatagcccaaaaatagccccgtccttggtgaatattacctcaatacaacccgttcaaactttgatggaggacacgtgtacacacgaggagctccttaactaagagacagatatttcgattggtgatgaaaccggatatggtactcacgcccataacgatggttaacagtcctacctgaagctttatccgacaccagatgatactggtaagaagtgcaaggagaatcctgtatcttcggatctctaagcacattgagtgtttatcagagcgacatattataacatcgcgtacatggtttctgataagtgagactcgcattttactacatacacgggatcaaactgattatcggcatttggagtgcgtgtccagctaccttgaacagaacagtatccagtggaatcagtgtggactatcactactca

SEQ ID NO: 118963 - DNA, 586 bp, Arabidopsis thaliana columbia
actatctaagagctatagacgtcgcatgcacgcgtacgtaagcttggatcctctagagcggccgctcccgtttttttcttttttttttttttttagaatacaaaggtttccaataaccgcatattctttaaggcaaaaaaaacttgactgcaaattctctttgggtcccaaaaaacaaaacaatccaaataattcccccattttttggtctaagagggagaccgattgatttatttgtcacatcaactccaaaaaccttcttgggggaaaacccccgccgacctttttgggaaaattttacccaaaggcggcatcataatcatcggggaaaggctgagcctgcaccactgcaaaatacggcctaattctgctgttgagcagcaatggcaaaggggaatcttttgggggagccaaaaacttgtgacctccccaaaagagaagggtgctggttccgccccgctgtgctaggaggagcgcaaaaaaaaggctttccggaacaacaagagacttcgtcttcttttatacaccataggggccgaagatacgtagccaccccgtggaattggcaccacgcgagcgccgtccc

SEQ ID NO: 118964 - DNA, 845 bp, Arabidopsis thaliana columbia
ctctaataccatacactatatggcaaagctggtacgcctgcaggtaccggtccggaattcccggggggacccacgcgtccgcccacgcgttcgtacgggtgcgagaagacgacagaagggaaaggaattcccttctattaaggcttctgcatgtacatgaacatatcctgtagcggaaacatctgattactactccctcctccttcaaacgcgtgggggacgggggcatcaatgttattaaacccaaaatcaagggttttggtattggcattacttacgggcgaccaatctttccacttgggccccgtcttaacctcggtcgggaactccggggacacccacctggttcaagcaactcgaatcccgtttatcgagcttcgggcaccgaatccgacgtgtcaaaatcccccaaactcacttgtcttttgcggggggggggaggttaacactcctccggcaccttgggttttccccttaaatgggtctacctaccaacaaacgggaaattatcctactttaaagcccgtcaattgtgggtgagggagggccacggaaaaccacccttgggaaaagacattttactggggaggggagaaaaaagataaccctcttgtggggggggggttatccttgggttttctcacaaaagcagaaaatccgtttttctgtgaggttctgctagcaaaaaaacttgggggcttagggcggggacccctcccggccatgggggtataatggtgggacgcgggaggggtactcaccaaggttcccgcaggaaggtgatttgtggcgggggagaactcccttgtgctgtgcaaaaatggccttgagacacggagaatgag

SEQ ID NO: 118965 - DNA, 301 bp, Arabidopsis thaliana columbia
tgtcccagcctatcactacttagactgcctgcgcgccgatcgtgcccctgccctctcgtggaaaaaaagggacaaaaattttctttgaaaaaatggggttagggcttttttggcttaaacccccgtttctcggggaaaaaacccgcgtaagatacccccctccaaaaaactctccctttttattattgcggggggaaaaaaaaaaccccccccccccctttataacacagagttttggggggggggccccccccctcccgaggaggggaggggggggttttctctcccccccctcgcgggg

SEQ ID NO: 118966 - DNA, 709 bp, Arabidopsis thaliana columbia
  unsure (1)..(709): unsure at all n locations
ccccctaaggggggaacgcccgccacggacacaaaagagganacttaacccgccgggccaacccgcatcaccacggatacgcctcaccgcggagaaccacacaccgcgcgacgccaccggccgcaccgcgcccccctaataacacaaaccccacaaaacacacagccccaacaggccacaaagaaccaccccttttccctcgcggagcgggcacaagagaaaacaccctctttaaaaaaacccccgcacccccccccgccacacccaagagaaaaaccccgcccacaccaccaggaggagcccgccgccacacccacccggagcacatgccgcccccacacacccacccacaaaaacacgcaccgccccacccaagcacggcgagacggcccagactaaactagcacgcggccacgacccaccacaaacagggaacgcagacgcaaccaccccgaacgccgagaaccccaaataaaagccgccccccagcgcagagcccagaaaaacacccggcggcctaagacaaggacgcgacgcccccgacagcgagcgcacagacacaggcggcacccaaaactcaccccccgcagaaccaagacaccggccaaggagaaacaaacacacggacgggaggagaccgaccccccccacaagagacacgggcacagcgacagagcgccgcagaccgcacccagcaagcgaggagcca

SEQ ID NO: 118967 - DNA, 616 bp, Arabidopsis thaliana columbia
  unsure (1)..(616): unsure at all n locations
tgaactatattaagagctatgacgtcgcatgcacgcgtacgtaagcttggatcctctagagcggccgcccttttttttttttttttttttttttttttgctctttttattgaaaaggaaattgttaaatctaaattcacctgacaaaaagaaactacccatccaaaatagattaactatggactcttttggataatgcttcttagtttaaagaagaaagaagcctatccatcttggggaactttcatctaaccgctagtttaaaatgtcccgaagcttatgaagttgaagccccctgtgcgctatttaccttaaaacaagaaaaaaatttttggggaagccataccaacgatgccctttacgcttctggtttgcttttttagcggaaattccgaacctgacacagaagcttatgggaggaaacttttgcaaggactcctaaaaaacacaggaaagngccttttatatctggttttggtgacggagttgctctagaaactcccatacaacgcgccggatggggtcctgtcctctaccatgtcgcaaaatacaaaatccctaaggggtatccctttgggcaaaattttattattaagatagaacatccttgacttatt

SEQ ID NO: 118968 - DNA, 712 bp, Arabidopsis thaliana columbia
  unsure (1)..(712): unsure at all n locations
acgccaacctctaatacgactcactataggagaaaggcttgtacgccctgcagtgtaccccggnactcggaatttaccacgggtcngaccccacngcccgtccngtcgcacngctgtcgcggcttggagaaaatggatcgaacaacagaggcgtacctagtcttggtgtagtgcagacatacacatgaagacgtgctacgatcatatactggcgatgataacatcttatcgctcgctgacattacatctcgctagcaaatatccgtatactcagttcagcagctagcaaccaatgtattgatgaactccagtatatccaacagcaaatgtgcaattggtagcaggtagaatacaaataacggagtgcatcagattgctctctacctatggaatataaatctgttgcatagaaggatagaaccatcaagaatgtcgtcactctcgtatatggccgaggacaggacaccatgcgggccaatgtatgtggagtttctcttgcaggtccatcgacaaatgcagataagaatgaactgaccctctgttttctaagagtccttacagatgctttctaccatacgcatgtgcgtactgtacacaatttgcaggataaacgcataacccacggcgaaagggcatcgttcttatggctgcttgacaaggtctctactcgtttggaagatatgacagcatactctactacagatcgagaagc

SEQ ID NO: 118969 - DNA, 904 bp, Arabidopsis thaliana columbia
  unsure (1)..(904): unsure at all n locations
acnnnnnnnnnnnnnnnnnnnnnnnnnnnnnnnnnnnnnnnnnnnnnnnnnnnnnnnnnnnnnnntntttttttttttttttttttttttttttgacaaaaggcgccaacaaacgtagcaacatgaattatttggaacatgttttttttttcttatcgaaatattccacggctaaagaatataataaaactccgaggtacaaaaccttgataacgcgtggtgcttgggatcataccccattattttggcaacacaaaatctggtatcaggaatttgatgatttatgcagagcggggacacgtaattttgcaaaggtcagtctagttttggaatgaccgaatcaacgaccttttgagtaggcttgttccccaaaactttccggccgggactttccttagggatgacttttttactgttgtttcagccggtcagaaatgaaggaactgaaggggtctaaccttatgcctgtgaaaaaacatgccctgggtttgctttggttccaaactatctgtcttcccaacatttcttgtgatcaccttctaaataccggatggccagcccaacttttcctccaggatgactcctggccctccacaattccagacgaatggttgcaccaaatacccatagagatgggcggtccctagacttaaattgtctgggttggctcaagttggtacgcgggtataaaaaagattcattggggggaggcgggattctcttctcacctcggccaagattcaaaacaacctcgcagttgtaatatgttgctttgcacccggtactttttttgtgcttaggggcactccaaagatcctgcaaaaaccttgggatttttcgagcgcactcttgttttttggagcgagaagcgggtctcccgaaatcgacacgtctagggtcactt

SEQ ID NO: 118970 - DNA, 758 bp, Arabidopsis thaliana columbia
gcagctctatacgacttacttagggaaagctggtacgcctgcaggtaccggtccggaattcccgggtcgacccacgcgtccgtacggctgcgagaagacgacagaagggtacggctgcgagaagacgacagaagggtcgtattgcaaagtatgcttttgagtatgcctacctgaacaacaggaagaaagttacagcggtgcacaaggctaacatcatgaaacttgcggatggtttgttcttggaatcttgtcgcgaggttgcgaaaaagtatcccagcatcacctacaatgaaatcattgttgataactgctgtatgcaacttgtagccaaaccagagcaattcgatgtcatggtaacgccgaatctctatgggaatttagttgcaaacactgctgctggtatttgctggaggcacaggagtcatgcctggaggaaatgttggggctgaccatgcggtattcgagcaaggtgcatcagcaggaaatgttgggatagacaagatagtattggaaaacaaagcaaacccagtggcattgcttctctcataagcgatgatgcttagacaccttcagtttccttcatttgctgaccggctcgaaacagcagtgaagaaagtcatcgctgaaggaaagtgccggacggaagatcttggtggaacaagcacgactcaagaggtcgtgatgcgggcattgcaaaactagactgactttgacaaattacgtgttcccgctctgataaatcataaattcctgataca

SEQ ID NO: 118971 - DNA, 617 bp, Arabidopsis thaliana columbia
gctggtacgcctgcaggtaccggtccggaattcccggggcgagccaagcgtgcgtccaagcgtacgaacgggcaataagacgacagaaggggatatctatgaaaaggctgcgaaaacgcgggagacatactgagcttggagaagaagatgatgaggagcgggaacgcccggggggggtttctccttaagggggggggcgaggagaggaggggaatggatgtcgaaaggaaatcccacaggagagcagagtcaggtaaccgatgtgaggaggggggaccggtacgcaagagacatagacgatgtatgtgggcacgggagacagaggcagttgtcgtgtcgaggaaatgaggccaccaggagtgtggggattagtcgaggtaggtaggaggtgcgggatgacagcgacgagtatacggcactggagtgttagagggagacggatgtaacacgtgtagacggtgaggatcgaagggcggtgagagccaagcagagatgtatcgtggacgagtcagacggtgacggtatagacagcgagacactgctgacgggcagcgggggggagatctcggagcaatgatgggacataataggtgtcctaacggatatagtactaggga

SEQ ID NO: 118972 - DNA, 696 bp, Arabidopsis thaliana columbia
  unsure (1)..(696): unsure at all n locations
gnnnnnnnnnnnnnnnnnnnnnnnnnnnnnnnnnnnnnnnnnnnnnnnnnnnnnnnnnnnnnnnnnnnnnnnnnntcttttttttttttttttttttttttttttgagccacaatccacatgtccctatttcatgcggaaaggtatacgcctcaatagagcaccatttatcatctaaagataagcctatcatgcctggatctaattgagaactgaaaaacaatctttgcgttggcatattccaagatacaaattttctcatgaaccttttattattcttatctggaatcgactcaatcttgaaggatgattgttgaaactacagacggttgagagtcccatctccgggtctttacactttctcgaagctgctcttattttacgccgctcctccttgtatttcctgaccctcatttgaaactctgcgaaatggagaatacacttgggggaatcttcacgatgatgggtcctatctttgggctctgtgctgagaaacgtactttcactgaaatccttccagactttgaagaatccccctatgcttcccgttattcctaatccagacaccattccctgactttttgtcgtgttcttttatccggactgacgcgtgggtttaccctggaattcctgaccggttcctagaagcgccccacctttgcctatagggagtgcgattacagctgggcgacttttg

SEQ ID NO: 118973 - DNA, 729 bp, Arabidopsis thaliana columbia
  unsure (1)..(729): unsure at all n locations
tctatacgactcactatagtggaagctggtacgcctgcaggtaccggtccgaatcccgggtcgaaccaccctccgccggttctaaaatacacttttggtgaaaaggcctggattggaaattcggggaaaaaggaggatttccaaccttttttgggggggctcccgggaagttttttttctttgaaaaaacccaaaattttccccctcttaaaaaaaaaacccagggggcccccccccttataatattttttaaaaaaaaaaaaaaaatatttttttggggggggggggtggttgttatataaaaacaatctctccccaaaagaagaaggtgatttcctccccgggggggggccgccccaaaaaaaaaaggnnnnntttcccccccccccctttcttttaaaaaaaaaataaaaaaagaagggggcgcggcttttttttttttttttttatacaaaaaagagtgtgtgttttttttttttttatatgttgggtgctttttttttttttttttattataaaaagaaggggccccccccacaaaaaattaggggggggggggtaaaaaaaaaaaaaaaaagaagaaaaaggntgggggggggggttttttttttttttttctctcccaaaaaatatttattttgttgaggttatataaaaaaacaccgccctccccaggaggaggaaaaaaaaaaacctgcccctctttttctctctttttccccttttttt

SEQ ID NO: 118974 - DNA, 872 bp, Arabidopsis thaliana columbia
ggcggagcgggacctttagagagggcgcaccaccagggatgagaaagcgcgggaacaagacgcaggaaggcgaccccagcgaaatacaaccgcgaagccgaacaggaggaacgcaaagaggggggaggaggagcacggcaagggacagggcgccttttttctggggcggggaccaagacgagcggacgaccgagcctgacgggacgcacgcggggagcaggacaggacaccgctgcccgagggcgcggggacagacgaacgcgggccggcgagggggaggacgccaaccgagggaggcggaggacggagcagggcgggcaaaaagaggaaggcggcaagaggggcggcgcagagagggaagactagaaaaaagaatcgggggggcgggaagcgaaagagaggagaacgaaagacaagaagcggaacaaagacggagagagaagggcgggaggcgcggaagacagccgagggggggagcgacgtgacacgacgcacacccggaaacaaccagaacacgaaaacacgcaacggaaaggagagaggggagggagcagagaaagacgcacaagggaagaacgacagaggagaagacacaagccgccccgcgaccaaaaaacgaacacaccgaacggagaagccgcgccaagaggtgagagatgacagcggaaccggagcaaagaaagcagccgagccaaaggaggacgccacaacggaggtgcccccgccgcggacggagaccgacagaccacggagcacggagcaagtgcaggacgccccgcaagcgaaggaggcccgacaggcgacggacgacagagacaacgagaacgagatgagagagaaagcggagaggacgagagagcgaggagagacag

SEQ ID NO: 118975 - DNA, 518 bp, Arabidopsis thaliana columbia
agctatgacaccgcatgcacgcgtacgtaagcttggatcctctagagcggccgcccttttttttttttttttttttttttttttttttttttttttttttttttttttttttttttttttttttaggaaaaaaaaatttggtttttgccaaatgttttggacagggccctttaaaattttttttcctgggtttttttccaccccggtttttttttgcataaaatttaaaacttgaacttgagtgagaaaacttttttgtcccgggaaaaaaaaggggcccctgccccggttggtttgggagctaaaataccgtggagactcatttatccgtgggcggggggcctttccgccttttctgggattgagaagaggccgccaatttctcattggtacctttttttttttttaaattattgggggtgggccctcacctccttaaaaaaaatctggtttatttttttctggcacaacggggttccactcgacgtgttatttgcctttttttcgggtttgttttc

SEQ ID NO: 118976 - DNA, 692 bp, Arabidopsis thaliana columbia
ctatgacactcgcatgcacgcgtacgtaagcttggatcctctagagcggccgcccttttttttttttttttttttttttttttttttttttttttttttaacaaaattggaatttggatttctttactacaataaagaattttaccgtttgtttaccaatcggctagttttagaaatttactcatttgagtataaacaatgggggggctctttttttaaaaatccattgagattacaaaattgtattattgaaaatgcaaaggtgtggcttttttttttaaaatcataaaacatggtttaagtttttgtggaaggggaccaatgttttttattgtccaaaagtattctttttaattggaaagccggcttaaatttttccccccaacaacccaacatttttaaatttgaaagttgaaggttgaaacaaaccccaatttggttgaaacttggggggtcgaccccctttttttctttaaaacccccgtgggttttaccgggtttaattaaggtttattaagatcggttcttttagtaaaaccttgtgggggtctggtgttttgtctaaggcgagggtaaattacaattttctctcccccttattttcctaaaggggctgcgtttatagggagaatccccctcgccggggttaaagaataaaataaggccctttcatcccctttttaggcggtttg

SEQ ID NO: 118977 - DNA, 937 bp, Arabidopsis thaliana columbia
gcatgcacgcgtacgtaagcttggatcctctagagcggccgccctccctttttttttttttttttttttttttgttgagcctttccgttttcccacccttttcttccgtgttcctcctctcccccgaaaaaaaaagcccccgcaaaaagcaaatatatacggggggggagggaaaaaccttctccaatggggggggggcgcccaccaaaaacccatcgctaccaacctataacggggggggctccgcgaaaagaaccaacacccggggggcgcgtccgggggaggccggggccggagagatattcgccccaccgggacgaaccggtgcacagaagtaccggacccgaccgggccgtgttcttacgcacacgcgcgcgcggggttccacgtatgatgtgtcctggtaatatcgctgcatgggggaacggcctcccccggcccccgcccgctgctctgcgccgagcgtagccctctcggggcttccacagcgaccctatgggggacggcgcgaccgggactagggagtggcacggggcgactccggctcgccggcgcgcggcccaggcgggaggagagtcaggcgcgcagtagcagacaagagtgggtgcgcggcggaggactggcaacagaggcggggtcgggggcgcgcggcaccccgccctcagtggatggctggggggagtgggggcgacggcggcgaaaagacatgacacgcgggccgcagagagccgcgaagcggacgacgcccgactcgagggacaggacacgccagagcgcggggcaggaccagcgccgcaggggcagacgcgaggagcgcaccccactggggggagtgggtgtgtgcccgcagtcgcgcgacgatgctcgcgggcgcgcggagagggggcgacatcaggcggcgggagcggagacgagcagggcagccgagcaggggaga

SEQ ID NO: 118978 - DNA, 639 bp, Arabidopsis thaliana columbia
  unsure (1)..(639): unsure at all n locations
nnnnnnnnnnnnnnnnnnnnnnnnnnnnnnnnnnnnnnnnnnnnnnnnnnnnnnnnnnnnnnnnnnnnnncttttttttttttttttttttttttttttttttttttttttttttttttttttttttttaaacaaaaaccccccaaaaaatggctgttccaaaaaaaatgggggaaacaatattctctcaaaactagaggccctttctcccttttggggcctccggccaaaattttatcaaagggtgctaccccccttggatcgcaaaaatgtttaccaaaaataatttatgcaatccatttttttgcccaacctacccaactttggaacttaacattaaatccctttcacgcattttctttaagcttccaccagagaaatagggaccaaaaccccccaccaaatttaccggaactaacctgagcaaaacgttttttttggtagtttgggtgaggccccaaatacatcaaaacacaacttccatattttcaggggcaggctttgtttatagggctcctccaccgtggaataccaattaacccactgggactactggtaaaacagacccaatttntatttttttttgatcttaagaaccgttttgagtcttgaaacctgggtttggagaacaaaaaggga

SEQ ID NO: 118979 - DNA, 565 bp, Arabidopsis thaliana columbia
cgtagcttggatcctctagagcggccgccctttgttttttttttttttttttttttttttttttttttttttaaagaagaaagggttgttactattacaggagagtttaacttaaaatccaggtttataaaagtaacccggcaaagtaaacactgcacccacatatttttttatgtgcggggctatcacaaaccattgaacatgaaaaaaaaaaaatgtctcaacaaatggttaaaacattcaaatcacaccaagctctgtaagaaaggcggcgcataaatccaagaagagaaactggggaccgttaactttttgtatatccagcaagtacttctcttcccgggctttgtatagctgaagttcaaatttgatgacagggggtgaagtcatggcccagtcatccccaatgatgcgggttcatctttaaagggcaactgtttgtgtgccattagtttctgaccatcagttataccaggaacccatcggactttgattgttgggaggaccatttttcttccaaaccacattggtttcttgaaaagctttaaaactttctttattgatt

SEQ ID NO: 118980 - DNA, 602 bp, Arabidopsis thaliana columbia
  unsure (1)..(602): unsure at all n locations
acctatagatgagctatgacgccgcatgcacgcgtacgtaagcttggatcctctagagcggccgcccttttttttttttttttttttttaagagagaatcccaattcaaaaaaagaggtaaaaggaaatgagtgcgacgaacttacagccttacaaaagtaataatcaatcatcttttctttaggcttcttcttcttcttcgtcctcctcgtactgctcttcaccgactgtagcatcttgatattgctgatactctgcaacaagatcattcatgttactctctgcttcagtgaactccatctcgtccattccttctcctgtgtaccaatgaaggaaagcctttctcctgaacatggcagggaactgttcactcacacccctgaacatttcctggattgaagttgagtttccaatgaaagttgatgccattttcaaaccagtgggagctatatcgcagacgcttgatttcacgttatttggaatccattcaacaaagtttgaggggtnttttgttctggaccttcatcatctgttcatcaacctctttgggactcatctttccacgaaaacagcagaagctggcaagttacgaccatgacgag

SEQ ID NO: 118981 - DNA, 900 bp, Arabidopsis thaliana columbia
  unsure (1)..(900): unsure at all n locations
cnnnnnnnnnnnnnnnnnnnnnnnnnnnnnnnnnnnnnnnnnnnnnnnnnnnnnnnnnnnnnnnnnnnnnncttttttttttttttttttgtcacctaggaaaaacactcaacaaaaaaagcgaaataccgtaaacattaacaagtatcactgcccgggacatactggtgtttatatatacagagcaaagtcattgtgtattaaacagagaggaatggagttctttcttgatgaaaagtgaaaactaaatcaaatcaaaccaaaccatagaaaatcatctgtcgtttcgtactaactcacatagtttgaagcagttcagggctcaagtacacagttttccagctttggaaaggagacaccaagttgcattccaacagtaactaatgtctccaaggacctagcactgttagctaagagatcctcatcaatcttaatcgagtccttttcaaagacgcatataactgggcttccaccaaatgaaaagtaaccaagcttcgcccctttcttaacatgggctccctcttgcctaacaaagctgatcctaccaccctttgttgctccaattcgaacaaaaggcgacctttccaaactgtggttgtgatataataaccatggtcctgttattcttaaggaacacatacagtacttggctatggacgcaatgggtttaccgtttatagcttccaaaacatggccaaactttctatggacccagaaccgggtaatgaaccatgtttgcccggggccccatggaattccccccaaatcctctaggagagctccactgcccttatttcaaggaggccttgattaaaaattacggcctgtccataaccgggtctttttaaccgttgatggccttacggaagtgcggaatcacggtctttttgacctgcccat

SEQ ID NO: 118982 - DNA, 524 bp, Arabidopsis thaliana columbia
gcgcatgcacgcgtacgtaagcttggatcctttagagcgggcgcccttcttttttttttttttttgtcccttgggaaaacactcaacaaaaaaagcgaaaatccggaaacattaacaagtatcactggccggggcataatggtgtttatatatacaaaacaaagacatgggggattaattttttaaaggaggtggcgggtttcttgatgaaaagggaaaaacaaaaaaaaatcacaccaaaccctggaaaatgcccctgcgtttttacaaccttactctcatattttcgggagcaagtgaaggtgctaaaagtccaccattttgcgtacttgagaaagggaaacaccagttgtttttccaaaccatgaattaatgtgttacaggggcctaagccgtgggtgtgataaaaaatcaccttactaattttttatttgatgtcctttctaaaaagacacaaataatcttgtgccttccaacacagaataatagagaatccctacttttgcccccttttttttaaatag

SEQ ID NO: 118983 - DNA, 878 bp, Arabidopsis thaliana columbia
  unsure (1)..(878): unsure at all n locations
aggggggggngtctttttgggaaacgtcttacgcccaaattttagaacaaagctcgtccccctccccgtacccggcccttttttcccgggggggagccgccgccattataattttaccaaattaatctccctcttgacccattttaaaaactcgcaactaatcctttctctcccggatgtaaaacgctcgcccctaacctccatttcctcccgcaggaacagaacgaatacccctctctcttttctcgggggggtgggggncaccacctccgggcccccaaaaattattaacnccccccccctcttcccttactaccccccccattcctcttactacccccacctctaaaaacaacaccccaaactcttatattttttttttatccccttcacaaatcttcccaacccaccaccaattaaactctttcttttcataatccccttctcctattccaaacatcatcaaatcactccctctaaccctcttacttcctatcttacatctcctccaccacactatttcctatcccgcttttctctccacacttaatcatactcacactacttccctccactttacactcctctctattctcatgtctccttaccatggatagtcccgtttaccacccgcccagatataaacgaccgattctgagtgtaactgtcacgacccacgcactggtacaagggacaagttcgcccgccaatacataacaagtgatgaaacgtaaggagtcacctgcgctcggagacgatcgacgcctgatgcgcgcgtcgcgctntagctggacactctataattctcatcaaccgagtttgcataacaccgaggtgaccgcacactttatgctatgtgcggcatagtgctcccgtag

SEQ ID NO: 118984 - DNA, 853 bp, Arabidopsis thaliana columbia
  unsure (1)..(853): unsure at all n locations
nnnnnnnnnnnnnnnnnnnnnnnnnnnnnnnnnnnnnnnnnnnnnnnnnnnnnnnnnnnnnnnnnnnnnnnnnnnnctttttttttttttttttttttttttttttttttttttttttttttgcaaaaaacaatttctgttggaatcaaacgttttttgctagaaacaacacaacttgggggtttaaggcaaagaacagaagaagaaacccccttttaagaaagaatgtacctgcagaaaggtggtccttaaacaaacatcttaggaaggggggttagagacatctccctaattagaatctttttttttatccgaaaaaaactccggagttttttgaaattccaccattttctcaagtgcctatatgtttccagcttcagcaagagcgtgtatcctgagcttttttgcgggtcaatatgtaacgcccaatattcccttgacgaataaggagttgtctttggagcagaagtcaggaagctcaaaaagatgggaaacctttccacaaaaccccttgaacggggatttttatctggaattcttttacagaaaaaccttgcattttataactaccggaccttnttccttgaaatacgacgagagatcttattaaaactcgaagaactgaaaatatttcaaccaaagcttttttaatgaaagaaaccccacaggggggggttaaacggttccatcccggcataagaatggttcccgaatttcccccctgttaacctgggtttgggcaaggcccaagcggaagtttgccctgcccgctttcttaaatctattaaaaatgggaaatagtttttttcacatgtttggccggctaagaaaggaattttaaggtttaaaaaag

SEQ ID NO: 118985 - DNA, 457 bp, Arabidopsis thaliana columbia
  unsure (1)..(457): unsure at all n locations
nnnnnnnnnnnnnnnnnnnnnnnnnnnnnnnnnnnnnnnnnnnnnnnnnnnnnnnnnnnnnnnnnnnnnnnnnnnnnccacgcgtccgctaaaaaacacaatactttagttttgcaacaacgagagcgaaccatatgtttttattctgagacccggcggtgagaagatcaaaaacaggctttgcgcccactcctgtagctactattactcttttcatcttcgaggggcggctcaggagatacccgtttatctgccaagagagaaagttctggcgatcgagctaggctatcccaataagacatacttcaccacagatagtctgttcaagactctgatgaaactcttagacgctgtagcgaaatcgcacgtgagcttactcgggaagagcatagttagtggtatcatgcaaaccagagtaaaataccatttttctctcagcataggcataccgatactg

SEQ ID NO: 118986 - DNA, 886 bp, Arabidopsis thaliana columbia
  unsure (1)..(886): unsure at all n locations
gnnnnnnnnnnnnnnnnnnnnnnnnnnnnnnnnnnnnnnnnnnnnnnnnnnnnnnnnnnnnnnnnnnnnnnnnnnnncttttttttttttttttttttttttttttttttttttttttttttttttttttttttttttttttttttttttttttggttttttttttttttttttttttggaaaaaggggaaaaacttttaaaaagggggggcaaaaaaaaaaaggggggccacccccctaaaaaacttttggggggaaaacccccaaaaaaaaaagggggggaaccctttttttttaaaacccccgggaaaaagggggaaaaccccccttttttttaaaaggggatttccccccccccccccaaaaggcgaaagggtaaaaccccaccccggggggaaaggggccctttaaatttttcggagggccaaaagggggggccaaaagggccccttaaaaaaaggggggggaaaaaaaccccctcctctgggggggggaaaaatctgggccccattaaaattttttgggcccctggggggggggcccaggaatttaaaccccccgaggggaaaattgggggggggccctggggaaccattgtggccaaaccaagggaaaaggggtggggaaaaaagtttgggaaaaaaaaccagaaaatgggccctgggccggccaaaaaaacccataatcccccccttggccttataaaacacagacccttttttcttgcgctttcggggggggggggaaaaccccggggccccccttgggatacaaaattccaaagggggagagggggcccccccgaaaaacttggggcccgggaaaaccaggggaaattcccctttaaaaacaggggggaggcaaacgaaaggaacccttttccccc

SEQ ID NO: 118987 - DNA, 753 bp, Arabidopsis thaliana columbia
  unsure (1)..(753): unsure at all n locations
nnnnnnnnnnnnnnnnnnnnnnnnnnnnnnnnnnnnnnnnnnnnnnnnnnnnnnnnnnnnnnnnnnnnnnnnnnnnnnccacgcgtccggaaaaaataaaaaaaataatggggtcactcgaacatagatatgatccttgtcctaanccctatgttgtaatggtccatagtggggtgtcggacgcatcagncaatngcaaaagacgaaatnntcgacgccccacttttttgatctgaaaaagatgggnngacaaactagatgcgactaacttgtgagatatacagaaggggcaaaggatgacnntacaccttcggtctcaagataatgccattcgatnngctgtcncnnctgttggtaaccctcctaatgtggattacttgtccactgtcccgtaagagggaactctacaagggagaagatgtgcacantctccggaagaacattnngccgttcattatntcattgatgggggtannnatggaataaggggataaatacggtgatncngaatnncttcgcataagtnntcggtcgacaattggttgccttcagctatctttcaaagtgcgagggctaatcactttgtcgccttttggtatcaagcatcccgaaatnggatgcacctgtcggaatggcattcacatctgagaaccaatcgggtggcagcgtttgtggctgctgacaaagtancgtttaacattgtgcgttctacagctaacacaacactttgtttgataacaaaggtagacatta

SEQ ID NO: 118988 - DNA, 393 bp, Arabidopsis thaliana columbia
gcgaagatcgttggcgtcgcatgcacgcgtacgtaagctagggagcctctagaggcggccgccctttgtttttttttttttgatagagaaaaatggagagttttatgacccatatgtacatcaaaacgagacattggcgagattttttttccgaccttctttaaatacgatgtcgctaggcctcttggttaaagttgaattgcctatagagagagcacaaccaaaaaggggcggggagcgcgccagctaaacgcgagcgcgcggagaaagcatgggagtggaggagccggagcgatcctccggtgacaacttagcgtagagtcgagcgcggtgttagggtttgggggcggtagaaggatagcagtgtgaaaatctcggaaaagaattggagtg

SEQ ID NO: 118989 - DNA, 566 bp, Arabidopsis thaliana columbia
gggcgaacgtgcgggagaaagcggggcggggaataatgggaacgccttagaatattttgacgtcgcatgcacgcgtacgtaagcttggatcctctagagctggccgcctttggtatttttttttttttttagagcacaaaagctttcttgcgtactttattggtattgggatgaaccaatgataatgggcacgacatttatctttggccatgccggagatgctataatagaaagaaaagaccgaagtctttattatgaaccttttggggggggggggggggtacagttgttagacgggcttaggagacaacagccagggatgcggtcttgcagggcgtggttcggctttgaaatccgggccggccatggttaatcgtgccgtgagaggtgggggtagaatgggatagtcattgagtgatgatgggaccttggaggcttgcggtcggctttttggagaggatacaagtgccatgggtggggaggagagggccagacgcagcggcggcggggtgggcaacacatacaaagacgcccccaaaaggaaagtatgataatggcgaggcaat

SEQ ID NO: 118990 - DNA, 498 bp, Arabidopsis thaliana columbia
cgcgtacgtaagcttggatcctctagagcttccgcccttggggttagtttttttttaattaaaaatcacctttattttattttcccgcgaagttttccaagagttaaagaccttacaatggggtataaaaataggttacaccaaaaaagattatcccgccagttgttttttcccaaacaagtgtccttcgccgccaatttttttttccggggcgtgggggtttggaacccgtgggagcaatctaaaaaaaaaaaacaaggggcgagacttttttgcaaggacggccctcgaacgccccccccgtaggggggggtccaggggagatagccaaactgcttgtcttggagggagacggccgcctgtgcggggacccttttgcctctgaccgctaggggagtgatgctcaaagacatggatgtgcggagccacctcgtagtgccagggcggagccgcaactgttggggtagtgtcgctgttatagcgtgtgccttgtaatgt

SEQ ID NO: 118991 - DNA, 550 bp, Arabidopsis thaliana columbia
aaaattttccccccctggggataacccttttttaatacaaaccccttcctctctcctctccctccctctccttttttccacacttttttcttttgtccctctggcaacactcccctaactttttctcctctccccaattttccaacctccgctcacagattttttattattcccccctctcttctctacttttttatttaccgggtggtggtgactcacagcaccttgtgcgcgtcttttaaaaaaaaaaaaatacatttttttcttttctcacaattattcatcccccctctcctaacccactccccccttttttacttctccaaccaaaccacctctcgatccgcctctttatgttctaccttcacttctatccactacttatcaactcttctctattctctctctacaactatttaccacaccctattttcattaatttgccctttccgtaacatttattatctctctcacccctcacgttctttccactctcaatgcactatcatatactatcctcttcctccaaacaatcatccttttctccaca

SEQ ID NO: 118992 - DNA, 369 bp, Arabidopsis thaliana columbia
  unsure (1)..(369): unsure at all n locations
ctccaaaaaaatttaattnatgggaaaaacataaatcccaacctttttccatcccccaattctaaacaatggaaaaaaaacctcacttgttttaccccaccaacctttttcccattttctttctgagcgggggctctttcccgcggngaaaataaaaataaaactcctttccccctgccaanccttttcccccccctccctttttctccaaccctttcttaatctaacactcttanaaaaaaattttcttttcccctttacccttggtccccttttcacatttctctcttaaaaaaaactcccccctcaaacaaattctcttatcccaacttccccctccacccttcacctttccccctcttcctctaa

SEQ ID NO: 118993 - DNA, 409 bp, Arabidopsis thaliana columbia
  unsure (1)..(409): unsure at all n locations
ccccaactctattcgacttatttagggaaactggtcncctgcggtcccgtccgattcccggggggcaagcgtccaaaaaaactttcatggatgcttctgttatagcaaatttatttattctatggtaatcgcgaagggaatgacaatgatctccattcccaactacttctagctataagaagggggggggggaactgggatttttttcaaaaaaagtaatcgcttggcaaaattgtgtaattagggacaaaaattaatttcaccccatctatgttcataacatgggtcaaatctaattgcatgtgtatggggggggaacttgaaccacatatgttggtcataatcaatcgtttctcatcttaatataaaagggggggaatccggaggtcaagattctaaggaaaaaatc

SEQ ID NO: 118994 - DNA, 356 bp, Arabidopsis thaliana columbia
  unsure (1)..(356): unsure at all n locations
atttaggacacacttagaagatcttgacgtcgctgccgcgtcgtaagcttggatcctctaaagcggccgcccttggtatgggcttttaaaataaaattttnttttnannnnnnnnnnaaaaaacaaatcaaaggactttttgccatataaacaagaaataaaattgttatctgctccatcttctaaagaaaattgttaaactccccctttttttttattaaatcataaggggagggtggggcaccacccccccttgttgaaaaaaaaaaaaattttttgtgttcccaatatccccctaggaattctcctttcccaatttttttaacccccccaaaaaacctttttttttcccccct

SEQ ID NO: 118995 - DNA, 186 bp, Arabidopsis thaliana columbia
atctaccccaacttttatcgactacttagggaaactggtcccctcaggtaccgtccgattccggtcggccaggcgtgcgagtatacttcttcttcatgggattctcgtctctaaataggttgggaatcaatatttaaagggaaattattgaaattaggggttctaatagtgatggatggtaataaa

SEQ ID NO: 118996 - DNA, 500 bp, Arabidopsis thaliana columbia
  unsure (1)..(500): unsure at all n locations
tgacgtcgcatgcacgcgtacgtaagcttggatcctctagagcgtgcccccttgggtttgtttttttttaaagcaatggtaccggaaactataatcggggcgggttacaaaaatgggggcccatttgtggaattttgacctcatctaaatttcccattccattgactatatatctacatatgtattacgggagtaaacaatatatttctttaaaggggggtggggacatgggcttggtgcttggctaaaaaaactaaactccttccattggatccaaaacctcccccccaagagtgggcatcaaaatggaaagaaagatggttcccaccaatcttgagaggcaagcctngtttgaaacattgttttaatctctatatgcccctgttgggaacccaacgaatttagggggtgttctccgggggaaccaaagaagcgcaactggagccccaatgggttccttgaacccattaaagacggaggggggggttccccattgtttt

SEQ ID NO: 118997 - DNA, 502 bp, Arabidopsis thaliana columbia
  unsure (1)..(502): unsure at all n locations
tgacgtcgcctgcacgcgtacgtaagcttggatcctctagagcgtccgcccttgggttttgtttttttaaatataaattaaaagttttttaaaaagacatattcacgaatgataatcaaagagagaagcacccccacatcagtcatgaaaccattttctggcttctttttttcttggtttattactttcatttccatatgaaactcctatgcggggggggganaaggacacaccattttgtctaaacaaactaaaggatattttttccttcaaatgggggaacccccatgtgggagagggaccttcttttttgtgtttcccacgataaccccagcaccttagattctccctaaataccaccggggggtgggggtgagtctacctcccatggaaccatttagacttggcccgggtcattgttctcattatttatttggggttgctggtctttaacccgggaccaggttcccattggacgttactttttggggaaaaaactttg

SEQ ID NO: 118998 - DNA, 421 bp, Arabidopsis thaliana columbia
  unsure (1)..(421): unsure at all n locations
nnnnnnnnnnnnnnnnnnnnnnnnnnnnnnnnnnnnnnnnnnnnnnnnnnnnnnnnnnnnnnnnnngcccacgcgtccgaagacaatgacactgttcttgctcttgtccactctcctcctcacgacttctttagctaaagatctctgtcataaagatgacaaaactaccctgctcaagatcaagaaatccgctaaacaaccccttaccacccttcggcggagggggatcccaaaaccggactgggggctcataaaaactggccctcgagtgggcggcggacgctacttgnccaacccaccggggtgcacttccccttaatcatacaaagacgggcagagatctccgggccaaatcccccccttgaagggggggaacttacccggatctttacatccctttatctttccggaaactcactaa

SEQ ID NO: 118999 - DNA, 268 bp, Arabidopsis thaliana columbia
accttagaagatctatgacgtcgcatgcacgcgtacgtaagcttggatcctctagagcggccgcccttggggtttgttttttttttttttgttttatttctattgtttttttatttttgtatttttttgtttgtctttattgttttttgggggagaacaaaacaccccttttggattgttaagaatattgggcggctccgcccaccggaagaatagtgtttataacaagaaggcgccaccgtggagcttaatttttttaggggggggg

SEQ ID NO: 119000 - DNA, 284 bp, Arabidopsis thaliana columbia
  unsure (1)..(284): unsure at all n locations
ctcatatcctttcccaatttccccttggccacgctccaataaatancccttaattttttttgangaatcttagtttttaattcttaaccgaaaatgattttctccattcttagttttctttttaccaaaactttatataaaaaatctctaccttggtgggtnaaaaataagtgtccttaacaattaaatataaactcattgcccattttctcctaattttcgatttcacaagagttgatcataaaaacttaccacaccatttttcaatcaattttttttaaaaa

SEQ ID NO: 119001 - DNA, 555 bp, Arabidopsis thaliana columbia
  unsure (1)..(555): unsure at all n locations
ggtaagggaggtggcggtcgcgtgcgtccgggctattatannnnnnnnnnnnnnnnnnnnnnnnnnnnnnnnnnnnnnnnnnnnnnnnnnnnnnnnnnnnnnnnnnnnnnnnncttgggtttttttttatttttttttttttgttttttttttattccgggcccgacaaaatatttttcccgaaaaagcccaaaggggcctgtttcttaataatttaaaggtgtcggcccattcgtggtttaaagagaatttaaccccttacgaacttttccaaagggggggcttaaaaattgggggcggggacaataataaaagatatattttaagggggcggtccttcgaaaggtcccctggaagagcacatgttattagggagggagcctttggggagcgcggggggaatagcctactttttgcggatttttttgggcggcaatatagagagttacacaaggccttcagccccagtcagaattcacccgtgaggggtgcgcaccgtgcttgaatgtatttgtgggagttgtgtttcttgcttaaactcataggcctgttttg

SEQ ID NO: 119002 - DNA, 868 bp, Arabidopsis thaliana columbia
  unsure (1)..(868): unsure at all n locations
tcatataccccttcccaaatttcccnggtcgagccacccctccaataaaatcanagttttttgaaaaatttgaaaaaaaataaccaaaaaaaatcaaaaaacccaccccctaaacttgagaaattcctcctaaaccagaaccaaaaaaaccccctcattatttttttttttgaaagaagaggataaatcntcttccaccacctaaaaaaaatnactccttaccatttcantcccttttttaggaaaaaaactccttgtttgaaccacttgtttaaaaaaattgtgcctcaaaagtttcaatcaaaagtcgactccaccaaaatctccttatccgtaccaaatttttttaatcttaaaaaaaaatgattccccttcaattcctgttaaaaaacccgatttttccacacctaattaaattttcaaccattaatcctaatctttttttacctttccgtttccctttacccttaagactctttcacaaccacccaanagttaaatcctttcaaaaatatcctgctcaaaatcctaacaatttccctttgtttaaaaccccctcccacaaataattttaaatttgccaagtttcaaaaacttttttttcttaaaacaactttaataatggttcttactcaaagccgctatcaaccttttcttttcatcccncccattgctcaaaaatcttcacccgagtctctttaatcacaccacatttccttccataaaaaaatttttttttattttacacagagcaaccctttnctctactctcattttaacataacaatttgatcacacccccttaagttcctttaaatcaaatctcttttaacccgtaatttttcttttaaaaaactatcctcttaat

SEQ ID NO: 119003 - DNA, 186 bp, Arabidopsis thaliana columbia
ccaacttatcacttttaggaaactgtccctcagtccgccgattcggtcgccacctccttaacccaattttactcttaaatcttatctgctatacctaccccttcatcccatttaccggcttaacctaaccataaatatcgcacctaaatcaatggtctttcatcccaaactacaaaaaatcatctc

SEQ ID NO: 119004 - DNA, 515 bp, Arabidopsis thaliana columbia
tgcgcgggcggaggttgggaaccttaaaattgcacgctcggggagcgccacaagaccatctgccctcgtgtggtatcgttttattctggaccgggtgcggtcggttatgaagaccgtcctacatgattgggacgtatggatttcgcggtggttcactggcattttaggcgctcgaggagatagtattttatgtaggggggggcgcggcgactaatgttccaccaacaaagtaacgacaggttctcgtggcccgccaccgtactctaccctcgggcgcgagctcgacggacgggcctgcgtgcgctccctccacctacattccctagggtgagaaacacgtgggtaactttttatgtccgtgatagagctgcgacgtgcgggagcacgtccgccgcggacggcgccggagagggtagatgactgaggaaggcgacgacccggcacagacgccacgagccaggcgcggtgcggcgccacacagacagcgtgaatgacagtgggtggtagtcgcgtgc

SEQ ID NO: 119005 - DNA, 842 bp, Arabidopsis thaliana columbia
cccccccccacggaaccccccccaaactccgccggggcccgggccgcaaaacaaaacaaccctaacccgaccctcaatactttccccgcgcccccagatccttcccccagtcaccccactcgatcatagcagcgctaagcccaccaccccacgaggccccgacccttttatttgggagtgggggaaacaccccgcgctcccaaaaaacaagccccacggcccgcgggagcccccccccccatcctccccacctaccccctcctcccacgacacgcacgccaacacaccccccccccccacccgccgcctctctgaccccacgccacactgcgccctccgctgaccacgtcgagccccccgcccttaccaacaccctcgcactaacggccccccacactctgtcctcccacaccgtctcctccgcccccctcaacgccattgtgccactccccccgccccgagggatcccgccccgccccgccccgccccccgaccagcgcgcccgagacgggcgggtatagtccgtcacagaggagcagagtccgcgcgcgtgggcacagtggcgggcccgtcccagtagagggcgcacacgcttcgccgcccgcacacccgcgcacagcccccccgagttagcggctcccccgaagcccccccccgccgacttccagtcgtagacgccgtgtagcacccccccacgcatcaccgaccgccccatgccggcttagccccgtccccggcccggaaggcaacaacagggtcacaccgagttccccccgctccaccccacgccgctcccccgatcccgccccgcagccccacgcccgccctgcagcccatacaga

SEQ ID NO: 119006 - DNA, 833 bp, Arabidopsis thaliana columbia
  unsure (1)..(833): unsure at all n locations
acttttccccctccggtcaccttcccaatttccngttgggccagggccccaaaaaaccaaatttttcctcttctaaaaaattttctactgccctcaaaaactaaaccccgtttnaatcccatttttaccctgcttaaaaccttaacattaaatctttccccacccttttatccaaagggggggttttccttcaccgnccttcaaatatatacccttttacaaccttcnnntcccccccctcccgctctcatttaatttctttgccccaacaccctatgaataaaattttttttgaaaaaaagaatgggccttttttttttcccccaaccttttttatcaaagaaaaaaaatttgttaaaaacactgtgttcccccaacttgttgtttcaaaaaaacaaacccaatggcttctcctgcccaatcttcttgaccacacaattctcttagggcgaaaaactctcatttttttaccaaccacaatataccctttttttcccccatatactcttttttcctctaaccccccccactaaacagccgttacaaagaggagatcccccccacataccccccctcttcttctccttatcaaaatcccctatccccaccctccaaaaccgccacctatctccacccgcccccccataaattctttcttcacataaaaacaaaaaaaaagcccccccctaaaaaccgattcttccctcctccaacctcccttcaaaccacaacaatcgttcttgcaccaaacataataaaacccccctaccttcttctaacaccccccttctataactactcaccacctctcctattttttaattccccccccc

SEQ ID NO: 119007 - DNA, 785 bp, Arabidopsis thaliana columbia
  unsure (1)..(785): unsure at all n locations
cccaactctatccacttcttaggaacactttcccctcaggtcccgtccggatttccggtcggcccgcctcccttaacccaatctttccctctctaaagaatcttcatcatggcctagtaaccttagccccgtttcaatccctctttacccgcttaaacctcaccataatcatcccacctcttatccaagctgtgctgttcatcaccgaccttacaaaaaatctcttaaaaactcngatcccccctacggctcacttcattctttcccgaacccctggcattaaattttttgagaggagggatggtccttacctttttccaacacttttttcctaagaaaaaaattttttaaaaacaccttgatacccaccatttttcttcataaaaacaatcccaagtgcttcacctggcaaatttcttgacaacaaacttctaacggccagaatcctccatttttttacccaccagtcttacatttttcttcccccttaaggtccttttggccgtaatcccctaactaattggttttaaaaaggagattcccccccattaagcctcttttcccttttcttatcctaaggttctattcagaatttaatcatgcccgtttttttccctcccctccaatgtttttttttattttaaaaaaaaaagggcccccttaatccccttcccctctccccttttttttttatccatttatccgccctttaaccgtgagaaaccgctccactttcttaacctctttgcttcataaaaaccccccccttctttcccccggaagcc

SEQ ID NO: 119008 - DNA, 517 bp, Arabidopsis thaliana columbia
  unsure (1)..(517): unsure at all n locations
taggacnnnnnnnnnnnnnnnnnnnnnnnnnnnnnnnnnnnnnnnnnnnnnnnnnnnnnnnnnnnnnnnnnnncttggggttggtttttttttttttattttttttttttttggggggaaaaagtattttaaagctgtgtccttggagtgaagttagagaagtaaaacattatgggtgttggtattatcaaatactatctctaaataataaggcacactctaatatcattatcactggtgggaaaacccaaaagaaaaaaaaaaacttgaatggtgaaaagcccccaacaaaagactcagagccaccttttattattgttggctttggaggacctggttttggccaactcaaccaggtttttgaaaagcaaaccctctgggtttctcttttttctgggggttcactacttgtaaaaaaaaggttccgggttcttcctctctaagaggaatctaagccgcttctcgaggggggatgctcaaaaacctgttgcctctgggttggccttgaagggggagg

SEQ ID NO: 119009 - DNA, 510 bp, Arabidopsis thaliana columbia
taggtaccactatagaagagttatgacgtcgcctgcacgcgtacgtaagcttggatcctctagagcgtccgcccttgggtttggttttttttttttttttttttttttttttttttttttttttttttttttttttttttttttttttttttttggaaacaaaggagcttttttttttttttttttttcaaaaaaaccgagttcccgaaattttttgaaaccctttttttaaaaaagggggggttaatcaaatggaaattcttttaggaaccccctttccgggaaccccatgctcaaagggaggcttaaaaagctttttcttaacaacccccgctccagtttttttttttaaaggaagggacacgtttttctaaattatcacccccttaaaaaattggagcttgcctttaaatttttcaaagcccccttttataaccggctcattgccccaaaatgctttttgttgttccccaatgtccttttccccgggggaaggggtggaaaaaaaac

SEQ ID NO: 119010 - DNA, 552 bp, Arabidopsis thaliana columbia
cccccactctatctgcctgccccttgttcccctttttctctccggggtcgtgtttagaaaaaaacactcccctcatttcataaatttttgcgtcccatcactcttctctacacttataatcagttatgttgtaaagttgtagatccattctccccgtcaccccctccgcgatctaattcgccccaacacataatctttttccaatagggggggggattgcccctcccttgctcccacaaaaaaaaaattagattattccagtcgcctttataccttcgatcccctctctgtcgcttagtcgctcttcttattctattcttttgattgccacttccgcctcggacatatactaatattaagacgtatgagttacagaaggaatactagtacagatttcatcttttcctcccttcgaatctatcattcatagccctattacctaattctagtatgcagattactattcattcactccccgcgtcacgctacaaaccgagacacgtcttgcagacaaaagccataccaccaacgaacacgacgacggagaggata

SEQ ID NO: 119011 - DNA, 294 bp, Arabidopsis thaliana columbia
ctgtccccctgcaagaccggcccgtatttcccgtcgggcgggcgggtcgaaatattcccaaacaaaaaaaaaccccttatggcccagggccgccacgaaagagttttttcctcccttgcttggcggaaaggcgcgaaacgcttccgcccggcatttaaaaaccccctattctaccaggggggggttacgaaaacttgtcccctaccaataaaagctttcgggtggcctcatgcacagaccccaccgctgagagatacttgcgttccttttcgggcgaagaaccgaaactacctc

SEQ ID NO: 119012 - DNA, 550 bp, Arabidopsis thaliana columbia
  unsure (1)..(550): unsure at all n locations
cccacgcggcacccctccgggccccccccggggggtaatatttaggacacctatagaagatcttgacgtcgcatgcacgcgtacgtaagcttggatcctctagagcggcgcgcccttggggggaggggtttttaaaaaaaaatttctttttttnaaaaataaattcacgatgcatttacctatattttttggcggggattgatctttatcccaaaagaaaagaaatgaaggaatcttaatttttcttaaaccacaataatttcaaaaattttaaaaaggggggtggggtccgcccacatgttgggcttcaaaaaaatatttttataatccggtttttacccacctacatcaatatttattgttcgaggatcacgccccagggtaacagtttttacggggggggttggcttccaatttttaaattttatgggagcggccccttgttttaaccctaacaatatttccatcttctttaggtggacacacaatatgggcctcccttgaccccccacccggttttttttttaccccccagagggggggccagtct

SEQ ID NO: 119013 - DNA, 906 bp, Arabidopsis thaliana columbia
  unsure (1)..(906): unsure at all n locations
nnnnnnnnnnnnnnnnnnnnnnnnnnnnnnnnnnnnnnnnnnnnnnnnnnnnnnnnnnnnnnnnnnngccacgcgtgcgattattagttcaaaataacaaaaacggaagataattaaaatctaaacacctgaaaaaaaaaatgaaatatctgtcagggtttcttatttttttatggcctatgcataatggggaatgtatatggacgatccaacaagggggggttgtggaacgatcttgatcccaataaaaaacactcagacccttttgtgcagtgtaaatctggaagggccgcctggggaaacattttgtcaaggtggaaaatatatcaatttgattttagggatatttgttggaagaacacacttttttgggtgtccctttagacatgggccctgattttgggactggccaacaattggatggggatgaatataaaccgggtggggctcaaggaggccatttgatgggccgctagaaaaaatgaatttttttagggtaaatcagggccactcatatagtcataatggaaccaatggccccggagaatggatctgggtttatctaaaaattatttcttgagggcggaactgattagaaaaaatccggagtcaggtgggccggaaattttttcttaaatcttgaattaggggggaaaaattcaaatgcttcattcttcttgtgggataaacttcccggaaaattatggaggctcggattttttgaaaaaaaaaaaaaaaaaaaaagggggggccttaaaggaaaatttctcgggctgggagtatttttttgggccaataaaacgggcgggttaacgggggggaaaccgggcccctatgggggaatccttccgggggaaaggaggccgcctttccacgtccctagggaagggcccttgccgttggggg

SEQ ID NO: 119014 - DNA, 335 bp, Arabidopsis thaliana columbia
  unsure (1)..(335): unsure at all n locations
acagaaagttttttttttattgggcggggggcgggggncgagaggcctcagcggtgccgcgtgtgaaaaacagacgggaccctcacggggtaagggagaaggagtgccgccccgcgcgatgaggcggagggcgagagaggcgtgggcgcgcgagagagggggcaaagcgcaagagggggaacggcacggataggcgcaagatggctggacagaaggagagagggctcgcgccgcggggccggggcccacggcccgggagacgccggagaacacacgcacaccaggatgaggcgagagggggggcaaggggagaatgagcggtgagggggagaggc

SEQ ID NO: 119015 - DNA, 831 bp, Arabidopsis thaliana columbia
ccccccctcaaaccgccgattcgggcggcacctcaaaaatacataaataaaaatttccttaacttcataccacatacagatcctcacctccctaacccaatacacacaaatcaacaactcctcccacgagagagaccaaagcctttcaaaaaaaaacccccaattcaaccttcccccccccccaaatacacaacccaccacaaaaacacctcccaatccacccaaacacacccgccgcacaaaaccattgatatcaaatcacaaaacccaacaacaacttccccgataactctaacacaacccccctcccaaaaaaaataaccacaccataaacaaccacaacaactataaacaacaacaccaacgaaataacacaccccccccgccatcacacaaccccctcccccaaataacaaatcactcaccaaccaccccccaacaaaacactaaccccaacaaacaaaaccacaaacatccaaaccacaaaacacaacgcaacaaaacaaaaaacacatacacaccccccccaccaaagttcaaaaaaaaaacaaaactaaaacacaccaaaataccaaccacataacaaccaaccacccctcccccaacacacacacaaccacttaacaacaccaataaacaacacaccacacaaactacaacctacccataccactcaatcaacccccccaaccccatcacaacattacaacccacacccccatgactcacactctctccacaacccacccacacaatagcaccacgaacaatacaaaacacccacacagacgtacacccatgaacacaaccatcaacacaaacacatcaaat

SEQ ID NO: 119016 - DNA, 530 bp, Arabidopsis thaliana columbia
  unsure (1)..(530): unsure at all n locations
nnnnnnnnnnnnnnnnnnnnnnnnnnnnnnnnnnnnnnnnnnnnnnnnnnnnnnnnnnnnnnnnnnnnnnccacgcgtccgtccaatttgatgtcgagaggtcaataaagtgatgagctttttgtgattttttcctcattcaaaatctttgcactttttcactctccttcaatctcaaatttctgagtctttcttggttcactttccttaaacacgatgggggcgtggatgcaatttcatctcttggaaccaattgtgttctttctggggtttctccattttcacaagagaatcaatcaaaatcgaaactttctccgtgtatgagtcttgatttgaaggaacatccaatggcttcagcagatttcaccaaccaaaccttaaccgttttctcttcttcctctgcgtctccttttcaggcaaagacatcatcnattggtttgagtagaggaatgaaatggtgggagaaatcaacaaatcccaacttgttagagatttcatctggcaatcattctggtgactcttttgtaaac

SEQ ID NO: 119017 - DNA, 489 bp, Arabidopsis thaliana columbia
  unsure (1)..(489): unsure at all n locations
nnnnnnnnnnnnnnnnnnnnnnnnnnnnnnnnnnnnnnnnnnnnnnnnnnnnnnnnnnnnnnnnnnnnnnnnncttgggtttggtttttgtttttttttctcataagaatgaacggcagctgattataataccggcaaaatcccttttatgtttttctaatggcggacctttgtataaattgaccataatacgatacgttctttataaacaaccatttcaacaatttggtctggggaggggcttctttgcaaccaactactaaaacaaactaaaccgtatcctcaataaggaaaagatactactgattccgatccaaccgaatgagtacgagaattgccaccgctttattaaaaggaagatgctgaaaaagatttatccttttttacgcatcaccaacctccctaaagaggcaattcgataaaaacccatgttgctttaacacgtgaaaaaatcccggcagaggactttctcggatactttgaagggct

SEQ ID NO: 119018 - DNA, 339 bp, Arabidopsis thaliana columbia
  unsure (1)..(339): unsure at all n locations
nnnnnnnnnnnnnnnnnnnnnnnnnnnnnnnnnnnnnnnnnnnnnnnnnnnnnnnnnnnnnnnnnnnnccacgcgtgcgaacacgcttccgttattatctaacacaaatacctgctcttatcgaactagatgctgtcgcgtgtcgatcttacatagccattacgatcgggcggtgtgtggagctcatgccatgctgacatacttaccatgacgttcctgggcgggggaactactcttagaactaatggctttagacatacttggcatgcttgcatccctaaccggaaccttactaccatggtcacgagctactatcacagcaccagcgtggacatcgat

SEQ ID NO: 119019 - DNA, 872 bp, Arabidopsis thaliana columbia
ccccccctcgcaaaacccaatcccgttcatccggagggaaagccggaaaaaaaaacttccctcttttacacaaacaacagtctcataagctaccctttccattcacatataaatatactcacaacctcttttcacctccatttatttatcccccaccaacctcttattctgggaggagggccccccaaaggatgtcccaaataataaccccccccctcccccctcctcctccctccccccctcccctcctctcacttacacttcctaccacctccaaataccacctccgtaattgtattttattcccactacacaaacctaacataatctaacacacatcatatttttattcccttgtctctatacaccaaatatttaccccaactcgcctcttttccttcaacaacacacctctatacaccttcccccacctcaatcaactttaattcaaccatatatcaccatctatttattatcttgcacctacattcaaatataaccaaatattactacaatataaacacccaatgtcctcgtttcttaccccaccccactcacctcgactatcaagctacccaggcgctccccacctctcaccaccctgatacatccgacccagtttttcccctccccgctatcttcccatttcattcaacacttcccctcccatctttcatataaatgcatccttccaccactaatatacatcccccccacagtctctcagctatatgaatataatcctttcaatcagtacctcacttcattcaccaaccctcccatcatactatcaaaaccacacacatcaattccaccatccataaacatcttgtaaccaccttattatacccacgcgataataaatacatccc

SEQ ID NO: 119020 - DNA, 444 bp, Arabidopsis thaliana columbia
tctgcacgtcgcccacgacacgccgtacggtaagccatgggatccctctcacagcgggcccgccctcttgtgcacatacattaatgggttgcttttaacccccagctgtacgattcgtacgcggcttgcaacggacccgcgcccgtttcagagctgccccccaacacttagactgacgaacctagcccggcctccatacctagtacgactagaaatacggagacccgatatagcagtgacaacggagatcctccgtaaggggggggggacatacgcagaacctacaatggaatcataacccataaaaaatcgccaccacgaatcaacacccgcgcccgccgccgcattccgcgccatcgcgcgcgacacccaccctccctccccctccgccccaggcactgaagccggagcaataactattccccccaacaaggaggccagact

SEQ ID NO: 119021 - DNA, 156 bp, Arabidopsis thaliana columbia
  unsure (1)..(156): unsure at all n locations
agggaaaaccttgtgccccctgcgagtaccgcgtcccgaaattccccgtgtcggggcccggcctncncaataaatacaatcgattntatcccccttaaaaacccctcacacctaacttcttacacttctccagagcgcctgattatttttgcttcc

SEQ ID NO: 119022 - DNA, 490 bp, Arabidopsis thaliana columbia
tggtcaactatagaagtctatgacgtcgcatgcacgcgtacgtaagcttggatcctctagagcggccgcccttgggtttttttttttttatcgagcgttaatatatatatatatatattgatagaaagaagttgtttcaatacaattttacaaaagtaacaaattatatgaatcactcaatctgaccgtaccaaaccccttggatcttcacatcttttggtaccttagcacgggggggagtatccgatggctgaagactctcaaacactccgatcacttgacctgtctgcggtttgctctttgtgatcttcaaagtgaactctccgacggaagccgccgggttcttgacgatttccttggatagctcttcctcggatgctttgcctacggggagcaaagccaactgattatcgtacccaggggatccaccccgaccctttgggtacaaaaagggcgagccccgggactagggaactaagaacttgcgagt

SEQ ID NO: 119023 - DNA, 354 bp, Arabidopsis thaliana columbia
  unsure (1)..(354): unsure at all n locations
ctatcgacttctatagggaacctggtcgcctgcagtccggccggattcccgtcgggcacgcgtcactagtctttcatcatggcactctctcaaccgcgaactttcttaccgggaaatgcgcgttctcttctcgtagtgccatctccgatcaaaccaaaccgggggcaagtcctttgggttatactgtgggcaacctangctcacgttcctctctccactctgacctcaaagacttcgcctggaaaatgctcccacgccgccaaaatcgccggtgttgctcttaccacctcttctctcgttgtctccggggccggtgcgggaggagcacccaaagggcttaccgtccgacgagat

SEQ ID NO: 119024 - DNA, 527 bp, Arabidopsis thaliana columbia
atgacgtaacatgcacgcgtacgtaagcttggatcctctagagctgccgcccttgggttatccttttttattttttttttattattttttttttttttatggggaatacctaaatgggccccagaggggtatattttctccaatgtggaaaaaacacatcccgggatgagcacaagcttgggaatacccaaaaaaactaaaaggggtttttttttcccgggggggaatacacttccaaaaaaaatttttacaagagagcctaccaaattgttagaagaacgtttgccccgaaccaccatacaaaataaaactgatttacgaaagcattgagcaaaaacagaggttgcaccgcaatttcttacaaccatagaagctatcacacgggtcatcggaaagaaaacggaaataaatcttctttggtgctaagaaacccgctcctttcgcgaatcctaaataattgtaacaaatccatgggcaagacacgaacagcgcgctatgcaccacacgtatatacccaagtaaaaaat

SEQ ID NO: 119025 - DNA, 221 bp, Arabidopsis thaliana columbia
aggctactgcggagactctcaatacgacttctatagggaacgctggtacgcctgcaggtaccggtccggaatttccgggtcgacccacgcgtccgacaactggcctgatagacttgaatgaggactaatattgggcgacgctcttgtcgccactgtaatggtttgcgagaaaacatcttgaacgaggactgagactcttgctttctctaattggacaacaa

SEQ ID NO: 119026 - DNA, 499 bp, Arabidopsis thaliana columbia
cctcgtcggcccacccacggcgcgccccccgggcggtaataattgggtcagcactatagaattctatgacgtcgcatgcacgcgtacgtaagcttggatcctctagagcggccgcccttggtgttttttttttaaagaaaaaatatgtattaggctgcgcgtggcagagtgatacaatatagttttacccgtagtatgcgagtccactctcaatgttgagcgttttttatgactctagcccgggggttttaaatattactccatggggaggcctttttttgggggggggggtgagcgcagagggggaactcataaaaacatttagcacgccgcagcaaagtgatttccttgccccggattgggaagaatttcggggcgttgggaagtgtcgaaggtaccaagtaggggcggggacagacttggtgttaggggtggcgatagaaaaaatttcgacgattacgaaaacttgagatgcatttttcaaaagaatcggcaccaa

SEQ ID NO: 119027 - DNA, 281 bp, Arabidopsis thaliana columbia
  unsure (1)..(281): unsure at all n locations
gtgtttttttaaataacatcacctttaaatttaccacggggacgtggtggtagccaaaaactnctgcttctgctaaaactgctgcttctttttcctctcaggggcctcttaagagtgggggtccttgaaatcttcctacgaatccttctggggggggggggggctccataagaagatgacctcccacgtgttcccggtggaccttcttccttggggggggagatggaacttgaacgagatccaccaacccttcggatgggggatcggctactcctacggat

SEQ ID NO: 119028 - DNA, 336 bp, Arabidopsis thaliana columbia
  unsure (1)..(336): unsure at all n locations
taggagcaccttagaagattatgacgtcgcctgcacgcgtacgtaagcttggatcctctagagcgtccgcccttggggtggggtgttttnaaatataattctcataaaactgaacgggagctttttattttgctgactgattacattttattaataacaaagggaggacgaatctttatttttgccatataataatcctctttgttgtattaataaaacccccaccttttactcggaggtgagctctatggatcagcctactttaacaaaaaaatcactatcctattaaaaggtttttattcccttaacctactcaaaatgaagagctccgaaaat

SEQ ID NO: 119029 - DNA, 514 bp, Arabidopsis thaliana columbia
  unsure (1)..(514): unsure at all n locations
nnnnnnnnnnnnnnnnnnnnnnnnnnnnnnnnnnnnnnnnnnnnnnnnnnnnnnnnnnnnnnnnnnnnnnnnnnnnnnnccacgcgtgcgcccacgcgtccgttattatcaacaacaatggctgctttgctcgtcaggagttgttgctctcttgcttcgagagccattaccaccgtgcggggatgagcatcgtaccggatgacacggtttacggaggaccgatgcggggggactctaatcaaagagtgactcagacacacttgtgacagaagcatcggaaaggatagccgataactatggtcacctgctacaatcacccttctgccgtgcacatagatacaggtgagatcgatgtttgtctcgactgaaactcatctgtcatggatgcacatgggtatgacaccactctgcctatgttcctagaggagatgcttggtcactgccgggccggtagtcgcggatccaaaagaccacttgttggcaagcatttgccggttgggacctatgaatctag

SEQ ID NO: 119030 - DNA, 428 bp, Arabidopsis thaliana columbia
  unsure (1)..(428): unsure at all n locations
annnnnnnnnnnnnnnnnnnnnnnnnnnnnnnnnnnnnnnnnnnnnnnnnnnnnnnnnnnnnnnnnnnnnnnnnnnctttgttttttttttttgagttggtaaccgtggtgtaactacaacaagaaacatgtcttatttgagaaatgctttatcacgacaattggcatccgtgtacatccagtgcacataatcatacactaaccttccatgactcaccatatgtttggtctctaggggagggccttttttgagaccacatacccttttatctgggactctgaccttgatattactatctagcgacccatgcatatataacatatagcctatccatgtctctttatctttctctaaacgcctgtccatttgtatatcaacaccttctggacttaccggacagcccctagacgactgtagccactccaac

SEQ ID NO: 119031 - DNA, 518 bp, Arabidopsis thaliana columbia
  unsure (1)..(518): unsure at all n locations
nnnnnnnnnnnnnnnnnnnnnnnnnnnnnnnnnnnnnnnnnnnnnnnnnnnnnnnnnnnnnnnnnnnccacgcgtgcgcccacgcgtccgttcatctgcaatctatatctcaaccatgagacctacgactctattaacaactgcttcaacatatgaacttatcctgaagatattccgcctactcttaatccatacctattctcgaagcttctctgggcggaactctatcaaagcgaatctctcaacaaactaatctaccacgctcgttattgatccttataaaccttccctacgacatcatatccgctcctatatgactggctttctctatcttacctctatccatggagacaaaactatatccatttctttcttactctctcttccgcaaaacaaacgctggaacgacacttcttaacactaatctacctaggcggaaaaaactgactgataaaacacattctggacctaacaactttgagtcttccaccttgactcatacggtctatactgcttta

SEQ ID NO: 119032 - DNA, 521 bp, Arabidopsis thaliana columbia
  unsure (1)..(521): unsure at all n locations
ttaggtgcaactatnagaagactatgacgtcgcctgcacgcgtacgtaagcttggatcctctagagcggccgccctttgttttttttttttttttttttttttttttttttttttttttttttttttttttttttttttttttttttttttttttttttttttttttgggaaaaaacccaccccgaaaaaattttttgggggcccccattacccccttaaccactgaaatttttaaacaaggtttttttttgaatttctggggaaaataaaaccccccaaaacaagattttcccaaaaaaatttttttacttttcttaaaaaggtgttttttttatttttttcgaaaaaagttttttgtcaaaatttcttaaacaaatagggaaggccttaaccccagaaaggggcttcccgaaatcctttgggaacttttttttttccattttcccaaaatgaaatttttttttttgggggacctttttttttaccaaacggttggggttaatttaggggttgaggtttc

SEQ ID NO: 119033 - DNA, 549 bp, Arabidopsis thaliana columbia
gggcggcacggggtccatcagaaggcggtttctatgggacacctatagaagtatctatgagtcgcatgcacgcggtcgtaagcttggatcctctagagcggccagcctttggatatgagatattttttttaatagtaggctgtttttttttttgtgtggcctaaaaagaccaaatgtggattagcgattagaaatgtattaaccaagacggggccagaaaaactagctaaaataaaaagggaatcttagataatggtaaagggttcagaaataaggaggggagtaactcaaccttcagagagagtgaaaaaataatcgctgagtgttctagaaaagtaataaacagtagatgtccgggtggctggtgaaatggttggtaaggaaaaaaaggtgggggataaaatattataattggcttaaggagttaataggttccccggaggttaatcagtgtgggaggattccgtcctgggataaggggagggtggaagaggtgcgaaatcgcgaatagatggccccttgagggggagttttgacgaggtcacgcca

SEQ ID NO: 119034 - DNA, 280 bp, Arabidopsis thaliana columbia
ctatgagaagttctatgacgtcgcatgcacgcgtacgtaagcttggatcctatagagcggccgccctttggtaatttccttccttgttaattcccctctctctcttcgttttgttttggaggccaccaaaggttcttttctttgccccaaggaggaaaaatattctcttttagtgtgttcggatcacaatacttccaaactattggtatctaaacccgtcttcaaaaaaaaagaatgcctgcgtgatgaggtgtggtatatagtcgagtttgttctgaaa

SEQ ID NO: 119035 - DNA, 475 bp, Arabidopsis thaliana columbia
  unsure (1)..(475): unsure at all n locations
aggggaacgctggtacccctgcaggtaccggtccggaattcccgggtcgcgccacgcgtncagaaaactngttatttctgtcccgtttgtgattgtgttagttaaaattcgncaaacttctttgatccactatatggagaaaaacatcaagggcattggngatgtctatgggggtggagaagatcctattttaacagggggaggaacggtttcagggtttaaaaaaaaaaaaaacgcgcaaaacctttacagaccagggaaaacttctgagaggaaccctttcttaagtttgtaggtggatgtttcttcaaaaaaaagaaccttttcttttgggaaaaaagcttaaaacaattctaattggtgtgggaaaataacatttggggtggcgacttantcttcatttaatggcatggtaaatttgggataacttgatttctggcgcctgatctgggaacaaatctgaccaaaccgcttc

SEQ ID NO: 119036 - DNA, 495 bp, Arabidopsis thaliana columbia
  unsure (1)..(495): unsure at all n locations
nnnnnnnnnnnnnnnnnnnnnnnnnnnnnnnnnnnnnnnnnnnnnnnnnnnnnnnnnnnnnnnnnnnnnnnnnnnnnctttggttttttttttttatcttacttttttttatctttttttttttttttgttattcatctttccattctactgtttaaagggaacctgtggggctttttttttcctcaaaaaacacaatggtttagcaaaaaaaaagatttctttttttttttttaaccggggtgggggcaataacgtcatatattggggataaaaaccccctaagcagatctctttgtgggggccctaaaacaatgccaaatgaccccaccggcccttttatttccttaaaacgactggccccggtgttgaaatacgggatttttaaaaaagcgctccaagttcggtctttttaaaaaaaacccgtccccgtttttctggtgcaccttccccgggcgaccctttttataatccttggaaaaggcgaacagtacat

SEQ ID NO: 119037 - DNA, 434 bp, Arabidopsis thaliana columbia
  unsure (1)..(434): unsure at all n locations
tgctaccgaacctaatcgacttctatgggaacatggtacgcctgcaggtaccggtccggaattcccgggtcgagccacgcgcccggacaaccacaaaactctcactccaaaactctcaatcttgccttcctttgatcgaatactacaattggngtctgtatctgcaattggagttctcaaggtacctnctgcttcgacttccaattccaccggaatataccacggggggcgggttccacgaggactctttctttataatactctgtacttcatccgacgacaagatttcactcaaatcccacggtttcccgtatttgtaaatctgttgttcgcaagaacccgatcatcggctttcccaaaccctgtgaaatttttcaaacctctaaacctgggctaatccctgatgcttacagcaatgttttggggataatttt

SEQ ID NO: 119038 - DNA, 579 bp, Arabidopsis thaliana columbia
  unsure (1)..(579): unsure at all n locations
gcgacgccccccgccgcgccccccgcgnnggggggaaataattgggtacnnnnnnnnnnnnnnnnnnnnnnnnnnnnnnnnnnnnnnnnnnnnnnnnnnnnnnnnnnnnnnnnnnnctttgtttttttttttgcttggatagacatgtatatcctcgtcaacagaataatggctcttctagaaggttacaatctttttttaaaactagataagaattctcaaggtttcataataagaggcctagatacaggcaattaaacacaataaatggctggctcaaataaatttttttaccgggggggggggatttaatganggccattggaacgaaaaaaaaaagaacctaagcttcgtacgctaagaggaagccctatgcaagcgagactttaaggttaaagggtaagggagcttcaactttctttccccaagagtggcttacgaacacgacatcctaggtgtcagttttttgcctttactagggtcatacactttatggtcttaataataaatgcgcgccatatccttttttttgtgtggaacagtttgatatgcattcctttcttttttataaagcccggc

SEQ ID NO: 119039 - DNA, 833 bp, Arabidopsis thaliana columbia
aggctacgcgagcactcttcgacttacttaggaaccctgtccctcagtaccggccggaattcccggtcggccagcgtccgatttaacaaccccccaaaaaaaagaggtaaaagaaaaacgggaaatgggttgcatcttctttaccgccttatctctgaaaaaaatctgattttaatccaattaggattttaaggagagggctctatgggcccaaaaaaaaagccattctgggggaacgtcgggggtttgtttataaacccttcggggatctgggtctacttgaatcacaggtcccccgcaaatttttccaggaaccctgccatccaatcttgatattccggaccacccccccctgtcggtgccaccgttatccatttggacaaaatggcattgcctctccccgaaggggtcacttccatgctatttcaaccgccggggggttttccggggccccggccttgacttccttttatgggactgcttgaccggggcaaaaaaaaaattacacggcgtcagggagaacccggaacatcgggacacccgattcgggtggggaacaacattgtgtgcccaaatacccaaaaaaaagctggttccttgtattggggggggtgatagggctttatccacttgggagctccaaacggcgtttgggggccgcgaatggctctccccattccccgccggctggtgaaaagtattaacaccacgtgtgtcgcccgacgtaaggataacgtcaatgtgggggacatgggggaggcgagaaaaatgggcttaccattccgcactaagttcttgtttatggggggggcgggggtcgggggcctggtggg

SEQ ID NO: 119040 - DNA, 468 bp, Arabidopsis thaliana columbia
atgacgcagcctccgctcggggtgcgcgccggcggcggggtattattgggtacacctatagaattctatgacgtcgcatgcacgcgtacgtaagcttggatcctctagagcggccgcccttggtttttgttttttaagcatcaaagtgtttgcaccaaaccggtataggggaaccaaaatgtctaaccaattcgtaaaccaatgaatgggaaactttcaaggggggtaacaaacacactacggaaaataccacttttacctcagataagaaatcattttctcgggggggggggagtgggactaaagtgtttagaaatacaaaaaccacacgcacccgatagaaaaatttccaaatccagacgcgggggatagcctttttgacggagaggtatcctcaaaacttttaaaggggttgtgcgagctattggaccctgtatgaaaagtgcggggggggccgcggatattggg

SEQ ID NO: 119041 - DNA, 560 bp, Arabidopsis thaliana columbia
  unsure (1)..(560): unsure at all n locations
ggagacgccttgagacgagaacagatctctggaggtcagcaacggcaacgcgtaatcatagtgtcgtgtatcgccctatgcactgtgaatgcgatgcgcggcaactcaatatgtatgtcccatcgtgcggatcgcgctgttgtcatctcaatacatttgtgaatgtgtgtcatggcagagggaaatgtttttattttgaagcggtgaggagagcgaaggagacaccagagcggccgatcttattccttcantcttatatcgatatttagcgacggatagtacatatgaatacgaccatgtacgtttctagtataagagatagtcggggtatagttatctatcgtccgcccactactgcatatagaggatatacgtgccacggcgatcagctattgaagtgtgcagacgtatatgagttgaccgcttttgtacagacattggaataggatgctgaaaggccgtcgtgagatctgacgagatgcgacagccgaagcggacgcacattttatgagagtcgttatagcatgctacgcgtagcctctgcgtcagtatgtttacga

SEQ ID NO: 119042 - DNA, 830 bp, Arabidopsis thaliana columbia
aagagacaaaaaggagaacgcacaaaaggagaaaccagccgagagggaagcgcaaagaagagaccgcaggtctttcttgatacggggggggaacgccaaagaacaaagaccgcgaagaaaaagaccgccaaggagacgcgggaggcgaagcagcggcgaggggcggaagaggggcgggagagctgacaacaggacagaggcacaaagaaagaaaagagaaggaaggacgcaccagagcggagacagaaactcatggcccacaccgaaacacgaaagggacggcggaaggcagagggccggggcgggagagaaacgacaacgggggggggcggcagagacccaagaaagagagaaacagagtgaccccccaccgaacaagccagaggcgagccgaagcagggcggcgcagagagcacgagagcacgaaacaggggagtggggagcgcagcccagcagagcggagaggaacgcaaaaaacacacatatccaaccagcgacgcggaaggaaggggaggaagaaaaagcggcgggacaacgaggaggaggacacgaagggaaagatggacgcgagagaacgccacgcacactgaaacgtcagaagcggcgaaccgagggcaggacgcacaagaaaccgatcaagcggagacgtgaagaggacgagaggggacgagaaaggaaaacaaaaaaagaaacacagataacagaaagccagaaagagaaagagaaataaaacagcaagaaagagaagggacgccgctggatgcccgaccgcgcaccctaaagaaggaaacatagaagggagaagaggaagagaagaacagcccccagaa

SEQ ID NO: 119043 - DNA, 901 bp, Arabidopsis thaliana columbia
  unsure (1)..(901): unsure at all n locations
nnnnnnnnnnnnnnnnnnnnnnnnnnnnnnnnnnnnnnnnnnnnnnnnnnnnnnnnnnnnnnnnnnnccacgcgtccgccaaccctgaaacatggctggtctttctttctcgtctttctattaatgacactttgatagaaagacgagaaataaagaccaaccctgaatcatgggtgaagaacaacaaaactcatatcanatcatttggtggaaacggggattgcaacctcctgaagaagttgctacaaacctgcacaaaactgttgaaaaaggtggatgggaaaaatggtggtaagaagaataacaccctgggaccaagggagagccacacctcttattggtcatattgtccacacttccttctccaaattaggcgtgctctgtttcccggttgtggtggaggacacgacgtcggagggatggcagcccctgactcctttgtggtgatgaaatattgtccaaaggcccctcccagaagctagtgagacctccggtgtctcacaaaaggcagagttctttttccgtagggaaggaaaatatttgcccggcggggcctactggattatttcaacctgatctgagaatgtggggggctcccgtgccattaaaccggggagtgaaaacctgtagggcttaatctataggggaacccttaaacgtgagagagagaccattatcttctgtattccatttccaaaacacgttggggaacctccctaaaaataaaactcacatcttcaaaaaggggggggccctctattttcatggagggatggtcaggagatctctccccatccaacttataggggcaaattagggggaagggaaaataatctagtcgccaataagatccttcgttggaaaggtggtgtgtttccactaaaaaggaaactcctttggt

SEQ ID NO: 119044 - DNA, 558 bp, Arabidopsis thaliana columbia
catgtctcgctcttattgtttgggtcggcaccgctcggcaattattggggtacacctatagcagttttatgacgtcgcatgcacgcgtacgtaagcttggatcctctaaagcggccgacctttggttttttttttgttttagattggaaaaccttagttcaagtctttggcgatcagagacacattggaagcttcaaccaaaaaagacaacaagcctaaacagctgcgggaggatccacttgccagaagatactagggcagggttttctaaccttttgttctcatgaggggggggatgataaatcgcctttaattacagactagtcggtcgggttgttgatgatcatatgatgtctggaaccgtgatagatttttactgtcttattttaatagaagattagggggaatttggatgcggggttatgagcctgaaattttcagtactcgcactttcaggcgcagcccgttttgccagaatagatacattgcaatatcaagccttgctgcctctcgtatgaagttaactttatttatattggataaattgtaacttgatag

SEQ ID NO: 119045 - DNA, 550 bp, Arabidopsis thaliana columbia
gggggggagtctgttgggacccctccgcctgttgggggacaggggcgccttcgggccgggccgcatttccgggggggcagggccccgtaaatacaggaaggattcttaatttttctttttttcctgcaatcggaaaggggatcggttacccacgttgttgaacttggcctttgcaaaattcaatactgggggcggagaatgctcctttttttcggggcgtaggcggaaagaccgggggccgaccaaaaaaattgggggcaaatattcctggggggtggaagattgtcttttcacaccccgagatgtttgtgaaccgttggagcaaaaccttgtgaagggaaggctgctgtgttgggtcccctgtgggagaatttaattgtgcacccgcgggggtggaaggcgagggccgtgtcaaaatatacaactgcggggaacgatcgcggagaagccgcggtcccccagtataaaccaaggagcagaggggtgtaggggagagagtggtgcgaggtcccgtaggcactagtgggtcggtagatagcggatgcaagcg

SEQ ID NO: 119046 - DNA, 501 bp, Arabidopsis thaliana columbia
ccttagagtttcttgacgtagcatgcacgcgtacgtaagcttggatcctctagagtggccgcccttggggatttttttttttttttttttttttttttttttttttcccgaggaaaataaatacctgacttattgggctgttgccaaaagtgggtactttttgagaaatttattgattattgtttttaaggttcagtgaaaacattaaaaatttttttaaacaggggggggggctttatgatttcttttggatcatcaaaattcaggtagaagattttattttccacaccaaaccttaataatcagcttgaagagtcttttgcaggcaaaccgaaacatcttttggaccagccaattttcccagcgcgcaaccgatccattggcccttggggggacggataagggcaaaactttttccggtttccagggcgaaaaatatttgggggccccccctttggtctttggtttacccccatctttgtttcgcgagattctttattt

SEQ ID NO: 119047 - DNA, 503 bp, Arabidopsis thaliana columbia
atgacgtcacctgcacgcgtacgtaagcttggatcctctagagctgccgcccttgtgtttttcttttttagaagaagatatagtccatctgttggatatagccatgatatgtttgtaacaagattgaattcatcatcgggtcttggcttgataatctactataacattaccacttgggaaataaataaaagacttcgaataggttttttttaaggggggggggggtaaaccctaggtggagcctgtccttgaatccattccgccttttgtgtggaccgcgacagacatccgttgatcctgcaacatggtcaggttcggggctaacagccttgtgtctcgatcgaggaacagaagttggttcgacagaggtgccccccctctcgggaacttacgcccctttgagtctcctaccccgcccccgtccgtggactagaccccttccttccggcttttataccatacgtccgttgccccgcatcccgcgcttcgtggttggattgcgt

SEQ ID NO: 119048 - DNA, 191 bp, Arabidopsis thaliana columbia
cccaacctaatcactatttggaaaccgtaccctcagtccctccgattccggtcggcagctcattactctaaatcatacaaaactatatgaaaccccacgcacttaacgagaaatactccaacttcaactgtgaacttcaacattcctttatctgaggaggagttcccaatccaaaattcgaatcaaaaaaa

SEQ ID NO: 119049 - DNA, 489 bp, Arabidopsis thaliana columbia
  unsure (1)..(489): unsure at all n locations
nnnnnnnnnnnnnnnnnnnnnnnnnnnnnnnnnnnnnnnnnnnnnnnnnnnnnnnnnnnnnnncttgggtttttcttttttttttttctattcgcgnggatagaaaaaaaaattcacattttttaaagagaaccaaccaaaccgccttcaaaccagtttttggaaatccgggaggttaacaatgtaggatcacctgataaaatcttaaaggccctttttttatagagggggggaaaccatttgaaggttgttccgaaaaaaacacacaatttggtttgccaggagcaacacaattgcagtgggcacaattttcccaaaaaagtgtggtggagagctccccagaaaatgtattcccatccctgttttttctttcttggcgccgccccccaaaaacaataaattccccacatgtcctggaaaggggcggtttttatgttgctccgcaaacgaagctttagttcaaaaaggagggcccctaaaacagctttt

SEQ ID NO: 119050 - DNA, 204 bp, Arabidopsis thaliana columbia
ctaatcgacttacttagggaacgctggtacgcctgcaggtaccggtccggaattcccgggtcgggccacggcgtccgcagacacgtgggctggaatctcgattctggatgatctcttcgatctaatcgagtcttctaaacgtggcgcgtggaaattcaaatgtaaggtctgctaaagcttagaaccctttctatacccttttac

SEQ ID NO: 119051 - DNA, 517 bp, Arabidopsis thaliana columbia
taggatacacactatagaagattcttgacgtcgcctgcacgcgtacgtaagcttggatcctctagagcggccgccctttgttttttttttttaaggttgcaactgtttggctaaaactagaaacatatgaaaaccttgctgcccaaaaatatatggtctctagttcgaaaggtgttttttctcatctaaatatggaggttcggcttactttatgggacttggccaccatttaagggatggggcttatggtagaggcagaccaagctgaagacaaagaaaccacccttcgtcgtaaagcaggctccataataaggatccgcacttgggataaatctctcatactcattgtgtctggaaggccgccccggaatctgcttccaaagaaataatgtagtgcaccctaccttttcatattcaaccttaaactggaataccccgctgacatcaggaaccttgaaagatgtttcacccacccttctttgtctgttgacaggtttttcaaaactacgggctcata

SEQ ID NO: 119052 - DNA, 324 bp, Arabidopsis thaliana columbia
  unsure (1)..(324): unsure at all n locations
ctaatccacttatatagggaaactggtcccctgcaggtccggtcccaatttccggtcggccggctccatttaagatcctgatcaaaccattgtatttgtgattccggtcgggacttgatcttatcggctgatactgctgcatgtgatttgataaagggtattgccacagagtggtgggggttattttcaatggaagtaggtccacctatgggggattnaatcatactaaaattctcccggctctgatgggtgaccgggcacccacaccttggattggttggccnactattttacgggaaactccaatgttctttttgggaaaaa

SEQ ID NO: 119053 - DNA, 566 bp, Arabidopsis thaliana columbia
cagcccttcgaccgacgaatcattctttttccttttctttccaggggggcaaggcgttcataactcatacctacttctggggcggcgattttcctctcgtcacttgtcgaccggctttgtcttctctatttttaagttcatatttcttgtacatcctcatcccattcacaatttttatctcgcgcgagaaactagattattttgacagggggggggagcccccacacccatctacctcggtgctaaaaaacaccgattgcatcttcctgcgtgccgttatacggggccgcggtagcgcgatagatttttccgtcgaaaacaatacaatagtttgcagtctccataaagatagtacaatatactgtcttctgagggactcgcttcgcgggtgatgactcgctgacgtaagcttggcttttcccacttctactctattgtttctcccttcccccgtctgagcgacaccacccgagtagctactgtatagcagccaacgaggcgcacagatacgagtacaccccgcacgtgcaagtacaagagatagagacaacacacatcccgccccc

SEQ ID NO: 119054 - DNA, 553 bp, Arabidopsis thaliana columbia
cactgcgccacgtcgtttcagctggccccccggcggggatattttggggagcaccttagagttctatgacgtcgcctgcacgcgtacgtaagcttggatcctctagagcggccgccctttggtttttttttattattgttttttatttttttcttcaccaatatacccgggctttcaacagaattaaaaattcgttttattaggatgacaattccttttttgtcctttgacgtaaaacagttttcatttatatgaaaaaatttgtgcaactcattatagggggggaacacaaaggattcgggttttatgatagagtaatttttggcagattaaacagccgctggtttgaaagaggcgttcgcccgctatggctggtggctatacgcggggcgggggacgggagacaatattggactagctctcttcccctttcgagtggggaacgacttgttgtgtgccagtccacagattctgtggcttatcccaattccgaagtggatgggataattgttatgcgtgagggccccgggagacattttaggcagccctgcga

SEQ ID NO: 119055 - DNA, 543 bp, Arabidopsis thaliana columbia
  unsure (1)..(543): unsure at all n locations
ccctcaggtcctgtcccgaattcccggtcgcccaggcgcccatttaataaggatatgcctttaccaacgttcccttggaccctccttcccttctgcctacttggacatgttctcctcacaaccgggggaagaaccgacccaatttcctgttccttgtttataagcgagaggcgggtcttctgacgttttcataaataaactgactagcgnctttgctttcctacttctcttgcttaagacggccttcgttcctttttattaagaaggcccctgtacaaaccccaaaaatcattggttatgttttgccaccagagagactctcattctttttatacttgttctttaaaattgttagaaggataatttcccaaacacccccggcgttaacttttttatgcctgaaaataacccctctctttttcccctgagcacacaaattcttcttttaatccttcggcttaattctatccagtcgcgcaatcctccaactttgccggaaaaggtttttttttcccatttcccctagacaaagagcgtttattt

SEQ ID NO: 119056 - DNA, 509 bp, Arabidopsis thaliana columbia
  unsure (1)..(509): unsure at all n locations
ttaggacnnnnnnnnnnnnnnnnnnnnnnnnnnnnnnnnnnnnnnnnnnnnnnnnnnnnnnnnnnnnnnnnnnnncttggggttggtttttttttttttttttttggagccagttgaagtacatacttgatgatattcaaacaaaaacgacccaaactaaaaaagtctctagtgccagaaatttcaaaaagacaataacaactagcactctaaaaaccaacaaagtgactacgaaaaggggggaaagctaatattccaaaacaaacaaaaaaaaaccaccctcgaaaatcttatctcaccaagtcaaactgcaaaattaaaagatatgtcaagggaagataatagccaaaagagggcacccattaaacaagtgaaaacagaaattgggttatgctgaaaccaaggggtttctcccttcggttaaacgggaagaatttggtcggtgcctgcatctccttctggcccaatggtagggtttgaaggtccaaatccaggaacttggttttttt

SEQ ID NO: 119057 - DNA, 520 bp, Arabidopsis thaliana columbia
  unsure (1)..(520): unsure at all n locations
acgggaactctatacgacttatttagggaacgctggtacccctgcaggtaccggtccggaatttccgggtcggcgccaggcgtctcgggacgcgtgggggcctcaatgtctgagaacgcaccaacaacatcatggagaccaagatttgggcagacgccctggggtctgaattacagaagaaaaagggcatctcttttactggttaaagtgcaaaaactgggggggacatcggcgggtgaatcgatcacataattctcaatccatcaacgggaggagttttgctggtggattcccaaatctattttcaaccacggccatgatatcccgagggcaacacggtggggtcctttggttcatttaagttcccctggttggattgtttaaacaaattctctggaaatttaccttgctcccctcgatttgtgtggttgcgtccttcacttgggggggtggcctttcttccccattgggtccttttgaaagaatggaaagagaaaggnattttccacctggttttacc

SEQ ID NO: 119058 - DNA, 533 bp, Arabidopsis thaliana columbia
cgccgcaccgatgggggggcgccgccgggccggtattatttgggtacacctcataaaagtatctatgacgtcacatgcacgcgtacgtaagcttggatcctctagagcggccgccctttggtttttttttttttgagctatcttttttaaaattgggtaaaaacagatatacactctgttattagctataaatggaaagaccatttctcaaataaaaatcttgtaatggtataagacataggctttttatatatataagccctgagacttttttttgggggggggggtttctcaatagggggggccttaaaaaccttgacgaattccgggtgcttaggcattcatcttgtggcgaaacccccctttttggttgatccaggccccgcctttttttcagcctggcaaataagctaaaaaggggcggtccgggaatctgattttttaaaccgggggtcctcttctctaaacgggtttaaatgggcaaggggggttaaaggaagaggcgtggtttaacttaccatgagtaaccgtgt

SEQ ID NO: 119059 - DNA, 944 bp, Arabidopsis thaliana columbia
  unsure (1)..(944): unsure at all n locations
tatacgactcatatagggaacactggtacgcctgcaggtacccggtcccggaatttcccggggtcggacccacggcgtccccaggacacattggnctcnnaaacacagggtaatgatctaaaaggggagcattcctcacttcttaaacaactgaacaacatgaatcacaagtatgacggaggctggcttgttagccaataaaaatacctaaagtgcttctcttttgaaggacagtagagaaccttaaagtggaaaatgggccaaaaaaaaacggggaagaaagtaacaggaatgaatccctgcttctcggaagatcaagtggccattacaaccaccaccagaatgccaattacctggtaacaacagggtggattctttaacatattccagtttcaacccactaaactaaccttttgtaaaccaaaacttgggagtcccaacccttctacctctcaaaactgagagaacaattttgggtgctccctccatccacaaaccaagttttcctttggaaaaaattaaaaatgggcaaaatcaccttttgactccagccccaaaccctgttgctggaataccaaacctcaaaacgagtcaggtggggaaaggataaactgggttttttctttaaaaacacttgacacattataaacccttggagagcctatgagcctgtttataccaaaaaaatcccgccgctcctttttttgcccatttacaggccaaaaaaggcggggactaaacaaacaaaacggggtttcccctatttaaatgtgcttccctggtacttccggggcttaaataccaacaaaagaaaagcgtctggagaacacgccctgggttaatattattaagcgtccctaaacaccaaaactcatagaaaacctttcattaaaaaacaagagagttcggttttccatgaaaaaagccaaaaaaaaaaggggggg

SEQ ID NO: 119060 - DNA, 510 bp, Arabidopsis thaliana columbia
  unsure (1)..(510): unsure at all n locations
nnnnnnnnnnnnnnnnnnnnnnnnnnnnnnnnnnnnnnnnnnnnnnnnnnnnnnnnnnnnnnnnnnctttgggttttttttttttttttttttttttttttttttctcaaaattttttttttttttgggacccaagatctcagtttcagaccaaaacagagcttttttttttgacaaaagatttgccgacaaaaaaaaaaacaggccccccctttacctctttttcgggcggggggggagattacaaaaaaagccttaaaaaaagagagaatctttccaaaaaaacaagaatggacttgcccagaaatttttataattaccgccagcgtttatgggggggaaaggctccagacccgggtacagggtttttccccaaaactccctgtggggggatcctccgcgagaaccccgaccttttccgccaccagggggagcccctttttttgggatgcgcagacaaaacggggtttggcctttttaccaacatgcccaccgggtagcaggggtccg

SEQ ID NO: 119061 - DNA, 515 bp, Arabidopsis thaliana columbia
atgacgtcgcatgcacgcgtaccgtagcttggatcctctagagcggccgccctttgtttttttttttttttttttttttttttttttttttttttttttttttgatttagagggttttttttaggttccaaaaaaacaaaaggtttttaaaggggctaaaaatgacatttggggggggacaaccacaaataaaagagccgcccaaaaaattttcattttttggggggggggaaaaaacatcgcgtggggcgaaaaaaaaccccccacccccggaggggcctacaacaatttcccccccacgaacaattgtgctcccccctcacaaaaaattttcccccaaaaaattaatcttgaccactttaatccaatttttcaaaaagaaacgaccgcataacaacttataaaaacgggaagggaacctccggcggccacccccctattttgaaagaaaagggaaaaacttgggtgattttccaaaatagaaggagggggggcaaaaataatccttttgaaga

SEQ ID NO: 119062 - DNA, 429 bp, Arabidopsis thaliana columbia
  unsure (1)..(429): unsure at all n locations
tggaggtcgaccgacgcgttcgtaagcttggatcctctagagcgttcgccccgggggggggcccncttattttactatcttgctctttttggagagcttgggcctaaaaacaggggggtttttttcggggcgcgcagtcgccggccgtgagggaaacggggcgctccaaaaaagataagggagggcggggggggggtcctcggggccgctttttttcgggatgttccgggnaaacnccggtggcggggacaagaaaaaagggcgggcgaaaaaaggcgggggcttttataccctaggggggtggctcttgttcttttgataaggggatcaccacaggtgggggtaggaatagcggtcgtgtcttcacccaggtgtgtgagagggcgtcaggtctcgccgcgcaccttaaggttggcgcccgcgcgtgtg

SEQ ID NO: 119063 - DNA, 618 bp, Arabidopsis thaliana columbia
gccgaccccttttcctaatccttttaaccttttaaaaaatttgtccttatcccccccttaccaaaaccctaaaaaacaccccccccaacacaccctaccattaacaccttctctctttcctgaaagatggcgcccccctaacccctttaaaaaaaaacgccaacacctttttctccgacttcctcccctaccaagccctcaaaaccacaaaacccgcaccttcttcccttttaaaaaaaaatatctccaacgtagccaccctcctcaaactccttataaaaaaaatctcaaccaagagacccaccctttattataaccaaaatgccctaccccccactcacttcatccacaaaacaacacaaaaaaaccactccccccacaccacccattcttatattaaacaccccttcaaacctcactattattccaccccccattatctaaataatacaaccaaccccacccaccctctccctctcttacaccatccataaccttacaccacaacccaacaacccctacttattctatacacaatttccccccccacctaaccaaacacccataataatcacaacaatccccaaccacccatcaatacaaatcaaccacccatct

SEQ ID NO: 119064 - DNA, 478 bp, Arabidopsis thaliana columbia
  unsure (1)..(478): unsure at all n locations
agggacagctggtacgcctgcaggtaccggtccggatttcccgggtggggccaggcgtgcgtattaatantaatttttttatttttttaggggaaaaaatgggtggatattttggagtttctacaatttttattatctgtgttgtgggaatttcagccaatgctgaggtattcaccatgggttcttatcagggtcggggaggactcangcacttgtgaaaccattaaaaaaggggtgccaatctttgtgaccaagcaaaggggtgatcccaaaaggagattcaagcttggtaagatccagatgaggggtccancgaaagctcccattgagggcacccttaaagggactggcaaagctgaacggaaccctattcaaggggaagggaaaaatggggtcgtcttcggcaacatttgatggctttaaagtggaaccgggggagggaccctttcaccggggaaggcgaatgccccctttggaa

SEQ ID NO: 119065 - DNA, 282 bp, Arabidopsis thaliana columbia
cctgtaaagaagagaccaacgaaatttcccggcggggggcagaaagcccagtaaataaaatacatcacgaagaacgagtgttagtccagattccgcccagccgccctggaccatccgtatgagtgcggagactcgtatataataagtatcttacgtgtataggacgatacgcgagcccgatgaggaggaaacattttttttcccagggggaggagaatccagagccccgaaatacgcaataaaaaaatacctccacgatcgactagtaggtgaggccacgtg

SEQ ID NO: 119066 - DNA, 510 bp, Arabidopsis thaliana columbia
cccggggcccgtaataattgggagcacctatagaagttcttgacgtcgcatgcacgcgtacgtaagcttggatcctctagagcggccgccctttgttttttttttttttttttaattaaaatgtacgcttcgggattaaaaattaaccagtgactcatttacatgcatatagatcgcaaacacatgcatgtgtctcatatataaatggaaatcttataaggtattggaataataaagcaacggttctttgaggggggggggggtattaaaggaggatgaaagaaactagtatatttgttagcggctcaacacccgcccacctcttgtctttcctagcatgactctccagtggggcggcttttcctcctgctgccccatttttataaatttggtaggacatgcggattgcaggtctttgatttcttgctagggggtcaaacttttagcgaagggggggtaccgaggtgggggcgagtccggatcgcggagggttttatggaggccctttta

SEQ ID NO: 119067 - DNA, 194 bp, Arabidopsis thaliana columbia
attttagaagccttttcccctctactaccctccccaatttcccgtcgggcagggcttctaaaaaaacaattgaaccttggaaaatcacaaaacctctttataccctcgatatacctcctatttctataggtttaaaacttttatcttctcaaaacaaaaaaagtttccaaccctctcatagaaggggccctttt

SEQ ID NO: 119068 - DNA, 513 bp, Arabidopsis thaliana columbia
tgacgtcacatgcacgcgtacgtaagcttggatcctctagagttgccgcccttgggtggtcgttttttttttatttggcaagaaagttttggctgaaattcaagcatttagcattacacgaatgatcatgggagttttacattgtctttataatatggtttttttctcaaaccgaaaacctattttgaccctggggacaaatttttttccggggtgggggtgaaagtttttggacctttgaaaaaaaatatttcaagaaagtgagacactgttgtcaatccccttttttcccaaatcaaagttaaaaaacagaaccccctaaagagaaaggggggccgtatataaaattcttttaaagaaaggagtgtgggccgatccaacagcagttttagacggagagccccaaccttctttggaaggagggggtggcgtggagcccttggtttcggaattgaattaattaccaggtgggttgttctttttgcgatcaaaacatattattccccatgcggg

SEQ ID NO: 119069 - DNA, 767 bp, Arabidopsis thaliana columbia
  unsure (1)..(767): unsure at all n locations
ttataaccattattccttggttttgaaaaaatgacccaccctttaccccttttaacccatttggaagttttccctgccctttccccaactttttttttgggggggggctccttntnnaagatgaacccaaaaaaatacatcccgggtcctttttcacccaagcccaaaaacaccttttttttttatctttttttaaaacaaatttccttattcttccaagttcctccatcaaaaagattgaaaaagtggtgttttcaaattttttaacactttttcaagaaaaaaacctgttttttattttattttaaacctttttttaaatttaaaaattcctcccccagctccgcaattccttaaaaaaaaaaccgccaaacccctttaaagttctttttttttccgcggtcccagaattttttttgcaaaacaatataataatctcacaggaaagggccctccccctggactttctccctcttaattgtagtttaagaacctctcttcatctttaaaaaaagaaaacaatctttctccccaaaaaatattttttttttattatatttcttccgcgcgtcccccccttctcccttttattataaagagatgttttttcaccccctgtaagctcttttttcccccccacaccttttttanaaaaatataacacccctctctttttcagaggctcttcccacacatctattggcacaccccctcctcttcctctctttatttccagaaagcacccacacagataacacctctttttt

SEQ ID NO: 119070 - DNA, 544 bp, Arabidopsis thaliana columbia
  unsure (1)..(544): unsure at all n locations
caggctgcgccccgtccngcgccgcccccgggggggggatattattgggtcacgcttagaagatctatgacgtcgcatgcacgcgtacgtaagcttggatcctctagagctgccgcccttgggggggggtttttttatttatttttttttttctttttttttttgtatcaaaaaccaaagacgggcgttttggcgtttaaaatgaacagtttcaaaaaaaaaggggggaggggggggagagtttagaaaatttcttttttaaccccgaattttttttttggggggggggaaaaacccaccacaccttactaaaaaaaaggccaaaaccaacgcccttaccggaaagcgatttatagtcattttcgttttcgagtctgaaggtgggttttgatatattttaccttggcgaccaaagccacagccgttggtatcctacagtgtatgcgcgggttctccccccctaattgccatatagaccccgtctattcccggggcggttcgattcttaattcggacctacacccttttgaggagctttgggggg

SEQ ID NO: 119071 - DNA, 1040 bp, Arabidopsis thaliana columbia
  unsure (1)..(1040): unsure at all n locations
ggggcccccttcgagggaccgggccggaactcctcggggggggcgggggcgccataaaaacacantactaagatttgttgggccggcttatgggtgaagagttccacttaacccccatgggtattagtggggcgaatttgaataaaatggggtgggtgttgcttcctgaaggaggaaaaaaaacctttttattgtttataagagtcgaacgcttcctaaagggggcaaccataaaaaaaacaaaaacttttttggagggttgggcaaatgtgaaagtgggattttcctttttttataaaaaacctcttttcttttgggggggggttgatatttccatcccccaaatgtggcctttttttttgtggagtgtctacacaaatgggggagggtggggcgtttttcccccctggagaaaacccaaagaggaggtgttttttcttttggacgctgtcaacagtggccactttcttatgatggtgcggaggagggggggccttcaaatttttggcctttcccgacccactagaaggttgcgctgtcgttgcgaaagtggcgtctctcgtagacgtgtagcgctgaggtaattaagtgtggtgggggcggaggctttgtggagaagtggtgggcgggcgaggaggcggtggggggtttgcggcttgtggaagggtgtgggtgttccttgtgcaggagggcggggggtgaggatcgtaagagggggtgtcgggtgttcgtgggggggtggcgcccctccccgcagcttgcagccggggttgcgaggcgcgggagggcgcgtagcgcgccggtgcgaggcaggtcgaggcggctgtcgagtgtaagagcgcggtggcggcggggtgcgtgaacgcgagtcttgttggtcggtgcagttggtctgcttgtgggcgccgcgacgggttcgggaggtcgcacgcggcagggtggggtgccgccgcacgggatctcccttctttgggctacgtctcgttgacgcggtgttggttgggtgcttgggcgtgggagtcgtggggggcggggacggg

SEQ ID NO: 119072 - DNA, 507 bp, Arabidopsis thaliana columbia
  unsure (1)..(507): unsure at all n locations
nnnnnnnnnnnnnnnnnnnnnnnnnnnnnnnnnnnnnnnnnnnnnnnnnnnnnnnnnnnnnnnnnnnctttgggttgggtttttttttttttttttttttttttttncccaaagggcttaaataagtcataaaaatatccaaggggtttttcaacaacaacaaaaataatcaaatttttgtgtgtttggaaactaaagaaaggaaaaaggtttaaaccaatttttttgagggggggaaaaaaacccgggcaggttcttcaacaaaaaagcattatcttaaaataattctagaaagacttttatatataaacacaaaacccctcaagtcctcttttttttaaacttcttcttcgggtttccttctctctttttcggtggctataaaatttaaagacctccggctagaagttcacttgaactcagcgggggaaaaaatgccgctttactgggttcttcaagggattaccccttattgggagggccccaaaaaaataccgtttaataaac

SEQ ID NO: 119073 - DNA, 586 bp, Arabidopsis thaliana columbia
  unsure (1)..(586): unsure at all n locations
ttccctcaaaaaaaaaaaattttnccccaaggaaaccaaaaaataaaccaaagcccatcctttccctcaaaagaataatctaactcaaaaaaactttttattcctctaacctcaacacacaaattacaaaaaaaaacccccgcaatnttttttataaactacaacaaatttttattttccntaatacacaaaccaaatcttcccctccttccctttaataaatcacacaaaaaaaaaccataccccctttaacacacaaaacccccctaattttacccctaaaattcctcctaaaaaacattttccctataaccaactttttcacaactaaaataaccaaaaatccctaaacttatcttcaccccttaaccccccccacaatcactctaaaccttcttaaacctcccacaaaaaaccccaaaataaaacacccaaaaacccttctcttttactaaacacaaaaccatcccccctcctccctcttcttgcccccacaataataccacaaaacacaaacctctccccctcacaaaaacccccatcttataaccacaaaacaaaacccaaatcatatccccccccccca

SEQ ID NO: 119074 - DNA, 551 bp, Arabidopsis thaliana columbia
  unsure (1)..(551): unsure at all n locations
cagctccccccggcccgggggccgcccgggggggcgggaaataattgggtacacactcctanaattctatgacgtcacctgcacgcgtacgtaagcttggatcctctagagcttccgcccttgggtttttttttttttttaaatcacaaactctatttcttgtaatggttctgaacatacaatttttgatgaagaaaaagaaaatgtaaaaagcctgaagacattccttttgtttcaccaggtacaaactgtgaacaatctacaaaactcattttttttatgggggggggcacaaaaactattggtttaatctcaaaaaccgaaagaaaaagggaggttaccctcccggggaaatactggtaagaaaaagacccgatgaaccaatcctccatgaatctgataaattacagtttttgacccagttaaccttgtgggaaggatgggacaaataatatgcaaatggtacctaatagagaaggcgtcatctctctcttagacggagggaatcccgcaggaaaatagggaaggcttttcctctttttgggtaagga

SEQ ID NO: 119075 - DNA, 456 bp, Arabidopsis thaliana columbia
  unsure (1)..(456): unsure at all n locations
cctttaattcaaaaattctcccgcccataatttcaaaccctccaccaaaaaaaaaaaccatatttcacccccccccccaattctctccctctaaatcctaatctccccccccttttctttcccctttaaagaaaactacccccctacacctnggccctcttcctataaaaaattccctccccttaacacaaaaacccaaattcccacctcccctttctcttttaaccaccacaattaaaaccacaccccccttcaatcaactcccataaacatatttttccactccaccaccctccttccctttttattccccncgggatcctcctacccaacacccacaaacacctatttttctccattccccccctatcaccccctccccccccccccctcctttaaacctcctaaaccccctccccctttcttcttcttttaaaacaccattttctctctccc

SEQ ID NO: 119076 - DNA, 540 bp, Arabidopsis thaliana columbia
ctatagaagatcatgacgtcgactgcacgcgtacgtaagcttggatcctctagagcgtccgcccttggggtgggcttttttaaataaaaatatccacccaacatgtgattaacgcccccacccaacaaggggggggggttttttgcccccggagggtttttaaaaccaaggtggagaaacgcggggtgttatgatttgaagaaagaatcctttttaaacacactttatttttaaaggttgatggggtctccccttttagggagacattataatacacaaggtggttgttccggggggccccttgtgtgcccccgtcggggaaaagagtcactcattcatgtgaagaaacattctttatgaaaacagagcagcggcggcgcgcgcggaaataaaagcagcacgcctcccccttcatgctaatagaagaagagtggggccccacaaaaagaaggaggggtcttttttgttcttcaggaggcgaatagaagcgccacgaacggatggacgggagagggaaaaaccaatacaatatctttttgt

SEQ ID NO: 119077 - DNA, 458 bp, Arabidopsis thaliana columbia
  unsure (1)..(458): unsure at all n locations
actcccacctctcactattaggacctttccctcaatccgccgattccggtggcagcgtcattacatccttcaacctacatcaaatcaatcaaccctaacataagtattctcttttctccaactcgtgaacaaaatcacctaattatttaaaagatgtgaattgtgggctnaatcaaaaacagaaatggtcctttgttttctttcatcaaggaccatgatgttaacggagctttattcttctggaaaaaaaaaaatttcttctttgtttttctggtgggcccacctttttcctttaggggcctaaaaggtggtggttgttggttcctccttcccgcggctgaaccccgtttcttaattcataaaaaaaaggttaaaaaaatgaaaggattaattttttttaccattccagcgcttgaagggtcctctttaattaaacactttaggttaaaaattttcct

SEQ ID NO: 119078 - DNA, 634 bp, Arabidopsis thaliana columbia
gagggggccgcgggggggggaggaaggggggggatctttggggaacgcccccggaactttaggggggaacagcccccctgcctagagcttggatcctctaaaagcttgccccctggggggaggggcctcaaaaaaaaaaaaaacaaccgcgtccgtgcgggaggcgcctaggcgggcgggggcgcgcgcggcgcaccgcgcgggcggggcgcgggtggggggggtagggggggaaggcacgaaaagcgggggttgacggggggcggccgggggtgggacggttttttttttttgggattgtatggggcaccccccagggggggggcggttaaaaaaaaaaaagccccccggcgcgccggggggagcaggacgagcgccgcgccggtctgaggtatgaggtgggcggcgccaaccccactccaccgcgcaaacggcacagaggcaaccagcagcgatgtgggaacgcagagagtgcgacccgagaggcgggggtagcggcgcgcgaggaggaggcggaggagacggagaaggggggggtgtgtacgtacgcgcggcgcggcgggtgccgacccagcggcgggcggtaagtacggaggcgtcggcgcgcggggacgagcgggaggggagaccccgc

SEQ ID NO: 119079 - DNA, 472 bp, Arabidopsis thaliana columbia
  unsure (1)..(472): unsure at all n locations
taggtgccactatagaagagtcttgacgtcgcctgcacgcgtacgtaagcttggatcctctagagcggccgccctggggtgggggtttttttttttttttttttttttttttttttttttttttttttttnngggggattctagatatcttattggaaccttaaaaagaagaatggtttaggcctagaccttgtttttcataagggtcacttgcaaatactggattttaagggggggggaacccttttcactgagctggaatgaaaaacccccccagaattgccgtgggtattaaggcgaaggggaacttctattggtttttcctctgcctttggagggaaagaagcgggggggtttctttttgcttcagggaggggggggtcccccacatttgaagcaaaggggggctggatttggacccttcacggggggaaaaggccttggattcccaaaagttatgagccccccgggg

SEQ ID NO: 119080 - DNA, 681 bp, Arabidopsis thaliana columbia
  unsure (1)..(681): unsure at all n locations
cggggcttttgtctgcaggaatcatgaataaattacatcccctacatgggggagggaccctttgagagggggttcacgttacctacccttacaaaaactaaaaatncattccttttataccctttagccgcttggtatatattgcctttcactattggcttttataaaaatccccggagggcctggctaagaaaaacctacaagagtgatagggaaaaaacaccctggctaatggtttgattcgccccccaattttccaacattaattgaaccacattttttgggggggaaaaaccatccaaatcacctttttgaaagggtggttttctcccacaacaaaggtgaagtaaattttttcctgggcctggtcattccttacgaaaaaatcctcccaaatattaaaatgggcgggtttacccgtgaagggagaaccctccccattcaaaatattgggccgcttttttttcccgtggaaaggggaaaacaaaaggtggcttaaagggtccgaccccaccaattttcttattttggaaactactaggccccctcctccggaaaaaaacccgccccctttttccacttaaaccttttgtgtggaaaaaaagggcaccggtaaattctatccccacggggtggggaaaaaactcccgcaaaagctcaaaacctttcttgggtggtggg

SEQ ID NO: 119081 - DNA, 672 bp, Arabidopsis thaliana columbia
agggacggaaacccggggcccccggtcgcgtcgcagccgggcggaggacgataagaaatgaccccgaccccgggcaggacagcgcgacccccgcgcagcagacggcgccacgacccccaacggcgaccgacggaagagaggcgcgcgggcaccccgcggccggcgatgaggggcccgacactacgaccaagcaccccaaaacgcaggagaagcgcgccggcgccccgagagaacagccacagcacgcgcggcccgcgcgcacccagagagcggacaatacgcgcggggggggggcgccgcccaacacacgtcgccgcccactagggccaacagcagacacgaacgggcgcgccgcgcaggctgcagaaggggcaagaccggcggcggccgagggacgacacatgacaagccaacccgacgcagatggcgacaacaagtgacagaccccaaccgcacagccccgccaccctgtccgcgcgaggcgacgcgaagacaccacatagagctaacacaacatgccggcaacaaacgacggcgacggagaaacgaccggacggcaccacgcgtagcaggcaacacgccgtcagaacggacctccacagaccagcgaccacccacgcgcgcgcgcgcggggcggggacgaggctcggcgacaccacagaacacgccccc

SEQ ID NO: 119082 - DNA, 305 bp, Arabidopsis thaliana columbia
aatagacccacaacatgcgaaaacctcgtctcgcgcccagggatcgctgcacaccctataagtctattcgttcttcgcgatgtgttgattaccgaactaataaataacgcgcacaataacctcctacatgcctaacagatcacctcacgtctagtccgcagcttaacagacttatttgttttctggctttaagccccgttttttttagggggggggcgtaaaaagaggtcatatctggagaatactcaagtagggttggtgacccgcgcgctatgaagctgattgaataatcttggctgcacaac

SEQ ID NO: 119083 - DNA, 474 bp, Arabidopsis thaliana columbia
gtaagcttggatcctctagagttgccgccctgggggggggggggtctagccattttttttaaaccccgagtagtgggtttttttccgcaagggatttagatattgagacgaacttccaaaaagaaaaggaaaccggactagtgttgcttcatagttcatggcacctggttaaggaaggggttttttgagggttgtaggggcatatttcggcgttctgaaaaaaaaaaatatcgtcgagagggggcttaattaaaggtccgagcggagttttatgaggctagttaaaattttttacctttaaaataagagggatattgaccagggggagacagtttgtacttctctaactggcagaccagattggggaaggatagtcctgcccatacccatctattgagttggcaaaaaccaagatggttcgagggttttttcgggtttagactctattttgaattcccgtggagctcttaaaaa

SEQ ID NO: 119084 - DNA, 150 bp, Arabidopsis thaliana columbia
  unsure (1)..(150): unsure at all n locations
aaaaggtccagccgggggcgggtataattgggtacacactctcanaaatctatgacgtcacctgcaccccgtacctaaagccttggaatccctataaaagctgttgcgcacctttgggtggagggtggctaactaaaatcacaatactat

SEQ ID NO: 119085 - DNA, 526 bp, Arabidopsis thaliana columbia
cccccaccgggggggggagtaatgccgggtctaacccgatcattatagggaaagccggtacccctgcaggtacccgggccggaattcccggttcgacccaggggggcgggggaactttagggttccatttccctccttggtaatcaccatgtccggagaaaaagaagaaaacgcccgtctaactcaagatcggaaattattttttgaaaggcgaagtgcttaatgaactgtgaaatgctcctttgaatcttgatttttaaggggggggtgggttcaccacaatctcagaggatccaaaaaaaaaaggtttcttggggggtttggacaagccctttcccctttgggaaggcggatcacctcggttcaaggatcccgagggcgtggtacaccatgtcggagaaaatactagggcggactttaacttgcttgagttgtgagctatgcgtcctttggccaacttctggccctgacactgggggaagaagcagcgggcaatgggttccttatttttaggagcgaaggggag

SEQ ID NO: 119086 - DNA, 562 bp, Arabidopsis thaliana columbia
ggggggggggggcgggaaataattgggtcacctctagaagttcttgacgtgacctgcacgcctacgtaagcttggatcctctagagctgccgccctcgggatgggccttcttaataaaatattttttttgttgcggtgccaactgggcgttggtggtatggcgggtgtgcgcgctttcagcttttttccgcaaaacacagaagttgcccccgcctattaaatagaccccggggcgcccccgccaacagtttttttttgggtgcggggcgaaacaacagggggggggttgttaaaaaaagaaaaattagggctgcccgcccttcgctgggagaccaccctttactctgtttttttttctttcacaatttttgcttggtgggacgagagggtgaaaatatcccattatccgatcccttccaccggcgggaggggcgcgtgcgcctttttttttggccccgttggcgcagcaacatcacgccgcgcagaagcacctcacgctgcggcggttttttgttttttatatacgatagctgacgcgcggggttacccccgcccctcctgt

SEQ ID NO: 119087 - DNA, 511 bp, Arabidopsis thaliana columbia
cccacgccaaaacaatagaattcttttttttttacttcaaaaactgtttgctggttgaaacagggcttctttcacaccttttgggggtccactacttttttaatggggttaccaggaaaatttcaacacgacccatctggggaaaaccaaaggaaaagtggttccatttttttttcaaccgggagcgggggtcccttccacccaccgtggtggtcttataaaaaaaaataaccgccgaaagatacgcatgtcttgttccaaggcgctccccgagcgaaacaactgtccgcagaagaccttccctcacgtcacattcaagaaaggaggtttcaaacaacaagggagtcccaccgtttttgcgaataacaattttcaagagaaggagaaatttttcggcccccagaccttattgcggcccgatcagagggggcccaaaaaccccacatcaattttgctgctccacgaacctaccctttctcgaggcgcgggcctttaaaccaaattggagaac

SEQ ID NO: 119088 - DNA, 542 bp, Arabidopsis thaliana columbia
  unsure (1)..(542): unsure at all n locations
gggaacggggggccctggtcggtcgcgggggggatttaagggaacaccttagaaatcnttgacgtaacctgcacgcgtacgtaagcttggatcctctagagctgccgcccttggggtttgttttttttttcacgtaataaagtcattgactcattgaacggcttttattaaatcatacaagacacacaaataggctcgaattgtagaacattcagttcctttgggttgaacttaagaccctaaagataaagatttggattttataacctggggggggggcggggcaacaaggggatttttaaaaataaacacgatcccaaacttctcctggacctccactctttttgcttgggggaattttcccataaaagaatgcaaaaacgttcccagattgaaaagacaaccctttggcccaatagcaattcccacccatatcttacaacaggacccaaagggtngataatggaagtattttcttttagagcataataccttatcccaaaccctgtgaaataaaagcttagcgggaatcccccttcctt

SEQ ID NO: 119089 - DNA, 304 bp, Arabidopsis thaliana columbia
  unsure (1)..(304): unsure at all n locations
atgtgggcggggggggggngccgcggggggggtagaatcgccgggtctattcgactaatatatggaaagctggccgcctgcggaaccgggcccctatacccgggtcgacccagggggggggggaatattacacacatttacagtctctttacaaaccggggggccttgtgaccaactttcactatgcgcttaactggcgataggttttaatcaacttctttgttcggtgtgctttggcctctccagccaccatgccaaaccgagggggtcttccacctgttccccccgggggtagtcggggggg

SEQ ID NO: 119090 - DNA, 591 bp, Arabidopsis thaliana columbia
agaccccccccacggagaagagggcccggcgcagcctttttcttccccgggggggaagggcgggtcgacacaaaaaaaaaacttctctttcttccccctgctcgtcgactaccgattattcgtctgcaatctactttgcgtgctgtactgaccccatgcgccgtccttcttgcccgcctactcgccccctctgcgcgcgccgcccccgcgttacctccccgtgcctacccagattcattccatgcttgcccctgacccctttttttttccgggtgtgggccccccccccaacctccctctgccaaaaaaaaaaatgcgcccttcccgtatcgcccgccgatagacccagttcgtcccggctgccccctctcggttcgcttatatacttctacgtccgccaacccatcccgcccgctaccctcccatcctcgcgacgcgcttccgccgcctcccatagcacactgctgtacgcttgcccttgtgccccacccctctcccaccttttagtgcgtctgcgcccgcgccccaccctccacctcgcggcgcatcgcccgtgcgcccttctccgctctgtttccatccccttcctcc

SEQ ID NO: 119091 - DNA, 115 bp, Arabidopsis thaliana columbia
tcttccagcactatctactacttagggaaactcttcgcctcatgtcctgtccctattccggtcacccacgcgtcgaaccagactatatttactaccttacctcatcgatgagccc

SEQ ID NO: 119092 - DNA, 538 bp, Arabidopsis thaliana columbia
ctctagactcgacaactgcccgccgcgcggatattagggggacacctatagaattttatgacgtcgcatgcacgcgtacgtaagctgggatcctctagagcggccgccctaggggttgttttatcttttatatttacgagcgtaacaatacaaacgcttggtatgcatatagactttaacgctcctacccaggtattataggacatggcaaatgcttaacctagaatatacccccttgacgactgtaacggattctcaccactaccattgagggttctcttttagggggggggcatcaaaacacgaacatagccaaaaagttggactaacacgccgtccacggaatcggatttcaagagggggcgcaactgttagtgaggtttcgtagcccgttgatctttttgcggaggtatggatgagacgaccgcatatcagagctgcgagacgttcgttggataattttagtgacagacctatggtgtatgcggggcactttattcgtaaaaaacggaacaattaaagtcttcgaaatgcctga

SEQ ID NO: 119093 - DNA, 582 bp, Arabidopsis thaliana columbia
gaagtggagcgtgatcccagtatcccgggcgcggagtatcgccagctctatacgactcatatagggaaagctgttacgcctgcaggtacctgggccggaattcccgggtcgacccacgcgtgcgagcactctgtgaaattttattaggttacgccacggcgcttgaaagcactgctcaacatcatgtattccggcgtgtaattggcgtgcactaatgaggattagtcaacggcacgcctaaggacctatttggctctcttagtggttcgtggcgatccgccttcgcccgggaggggcggcgattactcagggtatcagcatacataggacccgcttcattgctcctgccggccttggtggaggtgtggccggttgtggctctcgtactagggggggcctgtgcaagccccccaaactaggggagtagtggggttttcatggccagcgcggtgtttaaggacctccgcaacgacattctgaccaaccccgcagacaagcaaggggaaaaattaggagcatccttggtttggtcgacgacgataccacggaccgggttcatatggacgaaatccgatcctcacc

SEQ ID NO: 119094 - DNA, 540 bp, Arabidopsis thaliana columbia
atgacgtcgcctgcacgcgtacgtaagcttggatcctatagagcggccgcccttgggttttttattttattcttttttttttttttttttcaagaaaaagtaaaaacatttttattgataaggtgaatatacattgtgtgaatgatatatctgagggtaaaaacatgagtcccatcatgaaaaatttgttagccccaaggaaagggtttttattttactggggggggtgtatattaataatgctggttggtcttcaatataattaaactttcataagaagaaaatgttttttctatgtacactttcgccaaatttaatttagatggcctcaataattttttttttaacgcaaatccccggatattaaatttattttttaaatatccatacttaataaattgggtgtgaatgaactttcggtaggacataattcacctgggatgtaataatacgacgatcgaaaagaaaataggtaataggtggtgggtgagtggatgctaaacggggattgtattttgttaaaataagaaccctcgcttt

SEQ ID NO: 119095 - DNA, 540 bp, Arabidopsis thaliana columbia
  unsure (1)..(540): unsure at all n locations
gtgaggggggtggggtgccgcggcgcggcgcggtagtatcgcggggtctnnnnnnnnnnnnnnnnnnnnnnnnnnnnnnnnnnnnnnnnnnnnnnnnnnnnnnnnnnnnnnnnccaggcgtgcgaaaaaaacagcgattaaaccgaaacatcaagcaaacaaaaaaaaaagagaagagaaattattgttttttgttttcggtttcaaaaacaaagatctttgaattttatgggagcccgtcttctccgaacaaactttatggggggtatcttaccgggggggggcttttagcccgggggggcctccaaacgggagtggttccaccgggcggtggcccggagattctctggtttggacacaagcaccggaaccaccttttactacccaaaacgcagcgagcagtctcacggtgggctcgagctctcggatcaagcggggttttttttctttatcacaacctttggtctcctccggtccaccgccgggtttaatgcgggcggcaatgggaccttaggtctacctaggggcgtgggttcatga

SEQ ID NO: 119096 - DNA, 453 bp, Arabidopsis thaliana columbia
gaccggcgggcccgggggtagtatcgcgggcactaaccgactcttatagggaaagccggtacgcctgcaggtaccgggccggaattcccgggtcgacccacgcgtgcgagccacaccaagtgaagaaccaaacctcacaacgctccagaagcatccctgtcttgtctcttaaatccacattggaagccacttaaacgcgctctccgtgaaagccgccgcgcgttctcaaaactcggccaaaaccgggacgaatttccatggggggggaagaaatgatcagaggggtttctctattgcgaaggaactaaaggtgaggatttcatggagtcagtggagaaaaaaccttttacttatatcggcaagctcaaatcactagaaaccctcgagggttaataaggaagcattggcagggagtccggctctggacagtggggtgccctatcaaaggtaatg

SEQ ID NO: 119097 - DNA, 470 bp, Arabidopsis thaliana columbia
tgacgtaccatgcacgcgtacgtaagcttggatcctctagagcggccgaccttgggttttttttttttttttttacacaagaacatgtcccatattagagaactgattagacaaaaccgaggatttgctcttaattcttttgggactggaagatggtgaacaaaggagatttcttatttacggtgaaaacggataagccacatttttcagtagggggggggcaactccaaaggggggaagataaagtggaaacgacaagggcttttgataaaaggaaaagaaacccccgattgaaaaaagaaactgagaaagcgcccgaacccgtgtgtggggtgggtcttccaaggtttgggtgatgcatatagaacctcttttggttccgaaagggtcattagaaaatccactattgtctggtgtgtggcggggaagcgttcattaaggggatgtgttccaaagtaagcttggcagct

SEQ ID NO: 119098 - DNA, 423 bp, Arabidopsis thaliana columbia
tcggaccggccgattacgggcgaccagcggtcgtgatcattttacacatcacctttcctttacagggagcttattatcatcccacccagacatttggattataaaatcttctggctagaaacctcttatagcccctccttgaatatgtcaaatcacagggattacttttttgggaaacaaatatcatggaggggggggggggcacaaggatgggccccatcctaccccaggaagatccccagtgggtttgagtcccaaattaaatgtggaacccccaccagccgttttcattgtcttgacttgccgacacaccaagaaagtggggggatttttctacaaggatcatttcgggaactaaaaacgttcatttttatctcaacaaggactcttggaagaacaccccccaccattacttgggttctg

SEQ ID NO: 119099 - DNA, 476 bp, Arabidopsis thaliana columbia
  unsure (1)..(476): unsure at all n locations
nnnnnnnnnnnnnnnnnnnnnnnnnnnnnnnnnnnnnnnnnnnnnnnnnnnnnnnnnnnnnnnnnncttggggtttgttttttttttttttttttttttttttttttttaccaggtgccgaattcacaaaattttttgaagaataccaggagaattctcagacttaaaaaaaaaaaaaaaatcttccaaagttttacaaaacataacccgtttgggtttttttgttcaggggggttaactaaatgggcctgaaagatgtaaaaattgagtaccccaggggggacttcaggaactttcctttgctttttttttaggcttcaagctgttttggggcactgggtttccaaattccacccaagacgctaccgagggtttggagtgacagacccctaaaaacagcccacgggacttggaggggggggattcccaaaattttggttggaaagaacatctccaagccccgatttttgcatgcc

SEQ ID NO: 119100 - DNA, 471 bp, Arabidopsis thaliana columbia
actatagaagatctatgacgtcacatgcacgcgtacgtaagcttggatcctctagagcggccgcccttggggtttttttttttttttcaaataatttttctgttttataaaaaagtaaaaagcatttttattgataaggggaatatacattttgtgaatgatatattggtagtaaaaacataggcgcctaatgaaaaatatttagccacaggaaatggtttttttttacgggggggggtatattataagtgttttgttttcaataaattaaacctcctacaagaaatttattcatctacatttcccaatttaatttaaggggtccaaactttttctttacgcaatccgggggattaattccctcttaaggcgcatcctaatgaattgacgggtattaagtccggggggcttattccccggttgtataagcgcgtgggaaaacaaacggtatggcggttgcaacgggtccaa

SEQ ID NO: 119101 - DNA, 553 bp, Arabidopsis thaliana columbia
gggcgcggggtcgaggggggaggggggggtagtattcgcgagcactattcgactcatatagggaaagccggtacgcctgcaggtaccggtccggaattcccgggtcgacccaggcgtgcgaaaaaaacagcgataaaaccgatacatcaagcaaacaaaaaaaaaagagaagagaaattatgtttttttgttttcgttttcaaaaacaaaatctttgaattttatgggcacccgtcttctgcgaacaaactttatccggtgatcttaccggggggggggtttaccccgggggggtctcccaaaaagtatgcttccacctgcgtcgtcccggaaattcttttctttggacaacaaggcgggggaccacctttttattacccaaaaccggaccgagcattgttacgatgggctcaatcttttgcgagcaagccggtggttttttcctttatccaaaactctggagctcgtaggttcacccggcggtttagatgggggcggcgatagggtccttttgtcaaccttagggccgtgggtaatgaggtctaaactttgg

SEQ ID NO: 119102 - DNA, 501 bp, Arabidopsis thaliana columbia
gcactattcgactcatttagggaaagccggtacgcctgcaggtaccggtccggaattcccgggtcgacccacgcgtgcgcccacgcgtacgagaagatgatctcagagctcatgtccatgtaccacagaaatgtccagagcaaccaaacctctatggtcatggaaaatcaaagcgtgtcactgcttcaacccacagtccataaccatcaagaacatcttcagttcccaggagggggggcggaaggaagtttctttcaaaacaaaaacatcctcaacagagcatacatcaacaacagcagcaacaatcaaacgttttttcaaggggacaacaccaacaacattgtgtctaagtgcgacactgcagatcacaacatctttgaagctgcacataccaactacagtaacagtggcggtaacaaggtccagcttgggtttgatctcccaccgcggggcatggcgtaattcaatttcagaaatgatttgcccatcccagaagtagta

SEQ ID NO: 119103 - DNA, 171 bp, Arabidopsis thaliana columbia
  unsure (1)..(171): unsure at all n locations
tgacgcactgcattttacgggaaaagcctggtccagctctgagggttaccaggtaccggaatttcaagggttcgacccacngcggttcggaggtacgcgttggacaggacactgtgtggcggtactcatggtggctcagcatagtctgggaagtcttggacgaacgacttt

SEQ ID NO: 119104 - DNA, 490 bp, Arabidopsis thaliana columbia
actatggaaatctatgacgtaacctgcacgcgtacgtaagcttggatcctatagagcggccgccctttgttttttttttttttttcactaacgaatctgcttcattgaatcttgtatgtaactaaagccattgtattgaatgcaaatgttttcatttgggatgcttttatgttctggtgagaattatttactgattcaagtggtaaaatgcttacatatagagggggggggaaaccagctttgttggaatttgagaggaaagctctgtttgtcgagaaagaaggtcaattgcccctaatgtaagtgaaggggtagtagaagccacacgttacctttttgaacagggtgcataaaccctgagaggagggaacctcttcaaaagcctccctgggttttagcaaagcaaaggttatgtcatatacctcaaaacctataatttttaacaaatgggtggtttatgtgtatttccgaggcattcattactttgatc

SEQ ID NO: 119105 - DNA, 438 bp, Arabidopsis thaliana columbia
gcagcagcgggggggggccggagtatcgcgagaacatatcgactcttatagggaaagctggtacgcctgcaggtaccggtccggaattcccgggtcgacccacgcgtgcgttaaaaactttcagatttatatagaatttgttttgtctgttacttatttaggacaaatctttagtggcaattgagttgagagttgagttttttcttctctcgtaatgatgacttgccgtttggccaaaagttatggtttaataaaatggggggggtggaataagaatagtggccggcgggtaagaattcctcgggctgatggagtctagtgccgttcgcagggagttcaccccgagggagcagatcccatgcgtggtgtctagttgcctgcggcgaatccaattgtggcggtggagggccccaccgcgcattggttcgcctggggttc

SEQ ID NO: 119106 - DNA, 500 bp, Arabidopsis thaliana columbia
  unsure (1)..(500): unsure at all n locations
annnnnnnnnnnnnnnnnnnnnnnnnnnnnnnnnnnnnnnnnnnnnnnnnnnnnnnnnnnnnnnctttttttttttttttgggtacaaagttgttttttgtagctagcaagtaaatcgtaatacatatatacacaaaagtgaataattcagatggtttggtacaaagttgtttttttaaggatgttgggttacatcaaagcatggaatcacttaaattgttttggagggggggacatgaatgaaaagagaagaaagctgttgctgaatcgtgattgagagaaagtagagagagctacaacgcttacaacaaactactactagtcagcagtccagctttgctcaacaacataacgcactctactgttgtactcgcgcttgctttcgctgtacatccgagcagtttacgagtttgcaggagaattcggattagggtcacagagcaaggactggatggaggtaagtatagcagccacatcatagattggactccattggtttt

SEQ ID NO: 119107 - DNA, 513 bp, Arabidopsis thaliana columbia
cggcactaatacgactcatatagggaaagccggtacgcctgcaggtaccggtccggaattcccgggtcgacccacgcgtccgctttttacaggtgacctctctgaaagattgtaaggttccttacaaaaatttgatttcgtttggtgaatgaaatagttagaaattctccaaaacaaaatatgggtggctgtgtttcttctcagagaaaactcagtaacaagctttatcagaggaggcggaaacgcggcagatctggcaaatgacagaccaaaatatcggcttctatgcccgatgttcctatgaaacgcatgagtaatgcgagtgttagggattttgcggtgagcgaatatgttcatcttgatttcgacaattgtgcaaccaagatgatgggtaagagagctgagatggctaatgctaacttccatttaactcagcttcatgggaactgccaccaaatcgatggaaaccgaatttcacattgagaggcttggtatgattcctttaaccacatc

SEQ ID NO: 119108 - DNA, 503 bp, Arabidopsis thaliana columbia
  unsure (1)..(503): unsure at all n locations
nnnnnnnnnnnnnnnnnnnnnnnnnnnnnnnnnnnnnnnnnnnnnnnnnnnnnnnnnnnnnnnncttgggtttttttttttttttttttttttttttttttttttttttttttttttttttattttttttttttttattttatctttttttttttgtgattttaagttttggagaagagggaaaaaaaaaaaaagttttaaaaaaaaaactccttttttttaacggggggggggaaaaaaaaacgtgtcaaaaaaaaaaaaaaaaaacaagattttttggtgcggaaaaaaaaactccacgatttaaacccccaccagagcgtgggtggggtcgcgttaattccagtaagtatccgccaaagaaaaacaaaaaagcccccccccccctctttcggggaggtgggggtcacccgaaaattccgcacccgggcgcgggggggcaccttttttttttttgggagggagaatcagcctgcgaaaagaggggcccaatgttttccccc

SEQ ID NO: 119109 - DNA, 504 bp, Arabidopsis thaliana columbia
  unsure (1)..(504): unsure at all n locations
aatcgactcacttagggaaagccggtacgcctgcaggtaccggtccggaattcccgggtcgacccacgcgtccgcggacgcgtgggtggggatcttgttagatctggttgagaaaataatagatgagaaaacgaaaccaaaacgtttctgtttgtgtttttgagttttggatttttgttttctctgtgaatagttttttttttttttcgttttctttgtactttntgttgggatgtaaatcatgtataaaatgaaaagataaatcaatgaagataatggtttgtcttccaacaaaaaaaaataaaagagatcgcaggtataggtggggtggcgctgctgatggcttcgttgtttaatcaccctccccctcagggcccccctcctcttggccttacctttgggggcgccgtttttaaagatccaacctctctttttcctttgactacacgtgatttttttttttatgggccacaaattcaattactgcccgtctttttaccccgg

SEQ ID NO: 119110 - DNA, 457 bp, Arabidopsis thaliana columbia
gaagaagagatagcatttggctgcggcgggggggggcgataataatggggaacaactatagaagttctatggcgtcacctgcacgcgtacgtaagcttggatcctttagagtggacgccctttgttttttttttttctccgcccaaagacaaaaatttcttcaaactggggtggttacaccattattagggtacagcgaaaaaaacacattttaactccaaaaccaaaaaacaagaaaaataaatcctgaactttttctttcacatcgtctgaaaacaaatttttttatttgggggggggtgataaacgcacagggtgcgtttttgaaaggagccggagtatatattctttttcgatggctaatccccagatctttgaaacttggcgatatatcctgggttagttttttttcacaggggggcgcgtcggtttttggccaccaaaagagaaagcttga

SEQ ID NO: 119111 - DNA, 483 bp, Arabidopsis thaliana columbia
agggaaagcctggcacgcctgcaggataccgggacggaataaacggggtcgacccaggggtgcggcaacatttttgatcgcgaaagaacgagaagggcgctgtgacttacagacagaccactttggaagcccaaaattctattgttgacaagagagacaacacaagggcagtatgaatgaagctgcttggctttgcctatggtctcaagagctattctttagggtgtggggggggcctccttaaacaaggggggccgaaataaaaaaatccctaggtgccttccatgtcttaagatgcgacggcactggagtgttagaagctccgggcacatcctcaactttaatccttgtgttgtccatcgtcggccagtgggtggatgttgtaaccatagacggctgttgcctcgaagctggagctattggtgtgctaacaaggcgtgtgtggccccttgttggcaagaatagtaattccttaaggtgggt

SEQ ID NO: 119112 - DNA, 489 bp, Arabidopsis thaliana columbia
aacctgccgcgtacgtaagcttggatcctctagagcttccgccctttgggttgtcttttgaagaaagagatttcattagctcgtgaagaaaaaatagacaagcaagaaccgacgaaactctctcttgctctcaaggtgtgactccacttaataaaggggcgacgcagtgaaaagaaataaggggggcggtgtttttttttgcgggcgggggggctctctaaaaccaattgagcttttagttttcaacgcgcatttgcgcaggcgcagaccccacggggagcctcatccaggggtttcagaggctctgttaggcattattctaccgcaccacctcttactcggccattgttaccatggggcctgcgggaacccccaccagcaccattttggtactgttggcgctcccccctattgtggtgccctgtgattcccatatggggaggagcgggcccggccattatctgcttttgccccgggaacggcccccga

SEQ ID NO: 119113 - DNA, 502 bp, Arabidopsis thaliana columbia
aataatctaaatccttgcgagccaacagtttggcctgggcaatgaccaaccccacaactagtattgtcgagcggcctctccgcgttccgtcccctcggttacataaaagggaggtgacccccgtttaaagacaacatccctgccccttggttttagaaattttttttcttggggatgttagggacttctcttcagcggagtgggaatataaaaaaaagaaccccccgtggggtttcgcgtcttttgatgttacccacgggttagtaatttccatacccgcattcttcaatatagtttgaagaggaggatattcttgtctcttggcttatatagataccgcattgttttgccaagtgccaatataccttcgtcttcccatgtaagtggctccttccgatgggaatctcgtgactattttattgtttagaattggcctcccgaaattgacgagggagggggcgattcgtggtgcacgtcttaaccactcgcaattgaattatat

SEQ ID NO: 119114 - DNA, 534 bp, Arabidopsis thaliana columbia
  unsure (1)..(534): unsure at all n locations
atgatttgccnnnnnnnnnnnnnnnnnnnnnnnnnnnnnnnnnnnnnnnnnnnnnnnnnnnnnnnnnnnnnnnnnnnnnnccacgcgtccgaaaaaaaatggctccttcgtcttcatcttctccttccaaatctcctgttccatctcttcaccaatcccttcacttcactcctgtaagtcaaaactctaatccctcttctttgttccccgtggaagaagacagcacatacctcaatttagttttgtggtgtgtctttgctctgtcacaaaatcaaaaacttttctttctgtctttcaaaaatagtggaattgataggttatagctcgaaatcttcttgtttttgcttaaaaatgaaggaacagtggcaaaaggagcatgttctgttctgatgaatccnctaatgattgtggtaaaaatcattaagttaaggtggatacacatcttgtcatatgatcaaatggtttcgcgaanaatcaatantcagacaacaggatgtgcgacctcgatattttacacgactctctttaccaatt

SEQ ID NO: 119115 - DNA, 491 bp, Arabidopsis thaliana columbia
tgacgtaacatgcacgcgtacgtaagcttggatcctatagagcggccgcccttggttgtttgttgttgcattgatttttattttcagacccaagaactgtgggtcgttttcgattatccatccttttttttgtcccataaaatggaggacccgattttacggctttttaaaaggaagaagtcatctttacggaagcgcgagtcattattctctatagggggggggggggtacttccaaagaagtttaagcaaactttaatattttgtagtgaggggtgtcgttccacacagcgcggctgttcgatcataacgtggacctttgtgttttcgatgaggggacgcgcttgtgactgttttttttggtcgataactcaagacaatctcttgcggttttgaacgaaaacccgataatggagatatccttgactagtgagaccattttttaagagttatagtttactcatagtatttccgcctccagcaagtgacac

SEQ ID NO: 119116 - DNA, 466 bp, Arabidopsis thaliana columbia
tctactgttttagggaaggctgtgccccctgcgggtaccggtccggaattacagggtccacctatgcgttcgatataaaggaaaatttatgaaagggtagagaaaaattacaaaggggccactcttatagtcttttttcttacttctgaccgcgataggtctcgcgagcaaaaatttacgccctctctaacgtaacgtatgcatattcctcaggggcagtagtaattatacctattgactgcggggggggggatcacatccaggatatattgggataaaattttctgttcttttttgcggacgctcatttccagacagaggtccgtaccttaacacaaatattgcaaaaagggaatattaaatgatccacctatcaataaaacgtcttccatgtgcagattcaacaacgctagaggatgcaaaaaagattcttggtaagacctcagttcacccgcttacctctatt

SEQ ID NO: 119117 - DNA, 539 bp, Arabidopsis thaliana columbia
catataataataagaaaaatccgccgccccgcggggcggaattatttaggtctacctctagaagttctatgacgtcccatgcacgcgtacgtaagcttggatcctctagagcggccgcccttgggttttttaatatctacttttactttttttcggagaaggaacaactatttcattcataacccccctcttcttcaagtcctaaaatttaaacatagctataacccacaaaatccttaacaaaaaactaaaacttttttggtgtcaaagagcggagtttctattcaagaaagcacttaaaaaacttccaccaatttttcttacgcggaaagagctctagaaatctaggttgggacgtgtccagtgcctactctttaacgttcacctgattttgttatcaagaacgggaacagacccaattaggaatcggccgctctggctaatcttttacccttgcttccttttgaacactacctacttttcctacggatttttaatttctactgtggccataccgacaaaacccttactttttaaat

SEQ ID NO: 119118 - DNA, 506 bp, Arabidopsis thaliana columbia
  unsure (1)..(506): unsure at all n locations
nnnnnnnnnnnnnnnnnnnnnnnnnnnnnnnnnnnnnnnnnnnnnnnnnnnnnnnnnnnnnnnnnncttgggttttttttttttttttttttttttttttttttttttttttttttttttttttttttttttttttttttnaaaaaaaaaaaaaaaaaaaacgatttcccaaggctcgatttttttttcccaaacatgaatccaagccccaaacccttttttttaatggggggggcttttttctggccatcagntttgggtaagcccgaaacctgaaaaaaaaaaaaaaaaccttttttttttttttattggggcaagggcctttttttttttaaaaaatttggttttttttttccccaaggggagggttttttttttaaaacttttttccccttttttttctaaaatcaaacattcctgggtaacccttttttaagaaccggggtttttcaccaagttgctcttgacccattgaacacggggggccgttgtttacacccccccgg

SEQ ID NO: 119119 - DNA, 538 bp, Arabidopsis thaliana columbia
gcggcgcggccgggggggggagtatcgccggcactatacgactcatatagggaaagccggtacgcctgcaggtacctggtccggaattcccgggtcgacccaggcgtccgggttggcgtagggtatgaactctgtcaacaatatacagttcagagatcccaacacagcttatacatgtgcaatggctcctgcttcactctccccaagccctagttccgttagcccgcatgagtacagatccatgtttcacccattcaacgggggggccgaggggttacaagacccggcatagaaacatggatgtaaatgagaagggaaactggttttctgcaaccgaacatggtgcaataggcaatcacattggtcagcttattgggaagaagaacgaaaatggctatttagtatcccggcgggaaaattcagcatcttttgaactagaaggctttttaaccaaattccgaatgaagcgaacgggacagatgttttataaaaagggttcgttccgggaccggaagaaattagcaagcaccgcccacca

SEQ ID NO: 119120 - DNA, 505 bp, Arabidopsis thaliana columbia
tatgacgtcgcctgcacgcgtacgtaagcttggatcctctagagcggccgccctgggggttggttttttttcttttttttttttttgtttgtggtctttctttcttttctcgttgtctcttcttttcttttttccgccgcccgcgagggcgggccgaaaactccgccgccgacaaaagaaccccccgcggcctcctccccctcgacttttaaacggggggggggcgggccccccgggggtctgatttaaaaaaggaattcgagggacgggcgccccccaaacatccccgggcgccgccagccttcccttttctcttgaatggggggaccacactcctcctggggagaagccgcccccgcaggcccccccggaagggggcccccgccgcccccacccagggtggggcgcctgtgtaggccgtttccccaccctctggtggggaccctcccccccgccccgggggccccccggaccgggcgcgctgcccacggcgcgggccgggtag

SEQ ID NO: 119121 - DNA, 550 bp, Arabidopsis thaliana columbia
ggccgggggggacgcgcgggcgggggggggggtagaatcgccgggtactaatctgatcatatagggaaagccggtacgcctgcaggtaccggtccggaattcccgggtcgacccaggcggtgcgggaggatccaaaagaaaagaggaaaaaatggactatatgtatggaccagggagacaccatctgtttgtaccaggaccagtgaacataccggaaccggtaatccgggcgatgaaccggaacaacgaggattaccggtcaccattcattcgggggtgggacgaaaacattggtggaggatgttaaaaagatattcaagaccccatcagggacaccttttctgtttcccacgaccgggactggtgcttgggagaaggctttaacaacactttattttctggagacagggaatgttctttctgattggacaatttagcttgctttggatggaccagcagaagagggctaatttcaatgttgtggtggttgaaaatgatttggggcaaggggctaatctccaagtgttgggctcaaaaactcttacaagag

SEQ ID NO: 119122 - DNA, 517 bp, Arabidopsis thaliana columbia
  unsure (1)..(517): unsure at all n locations
tgacgtcgcacgcacgcgtaccgtagcttggatcctctagagcggcccgcccttgggtttttttttttttttttttttttttttttttttttttttttttttttttttttatttttttatttgacattttttttaatatcgggagaagttaaaattttttttgagtataagaccacgaaacaaaaaagcacttttgaaaaacttttttccaggggggggggcccgcaagaaccggnaaaaccaaaaaaaaacccccggggcaaacaaaccggagggtctgccaccccccgggtgggccgcctaaccaccccgtggggattttccgttccccccaaaaacttcgcccaaccaagccagcggagggcgtcctctcccccagggaacccagaagccccccaaaaaacaaaggggagacccgcccccaaggggcctcgcataaatgggggtccgggcccccccccccccccccaaggggcggcccagaaagagggcccggactgactctttttccccccaa

SEQ ID NO: 119123 - DNA, 348 bp, Arabidopsis thaliana columbia
caggtacattcgactaaatttagggaaagctgcgccgcctgcaggtaccgggacggaatacacgggtcgacctacgcgttcgttcacgcgttcggacacgcgtacgtaattgatttgatctttactccctactatttggagccgtagcaattaacgttaacgatcaacaactctattgtacatgtgtggtctacctctgtaatatatatacattaccacaagcttctatttcatggggggcgtcatgatgaagaaagagctgatacaataattggagcgagaaagcatgaagatgcgtcaggtggtgcttaggagagcctcgccagaggaaccttttacatgctgaag

SEQ ID NO: 119124 - DNA, 505 bp, Arabidopsis thaliana columbia
actatagaagagttatgacgtcgcctgcacgcgtacgtaagcttggatcctctagagcggccgccctttgtttttttttttttttttttttttttttttttttttttttttttttttttttttttttttttttttgaaacaaaacgattttcacataatcaatcggggtggtttggttcaaattttagcccagagccaaactttggtaggaccatggggcctttacccttgggggggcaacacaaattggtttacttttacctcataccctaagctacaaaagaagggggtgtaaagcaaaccacgtctgtttccggtggtggggggctggtgatttcattggggaaaaaaaaactgggggggttgttatggggtcatggaggattaaaagtttaaggggggctgattcaccccacctagttgctcccacccaaccggttggtgtgaaccctcccatgttgcattttggcagggggaaaggggcctccattcccctcaaaagaac

SEQ ID NO: 119125 - DNA, 416 bp, Arabidopsis thaliana columbia
taggagaaagcctggtacactctgcaggtacctgtgcccgaatttccgggtcagacccacgcgtccggccacgcgtactgggacgcgtgggctttcatcgtcggagaactgagtaacatattaccaaaacggcgttttgctatgagcagtagagacagaccagaatggaggtcttcttattatacgcgggtagataggagatgttagttgtgggagattaactatgtctactggggggggggcgaaattcataaacttgtgtctacaataacacagagctcgtgtaccgattttgtctaccgcaaaccatgggtctgtaggtatatcggaatttcataccgtagtcttaatctggtgaagcctatacctgatgagctgtgaggtaagaggaggtttagtcagttatcttatgggaa

SEQ ID NO: 119126 - DNA, 489 bp, Arabidopsis thaliana columbia
  unsure (1)..(489): unsure at all n locations
cnnnnnnnnnnnnnnnnnnnnnnnnnnnnnnnnnnnnnnnnnnnnnnnnnnnnnnnnnnnnnnnncttttttttttttttttactgaaaccacttttgactgaatctaatagtcttcagagtattgcattagttacactagacgaagaacatcggttagtaaaactgcggattccatgctttctcctgtcatccaaaccctgaactgtttggtgaaatactctgcggggcggcaagctttgagttgggtgagagagaatggtccctgtacaagaccctgaggatctttgtataaccagtttaacttctctttatcataagacagaacccggacgtcttcaactttagggtccagggtctctccatcaccggtgtcatcttcatcatcatcgctcagttcgattacttctgatggatttggttgaacttgagatccgttgtcgacattatttactggtatacttgactgaagctgagaaactttagactc

SEQ ID NO: 119127 - DNA, 485 bp, Arabidopsis thaliana columbia
tgacgtaacctgcacgcgtacgtaagctaggatcctatagagcggccgccctttttttttttttttccgaataaaacatttgaagattttcaattactaatagtgtcatgggaaaaaaataggtccaactttaaacatctgaaatcaagaaatgagaaaaacattcttatttgagctaggctcatgagatatcttgaaattttttttataagagggggggggggaaaacaggaagtccctccttttctctaaaaaccacaaagttttgagaaccagcggaacttctgtgtctttgaggatcttcctgcaaatattgggtaagcgcattccttgggcttctttggcctcaagggtttgccttaagcctgggaaacaagcatccgtgggtaaggacgttggtttcttttgcctcgacaacagcgcgggatgaccattttaagttggacgcttggatatgactgcgtggtacaaatccagtaatttct

SEQ ID NO: 119128 - DNA, 532 bp, Arabidopsis thaliana columbia
ggggggtagtatcgccggcactatacgactcctatagggaaagccggtacgcctgcaggtaccggtccggaattcccgggtcgacccacgcgttcggattgggaagtaattggattatgtgaatgtgggtggttttctaaatagatagttggaattagataatggcttaaaaagcttttgggtgtaggagacttggaaacaatggtggttttttttttcttttctttctggcgcttgtctaggcgggtgaggagttgcttagtgtccttcttacctacaaaaaaagggtgtgtattgctttcttcttttgcaactgttaaacccctttctgttgtttgatttattctctgcaacctctgaattttgttaaagtttctgccccacaaccaaaaacaaaagggcggccccgttctaaaggatccaagcttccgtacgcctccctgccaaccacataactctgctataggggccccctaaattcaatccaccggcccggctttttaccacggccaatgactgggaaaacccctag

SEQ ID NO: 119129 - DNA, 508 bp, Arabidopsis thaliana columbia
actatagaagatctatgacgtcgcctgcacgcgtacgtaagcttggatcctctagagcggccgccctttgtttttttttttttttcacggaggaaatggtgatatactgaaatcaacgtcaggttgagatatataactgtctttcaaaatgatttacaatctgaaccaaaatactagatctagagggatcttccgtgactctgaggatgggcctagtttgatgagctgggcacatcgtggtttccttctgcctggcttgcttctggttttagttcggtctctgatggagtagggttcttgaatcgaaccaatatcatggtcatgttatcacagccttcaccacctgaagtgtttggagccagacatctatcgagaactttttcacataccaccgagagtttggtcctctgaatgttaccaatcgaaagaaggaaactgtagcatccagaaaaggatagactggaaaaaaactgtaatccaaaggaagaaaatcaagttagcttactgg

SEQ ID NO: 119130 - DNA, 419 bp, Arabidopsis thaliana columbia
  unsure (1)..(419): unsure at all n locations
nnnnnnnnnnnnnnnnnnnnnnnnnnnnnnnnnnnnnnnnnnnnnnnnnnnnnnnnnnnnnnnnnnnnnnnnnnctttgttttttttttttttttttttttttttttttttttttttttttttttttttttaaaaccaaaatgagtttcacttcacacattaagtaaacaaagggcgaaaactttgtaatgatcccgttgaaaaagtaagtcgacaaaacagatgaaaaactaacccctggcgcttatgagtaatctttaagttacggaacctgtttccacgttcgcaaccgtagtttttgtctttgccccaatcatgggcatagtcatagccacgctccttgcctttttccctttttgggtttgtgcttctgcgtttatccttatgggagggatgatctttaccacggccttttggcc

SEQ ID NO: 119131 - DNA, 518 bp, Arabidopsis thaliana columbia
  unsure (1)..(518): unsure at all n locations
taggtacnnnnnnnnnnnnnnnnnnnnnnnnnnnnnnnnnnnnnnnnnnnnnnnnnnnnnnnnnnnnnnnnnnnctntgtttttttttttttttttttttttttttttttttttttttttttttttttttttttttttttntaaagggagaacggtttttttttttttgtttttccccgggtaaaaaaaaactttttaaaaaataccctccatttttttttctgtcggttcaaaaaatggggggggttgttttcggaaggtttggaatttttgggccaaactaggggaacaaaggggaggaccttacaaagaaaagggttttctttgaaaaaaacacaccggtattattttttttttttaaaaaaaaaaaaaaaaaaaaattttttttggggggaaaaaaaaagagtttaatgggggtatggggcaattggggggtgttaaaaattttttggggtgtttttgaaattttaggaaccccgggggggggggggggttttaaaaagttaaagggattgcct

SEQ ID NO: 119132 - DNA, 481 bp, Arabidopsis thaliana columbia
tatgacgtcgcatgcacgcgtacgtaagcttggatcctctagagcggccgccctttgtttttgttttttttttttttttttttttttttttttttttttttttttttttttttttttttttttttttttttttttttttttttttttttttaaacgccgcccccccccccaaatttcaaaaaaagtttttttaaagaaacacttcttttccggggggggggatattatttgcccaaaaagagttccacgaccccggtttaagatggtcagaaaaaaacctggttacctccatattaaaaaaaaaaagaggttttcccacacagacccttttaagagaaaggtttttagtttggaagaatttcggccaaactataaaaaaaattctttgttttttacccacacacaaaggggtcttttcacaatcgcgatagaaatgtagaaatgtaatataatattttcaagggtgttttaagaaataagg

SEQ ID NO: 119133 - DNA, 487 bp, Arabidopsis thaliana columbia
ttgggaacaccttagaagttcttgacgtcgcatgcacgcgtacgtaagcttggatcctctagagcggccgcccttggggttgtgtttatctttcaatattttttttttttgagctcaaatttgacttttcattaccaaaaagaaagaagaatctaaagttgttgagtgcaaatatatttttacaaaagttattcatctattgttttcacacgagtttgaaaaatattttcaaaggggggggtcccccaatactgtgaacaattttagaaaatcccctttccgggttgattgcgtttaaaaatatcaaactttattgtggaaccaatttggccctttgagttggtttagcaacgggctatgcacaatcctttgttattttttccaaactctttgtatccctttatggaataagccaatggaacgcaagctctttggatccatggcatttgttgggaaaattcccaataggttgccgtaggtgcccaaa

SEQ ID NO: 119134 - DNA, 509 bp, Arabidopsis thaliana columbia
aggaaaaacttgccgcctgcaggaaccgggacccaataccatggtcgacccaggggtcgcggaagatttttaacacaatgaatatagcgccgactattactgcactataagcttgaccatactatgcatgacgtacaatcaacggtcaattatctgcatctgaatatggacttttagactctactaagctaacttttcctaattttttaaaactggggcgggggtcaaaaaagatccagtacctaagaatatgctgttgtgtctcccaaatgtcggtctcccattttcaagacatgaaaactctcccaatcttgatttccagattaaattaaaccttcttcaataggggtacaacggagatcttatcatcgctttaaaacaacttataccggttggactttaaagggagagtgaaaaaaaccccacatttaactgaggggtaacataaacacattctaatgcccagaaagaaacatttgattaaacagtaaacaaccaccctcttacga

SEQ ID NO: 119135 - DNA, 498 bp, Arabidopsis thaliana columbia
ttgacgtcacatgcacgcgtacgtaagcttggatcctctagagcggccgcccttggttttttttttttttttgatgtttttaactcttgaaataaataatataagagaagtttcaaaactgagcagagtaccaaaagaaacgaagtgagtctaggaaatatgaaacgtctaaagaagcataacaaagaactgaaaatcacatatttaagcgggggggggactagcaagcctcttcctggcctactaaatgatagtcagcttgatacctttgcccttgggaagagacacccatggctttgtttctttgccaatggtgtacacattacccaacctttgtgcaaaactcatgtacttgttgaatcttaggatgtggattggtttaaaaggcttcccttatgccttttcacgggtttttgaatcacaccaatcacgcctctctggttctaacctgctgtgaaccattcaaagcgttggccagcaatcaagatttggtggaac

SEQ ID NO: 119136 - DNA, 448 bp, Arabidopsis thaliana columbia
  unsure (1)..(448): unsure at all n locations
gcacgcgtacgtaagcttggatcctctagagctgccgccctgggggaaaggccgttttttttttttttttttttttttctgggtgttctttctttgctccttttcttttttttggtttttttggtttttggaaagagcaaagggggaaaaattcctaagaacccccttaattttaaacacctacctcgggccttatttattttgggggtgttggggccctcttgaccgggcggcccaagacaaaaaaaatgggggtggcgagtggggcggaaatcttttatacaacaagtgtgttgccggtactctccaaaaatgtcacccangattgggggggggccgccctggcattttttttgtttttggagaaggagggggagtttttgtggtgcgtatagaacctgtccacccccccctcgtcttttgggggaagaacaaggaccgcccgccc

SEQ ID NO: 119137 - DNA, 512 bp, Arabidopsis thaliana columbia
acactatagaagattcttgacgtcgcatgcacgcgtacgtaagcttggatcctctagagcggccgccctttgttttttttttttcttctgaaacacgagtacgggtctgttcttgaattgacataaatgctttcagcacgagtctcagaggagcaggtgcttcataaagttttgtctgctaccgataccaaacgctattatcgtatacggttgattacttatttacccacaggggtggagctgtggagatcattactgtacgattaaacctgagatttcatagtccataacacagtctggatgactcccaggtgccggttatttaccaacatcatatgcgctatccgatgagctccgtacgcgagcacctggtggaatttgttattccttaagagccttgtgaaatcattagataacagctcattaaccgatctgaaacgccaaggggtattgtccatggatcttttggactccagaacttgagggatatagcacggtctgtccccattctg

SEQ ID NO: 119138 - DNA, 500 bp, Arabidopsis thaliana columbia
taatacgactcatttagggaaagctggtacgcctgcaggtaccggtccggaattcccgggtcgacccacgcgtgcggggagagaatatatagataggggtggggtgaaacacgtcttaatacccgctttcggatgcataccccttagcgccctatccgttaacgtgcattgtctctgattcgggatatatggagatgtatccaagactttcttgctttcaatggacggaggggggtgaacctgtctagctctatatagagaaaggtgctgtcatcagaggatgtaatcaaggcgatatcgaaatgcagaatgtaacacgtttttcatctagggtggtcttctgattactcacatggcactggaagctttctacattggaggaaccccccaaactttgcataagaatttatatcctaggacacaacgggccgtaaacctatcaccacttgataaggtggggcttgtaattaaaaaaccctataagggaatgctgtgggatc

SEQ ID NO: 119139 - DNA, 286 bp, Arabidopsis thaliana columbia
cgggcgaccggagagcgagggcagacatagaaggagaatgaggcccaccgagggggcagggcgcgaccccaccagaacacggagccgacgcgcgaacgcccaccacaaacaccaccacacaccgaagaccgagcgggcaacaccccacccacccgatgaacccaagccaccgaaggccaagacaccgagcagcgagacggcaggagcggagagaaccaacgaagcgactcacaccaaaacgagcgagtacacgaccacccacccgagaggggggggcccagacgaa

SEQ ID NO: 119140 - DNA, 483 bp, Arabidopsis thaliana columbia
cactatccaattctatgacgtcgcatgcacgcgtacgtaagcttggatcctatagagcggccgccctttgtttttttttttttaagaatttgacagttaaaacttatcttcatgagaccaaacaatgagacacaaggaacaagtgcagggtaaacaaattgcattgtgtttgtgagagtattggtatatcatctatagtgcccctgtaatcttgccaaactcgtgatgggggggactcatatgatctcctagctatataaatcggattccatgtgcattcttggaatatcaaacttgtatactgactctagaggagacactgactaattactggatctttctaatgttgggacgtaacggtcccctgtaggataacccatacagcttgaatccttgattatatgcaaaataaaaggccctttccatgctttgaaacgattttttagctgtgtattaaattaagttaagcactgtgttgcgcct

SEQ ID NO: 119141 - DNA, 505 bp, Arabidopsis thaliana columbia
aattcgactcatatatagggaaagctggtacgcctgcaggtaccggtccggaattaccgggtcgacccacgcgttcgcccacgcgtacgtggacgcgtgggtagaaactcattttattgagcaccataacagtgatctattttctgacgaaagcgatccagctgcaacagaagtggcatacaaggcagtcaagcatagtgcagcattggtggctgcttgtatctccaggggggggcattctacttggaatgaaagtaatcatgggaaagttccatcgatatggtgttggaatcctccttttagggtccatcatgaagccaaacaagaccattgagctagaatggaataatgaatgcgagggaactggctctaacctcatatcactcggtgcaagatatgacccacatggaggctatctcatgggggaagggaattattctccaagtttagaagctagagtaacactaacaggaaggggcgattttagagtttaagcggtcggatg

SEQ ID NO: 119142 - DNA, 509 bp, Arabidopsis thaliana columbia
actatagaagagttatgacgtcgcctgcacgcgtacgtaagcttggatcctctagagcggccgcccttggggtttgttttttttttttttttttttttttttttttttttttttttttttttttttttttttttgggaccaaacccctttttgattttggaaaaatgttccacctaaacattaaaaaaacttttcttgagatgaaataaagcaaaaaattttcccgagggggggggaccctttgggccccctaaacaaccaaaattggaaaaatttttgtttcctttaatcaaaagccttttgactcccaaagttattcaaaaccagttcgatcttgggtttttttttttttgggcaataccccggggagaacaaccccaactgcaaggaaatccccaaagggtgctcctgggtgggattctaatccttttttgaagaagaacttttgggaacggtttttggggtaaaattctggggcctttttttaaaacttttggccgtgacccttt

SEQ ID NO: 119143 - DNA, 506 bp, Arabidopsis thaliana columbia
atgagcgtcacatgcacgcgtacgtaagcttggatcctctagagcggccgcccttggggtggtgttttttttttaaattatgtcttgttggtggtggtgtatagaattgggtctttgtggaggtagtgtgtgttttgtgaagaaaaaatgcagcccggggggtgttaccctttaaaaaaaaaaaagaagggggctagaaggggggcttttttttttggggggggacccccccttttgtaaaccccggaattgatttagtgggggcgaaccttttgggcagggggaggtccctctaggtcacgcctgggaggaagaggcgccagcggggggggggggcccgtggtttctttgggggaggggcgatgtggaaggggcccgcgggccgctggtcttctttcaagaagggccccctgtcgggggaaaaccgattgttgacggaggggttgaacggggggggggggggggcgttttgggataaagggtatatagggagggcggggggggga

SEQ ID NO: 119144 - DNA, 621 bp, Arabidopsis thaliana columbia
tgatattcgcggcttcgttcccgccgccggcgggggggggagtattgtccggctctcattctatcttatagggaaagccggtacgcctgcaggtacctgggccgcaattcccgggtcgacccacgcgtgcggtcgttttggtgagaaaacgatgaccgatggatttcgctataatggttttctctgggataggcgtaccccgttttgggctctcatatcccaccaccggcctacaccttccacattcatcccaccgttttgcgccggccgtttcaacagaacattttctgggggggggggggggacccaacccaagaaatggttaaaaacaatgatggcgggatcatggacttttatccaacgactgcccgcttatttgtccaaataacccatggtttacggcaaaattcttggctctcaaacctctttctttgttcgggagtgatggcttaccgccacctcacccgatgggcaatggtttgtctttctagggcgaaggatctctctcttatgaaaagatatggtctagtccccgcgaggggtgattttaacttttctaaggggacattcaattatcttgaattcgtgggggtcgctttcctcgccccgtggagaagattg

SEQ ID NO: 119145 - DNA, 497 bp, Arabidopsis thaliana columbia
actcgactcatctatggcaagcctggccgcctgcaggtgccgggccgctatacccgggtcgacccacgcgtgcgacaagatcaagatatcttaactatagccattaatgcaaagtttttttttctttctaatactcgaaatggctttcttaacgagttgtttcgctaccaagcatatcatgcagccgggcttttactacggaatcattatcaactcctaaagggggtgttgggtggtatagtagagaaaatcttaaaaagaagagatttctcgctccggtttggtacttgaacaagccatcttttcaagctttgcttaggaaagcataaaaagagttctggtttaatcatccaacgggcggcgttgagtttaccttgctacgaagttttcttattcactggcacttattaaaacttcgggattccataacatattcagagtctttttcccattctcttttttattggaaaaaaacacattggtaaaacagcactttc

SEQ ID NO: 119146 - DNA, 467 bp, Arabidopsis thaliana columbia
tggggcgggggggggagaaatcgccggctactactctactcctatagggaaagcccggccgcctgcaggtaccgggccgcaattcccgggtcgacccacgcgttcgctcattgagagtgaacaagactttgatttgctgccaaaggtggcgagttttctgggaaaatgcttatacgcccgaaaagaagttctctaacgtagagaccctcccatggcatgaacatgaaccttgggggggacactttttagaaggaggagggagaaccttctcccgacggttgaaacaaaaaccttttcaattccaccatgggccaaagttgtcaccattgtataagaagagaatcttttcctaacggagtcctgccaaacaacgaatacggaccacttcctcgggtggtggaccacacccaaaaaaactctgtccatgtaaatggggctaccactgtaaataatgagcctccctgtcc

SEQ ID NO: 119147 - DNA, 461 bp, Arabidopsis thaliana columbia
caggtctcctctacacctctatggagagctgtgccgcctgcgtgtgccgggccgcaatacacgggtcgacctacgcgttcgaaaacctcaaaaccctctgctatgtagacaagcaaccatgtaataggtttagacaacttcctcacttttctcctctcaataccaatcctcgcgtggcggaatatggctcagcagccctgctaactccaccgactgattaagatttcttcactggggtgtgatcggcatcggaatctcaatcaagatcgaatctacagctggatgcgctggagcttgctaccgtaacaggcggcttatgtggctatacctagtaggcatgcttatcatcatgcgtggtcttatcggataatcatcttcgatgacgcgggcacagatgaaggatacggacaaaccgttctcaacctgggttatactgactataaccccgaatatacctctac

SEQ ID NO: 119148 - DNA, 431 bp, Arabidopsis thaliana columbia
  unsure (1)..(431): unsure at all n locations
cagctctattctactcacatctagggaaagctggcacgcctgcaggtaccggtccgcaattcccgggtcgacccacgcgtccgctgagtacaccttccctcaagcagagaaggacaaggaatacttgaaggatccaagcaagtttgctgttgcttcagtagctgcggtgtctgctgatgcaggtggtggcgccccatctgctgctaaggtagaggagaaggaagagtccaacgaggagggactntggccgtgatttcggtttcttcaatgaacagtcgattttgaccgctaagatcttacctttntgtactggatcataagtgttgctttgcttctagtatggcggacctcaattgtcttggttgtagccaatccagcttgatgctactactgccttttatttatccgaaagatttcctttcttatggctg

SEQ ID NO: 119149 - DNA, 492 bp, Arabidopsis thaliana columbia
attcgactcaattagggaaagcctggccgcctgcaggtaccggtccggtattcccgggtcgacccacgcgtggcggaagatcaaaaaacgccgctcctcttcacacagagccatcttcttcaacttcacaggtgaaaaatgagtcatggtatcgcaacatcagctaagggaaagaaaaagggagtttccttcactatcgattgtttctaaacctgttgtttatcagggtgtgtgagaattcttctttagaccaattaattaaagagaggattggtgttggtggtaaacctgatgctcttggagattttttccttatcactcgtgagaggagcaagagcactgcctctgttaatggggcaatcctccaagaggtctcttaagtacttgacagagaagttcttagagaagcccagttggagggattggtttacagtgatttcagcaaacaatggccgaaacctctatgagttgggggagttaaacattgcctag

SEQ ID NO: 119150 - DNA, 513 bp, Arabidopsis thaliana columbia
  unsure (1)..(513): unsure at all n locations
taggacnnnnnnnnnnnnnnnnnnnnnnnnnnnnnnnnnnnnnnnnnnnnnnnnnnnnnnnnnnnnnnnnnnncttgggtttgggttttttaataatggatcacaggttttattgctaccaaaaaactacccacctgctcgaatctgttgtccacactatccatttccatcagaggctatttcctgtcttacataaaaaccccacgggaaacagcaattccaacactttattgtggtgttgctgcctctccatcgtggctatatataaaaagatagtgacatgcaaccgaatcagttaagttccaactcttctttccacctaaataaggcatcaccacaaagactatgcttattcttatctgtgggtgaccaactattggctaaacatacttgcctaagcccacccgctcaaatgattgtgtttaggccacctagaagacaacccagcttgtaatgcttagagagaccccttactagaaaacaatctgaaatttttttttttttccgggaggg

SEQ ID NO: 119151 - DNA, 508 bp, Arabidopsis thaliana columbia
  unsure (1)..(508): unsure at all n locations
nnnnnnnnnnnnnnnnnnnnnnnnnnnnnnnnnnnnnnnnnnnnnnnnnnnnnnnnnnnnnnnnnnnnnnccacgcgtgcgcggactctagagcagacccctatgcctactgcgaggattccgcaanaccagacatgcctatcactccttggactatctatatcctcagcgggtatacattcgacctttgacccacatcacaacaaacgccatgcctctcgccacttaaaggatgctggcactatctacgcggtcttctccaaaaaactgacacctcacaagatcttcacgttaaacaaattatgcacactcttcctcactatcaaactcccttacaaactaatatgcccatgctggattctcaggagaccaacgatatgctgttttacagacttgtcatggatcacgtctaggagtttctaccccttatctacactacaccgggacgggcaagccacccataattatggtagcctagccctttcaaccacaggggctcaaaatcagc

SEQ ID NO: 119152 - DNA, 523 bp, Arabidopsis thaliana columbia
caggtctaattctactcaattatggcaagcctggccgcctgcaggtaccggtacgctatacaccggtcgacccaggggtgcgggtcaccaacactaccacaccgtcagaaggtcttcataacgactgatattgcaacacgtgctatcaagcacggtgcttcagggcgttatggagtcacaccaacattcttggtcaatgcatatcaattgcaaatcaaagttacacattgtgcctaggcggggggaacgttagcagcttcctataaagaaagataatgcgtatatctctaggctaaaaagctctaaacctgggtgatcctgcttatcatatccgaactgctaaccaccacatttactctattgacgatcttgctcaaatgatctttagtctacatctgattaatgccaaatgcataaccataagacaggctaattccttaagctctaatccgaactggtgcttcatgaagtgctaagggtaacgctcatatcatccagatatcaggccatgatgggggaaccg

SEQ ID NO: 119153 - DNA, 501 bp, Arabidopsis thaliana columbia
  unsure (1)..(501): unsure at all n locations
gcannnnnnnnnnnnnnnnnnnnnnnnnnnnnnnnnnnnnnnnnnnnnnnnnnnnnnnnnnnnnnnnnnnccaggggtggcggcccgcgtccgaactaaggtaaccgtggttccatctgctgcagctctcgtcatcaaggcgttgaaggagccacagagagaccgtaagaaggtgaagaacattaagcataacggtaacatctctttcaatgatgtgactgatattgctaggaggtggggcctanatctattgctaaggagaaaagtagcactgtgaggganattcttggaacgtgtgtctctgtgggatgcactgtttatgggaaagaccctaaggatcttcaacaggagattcaccaaggtgagattgacattcctgagaattaaggaacaatggagtttttttttcttcttaggggaatccaaaaagcttctggtggaatctttcctcggttcccatattttggttttgtgtggaacttaactgttatgaatgttcac

SEQ ID NO: 119154 - DNA, 502 bp, Arabidopsis thaliana columbia
ctctagaagatctatgacgtcgcatgcacgcgtacgtaagcttggatcctctagagcggccgcccttgggggggggttttttttttttttcttttttaaaggagaaagaagacactaaaccggaaaatttgtcttttgggatcattacaaatttcaagaaaaataaaagtttgaatctcaaaaaaagagctgaagactaacccgaataggtaaccattctttcctggggtggtgggaaacttggccaaataaaaaaaaaaaaacttttttttttgtggaagaacaaatggggaccatcgatttgatggaacgccaagcaattgatatgtgaaaagaaagacccagggtggcttaagggttaaaataaccactctgttttttcttgggccgagcacaaaaaaaccccaggctctgctattccttaagtggccaaacttatttcccattatccggtgacccccggaagaaaaaacctccacctggccaagcggggttttgattt

SEQ ID NO: 119155 - DNA, 463 bp, Arabidopsis thaliana columbia
  unsure (1)..(463): unsure at all n locations
gacgtcgcctgcacgcgtaccgtagcttggatcctctagagcggccgccctgggggtgggctttttttttttttttttttttttttaagggggaactttttttttttttccttatctcacaaacacgcactaaaccgggacccgacgaaaggaaacaaaaagtccccccgacgctttaccaaaggcatacaccntcgcccctcttcctctttgggaagctggggccctaccaaggttttcctaaactaacaaaatcttttccggagttttcaaaaacccccccaaccggggccctcgcgcctgtttttcatgagtgtagaaaattgctgtatttacgccgcaactatggggcgagactctcgctttccagtcaggtacgcctcctccactccaccttccaccctcctgccccgctcggtgtgcactcctcacgcccctccaaaactaccccaccgcctggacg

SEQ ID NO: 119156 - DNA, 530 bp, Arabidopsis thaliana columbia
  unsure (1)..(530): unsure at all n locations
aattctgactcactctatgggaaagctctgccgcctgcatgtaccggtccccaattccccggtcgacccacgcgtgcgataacttgcaacttcccacaccaaagaagattccatcaaaggtctctctctcttcataaaccaatattttcacgtaagaaacaaactttttcctatcaaagactgtgtgcagagtcagaaattttcccagggaaaagaaaaactctggatggagctgcccacccncctattatcatcaaccaaaaatgatgacgactgcaaaactgaaccaaccacagttaccacatcatgtacagcttaagtctcctcgctttgactcacctaacactaaatcctgttactacaacaataacaatgttgtcacaggccccatccctttttgcaaaaactgcacagccttaactggacctaaaggccggggctcttcctaaacatcccccagacggtgcggcgaaccttcttaatatacaaccacacccatcccgggttctttctcgcgttctaaccaattg

SEQ ID NO: 119157 - DNA, 340 bp, Arabidopsis thaliana columbia
agctctaattctactcactcttgggaaagctggcacgcctgcaggtaccggtcccctattcccgggtcgacccacgggtgcgagcgcccgcatccgtgaaagaactgatgctcttgatgcctctggaaacccactgctgctattggaaagggatttgccattggctctgctgccctactctccttggctctctttggtgcctttctgagccgtgcagggatcctctccgtgggtgatggtgaccctaaagtgatcatgtggctaaaaattggtgccatgcttccttactggttctctgccatgactatgaagagggtgggaagtgcatctcttaagatgg

SEQ ID NO: 119158 - DNA, 134 bp, Arabidopsis thaliana columbia
cagctctattctactcaattatggaaagctcttccgcctgcatgtacctgtccccaattccccggtcgacctacgcgttcggttctttctcgaaaagagtaagagggttcttctcctccagagagttcacttca

SEQ ID NO: 119159 - DNA, 441 bp, Arabidopsis thaliana columbia
  unsure (1)..(441): unsure at all n locations
nnnnnnnnnnnnnnnnnnnnnnnnnnnnnnnnnnnnnnnnnnnnnnnnnnnnnnnnnnnnnnnnnnnnnnnnnnnncttnntttttttttttttttttttttttttttttttttttttttttttttttttttttttttttttttttttttttttttttttnngggggcaaaactttttgaaaaataaaaaaagccggtttaaacccataaaaaactcctcccttttagggtcaattttagggttttgcttccatggccaaggggacaaaaaaattttttatcaaaacttttgggtttcttgagggaaaagcgccttgaaattctttgttggggggccttttcccttgggttttgggggccggtcaaaaactttgaatttttgctcctcaaggtggggtgggtggaccaaaatttttgaaaaaacttgatgtttttgtaggt

SEQ ID NO: 119160 - DNA, 548 bp, Arabidopsis thaliana columbia
  unsure (1)..(548): unsure at all n locations
tgtgcttacttgctccactgtgtccctttttctcatggggggaaaggggctaaaacaaaaanctcctgttcctgctctactttcacccatatctttcaacctctatattaattgatcataacaaagaatccaaaacgttccagcggttacatcgacacctcacacagctcttcacactccacattcctctcattctccttacaattctcttttgcctcggggggggggagctccccacatctaagggtgtgtcttttcaaaaaaaatatcaaatccatcattgttttcgttattctcgtccttttaagtattctattaactacacatcactccatgcttccatcccctacagcaccttcgcatccttatactcgactatcgtacccgtctactaagtccctcttccgatattactgaatactgtcttcctctattcttcaagtcaattatctccaccctacaccctccacgcttattcaactagcgtaatatacggattccatataatataaactgttcttatcttcctatattaatcacaacatcct

SEQ ID NO: 119161 - DNA, 696 bp, Arabidopsis thaliana columbia
ggataataaaaacaccccccccatttacccgctcttccctaaattacctaacctaaaagcccattttaaacaaaagcaaagtgcatatttctcaccgccgatcccccccaacactttttttctcggggggtggtccccatccggggggcccaaaaaaaaataaaacatcttcttccgcttctgtcttctaaccctattcttatattcttatccacttctctcttacttaatcctatacctaaaacgactatttcggctcatacatctcatttattatagtcctacctttatatatttaaaaccgctaattcgcgccaatactcatcattttaattaaatttccacccaaacataattcctctactcagccactatgtacaatcccccatattcaatcaaaactaacactttacgtaatctccaccccgtctagtcaatcccaattatagctaaattatagaacataattccagtaaacaactaagaaataatttcattacatatcatacgtgtgttcatactcatttcatctactcttttcagagccacaaagtatatcatttggtctcacccccgatacaaaaacgaatctaactcataaatactgctattataaccgcactttactcttgtgactaatcactcgcacactcacttaccccgcacataaaattctgacatttctatagtaaaatt

SEQ ID NO: 119162 - DNA, 409 bp, Arabidopsis thaliana columbia
  unsure (1)..(409): unsure at all n locations
ctgtatccgttctttccccctgtccgcgcgatttcttcgtctctttttccgcttccggccccttccgcgccttttttttttggggggtgttgtgggccccccaccagggggcgcnctcaaaaaacaaacctcattctttttcgggccttctcctcccccttttctccccctgcgttactctttatcgttctattctcccggtgtcgcgcattgcctcgtgagcgcgctgcctcctcgttcgcatctcgcttcccgtcatcccgccgctcctgtgttacttcaccgccctccccgctcgcttgttgctaccgttgcgttcgcggggttgatggtgtgtgtggccggagtctccgtccgggctcatctcgccgcgcctgtcggcgcggcgcgccgctcctctcgtggttcg

SEQ ID NO: 119163 - DNA, 135 bp, Arabidopsis thaliana columbia
  unsure (1)..(135): unsure at all n locations
cgctccccccccccccccccccccacccccacatcccctcgtaatactccgcgcgaaccggngtcctctcaatatttgcgnaaagcaccaagacattccccgcaccttttacttcttcgcgtggcgccgatgatt

SEQ ID NO: 119164 - DNA, 680 bp, Arabidopsis thaliana columbia
  unsure (1)..(680): unsure at all n locations
cccaaaaaaaaaaaaanccaaaaccccccccccccctcctcccccctctctcctccccccacccacctcccctccctactacttccttaatccacaacacacacccacccctaccccctctacatcctcaccttacccaacacaccacataatccctaaacaacccatcaacaaacaccccccaaatcccactccctctcatcccacaccacccttccaaaccacccctctccccatattaccacaccacactctcctcacaattccccctcctcccccttcccctcaaactacccacctcacccaccatccatccccatctactactctaaacaacacctctcctattcatcacccacacatctccacccactaaataatcacataaaatctatccctcctacaacactactcaatctctccacccacctaaacctctcactcatcacctcccctaaaccaccttaacataatcatctcacccctctcatctcaatcccctcacccaatctcctctcaccctttctatcatcacacccctcttccccctcatctaaccactccctaaacatatcaccctcaacactcataccacactccaatcttctncaccccacacaatcccacaaaatcttaatcacaatcctttattatctccctcccactccaccctcaccata

SEQ ID NO: 119165 - DNA, 575 bp, Arabidopsis thaliana columbia
  unsure (1)..(575): unsure at all n locations
cccccccttgccaaccggcccccctttccaaaggggggttaggggtcattattaaaaacccccncccctccccccccccccccccccccccccccccccctcccttcttcccccccctcttctcccccccctcncccctctcccccccccccccccacctctcccccccctccccccccccttttttttttccggcttttgtttcggncnnccncggggggggccccaaaattactaaacccacaaancccctctccccgcgcgccgcccctttcctctctcctctctccctctcgtcccctgtggtttctctcccttcttgcccctttcgggtccctgtttctctctttatcccgtgctcgctctatttatactgaaattgtcgtccttatagtggttttgtttcttcccatcgtctttccccgttcgcttcttatctccgctccgagtttaattcctccgcctacctcgctcctagatcctctgctttcctctcgctcacggttaagtcgtccctcaacttatgcttcgtagctgtcacacgctggcgtgttgtgtgcagttctcgtgagttt

SEQ ID NO: 119166 - DNA, 257 bp, Arabidopsis thaliana columbia
  unsure (1)..(257): unsure at all n locations
gtccccccaaaaacacacaaaaattatccntttcccctttccccccccccccacaacttacacgtntnaccntncttnttaccccggccccnntaaaaaaacaacaccaaattttttttaaaaaaatttgaagggaaagcccccaaccacttccttgccaaggggttttatgcaggaccaaggaaaacccccggaaaacacctctcgaaacgttaaatttttcctttcgaaaattttaaacacccccccctcaatcc

SEQ ID NO: 119167 - DNA, 465 bp, Arabidopsis thaliana columbia
  unsure (1)..(465): unsure at all n locations
gaaaacttttccccctccgatacccttccccaaatctcccgccccccgggccggcctttaaaaaaaatctctttaataaaaaaaacaaaaaaaaatttaaaaaatatttttctttcaacctnatctttcatacttttnnattctctctttccccttccgccagaatcaaaaaatcctttcaattttctaattccgggagggggagacctttttttgagtgttcccntttataaataaaaaatacccgagaaannnaaccctctttccaagggcccccctccnccctttccctctattggtttcaaaccttttaattccttttaataaatttaaaaaattaaaaaaaaggggttcttctcaaaaaaaggggaactttcctccaaacacccaccgaaataattgggaagcgtttttttttatccccctccccaccccaccccttttttgcccctttcaatttttccc

SEQ ID NO: 119168 - DNA, 549 bp, Arabidopsis thaliana columbia
aaaatcaaaacgccccccgccccccccccccccctcccccccccccccccccctcccgcccgcccgcaccgccctctctcttctcccccctcccctccccccctcccgccccggtgcgccgtgctcccttctcctcccccccccccccttctctgcgcgcctctcctccccctccctcgccccgtctgtcccggtcccctcgtctgccccctccccccccccccctcccccccctcccctccgcgcgccctctctagcgtcaccgccacccccccctactaccccacaaggcctccacagcaaaccatactcccccccccccccctcctccgcaagcccccacccgccacactacaactagcctagccatcttctcgtccgcagcacgcccgcgctcgccccacaacaatcatacaagcagtccagcaaccccgtacttctcccggcgcgcgcacccccacttacgccaagcacgctgcgcctccacacgcacattctgacccgaccagactcacgcagtcatgatcgacgggcaccgctccccgaacc

SEQ ID NO: 119169 - DNA, 672 bp, Arabidopsis thaliana columbia
  unsure (1)..(672): unsure at all n locations
cccttttttcttgnggcggacccctttcccccccctttttattcccctntccccncttttatcnccncccnncccgcgcggaacctcctctttatatatatattttttttcttttttttttttgttaaccccgcattctcctcccccccctcccctttcttcccccctctttccccttngnggatgnngggtctagaggattgggtcggcccccctccccaccgtcccccccctcctctctttcattccctccttttctctttttttttccccccgttttgttttcccgccccccccccgcctccctttctcctcacacacctacctaatatcctcccactcccctcctcttctctcccccccttcttctctccccctcctctctctttttttgcgttccctcctntttctccggccccttngtctntctcctttcccccccctccctcctctctcctcntctcctccccccctctcgctcctcctcctccgctcccctctcaccctctccctgctccctccccctcctccctcctccctccctctctcccccccccacctctcctccaccctcttctctctctccccccctctcctctctctcttccgcctcctcccctcttcctcccccccccctntcttccttcctccctcctcctggcatttctccct

SEQ ID NO: 119170 - DNA, 330 bp, Arabidopsis thaliana columbia
  unsure (1)..(330): unsure at all n locations
ccccccggggggggccccaaaaaaaaataaacccaaaaaaccncccccccccccctcttccccccttcntcctccccctcccctctctcctccttcgcttcccctcgccgcggctcgcttgcccaaggaccccggccctgccccgccgagggttcgttgcgccgggcggggggcgccgcgcggttggctggtatcccgcagccgccgccgccgcctctcggcgcacgctcctcccgcgcgaccccatcttcctagctcccgctcgcctctccacttgggccacgcgtcttctctgtctctcgtcccctgcttctgcggccctctgaggcg

SEQ ID NO: 119171 - DNA, 618 bp, Arabidopsis thaliana columbia
  unsure (1)..(618): unsure at all n locations
ccccccccccccttttttacccccaatccttcttccccttttttttagggaaaacttgtccccccttccctataccccctcccccatttccccgntcccccgcggcccctcccgtttaaatttaattcccccccatttttnaagcctctcccctacccggaacctttcccaataaaacaccaccccttnattccccttcccaccaggaattcccttttattcccccccttttgcccccaaaattcttctacccccccccttttcttttttttcctcgcgggggtgtttgctgctctcnccccccggctttcttctctcccaaaaaaaaccccccccttcttttccccccccccttttttccccccccccctctcnnttccctctctctttcccctcaaccaccccaacctttaaataattccctccccccctcaacaccccaccacaccccttctctccttttcatctcccatcttccccccccttacacccctctctcttttacaacacacccccccccccctccccccctttttccccatttactccccccccccacccccccccacccctttcttctcctaaaacatcttcctcccccccacacccccccatccc

SEQ ID NO: 119172 - DNA, 606 bp, Arabidopsis thaliana columbia
  unsure (1)..(606): unsure at all n locations
agaagaaaacaccccccccaaattccgggnggggagaacccggccacgacagcacaagaaacccacccgccgctattcgcaacaggcggggaaaaccccgcccccaaaaacaaacgaccaaagccccagagacaacaccagaaaggcgacacgccgacaaacaccccgccccggccgccccgaaccgaccagccacgacaccccgccaaaaccccccccacccaagcgccagccgcccccgcccacgacgccccaccgcgccagcggtttttttaacacaccaggagagtgggcccaccccacccccccccccgccacgccagcaaacacaaacgacgacccacggaacgcccgccgacagaaaccccgccggccgccggcacgacgacaggaccacgcagaccccagacacagccccgcccccccacgacaccaccagacagccgccaccgaacaacccgcagcaacaaacgcaagaaaccatagcataagagcgcgccccgccaagagggacacacgagcccgccgacgcagcccccaccgcaacacgcacatcgcacacacgcgaaggaaccagaaaacgcaccacaacgcgcagaccggaaa

SEQ ID NO: 119173 - DNA, 361 bp, Arabidopsis thaliana columbia
  unsure (1)..(361): unsure at all n locations
tttatttatctataccaaacctttattctcaatttngtaacctattggtccttaacttgaattgtaaccccaaccaattttttcacctgggggggggggggcattttttgttttttccttaaaaaaaaaaaccctnttttnncngggcgggggccccccccttttaaaagattccaccttttcctacccccttcatttccatttaataattttttttatagtcccacctaaattcatttccctgccccgtttttttaccaacttgaaatttagaaaaccccttcgctttcccccaatttatatcccttttaaaaaaattttcttctttttcccagtttggcctaaaaaaaaaaaaaacccc

SEQ ID NO: 119174 - DNA, 271 bp, Arabidopsis thaliana columbia
atctgattggtaatatcaaacctcacctttcaaccaaaggggcgagctttcttatcatccctcttttttaaaagtggtgggggcttatttccgtgggtccaaaaaaaaaaaaaacttccattgcttttcccttcacccctcaaccaattcaatcattattcttcaatcatattttaaaaaaaaattgcctggttttcctttttttcacatatcttaaaaaagagatttttcttttaccaaaaaaaaaaattaaattttttaaaggaaacca

SEQ ID NO: 119175 - DNA, 759 bp, Arabidopsis thaliana columbia
  unsure (1)..(759): unsure at all n locations
ttttttttatttaaagagaaaaccaagtgtgtccatcaaatgaggatcantantacaacccattctacaagtgagaaaaaaaaaaccacaccaaaaaaggggtgaccccggcaatcagtttttcaaaaggggggggataaatcttgtttgtaacaacataaatccccaacctacctttaaaactcattgtccatttaaaggggggagccccaccattaacccccttaatttggcctttatttacggttaaagagcgttcctataaaagacttcctccttttaaaaaataatttttaaccccaggttctcattttccttttttggtgaacctccctggaatttagaggttttctaactaaaaaaacacccccttttcgggatataaaatttttttttcccaagggtggggggccaaccagaatgcatcccaatttttaatggtgtttggtgttggccctaaaaaatttccggtatagcctcaaaaaaaccttttccccccaagggggaccaaactcctctatttattcctaggggagatagcttttctttttgttctccacaaacacaggtcctgaaggggggtagactttttaacttttccccctgcccgagggcccccacaagccctttttaagggatccctgttccaggcagacaaaaaataaccccttttaacaccctttttgtgggggggaaaaaaaaacctggtatcccctctaacttatgggggggggcgctctcgggagttctttcttaacc

SEQ ID NO: 119176 - DNA, 434 bp, Arabidopsis thaliana columbia
  unsure (1)..(434): unsure at all n locations
attaaattccctctccccatttaaattttttcaaaacctttgaagaaacctcctangtanttaatctttggctcctgccccgccccatcccattntttttatcacaaatcctccaacctaaaaacctctttcctttttaaccccaaatcttttcttcacctcgggttgtaggtttcncaaattctgatggggaagtaaaaaattataaacttccaaaaaattttcatgggaagtttttcaccccccctcctcgaaaccctcctttcttaataaatcctaaaattcccccctctttccctctggtttccctttaatctccataaaatatttcgcaaccccccccaaacaaaaaaccctacccatcaaccttccttattaaatcaaccaataagcaggtggaaaggtcctcaaaaagtttcaattccccccacccc

SEQ ID NO: 119177 - DNA, 666 bp, Arabidopsis thaliana columbia
ggggggcaaaaaaaaaagggaaaatcgcccttcccgtccccccttctctccgccccccctggggtgccccccctaaccaccggcgcttgccaaaccccctttttcccaccagccacacaccccagggaagccacccccctcccccccatcacccccccactcaccacccccccccccacccacccacgaccgctccccagtccatccgacctcacccctaaccacccccgccccgctatcaacaccccccctacccaccctcccaacactcatacgacccgccaccccataagcccaccccagactcacctcgaattccccccacccactaccctccgacctaacccctcctgcaccccaaccaccactccacacgccaacacgcaacacacccacacatcaaacgccccgcgcaccccgctgcgtcactacaccaaccgctacttagccccctacacctccgcaccagagacccaccccccatctccctcccccgccccactcaccgccgcctggatgacccgatcgccctgcgccgcccggctcgcgaaggctgggccccgcccgcgccgccgaccgaagccaaacctcatccccgccgtacctgggccccaaccaacccatcccgcacacgccgcccagcaaactaacacgcgcgcacccctc

SEQ ID NO: 119178 - DNA, 719 bp, Arabidopsis thaliana columbia
  unsure (1)..(719): unsure at all n locations
aaaaccgccccccccgcccgccccccccccgccggccccccccccccctacctcccccacccaaaaaaaacacgcctgccacaacaacccacacatgcacacgtacagaaccaatcaccgcccacccccggccccacaccacgacaccacaacatactccccacccccacacacgaccccacgcaccaacgacacccacccgccccccgcgccgaacacgcccccaccgcagcgaaacaacaacagcctgcgcgccggcaccccaacccccaccccgcaacacatacccaacccgccaccacaactccagcgaaacaccacccaacccccgccgcaccccacgccccaccacaccgaccgcgcaggcgctcgcgcncccgaccaccgcccccaccaccccccaccagaaccgcccccgccgacccgcccacccgcaccgccgtgccagcacccccacgcgcgccccacacccgcccccgccacccgcctacgcagcccaccacgcgcacacgccaccctcacgccaccaacctcctcgacccaccgcaccccgcgcgccacaacccaccgcaccaccacacccgcgcacacccccgccgaacacagacgcccaccagccgcgacacaccgaccgataactacccgacccaccaccgcgcaacccacaccgccgccacccccgccccccccacaagccacaacaccccccccaccacccg

SEQ ID NO: 119179 - DNA, 308 bp, Arabidopsis thaliana columbia
ccccagacttaattcgactattatatggaaagcttgtacgcctgcaggtaccggtcccgaattccacggtccacgcggggcggggcgccctaaactatacaccgcgcttccagatcttacaccaagatgaatcagcatatgccttttatttatattcagctctacacctatcaaattggccgggctatgaattatctacatcaaggggggtggagtgtctcacccaaactgggggggggaaaatctattgggtcataatgtaacaaatgaattaaagatttgccagtttgggaaccccaaaatgctta

SEQ ID NO: 119180 - DNA, 710 bp, Arabidopsis thaliana columbia
  unsure (1)..(710): unsure at all n locations
cccccccccggggggggcggccccgcgccaccccccccccccccgccgccaggaattaacccggagaaacaccgttctgncccattntcccccccgccaacccccccccccccccggcggnagnnnacccgcgngcgnagcctttcccccncccncgggggggcaaacccgccccccaaaaaaacaacaaccacagccccccccgcccaccacccccccaccgccacgcccccccccgcgtcatacgcccncccgtcaccgccacgcacgcgcccccccccccgaccgacccaaccccgcgctccngccgtgaaccgagcccgacccaccccacacccccacacaacctcttttttccacaccgcgactagtttgggcagcccacccccccccaggccccccccccaaaatacaagaaccccccccacccctcgcccccttccggccccccgcaccccccacccgccccccgctcgccacaagacgagcagcgccacaacgccccacagggcacccaccaccccccgacgccccaccgccccacggccgccccccgcccccacgacccgtcaccacccaccaccgccccagcccgccccagcccgacaccagacagccccagcgcacaagcggcctcacccccgccaggcccgccacgcgcacacacacgcgccaacccccccaccccgccgcacccccccccccccccg

SEQ ID NO: 119181 - DNA, 414 bp, Arabidopsis thaliana columbia
  unsure (1)..(414): unsure at all n locations
caaactttttnacaaacctaccattttttctaaaaaattctctcaattccctcaaaaaaggttcatacctcttccctaactttnaaagatggaaagctttcccttttgaagaatttcctctttttaaccgagggggggaaaaaaccttatggggtttttaaaaaaaaaaatacatttattttttccccttatgaaataaaccctaaatttaagttcccctgccttcctttttttaaaaggctttcattttcttcctaaaatttaaaattaccttaaaattactgcatcattaattttcccttattataaaattgcccctaaaaaattcttttttttaaaccccattcgccctaaaaacataattctttctttcttattattaaagtttcccccaaaaaactaaaaatatttttt

SEQ ID NO: 119182 - DNA, 256 bp, Arabidopsis thaliana columbia
  unsure (1)..(256): unsure at all n locations
aattcccgggtcnaccggggcgtgcggcgagaatttatccttcatggggggttgttctttttcggtggatttctccaagcgcctagctgaaaaatctcttgaacaagggggaaatgccgggtttgggggccactgaatcctnctcccccttcgtttacgggagactgggaagttcctttttagggcgggggggctcccaatgtggcgttccatttgacgagaaaccacttcggatggggttgggctcatggggaaa

SEQ ID NO: 119183 - DNA, 432 bp, Arabidopsis thaliana columbia
  unsure (1)..(432): unsure at all n locations
tttatggaaagcttgcccccttcataacctgccccattctcgtcaccggggcgggcggccaaataacaaactnaatncccttgcttgagttcaattgtctctaacagaaggccccccctaagaaagaacggccaggaaagaaacttataatgcccttaagacggcggacaacaattccataaacaagtcggggggggggttttntatgtggatataataaaaaacctaatccaatgggtgtttttaattgaaccactcacccttggctctcgggtttctcctttttttgcgttttttttcccctttctgaaaaagttatattataaatcttcttttcccgcgccgctcctctttttaaagggggagaacgtctttcattttcaaaaaaacattaaccccctccagcgagggtgtttttctctttttccccca

SEQ ID NO: 119184 - DNA, 570 bp, Arabidopsis thaliana columbia
  unsure (1)..(570): unsure at all n locations
ccccccctccttccctccccctatctttttgggggaacccttttccccccttcccctttccctttccccttttttcccngtcccgcgcgtcctgccaaanaatcctactattccccttttttttttttcttctccttcccctttttcccccctcccccctatttccttatcccctcccnttccttcccttttttttttntttctcccaccccccccctttccccatttaaccccttaaaaattcaaattttttttacccccgggtggtatgctgcccccccccctttgtgtggcncccttcaaacacaaaattcgccttttttccccccccttttttttccccccccccccttgttnccccccccccttttttttgngccacttgctnnaaaccaaccccaccccttcccccctctttttccctccttaaaattttccctttcccttccaaaacccctctcttccacctgttcctttccatctcacccaccttctcctttctttccttttttcgcccccgcccccccctttctttctccttcccccctccccccgtcctctctccccttc

SEQ ID NO: 119185 - DNA, 440 bp, Arabidopsis thaliana columbia
accaagccctaattctactctatatatgacaaaccttgcacgcctacatatacctttccccaatttaccggtcgaccgattcgtgcttaataaatatacataacaaattccgatatccttcttcctttcactaccacataacctcttttccttaacgtattctccgaaaactctctattctttgactacaaccatatcaactattatacacaagatcaattatttttaagaggggacggctacaacacagaaataataactctaaaactcatcatcttgcttacctaaaaaccacactttctaatcttcctacttaccttcttccaccaactaccaaagattaccggcaaaaatccttatataattatctaattaaactaacaacccatatcttaaacttggacttcttccaatttctttcggtttaaaaattctaccta

SEQ ID NO: 119186 - DNA, 320 bp, Arabidopsis thaliana columbia
cccccacatctctatacttttaaacttttaggacaaagcttttccccctcccagtacctttccccatttccccggggggccgggtgcttccaaaaacctcaaaaactttcatcccacaccccccaaaaaaccgattccactctcttccttccctaacctcttgctctctttctcaaatttcaaacggtttttcaagaaactccctccacccccaaaaatctctctccccttctcatctttcttccatttccactgtgggggggctttataaaaccgagggccttcttttaataaaaaaaaacttaaacaatcacccccaa

SEQ ID NO: 119187 - DNA, 724 bp, Arabidopsis thaliana columbia
  unsure (1)..(724): unsure at all n locations
tgtctcttccccattctctagggttttcaagctcaacctcaagctccactacgatctcttcttcttctctaatctcaggtgaaagatgcaaggggtgattccatccttcttttccgggggggaggggntaaaagggggtggccttaaaaaataaaaacggtgattaacccggcaattccacccttctgtggttttgttcaggctcctgaatcaacttaaccttccacgtatgggaggaatctggattctaataccacaactatttcccagtgtcaataaatccaaaagcgaaagggctgagggatcttggctttggtgaactactgaacacccctgtttataggccttgtaaaaccataacaccacaacatgggtgggccctggtggttgaaaagcctggtgaccaaaacctccttgttggtttatttcagagagaaatttttacggaagatatttggcaggggatatcatccaataacaaagggtggaacattttagctgaaaaaaaatacttttcctgggacccccgaaccacagggttcgttctttcacctgataacaaaaccaatcagcttttcccgaatcaaaaacaaggcttggtgggatgggtccctagaaattttcccccgggggtcattacctagaagggcctnaccccaatgcgttattggggggtgcctactttagaatggaaaaaaagcccttgtggccccggtttggctct

SEQ ID NO: 119188 - DNA, 576 bp, Arabidopsis thaliana columbia
  unsure (1)..(576): unsure at all n locations
cttcccctcttacttccctttccgtccccctctcttactctnctaccattcctttctctctaaaaccccctagttcctttttcctagactcctccgcttttaatccctttaccactcgttttctaagtgcgcctccctctcttaccataaagttatcaccctaaccccctacaacccttcccccaaaaccacccctctattcttttcaacattaccctcccctttcctccaattttttatctcacgcttttatcccaacttatactcttttattccaaaaactccctccttcccccttctattttatttttcctttaaaattcattccccccactacatccccgtccccctttaactcccatccccttctttttcattccccccctaaaaaacttccccccacctcctttatttcccccccttttataacctccctttttttccaaaaacattttttccatccctttctttttttttattaaatccccccaaaaaaactttttttttcgcccctttttcctcccaataaaacttcttcccttttttaacccccttccctcgaaataatcaaacggc

SEQ ID NO: 119189 - DNA, 253 bp, Arabidopsis thaliana columbia
  unsure (1)..(253): unsure at all n locations
ccttaatacttactcctcacctctaactgatcttaacgccgcttttttttttatttttctttttaaacaccaaataattccttaatataatcaacggttacttaatactcacagttttcaacttcaaaaccacattcttacgagggtcctnctttattactaaaaataatctttgtgtataaactcttctaaccctaataacaccccttaagctatcttttttattccttccccctctattgttccccccaaa

SEQ ID NO: 119190 - DNA, 316 bp, Arabidopsis thaliana columbia
acgtaagcttggatcctctatagcggccgcgcttgtttttttttttttttttttttttttaatccagtatatatcaaatttatcatttatcttttagttcagcattttacaaggggctcttgtatttcttatgttgggagccacaagttacaatacctttggtccaaaaattatttagagaggggaaggacacaccaagaagcaccctttaaaaagttctttacaaattcatactttcttgagtaataattgcataagaaaataaacctatctctctattttatataaataagaggaaacacttccactttgtaaa

SEQ ID NO: 119191 - DNA, 308 bp, Arabidopsis thaliana columbia
  unsure (1)..(308): unsure at all n locations
ctacgtaagcttggatcctctatagcggccgggctttgtttttttttttttacctgaaaactggtggagagagatatataataaaagagcccataaaagaactcagacaacaaacatcttaagtttattaagtttccacaacaaacttagaaacacactcctttacatggcttctccaccagggaggaatatgcaatgaaacctccacaaaaaattatccccaacttttggtaaaaatttctaaaaaaatccctttcacgattggaagacgggttcnaacctcactttttccaccaatgcaaaaaatc

SEQ ID NO: 119192 - DNA, 849 bp, Arabidopsis thaliana columbia
ttagggaaagctggtccgcctgcaggtaccggtcccgaattcccgggtcgggccgcggcgttctcccacacatacgatcttatttctccaagatgtggagatttcgtgtgcatgggaccaaggcgacatctcctgttgtataaaaacatgtctcagaggcagaacgtgaggataaagaaattgctgatgtatatgggggcagccggaggatcatggttgggcggcaagaaaaaatgcttcccaccaacagttgcagatacggaaacttcgatcagtgttaccttaaccgctaacgtaacatcaagctcatccgtgctgatggaattctcaactatgggccggggactaatgggggggatgaaggcgtacaagtgaaaaactggctggttcttctttcccggcaaatctaaaccgatgcgtataaaaataggagctgagaaatgggtttcctttttcttttggtcatcacttaaattgaggggtgtaggaaaccggttctgcaaacgggcgtgtgttcctgctctggcaaaggctcgtttttttaaaacgttttcctcggaagggaacaacctcggttgtcgctacccttcaaagtccccttttttgggtttggcttccgggcaaaacttttaaggagcgcccccgccttaccttttgtggggggggatcccccctatttggagacgggggttaagcatttcattccgccacggctgaagaaaaaaacaaacttggggtttccgttcttttcttttcctatcggaaaacttaaaaacttcgttttacttcgtggagggcttcttggcccgttctccgctttttgggggcccgaagcttcattcccttttt

SEQ ID NO: 119193 - DNA, 340 bp, Arabidopsis thaliana columbia
  unsure (1)..(340): unsure at all n locations
ctatgacgccgcatgcacgcgtacgtaagcttggatcctctagagcggccgcgctttttttttttttttaagagaaatagaagaatggcattaagtgttatggtacacgagttatagttgaagaaatgatgtcacacaccaaacacaggaaaaccaaaagggcaagagcttttttagcaagttaaaaatcaatttcttctgggggggcattcccaatagctgntncngagataaaaaaaaaaaaaannnntctagactgtgtctagagagtttcactttcaaaaaataaaattaagaaaaaaaccatgtcgagattctgacaaaacgatgaacaaaaact

SEQ ID NO: 119194 - DNA, 644 bp, Arabidopsis thaliana columbia
  unsure (1)..(644): unsure at all n locations
ctctaattcaattcactatagggaaggctggcacgcctgcaggtgccgggccggtattcccgggtggagcggggcgtccttccacgcgtaacgccactcgtcctgccacgcgttcgaaaaaaataaaaatcgcacgtggcttcttcttcttctctctcgcaacanatctgtattgggggtttttgagaaatcttccttgcgtgattttcaaagggagttngggtttnacttcgggggggcgcttaaagaaataaaactcccacccacccttgatttcttgattccatcaccaacggcttctggctacttcagctccaacccgggcagggattctccgataaaagaaagggacgaacagggccgggccaaattgaaacaggagcaggctagggctttngacaggaaccatggcctttctcatgggggcgatgattaacaggggggttaggggggaactggaatcccttcgaaaaatggggagggaaaagcctgatcaaagagatccttccggtgcggcggaaatttacttgaggtaaccatgggacccctcgcctgagggctttattggccccttcttataccctaacaggttcttggggggtgattcaattctattttagcagaactttgaggggagggggggt

SEQ ID NO: 119195 - DNA, 315 bp, Arabidopsis thaliana columbia
  unsure (1)..(315): unsure at all n locations
gacactatagaattactatgacgtcgcatgcacgcgtacgtaagcttggatcctctagagcggccgcccttgggttttttttttttttttttttttttttttttttttttngaggcctcataaaagcaaaggtgtaaaacttccataggaccataacatagccataaatattcaattttcttgaattaacaataaatggactgtgtcaatgaaacccaggtatgaaactgaatgaaacatagggtcctttttttatatacacgaaacccaacaggtgctttttttatgtatctaggtatggcataaacaacaaca

SEQ ID NO: 119196 - DNA, 706 bp, Arabidopsis thaliana columbia
  unsure (1)..(706): unsure at all n locations
acccactctctctactacttatacacttcccctcattccttccctttccccntcgcccaccgtcgattatttttttatgaatttgaccactaaccaccatttgcatttatctaactaaacgcaatattctgattttataactatcagtaaaacttttataagtgcgcctaagatccccgtacattcaaatacattttaaattccatcccatcacccttntcctttaatatggcaaacccccaaccttacctccctctttccctaacctcccccttacatcctcctctctaacacctatgctctttaacttcacatttttcttggtttccccataaaccaccctctcctacacttattcctcctccacccctttaacttaccaaacctttattacaaaccccttatttctcttaacctaccccacccctttttttcaactaaaaacttccctatcttccttcttaaaagactttcctctaaaaaaatacctccttaaggatatactaccttcacttcttcttttccccactaaacctaaattccacttttcctcttctttataaaacccctcttaccccccccttttctcccctccccctctttccttatctaaaatccttttttttttttcccaaaaccccccttctttcaccctcaacgtcaaaaacacaaccaacacccccctttatccctctccccctcttct

SEQ ID NO: 119197 - DNA, 521 bp, Arabidopsis thaliana columbia
  unsure (1)..(521): unsure at all n locations
nnnnnnnnnnnnnnnnnnnnnnnnnnnnnnnnnnnnnnnnnnnnnnnnnnnnnnnnnnnnnnnnnnnnnnnnnnnccaggcgtccgcccacgcgtacgtttattcctacaacttgcaaaaagctaaaccataaaccttgaaccttatcttctctgatctgaaatctgcataaaggaccaagtatgaagaaccttcttcttcttacgcttgttcttccaaaggggggggacgttctcaggaggagcttcctttatccactccggcatgaccacaccatagcgcgccggacccttacgacactgatggngcgacaggtcgcgaagatccggagatccctctgcttctatcatcaaagcggtaaatggatggctcgatcaaagcattctggctaagactacgaagctccatagcgttattaagatgctcaaaaagttcatccgtttctctaacccctcccagatatcagacccatgagggagcgtcaatttaatgagatcctctaaggagaccgcggctttcgc

SEQ ID NO: 119198 - DNA, 368 bp, Arabidopsis thaliana columbia
ggcttgaattgaactgacactatagctagactatgacctcgcatgcacgcgtacgtaagcttggatcctctagagcggccgccctttttttttttttttttagcaatagcttattccatcacaataacatatataatgtgcgatcttttcctcaaatttttgatacaagtgtaatgatacccttaatgggtatcttcttaatgctacataagttagtcaactgcattacagaggatgtttttagttcaatacaaagtggtacctcgcatctacatggctctcaacatcccaaaggaacgacccgaaagtaactgcctccaagacgagcctcttcattccaccgaagctgatctttatctgttcgtcct

SEQ ID NO: 119199 - DNA, 392 bp, Arabidopsis thaliana columbia
  unsure (1)..(392): unsure at all n locations
gcgccgcatgcacgcgtacgtaagcttcggatcctccgttnagcggccgcgttggggctctcttctgttgtgcgcgcggcgcgttggggtggagtacccaagtggagtcccttgtgaaagagagacccctctcgagggggccggtgtatggtctttcgatcgtgacgacgccggggagcgtgtacagggcccgttatnggnggggggcgggccggcccttttcttctctcggggggggggggccagtaatcttgtccgttggatccccagaaacgagggcgggggcggtgttggccggccctggcgggcgcccggggggagcggcccgagccgggtgccgcctcgtgtcgctgcggtcgaccgccgtccgggcgcggtggggcccccgggtt

SEQ ID NO: 119200 - DNA, 876 bp, Arabidopsis thaliana columbia
tctaatacgactcactatagggacaagctggcacgcctgcaggtaccggtccggtattcccgggtcgacccacgcgtccgtacggctgcgagaagacgacagaagggggcgaagaacgaagtagacgaagacgatgaagaaaggtggattcagcaataatctcaagctcgcaattcctgttgctggcgagcaatccatcaccatttcctgctggggcgggacgtttaaggatggagatctacaaagttaacaaggatggagttcgaatcattcctcaattggagcctgaagtcctgtctccaattaagccacctgatgatcagctgagcttgtcggatttggatatggttaaagtcattggcaaaggaagtagtggtgttgttcagctaggtcaccacaaatggactggccaatttttcgccttggaggtgattcacctaattattgatgaagcaattcgcaaggcatttgcccagagctcaaattaatcaatcgcgcagtggccaaatcttgttacctcgcaccagtcattttatgaccatggcgcattctcacttatcttggagacatggccggaggatcttatcagactttttaagtcaagtaaagcctccctgactctattttttgcctctttaacaagggcttaaggttaaccatcttatcacgaaggcaataatcctcgggactgaacccatccatctgtcgtcaccccagggagaagcaatatactggctctgtggggtaccgaataacaacccgcaggttagaaaccattggggggcttcaaatatgctcaaaaaaacgtggacaaaccggataaagggaatgggctgggtagatctcaaggcccagaagtcctttccctcaaaaaga

SEQ ID NO: 119201 - DNA, 895 bp, Arabidopsis thaliana columbia
  unsure (1)..(895): unsure at all n locations
nnnnnnnnnnnnnnnnnnnnnnnnnnnnnnnnnnnnnnnnnnnnnnnnnnnnnnnnnnnnnnnnnnnnnnnnnnnnnccacgcgtccgtacggctgcaagacgacagaagggggaaattgagagagagtacaacactaaattagtaaaatggctgcataagcatcaaatctagttgctcttcttctcttttagcttcttctgctactatctatctcctcacaggtgagactaggcgaggccaaactcaacctacataaacaatttggcgttggattgcgtttcccatccctgtcctcctccttctaatcgttccatggcccctccaatgtgttgaccgccttctacatcacacaaaggacaagggccataaacaaaatcatacaagtaaccggaaagaagtgatcaaaatttcatacccaaaaaaagaagggatcaggattccatatggagaaacaaggttgcgtaagaagaagggtcngatttttctttattgggtcaagcttttacaaggtgactatttaaattatacaacttattgcgactatacaggtgaaccttttcaaagctgttggattttaaacatatattgggattatatgaatagggggattccttaatataaggcctttaaaaaaatgaccatggcaaaaaaataaaaaaacaaaaaaagcggcgcttaaaggaccacgttcctccgggctccgagttattttttttttgggacctaattaattacggccggcgtttacaggggaatggaaaaccgagttccaaataagggctgaaaaatcccttcgccgggggtaaaggaaaggcccccatccttcccaatgccacctagggaagggccccctgtcggataagcggggggggtgaccgcgggcctccttcccc

SEQ ID NO: 119202 - DNA, 188 bp, Arabidopsis thaliana columbia
gctttaatccttttagcggccgcttttttcctttaatttaattttttaaaacataatcttcctccatcataaattatcccacatgcttacaatctaactttataatcgtttataaccccatctttttaaatacttttttctaaaataaaaaccccaacgctccttctatacaggagagcattcttaaa

SEQ ID NO: 119203 - DNA, 455 bp, Arabidopsis thaliana columbia
aagcttgcacgcctgcatgtaccggtcccctattacccgggcgacccacgcgtccacccacacttccgtacggatgctagaagacataatgtgtccgtaatcatcattggacgtaatgtccatactctcatcccataaaaaactctcctgaagatccgagaaatccattctctttacacttggggtgattctaaagggctcaaaaaaaaactcttttagtttctcatggcttcacaactgttagcttcatccagctcattaccatactcatccaattaaatactgttttaacttgctccgaaaaattattttctttgcccattcaccggatcagcttatttttttacatactccctaccctgacataattaattcttttcacctttcgtctcccattcccgctagagacattcaactgtccatttctcccgcttatggttccccaccaattattc

SEQ ID NO: 119204 - DNA, 345 bp, Arabidopsis thaliana columbia
atacgattcactatagggacagctggtacgcctgcaggtaccgggccggtattcccgggtcggagccacgcgttcggccacgcttccgtacggctgcgagaagactacataagggcgggtgaccgagaattaggcttccattccggaaggagagccaaagcgttcgtcctttatcattccctccgtgatttgccagatcccacttcttcttaggggggggggggccactatagctggtgctctaaataaaaataccacaagtggtgtcgccacaaaatctccacctcgtctctagtgaaaataccgcaatatgagcgaaccccagtatccgttttatcctttata

SEQ ID NO: 119205 - DNA, 277 bp, Arabidopsis thaliana columbia
cttgacgccgcatgcacgcgtacgtaagcttggatcctctagagcggccggtggggttttttatttttttctttttttttgacatactcaacatgaactttattactcagttgtgcagaaaccaacgggtttaatacggaataatgaactggtatccaaataaggagttattggctttctcaaaggggttaatttttattgtggggtaaaacctgtgatgggcactaaaaaatgacgatgggttaatcttgtgaatgcgtaatcttcactgggattt

SEQ ID NO: 119206 - DNA, 833 bp, Arabidopsis thaliana columbia
  unsure (1)..(833): unsure at all n locations
aaagacaaagacaccagagggagggggagacgaccagcgcgcgcccgaagccgcccccctccaaaagaaagccggcccgagaccgccggagaagggcgagcgacccggcagacgaccccggcccggcagcttctcctccaaagggggagggacccgagccaggggggngggaagaaaaaagcccccaggagcggaaggggggagagcagagcggcggggccgcccgaacggagcaagacgcaggaggggaggacggagcccgaagagggaggggccgcgcgccccagggacgcgcggggaggggaagcccgaggggcacagccaggaggagcacacgccggggccggccccgcacgcccggggccggagccggcggaccccccggccacagccggcccccgcggaccggcgcccgcagggggcgggcagcccgacgggaggcggccggcgccgagccagggcaagggagggagggcggaggcaggccagcccagggccgcccaagcacggcccgacggagcacccagcggccgggcgggcgggaaggggcgggagggcggaagcagagcccggaggcgaccggcgagggcacggagagagagcggcggagcagccgaccaggagcgcaggcagcgcacacgacgagagccagcaggcggcgaagcccgcgagacaccgagaagaggccgtagagaggccgcgcaagggcagccgcggcgccacccagacccgcagcgacaagcagcaggagagagccgaacgagcaagaagcggaaaagacagaggggaagacgaacaccagagcggcagcgaacgggcggaggagaggcgcg

SEQ ID NO: 119207 - DNA, 866 bp, Arabidopsis thaliana columbia
  unsure (1)..(866): unsure at all n locations
nnnnnnnnnnnnnnnnnnnnnnnnnnnnnnnnnnnnnnnnnnnnnnnnnnnnnnnnnnnnnnnnnnnnnnnnnnnnnccacgcgtccgacggctgcgagaagacgacagaaggggagagacaagacaagcaaagcaacactttcactaatcctctaatggcagaagacaagatcttaaagaagactccggcggcgaagaagccgcgaaaaccgaaaaccaggggggatgctccatacttgcagatgataaaagaggctttgatggtcctgaaagagaagaacggatcaagcccttatgctatagctaagaagatagaggagaaacacangtctttacttccagagagtttccgtaaaacactttctctacagcttaaaaactctgttgctaaaggtaagctcgtgaagatcagagcctcttacaagctctcagataccaccaagatgataacgaggcagcaggacaagaagaataggatgaatatgaagcaagaagataaagagatcacaaagaggactaggtcttcttcgacaaggcctaaaaagactgggtctgtgaaccaacaagataagaagaggaaaagggaagaagcgagataacctaaggtctatcaaaccttcagttggaaaaaagaaggccatgaagcttccgctgcttgatcactgaggaagaggaaatgaaatggaactgttgtgaatataaaaataaggtttttggttgcctctgaaaaggatgatgacctttgtttggttggcggggctctttgggcgaagagtaagaggtcttcggtgttacccggccaccagggaaaaccttaaaaatggatttacttgcgggaaaaaaaaaaaaaaaaaaaaaaaggggc

SEQ ID NO: 119208 - DNA, 378 bp, Arabidopsis thaliana columbia
gctatgacgtcgcatgcacgcgtgcgtaagcttggatcctctagagcgggcggttaggggttctttattatttcttcctcttcgagcgagaaactttagtagtacgagtattaacccatggagtaaataagaaactcgctttaatagtccatcggttaaactcggagtctttcctttttgttcctcttatttcacccttgagattattctcggaggggagaggcggggagaacccagaaaatccggctaacaaaataacctggggaacgtttgctgcacttaaaagagagggagggggggattttccccaggcccagaggggggaaccacacctccctttgggcttagcggagaacctattttaaggtattcactgtt

SEQ ID NO: 119209 - DNA, 358 bp, Arabidopsis thaliana columbia
  unsure (1)..(358): unsure at all n locations
ctatgacgtcgcatgcacgcgtacgtaagcttggatcctctagagacggccgcgttttgggtttttttttntttttttntnacacacacaaaggcggacgtttctttatttaatattgcacttattcattattactggggtggaccattcacctttattactacacaaagttacaaaccatggcacatagtacaagattacaactggggaggcgtttgaggttaaaacgtttaaagatctgattaaagggttggcgctgcagtagtcgcataaacctttcatactaccaggtcttggcccttccgaacgggatttaccttcccttcgcgcccttattttaacgggaagtcccaataac

SEQ ID NO: 119210 - DNA, 582 bp, Arabidopsis thaliana columbia
  unsure (1)..(582): unsure at all n locations
actccacctctattctattcatctagggcaagctgtgccgcctgcaggtgccggtccgctattcacgggtcgacccacgcgtccgcccatgcgttcgtatgcgagagacaacagaagggtcggctgtaataagacaacggacgggggattgaagactaatctcaagttctacttccgatgggtgatggacccatacgcttttcgttatgggtaaaggaaagcgtgcttgtggtantgaagacgctccctccaagggtgaaggatttgcaaggaaagctgcacatgttctttggacatgcacttatgttaaagcatgacatgttttcttgctacaagtctggaaagatcatcgaggcctacaacatgtttcaggatggttggctgagcaacgcaaacaaggttcctcctgctaagtttggaaagattgctgcactgttctctgaggggacctctgggaaaacaggaggttatcttcgatgggtcccttaaggaaagatggctggtccatttcaagatgtcgcctttaatacacctgtttggagttaccagcgcacccttcaaaaaatgcacggatgccacatt

SEQ ID NO: 119211 - DNA, 183 bp, Arabidopsis thaliana columbia
gagcccgcgatgccccgcgttccgtaaacttgggtaccctctagggaggcgggggggggtgtgtgtttgtcttatttttgttttctggagccaaattattggtgttttatatagaagcccaccccccagcgtggtttcccccccagaaatattatatacctgttataaagagagggagagaga

SEQ ID NO: 119212 - DNA, 937 bp, Arabidopsis thaliana columbia
  unsure (1)..(937): unsure at all n locations
cgccacctctacttctactcactatagggaaagctggcacgcctgcaggtaccggtccgcaattcccgggtcgagccaggcgtccgcccacgcgtccgtacggctgcgtgaagacgacagaagggggagacacatcagatgagagagatctagatattgtagagtgagattctaaagagagagagagagagagatatggctagtggaatcactcgtggtcggggtggctaaagagaggaaatccattcacgaagaatcatcctcatggttttgcgcganagccgaagacggggcaggatggaactgtgaatctaatggtgtggcattgcactatacctaggcaaagctgggactgattgggaaggtggattctttccattaacgatgcacttccaggaggattatccgagcaaacctcccaattgtaaatttccacaggggttgttccaccctaatgtctatccatctggaactgcctgtctctctatccttaacgaggatgatgggtggataccaaccatcacccggaagcagattctcggtcgtattcaggatgtacttgacccaccgaatcccgctcaccctgcacagacagatgggtatcatctcttctgtcacgatccaggtgaggacaagaaaagggagaagctgcacctccagccctatcctgctctttgctaaacctgagaaagagaacccaccaaactgaggacaacttggacatttcccggcttggcattaagtaagaggtattgggtgacgaaacctctcttttggcacctagcaccggaacattactttcaaaaaacctttttttattaacggtacatcctgacctgtccgtggtgtgctcccttaaccattcgccacaaaaaaaaaaaaaaacaaagcgcccttatagtccattcctcgcggccgcgtctttttttttgggact

SEQ ID NO: 119213 - DNA, 311 bp, Arabidopsis thaliana columbia
  unsure (1)..(311): unsure at all n locations
gaattaactgaactatagaatgactatgacgtcgcatgcacgcgtacgtaagcttggatcctctatagcggccgctttgttttttttttttttttttttttttttcgataactagaatgaagaatgtcggtaaataagaacaaaaggagaatgatttggaaggtaacttatgagtaagacaaaggcggggtacgtatattttacactagaacaaaagggattcaaaggagggngaaaccatagtctttgggggggcgcgggtaaatctattttggccaaagaagaaaatttgaaccacccaaacctccctt

SEQ ID NO: 119214 - DNA, 726 bp, Arabidopsis thaliana columbia
  unsure (1)..(726): unsure at all n locations
acgccaacctctcattctgattcactatagggcgaagctgtgccgcctgcaggtgccggtccgctattcccgggtcgacccgtgcgttcgcccacgcgttcgtacggctgcgagaagacgacagatggggacctcaaacaaaacatcgaaatcttagagaacaagaaaagacaaagaagagtaatgactgagaagacagagatggcagtggtgtaagggctcgggtggggggagatacatgggccgttggtacaagatagattctttcccatcaaggctttagccaaagaacggggtagacactcgctccacctacacccttaacctcgacggtaccatacacgtcttgaacgaaacgtggagcatcgggaagaggggttctatcgaaggcagcgcctataaggccgatcctaaaggcgacgaaaccaagctcagagtcaagttctatggccctcctttgctaccaatcattcccgtcaccggagactactgggtgctctacatcgatcctgactaccagcacgctctcattgggcagccttncaggagttattttctggatattgatcaggacgtttcagatggacgatgagacctctaaccagctggtgcacaatgtcacggaggatggtatgacttcaaaagcttcacaagactcctcagagtgacacaccaactgagtccaccactggccctgaagactccaagggcgtttggtggttcaaa

SEQ ID NO: 119215 - DNA, 367 bp, Arabidopsis thaliana columbia
  unsure (1)..(367): unsure at all n locations
atttagcagnnnnnnnnnnnnnnnnnnnnnnnnnnnnnnnnnnnnnnnnnnnnnnnnnnnnnnnnnnnnnnnnnttttgtttttttttttttttttttttttttttttttncaaagaacatgatagtagtaaatctaagggtttcaaaacagggtttcaacaaaaaatcccaaaaaagtgaacaatttcatcttgaatcctcctctccttagtctgccttggaagcaggagcagcagcttgacctctgaaacaaccagtcctccttgcagaattaagaccaaccttttttcctggtggtgcatcacgacaaacagtactagcgtgaccaatatgttgatggttccctcctccgggaggatgctcaac

SEQ ID NO: 119216 - DNA, 360 bp, Arabidopsis thaliana columbia
cactatagatgagctatgacgccgcatgcacgcgtacgtaagcttggatcctctagagcggccgcgtttgttttttttttttttttttttttttttttttttttttttttttttttttttaaacctgggaacagaaagagttttaactttgggaacccgggtctaatccataacatcaattttgattaaggggggaagcttgatttcataaatgggggggggggtacaaagaccttgaaaaatacaaacacattttcacatgacataaaatcttgtttcttctaggtggcatctttttgaaaggcagggtcacaaaattttcctccaagatcaatggaggccttttaacgggaaaccggt

SEQ ID NO: 119217 - DNA, 398 bp, Arabidopsis thaliana columbia
cgccagctctattcgactcacttagggaaagctggcacgcctgcaggtaccggtccgcaattcccgggtcgacccacgcgtccgtacggctgcgagaagacaacagaaggttacggctgctataacacgacagacgggtgctcttaaaatgggctgcaacgaatctcggatatccatccttggcagagatagaagctgctccaccaacatcttgaacttagagtgggttcgttactgactatggctcagcctcgatagaagtccgacatggggaatgacattatgacagagctttcagttctattggaagggatgaggaacgatattctcggtggtggacccactatctatggtgcaagtattctatgttcacaagggggggaaacaaagctaagccc

SEQ ID NO: 119218 - DNA, 353 bp, Arabidopsis thaliana columbia
  unsure (1)..(353): unsure at all n locations
acactatagatagactatgacgccgcatgcacgcgtacgtaagcttggatcctctagagcggccgctttggtttttttttttttttttttttttttttatacaaacactagaagtcttataaattcaaagtatgtctgagttttacaacattagagagaaagagaacaacacagaaacatttatagaaacatgattacacatgcgctaacaactgggggatttactgagccaaagcacctgtgttgtacacaagaagagcacctccggcaagaattccggcgagagttaccgcccaaattgccaatccggtgactcctcccttgtacacgtnaccactcgctgaccactcgtt

SEQ ID NO: 119219 - DNA, 648 bp, Arabidopsis thaliana columbia
acctctattcgattaactatagggcaagctggcacgcctgcaggtaccgggccgctattcccggggcggccgacgcgtccgtacggctgcgagaagaacgacagaagggggagaagagatctagagaagaatagtttgatcatcttgtgggaaaaataatggctggttcagtgatgctatcttcggtgacattgaaaccagctggtttcacggtgtgtaggacggccgctagaggattaccttaaataacaagagctcgtccctccttcaaaattgtcgccagtggcgtcaagaagatcaagaccgacaagcccttctgaattaacggcagcatggacttgagggacggcttcgaccccttcggcagaaagggcaagggatacggtgtttacaagtacgttgacaagggtggagctaacgtcgttggttcagtcctatttacaacgagaacgaatgggcacccagtggtgacgtgttcaagggatgagtcaccggattggcatttggtgccggtactctccccggattcttgcggaggggctctttttgtttcacacaggggtttggctaagcaatctttaaggtggcggcgcatgggaatcatgtttctataaaggttctgggtgggcctttccttttatgggcgaa

SEQ ID NO: 119220 - DNA, 363 bp, Arabidopsis thaliana columbia
  unsure (1)..(363): unsure at all n locations
aattgaacagacactatagatagactatgacgccgcatgcacgcgtacgtaagcttggatcctctagagcggccgctttttttttttttttttttttttttttttttggaatataattttttgttttgttttttttggatcccccttctgtcgtcttctcagccgtacccttctgtcgtcttctcgcagccgtacccttctgtcgtcttctcgcatccgtaccgggggggcgtcttctcgcagccgtacccttctgtcgtcttctcgcagccgtcggacgcgtggnnnnnnnnnnnnnnnnnnnnnnnnnnnnnnnnnnnnnnnnnnnnnnnnnnnnnnnnnnnnnnnnnnnnnnnnnnnnnn

SEQ ID NO: 119221 - DNA, 503 bp, Arabidopsis thaliana columbia
  unsure (1)..(503): unsure at all n locations
ctccaacctctattctattaaattatggaaagctgtgccgcctgcagtgtgccggtctgctattcaggggtcgatcgaggcgttcgacggttgctagatgacgacagaagggaacggctgcgagaagactacagaagggcacggcttgcgagaatactacagaagggtacggtttgcgatattacgacagaagggtctgctgagaatactatcaggcggggggtgtcgtgtaaacttatcggagccttatctttataaaatattttcgcaaccgtcgaacgcgtnnnnnnnnnnnnnnnnnnnnnnnnnnnnnnnnnnnnnnnnnnnnnnnnnnnnnnnnnnnnnnnnnnnnnnnnnnnnnnnnnnnnnnnnnnnnnnnnnnnnnnnnnnnnnnnnnnnnnnnnnnnnnnnnnnnnnnnnnnnnnnnnnnnnnnnnnnnnnnnnnnnnnnnnnnnnnnnnnnnnnnnnnnnnnnnnnnnnnnnnnnnnnnnaatatttggcca

SEQ ID NO: 119222 - DNA, 359 bp, Arabidopsis thaliana columbia
  unsure (1)..(359): unsure at all n locations
aattgaacnnnnnnnnnnnnnnnnnnnnnnnnnnnnnnnnnnnnnnnnnnnnnnnnnnnnnnnnnnnnnnnnnnnntttggtttttttttttttttttttttttttagtaaggaaaggtaccaaattcttactctacgtttacacgattatcaaaacagaaatcaaaagcgaaataaatttaaagaaacgacgctcttgcaattttgttataaacccactaccagggggaggggctgctactcagattctgcatttgctcaagctgaagttgtcttggtggtggttgcagctgcggaggagccttccttctggtcaccaaagacacgttgaaggaaatctttgaccatgagaggcagtc

SEQ ID NO: 119223 - DNA, 253 bp, Arabidopsis thaliana columbia
  unsure (1)..(253): unsure at all n locations
gtcgtaagcttggatcctctagagcggcgggggggggtttttattatatttnnttttcaacaaaaagcccaacatgggtcgcatatataaaacaagtgtgtccaatttttatgagagccccctaaagcttttttatacactcaaacatatctctttttttaacaaacattgccaaaggtggagggttgttctggggggccaataaaaacttttccttcccgggaatgtgtttttaaaaaccgagaattgcctt

SEQ ID NO: 119224 - DNA, 363 bp, Arabidopsis thaliana columbia
ctatagatttactatgacgtcgcatgcacgcgtacgtaagcttggatcctctatagcggccgcggtgggttttttttttattttttttttttaggaacaaaacatgataaatatccctttgtaccttaatcatgaagccatgatacatcgtaagattctctgtttctctctacaaaagtctcaaaaacattcaaacacaacaacattgcgtgaaaaggagcgtgggtttcacagtggttttactagaaaaatcattttcttggaatatttgaaaaaaatcctagacaagagcttaaaattccttgaagaaaccaataaaagcttcttttggacctcgggggtttattctttcaaatttttgag

SEQ ID NO: 119225 - DNA, 563 bp, Arabidopsis thaliana columbia
  unsure (1)..(563): unsure at all n locations
acgccaacctgtaattctgattcaatataggagaagctggcacgcctgcaggtgccgggccggtatacagggggcgagccgcgcgtccgtccacgcgttctgccatgcgtacagacggttgagagaagactacagacgggggagagagagagagagacatagaaagaaagatccaactttctcaaagaaccttggaagctgataaagacacagaacaagaggggggggggacaggnntgaaactttcggtgaaaccaactaaacccaacactcacagccactgtatgtcatatccaattcacagttccatttcagctgcagttcctttaagctgggaagaagagcctggcaagcccaagcaacattctactttttcttactcctaatactgtacctcaccattaacttcttatactacatgtccttttgaaactaacaagttcttagagctaccaccatggcttcaattacttggaaaggagggggatctagaaccaaacttcactcgcctatagccggcttttgtggaccttatagcgtggcgacatgagaaggggatggat

SEQ ID NO: 119226 - DNA, 352 bp, Arabidopsis thaliana columbia
  unsure (1)..(352): unsure at all n locations
gcactataaattactatgacgtcgcatgcacgcgtacgtaagcttggatccttctatgagcggccggcgttgggggtnnnntntttatttttttttttttggcttattgcaatatttactatttataattcaagtgtaagataggtttaccataatatagattacatattttttattttagattcatatatccggaaagaactcataaatctttgtgagacggaggctacaacaagggccatagaaataaataaaaagaggcttttactaaattataactatagatgggtttaaagatagacatcttcacttacatacatacgggttgcaaagatcatacaatacaatatag

SEQ ID NO: 119227 - DNA, 334 bp, Arabidopsis thaliana columbia
  unsure (1)..(334): unsure at all n locations
attacttactcctgccgctctagctggtccctggcgcgggtggtttttttttttttttttttatcacgaaggctttgattcatggcctaggaaccattacatgtgctggaaaattataacatttaattttatcaaaccctcccaaaatcaacttttatacaaaaatgaatgggngctacagagagcggaaaaatttnnaaaggggtgtgggggggaaaaatataaattccttaaatgcctcttcccaggggggaaaaaaacttaaaattttaaattcttttttaccgagggggttctttcccccaccaaaacgtggtgtgggaaagagccggtt

SEQ ID NO: 119228 - DNA, 334 bp, Arabidopsis thaliana columbia
  unsure (1)..(334): unsure at all n locations
gacaaagacccgcctgcacgcgtacgtaagcttggatcctttanagcgggcgggaggggggttaaaataaattctctccttttgggacactgatattcttattcccctgcaatctgttaactttatcttctggctaatttatcggcagagatgtctaagaaactgtacctcacaaaactagaaaccttatcttctctaatggggggggggcccncacggctaatttatccactaaaaatttgaaacttcaggaccattgaatttccagtgcctgttttacattccaaggctcggtctccatcttcaaaaattgaatttgacagaacaggattag

SEQ ID NO: 119229 - DNA, 980 bp, Arabidopsis thaliana columbia
  unsure (1)..(980): unsure at all n locations
ccccctcctctcccctcttccccccccgctctctcccctctgctcccttctctctttccccccttcacctcctccccatctctttcattctccctcctcctcccacaccccactcaccaacacgcttccctcntttctgggtgtgttgggcnccaccaccctccggcggtcttctaaatttattaaaaactccatctcctccttcctctcctcccctcctccccccctttcccctcaccctctctccccctttcctttctcctcttctcctctactcactctacgccctctcccgtctttatattacgtctccccacctatacttttcccccactccagcttctttccctcctctcctttactcttcatctttcctcctccgcccattctcgttttcttatctctctctttctcccttccctctcccaacctattnccctttcttactccttcttctctcccccacttcccctctctctctcccgtctctcgtcttcttataccctttctctctctttactcccttaccgctgttatcactctcatttttatctcattcctcctcatcctcctctctcctcttcatcttctttctcttttctcctctctctctttctcacctctccttcatcctctctctttcttcctcttcttcttctctcccctatcttctttttcttccacctcttccttcttctcccctcctcctttcattctcttctcacttttttatcctttctctattccttcattcacctcttactctctttatccattcatttctttcttcttcttctttcattctttcctaccctcattattcttcctcacattcctacacttcctctccctctcatttctttcctacaccccattctatattcctcttaccttcctcccctcccttctcctttctttctttattctttttctccttctttcctacttcacatccccttcttacacctttcctctctctc

SEQ ID NO: 119230 - DNA, 353 bp, Arabidopsis thaliana columbia
  unsure (1)..(353): unsure at all n locations
tgaaccgcactatagattagcttgacgccgcatgcacgcgtacgtaagcttggatcctctagagcggccgctttggggttttncttttatttttttttttttttnnttnttagtcttacgcgcgacataaattatttttatattatgtgtaacaacaacggggaaaataaacattaaaacagaaatatgcctgtcataaagttactcatagagtgacagagacggggtttatgtaaaatacccaccatttaacaccaaagattattggtagatttaacatgggacgtaacagatacacttgtggtgctgggaagacatagttgcatgatccatgtttggctccttcaagggta

SEQ ID NO: 119231 - DNA, 213 bp, Arabidopsis thaliana columbia
  unsure (1)..(213): unsure at all n locations
ccaaccttgtaattctaattaaattttatggggaggctggggtaccccctgccgtggtgccgggaccctattcccgggggggccgggggcgtccttacagattnnaaaaaacaacaggaggggactttatacagaacaaacacaaatcacatgcggggggatcatcggaaagaaaaaaaaatgggggaaagggggattgtggggtttcccctt

SEQ ID NO: 119232 - DNA, 481 bp, Arabidopsis thaliana columbia
  unsure (1)..(481): unsure at all n locations
atttaggacgcactantagagtagctatgacgtcgcatgcacgcgtacgtaagcttggatcctctagagcggccgccctttttttttttttttaaggactctaaacaagtttaatgtaataagtatatataacaaaagaaatgtccaaaggtacattatacatttgcctttagccagaaatttaagagaactgatggcagatgatgctaccatacataagaccattgcagcaaaagagaggaactcacctgtacagaagaacctccttatgcgcctcaactaatatctcacaagtttgcacctcgatgacttggttgtgtcttggcctggtaaattactttctttaccgattttccatttgtttcactgtacccaactccatccctatagtatccaccgacaaaattaccacctgggctgtgtaccgatccattgggtggggggtgatggcaacgggttcaaatttgcattagcagcttct

SEQ ID NO: 119233 - DNA, 496 bp, Arabidopsis thaliana columbia
  unsure (1)..(496): unsure at all n locations
tttaggacgcactatagaagtagcttgacgtcgcatgcacgcgtacgtaagcttggatcctctagagcggccgccctttntttttttttttttttttttttttttttttttttttttttttttgggaaataaactctagttctcatttctcttcaaaggttacatttttttttttttttatggttttacatttttgggatagcaagtttgagaatgaaccttttaaagatccgggggtacagatttttgttggggaagcaaatactaaaaattcccagggggcggggggggctaaagatacacagaccgaactggtctgacttttttgactagttaacaacatttttcttcagggaggctggggggtgtttttcggagcaacaacaaccctttggtttccccatttgggtggcttttccgcattcttaggtggttccacaatcgatctcggggctcctggttccccttgagttttttaccctttcaccattttttc

SEQ ID NO: 119234 - DNA, 219 bp, Arabidopsis thaliana columbia
gtgtgttaatgtggcacacgagcgagcccgaccgagcgcgagctctttttcgcgacgactcctgcggcgcggagtctagtgaaatttgagatgctagtcatcgcccacagaacgcgcgcgcagggtgcagctaggttagcgacaccttttatttatttcgtcctcgatgccacttcaacagcttatccttttctgacaccgtcgcagtagtttctcttg

SEQ ID NO: 119235 - DNA, 181 bp, Arabidopsis thaliana columbia
gggaaagcggggcgtctatctaatcaaaagaaaatcaaggctaggtgtctacacacagattcatctctcaatgcgagcagcgcatcggaacgaatcacaccttagcgtaaggattaaccccgaattagtcaaccgcttctttgtagcattcacgtctttacacgcccttccggcgtcaaac

SEQ ID NO: 119236 - DNA, 276 bp, Arabidopsis thaliana columbia
gccgtatcgtccgtcattatacaagttatggacctcaacaacttatgcttcgggtgtgtaatgtcaacgattgctgtagttaccccgaaatctcgccattaggtttattaattgtgtacaagtcgcgtagtatatactacaggagattggtataggagaccgatcccgtgatgtgctctataatcgtaagcgtaacgtcgcgacatgacattgaccactatataagagcggggatacaatgcctattgatgtaaatagttatacttgagctataat

SEQ ID NO: 119237 - DNA, 454 bp, Arabidopsis thaliana columbia
taggtcacactatagaagttacttgacgtcgcatgcacgcgtacgtaagcttggatcctctagagcggccgcccttttttttttttttttttgtcttttttttttttttttgttttttttttttttttttaaaaacaaaaccttccggttattaattaaaaaaaatagggggctcattgaaacaagcgggccctcaaaatatgcgtcctccctgaaagaatttgaaaaaaaggggtggggcgccaaacgggaaaatgttgtaattcaaccccttaaagactgggagtaagagagtaagagagaaagtttttatgcgacttcctcaattttgggacctgcacctccggcaaaaggaggaacatcctgtgccattcttcctgcaggtggaccaccacgttaaccggcttggtacatttttgctataacgggggggaaatactcttggcctttttta

SEQ ID NO: 119238 - DNA, 492 bp, Arabidopsis thaliana columbia
  unsure (1)..(492): unsure at all n locations
nnnnnnnnnnnnnnnnnnnnnnnnnnnnnnnnnnnnnnnnnnnnnnnnnnnnnnnnnnnnnnnnnnnnnnnnnnnnncttttttttttttttttttttttttttttttttttttttttttttttttttttttttttctttttgtttaagggcaccaaattttttttttagcccaaaattttccaaagggacaacaacaaatccggggaaaacccttacagaacccattttttgtttggcgggcaaaaattttaaatataaaaaccgggtttgacccaagggggtccctaaaccggggggtaaaaaaaattttttcaacgaggagcttttttaaagggaaactagcgaaacagtttttagaccttgacaaaactttggaaacacactcatgatgaaggaccgggccgtctttagaggggcttttagggatagatctaaacatttttgggggaaaataaactttttttaaaaaactgggttaagggaaaaaaca

SEQ ID NO: 119239 - DNA, 483 bp, Arabidopsis thaliana columbia
  unsure (1)..(483): unsure at all n locations
tttaggacgcactantagagtgctatgacgtcgcatgcacgcgtacgtaagcttggatcctctagagcggccgccctttttttttttttttttttttttttgctttaatacctttatgtaaccacttccatttggttcaaataagagttacaggaagagaaggtaacacaacaagagcccttctttgttgatggagcctgtgtaatagttgtagcatggggatgtatatgatgggattcaaccttattaatggttatgagacaaaactatctattacttccagttctgtcttttgcattacattcttggagacgtttattctttcacttccatgcacaagatgagaccaagattcggtccatccaaccaaggtacagagcaccatctttttcttcaatcgcatacccgttgctgtaatctctcaagagggctctaatggtggctgaaatgattgagctcaagggggatggctcaaaaccccgc

SEQ ID NO: 119240 - DNA, 322 bp, Arabidopsis thaliana columbia
cgcggtattttgacttaatttaggacgggataagtgatgaccacgaacacccgccgccaaggtccgaccaagggtgaggagaggggttgtaagcccgagaggggggtccccgtctatgtacttgtcagggaccgtgggcacagggcgatatacggcagccaccagtcgctctcagcacgcacggaaggcgtgcgcttgtgcgggcaagacgtagggatagatgcttgagtgcgtcaggataggacgattagcagatggggcgctccaccccattgacacggaagcaagggcccgtcgagcagagaacgaggtaaggagacgc

SEQ ID NO: 119241 - DNA, 495 bp, Arabidopsis thaliana columbia
tttaggacgcactatagaagtactatgacgtcgcatgcacgcgtacgtaagcttggatcctctagagcggccgcttttttttttttttttttttttttttttttggcataaagcatctgagacgagtataggaagaaaaaagaaacacatagtttttacatagacaaaggctgattagaaatcccaaatacatattcttgaaaggctcattacattgcaaaacacaagctacattagatagataagcaaagaaactactaaagaacaaattctggaccggggaatctttctgtgtgtctctaactcttgctcttgaaaggaatcgctctgatgacaatctggtgatatagtgctgctagagctgctccaatgaatggtccaacccagaaaatccaatggtcatcccaagagtggtccttgttgtagataattgcggctccaagacttctagctgggttgattccggtcccggtgatcggtattgttgccaagtgt

SEQ ID NO: 119242 - DNA, 526 bp, Arabidopsis thaliana columbia
ttttcctatgctcttttttcgcgcctactctcttatgatcatacccttcttcccctccgtcgggtctcacacccttctacccttcttgcccccacctctctcttttttcccactctatccactagcgcccctccgccttctccgtcatgcccctttcctctcttctctcgtctgccctcgcactgaatccctcccgtcgtttgtcccctctctgccccctcagtcctcccagctttttctttgactcttctcgtttattcgtacctttccctgacttcattcgcttgttgtaaccatctcctctttcttccatccatttttccttttttcttcctttctccacgccgcctgcgccttctcccctcgtcgacaattttgtttggacttttctcctcctatgttccatcactcttttctcacctgtccgtctcgcgccgcctcttctccatggccagcaatatatctcatggtcggtttcggttctgattatgtccccgtttacttcgctatttctcgccagcacact

SEQ ID NO: 119243 - DNA, 476 bp, Arabidopsis thaliana columbia
ttagaattacttgacgtcgcatgcacgcgtacgtaagcttggatcctctagagcggccgcttttttttttttttttttttttttttttttagctttaaactaaatagattactgctttatatagtgtacataatattcttctaatcctagttacattataaatcaaataaatattctgaccttacaattaaacattcccatcttttatgaactccaccagcagcccactttcttgcccacgtgttcctcacccaaattaagaattctcccatgaacatgaatgaaggatattttcgtaactgtagggtgttgttaactttttttctaaaccctgacccaatccgacgtcgttcgggaataaccggttcacatgggccggaacgagataaggctttcgtcagtgagggcccacattcttcagtgttttaccggggagacaagttagggtgtaaaagaagccccacatccgacaaagg

SEQ ID NO: 119244 - DNA, 476 bp, Arabidopsis thaliana columbia
  unsure (1)..(476): unsure at all n locations
nnnnnnnnnnnnnnnnnnnnnnnnnnnnnnnnnnnnnnnnnnnnnnnnnnnnnnnnnnnnnnnnnnnnnnnnnnntttttttttttttttttttttttttttttatgacaactaaatatacttttatgtgatataaacaaggactattcacttgcacaagatagtcatagattaaatacaagatgcatgcaactaggtccaaataatcaaccatcggaattgccgtgtcgagtgatatgacaccatcttcagaggtttttctttctgagtgtatcaatgaatcttttctgtgtaatatcgtttctggatatataatcaagaaaatcgttgaagctgaattctccatatgcagctggtttattttcattgacgagctgagttgctggacttattttcttgtgcataggtagactgtgaagacttgcaaaagagagccgcttggaatctatgatcactgctacacgatgaaccacact

SEQ ID NO: 119245 - DNA, 495 bp, Arabidopsis thaliana columbia
  unsure (1)..(495): unsure at all n locations
cnnnnnnnnnnnnnnnnnnnnnnnnnnnnnnnnnnnnnnnnnnnnnnnnnnnnnnnnnnnnnnnnnnnnnnnccacgcgtccgtacggctgcggaagacgacagaagggtacggctgcgagaagacgacagaagggggacacagaaacaatccaaaggtgagatctcttatagtttcgagattcgaggaagacttttggatacgatcagcttcagtcttccacaacttaacatggctcagggtgttggatctttctagggtaaagtttggaggagggaagttaccttctagcattggagggctcatccacttgagatacttgagcttatacggagctgtggtatctcatctaccttctactatgcggaacttaaagcttctgctctttttgaacttacgtgttgataacaaggaaccgattcacgtgccaaatgttttgaaagagatgctagagttgaggtacctttccctacctcaggaaatggatgataaaac

SEQ ID NO: 119246 - DNA, 463 bp, Arabidopsis thaliana columbia
  unsure (1)..(463): unsure at all n locations
aggccccgcggaccgggaggcaggggggcccaccattagcagcgcaagggggaagcccgcggtggaaaaagaaagcagcggcagagggagagcgacggagaaaagaaggagcaagagggccggagcagggggagagcgggacgagagcggagaaagaggccccgcagagagagcgcgagaccaccgagcgaggggagaccgccgcgccagcgggagacggggccgctttttatttaagcccacgggggggaggcgagagagcagggagggcgggagaagcgtgcgaacagacacaagagggcccgaagagacatcacagcagcgaagaagagagggngcgctaagaagaggcgcgagggccaccgcagagcagcaagaagcagacggagaggaaggagaagaaagcagtggaccgcacgaaggcggagaagagacgagaggagggagagacgcgagacagacg

SEQ ID NO: 119247 - DNA, 471 bp, Arabidopsis thaliana columbia
cactatagaagtactatgacgtcgcatgcacgcgtacgtaagcttggatcctctagagcggccgctttggtttttttttttttttttttttttttaactgaaaaagcgtatttggtcgaaatattatagacaatagcatctacacgagactgcaaccatatttacaattacataatcagagctatatttcaacaacaaacggaattcaaatttcctttttcctgggatttaccgaaactgttcaagagcttgtgtattgttgttgttcactagcttcatcatgaaggtaaacctggtgtcaggagatgtcttcggttgaggccaagtcgctccttcagggatcttgatggatctgaaaccttgatctttgtaaagtttagttgctcctaagttgttgagatcacagtgaaggccgatagctctacatccccaggtcttggctaaaggcctctggtttccatatggagtctc

SEQ ID NO: 119248 - DNA, 468 bp, Arabidopsis thaliana columbia
cactatcagagtgctatgacgtaccatgcacgcgtacgtaagcttggatcctctagagcggccgctttgttttttttttttttttttttttttttgaagaacattgcaaaattgtattgcttgcaaaatagttttgtcagccaaaacacaacacaacagttgataaatattgtagagcttcaaacgattagactgcaaaagaccttcaaagtttttcaccaaatgggacttatgcctaacggccctaatcatcatcagcttcagatcataaagacatttctttcttttctttatattcctccagagttatcagtgactccttgtttttggtccaatctgcaggtcttggcataattatcgcaatatacccttcgcggtcagccgttgaattaagaagctctggttgcttaatcaatctctcgttgacctccaagagagagcctttaacgcagcacctaacaatgtaag

SEQ ID NO: 119249 - DNA, 493 bp, Arabidopsis thaliana columbia
  unsure (1)..(493): unsure at all n locations
nnnnnnnnnnnnnnnnnnnnnnnnnnnnnnnnnnnnnnnnnnnnnnnnnnnnnnnnnnnnnnnnnnnnnnnnnnnnnnnnnnccacgcgtccgtacggctgcggacgacagaagggtacggctgcgagaagacgacagaagggggcgggatccctcgcgggtgcaccgccgaccgaccttgatcttctgagaagggttcgagtgtgagcatgcctgtcgggacccgaaagatggtgaactatgcctgagcggggtaaagccagaggaaactctggtggaagcccgcagcgatactgacgtgcaaatcgttcgtctgacttgggtataggggcgaaagactaatcgaaccatctagtagctggttccctccgaagtttccctcaggatagctggagctcggacgcgagttctatcgggtaaagccaatgattagaggcattgggggcgcaacgccctcgacctattctcaaactttaaataggtaggacgtgtc

SEQ ID NO: 119250 - DNA, 503 bp, Arabidopsis thaliana columbia
ttaaagtagagcacaagcacgtgttcgcaggcgggcagttttagccaagaaccgattttgcgtcgtattcagtgtgaaatccaggctcacccagcgcgatacctacccttttaatttctctcccagcacgccacgtcgcgtccctcgtgtgtgtaacctaacaatatatctagattcgagcagcgaactagtgatctacttacgaagaactcctttttcacacatcgaaaccaccgtgatcacgatgtcacctacgcgtctgaacaccacacacccgaagtccggttgccagtacaaatacaactcgcacccaagcgtaatacaccccaccacgcggacacagtaatcttcctcataacgtgcggcgcgtgtatatagcatgcacgccatcaacaccactaccatatgttactcattcaccctgtcctcggcaactgctccagtacctcctctcatccgttaccatataaatactccatttttatgtgcgcgagatgggcgca

SEQ ID NO: 119251 - DNA, 117 bp, Arabidopsis thaliana columbia
ccatggatatatggtttttttgctgaggcggcgggtgggaggtgcgtagataaggccaatatatcgtctgctggaacacacacatatggtagttacaagtgtgtgcgcgcaggatgc

SEQ ID NO: 119252 - DNA, 495 bp, Arabidopsis thaliana columbia
  unsure (1)..(495): unsure at all n locations
ttaggtcacactantagaagtctatgacgtcgcatgcacgcgtacgtaagcttggatcctctagagcggccgcttttttttttttttttttttttttttttggagattntctccaaccaaatcactctcaattcttcgatctcattacattctggtctaaagcttcggggtcattcacaccactaatcggaaacgaaccaaataaaataagacagtttgcttttaaacagctactaattagtatatcattaccattcatccgcataacaaagctctggttttcacttctcggcaaaagagacgaccattggattctgcggagtgatcttgaaaccctgaagagcctgcatggccatggaagactgaacatcgtcttcatactccacaaacgcaattcccgggttttgcttcgatcattcttatctctttgaatcctgggtattgctcaaagagcagctgaagcatcatactattcgtctcaatgggaagattatg

SEQ ID NO: 119253 - DNA, 496 bp, Arabidopsis thaliana columbia
  unsure (1)..(496): unsure at all n locations
ttaggtaccactantagaagtctatgacgtcgcatgcacgcgtacgtaagcttggatcctctagagcggccgctttttttttttttttttttttttttttttaacaaaaggtcttaacttgatctgtttcatactaaaaccaaaactcatgtttgttcactccaaacacaaacacagcagtaatcaaaaatcgtcttataacaaaaaggaaatgcaacaaaacagaagaaacaactaagtagtaggcaagattcttcttcactcgtcttcttggctacggagcctagcaagcctgttggtaacaacaacgtctagctgagaagctctctcaacaattgcctttctcttcttagtggagacgttgtgagcaatctcagcacagtaagtcctgttgcgcatcatcaacaactcgagctcacttgtgttgggaacaacgaatttcttgaatccattgggaagatagtgacgagccttttttgtaaatccgtaccaacat

SEQ ID NO: 119254 - DNA, 493 bp, Arabidopsis thaliana columbia
ttaggacgaactatagaagtctatgacgtcgcatgcacgcgtacgtaagcttggatcctctagagcggccgcttttttttttttttttttttttttttttttaaacaaacactagacgtcttataactggaaagggtgtttgagttgtcacaccgtctgggaagaacgaataccactcaaacacatgtatcgaaacatgctcacacaagcattaccaacttaaaaagttactgtgaggaagaattctgtggagctatattaagagctcctacggcaagattttcggctaaagtaacccagcaattggacaaggcggtgtctcctccatagggcacgccattgatgtgtgacaactcattgtagcagtgaatatgactgaatctcttgaggttaagagcatactagctggtgaaattaccatcaccgtattacttggagtctttatcgggaagagtgacgacttctctcaagccatgctgcaggaatctcgaag

SEQ ID NO: 119255 - DNA, 477 bp, Arabidopsis thaliana columbia
  unsure (1)..(477): unsure at all n locations
nnnnnnnnnnnnnnnnnnnnnnnnnnnnnnnnnnnnnnnnnnnnnnnnnnnnnnnnnnnnnnnnnnnnnnnnnnnccacgcgtccgtccaggcgtncgtacagctgcgagaggaacacagcagaatccggatacgcgattacaaccgacggcggaattaatcgagagaataatcttcttattattttgcgagaccaatgaaggcatgtccacagatgctatcttcctagacagagggagtacttgtcctcggtggataagacacacgtatcacaattactgtcactcacaagagatgggccattattcaatactgtctctagcgacactataaagatctaaactgacaagactttcagtatgaacggtctaatcttcttatgggatcgagttgacgcattcgacataccgggtaagagaagatgtgactactattttctntacatgcatggaactgacgccactggtactcctctat

SEQ ID NO: 119256 - DNA, 426 bp, Arabidopsis thaliana columbia
cttagaagtactatgacgtcgcatgcacgcgtacgtaagcttggatcctctagagcggccgcttttttttttttttttttttttttttttttttttttttttgggtcatttgaaaacattacacaagaaccccacctccctaaatagaaaactacacaggtggggaaaattcactatgttaaaagagttgcttcacgggaaaagggtcacttttttattgtagcggcgcacacacacgtgttagcatatattacatattttcccccacttttttgccccatatatgctgttataccccaattttttgaccaaaggtgtcacattaacccctaattgttgattgatacgcagagttggtgccctactccttgttgaaaccttttggcgagtggagaactcacccccccttttgtctcctcctttcag

SEQ ID NO: 119257 - DNA, 439 bp, Arabidopsis thaliana columbia
  unsure (1)..(439): unsure at all n locations
cnnnnnnnnnnnnnnnnnnnnnnnnnnnnnnnnnnnnnnnnnnnnnnnnnnnnnnnnnnnnnnnnnnnnnnnccacgcgtccgtacggctgcgagaagacgacagaaggggtggtgactcttgcagttgcgagaagaactacaacaaggagtgcgacaactgtagctgtggatcaaactgcagctatgggtcaaactgtaaccgttgatgaaattattatggtctaaaatcatatatatggcagaaaaattggggaaaatatgtgttttatgctaagagatgtgtgtgtgttgttggaataaagacgtgaccgttgtgttgcgtatcaactctcttaagctttgacttttcccagctttgtattttcctatgtatggtaatggtgtgattgtgtaatgttttcatatgtaacgtnnnaaaaaaaaaaaaaaaaaaaaaa

SEQ ID NO: 119258 - DNA, 468 bp, Arabidopsis thaliana columbia
  unsure (1)..(468): unsure at all n locations
nnnnnnnnnnnnnnnnnnnnnnnnnnnnnnnnnnnnnnnnnnnnnnnnnnnnnnnnnnnnnnnttgggttttgttttttttttttttttttttcttgagatcctctgctttgaacattagaggcaaaagcataaaaattgcggctcacatacattaagttttggagtctgaagggtaaaattttctgtgcttacacattagatcgaaggattctaaaagtagagggggcactttttttgagttgcaaaaaatgaaagtttgcaaaaaagagtctcctcctactctattttggaaaacccagggggtaatgaaatttttaaccccaaaccttttatttggaatttttttaattatcccccacattgattccttgggtttcccggcgaaacgtttaatttttatttgccattgcctttgccggggaccggtttaaatttttttttcttttcctaaaaaaaaatttttttt

SEQ ID NO: 119259 - DNA, 485 bp, Arabidopsis thaliana columbia
atcccactaatatagggaaagcctttccgcctacatgtacctttccccaattccccggtccacccgggcgtgcgtgcggttacaaaccacagaaggggagactttcctaagaacataaaacgaaggagaataaaaacagtttctcacattcaagagacatagagcttcttctgcgtaaattctcttcttttaaacttacgagaagaaccagacttatgtgtctgggtgcgggattacatcaaccttctggaaataagaacctcaaaatttgggatccaccctcaggatccaccgattcttttgggtttccagcttatcctaacggaaattctccatgtacccctttttttatcccgctctttttccccgttccattcttgccagaccgaggaacatataacccccggaccctttatctatcccccccctttcataattttgaaggccccttcaatacctttcctaaaatattttaaccccccccc

SEQ ID NO: 119260 - DNA, 336 bp, Arabidopsis thaliana columbia
  unsure (1)..(336): unsure at all n locations
tttaggacgcactatagaagtactatgacgtcgcatgcacgcgtacgtaagcttggatcctctagagcggccgctgggtttttttttttttttttttttttttncgcccgctccaatcaatgtgggaaaatcccaaaacactttcttacacaactttttttggtgatgggatggaacatccacccacgcatgtgaaaatcacaaaacgggatatcaaaaggaaaaaaagatgggggggttgagattgggaaaacgtttgccgatgatcatggatcaaaacattggccactcagtaaaaacttcatacgtttttgttggttaatgaaagggagaccc

SEQ ID NO: 119261 - DNA, 210 bp, Arabidopsis thaliana columbia
  unsure (1)..(210): unsure at all n locations
nnnnnnnnnnnnnnnnnnnnnnnnnnnnnnnnnnnnnnnnnnnnnnnnnnnnnnnnnnnnnnnnnnnnnnccacgcgtgcggtcagctgtnagaaacgacggaaggatacggctgagagaaaacaaaagaggggttgaacttgacaatatctggggagctgctctgatcatgatcatctgggcaacattctaacaaatataaacctacaa

SEQ ID NO: 119262 - DNA, 467 bp, Arabidopsis thaliana columbia
cactatagaatttacttgacgtacgctgcacgcgtacgtaagcttggatcctctatagcggccgcttggggggcggttttttttttttttttttttgggaagaaacatcatttgtttaataagagtgataaaacatttgtgaacagacattgttatcgttatgaaaattattaagcaatttattcagaggcttgaccactgattcggaaacttctttagccggggggggacaagcccacaatatgtaaaaactggaagttactccttcaactggggatcgctgggtgtaacacctgggatctctgttttagactctgcaattaaaccttcaagcgttttatagaactggtcaatcatttgcccaatgggtgggagctcatcgggagcctttttgattagctctttgacttgacccacaccaagccggttcttaatcatttcccattttttttttccttgacacattg

SEQ ID NO: 119263 - DNA, 485 bp, Arabidopsis thaliana columbia
ttgggacgacctatagaagtgctatgacgtcccatgcacgcgtacgtaagcttggatcctctagagcggccgcttgtgtttggttttttttttttttttttttaatccaaatctttaggtattacaatgatagtaattgccgaaactcccctattatttttgattgacttaaaagggagtccaaccaaaagatattctagacaaagcctcaaaaaatagtctttatcaaatggggggtcatacacatctgagttgagatgaaaaacaaaacaaatcacatttgaaaccggagaaaaaaaagacatatttatcatgtatgtatatatagggttcatcttaatcgaagaattcccatttgaatcgggggggaccggtttaaccgtttcagccgccttggccgtcgatgcggaatcaaacatttcccattttgaagctaccaccggcggaatacctgatgaggatgatgcattggaattcctaggctc

SEQ ID NO: 119264 - DNA, 459 bp, Arabidopsis thaliana columbia
  unsure (1)..(459): unsure at all n locations
tatacgactcanatagggaaagctggtacgcctgcaggtaccggtccggaattcccgggtcgacccgcgcgtgcgcccacgcgtccgtacggctgcgagaagacgacagaaggggatcgtgttcanaaatcatattcatcacctctctctctctatgtctctatattngggattctttataacatgtgagatcgatctatttttgatcagatacttagagaggaggagaggangcaaagaatatttcaagaatgatgaaaatgaatacaggaacatcgccgtcggtcatcggcggcgggactagtgggaatgagtgggagtctccacctggaggaatggttgttcaacggcggacagatcagaactccgatgtgccacgtgtttttcggggtcgggttaaataccggtcggtttatcacgagatcaacatcaattcccaatttttccttcggagaggtt

SEQ ID NO: 119265 - DNA, 470 bp, Arabidopsis thaliana columbia
  unsure (1)..(470): unsure at all n locations
cctatagagttacttgacgtcccatgcacgcgtacgtaagcttggatcctctagagcggccgcttggttttttttttttttttttttttttttttttttattnctaaacttttattattattattggaacaaaatgcatttgaataccatcatcaccaccacaaaccactaaattacaaatccatgtgataagcagcattgggatactttttttgccaattgggggccaagatcaaaacaagactttcaagaacttcagcagaagaacattataaattggcttagctttgttgttgaattgctgaaacaacttcaccgatactcttaaactttctcctttccttgaaaagcattttcgcaaactcgagtgcacttctttcgcaaatagctcttcgcttatcttcttcgattgattcaaaggcctcaacatgtgccactcccacaattctcctaatcatttttggagcgcg

SEQ ID NO: 119266 - DNA, 484 bp, Arabidopsis thaliana columbia
  unsure (1)..(484): unsure at all n locations
atttaggacgacctatagaagtactatgacgtcgcatgcacgcgtacgtaagcttggatcctctagagcggccgctnggtttttttttttttttttttttttttttttttttttttttttttttttttttnnncggcaaaaagaataagnggttattttataagttaatcaaaagggatcatttttttattccccccaaaactttcaaacacaaaaacttaattccccaaaattttttatatttggggggggggtggggaatttttcccaaaagggaaaccccaaaatccaaaaaccaccttcctaatatttttatttcccaaaccgagcctacacattttttttaaaggggggaaaaagagaccccccccagtgttcccccccccgaggattggcgggaccccgaaaacaaactttttataatttggttttaagaaaaaaatgggggagagggaaaaaatcctttttaccccccccccccttt

SEQ ID NO: 119267 - DNA, 503 bp, Arabidopsis thaliana columbia
actcgactcaattatggaaagctctgcacgcctgcagtgtaccgggcacgctataccacgggtcgacccacgcgttcggtctttgctaagagtcctaagaggacatcaacaaaaatccttagtgttcgtcctccgtggagtcacagtcatagcccgagtacaattcttatatggaacggaggcaaacttcctgctctatgtaccatccctgtgaagaacttgttattagcctgggagaaaggccaatcagtgatgataaggcataggctgccagaacgatccctaccaaaagtgttattatacgagcgtgtcggatgaaaaatgaaaggatacttttagtatgtctgcaaactattcaatgaaatgtcctttgacgagccaaagggggttttaaaataactccagtcttaggtctgatcctcagaggccttacgctggggccctggaatatcgtgctcctctggaaaacccaggggaggggccccctaaaaaaaagggcaaaa

SEQ ID NO: 119268 - DNA, 532 bp, Arabidopsis thaliana columbia
actctcacaaacatttatgacgaagctacgcacgcctgcgtgtaccggtaccctatacaccggtctacccacgcggtacagagacacgcgtgagctctggttgcttttccatttccttgtttattgtctctctgaccttggattttcggatacaaaaaacagatatcgcctcattctaaagctggtttccggatattctaagagtctttgtatcccccccgaactaatttttttttcgggaggtcaagcccaaggcctcaaaccctttcttatagggcgcctaaagctgataattttacatcggtccccccccctttttagattaccaaattcaccccaattccggagggggggccccctcctatacttgaaaaaaaccatccttaccccctcaaacctctcattttgggtttgcttgcaaccagattctgcgttcccccgaaactagattgacttatttcctttaagggaaataagaactcttttttcaaaatctcctcctaagcctctctctcaaaacgaaaaacaaagg

SEQ ID NO: 119269 - DNA, 513 bp, Arabidopsis thaliana columbia
ctcgactcacattagggagaagctagcgtcacgcctgcaggtaccggtccggtattccacgggtctgacccacgcgttcgctcacgcgtacgcccacgctttcgtggacgcgtgggagaaagcagaacgacgaaacttcgggttgttaggcgtgaaagagatcctgattttgaagatggtgatgacgctgattttacaatgatgtatgagggaatgcacccttgtctttgatgaagggaggcaaacccgcaggattaatccttacggggtgtttattgcgctacatgttgagactctgcgcgctgtattttactacccgattcttgacccggtgaaaaagcatattctttgggggttttttttgttatttgcaaatatggtttggaggttcggggttcttgactgttcccaaatgggccctatcggcgagaaaatccttgacccgctttgttaaaattggggaaggaagggaaaccggggggattatcccgggggttgtttttgtttccccgg

SEQ ID NO: 119270 - DNA, 578 bp, Arabidopsis thaliana columbia
  unsure (1)..(578): unsure at all n locations
agcggagataacanaccaaaaaaaaaaaaanaaaaaagaattgtctatctacaccccacacaattaggaggagcacgccgcctgcaggaaccgggacggaatagaggggttgacccacgcgtgcggtcctacgagcgtaatgtatgcgaaggcagatgccacacagccagtctcggaaataagaaacaacgtccagggaatacgagcccggccgcattgaataggaacaagaggtaaaaaagccccacacgcctgattagaacaggcagcatttttttttttgggggggtgggaggcaaggcccgaagcaaacgggaaaaaccaaggctccccatgcgtcaaaagcaggccctaacaacttggcagctccggcctcccccccctagcgcaaaggtgacgggcaacccgaatattttttatcttcttaccatcgaaattccaaggtgtgtccttgttttctctctccctacccttcttttatgccagccccaaatccttatttatgtgtaccgccaacacaaaaaaatgtacagccagtatatggatatagggacgccaatatcaatgccgcctaacaa

SEQ ID NO: 119271 - DNA, 517 bp, Arabidopsis thaliana columbia
cagctctactctgactcacattatggaaagctagcgtcacgcctgcagtgtaccggtccggaattcacgggtcgaccacgcgttcggttcttcaggtgacccgtatactattgatagtgactctgctcttgcttttaaaaactgaagatactgctgaccttatgagctgagcgacatggagaggattataaggacaaaaagcccaactctccataatagaaagacaagtcttactttttcattttcgtgaagaaaggcattccttaatcagataattgatgttacacattgttgctttggttctcgcgcaaaagaaaaaccatatttgatactaagactcatggtggtttggttttcaggaactagaaaccttttgtttgaaaaacccaattccttggcttttttcctcataacattatgtggtgaggatcttaacccgccctgctttgacctttaaaaaaaaaaaatggggcagacggtttagagaacccaagttacttaagtttcccaaccaaaa

SEQ ID NO: 119272 - DNA, 406 bp, Arabidopsis thaliana columbia
attcgactcacattatggaaagctgcgcacgcctgcaggtaccggtccggaattcccgggtcgacccacgcgtccgctttgtagggaaaccatatatctcttttgtcttggagaaaggttccgcgaacaggtctgctccgcacaatgtacaacgttcacgaagctaagaacagatggggattatatacaccccaaatgtcaaatccggttatagacgtgaccattttgtagacatcgtggatgaatctttacatgtatgccaatcacggtttcgatgttggatatgatctagttaaccatcttcttaaaaaagcgaaggatgttataccaaaagtgtttacaatctcaaactagaagctgggctcatcccaaaaccccaccactgcttattctgttttaaactagg

SEQ ID NO: 119273 - DNA, 528 bp, Arabidopsis thaliana columbia
tctacaaaactatgaggaagcacgcacgcctgcaggtacctgggcacccaatacaggggttgacccacgcgttcgctttcttgtacaaccattatcatctcctcgatacattaaatataatcctcacaagtgctcgggacctccagaattctttttcaccagtcccaacatgggtgagcgatcatcttccctggaaggctccacacctctgtgcaggcgttcccttttttttgcggggggtgatcccaaccctcagaacctggggtatttttatttttctccggaggggccctttttctataaccctcaccaaaactttacaacccccagttacctaccttaatctcttgggaaagaaaaaaaaaccttgaatacctggacctcgaatcctacattccagacacctaaattttcgctttgtggggcctgggggagctacccacaaggggggagaaaatcgtgtgatttccctcaaccccaaaaaacactcgtgtggaaaaaccggagtaaaacccttgccagagttct

SEQ ID NO: 119274 - DNA, 437 bp, Arabidopsis thaliana columbia
caagctgctattctactcacattatggaaagctggcacgcctgcaggtaccggtccggaatacacgggtcgacccacgcgtccgaacttctgtgtcttatgtagactacttgatctctctactctatttcctctctagctacttgactcccttacgtcttcaaggagatagattgtctaattctgctcacaaaggaaaaatgttcctctgcatacggctctctctctatgttcttcatcgctatgacttgaatcacaaggaaaggatgaggcactatctgcactaagtagcacagatcagatacacgaatctagaaagctatcttcttatgactgacgggttaaaactttttgagggatgagcgctaagagatctaagcctatgctgatgtatcttcttaggacaatcttatcacaagttgctttgactatgctcct

SEQ ID NO: 119275 - DNA, 255 bp, Arabidopsis thaliana columbia
  unsure (1)..(255): unsure at all n locations
aaaaaagcatgatttnttggttttttagaaagagggggacgagagacccccgcagaagcgagtgtggcgggtgagcgagaagaagagaaagaggataccaacgaggtacggtttatgtgtagcgcggtgatacggaacaaacgccggcggagaataaccgaaagaaacgattagagccggcgaggagggaggacccacgagaaagaagagaataaagagaagaaaagaattttttttttggggggggggaggaaa

SEQ ID NO: 119276 - DNA, 494 bp, Arabidopsis thaliana columbia
tattctgactcacattatggaaagctggtcacgcctgcagtgtaccggtccggaatacacgggtcgacctactgctgttcggtttctagcggactgaaaatatagcatgtttaagggatgattctttataaaccttttgttactggcaaaacccttatggcacggaaaatcggaaagatgcgttactggtaggatccatagatttttaatgggcctgacgtgctgatcatgtttgctggtgagacacataggaatgtaaaagacttaatcgctgatgctgttcaataccacaggaccctcggtgatgctaatgaggtgcatgaagttattatagatgagattgatactgtttgcttgtcaagaagttcagccagctatggcacatgcgaccgtgatatcattgtacaccatcttttagtacagggaaatggtgtggaggccctaaacaatggttagcttatcggaatgataacaaaaaggatttgttagagaaa

SEQ ID NO: 119277 - DNA, 524 bp, Arabidopsis thaliana columbia
  unsure (1)..(524): unsure at all n locations
tgattctgccnnnnnnnnnnnnnnnnnnnnnnnnnnnnnnnnnnnnnnnnnnnnnnnnnnnnnnnnnnnnnnnnnnnnnnnnccacgcgttcgcccacgcgtccggagaaaaatgcgccttcaatcatattcattgatgagatcgactctattgcaccgaaaagagagaagactaatggagaggttgagaggaggattgtctctcagctccttacgctaatggatggactgaaatctcgtgctcatgttatcgccatgggagcaaccaatcgccccaacagtatcgacccagctttgagaaggtttggaagatttgacagggagatcgatattggagttcctgacgaaattggacgtcttgaagttctgacgatccatacaaagaacatgaagctggctgaagatgtggatctcgagaggatctcaaaggacacacacggatacgtcggtgctgatcttgcagctatgtgcacagaggccagcctgcattgcatcagggagaagatggatgtgattgatctgga

SEQ ID NO: 119278 - DNA, 492 bp, Arabidopsis thaliana columbia
ctcgacacacatttagggagaagctgcgcacgcctgcaggtaccggtccggtatacacgggtcgacccacgcgtccgcggacgcgtgggcggacgcgtgggcggacgcgtgggccgacgcgtgggccatgcttggagctcttatgaaaagcatgcatggtggaaagatgagcttgagcctccgacgagagatggcactggtggctttggtggccttggagcaattatggtagagtcgtaacatgcactctatataatgggtgtagacgagcatttcctaagaggcagagagtgggttgcaagcctcttgtatttccacacggatttgacaccggattgttttagacaaccataaaatttgagggcggctttttacgggcgaaggcctttctggggacaaaaggtcccttgaaaggcttaggatatgacctccggtttttgggtggttgaaaactgcaagggggttcccttccgtttttttcacttgggaaag

SEQ ID NO: 119279 - DNA, 327 bp, Arabidopsis thaliana columbia
tcccagctctatcgactccttagggaagctgtcgctgcgtaccgccgatcccggcgacagcgtcgccaccgccgttttttcttgcccgggggattaaaaggggccttttttccgggcccaaaatctttttaaaaaaacgggctcccggacccccttttttccttccggggagggggtttttcccccccccccccctcttttttttttggggggggtccaagatttttgcgcccctaaaaagagggggggttggggaccgctccccctcccccccccgcgggggggggggaaaaatttttttttttttttttggaaaaaaattggggg

SEQ ID NO: 119280 - DNA, 293 bp, Arabidopsis thaliana columbia
ttctgactcacattatggaaagctcgtacgcctgcagtgtaccggtccggaattccacgggtcgacccacgcgttcgaagacgcttacgcttttccctgatgctgaacttactcactatttttctgggaagaatatcagatacattggaagttgctaacttcatcatagtaccaaacaagctgctcatatgtggtgcttgtctacacgctcctgcttatcctggttatagtgaggtggaaacttctaaaagtgtctcattataagcgacctgcagagctctgttttgctaggg

SEQ ID NO: 119281 - DNA, 452 bp, Arabidopsis thaliana columbia
cagctctattctactcacattatggaaagctggtcacgcctgcagtgtaccggtccggtattccacgggtcgacccacgcgttcgcccacgcgttcgcccacgcgtccgaggacgcttggggagagatcatgaggtcaccggtgcaactccaacacggctcagacgccactaacggtttccacacgctgcagcctcacgatcagacctgtggtccgatcaatagagtgtgtctcacgcgcggtatgcatgtccctgaacacgttgcgatgcaccacacacacgacgttggtccggaccagtgttgctcctcggtggtgcatatgatccacgcgccgtctgagtccccgtgggctcttgtgcggcgtttcaataatccgaatgtttacaagaacttcatcaaacagtgccgtatcttacaaggcgatggtctacacgtaaggatatctccgga

SEQ ID NO: 119282 - DNA, 538 bp, Arabidopsis thaliana columbia
cgcggataccgggagggattgaggggtttttgaatgggggatgaagcaacgaaagatggtttatgggagggagagagagaggaaataaaaattctattcgttttggaaggggatgtgggcgagctgttatggcgtgggttaatgaaggacaataattaataggaatgtgttggagagtgactagacgccagggagggagattttttttttcggggggggcgcagagggggcagagaggagaggtggataaatataatgtgaatgaagagggtgtaatagagaggtctagaggtggatcgaggacgtgaaattagggttagggaatgggcttaaataggccgggtgacccgtggtgagtatatactaattgttcactatgatatggcttgtcttgggcataaatggagggctgggctggggtagtatgtcgttcctgcccaacagtttttagagttgataatgacgcagtgatgttgttgctttgtcttaagcaagaattattaagtgaaagtgttaatgggatatggaaatgccgctg

SEQ ID NO: 119283 - DNA, 427 bp, Arabidopsis thaliana columbia
cagctctattctactcacattatggaaagctggtacgcctgcagtgtaccggtccggaattcccgggtcgacccacgcgtccgtttcttatgagattcgatcactatacatcaatcaaagctaacagaacagaacgtgtgttcatgataccagcgtacatggtgaggaggacctctaatgatggttatggtcgcagaaactacggccttaaacaagtgacgaccagcgtttcttctgtgagtgacgtaaagtgtacatctctggatcgatgaagcaagatgattgttgatacacattctgatccacagatcactacgatcatttctaatacgagtcataatcgtcctaagactgagccacaaagagaccatctgaatcttcatgaccatcgatctgctaatggatggtgctcgtacaataatgcttg

SEQ ID NO: 119284 - DNA, 539 bp, Arabidopsis thaliana columbia
ggagagcatacgcacgcgtgcaggaaccgggacccaatataggggtcgacccacgcgttcggtttcacaaaaagagggtttgtttagaagcaaggcgaaaaaattccaaaatgtcttaccaagggacctttcctcacaaaaactttgttggcgcccactcacaaaaaacaaacaggggacagacttctccacaaaaaaaaagcgcgcaaggtgtggaaatttttttttcggggggagaaaattttaagagttgggtggaactccccaaaaaacgcatttacagggggattttacaccctttccgtagaaacccaccctacaccacaaaaaccataggggcccggcccagagaatcccacacaggaagattaatcacccttcctctgcaactgcgagagccgtcacccccccaagaacccctcttccccgcccttttagtatttagaacaccccagtagagcaaaaaacaattttatccccccccccctgttggcgggtggcgaaaacataaatcaattcgacgagtaaaccgcccttat

SEQ ID NO: 119285 - DNA, 512 bp, Arabidopsis thaliana columbia
cttctactcacttatggaaagctcgtcacgcctgcaggtaccggtcccctattcacgggtcgacccacgcgttcgctttttgttggaataaacggaccaaaaccacacattttgtcaataaacactgagggtcgcagaactcatactcaagtgggcaaaagagggggaggctgacaatggacgaggagggggaacaacccacatcaaccatcctatttgtcttcccagcccacactgtatctggtttcaccgtctttttttcctaaggaacaacgggaaatttaatgtccttgttcacggcttacacaacaaaattaaaaagcgaaagggggctgggtttcatttttcacgccgtgttggtttttttgacccgcctctctgtttctttaaataatggctccaaaaaacggatttccgaaaaaagttttccctttttaaacacaacctttttctcttttggaacgctttataaaaaaagggggaaaatacctttttttttccacggggggggg

SEQ ID NO: 119286 - DNA, 496 bp, Arabidopsis thaliana columbia
aattcgactcacgttagggaaagctcgtacgcctgcaggtaccggtccggaattcccgggtcgacccacgcgtccggtcgctattaaggttattgataaagagaaagttctgaaaaataagatgatcgctcagatcaagcgtgagatttcgacgatgaaattgatcaagcacccgaatgtcattcgtatgtttgaggtgatggctagcaaaactaagatctacttcgttttggaattcgtcactggtggggagcttttcgataaaatttcaagcaatgggagattgaaggaagatgaggcgaggaagtatttccaacagctgattaatgcggttgattattggcatagcaggggagtttatcatagagaccttaagccagaaaatttgcttttggatgctaatggtgctttgaaagggtctgactttggattgagcgctctacctcagcaagttcgagaggatggggttcttcacacaaccctgtggaacacccca

SEQ ID NO: 119287 - DNA, 515 bp, Arabidopsis thaliana columbia
gacaacacagcttatgacgaagcaacgcacgcctgcaggaaccggatacgctatacacgggtcgacccacgcgtccggtcactcaccgctccctgaacctggatggatctacacgatccagcaacatcgagttcttattgagcattctttggaggcaaccacaataaaaaagcggcaagaaaatcatggatattgggcgggccttatcggaggattggtgttttttttgggtcgcaaatggaatatagacgctgatcacgcagttgctggttggccagctagagctttgttctgatgcggccggaggctagacatggtggggtcccttttagggcagtacgccaaacatgaagatggtctaacattcttcctgggaacattccctcccttttttgtgggcccccgaaacctaaaaccgtaaagacggcgcgttctgattattgataacgctctaccctcttcatcccgaacccgtatcgggttctggcaacacacacctatctatttccccgaaa

SEQ ID NO: 119288 - DNA, 508 bp, Arabidopsis thaliana columbia
  unsure (1)..(508): unsure at all n locations
cagctacattctactcacattagggaaagctgccacgcctgcagtgtaccggtccggaattcccgggtcgacccacgcgtccgaaacatcaagctaaacgagctgtcaagcagagatctattcatgaaaacctaatttgatgccgtcatcgccagaacacgtgtatggaaaactactcattacaaatcacatggtgagtcacagaggattgacccggcaacgcaaattgtatgatgttggagaaccgcgtacaaaagctgagctcagagttaaggctggagctggtgtgatacatcanaggtagatgagctgacataaaatggggcatcggcatcagatgatgaggatgataacgatggtgataacgatgacgtggttgatgatgatcgtgtatcttacgatgatcttgcagacatgtgatcgctatcaactagctaaacgagctgccactgcagagatctattcaagaaaccttatttgatgccgtatgcacctgacacgtggatgg

SEQ ID NO: 119289 - DNA, 529 bp, Arabidopsis thaliana columbia
  unsure (1)..(529): unsure at all n locations
nnnnnnnnnnnnnnnnnnnnnnnnnnnnnnnnnnnnnnnnnnnnnnnnnnnnnnnnnnnnnnnnnnnnnnnnnnnnnnnnnnccacgcgtccgctacttcttcctcttctccattaaccaaatcaaccaatacccatttctcaattcaccatatcttcatcaaatcaagattctttcttccttaatccctaaaaaaaaccttctttcaattctgattttcacttaggtttttctcaatttctacttcacacaatgaatcttaccttctacatcttcttcttaagtcttttaccaagtttctcatcttcaaagccaatgaattgctctgacactactcgtctctgcagttccttccttgctttcaaaccaaaccaaaaccaatctttctctgtaatccaaagcatgttcgatgtattaccacaagacataaccgccgacatctccggaggttacttctttattaaaaagaactgttcttgtcttactacgactcatcaatacacaacanacacaacattcacaatcagac

SEQ ID NO: 119290 - DNA, 477 bp, Arabidopsis thaliana columbia
  unsure (1)..(477): unsure at all n locations
nnnnnnnnnnnnnnnnnnnnnnnnnnnnnnnnnnnnnnnnnnnnnnnnnnnnnnnnnnnnnnnnccacgcgtccgatttgctctcttactggatgactcacctaccatgactataagtctgaacgagtgattgacacccacctcgaacaatctatccttttttttgatggccttctccggccagtccccggggagattgcgaactccgcaatcacggatatttactgtgataaagccaccgcctttgagctttcatctgcaacgaaaggcgttgtcaatcatcactaatcctaagcctaacagaggacgtgtagctctgcccagtgaaggcggcaatccctccgatctactattcactcccggaggcggctccacaaatagtcactactcctaaccgtgtctctaattaagggtctactgcttaaagtcctcgtttaaactgtacttcgagactatgtatgggggagcaatgttgtg

SEQ ID NO: 119291 - DNA, 498 bp, Arabidopsis thaliana columbia
tctacaaaattatgaggagctacgcacgcctgcaggtaccggtcacggtatacaggggtcgacccacgcgtccgcttttttatggaatagtcgtgccaactcagacgttaggccaataactactgatggcacacagaagctcatacatcgagagggtgaaaagacggtgagggtgacaatggacgaggaggttgaacaaccaacaacaaatatcagatttgtttgcgagaacacaatggatcagcttttacagtgcttacataccacagaagcaacggatgaattgtaatgttgctgctacaaagctcgcactactcaattaaatgccaaatgcggatggaacattatcattcgtgtagatgattcaccgacctatttttttcgatcataactgcaggaaactgctgtaccgaaaagtttagaagtatttaccaaaccttttccccaagggaacggttataaaatagtggtaaaaaaattacttttttatagcagggg

SEQ ID NO: 119292 - DNA, 439 bp, Arabidopsis thaliana columbia
cagcactcactctacacaatctatgagaaagctcggccgcctgcgtgagccgggaccctatacaggggtcgacctactgctgttcgtccacgcctgcgaaggcgcgtgcggatgggatacacctagtaagctcacacgttagctgacacttaattcgttacgcaacatagtattaagagggagactacttttttatcctattaacggataggatgctatctgcacactcttggggaatcttgctacgagacaggatcgatagatgaagttcatcaaagcagtcatgaacagacacaggcgtcttctcacatggatcgagatgaatgcaacaacgctctgggccaagcttgctctgcttgttgatgtgcagaccataactttttgaacgtgcagccagaacaccggataactcctttcatagggggacactctgcatatt

SEQ ID NO: 119293 - DNA, 293 bp, Arabidopsis thaliana columbia
ctcgactcacatttatggagaagctgcgcacgcctgcaggtaccggtccgctatacacgggtcgacccacgcgttcgcggacgcgtgggcgaaatcaagatgttccaggaagattctccctttggatggtctgcggattgacatgactgactcatcaaatctcataacttctcctctatcctctggatctttactcgatgatccttcttacaagatcaacaattctttgtattaaaggccgatgaacaataagacagtacccgcaacatctatccattttggaaacattagtg

SEQ ID NO: 119294 - DNA, 513 bp, Arabidopsis thaliana columbia
ctcgacacacattagggagaagctgcgcacgcctgcagtgtaccggtccggtatacacgggtcgacccacgcgtccgcttttcaaatacagcaaagggtaaaggcttcaagcacaggggagcatcttaaagcattagcagtggagtcttccaatgctgactctgtatttcaacagctagacaaactacgggcagtttttgaagaatactcgaaactaactactttatttatggctgtcgctgagaaaactttgcacgagcatacagaagagctgggtcagaagtctgagctcttgatgacgatcaggaatcttgccagatatagctgacaagactccattgaagcactggtgcaacccctcgaaatgctgacaggatcttttagagaatcgtttcccaccaaaagaaaatcggacatcttgaatataagccttgcttctacgggcgcttggcggttaaaactttgtggagaaattccaatcagaaattaaagttgctttccacagcaccaaag

SEQ ID NO: 119295 - DNA, 502 bp, Arabidopsis thaliana columbia
ctcgacacacatttatggagagctgcgtcacgcctgcaggtaccgggcacggaattcacgggtcgacccacgcgttcgtgacactgtccacgggacaataatgtctatggtgccactgtcatccctaaagcaccggccgttggagcctccagatacgcaccatggcgcgcaagatgtggatcattaactgcccttgacgtaagagcgaacggggttcattgttctttttttgcttgctagcacgttcagagagataccatgaggtgaagaatctataagcagtatggagaaaattccgaactagcagggagatggctcctcttagctcgggccttcaaggggacccaccaaataacacccattgggttttctttaggtggggaataaaaacaaggtggggttgaaaacattttgcagaaagggagttcttgtagctccttggtgacgggaacaccgccgttaaataggaaaattagagaagatcattatccttgttatttgg

SEQ ID NO: 119296 - DNA, 493 bp, Arabidopsis thaliana columbia
ctctgacacaatttatggagaagctacgccgcctgcagtgtaccgggacgctatacaggggtctgacccacgcgttcgcccacgcgtccgcctaaacccggaacccttatacacgcggagatccaagacgagccactatggatcatcttcgcgcgtgacatggacatataactcaaagaagagctgattatgaactttttcatgactatctacggccgaagagttttcttacacgttgctggtggcgcgggtatccccgtccagtacgtgaccaacatcatcatccacggtgttcacatacatgactgaaaaagaaaagggactggctgcgttcaagactctccgtcccattatgggagggggacactgtttgatggtaccccgtcttaattttggggggtcccacttttgttagccaatgctcgatggcaacatggctgaaggtctgtttaacgaatacttggatcacggggccttactttgtgtcaccctt

SEQ ID NO: 119297 - DNA, 519 bp, Arabidopsis thaliana columbia
cagctacactctactcacattatgaggaagctgcgtcacgcctgcagtgtgccggtccgctatacacgggtcgacccacgcgttcgcggacgcgtgggcggacgcgtgggttaggattaaattaaaggatctgctgtggtggaagacgacggcacgagcttcaccgaagagcgaagatggtgaacattccgaaaactaagagcacttactgccagaacacggagtgcaagatgttcccttgcccatggtgacgcagcctaagaaaggtaaagatagccttgctgcccacggaaagcgtagatatgatcgtatacaatctggatatggaggtcaaaccaagcccgtcttccacaacatggctaagacaactgacaagattgtgctgaggcttcaatgccgaagctgcaagcatttgtcgcaacgcccgattaagaggcgcaagcactctgagatcggcggagacaagaagggaaagggaacctttctcttttaagttgttgtgcatatatctactttttt

SEQ ID NO: 119298 - DNA, 469 bp, Arabidopsis thaliana columbia
aagctacgcacgcctgcaggtgccgggcacggaatacaggggtcgaccctacgcgtccgtgcacgcgtacgaatcaagcaactggatccagactatgacagtgctttcttgccttatccactatcagccaggatacacaaactggcgttttaaggcccttgaacaggtgtcgcagaagtccccgcccggaaagaatacagaatatgtttttttcaggggacgattatacacgaccgttgctaggccagtgaatgcctgagctcatcttcatgagctattggtaaaaaggggggttgttcaacagtggtggcgcctgatggcaactatgcagagccaacctttgagggacccgccatgaacacccaataagggcttagggtccagtgtgattgaggagcgcctgaacgagcttgcgaccgctccgtacaaaaacaaggccccttggggggagaaaccaggccccccgatg

SEQ ID NO: 119299 - DNA, 477 bp, Arabidopsis thaliana columbia
gaagctacgcacgcctgcagtgagccgggatgctatacaggggtcgacctatcgcgttcgtttactgaaagcacacgatatgcattttaatcaagcaaggtttggctgtctgcgttatacacagactaatcgattccgccaacagagcggactggaggggataaaccgctataaaactatgcctgttactggaagagtaactagtgtgtctttgttcttatctgggcttgctgctctgatggaaaaggatttctgcgctaaggtagcatgtggctgaaaatctatagtatgaggcgatgtgtcctagtcgacaatgggttctcacgactacgagagcttaaccgttccaagaatgatgctctggctgagaaaagacccagacgcaatcatcaaatggaatttattcaatacagcctttcatatcttcaacccgccgcttgaggaccccaagggccctgaacgccggacctttactag

SEQ ID NO: 119300 - DNA, 528 bp, Arabidopsis thaliana columbia
ccaggtctactctacaaaattatgggaagctactgcacgcctgcgtgaaccgggcaccctatacacgggtcgacctatctgcgttcgtttcttcttaccgtagatttcatctaactctccaataaggccacctgcgttcatggccataaataggcttagaaacgattataccgcctttacgtggttggtgatccacaaagagattacctttctgggaggaaatccatctcccctttgatgaggagtgggaacaacctgtagtcaggccactaggggagacctttatattaaattccttggaggaatggtcctctgggttcgattggagtctccccttacttgtttttgacccctgagagaattcctacccggctatgtgctatgggtacggagggaagttccacctttccctgagtgggtggatttaaggggggcacctctcatggggaacccccttataaaccttaagggagtctcccattaaagaaagaccatcccggggtttaaaaaagcacaaagggaaacccg

SEQ ID NO: 119301 - DNA, 408 bp, Arabidopsis thaliana columbia
gctctattctgactcacatatagggaaagctggcacgcctgcaggtaccggtccggtattcacgggtcgacccacgcgtccgatttacgaccgtggccttatcggagccactcatgattggtgtgaagcctttgacacatacccacgaacgtttgatcttatccacgcatggaacaccttcacagaaacccaagcacgtggatgcagctttgaagatctgcttatcgagatggatcggatactacgcccagaaggatttgtcataattcgtgacacaactgacaatattagctatatcaagaagtatctgacattattgaaatgggataaatgggccacagagacaactccaaaaggtgatcctctgtcgaccaaagacgagaaagttttgatcgccagaaagaaact

SEQ ID NO: 119302 - DNA, 517 bp, Arabidopsis thaliana columbia
  unsure (1)..(517): unsure at all n locations
caggtacaactctgactcaatctagggaaagctagcgccgcctgcaggtaccggtacgcaatacacgggtcgacccacgcgttcgagaagacacactaatagaaatccttgctacgttctattacacgacttccttgtactatccacgaatgctacacatacaaacaatcacctcccaaggtcaccgactgtgtattacggtaaagcatgctggaatgtagaatcaatagttcggcccgcgggtgagtctaactatgttgcagatgcaatcaatgctccatgcattattgcgtatgcactatcacgattggaatcgttcaaggctgtgacgcctacgtgctcctaggcggaacatacctctgagctaacggcgatccacaatctattgatgagagggtttactgtctttggaaaagctcctactcaactcgagaccgatagtactaaaacagaacccttgggcctaaatccttgcactcgatggacgtgaatttcgagcatanggccgggggacccg

SEQ ID NO: 119303 - DNA, 483 bp, Arabidopsis thaliana columbia
ccccccgttccccccgggcctttccctttgggtgggggacattaatgggaaaaaaaaagatttttatttcccacggcgcccctcgacagtgtgtcccgcccctttccacccaaaaacacacggcccttccctcccggggttgttggggcccccacccacgggggggcccccaaaaaccaccacaacccccccacattttccggggccggccgcgccccccccccctctcctctcccacccccccgcttcgcgctacacgtcgataaaactgatctgttatacccccctcctaacggccgctcccggcccgcccccaccacccatcactcccgcccccccctgccgctgctcccaccctcgcgggcaccgccgcgcctcacacaacgcgcccggcccaaaaccctcccctgctcctccccaacatacccgtccacccccggcgctcaccagcccccgcgacgcctccccctccgcaagcccctt

SEQ ID NO: 119304 - DNA, 560 bp, Arabidopsis thaliana columbia
  unsure (1)..(560): unsure at all n locations
cccccccgggccccgcccaaataaattttttttcaagggcagaggcggcaaaaaaaactttttttttttctttcccccctggcccccgaaaagccgggggaaggcccttttttttttcaccccccccacaaaaaacccgggtcctcttttgcccccccccccccccccaaaaacctaaaaaaaaaaaaattcttcttggtctgccgggacnccccccggaggggcggtcaaaaggagcgaaacccccctctttctccccgcttcctgntccccccccgtggggggggggggcgccctcttctgcccgcgccccctcccaaagggggccggggtccgcgaaccccccacgcccctttgggggtcttcctctctccgcgcgcccaccgcgcccgacccacgacctgttcttttgccacccgcaccccccacgcttttctctccgcccgcggcgcgggctcgcacccgcaaccgacaacggtgactcttccctctttagtgcgcaaaggcggggggcggcgccgagcctccccccccccactccccttccacacccgcggccg

SEQ ID NO: 119305 - DNA, 388 bp, Arabidopsis thaliana columbia
  unsure (1)..(388): unsure at all n locations
aaaaccccgcccgcgccacccccgagcggaaggaagggacgccacgccacccaacacaagaaagaacagccacacccgaggacaggcgcagacgcaacacccaccgcaacaacagccactttttttggggggggggaaaaaaccgccccccncaaaaaacaaaaaactagtacctcagagctacggagggcccacaccccgagagacagagtgcgctaccgagcctccaggccgacatagcactcgcgccagcctacacgcttacaagatgcccgacgtacgcgaagcgccaaaacgaagaaacgaagcaggacgacgcgatggcaccgtcgccaggatgcgcgcgcaaatgagaagaaagagcagagagaaggagcgaacgagaccc

SEQ ID NO: 119306 - DNA, 252 bp, Arabidopsis thaliana columbia
  unsure (1)..(252): unsure at all n locations
ccccccccgccgcgccgggggcggccaggaccgtggcagcagggccgccgccggcagagggagggcccccttacnaacacgcgccacccgacccccccccccccgcaccgagagcaccgcccgcccttttgttgtttggatgttgcgcggaacgcggagacaggcccgcccatggaaaaaaaaatgttcgttgcccggttgctgttcctcgcccttcccctctccactatcgttgtgtgtgctctctgcctc

SEQ ID NO: 119307 - DNA, 503 bp, Arabidopsis thaliana columbia
cgagggacgaaccgccccgccccaaaaggaacaccgggcggcggggcgattttttgaatggggggcgagagtgcgcgaagaaacaaacaacgccgaggcagcgcccggagcaccgggctacgtgagtcgaagtcgtcctgtgtagtgagtaccgtagactgcgagtagacggtctgtaggataggagataaaagcagtgaagcagcggcgcggcgccccgccggcactcggacccacgaagagcgggacgactttttcttggggggggtggagaaggaaggaggcacgccagccgtcaaaaaaaatcgcggggagttctccgcggacggtacccacagctccccccctgacacgctagaggcagagccgcactcgagccaaccgcccgacgcgacgtggggagtgtaagtcgagtcagagtccataccaggcgtcgcccgacactaacgctcgcgccgtccgcaccggcgcccgtgggtcgcgcgttgcatgccgtgccccta

SEQ ID NO: 119308 - DNA, 692 bp, Arabidopsis thaliana columbia
  unsure (1)..(692): unsure at all n locations
aagcccccccccaacttcgaaaaaaaagaaaccgcccccccggccgggcgacacggggaacaccgcgccgcttgcganngggcgcggagaggggcgccaaaaaaaaaagaacgggggcggagggcgccagcccggcgacacgcacgccgagcaaangaggaagcccgccggcaacacagaccgacgccgcgcggcagcaggatgggaaggagacgcgggcaggaaaccgccggcacgcgccgcgcccgcgcggcagcccaggcacagacggcgccggcggagcttctttttttgcgggggggtggaaggagggnggggcagaccgggcagnggcgcgcacgaacaacaagcggcccgccggggcctgaagcggggagcgcggccggcggccgcacgcggggacggcacgcgggcggcacggccggaacagggaccccgggccgcaaaggcgcgcgacccacgcgccccgcgccaacgcccaacggggacgaggccgcgcgggcatcggcacacgcggcacgaggccacaccgcccgcgcccccggggccccgccgcgcgggaacgctgagcacgggcagacgacacagaaggagcgcaccgcggcgaccacggcgaccacgcggcgcgccagccaagcgcgcaccgcgcacccggagcgacagaggcggcgagagaagccgcacagggcccc

SEQ ID NO: 119309 - DNA, 431 bp, Arabidopsis thaliana columbia
caagagaaacccccgcggccaggggacaagacatttaagcggggaaaggggaaaaaaaaaagccgcagggaccggcccagacaggacggaaagagggccggagcgacccacccccaaaaagaaatcaacgccgggcccacccccgcagcgacagacgcccgcccgacttttttgaggggggacaaaaaaaggaaaggaaagagaaaaaaaagacaggaacacagaacaacgcacggccgagaagaaggcgaagaagagcaagaccacacccggcacgacggacaacgcagaccgaacaagggcaacgccacggagagcggcaccaacaccgcggacagaacgcaaaaccaaagcaaacgccacccggcaacgaacagcagaagaggcgaggaaccggaacgacaacaagcccctccacgcacggacaagac

SEQ ID NO: 119310 - DNA, 414 bp, Arabidopsis thaliana columbia
ggaggagagaggaggggcaggaggggcccgcccagcgcggccgcggcgcgcgcaggcgcgcgcccaggaggcgacggcgcgacaccccaccaggccacggccatctttttttccgggggggggggcggccgccgccaccacccgcgcacgccgccccacgaaagaacgcgcggcgacccgccgcagggcgcggggagcacggcgcgccgcccccggcccccgccccgcccgcgcccgcacggacggagaaggggcggacccctcgcagagccaccgcgccacgacgagggcgagccggcaaccagccaccagaaggccggccccaacggcaccgccaaccgcgggaccgcgccccgcagcccgaacgccgccgcgcccgggcaccaaccggaggggggccaggacgaaccggcg

SEQ ID NO: 119311 - DNA, 429 bp, Arabidopsis thaliana columbia
  unsure (1)..(429): unsure at all n locations
ccctccttcctccccccccacactattgtccctcccttgttttttaaaaataaggttgtctttaacagatttttttttgcccactcccaacgcanaaaccgcggacgcgtggagacgcgccccgcttccccccccccacctttttttttggcttgttggggcccacaccccggggccctcctaaaatcactgcaaacccctctccttccgtcttcgtctctcccccccggcatttcacagccatcatctctactcacaaaagttgtttgtaaaatttcccctctcccgttgcatatccctgtccaccaccctcaaaagcacaaaagatcgtgtgcacctgcttgcaacaactccgccggtgtccagagtccaccgcgcatctgtctctcatttaccgtacaacgcctacacccctctcccccctcacac

SEQ ID NO: 119312 - DNA, 562 bp, Arabidopsis thaliana columbia
gcccccttagggggggcggcgcaaaaattatttttctcttccgggggggagggggggccaaaaaaaaaacttttttttttttttttttgggggggggtgaaaggggaaaaaagaggggggggacccccttctttcaaagaaaaaaaaatggtggagcccagggggcgggccccattctcttacaattttctaaaaaagcgcaaccttttttttggggaaagtaggggttttttttttgggcgctctaataaacccacgcaaggtctctggtgcggcggggcgtggtgggtggcgccccctcgtggggggcgcgcccgccctcgtctggtgagggcctcccccctttgtcttgttggtggtccggcgggcgggcccgccaaatagtggtggacaaaaaagcggtgtgtttgtgggcagggccggggagaagaacgtccgccccccgtcctctcagcagcgaacacgcgactcgcagaccgagcggggggacagccgaacgtggcgccgccggtcgcccattatacggaaatccgtcggccgcgtcgctcccagtcggaccgat

SEQ ID NO: 119313 - DNA, 515 bp, Arabidopsis thaliana columbia
ccccccctggcgcgggcgacgacgctttttcccggggggtcggcggcccaccaacccacccccccccgcccgcccccccccggggccccgggggtgggccggtgcttgttcgtgtgccttttcggcgcgcgggccccggcccggcctcgtccggccgtttggtctgcgcgctgccccccccttttttttggggggttgccccgcgcccccccccgggcgcccgcagaaacgcggccgccgggggcgcgcccgggctcgcggcttcgggggccgatggcccctcgctctcctgcgctgtgtggtggtgttgttgttctcgtccgcgcagctgtcatctttcgttttggcccgccgccgtccctcccccctcctcccctcccgcctcgtgtccgtatgtgcgttgttcttttcgtgggcacgcctctcccgcgggccggcgtcccctgtttgcctgggcggctcgccccctcttccggctttctccgcgctatgttcggtggcgggaacgcggcgcc

SEQ ID NO: 119314 - DNA, 176 bp, Arabidopsis thaliana columbia
  unsure (1)..(176): unsure at all n locations
ctgcaggtaccgggccggaattaattcctgggcnacgagctcactaggcggcggccacccttttttttttttttttttttttgggatcaaggtgggcttttgctcttaagcaatcaaaatttcgaaatcggataccacaaaaggcgtcaaaattcccccaaaattaacaaatttat

SEQ ID NO: 119315 - DNA, 449 bp, Arabidopsis thaliana columbia
  unsure (1)..(449): unsure at all n locations
ctatccattagcgggtaaggcagaaacacctccctcaaggggtaaaatgaaaaaaaaagaaagggccgggtccaaaaatgcccaaattacccaggccgtttattaaaaggataaaggtttttttgggagtgggggnnnncaaccagatccctattgataaaaagaaccaagatttgagttcccaggagatttatgggcattgggaataccggggggggggggatgataaattcacccgtgatgaagcttaaggagcccgggaaaaaagtggggttaaaatggttggcttaaacccccgaaaaccccccctttttcttccactgggaaaataacgggtattgcgaaacgcggtgggcctcaagggatgggggggttacaacaaaaccgagtcccccatttcccgcgcaaccctgtgtaaaggcttctttcgaaaaaaaacgcaccccgca

SEQ ID NO: 119316 - DNA, 423 bp, Arabidopsis thaliana columbia
  unsure (1)..(423): unsure at all n locations
aaaacatttttcanacccaaaatcctaaattcttttcctttantaaatcaaatttctttacattaatcnttanaaaattagcccatcccatcacacccgttcttcaggaactaaccccccccacccaattctacccttttttcaccagggggggcnattnnttaccccactaaccaacaaaaaaaatggtttccgtaacttaagagttaaaggtcacacccacttttaagggggcaccggtttctttaaaagcgtttttttccgcccttttgtttcttttttccccctaaacattttttattaacccatttggaattggaatggtttttttataacaattttttggaaatggatttaaattttttttcttctcccccccctaatgaaaaaacctcttttttttgattattattcccgaaaaac

SEQ ID NO: 119317 - DNA, 502 bp, Arabidopsis thaliana columbia
  unsure (1)..(502): unsure at all n locations
ttttttttttttttntttttttttttgggagaagaaaggcgtttataccttctccccacccccagggggcgagaacaaatttatatttaaaggccctcgggggggggggggacccccaacccccacccccctatgatgggttccgcccaccaaatttttttcggggaagatggggnacacaaaaaaggggggtatcttaaaccacgaaggggggggggaggaaaaaaaaaataactccccccccccctcccccagaacggcggggaaaaaaaaaacccacccccaaattccccaaaggggggtaaaaagaaaagggggccgggggccaaacaaacaccacggtgggcgcaaaaagaactgctataaaaaaacccccccacccttaaaggcggggctccccatttacccccggacccccccaccccttggtgggggtgggaacgggggcaaacccacggggggggggggggaatgaccacggagccctggggggggggggggc

SEQ ID NO: 119318 - DNA, 449 bp, Arabidopsis thaliana columbia
  unsure (1)..(449): unsure at all n locations
tttttttttttttttgggacattaaaccaaattctcatgggggcgtaaggagaactcaacttacaaggcttttttggtctatgcacctaaaaaaaaaagaggggtaacaaggagcacccggattctattttatgggacgcgggcatgtnntnntatggcaccccattaaaataaagaagggcgcccccctattatcggggggagggggcccccctaaagggggggggtgcgccccccaaaaaacgggggggccccacggggggtgcctgaaaaaaacggggaactatgggatgaggggggggggaaaaaaggggcaatccttagaaaaaatcttttcttaaaaaaaaaaaaaaaaccgggaaaaggttttttaaagggggctatgggggggggaaaaacaaaaaaaaaacccacatttcccagggttccaaaggggaagggcggaggga

SEQ ID NO: 119319 - DNA, 502 bp, Arabidopsis thaliana columbia
  unsure (1)..(502): unsure at all n locations
gtcgggggggggggccaaaaacccctttttttttttttttttaagaaaaaaaatttccttaaaaaaaaaaatgaccgcccccgggtaatggacaaaggtgggcgtttgaggagtggggcgccgggaacaaagaaagaacacccccctaaacgcaccctcctttctttttgggggtcgaagggggggnttnacnggggggctcccccaaaaagcataaaacggccggggcctaaaaggtggggaggggggcaaccggcaccgggcgcgcgttgccggggatatccaaaggaaggctcccctcggggggttcaaccttggaaggggggtgcccgacgacaccccccccacaagggcggcccggggaccgcgggagagggggggcccccgggagaaaagacgcggggacgggggcgccccaccgcgggattggaccacgcccggcggggcgcctaagcccgagggaagacgcggagggccccgagcgcgcggtgcggctcagcgc

SEQ ID NO: 119320 - DNA, 153 bp, Arabidopsis thaliana columbia
  unsure (1)..(153): unsure at all n locations
attcnnctccagtttctctctgtgtctggggcattaaannaaattacctcctcatanattctccagaaaacacttccatggggactaaagatatatcgggtactactctatgtatgggcatgtggagaaatgggctgaagaaataaggaaagg

SEQ ID NO: 119321 - DNA, 323 bp, Arabidopsis thaliana columbia
  unsure (1)..(323): unsure at all n locations
ttttttccttttctttccttaaagggaaaaaaataaaacctttttcaagcctctaaggaagcgaaaccccctctggccttntcgggggaaaggcggcaaacaagaactgggcccttggaaaaaatgctttgcttggaactcccaagctctggtgggcgggccttaaaacccggctcctgacaaatgggcccaccctccataggggggctccccccttttcaaattcttcaatttaaaaacttcccggcgccacagggggggaccggggggggacaaaaaaacacccccggggggagccacagtggagttattggccgggaaag

SEQ ID NO: 119322 - DNA, 468 bp, Arabidopsis thaliana columbia
  unsure (1)..(468): unsure at all n locations
ttagggaaagcacgtacgcctgcaggtacccgggccggaattaattccctggtcnacgggctcagtactcggcgggcgcccttttttttttttttttgaaaagcgttgaaattaaattacttcacaacaacaaaaataaaaacaaaaacatccacggaaaaacaaatatagggatccattctaccacccaagtgctttcactgttctgactcaaaatatataaaagctgggggggagcctttcgcaatcgaggtggtcggacaaatgcttttggtcaagtaaaagcctggctgaagttctggcccagccactccatttgatttggccacagaggtttgagacttggtttgggatgaggaaactctctagcctagagggtcaggggtcgccttaaaatggggtttgaaggacctctttgggaaagggtctttccaggggattaacgaccctgttttcggtctttttttt

SEQ ID NO: 119323 - DNA, 439 bp, Arabidopsis thaliana columbia
  unsure (1)..(439): unsure at all n locations
aagattatgacgtcgaccgcacgcgtacgtaagctcggaattcggctcgagttgtaaagctggggagggtcgactaaaagaantaggcgtctttgggtgtgtccggaaatgccttggtactcccncttaactgtcagggcagtgttcaagatcggggtggtccgggtggcatcaagccccatccacgtgtcaaggactgtgggcctctcttctcttaagaaaaagcccatcttcctgcggagtgggcaagggctgtcctctcggnacctagcgatgagcctcgcccacgggggtatgggcccctgacagggagcacccttctttgccctgagggggcctttttgggaaaggaccagaagatccccagaggtacttaaaacggggggacagtttgcttgggaaattatatgcgttatacaccccattttggggccttggg

SEQ ID NO: 119324 - DNA, 642 bp, Arabidopsis thaliana columbia
  unsure (1)..(642): unsure at all n locations
acccgcccccccgcggaccgcaccgcgccgcgcccggcagccacctttttcaacccccgggggtgaatgcttcccccacacaaaaaacgcaccgcccgccgccggcgccccgccgccgcccccgcccccgaagaccgcgcgcggcggagaggcaacgccaggtaactgtacgcgggtgcggcgccccccgccccctcttcccggatccccctccgcccgccacgcgccgccaccaacgcgcgccnacccgcattttttttttcgggggggtggggccccccgccgcgtaccgcgcgcgcgcgccacacaaaaccgcacccctgcacttcacccggccccgccgcgcggcccgcccccccgccccccacctcgccgcggtgtccccgcgccgtgggggacgtgactcctctccctgatgcggccccagccacgccggcgccgccggccgcgcggcactcactcgcccaccacgtccgcccgcccgccgccgccccggcgcagcgcccgccccgccccagccccggcacgccgtccgcacaccacccggggtcgcccgggcggccggccggcacgccagctcgccgcccgtgccccgccgtcagacgcccgacgcgcacgtccgcgccaccgaccctccccccc

SEQ ID NO: 119325 - DNA, 261 bp, Arabidopsis thaliana columbia
atccccactgcaccaatccgcacgcccacgatcgaattagactatagagagttattccgtgatcataactaccgcgcctagcaatccgctactctttattgtaatgcccccccgcgagttttttttttaagggaggggggacggtgcatagttcctactgacctggagaagaaacaaacctcactcgtgatgtcgtagtgccctgccctccctgtatcttctaactgcatctccgtcttctctctgcccgccgcactcttc

SEQ ID NO: 119326 - DNA, 324 bp, Arabidopsis thaliana columbia
  unsure (1)..(324): unsure at all n locations
cccccccccttgggggggcccaaaaaaaaaaaccccccaaccccgaaaaaacccttatttttctactctgtagggagcagaccgccntccatcaggcttaaaagaaaaaagaaataggaactatcccgccctacgcactttttactaagatacaaatcctacaaaacnttgtgacgacacacatggagcgtcatttccatactcttgcccactggacgcactaaagcgcccgagacgcctacccgcttcccgctcgccgatagcccgcagcacactataaaacttgaactcgcataattactttcagttgaacctcacactgca

SEQ ID NO: 119327 - DNA, 614 bp, Arabidopsis thaliana columbia
  unsure (1)..(614): unsure at all n locations
ccggtcaaaaaaaaaaaaaaaannnnnnnatttttggaaaggccccgcnaaattgaggggaaggaacgtgccccctccaggggccacggcccgaaataatatctttttnaaggggtaagggcggccaaaaaaaaccttttttttttttttttcctttaatacccctccgttttaaaaggaggggggggaggggggttataaaaaaataaaaaaaattggttttcccaaaagggggccaattctaaaacaaattttaaatggggccccaattttttggggaagttggcgtaacaccaacaggggggcctaaaaaatcattaaaggggcccaaggggtttaggttttttttgccccacaccgaggggtttttccaaaaaaactaaaagccttgagcaagagggggggggtcttggccccccggtccgggggggggagagaaaatcccccaaaaaaaagtggcccgcggctgtttacaaaaagacccgcgagaggggcaggggaacattctgttcgttcaacccccccccccgcggcgaaaaaagccccctcgcggaggggggcgacggggggagaaagcttgtgttcgcctctttttagaaaagagggcggggggg

SEQ ID NO: 119328 - DNA, 494 bp, Arabidopsis thaliana columbia
  unsure (1)..(494): unsure at all n locations
acagggggggaagcgcgggaaaaaaaaacccggggcccgcaggcggagagnaccgacacaacacagaaacagaagggccagggcacaaagcagaaaaagagaagagcggcgggcgaagggggcgccagaagaagaaagaaagcaacaccacaacagattttttttaaggaggtgggaaaacacacgccggacggcgaggaaaaaaaaaacccccgcgcggcgggcgccggaaccgcaaacgaacgcacacgacgcacagaacacggaaacgccggaaacaccaccgaccggagcgcgcagagcagcgcgccggacacgggggagcaagacgagcgccgacacagacacagcacggccgcccgaccacgacaagaacacgccacagaggacagacgaaaagaaacagggcgagaggcggagcgaaggagaaacgagaacagtagaaaacagaacacaaagacgagagacaacgcgaacacgaacaaagaggcacg

SEQ ID NO: 119329 - DNA, 551 bp, Arabidopsis thaliana columbia
  unsure (1)..(551): unsure at all n locations
tttttttttttttatacaattcttttccanccnaaaaattaaaccccttggcccaaattttattcctttnttttttttttaaattatcccccaataaaaccccttttttttcaataaaaaaacaaaaaaaacagccccttttttttcggggtgtggggggcccnccccccccccgnncaaatttaataagcagggaacggcgccccctggcggcgccaccccacttttttccctcccccggggggcgcgcgcttaaaggcgccgcggcgcgcaaaccggggggaaaggggggtgggttcctgcggaaaaaaacctcgttccgccgggaccgcacttcccccaccggcctctcgccgggccggcacccatcttcgcggggcgcgggcccgggggccgcgccttgggtggcgcccgcgccactcgcatgttgtggtgcgcgggccgcgcaccggtggggcgtcgttttcagggggaccgagcctcggcggcccgcgcccccggttattgtaactcancctcgcccgccggccggagccggtggcgcgcctctt

SEQ ID NO: 119330 - DNA, 412 bp, Arabidopsis thaliana columbia
  unsure (1)..(412): unsure at all n locations
ccccccccaatttagngggggaggaacggcccccctccaggggcccggggccgcgaataaaattcctttgtcccccgggggtgaggggcgccggaagcacacctttttttttttttttttaattaagaacaagggggtgtgtctcacccatattcaacagagaataaaaggaatcatcaaggggccaggggttaaaggcccacccgcggaagaaaacgcattaaaacaaaataattttttggcgcccccccccttttattttgggaaagtagggggaaaaaaaggggggcgcgcctctcccaccaagagaaggaaagggcctcacccggcgccgcgggcagggcgcacacaaacaacctgcttttaattagggggcgccccaaaactagaaaggcccgggcgggcgccgcgc

SEQ ID NO: 119331 - DNA, 564 bp, Arabidopsis thaliana columbia
  unsure (1)..(564): unsure at all n locations
aaaaaaaaaaaaaaannnnagntttttgggtacaccccacnactnnnnnnnnnnnnnnnnnnnnnnnnnnnnnnnnnnnnnnnnnnnnnnnnnnnnnnnnnnnnnnnnnnnnnnnnnnnnncttttttttttttttttcatggaaaaggctgttacgcaagaaaacgaaatttcagaggccagtgacaccattctgttcttgtagcatttggggacgtgtttagattacaactaactgggaagaggaacctttttatgctatgctggagagaggaagttctccactgtctaaaaaaaaccactttgctcttaaggagtcccgttttgttgccctcagcttcaatcttaaaaacacatccattccttggacccattttccaaaacaccacatggcttacatataacagggtgtgttgccccggggggaaaaaaaaacggggacccatggggggccttccccggagttccccattgaaaagaccccctgggcccaggggctttaagttgaaggttctaacaaaaaccttcgggcctgaggtggttctccacccaccccggccccag

SEQ ID NO: 119332 - DNA, 223 bp, Arabidopsis thaliana columbia
  unsure (1)..(223): unsure at all n locations
ggggagaaaaaaaataaagngcgcgcgatcgtgggtggatgggatattgtacggatatatagtcggtgcccagggtccgcgcagacgcttagaactcgctgtaagcatcgtaggcggatagcgtgatgatcgataagagggtgggtgtatagagcagacaccgcgacaacacgaacggatttttttttttgggggggggaagagaacgcgagcaagagaccgg

SEQ ID NO: 119333 - DNA, 420 bp, Arabidopsis thaliana columbia
  unsure (1)..(420): unsure at all n locations
ccctttttttttttttttttttttaacaaacaataaagcctttacattctttatttcccaaacaatattagggcaccaatcccggattaaatattaaccctatacccattaaaatctttttttggcctgagggccttcacagcgcatgaagataaaaaaaaaccccaggancctctttttaacaaaacccaccaaaaaacaacttttctaaatcgaaaaaccggaactttttcaaacgggcggaggaccacgtagaaaaaacccacccccccttaaaaagctttccccaaaacgcgggacccttaaccccccgggggggccacccaacccaaattggacaccccttttttttttttttaaatccaaaaaccgggagaaacaccccaaaaaaaaaatccctaacccccccacaaaaaaaaa

SEQ ID NO: 119334 - DNA, 391 bp, Arabidopsis thaliana columbia
  unsure (1)..(391): unsure at all n locations
aaaaaaaaaccggcccacgacgacgcccaacacggcgacgcgnggggacagggaaggagaggaagaaacgaagaccaggagaaggggacgcgcgnccggcaaacgaggacagcgaaacacgacgagagacgcgagaaccgaccagaccacnctttttttttaggaggtgggcacgcaaccaacagagagagggcgaacaaaaaaagaaagcggccaggacaacaaacaagggcgggtcgacagcgaggccgccacacggaggcgcaagacaggcaaaagggaagaaggaagaaaagaacaaccagagcaacgacgaggcaaccacaacaacagacaccaagagaaaaaaccagagaagcagagcagaccggagaggacggaagcacgaagg

SEQ ID NO: 119335 - DNA, 512 bp, Arabidopsis thaliana columbia
  unsure (1)..(512): unsure at all n locations
accccatcactttagggaaagctcgtacgcctgcaggtaccgggccggaataattccttggtcaaggagggtagtagtcggcggccacccttttttttttttttttgctacagtcactctcatatgccaaaaagccaaatgtggggaaaataccaccaaaaaaggacagggagagaatggaacttcaactacaaccaaactcccgaggattcaaacagacaataaagagggtggcgctgttttaaacgaggggnaaaaaaaaaaaaaaaaagaccattcctttacagaccttaatgcataaaaggggggataaagcctaccgggccccagcagggaggtttagttactgggtgaaaaccgcattttccactaaccctaaaggctaaaaagaaccctccaaaaatttgattttttaagaaaaaggaaaggggggggacccggtaaaaatggggccttgggggggccaacccaaacctggagaactcttatttgggctccaaccaaaagggccc

SEQ ID NO: 119336 - DNA, 633 bp, Arabidopsis thaliana columbia
  unsure (1)..(633): unsure at all n locations
tcccaaagaccccccgcccaaaaaaaataattttttccncgggggcaaagggcctcgaaaaaaaaaacctttttttttttttttttttcaccccaaaaaaaaaaatatttcattttattagctactgcccaaacaaacaaacaacaaaataattatgcccaaaacccccaaactttttccaccgcctaattgtctttcaaaaaataaaaaaacccacactctcttttttgggaggggtgggggacannnaacctcgggcgcgggtaaatatccagcaaaccccgcggccttgtgtttatcccggcacacgcccctccccccacgcccagccgcgagaagcaccanccgcggcgccccgcgttaacacccgcttccctccctctcttttataaagaaaagacgccaccccccgtgacccgccccgcctcctcaccataacaaaagagaaacaacccccccccgcgaccccataacaaggccccaccaggggcaacttcctaccactccctagcccccttccactctttcccctcacatcaaagaatatcccccacgcctccggtcgccgtctagacacctcctcattctctgccgtccatcaccctccgtgccgccccttcacactcccaccac

SEQ ID NO: 119337 - DNA, 478 bp, Arabidopsis thaliana columbia
  unsure (1)..(478): unsure at all n locations
cctttttttttttttttttttttttnttttagaggtatatgggggggggcattagttcaaaaatttggaggcaccccccttattttataacaaaaaacccctacaattgtggtttgtttcaaaatcaccccaaagattcccacattttttttggggggggggggccccccgagaagggggtttttaaaaaaaaaaaggaggggggtgaagaaagggggggctgtttcccggggggaggtttcaaaggggcactttatttttctttcccagggggggggggagcctccccaggactaagaggccgagatccacacggaggggcccttccctttgctacacaaataaaagggcacaaatcggaatgggaaaacaaaaaaaaagggactggggagttttaaacatttgtgtgggcaaaaaaaaaaaaaactcttatccactccgagaagtgggcagggtaaaaaatcaaaacgggaaagga

SEQ ID NO: 119338 - DNA, 420 bp, Arabidopsis thaliana columbia
aaaaacaacccccacaaaaagaaagaaaaaacttcaacgggcaaggccaaaaaaaaagaccgccacagccccaccgccaagaaaacagaaggcaaccgcgccagaccaaagaaaagggaggggagggaaggcgacgacaagacacaacaaagaccgcgtttttttggagtggagaacaagccggcacgccaaaaaaaaaacgggggggaccggagcacaggacgcacaaaaaagaaacaggaacaaccacggaaccagcgggagaggacaaggcagcgcggcaaggccagccgcgagaaaaaaagcaaaccaaacacgggggaagcagcacagagacaacaccacacaacaaccgcgcaccgcgcgcaccgaaaggagcaaaagagccgaaccaaacacagcccaaaaaaacaaagaaag

SEQ ID NO: 119339 - DNA, 477 bp, Arabidopsis thaliana columbia
  unsure (1)..(477): unsure at all n locations
gaaaattaaaaaaannnaggatttcgggctctaaaccactcactttagggaaagctcgtacgcctgcaggtaccggtccggaataattcctgggtcaacgggctcactagtccccggcccccctttttttttttttttttgcagaaacaagcattgggcttatttattataagggggtacaaaacattgaatgcttggggaattgttttatcatcttctaggatgcccttttgaacataacctttattggacgagagtgaaaggaagtcttttctttccatataaaacaaaccactccaaggttttacagatgactttgcaaaaattggcgaccggaggacaaaacctgggccttgtaatcctttttcaaaatttggcgaacctttaaccaatttattaacccgggtttctgacccgggaattccctttcaacgcccacaaggtgaaatgaacccattggtttccgccccctccggc

SEQ ID NO: 119340 - DNA, 467 bp, Arabidopsis thaliana columbia
cgcgcccgcggcgcagacgggggaagaaggaaaaagaagaaagaaggaggaagggggaggagcgcgagcccggacgaggggcgcgcacgccaacgaagcgagcgcgcggcggccgcctttctattagggggggggggaccccacccaaaggcctcccaaaaaaaaaaaccccccagcccggaaaagacgccgagccccccgcgcgcgcccgccggccccagcgcccaggccggggggtgggcacaatgaaggccgccgcggggcgggagtaagcaagataccgcagaacgccccccccctaccgccccgccgccggacgtccgcgaggaccccgcggaccacgcgcgcgcgccggccagcgcagccccaacgcacacccaccacacccccaacgcgacaaacacaccgatcccaccacacagacagcaggacacggagccaggcacgagcagcacgggcgcgcacat

SEQ ID NO: 119341 - DNA, 334 bp, Arabidopsis thaliana columbia
  unsure (1)..(334): unsure at all n locations
cccccattggagagggggaaacgggagcccctccgccgcggcgcggagggctgcatgaacctttttttccgccgcgggggggggggggtgggcaaaaaaaaaaccggccgccctccgccccgcgcgtcccgtgaacgtagtgcgttgcaatcgccgacgaggcaccccggcgcgcgcgccggctgtcgatttgcagggtgtgtgagcgcgaggcgggtagcgcgcgcgtgcggtggtcggccgcttgtgcgactgatgtcccgcgcccaccacgccgcttttttttttatgtggggggggggggtgagggcgncgcgcgcgacggccggcgtgt

SEQ ID NO: 119342 - DNA, 454 bp, Arabidopsis thaliana columbia
ttttttttttttttcatgaaggggggggcggtgttttaaacccccttaaaccccaaacccccctaaagggaaaaaacgcgggcctgaaatttcctctcggttgaaaaacacccccccaaacccccaaattatttttgaggaagtttggacattccccgggcggccctcttaatgaggaaagagggggggccaattggcaccgggggccccccccaatagccggaatttgaaacgagggggcccccccctcccccggggtggaggaggggaaaacccccccggcccgggggggaacccttccaaattttcttacgcaccccagcccctttaaagtttccgaaggaaaaaatacagcggaggcccccacagcccccccggataagaaattcgggcccccaacccccaaaaaaaccccttccccgccgcttttgggcgaggagggttttccccacgc

SEQ ID NO: 119343 - DNA, 324 bp, Arabidopsis thaliana columbia
ccccctaacatattcgaaggggaaaaccaagctgtctatgacagcacgactctaaattatttttttgtttaggcgggggaagggccccgataaaaaaaacttctctattggtctttcaccttttctcccgaacccaaattctgtagaacgctctctctatccgacatatttataattgaatgcacaagggacgcgtctcacgaagacatatggaacgatacaggaaccccacctccctaccgttttttttgcggaagaaggggaatgtaagacacggcgaaggagttataaaaaaaaaaaaaatagtcgcgtacgtttattgtg

SEQ ID NO: 119344 - DNA, 337 bp, Arabidopsis thaliana columbia
cgccccccgacctcacacctatctttttttattgggggggggggcggtgggctaaaaaataaatctccttgccgggccggccttcctcgccgcgcgtgtcgctcgtccctcttctttttttctattcctttctgactctcaccgcgtttatcttacggtgcgtgatgtaatgtcgctgttgttaggcgccgtcggcgcttccatcccctcactttacgctcattccagcaagtggccctgccccattttttttttaggggttgtgtgcccaatcctcagtgggctgtcgctcttcaaaaaaaaaaacagctccctgttcatcggcgcgcgctcctat

SEQ ID NO: 119345 - DNA, 251 bp, Arabidopsis thaliana columbia
  unsure (1)..(251): unsure at all n locations
agcgaaaaaaaaaaagaaaanaaaaaannnntttttggggaaaaacccccccacttannggaaggacgnacccctgcgggaccgggccggaataattcccttntcaagggggtgaggtactcagaagccaccccttttttttttttttttataataaaagctttttaaatatttcacaccccataccaagggaattttacaaggaatgaaaatctggcttcaacatgttccaaagaggcgaccaaagaccg

SEQ ID NO: 119346 - DNA, 386 bp, Arabidopsis thaliana columbia
  unsure (1)..(386): unsure at all n locations
ccctttttttttttttttttacccccaaaccgcagaaggctntatgagccaatcctccccccaccaaccacttaagaactttttaatattccctaaaaaaattcaaaaaaacccagagcaaaaaacattttttttggggggtgttggttccccctgggaaataaaagggagaaacctcctaccccccctttctctatttaactccacaaaaaaaactgcaaaaagcctcctccccaccatgtccaggcaccaaaaccaacagaacaaatttttccttcacccccaaacaacccacgaataacacctctgaaaaggaaaccccccctaaaaaaccttccaccaaaagaacaagaaggaccaccttcttgttttccgtcaataacagc

SEQ ID NO: 119347 - DNA, 180 bp, Arabidopsis thaliana columbia
aaaaaaaaccaggggtttttcgcaatgcccttttttcttttacatcttttagggtccctttggtctgaagggaattcaaaagagggtaagtcccaccctttttcgcaactttgttttttttgtgcggttcccaaccggtttttaacaattggtaaaattaccactcccccgatacctttt

SEQ ID NO: 119348 - DNA, 329 bp, Arabidopsis thaliana columbia
ggcccccctcaggggggcccgcgccgcgggatttccccctttttcaccccgggggggggggggcggacaaaataaacatcctatccaaaggcagagaaagaaaccttttcgcctttatctcaagtgaaaagagaggcttcccctgtgaacggtggagggggcgacaagagagaggggggttgcggggggatctcgagacgggccgtggccggcgcccttccttatcgaccccacccttttttcttttgggactgttgtgggcacaaacaccccccccccaccctccccaaaacgggaaacgcggccgcgcggggggcccgctttaaagg

SEQ ID NO: 119349 - DNA, 512 bp, Arabidopsis thaliana columbia
tacgtaagcttggatcctctaaagcgtccccctttggttttgttcttttaaaaaaaaacaacccaaactaaaaaggggcgttcttccctgaacttaataagcgatcaaaaggggacccggcctgggtcttatgggggagacacagaagggcctaccggggaggggacatttgcctatcaacacacaaattactcacttgttcggagagagggagaaaaaaaaaggggggcccagcaaaaaaaaaaccttcccctaccacgaaacccaaaaaaaatgccgagccttgtaatacacttctcttaacaccccaaaaaacaaaaggtcccgttgtttgaacacgcttttttgccggccaaaaatgttggcaagaaaaaagggtcccacgggtttgttttaacctttcaaagaaaaagtcccttttccttcgcaaaagggagaaaaaatttttcaattggcttatccacccccctttgtaacaaatgggtgctaaaaaaacattgcccaaggggccc

SEQ ID NO: 119350 - DNA, 324 bp, Arabidopsis thaliana columbia
aataccccccgaaaatcttcccaaaaaaaaaaaatggccacaagggggggtttaactcaaaggggttcgtctcgccacagggcttgatatttgttgcaaaaaaaccctccaatattgggtttactgtggcacaccctttttgaaaaagaattatacccagcccgaaaagttcccttcattctttgaaaacgctttcctttaaaaacgccccccccacatccctttttatcagggcgcgggcggaaaaatttgtgtttaaattgtttcaaaaaacaccccttgttgcgttaaaagtgctcccacacagataaccccccccacccc

SEQ ID NO: 119351 - DNA, 558 bp, Arabidopsis thaliana columbia
  unsure (1)..(558): unsure at all n locations
cccccaattaagagaaaaccgcccccccccacggacacagcaggggacagtttttcnccggagcgggggggcggaaaaaaaaaaaccccgccgccccccgggcgggaagaaaagcagagcgaccccgcgacggacccgccggcacgcgcgaagcgagaaaaagcagaaagagagcgaggcggggagcaacgccggcgcacaacacaacaaaggcgaccgaggaccttttttttggggggtgtgagagaccgcgggaggacggaggagagaaaaaaaagcgaagggacggggagaccgccgaagaccacacagcaggaaggaggggagggagaacgagacaaggacgagccaaggagagcgaggaggcggcggaagaaagttggacggaggcagagcgaaggcgcacggggatgcgcggccgacgcggcgaacacagaggaccggaagcaggccggcgccacgcacgccccccgacgaatagcacatcggcgcaccagaaaagagcacgggagcacatgcctccccgggagctcgaccaagggccaaccaggccccccc

SEQ ID NO: 119352 - DNA, 187 bp, Arabidopsis thaliana columbia
  unsure (1)..(187): unsure at all n locations
acgcgcgcgccccaccgcgcgttttttttttttgggggggtgtgggccagcngcacccgcncggtcgacgccgcgcgcggaagaaatcgtcgtaagtagtagtcttatcgtcacccgctctgtggtctgcagttactcgcttgctcgctcggtgcactncttctccgtccctcattgtcgtacgacc

SEQ ID NO: 119353 - DNA, 380 bp, Arabidopsis thaliana columbia
ggcccggtgccggcggccgatcagcggggcagcggcgaactgtttgtgggaacggcccccgagattttgaagccgccgcagggcctccccgggcgggcgcgcgcggccggcgggccgttttgtggccccgggggggtaggagccggccacaaaaaaacctctcacccccgcgtctgctgtcccacccgccgcgcaaccgcccgcgcgcccgccgggcatggggtatatgtatagagtgcggcgcggatgtgagccgcgcgcgcccgcgacacgcggggacggaggcgcgactcgggccgctgcggcggcgcccgcacgccgccctctttttttgcgaggggtggggagcacaccggcaccagcgtggggcggccgcgtga

SEQ ID NO: 119354 - DNA, 370 bp, Arabidopsis thaliana columbia
ctcccccctgccccctttaccctatcttattttttaatattcttctcgcgccgtcccccacaccccccctccctgattttctttctcatcgcttgtacctctcccccctctctctgctcctcactcttaacaacgcccccttttctccttggattgtttgggaccacacccccccgggcccctcataaatcagtaaaaccccctcggcatccaattgcgttgctcctgcctccccctcttttctcctttccacactttccatctcccttctttccttcatccttcctccactcacactctgtctcgctcctactcgcccgtcttcttcacccgagacgtacagctctcctttctctatcacacctagcaa

SEQ ID NO: 119355 - DNA, 594 bp, Arabidopsis thaliana columbia
  unsure (1)..(594): unsure at all n locations
aagaaaaccaaagcaccgagagccacagaggcgagaaagagccgacgattttcaacccggggggggagaggcggagaaaaacaaaagaaaagcaggcggggggccgccacgcgagccacacgaaagagagaagccagcggcgccccaccacaacacccccgcacgaaaacgagaagagatgagcgaagcagaggagcgcaggacgaacccgcgcagccgaaacaaagcagaggagccggcacgtcttttttttaacggggggggaaaagaagagagccccgcgccacgcgcaagaaaaaagaacaggacgacgaaggcgaccaggcgatcagccgcctccgccgcgcgacaagggtgaaaagacaagacacggagagcgaaagaacaaggaaaacacacgagcgacggcaccaacgcccgccaacacaggcaacgcgacggagagcccgcgcacaaaaccggagcaaccaggacaccggagcaaccgagacacaacgtagccaccgngggatccggagcgtcagagaaccagggcacggcgcaacgcgagggaagacagaggacgaaggaaaaagaggacacagcgcaccccgg

SEQ ID NO: 119356 - DNA, 401 bp, Arabidopsis thaliana columbia
cccgcccccgaaaggcccgaagaggaaaaaaaaacacagggaggcaacgccgcccgacagcgggggccggcgcggaaagagggattcagcctttttttgggggggggaaacaacccaccccccaccgcaaaaaaaaccgcccagccacgcggaagcgcgaacggccaacacaaagcaaaaagccccccgacgcaaccaggtaaggaaaggatgcaagaggcaagaaccaaacgcgacgcggaccgcgagacccccgccagagagcaccagcaccacgacacgacgagccgggcggaacgccagaggacacaggcccgagacacaaccgcggccggaaagccagcagaagccaacgcaagcaaacgaaaaaaccgcaagacgcaacgagaaaggcaaacgga

SEQ ID NO: 119357 - DNA, 450 bp, Arabidopsis thaliana columbia
actttcataataaataaaaccctaaatagggataaacccccataattccaaacagagcccaaaagaaaaaaaaaaagggggggggcaaccgttctatctttattactaaccacaggaaagggggacttccataattttttgcgggcgagagggagggtttcccaaagaaccccaaaaaaaaaaaaaagaattcttaaaaagaggatttaggcaccaccacccccctcgcctaaccgggtctttttaacctgaaacccccccaaaagccaaatgttccctaaattttcttccccccggggggcgggaaaaaacacccatttttaaccccattctttggccccctcaaatggggggggaggaacatcctgttatgcccccaggtaccaaggtctcctcggcgggagcgcggcttgcaacaaaaaaaaaaagggaaatggctttcagcttccc

SEQ ID NO: 119358 - DNA, 477 bp, Arabidopsis thaliana columbia
  unsure (1)..(477): unsure at all n locations
ccccccctttaggggaagaacgacncctgcaggtacccggccggaattcccgggtcgacccacgcggctcggtcctgtaacccaacccactcaaacgaaattttttcttaatccctctttcgggcttcttcttcttcttcttctttagaggggggaattccatcgggctctcgatccctttcttctccggtctttctggggcggccccggtttttttttttttggttgttgggaaacatttcccggtctttgccctgaaataccaacgatcagttttctttaaacccctagggtttccacccccgccttctgttttctccaagattatcgccacactctttccgttcctattcttttggagttttcgaaaaagggtttttcgcggaaaattaaggggcttgcctcggcctacttttcccaggcccggaagagatttgtggatgactccctaccgggggaggatttcccccccggttt

SEQ ID NO: 119359 - DNA, 402 bp, Arabidopsis thaliana columbia
  unsure (1)..(402): unsure at all n locations
aaatttaaaagagaaaatccccccattcctttttttttctttttgagtctcccggaaattttggagggggggcttttccctccggggcacccaaaaaatcttaaattcccccccctttttttgcgctgtggggnncataaccgctctccaaacncaccacccacaaactggcccccggaccctccccaaaccaaagcctttcccgcctgggtccttacctcgccccgggacctgtaacggagattcttcccccccccccccccaaaaaaaagactcgctcacccccccctctttcccttcgcgggggggcgccccaccccccccctaggggggggcctcacagagggccccgcccctttccgctaaagatggcggcacccgcgccccccctggaccacccaa

SEQ ID NO: 119360 - DNA, 163 bp, Arabidopsis thaliana columbia
cgcggggcctacaaaaaaaaactccacttgtcggtttccgtcccctctttattgctatctgctccttttttccttagcctgcttatggttctctcctgcctcgtcttaccgttccccttgttccgtatctcatcgctcctgctgttgcctgttttatctttga

SEQ ID NO: 119361 - DNA, 373 bp, Arabidopsis thaliana columbia
  unsure (1)..(373): unsure at all n locations
actatagggaacgctggtacgcctgcaggtaccggtccggaattcccgggtcgacccacgcgtccggcttcttaagcccaaatctctctctctttctctctttctcttcctctctcaatctactcgccggagatcggctcgattccttcgtcaccaccggatccggccggagatttccttcccgtttctttacttcacaacggggaggttcnaattctccctcgcagtgattgatcaaagatgggaagtcagaaaaatgtgaacccccttgaggaatgcactgtttccaaagcatgggggaacttgggtttcctaattccctaggccccattggtggcgatcccgggaggcttcaaccccaggcttttaggcc

SEQ ID NO: 119362 - DNA, 225 bp, Arabidopsis thaliana columbia
atacgacttttttagggaaacctggtacgcctgcaggtaccggtccggaatttccgggtcgacccacgcgtccgcttactttcttcttcgcaatctgaaaatacagaattttctgcgacccggatcagacacctgcaacatcgtcatgggtttattcctcaccacaagaatcgagccagaatctcattactacacacataatcttcttgctgaggtgcaaactac

SEQ ID NO: 119363 - DNA, 928 bp, Arabidopsis thaliana columbia
  unsure (1)..(928): unsure at all n locations
nnnnnnnnnnnnnnnnnnnnnnnnnnnnnnnnnnnnnnnnnnnnnnnnnnnnnnnnnnnnnnnnnnnccacgcgtccgcagcaatgttcatttccgacaaatctcgtcctactgatttctacaaagacgatcatcacaattcctccaccaccagcaccacacgcgatatgatgatcgatgtactcaccactaccaacgaatcagtagatctacaatggggccaccaccacaatcaccacaatcatcatctccaccaatctgagccacaacaacagattctcctcggagaaagcagtggagaagatcacgaagttaaagcaccaaagaaacgagcggagacatggggtcaagacgaaactcgtagcttaatcatgtctccgagaagggatggatggtttattcaatacttccaaatctaattaaccatctttgggaacagatttcgtcttaaatgaaaaaaaaagggttggtcgatctccgactatgggtactgataaaaggaggaatttgttggaaggagttaaaaaagcctaacttcttgatagagaatatggtcggggaaaattgcgtttacaaaaaaatggagaatttcttagagaggggagacaaaagcggcccccccccggttaataagagccctaatcaccccctacttagccaagggggtcctttatgcaattacaggaaaggggttgatgaaaccacttttctttggtccggtgagctaaggccgcccccttaaccttgaagggggttgatatgagggctcccttgcacactcaacggggtgcggtcgacaaaggggttctccctgatggggaaactccggaacggagatagccgggccccttgggggggctaacaagaatggggctttcaaaatggggtgggggggaacacaaagagaaaactcttgggaaataagggt

SEQ ID NO: 119364 - DNA, 561 bp, Arabidopsis thaliana columbia
  unsure (1)..(561): unsure at all n locations
nnnnnnnnnnnnnnnnnnnnnnnnnnnnnnnnnnnnnnnnnnnnnnnnnnnnnnnnnnnnnnnnnnnnnnnnnnnccacgcgtccgcggacgcgtccgcccacgcgtncgagagatttagatattgtagagtgagattctaaagagagagagagagagagatatggctagtggaatcgctcgtggtcgtttagctgaagagaggaaatcgtggaggaagaatcatgctcatggttttgtggcaaagccggagacggngcaggatggaactgtgaatctaatggtgtggcattgcactatacctggtaaagctgggactgattgggaaggtggattctttccattaacgatgcactccagtgaggatcatccgagcaaacctccgaagtgtaaatttccacaaggtgttttccaccctaatgtctatcatctggaactgcctgtctctctattccttacgaggattatggatggggcccgcctcccccgggaagcacatccttgttggtattcaggatttacttgcccacccgaatcccgctgaccctgcacagacaggggg

SEQ ID NO: 119365 - DNA, 665 bp, Arabidopsis thaliana columbia
  unsure (1)..(665): unsure at all n locations
nnnnnnnnnnnnnnnnnnnnnnnnnnnnnnnnnnnnnnnnnnnnnnnnnnnnnnnnnnnnnnnnnnnnnnnnnnnnnccacgcgtccgcccacgcgtccggcagaccagatatcaatagaagttgtgttcttgctgagcttcttcttggtcagccattatttcccggagaaaatgctgtggatcagctcgttgaaattataaaagttcttggtacaccaactcgagaagaaatccgttgtatgaatccacattacacagatttcaggtttccacagataaaggcacatccctggcacaagatcttccacaaaaggatgcccccagaagcgattgattttgcatcaaggctgcttcaatactctccaagtctaagatgcacagcgctcgaagcttgtgcacatccgttctttgatgaactcagagaaccaaacgctcgtttaccaaatggacggcctttcccgcctctcttcaacttcaaacaagaagtagctggatcattacctgaactgggcaacaagttgattccagaccatataaagagacaattggggtctaagctttcttgaatcaatctggaacctaaaagggatccctgcaaagacaactacttgtttttatataatggaccattacacgagccacaaggtcgtagtgaaggcaacgt

SEQ ID NO: 119366 - DNA, 481 bp, Arabidopsis thaliana columbia
  unsure (1)..(481): unsure at all n locations
ttgcccccccggggaaggcgcgnnngaaaaaaaaaacaaaaggggnccnaaaaaaacccacccgggaaaaaaaacaaaaaaacaagggggggcaaaaaaaaagaccaaaaaaggggccccccgaaccaccaaaaaaaaaacgcaaacaaaaaaccaaacccacaaacgtttttttttctgtggggactgtttggaaccacatttttcgggtttctcctcaaagaaagaaaaagggcccaccatcccccctttttttttttaaacccccccccaaagaaaagagggtgtttttttggggaaaaaataataattttgtggggcctttttttttttgccccccaaaataaaaaaagagcggtttcttttggtactttctcccgaacgccaggggggatttttaatccgggggaaacaccaccaaccggcggctttggccccccctcgtgggaaggggacgccacccccacaccacaacaaaaaa

SEQ ID NO: 119367 - DNA, 983 bp, Arabidopsis thaliana columbia
  unsure (1)..(983): unsure at all n locations
tatagggcaacatgttacgcctgcaggcaccgggcgcggattttccgggtcgggccccgcgccccggctgaagaccattctttcatctgaagaagaagaggcgcttctctgcttcaaatccgtgccttcgctctctcctctttctgcntgctcttccccgccgcccctttaaaatccccggctttcgcttttttttttttgaggggtgggcccaacccctgggggctccaaagacaaaatcttccttagggctttacagcttgacctccacctagggaaaaattggcgtggaaggcgcgctcgttttgggcgggaccgggccttccccctgaaagccagggggaaccccaaggccgtggggtgctggttttccaggggatacaccacccgcgggagtccaaagagacctaagagaaacccgctctttggaattggggctggnaatgaaacctcgcccaaaaagattagcgctccccgagagaaccttcgggtgagatagccagaacaaaggggaaagagggtcccggccccccttcctgagagaagaaacacccnagggtttagcgccctccgngggggcggggttttgggattccttttttggaacgtcttctttgggggcgaagagccccttattgtcctccatcgccccctttggtttgggtgttatccccaggcggggttctttaagaaacctttggtgaaagaaacaaacaaaaaaaaggggcggcctttaaggagcaagttctctccgcgggntgcccacttttttcttgttggcgcccatagcaattgcggcgcccgtttccagtggggggggagaaaccggggccccccctattgcctgggaacaccccttcgccgggggtatagaaaagcgccgcgagcctctccaaaggggcgtagggagagggccccctgacgccatgcgcgcggggggggtcgcccggccgctttgagcgctggccctttttttttttctc

SEQ ID NO: 119368 - DNA, 669 bp, Arabidopsis thaliana columbia
ccgggggggaacccccacgacagcaccaccagcacgagagacaaaccaagacacccaaacaaccacgccgaaccaaacaccacgcgccaaaccaacacacagaagagacacccctcacacggggggaaacagacaaacacagcaaaaaaaaacccaaaaagcggggccgcacccccaaaagaagcaaccacgaacccagccaagagacacccgacccacaccaaaaaaaagagcagcgagaaaacccagaaaagagcaaaaagaaaggaaccggaacgacaaacaaaacaagcccggcagcacagaaggacggccaaccaagacggaggcgacaaggaggggagacgagccagaaagccagcagacgaggagagaaaaaagaaaacggccgagaacacagacagagaagagacacaaagcagacaagaaaaacacaacgaggcccacccaacagaaagcaaacgccacacgcagacccaaagaggagacaaagacaaaaccaaggcgcaaaaacaaacaacccccgcccacaacaacaccgcacgggaaaaccgagagaaccagagccaggacgcgaacagcggaagcaccgcgcggcgcggagagccacaggaaagaggaagacaggacaaaggggcaagaaaacaaaggcaagagcagcagcaaaga

SEQ ID NO: 119369 - DNA, 1015 bp, Arabidopsis thaliana columbia
  unsure (1)..(1015): unsure at all n locations
aggcacgcctgcaggagccgggcccgaatattaggggcgagccagcgcccgcactctctctctctctgtcggacagagctttgcggctctccctctgcgccaggcaaagaatcagagcacgggcggcgcctccccagaacccggggcatcgatcgggaataaaaccagaaacgcccaaacccctcttgaaagggggggcggncccccccaaaagggaggcggcgggcccaaaacggaggcttaggcccggaccggggtccccaacaccccccggtaccttggggcgcaagcagaaaaccccaccgggggaccaacaaagaaccctcgcttacaaaagggggtcttccccccaaccagcgaaggggagccaggatgaccccacaaggcgcggaaccgaggaaagacccgcgcccacaacgcagcggggcgggagagggaacaagacacgaggtggcggcgggcgcgaagacctccgcagcagaaagcgggtcgcgcgagcccagccggtggggggcgcaaaagagacgccgcgctggacccccaaaggaggaaaggggaggcgcccctcccccaagcgcagggcgcgccgcaagcgagcgccggcaccgaccacgggggtgggccgcgcgggggcgggcgcgcggcgcgccccgcgcgccagaggccgcagaggaggccgccccgctacggagggggggcggcgccccgcgaggcgccctgcgcagcgaaagaaagaaagagacccaagggggctcaggacgggaagaccgcagcagggccaagacccgcgcgcgcgccccgcgccctcccggcccgacgagccgcccctggggaacacgaggccccccgccgctgccgccgcgaggagggggcgcggcgcacgcccacccgcccgcccggcggagcccccctgggccccagccagcgcccccccgccgggggcgccaaaggaacgagactaggggccggcgggacaaggaagagcgcgccggacaaagaagaggggaagagggag

SEQ ID NO: 119370 - DNA, 485 bp, Arabidopsis thaliana columbia
  unsure (1)..(485): unsure at all n locations
tacgtaagcttggatcctctanagtggccgcccttggtttttcttttttttttgagtgaacttgatttcccaaaaatgcattacaaaaatctcagacgtgtgtatgaaaaaattcgcttttctttcctaccaaaccaaaatttagcccggagaattttaaattaagctaataaaaaaacaccttttttacaaaggttgtttggggcatcctcccctgataataaactaaaaacaccgggggtttggcttgcggggggcaaccccccccaaagcggctcccgatttttgtgggaggggggaaagtagaaaaaaaaaantccccccccgtttttccccccccggggctaagaagggggcttccccccacccaaaccatccccggggctggaatttatcttccccaccccccggcggggaggtaaacaccctttttaaaaaaaaaaagaagaagcccattttcgcgccgccgggttcttttttttggg

SEQ ID NO: 119371 - DNA, 674 bp, Arabidopsis thaliana columbia
aaaatcctcccttcctttgtgtctacttacctaaaccctcttctccacttggtgtctttctatacttgcccttatgccgacacaacgggtttgtgttttcttcaaggcgggggttgttttcttctggttatctacagaagactggtttttaacccggcccccgggggcttggtcgggttttcaacaagcttggttacccgacttggccggtgtttatttgaccgggccaaacgggctttggttggccaaccgggtctctggggcgtttttttgtcaactttccggggggttaccccggtaatgctacgcgggaccatggttgaaaggagaaaatctccccgaaaattagccccggaaaatttgaccccggtgggtgaccaaaaaccggcttttgggaatggggagttgtggaatcacaatgcgaaaccccggggtttttagaaacaaaaaatctttttaaagaggttggacccccaaaccacaaaccttttagagaatttggggagttgaaaaggtgggtttttagggcgctgggatattctacacccggggggttaaccccctttaaagagggggcgagccccgtttcccccccccaaaatggaaaactttttttggtaagaacaccgtagataccttcttactcgcggcgacggcccccctgttgggccccc

SEQ ID NO: 119372 - DNA, 523 bp, Arabidopsis thaliana columbia
  unsure (1)..(523): unsure at all n locations
ttgggatcccttctanagtctgcgcccgccgtgggggatggcctatatataaatattattatttacttttcttttctttgttttntttcttttcttttctctccccctcaccccacaaagaaaaattttgtcgcggcactcccctcatgctttttcaaattctgtttttgggcgcccggagaagaaatattgttagccctaccggcttttttttcctctttccgcgagattgtagaggcccctcttataaaaagggttttttcccataaataaaacaagcggtgagagcgccccccggctgggtgttttttccccttctttaagaaaaagaaaaaattattgttgttttgttggtgcggggcgcggggttcacaacaataaaagaagagggttgggcggttttgtgcactcagaaggcggagccccccccggggggggcgcttgttgttctctcccccggggcgcgggcggccggccgcgncgggcagtcgtcccccccccgggcccggtgtcggggatgggg

SEQ ID NO: 119373 - DNA, 466 bp, Arabidopsis thaliana columbia
atgacgtaaactgcacgcgtacgtaagcttggatcctctagattcgccgccctggggtaagcttttttatatttttttttgggggttaacagaagtagtaatatgagttcaaagcttccactaaagcgctgttcggtggggttgacaatacttttattttatctttgaaatgaaagaaaaacctaacatgtctctaagttttaaaacacgggggggcccggtttaaaaaaatgaaacccttttacaacccggttattggggttgcgccttgttcttcccttccagggggcatctcccaggttcttcttctttctttcccccccccttttccccttttttgggggggaatcatagggggataggagggggcgcacggggacttttataggacaaacctgtgggaattttttggggcccccccccgggtttgggcctcccccatccagggggaaatcgagggggttcg

SEQ ID NO: 119374 - DNA, 506 bp, Arabidopsis thaliana columbia
taggagcaactatacaagatttatgacgtcccatgcacgcgtacgtaagcttggatcctctagagccggcgcccttgtttttttttttttttttttttttttagggtgcatattaggacttgctttttgctataaaaagaggtctctacaatgacaggaagtggataaaggtcttacctgaaaaatgagaaagcctggcaggtgaagtccccaaattacctacccatttttttaggagtggaaaaaaaccgaagaagcttggagcaaagaaaaaaaacaacgcctccttaaaacccctccacccccctcaaaacaactatggcggaccctcttgagcccccccacatccgcaggaacctgggcaggcgtccgcaagcactccccccgtcccgttctccgccccaacaccccctctcccgccgcgccgccccccccccgggcggccctcgccctcttgccccgcggcatggccgcgccgtgcgtccgggccacccgccccccggccc

SEQ ID NO: 119375 - DNA, 211 bp, Arabidopsis thaliana columbia
ggggggaacaggcgcggcgcgaggtgggcgccggcgcagtctttacaggggggggcaaaccgtgtccccgatatcaaaacagacggcgagaggacatgtcaagccccgtgacaaagccgagaggcgttcatgctcatagggagacagattagaccggcggccgtagagcccaatccattgtcagaggcgcaaacagcgaactcgagagatg

SEQ ID NO: 119376 - DNA, 466 bp, Arabidopsis thaliana columbia
ctatgacgtcgcatgcacgcgtacgtaagcttggatcctctagagcggccgccctttttttttttttttttttttttttttaaaaaaccaaggtttaattaattcctctttaataaacaacccataccaacagggcccaacaaaaactttttaaaaccataaactttttaaccccaaaccgggggagccaaaaaccctacacacatgggttgtggggggggggcccccccccaaaaaaaaattcccacaaggaaaggggggggggtaacccaattttccccccccccattggacccccagattttggggggaacaaccccaatctcttttttaaggaccaaacccccccaggacctgccccaggttggcccccaaaaattcccccctggttttaaccccccggggggattccccccggggtttggggttcctcccggctgccctgggcaccacgcggaaaaccacg

SEQ ID NO: 119377 - DNA, 136 bp, Arabidopsis thaliana columbia
gggcgactagggtgtgagccctaaggggatgtccagagagagaagcttttatacagtggtccgccgcactcgcatgtccggtcgcgtcgtgtgcgagccacgaccgacagagatacctcggcctacgccagtactt

SEQ ID NO: 119378 - DNA, 589 bp, Arabidopsis thaliana columbia
  unsure (1)..(589): unsure at all n locations
tnnnnnnnnnnnnnnnnnnnnnnnnnnnnnnnnnnnnnnnnnnnnnnnnnnnnnnnnnnnnnnnnccacgcgtccgcactaatactctatagattgtttttggtcttcttataatctttatattttcagcaaacgaaagggaagtgtgtcagaaatctcagagggtgagaatcccaatgaggatcttacccgaacctcgaggttcggttccgcgtcttctccttcttgtggcggttctcttatcagcgactctctcactcgctcggggcgccgaagttgtcgggtacgccgagagcattatcaaaacccctcatgcattttcagaacttcgagtgacaatcgactggagggtgaataatggccattttgttacaaagtgttcgggaacatatgacactttggaaagctnggtctaacatttttcctggcttttaacccccaaaagggggggtaaacgggggaggagcccgttacggttgtcaacgaggcccggaaaattgttaattctgtctagagtaaacgggtttctggaaaattttaaagtgctttccacgttggtgatctttttgttttggaccaaaagcctttt

SEQ ID NO: 119379 - DNA, 454 bp, Arabidopsis thaliana columbia
  unsure (1)..(454): unsure at all n locations
nnnnnnnnnnnnnnnnnnnnnnnnnnnnnnnnnnnnnnnnnnnnnnnnnnnnnnnnnnnnnnnnnnnccacgcgtccggtttcacacagtacacgcttcagtgggagttgttgggtgatcggtccgaggcgacatacaagatgaccggaaactcttttaactcgatgaaagatttcctgaagcagacaggcggctatgcggtaatagacggagggctggcaacggagttcgagagacatggagcaaatctcaacgatcctctctggagcgccaaatgccttggcacctctccctacctcattcacaccgagcatctngattaccttgaagctggtgctgatatcatctccagcgcttcttataaggccacgattaaggggtttgaagcaaagggattttctagaaaagagagccaatctttgcttaaaaagagccgaaaaatagcgactgaagc

SEQ ID NO: 119380 - DNA, 393 bp, Arabidopsis thaliana columbia
acgactttcttagggaaagctggtacgcctgcaggtaccggtccggaattcccgggtcgacccacgcgtccgatcttcgatcttatccgtatctgcttgccttgatctatgtctcttctaactaatctcttgtcttcgctcaaaatcaaacgtaatcataaataaagatcttcttgttcaattgctcttgatcctcgcaacatcacagattctgagaattctcttctcttgggctgaaactcgagagctctcgagttctgaaaagacagtgcgcagagttctgatgcgacaaatctcaacccattcctttgttatcattctatatcacctgagattcttcattgggtttacggtatcctcttgaccaaaaagacatggcaaacgcaaaaaaga

SEQ ID NO: 119381 - DNA, 894 bp, Arabidopsis thaliana columbia
  unsure (1)..(894): unsure at all n locations
gggggggcaccaccgctcttcaggagagggggggacccccggaagaagnagcgcgccggagcgggggagacaggaagcgcggaccggcgcagaagcgccagagggccgccgcccaccccgccgcaacgacgcgagggagagggcgcacgcccagccgcgcacccgcgcctcttttttcttnagggggggggcggcccgcgccgacgggggggccgtggaaacccccccgccggccgcgcccgggccccgccaccgttcctgggaacgagcacagcccgcccccccccagatgcacccaccgccccactcccccagcaagagcgcgagagcgaagcccgccacccccagcacgcgggcccgccgcggccgcgcggagcacgagtggacgcgaggcacgacgagccacccgcgcgacacgacgcgcagcaaacgcccggcaaagtgaccgaacgcgaaacgcgagaagaggaggggagcgcagggcaggcagatacgacaagcagaacaaggaacgcgcaagcaaccaacagcaacgcgcagcgcacacagagccacgaatgaccagcacgcagcgcagacgcccacaacagacgccggacgcggggggcccgagagggtgtgcacagaggagacagagatgggaggccgcagcaacgcacgaagaccgaagagagagacaacgacaaaacgaagagcggagacgaaaggaaacgagccgaccgccccacgtcagccgcgcgaccgcggcaccgagtaagagcgacagcacggcacagtaagcggcgaggacaaggcacccgcagaccaggacaccaggcacggagacgcaccggcacaaagaagcgcgcgaaaacagagggcaggacggccacgctacgggcacagagagcgagg

SEQ ID NO: 119382 - DNA, 475 bp, Arabidopsis thaliana columbia
tttttgacgtaacctgcacgcgtacgtaagcttggatcctttatttcgggcgcccgggggtatctattatataaataatcttttttctttattttttcaccttctatctttattcctttttctccccaacaaaagggtggacattaattaaaagaggggggaaagatttttttcccccacaaaagaaaagaatctattcccttttttttaaaagagaagatgggaatctttatataaaaatttttaaaaaaattttttttcccccctcttattttttccccgcgggagaagaaaaaaagaaaactattccccacctctcacacatgttttcgaggatttttgtcaccaccacacaacacaggcgtggttgtgtctttttttttggggatgatttcagaccccccaaaaaaaaagaaagaggggccccattaatagtttttgattaaaaagggtcttcgcgtcggggaaccgggtg

SEQ ID NO: 119383 - DNA, 479 bp, Arabidopsis thaliana columbia
  unsure (1)..(479): unsure at all n locations
aaggggaaagacccagccccccggaggaagaacgggaccctttaattttagcccgcccgggggggaagagcctttttcaaaaaaaaaaaaaccaccccactatcacgagaaaaaaaaaaccaagggcaaagaaacgaccaagggccccgcgctgggggggcgagaggttattgccccacaaggatcaaaaaaaaaaccccacgcaaggaggacgaactgtagagaaaacgcgcacactttttttttcccggggggaaagaaatgggncccccccctcgggcgcggcaaaaaaaaagtagcaagccccccctggcgggccggccccgagatcttcccccccccagccgcgggaaaacctatctcacccgcgggtgaggaagagacgggggggcgcagaggacgcggcgtaatgcgaacagaggggccatgaagttatgccggggggacgacggcgggacgagcaggccgccgggcccggc

SEQ ID NO: 119384 - DNA, 533 bp, Arabidopsis thaliana columbia
  unsure (1)..(533): unsure at all n locations
gtcgcagcccgcgtacgtaagcttggatcctctatagcggccgcccctgggtttgcgttttttatacaactaaaaaaaaaanattctttattatcctccaccttccacaagggataaaaaaacacaagggtttgatataccataacaacaacaatgacggcggaaccccaataaaaaaaaaaatttgatgggaaaaaatccaaaaaaaaccaatgggtttcataacatcggggaacgccggagacaaaaccccggggggccgccgtacccaagaaaatacctcccctctataaacgaggggttgggggagacccccccccagccaggggcaccttaaggccaccggctttctccgcgcccttttcagaaggggcgcggcgccccaaaaagttcttcatttgtaccaccgagcgcccccgagagggggaggccccaatttcccacaccgcacccctataaggaggcggccgcaaaccccccggccggcttctcttgggcggcgtcccgccacgcgccagaacaacacaccccgc

SEQ ID NO: 119385 - DNA, 532 bp, Arabidopsis thaliana columbia
ctatacgacttacttagggaaagctggtacgcctgcaggtaccggtccggaattcccgggtcgacccacgcgtccgaataaagatagatcatctttcgctttctatgatagaatatctctatgaacatcgtggactgtagctcataccgttatacttggcgaactactaaccagactttgggttgtcttattaaaagcataactatctctatgatacttcattgattaattttgtacagcggtgatttattctctacgaccttatttcttagagaccgaattcgtcctagcggactctgattttaacgtgggataatgacccggaacaatgtcccacggacatccgtcatgaacagctgttaagcagatacgacgtacggaaaaccgatgtgtcctcacgacttttgaaactgtgaccgcggcaagatcccaatttcgagcttaagcggaaatgtctgagaggagaacaaaccacgtctgggtaaaggagcactccttgggaggtgtcacagacatatttatatcatgctcg

SEQ ID NO: 119386 - DNA, 920 bp, Arabidopsis thaliana columbia
aaaaaaagaaggggcctgtttggggcccccctacgacccactatagggaacgctggtacgcctgcaggtaccggtccggtttttccgggtcgacccacccgttcggttcagtagagggacctgttctaccctcaaaagaggcttatgttgggaaagaactctatgacaagggctgcttagaaatttctctgggggaccaaaaaggaaacggcccctcccgggtcggggttccatccctaggaggcgagttggcctttttccccccggaacaaactacctttcccccttccttgagacccttgggcccccttctccacaacattttggcccccccccccctggggaatttggtatagcccccccttccttggcgggaataagcgggccccccttattcaaaaaggagttaaaagaaatggcccccccaaaatagcgttttccttttaaaccgtttttcgccccacccccatggagacttggtaatattttttgcgggggaaattccctcacaaacctttcgcccctccactgtgtcaaagggcgcccccccccctccgcgggataaccgcgcctcgcctaaatatatagttttcttcccccccccccgaggctgctttttttctcataaaaaaaaggccccccccacacatgtccccttttttctccccaaaaaaatatttttaaaaaacctctttttttttttttttccaaatgttcttttgtaagacaaccggccccccaaaaaaaaaaaagaggcgccctctaaaaaaccactctctcccgggcgcggtgttctttttttttttgcaccaaagaattacgggcgcctgttccaaagggagacgacaccccccccccccctatgcggggagaaccccttccgggggaaaaagagaaccgtctcttctctttattcccct

SEQ ID NO: 119387 - DNA, 216 bp, Arabidopsis thaliana columbia
ttgttctggagttttcgtccccccccccccccccacacgatgaattttctggggtctgtgttgcagcttctttgtttaacatctcgatcccccacctctcgagtccttcagactgtttatacatcttcacttgtagctccctcatctcgatttcaccctgtctcttcccccatcccccgttgatcgcggagtctcatgatctctttctcttctcaa

SEQ ID NO: 119388 - DNA, 254 bp, Arabidopsis thaliana columbia
  unsure (1)..(254): unsure at all n locations
tcactctctttggaagctgtccctgcggtccggccggattccgggcgcccaccgtcgcgcatgaagaatatcatcatgttctttgctagcgatctcttcgtggttcattggcccgtgctgctacagagagttctcantggtatctcattgctaggatgttaaaagggacttgtntctgcttcgtgttctctctctatctctttgtttccattgacttattgaaaaccatgccattgcgaaaaccttataaaatt

SEQ ID NO: 119389 - DNA, 619 bp, Arabidopsis thaliana columbia
  unsure (1)..(619): unsure at all n locations
atacgactttattagggaaagctggtacgcctgcaggtaccggtccggaattcccgggtcgacccacgcgtccggccccaccaaatgcttcaatcctcttccactacacaaagaaacaacttaatccctttatacccttttagccaaaaccctcgctaaaagccaatcccctcatatgaaatacaaagtagaattgatctggctatatataaggaggttgagacgaattaagatctataccacaagaaagatagtaaacttaaaagtctgggaagggcaccgcgctgtgagaaagctcacacanacaaaggagcatggacgaaaagaagaggacgagaggctcgtcgcctacattaaagcccattggnaagggctggggagatctctcccaaaggcggcggacttcttcgctggggaaaagctgcccgctccggggatacactttttccggcctgaccttaggggggaaaccttcccggggaaaaaaacaacttatcttagagctccatagcccttttgggaaaaaagggccccttatggccggaaaattccgggaaaaacagataccgggataaaaacttttgggaacccccttatcccaaaaaggttataacaaggg

SEQ ID NO: 119390 - DNA, 867 bp, Arabidopsis thaliana columbia
atagggaaacctggtccgcctgcaggtaccggtccggaatttccggggcgacccacgcctccggaaaataagcagcctcaaaggaccatgtttaggtgcagggtgagatattagagggtcttgttgctccgatcgtgagcagccagagctcaagaaattatggaaatgtcttgagagatctcccccaccttcctgtgaagggagctatcttgatctgggcactcactctaaaaaagatatgtgcttccccttgatcttaccaaaaacatcaaatgaaaccccttttaaaggatggtgggcccaagcttttcccccaagaacggggaatggttccgaaaataaacccactccaaaagggcggaccaattttttttaacaaaatcctgccatctccacctggaaatttttccacttttaaattcgagaaatggcccccttgaaaaagaaaaaccgctttccaccccattcaaagtttacctttttttcataaagcggggagattacacccggcaccctttttaataaagaggtgggcctggcccccagattaaggttgtacggttcccccaaaagagaggcccccccctggttgggccccttttagagagttctttgggtagtaaatgggccaccaaccaagggggggtcttttgtttaaaaccttttcgcccccgaaaatgggggcgggaaaaagggggggggttctttgccgcctttgaggcaaaaaacttctcccccaggaagaaaccttttgccgctgggccctttttcttttatagaggggggtagtacataacctctctttctaaaaaatagtcggccccatagaaagacaaaactctcggatcgggaggggcctcctcaaaa

SEQ ID NO: 119391 - DNA, 824 bp, Arabidopsis thaliana columbia
aaaaaaaaaaagcctggttggtgacaccccccgacctaatataggagaaccaaggcacccctgcaggtacccgggccccactttcccggtgcgcccaccccctccccttgtttaggttttttacaccaaaaattgaaaaaaaggggtgccgggggggagcttaccaacacaaactttcattaattctaacttcttggtttgcctctaaaggggcatgtggaagggactttttttcactttacggggggccccccccttcggtcaacattttatcttacacccaacacaaaattggaagggtccttggaaaacccaagctcgttccccccctttgtggcacccccaaaacggcatgttttctttgccctccccacaaattttttaaacagctcggggagaaaggccaaccttgggttccccccacccacaaaaaaaaacgccgggggccggagaccactcctccccaacacaacacgtgggtggagggactccttttagcccccccgaagagaagctctgccgcccctctccttctcttggtaccccaaaatattcccccccaaccactcccccctctataaacagggaccccacccacccccggagggagtctcaatccccaccccgcccccttgacactaacaacgcgcccagctaccctgcgacccccctctgggcgcgcccccccccagggcctcctgcaaggcctccgcgcgccccccaccaacaagccttctaccccccccccgctatctagctcttaaaccactcgcccccccgcccgggcagcatagtccctctctcctctcgtaaaccccccaccc

SEQ ID NO: 119392 - DNA, 342 bp, Arabidopsis thaliana columbia
gacgtcaactgccgcgtacgtaagcttggatcctctagagttgccgcccttggttttttcttttgaactgaacaaaccagtttgcatatcaagtgtgtctgatgataatacagatggttgacgaagataaaaattcacaatataaacagaggggactgacaaactaaaaagagttttaaagaacaagaaggggagtactttttaaacttggtggtggcctgaaagggcaatttcctttccctaaaagggtccttgggatgccccttacccgggggcgcgccggtaaaacggggaattccggaacggggccctgaatggtttcccttttttccttagaggggg

SEQ ID NO: 119393 - DNA, 444 bp, Arabidopsis thaliana columbia
tttatgacgtcaacgcacgcgtacgtaagcttggatcctctagagctgccgcccttggttaatccttttttttttctcatatccaacttttttggtgccctttatcaaatgttaaattattttcttttaataccgaaaacacaatttctgggggcccttatagcaaatggttaatttttgccgcgagaaaaactaaacgtgtttcttacccaaaggtggggttaaaggggttcattgatggcgctaaaaacaggggggggttctaaaaaccttttttttcctcggggagttataataaggtttaaaaatttatttttggggggaaaattttatatttttttatccccccccccctcccgaaaaaaaataaattttttttcgcgccagggaaccaaaaaaaactccttttatctctcactaaggttagaggatttttttgaaaaa

SEQ ID NO: 119394 - DNA, 711 bp, Arabidopsis thaliana columbia
  unsure (1)..(711): unsure at all n locations
agggaaagctggtacgcctgcaggtaccggtccggaattcccgggtggcgttggaaaagaaagcaaatgcagaaaaagtcctggcggatctggagaatagagagagtcctcaactttctgatattgacaaggagggtattactaatgatgaaaagacatgctccggaaaattggcttgaaaatgaagcctttccttttactaggtagaagaggcgtctttgatggaacaatagagaacatgcatcttcactggaagtattagggaactttgtgaaagatcatttggaatgaatattagcattgaagctgctcacanagtagcagaaatcttggaagcagaaagtggtggcatactagttgctgtggagatggttagtaagggctatgcaatcattgtgtatcgtggaaagaattatgagcggcctcaatgtctacgacctcaaacacttctcagtaagagagaggcgctgaagcggtctgtggaggcacaacgtcgaaagtcattgaagctacatgtgctgaaactttccaacaatatcgaagaattgaaccgtcaattggtcgaggacagcgcaaccaatgaaacttggtcagatggggattcaagaacatgatggtcgaagaaaaacagaaaatcagcatactgaacctgagaaagcaagaganaaaattgaacttggctattcatctgacttatcagtccttcctctg

SEQ ID NO: 119395 - DNA, 523 bp, Arabidopsis thaliana columbia
  unsure (1)..(523): unsure at all n locations
cccggggggaagggctctttttaaaaaaaaatactatttttttttttgtgggtttcccggggcccggggggcgccgcgagccgcgcacacaggataagcccggcccccccgcccaaaaaaaacaagaccgccagcgcgcacggagggagtggaagggtggtggcgggcgtttaataattaaaggaggttgttggggcccaccccctcgggggccgcgcaaaattacttaaatcccctcatgggggtggggtgtccgagcccgcccgcgccgtgggaggaacgaccngggaggggggggtcggaaggacgagagtcagcgcgtgccgggggtgggagcggtatgcaaggggggggggggggcgctcgagggagcgacgagcgccacatcgcgagtggggccggggcggggtgtgctggggtgcgggcgcccgcggaggggggggggggcagcgaaagaaagagggggggagtcgtgggggtgtgtgccgagcgggagcggagccggcgcggggggcgcgcaagg

SEQ ID NO: 119396 - DNA, 507 bp, Arabidopsis thaliana columbia
  unsure (1)..(507): unsure at all n locations
atgacgtaaactgcacgcgtacgtaaacttggatcctctatatttgccgccccgggataatcctattntataatatttttttttgagacaaaagatgaggattaaattacccaaacaaaaacaggagtttgatacaagagccaccaaattaacccccaaaggttggcgaaaataaattttgtaaataaaaaaaaaaaaaatttttctttttataaaanatttttttcatcaaaaagagaaggtttggaacactcaaatttgttcgggtttgcggggaagaaagaatacatttaactatacccgcttttttttttttaaatcacccccccttaaggcgctaaatcaaatttggcttcgtgaaataaggagaagggagcaaaaaggtgtaaaaaattctccctttataaaaagtgagaaaaaagaaaaaagccttctcctttttaaaaaaaactcccttctcacaaaagggcgcacaagatataaaagattgtgttttttataaaaaag

SEQ ID NO: 119397 - DNA, 488 bp, Arabidopsis thaliana columbia
cgcgggggggtgaaccccggccgcagaaggggtgacggaaggtggacgggcaaggtagacgcgcactacgacagtgcggcgggggcctcgttccgacaggtgtatgggagtggtcggcccagccgacattcctgacaattttttttttgttgggggggggacgaggccgcgggggagaccgacggggtacgcggcctcgtggccctggggggcgggcatcgcagcctgtgggcccgagcccaccaccccccgcccccagtctggccgtccgcgccacacccgaatagggattaaccatcagtgaccgcgcgcgcaacataatgaggagagcgaaatgcatccataacaagtaagaaagccacctcgcaccgtagcccacacaggtaggtctggtaggcgcggagccggcgcataacccccaaacagaaaagagtacggagagactaaatacggatagggacaggacatacataatatagtagagaata

SEQ ID NO: 119398 - DNA, 375 bp, Arabidopsis thaliana columbia
  unsure (1)..(375): unsure at all n locations
ttgagggggagaacgggcccccgccacggagagggccgagaacccatttatcgacggcggggggaaagcggccctaataaaaaattcnctcccccatcgtatagtcttctatcctctcgtccataaatgggcgggcgcgccccctaagaggacgggtggattcgtcggagggacatgtggtaggaaggacccgttctgacgagcatccctgttatagcgacccccagcgctttttttttctttcccgggggcttgttttggggacacacaccgacgacgggcgtgtgccataaaaatactaaaacacgcctcgctatttttctgatgtcgtggcgcgcgcccccccctcgttctaacggtttgtatctgccgcac

SEQ ID NO: 119399 - DNA, 567 bp, Arabidopsis thaliana columbia
  unsure (1)..(567): unsure at all n locations
gccccccccggccgccccccccttcacccccgccccgggaatacttggggcgccccccccattgtgggaggaaccccccccccgctttaaattncattcttttattttcgcccctgggggaagccctcttaaataatatcctcctccacgcggggggaccaaaagtcttggcgcccgcggggcatttttttcattagcagaggagtgtttctcgttttttttttttctttcccgccgcccgccgtgtttttttggaaacgcggcgctttttttctacgtgtctgatgggcccacnctccgcgggttttttaaatgacnatacctccctttttcctcttctccctccccccccccccggcggcgccggccccccctcgcccgttcttttccgccgcgcccccgcgggtccctccacccgtgcaaggtgtctcctcctttctgtctctccggtcgtttttttctgtgtgcttccgccgtccttttccccccccccccgctcgtccgcctgtctcgcgtgtttgtttgtcgcgctgcgctgagtctccttcacctctcctgcccccctcc

SEQ ID NO: 119400 - DNA, 564 bp, Arabidopsis thaliana columbia
gcgagctctatacgacttacttagggaaagctggtacgcctgcaggtaccggtccggaattcccgggtcgacccacgcgtccggacaaagatccgggtacagtttctcttccgctctctgttaaggcgagctctcaagccagctctgaatcatagatggtagcacctagtggttgacctaagagctgtgattactgccttcattatctgtggagagatcagtggccagggcagttccccattatgggagatgttccaaacagtgtgtcacgccgccttatcctgcacatcattgacgataagactgtcactaatcctgggaccacccgtggagacaccctggaactgggcctggagatgctcatgatcttgctgaactacttcgctaactcctacgctttcacatgattcgggtatgattaagagcgctataaaatgctgcaagaccggatggcacaacggcaggcaagcttagcatctggcctgggcatctgcaggagtaattgcacataaaccttattctaggtgcttttcctgcagatttactgaagaacttggtcaaaaa

SEQ ID NO: 119401 - DNA, 147 bp, Arabidopsis thaliana columbia
cacccacagcagcttttctaaccagataaaaccacgtccaccaacggacagcgtggtgcccgaccaaagatgtggtcctacttcacaagtcgctctctctgttgtgatactggccacaggtccctcagatttacaaggcccgaggaa

SEQ ID NO: 119402 - DNA, 193 bp, Arabidopsis thaliana columbia
ctactctctatagggaaagctggtacgcctgcaggtaccggtccggaattcccgggtcgacccacgcgtccggctcctctgtaagagaacaggtgtctctttagctgccttatctctgggtcagagagaatttgactcccctgagagtcatacatgcctacaggaacacgctcttgagtttaaaaaccatcac

SEQ ID NO: 119403 - DNA, 677 bp, Arabidopsis thaliana columbia
cgcttgcgatgtaccggacgcgcgctatcaggggcgggccaagcccgcctaaacacatacttcacggtccaccgttagcttcagttcccaattgatcttctgagaggttcacaaccgcgcatgccgacttaccctaactcataaacccatatagtccaaaaaaaaacagccaccatttctcctttctggggagtgggggccccccaagacgcttttggaaaaaaaacatcacccaggagttgagaatgactggcctctcgacttcctcactgccccctcctcgttcttccctacccacccccctaactaattttttacatacgtgtccacgcgccggaacaattattgttaccagatcttcatccgcccttaggatttcacctctatgccgacccattctaacccgacgatgtggccgcccgccctcctgcgaaaaacggatacacttgcgttgtcaccacaaatgtaaatacagccaggcgattcatcagctcccaagcacacaacgaacccagcgagacgcttgcttcttaatatgatattaaccgcattgttaactagaacccgggcacgcacgcaccctcatgaacatctcacacccaaaccacccgaggaccacacgaaccacgcacgagtagttaggattgattaatgaagttttatatacgcttttacgc

SEQ ID NO: 119404 - DNA, 960 bp, Arabidopsis thaliana columbia
gactttattagggaaacctggtacgcctgcaggtaccggtccgcaattcccgggtcgacccacgcgtccggtctctttctacgtcgccaccgttcctaaagacgactctccgtctctcctactaaaagagcgatccaatgcgtaagctctccatccatgaatgcagaccaaaacacccggcctttaccatccttaccagaactaccatttcccgatcaaaggggagggtctatacaagcgttccactctttcggaattttatttcacggagattttctcccgccgcggcgtcatggggggaaattctcatttttcaccaagggacgggttattagccgggtcttgacccggggcttaacctaaaaacctttctggcttcagaagctccgaaaatggagaccccaagatcgttgataatccaaagggatttaaaattccccctggcgaaggcgggggctactttgggggtaataaggctggggttttgtggggtgatccaccccggggtttaaaaagggggtggaggccctacttgtattagaccattttgtggaccctgttttccgctctcttgaaacagaagaggccttagggcacccccaggagaagaaccggcgttaggcccggctccttaggagaaaaggaggtgtttcacccttggcggggaacaccgattaaacgcgcgcacacaaaaagaaaacggggggtgtctttgcccccctttttgggaaaccaccaaccaaccctgtggggtttaaagaaaaatttgttttattttgcgggggcaccagaccccttctataaaaaacaaaatcagagggcggcgcttataaaaaaaaaagggggggctttatgaacccccttccgccggcctccccacatcttttattgagataaaaatgcgccgccttcgcggatggggaaatcaccgctccacacaactcgactcctctcgaggga

SEQ ID NO: 119405 - DNA, 600 bp, Arabidopsis thaliana columbia
  unsure (1)..(600): unsure at all n locations
cgacttaattatggaaacctggtacgcctgcaggtaccggtccgctatttacggggcgacccacgccctccggtggtacctaccatgttatgacttcatattgttcaaccccgaggactatggataagagctctatttcatctgcaaggcattagatccttttgtcctttctacaaaagctaaaaaaatttgtaaaaggatcttttgttgaaatgggggggaggtcattggaaaaccggttcttttcatataacctatccggcttaaccaagggttaatccaacaaacccaaaatttttttttcaaaaacgattttttccccagtgatacaaagagagaggggattttcatnttttgtggaaaaaaaattcatttctcctcggagggggttgcgggcaaaacccattttttattggggtgtgggggtttccttccaaaaaaaataggtcccctgcttggagggccttggaaacatttttgcttactttttgcggggccaaaaaattttcacaaatttttttttataagggtataaaaagctccaccccccgctctttggtgcggattgtggggtcccccaaccaaatacaatgtggtaaa

SEQ ID NO: 119406 - DNA, 467 bp, Arabidopsis thaliana columbia
  unsure (1)..(467): unsure at all n locations
gccagctctatacgacttacttagggaaagctggtacgcctgcaggtaccggtccggaattcccgggtcgacccacgcgtccgcggacgcgtgggtgttgccaaggaagaagtcattgaaaagagctcagattcatcgtcaacctaaacatgtttgtactattttatgagcagagtgatgtaaatcataccgtgatttaattacggattacaacgaagagctgggacaaaatgtttgcacggaagcattgttaatttattgtacaaggtgtgatacttacagaaaggcaaaacagtgtaacaaatgtagtaagtgccttgcatttcacgggtttgcanattgggggagaataataaaaaaaaaaaaaaaagnnnnnnnnnnnnnnnnnnnnnnnnnnnnnnnnnnnnnnnnnnnnnnnnnnnnnnnnnnnnnnnnnnnnnnnnnnnnnnnnnnnnnnnnnnnnnnnn

SEQ ID NO: 119407 - DNA, 138 bp, Arabidopsis thaliana columbia
ttttataactgtccctgggccgccgattccggcgcccaccgtcgatgtaagtgtggattattgtgttgtgcagcgctagctaatccctaagttttctctctccgggaggaaatggatgttgaaaatcagatttcgatt

SEQ ID NO: 119408 - DNA, 649 bp, Arabidopsis thaliana columbia
gaccccaacaaactggtttacttgatcataaatctttgtttcttttttttacttggattttttttaaatggcccgtacctctaactctgagttctgttggagaaaactgcctgaaaaatgttaacaagacaccagaaatggtctcacggtatacggggtgcacacaacttctccagtaccaatgaggatggaaacaccttgccatggcatggatccgaaaaccaaaagtcatgttccccgttgggcggcgaactctgcttcctgaagttagagagggatataccgggagaccaaatatcaggtggaaacatcaagggtgggaaccctataaagtgccaaaaagcggggtgagcttaaaaaccccacgcctttaggctactaactcctgaaagaattcttttttgccccctggccagaagatatgcttgcagggcttggtaaaaagaaaacaattttaaattcacttatttggtaacaagagacgggtctgaagtaaaaagttgtcacatctagctaagccttaaatattttggaaacgagaccaacccctgggcagaggcaagaataattaagcctaaacccctgattaagggggaaaaaaaaagtctttttaaaaaatcccgaaaaaagtttccggtaaaaaatttct

SEQ ID NO: 119409 - DNA, 763 bp, Arabidopsis thaliana columbia
  unsure (1)..(763): unsure at all n locations
gacacagcacccagccgcaggccgagagaagagcaaagccagaagcacgcccaccgcacacgaaaaaaacccccctcccacaaaagagggcgcccccaacaccgcaccacagccacaacaaaaccaccccacacccccgcaagcgagcacacaccgagaagaccagcggcacgcccccacccaccgaggcaccccgccgaccacccaacagagaaaagcaccagagagcccccccgcacgagagcccggaagaaaccccccgccaccgaggacgccaaagagaacacacccaaacacacaagagccccgccgcgaaccccaccccgccacgaccaagaggacaccgagnaacacaccacccacagaagacccaataggcacgaaggaacgagaacgcgggacgccaggaacacaccacaaccacgaaagaaaaaggacccccccccccgccaccaccaccgcaccagagcaagcgacgaccgccgggaaagaacagcaccaaggaaagagacgaagacaacgggccccccacaccacaccaacgaccacaaaaccgcaccccacacgcagccgaaaagaagcgacgcacccagccaacaaccagccaaccgcacacaaacagaacacgagcgcgccggacacgggaggaagaagacgccgcaaacaaaaaacccacgcgacacaacgaaggagaggaagaagagaaccaacacaaagcgcacgaacaagcacgccccgacgggccgaacagcgcacacacgcg

SEQ ID NO: 119410 - DNA, 879 bp, Arabidopsis thaliana columbia
  unsure (1)..(879): unsure at all n locations
ccacgcctgcaggaaccgggctccttttcccgggcgggcaacgcgttccaaaataattaatatatatggggcggaaccctcaccacctgtgtgtcggtgggaacccacacccacaatttccttttacaaaaacagcccctttttaaattaaaatccaaaactccggattttgataaatttcttcttttccgcagaatgtaggacggancaaataagcctttttttaaaaaacaatctccctcatattactgttgttgtttccccccccttttttatacaatatttttatatacaacgcatctctctttttttttatttctcttcctgagaccccccgtctttttctttatcttgtctaatcaaattttgaaacctcatcatactcataagtgacagcaccacttgttcgtttctataatcgactttttatattttgtatgatacacagatatttctcttagaaacgctcataatccataaccctgccgggaacatacacccttacctatttaattacgcaattatctatagtttcttttggttattcctcattttgctttttgtctatttaatacatttttctccccccgttttcttttttttttggggacattatacgcccccccgacccgatcaactgatacttctcttctaacacccaatgaaatgacgaggagcccccataacaaaagcgttagtctattatattagcatgacgcctcctgtcctttcttcttctccgctacctcgcctacatactttcttgttactcttataaaatatcgatctatattctccacctatttcattgtcagcgtctcattgattcatcccgcttcgtattaatttaccccgccctatctcgcacaaacattattt

SEQ ID NO: 119411 - DNA, 422 bp, Arabidopsis thaliana columbia
tttaaaaaaaaaatgcccctcaccgccacccccccaacccaagcccccgcattcgggtgctcgacgtctagcaagtgctctgtccgaattcaccatttccgactctgtggcagagataacaaacgacatttttttttttgggggtttgttgggacacacccatcgcctgcctcaaaaaaaataaaattcccctaaggggaaacaacggggggcccccgcggagctagctggaatccagcgagcgtactgtccatcgatggctcgtgccagacattctccggtaggctatatcagattccgcttcttctatcgatcgcgtcttggttctgctactgaaacgggctgcacagggcgactcgatcgcagccacggattcgtcgattcggtcggtcggggctgaggtaattcctacgccgccagcg

SEQ ID NO: 119412 - DNA, 896 bp, Arabidopsis thaliana columbia
agggaaacctggtacgcctgcaggtaccggtccggaattccgggtcggccacgcctccgagaactcttatgtttggaagggaaagcaggatcagtctctgagatatcacgattaactgggaacaagccgtacaatattctacctaggggaagaaatccccccggtgggccttctatacaaagaggttgttttttcagaatacgcagagagaccaggagcttgtcggggaagccctaaataaattaaccttttcttatgggagggttcttctcccccaaggggacctcttctaaaaagggaacaccccccacttttttcatattccaaaaattgggcccttttgaaaaggggttccagggacttatgggggtttcctttaataaaaacacaacattaaattttgggggagggcccttcttctgtcaaatctaacccttgaaaaagtttacccaatctctccccccaattataaggagaggcttccgatccattcgaaaagggcggggaaaaaacaacccccgggagataggtttctctccacaaacaaaaaaaatatggggggactcctttttttaactaaaacccctttgagagaggaataaaacacaagggggggttgttccctatatctgtgttacacaaaacaaaaaaacaccctctcccccactgaggcgtgggcgggcgggggtccctgtccgccctcttttcagaacaacacccagaaaacacccccctttctcgtttttattttctcgcggccccccctgacaaacgaacaaacgtctcagtgttcttgagatctctccttatgcaccaaaaaaaggtgcgcgcgtcttttgccaaatttcttcggcgctactatgagaattataatccgtcaagcgtggttatttctt

SEQ ID NO: 119413 - DNA, 522 bp, Arabidopsis thaliana columbia
  unsure (1)..(522): unsure at all n locations
ctaaacttggatcctctagagcgttcgcccttttggtttttttttttaataaaaaacatatannncatcatcattatccatatcccaccacatttggaacattaaattctctctattattcacaagagattatccacagcaaacaaaaccccacgctctcattttattccttcttaataaagagaaaattctttctttggtggtgggacacctatatccaggaggttttttaaaaaaaaaaaacccccccccccccccggtttatttttccccccccccgtttaacccataccaacctattttttagggtcaacaaaaaccccctcctatttttcttctccaaacaccccccccccaatctaccccccaaagatctttctcctagccccccttctaaaaacaaaacccaagcacgtgcccccgcccacaacactcctctacaccccttcctctcctcgttttacgcgctaataatacacaaacccaacttctccactttctcccctccctcctttccctaca

SEQ ID NO: 119414 - DNA, 452 bp, Arabidopsis thaliana columbia
tgacgtcgactgcacgcgtacgtaagcttggatcctctagagcggtcgccctttggtttttttttttttttttttttatattaaaggggtctttatattaatatcatccgggcagtttgattagtaaatcaaagatacaacatttttctgaaccctttaaacataaaaaactgggatgatacaaaaacaaatggaaaacatgaggaattttttccggggggtgtactaaccccccgcggtggtttaaaaaataaagcgcgcctcttaatgagggttaacccccccatgggcctaggcctcaggggcaggggcctctttggggggcgaggggttaacaggggcaaaaccttttctcgtacccttttactttccaggagccaaaaaagggggggtttaaaaaaccccccttcgccatatctacaaaccgccggggccgggtcttacgggggagg

SEQ ID NO: 119415 - DNA, 501 bp, Arabidopsis thaliana columbia
  unsure (1)..(501): unsure at all n locations
atgacgtcgaacgcacgcgtacgtaagcttggatcctctagagcggtcgcccttttgtttttttctttttttttcataaagaaccaaacttttcataaaaagaggagaactttggagatgtttttaacaacaaaagaggcggaccatcaaagcttttcaaaaaacaaattaaaattccgggggagagacacccggggaaaaaccccatttttttaggaagangggaagagcctccccaaacccatctaaaaatttccggcgtcccaaaaacttatttttccccccgcgggggcgggagagacgcggtatctcttcccgggccttttttcttgaggttgcgcgcgcgcggcccccccccccaaaaggcggggccgggcccccttccttatagccggcgtccgcccccctcgcgcacaaaccccgaaggggccccggcttgcgcaacacgccgaaacaaccattccgccctcggccaacaagcccccccctccccttctcccc

SEQ ID NO: 119416 - DNA, 484 bp, Arabidopsis thaliana columbia
  unsure (1)..(484): unsure at all n locations
cgattatattaggaacaacttagaagactatgacgtcgcacgcacgcgtacgtaagcttggatcctctagagcggtcgcccttttttttttttttttttttttttttttaaaaaaaggagtccagaaatgttttaatctcccctcgtctatgtttatgggtccccccttattgaaaattaaattttgatttaagaaaactttntttgaaagaggggaataaaaaaaaacccccaaagggaaggggggggggtcccctccctgngtaaaaacgggatgggaaattccccccccccggggtgggggagggccccccatttgttttttaataaaaattccccccccccaaaattttttttaaaaaaaaaagcgttttttataacccactttacgggggggaaaaaacgcgggggctcatacaaaaaaaaaaccggggtgcgtatcgccccaaacacaaatcttcttggccctgttaagaaaaaaaaa

SEQ ID NO: 119417 - DNA, 502 bp, Arabidopsis thaliana columbia
  unsure (1)..(502): unsure at all n locations
nnnnnnnnnnnnnnnnnnnnnnnnnnnnnnnnnnnnnnnnnnnnnnnnnnnnnnnnnnnnnnnnnnnnnnnnnncttttgttttttttttttttagtcagaaactttaacatattcatatgtttcagagatgaattcaacaacaaaaggtgttcaacattgccaaagaagaaagcaatacacaccacaaaacgtggctaagaagaacacaagcaaatcataaaccggctttacttgaggggggggaaaanaaaaaaaccccccctttttttaaaagtctcctacacccaaaagttttttaaccccttatttaattccaactatttattaaaaaaaccgcccacattcaataatccaactccttcccaatcaaaattaggcaccttctcttcttatccttgaagcaagcttaatgtctttgggcctttatggcccccccccttgtatggatggcccaaatggtttttccccccaaacagccccacggggttttcttccccccc

SEQ ID NO: 119418 - DNA, 508 bp, Arabidopsis thaliana columbia
actatagaagagttatgacgtcgcctgcacgcgtacgtaagcttggatcctctagagcggtcgccctttgggttttgtcttttttttttttttttttttttttttttttttttttttttttttttttttaacccaaaaaaaaattatgggcccattcctcatttttttaaattttttttttggcccttgaaaacatgttaacatacagtttatagcacatctttttttggggggggtttgaaaaaaattttcccctttaaacacaggttaagctcacatttggtttttttttttttccaaaaaaaaaaaatttgttttttggtggggggggggttccaaactaacggggggtggggttgttgttccaatagcaggaccccaacggggcctttggttttacattggacgaagggggcccggggggtggcccccccctgcggttccttggggggtttccaaaaaaaaattcccctggggggggagaagatttggggcctttttttgtttt

SEQ ID NO: 119419 - DNA, 487 bp, Arabidopsis thaliana columbia
atgacgtcgcctgcacgcgtacgtaagcttggatcctctagagcggtcgccctttgggttttttctttataaacaacaccacataaaatcatatggggaggtgaaggcagtacaatatctaccaaacttacaatcttttgtattatataaaagacagactctaaccaaatccaaacctaaaaagctctcactaaagatatactatttttttatgggggggtgggaaacaacaggggaatataacaaaaaaatcaccctagttagctctccactaattagaccccaccccctcttccaaagggatattttgctcaggaaacttcccctcaccaagcaaaaaaattccggcaggaggcgcggccgggaccaccaccaccgggaaggggttttgacttttctcccctttccccccacggcaaaaaaatcccacgtttattgggcccagccggtaatttccctggggcccaaatgccccggaaaaaccccc

SEQ ID NO: 119420 - DNA, 500 bp, Arabidopsis thaliana columbia
  unsure (1)..(500): unsure at all n locations
aggtgcaactatagnnagactatgacgtcgcctgcacgcgtacgctagcttggatcctctagagcggccgccctttttttttttttttttttttttttttnaaaacagaaaacgcactttggagggattaaaaaaaactgccaaaaacatattcaactctcgttattcttgtggcttttcacaagaaagagggttcatatcaaaagggctctcatttacaagagaagttttttcaggggggggacccctcaaagtacgtcttttaagatttttcacagatcctctggaccgttgatgccccccgccccgcggaagcgtgggcccacccgcgaaatccggcccgggaccttcaggcgtaccatctttccttataggggcccgcactaagcctggccggcctcacggcactaccgtggccccccccgaaccaccccatcccccccccctcccaccccatgagccccgccgcacgcgccacccgctgctgcgtccggcgcccc

SEQ ID NO: 119421 - DNA, 500 bp, Arabidopsis thaliana columbia
  unsure (1)..(500): unsure at all n locations
gaatgtannnnnnnnnnnnnnnnnnnnnnnnnnnnnnnnnnnnnnnnnnnnnnnnnnnnnnnnnnnnnnnnnnnnnnnnnctttttttttttttttgaatagattagatgattttattcttatttgaaatttgatacaatgttgggtgatatatatatatatatatatatatatattatcaaancatcaaaaaccacaatttccacctggtcctccaaatgaaaaggcttctcctgtatatttggtataaccccaatatgtcgccctaaaacaattataggaatcgaccataaggcgtattttcctaccttcaatgaaaactcttttatagcccgagtttataacaacgacgttattaaaaggggccctctttttaaggcccgaactggaaaaaacccattgcccattgggggactgtttcatcggaaaattaaaagttttccttctatcttaatagaaaactcattattaaagggaaaatacttttttagcaataacca

SEQ ID NO: 119422 - DNA, 503 bp, Arabidopsis thaliana columbia
tatagaagatttatgacgtcgcacgcacgcgtacgtaagcttggatcctctagagcgttcgcccttttttttttttcttttttttttttttttaaaaaaaaaacttattttaacaatttgggaagggttgccccctccattatcatcattacatatatttaaaaagaaataataacttaagaaggtgcgttacatttcacatgggagccccatcaaatttatttttgggggggggggattgaacattcccctttgaaaaaaatataacaccgcacaaaggaagagcgggacggaaaaaacttttaaaaactctcccacccccctcgaaaaaaaaagggaatttttgataaaaagggggtgaaaaaaaaccgcctgcctgatacgagaatcgtgcgggtgtttcttattttttttttttgggggggggcccgcgtttccccctctgttttcctgcgaaaaaactcccccaaaacaacgtgggagcccctctcgtttacaactcc

SEQ ID NO: 119423 - DNA, 491 bp, Arabidopsis thaliana columbia
actatagaagagttatgacgtcgcctgcacgcgtacgtaagcttggatcctctagagcggtcgccctttggttttttttttttttttttggtcgaacatccatgactcaagagcgggcggacatgctttacataaaagaaatcgaccatgttttaacagaaagagacaaaccgggacgaaacatgttttggattaccggaaggaccctctttggaaaaaccctttggggcggggaaatttaccacctagaaaggcccctaaaatactcccacaacattggcgggcggaacaataaggttcttggggggttaaacattttgaaaataaaccttttttggcgttttcttctccaccaggggggcacggttcattccaagggggggggccgggtttccaaagaatttaagccgggagggcccccgccttttttggttcccggccccccaaaaaaagagtttgccctctccgagaacacccccttaggggggttg

SEQ ID NO: 119424 - DNA, 456 bp, Arabidopsis thaliana columbia
ggaacacactatagaagattatgacgtcgaacgcacgcgtacgtaagcttggatcctctagagcggtcgcccttttgttttttttttttttaaagaaatggacaattatatatgaataaaagttgatacaaggcctttctttagctacattccgatcaagggcaaaacaaaaaactacatactgtatatagagaaacgtggaagataggactttgccttgacaactaattaattgggggtgagagctgtgacaattcgatttctcagagagaaacactttaaggtagactgagaagtgcaatcagtttactcaccttcccaacctgattgccgagctctcttctcccacaaagaaataattttcctctccttgataacaaagcttcagctctctctctagctgataacaaatctgaggggcgggattgcacttctcagcctcttttggaactgaaa

SEQ ID NO: 119425 - DNA, 451 bp, Arabidopsis thaliana columbia
cttagaagattatgacgtcgcctgcacgcgtacgtaagcttggatcctctagagcggtcgccctttttttttttttttgacctaaacgtttttgtatagttttattcagaacaatttagaagaaagaattaatcaagaaaaatattagcgagaggaagaaggagcttctcaagaacttgaccctcaattccagaattacacaaattcatcatcatcatcatcttcatgggtggggattcttggtttattctggaaccttatatgcatcatgtgtcacttcagacaaaacaaccctggaaacaaactatggggttttttctgaacagttttggaccgtttcttgggccgacgccgggcctcggaaccaccatcccaatgaaatcttctcccatctccttttcgagagctaataaaagaacaaggacgctttttttccgtttgaaccactccg

SEQ ID NO: 119426 - DNA, 487 bp, Arabidopsis thaliana columbia
tgacgtcaactgcacgcgtacgtaagcttggatcctctagagggttgccctttttttttttttcttaatatatatatatatatatggagagaaagaagttgtttcaatacaattttacaaaagtaacaaattatatgaatcactcaatctgaccggaccaaaccccttggatcttaacattttttgggaccttaacacccaagttttttttcggggggtgaagactctcgaacactccgatcacttaaactgtctcccggttggtctttgggatcttcaaagggatttctccgacggaagcccgccgggttttttaacgttttcccttggaaaagttcttccttgccttctctggctgggggagggaaggccccttgttttttcccacccagggggatcacacccccaccttttggggcccaaaagggaaccccccacggccccaatgagaaacaaaaaactctgcccgtgaatcttttgggttttc

SEQ ID NO: 119427 - DNA, 477 bp, Arabidopsis thaliana columbia
  unsure (1)..(477): unsure at all n locations
tnnnnnnnnnnnnnnnnnnnnnnnnnnnnnnnnnnnnnnnnnnnnnnnnnnnnnnnnnnnnnnnnnnnnnnnnnnnctttttttttttttttttttttaaaacattgggaacgtatgtagtatgtatatatacacgggttcaatatccactcatctcaagctgctctgcttgttccagctaggtagagatctttctgaattaatgctgagatcgttcaatagagtattattattattgcatgatttcaaagggcctatgttaaatccccttaaccctggagaccgttgctggtatgcacttggtctagtgttactgccattgttggcaatccttactttgcttggggcttcactcatcattgatggcgncaggcatagcttgttcttatatggcgagtaactctctgactgtgtgncaaaacttctcggtcttatccttggggagcttaatgatcttgactttgcctttgctgactc

SEQ ID NO: 119428 - DNA, 521 bp, Arabidopsis thaliana columbia
  unsure (1)..(521): unsure at all n locations
cgaattgtnnnnnnnnnnnnnnnnnnnnnnnnnnnnnnnnnnnnnnnnnnnnnnnnnnnnnnnnnnnnnnnnnnnnnnnnnnnctttttttttttttttttttttttttgccaaaggaatcttgtgattattgaaatcttattaaatctacataaaccgtcaattctcaactaaattataaagacaaggggttttcatattcatattagttgagccaacaaagttgactactaagaaaagaaacgaaaggcaaaaaaaaaagaagtggtctcatattccggcagatcggagagcatactcttgaaccaatgcagcaaacaacgactgtctctccagtaaacggactgggctatcatactctttcgctttacctgcgnctatgacaagaacgcgaccacagcccatacgtgtgggaaccctatgagcaacgctgataatgggaccgccccaaaaacccctccctgaggaatctttgggatcatagcatcaggctgggaaaacaccccgccgcattggctttt

SEQ ID NO: 119429 - DNA, 458 bp, Arabidopsis thaliana columbia
  unsure (1)..(458): unsure at all n locations
tatgacgtcgcctgcacgcgtacgtaagcttggatcctctagagcggtcgcccttggggtttgtgcttttttttttttttttttntaaaaaagataatcaaaccttggtaatagaaacagaagtttctaacaagagctcttcatggcaatagcagctaaaagtaaaaggcgttacatatgtgtttgaagatcgttcccatcaaaacatttttgattaggcggctgggctcctactttcggtggccctttatctccgggcccctctggatatgatctaatatcaaaagcctgggccctggggggatgttcccatcttttcagcgccctataagggaacaagggcagtggggaaccaaaaaaaacccctcttttggagtttttttggttttccccaaccccacctaaatagcgtggccttcccttgaaaaagagggtcctcccccccgcgtaaaaaaatc

SEQ ID NO: 119430 - DNA, 502 bp, Arabidopsis thaliana columbia
actatcagaagattatgacgtcgcctgcacgcgtacgtaagcttggatcctctagagcgtccgccctttggttttttcttttttttttttgggcctcttccagttcttttcccttttgcttgataatcttatcgctttcatttgccctatcttctctctgttttacaatcatttgagatttagcaactctttcttctccttcttgcaactttctttcccattctacgcaaggcctccctctgctttgacaaagttgcctcgtctgcttctcgttcagcaatgtaggaaaaccgctccctttgaagagaactttcccgagcttccacttcctttgccttcctctccacatctgaactctttctactaacttcagcaagttttgcatcaacagcacgcagctttgcctcaacttcaagagatttttcttcaacacttctaaccaatgcatttgcctcagtcaactttgaatcggctgaaatttgatctctgcattttcagcgcg

SEQ ID NO: 119431 - DNA, 530 bp, Arabidopsis thaliana columbia
  unsure (1)..(530): unsure at all n locations
cgaattgtnnnnnnnnnnnnnnnnnnnnnnnnnnnnnnnnnnnnnnnnnnnnnnnnnnnnnnnnnnnnnnnnnnnnnnnnnnnncttttttttttttttttttttttttttacgtctaaaaatctactgcttacctctttcaaaaacttcagttcaatcagtcgtatctcatacaactcaaaaacaaaaaggataataaaaaagcaacaattgaggcaaatgagaaaattcaaacaagaagagagattgttactttatagagatactgttggctttataatattcatccgagccaagaactgtagtatgcctgtaagttaaatctacaggcgaatagtccatcctcaaacccaaactctgaatttttgactttataaaggatgtgagaagaaacaaattgctgtacaatgacgacttcatcactcagcttcgcctgcttcttcttctctaaagtgctctgcaaagaattcatctagttgtccccagtttgggatgtctgattgattggcattgtcggatggtaacgaccg

SEQ ID NO: 119432 - DNA, 492 bp, Arabidopsis thaliana columbia
  unsure (1)..(492): unsure at all n locations
taggacnnnnnnnnnnnnnnnnnnnnnnnnnnnnnnnnnnnnnnnnnnnnnnnnnnnnnnnnnnnnnnnnnnnnctttttttttttttttgggtcaaagagaaatacaaacagaactactctctcgctgattaaaggactttagaatgcttaatcaaatgacattttctttcaaaacaagaaacaaaatgcatcaagtgcatgaagcaaatctcttgataacagggatcatctgcttgtcttcttcaagagagatcattcccttatgtgaaggatcttcaagcatgatttccacaaccaagtgacccgcgattgaccaagactggtgcttccttgcttgttttccaacgtaccttccttgcttaccataatagtatccacggcagcattgtcggtgcagccgagattcaattaaatcaatcgcacttttcgttatttgaggccgcccaatcttgatgcatgccggcgtaagcgtccacagcaatactggcca

SEQ ID NO: 119433 - DNA, 498 bp, Arabidopsis thaliana columbia
cactatagaagagttatgacgtcgcctgcacgcgtacgtaagcttggatcctctagagcggtcgccctttggtttttttctttttttttttttttttttttttttttttttttttttttttttgaaaactactgaaacatgttttttttatagtactccagtcttatggggggatcacatatttgggggaaacaaaaacctgaaaaatggcatcccccattttcttaacatacgtgggaacaaattccgagagcttaggatctgaaaagttttttatcacatatactttttttaaacaagctttttgagttgttcaattttggcgaagagctcaggatgcataagggcttttgcttccttaactaaactcccttttgtggggaaaggatacccttccaacaccgttttaataaaacctctgaaaatgctcaggggtcgggtttaagtaatctacataagccctttggagcttcgccccgggggtaaaagccttttgga

SEQ ID NO: 119434 - DNA, 464 bp, Arabidopsis thaliana columbia
gacgtcgactgcacgcgtacgtaagcttggatcctctagagcggtcgcccttttgtttttttctttttggttgaagaagatggcattattaacaaaagtttaaatatccaaaataggagtcacccaaaaacaagataatctccgatgagtaatggaagcctacaaaagaagaagaagaatctcataacaagggggaggctttgtttttctcaggggggacccatgtccttaagagcattgatctgttcctctcccataggtgaattccactcacccctacattttttccataaaaaaaccattttttgttggggggacaaaagggtcttttttggggggctaaaggtctttctttgcccctcccgttaaaaccaaaaaaagggacttttcctttttaaaaaatggccaatccgcgttataacacaggccgggggggagggaaggaaaacatataatggggggaa

SEQ ID NO: 119435 - DNA, 466 bp, Arabidopsis thaliana columbia
actactagaagattatgacgtcgactgcacgcgtacgtaagcttggatcctctagagcggtcgccctttgttttttttttttttttttttttttttttttttttttttttttccccccacttaaagcaaggaaaatggattgatataacctttcatataaaacaaaaatcttcttttttttctttccggtataaaagcccaataagagtcacacacataagctttcacacggttcccctgaaacactaaaaaataccccgataaatttaccctatggagggatttacaaagtaaaacttgttgttttacttataaaacttcatcacacctccaacttgggggggaaacacagggcaggtagggacaccaagggcggggatcattgccgttttctcctaaaaatagcataaacggggccaccacaaaccgggaaatcaataaaaccaaagatgggacccacattggg

SEQ ID NO: 119436 - DNA, 386 bp, Arabidopsis thaliana columbia
aaaaaaaaaaaagaaagggagaggaggggagagaagaggaaaggggggcgggagcaaagaacgacagggcgcccggagggacaggggacggagaagggcgggacaacggagagacgaggattttttttttggggtctgaccgaggacgggaggacggaaagaaaaaacccccccccgcaggcggacgaaggggcacccggagacgccggggccgcgagggcacgcgacgaggcaaccaaacgggagagagacgccgagaacggcgaccaagcgggacgcaagccgggggacggaacggcgacaggggcggggaggaaacgaggcgcgcacccagaggggagacgcacagagacagaaccagaaacacacggagcgcggggagcggg

SEQ ID NO: 119437 - DNA, 350 bp, Arabidopsis thaliana columbia
ctctagaagagttatgacgtcgactgcacgcgtacgtaagcttggatcctctagagcggtcgccctttggtttaaattttttttttttttttttttttttttttttttttctccaaaaaccctaataccattttataaccaaaaatacatttttatataattcgaccgaccaaacaaaacgacagattcaaggggttactcattgacaagtttaacccatcctcatcgggggggggagacaaataacaaacaaataaaccttccaactaaagtaattaagggtttttaacaatccctcattatataatctcccacgcctccggggacgggggggtcaacccggaaattcc

SEQ ID NO: 119438 - DNA, 511 bp, Arabidopsis thaliana columbia
  unsure (1)..(511): unsure at all n locations
ttaggtacacactantagaaagttatgacgtcgcctgcacgcgtacgtaagcttggatcctctagagcggccgcccttttttttttttttttttttttttttttttttttttttttttttttttttttttttttttttttttttttttttttttaaaagggaaacctgattttttttccaattttttttttaaaaaaaccccaaaaaaatttttttttttttaaaaaaaaaattttccgggggggaaccacaaaataaaaaacaagggtcccccccaacttaattccaaatttttgaaacatttttaaaaatcactggctttttgggtttaaaaaaaaaaactttggcccctggcttttttttttttcccaaaaaaacccccacccctcccgggacccgtgggtcaaccccgaaattcccgacccgtccctgggggggtaccaatttttcttatagggagtcgaattaaagcttggggaaaacaggggaatagctttttcctggggaaaaa

SEQ ID NO: 119439 - DNA, 498 bp, Arabidopsis thaliana columbia
  unsure (1)..(498): unsure at all n locations
gaagagctttgacgtcgcatgcacgcgtacgtaagcttggatcctctagagcggccgcctctacggccacgtccagccttagccatgagcttcctgtcagcacctgaaacccatgttgggattccggtctcgtcaatgtcttcaagaagacgacgagcaggaccatctgggtcggccacgggagattcatcaacaacaggaggggctccgggagtggggattccgcctgtcatgttcttcaagtcgtcaaccttgttgttaatcttggccatggcgctaacgacagtgtggaagatgtcaatagcgttggtagtgagaatcttggagtttgcaatgccctcaccaatcgcctttcttaaatcatcttcttcgatatcgncaagacaatcagtttggtaattgtaaacaccgattaaccattgtttgagctggtcgattttgctcccgatctggctaagatcttcacccatttcttcaataatggtagcgagatcctca

SEQ ID NO: 119440 - DNA, 471 bp, Arabidopsis thaliana columbia
ctgcacgcgtacgtaagcttggatcctctaaagcgttcgcccttgggggtaatcctttttttttttttcccaagaacattgatttataaaccaatcaaggatgccagagagttaaaacgcaaaaaagagctcaccaaccttgtttcttattggttctttggggggaaaaaaagcccataaaacaaaattcccttttggtttaggagggggaacaccttaaaccccgtttgccggtaaaagggttgcacttggaaaaaagttccccccccctcttgccactcacatttttgtggtccccccacccgggggccctctctctttaaagaaaaacgggaccccaaaaaggaattctttcggcctcgtcttcaagcaggaaaaaaaactctttttccgttacaacccaagggctcccggtttctcgccaaaaacaccaatggtgggcgggggaaaaccccccggggggacaaaaaa

SEQ ID NO: 119441 - DNA, 507 bp, Arabidopsis thaliana columbia
ggaaccactatagaagagttatgacgtcgcctgcacgcgtacgtaagcttggatcctctagagcggtcgccctttggttttttttttgttttttttaataagtatgtttttaataatattaaaacaacctaccaaatactggtcgaaacataaaaaccaaaaaaacatgagtgattttttttttttgagagaaaagcgaaagccacggggtctcaaacggtatgtcgttactttgggggggacatgtacaattgtgtaggggatgccttctatttccttcgcttgttctcgcacggatgctttattcttttttttagccattaccaaactagtctaatccaatataacctggttttttaatcgataaatcattggtaacaaactatgtggagtctatttaatctaaaggaacatttaaattctatttcttattaaggaaaaaatatttttttttttgagcgtttttacaaaggaaaaatttttacttgaggtgttataaaaatatgg

SEQ ID NO: 119442 - DNA, 459 bp, Arabidopsis thaliana columbia
gaagagttatgacgtcgaacgcacgcgtacgtaagcttggatcctctagagcggtcgcccttttttttttttcttgttttggtttgtgaaacaaatattacaaaatgtgtggatttgtatgaacagtttacaacgagaagttgttgtgtaaattgggctcttttcttcagaattcttgccacccaaggaatcgttagtcacttttttgccgccggttttgtgagggatcaaatatgtataaaaacatacaaaaacgctactactcgtgaatcttctgcaatgctatttcttggcctttttaagatacttcttgtgaagtttcattgcaccagtacaggcttttttagcatccaagtttccggttatgtcgtttaagatctttacaacgtcatcaagtcctcgagctttggacattaacctagaactcttggttttcaaaaccctaccccttaaaaaaac

SEQ ID NO: 119443 - DNA, 461 bp, Arabidopsis thaliana columbia
  unsure (1)..(461): unsure at all n locations
cgaactttnnnnnnnnnnnnnnnnnnnnnnnnnnnnnnnnnnnnnnnnnnnnnnnnnnnnnnnnnnnnnnnnnnnnnnnnnnnctttttttttttttcttcataacgtggagttgactccaattgatagaggttactgaaacaaaaatgaatcggagaacgtgcaaattgggcattggacaaaggaactgtaatagtataaagcaaattttaggctaagctgttcacagctgcaactgatgtttcaggtggattaacaacaatgacactgaagcagcgtccacagagagggggatggtcaaaaattgatccgccctcgcccgaggaattccagcacctctcacacttagacccctagggtggtgacacccaaaaccacactttgatctctccctacacatactctgctgtgtgaggcacactgattataatctccttctccattgaagacaatacttaaac

SEQ ID NO: 119444 - DNA, 447 bp, Arabidopsis thaliana columbia
  unsure (1)..(447): unsure at all n locations
ttaggtacnnnnnnnnnnnnnnnnnnnnnnnnnnnnnnnnnnnnnnnnnnnnnnnnnnnnnnnnnnnnnnnnnnncttttttttttttttttgtgtaaaaggaattcttatttagaaaagcagtctggtctgatacatggggccctctttacatgagaaccttcatatttgctctcatacactgtcttcctaagcgtcttcttagatcaacgcagagtagtgacggtctcattgctcttcgtgaggagggaaatgtctcaaattttggctagattcccctgcagcataatggggcggaggaaagacgctaactttacaggacatccactcgcgtgcagaggtattattcgatgagacataccttcttataaccaacaaaggatcttattctggaattcgaacacaggggggtggctacttgatgtctttaacgaactagtgggatcg

SEQ ID NO: 119445 - DNA, 513 bp, Arabidopsis thaliana columbia
ttaggtacacactatagaagagttatgacgtcgcctgcacgcgtacgtaagcttggatcctctagagcggtcgcccttggggttttttttttttttttttttttttttttttttttttttataaaaagaaacatcacaggccataacaagattaagaacaaaagtcccgaaacatcaaccagatttgtcaaatacaagcagagaaaaaaactacaactgggaggtgaggggtttcttttagggaaaagaaaagtcgcaaacgactaaattgtttttgtttttaaagcagttataactaaattattctcaggactcttcctcctggggatattcaccttcttcctcatcctgggaggcacctttttcatccgcaggtgcatcttggtattggtgggactctgacacaagatcggtcatgttgctctcccgttctgggaattccatttcgcccattccaattttgggacgcggggggcacccgggaattccggaccgggacctggaggggtacca

SEQ ID NO: 119446 - DNA, 493 bp, Arabidopsis thaliana columbia
tgacgtcgcctgcacgcgtacgtaagcttggatcctctagagcggtcgccctttttttttttttttatcaaaaggaaaaacctttattatgtggattattatatctataaagaaaggttcgcaggttaacatacgctaaaatgtaaaccagaattctaccctagaaacccgaaaaagctttgatttttatgattttcccataaagtttttttctagggaggcctcccgcttttcattatgcaccaaaaaaatttgaccaccctgtttccccgccaaagcccccccccgctcatttcccccaaaagcacccgccacgcccgccatatctcatccctggggcggccccaaagcacggctcccacccccaaccggccccccccgttcgtccaacgtcgctctccatcctgcggccccgccaccccgcccgttttgggcgaaaccccgtatccccgcggcgccttccggctggagcgcgccccttacggacaccccc

SEQ ID NO: 119447 - DNA, 504 bp, Arabidopsis thaliana columbia
  unsure (1)..(504): unsure at all n locations
atttaggaccacactatagaagatctatgacgtcgcctgcacgcgtacgtaagcttggatcctctagagcgtccgcccttttggtttttttttttaacataaaanaaacatcacattaatatttctaaaatgttacttaacactttgggttataatatctaggtgcgttttatagcctcctcaccgaatatgcacataaaacctagctagataaggggtgccctcctaagggacacaaaggtgtggggacagcattccataaaggtgggaaggattttttttcagacagaagggaatatttggtcggggtgaacggaaaccatacaactcttttgttctcggggcgttcttgaaagacaataatctccccaccagggttacctgggtttttcctgaacaaacatttttcttgggaggggggtgtccaacaagaagcccaccctcctcccaccaaggccttggaaagaaagggcccatttcccctcggcctaaaaccattttccc

SEQ ID NO: 119448 - DNA, 500 bp, Arabidopsis thaliana columbia
  unsure (1)..(500): unsure at all n locations
ctatagaagattatgacgtcgcctgcacgcgtacgtaagcttggatcctctagagcggtcgccctttttttttttttttaatccttaaatgtctgatttcaacattcccagagagaaatctacaataacatatgtacagcaatcacattttgtatgctgctgcttcaaagactaatagtgtatatcatccacgagtcaaatcaaaatcagtgagtgggtttctgcaaatgtgaagtgatctgccagagcctgagcctgaaccgggccacccccttattccctgagaagagaagttctgtggcgtctgctgacccgcagatgctgctggttcagctgcactacccggngtggnctccatttcactattggtgccctcttcatttggttccttttcttgtctgaagggcttgttattggtattatgagtctttgcccttgctccgtatacaaaactacatgccaccacctgaacaaggttggctgcgataagcatgtcaact

SEQ ID NO: 119449 - DNA, 471 bp, Arabidopsis thaliana columbia
  unsure (1)..(471): unsure at all n locations
nnnnnnnnnnnnnnnnnnnnnnnnnnnnnnnnnnnnnnnnnnnnnnnnnnnnnnnnnnnnnnnnnnnnnnnnnncttttttttttttttttttttctttgggcactaaaaatagtggatctaaactaatatgattaagttagacaaatatagacatgaagggcttgtttctctttgccatgagaggatgagaaacagaaaccaaagaagtgtctatgttcactaaggggcttaaaccagggggggaggaacagaagccggatcacccccccaagactctttcagatcaggcccatattcaccctcagggcgacttctttggccggaaacctgaagaaaaagccaagggctgaaccatttttctttctcgaacccaccgtgaccgggcttatcccgcggaccccccggttttggaaacaggtcggcatacccggtccaccttccccaacgccgccgcacttaccgcggagcc

SEQ ID NO: 119450 - DNA, 628 bp, Arabidopsis thaliana columbia
  unsure (1)..(628): unsure at all n locations
ggcggcgggggccgaaagccggggacggggggggggggattgatgtggggacgggctcccgcgactcgaggggggagaacgccccgcccccgttaggcngggcgccgccgagaccattcccccgggggggggaaggcccgcccacgaaaaaaccaccccccgcggngggggcggggcgggggccncggggggacgcgagcgaccggccacggagacggcggcgcgcgaggacgggcggcggggcgcgcggaggcgcgggcggggccgcccacgcgagcagcacagccggggcgggctcttttttttcggtgggtggcgcgaggggaggcggggcgggcgggcgggaaaaacatgggcccccggtccgcgccgcggggtgcgcgcccccgagggcgggggcagccgtaggggggacgcgcgcggcggtcgcccgcggggggcgccggctgtgcgcggtgggggcgcctacgcgccgcgccgcgcgccgtccgcgcgccggctggcgtcggagcggtcgcgcagtcttgagagcgagcgcgcgggcgggcgcgcgggtgcgggcggtgatccgcgcgggtccggcgcggttgcgcggccgcggggcggtccggcgcgcgcgcgtaggcgg

SEQ ID NO: 119451 - DNA, 551 bp, Arabidopsis thaliana columbia
  unsure (1)..(551): unsure at all n locations
ttttaggtcacaccttacnaagattatgacgtcgccatgcacgcgtacgtaagcttggatcctctagagcggccgcccttggggttttgtttttttaaaaaaaanaannccccccccaaaaagggaggttccccctttttaaaggattattaaaatcaccggcccccccttggggttctttaaagtgcaagagggcctttggtttcccaaaaaaagtattttgagagccctcctattttgggggtgtagcgccccccctttttttttttttaaaaaaaaacacacttcttncccctctatcccccccccccccataaaaaaaaatttttcttataaaacacaaacaaaacctctcaaaccctctctcccctacccccttcttttccccctcaccctccacccccaactcccccacaccttttttttctttcccatccctacccccccctcacacccccccccccctttatttcccctctcccccccctatccacccccaccacaactctttcccctctccctctcccccccccttttcttatacccccccc

SEQ ID NO: 119452 - DNA, 502 bp, Arabidopsis thaliana columbia
  unsure (1)..(502): unsure at all n locations
atgtnnnnnnnnnnnnnnnnnnnnnnnnnnnnnnnnnnnnnnnnnnnnnnnnnnnnnnnnnnnnnnnnnnnnnnnnnnnnncttttttttttttttttttttacgacaatgcctgataagtatttgcacatgacatagtacagagtattattagtggccccgtcactacccaaataaaggaaagcgaagagcttaaccttggacttcgactcggactaatacaggcctagagactatagatccggggggtgccatanctccgggttcccacaaaatatgtgactcaccataacgatccagagtccccttctccctggggggaaaaatctcttcttcctcttcatagggggacgggcaggaaaaatgcttcttttcgccagttcctccgggaggaaaaaaaacccccgagggggctttattttccggaggaaaaaaaaaacgcggcggcccttttgtctctttcgggaggagggcccgcccccnggcgccggttcgccccccc

SEQ ID NO: 119453 - DNA, 518 bp, Arabidopsis thaliana columbia
  unsure (1)..(518): unsure at all n locations
nnnnnnnnnnnnnnnnnnnnnnnnnnnnnnnnnnnnnnnnnnnnnnnnnnnnnnnnnnnnnnnnnnnnnnnnnncttttttttttttttttttttcacaaaacgcctaatcaacgaattccccgggacaaactataatctatatttattatgccccgcaccaccttaaatgaggtaacccagaagggtacccctcggacttccatatgcgcatatggcccccttccaaagattgaaaacggagagagtcaattctcttggttacccgcaaaaaaaggttctaggggtgacaaaaaaaccctcccttcccctttaagaaggggggctcctttttcctccccattcggaggggggccatcgccgggggtcttgttacagcacaacaccccatcccctggggaaggcccccccaaaagcccgttttttttctttagggggaaccacccccgcacaaccttttgtgggcgttgcccggcgaactggcccgtaaatcccacccaccgcaattcctagcgcccg

SEQ ID NO: 119454 - DNA, 352 bp, Arabidopsis thaliana columbia
  unsure (1)..(352): unsure at all n locations
atgtnnnnnnnnnnnnnnnnnnnnnnnnnnnnnnnnnnnnnnnnnnnnnnnnnnnnnnnnnnnnnnnnnnnnnnnnnnnnctttttttttttttttttttggcagagaaaaacatattatggagttgggaatatagaagtgtattatatgtgtggtccgccacgcatcacactaaatgggggtgccacagggaggttccaaccctgacgtccatagggcgcatattggcccccaatcccaggcattggaaaagcggggggggcgtaaattcccctttcggggcccgcgaaaaaaaagggcgacgaggcgtcccgagaacaaacacccacccctccccccctgggcgaagggg

SEQ ID NO: 119455 - DNA, 360 bp, Arabidopsis thaliana columbia
agtaccctcagaccgtccattcctgtcgccccgctcatttttaaggtcatgatttgggaatttttacaacttaaaaggcctatcaaaaaattttttataccccaccatattaattaaacaaaaactccccccctgataccttccatttacccaaggagaggaagaaggttttctattcttaaaagcttctatgaacctttagaaaaagggttccaacggccttttcaattcttttttagtccaatttcctttccagaattaaaaacccttttctaagcggatttaaacctacccctttaaaagaaatttggcctataaaacctttttaaattcttcccgaaccaaatataccctttttta

SEQ ID NO: 119456 - DNA, 139 bp, Arabidopsis thaliana columbia
  unsure (1)..(139): unsure at all n locations
gaagctggtcgcctgcggtccggccggattccggtcggccacgcgtcggcacgcgtcnagcgtttctcataacccagaaatcgcnagagctttctcttgtctttgacagatctctcccatcatcgttcgggattcgatg

SEQ ID NO: 119457 - DNA, 474 bp, Arabidopsis thaliana columbia
  unsure (1)..(474): unsure at all n locations
aattttaaacctttctaaaaagggtttcggtttcattttacttttaccatttgaccttccccatgccggacttatttctttttccttcttaggaacaatccccctccaaaaggggaaaaacttttttaatgattcaatcttttaataggtttaaaaaatccagaatttttttccccacaatttattatgggggtggaaaaaaaaaacccgtcattttaaaaaaaaaaaaagggccgctttttaagaacccactttcttccgcttgttcgaagtttattttttttgangccccaaataattcgctggccggtttccaccgaggttggaaaccctcgccccatttaaggcttcaaaaatccttttccgttgaaaaagaaaagcccccatccctcccatatnatcctaagagaaaggaccccctctctctttaccgcggtttggtctcaaaaggtctttttcccctctccttttttt

SEQ ID NO: 119458 - DNA, 875 bp, Arabidopsis thaliana columbia
gatttttcaagccaatttttttcagtgtcttccctgtgttatatttacaaagtgtgaaaatataataaaatctcccttggtaatcacaaatcccgtagactaaataaaaaagacctccgttttttatttcctgcggtagagtaattaaaataattttcctgctaagaccaaagccattttttttttttcttttttaattaacgaaatatctaaattttttatattgccccattaggccaattgcctgattcaccctaaatcttaattttatatatttctaaaaataaccttttatttttttccttccaaaaaaaacaccgcgtggccggttttattaacagaaaaatacttttttccccccaaaacttgtttttcctatccccccttcccttttttttaacccaccagtcgaagaaacaaaaccccccaacccactctaaccctgtttttacaaatcttgcaaaaagggaaatattcccccccaaaattaaccaattctcggaaccctcccccctcccccaaaaaaaactttaaacccaaaaaacctccctttaaaaaacccctttctgggccataaatacaatcccaccaagagactctctcccccccctttataaaattgttcgcgagaaacaaaaaaaaaacccccccaaacctttgcttttaaaatggtaccaatctctaaaagagaaccctctaaagaaacctttttttccaaaagattacacttaaaaaaacgcgtccctataaaaaacttttttcccaggggcccttttcaacaatttgtcggtttcttcctcccccaaaaaaaaacgctactggctcccctccttcagtctttgaagcacctagaaaggacggtggttttcctcaaa

SEQ ID NO: 119459 - DNA, 873 bp, Arabidopsis thaliana columbia
  unsure (1)..(873): unsure at all n locations
cttactatagggaaagctggtacgcctgcaggtaccggtccggaattcccgggtcgacccacggcgtgcgctttgcttataaaccccaatcttcttcttcgagagagagagtgaaagagaagaaaacgacaatgggacacgccacgagtctctctcacttcctcatcctcttttnctccaggttctctcggctggggtctctcactagggggggtctccaaacccacctgtctctcaggatatttttcttccatttcgggcaccggaaaagggttccgatgctgttggctccgtcccacagaagaacctttctcttctgtaaagaacgggtggtctctggtgtccacctacgggtcagttacttaggcactttgtgggggttataaaaactggggcgtcttaaagatcatataaacacttttttcatggaaaccatccgcgataccctttctatgaaccacgaactagggagggcacaagggtccggagcttttttttagatgggaaatggtccagtacaaaaaatcccccggggggggtagaaatgctgggcgtttgttactatcccggagggggcggggattccctttgttanctattttgccctggggggggcccaaaccccattaacttgccggaattcgccgggggaatttttttggggaaaaaggaaaatttggggggcggggtttttttaaaaccaaccctttctcccagggggggtggtttttttttgggggttttaaggagcaagtgccctttaagggcggatattcctgctaaaattgtggggaaataaggggaaaaactttggggtttataaagggaaacataaaaattttatttatttttggaaaaaaggggggggggcat

SEQ ID NO: 119460 - DNA, 681 bp, Arabidopsis thaliana columbia
ggggggggagccgacaacaaaaagagaggagagccagacgccacgcacagcagaacagccgaccgaaccaccgaaagcgaagaagagaagagacggagacccaagcggccaccccgacccacgcgcagaaacaggccgaggcaccttctcgaaagaggggggggacgggcgacgctcagaagccgaaaacaaaaaggcgcgcccgagggcgcgcgacaagagccagcaagagagagcgggaccgcagcgcgcccccgcgccccccaaggcgagcaagaagagacgcgagacgagggaagacaaaacaaagaacaaagacacaagcccgcaccacagggaaagagcagagacagagaagaggagaaagaaggcggcagagagggcccccaacaagagccgagcgaggaagaacgccgagagaggggagagggccgcgcagcccacgcgcgcgggccacgaggcgcagcacacgagagggacagccgggacacagaccacacggcgcggccgagcaacggcaggcgcggccaacaggagaaagagccgcacgaggaacgagcagggagagcaacagagaaacgaccccggcgcagaggggccgccgcgcccggcgcagccagagcgccgagccaacaaagcagaaaggagcaaagaagagaacaggagcacagacccaaggga

SEQ ID NO: 119461 - DNA, 619 bp, Arabidopsis thaliana columbia
  unsure (1)..(619): unsure at all n locations
gacggcccgagaccgcgatttgggggaggcgcactcgccactcgccactcaaagagaacaaaaaaaaaagtctgggctatggaatataactctctatggcgatttcaggggcgcacaccgtgtcgcgctattctctgtttgcaccttacgtcgagctgtagatgtgaaaggaatggaacaatttaaagaactgcatgtcacgacataaaatgaagaagggaggctaaacattacgccaatagggggacctgggcggtggtactcatgtggggcccacctgccttctccaataaaactgcgccggccggaggtgtacaaccctttaagaacaaagatggtggaattaacctaaaaaaatgagaagaaaatttttaaataacccttcttctgatgtcctgaaaggggaaataaaaggctttaaaattgttggggtgaacttacggaaaaaaaaaaaaaaaaggggcctaaaacacttccccgcgccaataactttttaggccaaaaatacgcgcttaaagngagggaaacgggccaaaacttgaaaacctttcggggaaaaaaaggccccccctccaatccccaagaaaacccctgggatacgcggggtgtcccccccacc

SEQ ID NO: 119462 - DNA, 773 bp, Arabidopsis thaliana columbia
  unsure (1)..(773): unsure at all n locations
tgggaaccggtccctgcggtccggccgattccggcggcccgctcaaaaaacaggaagatgtaaaaaatggactcattctctagtccatatttgtttggagttaagaccgctcatctgtatgctaatcgattctaaatggggtgacctcctggttaaagattagctaagggcttgttcctgtttaccccttgaaatggaaattcatggagggcctaggggttgactaagatgacctgaaatgaaatgggtgaggaacaattgaaaatgttgtaaattaaaaaacatctgaaaataaggggaccttcctgggtcaccaaaagatccttttttgggggaaaaggggttttcgggaagggaaccatttccccttaaaactttttgggggcctcccggatatctgggaagggaagagatccccagggagaggtgagagtttttccccattgtcctaaaaaaaaacccccgaatccccctccncttaagggtttggtcaatttttatttaaccccttggggcaacccctataaaaaaaaggcgggaaccttctggtttggggaaccaagacaaatgttttccttgtttttgaaattagttttttctgggggtgttttgggaaaaaaaaaaagggggcccttaggacaatttatcccggcggcgcggttttttttttaggcccaaataataggggcgggttaaacggggagggaaacccggtgcccaatatgcggggaaacctcttggggggtaaaagaggcccccccctcccctgccct

SEQ ID NO: 119463 - DNA, 497 bp, Arabidopsis thaliana columbia
cttactatagggaaagctggtacgcctgcaggtaccggtccggaattcccgggtcgacccacgcgtccgatgaaagtttagagattttttgaaagaacaaacagatatcgaattcgagttttgcaaaaatggtatcgggtggaggaacctttatctcattccaattccactcgctttccgttaacaaccgatttctacggttcatcatgggggcgtcggcggcgaggttacaccgtcaagctggccggtcgatgagaacagtgagatctaacttctatcaaagcggagatcaatcttgctcattcgtcggctcaatcggcgataaatcagagtatgcgtcggagtttctctcggattccgtcattcacatgagactcggcgagcttgctttgaaaaacagtaattctcttaattcaacgcttccttaatgaaagaggaagcgtttctcgacatttcttaggcgtttagtgatttttccgcttggaagaaggatatct

SEQ ID NO: 119464 - DNA, 708 bp, Arabidopsis thaliana columbia
  unsure (1)..(708): unsure at all n locations
gggggagcactatacgacttacttagggaacgctggtacgcctgcaggtgccggtccggaattcccgggtcgacccacgcgtccgcaaaaccgcaatccgcgccgagaaaacagattcctccgccgccgctgctgcagcccccgccacgaaagaagctcccgtgggattcacgccaccggagctagacccaaacacaccgtctccgatcttctctggaaggggggggggtcttctacgtaaagcgcaagtggaagagttctacgttatcacgtggaactccccgaagaacagatctttgaaatgccgacgggaggagcancgatcctgaaagaaggccgaatcttcgaagctagcgaggaaagaccgtgtttatctttggggacaaggttaaatccaagacaaatcacttcccgttttacagggggttcctaagggggaggtcattttcttctccctaagggggggtgtatccagagaggcgattcccgaaagagaaggggggggccacacttgagatctttggggaanaatggtagccccattgaaggttacgttcccggcgcaacaaggttttgattgggaaattcggaaacctaaaacacccaaccctttgggccttggggaggaagatataacccatgtgtcatggtaatttttaaaggggtttttgtgtaaataaaaaaaaaaaaaaaaggggggggccgttt

SEQ ID NO: 119465 - DNA, 489 bp, Arabidopsis thaliana columbia
tctacgactttcttagggaaagctggtacgcctgcaggtaccggtccggaattcccgggtcgacccacgcgtccggttttgtggatcttgctggttctgagagagttaaaaagtcgggctcagctggttgtcaactcaaagaagctcaaagtatcaacaaatcactttctgcattaggtgatgttattggtgctttatcttctggcaaccagcggtgttgcttataggaatcacaagctaacgatgttgatgagcgattcattgggcggcaatgccaagacgttaatggtttgttaatgtgtctccagccgaatcaaatttgggacgagacgtaccattcctcttttatatgcatcgagagtgaaaccgatcgtgaatgatcccagcaacctttttcatccaaagagaggggcgattgaaaaagtggtacatactgaaagaccagcccgaaaaaaggggaggaaaaaactggtggatttggggaaaacc

SEQ ID NO: 119466 - DNA, 955 bp, Arabidopsis thaliana columbia
  unsure (1)..(955): unsure at all n locations
agggaaacctggtacgcctgcaggtaccggtccggatttccgggtcgaccacgcgtccgggcaatgacgcacctaatgaggtgctaaccgaggcgcgtctattgctggttgaaactatttncaaacccgctcctggggctaagcttgtaaaaaaaaaaaaaaaaaaaaggggggcgggcgcttctattggaacccagggggagggaccgcgtgcatgcgaangaaaataaaaaatttattggggtgcacctaaaattaaattcacctggcccggcgttttaacaaggggggtgactgggagaaaccctgggggttaccccaacttaagtcggtttggaaaacatacccccttttggccagggggcgtaaataaaaaagagggccccacacaatccccttctcacaaattgtccccaacttaatggggaaatggaacccgccctttaggggcgattaaagccggggggggggggggggttacccccaaggtaaaccattacatttggcaggcgctaaggccccgtatttatagttttctccgcttcttaaagagaatgtggccggtttccccgcaaaataaaaagaggggctccttagggagcccattaatgtgttaacggccccccccccaaaaattatttggggagggccacgaggggaccctcccccaaagaagagttctccctttagaggagaccccatcttaaaagagacttttacaaaaggaaaaacacgcccttggggtttttttttgatataaagaattgcccttcgcccatgtgaaaaaaagagggtgaaaaaagtcgcgcgtggaaaaaataaggtccctttgggggctttgggaaaggggcacccctggttttttaaaaaacaacagagccccaagaaaacccgtagttttttttaaaaaggaaagtgttaatggcgggctatttcttggggggggcgaacgaaa

SEQ ID NO: 119467 - DNA, 467 bp, Arabidopsis thaliana columbia
ctccgactctctatagggaaacctggtacgcctgcaggtaccggtccggaattcccgggtcgacccacgcgtccgatcgaatgagtattcaacaacagattgctgctgttcgagctggaaatagtgttcaaaacaaccggaatggctgatgccctctagcggggtcaagcagtctttgcctcggaggacccaccgcctatgctaaccctcttcgcaatcatggcggtgaggcagccgatgttatcaaaccgcattatccgagagaaggggtttctctggaaggaacatatcccccgagaggcagagaaggttaccgacaagttacacttatctcacaacacaacactcattaagctcgatgccttataacaacttccaacaagaacttccggtgaacagttcccgctggcaaggccccaggggtttcagtgccgggttggaaagccacttttaccaggaagaggtta

SEQ ID NO: 119468 - DNA, 881 bp, Arabidopsis thaliana columbia
  unsure (1)..(881): unsure at all n locations
taatacgacttactatagggaacagctggtacgcctgcaggtaccggtccggaattcccgggtcgacccacgcgtgcgcccacgcgtgcgcttgcaatcacatttgttgcatctgcttcagattcagaggttcttaaccaggtacaagagaggtttgaggttgatataaaggaacttccggagcagattgatacttcaacctacatgccttcttaaagaagtagcacgtccctcaagaaagaagctcttcanatttcaaccttgtaggtgttcaaagggtgatgggggttcacaactatctctcgctccgtttgttttaatgttttctatgacgacatttttttccatatgttaagaacgtctgttgcactctntaaaggagattcgagtcactcctcacaatccacagtaaaaagctgcccattttttttgtccaagaaattttttgtttgaatatcaagatttattctcaaaaaaaaaaaaaaaaaaaaaaaggggggcccttctaaagatccaagcttacctccgcgtgcttgcgaatgaatagtttttttttgggggcacctaaattcatttcactgggccggggttttcaacggtgggaatgggaaaccctggggttcccaatttatggcttggaaaactccctttcccaggtgggaataaaaaaagccccccattcccttccaaattgcccccctaatgggaagggcccccctttggggccttagggcgggggggggggttcccaatgacccttttttcagccttagccttttttttttttcttttttcgcagtggggttcccgaaattaaagggccctttggggcctttaggtttccccctcccaatttttgggggggtccaggggccccccta

SEQ ID NO: 119469 - DNA, 710 bp, Arabidopsis thaliana columbia
  unsure (1)..(710): unsure at all n locations
tatacgacttatatagggaaagctggtacgcctgcaggtaccggtccggaattcccgggtcgacccacgcgtccgggagttttctactggatcgctcagcttctcggctcccaccgccgcttgtttcctccttaaatacgtcaccgggtggattggcggttccaacccacagcgttgcggctggactaggatcgatagaaggagtagtgatgggagagctcatcaccttcgctttggtctacactgattacgccaccggcgttgatcccaaaagggtgtctttggaaccatcggttctttcggcatgggttttatggttggtgcaaacatcctcgccgcgggtcatttttcggtggatccatgaacccaacacggttcttttggacaacttgttgctgccggaaacttttctggncaactgggtctactggggtgggaccactcatcgggggggggacttgcgcgaacttatttacggaaatggttttatggggttttccaacacatgtccttttggttttgctgattttaaaggaaacagggaagagccttgagtcattgtncttggttggggtactttgccctcaactttcttgttttgtgggagtgtggcccgttccttggaattttatccaatgtggtgaaatttattaaggggaaaaaaaaaaacaaaaaaaaaaanataaaaaaagaggggggccgttttaaag

SEQ ID NO: 119470 - DNA, 231 bp, Arabidopsis thaliana columbia
aatacgactctctatagggaaagctggtacgcctgcaggtaccggtccggaatttccgggtcgagccacgcgtgcgctacactttccattaattaccaatatatttttactacttaaaaaagatattggtcttgaaatggagagttccttaacgaaatggtgtgtactgctagtgaagccgcgatgcgggcttattgctgtaaaagcacaggcacgggctcaagctccatg

SEQ ID NO: 119471 - DNA, 587 bp, Arabidopsis thaliana columbia
gggcgcagcaccacaccagccaccaaacaaaaaaaaaacccagcacacaccccgacccccccaggacagcagaaaaagccacaccgaacagagacgacaacacagaagcacaccccccacgcacagcaacgagacaaaagcaaacaccaacaacgaaacaaccaccaaacacccacaacccaaaaagcacaccgacgccaacccacaaccgcccaccaccccagcaacagaaaaaccgagcacacccacacaccgaaagccacgcgcccccaccactacccgaagaagacgcgaaaacagaagcagcagaacgcacccgaccacgcccagcacgcacaaccaaatacgaagcgaacgaacccagcagaaacaccaccccagacccacagacccacaccccgccccgcccacccaaaaacaccccaacacaacaccaccaacaccaaacaaacacacacaaccacaagaccgccagaggcaaacagcacgaaccggcacaagacgactacgccaacacagcaaaagacgaaacacgaacgaccacctcaacacagaaaacaacgaaaacaacccaccaaccgacaaca

SEQ ID NO: 119472 - DNA, 688 bp, Arabidopsis thaliana columbia
  unsure (1)..(688): unsure at all n locations
gggaagctggtcgcctgaggtccggccggattccgggtcgaccacgcgtcgaggacactagagacaaagacagctcgtagctacccgtctaagttctcgcagccggccgtctaagcagtcgtagatcacccgttgaacatctcgtagcggccgtctaagtactatcactggcggctaacagtcgtagtcaccctcgagtattcccagcggccgttaatcttccgatgaaattcttcnattccgcggagagttcaaggaggatcatcggagctgtaaaatggggagagttagctagaaggggggtgcttcggggcttctctatctaatgcccccgtcctaattaatgcggagctcaatcttgggtatgctctcctcaaaagtgaaaaagcatgtcttttttgaactaagtgaagaggtgcaaataaggaactcaaataatcgtttgtcctgatatgaatcagaggtgcaacatctaggaccaacccgcctgtgaggcttatttacctgacaaccaaaagtgcatttttttttggggggaaataagcataaatgttgctgccgtcaggagggccctacttttaataacttacggggaggggttccaattctattttcaactttgccaaagtaaacgaacccgggtaaaaattcctccggcctcacgagtataagaggtttcgccactaaa

SEQ ID NO: 119473 - DNA, 623 bp, Arabidopsis thaliana columbia
ctggtacgccttcaggtacccgggccgggatttccggggggggccgggcgtggcgcccacacgttcgcacatttttgtagccgcagaccccttcaattcttcttcccgttggggaaaaagaatttccccttaacctttgggggcattgggccatttgtgatttctggaaactcccccctctttctggtcgggtgaggctttaaacgtggggggggttgaccaaaaaaatcctcgggggggtttcagaaagggaggctcctttaaatagacaagaagggtcctccaaggcccgggggggggggtggacaaactttaagggccgcgcggggagcgtggatttcccccttaatttttgtctttttggagatccaccaccccccccattctctttctcgccatttatgtgtcccccccgaacctggtgtgtttttcaaagaactttattcccggcccctcccccgggggttgggctgttttttcattcccctccccccgtggggttttcggggtctttcctcttagagaggccacccccccggcgcccctttttttgtgtttccccttgggggaacgcaaatattttcttcttttgcaaaaaagggccccccccccccccactcccg

SEQ ID NO: 119474 - DNA, 483 bp, Arabidopsis thaliana columbia
cttagggaacgctggtacgcctgcaggtaccggtccggaattcccgggtcgacccacgcgtgcgcccacgcgtgcggaaagacattgggagagttaatcccaatttccaggttcttcttttctcggcaacttttaacgaaactgtcaaagattttgttgcgcggacagtcaaagatcccaaccaattgtttgtcaaaagagaggagctggctttggactcggtgaagcagtataaagttgtttgcccgaagggagcaaacaagatcgaagtcatcaaggatcagattatggagcttggggatattgggcaaaccattatctttgtgaaaacaaaagcgtctgctcaaaaggtgcacaaagcccttgcagaaatgggatatgacgttaccagtgtccatgggaatctgactgaatcggacaggggtaagatagtttaaggagttaaagaatgccttactcaagtgctcattgctaccgatggca

SEQ ID NO: 119475 - DNA, 839 bp, Arabidopsis thaliana columbia
  unsure (1)..(839): unsure at all n locations
taatacnacttactatagggaacgctggtacgcctgcaggtaccggtccggaattcccgggtcgacccacgcgtccggttgggaaaggcctgaagatatggacactctccgtactgtttacaaaatcgatagagctcatcctggttctgacgtcgctggtgaaaccgcagccgctttagccgccgcttcaatcgtttttagaaaacgcgatcctgcgtattccagacttctacttgaccgtgccactagggtattcgcgtttgctaacagatatcgcggcgcgtatagtaacagtctctaccacgcgggttgtcctttttactgtgatttcaacggttaccaggatgagttactgtggggagcggcatggctacacaaagcctcgaggaaacgagcgtacagagaattcattggtgaagaacgaggtcattcttaagggctggagatcccattaattgagtgtggtgtgggacaataaggcatgctggggattaatggtcttaatctcccaggggagtggttattgggaaaagcagagttttttgagtctttcagcaaaacgcagatgggtttatctgttctatttggctggaaattctccccccaagtccatactcttgagggggggtcttgtgaagactggaggagatacttgcacctggacctcctttctttctcctatggggtactctaatttcggacctgccaaaaggtgggcttgggggaattaatggttccatttttctccggaatggccagggggggtggatactttcggaccccccaggggcggcttctggtggtccggccaatttcccggggattttacggggggctgg

SEQ ID NO: 119476 - DNA, 656 bp, Arabidopsis thaliana columbia
ctatacacttctatagggaaagctggtacgcctgcaggtaccggtccggaattcccgggtcgacccacgcgtccgagacacagatagtgaagaatcagatgtgagtggttctgatggagaggacacttcatggatatcttggttttgtaatctaagaggaaacgagttcttttgtgaagttgatgatgattacattcaagatgacttcaacttgtgtggactcagcagtctagttccctactacgagtacgctcttgatttgattttggatgttgaatcttctcaaggagagatgtttacagaggaacagaatgaattgatcgagtcagcagctgagatgttgtatggactgattcatgctcgttacatattgactagcaaaggattggcagcaatgttagacaaatacaaaaactatgactttggaagatgtccaagagtttattgctgtggccaaccttgtcttccggttggtcaatcagacttacccgcgatctagcactgtgaagatatattgcccgaaatgcgaaaacatttattacccacgatcaaagtatcaaggcaacattgatggagcttactttgggacaacgttccacatctgttcctgatgactaatgggcatttcaagccagcgaaggcaacacaaaactatg

SEQ ID NO: 119477 - DNA, 888 bp, Arabidopsis thaliana columbia
  unsure (1)..(888): unsure at all n locations
atagggaaacctggtacgcctgcaggtaccggtccggaatttccgggtcaagccacgcgtgcgtacacacatacncccacncnttccgtncnaattataccaaagtccagacaatggaactcaattgtgttcaatttcttcaaaacaagactattcttttcaccggaactcccggttccttgcgaatgttttttttgagagaagattgacaatccacccaatttnaaaaaaaaatccctttttgtagaccatctacaataaccctcccctatacccttaccacaagagtatttaaaaaaaatttttaaggtataacacaaattttggcaattaaaaattaatacctttttttccaaaaaatttgtctccccccccgttatttacccacctaccaataagcctaaattacctctcttttaaaaaaccttccaaaaaaaaaaaatttttttttcatttttcccgcccaaaatcttttacaaaaaaatttatttcggctttaatcatacacttgacccccccccctcctactctcccaaaaattttttaaacccacttcctttcccttctaacttctttatttgaaaataaccctcctctctctttaaaccctcttcctaaaaatctctcccatattcctcccttcatttaccctcaagagacttttagacattattatacactcttcacacatgtccccaaaaaattcttttctcaaaaatcacctatacagcccatcatttccattagcccacaatacttaccacaataacaaaatctcttttccataaaaaattccctcccctatcgtcccccatatcacaatctttaaaacttttcttcattatcctataattcctacttaccctacactactagtattttttacct

SEQ ID NO: 119478 - DNA, 575 bp, Arabidopsis thaliana columbia
  unsure (1)..(575): unsure at all n locations
acgcctgcaggtagccgggccggaattcctcgggtcgacccacgcgtccgcggacgcgtgggcggacgcgtgggcggacgcgtgggaaccactcgaacaacaacaacaacaggaacaataggcacaacaacaacacaaacccaaacacataccaacaacgnacggtggtttcggttttcttttattcccagagcggggagccaaacgggagccagcagaaaaaagggatacccctctaagggcacgaaagctgcttccttacagccggcggaaacatcttccgaacttgaggggtatcctgcggggcgggcagaacaggtttctacgggagccaccaagggggatcccactcaccagcaagcccggtggggagaccccaccggcccagggggggcttttttttaaccctttcgggtaaaacggggggggaaggggaacttattaaaaacccccgccttattcacgggggattggggcccggaatgagaaaaaaatgcggggggggggctggttttaagaggacgggggggaacaaaagggggtagctaaatgtggtgagggccagggccttggga

SEQ ID NO: 119479 - DNA, 907 bp, Arabidopsis thaliana columbia
  unsure (1)..(907): unsure at all n locations
ctatacgacttacttagggaaagctggtacgcctgcaggtaccggtccggaattcccgggtcgagccacgcgtgcgaaaatttgttcctctgcgcaaacccaagaaactacctggtgaaacaatatttgaggaatacgagttggaatatggaaatgaccgcctaaagatgcacataagaaccgtcgaggctggcaatcgatctttggtcggggggggagctnatcgggagggggggcctctatacgctggccttaaccgggctcgagaggggtggcaccaaaagttgggggatgggcatggggtaaccaatttacccgaattaaagggaaaggcaaaaacttagggggaaccccctttgtgtgcgtgggggggcccgaggatgattttacctttacttatgggataaaattttgcgggtattaattgatgccgccgaaatggggatgttggcccctctttataaaaaaaaaaaaaagagggcgcccggtttaaaagatccaaagtaacggcgccggtgggtgcgaaggatttgtttttttttaggggcacctaaattaatggggcggcggggggttaaaagggggggggtgggaaacccggggggaccaaattatggggttggggaaatccccgttttgcggggggggtaaaaaagaaagggcccccccgatcccctttccaaagtggccacgcgaaggggaaggggccccccctagaggcattaggggggggtggggggtgcccagggtaccctactttcgagcccctgggggggtttggttttccttctttccgaggtggggtttccgaaaatttaaagggggccttgggggcattaggccgcccccccccaatgttggggggggggggcggccccttagaggtttcctttgggggacctaaagg

SEQ ID NO: 119480 - DNA, 336 bp, Arabidopsis thaliana columbia
  unsure (1)..(336): unsure at all n locations
cctgcaggagtcccgggcccgaaatttcctcgggtcgagcccacggcgccgccgatatacttggatccccgcttcctttgaccaaacaatatataattctttcgttttgcttaaagttacaccctatattaactcccttccactgggagccttcaccggcgggacccaagggcgggccaagaagaaagaattcgcatctttctgaaggggggggggccataacgattttctacaagcctaaaaaaaaaccgggattnaaaaaaaggggggggagggggttctttcgagagagagtttcctcttgtggccgaagctccggaaagggaccccggggga

SEQ ID NO: 119481 - DNA, 379 bp, Arabidopsis thaliana columbia
gacttttttagggaaagctggtacgcctgcaggtaccggtccggaattcccgggtcgacccacgcgtccgcggacgcgtggggtgatcttagaagaggtgttgagattgaattgctacacctggtcgtttgattgatatgtgtggaatgtcaacacactaatttgaagagagtgacttaccttgtactggatgaggctgacagaatgtgggacgtgggatttgaaccccaaattagaaagattgtatctcagatccgacctgatagaacaacactttttttggagtgcaacatggccacgagagggttgaaactcttgccaggcagtttctacgagatccatttaaggccattattggatcaacagatctaaaagctac

SEQ ID NO: 119482 - DNA, 906 bp, Arabidopsis thaliana columbia
  unsure (1)..(906): unsure at all n locations
ttaggaaacctggtaccctcaggtccggtcccgatttcccggtcgacccacgcctccgtaaggatataaaaaatggcagatggtgaatacattcancctctcctctgtgacaatggaaccggaatggttaaggcttgatttgcttggaaaaatacaccaagaactgtattcccctaccatcgttttctccctcgaggggagtggttcatggtgtgtatgggaaaaaaaaattcctacgttgtgggatgaggctccccccaaaaaaggttttttcacattgaaatttcctattgaacattgtatttttaccaccgggataaattagaaaaaatttgcttcacactttctaaatgaactcccggttccaccataaaacacccttttctttcacataggctcctttaccccaaggccaatggggagaaattaccttatttttttttaaaactttcaaccttcctcccttgttttgccttattcaagcttgttttttccctctaccctaggggggccacctaccggtattgggttcgcccctgagaaagggggaacccacccttcccattaaaaaagatttccttcccacacctctttttggtgagaccttccggcccgaccttctttattccttagaaaatcttaccggcgttttttcccttcttcctcctaaaaggcttaatcgtgggggtaaaaaaaaacttcttttatatcttttttccccaaaagagacacccaacacctctcccgtaaaaacttggttgccctagacagggtcccctgggaaaaaaatcccctccccgattgtttccccacttttgggaagaagatggttttccaaacctccattctcttaatggtcgttaaaaacttttaaacttcctttggacaccctctttttttctacaa

SEQ ID NO: 119483 - DNA, 872 bp, Arabidopsis thaliana columbia
  unsure (1)..(872): unsure at all n locations
agggaaacctggtacccctgcaggtaccgggcccgaattcccgggtcgacccacgcgcttccggaaagggcggtaaaaaaaccaaaacctaaaccaaagagcatttatacctctttaaaaaacccacaacccaaaaaaaacaaaacgggggtgaaaatggtattaatctttggcgcccnggcccaagcttttttttacaaggaagcagggccaccctctcccgttaccataaaaaaaaatgccgcggcgcgtggttgcaaggggcaacctctttgtcgtggggtttgagcgggggccgaaggcacaccgcggagctactggagagagggggtgcccgcccctcggccgcgagtctataaacagccctgcgtgtggccgaagcgcacgcctcgcgccgccccggtggggcgggaggggggtatgcgagacgtagtctccctccaatggggggggtgggatatcgtcatcctcctcttgctcgtcttgccggggcgagtttggttacggtggttctccgccgcgcgcgctcacgcgcgccgccgcgccgcggcgcgcgccacggccgcgacgcggcggcgagaagcaccgcgtgccggcggtgcgagtgatgagcggtttcggtcccgcgtccgcgtggttagggccccagcaccactgtggtgccgctgtttttagacttctggtcgtcgggcgtttggcacgtggactgagatgtctcctctagtgtacaaggctcgcgccccgcggcggagccgggtggcgcggcgacggtcccctctaagcggcgcataatatagacgcacaggcaagctgtcggcgaactattgagcgtgcggggcgtagcggcaagggaacgcgagcgcgtcggcggt

SEQ ID NO: 119484 - DNA, 920 bp, Arabidopsis thaliana columbia
  unsure (1)..(920): unsure at all n locations
tagggaaacctggtacgcctgcaggtaccgggccggaatttccgggtcgggccaggcgtgcgatttttaacttttgcgtgccttccttatcaacttgtaaacaaagctacaaatatctttaaataaggacccaactctttttcaattcctcccatcaatcttcttcattttgtcttgtgggggggggggtttttctattttgaggggaaacaatttttccaaagtgggttcttataaaaaaacctttcttccttctttgaaaggggtccttctggggaacaaaacattttttgttactgggggggcttggcttttatcgggaccccatactgtgtgttcaacttctaaaaagagggtttaaaggggttcaatcatccgataattttggataactcttgttatcaaagctgttaataaaataaagggaacttttttgcccctnatcctttcaaaaaactcgacttaattgggggggacctaaaaacaagggagaacttgaatctttcttcccaacaaaattggagcccggattcatttgcgggcttaaagcgggggggaagaggggaaaacccctccccttctttacaaaaaactggggggaaacattattttttgtagaccctgggaagaccaccggcaaagggggggtgttcctcttgctcgccgggtttgggacaccctaaaaaatcccgccgtggaaaatcttaataaagggcgttaatccctatgggggacctacttttccttgagaaaatgcctaaatttcaagagcgaaccggaggggagattttgtggggggctccacccctgagaccaagaaaggggcatttgtggagccaaaggagtcccaacccttcctctatcaaaaggggcggtccgcgcccggccctatgtttggccgccttccccgggaggggggg

SEQ ID NO: 119485 - DNA, 892 bp, Arabidopsis thaliana columbia
  unsure (1)..(892): unsure at all n locations
ggccgaattcccggtcggcgccacgcgtccgacaagttattcaccaaaaaaaaaaaaaaacacaaaaagtttcaatggccgcctccacaatgggctctctcctcccctgcctttgccggagaggctgtgaacctttcccccgccgcatctgaagtcctcttaacgggccgtagagacatgaagaaaactgttccccaaccaaaagggtcattcaggcacccatggtangatccccacccagtcaagtccttgggtcctttctttgggcagtcacccgcctaccttaccggaagattccccggagactacggtgggacaccggtggactttcagcttaccccaaaacttgccaaggaaccgtatcctataattttcccacgggggggggctttgctcggaacccttaggttgcttttcccttaccttttggcttagaaccgaacaatttgcgaaaaggggttttgtttaaggcccttttccaaactttttacgaaggaggatctttttctttgaaaccccctttttggcccacccctaaagattttggccctttgggcccctcaattttttttgtggggacttgttaaagccccaaaacccaaagaaatggcctttggaaaaaccccatactttcttttccccgggggaatttttccaccttttgtgctttccccccccaaatgcttttcggggttgaggggaagggctctaaaaccgaaattggttttttctctttttgctcttcgcgccacctctccctttgagggcccaataaaactcttttactttggctcccacacaacaccgtgtggcttttaccatttttccgagaagacccatatcacgattttttctttttcacttctcacccaggaaaaataaagaaaaaggt

SEQ ID NO: 119486 - DNA, 990 bp, Arabidopsis thaliana columbia
  unsure (1)..(990): unsure at all n locations
aaaaaaaaagggggcctgtgggggaccccccccgacttactttagagacactggtacccctgcaggtgccggggccgggtttccccgggtcggcccgggcggcccatcatataaaaattttttaaaaaaacgatgtctcaactggaaaatgggttcctcaccatggcttattggccaattttttggcttgggggtttttttgatttggccaatgggctggggggacctttttttttaattttttgggaaccgcggtggaaaaaaatctttttggttttcaaaaaaaaaaccggtccggaaattggcgcctcaaacccaaccaattacttggggaaagagattctctggccttaaaagacgggtctggatcgctcatgggtacccccaccgggggggtgtcctttgtgtgccggaaaaccaaggagaggggggagtttccccggcgcccctttcttacaacaaggtggtgggggggagacaatataaagggggcgccccccgttgtgggggccatcaagaaagaaaaacaccctcctccgcggctttaagggcgccccctttttttttttataaaacccccttcctacccccatttgctctgcgcggagggggggggcaatataatactcccccaccggggcggggggtggcgggcttggggattcacccccccccccttttcttttnggctgggtcgccccacccccgcgggccgccacccagagggaggaaacggaggggggggtggggtgtgtgtaattttctttcgccctgtaggagacgccccgccccccgcgcttgttggcgcaggaaaaatatcttagatgtgggagagggcgcccgcctttgaccaaactctcgttggggggggagtgcgccgccgacggggattacaaaacatccgcggccgcggggctgggcccccgcgcccccacaaaatttttctgtgttatccagcgcggggcgggggagcgcggaggctgttttccg

SEQ ID NO: 119487 - DNA, 196 bp, Arabidopsis thaliana columbia
aatgatggtctactaggcacatctatcttggtcaactttttattgcagcctcggtggcaagaccggctacctcgcgttctttatcattgcctaaaggagttcccggggtgagggtggaaccctaccaggggcaaataggttcattcttctcttagggacggggaatgtcaaactacagaattttacaggggaacga

SEQ ID NO: 119488 - DNA, 565 bp, Arabidopsis thaliana columbia
  unsure (1)..(565): unsure at all n locations
ccccctcagaccgccgactcgggcggcaggcgcgcaacctcggacttcactgccctcttaaaaacccccggcccccaacgctccactggaacccaacacgaaacccccccgaccgcccaacccctcttagggggagggaagnagggcaactgaaaaaacccccccagagggccgcagcccccgacacaagggccccgcgaccaaaaacccacaagcggggaggaagcgcaccaagaaacgaagcacccccgaccaaccgccccccccccaagacccaacgagacccgccccaaaaaaaccagagccgaaccgccgcgccgcccaccgcggaccgcgcaacgaacgccggcgaaaaagccaccaaccgcgcggcgagccccgcgccgaggcaaggcgggagcccccaccccaccaagaagcccaccaccacacagacccaccgcagccgaaaccgccccccaccccccccgcgacacaacgaggcagaagaggccacgagaggcggcgcagggcacaagagtcccccacccgcccccacccacacaccacccgccgcacccgcagc

SEQ ID NO: 119489 - DNA, 785 bp, Arabidopsis thaliana columbia
ctgaggtgatcatcatctcatgtgtttttattctcttgatccacaattttcattttccttccattggcttttcgtattgacccctgttaacatattttgtttggaagaaaaaaaaaaaagggcgcccatatatagagatccaatttactacccttcttcaacgtttagttttttttaggcccctaattcattccctggccggctttttcacgtgggattgaaaaccttccttcccacttattcccttcacacttcccttttccaagttggtttttaggaaaacgcccccactatccctcttcccaacattccccacccttaatgggaattggcccccccttttcccccttttaacccgggggttttgtgttaccccaagttgccctttttttccagcccttcccccgttttttgttttttctttttttctcccaattccgtttttccccaaattttaatggggcctcctttgtgtcccatttatctttccccccccccccccaaacttttttggtgttgtcccatgtggcccccccctaaaaacgttttcccttcgcggggccccccttttatgggccttttttcaaaagaacaccatcccctttgtctttttttttttttataggtttcccttcccccccttttaaaaagcgctttccacaattctccgtttttaaattttcctttttggggggtttttgggatgccccacccctctttttttttatactatattttcccctacaaacccctttagtctttataataaaagattgtttaatttc

SEQ ID NO: 119490 - DNA, 888 bp, Arabidopsis thaliana columbia
  unsure (1)..(888): unsure at all n locations
tggtacgcctgcaggtaccggtcccgaattcccgggtggagccaggctgccaccacacgnnccctcttnctcttccttttccttttctctctcttctcattctccccatacccttataaggaaaaatcttcaaagaagagaagtgatggccaaacacatgagaggagaaaatcccatgggggtttctttttttcttgagagccaggagaacctctcaaagaatagggtggaaaaaaatggtggtggccattcccttagaggcttgcttgtttcccatccccattcgggattcttttttataattagggttttccccccgggaccttaaaacctggaatccccccttgttaaataaaacatttacccccttttattttaaaatttttttgaaaaaaaaaccgcagaggaagggaaaaaccatggggtgtgtttttattggggagcaaaaaggttcccttataaaaaaacattttgtcctcagtctctcacatgaatctctaaagagctggctgtaataaaatacacaacaagggccaaattttcccataaaaatattgtttgggctcaaccattagaaaaaaagagagtttctccttaaaaaaaaaacaaatccccttcccccaatggggtggggatcccaacttaaattccttctttccctcacaaatattctgtgggggaaaaaataatgggtccaggggttcaaaggtcccccttccttttggaagggccctttttcgttgtttgggaactttccctttctttattccccactgtgttttctcctcgggggggggtagaggggcctaaaaaaaaaaaatgcggcccctctgtgctttcttgcttctactccgactttcttttcttttgggtcgccgcagaagtata

SEQ ID NO: 119491 - DNA, 891 bp, Arabidopsis thaliana columbia
  unsure (1)..(891): unsure at all n locations
tagggaaacctggtacgcctgcaggtaccggtccggaattcccnggtcggcccacgcgtccgcggacgcgtgggcggacgcgtgggcggacgcgtgggtgacccangtgaanaatctacagaagataaacgctagggaatcagatttaggaatatctgatgaagcttcatggcacgcctaagtacaaaatctttgcttatggtggggggcnggaggcctacccgttcaatctaaacaaaagggatctttctcgccgttttttctcaatgtagggaaatgggtgatgtcattcttattcaaaacaggggaacggtaattctaaggggtttgctttcttgcttatgaaaatcaaaaaagacccttcttggtggtaatatccgaagggagctcttgtgtggggacgaccatttaggggggccttgtggggcttcaaaaagcccaaggaggggttgaaacccccaccccaaataaaggggctcgggggtttcaaaactttaaaagaggaagaggtcccggggggttcttcaaatttcccccaataaaaagacttaattctggttggggctgaaaaggaaaaatttccaggggatctaacaaattaggagggggggtgtttcaactttttaaaggagagcgctccgggttcttgaaattcaaaaaaaaaaaacctccccctggtggggaataaagataaattctcagggaaaaacattaatggctaaggggggccactttcccatgagaattcacccttgggaaaaaagtccggggggggtttgattccccttgggccctaaaaaaaagaggggagggggttggccccccaaattctttttgagacacaatacggcgggggttggttttaagcgctttatttttttgggggagggc

SEQ ID NO: 119492 - DNA, 659 bp, Arabidopsis thaliana columbia
aggtaccggtcccgatattccccggtcagacccacgcgtgcccccaacctccggccacattaaccaacccaaaatgggaagagaaacacttttctctctctctttctctatcccctccatctctctaaggttttctttccaccgcaaaaaattttcgtaaataccctcgaggaggagcaacaaccctaagttcttccaaaaactataagtgttccctaaagaccgctttaccaaaacatcttaaaaaaccttccaaaaaccccctttcaaaaatcatccctataaggggggaaatccccaaaaagtaatatttcttaaactccttaaattctctcaaattcaattgggtgaatggggttttttttttccaaatgattgggtggcccttggtactttctctaaatgggaaattttccaccccaccctaaataaaaaagtttgttgttttggcaattaaacaaaaaattaggggtttaaaaaaaaaaaatgcccctcccttaaaaaatggaggggtaaagtttggttcttttataaataaaaattttaatttgtgggttatccgttcccccccacttaaagatttaccaccatccttttaaactccttttcgcccccaaaaaccctatattttatccccttttggagagcctcccctcaaa

SEQ ID NO: 119493 - DNA, 840 bp, Arabidopsis thaliana columbia
aaaaaaaaaaaaaaaatatataaaatccaaaaaaacaaaaaccccccctcaactccaaccttaaaccttaatttttttcccccccctccttttcaaacccttttttaataatggagaggggacccccaaaccggttcaaaaaaatattaaccggctcttgcttttcttttaaacccccccgggggaaacccaacccttcccctttttggttctttggcctccccccccctcccttataaacttttcctttttaaaaaacacccctaaacccccaaaaccaaaacccccttttcttttttttcccaaaaaaaaaaccttttcccctctcaaacccttgggttccataaccaagacaaaaaaaaacccccggcaaaacttttttttttaccccccccaccctttttttttttttcgtctgtgatacccgggacccccaaaccaccacccaattctaattcccccccccccgtttttgatgtttccccttattttccccttttcctcctcccccacaaaaaagcccccccccccccctttccaaaacactggggaggttccaccccctctttcttctttataacaaaatataattcttctctccaaaccagagccccttaaataaaacaaccggggatcctttcttccaaatccccttcacatccaaccaaaatcaccccccgccacaaaaaaaaataacccgccgccccacaacaacacatcccccgcctctaccatactactttttataacccatacacatccaccacccgccgcccatctcaccgttacataaacacctctttctctaatcttcccaatctatccctacttcaaatcaaa

SEQ ID NO: 119494 - DNA, 278 bp, Arabidopsis thaliana columbia
  unsure (1)..(278): unsure at all n locations
tagggaaacctggtccccctgcaggtacgcgggccgaaatttcccgngtcgggcccaggcgcgcccgcataatgtttaataaagcaggaaagaacaaccccctttgattcaagaaccttaaaaggttccgacaaaaaatccacctttttatattgggatatagatatgggtttcaaaaaaaggaggggctcccgtcctttgggggtttttgttccccggggtgcgcggttatggggggaacctctaaagagaaaaaccttccccggttttcttggaac

SEQ ID NO: 119495 - DNA, 121 bp, Arabidopsis thaliana columbia
  unsure (1)..(121): unsure at all n locations
tagggaaacctggtacccctgcgggtaccgggccgggatttccgngccggccccggggtccgctaaagtttttcttggagggggatggccacagaatgggatggcaaaggaatatataagc

SEQ ID NO: 119496 - DNA, 150 bp, Arabidopsis thaliana columbia
  unsure (1)..(150): unsure at all n locations
gtaccctcaggtccggccaaattccnggtcgccccgcgtccgggaacttcttcttanactactctcttccctaatctgaaggtttataattctacactgaccctatactttttggaatgtttatttctttaaaacagttttctttaccta

SEQ ID NO: 119497 - DNA, 604 bp, Arabidopsis thaliana columbia
  unsure (1)..(604): unsure at all n locations
cttatttcatctttcttataacgcctttttaagtttatttaccaaaaagttgtgaatcctttaaaaacataccataacctttactttttaacccccccccctttttaataaacttaaaacctttcaatcccaaaaaaaaaaaaaatatcgggaagatttcttcaccttttttatcatttcccaaaatttaaaaaaacccttaaaaacacttttttttattaaaagattttctcccttatttattaaaccccccctcccccntctttttatattattttcaaccataaaatcctattttttaacccttcttaaaaataaatttaaccttccccccctatttttttaaaaaaaagtttccaaccaaaaaaatttattttccgtgtgtttttaacccccccttccccctcaaaattaataatttttcccaacccccataaaaccttttttttctcttctctaaaaattatttccacaaacaattcccttttattttatcctcatcctttctcttcttttaaaaaaccctacacagatcaaaaatttttttttttctctttttcttaaaaaaataaatatcccatttttttctttaacattctcaatt

SEQ ID NO: 119498 - DNA, 420 bp, Arabidopsis thaliana columbia
  unsure (1)..(420): unsure at all n locations
caggtacccggtcccgaatttcccgggtgggggccgcggccttcgatacaaaaatgggaggaagcaaaggggcccttttaaacacctatttctttcttttttaaaagatggggtgagtccctaaaaaaatccaaaaactcattgaagggttcccccccatctccgnaaattctcatcattttttttaaaagggtgctcggcgggnaaaaaaagggtgcaccttaaaaaaattttgcttcgggggcgtccccccccctttttttctccccccccttgttgaaaaataaaagaagcttgtgtacaagaaaaccttttttcttttccttcttcacgtgtaaactcccccccccctntcttccttgggcaggtgtagaaaaaaagtgtttggtcttatacgcccaccaccccctcccctttttt

SEQ ID NO: 119499 - DNA, 558 bp, Arabidopsis thaliana columbia
  unsure (1)..(558): unsure at all n locations
ctggtacncctgcgggtccggtccgatttcccgggggggccaggcgtcccaccaaacatccaataaaattttttacactcttcttcatgtgcaagcaatgggaaaccttttgttctttgtttcctccccccaaaccccggggaagaaaaaaaaacccccatcccaaaaaaaacattttttttttccaaaggcgttgatggtcncccggtccggggtcttatttattaaaaacaaaagcaacccccccgggtgcaaaatcttttttctctcccaaaaaaaaacaacacagtcccgaaaaattgctttttaattaaaagaaacactccttctttggctggcttcgcttgttggtttcggccccccaaacaaaaaaagcggggggggggagaggatcctctcccccttttaatacccggccaatttaacaaagatttataagggggttttgagaaaaaaaaaaaaacccaccttgccttcaaacgcttgagttgcaaggagaaggggtctttaccataccccttggaaaaccccctttttttgttttttaagagggggggt

SEQ ID NO: 119500 - DNA, 792 bp, Arabidopsis thaliana columbia
  unsure (1)..(792): unsure at all n locations
cgggggcttaaaaaaagaaaaccttcagcggggaatgggggttgctaacccttgttcatccaaaaatacaaaaagttngaaacacttattctccctccccccttattggtagaagggggggctggcccttttttgttttttacctacaaaaatantgtttacctggagggactgaggatctcgcggggcaaaggggttttcccccaaaagctttaagtttggttttacccgggaaaacattcccccattttttttaaagttaatcctgcccggcccccctccaaaagggggaaagttttgtctttaaggggaaggagtgaaaccgggtgggcgtgttttgtttccaaggggggcccccccccactcaaaccccctctttcttccgtgtgtattaaggataaaaaattgggaaatttttttgtgtggtttgttggcgctatagaattcttggggccgccaggaccccgagtatcttttttttgtttcgcaggaaaaattatggggggggggcccatactgttttgttttttgggcgtccttcttgaaaaactataaaagccctccccaatttttccccccggggggtatagaaattttgtttttctttttccccggaatataacttaaagggtggtgggcccccacaattgggggggggcggtgttaaggcaccactattatttcgcggccgtagattttttttttttattacccccacatgttgtgggcggggtgttacatagggagtttaacccccccgtcccctctgcggcgggccctcttcttcgatgc

SEQ ID NO: 119501 - DNA, 301 bp, Arabidopsis thaliana columbia
atttttgccccccggtgagatgccttttatcaaagagaggaatgagcaaaggaggagccgtgcgtcacgcgagtggatagcgagacacaaataaagcagtctcgtaccggatcattctcagatagtgatgtagtagcgcagccagaacaccgataagttttttttttattgaggcggtggcggagcgcaagaccaagcatggtctggcgcagactaatataacactaatagaagggtccgagaagacagaggtgaggcagtgcagtagatgagaattatatcacgttcgttagagaggtga

SEQ ID NO: 119502 - DNA, 282 bp, Arabidopsis thaliana columbia
  unsure (1)..(282): unsure at all n locations
gtcttattagggccacctatagaattgctatgacgtcccatgcacgcgtacgtaagcttggatcctctatagcggccgcccttttttttttttttttagaaagaaaccactccatgtcttagatagagttaacatagtaacatcatcccaacacanagcaaaggaacagaccatgtgacgcagcacgaaaccaaactaagagatcaggttttatttataaaacatanttattgcgtgtagataagagagatagagaaaagtgccagaacccaagagctcatc

SEQ ID NO: 119503 - DNA, 579 bp, Arabidopsis thaliana columbia
  unsure (1)..(579): unsure at all n locations
attggggcnnnnnnnnnnnnnnnnnnnnnnnnnnnnnnnnnnnnnnnnnnnnnnnnnnnnnnnnnnnnnnnnnnnnctttgtttttttttttttttttctttctctttcaggactcttacggcgctgatccatctcatcttcagatccatcagcaatcccttcattctcctccttttcttcctcttcttcaaaggcggcttccaaaacacttttccttggctctatgagccattctgttcaagcgtccaccttttctttaaacgggggcatggaatatcacaagaaaaatccttgggttagaaggtcctcatggacttcggccacctggggcagggaaaacttcccatcaggaaaccttttggcttacttttcgggaagcattggaaaaagggtccaaggacccgataacattcacctcacgcccaggggggacgcagatggaccggcccaggaatccgacctttgtggaggcatcattttttaagaaccccccaaaattttcctttcaagggggagtgggaacctcctcaatatggaggccaagggaccgggggagggttgggggttcccccccaagg

SEQ ID NO: 119504 - DNA, 945 bp, Arabidopsis thaliana columbia
ctctactttactatgacgccgcatgcacgcgtacgtaagcttggatcctctagagcggccgccctctcctttttttctttttttttttctttttttttttttttttttttttttcttttgttttttacaccaattttttcttttcaatttttggggaccccaaaaaacaaaatcccccccccgggggaaaggggggttttcccaaaacccagggggggggggaaaataaaccccgcctttcaaaaaggtttcacatccggaccccaaatctttattctaggggaccctccccccccccaggggggggcccaattttaagggccccgcctcaggggggttccctttcgccgggtggtttggggttaaaaccggcctcgggggaaaggggtcttaaatccaacccatttctggggctggtacccccccctccccccccgaggggggtgtggccccaccccttatggaaccttttccacccccccgggaggggggccccttaatacaccgggccacggtaaaaaccaccgggggggtgggcgtggcccgcccacccaaattcccctggggggcggaaacagaggacacctccccccccgggtgccaccggggtaaacctgggcgctgcggggcttttcttccttcacaacggaacaccatttccggggcgatccccccccccacggtcgcggaaaaaaacacccccccgcgctcccccggcgtggtaccaccgcccctcaaaatctttcttgtggagtaaagagggggggcggccaacaaggccacccgccccttgttccgcccaccacggccgccctcccgttggaaagcaggtgggtctaaaaacgcgcggcgcgtcgtcccaacccgcgcgcccctcaccacgccccccccgaccccggacctccaccgcgcccacccggcagcgaggccgccaggcgcgaccag

SEQ ID NO: 119505 - DNA, 326 bp, Arabidopsis thaliana columbia
  unsure (1)..(326): unsure at all n locations
gcggccggcgctttgttttttttttttttttttttttgtccaataacgggggtatttcttcttttaatatctcattattatcacattccacaaagctagttacaaggtcagtatatttgagtacactatgcgtntgtgaacaaaacaccactctaaattttctgagatgtgaaaatgctcaggattttggagaaacgacgaaagcgggggcatccaaccgcttcccgatcattattctccagggaacaccgcacgttttcccgcggggccctttgaaaaaattaaccctcaggcagtccatttcgcaccttttttgtccccccgcc

SEQ ID NO: 119506 - DNA, 333 bp, Arabidopsis thaliana columbia
  unsure (1)..(333): unsure at all n locations
cccgagcgagggcgagacgaggccaccgaacagcagaacaaccaagcacagacgccagagacccccctccaggagcgggggcgggcacgaaccgagcgcagagcgcaaggaaaaaaaaaagcacccaccgcacgcaaacacaacgccaaccaaacccgaagcaccaagcgagagaaagcngacgcagccaggggacccgacaggcacggagcaaagcgagcagaaggaagcacggcacgcccgaaaacccacaaacccaaccgcctacacacaccccaccagaaagcggcgccgagacagacgcacagaggacgagggcaggcgccgccgcgg

SEQ ID NO: 119507 - DNA, 429 bp, Arabidopsis thaliana columbia
  unsure (1)..(429): unsure at all n locations
ctatgacgacccatgcacgcgtacgtaagcttggatcctctatagcggccgcgctttttttttttttttgcgaacacaataacaaagttctcaactaggaaaaaagtaaaaaacattcaggggatggcgagagaaaagtcttcacaatccgtcataccataagagtgttaataaaacaagacanaattaagatagagagagtggcggcccattggaaaaaggctagtacgagtcttggtgaagcttaaagcttgtcttccaactcagatagtggagtcatcgctttctttaatccctttcttttgctgatatcagccaccaaaactgaagcctgagtacccggctcaaaagggtcaaaaaaatcattttccaatgatcaaacacacactggtggaatgcctgtnctgaaggtggtgccctaagctgact

SEQ ID NO: 119508 - DNA, 535 bp, Arabidopsis thaliana columbia
acactatagacttactatgacgtcgcatgcacgcgtacgtaagcttggatcctctatagcggccgccctttttttttttttttatcaaatacatctgttattctttttcttcaaaagactaccaaattttatgtgtgtatgtatgtatatttcaaaaatacattatatcatgcaaaagaatatacaagatcgaggacatgtttaaagggaaagaagaaagaagcaaaggcaataaaaactactaaggtacaaatctggactggtcacgactgccccagctactatgtgactgtgagcgatcaaagaagtcagaactataatcttgactcccaaaagccattctttgaaacatccttatctgagcagattgttgtttcgagtcaaacacttggctctgtcctgggctcattccgttggttatgtccgttgcttcttaaagtgtgtccaaagctctcaccacttgactcatctttggtcttttggcagctgaagtggcggacacatgccagcgaagtttttaccattttgaacattt

SEQ ID NO: 119509 - DNA, 773 bp, Arabidopsis thaliana columbia
  unsure (1)..(773): unsure at all n locations
ctgggacgacccatgcacgcgtacgtaagcttggatcctctagagcggcgcgcccttggccttttttttttttttttttttttttttttgttttttttttttttttttttgcccaagagcccggggccttctattaataacaaaaacttttattagtttggacccctcactttctaaataaaaaccccccttttttaaaaaagggggggggtaaaccaaaggggcccatggctaaaaaaaaacaaaaaagggggggggccaaattttaaaacccaaattccccccggggttcaccgaaggataaaaagaaaagggtgnggttaattggggctctttttccccgggtttcttgggccccttggaggggtcctatgggggccttctcacgatatcgcccttctttcaaggaccgggatcagcattggggtgggaacttggaaccgaattttcctaaaaaaaagaaaaatgaaaggttttctttgtccctaaaacacttgcttttggattccaaggggcccggacaataaatgggggtaatcaaaattgacctggcggtttcaaccccgaatccggggggaaccgggaagtgttttcaaacaaagttcaaaccccgggggaataaagcttaaaagggcccggggtcttaaaccgggcccccgggtttcaaaggtttaagttccgaaaaagggggggggcccggtgtgccccctctcctcctccttaaaccttcctccgagaaccccccttcccccggggaattccctttaacgggg

SEQ ID NO: 119510 - DNA, 823 bp, Arabidopsis thaliana columbia
ctatgacgcagcatgcacgcgtacgtaagcttggatcctctagagcggccgcccttccttttttttttttttttttttttttttttttttttttttttttgggagaaatttttttttttttttttttcttaaaaaaaaaaagatgcttcctaaaaattgttttcgaaaaggaagaattaacaatatagattttttccgggaatggtagcgaaaccagaaaaagagggtccactaggtaaatcaaaaagaggtaagaacaaaatcgatacaacaccatctctctctcggcattcatttagggactaccttccgggggattctcagtctccattggttcggcaaaagctggttgctctggctcactcttgccctcatccggctgctcacctcccttggcttggggggcctttgctttagccaccggctttggtttgggcattataggcctgcaaacttgcccaaggcctctgccttgctttaaccggaagtgacagaagaccggtgtgtcatacttgggaaggggggcctgttgttgtgcttttccccgaacctgcttctggttccaacacttgggaaaacctttggtttttgccagtcgggggaacaacttgggacccgaaacatacgggctcttggagcggtatacagaaccagcggtaatgcccccctttttcaagactctttgaagcccttaacgggaccccccctcttgagctctcagcttcgaaattaaacctttggggcttttcccattttatacaaaaatcctaattccgggaatacgccaagaagttcccttccagaaagggttattctcggtttg

SEQ ID NO: 119511 - DNA, 648 bp, Arabidopsis thaliana columbia
  unsure (1)..(648): unsure at all n locations
acnnnnnnnnnnnnnnnnnnnnnnnnnnnnnnnnnnnnnnnnnnnnnnnnnnnnnnnnnnnnnnnnctttttttttttttttaaagataattgctacattgattgagaatacaataagattcaaaccaagcttcaaaaaaaatgttggaaggaaaattacatatgaatcaaaagaaacattctctaaggaaaaggctattgaagtgaactgttactgaagttctctaaggaaatcactgcacctgatctaagttcacctgaagaagaagcatcggaatgagagagtaggatgtataatacccatagatgaaggcaaaccagatagaccacagcccatatcttggcagtcgggtttctacgcaagaagacggttcccgagatgaatatagcgtttagttgcatcacaagccatcccaaatgtttcttgcctgaccggattttatcttggaaagctggtttaaactttgatcccgagagttcccaatctcctgcttcagatcttgggatgaggcttcagttgcagacatacctttgttttcttctataagccttgacacggcctcgattctaaacaatatgggtgctttctctgaagaaagcgcctcgaccttggattgtttttgataaatggtcagttagctggttaag

SEQ ID NO: 119512 - DNA, 741 bp, Arabidopsis thaliana columbia
  unsure (1)..(741): unsure at all n locations
ctatgacgccgcatgcacgcgtacgtaagcttggatcctctagagcggccgccctttttttttttttttgaacacaaatttcaactactacaatttatagggaaagagaaaattggtctatggtagttgtttaaacaaaccagaaactttcatatcaataatacaagaaaaaagaaacagagggatttgtttattgggcctggggggatgtttaaagtgaaaagacagaaaaaacatanaatcaagtttaagcttgagggttgtcccacttgagggggttcaccacctcccagggaagccagggtcgtctcttccgaaatgccctacgctgccggtttttgaaaccttccatttcctccttttttaaggccaaggtgattgtcatcattcctgggctaaatcgaatgtctttttcaccatcttaaggatcttcttgctggaatcaaccctgtcccgaaggtggaacaaaaacaacaatgggtcgggtactcaatgggcgatgaaacctgaacaaaacccctgggagccctcccttaacccacacactttttggtgttggcctaaaaaggaaactcacttttgtgaactttgggtgggtttttcccgaaaaacacccctcctgagccccctccccccgttggggaaggaaatcctcccccagtaaaccacatacccgttgggcccccatccaaaccggccttagggtaggggaaaaagtttttccccaggatttttttgaaa

SEQ ID NO: 119513 - DNA, 364 bp, Arabidopsis thaliana columbia
acttgacgtcccatgcacgcgtacgtaagcttggatcctctatagcggccgcccttggtttttttttttttttttttttttttttttttttttttttttttttttttttttttttaaaaagggaggaaaaacccgtttttgtttcagggaatttatgaatttggggggagagattcaaaatttttccaaatcttttcttaccgggggggacaagacccgaaccccaattactttggttttcggggaaaaaaaaaaaaaaaacttaaacaagctttgctttgggcaatgcacaaaaaaaacaaaaacatgttctccattctttaatggggggacaaagccaaacagttttttaaaacccggtttt

SEQ ID NO: 119514 - DNA, 502 bp, Arabidopsis thaliana columbia
  unsure (1)..(502): unsure at all n locations
tgcacgcgtacgtaagcttggatcctctatagcggccggcgcttggtctcttttttttattttttttattttttaggttttcttgttttgtgttatttttttttttttttgggaaaagggaaaactgggtggatgggattttaaaaggaaaaaaccacctgtggaaacacacgggctggggatttttactagggcgcggggggcccactggtacaataaaattgaaacaaaaaaggcccgaacttccttttggggtttacacccccaaaaaacatcatcttctttattttttttcgcctaggggccgatataaggccccttcaggtggcgggtgaccacagggccctgggtgggaaaaacttagctttggccccctggggccaaacccttgtattggtctaagttgggggccccaccccgggggaattaaggaatcccccnttcctgcaaaaaagattcttgcccccccggggaccttacttttccttccaaaagactcccg

SEQ ID NO: 119515 - DNA, 897 bp, Arabidopsis thaliana columbia
cacgcgtacgtaagcttggatcctctttagcggccggcgcttggccttttttttttaacaccaacacagactggtgggtatatgcagatacaccacaatagataagaaattatccaaaatacattcaaacagcaaaatatgggaagagacaataacaaagggagagactttcagatcctcctcttcaaaggaggggaatctgtctctctatatataagataaaaggaagcgatgctcagaaaaaaagaaacccaccctgatttggtgaaaaaacggaatcccaccgtctaaccaaaaatgggaaggggtacgaaggacctggaggagcttgattaaaaaaccagaggccctgccctgactggaaggaaagctgtcaggaaggggggacctgaccctccttggggagagagggggagcaaactcccctacaaagaccgggccaacattccactgcaacctcggtgggacccaccccccaaaacaaacggtgcatcctaaccggggaaaaaaaaaaacacgcccccaccggagggcctaaaaaaacgggcacattgaaacccgccatggtgacaatcaaaacccagagcctggtttgccctcaaacctccaaaaaaaaaaaactctggtcggcgcccactgggaggtgcccaccaaccgggcacaggggccccccgaaatcccgaccggactggaagggaccaccttaccaaaaggaaggctataagccgagggaaacagccaaagctctcctgggaaatgtttgcggccaacccaacaacaaaaccggaaaaaaaaaaaccggggccccataaaaacaacaaaaaatggggcccacaccgctccccagaaacaacccccgtaaaaataccaccccgggaggcgccttggcccagggta

SEQ ID NO: 119516 - DNA, 564 bp, Arabidopsis thaliana columbia
  unsure (1)..(564): unsure at all n locations
ctatgacgtcccatgcacgcgtacgtaagcttggatcctctagagcggccgccgcttggcctttttttttttttttttttttttttttttttttttttaaccaaacaaaagggaccgtgaccttttcaaaccccagaccaccacccggtggttttaaaaaaaacaccatttacaaaaggcgcccaaatgctttttaccagaaagggggagcgatatcctaacaaaggcctggaaaacattcacaaaccattcttggctcaaaacggcccaagcaatgggaaaaccccggaaaagctaaaaacgggttccctaaaccatcgggaacattattttccccattttcccaaacgggaaaaaaacccctcccctttgccctttcgggaaaattcccggcccactgcaccaattacttccggttgcccaaacctaaaaatttttcccggcccctccgggaccccggcctggaattcaaccccccncgggggttttgttttgcgccccgggggggttgggccccaaaccaaagggggttttttcaagggcttgagcccccggaaagggttt

SEQ ID NO: 119517 - DNA, 475 bp, Arabidopsis thaliana columbia
ctatgacgccgcatgcacgcgtacgtaagcttggatcctctagagcggccgccctttctttttttttttttttttttttttttttttccaaccatgaaggaaccaaaaattatcttccaagtatagcgaacacgatttaaaattgtctaagggatccaaagagatggcaacaaaagaaaccgagtttcttacaactcttgaacgatttcctcagggacatcgataaaatcctaaaactcaacttctttggcttaatattaatcttcttccacataacttacttaaccatccggaaggttttgcctcacgagtttctccttttaatgcaaagacttccactgcattacccatttctcccattcttccttaaaggcctttcttttttcttctgctgggaactcaacagaacaacacggcctgatcctctgcctaatattgttgtggacttcttaagggccttggctatctcttcttc

SEQ ID NO: 119518 - DNA, 420 bp, Arabidopsis thaliana columbia
ctatgacgtcccatgcacgcgtacgtaagcttggatcctctatagcggccgccctttgtttttttttttgaccggaaaaaaaccagagctgtggcatacatttcagttttactaacaatacatacacaagctccaacaagcctaaacatcttttgtggcattgtcatataaccatttcattataatcgcgtacaacataaacgagtggaacctgccaccatctatttttctaaagagggaaagccactgcaagtttttagaccaacgggttgagtaacgtgcacaaatggttaaccctaaccttaactttttccgacatttatgagaagtcttcctttcacccttttttttaaaaaaccttacaaatttccccaagtatccggccgaaacaaacttcggatttattccttagtgaagaaa

SEQ ID NO: 119519 - DNA, 758 bp, Arabidopsis thaliana columbia
  unsure (1)..(758): unsure at all n locations
cacgcgtacgtaagcttggatcctctatagcggccggcctttttttttttttttttcatgataaagagattttattcattacttgtaaaaaaaatgttccttcctttgtataaagattaataatcatacagcttattcccacttctataaactaattttggaaagggattattctttattttacttataaaccgaagcgtaatttaatatggtggatcttatattcttggggctcaagaattctatgaaaaaagaaggctcgacctctaacttcttgggtggtgccttcaacctgagccttttcttccacattaacaaaacctttctccaaaacctaaagaagccggggggaggaccaaaacccccctccgttaaactggggacagcccgaaaagttcccccataatacacaggttttttaaaatcccaacctcgggttcccttggttaattggaccgggagttttatagacccaggcaatccccccttcttagaggaaaaaaaaagggcctggggaaccttggggtggtttgaccccanaacccacccaaaaccttgggtccccccttgaagacttttggttgggaaaaccaaaacccggttcttttttttactgtccccaatcttgtttactcacactttggaatttttaggttccccacgcttggggagagaaaggatttttagggccctttcccccctttttttttatccccggggaaccccaccttgaaaaaaccccccctttttttgttttg

SEQ ID NO: 119520 - DNA, 541 bp, Arabidopsis thaliana columbia
cccccgcgcggccggcggccgccgaaaaacccggccgcgggaccgcgagcggaggggaggggccccgcagagcgcgcggagccaccgtcgccgcgcacagcgcgcccccggcaggcgcggcacaagccggacagcccaccgggcgcaggccgggagaccccccccaacacaaaacaccagcaccccccgcaacgccgccgccgccgaccgccgaccaccgcagcaccacacgggaccgcgccaagacgggcaaaggcggccccggcagcccgcccacccgacgaggaggagaccgccagcgcgcgcaacgcggcgaccagaggagcggccaggaacggcgccgcgacgaagccaccgcccggacgaggcacgaccccagcggcggggccgccgcccccaggaggcgacgcgcagagggcaggcgacggccagcgcgcgacccgcccgccgcacccgcgcgcgcggcgcccgcggacacaccgcgcccgcggcggcgccgccgcggcccgcagcgcggagcgcggcgccgcgccgggcccgc

SEQ ID NO: 119521 - DNA, 725 bp, Arabidopsis thaliana columbia
  unsure (1)..(725): unsure at all n locations
ctatgacgtcccatgcacgcgtacgtaagcttggatcctctatagcggccgccgcttggtcntttttttttttttttttttttttttttttaaaaaatcacatgccttaaattttgaaaaaaaaaaaatggagacttctgattcttgtccatggacaaacacatttgtatcctcaaaataagaccatccaaattggatccatgagaggacttaaaacaatgaaaccaatgtgctctttcagataaccaacatgaaaaaatatttcacccaaatctcttcatatcacccgacactttagactcaaaaactattagacccataacgactcagcattcaataaaacccgccccaagcgatccccaaccacttgtatgactcgacaaacattggtagattgatgggccaaaaaatgggagactctggatgctaaaacttttgggggttatttccttgccggtttggcaacttaaagaggaccttttttggtggggaccattttttctgtttctttgttcaccaattctttgcccgctctcttcttttttgtggttcacttaagctttcccgctccaaatttcggttgggttttccctcgttttggctctcccaggcattctaaaaaggccaaagggtaggggttttttgtttcttttttttttttaaaccaaaaacttcctgaattttgataaatggttgaatctaaaaaaacaatgggtccaaaaact

SEQ ID NO: 119522 - DNA, 701 bp, Arabidopsis thaliana columbia
  unsure (1)..(701): unsure at all n locations
cggcccccacgaccaaaaaacccccacaaggggcaggggggaggggcgcccccggcacccgggcggaggaccgcccgccacgcgcaaggcagcagaccgagacccgcccccacgacacgcccccagcccccggaagggaccgcccaccagacgacacccacgaccaaccgcacacccaccgcacaaacgaacaaaacccccccacaccccaccgaaccaaccaaccccgcggcgagggccgcgaaggcaaacacaccacgcgaaaggcgcgcgccacacgcaagaaccccgcaagcgccggggaaggcgaccagaaaggaacagacgcacgaacgagaggaggaggacaccaaagcgcagcaacgcccgcgcgcccacaaaacgacaccaaaaacaaagcccacacaacgccaccacccgcaccccacaggcggagagaaaagagaaaacgcaagccgacacgccccacgaccgccggcccaccccggaggaccagacaggcgccaggagaaaccacgccagcagcacagcgaagatagaccccccccccggggctacagaggcccgcgcaaccgcggagcgcgcgcggaagagcagngcgagagaagcacgagaggaccacgcagctccacaacaccgcacccaccgcacacacggacggagagcccgaccgccacccagccgccgcgggcggcgcgcgc

SEQ ID NO: 119523 - DNA, 670 bp, Arabidopsis thaliana columbia
agaagacagcccacaccgccaccgcgacgcaccaacacaaaaccaagacaaagcgcaaacgcaaagagagcgcacccaaacaaccaagacgagcaagcgacagcacacagacccccccagaccagacactcttctcacaccgcaggggagcaaacacaccaaacacggacccccacaaaaacacaccacacggcccaaacgacccaaagccaccacagagcgcgaacaccgcacccaaccgacacgcagcgtcacaccaacacacacacaaaaagaacagaccaagtaaacgacccacacaaacagcaagccccccccccaccccccacaaccgcacacaaaagacaaggagaacaacaaaccaaccacagacccgcacaacccacacccacacaaaggagcaaaaagaaccaaacggaccagagagcaaagacgcgcacagcccccccaagacaaaaaaagaaaagcaaccagcgcggacccaacaaagcagccacaacccaccaagccaagcccgcgccagcacgacaccacacaagacgaaaacgaaacgcaacacaccacacacgaaacagaaacgacaaaaagagccagaaggaagagaacacctacaaacaggaaacaagggacagaaaaccagacacgcaaagaagcgcacgcagaaccacaa

SEQ ID NO: 119524 - DNA, 327 bp, Arabidopsis thaliana columbia
  unsure (1)..(327): unsure at all n locations
ttggatcctctatagcggccgcccttttttttttttttttaacataaaatttagttatttcttttcaagtgagatttaagaagttgattctaacattttgaagaaagaagccttcgtactcttgcatgtgagttgtgaattanaagttgctagaccttatttgatatatgtgggtgggcataacttcatcaggctactaacttagttagaaaccatactctcagtctccttcacgaacccatccccgggtcaatctttatcagatttcaagcctctcttctcagcttttctctgctcaactgcttctttctgtctctaactaaatct

SEQ ID NO: 119525 - DNA, 918 bp, Arabidopsis thaliana columbia
  unsure (1)..(918): unsure at all n locations
atgcacgcgtacgtaagctgtggatcctcctagagcaggccgccccgaggcgnttttattaaattntttttttttttttttttttttcgccccgcaaaataagtggacaacaataaaaagcgcggggtaccgttatggctcatccctgctcaaacatttggacccggattgggtaagaaaaccggtcttcttccctggggggggggtgggnccttttggcgggcctggagggaaaataggcctaaaaacatctctatattgcggcggggccaggaaaattcaaaatctttggctttccccccattcacagggggtagaccctcccattgacccgagccccaaaaccccttccaaggacatctgctcaaaaaaaaaagcctcacaaaaaccgcccaacaaaaaacaaaaggggggaaacgtgtaaaacacaggacccttggttttaaaccacccccccaatggaaaacaaaagcggaacaccactttcccttttgggggatgtgaaaaagtttagggccccacccaagggcccccacccgaaggatttccttttccaaaaacaaaagcaaacacccnccctgtttgggccctatggcttttccgtgggcaaaaaaaacccctccgggaagacccttataggaatgggcggagagaaacaaaaacgccatgggagagccccagggggccaaaccgccccctgtggagcaaaaaaacacccccaccgcggctggcgataggggctttaacaaaaaaagaaaaacgccgcttttcaaggggaaacaaaatcccccaggaggttgtggccaccacctgggcgcgcttaatcttaaaactacccccccccgataagagaaaaaacacagcgggtaaggttccaaggcgtaactagcccgctttccccacaacataaataaacaa

SEQ ID NO: 119526 - DNA, 524 bp, Arabidopsis thaliana columbia
  unsure (1)..(524): unsure at all n locations
cctatagctgnactatgacgacgcatgcacgcgtacgtaagcttggatcctctagagcggccgcccttgcctttttttttttttttttttttttttttttttttttttaagaggaagttatgagccttttatataatgaatcacgataattttgctgacatctttaagctagacaatagttagattctggtttcctatttctgattacaataaggggggatcanactttaagctcttaagggtttgcaagaagaaataatagtcttcagaagatcaatggccttgagaaaaatgggtctctctcacattctcctgcacagcctgaaggagttctgtcatcttgcctcggccgtaactgggcatgggtttcaacatatgtactggatggattgggtgtatcgcctgcaatggctcaagggacagagcttgctcatctgactcgggttcaacggactgggttgggggctggacttgacccttattcatcacctgggggagaacggctaaaaagggttgccgtactc

SEQ ID NO: 119527 - DNA, 275 bp, Arabidopsis thaliana columbia
  unsure (1)..(275): unsure at all n locations
gtacgtaagcttggatcctctttagcgggcgggcttggtctttttttttgttactgaatcaattgttgcaagttatataataggacaatacaacaatgtttnataaagggggaatctctctgggcactctcatattctatcttatagtataacagcaaaatgatacacacttttattatatagagggagaggggtcgatttatttttactgcaaaaaaaacacttccttaatcaagaaaagaatcttttttatggggggtgggttaaagtcccca

SEQ ID NO: 119528 - DNA, 391 bp, Arabidopsis thaliana columbia
  unsure (1)..(391): unsure at all n locations
tgcacgcgtacgtaagcttggatcctctatagcggccgcgcttggtttttttttttttttttaactaaaattatattttttttcagaaacgaaaaaaaaaaacttatgaacaaagaaaaaaaaattcaatttcatcaaagcaattattgatcatcatcatcatcttcttcctcaatcagtatcttgaaagngcggacaactcctaaacttataagctctggtctttgaaaatccttttcttaccacaactttttcactccttcttcatcactcgatgattattctcatcaaccccaattcaagatcttttcatcggcatttcatcatcatcggcttatcttcgttaccgggaacagaggctaaaattaggggtttgcctgaataaacaatt

SEQ ID NO: 119529 - DNA, 665 bp, Arabidopsis thaliana columbia
  unsure (1)..(665): unsure at all n locations
actctagactactatgacgtaccatgcacgcgtacgtaagcttggatcctctagagcagccgcccttggttttttttttttttttttttttttttttttttttttttaatttttttttttttttttatttttttttttttttttattttttttttttttttttttttttttgaaaccccccctcaacacccccctaaattaaaagggaaaaagggggggaggcccccccaaaaaaattattctaaaaaaantctcccctatggccccccaaaaaataccccggaaaaaattttttaaaaaaaaacggaccccccgggggcgcccggggaatacccggaaaattctcgcgggggccccccaggttcccaaaaagggtcccaaaaaagaaacgtggaaaaaacactgggaaataactgggccctggggaaaacttggtgaaaatnaatttcccccacacatctcccncccaaaaaataagggggaatattcggggggcgcccgagggggcgacaaaaaaaaaaaaaattgcttttcttgggggccccttccccggagaaaaccagggaaaacttgtttaataaaaaataaacagcggnaaaaagggggaaaagaagccccccacaggggccttttttatcttttaaaaaaaaaaaaggaccccttcc

SEQ ID NO: 119530 - DNA, 1003 bp, Arabidopsis thaliana columbia
  unsure (1)..(1003): unsure at all n locations
cctatagactagctatgacgtcgcatgcacgcgtacgtaagcttggatcctctatagcgggcgccctttttttttttttttaaaaaaagacatctcattgctcgtaataacaacatcctcagcattcataatttcatcacatagagtttttacttcacaagttcttatatcgaagagtcagttttcataaccattaaaacataacgcaaatcaatcaatattgccagaggttgcattgcataagtagcagtagtaactaattgccaaagaaagtctggttgaagatacgaaactcgttttgattctataagcaagcaaactactcaagaanaacatgttaaactttgaagaaccacgacacatctttcagaaggatccatacctttgtgaaaattaatggattctgcttcagaggttcatactggccatgcaaacaacctacctttggtggaaacatctgagaagggagcttggaccaatttccgatcacaatggcccaggggacaaactaaaggaagaaaggcgggcttgggttcccgttcattctggataattttccatgaaagggaggcgtggagaacaaatcaaaatacggaatcgccacgggtgccaaaccccattttttggaagaggcttcattaacattaacccccttccggcgcttggccccttacctcctagagggccgaacaactttttgccggaaggaatagctcagagggctcgcggcggggaaaacccccggacggagcccgagggacggaacagcgcggggcgtcacttgacagtgtccgcgtgaaagagggtggccgggcagtgtggggcctcacacccgcgtccttcaagagcgcccggaggtgcccgccgcgcccgggagtgcccgacgtgtcggcgggggacgaagcgggggagcgatcgccagcgcccggcgggggcgcggcgtggcggcggccgggatcggtggcggtccacccggtgttgcgcgggggggcgcgccgggccg

SEQ ID NO: 119531 - DNA, 780 bp, Arabidopsis thaliana columbia
ctatgacgacgcatgcacgcgtacgtaagcttggatcctctatagcgggcgccctttcccttttttttttttctatttccttcttgggggaccatggcaaaaaggagaaaatcaatatacataggcgccaccatcatcatcaataaaagaatgggatcaaaaatctccgaagcagcttccctaacttgcttctcttcgtaacgaagagaacaacaggggaaaggaccttgcctacaaactggagaaaacaaaggcctttataaaagaaccatgggctccttcccgctttaacccggcgtgaccaggaaaatccgcagccgccggcggaacgctccccaccttccatattcaagcacttctggggctttaaccacatccccccgggattagacccacacccgagggaggcaaagccccggcgggaaaaactgcggtaccaccgggggggccctcaccgcaccattgtgtaacaccactcctccaataagcgccttccttgaaaccgcggcgcgagaacgcgtggcgggacgcgcgccacgcaaatccggggcgccggcgcaaccggcagcgcccaccgcgcacgccgacacgccgcgcggcgcccagcagcgctccagaaccgcgagcggcggagaacgcgccgccacccccgagcgactaccgcgcgagagaggctgaaacgacgcgacaccgcgccagagacgcacgcgccgcgtcctacgggcccgcggcgctcccacgcacccagcatgagggaagaggccggcccgcccgcgcccc

SEQ ID NO: 119532 - DNA, 683 bp, Arabidopsis thaliana columbia
  unsure (1)..(683): unsure at all n locations
gtacgtaagcttggatcctcttgagcggccgggcttgagccccnaaaaaaaannnnnnnnnnnnnnngnggggattggaaaaaaaaggcttatcataaaacatcttacaggaacattagttattttttcaagaaaattggttttggaggcttaacccctgggacaggaatggcctccttctctaggtgtgagccnccacattcttgggggcccctttaaatatccctcgcttgtcaaaacaaataggcataatccagggtgcggttttctttggtttaagggaccagggtcttctttttaaagctaaactgtgtggattcccccacaaacttaggatcgggggcttttattttttcccctgaaccccaggcttacaccccttaaatttttgggggcccggaactctacaatgggaggcgtctttgttcgggggaaattattaaacccggtttgcacccttgcattatgaaaatttggtggccccgggggggaaaaaaattttggatttttgttcgccccctgggcggtgtgtcgaaaaaaaaaaaaaaaggttttggggtttcacaaaaaaccgcccgggggggccccccggatttccggcccggcccggaggggtaccactttctctatagggggcgattaaacgcgtggcataatgaggaaatgcgggtcctgggggaaaa

SEQ ID NO: 119533 - DNA, 770 bp, Arabidopsis thaliana columbia
tgcccgtcgagctggacccttacggcggcttgcttttttacagcttgtggcttcgatactatgcacacagacattcacggcacagggggatgatatgaattgatctgcaactgtttagaccaactttcacagtttctcaaaaggggcgaaccagaccggcaccccttagctctgaaacctgaaagaaagacagacccgagaacctccgggtatccggggaacccaggaccggatcttcaagaaatgcttttacaccaccccctttttaagaggctactcttcagggggcggggatccgctgagggcttttagggcccacggggcaagttttttcccgtttaaaaaatcacatggccctctctggaaaaaacctcaacaaagtcccataaattggctcttcgaaagactgggaaagttcaccgaccccggctagggaaatgcccccaaaagctaaaacgatgcccaaaaggctgaaatggaatagccccgggccactctatggaaacccctcttttaaaaacctaaaaacccgccttggaaagacccttgggaattacgaaaaaataaacccccgggagaactttcaattctccggcgactttccggagggcccatcccaactgacggggggaaaagggaactgctggccacacgcaaaaaatttcccaaagttaccaaaggccgggggtaccaacgccccacagttaaaccaaaacgagtacccccggggcccccttgagagggaccccggaccggccccaaaacgccgg

SEQ ID NO: 119534 - DNA, 919 bp, Arabidopsis thaliana columbia
  unsure (1)..(919): unsure at all n locations
ctatgacgacccatgcacgcgtacgtaagcttggatcctctatagcggccgcccttttttttttttttttaagaaagaatcataatcgtgatactaaaggtgggtgagctccaaatcatcttaagaaccttttttcttttgtgtgtgtgggaatttcaagaaagacgacaataaaacataaaaagaaccattttttttagatggggagagcactgggactttttttttaacaaaaaaaaaatccatctttgtgtctgtcaagatccacagctggagcttgcatgcacaaaaaccatttttaaggctgaggtttactaggatctcctcctccaaattaacatgacccccacctgattaaccgggtgaacccggttgcccccggcctttttctcaaccctaactttgttaaaaatcactgaaaaaccttcggctgatgccggatattcacatcccaattcaccaaattttggcaagggacaaccttttcccaacaatggggcttgaaaaagggagaanaatttccccaaaaaaactcggaaaaaccatgtgggggaaaaataagaaaaaaaaaaacccgccgaaaaaacccaggaaggggagaaaaaatatattttcgacccctgggggaaccccgaaattccgaaccggccctgaggcgacacaatttccttaaggaggcaaaaaaactcgggaaaaatggcaaaatttttccctggaaaaagtttcccctacaatccccaaaaaccacccgaaacaaaaagaaacctggggccctaagagganccaccacataatggtgccccaccccccctccaaagaaaaccgcgcccgctctataaatacgccaccccgggaaaggccttcatatgcccacgaggttttttacaaaaaaagaaaaataatccccccctccgccaaa

SEQ ID NO: 119535 - DNA, 758 bp, Arabidopsis thaliana columbia
  unsure (1)..(758): unsure at all n locations
nnnnnnnnnnnnnnnnnnnnnnnnnnnnnnnnnnnnnnnnnnnnnnnnnnnnnnnnnnnnnnnnnnnnctttcttttttttttttttttttttttttttttttttttttttttttttttttttttttttttttgggggggggggaaaaagttttttaaggggcaaacaaattgggggtcttattacaaaacagttggcaaaaatttaagaacctttttaaggagggggattgggcccctgaaacaaaaaaaacttgaaccaggtttcctgggaaaaattttttaaaacaaaaaaaaaaaaaatttttggggttccccttttttttttaaaaatttggggtttggaatcggaacaattcaaagtttttggccaaggaaataaacccaacaaagggccggcaaaaaccggaaatttttagttatggggaatcaaaagggaaacagggttttggccttaataaggggaggctaaactaattatgggggagccttcccgaattcctaaaaaacgggggaaatattcaaaaggggggataagggctttttttctatttggggcccaggtaaaaaaactcttcccggcacaaaaataaggcggaccaccctttgagaagttcccctcattaatacatcccggggaaagagcaagggcccggaccttggaaaacgcctctgggaaggtggcgggcccttcggcccaaaggggagttttggcttccagagccctcccaggttgtggtctctaaaaccccgaacatt

SEQ ID NO: 119536 - DNA, 927 bp, Arabidopsis thaliana columbia
  unsure (1)..(927): unsure at all n locations
gctatgacgccgcatgcacgcgtacgtaagcttggatcctctagagcgggcgcccttccctttttttttttttttttttttttttttttttttctttttttctttttttcttttcctttctctggggccngaaaaaaaaaaaaaatttttccattttagaggggtttttgccccaaattaaacccctttatttttttctttttgggggcggggaaaccccccggtttctctgggaaaaaggggccttttaaaaaaggggccgcgggggaacccctttttcccctttcaaaccacccctttaaaaggggggaaaacaatattcccccccaatttctcgccccccgttttggtaaccccgaccccccccctggggcggtggggccccccccgacaccgggggtgggggggtgggtttcctataagggtatttgcgcccccccacaaaaataggcgggcccctcatttatttttcccggatttctggggtgggaaacccacttccgggggggattttccggccccaaaccccattatggttgtggaaaaatccttttaaggttcctgaaaacaggggggggggatctccaggcgctttggttttgatctcgggggggccaatacccacacgggaaggggtgttctccccccacaaggggggggagggccacccgcctggggcggaaaacccggccttatattcgcccaaaaggagaacaaatccctccctacggggggcggcctatcctgacaaacccccgcggaaaaaggcgccgtggggggctgcccccaccccgggaccgccgtaatggtgggggcgccccttcccccagggtcgcgttcgaggcccgcggcgcggttcttccccgcaagactcggcacgcgcttgggcggggggggacgggggcgcccgccccgcgctccccgccc

SEQ ID NO: 119537 - DNA, 593 bp, Arabidopsis thaliana columbia
  unsure (1)..(593): unsure at all n locations
cctatagaatagctatgacgtcgcatgcacgccgtacgtaagcttggatcctctagagcggccgcccttttttttttttttttttttttgagaaaaatgcggagagtctcttttcttctatttttttcaacctttttttataacataacaaggacgaggtaaaactcttttgtttaccgcccgcgcgcttctgtttaactagcatttggccttggttccaaagaagaggggaccgtgggaatgggccattaccattaccaatggagccacaccaggaacccagattccttcaccgggctcacaatcttctgggactaagaaggtggagtcccccctcntctggagtcccgagaacctttggaataggatagacctgaggttccatcatcgatcctgggggggccccaaggncttcgggcttcaaacccgtttccaagcaaggtttggacttgggggccccaaagacttccacccaaaacagaaactggcgacttctgggcctttatgcgaaggcacattatctttcctgggttccaaaagaagaaaaacgatcctggcacattggggcccaagatcctcgggggagagggtac

SEQ ID NO: 119538 - DNA, 478 bp, Arabidopsis thaliana columbia
  unsure (1)..(478): unsure at all n locations
actatgacgacccatgcacgcgtacgtaagcttggatcctctagagcggccgccctttgtctttttttttttttttttttttacagagagacatacaatgggatttattttcccttgatcactatgtctatcataaagatcttctttttagggtaaaacaaatggtaaattatattattatagaaaatnctaatgaatactttgatcatatatggggggagcctcttttgaatcactgcatgggctatcactccaaggtccttatgtgcttctgccactggcctgtttcacctgcttcagcatctatgcagtctccatcatcattatttgatgaaccaatggcatgcaagctaaatgtggtagtacatgaaaccctagcttcaaccaccatcaagtccaaagatcttaaagggttcaaagaacacaaaccacatgcctgcctcatttttcctggcattacctttattaatgaacccct

SEQ ID NO: 119539 - DNA, 897 bp, Arabidopsis thaliana columbia
  unsure (1)..(897): unsure at all n locations
gcatgcacgcgtacgtaagcttggatcctctagagcgggcgcccttttttttttttttttaaaacacagtaaggaaccctttggcaaattaagccaacttgaaattttgtggggtttacaatataaaccaatatatatatatatatatatatatatatatatatatatatatagagagatttagagagtggggactgancaaagtcaggtccatagtttagttatactaccattttcacatgaacttaagaactttaactccaaatgcaattcctatgaaagttgcaatggcgatcccaaatattcccggccagaatcccgggaactatcaacgagttccattcctttggcggggccattccagctgcggtggtgggtcctccgacattacctttgatgctagaaagcagcaccttacctcgatgtttagcacctttcctatgcccaatataaagccaagaggggccaaattgaaccattgcaacaaaatatgccccgcccaggttatcacacttatatgtttccgtttgcacccccaatggaaaaaaccccggttaaacttagacccttgggttttcaaaaaggaccaagaacacaaatctgggaacccgaagaacattcttaaataaacacaaccggtgggataggcgggagagctccacccaaattccgaaacctcttttaaacaagcccacccttgcaaaactattgaacaaaattcccgtactttaaaaacccgagattttttttatgtcaaagctcgtgcccgttggggtaaaaaacgaagagggggcaacttcgaagtttttgaacccaaaaaagagtgtacataacggcctttatctttagggccgccaaagttacccggcggcgcaaaggaccttgtaaattgagtgg

SEQ ID NO: 119540 - DNA, 402 bp, Arabidopsis thaliana columbia
  unsure (1)..(402): unsure at all n locations
ctatgacgacgcatgcacgcgtacgtaagcttggatcctctagagcggccgccctttaccttttttttttttttttttttttttttnaaaacggcgtttcaaactttaatttaattccacgaaactgattgtataatttcggatgcgtattctaaaaccattgcatgtgcccatcagctttataaaataacatcctgggacatgtgggttctaagggaattaatataccttgcaaaaagacaatgtatatatatttatgaggaaattagtattatctccgttcacaatctctaagcagagcatttgttcaggacaacagattcaatagggatcttatcaacccggaaaagccagtccaccggggctccttttctcgggacaaaatacacgggttaggggaac

SEQ ID NO: 119541 - DNA, 606 bp, Arabidopsis thaliana columbia
taagccttggatcctctatagcggccgcccttttttttttttttttcatcacgagaatctttagagttgtaccctttttattattatcatcatcatatctcatatccacctaaaacagtgtcaactattaaattctcgacaacccacaaaagcgagtacgcccacacttcatattccgactgtgcaaaatcccgtgtccgagatctacttacaaacgcaaagtccactttgggtcctcaaactaacatcgtttgcctctatctccacccgtcaatcttttttaataataccaataaaaacaaaatgtttttacgaccaccaaaaattaaaaccaccatttaaaaaacacctctcaagaacccaaatcatttcccgttttggatcgtcaaaaccgacaaattcccccacccttgacgtcatcatattctgcggtttcctttttcatcatggaccccttaccggaaaacaataaaagcccttgttttaaccaaaaaaaaaaagggcccgtttaaatcgccttaccccttatacttaaccaaaaccccctcccgggacggggggttttaccccaagcggtacgggaaccacgtgttgtttatccttttt

SEQ ID NO: 119542 - DNA, 508 bp, Arabidopsis thaliana columbia
ctgtgaagccgcatgcacgcgtacgtaagcttggatcctctagagcggccgcgctgggcttttttttttttttttttttttttttttgggacagagaagaaagtatttaccagttcaattcaaatgaagaaaagaaattacaaatcgggggcaacaagaaccgaaattgattttttttttcggttccttctttttttaaaaggggggggttgaaacagagatttatttaagttaaagcaagggcaggtcttcttctactacttctaattaccatcaggaaggagaagaagaagaagaatgtggtaatggagaagtgctttagtataaacggaacttctcctttgggttctggaaaacttgctccgcaatcggagggccattcccgtgtggtttcttgatctccagactagatttctggtaaacccccgggcctcctaaagcatcagctttgaaggcatcaaacccggtgggtttagctggttcggctttggcttcataaaccaacctc

SEQ ID NO: 119543 - DNA, 909 bp, Arabidopsis thaliana columbia
  unsure (1)..(909): unsure at all n locations
actatgacgccgcatgcacgcgtacgtaagcttggatcctctagagcgggcgccctttgtttttttttttttttggtttttttttttttggacagaaaaaaaagtttttaccagttcatttcaaaggaaaaaaagaaattacaaatcggggtcaacaagaaccgaagggggttttttttttcggttccttctgtttttaaaaggagcggtttgaaacagagatttttttaagttaaaggaggggcaggtcttcttctactacttccaattaccatcaggaaggagaaaaaaaaaaaaaaggcggtaatggagaagtgctttaataaaaacggaacttttcctttgggtttgtgaaaacttgctccggaatgggagggcctttcccgtctgctttttttgatctcaaactagaattttggaaacccccggggcctcttaaaaatcaggtttgaaggcttaaaccccgagggcttaggggggttgggttttgggtccataacccacctttttggtctagaaagaggaggggttccaaacccattgggcaggggtcaaaaaagcggaaatcccggattttggaccccgagtttggtaagtttctaaagcgccttttaagggaggggtttaaggtgggcaggggggacatatatttaaaacctttgggggaggggggggcacccttgtttttggaaatacaccggcaaagggggccccatcccaaggcctctctttggaggttcctacgggtgggggagaattatgggccttgggaaccgttggtggacgggaataagaaacccgagaggccgcctttcggcacttcaatcttccaaagngatccaaggagtctcggcacgtgatagaggcggcataggcgcgacggaggccgcgggcagcccgggcagcggg

SEQ ID NO: 119544 - DNA, 877 bp, Arabidopsis thaliana columbia
  unsure (1)..(877): unsure at all n locations
ctatgacgtcccatgcacgcgtacgtaagcttggatcctctagagcgggcgcccttttttttttttttaatataaaggggctcataatcacagaaggaaacagagctctctgtattagctttaacatcaaatcagatataagaggttctgttttggtttggtggttatacttaagaacagcgaattaccaaagagggagattgtgatcgcctggggcttgtttttcttggctttgcttcaaaagcaaaagaggaggttcttcttcttcttcttcatcttcgggaactgagcttttttttgacgatcaatggaaggcaagtaacttttcctggctaatcaaggctttgaaaagggcctttttagaacttatgagctctgcttacagggcgctactttggagacggtggggtaaaaagtcttctttttcgaaggattccatttggcttttgatggagggttccaatttaccttcaggtttggaggttttcggaacacagttaaggaaaaaagtcccgggaggcggnaacagagagaggggacaacctcgttttaaggctttgcgggggaaaccaagtcctttggggtgctttggtttcgccgagagagaatgacggcgccgggaaggcgcttgagaaccccggggagcggagcggccggccccgaccggcgagggcgccaccgggcgggggctggagcctcaagcttggggccgcgagtagaagtagcgtgtgagcggtgggggcgggggacgcgcggcggggggtgcgcggggcgggagagcctatgcgcgggacgaaggggccggcgtagcgccgcgcggctgctggtgcgcccgaggggcgagtgacggccgcgcccctgagaggcggcggggaga

SEQ ID NO: 119545 - DNA, 608 bp, Arabidopsis thaliana columbia
  unsure (1)..(608): unsure at all n locations
annnnnnnnnnnnnnnnnnnnnnnnnnnnnnnnnnnnnnnnnnnnnnnnnnnnnnnnnnnnnnnnnnnnnnnnnctttttttttttttttttcacaaaaaggtctaattcttttcatcaactaacggatagtttccatagtacaacattacatgaaatagacaaaaggccaagtctaaaataggtttcaagactcttgcaacataaaccaaaaagctacatgacacagcaagactagctaaaggttatcggggatacatgaggaggctagatttagaggaagaagcctttgagaggagtgaatttagagaggatctctgcttcacgtttaagcgcattgcctttcttgcatcccattcaggcttttttcaattagctgattgaacttcctgtacgacttttcggaatggagtccgctaccattttttgaccattagcttagacaacccctctttttctcctttggccccgatgtacccgttcaaattaaaaccggttgggcttgaagtgaaccaatttggccatcgatttgaaggaattggcccaaaaggttgggcctactcccatggggaaccttccaagtgtccctttagggcgggggactgggat

SEQ ID NO: 119546 - DNA, 559 bp, Arabidopsis thaliana columbia
ctatgacgccgcatgcacgcgtacgtaagcttggatcctctagagcggccgccctgggtttttttttttattttttttttttttttttttttttttgggggggaaaaaatataattgaacaattgggttttgttggactgctttaaacaacacattttgtctatacaaaggcgtagcctatgatcataaatcaatattggggggggcgggattcaacaagccagcacaaacgcaaatggcatctaccttttccctacggggggctttttttaagcttcttacaatcatcttggctgacgtaatacgctgttaccgccttcagcttcccatttaaataggttttttctacctctagggaccatggaggagacgttgataagggaagctctgctagttggttaatggcaacatttcttggaagaaacataatgatggggtgacccaatgttcatggccgccttaaatagagcatctccggcacgaggtctcaacattgtcttcatatcatacgggctcgctttaaaaaaatcagggccctccccaggaggcgaaaggaata

SEQ ID NO: 119547 - DNA, 434 bp, Arabidopsis thaliana columbia
agcggggataggggggaaaatttttagccccaggggggcccagagaaccaccccctgcgtaacaaaaaaaccgtccgcattcctcgacacaccgcggagaatgatgaaggacaaggtaagatacggtagcgggcaggtggacccttcagttggcgccccctcgatccgcgtacgggactgtctgctccacagggttgcaggaggagctgagggagtgccgggggggaccgcaaacccagcccaccccccacgtccctaatatattgggacgcggttgaagtgagaaaaatagagacgaagaaatagatgctacaaaatacccgcccgcgaacacgacaaacgggaaagagggcgcgaagagcaagataatggcggtaggtcagtcgaggaggcaccgcggtaggagaagaaatgcctctcattatacatttccg

SEQ ID NO: 119548 - DNA, 520 bp, Arabidopsis thaliana columbia
ctatgacgccgcatgcacgcgtacgtaagcttggatcctctatagcggccgcccttttttttttttttttattatcctcaactcttatcttctctttttataggaacaacgttgatgcgattgtacatccattacatgtgaaccccttctcacggccaaggtgaaattttcataatatacacaaaaagggcaacaaataaagaagattatcaatgaccacacacggctgggctaccatactggggcatgctactaatcccaaagacatgtagttagtagtcagatttacgcgtggtagccagtctcccaccattgacacaggatctaatcatctgggctttggctcctccaataacttcaacttggcgatattcttccagagagagtcacgttaaggcccgccccatgaatagacaaagttgcatctgaaggggccatttgtgaaccggaatcttgcccattggcaagcccaaaaaccgaaagagctgaatttgggaaaaaagatctgatagttggctga

SEQ ID NO: 119549 - DNA, 286 bp, Arabidopsis thaliana columbia
gtacgtaagcttggatcctttagagcgggcgggcttcttttttttttttatttttcccaaaagagggtgactactagctttttatcctcaacttccacaaacaacagcaaaatctaattaacaaaaatcttggagctttacgtttttttctctaactctaaattttttcaactcggggggctctaactgtgtgggggtttcttaaaaaccccccgtattctctctggaattggctttcaacccttaaaaaaccaatgcaaacactgggtaaaatgtttccatcggg

SEQ ID NO: 119550 - DNA, 289 bp, Arabidopsis thaliana columbia
ataatacacccgaagactgaatacgccaatcaactagaccacacatcctatcttatgacgcattatatcggtgtgttggtgggttgtaacagtgaacattcacgcgagcaaaaatgaagagtatggcaacgaatatttaaccggctcctgtcgatgttatctaaactatgctcattattttatgccgctgcagtcccgatgatttttcacgacaagaggtaatacctcccgcccgatacgtcgccccgcgggggttgaacagaccgagaagaggagagaagtaagtagc

SEQ ID NO: 119551 - DNA, 207 bp, Arabidopsis thaliana columbia
tacgtaagcttggatcctctagagcggtcgcccttttgtttttttcttaacggcaatttcatgaaggaggggatttacaaaaatgtaatgggacaaggagagttttaaatacacatacagggtgtagctacaccattcacaatctcacgaggggggccaaattaaaatgaaaaacccaatattgattcaaattataagggggggggg

SEQ ID NO: 119552 - DNA, 298 bp, Arabidopsis thaliana columbia
  unsure (1)..(298): unsure at all n locations
acgcgtacgtaagcttggatcctctagagcggtcgcccttngggttggggcttttttttttattttttnnaaaacaaaaagaagttcttaatatagtataaatctaggtgtgagctatacaaagctcaatatccactattgtgttgaaaacaaagaaaagaaacaaaactcatttaaggctcttacaaaattttaggcctacggagggaaggaaacatacttcctcacaacttggccgattcatcctctgacactcttcaacatttctattcttagttccttactaaggagggcctaa

SEQ ID NO: 119553 - DNA, 376 bp, Arabidopsis thaliana columbia
gacgtcaactgcacgcgtacgtaagcttggatcctctagagcggtcgcccttttgtttttttcttttgacacaacgataactttagcacaaatcacttgctcttgtatcttgatttttgttcagttttacatggaagccttgtaaacatataattattgtacacgaaaacttacgtaaatcatattaaaagcgggatataaacagatacataagtggtgcaatcgaaaagaaaagatggccttgaaaacatagtttcactttcaaacgcgcaagggatgctatctgagatcaatgacatcaaacttgagattggggttcatgtaacctccttacgggtattggaaatgggccctccgtcctcggggaaactgggcg

SEQ ID NO: 119554 - DNA, 474 bp, Arabidopsis thaliana columbia
cacgcgtacgtaagcttggatcctctagagcgggcgcgcttttgtttttttctttttttttttataaaaagccatagaggcgttttataactagcgtatcaaatataacaggaagcgggctaagtccataaggtctccttggggaggaagaagggcctacaaaaataagcccaaaaaaaacggccgcggcgtccccccgggaggtgggggccccgccccgggggccacaaaaaaaaccctagagggggggcataaagggggccccccccaggggccagggggccccccggggaacaacggaccccccccaaacccccaaaacacgacacgaggcggaaaccagacggggagcgggggccgccccacaggcgcgccccaccccgatagcggggcggccgcaccgccggcccccaggcgagcacacccgcgcccggaccgccaaccgaaggcccacggcccgcgcggcgggcggcg

SEQ ID NO: 119555 - DNA, 471 bp, Arabidopsis thaliana columbia
ctacgtaagcttggatcctctagagcgtttcccctttgggttatgtcttttttatttaactaaatttatttttacatatatggcaaaatgaaaaatacttttacaacttaatacaaaggcatctttatcataaatttaaacaaaaatatcccattggataattttggggcctaaaaaaacccaaatggaatatttaaaccttatttttatcgcgtgctggaaaaaccccccttattgttataaacagaaaacaccgattaaacccccaaaggaccttttccccctcttttttgacctttttggggggtaacctttaaaaaaaaaataaccggaacttgggccttatgtaaaaaggggtatcacgctggggattggaaaaaaaaaacaatgcgccccaaaaaaaatttccgagaagggggcaggaaaatgggaaaaggccgttcacagaaaaaaaaaaacccttccttggaa

SEQ ID NO: 119556 - DNA, 507 bp, Arabidopsis thaliana columbia
  unsure (1)..(507): unsure at all n locations
gacgtcgactgcgcgcgtacgtaagcttggatcctctagagcgggcgcgcttgtggttggggcttttttaaataaaaatttattttattttcctgagtagcttaagagaaatttgatctttgtnttcggcactacgggcccaggtgtgggggtttgttcactcgatttcctctatacatttccttaaaccccaaaattcttaagccctttgggggagagggaaacacccacctttttttttattaaaaaatttaaacgggtcccctaaaaatctcactgcgcctactgggttccccccacctgcatgggggctgagggggagtcaggccctttatcagggaatccccgcggggaagcccggcccccgggggggccgggggcatctccggcgtgggaacctccccccctgcggggtttaaaaaggtggggggggcgcccgcggttaaacgtgcgctccgggtggccggggagaagcgcttccccccttttcctaagggggggcgtttg

SEQ ID NO: 119557 - DNA, 478 bp, Arabidopsis thaliana columbia
atgacgtcacacgcacgcgtacgtaagcttggatcctctagagcggtcgcccttttttttttttttttgtgatataaattaaaatttcaatagtttaatctttaagggtaccacatgatataaatctaatgactaatatataacatgtgataataagttaacgagtttctttagctaaagaaaaaatctttgataaccaatataaattgataactaccagggcaaaacatctttgatctggcctgaatcaagaacctgaataacttgcgcttgaacttgaatcctggattgataaggaacctcccatcagctgagaaagggctactgcaatctgagaaccgaaaggggattttttttaacaaccccatggtttgtacaaaggaaggccccccgcttaactatttccccgggaagaaaaaaagggttttcttgcctttcccggaccggttctttcccttgttcctaaaaaacgcccccg

SEQ ID NO: 119558 - DNA, 467 bp, Arabidopsis thaliana columbia
  unsure (1)..(467): unsure at all n locations
gacgtcgcctgcacgcgtacgtaagcttggatcctctagagcggcgcgccctttttttttttttttttgccaaaaataaaaatgtggagcttcagtttcagattgctttaatctcatcccaagtgtttggaagataatcaagattcactcacaataaacatattgaacagaaacatttaagtagatcttaagggaactcactaacataacagggagggggccctanatatacaaagcacatcataatattcttcttccttcctaaggggcgcccaacccacgggggcgttgggacctacgggactttcgtttgcttggaagtttggttttatttccccaacggggtatagcccgtcctaaaaaccttttaaattctggccatgggaaccccctaaaaaaacctcctccaccctttagttttttagggttcaccagaaaattcgggcaatttttttggggttgaaaaa

SEQ ID NO: 119559 - DNA, 458 bp, Arabidopsis thaliana columbia
  unsure (1)..(458): unsure at all n locations
gacgtcaaacgcacgcgtacgtaagcttggatcctctagagcggtcgcccncnggggaaaagcttttttattttttttttttttntnngagggaagaggatgcttgattcataaattaaatacccgggggtttttttaaagggcttttaaaaaaataaacccccccatagaaaaaccaacgaaactcctacaagaggaatttcacttttaaaaagggcgagaccttttctcaatccttatttttaaagaacaaaaaatgacctgaattatattttcaccgcatccttttatggggggaggagcgtaaaaaaaaattactggtccttgcattcgggggggcctctctttttgtttacctttacccaatatttggaaaactcccttcctttgtgggggcaaaggggggggtttttttggggctctgttttttttttaacccaaaaaaaaaaggggccccc

SEQ ID NO: 119560 - DNA, 470 bp, Arabidopsis thaliana columbia
  unsure (1)..(470): unsure at all n locations
cctttttttttttcttttttttttgagttaattctttatcgattttcattgctaagaagactatattgacaaaccacacatcatcttatgtttaagaaccaaaaaaaaaaagaaacccacatacaatctgtgttctacaatactatataantttcctttatgatcagtgatcatngaccatccacttggaaagaataatctaaataatttcttttttggtagataacacttcacctccctttgcgcccgcctaatagtcccgcggcctccctgtctttttacttttctcccttaaagaaaaatctnggttcccttttgttcttccataaaaattcaatggtaccgcactcttaacccccccctctggtcttgcccttaacctcgtactaaaaatttacagcatcccctttttttagacgcctttttttcaagttaattccacccaaaaaaacctttccccccgttttttt

SEQ ID NO: 119561 - DNA, 496 bp, Arabidopsis thaliana columbia
tggaacaccctccaagactatgacgtcaaacgcacgcgtacgtaagcttggatcctctagagcggtcgcccttttgtttttttcttatggtacacaagagttgtaaatgaattatcaagagttccaagggtaattatatatggtacaccgaatcccaaggcccgggatcgatcaacccctcacttgggcatttataagtaaacaaaactgttcccaacaccttgagggggtttagaggtgaaaaccaacaaagggaggggggattactaagatagtttgggcacccggtgtaaaaaataggatggggaatgcattaaaaaactgctttgcaggacatgggatggacaactaaggcgtgaggaacacagggggccaaataatggtctgggcaaaaatattttggccccaacctccccatccgagggaatacccgaatttctttggttaacccaatttgggattaaagatggacctatctttttttttggggaatttt

SEQ ID NO: 119562 - DNA, 449 bp, Arabidopsis thaliana columbia
gacgtcgaccgcacgcgtacgtaagcttggatcctctagagcggtcgcccttttggtttggtcttttgagtggaaaatatgatttgtcttttggtttgatatatataagtttcttctaatgcattagtttacattttgctaagggactaagctttcttctctctaactttcagacatatttggaagtaaaaagtttccaaatcaaaaacaatggggtggaagaattaaatattttgatccccaaaataagcttcaggcctttttcttcttctggattctctgcagcttcctccatttaaggtaaatttgggaagacaatccaccgaacaccatggacacacatccccatgggttggaagaataacgggttccggctcaaaactgaagataccacggtgcttaccaacttcctggggggggtatgggccggttacctaaaaccccaatct

SEQ ID NO: 119563 - DNA, 493 bp, Arabidopsis thaliana columbia
  unsure (1)..(493): unsure at all n locations
gcgtacgtaagcttggatcctctagagcggttcgcctttgggtaaaatcttttttattaaaattatnngnnnnnngggggggtgcaaaactcttatttatttattttcttcttcaaggcgaagtggttataccccaaaaaacaagatttctggcaattatcagatggggaaccacaaaaacccagttttctttttttttttagaatgtagggcacacaaaacttagtttgtgggaggaattttgcgcccttttgttgacaccctctcctccagacgcggcggggtgttttccaaaaaacaatgtttactttcccatttagggggtttggggggaaacccgccccaaagagagccccttaagggattgggggtggggcgggaaataaacccatatcaaatggggttgtcaagggaggtttccacaagggtgggaaaccttttgttaaaaagccacaacgggcattttttttgcacagggcgtctttaaaaaaaa

SEQ ID NO: 119564 - DNA, 446 bp, Arabidopsis thaliana columbia
gacgtcgaacgcacgcgtacgtaagcttggatcctctagagcggtcgcccttttgtttttttcttttttagggaaaatttttttttttttttttttttttttttaaaccaaacatatattttattccaattgggtaggttttattcaaaccatttggttccttttccatttgggaaagctcaatggttttctgtcacaatgaaaccaaaaaaaagaggggggaaacagagccggcaaaaaacagagtatatgggggggattcaactgaattaaccttcccaaccacgcaagtgggtgggtcgagccactcggttaactccaagagggaaagcccccatccgggggggaaaaaatgagtttggcccctttgtttgagggtgggaaaagggtccagatttttttttttttgcacttcccaaattcatttttttcctttccaccaaaag

SEQ ID NO: 119565 - DNA, 482 bp, Arabidopsis thaliana columbia
  unsure (1)..(482): unsure at all n locations
gacgtcaaactgccgcgtacgtaagcttggatcctctagagcggtcgcccttttttttttttctttttcccaaatatcatatcattcactaattaaacatacttaggcgaaagccaaatatacttagctttaaaacctaatttgatccccaaaaaacaccatcggggggctattttacaagttccgaatccaaacaagagaactgaactaagaggggggagaacctcaaaactgctgaaaagggaaaccaanatctcctttgttcttgccaaccttggtgggaaaagagttttaagaatattggaaaaactccttcattcggaatcgcaacacttcccagaaggtgggttaaacttttaatgggccctaaatgaaagggagggggtttgggaccaaaccggttttttttggtaccccttgggggggtcccccggcagttaaaaaactggggggggggggggccttaaaaaacgggggaaaaa

SEQ ID NO: 119566 - DNA, 496 bp, Arabidopsis thaliana columbia
  unsure (1)..(496): unsure at all n locations
gtacgtaagcttggatcctctagagcggtcgccctttgggttttttctttttaaaacgacaagaacaaatcactatggttcttatgttttaataccacccacaaaaaaaaggggtgaaaccgccgagatgggcttttttattttttttacccccctgggaaaacattaaaggcttgcgaaaaaggggggagttattttaagcccgaaggggcctcggtccggggggcctccctaaaaaaattccggccncggttccgggggggcggcccaccggccccccttggggggcttattcaagaggctgggggaaatcgggggccttttttaggggcctgagggaggaggggcctccgggcacaagttccaacaaattttcaaagcttggaaacttggagggtcgcaaagcggggggggccctaaggaaaaaaacaaaacccccttttggttgggggccccctctccttgcgccccttaaaagtggggaaaagcccggggg

SEQ ID NO: 119567 - DNA, 476 bp, Arabidopsis thaliana columbia
  unsure (1)..(476): unsure at all n locations
aaaaaaaaaaaaaaacccaccccccaaaaaaaaaaccaccccaccggaaaaaaaaacccaagggaaaaaaaaaaaaaccaacccaccccccacggccccacgaagccaaaaccaacaaaaggaacgcaannnnnaaaccaaccccttttttcaggaaagaaagggaaaanaccccgccgcggggaaacacaaaaacaaaaaacngccccgaacccccccgngcgccccccccccccccacacgagaaaaaaaaagcgggcccccaccaaaaaaacaaaaacaacaagattggtgttaacaaaacctcccccacccgctgcgaaacgggcccccccaccttttgttattaaaaaaaaccacaaaacaactcccctaaaaaaaaaaatgtgttaaaaagaaccatccagaaaaacaaacaatcacaaggggggtccttttccaaaaacccttcgacaaagaaagaaaaccatcttcaa

SEQ ID NO: 119568 - DNA, 463 bp, Arabidopsis thaliana columbia
  unsure (1)..(463): unsure at all n locations
atgacgtcgactgcacgcgtacgtaagcttggatcctctagagcggtcgcccttnggtttaatcctttttttttttttatagattaacgatcattaattaaactcatagttacaatgcataaaaactaggacaagccattaaatccagaaaacacaggaatctgctacagcaaagacatacattctctacactcaaaccacctcacagatgctctggggtatttaagaaagacaacacacgaaagtaaaacagagagcttcttaagtccgaaccatatgacaagagaaacatatttactcaggtacaaatttcttcctgagctcagagacgaattcagtaaccttctcaggatcaggcaaggacttanccacgctctccctctgcaaacacttcttaacccaagcaatcagtttcggaacctcagattcgatactgaagttagcaaacttctcgtatgctgga

SEQ ID NO: 119569 - DNA, 465 bp, Arabidopsis thaliana columbia
tatgacgtcaactgcacgcgtacgtaagcttggatcctctagagcggtcgccctttttttttttcttttggtctgtaaacacaaaattgataatttaaaagccgtcaaatcttgttgtatacacacattaatcgtaattatacattaggttataacacgtacagataccaatcacacagtatagatagataagacttaaatatgattgatctaggcgggggttgagaaacccatttaaatccttcgcacgaacccatctttctgacaatgctgcacatgaacacctcaagaggacgaacattggttcctgctagattcactttacctttcccaggggtgaaactggtgaggcctaaatgataacgcagctcgtcttctgatgcagcgtacggaatgtcattttgtttccaaggatgaggaagggacatttgctagggattatcagagagaaaaacgcaagctttt

SEQ ID NO: 119570 - DNA, 299 bp, Arabidopsis thaliana columbia
  unsure (1)..(299): unsure at all n locations
gacgtcgactgcacgcgtacgtaagcttggatcctctagagcggtcgccgttgtggtaattcttttttaaaaaaagaaaacaaannaacgctatagntccattgaggcgccggagggaaaaaagacttagaatgactgcacgtggtacggggtgtgtgttttgaaaaaattcggacctcgttcgggggaaagtgtggttggattccttttttttggggtgtgggggggtgttagccggctttataatgttaaaaaaaaaaagaacccgttctttccccagttcctattccaccccccct

SEQ ID NO: 119571 - DNA, 387 bp, Arabidopsis thaliana columbia
aaaacactttttttttttttaaagacgggggttaaaaaaaaaaaaaaatttttttttaaaaaagttgtatagggttaagtgtgtttataaaccaaaaaaaaaagcgaaaaaaaggttttttttggggaaattttttaagggaaagtcggggcaaaacacctttttttttttttttaaaaggtaatgaaaagcccggttttcttagagagggtgggagaaaacccccgctcccattttgtcccttgtgtgttggagagaaagaaggccgtggttttttgtgcacttccgttgatagggggcggccaaagggaaaaaaatgctgtttagaaaggagaaaagaaaggagatccctatgtgttgcgggcgcggggtttttgttttggaata

SEQ ID NO: 119572 - DNA, 515 bp, Arabidopsis thaliana columbia
  unsure (1)..(515): unsure at all n locations
aagcttggatcctctagagcggtcgccctttgttttagttcttttttttttttttgagcccaaaaccctgggattttctggggaaaaaacaacaaattaaaatcaaaagcccttttttgggcaacaatttgtctgggtttattggtggcccgatacccagaatacccaaagaancccaaaaggatangcttcttttcaaaaggcgtggattggaaaaaaaatatctttgggccaaaaacaaattaaaaaaaacccagggggtggggtaaaaaaaaaaancccttccccccttgggggcccaaactcccaggggacgggccccctactggggacggggggaaaaaaaaaaaccccacccccccccgtgggccggcccccttacttatttagaaaatttttgcgggggcgggggtctcccccccaaaatacaaaaaggggagacccttttcttttttctttgcgccccaaaaaacccgcagggggggggaaacaaaacccggggctcggtgcagggg

SEQ ID NO: 119573 - DNA, 346 bp, Arabidopsis thaliana columbia
gcacgcgtacgtaagcttggatcctctagagcgtccgccctttgttttagtctttttaaggcacacaacttttgataaagaagtttgcaaacgaaaacagaataccctatcaaccttacaaaatatcaatttggaaccccaaacgggacaaaaagaataaattaccggatggaagggaccccccaccggctcaaaggctcaagttttttataagaagcaaaaaacaaaaacaaaaaattgtttttaaaaaaaaaaacaaccccttcctattaaaaagaggggggaacaaccactcggcggccccaaagggggttttaataaaagggagggggaaaaaaccaccagg

SEQ ID NO: 119574 - DNA, 434 bp, Arabidopsis thaliana columbia
cttggatcctctaaagcgttcgccctttggttaagcctttttttttttttttttggaggaactagagaggtgacataagatccagtaagcaacattatcttaaaagcaatatgacagtagagaaaatctctcacaaaagacccaaaatcgagtcgtgcaaaattgtacgaacaacaaattttaaaaggcgttccttatcaaagatccaatccagctacaaataacaacattggcttaacgcttcttagacacaccaacagtttttcctctgcaaccaattgtcttggtgtgttgcccacaaacacggaaaccccagtaatgtctcacaccacgatggtttctgattttcttgagaccctcaagatcatcccctgagcttcatggcaaagggcattggaacacaacttgagaaaccctccccatcccttgaaatc

SEQ ID NO: 119575 - DNA, 504 bp, Arabidopsis thaliana columbia
  unsure (1)..(504): unsure at all n locations
gacgtcaactgccgcgtacgtaagcttggatcctctanagcggtcgccctccggggttaggctttttcccttaaattttttttttttttntgttnnttttttttggggcgcaaagcctcaaaaatttatcttttcaaaggggtgcaaaccaaaaaaacttcataaaacaaaaaagcccacccgggggaaacctttttccatcttttttaggggagatgcgtaccccccttggggccaaattaaaaaaacccgggcaaagggaaaatccttaacgggccccctggggaactttttaaaacccacccttttttttgaggggccaccgcgggggaaaaccccttgccgcnttaaaaaatattaaggggggggccccacgttttgggggggggtgtttagaagcgtcccccccaccccgggggggaacaaaaaagaacgcgcggggtccacccgcgttaggggggggaataaaccagcgggtttgtttcccaaccaccccaaaaaaaa

SEQ ID NO: 119576 - DNA, 453 bp, Arabidopsis thaliana columbia
atgacgtcgaccgcacgcgtacgtaagcttggatcctctagagcggtcgccctttgtgtttggtctttttttttttttttgggccctggttcagctagtttacgctctagtactcggcttcttgttgaaagattcaataaagcggaacatccaacgatctaacattcctgtcaaagcaaatgtaccgcctaatacagcgcaaagacgattgattaaggggagaaaactacggcgttcttccttgatggtcacagtgataggtgaaagatcatataagaagtaaactgctggccatgtacggtcaaattcagtcattggcgtgaaatattcagttacagagtactgatttgttgacagtacgtcttttgaaagattctatattctgtgggaacaatcttaatatagtatttgaatgttccactggggtcatggagtattcgggtggtgtcatca

SEQ ID NO: 119577 - DNA, 490 bp, Arabidopsis thaliana columbia
gaagagttatgacgtcgactgcacgcgtacgtaagcttggatcctctagagcgggcgccctttgttttttttctttttttttttttttttttttttttttttttgttttttttttttttttttgggggagaaaaacccccttcttttttggggggggaaatgtgaatgttcaagttttttggggcccccggtttttttgggttatagctttttggacaaatgggggggtgccctaaaaaaaaatttttttttttttaatttttggcttccccgcccaaaaacaaggaagagggttttagctcccccctttcgggggtgggttcaagcggtggaggcccttaactcttgtggaacatttgggggggggtttggttttttctctacaggttttaaaggggaggcccccgggtgtttccccggggggattttgaccctttgggttggttttgaacctatttcaaaaattcttttttggggctcccctttttgg

SEQ ID NO: 119578 - DNA, 420 bp, Arabidopsis thaliana columbia
  unsure (1)..(420): unsure at all n locations
tttcgccaggggggtggaaaaccttcaattttcccgcccctccagggggttctccccttttccttttgggggaacccgagttctttttcccaaagaggaaaaccccctccccgggggggggggtaaaaaaaggtgggggggggggaaaaaaaaaaactttttttttaaacctcttttttttttctcccccccccccctttttaagggcccccttattttttttgggggggaggcccctccccctccttttaaaaccctccccccccatgggtgttccctgtggaaaatacacacccttttttttgnggggcgttaacgacccctctttttttcttcttgagggggcttccacagggggggcccgggggggcgcccctctttccaaaggaaggggggggggggcgcccccccccccccccc

SEQ ID NO: 119579 - DNA, 496 bp, Arabidopsis thaliana columbia
  unsure (1)..(496): unsure at all n locations
gcacgcgtacgtaagcttggatcctctagagcgttcgccctttgggtagggcgttttaaaaaaaaatataatnnataaaatattttattttataaaaatttttttntttannnattttggggacccaatccggggcttaaaaaatttaagagtgaaaaaaactcccccccaaaaaaccggggggggcccactttttttttgggagtttggaanttaaaaaggggggaacttgaaaaaaatttttaataacggaaaaaaagggggcgccccccccaaattaccaaattgttgggggaagcgcttttaagggggcgggggggggggggggcttcccaatttataggccacaaccacaggggggggggcttcttttgtggggcttttcccctcgactttttccccccccgtggggggggggtgcgtttaaagaaccggtgactatgggaaaaagaacaaaattttcgggcattgtggcggcgcccaagttctttaaaaa

SEQ ID NO: 119580 - DNA, 511 bp, Arabidopsis thaliana columbia
  unsure (1)..(511): unsure at all n locations
tacgtaagcttggatcctctagaggcgttcgcccttggggttgaggctttntaaataattaaatttgnattaaagttttacacatggtggttttttttttnnacatatgggggggaaaccccttaatttaaaaagggttttttggaaagtttcttttaaaagggggggggggcaattttaaaaatttttttttggttgtcggggatctactcttggggggggaaaaaaaaaaaaaatcccccccctcctcggattttgtcccttccccgcgggcgaagaaccttcttttttggggggggggcgagccgcttccttctttttttttttgggggggtgggggggtgttcgacgcctttctttttgggggggctttttgtgggggggggactttttttttttttgggggggcgtgtgtgagccctcttttttttttaaaagaacgggtgtgtttttttttttggggggctccaaatttttttggtaccgattgggccccaattcttccgggggg

SEQ ID NO: 119581 - DNA, 421 bp, Arabidopsis thaliana columbia
gacgtcaactgcacgcgtacgtaagcttggatcctctagagcggtcgcccttttgtttttttctttttttgaaaaagtaaaatatcaatgacttgtctcaatgatccaacattacgagctacaacaactctacaagagctcgtttgactcagggttgattctatcaagtgtattcacatatgtatagcttgaaaacaaaacaaaaagcttccgggaggtacacaatcgcagagattcatgtttcaaaaattatcattattcacattcatcatgggcaaaggtaaaaagaatatatttagtgtttggggaaggagagacataccaaacccactggcttaaatggtgggccattgctttgaagcttttccaaggctggttgtttatgaggatacccttactcggatgtcttttggcggataaa

SEQ ID NO: 119582 - DNA, 484 bp, Arabidopsis thaliana columbia
  unsure (1)..(484): unsure at all n locations
tgacgtccactgccgcgtacgtaagcttggatcctctagagcggtcgcccttggggtttagtcttttttttttttacaaatcatattccccaaggtaaaaacggatttaanngggagagaaccacatttaaactgaaaaaactggaacagcgagatataaactaaagaccctcccatttttggctaaaaaaaagggggaaaacaaaaaaattcttcttggggtgtagtggaaaacaacccgggcgaatcctcttaataaaaaaggcaccctgttgggaaagctatatacgcttccccaccccctgttaaaaaaccccgtggccggattgcgcccccataaaaattccttttgtgggggggaaggcccaaaaaaacccgggggtgggggaacaccacttactggggggagcccttctatttaaacaacaccccgctcggggcgcaagcgggcattcttatcccccctgtctccaaaacaatcccc

SEQ ID NO: 119583 - DNA, 251 bp, Arabidopsis thaliana columbia
  unsure (1)..(251): unsure at all n locations
gcggtcgccctttttttttttcttttttataggaaaggttgattttttaatattttaaaacaacgnagaacaannaaccggtccacgggggaaaaggcacgaagaagaattaaacaanctagactaagaaaacttcctttgaatcacaaagaaaagtaaaacacccctcaaaaatcttttganngggaggagcaccaaaccgataaaaagataaaaagctggaaacattggtctcaattcttctcccttct

SEQ ID NO: 119584 - DNA, 490 bp, Arabidopsis thaliana columbia
tgacgtcgcctgcacgcgtacgtaagcttggatcctctagagcggccgccctttgggtttggtccttttatcataattttttttttttttcagggggaccctttctttttttctaaaaaaaaaaacccttttttttttttttttttgggggaaatttctggggaaaaaaacaacaaaacctttttgttcccccctttccaatccctattaatattggggggggcccaccttttcaaaacggctttggagcatacttatgtttttaaaaagggccttttctccctttctgttgggctgcacggttttttccatgggcctcccccgcccggggagggaaccctgtgttgggggttgctctagcggggattttggcccccctttacactttcccgcgggggggaacccagggccccccctgtgggaggcgtggtacaaggtttcccttttttaaacacccctcctggggggggcacccaatcctccctggggg

SEQ ID NO: 119585 - DNA, 409 bp, Arabidopsis thaliana columbia
  unsure (1)..(409): unsure at all n locations
atgacgtcgcctgcacgcgtacgtaagcttggatcctctagagcggtcgcccttttttttttttcttaaggacatactcaatttattccaatgtatttcggcgctgttgttatgacattacatagcttgatgtgagaacataggttattttgtctaaagagtaacaatagttatgcctttttttcaggctcttcaccaatcaataccgagttgcttggagaggaatanattatcaagatccgtgattaatggggccgatgaattgacatagctttgcatatgtatcttagccggcgcctcatcctctttgagcatattaagtaggggagcccttgtgggaagagcatacctcccaagagaaacagttttcgtatggcccatcgctggggggggagcaaaccttgagcat

SEQ ID NO: 119586 - DNA, 489 bp, Arabidopsis thaliana columbia
gacgtcaactgcacgcgtacgtaagcttggatcctctagagcggtcgcccttttgtttttttttttgccaaaaaaatgctttgtttgaatcactatatatgttacaaacctacccccaaccaaagggagaaactaaagagcgggacagggtgttttgaaaagaagagagcaactcacaggtacatatagattacgggttctctctctctggctcgtgaggagccccagtttggtatggtggcccaaaaataaatttataatcttcactagggccaccacccttttggaaacaccagggggaggcattgaaagggttcttggggggggtttcctaacataccaacttttggaaaaatctccttccccgattttcccataagtgaattccacccttcatatcaaaacccctcccataaggggagggtaaaatgtccttccccccaactttatttccgagggggggtaaaataaaactctttgggaaaaaat

SEQ ID NO: 119587 - DNA, 538 bp, Arabidopsis thaliana columbia
  unsure (1)..(538): unsure at all n locations
tctccaagattatgacgtcaactgcacgcgtacgtaagcttggatcctctagagcggtcgccctttggggtagggcttttttaaaaaaataattttttttttatannnaanttaaaaagacaaaaggggtttgtataaaccaacaaccttttctttttgggaaaaaaaaagaatttaaaaaagcccccccccagagaacacgtggaaaacggaactcttttttctgtgagtctggggggaaaaaggggggaaatttttaaaatatttcctggaaaaaaaaaaatgttgcccgtgttttattttagggtcgtgggggaaacccaagttggatagggcctggaaacattttttttgttcttatttattttaaaaacagggggtgtgggttttttttttgtgtggcggtttcccaaattttttaaacccccctggggggggggttgttgttttaaaaaagggggctctttgaagaaaaaaaaactctttcggcctctctgggggggcttttttttttaagaaagaaaataattgttttttt

SEQ ID NO: 119588 - DNA, 307 bp, Arabidopsis thaliana columbia
  unsure (1)..(307): unsure at all n locations
gtacgtaagcttggatcctctagagcggtcgcccttttgtttttgtctttgctcaaaactcanaatctcatactttgggggactcaaaagcaaaatcttataaacttctgtgcatcaactaaaacccaaaaacaataaaagcgggaggcccactttctctagcctaccctttttggccagactctctctcatttaaatgaaggcgacccacggggcttggttccttttaaaaaaatattaatcactgcccggccctcatttctccaccccaatgaaacgatccaaattttctacttcttttaaattc

SEQ ID NO: 119589 - DNA, 465 bp, Arabidopsis thaliana columbia
gcacgcgtacgtaagcttggatcctctagagcggtcgccctttttttttttcttttttttttctaaaaagcgcgcgctttggtgagccatggcacatagcgcactaaaggactctctgagccatggtgcgctttgtgccatttaaaactcagattggtagtcaattctcaaattatccaatatacaacttctttatcttttaagggcgattgacaatgacaacaataacagaaaatttcttcaagagcattcgtttgtaggagagagcaaaaagcatgtcttgacactgtttatgtaaactgtggatgaggtccagtgtcagacgatggatcccatcccggcggttttatattgggccaatcgccacggcatcccaagcgtatgtacaaactcttcttacctggaagtcccttgtctgagatgatcagttgcttaaggcactcaaggaagcctgagccacgcttt

SEQ ID NO: 119590 - DNA, 455 bp, Arabidopsis thaliana columbia
gacgtcgcctgcacgcgtacgtaagcttggatcctctagagcggccgcccttggggttgggcttttttttttattttttttttttttttttttttttttttttttttttaaccaactggtttaggtggataattataaaattaattcacctttgatttaattaaaaacaatatctggacaattgcttgacctacaaggaagggcttgtacaaggggggttcccaaacccggtaaaacaaaacccaaccacaagctattttttggcggagggagaagctttttcccgcaaagttttttatttctgctatcaaaattcaaaaccccccaaaaaaaacaagtgaagaaggggaggtctttttttcaaatttgaacctcctcaagcccccctgggaagacgagactaattctttctcccaaaaattatcccgatgataacaaagatccccgcccttcca

SEQ ID NO: 119591 - DNA, 421 bp, Arabidopsis thaliana columbia
ctagagcgttcccctttggtttttttctttttattttaaatagggcctatataaaaattaaggaaacctaaaaaggaaggcactccccctttaaaaaaagataaccccctccttggggggagtttctacttttttttcccggggcgcacccccttttccccttaaaaaaaataaccggttgttggaaaccaaaacagaccactaaaaaaaaaccccccccccccgggggggggaacacccccctacacctcgctgggggtcgctcccaccaaaaacgaacggcaaatgaagggccccccccagggtcctcccccctaaggcaaaaaccctctcccctgggggaaccatggccccccctccttcaggcgggaccccaagcccgagcccttaaccggtgggggcccctcccgccccaacaccc

SEQ ID NO: 119592 - DNA, 435 bp, Arabidopsis thaliana columbia
  unsure (1)..(435): unsure at all n locations
cctttgtgttttttcttttttttggcaaacgatatgtattatagcaaatgaacacaacaaagctctgtttcatggaacagagtatgtaagtctgatgaaatttcacaaccagaaaaaaaaagacagtctcaacacccgttnaacttttcttttttttttctcaaggggggggtttacttaanagttaaccaacctcctataaaaaataaccccaacttgaccgctttttactacaacttaacgggaaaaaataaacaccctgttttactgataactaattcttcccaaccaattatcagtgtgcctggtataaggcaaatccctcccttgacctttcggggttcccccctttcccctgtttttgggggggggaattgttaaaaaaaaatttgaatttttcccctttacccacattttttccccggacataaatgc

SEQ ID NO: 119593 - DNA, 365 bp, Arabidopsis thaliana columbia
  unsure (1)..(365): unsure at all n locations
tgacgtcaactgcacgcgtacgtaagcttggtcctctgagcgtgcgcctttggttttcttttgtatggcaaagctataccttgtccggatcatataagaacaaagcccacatcatataatgaaaaggggctgcctaaaaaaatgggttgggaggcaatacttttaaaggggggttgagaaattttttttgggcagccggcccncttgttttttttccttatcctaaaaaaaaagaatatatcccatccccggaataatatgggggtgggaaaccaaaataaaacgggggcgattatttcccttggggaaataaaaaaccttgtcagaaaaccttaaaataccccccctgttacaggggggggcca

SEQ ID NO: 119594 - DNA, 501 bp, Arabidopsis thaliana columbia
gccgcgtacgtaagcttggatcctctagagcggtcgccctttgtttttgttctttacgagaaaaagtaacaaactctttctgaagcatctatcttacaaggaaccaaagaaaatagaattcccccctgagggggggaacatcaaagcaaaattccactcataaccacttttaaaaaagcgtgctttaagggtttgaaaaacaaaaacctttttgttggttgtttggtatttttaccgcacccaaaaacaaaaaagaagacttcctttccctcagggggtgggttagttccgagaggggttgcccttttttttggggggcaccaaacaaatctttgaaatttttggtggaaggaaatctctccttggagttccaattgttttcctacttggggcccaatttattcccaggtttttttaggggcatggaaatccctttctggttttcaaccattccgaaatatagtgggccccttcacttttaccaggagccggcaaacggcc

SEQ ID NO: 119595 - DNA, 339 bp, Arabidopsis thaliana columbia
  unsure (1)..(339): unsure at all n locations
cccccaaccttaggataaaaaaaaaaaggcggaaaactcccccctctccggttttttttccatctcgccaccctccctggtttacacataaaaaggttcccgtggccccccccaaaattttttttgggttgtaggggacnttcccagggttttcccaacgacaaacccccccttttttgatttgtgggcccccccccgactccttttttcgtttattacccgagggccccccccccccccccgagcggagaagcgggacaaacagtttttttttttaaggggggggggtcttgtgctccccccccccgaaaaaaacttctttctttctccacaagaaaa

SEQ ID NO: 119596 - DNA, 578 bp, Arabidopsis thaliana columbia
  unsure (1)..(578): unsure at all n locations
aaaaaaacttttttttatttaaaacccctttttttttaaaaccccccccaaaaaaattcccttttttttaaaccctttataaaaaaaaaattaaaccccctttttgtgtttttttttcccccccgatttttttaaagcccggaaaatttcccccccccccctcttttttttttcccccttttatttttaggnaaagaacggttntttttccctttccctccgccctcttaaaaaatttatttaaaactcccccctccccccctctcctcgtttgnggaaaacacccccccccctatntctctttttttttattaaaaaataaaatttttttatttaaaaccaacaaattttcttgcaatttctcccnccgcttaaaacaacacccacacccaaaccagttctcattcaaacctctcctttctttttatatacccccgtgggccaaccaaaaaacaccttcctccccccccctttatttataacacccctcttttcccttataaaaaaacatacctcttctctatatacctcctaaagtccaccacctcccctacaccccccgccaccaataaaatttc

SEQ ID NO: 119597 - DNA, 576 bp, Arabidopsis thaliana columbia
  unsure (1)..(576): unsure at all n locations
accccttcccaaaatttcccccggtcaaccccccgcggtttcgggttcctcctttaacacaaaaacaaaaaaaattccccccaaacccaatcccaaaattattcaaaacaactttcccaccaaaaaattcaaaaacacacaaaacccaacaccaattttttttttaaaaaattttaaacctcttctcccaaacttcatttccacgccccctcttaaaaaaaaacccctttttcctggaagccaggccctccccccctcccncccttcaaaaaaaccattcaaattctctccccctcctccaacaaataaaaaccccccccaaatttctccgtaaaaacccaaaaaaaatgtttataattaattccaaaaaaaaaccgttttaaaacgcctctttcttcctctctccccccccccaacctcctcaaaatattttttttttttccccccccccccacctcataaaaaaaacaggcccccccctcccccccncccttactataccccccaaccaaattctcttttcaaaattttaacaaaccatcctcccctttaaccccctttaccaataaacacccc

SEQ ID NO: 119598 - DNA, 186 bp, Arabidopsis thaliana columbia
tttttttttaaaaaaagccatcccgccacccccttaaaacaaaatcccttttttattcccccccccaaagagggaaccgggccaaaaaaactttttcccttcaacattaaccgagaaaaattaagggggcgtggaacaccttgtgggcgtctttctttaacacgccttaaaaaaaacgcttttttt

SEQ ID NO: 119599 - DNA, 332 bp, Arabidopsis thaliana columbia
tggaccccccggtcagttccatatcacaacattaagtagttcgtccgaactcacgcttcaatcgtcctcccgtgcccaagtacttccgtgccagccgcgcgctgatcgtgtgtcgctgacaatgtccgttgattctgacgctctaccagtgtgacggacggcgagcgacacacttgtcattttgtattcgcagtctgtcttagcatcggttagatggatttatgcattcgaacccacttccatactcatgattctgtgtctaccacgccgaaccgtgaggtcagtgatcacgattatgataggacgcgacgcggcttttcagacactttctc

SEQ ID NO: 119600 - DNA, 106 bp, Arabidopsis thaliana columbia
  unsure (1)..(106): unsure at all n locations
tctatcactcactttaggaaagctctcgcctcaggtccggtccggattccgggtnaccccgcggtcgtccgatatatgagtttccggcttttcccattttttcttc

SEQ ID NO: 119601 - DNA, 470 bp, Arabidopsis thaliana columbia
  unsure (1)..(470): unsure at all n locations
gggaaagcacgtacgcctgcaggtaccggtccggaattcccggtttaccccgggtccgggcggaggtccacaaaattntgagtaagatgatgattaatgaggaactgccttccagctgggatcagccaacaccatgcattntcttccatgaaaggcaacacagcganattacaatccttggctttccagataacggaagaaacttcctatttggagatggagccaattanaggggccattaaataatcacacggggggaggggggtctggaatcttgtttccacccgaaaggaccaccatccggactttccggggaccccatggggggggggggattttggcaaaacagggaatttccggccagaaacacaggcccatatccggttttgggggagagaaaacttccgccaaaaagggccccgggacaggccacccccgggggggggttcttcccgaatagtttctttaaa

SEQ ID NO: 119602 - DNA, 218 bp, Arabidopsis thaliana columbia
  unsure (1)..(218): unsure at all n locations
atcccactcaccttagggaaagctcgtgcccctgcaggtaccggtccggaattcccgggtctacccacgggtacgggcaaatgctatccatgtcctcttccggataatanacngaacccttctcactcagattgagcgatacttgaaacaggccattgtggataagaatcccgttgtttcaagggcagctttagtcaggggggcttcacttgctcaag

SEQ ID NO: 119603 - DNA, 470 bp, Arabidopsis thaliana columbia
  unsure (1)..(470): unsure at all n locations
atacgactcactttagggaaagctcgtacgcctgcaggtaccggtccggaattcccgggtcgacccacgcgtccgggcggatcaagataaaaaanaanaaanactcttctaaaaatgggaataatggaggcagagaggaaaacaacagtgctgggctgccagagacccatgtgggatcctctctccttacacttacactncttanagagactggacccanaggatgttaagcatganggtcatttcctggggggatctcccacaacaaacttcatcaaactaagaggggtgttgggctgtcctattaccccatgggtcctgggcatgaaaggggagggaaagtgggggaggttaaatcaaatttctacccttttccccgggggggaccatggttgaggtgcgtccccttgtgtatgttccggcggtttctccctttgcaagaaagggggggaacaattttccccaaaagg

SEQ ID NO: 119604 - DNA, 101 bp, Arabidopsis thaliana columbia
cgacgagtcgtattcgcgcggatgtcgtcgcgtcattagacgtagtatagacagcgctccccgtttccgatcatagataagatcacagagtaagagattat

SEQ ID NO: 119605 - DNA, 486 bp, Arabidopsis thaliana columbia
  unsure (1)..(486): unsure at all n locations
ggaaagcacgtacgcctgcaggtaccggtccggaattcccgggtcgacccacgggttcgggcacgcttacaaaaacattatgggttatctcacttatcttcaccatttgtgttcttgcaaccgcgttcaaccacaagaatcggtggattttatcaagggacacccaccgtctcctccctgggagccctataatcgtgaaactctgcttatctccgtgagaagtcggacaacaatctctgggggaatcctaaacaagaaatctgcgccctggaaaggtttttaaagcttcccaacatttcccttcggtcttttttcttttttttttaaacatcaaaaataatctttgaacatccgtaaccccccttgggggtantccccccccctttaacgaggggcaaaaaacctttctttacaaaataaaaaaacattgggtttttctccttttaggggtaccggggaaaaaaataaggaaccttccttttaaaa

SEQ ID NO: 119606 - DNA, 429 bp, Arabidopsis thaliana columbia
  unsure (1)..(429): unsure at all n locations
aaccttaaaaaaaccgggggggagagcaaaaaataaaaacaaaaatttccaaaaaccaaaacaaaaaatccttaaaaatgatttgaaaaggtggggcctccgggcccctcattctttgggagangnnnaccccccctnnnnntcaaaaccatacatcccccagggggggggtcctattctccccccccaaaaaaaaagcgggcccaaaaaatttgccaaggcaaattcccaaaaaaaccctttttttaaaaaactttccgagcccggaaaaacccaatccccaaaacagggtgggaagggttttttttccctcctcaccagaaatttctatacccccaataataaaattttgagggataaaaaccaaaaaaactcttggttttcggccattcaccaaaaaaaaaaacccgttttttaataaataaaaaa

SEQ ID NO: 119607 - DNA, 548 bp, Arabidopsis thaliana columbia
  unsure (1)..(548): unsure at all n locations
ctaatcccactcactttagggaaagctcgtncgcctgcaggtaccggtcccgaattcccgggtcgacccacgcgtccagggacgcttggttaaaaatccccccctaaatcaaaccttctttgagagatagatccaccgttgaaggaacatatctaaaccgctgacccttttgtggaagaatatgcccccttattccctaaattcccttctttaaaagacaacttttaaaactttttttttggggtggttgggaaccataaacaccacttttttttaaaacaacaaaatctccctccctttaattaagcttaatcacccaaagaccctnttttaaatcccctttcttcaaaatttctccaacccttaacccaactttcttttttaataaaaattctttttcttcacaaaaccccttataaaaacctttcctaatatttataaaacaattattttttacttcgtttgttaacgggggtttagtcttcccccaaaccccttttcacgagatataaagtttttttttttggaacttttttttgggcgtgggg

SEQ ID NO: 119608 - DNA, 373 bp, Arabidopsis thaliana columbia
  unsure (1)..(373): unsure at all n locations
ggtctaaacccatttccacggggctctacattctcaattcactcttttagggggtctcgcctctctgggcttttaaacgggggtcaaaccttctccattccacctattacttaaaggcgccgggggggncctccctcctttttatataaaaaataaaccccccctcttggtccgcnatccccaccccccacccccccccaaaccggtgttttttaaaccccaaaaaaatgtcctcgggaccttcaaaagaaaagccccttttctttccccggagaggggatctgtgggggcccaaccccaaacccgggggggcgcccaaaaattctacccgtccttatagggggggcggagcccacgcgtgaaattccctttc

SEQ ID NO: 119609 - DNA, 162 bp, Arabidopsis thaliana columbia
ctcacgtacgttaccatggccgctctcacgacgaaagctcaatataataattactattttccagcgccatatatcaatgtcgataaacaaaccatttatatcagttatatttacagttaagtcttatgtgcttctacgcacatacacattttccgagctccc

SEQ ID NO: 119610 - DNA, 382 bp, Arabidopsis thaliana columbia
  unsure (1)..(382): unsure at all n locations
tcatacgactcactttagggaaagctcgtacgcctgcaggtaccggtccggaattcccgggtcgacccacgcgtacggggtgccanaaatttccnatttcactttcacatctccctctctcttacaactctgtatccgtagttatagtttcntcctaaaatttcttttcttgagtgttccaaatgaaattgtgagttctccgagttatatgcatcccctataattttagggatgatggaaaccacaatggaggggattcaaaaaaatggttctgggggtgtttccctttgaaaagcaccaagaaacggccctctgtttctatgaagggggtggatcttgaagaaagcaagcccactgctttacctgagcccccaaagattcc

SEQ ID NO: 119611 - DNA, 220 bp, Arabidopsis thaliana columbia
  unsure (1)..(220): unsure at all n locations
aaaaaaaaantccccaacctttttctaaaagcttggcatgaaaccctttctcaaatgtcaccaaagttacaatcaaaagagccaagagtgttttttttttcattttaaaacccgttttttacaaaagtcccatgaaaaaacttccttttttttgaaaaggccaggggcaaaatttaacttctaattacaaattaagcttgtaaaagttaaaaagccctat

SEQ ID NO: 119612 - DNA, 215 bp, Arabidopsis thaliana columbia
gtctccctcagtccgccgattccgtcccccggtcggaacataaatattcacttcaactaaattccacatgttaaaggatgagtgcctttatagctgtacatatcactatcttggccatatatgatctggactgttcatttcgggggggacttcctatcttctcaaaaaaatgtctggacatggaaaaaactcttttagtcataggtggcaatatg

SEQ ID NO: 119613 - DNA, 486 bp, Arabidopsis thaliana columbia
acccctccaagtacccgtcccaaattcccgttccaccccgggtccagcccccctccaaatttttaaataggactttttgattttccaaaatttttgtgttaatgggaaacaaatattatccattccccggatccgttgacccataacatcccttcaaaaacccccttttttctttaaccaaatttttaagggattttctcccgggggtagttttcttccccttccaggcgtttaacaaaaaaaattaattccccctttctccaccccaattaaatccccccccccccatcccttagggtgtattagggccccttccttttttttccaacctttaaaatcaaaaacccccttttccttttttaaaaaaataccctcccccctttttattcccccccccaatatttaccaatctgtggtgcccttggaatttttcctttttacccaaaaaacctaagggttggttctccaaatcctcctttaacccct

SEQ ID NO: 119614 - DNA, 103 bp, Arabidopsis thaliana columbia
gatctagatctacgtctccgatagagagcgaagagtatagtgtgcgaatgagcgagggagatcatcgtcttcaggatcgcggatcctttgagcaggatagtac

SEQ ID NO: 119615 - DNA, 393 bp, Arabidopsis thaliana columbia
  unsure (1)..(393): unsure at all n locations
aaaaaaaaaaaaaacttttttttaactcacccccccaaattaaanggaaaaaaacggcccccctttccaaaaaccgcgacccaaattccccttcccaccccgggttaaggcccccccaaantaatttttctaaaaaaatcaccaaaacaccccctaaaatttgttaaaacttccttctcccaaacaaaaaatttctccacccttttttttctttctttccaaaaaacatacccccccattcaaaaacccgcgtttaatcccctttattactataaatttttttttttgaaaaagatagggccccnccctttttgtttcgcacccctaaaaccttatttnaaaccccccttttctcttgccccctcccccgcttttcccccccctccttttttt

SEQ ID NO: 119616 - DNA, 135 bp, Arabidopsis thaliana columbia
tcgcttcgcacgtatagtgatccttggcggctcgggtccgcactgtggatgacttcgacctgataatttcgcgcttttgtcggagcgccctcatcccactctcctgttttcgccgttacagcggtaccccgagaa

SEQ ID NO: 119617 - DNA, 531 bp, Arabidopsis thaliana columbia
gactcactttagggaaagctggtacgcctcgaggtaccggtccggaattcccgggtcgacccacgcgtgcgggggcgcgttcgcccacccgttcgctcaaaagcaccttccttttttttcctattctttctcatcatctttcttattatgaactaaaataaatgttcagacaaaggggccatttctaccatttataattttatattacacaactatttgtgtggggggggggggcgcgcacccgtgggggatttatatatacatataacatatattggcaacctttactactgggatttaacctgcaaggcccacaaacagagggctacacaaggctttccttctctctttcccctttcctttttttaaaggggcaagagggatcaatggtttggaaaggggttgacaatttgatcaagttttgaagaagccaattgaaataaaaaaagaaaaaagaactccttgggggggggaaaaaagggatttgtagcgaaacgggcggaaaaaaatgggccattagggatcccaatt

SEQ ID NO: 119618 - DNA, 510 bp, Arabidopsis thaliana columbia
aatacgactcactttagggaaagctcgtacgcctgcaggtaccggtccggaattcccgggtcgacccacgcgtccgggtagtcaccaaaaaaaaaaaaaaaacacaaaaagtttcaatggccgcctccacaatggctctctcctcccctgccttcgccggaaagggtgtgaacctttcccccgcggcatctgaagtcctcggaagcggccgtgtgacaatgatgaagactggtgccaagccaaagggtccatcaggcagcccatggtacggatccgaccgagtcaagtacttgggtccattctttggggagtcaccgagctaccttaccggagagttccccggagactacggatgggacaccggtggactttcagttgatccccagacattcgcaagggaccgggagctagaagttatccacgcaggtgggctatggtcggagccctaggctgggttttccctgacttttggctaggaacgggatcagttcggagagggggtttggttaa

SEQ ID NO: 119619 - DNA, 547 bp, Arabidopsis thaliana columbia
  unsure (1)..(547): unsure at all n locations
nnnnnnnnnnnnnnnnnnnnnnnnnnnnnnnnnnnnnnnnnnnnnnnnnnnnnnnnnnnnnnnnnnnnnnnnnnnnnnnnnnccacgcgtccgcccacgcgtccgcccacgcgtccgcccacgcgtccgatggactgtggaatcatcaagggaaatggaacagaatctggacggattattaccaccaaaaagaagggtttgaatgatcaaaaagacaagacaatctcttacagagctgaacatgtaattggcactggctcattcggtgttgtctttcaggctaagtgcttagagacggaagaaaaagtagcaataaagaaagtgttacaggacaagagatacaaaaacagagaacttcagatcatgcgaatgcttgatcatcctaatgtcgntgagctcaagcattctttcttttccacgactgagaaagacgagctttatcttaaccttgntcttgagtatgtacccgagactatttaccgcgcttccagatcttacaccaagatgaatcagcatatgcctttgatttatattcagctctacacct

SEQ ID NO: 119620 - DNA, 510 bp, Arabidopsis thaliana columbia
  unsure (1)..(510): unsure at all n locations
agctctatacgactcactttagggaaagctggtacgcctgcaggtaccggtccgngatcccgggtcgaccccgcgtccgccacgcgtncgtggacgcgttcgcgaactgattagcttgcctgtggaattaacaatcttaatgttctaaagatggttaatatagtcgccaataatgtgatgtgtttgaaggattatttatatgtgcgatatatttgcgaaatgttttttattggtgggctgtctcttgcttcacatgacaatgataagaatgcctttagatttggagtgggaagcttacgatcgctgttgtgtatcagcgagtgttaaatatttcgtgtctgtttgagaatttgcaggagcgggaaccctttcattggatgttcgctaaaagagttcctttttcatctataaatggtagatatattcctattgttaaactattcttgaagattaaaccggggagttgtgatcagactttctagtgctttgcagattttattttaaggaggc

SEQ ID NO: 119621 - DNA, 516 bp, Arabidopsis thaliana columbia
  unsure (1)..(516): unsure at all n locations
cggcaactaatacgactcatttagggaaagctcgtacgcctgcaggtaccggtccggaattcccgggtcgacccacgcgtgcgcgcacgcgttcgcccacgcgtncggtcgtagtctctctctctctccgcaaaatatcactcggagaaaagaaacagagacacgaaacagagaaaaccctgcgagagattccgcggcgaaaaagaatcggggcaaaaacaatttccggtcttctcttttgtgcgggcgggggggtctccatcggacggtctccagggcaggcgaacaggctttccggttagaggagttcccgacggaggtttcagagcggagggctctcctccttttttggttaacactccctctcgccggtatactgggtccttcccgcggatggttatcctttagcaaaagggaagggggtttctcacgcccttccatggtccggcctttatcggaaaccgttaaacattgggggtggggaaaatgcaatattttttttggggggaagggggg

SEQ ID NO: 119622 - DNA, 544 bp, Arabidopsis thaliana columbia
aacacgactcactttagggaaagccgctacgcctgcaggtaccggtccggaattcccgggtcgacccacgcgtgcggagcttctctctgataagggcacttcctctgacccttttatctaagctcaacgctgcaactctcgccggcgggtacttacccatttttcttcctttttcccgagcaaagactcaatttttattctccgggggggagggtcaaccttttaaagggggggggttatcttttgatgcgacccggtttggagaggggaaaaagatacatcgtgtcggaaattcggattgatttcctaaaaaagggctcaaattccccatcagggcgcaaacggcccagggggggggagcttgtccaccggcgcggtgcggcttgaacttggcgggcttagcccgggacctgtggggtgggttctcggatctgggcaacagggaacgacctctttttatggcggaggactcggacgccaccccggacggaaccacaagtttttgcgagcgccgtccccaacgcgtgtagggggtgttgtactc

SEQ ID NO: 119623 - DNA, 536 bp, Arabidopsis thaliana columbia
  unsure (1)..(536): unsure at all n locations
cnnnnnnnnnnnnnnnnnnnnnnnnnnnnnnnnnnnnnnnnnnnnnnnnnnnnnnnnnnnnnnnnnnnnnnnccacgcgtgcgtggaattgaagccacaaaaccttgtgatgagagagctgattcaacaacaacagcgactacaacaacaagaatcaatgatgggtgagtatgaaaagattgaagagtctcacaattttaataacatggaggaagaggaagatcaggaattgggtgaggaagaactacaccaggatgaaaagtcccggggctttcgagattgggtttaaaagccctgccaacagaggggggaatgggcatacggaaccacctttttttgacatggggtaaaaaaaataaaatcattggttcaaaaaaaggaccttatggggcatagttttttaacaaaacccccaaaacccaaaacccaaaccccccccccccccttgtgacccaacaagtggaatatggggggtcaacgatcttcaatttttaaagaaaacaaattctttttcacattttttcccttttgggttt

SEQ ID NO: 119624 - DNA, 318 bp, Arabidopsis thaliana columbia
  unsure (1)..(318): unsure at all n locations
atgatttgccnnnnnnnnnnnnnnnnnnnnnnnnnnnnnnnnnnnnnnnnnnnnnnnnnnnnnnnnnnnnnnnnnnnnnccacgcgtccgccctgatgacagtatgctttgacattgatgccattaggatactcaatgcttccttctggagcatgacctccgaacagagaagcaaacatcccattgccattgactccggttaaatctccccggatgagatggagagaatggatcccgtcgctgaggggagcaattgctaagacgagtaccacatcaacatcgtgctagcgcagatcgcttctcaggaactcacttacg

SEQ ID NO: 119625 - DNA, 521 bp, Arabidopsis thaliana columbia
atacgactcactttagggaaagctcgtacgcctgcaggtaccggtccggaattcccgggtcgacccacgcgtccggtttggacaaaaagcttgcccagagaaaacattttccctctgttaattggttgatttcttactcaaagtattcaacggcactggaatctttctatgagaagttcgatccagatttcatcaacatcaggacaaaggccagagaggtgttgcagagggaagacgatcttaatgaaattgtccagcttgtaggaaaagatgcgctagcagaaggggacaaaatcacattggaaacagctaagctattgagggaagattaccttgctcaaaacgcgtttacaccatatgacaaattctgtcctttctacaagtccgtgtggatgatgcgtaacattatccatttctacaacctagccaaccaggcggttgagagagcagctggaatggacggtcaaaagattacctacactcttatcaagcatcgcttaggagatcttttctcccgttta

SEQ ID NO: 119626 - DNA, 455 bp, Arabidopsis thaliana columbia
  unsure (1)..(455): unsure at all n locations
annnnnnnnnnnnnnnnnnnnnnnnnnnnnnnnnnnnnnnnnnnnnnnnnnnnnnnnnnnnnnnnnnnccacgcgtccgagcaatcatcgggttcttctttatctattcaagatcgatcctgatcgagatttattacaaattccaccttctattcgctacaaaaatgcgactatctcggacgggcaaagatggacgctgattcccagagatttctagctgcgctttgttcccggtctgaaatgccaatgggctttgaagacatagatggacatgattatttgcagaaagagtttgcttgcccgttctgggcagaatcaaatgatatcatcgggctgtgctgtcacatagatgaggaacatactttatagtcaaagaacgccgtatgccctgtgcgatctcttaaagggggagttgctctcgaaccccacataaccctgcaccatgggagaccctt

SEQ ID NO: 119627 - DNA, 509 bp, Arabidopsis thaliana columbia
  unsure (1)..(509): unsure at all n locations
aatacgactcactttagggaaagctcgtacgcctgcaggtaccggtccggaattcccgggtcgacccacgcgtccgggcagtggaagacgacggcacgagcttcaccgaagagcgaaaatggtgaacattccgaaaactaagaacacttactgcaagaacaaggagtgcaagaagcataccttgcacaaggtgacgcagtataagaaaggtaaagatagcctttctgcccaaggaaagcgtcgttatgatcgtaaacaatctggttatggaggtcagaccaagcccgtcttccacaagaaggctaagacaactaagaagattgtgctgaggcttcaatgccaaagctgcaagcatttctcgcaacgcccgattaagaggtgcaagcactttgagatcggtggagacaagaagggaaagggaacatctctcttttaagttggtggttcatctatctactnttttttggtttggnttgggacctgtcctgcttcaatactgggatatactt

SEQ ID NO: 119628 - DNA, 573 bp, Arabidopsis thaliana columbia
  unsure (1)..(573): unsure at all n locations
agagaaaaacgaaaaaaaaaaagtttgtttggttacatacgactcacttaggggaagcacgtacgcctgcaggtaccggtccggaattcccgggttgacccacgcgtgcgcggacgcgttcgcccacgcgtncgcccacgcgtgcgcggacgcgtgggctcagagaccaattctctcaatctccgtcgtgcgcttttggcttgattttggaaataaggaatctgaggaaattgatacaagtggggctctgatgggaacctttttattggggggggggtgcaaaaaaaaactcctttgtgggaattcagcaggcaaggttaccaggcttcccttgtggaattaaatttggaggggcctgttggaatttcccactattttaaggcttaaatttgcggtgggggaatcgggggggagaaaaacggagcaagcttttttcatgagaagggagtttgagggggcaggtttttgactccctgaggggtttcgtggggttgggcgtaaacaagccaggaacttgaatgggtaaggaagaaaaaaattgtttttgccaccaaaaaaataccaggtgttggg

SEQ ID NO: 119629 - DNA, 530 bp, Arabidopsis thaliana columbia
atacgactcacattagggaaagctcgtacgcctgcaggtaccggtccggaattcccgggttgacccacgcgtgcgggcgaacgcgtgtattttaggacagtttctagaaaagatttttgcgatcggctcgggcatggttatgcatctgctcctccatacaatattccatgttcgaatttaccgagcgggaagaacttccggtacttgggaatgggacaatatttatgggggggatgatctccctcctgggaatttaagacacaggggcccgtatggttttgaattattctgatgtcgatatcaccagagggggttttattacccggggggtgagtccttttttaggccaaatggggacaaggaattgaccattgatccggaagggggttttggggatttggaaactgggctaccggagttgggtttttccccaagggggcctgggtggtttaaacccttttctttttttctttaggaccacttctcctcactggggaaagagaaaccagtagacagcggggggcgggagg

SEQ ID NO: 119630 - DNA, 519 bp, Arabidopsis thaliana columbia
  unsure (1)..(519): unsure at all n locations
nnnnnnnnnnnnnnnnnnnnnnnnnnnnnnnnnnnnnnnnnnnnnnnnnnnnnnnnnnnnnnnnnnccacgcgtccgcccacgcgtccgcggacgcgtgggtgccactgtacatgctgttgtggaaagtcaaggtttgaatgataaagtggtagtcttcaagtacaagcctaagaagaagtaccgtagaaatatcggtcacagacagccgaatacgaggattaggattaccggaatcacagggtatgaagagtatccagcctcgcccaatgttgcagttggagaagtaaatctttgacacaaaatgtttcttgaatgttaaaatttttctgatcttctctatgtaattttgtaaggaccctggtcatttcatttctgctgagattccttttattaatatgtaccttttgccaaaaaaaaaaaaaaaaaaagnnnnnnnnnnnnnnnnnnnnnnnnnnnnnnnnnnnnnnnnnnnnnnnnnnnnnnnnnnnnnnnnnnnnnnnnnnnnnnnnnnnnnnnn

SEQ ID NO: 119631 - DNA, 475 bp, Arabidopsis thaliana columbia
  unsure (1)..(475): unsure at all n locations
aataccactcactttagggaaagctcgtacgcctgcaggtaccggtccggaattcccgggtcgacccacgcgtccgagtttattttatttaggaaactttgtcttttttccttcctctgcgctgtcttcttcaaaaaacaaaatattttgttttttgttctattagtaactttgctttctccacaattcaaagctaatttagttctattcattttttgctctctcttttgcggagatttggtngaagaagaaaaataaaaagagttataatcaatcagatcttgttttaagtgcagactcgttatttctcttcctcacctaagcttcagcatcggaaatttaaaactaaaatcgcatcaaatcccggagataggaaagaaataattgattgtttctagtgaagaacaaaaaaaaaaaagccgaagactttacatctggggtcatcgatttgaataagatcttcttttttgttatc

SEQ ID NO: 119632 - DNA, 513 bp, Arabidopsis thaliana columbia
aatacgactcactttagggaaagctcgtacgcctgcaggtaccggtccggaattcccgggtcgacccacgcgtccgcaacaagcagaagagattcgattctccattatcttccttctaaatgccttccctaatgttatctgataagaaagaggagaagaagatgaagaagaagatggctttggataccccagagcttgattctaagaaggggaagaaggagcataagctgaaactatctgattcggatgaagaagagtcggagaagaagaagagtaagaagaaggataagaagcgtaaggcttccgaggaggaggatgaagtgaagagcgattcaagctcggagaagaagaagagcagcaagaaggttaagttggggcgttgaggatgttgaagttgataaccctaatgctggttctaagtttcggatttctgcgcctttgagggagaagcttaaggcgaatggtattgaagctctttttccgattcaagcttccacgtttgatatgggtctc

SEQ ID NO: 119633 - DNA, 542 bp, Arabidopsis thaliana columbia
  unsure (1)..(542): unsure at all n locations
aatacgactcactttagggaaagctgcgtacgcctgcaggtaccggtccggaattcccgggtcgacccacgcgtccgcggacgcgtccgcccacgcgtccgcccacgcgtncgcggacgcgtgggcagtagaatcattttacctatagtgtttcccgctttggagaaaaacggtagcagccattggaatcaggctgtgaagaacttgacagagaatgttctcattgttttgtgcgatacaaatcctgatttattcgaagaatgtttgcacaagttccaagaagatcagcaaaaagcagaagatactaaaaagaagaatggagaaacctggagacagctagaggagattgttgcttcaatggcgaagtaagagttttttctgcactttacgtgattcaacaagaaatcgggttattgggtttgttttgtttcctttacgcctgaaaggtatatacatttactttgctttgcttgcttcatttaaggatctgggtttcgacttttagactaggtttaattcagttaaaacaggggtgagatttt

SEQ ID NO: 119634 - DNA, 538 bp, Arabidopsis thaliana columbia
atcgactcacttagggaaagctgcgtacgcctgcaggtaccggtccggaattcccgggtcgacccacgcgtgcgattcttccttagttcctcatcaaactcaaaaatctctatctatacggggagtatcatactatcttcatcattcaccaccagcattgatcatcatctgttggaaaatatgaagagaacacatttggcaagttttagtaacagagacttatcccaagaagaagaaggagaagacggtaatggtgacaacagagtcatcatgaatcactacaagaattacgaagctgggctgatcccatggcctcccaagaattacacttgcagcttctgcaggagagagttcagatctgctcaagcacttggaggccacatgaatgttcatagaagagacagagcaaaactcaggcagatccctttttggctcttcgaacctcaccaccacacaccctattgcaaacccctaacccctaattttagctcctctttttttctcttaaacaacaacaggtcaatcttgagcctttcct

SEQ ID NO: 119635 - DNA, 545 bp, Arabidopsis thaliana columbia
  unsure (1)..(545): unsure at all n locations
nnnnnnnnnnnnnnnnnnnnnnnnnnnnnnnnnnnnnnnnnnnnnnnnnnnnnnnnnnnnnnnnnnnnnnnnnnnnnnnnnnnccacgcgtccgcccacgcgtccggtttcatcgatgaacataacaccaaaaacctcagttataaacttggtttaacccggtttgctgatttaaccaatgaggagtaccgatctatgtaccttggtgctaaaccgaccaagagggttttgaaaaccagtgatcggtatcaggcgcgtgttggtgacgcgcttcctgattcggttgactggagaaaagaaggtgccgtcgctgatgttaaagatcaaggaagctgtgggagttgttgggcattctcaactattggagcagtggaaggaataaacaagattgggacaggagatttaatatctttgtctgaacaagatttgggtgattggggcacatcttataaccaagggatgaagggggggttaacggctatggggtgggggggtgttgacaacgtggcgtgttgtcgactgagagagaatcacctgagcagtag

SEQ ID NO: 119636 - DNA, 584 bp, Arabidopsis thaliana columbia
ggcccctgcaggggaacgcgtcaaggaaatacacctttttggacccaaggggggcgggcctcttaaagaggggagtatcccccccctttttctgttttcttttttcgaccgcgcagcaagaaaaaaagaagaaatgtggggggggcgtccgggccggagtaaaagttgtgccgacgattctctccccgttccatgttgcggaaggtgaagaggagaggaccccccccacaactttttttttcggggggggggggcttcgggcaccaaacaacgagacgctttgacagagagaaaccacctacctcctttctcgcccccaaccacacgaccaacaaacgagatgcaaatccatgatcgtcgcgaccagagacgtattctgaagacaacgcacctcctctttctgatacgcgagagcgaggacggtggaggtaactgctctcccaggagaaccacgattgtgatacgctcatcatgtataaggaaatatgtgcgacagagtcgctggtatcagtccacggcgccatggcgggcagacgcgcggtgccctgactgcccctcattctgatcgggggaagcgatgagac

SEQ ID NO: 119637 - DNA, 550 bp, Arabidopsis thaliana columbia
  unsure (1)..(550): unsure at all n locations
cnnnnnnnnnnnnnnnnnnnnnnnnnnnnnnnnnnnnnnnnnnnnnnnnnnnnnnnnnnnnnnnnnnnnnnnccacgcgtccgcccacgcgtacgcccacgcgttcgggaaagcgccttgatgctggatttggatagccttaggttcaatggtaaggctactcttcaagggaacaccttcaaactccgagttccgtttccaagacgcgcacaagacagaaaggatggtttgacattggggtggggaaaatgtttcaagctgcccagcccaaaatagttggttaaaataaagatggaaaagcttttccatctgaaatcctggtaccaacaagaaaagcttccctccaatacacaattttattcttatgtaatcaggtggcaaaaagaacccttattttagtccctgggttttttcttcagcaaggactagcaacctagatggattccatggaaaaaaaggttctccaattaagaatcttttcgaagtttggattgggcaaaaacaaaaaaaaaaacaaaaaaaaaaggggcggcccgtctttaaaggatcc

SEQ ID NO: 119638 - DNA, 600 bp, Arabidopsis thaliana columbia
  unsure (1)..(600): unsure at all n locations
aggctgaggggaaaaaggggtaacccaaanntttgtttggtgacggccccgannntttaaagggagagacggaccccggggggggggagggggggacagctttccccccgggggggagagcccagaaagaaatggggggagggcgggggggggggagagggggggggggggggcgtggagaagaggtgggaagggggggaggggaaggaggtagaagggaagggagggggaggggagaggaaggacgagggagagggggttttttctttggaggggggggggagggagtgtcgatggtatggaaaaaaagttggtggggtgtggcgtgaatatggggaggagaaaagtgagggggtgagcaagggggatgtaggaagtaggtaggtggttgggtgggtgtgcttagttggagaagggtagtgataagtgtgggttgagagatggatgagtggaggggagggtgagggatgtggatatggttggtgaagtaatgtggggtgtagaggagttcgggggtaaggagtgaggtaaggtcgtgatatgagtattattgtggggaatgggtgttttttggtagggatgtatttaatgtttgtggga

SEQ ID NO: 119639 - DNA, 515 bp, Arabidopsis thaliana columbia
aatacgactcactttagggaaagctcgtacgcctgcaggtaccggtccggaattcccgggtcgacccacgcgtccggctttcgcttttaaaaaaaaacctatcaacctctcttttttcttccttgttcaacaacaatggagctttggggagttgcggtgacaccaaaaaacgctactaaggggactactgaagaagacagccttgaccacatttctcaggctttactagactgcacagcgaaatctggagaatctgaggttatgagtgtgactgttggtggggctaaacttgttattggaacactctcacaagacatgtgccctcagattacctatgattcggtttttgataaagagtttgagctttcacacagcggctccaaagcaaatgatcatttgattggctacgaatcccgcaacatcgagcacgatgacttcactagctctgatgatgaggatgctcctgaagctgtctctgctcctgcccctactgctgatactgccaacggatatgc

SEQ ID NO: 119640 - DNA, 504 bp, Arabidopsis thaliana columbia
  unsure (1)..(504): unsure at all n locations
ccnnnnnnnnnnnnnnnnnnnnnnnnnnnnnnnnnnnnnnnnnnnnnnnnnnnnnnnnnnnnnnnnnnnnnnnccacgcgtgcgcccacacataatttaactcttgggctgattcgtgagcttaaattaacacagaatacaccctttcttcagccttctctctgcagactacttctttacttgccaactgagactagcctgactatcggaagcgggaagcttaggccctacttgtcgggggggggatatttaaggatgatggtagagttaatatcacaagtaggaattgagtttttcacatttcaacctagacagngtgatttgggatattttcttaggtcattggagtggaacggaaggccataaaatccggccccgaatgtcctggggctggtggaaccaaaaccctggagagcagccgccgagaacccctgcaatttttggtatgccgtggtccgaaagcctttttgtgcacccaaaacattggctcaatgggtaagaagg

SEQ ID NO: 119641 - DNA, 549 bp, Arabidopsis thaliana columbia
  unsure (1)..(549): unsure at all n locations
nnnnnnnnnnnnnnnnnnnnnnnnnnnnnnnnnnnnnnnnnnnnnnnnnnnnnnnnnnnnnnnnnnnnnnnnnnnnnnnnnnnccacgcgtccgcaagtgttcaggaccagggtcacacaaagccaagagagtgccattcacacaagacatcgacgacaaagaagctaactgtttcctatccctcggctacatccaaggatccaagtggcttctcccaccacccgctttgtaaattctttaatatcaacctattaaaattaaaattaaaacgtaaaactaaaattaaaacttctacttacatccttttttcaccgaaatatgtttatcggtgtatattatttttgtcgatattttctttcaatttccagaaatcctctcttctttaaatatcatggaggagttgagatttatgtaattttggtttcattataataaaatgttgtttccgttcagaaaaaaaaaannnaaaaaaaaaaaannnananaaaaaaaaaaaaaaaaaaagggcggccgctctagaggatccaagcttacgtacgcgtgcatgc

SEQ ID NO: 119642 - DNA, 419 bp, Arabidopsis thaliana columbia
cccccgccaaaacgacaaaaaaaatgttgggcacccccccattaaggggacgccccgaagaaaggccggacccctttaccgggggagaccgacacaaagagggcgacagagaaaaagagaagccacagcgcggacaaaggcgagcgacacaaagcggcccgaaaggacaccggccgaacacgggaggaagaggaagaaatttttcgggggggacaaaaacagcaaagcaacaaaaaagcagcagagggaggagagcccccagcgaggaagggcaggaggggggcagacaacggaaacgagaggcaggaacggccgaagggcggccgaaagccaaaccaaaaggaagaagacgaccggagaaggcccaaagagccagccgacgcggcggggagcaaagaaaggagagagaaaagacgcgc

SEQ ID NO: 119643 - DNA, 377 bp, Arabidopsis thaliana columbia
  unsure (1)..(377): unsure at all n locations
atgatatgnnnnnnnnnnnnnnnnnnnnnnnnnnnnnnnnnnnnnnnnnnnnnnnnnnnnnnnnnnnnnnnnnnnnnnnnnnnccacgcgtccgtcttcgtgaatgaaacctagagagcgtgagggagagaagaagaagtctgggaccgggtttggtgttgctacgcttgttgaatgggtacagaagaattcatcttcgtgaatgaaacctagagagcgtgagggagagactgtagagtttttcgggtgttgaaatgattgctggtttttaataaggtctcaaaagttactatgttttcagatgttcttaacttgttatgaaaagtaaaatcgtcaaaagttgaataaagtggtactttgttttagtcgtgcaaaaa

SEQ ID NO: 119644 - DNA, 526 bp, Arabidopsis thaliana columbia
tatacgactcacttagggaaagctggtacgcctgcaggtaccggtccggaattcccgggtcgacccacgcgtccggtcacatccaattccgtgaggacacataaacccaaattatactgggtggctcaaacatgggtatgccctccactgccttcgccggaaaggctgagaagcctgccacatcagatatcactcggatgctgccgtgagaccatgatgattattgtcgtcgagctctagggtccatcatgcaacccatgatacggatctgaccgagaaaaggactcgggaccattctgcggggagcctccgagctaccttaccggagagaacgccggagactactagtgtgagactggtgttctattctccgaccaacagacctttaccaggaaccgagagcgagatgttatccacagcccatgggccatgctcagagccctaggctgcctaccccctgatctattgagatagaacggagggaatttccggagagccggttcggttcaaggacctatcacagatc

SEQ ID NO: 119645 - DNA, 256 bp, Arabidopsis thaliana columbia
aagaatggccgggggggtgggagggaacggcgggtttttacaagtagggggggaggacgaagggtcctagagaggaaaatgtgggagtagtaggagaagtaaaaaggagacagggggactggctccacagaaggacaatgggggaacaagatgacatgaaagaggaagaagagacggaagacgtgggagacaggaacggcaaaggagcacgcggaggttgtttttagagggggtggtggaaaggagcgaaggggcg

SEQ ID NO: 119646 - DNA, 168 bp, Arabidopsis thaliana columbia
  unsure (1)..(168): unsure at all n locations
aagaaactccagctccatacaactcacttagggaaggctggtcgcctgcggtaccggtccgaattccgggtcaccacggtgcgggaattttgatattaaaggggctctcttctctctcggtcatggttcaaaactagttctaggggttcacaaccanagatagagaga

SEQ ID NO: 119647 - DNA, 329 bp, Arabidopsis thaliana columbia
ccccacgtggcagccgcgacgcttctgatcttctcccgtactgatcagcgttccggctagcgcactattagactttgcggccagcatacatagtgtagatcaccgcgcggcgtgagtagcgtttagttggtttactggttttagctttcgagccgcccaagcgtctcactcgcctcccgccgacagccgcgcctagtacaatttagggaatgccgctccagcccatcctttcatacccattatgccgctccccgacccacatcccgcagtacgccctccgccacagtttagagattcagatcctagcgcgccaggatgtccatagaaga

SEQ ID NO: 119648 - DNA, 524 bp, Arabidopsis thaliana columbia
  unsure (1)..(524): unsure at all n locations
acgactcaattagggaaggctggtacgcctgcaggtaccggtccggaattcccgggtcgacgcacgcgtccgcgcacgcgttcaaaaannnnnnnnnnaaagagggggttgacgcttgggataaaactgggagcgggcctatgagtatgtttcttgggtcggtcgaaccaacaggggtatttaggacggttgtttttttattttttatttgaaggtccccgtttttttggggggggggggtttattttccccgcggcgacttgttacaaaaatgttttagggatgggttttctctttttgtatgcaaagtttagttaggctcaaatactcggagtattatgggccctgctcttgttctttagagtggcgatcggtttatgaggtgggtgtaattaagaggagggtgtcaacagtaatccaggagagtgggtgtctccacggttccgtttttgtaactttggcggctttccgcacatcatttgttatcatgaggggattgtatctcacaagatggcttgggtggg

SEQ ID NO: 119649 - DNA, 395 bp, Arabidopsis thaliana columbia
tctcaattgttttgcctactgcccgcactatcaatattgcgcagacttcgtcctcaacgataagatatacctagaggagcagctcgcagcgggcctcactcgtcacaagtccgagcagcgcgcgcgcgccgcccgcccctattattttctttcatccgagtcagcagccgttgttctgctgacgttcaattgacacagacagcgcacgccttctcgccacttccggtccgccctcttttcgagcgtgtagtctgtatagtaattaagtcatctctccccctagacctcctgcgccacccttatcgcgcatggccctagcctatatcatccccacgcacagcgccgtgcgcgcatgcggtgctcgcggctgagcagagccaagctcgcacgcaacc

SEQ ID NO: 119650 - DNA, 316 bp, Arabidopsis thaliana columbia
  unsure (1)..(316): unsure at all n locations
aacgactcacattagggaaagctggtacgcctgcaggtaccggtccggattcccgggtcaccccgcgtacgaggttgttattnttttcttctgcgacaggttcgaaggcgtctcttggatttttacaaggcaaaagctgagtaagacgttaaccaccgagtgtttctccccgggggaccgggggtaaaggggggggagatttttggttagttatgtccccgatttttcacccaggcttgcagggaactccctttcacgggggggggagcctcaaaaaaaaaaacacctaccttaaggggattctctaaaaccccta

SEQ ID NO: 119651 - DNA, 412 bp, Arabidopsis thaliana columbia
  unsure (1)..(412): unsure at all n locations
atacgactcactttagggaaagctcgtacgcctgcaggtaccggtccggaattcccgggtcgacccacgcgtccgcaagatggctggcgaagttaggtcgtgataaagaatgccgatcttcgttgcaacgccttaggggatctgacgtcnatatttctcgtgaagcaaacacaattagagataccattgacatgacagaaaacggtggtgaaactaaaatgtctgaattgtgggagagacgatacgcatatccgttaattatcggagttggtttaatgtttttgcaacaattgtgtgggagctccggtgttacctattatgctagtagcctcttcaacaaaggaggatttccaagtgctattggcacatccgtaatagccacaattatggttccaaaagcaatgctggcaac

SEQ ID NO: 119652 - DNA, 162 bp, Arabidopsis thaliana columbia
atggcggacgatagcgataaacgaccgaccataaagagaggacgtggaatgaggtggaaccgggagagaggagcgtcggacttgcagtggctgagaggaaaacgtctgtcaaatattagctatagtctgaagtgcataagagtgagtgggaagcaggcatga

SEQ ID NO: 119653 - DNA, 264 bp, Arabidopsis thaliana columbia
  unsure (1)..(264): unsure at all n locations
cnnnnnnnnnnnnnnnnnnnnnnnnnnnnnnnnnnnnnnnnnnnnnnnnnnnnnnnnnnnnnnnnnnnnnnnccacgcgtccgcggacgcgtgtacccaacgctctctgagaaaccccaaaacttgtttcctagaaggttgtttgaattacctcttaaaccttaggaaatgatttccagaaactcggtggatcaccatggtatgggcaagaaaagactatccgttctcctccgctgcaggggggctaacacagggaacgagctt

SEQ ID NO: 119654 - DNA, 230 bp, Arabidopsis thaliana columbia
  unsure (1)..(230): unsure at all n locations
atctctatttgtcttattattatctctagtcgtcgatcatctcttcgagtcgggacaccgactagttcgcactcctgtgcacttagtactgttctgcattcgcgcgagctgccaccgagtgattgtatcggatatcgttatacgtgatcgatagttcatatacgaactactggntcttgtgctcagacacgcgcatgatatctctacgcgattgctgtgctttcgttttt

SEQ ID NO: 119655 - DNA, 542 bp, Arabidopsis thaliana columbia
gagttacgctgtcctcggcgtcagctacttaagcgacttccgatattcaccggatggcgactgcgactagtatcggcgaaaaagagagaataagaataaattactgagtagagagtagtgacagatagcgagtgtaataagccgtctccaattccatattgggtcaagtccgcatctagtctcacgttctatcgaacatgatatatctagcgacttccaacagacgcattctacccgcccacatgtatttattgtaccgtcggtgcagtgagttatacgagaagtaaaagagcaagaagcccagcctgtcctattacacccgtactacaccaacccaagacagagaatgtataatatttagatcttgccgactgatttataagatagtagacatgcagcatcagaaaaattaatagagactcgcgcagcatagatgttagaatacggagaatcggcacgataataattgtatgtccgaatgagacaatacattttgatatacatgcggatatcgtcgcccgtgatgtagaggttagtggact

SEQ ID NO: 119656 - DNA, 446 bp, Arabidopsis thaliana columbia
  unsure (1)..(446): unsure at all n locations
acgactcactttagggaaagctcgtacgcctgcaggtaccggtccggaattcccgggtcgacccacgcgtccgcggacgcgtgggttggaagactatgggtgcagagagaggacatttgagtctctaggagaagagagtggaacagtgatgtatcaaacgtttgagaagcttggtaagtactgtggatcgcctanatctaccttgaagtgtgaatggagcatcaacggggggtgcancancgaggacgagaaggacgagggaatctagcagaatttttcttcctataactattttcgagctttctggttttgttctttctttntaaaaaacttattaagttcttatgaataatgacttgtgaagtttgagttcgtctccttcacaagcaaggtggattggtggtttctactttatgaatatggggttttatataaaaaaaaaaaaa

SEQ ID NO: 119657 - DNA, 365 bp, Arabidopsis thaliana columbia
gggaaagcacgtacgcctgcaggtaccggtccggaattcccgggtcgacccacgcgtccgggccatcaacctcaacaatctctctcctctctctctctggatatagaagaatctccattggctttaatttctctccatttctctttctctcttccttcaaaggtttctcttttcttgatgggtttaagagaagaaagatcatcattttctatgcgtggggtggagaagttattaaaaatttcaaaagaaattaaagattgttgatgatgaagagattaactttttcagattcaggggggggcctcatctctttatgtcctacaacttccacaaatgacccaagtcccaggagatacggggggaga

SEQ ID NO: 119658 - DNA, 470 bp, Arabidopsis thaliana columbia
  unsure (1)..(470): unsure at all n locations
ccaataccccgttcgaccccgcgttagagccgggataaaacaaatcaaaaccccaaaatcaagcattaaaaaacaaccctaggaggacaaacctatatcaacctgcttgcccacaacacctttagaacaccaatccgcccatgttcccccccctaattttaaaaatcccaaaaatccttttggcaagacagcccattaaaccacctcaatttcaaccatnaactaaaaacccctaaacacttttttttcccaaaaacccaacaaactggaaaccccatgcccccaccccgagcagtgaaccacacccccccatataaataacccggacaacccccaaaattcaccaaaaacacccatccccccccaccggaacgagcaaacacccccctgaagagcccccccccaaacccaaaagccaaccgccactctaaaaaacgggcacccgaaccgaacttcacaaaaaaaccccc

SEQ ID NO: 119659 - DNA, 363 bp, Arabidopsis thaliana columbia
accacgacatgacccaatggagagagtagaggtgaacgagtatgagcctgggaagatacgcgtaggttgccatatatgcgtgggcgaagcgggcgcttaggtgaggtgtattcttggaagcatatcgagtcccgcgggtcgtaccccacgctagccgcttgtaaggaaaagtgtgggaagggtcgtctaagacagagcccacgagcgtacacttcgtgcgcgtcactacggcgcgcttaacggtagcaatcacgcgtccccaactattttcataacaccatgcggccacgagagaagcatgaccgccgatatttggagacgtgggagcgagatatagagcgcgttgatagtttaaccagccag

SEQ ID NO: 119660 - DNA, 479 bp, Arabidopsis thaliana columbia
  unsure (1)..(479): unsure at all n locations
nnnnnnnnnnnnnnnnnnnnnnnnnnnnnnnnnnnnnnnnnnnnnnnnnnnnnnnnnnnnnnnnnnnnccacgcgtgcgggacgaccaagagtttcgtagtctcctcgacctcttcccagtcgtacgttctcgtgaccaccgtgctgaattagattcttcaaagcaatcaacttcacagtcagttgtggatcgagaggtaagtgaatggcacgatgcaccgactgttgctgaggggaagacttgcaatatctgaagactgatcaagacaaattttgggaaaatctgaaagcggctgctgagaagaaggttggtggggttgaagcatagagattgtgcaaggctttccagaaactccacaagaaacttgtgtatgaagaattggatccagaagctgcaaagcgatatttactaaactcttaaacttctgtcttctatatgatgcgcttccaaaagtttggtaatgtggagacacttccaa

SEQ ID NO: 119661 - DNA, 460 bp, Arabidopsis thaliana columbia
  unsure (1)..(460): unsure at all n locations
aggccaaactgcgagtaggtcgagtccgaagatacgtcgatatgcgcaggattataatggggatccggtacacgatgcgcgtggtggcatgagagtagtagctcgcgccacgtaccgccagcgacgcggcacgagataaactacgtccgctccggcagcagaaagcgacacgatagagttagggcaagcgataaactacaaaaaattataatatagtatagcgaccatttactgagtatgtcaaaatcgacgtcagcagnttgccatctgattcgtatactacgcgctacacaattattcgtgcaagatagtaaactgacatccaccggttcatatacttttacgagcgactcgcccgcacgccgcgtcgttgaagggaacggacgcgggatagttgcgccacgcaacacgacgggactgacctcggctgcgcttactaaccaccgtctgcggacggtca

SEQ ID NO: 119662 - DNA, 148 bp, Arabidopsis thaliana columbia
  unsure (1)..(148): unsure at all n locations
cccgaagttgatgccgggtagcaactacgctcatcgagcgcaaagcgagtggacgacacgcctcccctcagtaggttcgcgctgaccagtctcatcagcttgataaattataatcacccaagccgactaancgatgaagtactacgcg

SEQ ID NO: 119663 - DNA, 609 bp, Arabidopsis thaliana columbia
  unsure (1)..(609): unsure at all n locations
gagacgagcggagggcccccccgggggaccggggggcatccctgagagcatagagtaagaaatttataggggggggggggggctggggggaacaggggagcgaaaaaannncnnnnnnnnaaaaaaaattctctcttagagttttttccaaaaacccaaattccaatttataggggaaaggctgggtgaccccctgtccgaggtaccccgggccccgaaatttcccggggtgnaaacccaaaggggggcgggggcgcgggggtttcttaaagggtttggaaaaaaacaaacaaaaagggggaaaaaaaaaaaaaaaacttttttaaaaaaggggtttccaaaaaattttttccccaaaaagggagaagtggggggatgtccctttgaataaaaaattcccctaaaaacgggagttttggaaaaaaaaaagggggaccaaaaaagggagagggggggttnggcttttaagagaaccccaaagaaaaaggggggcccctttttttttgggggggaggggaaaaaggcccccccccctttttgaaaaaaaataaaaggcccccccaagagggagggcgcccccttttgtgtgcctcccccccaacaaacaaa

SEQ ID NO: 119664 - DNA, 500 bp, Arabidopsis thaliana columbia
  unsure (1)..(500): unsure at all n locations
atacgactcactttagggaaagctcgtacgcctgcaggtaccggtccggaattcccgggtcgacccacgcgtgcgcccacgcgtncgcccacgcgtncgtacggctgcgagaagacgacagaaggggtcttaaagaagatactattgactttattggtcatgcagtggcacttcactgtaatgacaatcatctccatcaacctgcctatgatactgtaatgagaatgaaggtgtacgcanagtcccttgcacgttttcaaggaggttcaccatatatctatcctctctatgggttgggagaattgcctcaggcatttgcacgacttagtgctgtctatggtgggacgtatatgttgaacaaacctgagtgcaaggtanagtttgacgaggagggtaaggtttctggtgttacatctgagggagagactgccaaatgcaagaaagttgtctgcgatccttcttacctaaccaacaagggtcaggaagattggcagggttgc

SEQ ID NO: 119665 - DNA, 276 bp, Arabidopsis thaliana columbia
  unsure (1)..(276): unsure at all n locations
nnnnnnnnnnnnnnnnnnnnnnnnnnnnnnnnnnnnnnnnnnnnnnnnnnnnnnnnnnnnnnnnccacgcgtccgtgcgggtgtnagaagagnacagaaggggacacacactctctctctgatcattcaactgttcgaacgtttgctatatcgtctccgacatgggctgtctgttgaattactaaaacaatgcctttttgtctccggatttatccttcaccatcagatgggtgggcgactaccggaggggtaggtccatggaggaaacagggcccg

SEQ ID NO: 119666 - DNA, 486 bp, Arabidopsis thaliana columbia
  unsure (1)..(486): unsure at all n locations
cccctcacttagggaaagcacgtacgcctgcaggtaccggtccggaattcccgggttgacccacgcgtccaggcgatataaaattactttcaagtgtatcagttttagcaactcttttccaaaaagaacactcccattgctcatgctggtgggttctgggactaccattatttcattactggtgataccctctttgaacctgttggttctggtctcttttgagggagcggcanggnacaaaaagagagggctaaataaaacgctaatgtacaccacaaaacatgctgtgggtatggaattgcaactggggggcctttttcttgggggtctggctcacaccggggaagtgagcccagtgcattccttctggtacgaggcctagaaattcgaaatcccctctgcaaacctggagttgaatactaaaagaccaggtgccttacccatttaatgggaaccttaactcccggggaaagtggggaaacccct

SEQ ID NO: 119667 - DNA, 493 bp, Arabidopsis thaliana columbia
  unsure (1)..(493): unsure at all n locations
cnnnnnnnnnnnnnnnnnnnnnnnnnnnnnnnnnnnnnnnnnnnnnnnnnnnnnnnnnnnnnnnnnnnnnnnccacgcgtccgcccacgcgtncggaagggtacgggtgcaagaagacgacagaagggtacggttgccagaagacgacagaaggggactcttgtcttcattggaagaataggaagacagcggactagagaatcatatgaagaagacctactcatgggataggtgataggagaccaccatgctattcttaaatccttactagccgaggtcggagaagttgagagaataaccatgtcggcaggattctctcatgctttaagctgaatgcgttcgagcatcttagcctgtgtttcgattcttccacggatgatggtaaaaggcagcacaaaaagattcctttgatgggtcatcctgatatatgcgaacatccacatgcacaggaggctttcggagcattcatcaaagcgcaccatctgctgctaaa

SEQ ID NO: 119668 - DNA, 527 bp, Arabidopsis thaliana columbia
  unsure (1)..(527): unsure at all n locations
nnnnnnnnnnnnnnnnnnnnnnnnnnnnnnnnnnnnnnnnnnnnnnnnnnnnnnnnnnnnnnnnnnnnnnnnnnnnnnnnnnnccacgcgtccgcgcacgcgtncggagagaagacaacagaagggggnctttgtcttttagcattttttgcttcgagctaatatcagtgaagagaaaagatgggatgatgtttaacgaagaaggaggttgtgattcagagtccgatcttgtttcttcatctcctgatgggtttatcgtacggcgcagtgaaaccgaattagaaaggagtatgcgtttctaaaggagggagatttccgccatatgagttggaaggaaagcctcctaaccacggagagaggggatcccatgttgttactctgggacctgagaaaccgaaaaagacttggtggggcatcggaccggagtgaacctggtgtcccaaacatgggcgaatcctaaatacttcggggaaaagctttgccttaattgacgggggcactcagagggtaggggaccaagaatagcg

SEQ ID NO: 119669 - DNA, 513 bp, Arabidopsis thaliana columbia
  unsure (1)..(513): unsure at all n locations
agctannnnnnnnnnnnnnnnnnnnnnnnnnnnnnnnnnnnnnnnnnnnnnnnnnnnnnnnnnnnnnnnnnnccacgcgtccgtacggctgagaagacgacagaaggggagcgaggaacaggtgtttgacctcacggaagtgaagccgcatgagtttgttcgatacgggttggggtgtttggagaaagtggcagcggaaggagatgaatgtgcaaaagaatgcanagcaaggttgaggagtatggttgcaggaggtgatggtactgttggttgggttcttggatgtcttggagagcttaataaagatggaaagtcgcaaattcctcctgttggagttattcctctcggtacagggaatgatctttcaaggagttttggttggggtggttcgtttccttttgcgtggagatctgctgttaaaagaacactccatcgcgcaagtatgggtccagttgctagacttgacagctggaagattntagtgtcaatgccatctggagaagtcgtagatcc

SEQ ID NO: 119670 - DNA, 511 bp, Arabidopsis thaliana columbia
  unsure (1)..(511): unsure at all n locations
nnnnnnnnnnnnnnnnnnnnnnnnnnnnnnnnnnnnnnnnnnnnnnnnnnnnnnnnnnnnnnnnnccacgcgtccgtgcggctgcgagaagacgacagaagggtacggctgcgagaagacgacagaaggatacggctgcgagaagacgacagaagggtacggctaagaagacgacagaagggtacggctgcgagaagacgacagaagggtacggctgcgagaatacgacagaggggtacggctgcgagaagacnacagaaggggcaggaagaaaggtcaaagttccaactttccttgtcccggctactcagaaggtgtggatggatgtgtatgctctcccggtacctggagcaggtggaaagacatgtgcgcagatctttgaagaagctggctgtgacacaccagccagccctagctgtggtgcttgccttggtggcccagcagacacctacgctcgcttgaatgaacctcaagtgtgtgtctcaacgacaaacaggaacttccccggtcg

SEQ ID NO: 119671 - DNA, 396 bp, Arabidopsis thaliana columbia
tacgactcactttagggaaagcacgtacgcctgcaggtaccggtccggaattcccgggttgacccacgcgtccgaccgctcgtacaaaacctcaaaaagacaccggatggagaccacgactaaggggtgcatttcgcatgaaccgacagggggagtcacgtgccataagacaacaggaagttacatatgaaaaaagactacagcaggattcccatactgtttatatgacggggagggatcgattctctatatacgacagaacgatacggatgtgaccagacaaaatacaggcactggctcaagaaggccacaaatgggtacagacagtgttaatacaacgaatgggttccgatgcaaaaaaaaaaataatagtggcggtttctacaagacgacgca

SEQ ID NO: 119672 - DNA, 507 bp, Arabidopsis thaliana columbia
  unsure (1)..(507): unsure at all n locations
nnnnnnnnnnnnnnnnnnnnnnnnnnnnnnnnnnnnnnnnnnnnnnnnnnnnnnnnnnnnnnnnnnnnnccacgcgtccgcccacgcgtccgtacggctgcgagaagacgacagaagggtacggctgcgagaagacgacagaagggtacggctgcgagaagacgacagaagggtacggctgcgagaagacgacagaagggtacggctgcgagaagacgacagaagggtacggctgcgagaagacgacagaagggtacggctgcgagaagacgacagaagggtacggctgcgagaagacgacagaagggtacggctgcgagaagacgacagaagggtacggctgcgagaagacgacagaaggatacggctgcgagaagacgacagaaggggacgactaaccgtagggtcaacgctctggagaatgtggtgaaaccaaagctggagaatacaatcagttacatcaagggagagcttgatgagcttgagagagaggatttcttcaggttg

SEQ ID NO: 119673 - DNA, 99 bp, Arabidopsis thaliana columbia
tcgtgaggtaccagcaacttattatagagtcttacatgcttcaacatatatactgcggaatagtgttgttgttagcacgagtcagccagacgctgctaa

SEQ ID NO: 119674 - DNA, 502 bp, Arabidopsis thaliana columbia
atacgactcactttagggaaagctcgtacgcctgcaggtaccggtccggaattcccgggtcgacccacgcgtccgtgcgggtgtaagaagacgagagacgggggaagataaaacacagctggagaggagaaaggaaactgctacaagagaaagactattgactctttgaaaagagagagaggaacgatggaacatatgcactatctctacttagacaaaatttttttatcgagtggggcagataaagcgtcctggagttgaagacaatgaattctccaaggaccccaggtgcccccagctacctcctttggctacctggggacctccctcccgacaaggcaaagattggacgtgatgattttcctttaagggacgggtctcccccccacttcaaaatgaataccgggggcgcttagtatggggaactcgccaagggctacactataaaatggtgcccaaactttggccccaaggggggcttttacgttttaatcaagggtga

SEQ ID NO: 119675 - DNA, 472 bp, Arabidopsis thaliana columbia
  unsure (1)..(472): unsure at all n locations
nnnnnnnnnnnnnnnnnnnnnnnnnnnnnnnnnnnnnnnnnnnnnnnnnnnnnnnnnnnnnnnnnnnnnnnnnnccacgcgtccgtgcgggtgcgagaagacgacagaagggggcaacgcaaaatacactagcggtatgacgacggtcctttgacagaaacttcatcagcgctcaatttgacgagtgcctatttacttagctccgacgcagaccacgtgtcggcggtattcagggaggggtgggggtcctcagattgaaaaatttccaaagaaatggataagatgtccaaaggatgggttccgttgaacggcactagtagcagcgaagatcagcggcagcttccggtgcaaacaggaggaacgtctctgctaactgaatggaattgttacgcagcattatgagattttgaagaagactcgcggactttaggcttcgatttcaaagccggcggtagatctgtccacgcactgt

SEQ ID NO: 119676 - DNA, 505 bp, Arabidopsis thaliana columbia
  unsure (1)..(505): unsure at all n locations
nnnnnnnnnnnnnnnnnnnnnnnnnnnnnnnnnnnnnnnnnnnnnnnnnnnnnnnnnnnnnnnnnnnnnnnnnnnnnnnnnnnccacgcgtccgtacggctgcgagaagacaacagaaggggcgcccagatcaaaaacaacaatgcaactctcactggttcaagtctcttcagtgtccaacttcagatcccaatcaacgattcctactctcttcaactcagacccatcttggttacttcttcaaaaggcgaggtttcctgggcccaagttaaccctccatcgaatttttcgttatccgaagaaaatctcaaatggctctactcgtgcttcactgcttgagacccctatcttatgggctggtcggatttgtgtcttctacgctctcatgaaagctggctttgctggatccaagtctaaccctatcggttctggcttggatactggcggtgttaatgtcaaaaaccatgatgaggctactacctgatatcgagcgtgggacatgatc

SEQ ID NO: 119677 - DNA, 495 bp, Arabidopsis thaliana columbia
  unsure (1)..(495): unsure at all n locations
aatccgactcactttagggaaagctcgtacgcctgcaggtaccggtccggaattcccgggtcgacccacgcgtccgtgcggctgtgagaagagacagaagggtacggctgctagaagacaacagaagggttctgctgtgataagactacagaagggtactgctgcgagaagactacagaagggtacggctgttagaagacgacagaaggggcacatccatcacttatgggggggaacacaaatcacgataaaatggcggaaaaacaagctccgactgcaatgggaacatcggctgtggataagcagcctgagacgactacagaggctgaatcaccaagtttgacgacaaagaggatggtgggtgcaattgataagagcttttcttgggacctgtagaaattactgggctaattacgcgaaatgtgccatgcttatttgtaagccacctaaggagatgactaantaattttggagctggttacatggttggggtta

SEQ ID NO: 119678 - DNA, 451 bp, Arabidopsis thaliana columbia
  unsure (1)..(451): unsure at all n locations
gatttccnnnnnnnnnnnnnnnnnnnnnnnnnnnnnnnnnnnnnnnnnnnnnnnnnnnnnnnnnnnnnnnnnnnnnccacgcgtccgtccacgcgtgcgaccacgcgtacagccacgcgtgcgtacggttgcgagaagactacataaggggatgtttcttatggatcttgatgaggggattgcaagggccaacaactcaaggtacggtttaactgctgtagtgttcacacagaatctttgcaggggacaccggctgatgcgagcactcagagttgggactggttggatcaactggtttgatgtacttgatgcatcaattccatttggagggtataagatgaggggcattggtagagagaaagggatctacagtctcaacaattacttgcaaggcaaggctgggtggttcttcccctcaagaaccctgcctgggttaaaacataccaggggg

SEQ ID NO: 119679 - DNA, 120 bp, Arabidopsis thaliana columbia
gaatccgctctatacatattgggagctggtccctgcaggtacgccgaattcgtgacacgcgacggtgaaacaaagacggcgtgtacgagtctcacttatctagagtagtgacttcaacag

SEQ ID NO: 119680 - DNA, 524 bp, Arabidopsis thaliana columbia
  unsure (1)..(524): unsure at all n locations
acctaagcttggatcctctagagcggcctgccctttgggtttttttcttttaacataaaaccantcccttcnttatgggaggaaaataaacccctattattttcggataaacaaaagtaaatcacaaattttcattccaaaaagggattttttaaaattaaataaatccccagggacacaaacaaaaaatcccccaatttgttttttatccggggggcgcgccccttaaatggtcagaattccctaaaaaaaaaccctatcccaaaaccccaaattttttatttaccccccccctttatcattaataagccgaacctctcttaattctaaagccccttttataacccttccccgggggggggaaaacctttttaagaaaaaatccggcttccgcaatttcttaaaaaaaaaaaaaaaacacctttttggggggccccaacgaataaacacaaaaacggggggtttttttcttaaaaaaaaagaattttgccggggtgtataaaaatcttttcaccataaaaaaa

SEQ ID NO: 119681 - DNA, 589 bp, Arabidopsis thaliana columbia
  unsure (1)..(589): unsure at all n locations
ccttcctccccccccccctaacttnatcccctaacccccccccttttgtttttttccctaaaaaaccccctntttttaaaattatcctccccccctcacaattttaaggcacctcttggcccccattcttancccttttcttttttctaaatccttttttaaccccaaccccccacctaaaaccccttcccgccccctagggccctcaaattttttccccccttttcttttccaaggtcgttgggggcaccactttttttgggatcccncccccacaacgacgcaaacccccctcccccccccggngttttntttttccccccccctcntcccaaacccccccccccccaaagttgaaatcctctcttcccctccttttccccccctttccccctcccccaaaactccctctccccttttttcccccaaacccgccgccttttccctctcctcccacccctctttttctccccgcctacctccctccctttcccccttctacaccacaacaagatcttttcttcccccacgcgttttttccccccccccacctcccccctacccgcacctgacctcaaaccaacacccc

SEQ ID NO: 119682 - DNA, 492 bp, Arabidopsis thaliana columbia
ggggcccttttgttcccccccaggtctcgggtgctttttttttggaaaaagttgttttaacacaaattttaacccccaaagccgaaaaggggtttttaaaaaacccctttgcccaagttgtggggctggcactttttttggggagagggggcccccatacgggggggcgggaaaagaaaagaaatcccctccctccttaaaagggaagagggtttgttcccccccctcggttccccccccggacttgagaggagaggtttaagttccccgccccccctcaaaattctgccgcgcgcgcaaggacatccaaatgtgcgcacagaggaggggggtctcccgcccccctctcgattatcgcgcgaagcagaccacgcggagaacccgtggcgcgcccgcttgaagaaaggggggtgcgggtctcccatacagaatgcccccagacgcccctggggcagctcgagccggccggcccgggacgctaaacgcccacgc

SEQ ID NO: 119683 - DNA, 350 bp, Arabidopsis thaliana columbia
  unsure (1)..(350): unsure at all n locations
acgtcgcctgcacgcgtacgtaagcttggatcctctagagcgtccgccctttgggttttgtttttcaaaaaaaaacaaataatattttatttctttttcgtcttcataaggctatttttccttnccctttttgggcggggcggggaaaaaaaaaacaaaaaaaccgggagttcccgaaccctaaagtgcggaatcaaaaaaaaataaccccatttccccgggagtnggaaattaatcttctaaggatcctaataaaaaaagggaccacccggtcctcttttgaatttcccccccccaaaaaaccttttacaaaatcttttgctgcgccgttgttcctttttttttttttc

SEQ ID NO: 119684 - DNA, 523 bp, Arabidopsis thaliana columbia
  unsure (1)..(523): unsure at all n locations
aannnnnnnnnnnnnnnnnnnnnnnnnnnnnnnnnnnnnnnnnnnnnnnnnnnnnnnnnnnnnnnnnnnnnnnnnnnnnctttgtgtttttttttttttatcaaaaatattcttttagttatctcattcacttatgaataggaactttcaatctctatttatgtttacaaaattattctttgcataggcgcgggcgatatatctatgcctagcctatacatatgttggttttatttacaagaagagggggggctttaattattcgctaggtgttaaaatattacggcattgtgggagttattggctttcaagtttactttgcttgcatcttccccgaagaggagggaaaagagggaagaggaaaaacaccaanttcccaccactcctctgggctggcaactaaacgaaggggggtgggactggtcccctttggggaagggccgcttaatctggcctggggggggggggggccaataaaaaaaacccttccttttgtttccacccacaatgggggggggggggg

SEQ ID NO: 119685 - DNA, 500 bp, Arabidopsis thaliana columbia
  unsure (1)..(500): unsure at all n locations
acgtccatgccgcgtacgtaagcttggatcctctagagcggcctccctttgtgttttttttttaataaataaatccatattttcatgaaaaaaagtgttaccatctctgtttcattctgcatcaagacaaactctacgatccaatatatgcacataagatcaaactcccctacgatatttctcctaatccggagaagtaaaaatattattgggagtggcgccacttggacattggttaaaacaaaaattgccccccgganatgccacttgttttgctcttctgggggaggcattttttttaacccccgccttggggaattcacttacccaaaaaccttcccccgtttttttttgcctaaaaacccggcgattggggggggttttcctgcccactctattgcccccacctttattctttgtttccacccagcccctccaaaattcctctccggcccttgggtggttccgcttttcctaaaaaaaaaacctccacggtttga

SEQ ID NO: 119686 - DNA, 519 bp, Arabidopsis thaliana columbia
  unsure (1)..(519): unsure at all n locations
nnnnnnnnnnnnnnnnnnnnnnnnnnnnnnnnnnnnnnnnnnnnnnnnnnnnnnnnnnnnnnnnnnnnnnnnnnnnnnnncttttgttttttttttttttttgcaatgatggaaatggtctattcctgcaagagttttggtacattcctccgaaatgctcgatttaaaaccaaaaacaatcaaaaaatgtcagagaaaaagcaagttttggtaacaaggatttatctacgcattgataatatcgggagtggggttactcatattaacaccaaatcatattgtttctggtcaaagcttaaactttttcaaaacctcccattttacattggccttagaggcaggggagtgggccccaacaggacctttgtttccttatggatggagcctaagaatgattttcttctccttaagttcttaaaggggggggaaaaaaaacccatgcggatttaacttataacttggaaaaacaaccttctttctttttaaggggggggagaagcgtttttttttttggggggg

SEQ ID NO: 119687 - DNA, 521 bp, Arabidopsis thaliana columbia
  unsure (1)..(521): unsure at all n locations
nnnnnnnnnnnnnnnnnnnnnnnnnnnnnnnnnnnnnnnnnnnnnnnnnnnnnnnnnnnnnnnnnnnnnnnnnnnnnnnnnnncttttgtttttttttttttaaccacaaaaagttttcaataagctacaaatttagacacgcaagccgatgcagtcattagtacatatatttattgcaagtgattacatggcaacccaaacttcaaaaacagtggggttgctccatttaataacctgaattgcctcctgagggtagttgatccccttcaggggatataatacataggatttggaagtttaaagatctttctgacattgcaaaacccaacaaatacttcatggggcacctgaatggcctttgatcctatacctttttttcaccatttccttttttttttttaacttggacatggggccgtgtttttttccgatcatccaacgattctaaaataggcttgccccacttaatggaacccggctttggccaggtttttcaaagggaaaaccggggggttttttt

SEQ ID NO: 119688 - DNA, 528 bp, Arabidopsis thaliana columbia
  unsure (1)..(528): unsure at all n locations
nnnnnnnnnnnnnnnnnnnnnnnnnnnnnnnnnnnnnnnnnnnnnnnnnnnnnnnnnnnnnnnnnnnnnnnnnnnnnctttttttttttttttttttttaccataatgtgttcttcttttcataaaaaaaagtcgagtttaaaaacaattaaacaactaatctgataaaccttaagaaacaaacacaccataatagataattttatagatatgatgatatttcattcccacgtaccatagatcggggggatgggcacaccagactgctccaaggtaagtttagattcatactccaatgtctttgattcacctggaatcgcttgggttacctaaaatggctttttcctctctgattcctcaaagctgggaatagccaaaatgaccagagaagcttgatttgtttctcgttttgagagaaattcctctgggagtcttttgcccgttaggaaaacggctccccaacttttggtttgggaggctggcgatcccccttccttttgggttcttcccggagggggtgggaaatgg

SEQ ID NO: 119689 - DNA, 436 bp, Arabidopsis thaliana columbia
aggtgcactatagaagactatgacgtcgcatgcacgcgtacgtaagcttggatcctctagagcgggcgcccttttgttttttttttaatcaaaaggtttggatactctgaaaacaataaaagtacataaacaaaatccatgaaacacaatctagcaggacaggtaagagcttcacacgtttgaattagaacacacagaccccaaaagaacaacaacagagagaggagatttcctcgggggggaaggcccattagagcagcgctgatacataaaaaacagcttctgcaggaccccgcatgaacatatgggttggcttcctgtttccactctatctccaagggcccgcccggaaaaacccaccgggcttttcctgtgcgctcgaccttaaaggactggtgaaacaaccagaacacaagctccaatttcaacaggcaaa

SEQ ID NO: 119690 - DNA, 365 bp, Arabidopsis thaliana columbia
  unsure (1)..(365): unsure at all n locations
ggtgcactatanaagactatgacgtcgcatgcacgcgtacgtaagcttggatcctctagagcgggcgccctntgggtttggggtttttttttaaaatnttnnngggtacacaatatacaatataattcaaaaattacctagtttttgtgttgaacagttacattatttatctgtcatgtanntgttgggatatggatgggcgggtatgttcaggaaatacctantgnactgggcgtggggtggggngccctgcaaatcttgttaaaaaatctctctttaggttcgggtttttttctccaaatcattcacttttgaaactggcaccaattttactttttaatggattacacccttacttgaaaggg

SEQ ID NO: 119691 - DNA, 267 bp, Arabidopsis thaliana columbia
taggtcacactatagaagatcttgacgtcgcctgcacgcgtacgtaagcttggatcctctagagcggccgccctttttgttttttttttttaaaacaaataaaccagaccatgtgttgcctattgccagggtagactggccggtcaggatttcaaaaactggtatagtaaacaattctggacggaggcgaaacattaacaaagaactaaaaagacttgtccttgacactctattagggggaggaaaaaacagtctatgcgacacgta

SEQ ID NO: 119692 - DNA, 562 bp, Arabidopsis thaliana columbia
  unsure (1)..(562): unsure at all n locations
ttgaattatgtgacctatacaagagcttgacgtcgcatgcacgcgtacgtaagcttggatcctctagagcggccgcccttggggggnggggggcttttaattaaataattccctccttttccctttataaggggggatccttccacaaaaaacaaataaataatcccacactgacgatctttttaagggcaacttttctaactggtcttgcgtgggaaatggtccaatgaagccaattttcccttgggtgaggggcccccctaaagaggggcttnaaaaaaaagaaaaaaaaaagtttcgagtgctctttttgccccctcttcaaaagagaaaacgggtggaacccccggggggccccctttttacccccaacgggaagaacggtttttttaaaaaaaggggcttttaaagtaaaaaaggggcggggtaaggcccaggctttgtaatatttggattttttgttcccccgggttttttttccacattttaattgtttgtggtgcggagcctcccggggttttcccgaggaaaaacctttcccttaaaatttcttggggggggg

SEQ ID NO: 119693 - DNA, 503 bp, Arabidopsis thaliana columbia
  unsure (1)..(503): unsure at all n locations
gtcgcatgcacgcgtaccgtgagctggatcctctagagcggccgcccttggggttgggcttttttaattaaatttttttttttttnnntcccctanngccaaggnnncctnncccntttaaacctcaaaaacaaggggggggcccccccggcgaaacagaaaaaatctcggggggctttacgggccccccagggggaggacccttttttgaggaaagaaggggaccntatttctgtgtttcccaaaaagataaaccccccttctntcctttttctttttttcccccccttttaaaaaacantgggggttgtgttggaccctaggcgggggtggctttcctttttttccctgggagaaaaaaaaaccaccccgaggaccaccgccggcgtgggtcgggggtatttgtggccagagaaccacaccccccccgcggggggggaaaaaaaaaagcgcttgaaaacactaccaaccgagtggtttctcccaagataaattgcgggggg

SEQ ID NO: 119694 - DNA, 357 bp, Arabidopsis thaliana columbia
  unsure (1)..(357): unsure at all n locations
nnnnnnnnnnnnnnnnnnnnnnnnnnnnnnnnnnnnnnnnnnnnnnnnnnnnnnnnnnnnnnnnnnnnnncttnggggttggtttttttttttttttttttttttttnnaacaagaacaaatcgggtctgttatatatatgttttttatacataacatgtgacgtttacaattttcttaaaacacatccgaggaagatgtttgttatgtgcctgaaaaagagctaggtgttttgcttggggagatgatnaacgcgcaaacaccanaaagagagaaaacggggccccaagttttctctgtatacatctccatggcgtgtgttaacgacaacctggtcctgttctctgcccagttcctt

SEQ ID NO: 119695 - DNA, 489 bp, Arabidopsis thaliana columbia
  unsure (1)..(489): unsure at all n locations
tgtnnnnnnnnnnnnnnnnnnnnnnnnnnnnnnnnnnnnnnnnnnnnnnnnnnnnnnnnnnnnnnnnnnnnnnnnnctttttttttttttttttatgaacaaagtcgtcatttattagaaggaaatgaaagatcaccactaaaataatctcttgagtgaacaagctgatcacaaccgtatatataattggctaaaaataactatatttgtttgaaacgcacttggagctagaatacacatgatgctaagtgaagaacgaaaactatacaacgcagtcacgtagatgaaaaactgatatatgtacgtttcaatttatttgaaactcacgaaacatcatgatataggacatacatcatttttagttgtgggagtgaaatggaatatgatttcccattccttaatccccgttcccgtaaggtcgtttcaaaaaatcccgtttgtccacttttaggcgccggtgagagagttttctattagacctcaccgcag

SEQ ID NO: 119696 - DNA, 472 bp, Arabidopsis thaliana columbia
  unsure (1)..(472): unsure at all n locations
tgacctatagaagactttgacgtcgcatgcacgcgtacgtaagcttggatcctctagagcggcctgccnnnnggggnngggttttttttttttttttttttttttnnccaaacaagagaatttatcaaaagaaaaattcaaaacaacaaaatgttgcaatttcgagaaattccaaaaggaattaaagtggaaagagaaaggggggggagnnnctcttctcttcttataacccggcggtgggcttggataacaagtttaaaaaaggagaaataaattttaacactttacagccctagggcttgggattcccatgtttgccaagcggggaaacaccctcactttaggactagcccttggaaatggaattggccccaaaaaattacctggtaaaaccctaggaaacagactgatttgctccaggggttgggcttgtgacctccattggataattttttaaaaccccaattttttg

SEQ ID NO: 119697 - DNA, 323 bp, Arabidopsis thaliana columbia
  unsure (1)..(323): unsure at all n locations
atgacgtcgcatgcacgcgtacgtaagcttggatcctctagagcggccgcccttttttttttttttttttgttagtcaattcatcgctacatagacattcttaataagcaacaaatgaactcgatggttaaatcaatatatcataggtccccccaaaaaaaaaagagaaattattcaaaacaaaaaacatataaagagaagaagaangttatattaggggggaacgaacaaaggaatgaaaccacaaaaaaaacaagaagtttgagtttctctcaccctttgatatgcaagttgttcattgggtcatctacattttctgcatc

SEQ ID NO: 119698 - DNA, 512 bp, Arabidopsis thaliana columbia
  unsure (1)..(512): unsure at all n locations
ggtgnnnnnnnnnnnnnnnnnnnnnnnnnnnnnnnnnnnnnnnnnnnnnnnnnnnnnnnnnnnnnnnnncttngggggttggttttttttttttttttttttttttnttnttttttttaacacggactaaagtgctttattaaacctgctaaggttatgtaaatgggaaattttgaacaggcgattcgagcaacggaaataaaaaaaaacttanttttctcaaaccttattccgggggggagaagttaaaagatatgatttgggaaaaaaaaaactcccttcaaatttaataaagctgcatggcccctaaaccatgaaaactttttttctaaagattcatccccccaaaaaggttttatcccctttttcaaaaaaaataaagaccgggtttttgaaccccttctttaacacgcccctttatttgggcccctgaccctaaaaaaatcctaagggttggggggaacctttaaaaagaacccccccattttgcgggggaggggaaaattctttcc

SEQ ID NO: 119699 - DNA, 474 bp, Arabidopsis thaliana columbia
  unsure (1)..(474): unsure at all n locations
atgatttggtgaccttagaagactatgacgtcgcatgcacgcgtacgtaagcttggatcctctagagcggccgcccttgggtnntggggtttttattttaaatttttttnnttnnngnacaaaaaataattcaaattgtgtttagttaaatcaggggggctttaaaagagacactcccaaaaccatccaaaaaattaaaaatccaatttttgttaacaaaaaaaaaaaaaaattggtttcggggggcattttatatctggtaggctctaagaaaacctttttcttttcaggcctggagaagaaaaacaattttgtctgattgggggaaaaaaacaagagggggttttagtccaacccgatcgggggggatcggatgggggggtttggcttaagagatatcccctttcctgaaaagaggggatttttggctcccccttgggacaatggtttaaaacacatttttaattttgcggg

SEQ ID NO: 119700 - DNA, 480 bp, Arabidopsis thaliana columbia
  unsure (1)..(480): unsure at all n locations
nnnnnnnnnnnnnnnnnnnnnnnnnnnnnnnnnnnnnnnnnnnnnnnnnnnnnnnnnnnnnnnnnnnnnnnnnnnnnnnnncttnggggtttgttttttttttttttttttttttttttttttttttttttttttttttttttttgaaaggggaaactatcattcttcctatcaaaagttaacagatccaacaaacctttctttgggataacaggccaaaatttaatgaaattaaacaaattttgccctggggggaataagcctcaaaaaacccaaaataaataaaagcttttttaagttttgcacctgagcttctgcattttttttttcttgattgggtgcggccttaattaataaaacttttttgacttaacaagggtaatctaaattttatttttttgaaagggagttcttttgcataatccttaaaacaacgggtggaggtttgttttttttttaaaaaaaaaaacatttggtttt

SEQ ID NO: 119701 - DNA, 518 bp, Arabidopsis thaliana columbia
  unsure (1)..(518): unsure at all n locations
gtcgcatgcacgcgtacgtaaagctggatcctctagagcgggcgcccccnggggnaggagctttttatttaaatttttttttttnttttgtgggaattggctttttgtggggggaagggggttgcattgngggacaggaaagggggcccccggaaagcgagaggccgccacccacaacaccgaaaaaggagaaaggaggtttttttttttggggagaaggggcccccccacggcgggggncaaaaaaaacaaaattggttctttgggggggtgtgccttccgcccccccttcattttttctaaaagaaaagggaggacgtgcccgcgctatacaagaggggggggagggtgggtgttttttttttctgaatacaagaggggagaggcgggggggataaaataaaaacctctcaaaaagaagagagcactataagagcacacagtggttctcctgcccccaaaaaaaaaaaagagaaccccgccccccctcctgtccgcaaaagagagaaaaaaaaata

SEQ ID NO: 119702 - DNA, 513 bp, Arabidopsis thaliana columbia
  unsure (1)..(513): unsure at all n locations
nnnnnnnnnnnnnnnnnnnnnnnnnnnnnnnnnnnnnnnnnnnnnnnnnnnnnnnnnnnnnnnnnnnnnncttnggtttttttttttaatttgatatttttttgctttggggattcaaatcaaaccattattagtgaagggataagaaacatggaaaccccaaaaatacataacaatgattgtgtcacaattttctgtgtttaagaagatatgtgtctcaaatttgataattcaagggggggcggantaccaacaacaaaacccaacttaaaaccctttcaatttccttattcttaaactaaaagtaatcttccccaacaacttttttttcttgatcaagattcccaccttttcctttgaaaaaaaaatgtttctgcgaaacctcaccatccttcttaaaaaccctttccttaaaagaaatttatggaagataaaataatttttttatcccggggatattttttaaaccaagaggggtgatgccccccaggaattattccaaacttttttatg

SEQ ID NO: 119703 - DNA, 506 bp, Arabidopsis thaliana columbia
  unsure (1)..(506): unsure at all n locations
nnnnnnnnnnnnnnnnnnnnnnnnnnnnnnnnnnnnnnnnnnnnnnnnnnnnnnnnnnnnnnnncttngggtttggtttttttttttttttttttttttttttttttttttttttttaaaaaccccttttggtttttagaacacaatctgggggtttggttcttttcaggtggcccaatttcaaaatttttaaacccttagcgagggggggggtgcaatcttagtttaagggggggggggggggttttcaggagcccttaattttttttgggtcaacatgaaaacaagatttgactttttttgggttgggaannnnnnnnnaaaacaaaaaaacctccccaaaaaacccccccctaagagggggggggtaaaaccaaggcccagggcggggacgcgggggccatagcccccaaccccccgcgggaagacggggggggggaggcccccacgacccggaaacaaggggcccctcttgggtggggggggggggggggccccccggggaa

SEQ ID NO: 119704 - DNA, 488 bp, Arabidopsis thaliana columbia
  unsure (1)..(488): unsure at all n locations
nnnnnnnnnnnnnnnnnnnnnnnnnnnnnnnnnnnnnnnnnnnnnnnnnnnnnnnnnnnnnnnnnnnnnnnnnnnnnncttnngggnttggtgtttttttttttattttttttttttttttnnnnnnagaaaaaaaacaggccttggttgatagttaacaaattgaacttacggttgattaaaaaaaaaattttgataaggttttttttccttacacactttaatatgcctggataaaaaccgagtggaggactactttttctcctcccacccctaaaaaattgtttttgccccccctcgtttttttttggcccattgggggggagaggggaaaaaaaaactaaaaatattttcttttttgtccacctttttaaaggaagggtttgaacccatgctccctggacaattaaccaagggccattttcccacccccccccccgttatcaattgcgttttccatcaccggcccttttttttttttttttttt

SEQ ID NO: 119705 - DNA, 487 bp, Arabidopsis thaliana columbia
  unsure (1)..(487): unsure at all n locations
nnnnnnnnnnnnnnnnnnnnnnnnnnnnnnnnnnnnnnnnnnnnnnnnnnnnnnnnnnnnnnnnnnnnnnnnnnntcccttttgttttttttttcgtgaaaaggtaattaatgatgatattaattcattatatggttataaacttgataaagttaagcaaatagaaaatctctcatgggatatgggtttttcttttttttctttncgctaagaatgttacgtcagggacaataccaatctcctgtggagcagcaggacaatcagccaatggagtctaaaccatgaacccgagagggttaacaatacgtgtcctcgggggagacaattccgtctttcgccgttaaactgatcttagcggctttacttaagaaacctctgtcctgaactcactgcaacccattgctggtgattggaaccaaaacaagctcgcaaactttttcctggggggcaccgggtcctttcctttttgaacctccctgtttggccg

SEQ ID NO: 119706 - DNA, 525 bp, Arabidopsis thaliana columbia
  unsure (1)..(525): unsure at all n locations
nnnnnnnnnnnnnnnnnnnnnnnnnnnnnnnnnnnnnnnnnnnnnnnnnnnnnnnnnnnnnnnnnnnnnnnnnnnnnnnnnnnctttggggtggggtttttttatttaaatttttttttttttttttttttttttttaaaaaaaacttttaagccccaaagcaagtttttaataacttcgggggtgagagtttaaataactaaaaaacagagacctttttaaaaagcctctctaaggggtttactcttggtgttgtggggaaactactaagggggggaaccaaaatagaaaaaactctccctaagagatttacccacaaccaaaaggcaacagaaactttatcaggcttttagctttacatgggggaaaacaaaaaaaccaaaatttttaaacaaacattttttacttggttgggggggccaaaatttttataaaccctggccctccgggtaagcatttgatggccgggaataacccgggaaacaaaccggggtttttgggggcccccctttttggaaaaaacaa

SEQ ID NO: 119707 - DNA, 529 bp, Arabidopsis thaliana columbia
  unsure (1)..(529): unsure at all n locations
atgaannnnnnnnnnnnnnnnnnnnnnnnnnnnnnnnnnnnnnnnnnnnnnnnnnnnnnnnnnnnnnnnnnnnnnnnnctttttttttttttttgaggaaaaatgtttacntatatatacgtactcatttctagagctatcatatattcatatatatgtgcgaaaattatattaattattagctacacgtaaattacttaccctcgattattattaaccctcaactatattattatcttgatcggggggggcaatgattctcctttagacctgggcaagggatccagatccaggacagggccatttaaccaactcctcaatcatctggatggccatttgatcattttcctggacggttttcgttcgcactttcatcttattaggccaaatatccccgggggggcggggggtaacctttggcacctaattcaacaagcttgaccccgtttggacttgttttggacccgggcggtttttgccaaaagccgatggtgtgaacttgtcttttcaagggggaaaaaacttaaaa

SEQ ID NO: 119708 - DNA, 238 bp, Arabidopsis thaliana columbia
  unsure (1)..(238): unsure at all n locations
aatagtatcaccattcattattttaaaactcaatccttcaccattctatggggcaaaaccagaccaaaaagctaacaaacaatgaaccgggacaaatactacatggcgggagtcgtggggacctanntttcttatggagagggccattttaaaacattgttgtctcttaaagggtaaataggaggggcatcccctcaacatttttttaaaaggtcgggggaaataaaagcgtttgggg

SEQ ID NO: 119709 - DNA, 493 bp, Arabidopsis thaliana columbia
  unsure (1)..(493): unsure at all n locations
cccccccggggggggcccgactccaaaaacccttttgttgggcgttaaccctcccctcccccccccatttttttttcccccttcaccatttcctaacacccaaccacacttttttcttctttctggcgattgtttgtgggaaaccccctctggggggccnccctcaaatctatcctaaactccccccccccccccctttttntntccnnccgcccccctccctcttttgcgcccccccccccccccgcccctctttccccccctttttctccgccgcccctcccccccccctccccgccaaaccttcccttcccccccctcggccctgccccaaaccgccttcctttttcctctcaaacctgttttgtttgggcgccctgtcctccctcctccttctcccgcgctccttccttttcccttttatgcccccgaccgccccccctcttctcttttctcccccccccccgccccgtccctcttctctcccgtctcc

SEQ ID NO: 119710 - DNA, 455 bp, Arabidopsis thaliana columbia
  unsure (1)..(455): unsure at all n locations
cccccccccncccccccccccccnncccccccccccccataaaaacacaccttttttcccccccaaccccccccnnaccccccccccccncccccaccccaaaaaaaaaaaacaacaccttttttttttcccaaaaaaattttcgtgggatgtggggcccccnccctctttgggcgtcaacaaaaaagcacccaactccctcccctcttttgtttgcgggggggtgggcccccccttttttnccataacccttttttggngccccttcttgtgaatttttctccaccggggattctcctcccacaccaataaaaaaaaacacccagcgcgcggccctaaaaaatttttcgcgggggggcgcgtctttttctcttcttcaaaaatgtcccggcctattttcgcccgcctgccgttcgaaagcggcggagcatggtgtgtggggggggcggtttcta

SEQ ID NO: 119711 - DNA, 530 bp, Arabidopsis thaliana columbia
taggtacacacttagaagactatgacgtcgcctgcacgcgtacgtaagcttggatcctctagagcggccgccctttgggttggggtttttttttttttttttttttttttttaaaaaaaaaacagttcctgaacttcttggttctgtggcttcattttgggaatattttgtttgtacagttggctccaaaatgaatctggctcattttagtaactcacaggcccatgtttttttttgggggtttccccagaatcggatggggatcctaggtggggagtttttatccccgaggggcttttttttttgttggggcaaaaaagcccgccaggaaaaacttctttttggattctccgggggcttcattttgtttaaataaaacccccttacccaagtacctttggaagctttaaagatgacccctttttagcgggtcttaaaccggtttgcggtgtttttttttccccagcttttattacctttttgacaaaaagtccccccccctgagggggggtttatttttgttgtatttg

SEQ ID NO: 119712 - DNA, 511 bp, Arabidopsis thaliana columbia
cttgcccgccgtcgttaagcatgggataccacgtataaattttcccgctagggagtgggggctattatatatattttcattaaaaaacacctttctgctattgaatgtctacactttctaacctatgtttcgtcttctacaaaacgtatattctgtatgctcgactcaagaacattttataagtttttaatggtatttacattgacttcaaaagagtataaacgatcactatttcttttctttttgggggggggggggggtgactttctattacatactaacattaagagggtcggtggttctggctgtcttgtgaaaaaaaaatcttatctttttatgttttgtttagaatagagagtaaatgataaacagcataataccaacgtacttccacacccctattcttgctaggattttctgctctatactcgtcgtgtatgatattacctccagccgagaataataacaaaacacagatatgatccaatttatcgttaataaaacaaaacag

SEQ ID NO: 119713 - DNA, 544 bp, Arabidopsis thaliana columbia
gacgtcgcctgcacgcctacctaagcttggatcctctagagcggccgcccttggggttaggccttttttatttttttttttttttttttttttcgaaaaaaaggttctttttttctctaaacctcttgccctcttcaacccccaaaagagaaaaaagaggtttttacacaaaactatttcccccctccttcccccccacaaaaacacctttttttggaagaagagttttttttttttgttcttttaaaaaaaaaaaaaggggggtctttttttttttcttgtacccccccaccccttttttggaaggagatcacaatgttttttctttagtaccctccattttaacccccccgcccctctcccaggcctctcctttttttttttatgagaaagggtcgtttaccttcccccccgccctcaaacactagctcgcgtcgtactatcaagaaaacaaatttcttgtccgccccacacacacccacaccactgtcgcactttagatccttctggccctcccctcgtgctcttcttcaataagaaaaac

SEQ ID NO: 119714 - DNA, 530 bp, Arabidopsis thaliana columbia
  unsure (1)..(530): unsure at all n locations
aactccggaaaggcacttgtcagcagggctggggttccactgaggggggggggaagcttatattggagtaccacactcctcaggaaatattttgatgggaacgttgggccctggcccccgccgctaccgttaaaagctcttgggggatacccttcttaaaaaagcggggggcccgcccccctttttgtgtggttttttgggggcttttttaaaacccacaaaaatatgcgcccccaattttttcttngttggggcgcgcaaatctctctcttaagaaggggggggggacacacgcacaaagacaaaccantatatgctaccgacccgcgcggggggtgtcttnngtgcgcagtagagncgctcccctcaaaaaaaaagaagccatgtgcgtccccacgaaaaagaaacaaaaaaaaaaaaaattcttttctagttcttgatagaagaaatcctcttccttttttttattttttgggggggaggaaaaaaaaaaaaaacaaagaaagtgttgtgggcgggcgcgcgggcgc

SEQ ID NO: 119715 - DNA, 546 bp, Arabidopsis thaliana columbia
  unsure (1)..(546): unsure at all n locations
nnnnnnnnnnnnnnnnnnnnnnnnnnnnnnnnnnnnnnnnnnnnnnnnnnnnnnnnnnnnnnnnnnnnnnnnnncttggtttttgttttttttttttgattatcaagattccaatttctgagctaatcaacaccccgacacaacaaggaagggttctttaaagccttggatccgagggggcatgtggggggtttgtaatttggcgtaaccgtttgaaaaaaaacttttactctttttgggcggggggggggagggtttctttttacaaacttttggaaaaaatttttttttttagacccctaaaaggcacaccttgccctgaagggaaaaacccaatttttgtcgggttgggacacggtttttttaacacggaggggggagatggaacgagtccccttccacttggacagtgggggacacacaattttcaacttgggggggagggcggggtaaatcatgttgtttggcgctaaaagagggggggttggggggcctcccgttcggggggcggcttttctttgtgggaccaataaataaataacactg

SEQ ID NO: 119716 - DNA, 538 bp, Arabidopsis thaliana columbia
  unsure (1)..(538): unsure at all n locations
nnnnnnnnnnnnnnnnnnnnnnnnnnnnnnnnnnnnnnnnnnnnnnnnnnnnnnnnnnnnnnnnnnnnnnnnnncttgggggttggttttttttttttttttttttttttttttttttttttttttttgggccccgcttggagaagagcaccaaattttttttttagcccaaaattttccaaaggggcaacacccaatcggggaaaaaccccttcaaaacccctttttttttttccccggggggggtgttaaattaaaaaacggggtttgaaccaaggggggccctaaaccggggggtaaaaaaacttttttccaaggagagcttttttaagaggaaacttagcgaaacaggtttttgacctaaacaaaatttgggaaaccccctcgggggggggaccggggggcgttttagaggggcttttgggctaagtctaaacgtttgggggaaaaaaacgtttttttgaaagatggcggggggggaaaaaacaaggtgcggggaataaggggggggcctgagggatttacctcttacccgggt

SEQ ID NO: 119717 - DNA, 517 bp, Arabidopsis thaliana columbia
ttaggacgaccttagaagagtcttgacgtcgcatgcacgcgtacgtaagcttggatcctctagagcggccgcccttttttgttttttttacaatgaaaatcaacaaccctttgaaatagaaaagatccatacccctcttacttttgacaaaataagaataaggcacaccacttattttgacctattgattttgggttatttttggaaacaccatttaataggccttcaaattttttgttggggggcgaggcttaacttttaacaaatttggccaacaaaattttaaaattttctaaaaagcttcctttcctgggaaaattctttctgttggaggttttttttaaacttttttggattagcctttattggtttccctttttagtgaaaaaaaaactttttttcaaccctttttaaattcttttgtttggggaggaccccattttccaatattaatgcaacctttcacaaaacctcaatggttttttgcggtgggcctttttatccgcaaaaatggggt

SEQ ID NO: 119718 - DNA, 551 bp, Arabidopsis thaliana columbia
  unsure (1)..(551): unsure at all n locations
ttaggtcacactatagaagagtcttgacgtcgcctgcacgcgtacgtaagcttggatcctctanagcggccgctttttgttttttttttttttttttttttaaagggaacttgggaaatttatttggcctcaggaaaattcataccaaaccatccttttgaggacaatttttaatcaatctaaccagggggggggccctccacaagaatggaaaatgggggctttttttaacaaagggggggagggtttctttttcctgcccaacccctaaaaacttttgggccttgcaaagcccttcaggccaaaaaaattgagggaaaagcgggggggaaaaacccccaagttggaagaaaccttgaatgcccttggagggggagaagagggctcccccaaaggggtctttagggaaaacacctggcaagaacccaatttgtgccaattgaacccgtacccaagtctggggaaccatcccgagggaaactttcttttcgttgcgggaaactttccttttttggtccccggagttggggaccctctttttcacaccacca

SEQ ID NO: 119719 - DNA, 479 bp, Arabidopsis thaliana columbia
attaggtacacactatagaagattatgacgtcgcctgcacgcgtacgtaagcttggatcctctagagcggccgcttcgggggtgagggcctttttttctctcgttgggggaggggcccaaaggattacaaaaggctttttaatattatttgggggacccaaccggccaaaacgaatttaaaacattactgggggatattatattccctaaaagggattttatttaccagaataaagaggcccaaaaacctcccaaatttttttgtgggggggggccccaggggggtggcggaaaaaaacctttttaaatctgcatggaaattgggggtggggtaagagtatttttataacctccgctaaggggccccagaggcctataaagtttcgggggggccggtgttttctattgttcttaaaacacgggggggtaccacgcggcttctccgtggagaactctccaaaagcggggatattgttttg

SEQ ID NO: 119720 - DNA, 469 bp, Arabidopsis thaliana columbia
  unsure (1)..(469): unsure at all n locations
ggacnnnnnnnnnnnnnnnnnnnnnnnnnnnnnnnnnnnnnnnnnnnnnnnnnnnnnnnnnnnnnnnnnngctttggttttttttttttttttttttttaagagaaaaacaaccaccagggtgggtttgtatacatatataacttagggtgagaacaacttaaaacatcattgcacatcctaaaaaatttacagcgacagatgtgtttttggtgtgctcttttttattcactggagggggcatcatcactataacttacccaatctagttgggggttggcttccacacggaacatgtacccgtgggtcgtcttttccaaaagagggagagcgctcctttatagcctcccagtttggtgttttttgtaataaacctttaaccttctcactcttctggaaacccgtggaattgtggctaaccgggcaaccccggaaccccaatctatttttttttgggccccttcttttcc

SEQ ID NO: 119721 - DNA, 528 bp, Arabidopsis thaliana columbia
  unsure (1)..(528): unsure at all n locations
tttaggacacactatagaagcatcttgacgtcgcctgcacgcgtacgtaagcttggatcctctagagcggccgcttnggggggtgggcttttttttttttttttttaaatacaatattcaagtttattcaactgataaagtacatgcaggggggtaatactacacacaaagtcgccagcaaacaacatcaaacaaacaagcaaaaacatgaaaaaagctttggggatatttaattcttagggtgtctaattaaggagttggcttcctcgggttggcaacctcaatcacaaatgggtccttaacgtccacctttgaaacccgttccatggggggggtttacttaccccgaaaagatgacctaaattcccgccgggatggtgggggtttcaaccaaaacccccattttgtggggtttttttatacctcttaacatactaccaacaacttttttcggcaaatggggaggggaaaacgggagcgtggggcggttttgctgggcaacaaaaaaaaaaagttttcttttttttt

SEQ ID NO: 119722 - DNA, 530 bp, Arabidopsis thaliana columbia
  unsure (1)..(530): unsure at all n locations
atttaggaacacctctagaagactcttgacgtcgcctgcacgcgtacgtaagcttggatcctctagagcggccgcccnntggggtggggtcttttttttttttttggtcttaaatttcatatctttgacttcttcttatttagataacaaaactcaaataattcttgggaagtttacactttttttttcttgtttcttcatagagtaaggaaaaaagaaagtggataatccaccacccgagagggaaacctatccaaacttttttagagtacccccacaagatgattgatccatcaccaggcgtgtgctcctttagatcccccccaaatcacagggatggttgctagaatagccaggatggggccggcatgtctcctggtttctccctggaaacaattccccttccaacttggtgaggaccactcccccccccgaggggtttgttccaaggaaaattcccaccggggacggggccccccaaaacccttttcacaggagggagggcaacttttctagaaggttttttttaa

SEQ ID NO: 119723 - DNA, 569 bp, Arabidopsis thaliana columbia
  unsure (1)..(569): unsure at all n locations
gatggtggcggggggttacctcgcgggggggttcttannnnnnnnnnnnnnnnnnnnnnnnnnnnnnnnnnnnnnnnnnnnnnnnnnnnnnnnnnnnnnnnnnnnnnnnnnttttcgggggggggggttttttttttttttgtaaaacacaatcttactaaaaaccaaaatttttaacaaactgtcggaatcaagtagacaattgaggtttgaaactgatttactatccaaactgaatttgaaacaaaatttataagtctggaaaaaaattatttgggggggggaccgttttccctttactttttgaataactcttgctgcctttggaacacttgggagggtcttgggaagggcccttccctttttggggctggaactgtcttttggagcttcaaaagctttcccgaaggggggattaacaccttttagaatttgttgtggggtccacaactttactcttcttgtgtgagggggggtgccgagaaaattgttttttctgcgagaaagggtgttcgttgttgggggtgtgggtgaaccaaaaggggtgtttgattttggggggctgtttt

SEQ ID NO: 119724 - DNA, 505 bp, Arabidopsis thaliana columbia
tttatttctcgtccattctcttttgggcatcaacaccctctggggcaccattttttgtggaaaaaaacaaaaacccctttttttttttctttacacaggggggggtgttgaaattcccaaatctttttttttttgaaaggggttttttttctttgggataccccaacgcgggggggtggggttttgtacgccgaggggattcctctcttaagaaacaattttttggggcccggggactttttttgtggggggggttttaaccctttggttttttgaaaagggattcgcttctaataaacacttcgggggaatatttagggctggtaaaggcctcctcccatgtgggggggcccccccccagaaatcctgtgtggctcccccacaagtggcggcctctgggggggagaaatatgtgccggcccacaacttttttacgggcggttttctccccgcccccggtgggatccttgttttgtgtgtcttccagtggtcccaaaaactctgg

SEQ ID NO: 119725 - DNA, 518 bp, Arabidopsis thaliana columbia
  unsure (1)..(518): unsure at all n locations
nnnnnnnnnnnnnnnnnnnnnnnnnnnnnnnnnnnnnnnnnnnnnnnnnnnnnnnnnnnnnnnnntntttgggtttgtgtttttttttttttttggggattcatcaaattattatttttgatttagataagatacatgagcctaattttcatgacaagaaaacagaaacataacaaacaaagatggatgcgcgggtctcctgcccttgtggggttttttcgcaactcgaaccggggtggggttttttacaagcgaacccttttggggtgttttagcaacccgacccttttggtgtttttctcaaaaccggacggacggggtgggtaacccgggaaattccggaccgggacctgggagggctccccatctttttcttatagggaggtcgtaaataaagctggggacgaaaatggggcattagttgggtccggggaagaaattgttattcccataaaaatcccaaacaaaataagagggcggaaggttaaaaggggtaaacgcgggggggcgcctaaaga

SEQ ID NO: 119726 - DNA, 512 bp, Arabidopsis thaliana columbia
  unsure (1)..(512): unsure at all n locations
taggaacnnnnnnnnnnnnnnnnnnnnnnnnnnnnnnnnnnnnnnnnnnnnnnnnnnnnnnnnnnnnnnnnnntntttggtttttttttttttttttttttttaaacacaaaaggaaatacaagttttatttattatagcggccgttcgacaaactataaaatatgacaaacacctgcttaggtaaacaaagacagaagccacaaaccaaaccacaatgtaagaaacatgccctcacacacgcgttcaaagctagattgaggtcaaagaccaggtttgtttgggccttaaaaaaacctctggggggggggaggaaataaatgaagaccacttcttgtgccttttaaaagacattccaggatagggggattttttggcgtggggcgtataaccttaagaatttatttggggctaaaaagagaaagaaaacgcgtgcattaagggaaagttctttctagcacccttgttgtggaagatcccttgggggccgcctagggtctttttccattggcg

SEQ ID NO: 119727 - DNA, 533 bp, Arabidopsis thaliana columbia
  unsure (1)..(533): unsure at all n locations
taggagcnnnnnnnnnnnnnnnnnnnnnnnnnnnnnnnnnnnnnnnnnnnnnnnnnnnnnnnnnnnnnnnnnttttttggttggttttttttttttttagggggttggattgcttanccatttcatggtttgataaattacaagaggatgagaaacgaatttagaaactaatgcaattaacttctatcttttcatcacgtagactggtagggacaacaaaccattttctactaataacgagggcaactaaagaaagtcacaaaaattaaagaatcaattttgcggagatggcccaaaagcaatatttataagaaaccttgtttgggggggtttacaccaaaggctgctcctcctctttggactttggctcagcccacgaaattatccgaaccctttatttttttcaaaggtttttttaaacacaaaagtgtgtttttaactaaagaagtacccatggacctttggggtcgcccctgagatctctaacgggggatattggtggtggcttcccaggactcaaaagataaactttt

SEQ ID NO: 119728 - DNA, 520 bp, Arabidopsis thaliana columbia
taggtgcacactatagaagagtcttgacgtcgcatgcacgcgtacgtaagcttggatcctctagagcggccgcttttttggttttttttttttttttttttttttttttttttttttttttaaaaaaataccaaactcttccacattatttggatttcaaatattacaaaacttattttgtttgggggtcttttcaaaccggtggaacatgttgcttgaaatcttcctgggtttaacgacgaaaatcctcaataaatatgaaaattgcacaaacggtatcaaatctttttgtaaggggttggcccggatcagggggaaataatggtgagcttttttacccagtaaccaaggttgttaacaacaacatttggtcctgtggcccctaaggacctgaacttttgggcgggattttcaaacccccaaaaatccaaacccctttttttttaaaaaacggggctcaatttttttatttttttaaaaaacttaaggtctaaagttcacagcttttttgaaaacccaa

SEQ ID NO: 119729 - DNA, 527 bp, Arabidopsis thaliana columbia
  unsure (1)..(527): unsure at all n locations
annnnnnnnnnnnnnnnnnnnnnnnnnnnnnnnnnnnnnnnnnnnnnnnnnnnnnnnnnnnnnnnnnnnnnnnnntttttgggttgggtttttttttttttttttaggggatttaacattacatttaaacgcggaaacacacaaatccaaagacttatttgagaacacactaatgtacggtactttatggtgctgtgcggaagattagataagaaagaagtgacacacgacgatggatcagggggggaattatgcatgagaatgggtagatcaacaatggctggggcanaagcaacgacgacggaatccacgggagttacctccgacaaagccttggttggggtacacggtggcgcagtttgatgcactcccgcatgtcccctggaacctatggctctggaactcacaagggggggcctcaaaagggacgtggcccttcccatgggggaagaattttatgaacttgaggagaacgcggggaaacaaccggcttaagagctttttgggaaagaaaaaagaaagagtct

SEQ ID NO: 119730 - DNA, 513 bp, Arabidopsis thaliana columbia
tgacgtcgcctgcacgcgtacgtaagcttggatcctctagagcggccgctttgaggggggggggtggtttactttttttggagcttttttttctttctttttttgtttccccttctgtgggtttctagaagccgtacccttttggtcgtcttcttgcgaacgcgtgggtcaaccccggaaattccgggaccgggtctctgaaggggttacctttttgggggggggggggaacctaatttaaaagctgggccaaaaaaaaaggaacatacttgtttcccggggaagaaattgcacatcccttcacatttccaacaacaaatagcgaggcgggagagcttaaatgggtgaaagcttggggtgccccaaataaggggagtccaactaaattaaagggggggtgcggctcactgggcgtgttttccaggcgagaaaacctgttgcgccaagtttacattaataaaaagcgcgccaccggggggaggaagaggggtttatatgtttctggaaccccga

SEQ ID NO: 119731 - DNA, 476 bp, Arabidopsis thaliana columbia
ttgacgtcgcctgcacgcgtacgtaagcttggatcctctagagcggccgccttcggggggggggttttttttttttttttaacaaaccctaaaggtcctcctttcgtgaagggagaaacttatagaaataattttcacattccaccggattgcaaagcatctgaaacaaaacccgtggggagggactatgggggtttttggccataattttttggggggggggcccttttgggggggggggtttagaaaacttgtagggtttctggggcttttggtaaactccgttggggaggtaaatcatgctctctgtagtgacacaataacctccacgtggaaaaagcacctttgaaaaaaataaaccagctttggctatatctttgaacaataattcaaggaatctgggcaatttttgttaaaaaaatcctcttgggaaagaaaacctttcttcccctctttcccttcgccagacttttttg

SEQ ID NO: 119732 - DNA, 516 bp, Arabidopsis thaliana columbia
ttaggtgcaccttagaagattttgacgtcgcatgcacgcgtacgtaagcttggatcctctagagcggccgcctttggggtggggtcttttttttttttttacaagtttcgtttcttcatttgtggaaagagttctcaagcatattgcatgccttcacatgaaaaacaaacaacaatttaaggctgtgtttctataatatagggctgagctacacaacataacgattcactgaatggggggggcggaaaacgggaaaccgtatttttaaaaccttgagggattggattcttcataagcttttctcccggaaaaacctggggattagtttggtgacttttgggaaacccccctttttttttcacaaaaaaaaaaattgggggctggcttgtggggttgttcctggcttttttttaaaaaaggacgggcgtgggaaccatgtttgatgtgtgggagacctgcgccacttgtttttccgagaattccgccgcgcgtttttggaaaaggcgaggggcgccc

SEQ ID NO: 119733 - DNA, 522 bp, Arabidopsis thaliana columbia
  unsure (1)..(522): unsure at all n locations
tgacgtcgcctgcacgcgtacgtaagcttggatcctctagagcggccgctnttttgggttgttttttttttttttttttaccaacattcttatacattaaaaagtaaaggtttgatgaatcaaatttttttttacacaagaagtgctacaacatacacacaaaaacatttcttaggaagttgtaactttattgggcccataaaaattgttctataaggggggaaatttatcaccacccaccccagggcggattacctcataagcctgtttgggttttggttttctaaacccggggtgggaaatatccctgtgatgaaacagctgaaatacaagcctttttcacccataagataacctttgtgttaatgcccttcccttttgggaagcttccctttttccaagtaacccgtttccggttgtaaaaacccgaaaaccgatgaattttctgcccccaatttcgaatgtttaagggatgaaaccagtaatttacccgggttttggttaaattcaaggtttgggacc

SEQ ID NO: 119734 - DNA, 485 bp, Arabidopsis thaliana columbia
tatctctaccgcttgggtgtgaggggggggttctattaggtacaacttagaagatcttgacgtcgcctgcacgcgtacgtaagcttggatcctctagagcggccgctttctgggttggtgttttttttttttttttaactgaaaaagcgtatttgggcgaaatattatagacaatagcatctacacgagactggaaccatttttacaattacataatgagagctatttttcaaccacaaaacggaattcaaatttcctttttcctcggattaagcgggactggtcaaaaccttgggttttggagctggacactacccttataaagaaagtaaccctggggccaggaaattgtcttggttgagggccattccttctttaggattttgagtggatccaaaccttcgtctttgaaaagtacgcccctccaagggtggaaccacgggggagggcggttcgtctccccccccggtttggggtaaaacctg

SEQ ID NO: 119735 - DNA, 531 bp, Arabidopsis thaliana columbia
actatagaagagttatgacgtcgcctgcacgcgtacgtaagcttggatcctctagagcggccgcttttgggggtggtgctttttttttttttaaccagaaataaccacagacgttcttgatcttgacaaacataaaatctcaaaacagtgtcagttcccttgtgtggtcttctcgcagccggacccttttggggttttctcgcagccgtacccttttgttttttctggagggggggtccttttggcgtgttttcgcaaccgtatccttttgtggttttttccgcacccgtgggcccgcggggggccaccccgggaattccgggcccggtccctgggggcgtcccaagttttccctattggggggccgtttaaaagctgggcggagtcgtgggcattggtggttccggggagaaattgtttgcccgtcacatttccccacaaaatccgggcggggaatataaaggtgaaaggcgtgggggcccttaaggggtgacccaccccacctctgtgggggtggcgccccctgggcgg

SEQ ID NO: 119736 - DNA, 553 bp, Arabidopsis thaliana columbia
taggaacacactctagaagactatgacgtcgcctgcacgcgtacgtaagcttggatcctctagagcggccgctttttggtttgtgtctttttttttttttttgaagaacattgcaaaattgttttgcttgcaaaatagttttgtgagccaaaacacaacacaacaggttgataaatattgtagagcttcaaacgattagactgcaaaagaccttgaaagttcttcaccaattttgattgaggcgtgacggccctaattatatttcagttaaaaaaataaagactttttttttttttctttatttccccccaaaatattcaagggcctcctttggttttgggcccaatcggggggggttggggatatattttgggaaatacccccttccgggaggcagccgttaaaaaaaaaaagctcggggtgatataacaaatcctttcggcggcccgcaaaaaaagagcttttcaccgcgccacctaacattgtgtgttttttttgggggggaaaactttgccacatggtggtttccgttgtaaaggggccatcttttttt

SEQ ID NO: 119737 - DNA, 533 bp, Arabidopsis thaliana columbia
  unsure (1)..(533): unsure at all n locations
ttaggacacactatagaagatcttgacgtcgcctgcacgcgtacgtaagcttggatcctctagaagcggccgcctcnnggggggttgggtttttttttttttttttcttttaaaaagaaaattttatttttatatatttatggattggtacatggcttcactttgagtaatgcctgtctacaatctggggatatataaaagaccaaactattttacataaaaaaccaaacttttttaatgaggggatatttttcttttccacacaaactgttatatcacacacaatgtttaccgtatctatatatggtttcaaaacgatgaaccctccccttctgtcgttttctgcagccggggacccctgggcgaacccgtggttcannnnnnnnnnnnnnnnnnnnnnnnnnnnnnnnnnnnnnnnnnnnnnnnnnnnnnnnnnnnnnnnnnnnnnnnnnnnnnnnnnnnnnnnnnnnnnnnnnnnnnnnnnnnnnnnnnnnnnnnnnnnnnnnnnnnnnnnnnnnnnnnnnnnnnngtgg

SEQ ID NO: 119738 - DNA, 495 bp, Arabidopsis thaliana columbia
  unsure (1)..(495): unsure at all n locations
ctgcacccctacctaaacttggatcctctagagcgttccctttgggggtgggcttttttaattttctttacaataaccaatcccttgtttttcaactgatatgtctgtcaaaaagatctatcttccccactgaaacccaaattcaatgcctaccaaccctttaatatatnagtaatctaaaaccttgaaccttctttataataaggaggcggagcctaaaacggggccttaggtaaacaaaatataatactcccccctaaccacattgttccccccctaataacccccccttcctggaattccccaagggattgggtcttttttcctacccccccatactccgtttttggcccggtggaatatacccccccagggttaacttcccccgaaccaaaacccccccctccagtttttttttcctccccgcccctccctttatagggccccccaccccctttttggaaccttctaaccccttacccttttttacaaccc

SEQ ID NO: 119739 - DNA, 598 bp, Arabidopsis thaliana columbia
  unsure (1)..(598): unsure at all n locations
tataatatttaatttatagttacgttaattaggtacacactatagnaagatctttgacgtcgcatgcacgcgtacgtaagcttggatcctctagagcggccgctcttgtggttttgttttttttttttttttggaatgataataactcaatttattaacaccaaatacacgttaatataatactacaaatttcaaaatcaattgcaaatcaacaattctcgtacaaaaatgcatggggtatgacaaattatttttcaaacaaataatatagagggggggttttaaaaaccatttttatataagcgtgaaaaaataatatcattcaaagacttgtggttgagcaacttctttgtaatttttacaaaattccccaaaaaaatctccaccggcattttttccaaggctggggtctagaaaacgttttatgagggaggctaagattttgaaaaccccattctgcatatcctttcttttaattggtaaatgtggttcgcgtaaaatttgtgtcactactttgggggtcacaaaccggatgtgggtatctccccacctgggaaactttttgaaatgccccaatttaaagggggaggcggttttt

SEQ ID NO: 119740 - DNA, 561 bp, Arabidopsis thaliana columbia
  unsure (1)..(561): unsure at all n locations
gacgtggtaggggtgtatttattgtcaggttgtaannnnnnnnnnnnnnnnnnnnnnnnnnnnnnnnnnnnnnnnnnnnnnnnnnnnnnnnnnnnnnnnnnnnnnnnnntttttggtttttttttttttttttttttttttttttttttttttgaaaaaaataaataaaaactttttacgaggttttttttacccaaaatattttcaggtaaaggaaaaaaaaagaagcttttttagatcccagagtttcttttgaaaaaccagagttgagggggggggacaaacctttttacatgggcgggtaatgctgtttttaaaacgacccatggtttttttttttgggggggacatgaaaattggggaaaccctgtaaaggtaaaatcaatggcttggtggccttggggattttggacaaaaaggtttttttgaaggcctcccccttttgggaaaaaaaccaagaacacttccgttgtggtggagagatgtttttgcgttttcgcgttttgcaatttttaaaaaaacatatagagggggggttgtataatttcgaggcgcgcttgg

SEQ ID NO: 119741 - DNA, 583 bp, Arabidopsis thaliana columbia
  unsure (1)..(583): unsure at all n locations
atgaaagaaaaggggggtttcttattaggtaacnnnnnnnnnnnnnnnnnnnnnnnnnnnnnnnnnnnnnnnnnnnnnnnnnnnnnnnnnnnnnnnnnntntttgtttttttttttttttttttttttgggaggaacaagtcgaatttttatgatagaaacaatgggaagatgggaaggaacatttttgcattggcaaattttattacagggaggctcttttcgaacacagttgattttcttattcagggtagtctatttttagttggggggactcctttttctttactattttagagaaactatggggcacaattggccttgcccctcagtttgttataatcctcctccggaataaaagtaggacctccttttatttggctggacttttttgggaagggggaaccttttccaaaacctttttttggccctggtgaaaccctggagttaattactagaaattgtttttttttaaaacacgaacttgggatctttccccatacaagaaaggggttggatattcaaaaaaaaggcttttttctctttttcataataaggaaccatgggctcttttccaaaaaaaa

SEQ ID NO: 119742 - DNA, 557 bp, Arabidopsis thaliana columbia
aggtggtgggttctcattaggtacacactatagaagatttatgacgtcgcatgcacgcgtacgtaagcttggatcctctagagcgggcgcgatttggggtagtgttttttttttttttgagcacaagccagattccttaagttttaagacaacactttaaggacccaaaagggagaccaaagacaaagacaaagaccaaactggtaaaatgaacctgtttaggtgggtaccgtcacagcaaattttaggaaaaaggagggggggttaataagacgaaaaaattttaattaaaccaaaattttgaggggggattttttttataaagtggggtggggttttaaaaaaacaaaaaaaaactttttagggttgaatcgggttgccaaaaaccctaaacttaaattccggctattttttttgtagaaacctgtttttggggcgctgatataagaacaatgtatggtttctacattgttgggcggggggcggggaaacctcggccataataaataaatcagaaaagggggcgtggtgggtgtttctatataggcgaaaaaaac

SEQ ID NO: 119743 - DNA, 574 bp, Arabidopsis thaliana columbia
  unsure (1)..(574): unsure at all n locations
taggtacnnnnnnnnnnnnnnnnnnnnnnnnnnnnnnnnnnnnnnnnnnnnnnnnnnnnnnnnnnnnnnnnnntnnnttgttttttttttttttttttttttaaagacaaattctttacgtttatctcataatcatctggaaaatgggccaagtagaggaaacaatgctttaaataaccttggcaatttttcaaagcttagagacaatacataagttacatgtattgggtgtttttccgcagataaaaaattatattctttcctccaccaaaaaaaaaaaaccaattttttctaaaaaaatttttctccaatccctgcccgaaaggggttttttttaaggtaaaaaacccttctaacactttgagtgggcaatggtacccctcccccagagtggttttgatattttaactcacacaactttttttctttcctcaaaaaattttaaaatgaaggtgcttctttaaaaaagaagggcttcctctgaaaaaaaggccccactttccttaaagggttaggcctttcggggttaaaaggtgatttatcgtagttttttttcccctggggcacttttttt

SEQ ID NO: 119744 - DNA, 475 bp, Arabidopsis thaliana columbia
gtacacactataggaagatcttgacgtcgcctgcacgcgtacgtaagcttggatcctctagagcggccgctctgaggggttggttttttttttttttttttcagaccaaatctggggaaagacaattcaaatcttgcaaaagttgacattattgttttggataaacaccccacacgattcgagacttatggaatcaaaataaggcctgcaaccctcagacggaatttttttttttgggggggccgttaaaaaaaccgtcctccccccaaaaaaagttgggttgactatttaccccgggggacttccacctcaaaaaatagcccacgcgggacttggtttttcttgggtggctgggaaaaccatgggaagggcccggccaaaatttcgggcttctttccccctggggcgggccagtttttcaccgggggtttagaaaacttgagagtgtgttttagaagggaatttttttggccca

SEQ ID NO: 119745 - DNA, 542 bp, Arabidopsis thaliana columbia
cactatagaagagtctatgacgtcgcctgcacgcgtacgtaagcttggatcctctagagcggccgctctaatggggacgcgtgggctgtctctttaggaggagaaatctttcattacagttttaccaaaactatataaaaggggggtcttttttaagttctacgtacaatcacaaaatgcttggacatatcccaaaaaaaaagcggaccagtggcaaaaacggattccaaaagagggtcacataatggttgggccctgcatccaaattggctaaaccaagtgagctccaccaagaactttccctctaccccttgcgcgggatggtgggggaacaaccatgaaaagaaccttcttaaaaccccctccctctaaagagagaaactgggccttcgagatgaacaaagggccgtttgcgggataagaggggaaaacaatttttttctctggacccggagaagattacaaagcttgggggacactcctgttttaaacaaacaaaaaagaaaagagtcagcgcggttgttcttattaaaatagcgaaa

SEQ ID NO: 119746 - DNA, 539 bp, Arabidopsis thaliana columbia
  unsure (1)..(539): unsure at all n locations
taggagcacactatagaagagtctatgacgtcgcctgcacgcgtacgtaagcttggatcctctagagcggccgcgtcttggttttggtttttttttttttttnaaaatgaacttacatatatatacttaacacatgtataaagatatatgcatatctgattcatgttccacttgaataaatatataaacatttttcctccataagaaatcctcaaagaccaaaaagcttaacttgctttgggggatcaattatgttgggcctggaggttttaccaaccacttggcacaaaaccccgttttcgttgcaatcgctacaggtagcaaaaccctgtccaaaagcattattcccattgaatttttccttgggggaaccctggcaaattttttcttcaccaaggaaaaataaatcctggtcccccccaaccattggtatttccaaatgaccttttgaatggcgacaaaaaacctccaaaggactttggttggggggaaaaaaaacagcctctaccccttacccgtgggaaatattgaaacaccct

SEQ ID NO: 119747 - DNA, 523 bp, Arabidopsis thaliana columbia
  unsure (1)..(523): unsure at all n locations
nnnnnnnnnnnnnnnnnnnnnnnnnnnnnnnnnnnnnnnnnnnnnnnnnnnnnnnnnnnnnnnnnnnnnnnnnntttttggttttgttttttttttttttttttgagagaaaccctaaccaaataaacttctacagaagattaaatttacacaaacatcacacaatacatacattaacaaaatatacacacaattttagagggaaagggaaaagttataaaacccaaaactcttgaaaagaggagtgaccaaagagaagacatttcaagattctagaagggaagcatccttccaacagtccaacctaagagcaaaccagcaccaatgagactaacccctagtgcaaaagccatcatatttctcccagtcccacccttttttttcttcccccctcttgggtttctcttctaaaaattaattccttggacccggccctctgggtcttctcccttcttaagggggaaaaaaaagccttcatttaaaaagctttaaccattgttataagccaactttggactgggtt

SEQ ID NO: 119748 - DNA, 561 bp, Arabidopsis thaliana columbia
  unsure (1)..(561): unsure at all n locations
ctannnnnnnnnnnnnnnnnnnnnnnnnnnnnnnnnnnnnnnnnnnnnnnnnnnnnnnnnnnnnnnnnnnnnnnnntttttggtttggtttttttttttttttttgagattttctccaaccaaatcactctcaattcttcgatctcattacacttctggtctaaagcttgnggggtcatttacaccactaatggggaaacgaaccaaataaaaataagacagggggcttttaaaacacttcggggggaggatatcatttaccattgcttccggaataaaaaaggttttgggttttcacttttttgggaaaaaaaaaacaacccattggattctggggggagggatcttaaaaacctctgaaagagcctggtcgggccctgggaaaaactaaacacttggctttaataccccaaaaaaaacattgcggggttttggtttaaatactttttatttttttaaatcgggggggttggctaaaagacgcggtgacacctactacttttggggcaaaggggaaaaattttgaaggaagagtttcgttgtgggggggaccccgccccc

SEQ ID NO: 119749 - DNA, 529 bp, Arabidopsis thaliana columbia
  unsure (1)..(529): unsure at all n locations
acttagaagactatgacgtcgcctgcacgcgtacgtaagcttggatcctctagagcggccgctntttggggttgctttttttttttttttttttcaaaaggaaaaaattctcatttcaaatcaagagaattgcggggggaacaaacaattaaaatttaatttggaagtttgaatgtaaagttacaagtccatataaagattggctccttaaaaaacaattttctaaaggggggctccccttctttggcagggagccaaatactgcttcgctttcaaaattttcttacggtttttccaaagggatgtttttggacttgacgcataaaaaatgggttgggaaaacatacccttttatctgagggagacccatagtgttgggtttaaacctttcacaaggtggttaatttaccttcgacaacttctccatttttttaggggcctgagaaaacgtttcggctaaatttttttcgccacgaactctcgaataaaaagcattttttaaccccccccactttttccacctttttac

SEQ ID NO: 119750 - DNA, 528 bp, Arabidopsis thaliana columbia
  unsure (1)..(528): unsure at all n locations
taggagnnnnnnnnnnnnnnnnnnnnnnnnnnnnnnnnnnnnnnnnnnnnnnnnnnnnnnnnnnnnnnnnnttttttgttttatttttttttttttttttttttttttgccgccgcgcaggaaaacactgcccactccccccctctccctccttaagaaaatacacagcggggaaatatcctctcttttaaaaaatgtttctcccaacaaaggtgtctttttttttctttctccccaggggaggtgtgttttaataataaaactattttcccccttttttttgtcgattatattatttttaaccctaattttttttccacgaggtttatggtcacccctttcttgttgttttcacccatcgtgctggccccaccctttttgtttggggtcttctctgggcctggggaatatccccccctgttttttttttttttttatacaacaacacgcccgtgtgttccccccttttttttgcgacccggtcctcttggggccatcctctttttttttttaagggttcttttttag

SEQ ID NO: 119751 - DNA, 521 bp, Arabidopsis thaliana columbia
  unsure (1)..(521): unsure at all n locations
gaacnnnnnnnnnnnnnnnnnnnnnnnnnnnnnnnnnnnnnnnnnnnnnnnnnnnnnnnnnnnnnnnnnntntttgtttttgtttttttttttttttttcacaaatgtaagatgatatttaaaccaagttcaaaactttatgggtgaataacaaaagaaacaaaacccacataacataatgtgtgagatccacatgaaaagtaatcttcaactagttgaatgcaaaaaatgctaaggggtggtccttcctgagagactactcgaactggctctttaagctgaagaagctgatgccttgctccttggcttggcttaaaaaccttctttgaaaccagttttgaaccgacggaggaacattacggaaataccttatccttccgggaccaggaattttcctgcgggtgggcttcacactcccattgaaagtcctcttgggagcaggggggtaacacaagccggacaacgatttttggggtggggaaattacgaaacccctttttaaaaagaggggggactttggt

SEQ ID NO: 119752 - DNA, 544 bp, Arabidopsis thaliana columbia
  unsure (1)..(544): unsure at all n locations
actatagaagagttatgacgtcgcctgcacgcgtacgtaagcttggatcctctagagcggccgctnttggggtttttttttttttttttttctgggaataaccacacgatgaatccagtagaagcaaacttagtagcatgtctgaaagaggaaagaaaaaacagagttccctaacaaaaatccggttacgaaagcaaccaagaagcaacagttctccaaattcttttcggggggggggaacaacttttttaaacctggaatccacgactctttctctttcctgtgggcttttaaaactttcttccttgggcccaatcttatgggttggagagactgggtggcacacccaggagcggggccaaaatgcttcactggtttacggaaaatttttagggcccttaaaaaaaaacccgtgttttggcccacaatgggccttttaaaaagccaacttggacaaagggtaaaacccttcccccccacatttttttaaaaaggagagccccttggttttttttgggaaaacctagaggcggttctttttttt

SEQ ID NO: 119753 - DNA, 549 bp, Arabidopsis thaliana columbia
  unsure (1)..(549): unsure at all n locations
ttgaattggggtgggttctaattaggtacacactatagaagagtcttgacgtcgcctgcacgcgtccgtaagcttggatcctctagagcggccgcggnntttttttttttttttttttttttaggaacttaatcagttctctaaattgtttcaaaatgtgtttaacccgagtttgctagcattacaaaatctttcctgatccagtatccggtttcaggagaaaaaaaactaaatgggggaaaaagctcgaaccctcttggagggttgcaaagcttcatcccaatttcaggggctacccaaaacctctctcaggtggggggttagactccaaccatgcctttgccggacattggttttcaaaaacccccccaccttttttggggttttatgggaagggcctttttctttctttaagggagaccagaaaacgggtggtagcactttggctgagtatttgggttctccctggccaggggtgatcccaagcgggggggggacccccttttggggtttttaaaaaccagccccttttggtgtttttttgcaacc

SEQ ID NO: 119754 - DNA, 569 bp, Arabidopsis thaliana columbia
attagtgcacactatagaagatcttgacgtcacttgcacgcgtacgtaagcttggatcctctagagcggccgcttttggggggggggggtttttttttttttttttttttttttttttttaaaacaaacacctgaaagtcttataaattcaaagtttgtgtgggttttacaaccgttggagaaaaagagaaccccccgcaaactttttttagaaacatgattacccttgccgcttattttttggggggggtctagcccaaagcctttttttgtgaaaaaaagaaaaacccttgcgggaaaatttcgggggaaagttcccggccaatttggcattggggggattcttttttttggaaacattaaccattttttgaacacttgtttccggttgtaaatagggacttggtccattggggtgtttgctgtcttttttggcgagtgtgtttgagaaaccggtgttttctttgtcttttttttgggggggggggttacaccacctcttcttagggtgtgcttgtggcgtttatttggcgaagagggtgggggggtttgtgttttttttaaaaccc

SEQ ID NO: 119755 - DNA, 604 bp, Arabidopsis thaliana columbia
  unsure (1)..(604): unsure at all n locations
ccaaggggtttctaagtgtagttgtagcatatctaattgaggtaacnnnnnnnnnnnnnnnnnnnnnnnnnnnnnnnnnnnnnnnnnnnnnnnnnnnnnnnnnnnnnnnnnntncttgggtttgttttttttttttttttttaaccacaagagacttgatttctacgcccgaattgaaccttaagggttttgactgttacaattataagttaatttattttacaagggctgcaaactctcttaattacattaatggggagaaagggctaatttttgggggggcggcggggggagaacttaagaaacatacctccttttgccggggaaacaacaccatgagacttttctctttttttagcccagtggtttaatttacacacaaacatgttggtttttaaaaagccccgcctccttcccataggtttactttgccccaacctgtggaagttctatttggcatccggaaattaaaccctttctaattgggttttgaatgggtctttcttcaacatttttttcttcttcgaggacacagtctgggtacgttcaataatcgcaaaaacaattcacacacgttgtttcctcgcaatcctgccacgctcta

SEQ ID NO: 119756 - DNA, 592 bp, Arabidopsis thaliana columbia
  unsure (1)..(592): unsure at all n locations
aggggccgggaagagcagaaaataaaggagattctattgggtaccactatagaagactatgacgtcgcctgcacgcgtacgtaagcttggatcctctagagcggccggctncggggggagaggcttttttttgttttagcaaacagatatattccataacattggggctttcacctcatgaatcatgatagcagcccccacattgtcaaattttcccgatacaaaacacttttacatgttgggaaactagagaccctactaaaagatatagtgggggggttgtatcaaccgggaaaagagcttggaaaagaaaggggacctccttcggaaaaaaaagtacgcctttggccttactaccctcaacatttttggagggagggtttaaaaatgtcccccaccgcgttgggtgacctgcgcaaaagaacaactataacttctctctaggcaaataaaaagcggagaggaaaacgggcctcggctacagtgggtaaccttgcgagaaggtcaggaggagaggcgtggtgtcttttatttcgggggggaaaaagcggggtggagaggttcttcgccttggcgcagagggagtagagcg

SEQ ID NO: 119757 - DNA, 550 bp, Arabidopsis thaliana columbia
  unsure (1)..(550): unsure at all n locations
taggagcnnnnnnnnnnnnnnnnnnnnnnnnnnnnnnnnnnnnnnnnnnnnnnnnnnnnnnnnnnnnnnnnnnttttttggtttgtttttttttttttttttaactgcaaacattgttcgatattcacaaattgtctgcgtttataaacgagaatcaaagaacaaatgtcgaatttgaaatcaatatgaaatacaacattgatcaaaccctatttacactatttacacccgcattgctgtgagtttaaaaacagagtctcgcacagaaagacaaacccaaagataggggaagatcatcattcccactttcatgggattagaaagacctcttatacctttaaaagagccctaaaaacaaccttgctggggcgaatgaacaccctaagcagtttttttaaacacaccaggagcttggtataaccctccaaatgcaagcccccaagggggcaggggtgtaaaacattttccaaggtggcaataacgcccctaccttccctacctgggtaaaaaaaagaacttttttggaccaaaggtttctaagagcttttag

SEQ ID NO: 119758 - DNA, 514 bp, Arabidopsis thaliana columbia
  unsure (1)..(514): unsure at all n locations
atgacgtcgcctgcacgcgtacgtaagcttggatcctctagagcggccgccntttgggttttggctttttttttttttccaaaatggtataatcgaattatattatatatatgggttttacatagaatgttctgttcaaatgactatacacaacaatgttgatataaaaacaattttcttaagggggttggaagttttaaactaacaaactgtttcgggagaagacttccaaaaaatgccaattaaattttttttgtggaggggtctccattgcatacaaaacccccttgtgggttttaaaaattttaatgaggccggtttccccttttgggaacaaaaaaagacattccccgaattttttgaagttggttacccaaacgctttttttaaacacattaaatttttggagggaacacccccgagggttcaaccgtcttaagtgtggaatggggtggacccgtcttttttttggggaaccaacctccccgaaaaaattatggtttttttgatgtgg

SEQ ID NO: 119759 - DNA, 530 bp, Arabidopsis thaliana columbia
  unsure (1)..(530): unsure at all n locations
nnnnnnnnnnnnnnnnnnnnnnnnnnnnnnnnnnnnnnnnnnnnnnnnnnnnnnnnnnnnnnnnnnnnnnnnnntttcttgttttttttttttttttttttttgcagcccaaaagatagaatttttaacttataaataaaacgggagttgaggtgataaactttaacagcgatacatggataaaacgaaattgatattaatacccacctggatttcccaaacttagttgcggaggggcttatacttgctcgaagcgagaacatgaaaggtgggttccaggtttctcctttgaaactttttagccctttaccctgaactgggagagtggctcttttctctaataaaaaggttgcaacctctgttttatgttcacataaaactccttaagggaattggatgggtcccagccatcttaaaaagacaaacgttctatgagggactttttgggcccctcctaaagcctaacccccttaagaccttctggaaagacccttttttaaactctttcaaaaagaagggggcaccccctc

SEQ ID NO: 119760 - DNA, 523 bp, Arabidopsis thaliana columbia
cactatagaagagtctatgacgtcgcctgcacgcgtacgtaagcttggatcctctagagcggccgcttttttgttttgtttttttttttttttttaaaacgggagcttggttacaaaaacaaatcgttttgaaagcctcaactcgtgtccaacctcgtttgaaaactaaataaccctaaagggggtggcttttaccttaagcttttctaaagtaagcttttgttatttaaagggggggggtgaccttttgggggataaatgtaactatttttctttgggtctttaacaaaaaggggggttttttttttggcttttttagcaaaccccccaataaaaccctttgttacccttttggtaggggggggttttttaaaaaatcctttttataaaggggggggcaatggggggggggtgttagctatacccccatttgggccatttttaaaaaaaaaaaggtttttttttgctgggagatccaaaaaatttggttggggggggagacccaaattttggggtttttttt

SEQ ID NO: 119761 - DNA, 583 bp, Arabidopsis thaliana columbia
gacgtcgcctgcacgcctacgtaagcttggatcctctagagcggccgctttttgggggagggtttttttatttatcttttttagaaaccctctcgttttgtaacatctagagggcaaaacccttaaaaatggggcccctcacatcaattataagctttgggcgactcgggaagggaaaaatttcttctttcctttccccttttgaaatcggaagggaagattcttatttcttttatcgggaggaggtgttttttatttccgggaaatttaaataaaaaaaaaaaaacactctctttaacttattttgttccaacaaaccccggggagtatgtgaatctttttaccccccacctcttttcacttcgatcttttttccaactcatcccccacaccaagattttcttttggttgttcctggaagacaaattttttatttttcatttctgccttccccctcttgtggcggcacccagattcacatcctcatcttttctctgcgcccaaaaaaaaatacgtttgttttctttattgcaaatcgtcgctcgtactcggttactatttttcatctttcctaagcagtatt

SEQ ID NO: 119762 - DNA, 587 bp, Arabidopsis thaliana columbia
tgtgtggggggaagagggtaaaaagggggggggtgctaattaggtacacactatagaagatgatgacgtcgcctgcacgcgtacgtaagcttggatcctctagagcggtcgcttcgggggggggggcttttttattttttttcgctgcttcattctatgggtgaaaatcccaaaatattttttagtccaacattgggttctgatcggggtgggttttccccccagcccattttaaaaaacaaaggacgggtgttaaaaaaagagaaaaaaaaatcttttgtcggcagaaggggttaataatgttgggcgggttgatcataaaaaaaagacttttgcccaactattttttaaggtttctccccttttcgggggggcttttacagaaaagattttttttttgtgttttttttctgcaacccaaggggagggccgtgtgggcttcaacacatagattttctccgggacgctggttactggaggagccttccactttttttatctaatagggagagtcgtcttaacacgctgtcgctgtgaaatacgaggcattcgttttgcgtcgtcatgagaaaatagtttgctctgcc

SEQ ID NO: 119763 - DNA, 530 bp, Arabidopsis thaliana columbia
ccttagaagagtcttgacgtcgcatgcacgcgtacgtaagcttggatcctctagagcggccgctcttgggggtgggggtttttttttttttttgcaccctagggttcaatgagatatatatatattacactaacacaagtaacttttatccgttgagcgacggcccttccactcgggaccgtgggatcactaaggccgactttcgtccctgctcaaagggtgggtctggggggcaagctcccttctggctttgcactagagggaaaatcttcgggccgggcagaagaaacctttgcccgcctccgttaccttgggggaggcctcccccccataaaaactggctacctgaaactgtccctgggcccctaggtcctgacacaagggtaaaaattctaccttttcaagaggggtctctaattgaggggtcggccccccccggaaggggcccctttttccccttcccataagggggggaggaaacgccaaacccaacccaaggaacgagggaccgtaaaggggttttttggaca

SEQ ID NO: 119764 - DNA, 608 bp, Arabidopsis thaliana columbia
tgagtagtggggggttctattaggacaacttagaagattatgacgttgcctgccgcgtcgtaagcttggatcctctagagcgggcggcgcggcgggggggggccgtttatcattttcgtcgttttataaaacctaattttttctccccgtgtggacttttaaagggtctataagttttccattaaaaatttaacatttttttgcccgagggtggcgaccccctcgaaaatgcccttaaacaaaaggaaacgggactttttttgtggggggggggggccagatttaaaacaaatacccctctaaaagggtttcggcaaacttctccgccaaaacttttcccccctttccgtccgtgatttgagttagatcgcggtggtgtttattgaggccccctcgccgatgctctctgttgtgttgccgtcgcccatcccttgagtgacgttttacggggagtggggaggtctcctcgttcgtcataggtgactttgaccctttgagtatatagaacacgtctttttcaccacatatgtgggcggggaactcgccctcactagggtattggtattaaactccgttgttgtccgccggaggtgggtggtattggtata

SEQ ID NO: 119765 - DNA, 550 bp, Arabidopsis thaliana columbia
gacgtcgcctgcacgcgtacgtaagcttggatcctctagagcgggcgcttttgggggggggggtttttttttttttttgggggaagaaacctcttttgtttaataagaggggtaaaacattggggaacagacattgttttcgttttgaaattttttaaacctttttttcagggggcttgacctcctggtttggaaacatcttttcgcttattttggggggggggcacttttttttaaacactgggaatttccctcttttcacgggggggtgtggggggggttgacaacccccgatttttttttttatagccttgtgggatgaagcctcctagggcgttttatataaaccgtgccttttctttttgcccaggggagggggacctcttggggggggttttgtggtatagagtttttctattttgaccaacgaacatagggttgtttttgtatattgagcgcaattttttttttttttttttccacactattgggtatgtgggccggtatagaagatctccccttgttttcatgtgcctcttttttccgggga

SEQ ID NO: 119766 - DNA, 518 bp, Arabidopsis thaliana columbia
  unsure (1)..(518): unsure at all n locations
atgacgtcgcctgcacgcgtacgtaagcttggatcctctagagcggccgcccctggggggcgggcccttttttttttttgaaatccaaatctttagggtttacaaggatagtaattggcgaacctcccctattttttttgattgacttaaaagggagtccccccaaaagattttttaaaaaaggcctgaaaaaatagccaagatcaatttttcaatggggggcttctnatttgagaataaaaaaaaacaattccttttgggacggggagaaaaaaaagacccctctttgaggggtgtgttaatagggggcgacctaaacagaaaaatccccttggaatgggggggaggaccgtttatagcggtgttcacggcgttggggcgtgattgcaaaaaaacattttttcctttttgaaccttaagcggcgcggataccttgttgaaaaataatgcgttgcgatccgcgtgcccgccctgcactttccacaaaaaagaataaaaaggggtgggaaaaagagggg

SEQ ID NO: 119767 - DNA, 515 bp, Arabidopsis thaliana columbia
actatagaagacttatgacgtcgcctgcacgcgtacgtaagcttggatcctctagagcaggccgccccctgggggtgggtccttttttttttttttggactcaaagactttgattgattttcacttccaaaggtgaaaacttgaacaatagtaataagggaaggacaaaactttcacaccacaaaacgattatgggaagtgaataccatacttgttgaacaaggaattaaaatgcgggaactttttgttgggaaaaccttttaaaatatttttttctgaaaaccaccttgcttaaaaaaatccatacctttgtccttgaactgggatggtttttccgccgtctcctcccccctaatacattttaatagaagggaatccatttgggggggggaattttccttgcacagggtgggacaaaaaaagagggtggggggggtaaaggggggctctctttggtgtaaaaaaagtttgggggggaaaaaatcttgaattttttctccagggggaaaaacatt

SEQ ID NO: 119768 - DNA, 508 bp, Arabidopsis thaliana columbia
taggacacactatagaagactatgacgtcgcctgcccgcgtacgtaagcttggatcctctagagcggccgcgccggggggggggccttttttttttttttttttttttttttttttttttttttcccggagaaaagataagggtttttttataagtttataaaaaggatcatttttttcttccccaaaccttacaacaaaaaatttattcccaaagtggaaaatttgggaggccttgagggggccaaaaggaacccccaacccaaaacaacattttttttctaattacaaacaggctttaatttttttagggggaaaaaaacccccccattggtccccccgggaggggcgggaccgaaaaaaactttttaagtgtgtttaaaaaaaagggggaaaaaaaaattttttccccccccccattgggaaacccctcttgacccaaaaagttttttgcgggcccgggggcgcttctttaaaccctcaaaggggtgttttttggggaaagaaaa

SEQ ID NO: 119769 - DNA, 531 bp, Arabidopsis thaliana columbia
  unsure (1)..(531): unsure at all n locations
nnnnnnnnnnnnnnnnnnnnnnnnnnnnnnnnnnnnnnnnnnnnnnnnnnnnnnnnnnnnnnnnnnnnnnnnnnnnngnnnggggtgtggtttttttttttttttnaaaacaaaacaaattatatagcacaaaggcaaatctttcctagaaattaccataattgacgttacaacgctccaaaatagattggaccagttttctaactcacaaactccaccaaattggaagaacaaacattctagggggcttagagaacctggtgtttaatatcttcctccactggttgtggtttaactggatcagtcgccacttcctccttgaggggtccatctcccccctcctccaggaaatcatccattatcatttcatcctctccaccatggatatcctctacttaatgttctgaatctacatctcctaccccccccacagggaatttttctttttttgggcccctgcctcatcctaggaggctctaatgccgggccatgggtccgggaaataacaccctgggtgggggcttcctggcc

SEQ ID NO: 119770 - DNA, 530 bp, Arabidopsis thaliana columbia
  unsure (1)..(530): unsure at all n locations
nnnnnnnnnnnnnnnnnnnnnnnnnnnnnnnnnnnnnnnnnnnnnnnnnnnnnnnnnnnnnnnnnnnnnnnnnttttgtggttggggttttttttttttttttgctaaaccattagacattagtacatagactagatccaaaaaatacaaacctgtctaaacgaagtttaagatgatccaaccatatgaatgtgtgcttcttccattgggcacgcacccaaatcccacttaacaagagggggaggcctcctaataaattggcacatccagataatctccaatctcaaagggaagttcggaacgccttttactggcatggggttggtttggggttgaataagccatggtctccccaacctctttaaaattatagccacttttttggggaggataaacaacgggaaaaaacaattgtaccttgctttgtgctaggtggtacaaaaacttttttaaccaaattttggcagctggggaagactggcttttttcccaaggggagattgaacctcctcccttggggttttggcctc

SEQ ID NO: 119771 - DNA, 526 bp, Arabidopsis thaliana columbia
tgacgtcgactgcacgcgtacgtaagcttggatcctctagagcgtgcgctttggggggtaggcttttttttttttttttcgaaaatgctccgggaacaaacatagtttctttacattactattacaatgctgccaatcacgtggataatgtggggccctcgaaactttgttactttttttttgcaacatctagttaaaacacatatttttttggggggtgtggtataaatgatgtgtgtccctagaacaataaaagaacattggaatttccttgtaaaggggcctttttttaaaatctttgaaatagccaactgccagggttttgttggtggcaacaaaactaggggggggggataaataatggttctttgttctacctccctccaggttgtttaagaaccttatttgtttttgtttttcttccctcgcaagtcgtggggtgggggggggaccaccccccccctttttcttgtttttttctttaggagggcgtaaaacgccccccctgtgtctcttggtttctttt

SEQ ID NO: 119772 - DNA, 353 bp, Arabidopsis thaliana columbia
ccaagctctaattctactcacttatggaaagctggtacgcctgcaggtaccggtcccgaattcccgggtcgacccacgcgtccgtgcggctgcgagaagagacagaagggtacggctgcgacaatactacagaaggggacaccttttataggcaactggagtgcggctaaatcaatcatccggtggccaccaaaatgtcatcctgatgcgtcatggcaatcaactcaacaatttcgagcgagtgtggacttcaacaggtgcgagaccgtgggatccaccgcttgctcaagacggtaaggatcggtcctttagaactggtcagagaatccgctctcaacttggggttccgattc

SEQ ID NO: 119773 - DNA, 530 bp, Arabidopsis thaliana columbia
tacccctgcaggtaccggtccggaattcccgggtttacccacgggggcgggcccgcgtacctaagttttctataaacgacaaaagggctccgctccaaaaacccacaaacggcgtcgcctccaaaaaaccaccgaggggcccgcctccacaacaccacagagggggccccctttcgtttttcggcgatttttaaaggcgagggggtccccaaagaggacctctcacccaaaacgtgccgggccccctcttcgtttccaaggcccccaatcccctcccttttcccatccctcttccttttccatacccaatgagttcccccccggggggtgcggcgatctctcgcacccagacaaagacccacctctttccttcttcccatcggcttataccaaaaacgcaccctgcccacccctcccccgcttttctccgagaacccgctccccccccccccccccgctacccgcgcctctctccccgcccccactgtacccgcgctgcgcttccgcgtatcgctcggtacatcttgtcg

SEQ ID NO: 119774 - DNA, 571 bp, Arabidopsis thaliana columbia
ctctaattcgactaacattatggaaagctcgtacgcctgcaggtaccggtcccgaattcccgggtcgacccacgcgggcgggcacgctttcttgctagaagaccacagaagggggttggtggtgaattattttttgggaatcttggaagagcgccttaaacccctaggaccggacggggtaaaataaacccctagaccggggaaaaaaagataacccacaattcaattgtcagatattaaattaccgaggagcgggtgttcccttatgctcgggggaaaattaaacacaaaaaccggcaattgttgagattagcacgctttttctctaattcccggagaagaaatctgggaccgcggttctccccttaaaaaaaaaagaagccccccccttttttgaaaaaacattggacctttccaaaatccttgaaaatatctaattttttccggggtgtttttcaaaaaataacaaccttggggaaactcttttaactttcttccaacgagggaattcctatccaaaattcttttttttttttttcccggaaaaaaaaaaaacaaaagtctgggaaag

SEQ ID NO: 119775 - DNA, 523 bp, Arabidopsis thaliana columbia
accggccccacgcccgtttagcaggcggcaattttattttttttttggggggggaggggcgtgtaacataaacaagtacggtgtctagacccctactttgctcgctctcactcccctctgaagcaccggggccgcagtggattgggatacagtgccttaggggggatgtcgcaatatagttctaatttacgtgtcagtcgatgagtagtgcattttttttggggggggggggtagacgcgcaacgggttctgctgttaataaaaaaaagtgcgttagatattgcgtgtgtggtgtgtgggctggggtgcgtatgacgtgtgatgatagaggacgtactgcctactttcacgacggataagttatgttcccctggctgccgggtcctactcgtatgcgtctctcgttgcggcacgagtgtcgtcgatgcggtactgtcagcctactttggctgtagtttattcgggctctaccttgtattggagtgttgtgagttagctttcagtatgcattcgctgctagatc

SEQ ID NO: 119776 - DNA, 424 bp, Arabidopsis thaliana columbia
ccaggcactaatacgactcacttagggaaagctcggtcgcctgcaggtaccggtccggaattcccgggtcgacccacgcgtgcggtgcgggtgggaaaaaacgacagaggggggaaaaaaaaaaacaaaatggcttggatgggtggattacacggtgcctctccgggggttcttgaaggaaccttaaagatcaatggctccaccccgtctgaatggccttaaaaaaatggcctgtggtggggggggctaaactcttcgtgagaacttaacaaagagagggaaacttctcccccggtccatgattgggccttttttctgctggatttagcggggggggcttcttttgttcaaggctgttcctcccccgattgctatttaaaaacaagaggggcgcccctccttccaactcccttggggaggggcc

SEQ ID NO: 119777 - DNA, 528 bp, Arabidopsis thaliana columbia
gctctaattctactaactttatggaaagctggtccgcctgcaggtaccggtccccaattcccgggtcgacccacgcgttcgggccgcgttcttacgggtgaaaaaagagacataagggcataaaaaaaaaaaaaaacacttaaaagtttcaatgggccccttaacaatggctctctcctcccctgctttcgccggaaaggctgtgaacctttcccctggaggataaaaactggggggggaggcgccttctgacattgaaaaacactatttccttccccaagggttctttgggccccccctcgccgggttccaaccaatttaattactttgattccttttgtggggattcccccaccctccttcccggaaaatttccttgaaaactagggtgggaacccattttgttttctcccctcccccctataatattccaaggaaccctgaatcataagaattctccccgggggggtggcccctccctcagaccgcttaagttgccctctcacctaaacctttgcccccaaaacc

SEQ ID NO: 119778 - DNA, 455 bp, Arabidopsis thaliana columbia
  unsure (1)..(455): unsure at all n locations
gtttaaaaaaaaaaaaaaaaggggaggaatctttaattttatttttttaaaaaagaaattattgtggccttcggcccttttcttggtttcaaaatttaccactactggtaaactctctttttttgggccctcttgtttttatgaaaatttttttttgggaaagaagagtcnttccaatagtggtttttttttaaaaaaaaaatttgcggcgcgaggttatatcaattttctcccccccccatcgttttcgggtagtgctctccacccttctctttactttcccgctcactcgggggacagctccggtaatacagcggactaggcgttccctacataacacatgtcgccgcattccgctaacctctgacctcttttatcggcccttcgtctcgtgcagcgcctactgctgtcatcagttagctgcccttcctcgctctctctcgtcgatcatgtca

SEQ ID NO: 119779 - DNA, 394 bp, Arabidopsis thaliana columbia
agaaaacaaaccctcattccatcccaatcccttcaccccggtcgccccatcaccaccctcaccttctcttctttttacaacacctctctcactctaatcaaaaaacgcatatcctctaaccccattactcatccacatcctacccatttttttttgggggacctaccttcacctctcaaaaaaaacacctttacacacccctttaccccccaacccccccccaacaatctctccacacccaacaatcttaatcaaccccacaaccattcctaccctctccacaaatacctccatacccctcattaatctattcataaccaaacacaccccccaccacccccccacctccttacaccaccctccacccctagcaaccacactacaataaccttta

SEQ ID NO: 119780 - DNA, 496 bp, Arabidopsis thaliana columbia
  unsure (1)..(496): unsure at all n locations
nnnnnnnnnnnnnnnnnnnnnnnnnnnnnnnnnnnnnnnnnnnnnnnnnnnnnnnnnnnnnnnnnnnnnnnnnccacgcgtgcgtgcggttgcgagaagacaacagaagggggacgaatactaaacaaaaaaagcttcccccaagaacaaaaagttatcataaatgaagagtcttcgggttttgtagtttttgtgaaacacaaaaaaatatagatatcaacacatgggaggtttctggggggggtcttctttacgaagagctgatgtaaataatggacctgggtactactacccaggggcatcagaagagcgtttgcctttttctttcggtaataaaggacttcctctggaatctgtattgggggggggagcagtaaacacaaacttagacaccttatttcctggtgtttatttaccaccggcccttgtctacccttttttttgggcctttgggggatgctaaaacccccatctatgggtgaagaggctctttggt

SEQ ID NO: 119781 - DNA, 533 bp, Arabidopsis thaliana columbia
  unsure (1)..(533): unsure at all n locations
nnnnnnnnnnnnnnnnnnnnnnnnnnnnnnnnnnnnnnnnnnnnnnnnnnnnnnnnnnnnnnnnnnnnnnnnnccacgcgttcgcccacgcgttcgtccacgcgtccgtacggttgtgagaagaccacttaagggtacggctgcgagaacacgactgaagggggcgatcggagaagaaaaagctcgagagacgccatggaaatttcccaagctcgttcaagcttcgtttgtcttcttggggcggtactctacatgtgggtggttccataaaaaaattccaaatttgcttgtactatctccgatggggagatcaggcataaaaagaccgaatgcttcggtgatatagaggaggggttatggggtggggaattcttatctttttgcaataaaaaaaaaaatgggccgcttcaaaagctttcccccgggtggctcttaactatttatgagagaggctccccttcaaaaaggaaaaaattttttttttttggaccccagaatacctttttttgtatggtcaattcctcactcggggg
